(19) United States
(12) Patent Application Publication
(10) Pub. No.: US 2019/0112353 A1
(43) Pub. Date: Apr. 18, 2019

(54) MATERIALS AND METHODS FOR TREATMENT OF SEVERE COMBINED IMMUNODEFICIENCY (SCID) OR OMENN SYNDROME

(71) Applicant: CRISPR THERAPEUTICS AG, Basel (CH)

(72) Inventors: Ying YANG, Cambridge, MA (US); Chad Albert COWMAN, Cambridge, MA (US); Ante Sven LUNDBERG, Cambridge, MA (US); Gregory Joseph COST, Cambridge, MA (US)

(21) Appl. No.: 15/999,370

(22) PCT Filed: Feb. 17, 2017
(86) PCT No.: PCT/IB2017/000200

§ 371 Date: Aug. 17, 2018

Related U.S. Application Data
(60) Provisional application No. 62/323,843, filed on Apr. 18, 2016.
(60) Provisional application No. 62/296,842, filed on Feb. 18, 2016.

(51) Int. Cl. C07K 14/715; C12N 5/074; C12N 15/90; A61P 37/04; C12N 15/10

(52) U.S. Cl. CPC C07K 14/7155; C12N 5/0696; C12N 15/102; A61P 37/04; C12N 15/907

(57) ABSTRACT

Materials and methods for treating a patient with severe combined immunodeficiency (SCID) or Omenn Syndrome, both ex vivo and in vivo, and materials and methods for editing to modulate the expression, function, or activity of an lnterleukin-7 receptor (IL7R) gene in a cell by genome editing.

### RELATED APPLICATIONS

[0001] This application claims the benefit of U.S. Provisional Application No. 62/296,842, filed Feb. 18, 2016; and U.S. Provisional Application No. 62/323,843, filed Apr. 18, 2016; the contents of each of which are incorporated herein by reference in their entirety.

### FIELD

[0002] The present application provides materials and methods for treating a patient with severe combined immunodeficiency (SCID) or Omenn Syndrome, both ex vivo and in vivo. In addition, the present application provides materials and methods for genome editing to modulate the expression, function, or activity of an Interleukin-7 receptor (IL7R) gene in a cell.

### INCORPORATION BY REFERENCE OF SEQUENCE LISTING

[0003] This application contains a Sequence Listing in computer readable form (filename: CRIS013001WO_ST25; 12,716,595 bytes—ASCII text file; created Feb. 9, 2017), which is incorporated herein by reference in its entirety and forms part of the disclosure.

### BACKGROUND

[0004] Severe combined immunodeficiency (SCID) is a monogenic disease that affects approximately 1.7/100,000 people in the United States, with about 40 -100 new cases per year (J. Allergy Clin Immunol 2007; 120: 760-8). Mutations in more than 20 different genes have been identified as causing SCID, including, but not limited to, Interleukin-7 receptor (IL7R), IL2RG, ADA, RAG1, RAG2, JAK3, CDLRE1, and others. Biallelic mutation in any one of the causative genes is sufficient to cause SCID. SCID causes disturbed development of functional T cells and/or B cells. Infants with SCID develop infections starting at approximately three months. The disease is almost universally fatal in the first two years. Existing treatment for SCID is hematopoietic stem cell transplant, which at best has a 5 year survival rate of 74% overall or greater than 90% for a matched sibling donor (N. Engl. J. Med. 214; 371: 434-46).

[0005] Omenn Syndrome is an autosomal recessive severe combined immunodeficiency (SCID) associated with mutations in immunologically relevant genes of T-cells (and B-cells), including, but not limited to, Interleukin-7 receptor (IL7R), RAG1, and RAG2. Omenn Syndrome has particular symptoms related to the limited amounts of recombination present and dysregulation of T and B cell functions. Symptoms are similar to graft-versus-host disease (GVHD), as the patients can have abnormal T cells with affinity for self-antigens. These auto-reactive cells can target the patient resulting in symptoms similar to GVHD, including chronic inflammation of the skin, eosinophilia, failure to thrive, swollen lymph nodes, swollen spleen, diarrhea and enlarged liver. These patients have low immunoglobulin levels (except immunoglobulin E, which is elevated), low T cell levels (of low diversity), and no B cells. An additional disease, distinct from classic SCID and from Omenn Syndrome, is combined cellular and humoral deficiencies and multiple granulomas (Boissel, S. et al. Nucleic Acids Res 42, 2591-2601 (2014)).

[0006] Human Interleukin-7 receptor (IL7R) gene, also known as CD127, maps on Chromosome 5, ranging from 35,856,875-35,879,603 bp (GRCh38). It contains eight exons, spanning 22.7 kb of genomic DNA. The IL7R cDNA consists of 1379 nucleotides and encodes for type I membrane glycoprotein (Immunol Rev 2005; 203: 110-126).

[0007] The full-length human IL7R protein is an 80 Kd transmembrane protein with a N-terminal fibronectin type III-like domain and a Trp-Ser-X-Trp-Ser (WSXWS) motif that resides in the extracellular domain, and a C-terminal intracellular domain which is fundamental for signal transduction. The IL7R gene also produces a soluble form of IL7R (sIL7R) that lacks the normal C-terminus of the protein, including the transmembrane domain. Production of the normal amount of sIL7R is important for homeostatic regulation of T cell number.

[0008] IL7R mediates interleukin-7 (IL7) signaling by forming a heterodimer with the common receptor γ (γc) chain and thus activates downstream pathways: Jak/STAT, P13K and MAPK pathways.

[0009] Mutations in IL7R result in T-B+NK+SCID and account for 11% of SCIDs (J. Clin. Immunol. 2001; 31: 281-296). The impaired number and function of T cells in these patients is attributed to the key role of IL7/IL7R signaling pathway that leads to the proliferation and differentiation of diverse T cells (Immunol Rev 2005; 203: 110-126).

[0010] For patients diagnosed with SCID and Omenn Syndrome, allogeneic bone marrow (BM) transplantation is a treatment that displays a high survival rate when a HLA compatible donor is available. There are complications with morbidity and mortality directly related to conditioning chemotherapy and graft-versus-host disease, which are reduced in newer protocols. There is a much poorer prognosis when the donor is partially compatible. There are large numbers of patients for whom HLA-matched donors are unavailable, which is a major challenge for these patients.

[0011] As an alternative to BM transplantation, an autologous procedure based on genetic correction of hematopoietic stem and progenitor cells is a highly attractive option, particularly for patients for whom HLA-matched donors are unavailable.

[0012] Early gene therapy methods used autologous hematopoietic stem cells modified to express a therapeutic gene via γ-retroviral vectors. However, using viral insertion as a means of cDNA delivery carries the significant risks of insertional mutagenesis, as gamma retroviruses preferentially target transcribed regions.

[0013] Genome engineering refers to the strategies and techniques for the targeted, specific modification of the genetic information (genome) of living organisms. Genome engineering is a very active field of research because of the wide range of possible applications, particularly in the areas of human health; the correction of a gene carrying a harmful mutation, for example, or to explore the function of a gene. Early technologies developed to insert a transgene into a living cell were often limited by the random nature of the insertion of the new sequence into the genome. Random insertions into the genome may result in disrupting normal regulation of neighboring genes leading to severe unwanted effects. Furthermore, random integration technologies offer little reproducibility, as there is no guarantee that the sequence would be inserted at the same place in two different cells. Recent genome engineering strategies, such as ZFNs, TALENs, HEs and MegaTALs, enable a specific area of the DNA to be modified, thereby increasing the precision of the correction or insertion compared to early technologies. These newer platforms offer a much larger degree of reproducibility, but still have their limitations.

[0014] Despite efforts from researchers and medical professionals worldwide who have been trying to address SCID and Omenn Syndrome, and despite the promise of genome engineering approaches, there still remains a critical need for developing safe and effective treatments for SCID and Omenn Syndrome.

[0015] The present disclosure presents an approach to address the genetic basis of SCID and Omenn syndrome. By using genome engineering tools to create permanent changes to the genome that can address the IL7R gene and restore IL7R protein activity with a single treatment, the resulting therapy may completely stop the disease progression of SCID and Omenn Syndrome.

### SUMMARY

[0016] Provided herein are cellular, ex vivo and in vivo methods for creating permanent changes to the genome by deleting, inserting, correcting, or modulating the expression of or function of one or more mutations or exons within or near the Interleukin-7 receptor (IL7R) gene or other DNA sequences that encode regulatory elements of the IL7R gene or knocking in IL7R cDNA or minigene into a safe harbor locus by genome editing and restoring IL7R protein activity, which may be used to treat severe combined immunodeficiency (SCID) or Omenn Syndrome. Also provided herein are components, kits, and compositions for performing such methods. Also provided are cells produced by such methods.

[0017] Provided herein is a method for editing an Interleukin-7 receptor (IL7R) gene in a human cell by genome editing, the method comprising the step of introducing into the human cell one or more deoxyribonucleic acid (DNA) endonucleases to effect one or more single-strand breaks (SSBs) or one or more double-strand breaks (DSBs) within or near the IL7R gene or other DNA sequences that encode regulatory elements of the IL7R gene that results in at least one of a permanent insertion, deletion, correction, or modulation of expression or function of one or more mutations or exons within or near or affecting the expression or function of the IL7R gene, or within or near a safe harbor locus that results in a permanent insertion of the IL7R gene or minigene, and results in restoration of IL7R protein activity.

[0018] Also provided herein is a method for inserting a IL7R gene in a human cell by genome editing, the method comprising the step of: introducing into the human cell one or more deoxyribonucleic acid (DNA) endonucleases to effect one or more single-strand breaks (SSBs) or double-strand breaks (DSBs) within or near a safe harbor locus that results in a permanent insertion of the IL7R gene or minigene, and results in restoration of IL7R protein activity.

[0019] In one aspect, provided herein is a method for editing the Interleukin 7-receptor (IL7R) gene in a human cell by genome editing comprising introducing into the cell one or more deoxyribonucleic acid (DNA) endonucleases to effect one or more single-strand breaks (SSBs) or double-strand breaks (DSBs) within or near the IL7R gene or other DNA sequences that encode regulatory elements of the IL7R gene of the cell that results in permanent insertion, deletion, or correction of one or more mutations within or near the IL7R gene, or within or near a safe harbor locus that results in permanent insertion of the IL7R gene or minigene, and restoration of IL7R protein activity.

[0020] Also provided herein is an ex vivo method for treating a patient (e.g., a human) with severe combined immunodeficiency (SCID) or Omenn Syndrome, the method comprising the steps of: i) creating a patient specific induced pluripotent stem cell (iPSC); ii) editing within or near an Interleukin-7 receptor (IL7R) gene of the iPSC or other DNA sequences that encode regulatory elements of the IL7R gene of the iPSC or editing within or near a safe harbor locus of the iPSC; iii) differentiating the genome-edited iPSC into a hematopoietic progenitor cell or a white blood cell; and iv) implanting the hematopoietic progenitor cell or white blood cell into the patient. As used herein, the term “hematopoietic progenitor cell” includes hematopoietic stem cells.

[0021] In some embodiments, the step of creating a patient specific induced pluripotent stem cell (iPSC) comprises: a) isolating a somatic cell from the patient; and b) introducing a set of pluripotency-associated genes into the somatic cell to induce the somatic cell to become a pluripotent stem cell. In some embodiments, the somatic cell is a fibroblast. In some embodiments, the set of pluripotency-associated genes is one or more of the genes selected from the group consisting of OCT4, SOX2, KLF4, Lin28, NANOG and cMYC.

[0022] The step of editing within or near an Interleukin-7 receptor (IL7R) gene or other DNA sequences that encode regulatory elements of the IL7R gene of the iPSC or editing within or near a safe harbor locus of the IL7R gene of the iPSC or editing within or near a locus of the first exon of the IL7R gene of the iPSC comprises introducing into the iPSC one or more deoxyribonucleic acid (DNA) endonucleases to effect one or more single-strand breaks (SSBs) or double-strand breaks (DSBs) within or near the IL7R gene or other DNA sequences that encode regulatory elements of the IL7R gene that results in a permanent insertion, deletion, correction, or modulation of expression or function of one or more mutations or exons within or near or affecting the expression or function of the IL7R gene or within or near a safe harbor locus that results in a permanent insertion of the IL7R gene resulting in restoration of IL7R protein activity. The safe harbor locus can be selected from the group consisting of: AAVS1 (PPP1R12C), ALB, Angptl3, ApoC3, ASGR2, CCR5, FIX (F9), G6PC, Gys2, HGD, Lp(a), Pcsk9, Serpina1, TF, and TTR. The safe harbor locus can be selected from the group consisting of: exon 1-2 of AAVS1 (PPP1R12C), exon 1-2 of ALB, exon 1-2 of Angptl3, exon 1-2 of ApoC3, exon 1-2 of ASGR2, exon 1-2 of CCR5, exon 1-2 of FIX (F9), exon 1-2 of G6PC, exon 1-2 of Gys2, exon 1-2 of HGD, exon 1-2 of Lp(a), exon 1-2 of Pcsk9, exon 1-2 of Serpina1, exon 1-2 of TF, and exon 1-2 of TTR.

[0023] In some embodiments, the step of editing the Interleukin 7-receptor (IL7R) gene of the iPSC comprises introducing into the iPSC one or more deoxyribonucleic acid (DNA) endonucleases to effect one or more single-strand breaks (SSBs) or double-strand breaks (DSBs) within or near the IL7R gene that results in permanent insertion, deletion, or correction of one or more mutations within or near the IL7R gene and restoration of IL7R protein activity.

[0024] In some embodiments, the step of differentiating the genome-edited iPSC into a hematopoietic progenitor cell or a white blood cell comprises one or more of the following: treatment with a combination of small molecules or delivery of transcription factors (e.g., master transcription factors).

[0025] In some embodiments, the step of implanting the hematopoietic progenitor cell or white blood cell into the patient comprises implanting the hematopoietic progenitor cell or white blood cell into the patient by transplantation, local injection, or systemic infusion, or combinations thereof.

[0026] Also provided herein is an ex vivo method for treating a patient (e.g., a human) with severe combined immunodeficiency (SCID) or Omenn Syndrome, the method comprising the steps of: i) isolating a white blood cell from the patient; ii) editing within or near an Interleukin-7 receptor (IL7R) gene or other DNA sequences that encode regulatory elements of the IL7R gene of the white blood cell or editing within or near a safe harbor locus of the white blood cell; and iii) implanting the genome-edited white blood cell into the patient.

[0027] In some embodiments, the step of isolating a white blood cell from the patient comprises cell differential centrifugation, cell culturing, or combinations thereof.

[0028] In some embodiments, the step of editing within or near an Interleukin-7 receptor (IL7R) gene of the white blood cell or other DNA sequences that encode regulatory elements of the IL7R gene of the white blood cell or editing within or near a safe harbor locus of the white blood cell comprises introducing into the white blood cell one or more deoxyribonucleic acid (DNA) endonucleases to effect one or more single-strand breaks (SSBs) or double-strand breaks (DSBs) within or near the IL7R gene or other DNA sequences that encode regulatory elements of the IL7R gene that results in a permanent insertion, deletion, correction, or modulation of expression or function of one or more mutations or exons within or near or affecting the expression or function of the I L7R gene or editing within or near a safe harbor locus that results in permanent, insertion, or correction of one or more mutations within or near the IL7R gene, and restoration of IL7R protein activity. The safe harbor locus can be selected from the group consisting of: AAVS1 (PPP1R12C), ALB, Angptl3, ApoC3, ASGR2, CCR5, FIX (F9), G6PC, Gys2, HGD, Lp(a), Pcsk9, Serpina1, TF, and TTR. The safe harbor locus can be selected from the group consisting of: exon 1-2 of AAVS1 (PPP1R12C), exon 1-2 of ALB, exon 1-2 of Angptl3, exon 1-2 of ApoC3, exon 1-2 of ASGR2, exon 1-2 of CCR5, exon 1-2 of FIX (F9), exon 1-2 of G6PC, exon 1-2 of Gys2, exon 1-2 of HGD, exon 1-2 of Lp(a), exon 1-2 of Pcsk9, exon 1-2 of Serpina1, exon 1-2 of TF, and exon 1-2 of TTR.

[0029] In some embodiments, the step of implanting the genome-edited white blood cell into the patient comprises implanting the genome-edited white blood cell into the patient by transplantation, local injection, or systemic infusion, or combinations thereof.

[0030] Also provided herein is an ex vivo method for treating a patient (e.g., a human) with severe combined immunodeficiency (SCID) or Omenn Syndrome, the method comprising the steps of: i) isolating a mesenchymal stem cell from the patient; ii) editing within or near an Interleukin-7 receptor (IL7R) gene of the mesenchymal stem cell or other DNA sequences that encode regulatory elements of the IL7R gene of the mesenchymal stem cell or editing within or near a safe harbor locus of the IL7R gene of the mesenchymal stem cell; iii) differentiating the genome-edited mesenchymal stem cell into a hematopoietic progenitor cell or white blood cell; and iv) implanting the hematopoietic progenitor cell or white blood cell into the patient.

[0031] In some embodiments, the mesenchymal stem cell is isolated from the patient's bone marrow or peripheral blood. In some embodiments, the step of isolating a mesenchymal stem cell from the patient comprises aspiration of bone marrow and isolation of mesenchymal cells by density centrifugation using Percoll™.

[0032] In some embodiments, the step of editing within or near the Interleukin-7 receptor (IL7R) gene of the mesenchymal stem cell or other DNA sequences that encode regulatory elements of the IL7R gene of the mesenchymal stem cell comprises introducing into the mesenchymal stem cell one or more deoxyribonucleic acid (DNA) endonucleases to effect one or more single-strand breaks (SSBs) or double-strand breaks (DSBs) within or near the IL7R gene or other DNA sequences that encode regulatory elements of the IL7R gene that results in a permanent insertion, deletion, correction, or modulation of expression or function of one or more mutations within or near or affecting the expression or function of the IL7R gene or editing within or near a safe harbor locus that results in restoration of IL7R protein activity. The safe harbor locus can be selected from the group consisting of: AAVS1 (PPP1R12C), ALB, Angptl3, ApoC3, ASGR2, CCR5, FIX (F9), G6PC, Gys2, HGD, Lp(a), Pcsk9, Serpina1, TF, and TTR. The safe harbor locus can be selected from the group consisting of: exon 1-2 of AAVS1 (PPP1R12C), exon 1-2 of ALB, exon 1-2 of Angptl3, exon 1-2 of ApoC3, exon 1-2 of ASGR2, exon 1-2 of CCR5, exon 1-2 of FIX (F9), exon 1-2 of G6PC, exon 1-2 of Gys2, exon 1-2 of HGD, exon 1-2 of Lp(a), exon 1-2 of Pcsk9, exon 1-2 of Serpina1, exon 1-2 of TF, and exon 1-2 of TTR.

[0033] In some embodiments, the step of differentiating the genome-edited mesenchymal stem cell into a hematopoietic progenitor cell or white blood cell comprises one or more of the following: treatment with a combination of small molecules or delivery of transcription factors (e.g., master transcription factors).

[0034] In some embodiments, the step of implanting the hematopoietic progenitor cell or white blood cell into the patient comprises implanting the hematopoietic progenitor cell or white blood cell into the patient by transplantation, local injection, or systemic infusion, or combinations thereof.

[0035] Also provided herein is an ex vivo method for treating a patient (e.g., a human) with severe combined immunodeficiency (SCID) or Omenn Syndrome, the method comprising the steps of: i) isolating a hematopoietic progenitor cell from the patient; ii) editing within or near an Interleukin-7 receptor (IL7R) gene of the hematopoietic progenitor cell or other DNA sequences that encode regulatory elements of the IL7R gene of the hematopoietic progenitor cell, or editing within or near safe harbor locus of the hematopoietic progenitor cell; and iii) implanting the genome-edited hematopoietic progenitor cell into the patient.

[0036] The method can further comprise treating the patient with granulocyte colony stimulating factor (GCSF) prior to the step of isolating a hematopoietic progenitor cell from the patient. The step of treating the patient with granulocyte colony stimulating factor (GCSF) can be performed in combination with Plerixaflor.

[0037] In some embodiments, the step of isolating a hematopoietic progenitor cell from the patient comprises isolating CD34+ cells.

[0038] In some embodiments, the step of editing within or near an Interleukin-7 receptor (IL7R) gene or other DNA sequences that encode regulatory elements of the IL7R gene of the hematopoietic progenitor cell comprises introducing into the hematopoietic progenitor cell one or more deoxyribonucleic acid (DNA) endonucleases to effect one or more single-strand breaks (SSBs) or double-strand breaks (DSBs) within or near the IL7R gene or other DNA sequences that encode regulatory elements of the IL7R gene that results in a permanent insertion, deletion, correction, or modulation of expression or function of one or more mutations or exons within or near or affecting the expression or function of the IL7R gene that results in the permanent insertion of the IL7R gene or minigene, and restoration of IL7R protein activity.

[0039] In some embodiments, the step of implanting the genome-edited hematopoietic progenitor cell into the patient comprises implanting the genome-edited hematopoietic progenitor cell into the patient by transplantation, local injection, or systemic infusion, or combinations thereof.

[0040] Also provided herein is an in vivo method for treating a patient (e.g., a human) with severe combined immunodeficiency (SCID) or Omenn Syndrome, the method comprising the step of editing an Interleukin-7 receptor (IL7R) gene in a cell of the patient.

[0041] In some embodiments, the step of editing an Interleukin-7 receptor (IL7R) gene in a cell of the patient comprises introducing into the cell one or more deoxyribonucleic acid (DNA) endonucleases to effect one or more single-strand breaks (SSBs) or double-strand breaks (DSBs) within or near the IL7R gene or other DNA sequences that encode regulatory elements of the IL7R gene or editing within or near a safe harbor locus of the IL7R gene that results in a permanent insertion, deletion, correction, or modulation of expression or function of one or more mutations or exons within or near or affecting the expression or function of the IL7R gene and restoration of IL7R protein activity. In some embodiments, the cell is a bone marrow cell, a hematopoietic progenitor cell, or a CD34+ cell, or combinations thereof.

[0042] In some embodiments, the one or more DNA endonucleases is a Cas1, Cas1B, Cas2, Cas3, Cas4, Cas5, Cas6, Cas7, Cas8, Cas9 (also known as Csn1 and Csx12), Cas100, Csyl, Csy2, Csy3, Cse1, Cse2, Csc1, Csc2, Csa5, Csn2, Csm2, Csm3, Csm4, Csm5, Csm6, Cmr1, Cmr3, Cmr4, Cmr5, Cmr6, Csb1, Csb2, Csb3, Csx17, Csx14, Csx10, Csx16, CsaX, Csx3, Csx1, Csx15, Csf1, Csf2, Csf3, Csf4, or Cpf1 endonuclease; or a homolog thereof, recombination of the naturally occurring molecule, codon-optimized, or modified version thereof, and combinations of any of the foregoing.

[0043] In some embodiments, the method comprises introducing into the cell one or more polynucleotides encoding the one or more DNA endonucleases. In some embodiments, the method comprises introducing into the cell one or more ribonucleic acids (RNAs) encoding the one or more DNA endonucleases. In some embodiments, the one or more polynucleotides or one or more RNAs is one or more modified polynucleotides or one or more modified RNAs. In some embodiments, the method comprises introducing into the cell one or more DNA endonucleases wherein the endonuclease is a protein or polypeptide.

[0044] In some embodiments, the method further comprises introducing into the cell one or more guide ribonucleic acids (gRNAs). In some embodiments, the one or more gRNAs is single-molecule guide RNA (sgRNAs). In some embodiments, the one or more gRNAs or one or more sgRNAs is one or more modified gRNAs, one or more modified sgRNAs, or combinations thereof. In some embodiments, the one or more DNA endonucleases is pre-complexed with one or more gRNAs or one or more sgRNAs, or combinations thereof.

[0045] In some embodiments, the method further comprises introducing into the cell a polynucleotide donor template comprising at least a portion of the wild-type IL7R gene or minigene (comprised of, natural or synthetic enhancer and promoter, one or more exons, and natural or synthetic introns, and natural or synthetic 3′UTR and polyadenylation signal), DNA sequences that encode wild-type regulatory elements of the IL7R gene, and/or cDNA. In some embodiments, the at least a portion of the wild-type IL7R gene or cDNA is exon 1, intron 1, exon 2, intron 2, exon 3, intron 3, exon 4, intron 4, exon 5, intron 5, exon 6, intron 6, exon 7, intron 7, exon 8, fragments, or combinations thereof, or the entire IL7R gene or cDNA. In some embodiments, the donor template is either a single or double stranded polynucleotide. In some embodiments, the donor template has homologous arms to the nuclease-targeted region of IL7R.

[0046] In some embodiments, the method further comprises introducing into the cell one guide ribonucleic acid (gRNA) and a polynucleotide donor template comprising at least a portion of the wild-type IL7R gene. In some embodiments, the method further comprises introducing into the cell one guide ribonucleic acid (gRNA) and a polynucleotide donor template comprising at least a portion of a codon optimized or modified IL7R gene. In some embodiments, the one or more DNA endonucleases is one or more Cas9 or Cpf1 endonucleases that effect one single-strand break (SSB) or double-strand break (DSB) at a locus within or near the IL7R gene (or codon optimized or modified IL7R gene) or other DNA sequences that encode regulatory elements of the IL7R gene or editing within or near a safe harbor locus that facilitates insertion of a new sequence from the polynucleotide donor template into the chromosomal DNA at the locus or safe harbor locus that results in a permanent insertion or correction of a part of the chromosomal DNA of the IL7R gene or other DNA sequences that encode regulatory elements of the IL7R gene proximal to the locus or safe harbor locus. In some embodiments, the gRNA comprises a spacer sequence that is complementary to a segment of the locus or safe harbor locus. In some embodiments, proximal means nucleotides both upstream and downstream of the locus or safe harbor locus.

[0047] In some embodiments, the method further comprises introducing into the cell two guide ribonucleic acid (gRNAs) and a polynucleotide donor template comprising at least a portion of the wild-type IL7R gene. The one or more DNA endonucleases is two or more Cas9 or Cpf1 endonucleases that effect or create at least two (e.g., a pair) single-strand breaks (SSBs) and/or double-strand breaks (DSBs), the first at a 5′ locus and the second at a 3′ locus, within or near the IL7R gene or other DNA sequences that encode regulatory elements of the IL7R gene or editing within or near a safe harbor locus that facilitates insertion of a new sequence from the polynucleotide donor template into the chromosomal DNA between the 5′ locus and the 3′ locus that results in a permanent insertion or correction of the chromosomal DNA between the 5′ locus and the 3′ locus within or near the IL7R gene or other DNA sequences that encode regulatory elements of the IL7R gene or within or near a safe harbor locus and restoration of IL7R protein activity. In some embodiments, the first guide RNA comprises a spacer sequence that is complementary to a segment of the 5′ locus and the second guide RNA comprises a spacer sequence that is complementary to a segment of the 3′ locus.

[0048] In some embodiments, the one or more gRNAs is one or more single-molecule guide RNA (sgRNAs). In some embodiments, the one or more gRNAs or one or more sgRNAs is one or more modified gRNAs or one or more modified sgRNAs. In some embodiments, the one or more DNA endonucleases is pre-complexed with one or more gRNAs or one or more sgRNAs.

[0049] In some embodiments, the at least a portion of the wild-type IL7R gene or cDNA is exon 1, intron 1, exon 2, intron 2, exon 3, intron 3, exon 4, intron 4, exon 5, intron 5, exon 6, intron 6, exon 7, intron 7, exon 8, fragments, or combinations thereof, or the entire IL7R gene or cDNA.

[0050] In some embodiments, the donor template is either a single or double stranded polynucleotide. In some embodiments, the donor template has homologous arms to the 5p13.2 region.

[0051] In some embodiments, the locus, 5′ locus, and/or 3′ locus are in the first, second, third, fourth, fifth, sixth, seventh, or eighth exon of the IL7R gene.

[0052] In some embodiments, the insertion or correction is by homology directed repair (HDR).

[0053] In some embodiments, the method further comprises introducing into the cell two guide ribonucleic acids (gRNAs). In some embodiments, the one or more DNA endonucleases is one or more Cas9 or Cpf1 endonucleases that effect or create two or more (e.g., a pair) double-strand breaks (DSBs), the first at a 5′ DSB locus and the second at a 3′ DSB locus, within or near the IL7R gene or other DNA sequences that encode regulatory elements of the IL7R gene or editing within or near a safe harbor locus that causes a deletion of the chromosomal DNA between the 5′ DSB locus and the 3′ DSB locus that results in a permanent deletion of the chromosomal DNA between the 5′ DSB locus and the 3′ DSB locus within or near the IL7R gene or other DNA sequences that encode regulatory elements of the IL7R gene, or within or near a safe harbor locus and restoration of the IL7R protein activity. In some embodiments, the first guide RNA comprises a spacer sequence that is complementary to a segment of the 5′ DSB locus and the second guide RNA comprises a spacer sequence that is complementary to a segment of the 3′ DSB locus.

[0054] In some embodiments, the two gRNAs are two single-molecule guide RNA (sgRNAs). In some embodiments, the two gRNAs or two sgRNAs are two modified gRNAs or two modified sgRNAs. The one or more DNA endonucleases can be pre-complexed with one or two gRNAs or one or two sgRNAs.

[0055] In some embodiments, the 5′ DSB and/or 3′ DSB is in or near the first exon, first intron, second exon, second intron, third exon, third intron, fourth exon, fourth intron, fifth exon, fifth intron, sixth exon, sixth intron, seventh exon, seventh intron, or eighth exon of the IL7R gene.

[0056] In some embodiments, the correction is by homology directed repair (HDR).

[0057] In some embodiments, the correction is by non-homologous end joining (NHEJ).

[0058] In some embodiments, the deletion is a deletion of 1 kb or less.

[0059] In some embodiments, the Cas9 or Cpf1 mRNA, gRNA, and donor template are either each formulated separately into lipid nanoparticles or all co-formulated into a lipid nanoparticle.

[0060] In some embodiments, the Cas9 or Cpf1 mRNA, gRNA, and donor template are either each formulated separately into exosomes or all co-formulated into an exosome.

[0061] In some embodiments, the Cas9 or Cpf1 mRNA are formulated into a lipid nanoparticle, and the gRNA and donor template are delivered to the cell by a viral vector. In some embodiments, the viral vector is an adeno-associated virus (AAV) vector. In some embodiments, the AAV vector is an AAV6 vector.

[0062] In some embodiments, the Cas9 or Cpf1 mRNA is formulated into a lipid nanoparticle, and the gRNA is delivered to the cell by electroporation, and donor template is delivered to the cell by a viral vector. In some embodiments, the viral vector is an adeno-associated virus (AAV) vector. In some embodiments, the AAV vector is an AAV6 vector. In some embodiments, the gRNA is delivered to the cell by electroporation and donor template is delivered to the cell by an adeno-associated virus (AAV) vector. In some embodiments, the AAV vector is an AAV6 vector.

[0063] In some embodiments, the IL7R gene is located on Chromosome 5: 35,856,875-35,879,603 (Genome Reference Consortium—GRCh38).

[0064] In some embodiments, the restoration of IL7R protein activity is compared to wild-type or normal IL7R protein activity.

[0065] In another aspect, provided herein is one or more guide ribonucleic acids (gRNAs) comprising a spacer sequence selected from the group consisting of the nucleic acid sequences in SEQ ID NOs: 54,862-63,375 editing the IL7R gene in a cell from a patient with severe combined immunodeficiency (SCID) or Omenn Syndrome. In some embodiments, the one or more gRNAs are one or more single-molecule guide RNAs (sgRNAs). In some embodiments, the one or more gRNAs or one or more sgRNAs is one or more modified gRNAs or one or more modified sgRNAs.

[0066] Also provided herein is one or more guide ribonucleic acids (gRNAs) comprising a spacer sequence selected from the group consisting of the nucleic acid sequences in SEQ ID NOs: 1-54,859 for editing a safe harbor locus in a cell from a patient with severe combined immunodeficiency (SCID) or Omenn Syndrome. In some embodiments, the safe harbor locus is selected from the group consisting of AAVS1 (PPP1R12C), ALB, Angptl3, ApoC3, ASGR2, CCR5, FIX (F9), G6PC, Gys2, HGD, Lp(a), Pcsk9, Serpina1, TF, and TTR. In some embodiments, the one or more gRNAs and/or sgRNAs comprises a spacer sequence selected from the group consisting of nucleic acid sequences in SEQ ID NOs: 54,862-63,375. In some embodiments, the one or more gRNAs are one or more single-molecule guide RNAs (sgRNAs). In some embodiments, the one or more gRNAs or one or more sgRNAs are one or more modified gRNAs or one or more modified sgRNAs.

[0067] In another aspect, provided herein are cells that have been modified by the preceding methods to permanently correct one or more mutations within the IL7R gene and restore IL7R protein activity. Further provided herein are methods for ameliorating severe combined immunodeficiency (SCID) or Omenn Syndrome by the administration of cells that have been modified by the preceding methods to a SCID or Omenn Syndrome patient.

[0068] In some embodiments, the methods and compositions of the disclosure comprise one or more modified guide ribonucleic acids (gRNAs). Non-limiting examples of modifications comprise one or more nucleotides modified at the 2′ position of the sugar, in some embodiments a 2′-O-alkyl, 2′-O-alkyl-O-alkyl, or 2′-fluoro-modified nucleotide. In some embodiments, RNA modifications include 2′-fluoro, 2′-amino or 2′ O-methyl modifications on the ribose of pyrimidines, abasic residues, desoxy nucleotides, or an inverted base at the 3′ end of the RNA.

[0069] In some embodiments, the one or more modified guide ribonucleic acids (gRNAs) comprise a modification that makes the modified gRNA more resistant to nuclease digestion than the native oligonucleotide. Non-limiting examples of such modifications include those comprising modified backbones, for example, phosphorothioates, phosphorothyos, phosphotriesters, methyl phosphonates, short chain alkyl or cycloalkyl intersugar linkages or short chain heteroatomic or heterocyclic intersugar linkages.

[0070] It is understood that the inventions described in this specification are not limited to the examples summarized in this Summary. Various other aspects are described and exemplified herein.

### BRIEF DESCRIPTION OF THE DRAWINGS

[0071] Various aspects of materials and methods for treatment of severe combined immunodeficiency (SCID) or Omenn Syndrome disclosed and described in this specification can be better understood by reference to the accompanying figures, in which:

[0072] FIG. 1A is an illustration depicting the type II CRISPR/Cas system.

[0073] FIG. 1B is another illustration depicting the type II CRISPR/Cas system.

[0074] FIG. 2 is a graph depicting cutting efficiencies of gRNAs transcribed in vitro, complexed with spCas9, and transfected into primary human mobilized Peripheral Blood CD34+ cells (mPB CD34), as evaluated using TIDE analysis.

### BRIEF DESCRIPTION OF THE SEQUENCE LISTING

[0075] SEQ ID NOs: 1-2,032 are 20 bp spacer sequences for targeting exons 1-2 of an AAVS1 (PPP1R12C) gene with a S. pyogenes Cas9 endonuclease.

[0076] SEQ ID NOs: 2,033-2,203 are 20 bp spacer sequences for targeting exons 1-2 of an AAVS1 (PPP1R12C) gene with a S. aureus Cas9 endonuclease.

[0077] SEQ ID NOs: 2,204-2,221 are 20 bp spacer sequences for targeting exons 1-2 of an AAVS1 (PPP1R12C) gene with a S. thermophilus Cas9 endonuclease.

[0078] SEQ ID NOs: 2,222-2,230 are 20 bp spacer sequences for targeting exons 1-2 of an AAVS1 (PPP1R12C) gene with a T. denticola Cas9 endonuclease.

[0079] SEQ ID NOs: 2,231-2,305 are 20 bp spacer sequences for targeting exons 1-2 of an AAVS1 (PPP1R12C) gene with a N. meningitides Cas9 endonuclease.

[0080] SEQ ID NOs: 2,306-3,481 are 22 bp spacer sequences for targeting exons 1-2 of an AAVS1 (PPP1R12C) gene with an Acidominococcus, Lachnospiraceae, and Francisella novicida Cpf1 endonuclease.

[0081] SEQ ID NOs: 3,482-3,649 are 20 bp spacer sequences for targeting exons 1-2 of an Alb gene with a S. pyogenes Cas9 endonuclease.

[0082] SEQ ID NOs: 3,650-3,677 are 20 bp spacer sequences for targeting exons 1-2 of an Alb gene with a S. aureus Cas9 endonuclease.

[0083] SEQ ID NOs: 3,678-3,695 are 20 bp spacer sequences for targeting exons 1-2 of an Alb gene with a S. thermophilus Cas9 endonuclease.

[0084] SEQ ID NOs: 3,696-3,700 are 20 bp spacer sequences for targeting exons 1-2 of an Alb gene with a T. denticola Cas9 endonuclease.

[0085] SEQ ID NOs: 3,701-3,724 are 20 bp spacer sequences for targeting exons 1-2 of an Alb gene with a N. meningitides Cas9 endonuclease.

[0086] SEQ ID NOs: 3,725-4,103 are 22 bp spacer sequences for targeting exons 1-2 of an Alb gene with an Acidominococcus, Lachnospiraceae, and Francisella novicida Cpf1 endonuclease.

[0087] SEQ ID NOs: 4,104-4,448 are 20 bp spacer sequences for targeting exons 1-2 of an Angpt13 gene with a S. pyogenes Cas9 endonuclease.

[0088] SEQ ID NOs: 4,449-4,484 are 20 bp spacer sequences for targeting exons 1-2 of an Angpt13 gene with a S. aureus Cas9 endonuclease.

[0089] SEQ ID NOs: 4,485-4,507 are 20 bp spacer sequences for targeting exons 1-2 of an Angpt13 gene with a S. thermophilus Cas9 endonuclease.

[0090] SEQ ID NOs: 4,508-4,520 are 20 bp spacer sequences for targeting exons 1-2 of an Angpt13 gene with a T. denticola Cas9 endonuclease.

[0091] SEQ ID NOs: 4,521-4,583 are 20 bp spacer sequences for targeting exons 1-2 of an Angpt13 gene with a N. meningitides Cas9 endonuclease.

[0092] SEQ ID NOs: 4,584-5,431 are 22 bp spacer sequences for targeting exons 1-2 of an Angpt13 gene with an Acidominococcus, Lachnospiraceae, and Francisella novicida Cpf1 endonuclease.

[0093] SEQ ID NOs: 5,432-5,834 are 20 bp spacer sequences for targeting exons 1-2 of an ApoC3 gene with a S. pyogenes Cas9 endonuclease.

[0094] SEQ ID NOs: 5,835-5,859 are 20 bp spacer sequences for targeting exons 1-2 of an ApoC3 gene with a S. aureus Cas9 endonuclease.

[0095] SEQ ID NOs: 5,860-5,862 are 20 bp spacer sequences for targeting exons 1-2 of an ApoC3 gene with a S. thermophilus Cas9 endonuclease.

[0096] SEQ ID NOs: 5,863-5,864 are 20 bp spacer sequences for targeting exons 1-2 of an ApoC3 gene with a T. denticola Cas9 endonuclease.

[0097] SEQ ID NOs: 5,865-5,876 are 20 bp spacer sequences for targeting exons 1-2 of an ApoC3 gene with a N. meningitides Cas9 endonuclease.

[0098] SEQ ID NOs: 5,877-6,108 are 22 bp spacer sequences for targeting exons 1-2 of an ApoC3 gene with an Acidominococcus, Lachnospiraceae, and Francisella novicida Cpf1 endonuclease.

[0099] SEQ ID NOs: 6,109-7,876 are 20 bp spacer sequences for targeting exons 1-2 of an ASGR2 gene with a S. pyogenes Cas9 endonuclease.

[0100] SEQ ID NOs: 7,877-8,082 are 20 bp spacer sequences for targeting exons 1-2 of an ASGR2 gene with a S. aureus Cas9 endonuclease.

[0101] SEQ ID NOs: 8,083-8,106 are 20 bp spacer sequences for targeting exons 1-2 of an ASGR2 gene with a S. thermophilus Cas9 endonuclease.

[0102] SEQ ID NOs: 8,107-8,118 are 20 bp spacer sequences for targeting exons 1-2 of an ASGR2 gene with a T. denticola Cas9 endonuclease.

[0103] SEQ ID NOs: 8,119-8,201 are 20 bp spacer sequences for targeting exons 1-2 of an ASGR2 gene with a N. meningitides Cas9 endonuclease.

[0104] SEQ ID NOs: 8,202-9,641 are 22 bp spacer sequences for targeting exons 1-2 of an ASGR2 gene with an Acidominococcus, Lachnospiraceae, and Francisella novicida Cpf1 endonuclease.

[0105] SEQ ID NOs: 9,642-9,844 are 20 bp spacer sequences for targeting exons 1-2 of a CCR5 gene with a S. pyogenes Cas9 endonuclease.

[0106] SEQ ID NOs: 9,845-9,876 are 20 bp spacer sequences for targeting exons 1-2 of a CCR5 gene with a S. aureus Cas9 endonuclease.

[0107] SEQ ID NOs: 9,877-9,890 are 20 bp spacer sequences for targeting exons 1-2 of a CCR5 gene with a S. thermophilus Cas9 endonuclease.

[0108] SEQ ID NOs: 9,891-9,892 are 20 bp spacer sequences for targeting exons 1-2 of a CCR5 gene with a T. denticola Cas9 endonuclease.

[0109] SEQ ID NOs: 9,893-9,920 are 20 bp spacer sequences for targeting exons 1-2 of a CCR5 gene with a N. meningitides Cas9 endonuclease.

[0110] SEQ ID NOs: 9,921-10,220 are 22 bp spacer sequences for targeting exons 1-2 of a CCR5 gene with an Acidominococcus, Lachnospiraceae, and Francisella novicida Cpf1 endonuclease.

[0111] SEQ ID NOs: 10,221-11,686 are 20 bp spacer sequences for targeting exons 1-2 of an F9 gene with a S. pyogenes Cas9 endonuclease.

[0112] SEQ ID NOs: 11,687-11,849 are 20 bp spacer sequences for targeting exons 1-2 of an F9 gene with a S. aureus Cas9 endonuclease.

[0113] SEQ ID NOs: 11,850-11,910 are 20 bp spacer sequences for targeting exons 1-2 of an F9 gene with a S. thermophilus Cas9 endonuclease.

[0114] SEQ ID NOs: 11,911-11,935 are 20 by spacer sequences for targeting exons 1-2 of an F9 gene with a T. denticola Cas9 endonuclease.

[0115] SEQ ID NOs: 11,936-12,088 are 20 bp spacer sequences for targeting exons 1-2 of an F9 gene with a N. meningitides Cas9 endonuclease.

[0116] SEQ ID NOs: 12,089-14,229 are 22 bp spacer sequences for targeting exons 1-2 of an F9 gene with an Acidominococcus, Lachnospiraceae, and Francisella novicida Cpf1 endonuclease.

[0117] SEQ ID NOs: 14,230-15,245 are 20 bp spacer sequences for targeting exons 1-2 of a G6PC gene with a S. pyogenes Cas9 endonuclease.

[0118] SEQ ID NOs: 15,246-15,362 are 20 bp spacer sequences for targeting exons 1-2 of a G6PC gene with a S. aureus Cas9 endonuclease.

[0119] SEQ ID NOs: 15,363-15,386 are 20 bp spacer sequences for targeting exons 1-2 of a G6PC gene with a S. thermophilus Cas9 endonuclease.

[0120] SEQ ID NOs: 15,387-15,395 are 20 bp spacer sequences for targeting exons 1-2 of a G6PC gene with a T. denticola Cas9 endonuclease.

[0121] SEQ ID NOs: 15,396-15,485 are 20 bp spacer sequences for targeting exons 1-2 of a G6PC gene with a N. meningitides Cas9 endonuclease.

[0122] SEQ ID NOs: 15,486-16,580 are 22 bp spacer sequences for targeting exons 1-2 of a G6PC gene with an Acidominococcus, Lachnospiraceae, and Francisella novicida Cpf1 endonuclease.

[0123] SEQ ID NOs: 16,581-22,073 are 20 bp spacer sequences for targeting exons 1-2 of a Gys2 gene with a S. pyogenes Cas9 endonuclease.

[0124] SEQ ID NOs: 22,074-22,749 are 20 bp spacer sequences for targeting exons 1-2 of a Gys2 gene with a S. aureus Cas9 endonuclease.

[0125] SEQ ID NOs: 22,750-23,027 are 20 bp spacer sequences for targeting exons 1-2 of a Gys2 gene with a S. thermophilus Cas9 endonuclease.

[0126] SEQ ID NOs: 23,028-23,141 are 20 bp spacer sequences for targeting exons 1-2 of a Gys2 gene with a T. denticola Cas9 endonuclease.

[0127] SEQ ID NOs: 23,142-23,821 are 20 bp spacer sequences for targeting exons 1-2 of a Gys2 gene with a N. meningitides Cas9 endonuclease.

[0128] SEQ ID NOs: 23,822-32,253 are 22 bp spacer sequences for targeting exons 1-2 of a Gys2 gene with an Acidominococcus, Lachnospiraceae, and Francisella novicida Cpf1 endonuclease.

[0129] SEQ ID NOs: 32,254-33,946 are 20 bp spacer sequences for targeting exons 1-2 of an HGD gene with a S. pyogenes Cas9 endonuclease.

[0130] SEQ ID NOs: 33,947-34,160 are 20 bp spacer sequences for targeting exons 1-2 of an HGD gene with a S. aureus Cas9 endonuclease.

[0131] SEQ ID NOs: 34,161-34,243 are 20 bp spacer sequences for targeting exons 1-2 of an HGD gene with a S. thermophilus Cas9 endonuclease.

[0132] SEQ ID NOs: 34,244-34,262 are 20 bp spacer sequences for targeting exons 1-2 of an HGD gene with a T. denticola Cas9 endonuclease.

[0133] SEQ ID NOs: 34,263-34,463 are 20 bp spacer sequences for targeting exons 1-2 of an HGD gene with a N. meningitides Cas9 endonuclease.

[0134] SEQ ID NOs: 34,464-36,788 are 22 bp spacer sequences for targeting exons 1-2 of an HGD gene with an Acidominococcus, Lachnospiraceae, and Francisella novicida Cpf1 endonuclease.

[0135] SEQ ID NOs: 36,789-40,583 are 20 bp spacer sequences for targeting exons 1-2 of an Lp(a) gene with a S. pyogenes Cas9 endonuclease.

[0136] SEQ ID NOs: 40,584-40,993 are 20 bp spacer sequences for targeting exons 1-2 of an Lp(a) gene with a S. aureus Cas9 endonuclease.

[0137] SEQ ID NOs: 40,994-41,129 are 20 bp spacer sequences for targeting exons 1-2 of an Lp(a) gene with a S. thermophilus Cas9 endonuclease.

[0138] SEQ ID NOs: 41,130-41,164 are 20 bp spacer sequences for targeting exons 1-2 of an Lp(a) gene with a T. denticola Cas9 endonuclease.

[0139] SEQ ID NOs: 41,165-41,532 are 20 bp spacer sequences for targeting exons 1-2 of an Lp(a) gene with a N. meningitides Cas9 endonuclease.

[0140] SEQ ID NOs: 41,533-46,153 are 22 bp spacer sequences for targeting exons 1-2 of an Lp(a) gene with an Acidominococcus, Lachnospiraceae, and Francisella novicida Cpf1 endonuclease.

[0141] SEQ ID NOs: 46,154-48,173 are 20 bp spacer sequences for targeting exons 1-2 of a PCSK9 gene with a S. pyogenes Cas9 endonuclease.

[0142] SEQ ID NOs: 48,174-48,360 are 20 bp spacer sequences for targeting exons 1-2 of a PCSK9 gene with a S. aureus Cas9 endonuclease.

[0143] SEQ ID NOs: 48,361-48,396 are 20 bp spacer sequences for targeting exons 1-2 of a PCSK9 gene with a S. thermophilus Cas9 endonuclease.

[0144] SEQ ID NOs: 48,397-48,410 are 20 bp spacer sequences for targeting exons 1-2 of a PCSK9 gene with a T. denticola 9 endonuclease.

[0145] SEQ ID NOs: 48,411-48,550 are 20 bp spacer sequences for targeting exons 1-2 of a PCSK9 gene with a N. meningitides Cas9 endonuclease.

[0146] SEQ ID NOs: 48,551-50,344 are 22 bp spacer sequences for targeting exons 1-2 of a PCSK9 gene with an Acidominococcus, Lachnospiraceae, and Francisella novicida Cpf1 endonuclease.

[0147] SEQ ID NOs: 50,345-51,482 are 20 bp spacer sequences for targeting exons 1-2 of a Serpina1 gene with a S. pyogenes Cas9 endonuclease.

[0148] SEQ ID NOs: 51,483-51,575 are 20 bp spacer sequences for targeting exons 1-2 of a Serpina1 gene with a S. aureus Cas9 endonuclease.

[0149] SEQ ID NOs: 51,576-51,587 are 20 bp spacer sequences for targeting exons 1-2 of a Serpina1 gene with a S. thermophilus Cas9 endonuclease.

[0150] SEQ ID NOs: 51,588-51,590 are 20 bp spacer sequences for targeting exons 1-2 of a Serpina1 gene with a T. denticola Cas9 endonuclease.

[0151] SEQ ID NOs: 51,591-51,641 are 20 bp spacer sequences for targeting exons 1-2 of a Serpina1 gene with a N. meningitides Cas9 endonuclease.

[0152] SEQ ID NOs: 51,642-52,445 are 22 bp spacer sequences for targeting exons 1-2 of a Serpina1 gene with an Acidominococcus, Lachnospiraceae, and Francisella novicida Cpf1 endonuclease.

[0153] SEQ ID NOs: 52,446-53,277 are 20 bp spacer sequences for targeting exons 1-2 of a TF gene with a S. pyogenes Cas9 endonuclease.

[0154] SEQ ID NOs: 53,278-53,363 are 20 bp spacer sequences for targeting exons 1-2 of a TF gene with a S. aureus Cas9 endonuclease.

[0155] SEQ ID NOs: 53,364-53,375 are 20 bp spacer sequences for targeting exons 1-2 of a TF gene with a S. thermophilus Cas9 endonuclease.

[0156] SEQ ID NOs: 53,376-53,382 are 20 bp spacer sequences for targeting exons 1-2 of a TF gene with a T. denticola Cas9 endonuclease.

[0157] SEQ ID NOs: 53,383-53,426 are 20 bp spacer sequences for targeting exons 1-2 of a TF gene with a N. meningitides Cas9 endonuclease.

[0158] SEQ ID NOs: 53,427-54,062 are 22 bp spacer sequences for targeting exons 1-2 of a TF gene with an Acidominococcus, Lachnospiraceae, and Francisella novicida Cpf1 endonuclease.

[0159] SEQ ID NOs: 54,063-54,362 are 20 bp spacer sequences for targeting exons 1-2 of a TTR gene with a S. pyogenes Cas9 endonuclease.

[0160] SEQ ID NOs: 54,363-54,403 are 20 bp spacer sequences for targeting exons 1-2 of a TTR gene with a S. aureus Cas9 endonuclease.

[0161] SEQ ID NOs: 54,404-54,420 are 20 bp spacer sequences for targeting exons 1-2 of a TTR gene with a S. thermophilus Cas9 endonuclease.

[0162] SEQ ID NOs: 54,421-54,422 are 20 bp spacer sequences for targeting exons 1-2 of a TTR gene with a T. denticola Cas9 endonuclease.

[0163] SEQ ID NOs: 54,423-54,457 are 20 bp spacer sequences for targeting exons 1-2 of a TTR gene with a N. meningitides Cas9 endonuclease.

[0164] SEQ ID NOs: 54,458-54,859 are 22 bp spacer sequences for targeting exons 1-2 of a TTR gene with an Acidominococcus, Lachnospiraceae, and Francisella novicida Cpf1 endonuclease.

[0165] SEQ ID NOs: 54,862-57,013 are 20 bp spacer sequences for targeting exons 1-2 of an Interleukin-7 receptor (IL-7R) gene with a S. pyogenes Cas9 endonuclease.

[0166] SEQ ID NOs: 57,014-57,712 are 20 bp spacer sequences for targeting exons 1-2 of an Interleukin-7 receptor (IL-7R) gene with a S. aureus Cas9 endonuclease.

[0167] SEQ ID NOs: 57,713-57,984 are 20 bp spacer sequences for targeting exons 1-2 of an Interleukin-7 receptor (IL-7R) gene with a S. thermophilus Cas9 endonuclease.

[0168] SEQ ID NOs: 57,985-58,076 are 20 bp spacer sequences for targeting exons 1-2 of an Interleukin-7 receptor (IL-7R) gene with a T. denticola Cas9 endonuclease.

[0169] SEQ ID NOs: 58,077-58,708 are 20 bp spacer sequences for targeting exons 1-2 of an Interleukin-7 receptor (IL-7R) gene with a N. meningitides Cas9 endonuclease.

[0170] SEQ ID NOs: 58,709-63,375 are 22 bp spacer sequences for targeting exons 1-2 of an Interleukin-7 receptor (IL-7R) gene with an Acidominococcus, Lachnospiraceae, and Francisella novicida Cpf1 endonuclease.

### DETAILED DESCRIPTION

[0171] Therapeutic Approach

[0172] As the known forms of SCID are monogenic disorders with recessive inheritance, it is likely that correcting one of the mutant alleles per cell will be sufficient for correction and restoration or partial restoration of IL7R function. The correction of one allele can coincide with one copy that remains with the original mutation, or a copy that was cleaved and repaired by non-homologous end joining (NHEJ) and therefore was not properly corrected. Bi-allelic correction can also occur. Various editing strategies that can be employed for specific mutations are discussed below.

[0173] Correction of one or possibly both of the mutant alleles provides an important improvement over existing or potential therapies, such as introduction of IL7R expression cassettes through lentivirus delivery and integration. Gene editing to correct the mutation has the advantage of precise genome modification and lower adverse effects, and for restoration of correct expression levels and temporal control. Sequencing the patient's IL7R alleles allows for design of the gene editing strategy to best correct the identified mutation(s).

[0174] For example, the mutation can be corrected by the insertions or deletions that arise due to the NHEJ repair pathway. If the patient's IL7R gene has an inserted or deleted base, a targeted cleavage can result in a NHEJ-mediated insertion or deletion that restores the frame. Missense mutations can also be corrected through NHEJ-mediated correction using one or more guide RNA. The ability or likelihood of the cut(s) to correct the mutation can be designed or evaluated based on the local sequence and micro-homologies. NHEJ can also be used to delete segments of the gene, either directly or by altering splice donor or acceptor sites through cleavage by one gRNA targeting several locations, or several gRNAs. This may be useful if an amino acid, domain or exon contains the mutations and can be removed or inverted, or if the deletion otherwise restored function to the protein. Pairs of guide strands have been used for deletions and corrections of inversions. NHEJ can also be used to promote targeted transgene integration at the cleaved locus, especially if the transgene donor template has been cleaved within the cell as well.

[0175] Alternatively, the donor for correction by homology directed repair (HDR) contains the corrected sequence with small or large flanking homology arms to allow for annealing. HDR is essentially an error-free mechanism that uses a supplied homologous DNA sequence as a template during DSB repair. The rate of homology directed repair (HDR) is a function of the distance between the mutation and the cut site so choosing overlapping or nearby target sites is important. Templates can include extra sequences flanked by the homologous regions or can contain a sequence that differs from the genomic sequence, thus allowing sequence editing.

[0176] In addition to correcting mutations by NHEJ or HDR, a range of other options are possible. If there are small or large deletions or multiple mutations, a cDNA can be knocked in that contains the exons affected. A full length cDNA can be knocked into any “safe harbor”—i.e., non-deleterious insertion point that is not the IL7R gene itself—, with or without suitable regulatory sequences. If this construct is knocked-in near the IL7R regulatory elements, it should have physiological control, similar to the normal gene. Two or more (e.g., a pair) nucleases can be used to delete mutated gene regions, though a donor would usually have to be provided to restore function. In this case two gRNA and one donor sequence would be supplied.

[0177] Provided herein are methods to correct the specific mutation in the gene by inducing a double stranded break with Cas9 and a sgRNA or a pair of double stranded breaks around the mutation using two appropriate sgRNAs, and to provide a donor DNA template to induce Homology-Directed Repair (HDR). In some embodiments, the donor DNA template can be a short single stranded oligonucleotide, a short double stranded oligonucleotide, a long single or double stranded DNA molecule. These methods use gRNAs and donor DNA molecules for each of the variants of IL7R.

[0178] Provided herein are methods to knock-in IL7R cDNA or a minigene (comprised of one or more exons and introns or natural or synthetic introns) into the locus of the corresponding gene. These methods use a pair of sgRNA targeting the first exon and/or the first intron of the IL7R gene. In some embodiments, the donor DNA is single or double stranded DNA having homologous arms to the 5p13.2 region.

[0179] Provided herein are methods to knock-in IL7R cDNA or a minigene (comprised of one or more exons and introns or natural or synthetic introns) into the locus of the hot-spot, e.g., CCR5 gene. These methods use a pair of sgRNA targeting the first exon and/or the first intron of the gene located in the liver hotspot. In some embodiments, the donor DNA is single or double stranded DNA having homologous arms to the corresponding region.

[0180] Provided herein are cellular, ex vivo and in vivo methods for using genome engineering tools to create permanent changes to the genome by: 1) correcting, by insertions or deletions that arise due to the imprecise NHEJ pathway, one or more mutations within or near the IL7R gene or other DNA sequences that encode regulatory elements of the IL7R gene, 2) correcting, by HDR, one or more mutations within or near the IL7R gene or other DNA sequences that encode regulatory elements of the IL7R gene, or 3) deletion of the mutant region and/or knocking-in IL7R cDNA or minigene (comprised of, natural or synthetic enhancer and promoter, one or more exons, and natural or synthetic introns, and natural or synthetic 3′UTR and polyadenylation signal) into the gene locus or a safe harbor locus of the IL7R gene, and restoring IL7R protein activity. Such methods use endonucleases, such as CRISPR-associated (Cas9, Cpf1 and the like) nucleases, to permanently delete, insert, edit, correct, or replace one or more or exons or portions thereof (i.e., mutations within or near coding and/or splicing sequences) or insert in the genomic locus of the IL7R gene or other DNA sequences that encode regulatory elements of the IL7R gene. In this way, the examples set forth in the present disclosure restore the reading frame or the wild-type sequence of, or otherwise correct, the gene with a single treatment (rather than deliver potential therapies for the lifetime of the patient).

[0181] Provided herein are methods for treating a patient with severe combined immunodeficiency or Omenn Syndrome. An aspect of such method is an ex vivo cell-based therapy. For example, a patient specific induced pluripotent stem cell (iPSC) is created. Then, the chromosomal DNA of these iPS cells is edited using the materials and methods described herein. Next, the genome-edited iPSCs is differentiated into hematopoietic progenitor cells or white blood cells. Finally, the hematopoietic progenitor cells or white blood cells is implanted into the patient.

[0182] Another aspect of such method is an ex vivo cell-based therapy. For example, a white blood cell is isolated from the patient. Next, the chromosomal DNA of these white blood cells is edited using the materials and methods described herein. Finally, the genome-edited white blood cells is implanted into the patient.

[0183] Yet another aspect of such method is an ex vivo cell-based therapy. For example, a mesenchymal stem cell is isolated from the patient, which is isolated from the patient's bone marrow or peripheral blood. Next, the chromosomal DNA of these mesenchymal stem cells is edited using the materials and methods described herein. Next, the genome-edited mesenchymal stem cells is differentiated into hematopoietic progenitor cells or white blood cells. Finally, these hematopoietic progenitor cells or white blood cells is implanted into the patient.

[0184] A further aspect of such method is an ex vivo cell-based therapy. For example, a hematopoietic progenitor cell, including by way of non-limiting example, a hematopoietic stem cell, is isolated from the patient. Next, the chromosomal DNA of these cells is edited using the materials and methods described herein. Finally, the genome-edited hematopoietic progenitor cells is implanted into the patient.

[0185] One advantage of an ex vivo cell therapy approach is the ability to conduct a comprehensive analysis of the therapeutic prior to administration. Nuclease-based therapeutics have some level of off-target effects. Performing gene correction ex vivo allows one to fully characterize the corrected cell population prior to implantation. The present disclosure includes sequencing the entire genome of the corrected cells to ensure that the off-target effects, if any, are in genomic locations associated with minimal risk to the patient. Furthermore, populations of specific cells, including clonal populations, can be isolated prior to implantation.

[0186] Another advantage of ex vivo cell therapy relates to genetic correction in iPSCs compared to other primary cell sources. iPSCs are prolific, making it easy to obtain the large number of cells that will be required for a cell-based therapy. Furthermore, iPSCs are an ideal cell type for performing clonal isolations. This allows screening for the correct genomic correction, without risking a decrease in viability. In contrast, other primary cells are viable for only a few passages and difficult to clonally expand. Thus, manipulation of iPSCs for the treatment of SCID or Omenn Syndrome will be much easier, and will shorten the amount of time needed to make the desired genetic correction.

[0187] For ex vivo therapy, transplantation requires clearance of bone-marrow niches or the donor HSCs to engraft. Current methods rely on radiation and/or chemotherapy. Due to the limitations these impose, safer conditioning regiments have been and are being developed, such as immunodepletion of bone marrow cells by antibodies or antibody toxin conjugates directed against hematopoietic cell surface markers, for example CD117, c-kit and others. Success of HSC transplantation depends upon efficient homing to bone marrow, subsequent engraftment, and bone marrow repopulation. The level of gene-edited cells engrafted is important, as is the ability of the cells' multilineage engraftment.

[0188] Hematopoietic stem cells (HSCs) are an important target for ex vivo gene therapy as they provide a prolonged source of the corrected cells. Treated CD34+ cells would be returned to the patient.

[0189] Another embodiment of such methods also includes an in vivo based therapy. In this method, chromosomal DNA of the cells in the patient is corrected using the materials and methods described herein. In some embodiments, the cells are white blood cells, bone marrow cells, hematopoietic progenitor cells, or CD34+ cells.

[0190] Although blood cells present an attractive target for ex vivo treatment and therapy, increased efficacy in delivery may permit direct in vivo delivery to the hematopoietic stem cells (HSCs) and/or other B and T cell progenitors, such as CD34+ cells. Ideally the targeting and editing would be directed to the relevant cells. Cleavage in other cells may also be prevented by the use of promoters only active in certain cells and or developmental stages. Additional promoters are inducible, and therefore can be temporally controlled if the nuclease is delivered as a plasmid. The amount of time that delivered RNA and protein remain in the cell can also be adjusted using treatments or domains added to change the half-life. In vivo treatment would eliminate a number of treatment steps, but a lower rate of delivery may require higher rates of editing. In vivo treatment may eliminate problems and losses from ex vivo treatment and engraftment.

[0191] An advantage of in vivo gene therapy is the ease of therapeutic production and administration. The same therapeutic approach and therapy will have the potential to be used to treat more than one patient, for example a number of patients who share the same or similar genotype or allele. In contrast, ex vivo cell therapy typically requires using a patient's own cells, which are isolated, manipulated and returned to the same patient.

[0192] Also provided herein is a cellular method for editing the IL7R gene in a cell by genome editing. For example, a cell is isolated from a patient or animal. Then, the chromosomal DNA of the cell is edited using the materials and methods described herein.

[0193] The methods provided herein, regardless of whether a cellular or ex vivo or in vivo method, involve one or a combination of the following: 1) correcting, by insertions or deletions that arise due to the imprecise NHEJ pathway, one or more mutations within or near the IL7R gene or other DNA sequences that encode regulatory elements of the IL7R gene, 2) correcting, by HDR or NHEJ, one or more mutations within or near the IL7R gene or other DNA sequences that encode regulatory elements of the IL7R gene, or 3) deletion of the mutant region and/or knocking-in IL7R cDNA or a minigene (comprised of one or more exons or introns or natural or synthetic introns) or introducing exogenous IL7R DNA or cDNA sequence or a fragment thereof into the locus of the gene or at a heterologous location in the genome (such as a safe harbor locus, such as, e.g., targeting an AAVS1 (PPP1R12C), an ALB gene, an Angptl3 gene, an ApoC3 gene, an ASGR2 gene, a CCR5 gene, a FIX (F9) gene, a G6PC gene, a Gys2 gene, an HGD gene, a Lp(a) gene, a Pcsk9 gene, a Serpina1 gene, a TF gene, and a TTR gene). Assessment of efficiency of HDR/NHEJ mediated knock-in of cDNA into the first exon can utilize cDNA knock-in into “safe harbor” sites such as: single-stranded or double-stranded DNA having homologous arms to one of the following regions, for example: ApoC3 (chr11:116829908-116833071), Angptl3 (chr1:62,597,487-62,606,305), Serpina1 (chr14:94376747-94390692), Lp(a) (chr6:160531483-160664259), Pcsk9 (chr1:55,039,475-55,064,852), FIX (chrX:139,530,736-139,563,458), ALB (chr4:73,404,254-73,421,411), TTR (chr18:31,591,766-31,599,023), TF (chr3:133,661,997-133,779,005), G6PC (chr17:42,900,796-42,914,432), Gys2 (chr12:21,536,188-21,604,857), AAVS1(PPP1R12C) (chr19:55,090,912-55,117,599), HGD (chr3:120,628,167-120,682,570), CCR5 (chr3:46,370,854-46,376,206), ASGR2 (chr17:7,101,322-7,114,310).). Both the correction and knock-in strategies utilize a donor DNA template in Homology-Directed Repair (HDR) or Non-Homologous End Joining (NHEJ). HDR in either strategy may be accomplished by making one or more single-stranded breaks (SSBs) or double-stranded breaks (DSBs) at specific sites in the genome by using one or more endonucleases.

[0194] For example, an NHEJ correction strategy involves restoring the reading frame in the IL7R gene by inducing one single stranded break or double stranded break in the gene of interest with one or more CRISPR endonucleases and a gRNA (e.g., crRNA+tracrRNA, or sgRNA), or two or more single stranded breaks or double stranded breaks in the gene of interest with two or more CRISPR endonucleases and two or more sgRNAs. This approach can require development and optimization of sgRNAs for the IL7R gene.

[0195] For example, the HDR correction strategy involves restoring the reading frame in the IL7R gene by inducing one single stranded break or double stranded break in the gene of interest with one or more CRISPR endonucleases and a gRNA (e.g., crRNA+tracrRNA, or sgRNA), or two or more single stranded breaks or double stranded breaks in the gene of interest with one or more CRISPR endonucleases and two or more appropriate sgRNAs, in the presence of a donor DNA template introduced exogenously to direct the cellular DSB response to Homology-Directed Repair (the donor DNA template can be a short single stranded oligonucleotide, a short double stranded oligonucleotide, a long single or double stranded DNA molecule). This approach requires development and optimization of gRNAs and donor DNA molecules for the IL7R gene.

[0196] For example, the knock-in strategy involves knocking-in IL7R cDNA or a minigene (comprised of, natural or synthetic enhancer and promoter, one or more exons, and natural or synthetic introns, and natural or synthetic 3′UTR and polyadenylation signal) into the locus of the gene using a gRNA (e.g., crRNA+tracrRNA, or sgRNA) or a pair of sgRNAs targeting upstream of or in the first or other exon and/or intron of the IL7R gene, or in a safe harbor site (such as AAVS1 (PPP1R12C), ALB, Angptl3, ApoC3, ASGR2, CCR5, FIX (F9), G6PC, Gys2, HGD, Lp(a), Pcsk9, Serpina1, TF, and/or TTR). The donor DNA will be single or double stranded DNA having homologous arms to the human 5p13.2 region.

[0197] For example, the deletion strategy involves deleting one or more mutations in one or more of the five exons of the IL7R gene using one or more endonucleases and two or more gRNAs or sgRNAs.

[0198] The advantages for the above strategies (correction and knock-in) are similar, including in principle both short and long term beneficial clinical and laboratory effects. Another advantage for all strategies is that most patients have low-level gene and protein activity, therefore suggesting that additional protein expression, for example following gene correction, should not necessarily lead to an immune response against the target gene product. The knock-in approach does provide one advantage over the correction or deletion approach—the ability to treat all patients versus only a subset of patients. While there are common mutations in this gene, there are also many other possible mutations, and using the knock-in method could treat all of them. The other issue with gene editing in this manner is the need for a DNA donor for HDR.

[0199] In addition to the above genome editing strategies, another strategy involves modulating expression, function, or activity of IL7R by editing in the regulatory sequence.

[0200] In addition to the editing options listed above, Cas9 or similar proteins can be used to target effector domains to the same target sites that may be identified for editing, or additional target sites within range of the effector domain. A range of chromatin modifying enzymes, methylases or demethlyases may be used to alter expression of the target gene. One possibility is increasing the expression of the IL7R protein if the mutation leads to lower activity. These types of epigenetic regulation have some advantages, particularly as they are limited in possible off-target effects.

[0201] A number of types of genomic target sites are present in addition to mutations in the coding and splicing sequences.

[0202] The regulation of transcription and translation implicates a number of different classes of sites that interact with cellular proteins or nucleotides. Often the DNA binding sites of transcription factors or other proteins can be targeted for mutation or deletion to study the role of the site, though they can also be targeted to change gene expression. Sites can be added through non-homologous end joining NHEJ or direct genome editing by homology directed repair (HDR). Increased use of genome sequencing, RNA expression and genome-wide studies of transcription factor binding have increased the ability to identify how the sites lead to developmental or temporal gene regulation. These control systems may be direct or may involve extensive cooperative regulation that can require the integration of activities from multiple enhancers. Transcription factors typically bind 6-12 bp-long degenerate DNA sequences. The low level of specificity provided by individual sites suggests that complex interactions and rules are involved in binding and the functional outcome. Binding sites with less degeneracy may provide simpler means of regulation. Artificial transcription factors can be designed to specify longer sequences that have less similar sequences in the genome and have lower potential for off-target cleavage. Any of these types of binding sites can be mutated, deleted or even created to enable changes in gene regulation or expression (Canver, M. C. et al., Nature (2015)).

[0203] Another class of gene regulatory regions having these features is microRNA (miRNA) binding sites. miRNAs are non-coding RNAs that play key roles in post-transcriptional gene regulation. miRNA may regulate the expression of 30% of all mammalian protein-encoding genes. Specific and potent gene silencing by double stranded RNA (RNAi) was discovered, plus additional small noncoding RNA (Canver, M. C. et al., Nature (2015)). The largest class of noncoding RNAs important for gene silencing are miRNAs. In mammals, miRNAs are first transcribed as a long RNA transcripts, which can be separate transcriptional units, part of protein introns, or other transcripts. The long transcripts are called primary miRNA (pri-miRNA) that include imperfectly base-paired hairpin structures. These pri-miRNA are cleaved into one or more shorter precursor miRNAs (pre-miRNAs) by Microprocessor, a protein complex in the nucleus, involving Drosha.

[0204] Pre-miRNAs are short stem loops ˜70 nucleotides in length with a 2-nucleotide 3′-overhang that are exported, into the mature 19-25 nucleotide miRNA:miRNA*duplexes. The miRNA strand with lower base pairing stability (the guide strand) can be loaded onto the RNA-induced silencing complex (RISC). The passenger guide strand (marked with *), may be functional, but is usually degraded. The mature miRNA tethers RISC to partly complementary sequence motifs in target mRNAs predominantly found within the 3′ untranslated regions (UTRs) and induces posttranscriptional gene silencing (Bartel, D. P. Cell 136, 215-233 (2009); Saj, A. & Lai, E. C. Curr Opin Genet Dev 21, 504-510 (2011)).

[0205] miRNAs are important in development, differentiation, cell cycle and growth control, and in virtually all biological pathways in mammals and other multicellular organisms. miRNAs are also involved in cell cycle control, apoptosis and stem cell differentiation, hematopoiesis, hypoxia, muscle development, neurogenesis, insulin secretion, cholesterol metabolism, aging, viral replication and immune responses.

[0206] A single miRNA can target hundreds of different mRNA transcripts, while an individual transcript can be targeted by many different miRNAs. More than 28645 microRNAs have been annotated in the latest release of miRBase (v.21). Some miRNAs are encoded by multiple loci, some of which are expressed from tandemly co-transcribed clusters. The features allow for complex regulatory networks with multiple pathways and feedback controls. miRNAs are integral parts of these feedback and regulatory circuits and can help regulate gene expression by keeping protein production within limits (Herranz, H. & Cohen, S. M. Genes Dev 24, 1339-1344 (2010); Posadas, D. M. & Carthew, R. W. Curr Opin Genet Dev 27, 1-6 (2014)).

[0207] miRNA are also important in a large number of human diseases that are associated with abnormal miRNA expression. This association underscores the importance of the miRNA regulatory pathway. Recent miRNA deletion studies have linked miRNA with regulation of the immune responses (Stern-Ginossar, N. et al., Science 317, 376-381 (2007)).

[0208] miRNA also have a strong link to cancer and may play a role in different types of cancer. miRNAs have been found to be downregulated in a number of tumors. miRNA are important in the regulation of key cancer-related pathways, such as cell cycle control and the DNA damage response, and are therefore used in diagnosis and are being targeted clinically. MicroRNAs delicately regulate the balance of angiogenesis, such that experiments depleting all microRNAs suppresses tumor angiogenesis (Chen, S. et al., Genes Dev 28, 1054-1067 (2014)).

[0209] As has been shown for protein coding genes, miRNA genes are also subject to epigenetic changes occurring with cancer. Many miRNA loci are associated with CpG islands increasing their opportunity for regulation by DNA methylation (Weber, B., Stresemann, C., Brueckner, B. & Lyko, F. Cell Cycle 6, 1001-1005 (2007)). The majority of studies have used treatment with chromatin remodeling drugs to reveal epigenetically silenced miRNAs.

[0210] In addition to their role in RNA silencing, miRNA can also activate translation (Posadas, D. M. & Carthew, R. W. Curr Opin Genet Dev 27, 1-6 (2014)). Knocking out these sites may lead to decreased expression of the targeted gene, while introducing these sites may increase expression.

[0211] Individual miRNA can be knocked out most effectively by mutating the seed sequence (bases 2-8 of the microRNA), which is important for binding specificity. Cleavage in this region, followed by mis-repair by NHEJ can effectively abolish miRNA function by blocking binding to target sites. miRNA could also be inhibited by specific targeting of the special loop region adjacent to the palindromic sequence. Catalytically inactive Cas9 can also be used to inhibit shRNA expression (Zhao, Y. et al., Sci Rep 4, 3943 (2014)). In addition to targeting the miRNA, the binding sites can also be targeted and mutated to prevent the silencing by miRNA.

[0212] Human Cells

[0213] For ameliorating SCID or Omenn Syndrome, as described and illustrated herein, the principal targets for gene editing are human cells. For example, in the ex vivo methods, the human cells are somatic cells, which after being modified using the techniques as described, can give rise to white blood cells or hematopoietic progenitor cells, such as, by way of non-limiting example, hematopoietic stem cells. For example, in the in vivo methods, the human cells are white blood cells.

[0214] By performing gene editing in autologous cells that are derived from and therefore already completely immunologically matched with the patient in need, it is possible to generate cells that can be safely re-introduced into the patient, and effectively give rise to a population of cells that are effective in ameliorating one or more clinical conditions associated with the patient's disease.

[0215] Progenitor cells (also referred to as stem cells herein) are capable of both proliferation and giving rise to more progenitor cells, these in turn having the ability to generate a large number of mother cells that can in turn give rise to differentiated or differentiable daughter cells. The daughter cells themselves can be induced to proliferate and produce progeny that subsequently differentiate into one or more mature cell types, while also retaining one or more cells with parental developmental potential. The term “stem cell” refers then, to a cell with the capacity or potential, under particular circumstances, to differentiate to a more specialized or differentiated phenotype, and which retains the capacity, under certain circumstances, to proliferate without substantially differentiating. In one aspect, the term progenitor or stem cell refers to a generalized mother cell whose descendants (progeny) specialize, often in different directions, by differentiation, e.g., by acquiring completely individual characters, as occurs in progressive diversification of embryonic cells and tissues. Cellular differentiation is a complex process typically occurring through many cell divisions. A differentiated cell may derive from a multipotent cell that itself is derived from a multipotent cell, and so on. While each of these multipotent cells may be considered stem cells, the range of cell types that each can give rise to may vary considerably. Some differentiated cells also have the capacity to give rise to cells of greater developmental potential. Such capacity may be natural or may be induced artificially upon treatment with various factors. In many biological instances, stem cells are also “multipotent” because they can produce progeny of more than one distinct cell type, but this is not required for “stem-ness.”

[0216] Self-renewal is another important aspect of the stem cell. In theory, self-renewal can occur by either of two major mechanisms. Stem cells may divide asymmetrically, with one daughter retaining the stem state and the other daughter expressing some distinct other specific function and phenotype. Alternatively, some of the stem cells in a population can divide symmetrically into two stems, thus maintaining some stem cells in the population as a whole, while other cells in the population give rise to differentiated progeny only. Generally, “progenitor cells” have a cellular phenotype that is more primitive (i.e., is at an earlier step along a developmental pathway or progression than is a fully differentiated cell). Often, progenitor cells also have significant or very high proliferative potential. Progenitor cells can give rise to multiple distinct differentiated cell types or to a single differentiated cell type, depending on the developmental pathway and on the environment in which the cells develop and differentiate.

[0217] In the context of cell ontogeny, the adjective “differentiated,” or “differentiating” is a relative term. A “differentiated cell” is a cell that has progressed further down the developmental pathway than the cell to which it is being compared. Thus, stem cells can differentiate into lineage-restricted precursor cells (such as a myocyte progenitor cell), which in turn can differentiate into other types of precursor cells further down the pathway (such as a myocyte precursor), and then to an end-stage differentiated cell, such as a myocyte, which plays a characteristic role in a certain tissue type, and may or may not retain the capacity to proliferate further.

[0218] The term “hematopoietic progenitor cell” refers to cells of a stem cell lineage that give rise to all the blood cell types, including erythroid (erythrocytes or red blood cells (RBCs)), myeloid (monocytes and macrophages, neutrophils, basophils, eosinophils, megakaryocytes/platelets, and dendritic cells), and lymphoid (T-cells, B-cells, NK-cells).

[0219] A “cell of the erythroid lineage” indicates that the cell being contacted is a cell that undergoes erythropoiesis, such that upon final differentiation it forms an erythrocyte or red blood cell. Such cells originate from bone marrow hematopoietic progenitor cells. Upon exposure to specific growth factors and other components of the hematopoietic microenvironment, hematopoietic progenitor cells can mature through a series of intermediate differentiation cellular types, all intermediates of the erythroid lineage, into RBCs. Thus, cells of the “erythroid lineage” comprise hematopoietic progenitor cells, rubriblasts, prorubricytes, erythroblasts, metarubricytes, reticulocytes, and erythrocytes.

[0220] In some embodiments, the hematopoietic progenitor cell, including, by way of non-limiting example, a hematopoietic stem cell, expresses at least one of the following cell surface markers characteristic of hematopoietic progenitor cells: CD34+, CD59+, Thyl/CD90+, CD381o/−, and C-kit/CDI 17+. In some examples provided herein, the hematopoietic progenitors are CD34+.

[0221] In some embodiments, the hematopoietic progenitor cell, including, by way of non-limiting example, hematopoietic stem cells, is a peripheral blood stem cell obtained from the patient after the patient has been treated with one or more factors such as granulocyte colony stimulating factor (optionally in combination with Plerixaflor). In some embodiments, CD34+ cells are enriched using CliniMACS® Cell Selection System (Miltenyi Biotec). In some embodiments, CD34+ cells are stimulated in serum-free medium (e.g., CellGrow SCGM media, CellGenix) with cytokines (e.g., SCF, rhTPO, rhFLT3) before genome editing. Addition of SR1 and dmPGE2 and/or other factors is contemplated to improve long-term engraftment.

[0222] In some embodiments, the hematopoietic progenitor cells of the erythroid lineage, including, by way of non-limiting example, hematopoietic stem cells of the erythroid lineage, have a cell surface marker characteristic of the erythroid lineage: such as CD71 and Terl 19.

[0223] Hematopoietic stem cells (HSCs) are an important target for gene therapy as they provide a prolonged source of the corrected cells. HSCs give rise to both the myeloid and lymphoid lineages of blood cells. Mature blood cells have a finite life-span and must be continuously replaced throughout life. Blood cells are continually produced by the proliferation and differentiation of a population of pluripotent HSCs that can be replenished by self-renewal. Bone marrow (BM) is the major site of hematopoiesis in humans and a good source for hematopoietic stem and progenitor cells (HSPCs). HSPCs can be found in small numbers in the peripheral blood (PB). In some indications or treatments their numbers increase. The progeny of HSCs mature through stages, generating multi-potential and lineage-committed progenitor cells including the lymphoid progenitor cells giving rise to the cells expressing IL7R. B and T cell progenitors are the two cell populations requiring the activity of IL7R, so they could be edited at the stages prior to re-arrangement, though correcting progenitors has the advantage of continuing to be a source of corrected cells. Treated cells, such as CD34+ cells, would be returned to the patient. The level of engraftment is important, as is the ability of the cells' multilineage engraftment of gene-edited cells following CD34+ infusion in vivo.

[0224] Induced Pluripotent Stem Cells

[0225] In some embodiments, the genetically engineered human cells described herein is induced pluripotent stem cells (iPSCs). An advantage of using iPSCs is that the cells can be derived from the same subject to which the progenitor cells are to be administered. That is, a somatic cell can be obtained from a subject, reprogrammed to an induced pluripotent stem cell, and then re-differentiated into a progenitor cell to be administered to the subject (e.g., autologous cells). Because the progenitors are essentially derived from an autologous source, the risk of engraftment rejection or allergic response is reduced compared to the use of cells from another subject or group of subjects. In addition, the use of iPSCs negates the need for cells obtained from an embryonic source. Thus, in one aspect, the stem cells used in the disclosed methods are not embryonic stem cells.

[0226] Although differentiation is generally irreversible under physiological contexts, several methods have been recently developed to reprogram somatic cells to iPSCs. Exemplary methods are known to those of skill in the art and are described briefly herein below.

[0227] The term “reprogramming” refers to a process that alters or reverses the differentiation state of a differentiated cell (e.g., a somatic cell). Stated another way, reprogramming refers to a process of driving the differentiation of a cell backwards to a more undifferentiated or more primitive type of cell. It should be noted that placing many primary cells in culture can lead to some loss of fully differentiated characteristics. Thus, simply culturing such cells included in the term differentiated cells does not render these cells non-differentiated cells (e.g., undifferentiated cells) or pluripotent cells. The transition of a differentiated cell to pluripotency requires a reprogramming stimulus beyond the stimuli that lead to partial loss of differentiated character in culture. Reprogrammed cells also have the characteristic of the capacity of extended passaging without loss of growth potential, relative to primary cell parents, which generally have capacity for only a limited number of divisions in culture.

[0228] The cell to be reprogrammed can be either partially or terminally differentiated prior to reprogramming. In some embodiments, reprogramming encompasses complete reversion of the differentiation state of a differentiated cell (e.g., a somatic cell) to a pluripotent state or a multipotent state. In some embodiments, reprogramming encompasses complete or partial reversion of the differentiation state of a differentiated cell (e.g., a somatic cell) to an undifferentiated cell (e.g., an embryonic-like cell). Reprogramming can result in expression of particular genes by the cells, the expression of which further contributes to reprogramming. In certain embodiments described herein, reprogramming of a differentiated cell (e.g., a somatic cell) causes the differentiated cell to assume an undifferentiated state (e.g., is an undifferentiated cell). The resulting cells are referred to as “reprogrammed cells,” or “induced pluripotent stem cells (iPSCs or iPS cells).”

[0229] Reprogramming can involve alteration, e.g., reversal, of at least some of the heritable patterns of nucleic acid modification (e.g., methylation), chromatin condensation, epigenetic changes, genomic imprinting, etc., that occur during cellular differentiation. Reprogramming is distinct from simply maintaining the existing undifferentiated state of a cell that is already pluripotent or maintaining the existing less than fully differentiated state of a cell that is already a multipotent cell (e.g., a hematopoietic stem cell). Reprogramming is also distinct from promoting the self-renewal or proliferation of cells that are already pluripotent or multipotent, although the compositions and methods described herein can also be of use for such purposes, in some embodiments.

[0230] Many methods are known in the art that can be used to generate pluripotent stem cells from somatic cells. Any such method that reprograms a somatic cell to the pluripotent phenotype would be appropriate for use in the methods described herein.

[0231] Reprogramming methodologies for generating pluripotent cells using defined combinations of transcription factors have been described. Mouse somatic cells can be converted to ES cell-like cells with expanded developmental potential by the direct transduction of Oct4, Sox2, Klf4, and c-Myc; see, e.g., Takahashi and Yamanaka, Cell 126(4): 663-76 (2006). iPSCs resemble ES cells, as they restore the pluripotency-associated transcriptional circuitry and much of the epigenetic landscape. In addition, mouse iPSCs satisfy all the standard assays for pluripotency: specifically, in vitro differentiation into cell types of the three germ layers, teratoma formation, contribution to chimeras, germline transmission [see, e.g., Maherali and Hochedlinger, Cell Stem Cell. 3(6):595-605 (2008)], and tetraploid complementation.

[0232] Human iPSCs can be obtained using similar transduction methods, and the transcription factor trio, OCT4, SOX2, and NANOG, has been established as the core set of transcription factors that govern pluripotency; see, e.g., Budniatzky and Gepstein, Stem Cells Transl Med. 3(4):448-57 (2014); Barrett et al., Stem Cells Trans Med 3:1-6 sctm.2014-0121 (2014); Focosi et al., Blood Cancer Journal 4: e211 (2014); and references cited therein. The production of iPSCs can be achieved by the introduction of nucleic acid sequences encoding stem cell-associated genes into an adult, somatic cell, historically using viral vectors.

[0233] iPSCs can be generated or derived from terminally differentiated somatic cells, as well as from adult stem cells, or somatic stem cells. That is, a non-pluripotent progenitor cell can be rendered pluripotent or multipotent by reprogramming. In such instances, it may not be necessary to include as many reprogramming factors as required to reprogram a terminally differentiated cell. Further, reprogramming can be induced by the non-viral introduction of reprogramming factors, e.g., by introducing the proteins themselves, or by introducing nucleic acids that encode the reprogramming factors, or by introducing messenger RNAs that upon translation produce the reprogramming factors (see e.g., Warren et al., Cell Stem Cell, 7(5):618-30 (2010). Reprogramming can be achieved by introducing a combination of nucleic acids encoding stem cell-associated genes, including, for example, Oct-4 (also known as Oct-3/4 or Pouf51), Sox1, Sox2, Sox3, Sox 15, Sox 18, NANOG, Klf1, Klf2, Klf4, Klf5, NR5A2, c-Myc, 1-Myc, n-Myc, Rem2, Tert, and LIN28. In some embodiments, reprogramming using the methods and compositions described herein further comprises introducing one or more of Oct-3/4, a member of the Sox family, a member of the Klf family, and a member of the Myc family to a somatic cell. In some embodiments, the methods and compositions described herein further comprises introducing one or more of each of Oct-4, Sox2, Nanog, c-MYC and Klf4 for reprogramming. As noted above, the exact method used for reprogramming is not necessarily critical to the methods and compositions described herein. However, where cells differentiated from the reprogrammed cells are to be used in, e.g., human therapy, in one aspect the reprogramming is not effected by a method that alters the genome. Thus, in such embodiments, reprogramming is achieved, e.g., without the use of viral or plasmid vectors.

[0234] The efficiency of reprogramming (i.e., the number of reprogrammed cells) derived from a population of starting cells can be enhanced by the addition of various agents, e.g., small molecules, as shown by Shi et al., Cell-Stem Cell 2:525-528 (2008); Huangfu et al., Nature Biotechnology 26(7):795-797 (2008) and Marson et al., Cell-Stem Cell 3: 132-135 (2008). Thus, an agent or combination of agents that enhance the efficiency or rate of induced pluripotent stem cell production can be used in the production of patient-specific or disease-specific iPSCs. Some non-limiting examples of agents that enhance reprogramming efficiency include soluble Wnt, Wnt conditioned media, BIX-01294 (a G9a histone methyltransferase), PD0325901 (a MEK inhibitor), DNA methyltransferase inhibitors, histone deacetylase (HDAC) inhibitors, valproic acid, 5′-azacytidine, dexamethasone, suberoylanilide, hydroxamic acid (SAHA), vitamin C, and trichostatin (TSA), among others.

[0235] Other non-limiting examples of reprogramming enhancing agents include: Suberoylanilide Hydroxamic Acid (SAHA (e.g., MK0683, vorinostat) and other hydroxamic acids), BML-210, Depudecin (e.g., (−)-Depudecin), HC Toxin, Nullscript (4-(1,3-Dioxo-1H,3H-benzo[de]isoquinolin-2-yl)-N-hydroxybutanamide), Phenylbutyrate (e.g., sodium phenylbutyrate) and Valproic Acid ((VP A) and other short chain fatty acids), Scriptaid, Suramin Sodium, Trichostatin A (TSA), APHA Compound 8, Apicidin, Sodium Butyrate, pivaloyloxymethyl butyrate (Pivanex, AN-9), Trapoxin B, Chlamydocin, Depsipeptide (also known as FR901228 or FK228), benzamides (e.g., CI-994 (e.g., N-acetyl dinaline) and MS-27-275), MGCD0103, NVP-LAQ-824, CBHA (m-carboxycinnaminic acid bishydroxamic acid), JNJ16241199, Tubacin, A-161906, proxamide, oxamflatin, 3-CI-UCHA (e.g., 6-(3-chlorophenylureido)caproic hydroxamic acid), AOE (2-amino-8-oxo-9,10-epoxydecanoic acid), CHAP31 and CHAP 50. Other reprogramming enhancing agents include, for example, dominant negative forms of the HDACs (e.g., catalytically inactive forms), siRNA inhibitors of the HDACs, and antibodies that specifically bind to the HDACs. Such inhibitors are available, e.g., from BIOMOL International, Fukasawa, Merck Biosciences, Novartis, Gloucester Pharmaceuticals, Titan Pharmaceuticals, MethylGene, and Sigma Aldrich.

[0236] To confirm the induction of pluripotent stem cells for use with the methods described herein, isolated clones can be tested for the expression of a stem cell marker. Such expression in a cell derived from a somatic cell identifies the cells as induced pluripotent stem cells. Stem cell markers are selected from the non-limiting group including SSEA3, SSEA4, CD9, Nanog, Fbxl5, Ecatl, Esgl, Eras, Gdf3, Fgf4, Cripto, Daxl, Zpf296, Slc2a3, Rexl, Utfl, and Natl. In one case, for example, a cell that expresses Oct4 or Nanog is identified as pluripotent. Methods for detecting the expression of such markers can include, for example, RT-PCR and immunological methods that detect the presence of the encoded polypeptides, such as Western blots or flow cytometric analyses. In some embodiments, detection involves not only RT-PCR, but also includes detection of protein markers. Intracellular markers may be best identified via RT-PCR, or protein detection methods such as immunocytochemistry, while cell surface markers are readily identified, e.g., by immunocytochemistry.

[0237] The pluripotent stem cell character of isolated cells can be confirmed by tests evaluating the ability of the iPSCs to differentiate into cells of each of the three germ layers. As one example, teratoma formation in nude mice can be used to evaluate the pluripotent character of the isolated clones. The cells are introduced into nude mice and histology and/or immunohistochemistry is performed on a tumor arising from the cells. The growth of a tumor comprising cells from all three germ layers, for example, further indicates that the cells are pluripotent stem cells.

[0238] Creating Patient Specific iPSCs

[0239] One step of the ex vivo methods of the present disclosure involves creating a patient specific iPS cell, patient specific iPS cells, or a patient specific iPS cell line. There are many established methods in the art for creating patient specific iPS cells, as described in Takahashi and Yamanaka 2006; Takahashi, Tanabe et al. 2007. For example, the creating step comprises: a) isolating a somatic cell, such as a skin cell or fibroblast, from the patient; and b) introducing a set of pluripotency-associated genes into the somatic cell in order to induce the cell to become a pluripotent stem cell. In some embodiments, the set of pluripotency-associated genes is one or more of the genes selected from the group consisting of OCT4, SOX2, KLF4, Lin28, NANOG, and cMYC.

[0240] Performing a Biopsy or Aspirate of the Patient's Bone Marrow

[0241] A biopsy or aspirate is a sample of tissue or fluid taken from the body. There are many different kinds of biopsies or aspirates. Nearly all of them involve using a sharp tool to remove a small amount of tissue. If the biopsy will be on the skin or other sensitive area, numbing medicine can be applied first. A biopsy or aspirate may be performed according to any of the known methods in the art. For example, in a bone marrow aspirate, a large needle is used to enter the pelvis bone to collect bone marrow.

[0242] Isolating a White Blood Cell

[0243] White blood cells may be isolated according to any method known in the art. For example, white blood cells may be isolated from a liquid sample by centrifugation and cell culturing.

[0244] Isolating a Mesenchymal Stem Cell

[0245] Mesenchymal stem cells may be isolated according to any method known in the art, such as from a patient's bone marrow or peripheral blood. For example, marrow aspirate may be collected into a syringe with heparin. Cells may be washed and centrifuged on a Percoll™. The cells may be cultured in Dulbecco's modified Eagle's medium (DMEM) (low glucose) containing 10% fetal bovine serum (FBS) (Pittinger M F, Mackay A M, Beck S C et al., Science 1999; 284:143-147).

[0246] Treating a Patient With GCSF

[0247] A patient may optionally be treated with granulocyte colony stimulating factor (GCSF) in accordance with any method known in the art. In some embodiments, the GCSF is administered in combination with Plerixaflor.

[0248] Isolating a Hematopoietic Progenitor Cell From a Patient

[0249] A hematopoietic progenitor cell can be isolated from a patient by any method known in the art. CD34+ cells can be enriched using CliniMACS® Cell Selection System (Miltenyi Biotec). CD34+ cells can be weakly stimulated in serum-free medium (e.g., CellGrow SCGM media, CellGenix) with cytokines (e.g., SCF, rhTPO, rhFLT3) before genome editing.

[0250] Genome Editing

[0251] Genome editing generally refers to the process of modifying the nucleotide sequence of a genome, preferably in a precise or pre-determined manner. Examples of methods of genome editing described herein include methods of using site-directed nucleases to cut deoxyribonucleic acid (DNA) at precise target locations in the genome, thereby creating single-strand or double-strand DNA breaks at particular locations within the genome. Such breaks may be and regularly are repaired by natural, endogenous cellular processes, such as homology-directed repair (HDR) and non-homologous end-joining (NHEJ), as recently reviewed in Cox et al., Nature Medicine 21(2), 121-31 (2015). These two main DNA repair processes consist of a family of alternative pathways. NHEJ directly joins the DNA ends resulting from a double-strand break, sometimes with the loss or addition of nucleotide sequence, which may disrupt or enhance gene expression. HDR utilizes a homologous sequence, or donor sequence, as a template for inserting a defined DNA sequence at the break point. The homologous sequence may be in the endogenous genome, such as a sister chromatid. Alternatively, the donor may be an exogenous nucleic acid, such as a plasmid, a single-strand oligonucleotide, a double-stranded oligonucleotide, a duplex oligonucleotide or a virus, that has regions of high homology with the nuclease-cleaved locus, but which may also contain additional sequence or sequence changes including deletions that may be incorporated into the cleaved target locus. A third repair mechanism is microhomology-mediated end joining (MMEJ), also referred to as “Alternative NHEJ”, in which the genetic outcome is similar to NHEJ in that small deletions and insertions can occur at the cleavage site. MMEJ makes use of homologous sequences of a few basepairs flanking the DNA break site to drive a more favored DNA end joining repair outcome, and recent reports have further elucidated the molecular mechanism of this process; see, e.g., Cho and Greenberg, Nature 518, 174-76 (2015); Kent et al., Nature Structural and Molecular Biology, Adv. Online doi:10.1038/nsmb.2961(2015); Mateos-Gomez et al., Nature 518, 254-57 (2015); Ceccaldi et al., Nature 528, 258-62 (2015). In some instances it may be possible to predict likely repair outcomes based on analysis of potential microhomologies at the site of the DNA break.

[0252] Each of these genome editing mechanisms can be used to create desired genomic alterations. A step in the genome editing process is to create one or two DNA breaks, the latter as double-strand breaks or as two single-stranded breaks, in the target locus as close as possible to the site of intended mutation. This can be achieved via the use of site-directed polypeptides, as described and illustrated herein.

[0253] Site-directed polypeptides, such as a DNA endonuclease, can introduce double-strand breaks or single-strand breaks in nucleic acids, e.g., genomic DNA. The double-strand break can stimulate a cell's endogenous DNA-repair pathways (e.g., homology-dependent repair or non-homologous end joining or alternative non-homologous end joining (A-NHEJ) or microhomology-mediated end joining). NHEJ can repair cleaved target nucleic acid without the need for a homologous template. This can sometimes result in small deletions or insertions (indels) in the target nucleic acid at the site of cleavage, and can lead to disruption or alteration of gene expression. HDR can occur when a homologous repair template, or donor, is available. The homologous donor template comprises sequences that are homologous to sequences flanking the target nucleic acid cleavage site. The sister chromatid is generally used by the cell as the repair template. However, for the purposes of genome editing, the repair template is often supplied as an exogenous nucleic acid, such as a plasmid, duplex oligonucleotide, single-strand oligonucleotide, double-stranded oligonucleotide, or viral nucleic acid. With exogenous donor templates, it is common to introduce an additional nucleic acid sequence (such as a transgene) or modification (such as a single or multiple base change or a deletion) between the flanking regions of homology so that the additional or altered nucleic acid sequence also becomes incorporated into the target locus. MMEJ results in a genetic outcome that is similar to NHEJ in that small deletions and insertions can occur at the cleavage site. MMEJ makes use of homologous sequences of a few basepairs flanking the cleavage site to drive a favored end-joining DNA repair outcome. In some instances it may be possible to predict likely repair outcomes based on analysis of potential microhomologies in the nuclease target regions.

[0254] Thus, in some embodiments, either non-homologous end joining or homologous recombination is used to insert an exogenous polynucleotide sequence into the target nucleic acid cleavage site. An exogenous polynucleotide sequence is termed a donor polynucleotide (or donor or donor sequence or polynucleotide donor template) herein. In some embodiments, the donor polynucleotide, a portion of the donor polynucleotide, a copy of the donor polynucleotide, or a portion of a copy of the donor polynucleotide is inserted into the target nucleic acid cleavage site. In some embodiments, the donor polynucleotide is an exogenous polynucleotide sequence, i.e., a sequence that does not naturally occur at the target nucleic acid cleavage site.

[0255] The modifications of the target DNA due to NHEJ and/or HDR can lead to, for example, mutations, deletions, alterations, integrations, gene correction, gene replacement, gene tagging, transgene insertion, nucleotide deletion, gene disruption, translocations and/or gene mutation. The processes of deleting genomic DNA and integrating non-native nucleic acid into genomic DNA are examples of genome editing.

[0256] CRISPR Endonuclease System

[0257] A CRISPR (Clustered Regularly Interspaced Short Palindromic Repeats) genomic locus can be found in the genomes of many prokaryotes (e.g., bacteria and archaea). In prokaryotes, the CRISPR locus encodes products that function as a type of immune system to help defend the prokaryotes against foreign invaders, such as virus and phage. There are three stages of CRISPR locus function: integration of new sequences into the CRISPR locus, expression of CRISPR RNA (crRNA), and silencing of foreign invader nucleic acid. Five types of CRISPR systems (e.g., Type I, Type II, Type III, Type U, and Type V) have been identified.

[0258] A CRISPR locus includes a number of short repeating sequences referred to as “repeats.” When expressed, the repeats can form secondary structures (e.g., hairpins) and/or comprise unstructured single-stranded sequences. The repeats usually occur in clusters and frequently diverge between species. The repeats are regularly interspaced with unique intervening sequences referred to as “spacers,” resulting in a repeat-spacer-repeat locus architecture. The spacers are identical to or have high homology with known foreign invader sequences. A spacer-repeat unit encodes a crisprRNA (crRNA), which is processed into a mature form of the spacer-repeat unit. A crRNA comprises a “seed” or spacer sequence that is involved in targeting a target nucleic acid (in the naturally occurring form in prokaryotes, the spacer sequence targets the foreign invader nucleic acid). A spacer sequence is located at the 5′ or 3′ end of the crRNA.

[0259] A CRISPR locus also comprises polynucleotide sequences encoding CRISPR Associated (Cas) genes. Cas genes encode endonucleases involved in the biogenesis and the interference stages of crRNA function in prokaryotes. Some Cas genes comprise homologous secondary and/or tertiary structures.

[0260] Type II CRISPR Systems

[0261] crRNA biogenesis in a Type II CRISPR system in nature requires a trans-activating CRISPR RNA (tracrRNA). The tracrRNA is modified by endogenous RNaseIII, and then hybridizes to a crRNA repeat in the pre-crRNA array. Endogenous RNaseIII is recruited to cleave the pre-crRNA. Cleaved crRNAs is subjected to exoribonuclease trimming to produce the mature crRNA form (e.g., 5′ trimming). The tracrRNA remains hybridized to the crRNA, and the tracrRNA and the crRNA associate with a site-directed polypeptide (e.g., Cas9). The crRNA of the crRNA-tracrRNA-Cas9 complex guides the complex to a target nucleic acid to which the crRNA can hybridize. Hybridization of the crRNA to the target nucleic acid activates Cas9 for targeted nucleic acid cleavage. The target nucleic acid in a Type II CRISPR system is referred to as a protospacer adjacent motif (PAM). In nature, the PAM is essential to facilitate binding of a site-directed polypeptide (e.g., Cas9) to the target nucleic acid. Type II systems (also referred to as Nmeni or CASS4) are further subdivided into Type II-A (CASS4) and II-B (CASS4a). Jinek et al., Science, 337(6096):816-821 (2012) showed that the CRISPR/Cas9 system is useful for RNA-programmable genome editing, and international patent application publication number WO2013/176772 provides numerous examples and applications of the CRISPR/Cas endonuclease system for site-specific gene editing.

[0262] Type V CRISPR Systems

[0263] Type V CRISPR systems have several important differences from Type II systems. For example, Cpf1 is a single RNA-guided endonuclease that, in contrast to Type II systems, lacks tracrRNA. In fact, Cpf1-associated CRISPR arrays are processed into mature crRNAs without the requirement of an additional trans-activating tracrRNA. The Type V CRISPR array is processed into short mature crRNAs of 42-44 nucleotides in length, with each mature crRNA beginning with 19 nucleotides of direct repeat followed by 23-25 nucleotides of spacer sequence. In contrast, mature crRNAs in Type II systems start with 20-24 nucleotides of spacer sequence followed by about 22 nucleotides of direct repeat. Also, Cpf1 utilizes a T-rich protospacer-adjacent motif such that Cpf1-crRNA complexes efficiently cleave target DNA preceded by a short T-rich PAM, which is in contrast to the G-rich PAM following the target DNA for Type II systems. Thus, Type V systems cleave at a point that is distant from the PAM, while Type II systems cleave at a point that is adjacent to the PAM. In addition, in contrast to Type II systems, Cpf1 cleaves DNA via a staggered DNA double-stranded break with a 4 or 5 nucleotide 5′ overhang. Type II systems cleave via a blunt double-stranded break. Similar to Type II systems, Cpf1 contains a predicted RuvC-like endonuclease domain, but lacks a second HNH endonuclease domain, which is in contrast to Type II systems.

[0264] Cas Genes/Polypeptides and Protospacer Adjacent Motifs

[0265] Exemplary CRISPR/Cas polypeptides include the Cas9 polypeptides in FIG. 1 of Fonfara et al., Nucleic Acids Research, 42: 2577-2590 (2014). The CRISPR/Cas gene naming system has undergone extensive rewriting since the Cas genes were discovered. FIG. 5 of Fonfara, supra, provides PAM sequences for the Cas9 polypeptides from various species.

[0266] Site-Directed Polypeptides

[0267] A site-directed polypeptide is a nuclease used in genome editing to cleave DNA. The site-directed may be administered to a cell or a patient as either: one or more polypeptides, or one or more mRNAs encoding the polypeptide.

[0268] In the context of a CRISPR/Cas or CRISPR/Cpf1 system, the site-directed polypeptide can bind to a guide RNA that, in turn, specifies the site in the target DNA to which the polypeptide is directed. In embodiments of the CRISPR/Cas or CRISPR/Cpf1 systems herein, the site-directed polypeptide is an endonuclease, such as a DNA endonuclease.

[0269] In some embodiments, a site-directed polypeptide comprises a plurality of nucleic acid-cleaving (i.e., nuclease) domains. Two or more nucleic acid-cleaving domains can be linked together via a linker. For example, the linker comprises a flexible linker. In some embodiments, linkers comprises 1, 2, 3, 4, 5, 6, 7, 8, 9, 10, 11, 12, 13, 14, 15, 16, 17, 18, 19, 20, 21, 22, 23, 24, 25, 30, 35, 40 or more amino acids in length.

[0270] Naturally-occurring wild-type Cas9 enzymes comprise two nuclease domains, a HNH nuclease domain and a RuvC domain. Herein, the “Cas9” refers to both naturally-occurring and recombinant Cas9s. Cas9 enzymes contemplated herein comprises a HNH or HNH-like nuclease domain, and/or a RuvC or RuvC-like nuclease domain.

[0271] HNH or HNH-like domains comprise a McrA-like fold. HNH or HNH-like domains comprises two antiparallel β-strands and an α-helix. HNH or HNH-like domains comprises a metal binding site (e.g., a divalent cation binding site). HNH or HNH-like domains can cleave one strand of a target nucleic acid (e.g., the complementary strand of the crRNA targeted strand).

[0272] RuvC or RuvC-like domains comprise an RNaseH or RNaseH-like fold. RuvC/RNaseH domains are involved in a diverse set of nucleic acid-based functions including acting on both RNA and DNA. The RNaseH domain comprises 5 β-strands surrounded by a plurality of a-helices. RuvC/RNaseH or RuvC/RNaseH-like domains comprise a metal binding site (e.g., a divalent cation binding site). RuvC/RNaseH or RuvC/RNaseH-like domains can cleave one strand of a target nucleic acid (e.g., the non-complementary strand of a double-stranded target DNA).

[0273] Site-directed polypeptides can introduce double-strand breaks or single-strand breaks in nucleic acids, e.g., genomic DNA. The double-strand break can stimulate a cell's endogenous DNA-repair pathways (e.g., homology-dependent repair (HDR) or non-homologous end-joining (NHEJ) or alternative non-homologous end joining (A-NHEJ) or microhomology-mediated end joining (MMEJ)). NHEJ can repair cleaved target nucleic acid without the need for a homologous template. This can sometimes result in small deletions or insertions (indels) in the target nucleic acid at the site of cleavage, and can lead to disruption or alteration of gene expression. HDR can occur when a homologous repair template, or donor, is available. The homologous donor template comprises sequences that are homologous to sequences flanking the target nucleic acid cleavage site. The sister chromatid is generally used by the cell as the repair template. However, for the purposes of genome editing, the repair template is often supplied as an exogenous nucleic acid, such as a plasmid, duplex oligonucleotide, single-strand oligonucleotide or viral nucleic acid. With exogenous donor templates, it is common to introduce an additional nucleic acid sequence (such as a transgene) or modification (such as a single or multiple base change or a deletion) between the flanking regions of homology so that the additional or altered nucleic acid sequence also becomes incorporated into the target locus. MMEJ results in a genetic outcome that is similar to NHEJ in that small deletions and insertions can occur at the cleavage site. MMEJ makes use of homologous sequences of a few basepairs flanking the cleavage site to drive a favored end-joining DNA repair outcome. In some instances it may be possible to predict likely repair outcomes based on analysis of potential microhomologies in the nuclease target regions.

[0274] Thus, in some embodiments, homologous recombination is used to insert an exogenous polynucleotide sequence into the target nucleic acid cleavage site. An exogenous polynucleotide sequence is termed a donor polynucleotide (or donor or donor sequence) herein. In some embodiments, the donor polynucleotide, a portion of the donor polynucleotide, a copy of the donor polynucleotide, or a portion of a copy of the donor polynucleotide is inserted into the target nucleic acid cleavage site. In some embodiments, the donor polynucleotide is an exogenous polynucleotide sequence, i.e., a sequence that does not naturally occur at the target nucleic acid cleavage site.

[0275] The modifications of the target DNA due to NHEJ and/or HDR can lead to, for example, mutations, deletions, alterations, integrations, gene correction, gene replacement, gene tagging, transgene insertion, nucleotide deletion, gene disruption, translocations and/or gene mutation. The processes of deleting genomic DNA and integrating non-native nucleic acid into genomic DNA are examples of genome editing.

[0276] In some embodiments, the site-directed polypeptide comprises an amino acid sequence having at least 10%, at least 15%, at least 20%, at least 30%, at least 40%, at least 50%, at least 60%, at least 70%, at least 75%, at least 80%, at least 85%, at least 90%, at least 95%, at least 99%, or 100% amino acid sequence identity to a wild-type exemplary site-directed polypeptide [e.g., Cas9 from S. pyogenes, US2014/0068797 Sequence ID No. 8 or Sapranauskas et al., Nucleic Acids Res, 39(21): 9275-9282 (2011)], and various other site-directed polypeptides. In some embodiments, the site-directed polypeptide comprises at least 70, 75, 80, 85, 90, 95, 97, 99, or 100% identity to a wild-type site-directed polypeptide (e.g., Cas9 from S. pyogenes, supra) over 10 contiguous amino acids.

[0277] In some embodiments, the site-directed polypeptide comprises an amino acid sequence having at least 10%, at least 15%, at least 20%, at least 30%, at least 40%, at least 50%, at least 60%, at least 70%, at least 75%, at least 80%, at least 85%, at least 90%, at least 95%, at least 99%, or 100% amino acid sequence identity to the nuclease domain of a wild-type exemplary site-directed polypeptide (e.g., Cas9 from S. pyogenes, supra).

[0278] In some embodiments, the site-directed polypeptide comprises at most: 70, 75, 80, 85, 90, 95, 97, 99, or 100% identity to a wild-type site-directed polypeptide (e.g., Cas9 from S. pyogenes, supra) over 10 contiguous amino acids. In some embodiments, the site-directed polypeptide comprises at least: 70, 75, 80, 85, 90, 95, 97, 99, or 100% identity to a wild-type site-directed polypeptide (e.g., Cas9 from S. pyogenes, supra) over 10 contiguous amino acids in a HNH nuclease domain of the site-directed polypeptide. In some embodiments, the site-directed polypeptide comprises at most: 70, 75, 80, 85, 90, 95, 97, 99, or 100% identity to a wild-type site-directed polypeptide (e.g., Cas9 from S. pyogenes, supra) over 10 contiguous amino acids in a HNH nuclease domain of the site-directed polypeptide. In some embodiments, the site-directed polypeptide comprises at least: 70, 75, 80, 85, 90, 95, 97, 99, or 100% identity to a wild-type site-directed polypeptide (e.g., Cas9 from S. pyogenes, supra) over 10 contiguous amino acids in a RuvC nuclease domain of the site-directed polypeptide. In some embodiments, the site-directed polypeptide comprises at most: 70, 75, 80, 85, 90, 95, 97, 99, or 100% identity to a wild-type site-directed polypeptide (e.g., Cas9 from S. pyogenes, supra) over 10 contiguous amino acids in a RuvC nuclease domain of the site-directed polypeptide.

[0279] In some embodiments, the site-directed polypeptide comprises a modified form of a wild-type exemplary site-directed polypeptide. In some embodiments, the modified form of the wild-type exemplary site-directed polypeptide comprises a mutation that reduces the nucleic acid-cleaving activity of the site-directed polypeptide. In some embodiments, the modified form of the wild-type exemplary site-directed polypeptide has less than 90%, less than 80%, less than 70%, less than 60%, less than 50%, less than 40%, less than 30%, less than 20%, less than 10%, less than 5%, or less than 1% of the nucleic acid-cleaving activity of the wild-type exemplary site-directed polypeptide (e.g., Cas9 from S. pyogenes, supra). In some embodiments, the modified form of the site-directed polypeptide has no substantial nucleic acid-cleaving activity. When a site-directed polypeptide is a modified form that has no substantial nucleic acid-cleaving activity, it is referred to herein as “enzymatically inactive.”

[0280] In some embodiments, the modified form of the site-directed polypeptide comprises a mutation such that it can induce a single-strand break (SSB) on a target nucleic acid (e.g., by cutting only one of the sugar-phosphate backbones of a double-strand target nucleic acid). In some embodiments, the mutation results in less than 90%, less than 80%, less than 70%, less than 60%, less than 50%, less than 40%, less than 30%, less than 20%, less than 10%, less than 5%, or less than 1% of the nucleic acid-cleaving activity in one or more of the plurality of nucleic acid-cleaving domains of the wild-type site directed polypeptide (e.g., Cas9 from S. pyogenes, supra). In some embodiments, the mutation results in one or more of the plurality of nucleic acid-cleaving domains retaining the ability to cleave the complementary strand of the target nucleic acid, but reducing its ability to cleave the non-complementary strand of the target nucleic acid. In some embodiments, the mutation results in one or more of the plurality of nucleic acid-cleaving domains retaining the ability to cleave the non-complementary strand of the target nucleic acid, but reducing its ability to cleave the complementary strand of the target nucleic acid. For example, residues in the wild-type exemplary S. pyogenes Cas9 polypeptide, such as Asp10, His840, Asn854 and Asn856, are mutated to inactivate one or more of the plurality of nucleic acid-cleaving domains (e.g., nuclease domains). The residues to be mutated can correspond to residues Asp10, His840, Asn854 and Asn856 in the wild-type exemplary S. pyogenes Cas9 polypeptide (e.g., as determined by sequence and/or structural alignment). Non-limiting examples of mutations include D10A, H840A, N854A or N856A. One skilled in the art will recognize that mutations other than alanine substitutions can be suitable.

[0281] In some embodiments, a D10A mutation is combined with one or more of H840A, N854A, or N856A mutations to produce a site-directed polypeptide substantially lacking DNA cleavage activity. In some embodiments, a H840A mutation is combined with one or more of D10A, N854A, or N856A mutations to produce a site-directed polypeptide substantially lacking DNA cleavage activity. In some embodiments, a N854A mutation is combined with one or more of H840A, D10A, or N856A mutations to produce a site-directed polypeptide substantially lacking DNA cleavage activity. In some embodiments, aN856A mutation is combined with one or more of H840A, N854A, or D10A mutations to produce a site-directed polypeptide substantially lacking DNA cleavage activity. Site-directed polypeptides that comprise one substantially inactive nuclease domain are referred to as “nickases”.

[0282] Nickase variants of RNA-guided endonucleases, for example Cas9, can be used to increase the specificity of CRISPR-mediated genome editing. Wild type Cas9 is typically guided by a single guide RNA designed to hybridize with a specified ˜20 nucleotide sequence in the target sequence (such as an endogenous genomic locus). However, several mismatches can be tolerated between the guide RNA and the target locus, effectively reducing the length of required homology in the target site to, for example, as little as 13 nt of homology, and thereby resulting in elevated potential for binding and double-strand nucleic acid cleavage by the CRISPR/Cas9 complex elsewhere in the target genome—also known as off-target cleavage. Because nickase variants of Cas9 each only cut one strand, in order to create a double-strand break it is necessary for a pair of nickases to bind in close proximity and on opposite strands of the target nucleic acid, thereby creating a pair of nicks, which is the equivalent of a double-strand break. This requires that two separate guide RNAs—one for each nickase—must bind in close proximity and on opposite strands of the target nucleic acid. This requirement essentially doubles the minimum length of homology needed for the double-strand break to occur, thereby reducing the likelihood that a double-strand cleavage event will occur elsewhere in the genome, where the two guide RNA sites—if they exist—are unlikely to be sufficiently close to each other to enable the double-strand break to form. As described in the art, nickases can also be used to promote HDR versus NHEJ. HDR can be used to introduce selected changes into target sites in the genome through the use of specific donor sequences that effectively mediate the desired changes. Descriptions of various CRISPR/Cas systems for use in gene editing can be found, e.g., in international patent application publication number WO2013/176772, and in Nature Biotechnology 32, 347-355 (2014), and references cited therein.

[0283] Mutations contemplated include substitutions, additions, and deletions, or any combination thereof. In some embodiments, the mutation converts the mutated amino acid to alanine. In some embodiments, the mutation converts the mutated amino acid to another amino acid (e.g., glycine, serine, threonine, cysteine, valine, leucine, isoleucine, methionine, proline, phenylalanine, tyrosine, tryptophan, aspartic acid, glutamic acid, asparagines, glutamine, histidine, lysine, or arginine). In some embodiments, the mutation converts the mutated amino acid to a non-natural amino acid (e.g., selenomethionine). In some embodiments, the mutation converts the mutated amino acid to amino acid mimics (e.g., phosphomimics). In some embodiments, the mutation is a conservative mutation. For example, the mutation converts the mutated amino acid to amino acids that resemble the size, shape, charge, polarity, conformation, and/or rotamers of the mutated amino acids (e.g., cysteine/serine mutation, lysine/asparagine mutation, histidine/phenylalanine mutation). In some embodiments, the mutation causes a shift in reading frame and/or the creation of a premature stop codon. In some embodiments, mutations cause changes to regulatory regions of genes or loci that affect expression of one or more genes.

[0284] In some embodiments, the site-directed polypeptide (e.g., variant, mutated, enzymatically inactive and/or conditionally enzymatically inactive site-directed polypeptide) targets nucleic acid. In some embodiments, the site-directed polypeptide (e.g., variant, mutated, enzymatically inactive and/or conditionally enzymatically inactive endoribonuclease) targets DNA. In some embodiments, the site-directed polypeptide (e.g., variant, mutated, enzymatically inactive and/or conditionally enzymatically inactive endoribonuclease) targets RNA.

[0285] In some embodiments, the site-directed polypeptide comprises one or more non-native sequences (e.g., the site-directed polypeptide is a fusion protein).

[0286] In some embodiments, the site-directed polypeptide comprises an amino acid sequence comprising at least 15% amino acid identity to a Cas9 from a bacterium (e.g., S. pyogenes), a nucleic acid binding domain, and two nucleic acid cleaving domains (i.e., a HNH domain and a RuvC domain).

[0287] In some embodiments, the site-directed polypeptide comprises an amino acid sequence comprising at least 15% amino acid identity to a Cas9 from a bacterium (e.g., S. pyogenes), and two nucleic acid cleaving domains (i.e., a HNH domain and a RuvC domain).

[0288] In some embodiments, the site-directed polypeptide comprises an amino acid sequence comprising at least 15% amino acid identity to a Cas9 from a bacterium (e.g., S. pyogenes), and two nucleic acid cleaving domains, wherein one or both of the nucleic acid cleaving domains comprise at least 50% amino acid identity to a nuclease domain from Cas9 from a bacterium (e.g., S. pyogenes).

[0289] In some embodiments, the site-directed polypeptide comprises an amino acid sequence comprising at least 15% amino acid identity to a Cas9 from a bacterium (e.g., S. pyogenes), two nucleic acid cleaving domains (i.e., a HNH domain and a RuvC domain), and non-native sequence (for example, a nuclear localization signal) or a linker linking the site-directed polypeptide to a non-native sequence.

[0290] In some embodiments, the site-directed polypeptide comprises an amino acid sequence comprising at least 15% amino acid identity to a Cas9 from a bacterium (e.g., S. pyogenes), two nucleic acid cleaving domains (i.e., a HNH domain and a RuvC domain), wherein the site-directed polypeptide comprises a mutation in one or both of the nucleic acid cleaving domains that reduces the cleaving activity of the nuclease domains by at least 50%.

[0291] In some embodiments, the site-directed polypeptide comprises an amino acid sequence comprising at least 15% amino acid identity to a Cas9 from a bacterium (e.g., S. pyogenes), and two nucleic acid cleaving domains (i.e., a HNH domain and a RuvC domain), wherein one of the nuclease domains comprises mutation of aspartic acid 10, and/or wherein one of the nuclease domains comprises a mutation of histidine 840, and wherein the mutation reduces the cleaving activity of the nuclease domain(s) by at least 50%.

[0292] In some embodiments, the one or more site-directed polypeptides, e.g. DNA endonucleases, comprises two nickases that together effect one double-strand break at a specific locus in the genome, or four nickases that together effect or cause two double-strand breaks at specific loci in the genome. Alternatively, one site-directed polypeptide, e.g. DNA endonuclease, effects one double-strand break at a specific locus in the genome.

[0293] Genome-Targeting Nucleic Acid

[0294] The present disclosure provides a genome-targeting nucleic acid that can direct the activities of an associated polypeptide (e.g., a site-directed polypeptide) to a specific target sequence within a target nucleic acid. The genome-targeting nucleic acid can be an RNA. A genome-targeting RNA is referred to as a “guide RNA” or “gRNA” herein. A guide RNA comprises at least a spacer sequence that hybridizes to a target nucleic acid sequence of interest, and a CRISPR repeat sequence. In Type II systems, the gRNA also comprises a second RNA called the tracrRNA sequence. In the Type II guide RNA (gRNA), the CRISPR repeat sequence and tracrRNA sequence hybridize to each other to form a duplex. In the Type V guide RNA (gRNA), the crRNA forms a duplex. In both systems, the duplex binds a site-directed polypeptide, such that the guide RNA and site-direct polypeptide form a complex. In some embodiments, the genome-targeting nucleic acid provides target specificity to the complex by virtue of its association with the site-directed polypeptide. The genome-targeting nucleic acid thus directs the activity of the site-directed polypeptide.

[0295] Exemplary guide RNAs include the spacer sequences in SEQ ID NOs: 1-63,375, for example, in SEQ ID NOs: 54,862-63,375, with the genome location of their target sequence and the associated Cas9 or Cpf1 cut site, wherein the genome location is based on the GRCh38/hg38 human genome assembly. As is understood by the person of ordinary skill in the art, each guide RNA is designed to include a spacer sequence complementary to its genomic target sequence. For example, each of the spacer sequences in SEQ ID NOs: 1-63,375, for example, in SEQ ID NOs: 54,862-63,375 can be put into a single RNA chimera or a crRNA (along with a corresponding tracrRNA). See Jinek et al., Science, 337, 816-821 (2012) and Deltcheva et al., Nature, 471, 602-607 (2011).

[0296] In some embodiments, the genome-targeting nucleic acid is a double-molecule guide RNA. In some embodiments, the genome-targeting nucleic acid is a single-molecule guide RNA.

[0297] A double-molecule guide RNA comprises two strands of RNA. The first strand comprises in the 5′ to 3′ direction, an optional spacer extension sequence, a spacer sequence and a minimum CRISPR repeat sequence. The second strand comprises a minimum tracrRNA sequence (complementary to the minimum CRISPR repeat sequence), a 3′ tracrRNA sequence and an optional tracrRNA extension sequence.

[0298] A single-molecule guide RNA (sgRNA) in a Type II system comprises, in the 5′ to 3′ direction, an optional spacer extension sequence, a spacer sequence, a minimum CRISPR repeat sequence, a single-molecule guide linker, a minimum tracrRNA sequence, a 3′ tracrRNA sequence and an optional tracrRNA extension sequence. The optional tracrRNA extension may comprise elements that contribute additional functionality (e.g., stability) to the guide RNA. The single-molecule guide linker links the minimum CRISPR repeat and the minimum tracrRNA sequence to form a hairpin structure. The optional tracrRNA extension comprises one or more hairpins.

[0299] A single-molecule guide RNA (sgRNA) in a Type V system comprises, in the 5′ to 3′ direction, a minimum CRISPR repeat sequence and a spacer sequence.

[0300] By way of illustration, guide RNAs used in the CRISPR/Cas/Cpf1 system, or other smaller RNAs can be readily synthesized by chemical means, as illustrated below and described in the art. While chemical synthetic procedures are continually expanding, purifications of such RNAs by procedures such as high performance liquid chromatography (HPLC, which avoids the use of gels such as PAGE) tends to become more challenging as polynucleotide lengths increase significantly beyond a hundred or so nucleotides. One approach used for generating RNAs of greater length is to produce two or more molecules that are ligated together. Much longer RNAs, such as those encoding a Cas9 or Cpf1 endonuclease, are more readily generated enzymatically. Various types of RNA modifications can be introduced during or after chemical synthesis and/or enzymatic generation of RNAs, e.g., modifications that enhance stability, reduce the likelihood or degree of innate immune response, and/or enhance other attributes, as described in the art.

[0301] Spacer Extension Sequence

[0302] In some examples of genome-targeting nucleic acids, a spacer extension sequence may modify activity, provide stability and/or provide a location for modifications of a genome-targeting nucleic acid. A spacer extension sequence may modify on- or off-target activity or specificity. In some embodiments, a spacer extension sequence is provided. A spacer extension sequence may have a length of more than 1, 5, 10, 15, 20, 25, 30, 35, 40, 45, 50, 60, 70, 80, 90, 100, 120, 140, 160, 180, 200, 220, 240, 260, 280, 300, 320, 340, 360, 380, 400, 1000, 2000, 3000, 4000, 5000, 6000, or 7000 or more nucleotides. The spacer extension sequence may have a length of less than 1, 5, 10, 15, 20, 25, 30, 35, 40, 45, 50, 60, 70, 80, 90, 100, 120, 140, 160, 180, 200, 220, 240, 260, 280, 300, 320, 340, 360, 380, 400, 1000, 2000, 3000, 4000, 5000, 6000, 7000 or more nucleotides. In some embodiments, the spacer extension sequence is less than 10 nucleotides in length. In some embodiments, the spacer extension sequence is between 10-30 nucleotides in length. In some embodiments, the spacer extension sequence is between 30-70 nucleotides in length.

[0303] In some embodiments, the spacer extension sequence comprises another moiety (e.g., a stability control sequence, an endoribonuclease binding sequence, a ribozyme). In some embodiments, the moiety decreases or increases the stability of a nucleic acid targeting nucleic acid. In some embodiments, the moiety is a transcriptional terminator segment (i.e., a transcription termination sequence). In some embodiments, the moiety functions in a eukaryotic cell. In some embodiments, the moiety functions in a prokaryotic cell. In some embodiments, the moiety functions in both eukaryotic and prokaryotic cells. Non-limiting examples of suitable moieties include: a 5′ cap (e.g., a 7-methylguanylate cap (m7 G)), a riboswitch sequence (e.g., to allow for regulated stability and/or regulated accessibility by proteins and protein complexes), a sequence that forms a dsRNA duplex (i.e., a hairpin), a sequence that targets the RNA to a subcellular location (e.g., nucleus, mitochondria, chloroplasts, and the like), a modification or sequence that provides for tracking (e.g., direct conjugation to a fluorescent molecule, conjugation to a moiety that facilitates fluorescent detection, a sequence that allows for fluorescent detection, etc.), and/or a modification or sequence that provides a binding site for proteins (e.g., proteins that act on DNA, including transcriptional activators, transcriptional repressors, DNA methyltransferases, DNA demethylases, histone acetyltransferases, histone deacetylases, and the like).

[0304] Spacer Sequence

[0305] The spacer sequence hybridizes to a sequence in a target nucleic acid of interest. The spacer of a genome-targeting nucleic acid interacts with a target nucleic acid in a sequence-specific manner via hybridization (i.e., base pairing). The nucleotide sequence of the spacer thus varies depending on the sequence of the target nucleic acid of interest.

[0306] In a CRISPR/Cas system herein, the spacer sequence is designed to hybridize to a target nucleic acid that is located 5′ of a PAM of the Cas9 enzyme used in the system. The spacer may perfectly match the target sequence or may have mismatches. Each Cas9 enzyme has a particular PAM sequence that it recognizes in a target DNA. For example, S. pyogenes recognizes in a target nucleic acid a PAM that comprises the sequence 5′-NRG-3′, where R comprises either A or G, where N is any nucleotide and N is immediately 3′ of the target nucleic acid sequence targeted by the spacer sequence.

[0307] In some embodiments, the target nucleic acid sequence comprises 20 nucleotides. In some embodiments, the target nucleic acid comprises less than 20 nucleotides. In some embodiments, the target nucleic acid comprises more than 20 nucleotides. In some embodiments, the target nucleic acid comprises at least: 5, 10, 15, 16, 17, 18, 19, 20, 21, 22, 23, 24, 25, 30 or more nucleotides. In some embodiments, the target nucleic acid comprises at most: 5, 10, 15, 16, 17, 18, 19, 20, 21, 22, 23, 24, 25, 30 or more nucleotides. In some embodiments, the target nucleic acid sequence comprises 20 bases immediately 5′ of the first nucleotide of the PAM. For example, in a sequence comprising 5′-NNNNNNNNNNNNNNNNNNNNNRG-3′ (SEQ ID NO: 54,860), the target nucleic acid comprises the sequence that corresponds to the Ns, wherein N is any nucleotide, and the underlined NRG sequence is the S. pyogenes PAM.

[0308] In some embodiments, the spacer sequence that hybridizes to the target nucleic acid has a length of at least about 6 nucleotides (nt). The spacer sequence can be at least about 6 nt, at least about 10 nt, at least about 15 nt, at least about 18 nt, at least about 19 nt, at least about 20 nt, at least about 25 nt, at least about 30 nt, at least about 35 nt or at least about 40 nt, from about 6 nt to about 80 nt, from about 6 nt to about 50 nt, from about 6 nt to about 45 nt, from about 6 nt to about 40 nt, from about 6 nt to about 35 nt, from about 6 nt to about 30 nt, from about 6 nt to about 25 nt, from about 6 nt to about 20 nt, from about 6 nt to about 19 nt, from about 10 nt to about 50 nt, from about 10 nt to about 45 nt, from about 10 nt to about 40 nt, from about 10 nt to about 35 nt, from about 10 nt to about 30 nt, from about 10 nt to about 25 nt, from about 10 nt to about 20 nt, from about 10 nt to about 19 nt, from about 19 nt to about 25 nt, from about 19 nt to about 30 nt, from about 19 nt to about 35 nt, from about 19 nt to about 40 nt, from about 19 nt to about 45 nt, from about 19 nt to about 50 nt, from about 19 nt to about 60 nt, from about 20 nt to about 25 nt, from about 20 nt to about 30 nt, from about 20 nt to about 35 nt, from about 20 nt to about 40 nt, from about 20 nt to about 45 nt, from about 20 nt to about 50 nt, or from about 20 nt to about 60 nt. In some embodiments, the spacer sequence comprises 20 nucleotides. In some embodiments, the spacer comprises 19 nucleotides.

[0309] In some embodiments, the percent complementarity between the spacer sequence and the target nucleic acid is at least about 30%, at least about 40%, at least about 50%, at least about 60%, at least about 65%, at least about 70%, at least about 75%, at least about 80%, at least about 85%, at least about 90%, at least about 95%, at least about 97%, at least about 98%, at least about 99%, or 100%. In some embodiments, the percent complementarity between the spacer sequence and the target nucleic acid is at most about 30%, at most about 40%, at most about 50%, at most about 60%, at most about 65%, at most about 70%, at most about 75%, at most about 80%, at most about 85%, at most about 90%, at most about 95%, at most about 97%, at most about 98%, at most about 99%, or 100%. In some embodiments, the percent complementarity between the spacer sequence and the target nucleic acid is 100% over the six contiguous 5′-most nucleotides of the target sequence of the complementary strand of the target nucleic acid. In some embodiments, the percent complementarity between the spacer sequence and the target nucleic acid is at least 60% over about 20 contiguous nucleotides. In some embodiments, the length of the spacer sequence and the target nucleic acid differs by 1 to 6 nucleotides, which may be thought of as a bulge or bulges.

[0310] In some embodiments, the spacer sequence is designed or chosen using a computer program. The computer program can use variables, such as predicted melting temperature, secondary structure formation, predicted annealing temperature, sequence identity, genomic context, chromatin accessibility, % GC, frequency of genomic occurrence (e.g., of sequences that are identical or are similar but vary in one or more spots as a result of mismatch, insertion or deletion), methylation status, presence of SNPs, and the like.

[0311] Minimum CRISPR Repeat Sequence

[0312] In some embodiments, a minimum CRISPR repeat sequence is a sequence with at least about 30%, about 40%, about 50%, about 60%, about 65%, about 70%, about 75%, about 80%, about 85%, about 90%, about 95%, or 100% sequence identity to a reference CRISPR repeat sequence (e.g., crRNA from S. pyogenes).

[0313] A minimum CRISPR repeat sequence comprises nucleotides that can hybridize to a minimum tracrRNA sequence in a cell. The minimum CRISPR repeat sequence and a minimum tracrRNA sequence form a duplex, i.e. a base-paired double-stranded structure. Together, the minimum CRISPR repeat sequence and the minimum tracrRNA sequence bind to the site-directed polypeptide. At least a part of the minimum CRISPR repeat sequence hybridizes to the minimum tracrRNA sequence. In some embodiments, at least a part of the minimum CRISPR repeat sequence comprises at least about 30%, about 40%, about 50%, about 60%, about 65%, about 70%, about 75%, about 80%, about 85%, about 90%, about 95%, or 100% complementary to the minimum tracrRNA sequence. In some embodiments, at least a part of the minimum CRISPR repeat sequence comprises at most about 30%, about 40%, about 50%, about 60%, about 65%, about 70%, about 75%, about 80%, about 85%, about 90%, about 95%, or 100% complementary to the minimum tracrRNA sequence.

[0314] The minimum CRISPR repeat sequence can have a length from about 7 nucleotides to about 100 nucleotides. For example, the length of the minimum CRISPR repeat sequence is from about 7 nucleotides (nt) to about 50 nt, from about 7 nt to about 40 nt, from about 7 nt to about 30 nt, from about 7 nt to about 25 nt, from about 7 nt to about 20 nt, from about 7 nt to about 15 nt, from about 8 nt to about 40 nt, from about 8 nt to about 30 nt, from about 8 nt to about 25 nt, from about 8 nt to about 20 nt, from about 8 nt to about 15 nt, from about 15 nt to about 100 nt, from about 15 nt to about 80 nt, from about 15 nt to about 50 nt, from about 15 nt to about 40 nt, from about 15 nt to about 30 nt, or from about 15 nt to about 25 nt. In some embodiments, the minimum CRISPR repeat sequence is approximately 9 nucleotides in length. In some embodiments, the minimum CRISPR repeat sequence is approximately 12 nucleotides in length.

[0315] In some embodiments, the minimum CRISPR repeat sequence is at least about 60% identical to a reference minimum CRISPR repeat sequence (e.g., wild-type crRNA from S. pyogenes) over a stretch of at least 6, 7, or 8 contiguous nucleotides. For example, the minimum CRISPR repeat sequence is at least about 65% identical, at least about 70% identical, at least about 75% identical, at least about 80% identical, at least about 85% identical, at least about 90% identical, at least about 95% identical, at least about 98% identical, at least about 99% identical or 100% identical to a reference minimum CRISPR repeat sequence over a stretch of at least 6, 7, or 8 contiguous nucleotides.

[0316] Minimum tracrRNA Sequence

[0317] In some embodiments, a minimum tracrRNA sequence is a sequence with at least about 30%, about 40%, about 50%, about 60%, about 65%, about 70%, about 75%, about 80%, about 85%, about 90%, about 95%, or 100% sequence identity to a reference tracrRNA sequence (e.g., wild type tracrRNA from S. pyogenes).

[0318] A minimum tracrRNA sequence comprises nucleotides that hybridize to a minimum CRISPR repeat sequence in a cell. A minimum tracrRNA sequence and a minimum CRISPR repeat sequence form a duplex, i.e. a base-paired double-stranded structure. Together, the minimum tracrRNA sequence and the minimum CRISPR repeat bind to a site-directed polypeptide. At least a part of the minimum tracrRNA sequence can hybridize to the minimum CRISPR repeat sequence. In some embodiments, the minimum tracrRNA sequence is at least about 30%, about 40%, about 50%, about 60%, about 65%, about 70%, about 75%, about 80%, about 85%, about 90%, about 95%, or 100% complementary to the minimum CRISPR repeat sequence.

[0319] The minimum tracrRNA sequence can have a length from about 7 nucleotides to about 100 nucleotides. For example, the minimum tracrRNA sequence can be from about 7 nucleotides (nt) to about 50 nt, from about 7 nt to about 40 nt, from about 7 nt to about 30 nt, from about 7 nt to about 25 nt, from about 7 nt to about 20 nt, from about 7 nt to about 15 nt, from about 8 nt to about 40 nt, from about 8 nt to about 30 nt, from about 8 nt to about 25 nt, from about 8 nt to about 20 nt, from about 8 nt to about 15 nt, from about 15 nt to about 100 nt, from about 15 nt to about 80 nt, from about 15 nt to about 50 nt, from about 15 nt to about 40 nt, from about 15 nt to about 30 nt or from about 15 nt to about 25 nt long. In some embodiments, the minimum tracrRNA sequence is approximately 9 nucleotides in length. In some embodiments, the minimum tracrRNA sequence is approximately 12 nucleotides. In some embodiments, the minimum tracrRNA consists of tracrRNA nt 23-48 described in Jinek et al., supra.

[0320] In some embodiments, the minimum tracrRNA sequence is at least about 60% identical to a reference minimum tracrRNA (e.g., wild type, tracrRNA from S. pyogenes) sequence over a stretch of at least 6, 7, or 8 contiguous nucleotides. For example, the minimum tracrRNA sequence is at least about 65% identical, about 70% identical, about 75% identical, about 80% identical, about 85% identical, about 90% identical, about 95% identical, about 98% identical, about 99% identical or 100% identical to a reference minimum tracrRNA sequence over a stretch of at least 6, 7, or 8 contiguous nucleotides.

[0321] In some embodiments, the duplex between the minimum CRISPR RNA and the minimum tracrRNA comprises a double helix. In some embodiments, the duplex between the minimum CRISPR RNA and the minimum tracrRNA comprises at least about 1, 2, 3, 4, 5, 6, 7, 8, 9, or 10 or more nucleotides. In some embodiments, the duplex between the minimum CRISPR RNA and the minimum tracrRNA comprises at most about 1, 2, 3, 4, 5, 6, 7, 8, 9, or 10 or more nucleotides.

[0322] In some embodiments, the duplex comprises a mismatch (i.e., the two strands of the duplex are not 100% complementary). In some embodiments, the duplex comprises at least about 1, 2, 3, 4, or 5 or mismatches. In some embodiments, the duplex comprises at most about 1, 2, 3, 4, or 5 or mismatches. In some embodiments, the duplex comprises no more than 2 mismatches.

[0323] Bulges

[0324] In some embodiments, there is a “bulge” in the duplex between the minimum CRISPR RNA and the minimum tracrRNA. A bulge is an unpaired region of nucleotides within the duplex. In some embodiments, the bulge contributes to the binding of the duplex to the site-directed polypeptide. In some embodiments, the bulge comprises, on one side of the duplex, an unpaired 5′XXXY-3′ where X is any purine and Y comprises a nucleotide that can form a wobble pair with a nucleotide on the opposite strand, and an unpaired nucleotide region on the other side of the duplex. The number of unpaired nucleotides on the two sides of the duplex can be different.

[0325] In some embodiments, the bulge comprises an unpaired purine (e.g., adenine) on the minimum CRISPR repeat strand of the bulge. In some embodiments, the bulge comprises an unpaired 5′-AAGY-3′ of the minimum tracrRNA sequence strand of the bulge, where Y comprises a nucleotide that can form a wobble pairing with a nucleotide on the minimum CRISPR repeat strand.

[0326] In some embodiments, a bulge on the minimum CRISPR repeat side of the duplex comprises at least 1, 2, 3, 4, or 5 or more unpaired nucleotides. In some embodiments, a bulge on the minimum CRISPR repeat side of the duplex comprises at most 1, 2, 3, 4, or 5 or more unpaired nucleotides. In some embodiments, a bulge on the minimum CRISPR repeat side of the duplex comprises 1 unpaired nucleotide.

[0327] In some embodiments, a bulge on the minimum tracrRNA sequence side of the duplex comprises at least 1, 2, 3, 4, 5, 6, 7, 8, 9, or 10 or more unpaired nucleotides. In some embodiments, a bulge on the minimum tracrRNA sequence side of the duplex comprises at most 1, 2, 3, 4, 5, 6, 7, 8, 9, or 10 or more unpaired nucleotides. In some embodiments, a bulge on a second side of the duplex (e.g., the minimum tracrRNA sequence side of the duplex) comprises 4 unpaired nucleotides.

[0328] In some embodiments, a bulge comprises at least one wobble pairing. In some embodiments, a bulge comprises at most one wobble pairing. In some embodiments, a bulge comprises at least one purine nucleotide. In some embodiments, a bulge comprises at least 3 purine nucleotides. In some embodiments, a bulge sequence comprises at least 5 purine nucleotides. In some embodiments, a bulge sequence comprises at least one guanine nucleotide. In some embodiments, a bulge sequence comprises at least one adenine nucleotide.

[0329] Hairpins

[0330] In various embodiments, one or more hairpins are located 3′ to the minimum tracrRNA in the 3′ tracrRNA sequence.

[0331] In some embodiments, the hairpin starts at least about 1, 2, 3, 4, 5, 6, 7, 8, 9, 10, 15, or 20 or more nucleotides 3′ from the last paired nucleotide in the minimum CRISPR repeat and minimum tracrRNA sequence duplex. In some embodiments, the hairpin starts at most about 1, 2, 3, 4, 5, 6, 7, 8, 9 or 10 or more nucleotides 3′ of the last paired nucleotide in the minimum CRISPR repeat and minimum tracrRNA sequence duplex.

[0332] In some embodiments, the hairpin comprises at least about 1, 2, 3, 4, 5, 6, 7, 8, 9, 10, 15, or 20 or more consecutive nucleotides. In some embodiments, the hairpin comprises at most about 1, 2, 3, 4, 5, 6, 7, 8, 9, 10, 15, or more consecutive nucleotides.

[0333] In some embodiments, the hairpin comprises a CC dinucleotide (i.e., two consecutive cytosine nucleotides).

[0334] In some embodiments, the hairpin comprises duplexed nucleotides (e.g., nucleotides in a hairpin, hybridized together). For example, a hairpin comprises a CC dinucleotide that is hybridized to a GG dinucleotide in a hairpin duplex of the 3′ tracrRNA sequence.

[0335] One or more of the hairpins can interact with guide RNA-interacting regions of a site-directed polypeptide.

[0336] In some embodiments, there are two or more hairpins, and in other embodiments there are three or more hairpins.

[0337] 3′ tracrRNA Sequence

[0338] In some embodiments, a 3′ tracrRNA sequence comprises a sequence with at least about 30%, about 40%, about 50%, about 60%, about 65%, about 70%, about 75%, about 80%, about 85%, about 90%, about 95%, or 100% sequence identity to a reference tracrRNA sequence (e.g., a tracrRNA from S. pyogenes).

[0339] The 3′ tracrRNA sequence has a length from about 6 nucleotides to about 100 nucleotides. For example, the 3′ tracrRNA sequence can have a length from about 6 nucleotides (nt) to about 50 nt, from about 6 nt to about 40 nt, from about 6 nt to about 30 nt, from about 6 nt to about 25 nt, from about 6 nt to about 20 nt, from about 6 nt to about 15 nt, from about 8 nt to about 40 nt, from about 8 nt to about 30 nt, from about 8 nt to about 25 nt, from about 8 nt to about 20 nt, from about 8 nt to about 15 nt, from about 15 nt to about 100 nt, from about 15 nt to about 80 nt, from about 15 nt to about 50 nt, from about 15 nt to about 40 nt, from about 15 nt to about 30 nt, or from about 15 nt to about 25 nt. In some embodiments, the 3′ tracrRNA sequence has a length of approximately 14 nucleotides.

[0340] In some embodiments, the 3′ tracrRNA sequence is at least about 60% identical to a reference 3′ tracrRNA sequence (e.g., wild type 3′ tracrRNA sequence from S. pyogenes) over a stretch of at least 6, 7, or 8 contiguous nucleotides. For example, the 3′ tracrRNA sequence is at least about 60% identical, about 65% identical, about 70% identical, about 75% identical, about 80% identical, about 85% identical, about 90% identical, about 95% identical, about 98% identical, about 99% identical, or 100% identical, to a reference 3′ tracrRNA sequence (e.g., wild type 3′ tracrRNA sequence from S. pyogenes) over a stretch of at least 6, 7, or 8 contiguous nucleotides.

[0341] In some embodiments, the 3′ tracrRNA sequence comprises more than one duplexed region (e.g., hairpin, hybridized region). In some embodiments, the 3′ tracrRNA sequence comprises two duplexed regions.

[0342] In some embodiments, the 3′ tracrRNA sequence comprises a stem loop structure. In some embodiments, the stem loop structure in the 3′ tracrRNA comprises at least 1, 2, 3, 4, 5, 6, 7, 8, 9, 10, 15 or 20 or more nucleotides. In some embodiments, the stem loop structure in the 3′ tracrRNA comprises at most 1, 2, 3, 4, 5, 6, 7, 8, 9 or 10 or more nucleotides. In some embodiments, the stem loop structure comprises a functional moiety. For example, the stem loop structure may comprise an aptamer, a ribozyme, a protein-interacting hairpin, a CRISPR array, an intron, or an exon. In some embodiments, the stem loop structure comprises at least about 1, 2, 3, 4, or 5 or more functional moieties. In some embodiments, the stem loop structure comprises at most about 1, 2, 3, 4, or 5 or more functional moieties.

[0343] In some embodiments, the hairpin in the 3′ tracrRNA sequence comprises a P-domain. In some embodiments, the P-domain comprises a double-stranded region in the hairpin.

[0344] tracrRNA Extension Sequence

[0345] In some embodiments, a tracrRNA extension sequence is provided whether the tracrRNA is in the context of single-molecule guides or double-molecule guides. In some embodiments, the tracrRNA extension sequence has a length from about 1 nucleotide to about 400 nucleotides. In some embodiments, the tracrRNA extension sequence has a length of more than 1, 5, 10, 15, 20, 25, 30, 35, 40, 45, 50, 60, 70, 80, 90, 100, 120, 140, 160, 180, 200, 220, 240, 260, 280, 300, 320, 340, 360, 380, or 400 nucleotides. In some embodiments, the tracrRNA extension sequence has a length from about 20 to about 5000 or more nucleotides. In some embodiments, the tracrRNA extension sequence has a length of more than 1000 nucleotides. In some embodiments, the tracrRNA extension sequence has a length of less than 1, 5, 10, 15, 20, 25, 30, 35, 40, 45, 50, 60, 70, 80, 90, 100, 120, 140, 160, 180, 200, 220, 240, 260, 280, 300, 320, 340, 360, 380, 400 or more nucleotides. In some embodiments, the tracrRNA extension sequence has a length of less than 1000 nucleotides. In some embodiments, the tracrRNA extension sequence comprises less than 10 nucleotides in length. In some embodiments, the tracrRNA extension sequence is 10-30 nucleotides in length. In some embodiments, the tracrRNA extension sequence is 30-70 nucleotides in length.

[0346] In some embodiments, the tracrRNA extension sequence comprises a functional moiety (e.g., a stability control sequence, ribozyme, endoribonuclease binding sequence). In some embodiments, the functional moiety comprises a transcriptional terminator segment (i.e., a transcription termination sequence). In some embodiments, the functional moiety has a total length from about 10 nucleotides (nt) to about 100 nucleotides, from about 10 nt to about 20 nt, from about 20 nt to about 30 nt, from about 30 nt to about 40 nt, from about 40 nt to about 50 nt, from about 50 nt to about 60 nt, from about 60 nt to about 70 nt, from about 70 nt to about 80 nt, from about 80 nt to about 90 nt, or from about 90 nt to about 100 nt, from about 15 nt to about 80 nt, from about 15 nt to about 50 nt, from about 15 nt to about 40 nt, from about 15 nt to about 30 nt, or from about 15 nt to about 25 nt. In some embodiments, the functional moiety functions in a eukaryotic cell. In some embodiments, the functional moiety functions in a prokaryotic cell. In some embodiments, the functional moiety functions in both eukaryotic and prokaryotic cells.

[0347] Non-limiting examples of suitable tracrRNA extension functional moieties include a 3′ poly-adenylated tail, a riboswitch sequence (e.g., to allow for regulated stability and/or regulated accessibility by proteins and protein complexes), a sequence that forms a dsRNA duplex (i.e., a hairpin), a sequence that targets the RNA to a subcellular location (e.g., nucleus, mitochondria, chloroplasts, and the like), a modification or sequence that provides for tracking (e.g., direct conjugation to a fluorescent molecule, conjugation to a moiety that facilitates fluorescent detection, a sequence that allows for fluorescent detection, etc.), and/or a modification or sequence that provides a binding site for proteins (e.g., proteins that act on DNA, including transcriptional activators, transcriptional repressors, DNA methyltransferases, DNA demethylases, histone acetyltransferases, histone deacetylases, and the like). In some embodiments, the tracrRNA extension sequence comprises a primer binding site or a molecular index (e.g., barcode sequence). In some embodiments, the tracrRNA extension sequence comprises one or more affinity tags.

[0348] Single-Molecule Guide Linker Sequence

[0349] In some embodiments, the linker sequence of a single-molecule guide nucleic acid has a length from about 3 nucleotides to about 100 nucleotides. In Jinek et al., supra, for example, a simple 4 nucleotide “tetraloop” (-GAAA-) was used, Science, 337(6096):816-821 (2012). An illustrative linker has a length from about 3 nucleotides (nt) to about 90 nt, from about 3 nt to about 80 nt, from about 3 nt to about 70 nt, from about 3 nt to about 60 nt, from about 3 nt to about 50 nt, from about 3 nt to about 40 nt, from about 3 nt to about 30 nt, from about 3 nt to about 20 nt, from about 3 nt to about 10 nt. For example, the linker can have a length from about 3 nt to about 5 nt, from about 5 nt to about 10 nt, from about 10 nt to about 15 nt, from about 15 nt to about 20 nt, from about 20 nt to about 25 nt, from about 25 nt to about 30 nt, from about 30 nt to about 35 nt, from about 35 nt to about 40 nt, from about 40 nt to about 50 nt, from about 50 nt to about 60 nt, from about 60 nt to about 70 nt, from about 70 nt to about 80 nt, from about 80 nt to about 90 nt, or from about 90 nt to about 100 nt. In some embodiments, the linker of a single-molecule guide nucleic acid is between 4 and 40 nucleotides. In some embodiments, the linker is at least about 100, 500, 1000, 1500, 2000, 2500, 3000, 3500, 4000, 4500, 5000, 5500, 6000, 6500, or 7000 or more nucleotides. In some embodiments, the linker is at most about 100, 500, 1000, 1500, 2000, 2500, 3000, 3500, 4000, 4500, 5000, 5500, 6000, 6500, or 7000 or more nucleotides.

[0350] Linkers comprise any of a variety of sequences, although in some examples the linker will not comprise sequences that have extensive regions of homology with other portions of the guide RNA, which might cause intramolecular binding that could interfere with other functional regions of the guide. In Jinek et al., supra, a simple 4 nucleotide sequence -GAAA- was used, Science, 337(6096):816-821 (2012), but numerous other sequences, including longer sequences can likewise be used.

[0351] In some embodiments, the linker sequence comprises a functional moiety. For example, the linker sequence may comprise one or more features, including an aptamer, a ribozyme, a protein-interacting hairpin, a protein binding site, a CRISPR array, an intron, or an exon. In some embodiments, the linker sequence comprises at least about 1, 2, 3, 4, or 5 or more functional moieties. In some embodiments, the linker sequence comprises at most about 1, 2, 3, 4, or 5 or more functional moieties.

[0352] Genome Engineering Strategies to Correct Cells by Deletion, Insertion, Correction, or Replacement of One or More Mutations or Exons Within or Near the IL7R Gene, or by Knocking-in IL7R cDNA or Minigene Into the Locus of the Corresponding IL7R Gene or Safe Harbor Site

[0353] The methods of the present disclosure can involve correction of one or both of the mutant alleles. Gene editing to correct the mutation has the advantage of restoration of correct expression levels and temporal control. Sequencing the patient's IL7R alleles allows for design of the gene editing strategy to best correct the identified mutation(s).

[0354] In some embodiments, a step of the ex vivo methods of the present disclosure comprises editing/correcting the patient specific iPSC cells using genome engineering. Alternatively, a step of the ex vivo methods of the present disclosure comprises editing/correcting the white blood cell, mesenchymal stem cell, or hematopoietic progenitor cell, including, by way of non-limiting example, a hematopoietic stem cell. Likewise, a step of the in vivo methods of the present disclosure comprises editing/correcting the cells in a SCID or Omenn Syndrome patient using genome engineering. Similarly, a step in the cellular methods of the present disclosure comprises editing/correcting the IL7R gene in a human cell by genome engineering.

[0355] SCID and/or Omenn Syndrome patients exhibit one or more mutations in the IL7R gene. Any CRISPR endonuclease may be used in the methods of the present disclosure, each CRISPR endonuclease having its own associated PAM, which may or may not be disease specific. For example, gRNA spacer sequences for targeting the IL7R gene with a CRISPR/Cas9 endonuclease from S. pyogenes have been identified in SEQ ID NOs: 54,862-57,013. gRNA spacer sequences for targeting the IL7R gene with a CRISPR/Cas9 endonuclease from S. aureus have been identified in SEQ ID NOs: 57,014-57,712. gRNA spacer sequences for targeting the IL7R gene with a CRISPR/Cas9 endonuclease from S. thermophilus have been identified in SEQ ID NOs: 57,713-57,984. gRNA spacer sequences for targeting the IL7R gene with a CRISPR/Cas9 endonuclease from T. denticola have been identified in SEQ ID NOs: 57,985-58,076. gRNA spacer sequences for targeting the IL7R gene with a CRISPR/Cas9 endonuclease from N. meningitides have been identified in SEQ ID NOs: 58,077-58,708. gRNA spacer sequences for targeting the IL7R gene with a CRISPR/Cpf1 endonuclease from Acidominococcus, Lachnospiraceae, and a Francisella novicida have been identified in SEQ ID NOs: 58,709-63,375. gRNA spacer sequences for targeting, e.g., targeting exon 1-2 of AAVS1 (PPP1R12C), ALB, Angptl3, ApoC3, ASGR2, CCR5, FIX (F9), G6PC, Gys2, HGD, Lp(a), Pcsk9, Serpina1, TF, and TTR with a CRISPR/Cas9 endonuclease from S. pyogenes have been identified in Example 7. gRNA spacer sequences for targeting, e.g., targeting exon 1-2 of, AAVS1 (PPP1R12C), ALB, Angptl3, ApoC3, ASGR2, CCR5, FIX (F9), G6PC, Gys2, HGD, Lp(a), Pcsk9, Serpina1, TF, and TTR with a CRISPR/Cas9 endonuclease from S. aureus have been identified in Example 8. gRNA spacer sequences for targeting, e.g., targeting exon 1-2 of, AAVS1 (PPP1R12C), ALB, Angptl3, ApoC3, ASGR2, CCR5, FIX (F9), G6PC, Gys2, HGD, Lp(a), Pcsk9, Serpina1, TF, and TTR with a CRISPR/Cas9 endonuclease from S. thermophilus have been identified in Example 9. gRNA spacer sequences for targeting, e.g., targeting exon 1-2 of, AAVS1 (PPP1R12C), ALB, Angptl3, ApoC3, ASGR2, CCR5, FIX (F9), G6PC, Gys2, HGD, Lp(a), Pcsk9, Serpina1, TF, and TTR with a CRISPR/Cas9 endonuclease from T. denticola have been identified in Example 10. gRNA spacer sequences for targeting, e.g., targeting exon 1-2 of, AAVS1 (PPP1R12C), ALB, Angptl3, ApoC3, ASGR2, CCR5, FIX (F9), G6PC, Gys2, HGD, Lp(a), Pcsk9, Serpina1, TF, and TTR with a CRISPR/Cas9 endonuclease from N. meningitides have been identified in Example 11. gRNA spacer sequences for targeting, e.g., targeting exon 1-2 of, AAVS1 (PPP1R12C), ALB, Angptl3, ApoC3, ASGR2, CCR5, FIX (F9), G6PC, Gys2, HGD, Lp(a), Pcsk9, Serpina1, TF, and TTR with a CRISPR/Cas9 endonuclease from Acidominococcus, Lachnospiraceae, and Francisella novicida have been identified in Example 12.

[0356] For example, the mutation can be corrected by the insertions or deletions that arise due to the imprecise NHEJ repair pathway. If the patient's IL7R gene has an inserted or deleted base, a targeted cleavage can result in a NHEJ-mediated insertion or deletion that restores the frame. Missense mutations can also be corrected through NHEJ-mediated correction using one or more guide RNA. The ability or likelihood of the cut(s) to correct the mutation may be designed or evaluated based on the local sequence and micro-homologies. NHEJ can also be used to delete segments of the gene, either directly or by altering splice donor or acceptor sites through cleavage by one gRNA targeting several locations, or several gRNAs. This may be useful if an amino acid, domain or exon contains the mutations and can be removed or inverted, or if the deletion otherwise restored function to the protein. Pairs of guide strands have been used for deletions and corrections of inversions. NHEJ can also be used to promote targeted transgene integration at the cleaved locus, especially if the transgene donor template has been cleaved within the cell as well.

[0357] Alternatively, the donor for correction by HDR contains the corrected sequence with small or large flanking homology arms to allow for annealing. HDR is essentially an error-free mechanism that uses a supplied homologous DNA sequence as a template during DSB repair. The rate of homology directed repair (HDR) is a function of the distance between the mutation and the cut site so choosing overlapping or nearest target sites is important. Templates can include extra sequences flanked by the homologous regions or can contain a sequence that differs from the genomic sequence, thus allowing sequence editing.

[0358] In addition to correcting mutations by NHEJ or HDR, a range of other options are possible. If there are small or large deletions or multiple mutations, a cDNA can be knocked in that contains the exons affected. A full length cDNA can be knocked into any “safe harbor”, but must use a supplied or other promoter. If this construct is knocked into the correct location, it will have physiological control, similar to the normal gene. Pairs of nucleases can be used to delete mutated gene regions, though a donor would usually have to be provided to restore function. In this case two gRNA would be supplied and one donor sequence.

[0359] Some genome engineering strategies involve correction of one or more mutations in or near the IL7R gene, or deleting the mutant IL7R DNA and/or knocking-in IL7R cDNA or a minigene (comprised of one or more exons and introns or natural or synthetic introns) and/or knocking-in a cDNA interrupted by some or all IL7R introns into the locus of the corresponding gene or a safe harbor locus These strategies restore the IL7R gene and completely reverse, treat, and/or mitigate the diseased state. These strategies may require a more custom approach based on the location of the patient's mutation(s). Donor nucleotides for correcting mutations are small (<300 bp). This is advantageous, as HDR efficiencies may be inversely related to the size of the donor molecule. Also, it is expected that the donor templates can fit into size constrained viral vector molecules, e.g., adeno-associated virus (AAV) molecules, which have been shown to be an effective means of donor template delivery. Also, it is expected that the donor templates can fit into other size constrained molecules, including, by way of non-limiting example, platelets and/or exosomes or other microvesicles.

[0360] Homology direct repair is a cellular mechanism for repairing double-stranded breaks (DSBs). The most common form is homologous recombination. There are additional pathways for HDR, including single-strand annealing and alternative-HDR. Genome engineering tools allow researchers to manipulate the cellular homologous recombination pathways to create site-specific modifications to the genome. It has been found that cells can repair a double-stranded break using a synthetic donor molecule provided in trans. Therefore, by introducing a double-stranded break near a specific mutation and providing a suitable donor, targeted changes can be made in the genome. Specific cleavage increases the rate of HDR more than 1,000 fold above the rate of 1 in 10⁶ cells receiving a homologous donor alone. The rate of homology directed repair (HDR) at a particular nucleotide is a function of the distance to the cut site, so choosing overlapping or nearest target sites is important. Gene editing offers the advantage over gene addition, as correcting in situ leaves the rest of the genome unperturbed.

[0361] Supplied donors for editing by HDR vary markedly but generally contain the intended sequence with small or large flanking homology arms to allow annealing to the genomic DNA. The homology regions flanking the introduced genetic changes can be 30 bp or smaller, or as large as a multi-kilobase cassette that can contain promoters, cDNAs, etc. Both single-stranded and double-stranded oligonucleotide donors have been used. These oligonucleotides range in size from less than 100 nt to over many kb, though longer ssDNA can also be generated and used. Double-stranded donors are often used, including PCR amplicons, plasmids, and mini-circles. In general, it has been found that an AAV vector is a very effective means of delivery of a donor template, though the packaging limits for individual donors is <5 kb. Active transcription of the donor increased HDR three-fold, indicating the inclusion of promoter may increase conversion. Conversely, CpG methylation of the donor decreased gene expression and HDR.

[0362] In addition to wildtype endonucleases, such as Cas9, nickase variants exist that have one or the other nuclease domain inactivated resulting in cutting of only one DNA strand. HDR can be directed from individual Cas nickases or using pairs of nickases that flank the target area. Donors can be single-stranded, nicked, or dsDNA.

[0363] The donor DNA can be supplied with the nuclease or independently by a variety of different methods, for example by transfection, nano-particle, micro-injection, or viral transduction. A range of tethering options has been proposed to increase the availability of the donors for HDR. Examples include attaching the donor to the nuclease, attaching to DNA binding proteins that bind nearby, or attaching to proteins that are involved in DNA end binding or repair.

[0364] The repair pathway choice can be guided by a number of culture conditions, such as those that influence cell cycling, or by targeting of DNA repair and associated proteins. For example, to increase HDR, key NHEJ molecules can be suppressed, such as KU70, KU80 or DNA ligase IV.

[0365] Without a donor present, the ends from a DNA break or ends from different breaks can be joined using the several nonhomologous repair pathways in which the DNA ends are joined with little or no base-pairing at the junction. In addition to canonical NHEJ, there are similar repair mechanisms, such as alt-NHEJ. If there are two breaks, the intervening segment can be deleted or inverted. NHEJ repair pathways can lead to insertions, deletions or mutations at the joints.

[0366] NHEJ was used to insert a gene expression cassette into a defined locus in human cell lines after nuclease cleavage of both the chromosome and the donor molecule. (Cristea, et al., Biotechnology and Bioengineering 110:871-880 (2012); Maresca, M., Lin, V. G., Guo, N. & Yang, Y., Genome Res 23, 539-546 (2013)).

[0367] In addition to genome editing by NHEJ or HDR, site-specific gene insertions have been conducted that use both the NHEJ pathway and HR. A combination approach may be applicable in certain settings, possibly including intron/exon borders. NHEJ may prove effective for ligation in the intron, while the error-free HDR may be better suited in the coding region.

[0368] The IL7R gene contains 8 exons. Any one or more of the 8 exons or nearby introns may be repaired in order to correct a mutation and restore IL7R protein activity. Alternatively, there are various mutations associated with SCID and/or Omenn Syndrome, which are a combination of insertions, deletions, missense, nonsense, frameshift and other mutations, with the common effect of inactivating IL7R. Any one or more of the mutations may be repaired in order to restore the inactive IL7R. As a further alternative, IL7R cDNA or minigene (comprised of, natural or synthetic enhancer and promoter, one or more exons, and natural or synthetic introns, and natural or synthetic 3′UTR and polyadenylation signal) may be knocked-in to the locus of the corresponding gene or knocked-in to a safe harbor site, such as AAVS1 (PPP1R12C), ALB, Angptl3, ApoC3, ASGR2, CCR5, FIX (F9), G6PC, Gys2, HGD, Lp(a), Pcsk9, Serpina1, TF, and/or TTR. The safe harbor locus can be selected from the group consisting of: exon 1-2 of AAVS1 (PPP1R12C), exon 1-2 of ALB, exon 1-2 of Angptl3, exon 1-2 of ApoC3, exon 1-2 of ASGR2, exon 1-2 of CCR5, exon 1-2 of FIX (F9), exon 1-2 of G6PC, exon 1-2 of Gys2, exon 1-2 of HGD, exon 1-2 of Lp(a), exon 1-2 of Pcsk9, exon 1-2 of Serpina1, exon 1-2 of TF, and exon 1-2 of TTR. In some embodiments, the methods can provide one gRNA or a pair of gRNAs that can be used to facilitate incorporation of a new sequence from a polynucleotide donor template to correct one or more mutations or to knock-in a part of or the entire IL7R gene or cDNA.

[0369] Some embodiments of the methods provide gRNA pairs that make a deletion by cutting the gene twice, one gRNA cutting at the 5′ end of one or more mutations and the other gRNA cutting at the 3′ end of one or more mutations that facilitates insertion of a new sequence from a polynucleotide donor template to replace the one or more mutations, or deletion may exclude mutant amino acids or amino acids adjacent to it (e.g., premature stop codon) and lead to expression of a functional protein, or restore an open reading frame. The cutting may be accomplished by a pair of DNA endonucleases that each makes a DSB in the genome, or by multiple nickases that together make a DSB in the genome.

[0370] Alternatively, some embodiments of the methods provide one gRNA to make one double-strand cut around one or more mutations that facilitates insertion of a new sequence from a polynucleotide donor template to replace the one or more mutations. The double-strand cut may be made by a single DNA endonuclease or multiple nickases that together make a DSB in the genome, or single gRNA may lead to deletion (MMEJ), which may exclude mutant amino acid (e.g., premature stop codon) and lead to expression of a functional protein, or restore an open reading frame.

[0371] Illustrative modifications within the IL7R gene include replacements within or near (proximal) to the mutations referred to above, such as within the region of less than 3 kb, less than 2kb, less than 1 kb, less than 0.5 kb upstream or downstream of the specific mutation. Given the relatively wide variations of mutations in the IL7R gene, it will be appreciated that numerous variations of the replacements referenced above (including without limitation larger as well as smaller deletions), would be expected to result in restoration of the IL7R gene.

[0372] Such variants include replacements that are larger in the 5′ and/or 3′ direction than the specific mutation in question, or smaller in either direction. Accordingly, by “near” or “proximal” with respect to specific replacements, it is intended that the SSB or DSB locus associated with a desired replacement boundary (also referred to herein as an endpoint) may be within a region that is less than about 3 kb from the reference locus noted. In some embodiments, the SSB or DSB locus is more proximal and within 2 kb, within 1 kb, within 0.5 kb, or within 0.1 kb. In the case of small replacement, the desired endpoint is at or “adjacent to” the reference locus, by which it is intended that the endpoint is within 100 bp, within 50 bp, within 25 bp, or less than about 10 bp to 5 bp from the reference locus.

[0373] Embodiments comprising larger or smaller replacements is expected to provide the same benefit, as long as the IL7R protein activity is restored. It is thus expected that many variations of the replacements described and illustrated herein will be effective for ameliorating SCID and/or Omenn Syndrome.

[0374] Another genome engineering strategy involves exon deletion. Targeted deletion of specific exons is an attractive strategy for treating a large subset of patients with a single therapeutic cocktail. Deletions can either be single exon deletions or multi-exon deletions. While multi-exon deletions can reach a larger number of patients, for larger deletions the efficiency of deletion greatly decreases with increased size. Therefore, deletions range can be from 40 to 10,000 base pairs (bp) in size. For example, deletions may range from 40-100; 100-300; 300-500; 500-1,000; 1,000-2,000; 2,000-3,000; 3,000-5,000; or 5,000-10,000 base pairs in size.

[0375] Deletions can occur in enhancer, promoter, 1st intron, and/or 3′UTR leading to upregulation of the gene expression, and/or through deletion of the regulatory elements.

[0376] As stated previously, the IL7R gene contains 8 exons. Any one or more of the 8 exons, or aberrant intronic splice acceptor or donor sites, may be deleted in order to restore the IL7R reading frame. In some embodiments, the methods provide gRNA pairs that can be used to delete exons 1, 2, 3, 4, 5, 6, 7, or 8, or any combination of them.

[0377] In order to ensure that the pre-mRNA is properly processed following deletion, the surrounding splicing signals can be deleted. Splicing donor and acceptors are generally within 100 base pairs of the neighboring intron. Therefore, in some embodiments, methods can provide all gRNAs that cut approximately +/−100-3100 bp with respect to each exon/intron junction of interest.

[0378] For any of the genome editing strategies, gene editing can be confirmed by sequencing or PCR analysis.

[0379] Target Sequence Selection

[0380] Shifts in the location of the 5′ boundary and/or the 3′ boundary relative to particular reference loci are used to facilitate or enhance particular applications of gene editing, which depend in part on the endonuclease system selected for the editing, as further described and illustrated herein.

[0381] In a first, nonlimiting example of such target sequence selection, many endonuclease systems have rules or criteria that guide the initial selection of potential target sites for cleavage, such as the requirement of a PAM sequence motif in a particular position adjacent to the DNA cleavage sites in the case of CRISPR Type II or Type V endonucleases.

[0382] In another nonlimiting example of target sequence selection or optimization, the frequency of off-target activity for a particular combination of target sequence and gene editing endonuclease (i.e. the frequency of DSBs occurring at sites other than the selected target sequence) is assessed relative to the frequency of on-target activity. In some embodiments, cells that have been correctly edited at the desired locus may have a selective advantage relative to other cells. Illustrative, but nonlimiting, examples of a selective advantage include the acquisition of attributes such as enhanced rates of replication, persistence, resistance to certain conditions, enhanced rates of successful engraftment or persistence in vivo following introduction into a patient, and other attributes associated with the maintenance or increased numbers or viability of such cells. In other embodiments, cells that have been correctly edited at the desired locus may be positively selected for by one or more screening methods used to identify, sort or otherwise select for cells that have been correctly edited. Both selective advantage and directed selection methods may take advantage of the phenotype associated with the correction. In some embodiments, cells may be edited two or more times in order to create a second modification that creates a new phenotype that is used to select or purify the intended population of cells. Such a second modification could be created by adding a second gRNA for a selectable or screenable marker. In some embodiments, cells can be correctly edited at the desired locus using a DNA fragment that contains the cDNA and also a selectable marker.

[0383] Whether any selective advantage is applicable or any directed selection is to be applied in a particular case, target sequence selection is also guided by consideration of off-target frequencies in order to enhance the effectiveness of the application and/or reduce the potential for undesired alterations at sites other than the desired target. As described further and illustrated herein and in the art, the occurrence of off-target activity is influenced by a number of factors including similarities and dissimilarities between the target site and various off-target sites, as well as the particular endonuclease used. Bioinformatics tools are available that assist in the prediction of off-target activity, and frequently such tools can also be used to identify the most likely sites of off-target activity, which can then be assessed in experimental settings to evaluate relative frequencies of off-target to on-target activity, thereby allowing the selection of sequences that have higher relative on-target activities. Illustrative examples of such techniques are provided herein, and others are known in the art.

[0384] Another aspect of target sequence selection relates to homologous recombination events. Sequences sharing regions of homology can serve as focal points for homologous recombination events that result in deletion of intervening sequences. Such recombination events occur during the normal course of replication of chromosomes and other DNA sequences, and also at other times when DNA sequences are being synthesized, such as in the case of repairs of double-strand breaks (DSBs), which occur on a regular basis during the normal cell replication cycle but may also be enhanced by the occurrence of various events (such as UV light and other inducers of DNA breakage) or the presence of certain agents (such as various chemical inducers). Many such inducers cause DSBs to occur indiscriminately in the genome, and DSBs are regularly being induced and repaired in normal cells. During repair, the original sequence may be reconstructed with complete fidelity, however, in some embodiments, small insertions or deletions (referred to as “indels”) are introduced at the DSB site.

[0385] DSBs may also be specifically induced at particular locations, as in the case of the endonucleases systems described herein, which can be used to cause directed or preferential gene modification events at selected chromosomal locations. The tendency for homologous sequences to be subject to recombination in the context of DNA repair (as well as replication) can be taken advantage of in a number of circumstances, and is the basis for one application of gene editing systems, such as CRISPR, in which homology directed repair is used to insert a sequence of interest, provided through use of a “donor” polynucleotide, into a desired chromosomal location.

[0386] Regions of homology between particular sequences, which can be small regions of “microhomology” that may comprise as few as ten basepairs or less, can also be used to bring about desired deletions. For example, a single DSB is introduced at a site that exhibits microhomology with a nearby sequence. During the normal course of repair of such DSB, a result that occurs with high frequency is the deletion of the intervening sequence as a result of recombination being facilitated by the DSB and concomitant cellular repair process.

[0387] In some circumstances, however, selecting target sequences within regions of homology can also give rise to much larger deletions, including gene fusions (when the deletions are in coding regions), which may or may not be desired given the particular circumstances.

[0388] The examples provided herein further illustrate the selection of various target regions for the creation of DSBs designed to induce replacements that result in restoration of IL7R protein activity, as well as the selection of specific target sequences within such regions that are designed to minimize off-target events relative to on-target events.

[0389] Nucleic Acid Modifications

[0390] In some embodiments, polynucleotides introduced into cells comprise one or more modifications that can be used individually or in combination, for example, to enhance activity, stability or specificity, alter delivery, reduce innate immune responses in host cells, or for other enhancements, as further described herein and known in the art.

[0391] In some embodiments, modified polynucleotides are used in the CRISPR/Cas9/Cpf1 system, in which case the guide RNAs (either single-molecule guides or double-molecule guides) and/or a DNA or an RNA encoding a Cas or Cpf1 endonuclease introduced into a cell can be modified, as described and illustrated below. Such modified polynucleotides can be used in the CRISPR/Cas9/Cpf1 system to edit any one or more genomic loci.

[0392] Using the CRISPR/Cas9/Cpf1 system for purposes of nonlimiting illustrations of such uses, modifications of guide RNAs can be used to enhance the formation or stability of the CRISPR/Cas9/Cpf1 genome editing complex comprising guide RNAs, which may be single-molecule guides or double-molecule, and a Cas or Cpf1 endonuclease. Modifications of guide RNAs can also or alternatively be used to enhance the initiation, stability or kinetics of interactions between the genome editing complex with the target sequence in the genome, which can be used, for example, to enhance on-target activity. Modifications of guide RNAs can also or alternatively be used to enhance specificity, e.g., the relative rates of genome editing at the on-target site as compared to effects at other (off-target) sites.

[0393] Modifications can also or alternatively be used to increase the stability of a guide RNA, e.g., by increasing its resistance to degradation by ribonucleases (RNases) present in a cell, thereby causing its half-life in the cell to be increased. Modifications enhancing guide RNA half-life can be particularly useful in aspects in which a Cas or Cpf1 endonuclease is introduced into the cell to be edited via an RNA that needs to be translated in order to generate endonuclease, because increasing the half-life of guide RNAs introduced at the same time as the RNA encoding the endonuclease can be used to increase the time that the guide RNAs and the encoded Cas or Cpf1 endonuclease co-exist in the cell.

[0394] Modifications can also or alternatively be used to decrease the likelihood or degree to which RNAs introduced into cells elicit innate immune responses. Such responses, which have been well characterized in the context of RNA interference (RNAi), including small-interfering RNAs (siRNAs), as described below and in the art, tend to be associated with reduced half-life of the RNA and/or the elicitation of cytokines or other factors associated with immune responses.

[0395] One or more types of modifications can also be made to RNAs encoding an endonuclease that are introduced into a cell, including, without limitation, modifications that enhance the stability of the RNA (such as by increasing its degradation by RNAses present in the cell), modifications that enhance translation of the resulting product (i.e. the endonuclease), and/or modifications that decrease the likelihood or degree to which the RNAs introduced into cells elicit innate immune responses.

[0396] Combinations of modifications, such as the foregoing and others, can likewise be used. In the case of CRISPR/Cas9/Cpf1, for example, one or more types of modifications can be made to guide RNAs (including those exemplified above), and/or one or more types of modifications can be made to RNAs encoding Cas endonuclease (including those exemplified above).

[0397] By way of illustration, guide RNAs used in the CRISPR/Cas9/Cpf1 system, or other smaller RNAs can be readily synthesized by chemical means, enabling a number of modifications to be readily incorporated, as illustrated below and described in the art. While chemical synthetic procedures are continually expanding, purifications of such RNAs by procedures such as high performance liquid chromatography (HPLC, which avoids the use of gels such as PAGE) tends to become more challenging as polynucleotide lengths increase significantly beyond a hundred or so nucleotides. One approach used for generating chemically-modified RNAs of greater length is to produce two or more molecules that are ligated together. Much longer RNAs, such as those encoding a Cas9 endonuclease, are more readily generated enzymatically. While fewer types of modifications are generally available for use in enzymatically produced RNAs, there are still modifications that can be used to, e.g., enhance stability, reduce the likelihood or degree of innate immune response, and/or enhance other attributes, as described further below and in the art; and new types of modifications are regularly being developed.

[0398] By way of illustration of various types of modifications, especially those used frequently with smaller chemically synthesized RNAs, modifications can comprise one or more nucleotides modified at the 2′ position of the sugar, in some embodiments, a 2′-O-alkyl, 2′-O-alkyl-O-alkyl, or 2′-fluoro-modified nucleotide. In some embodiments, RNA modifications comprise 2′-fluoro, 2′-amino or 2′ O-methyl modifications on the ribose of pyrimidines, abasic residues, or an inverted base at the 3′ end of the RNA. Such modifications are routinely incorporated into oligonucleotides and these oligonucleotides have been shown to have a higher Tm (i.e., higher target binding affinity) than 2′-deoxyoligonucleotides against a given target.

[0399] A number of nucleotide and nucleoside modifications have been shown to make the oligonucleotide into which they are incorporated more resistant to nuclease digestion than the native oligonucleotide; these modified oligos survive intact for a longer time than unmodified oligonucleotides. Specific examples of modified oligonucleotides include those comprising modified backbones, for example, phosphorothioates, phosphotriesters, methyl phosphonates, short chain alkyl or cycloalkyl intersugar linkages or short chain heteroatomic or heterocyclic intersugar linkages. Some oligonucleotides are oligonucleotides with phosphorothioate backbones and those with heteroatom backbones, particularly CH₂—NH—O—CH₂, CH, —N(CH₃)—O—CH₂ (known as a methylene(methylimino) or MMI backbone), CH₂—O—N (CH₃)—CH₂, CH₂—N (CH₃)—N (CH₃)—CH₂ and O—N (CH₃)—CH₂—CH₂ backbones, wherein the native phosphodiester backbone is represented as O—P—O—CH,); amide backbones [see De Mesmaeker et al., Ace. Chem. Res., 28:366-374 (1995)]; morpholino backbone structures (see Summerton and Weller, U.S. Pat. No. 5,034,506); peptide nucleic acid (PNA) backbone (wherein the phosphodiester backbone of the oligonucleotide is replaced with a polyamide backbone, the nucleotides being bound directly or indirectly to the aza nitrogen atoms of the polyamide backbone, see Nielsen et al., Science 1991, 254, 1497). Phosphorus-containing linkages include, but are not limited to, phosphorothioates, chiral phosphorothioates, phosphorodithioates, phosphotriesters, aminoalkylphosphotriesters, methyl and other alkyl phosphonates comprising 3′alkylene phosphonates and chiral phosphonates, phosphinates, phosphoramidates comprising 3′-amino phosphoramidate and aminoalkylphosphoramidates, thionophosphoramidates, thionoalkylphosphonates, thionoalkylphosphotriesters, and boranophosphates having normal 3′-5′ linkages, 2′-5′ linked analogs of these, and those having inverted polarity wherein the adjacent pairs of nucleoside units are linked 3′-5′ to 5′-3′ or 2′-5′ to 5′-2′, see U.S. Pat. Nos. 3,687,808; 4,469,863; 4,476,301; 5,023,243; 5,177,196; 5,188,897; 5,264,423; 5,276,019; 5,278,302; 5,286,717; 5,321,131; 5,399,676; 5,405,939; 5,453,496; 5,455,233; 5,466,677; 5,476,925; 5,519,126; 5,536,821; 5,541,306; 5,550,111; 5,563,253; 5,571,799; 5,587,361; and 5,625,050, each of which is herein incorporated by reference.

[0400] Morpholino-based oligomeric compounds are described in Braasch and David Corey, Biochemistry, 41(14): 4503-4510 (2002); Genesis, Volume 30, Issue 3, (2001); Heasman, Dev. Biol., 243: 209-214 (2002); Nasevicius et al., Nat. Genet., 26:216-220 (2000); Lacerra et al., Proc. Natl. Acad. Sci., 97: 9591-9596 (2000); and U.S. Pat. No. 5,034,506, issued Jul. 23, 1991.

[0401] Cyclohexenyl nucleic acid oligonucleotide mimetics are described in Wang et al., J. Am. Chem. Soc., 122: 8595-8602 (2000).

[0402] Modified oligonucleotide backbones that do not include a phosphorus atom therein have backbones that are formed by short chain alkyl or cycloalkyl internucleoside linkages, mixed heteroatom and alkyl or cycloalkyl internucleoside linkages, or one or more short chain heteroatomic or heterocyclic internucleoside linkages. These comprise those having morpholino linkages (formed in part from the sugar portion of a nucleoside); siloxane backbones; sulfide, sulfoxide and sulfone backbones; formacetyl and thioformacetyl backbones; methylene formacetyl and thioformacetyl backbones; alkene containing backbones; sulfamate backbones; methyleneimino and methylenehydrazino backbones; sulfonate and sulfonamide backbones; amide backbones; and others having mixed N, O, S, and CH₂ component parts; see U.S. Pat. Nos. 5,034,506; 5,166,315; 5,185,444; 5,214,134; 5,216,141; 5,235,033; 5,264,562; 5,264,564; 5,405,938; 5,434,257; 5,466,677; 5,470,967; 5,489,677; 5,541,307; 5,561,225; 5,596,086; 5,602,240; 5,610,289; 5,602,240; 5,608,046; 5,610,289; 5,618,704; 5,623,070; 5,663,312; 5,633,360; 5,677,437; and 5,677,439, each of which is herein incorporated by reference.

[0403] One or more substituted sugar moieties can also be included, e.g., one of the following at the 2′ position: OH, SH, SCH₃, F, OCN, OCH₃OCH₃, OCH₃O(CH₂)n CH₃, O(CH₂)n NH₂, or O(CH₂)nCH₃, where n is from 1 to about 10; C1 to C10 lower alkyl, alkoxyalkoxy, substituted lower alkyl, alkaryl or aralkyl; Cl; Br; CN; CF₃, OCF₃, O—, S—, or N-alkyl; O—, S—, or N-alkenyl; SOCH₃, SO₂CH₃; ONO₂, NO₂; N₃; NH₂; heterocycloalkyl; heterocycloalkaryl; aminoalkylamino; polyalkylamino; substituted silyl; an RNA cleaving group; a reporter group; an intercalator; a group for improving the pharmacokinetic properties of an oligonucleotide; or a group for improving the pharmacodynamic properties of an oligonucleotide and other substituents having similar properties. In some embodiments, a modification includes 2′-methoxyethoxy (2′-0-CH₂CH₂OCH₃, also known as 2′-O-(2-methoxyethyl)) (Martin et al, Helv. Chim. Acta, 1995, 78, 486). Other modifications include 2′-methoxy (2′-0-CH₃), 2′-propoxy (2′-OCH₂CH₂CH₃) and 2′-fluoro (2′-F). Similar modifications may also be made at other positions on the oligonucleotide, particularly the 3′ position of the sugar on the 3′ terminal nucleotide and the 5′ position of 5′ terminal nucleotide. Oligonucleotides may also have sugar mimetics, such as cyclobutyls in place of the pentofuranosyl group.

[0404] In some embodiments, both a sugar and an internucleoside linkage, i.e., the backbone, of the nucleotide units are replaced with novel groups. The base units are maintained for hybridization with an appropriate nucleic acid target compound. One such oligomeric compound, an oligonucleotide mimetic that has been shown to have excellent hybridization properties, is referred to as a peptide nucleic acid (PNA). In PNA compounds, the sugar-backbone of an oligonucleotide is replaced with an amide containing backbone, for example, an aminoethylglycine backbone. The nucleobases are retained and are bound directly or indirectly to aza nitrogen atoms of the amide portion of the backbone. Representative United States patents that teach the preparation of PNA compounds comprise, but are not limited to, U.S. Pat. Nos. 5,539,082; 5,714,331; and 5,719,262. Further teaching of PNA compounds can be found in Nielsen et al, Science, 254: 1497-1500 (1991).

[0405] Guide RNAs can also include, additionally or alternatively, nucleobase (often referred to in the art simply as “base”) modifications or substitutions. As used herein, “unmodified” or “natural” nucleobases include adenine (A), guanine (G), thymine (T), cytosine (C), and uracil (U). Modified nucleobases include nucleobases found only infrequently or transiently in natural nucleic acids, e.g., hypoxanthine, 6-methyladenine, 5-Me pyrimidines, particularly 5-methylcytosine (also referred to as 5-methyl-2′ deoxycytosine and often referred to in the art as 5-Me-C), 5-hydroxymethylcytosine (HMC), glycosyl HMC and gentobiosyl HMC, as well as synthetic nucleobases, e.g., 2-aminoadenine, 2-(methylamino)adenine, 2-(imidazolylalkyl)adenine, 2-(aminoalklyamino)adenine or other heterosubstituted alkyladenines, 2-thiouracil, 2-thiothymine, 5-bromouracil, 5-hydroxymethyluracil, 8-azaguanine, 7-deazaguanine, N6 (6-aminohexyl)adenine, and 2,6-diaminopurine. Kornberg, A., DNA Replication, W. H. Freeman & Co., San Francisco, pp75-77 (1980); Gebeyehu et al., Nucl. Acids Res. 15:4513 (1997). A “universal” base known in the art, e.g., inosine, can also be included. 5-Me-C substitutions have been shown to increase nucleic acid duplex stability by 0.6-1.2° C. (Sanghvi, Y. S., in Crooke, S. T. and Lebleu, B., eds., Antisense Research and Applications, CRC Press, Boca Raton, 1993, pp. 276-278) and are embodiments of base substitutions.

[0406] Modified nucleobases comprise other synthetic and natural nucleobases, such as 5-methylcytosine (5-me-C), 5-hydroxymethyl cytosine, xanthine, hypoxanthine, 2-aminoadenine, 6-methyl and other alkyl derivatives of adenine and guanine, 2-propyl and other alkyl derivatives of adenine and guanine, 2-thiouracil, 2-thiothymine and 2-thiocytosine, 5-halouracil and cytosine, 5-propynyl uracil and cytosine, 6-azo uracil, cytosine and thymine, 5-uracil (pseudo-uracil), 4-thiouracil, 8-halo, 8-amino, 8-thiol, 8-thioalkyl, 8-hydroxyl and other 8-substituted adenines and guanines, 5-halo particularly 5-bromo, 5-trifluoromethyl and other 5-substituted uracils and cytosines, 7-methylquanine and 7-methyladenine, 8-azaguanine and 8-azaadenine, 7-deazaguanine and 7-deazaadenine, and 3-deazaguanine and 3-deazaadenine.

[0407] Further, nucleobases comprise those disclosed in U.S. Pat. No. 3,687,808, those disclosed in ‘The Concise Encyclopedia of Polymer Science And Engineering’, pages 858-859, Kroschwitz, J. I., ed. John Wiley & Sons, 1990, those disclosed by Englisch et al., Angewandle Chemie, International Edition’, 1991, 30, page 613, and those disclosed by Sanghvi, Y. S., Chapter 15, Antisense Research and Applications', pages 289-302, Crooke, S. T. and Lebleu, B. ea., CRC Press, 1993. Certain of these nucleobases are particularly useful for increasing the binding affinity of the oligomeric compounds of the disclosure. These include 5-substituted pyrimidines, 6-azapyrimidines and N-2, N-6 and 0-6 substituted purines, comprising 2-aminopropyladenine, 5-propynyluracil and 5-propynylcytosine. 5-methylcytosine substitutions have been shown to increase nucleic acid duplex stability by 0.6-1.2° C. (Sanghvi, Y. S., Crooke, S. T. and Lebleu, B., eds, ‘Antisense Research and Applications’, CRC Press, Boca Raton, 1993, pp. 276-278) and are aspects of base substitutions, even more particularly when combined with 2′-O-methoxyethyl sugar modifications. Modified nucleobases are described in U.S. Pat. Nos. 3,687,808, as well as 4,845,205; 5,130,302; 5,134,066; 5,175,273; 5,367,066; 5,432,272; 5,457,187; 5,459,255; 5,484,908; 5,502,177; 5,525,711; 5,552,540; 5,587,469; 5,596,091; 5,614,617; 5,681,941; 5,750,692; 5,763,588; 5,830,653; 6,005,096; and US Patent Application Publication 2003/0158403.

[0408] Thus, the term “modified” refers to a non-natural sugar, phosphate, or base that is incorporated into a guide RNA, an endonuclease, or both a guide RNA and an endonuclease. It is not necessary for all positions in a given oligonucleotide to be uniformly modified, and in fact more than one of the aforementioned modifications may be incorporated in a single oligonucleotide, or even in a single nucleoside within an oligonucleotide.

[0409] In some embodiments, the guide RNAs and/or mRNA (or DNA) encoding an endonuclease are chemically linked to one or more moieties or conjugates that enhance the activity, cellular distribution, or cellular uptake of the oligonucleotide. Such moieties comprise, but are not limited to, lipid moieties such as a cholesterol moiety [Letsinger et al., Proc. Natl. Acad. Sci. USA, 86: 6553-6556 (1989)]; cholic acid [Manoharan et al., Bioorg. Med. Chem. Let., 4: 1053-1060 (1994)]; a thioether, e.g., hexyl-S-tritylthiol [Manoharan et al, Ann. N.Y. Acad. Sci., 660: 306-309 (1992) and Manoharan et al., Bioorg. Med. Chem. Let., 3: 2765-2770 (1993)]; a thiocholesterol [Oberhauser et al., Nucl. Acids Res., 20: 533-538 (1992)]; an aliphatic chain, e.g., dodecandiol or undecyl residues [Kabanov et al., FEBS Lett., 259: 327-330 (1990) and Svinarchuk et al., Biochimie, 75: 49-54 (1993)]; a phospholipid, e.g., di-hexadecyl-rac-glycerol or triethylammonium 1,2-di-O-hexadecyl-rac-glycero-3-H-phosphonate [Manoharan et al., Tetrahedron Lett., 36: 3651-3654 (1995) and Shea et al., Nucl. Acids Res., 18: 3777-3783 (1990)]; a polyamine or a polyethylene glycol chain [Mancharan et al., Nucleosides & Nucleotides, 14: 969-973 (1995)]; adamantane acetic acid [Manoharan et al., Tetrahedron Lett., 36: 3651-3654 (1995)]; a palmityl moiety [(Mishra et al., Biochim. Biophys. Acta, 1264: 229-237 (1995)]; or an octadecylamine or hexylamino-carbonyl-t oxycholesterol moiety [Crooke et al., J. Pharmacol. Exp. Ther., 277: 923-937 (1996)]. See also U.S. Pat. Nos. 4,828,979; 4,948,882; 5,218,105; 5,525,465; 5,541,313; 5,545,730; 5,552,538; 5,578,717, 5,580,731; 5,580,731; 5,591,584; 5,109,124; 5,118,802; 5,138,045; 5,414,077; 5,486,603; 5,512,439; 5,578,718; 5,608,046; 4,587,044; 4,605,735; 4,667,025; 4,762,779; 4,789,737; 4,824,941; 4,835,263; 4,876,335; 4,904,582; 4,958,013; 5,082,830; 5,112,963; 5,214,136; 5,082,830; 5,112,963; 5,214,136; 5,245,022; 5,254,469; 5,258,506; 5,262,536; 5,272,250; 5,292,873; 5,317,098; 5,371,241, 5,391,723; 5,416,203, 5,451,463; 5,510,475; 5,512,667; 5,514,785; 5,565,552; 5,567,810; 5,574,142; 5,585,481; 5,587,371; 5,595,726; 5,597,696; 5,599,923; 5,599, 928 and 5,688,941.

[0410] Sugars and other moieties can be used to target proteins and complexes comprising nucleotides, such as cationic polysomes and liposomes, to particular sites. For example, hepatic cell directed transfer can be mediated via asialoglycoprotein receptors (ASGPRs); see, e.g., Hu, et al., Protein Pept Lett. 21(10):1025-30 (2014). Other systems known in the art and regularly developed can be used to target biomolecules of use in the present case and/or complexes thereof to particular target cells of interest.

[0411] These targeting moieties or conjugates can include conjugate groups covalently bound to functional groups, such as primary or secondary hydroxyl groups. Conjugate groups of the disclosure include intercalators, reporter molecules, polyamines, polyamides, polyethylene glycols, polyethers, groups that enhance the pharmacodynamic properties of oligomers, and groups that enhance the pharmacokinetic properties of oligomers. Typical conjugate groups include cholesterols, lipids, phospholipids, biotin, phenazine, folate, phenanthridine, anthraquinone, acridine, fluoresceins, rhodamines, coumarins, and dyes. Groups that enhance the pharmacodynamic properties, in the context of this disclosure, include groups that improve uptake, enhance resistance to degradation, and/or strengthen sequence-specific hybridization with the target nucleic acid. Groups that enhance the pharmacokinetic properties, in the context of this disclosure, include groups that improve uptake, distribution, metabolism or excretion of the compounds of the present disclosure. Representative conjugate groups are disclosed in International Patent Application No. PCT/US92/09196, filed Oct. 23, 1992, and U.S. Pat. No. 6,287,860, which are incorporated herein by reference. Conjugate moieties include, but are not limited to, lipid moieties such as a cholesterol moiety, cholic acid, a thioether, e.g., hexyl-5-tritylthiol, a thiocholesterol, an aliphatic chain, e.g., dodecandiol or undecyl residues, a phospholipid, e.g., di-hexadecyl-rac-glycerol or triethylammonium 1,2-di-O-hexadecyl-rac-glycero-3-H-phosphonate, a polyamine or a polyethylene glycol chain, or adamantane acetic acid, a palmityl moiety, or an octadecylamine or hexylamino-carbonyl-oxy cholesterol moiety. See, e.g., U.S. Pat. Nos. 4,828,979; 4,948,882; 5,218,105; 5,525,465; 5,541,313; 5,545,730; 5,552,538; 5,578,717, 5,580,731; 5,580,731; 5,591,584; 5,109,124; 5,118,802; 5,138,045; 5,414,077; 5,486,603; 5,512,439; 5,578,718; 5,608,046; 4,587,044; 4,605,735; 4,667,025; 4,762,779; 4,789,737; 4,824,941; 4,835,263; 4,876,335; 4,904,582; 4,958,013; 5,082,830; 5,112,963; 5,214,136; 5,082,830; 5,112,963; 5,214,136; 5,245,022; 5,254,469; 5,258,506; 5,262,536; 5,272,250; 5,292,873; 5,317,098; 5,371,241, 5,391,723; 5,416,203, 5,451,463; 5,510,475; 5,512,667; 5,514,785; 5,565,552; 5,567,810; 5,574,142; 5,585,481; 5,587,371; 5,595,726; 5,597,696; 5,599,923; 5,599,928 and 5,688,941.

[0412] Longer polynucleotides that are less amenable to chemical synthesis and are typically produced by enzymatic synthesis can also be modified by various means. Such modifications can include, for example, the introduction of certain nucleotide analogs, the incorporation of particular sequences or other moieties at the 5′ or 3′ ends of molecules, and other modifications. By way of illustration, the mRNA encoding Cas9 is approximately 4 kb in length and can be synthesized by in vitro transcription. Modifications to the mRNA can be applied to, e.g., increase its translation or stability (such as by increasing its resistance to degradation with a cell), or to reduce the tendency of the RNA to elicit an innate immune response that is often observed in cells following introduction of exogenous RNAs, particularly longer RNAs such as that encoding Cas9.

[0413] Numerous such modifications have been described in the art, such as polyA tails, 5′ cap analogs (e.g., Anti Reverse Cap Analog (ARCA) or m7G(5′)ppp(5′)G (mCAP)), modified 5′ or 3′ untranslated regions (UTRs), use of modified bases (such as Pseudo-UTP, 2-Thio-UTP, 5-Methylcytidine-5′-Triphosphate (5-Methyl-CTP) or N6-Methyl-ATP), or treatment with phosphatase to remove 5′ terminal phosphates. These and other modifications are known in the art, and new modifications of RNAs are regularly being developed.

[0414] There are numerous commercial suppliers of modified RNAs, including for example, TriLink Biotech, AxoLabs, Bio-Synthesis Inc., Dharmacon and many others. As described by TriLink, for example, 5-Methyl-CTP can be used to impart desirable characteristics, such as increased nuclease stability, increased translation or reduced interaction of innate immune receptors with in vitro transcribed RNA. 5-Methylcytidine-5′-Triphosphate (5-Methyl-CTP), N6-Methyl-ATP, as well as Pseudo-UTP and 2-Thio-UTP, have also been shown to reduce innate immune stimulation in culture and in vivo while enhancing translation, as illustrated in publications by Kormann et al. and Warren et al. referred to below.

[0415] It has been shown that chemically modified mRNA delivered in vivo can be used to achieve improved therapeutic effects; see, e.g., Kormann et al., Nature Biotechnology 29, 154-157 (2011). Such modifications can be used, for example, to increase the stability of the RNA molecule and/or reduce its immunogenicity. Using chemical modifications such as Pseudo-U, N6-Methyl-A, 2-Thio-U and 5-Methyl-C, it was found that substituting just one quarter of the uridine and cytidine residues with 2-Thio-U and 5-Methyl-C respectively resulted in a significant decrease in toll-like receptor (TLR) mediated recognition of the mRNA in mice. By reducing the activation of the innate immune system, these modifications can be used to effectively increase the stability and longevity of the mRNA in vivo; see, e.g., Kormann et al., supra.

[0416] It has also been shown that repeated administration of synthetic messenger RNAs incorporating modifications designed to bypass innate anti-viral responses can reprogram differentiated human cells to pluripotency. See, e.g., Warren, et al., Cell Stem Cell, 7(5):618-30 (2010). Such modified mRNAs that act as primary reprogramming proteins can be an efficient means of reprogramming multiple human cell types. Such cells are referred to as induced pluripotency stem cells (iPSCs), and it was found that enzymatically synthesized RNA incorporating 5-Methyl-CTP, Pseudo-UTP and an Anti Reverse Cap Analog (ARCA) could be used to effectively evade the cell's antiviral response; see, e.g., Warren et al., supra.

[0417] Other modifications of polynucleotides described in the art include, for example, the use of polyA tails, the addition of 5′ cap analogs (such as m7G(5′)ppp(5′)G (mCAP)), modifications of 5′ or 3′ untranslated regions (UTRs), or treatment with phosphatase to remove 5′ terminal phosphates—and new approaches are regularly being developed.

[0418] A number of compositions and techniques applicable to the generation of modified RNAs for use herein have been developed in connection with the modification of RNA interference (RNAi), including small-interfering RNAs (siRNAs). siRNAs present particular challenges in vivo because their effects on gene silencing via mRNA interference are generally transient, which can require repeat administration. In addition, siRNAs are double-stranded RNAs (dsRNA) and mammalian cells have immune responses that have evolved to detect and neutralize dsRNA, which is often a by-product of viral infection. Thus, there are mammalian enzymes such as PKR (dsRNA-responsive kinase), and potentially retinoic acid-inducible gene I (RIG-I), that can mediate cellular responses to dsRNA, as well as Toll-like receptors (such as TLR3, TLR7 and TLR8) that can trigger the induction of cytokines in response to such molecules; see, e.g., the reviews by Angart et al., Pharmaceuticals (Basel) 6(4): 440-468 (2013); Kanasty et al., Molecular Therapy 20(3): 513-524 (2012); Burnett et al., Biotechnol J. 6(9):1130-46 (2011); Judge and MacLachlan, Hum Gene Ther 19(2):111-24 (2008); and references cited therein.

[0419] A large variety of modifications have been developed and applied to enhance RNA stability, reduce innate immune responses, and/or achieve other benefits that can be useful in connection with the introduction of polynucleotides into human cells, as described herein; see, e.g., the reviews by Whitehead K A et al., Annual Review of Chemical and Biomolecular Engineering, 2: 77-96 (2011); Gaglione and Messere, Mini Rev Med Chem, 10(7):578-95 (2010); Chernolovskaya et al, Curr Opin Mol Ther., 12(2):158-67 (2010); Deleavey et al., Curr Protoc Nucleic Acid Chem Chapter 16:Unit 16.3 (2009); Behlke, Oligonucleotides 18(4):305-19 (2008); Fucini et al., Nucleic Acid Ther 22(3): 205-210 (2012); Bremsen et al., Front Genet 3:154 (2012).

[0420] As noted above, there are a number of commercial suppliers of modified RNAs, many of which have specialized in modifications designed to improve the effectiveness of siRNAs. A variety of approaches are offered based on various findings reported in the literature. For example, Dharmacon notes that replacement of a non-bridging oxygen with sulfur (phosphorothioate, PS) has been extensively used to improve nuclease resistance of siRNAs, as reported by Kole, Nature Reviews Drug Discovery 11:125-140 (2012). Modifications of the 2′-position of the ribose have been reported to improve nuclease resistance of the internucleotide phosphate bond while increasing duplex stability (Tm), which has also been shown to provide protection from immune activation. A combination of moderate PS backbone modifications with small, well-tolerated 2′-substitutions (2′-O-Methyl, 2′-Fluoro, 2′-Hydro) have been associated with highly stable siRNAs for applications in vivo, as reported by Soutschek et al. Nature 432:173-178 (2004); and 2′-O-Methyl modifications have been reported to be effective in improving stability as reported by Volkov, Oligonucleotides 19:191-202 (2009). With respect to decreasing the induction of innate immune responses, modifying specific sequences with 2′-O-Methyl, 2′-Fluoro, 2′-Hydro have been reported to reduce TLR7/TLR8 interaction while generally preserving silencing activity; see, e.g., Judge et al., Mol. Ther. 13:494-505 (2006); and Cekaite et al., J. Mol. Biol. 365:90-108 (2007). Additional modifications, such as 2-thiouracil, pseudouracil, 5-methylcytosine, 5-methyluracil, and N6-methyladenosine have also been shown to minimize the immune effects mediated by TLR3, TLR7, and TLR8; see, e.g., Kariko, K. et al., Immunity 23:165-175 (2005).

[0421] As is also known in the art, and commercially available, a number of conjugates can be applied to polynucleotides, such as RNAs, for use herein that can enhance their delivery and/or uptake by cells, including for example, cholesterol, tocopherol and folic acid, lipids, peptides, polymers, linkers and aptamers; see, e.g., the review by Winkler, Ther. Deliv. 4:791-809 (2013), and references cited therein.

[0422] Codon-Optimization

[0423] In some embodiments, a polynucleotide encoding a site-directed polypeptide is codon-optimized according to methods standard in the art for expression in the cell containing the target DNA of interest. For example, if the intended target nucleic acid is in a human cell, a human codon-optimized polynucleotide encoding Cas9 is contemplated for use for producing the Cas9 polypeptide.

[0424] Complexes of a Genome-Targeting Nucleic Acid and a Site-Directed Polypeptide

[0425] A genome-targeting nucleic acid interacts with a site-directed polypeptide (e.g., a nucleic acid-guided nuclease such as Cas9), thereby forming a complex. The genome-targeting nucleic acid guides the site-directed polypeptide to a target nucleic acid.

[0426] RNPs

[0427] The site-directed polypeptide and genome-targeting nucleic acid may each be administered separately to a cell or a patient. On the other hand, the site-directed polypeptide may be pre-complexed with one or more guide RNAs, or one or more crRNA together with a tracrRNA. The pre-complexed material may then be administered to a cell or a patient. Such pre-complexed material is known as a ribonucleoprotein particle (RNP).

[0428] Nucleic Acids Encoding System Components

[0429] The present disclosure provides a nucleic acid comprising a nucleotide sequence encoding a genome-targeting nucleic acid of the disclosure, a site-directed polypeptide of the disclosure, and/or any nucleic acid or proteinaceous molecule necessary to carry out the aspects of the methods of the disclosure.

[0430] The nucleic acid encoding a genome-targeting nucleic acid of the disclosure, a site-directed polypeptide of the disclosure, and/or any nucleic acid or proteinaceous molecule necessary to carry out the aspects of the methods of the disclosure comprises a vector (e.g., a recombinant expression vector).

[0431] The term “vector” refers to a nucleic acid molecule capable of transporting another nucleic acid to which it has been linked. One type of vector is a “plasmid”, which refers to a circular double-stranded DNA loop into which additional nucleic acid segments can be ligated. Another type of vector is a viral vector, wherein additional nucleic acid segments can be ligated into the viral genome. Certain vectors are capable of autonomous replication in a host cell into which they are introduced (e.g., bacterial vectors having a bacterial origin of replication and episomal mammalian vectors). Other vectors (e.g., non-episomal mammalian vectors) are integrated into the genome of a host cell upon introduction into the host cell, and thereby are replicated along with the host genome.

[0432] In some embodiments, vectors are capable of directing the expression of nucleic acids to which they are operatively linked. Such vectors are referred to herein as “recombinant expression vectors”, or more simply “expression vectors”, which serve equivalent functions.

[0433] The term “operably linked” means that the nucleotide sequence of interest is linked to regulatory sequence(s) in a manner that allows for expression of the nucleotide sequence. The term “regulatory sequence” is intended to include, for example, promoters, enhancers and other expression control elements (e.g., polyadenylation signals). Such regulatory sequences are well known in the art and are described, for example, in Goeddel; Gene Expression Technology: Methods in Enzymology 185, Academic Press, San Diego, Calif. (1990). Regulatory sequences include those that direct constitutive expression of a nucleotide sequence in many types of host cells, and those that direct expression of the nucleotide sequence only in certain host cells (e.g., tissue-specific regulatory sequences). It will be appreciated by those skilled in the art that the design of the expression vector can depend on such factors as the choice of the target cell, the level of expression desired, and the like.

[0434] Expression vectors contemplated include, but are not limited to, viral vectors based on vaccinia virus, poliovirus, adenovirus, adeno-associated virus, SV40, herpes simplex virus, human immunodeficiency virus, retrovirus (e.g., Murine Leukemia Virus, spleen necrosis virus, and vectors derived from retroviruses such as Rous Sarcoma Virus, Harvey Sarcoma Virus, avian leukosis virus, a lentivirus, human immunodeficiency virus, myeloproliferative sarcoma virus, and mammary tumor virus) and other recombinant vectors. Other vectors contemplated for eukaryotic target cells include, but are not limited to, the vectors pXT1, pSG5, pSVK3, pBPV, pMSG, and pSVLSV40 (Pharmacia). Additional vectors contemplated for eukaryotic target cells include, but are not limited to, the vectors pCTx-1, pCTx-2, and pCTx-3. Other vectors may be used so long as they are compatible with the host cell.

[0435] In some embodiments, a vector comprises one or more transcription and/or translation control elements. Depending on the host/vector system utilized, any of a number of suitable transcription and translation control elements, including constitutive and inducible promoters, transcription enhancer elements, transcription terminators, etc. may be used in the expression vector. In some embodiments, the vector is a self-inactivating vector that either inactivates the viral sequences or the components of the CRISPR machinery or other elements.

[0436] Non-limiting examples of suitable eukaryotic promoters (i.e., promoters functional in a eukaryotic cell) include those from cytomegalovirus (CMV) immediate early, herpes simplex virus (HSV) thymidine kinase, early and late SV40, long terminal repeats (LTRs) from retrovirus, human elongation factor-1 promoter (EF1), a hybrid construct comprising the cytomegalovirus (CMV) enhancer fused to the chicken beta-actin promoter (CAG), murine stem cell virus promoter (MSCV), phosphoglycerate kinase-1 locus promoter (PGK), and mouse metallothionein-I.

[0437] For expressing small RNAs, including guide RNAs used in connection with Cas endonuclease, various promoters such as RNA polymerase III promoters, including for example U6 and H1, can be advantageous. Descriptions of and parameters for enhancing the use of such promoters are known in art, and additional information and approaches are regularly being described; see, e.g., Ma, H. et al., Molecular Therapy—Nucleic Acids 3, e161 (2014) doi:10.1038/mtna.2014.12.

[0438] The expression vector may also contain a ribosome binding site for translation initiation and a transcription terminator. The expression vector may also comprise appropriate sequences for amplifying expression. The expression vector may also include nucleotide sequences encoding non-native tags (e.g., histidine tag, hemagglutinin tag, green fluorescent protein, etc.) that are fused to the site-directed polypeptide, thus resulting in a fusion protein.

[0439] In some embodiments, a promoter is an inducible promoter (e.g., a heat shock promoter, tetracycline-regulated promoter, steroid-regulated promoter, metal-regulated promoter, estrogen receptor-regulated promoter, etc.). In some embodiments, the promoter is a constitutive promoter (e.g., CMV promoter, UBC promoter). In some embodiments, the promoter is a spatially restricted and/or temporally restricted promoter (e.g., a tissue specific promoter, a cell type specific promoter, etc.).

[0440] In some embodiments, the nucleic acid encoding a genome-targeting nucleic acid of the disclosure and/or a site-directed polypeptide is packaged into or on the surface of delivery vehicles for delivery to cells. Delivery vehicles contemplated include, but are not limited to, nanospheres, liposomes, quantum dots, nanoparticles, polyethylene glycol particles, hydrogels, and micelles. As described in the art, a variety of targeting moieties can be used to enhance the preferential interaction of such vehicles with desired cell types or locations.

[0441] Introduction of the complexes, polypeptides, and nucleic acids of the disclosure into cells can occur by viral or bacteriophage infection, transfection, conjugation, protoplast fusion, lipofection, electroporation, nucleofection, calcium phosphate precipitation, polyethyleneimine (PEI)-mediated transfection, DEAE-dextran mediated transfection, liposome-mediated transfection, particle gun technology, calcium phosphate precipitation, direct micro-injection, nanoparticle-mediated nucleic acid delivery, and the like.

[0442] Delivery

[0443] Guide RNA polynucleotides (RNA or DNA) and/or endonuclease polynucleotide(s) (RNA or DNA) can be delivered by viral or non-viral delivery vehicles known in the art. Alternatively, endonuclease polypeptide(s) may be delivered by viral or non-viral delivery vehicles known in the art, such as electroporation or lipid nanoparticles. In some embodiments, the DNA endonuclease may be delivered as one or more polypeptides, either alone or pre-complexed with one or more guide RNAs, or one or more crRNA together with a tracrRNA.

[0444] Polynucleotides may be delivered by non-viral delivery vehicles including, but not limited to, nanoparticles, liposomes, ribonucleoproteins, positively charged peptides, small molecule RNA-conjugates, aptamer-RNA chimeras, and RNA-fusion protein complexes. Some exemplary non-viral delivery vehicles are described in Peer and Lieberman, Gene Therapy, 18: 1127-1133 (2011) (which focuses on non-viral delivery vehicles for siRNA that are also useful for delivery of other polynucleotides).

[0445] Polynucleotides, such as guide RNA, sgRNA, and mRNA encoding an endonuclease, may be delivered to a cell or a patient by a lipid nanoparticle (LNP).

[0446] A LNP refers to any particle having a diameter of less than 1000 nm, 500 nm, 250 nm, 200 nm, 150 nm, 100 nm, 75 nm, 50 nm, or 25 nm. Alternatively, a nanoparticle may range in size from 1-1000 nm, 1-500 nm, 1-250 nm, 25-200 nm, 25-100 nm, 35-75 nm, or 25-60 nm.

[0447] LNPs may be made from cationic, anionic, or neutral lipids. Neutral lipids, such as the fusogenic phospholipid DOPE or the membrane component cholesterol, may be included in LNPs as ‘helper lipids’ to enhance transfection activity and nanoparticle stability. Limitations of cationic lipids include low efficacy owing to poor stability and rapid clearance, as well as the generation of inflammatory or anti-inflammatory responses.

[0448] LNPs may also be comprised of hydrophobic lipids, hydrophilic lipids, or both hydrophobic and hydrophilic lipids.

[0449] Any lipid or combination of lipids that are known in the art may be used to produce a LNP. Examples of lipids used to produce LNPs are: DOTMA, DOSPA, DOTAP, DMRIE, DC-cholesterol, DOTAP-cholesterol, GAP-DMORIE-DPyPE, and GL67A-DOPE-DMPE-polyethylene glycol (PEG). Examples of cationic lipids are: 98N12-5, C12-200, DLin-KC2-DMA (KC2), DLin-MC3-DMA (MC3), XTC, MD1, and 7C1. Examples of neutral lipids are: DPSC, DPPC, POPC, DOPE, and SM. Examples of PEG-modified lipids are: PEG-DMG, PEG-CerC14, and PEG-CerC20.

[0450] The lipids may be combined in any number of molar ratios to produce a LNP. In addition, the polynucleotide(s) may be combined with lipid(s) in a wide range of molar ratios to produce a LNP.

[0451] As stated previously, the site-directed polypeptide and genome-targeting nucleic acid may each be administered separately to a cell or a patient. On the other hand, the site-directed polypeptide may be pre-complexed with one or more guide RNAs, or one or more crRNA together with a tracrRNA. The pre-complexed material may then be administered to a cell or a patient. Such pre-complexed material is known as a ribonucleoprotein particle (RNP).

[0452] RNA is capable of forming specific interactions with RNA or DNA. While this property is exploited in many biological processes, it also comes with the risk of promiscuous interactions in a nucleic acid-rich cellular environment. One solution to this problem is the formation of ribonucleoprotein particles (RNPs), in which the RNA is pre-complexed with an endonuclease. Another benefit of the RNP is protection of the RNA from degradation.

[0453] The endonuclease in the RNP may be modified or unmodified. Likewise, the gRNA, crRNA, tracrRNA, or sgRNA may be modified or unmodified. Numerous modifications are known in the art and may be used.

[0454] The endonuclease and sgRNA may be generally combined in a 1:1 molar ratio. Alternatively, the endonuclease, crRNA and tracrRNA may be generally combined in a 1:1:1 molar ratio. However, a wide range of molar ratios may be used to produce a RNP.

[0455] A recombinant adeno-associated virus (AAV) vector may be used for delivery. Techniques to produce rAAV particles, in which an AAV genome to be packaged that includes the polynucleotide to be delivered, rep and cap genes, and helper virus functions are provided to a cell are standard in the art. Production of rAAV requires that the following components are present within a single cell (denoted herein as a packaging cell): a rAAV genome, AAV rep and cap genes separate from (i.e., not in) the rAAV genome, and helper virus functions. The AAV rep and cap genes may be from any AAV serotype for which recombinant virus can be derived, and may be from a different AAV serotype than the rAAV genome ITRs, including, but not limited to, AAV serotypes AAV-1, AAV-2, AAV-3, AAV-4, AAV-5, AAV-6, AAV-7, AAV-8, AAV-9, AAV-10, AAV-11, AAV-12, AAV-13 and AAV rh.74. Production of pseudotyped rAAV is disclosed in, for example, international patent application publication number WO 01/83692. See Table 1.

TABLE 1

| AAV Serotype | Genbank Accession No. |
|---|---|
| AAV-1 | NC_002077.1 |
| AAV-2 | NC_001401.2 |
| AAV-3 | NC_001729.1 |
| AAV-3B | AF028705.1 |
| AAV-4 | NC_001829.1 |
| AAV-5 | NC_006152.1 |
| AAV-6 | AF028704.1 |
| AAV-7 | NC_006260.1 |
| AAV-8 | NC_006261.1 |
| AAV-9 | AX753250.1 |
| AAV-10 | AY631965.1 |
| AAV-11 | AY631966.1 |
| AAV-12 | DQ813647.1 |
| AAV-13 | EU285562.1 |

[0456] A method of generating a packaging cell involves creating a cell line that stably expresses all of the necessary components for AAV particle production. For example, a plasmid (or multiple plasmids) comprising a rAAV genome lacking AAV rep and cap genes, AAV rep and cap genes separate from the rAAV genome, and a selectable marker, such as a neomycin resistance gene, are integrated into the genome of a cell. AAV genomes have been introduced into bacterial plasmids by procedures such as GC tailing (Samulski et al., 1982, Proc. Natl. Acad. S6. USA, 79:2077-2081), addition of synthetic linkers containing restriction endonuclease cleavage sites (Laughlin et al., 1983, Gene, 23:65-73) or by direct, blunt-end ligation (Senapathy & Carter, 1984, J. Biol. Chem., 259:4661-4666). The packaging cell line is then infected with a helper virus, such as adenovirus. The advantages of this method are that the cells are selectable and are suitable for large-scale production of rAAV. Other examples of suitable methods employ adenovirus or baculovirus, rather than plasmids, to introduce rAAV genomes and/or rep and cap genes into packaging cells.

[0457] General principles of rAAV production are reviewed in, for example, Carter, 1992, Current Opinions in Biotechnology, 1533-539; and Muzyczka, 1992, Curr. Topics in Microbial. and Immunol., 158:97-129). Various approaches are described in Ratschin et al., Mol. Cell. Biol. 4:2072 (1984); Hermonat et al., Proc. Natl. Acad. Sci. USA, 81:6466 (1984); Tratschin et al., Mol. Cell. Biol. 5:3251 (1985); McLaughlin et al., J. Virol., 62:1963 (1988); and Lebkowski et al., 1988 Mol. Cell. Biol., 7:349 (1988). Samulski et al. (1989, J. Virol., 63:3822-3828); U.S. Pat. No. 5,173,414; WO 95/13365 and corresponding U.S. Pat. No. 5,658.776 WO 95/13392; WO 96/17947; PCT/US98/18600, WO 97/09441 (PCT/US96/14423); WO 97/08298 (PCT/US96/13872); WO 97/21825 (PCT/US96/20777); WO 97/06243 (PCT/FR96/01064); WO 99/11764; Perrin et al. (1995) Vaccine 13:1244-1250; Paul et al. (1993) Human Gene Therapy 4:609-615; Clark et al. (1996) Gene Therapy 3:1124-1132; U.S. Pat. No. 5,786,211; U.S. Pat. No. 5,871,982; and U.S. Pat. No. 6,258,595.

[0458] AAV vector serotypes can be matched to target cell types. For example, the following exemplary cell types may be transduced by the indicated AAV serotypes among others. See Table 2.

TABLE 2

| Tissue/Cell Type | Serotype |
|---|---|
| Liver | AAV3, AAV5, AAV8, AAV9 |
| Skeletal muscle | AAV1, AAV7, AAV6, AAV8, AAV9 |
| Central nervous system | AAV5, AAV1, AAV4 |
| RPE | AAV5, AAV4 |
| Photoreceptor cells | AAV5 |
| Lung | AAV9 |
| Heart | AAV8 |
| Pancreas | AAV8 |
| Kidney | AAV2, AAV8 |
| Hematopoietic stem cells | AAV6 |

[0459] In addition to adeno-associated viral vectors, other viral vectors can be used. Such viral vectors include, but are not limited to, lentivirus, alphavirus, enterovirus, pestivirus, baculovirus, herpesvirus, Epstein Barr virus, papovavirusr, poxvirus, vaccinia virus, and herpes simplex virus.

[0460] In some embodiments, Cas9 mRNA, sgRNA targeting one or two loci in IL7R gene, and donor DNA is each separately formulated into lipid nanoparticles, or are all co-formulated into one lipid nanoparticle, or co-formulated into two or more lipid nanoparticles.

[0461] In some embodiments, Cas9 mRNA is formulated in a lipid nanoparticle, while sgRNA and donor DNA are delivered in an AAV vector. In some embodiments, Cas9 mRNA and sgRNA are co-formulated in a lipid nanoparticle, while donor DNA is delivered in an AAV vector.

[0462] Options are available to deliver the Cas9 nuclease as a DNA plasmid, as mRNA or as a protein. The guide RNA can be expressed from the same DNA, or can also be delivered as an RNA. The RNA can be chemically modified to alter or improve its half-life, or decrease the likelihood or degree of immune response. The endonuclease protein can be complexed with the gRNA prior to delivery. Viral vectors allow efficient delivery; split versions of Cas9 and smaller orthologs of Cas9 can be packaged in AAV, as can donors for HDR. A range of non-viral delivery methods also exist that can deliver each of these components, or non-viral and viral methods can be employed in tandem. For example, nano-particles can be used to deliver the protein and guide RNA, while AAV can be used to deliver a donor DNA.

[0463] Exosomes

[0464] Exosomes, a type of microvesicle bound by phospholipid bilayer, can be used to deliver nucleic acids to specific tissue. Many different types of cells within the body naturally secrete exosomes. Exosomes form within the cytoplasm when endosomes invaginate and form multivesicular-endosomes (MVE). When the MVE fuses with the cellular membrane, the exosomes are secreted in the extracellular space. Ranging between 30-120 nm in diameter, exosomes can shuttle various molecules from one cell to another in a form of cell-to-cell communication. Cells that naturally produce exosomes, such as mast cells, can be genetically altered to produce exosomes with surface proteins that target specific tissues, alternatively exosomes can be isolated from the bloodstream. Specific nucleic acids can be placed within the engineered exosomes with electroporation. When introduced systemically, the exosomes can deliver the nucleic acids to the specific target tissue.

[0465] Genetically Modified Cells

[0466] The term “genetically modified cell” refers to a cell that comprises at least one genetic modification introduced by genome editing (e.g., using the CRISPR/Cas9/Cpf1 system). In some ex vivo examples herein, the genetically modified cell is genetically modified progenitor cell. In some in vivo examples herein, the genetically modified cell is a genetically modified hematopoietic progenitor cell. A genetically modified cell comprising an exogenous genome-targeting nucleic acid and/or an exogenous nucleic acid encoding a genome-targeting nucleic acid is contemplated herein.

[0467] The term “control treated population” describes a population of cells that has been treated with identical media, viral induction, nucleic acid sequences, temperature, confluency, flask size, pH, etc., with the exception of the addition of the genome editing components. Any method known in the art can be used to measure restoration of IL7R gene or protein expression or activity, for example Western Blot analysis of the IL7R protein or quantifying IL7R mRNA.

[0468] The term “isolated cell” refers to a cell that has been removed from an organism in which it was originally found, or a descendant of such a cell. Optionally, the cell is cultured in vitro, e.g., under defined conditions or in the presence of other cells. Optionally, the cell is later introduced into a second organism or re-introduced into the organism from which it (or the cell from which it is descended) was isolated.

[0469] The term “isolated population” with respect to an isolated population of cells refers to a population of cells that has been removed and separated from a mixed or heterogeneous population of cells. In some embodiments, the isolated population is a substantially pure population of cells, as compared to the heterogeneous population from which the cells were isolated or enriched. In some embodiments, the isolated population is an isolated population of human progenitor cells, e.g., a substantially pure population of human progenitor cells, as compared to a heterogeneous population of cells comprising human progenitor cells and cells from which the human progenitor cells were derived.

[0470] The term “substantially enhanced,” with respect to a particular cell population, refers to a population of cells in which the occurrence of a particular type of cell is increased relative to pre-existing or reference levels, by at least 2-fold, at least 3-, at least 4-, at least 5-, at least 6-, at least 7-, at least 8-, at least 9, at least 10-, at least 20-, at least 50-, at least 100-, at least 400-, at least 1000-, at least 5000-, at least 20000-, at least 100000- or more fold depending, e.g., on the desired levels of such cells for ameliorating SCID and/or Omenn Syndrome.

[0471] The term “substantially enriched” with respect to a particular cell population, refers to a population of cells that is at least about 10%, about 20%, about 30%, about 40%, about 50%, about 60%, about 70% or more with respect to the cells making up a total cell population.

[0472] The terms “substantially enriched” or “substantially pure” with respect to a particular cell population, refers to a population of cells that is at least about 75%, at least about 85%, at least about 90%, or at least about 95% pure, with respect to the cells making up a total cell population. That is, the terms “substantially pure” or “essentially purified,” with regard to a population of progenitor cells, refers to a population of cells that contain fewer than about 20%, about 15%, about 10%, about 9%, about 8%, about 7%, about 6%, about 5%, about 4%, about 3%, about 2%, about 1%, or less than 1%, of cells that are not progenitor cells as defined by the terms herein.

[0473] Differentiation of Genome-Edited iPSCs Into Hematopoietic Progenitor Cells or White Blood Cells

[0474] Another step of the ex vivo methods of the present disclosure comprises differentiating the genome-edited iPSCs into hematopoietic progenitor cells or white blood cells. The differentiating step may be performed according to any method known in the art.

[0475] Differentiation of Genome-Edited Mesenchymal Stem Cells Into Hematopoietic Progenitor Cells or White Blood Cells

[0476] Another step of the ex vivo methods of the present disclosure comprises differentiating the genome-edited mesenchymal stem cells into hematopoietic progenitor cells or white blood cells. The differentiating step may be performed according to any method known in the art.

[0477] Implanting Cells Into Patients

[0478] Another step of the ex vivo methods of the present disclosure comprises implanting the cells into patients. This implanting step may be accomplished using any method of implantation known in the art. For example, the genetically modified cells may be injected directly in the patient's blood or otherwise administered to the patient. The genetically modified cells may be purified ex vivo using a selected marker.

[0479] Pharmaceutically Acceptable Carriers

[0480] The ex vivo methods of administering progenitor cells to a subject contemplated herein involve the use of therapeutic compositions comprising progenitor cells.

[0481] Therapeutic compositions contain a physiologically tolerable carrier together with the cell composition, and optionally at least one additional bioactive agent as described herein, dissolved or dispersed therein as an active ingredient. In some embodiments, the therapeutic composition is not substantially immunogenic when administered to a mammal or human patient for therapeutic purposes, unless so desired.

[0482] In general, the progenitor cells described herein are administered as a suspension with a pharmaceutically acceptable carrier. One of skill in the art will recognize that a pharmaceutically acceptable carrier to be used in a cell composition will not include buffers, compounds, cryopreservation agents, preservatives, or other agents in amounts that substantially interfere with the viability of the cells to be delivered to the subject. A formulation comprising cells can include e.g., osmotic buffers that permit cell membrane integrity to be maintained, and optionally, nutrients to maintain cell viability or enhance engraftment upon administration. Such formulations and suspensions are known to those of skill in the art and/or can be adapted for use with the progenitor cells, as described herein, using routine experimentation.

[0483] A cell composition can also be emulsified or presented as a liposome composition, provided that the emulsification procedure does not adversely affect cell viability. The cells and any other active ingredient can be mixed with excipients that are pharmaceutically acceptable and compatible with the active ingredient, and in amounts suitable for use in the therapeutic methods described herein.

[0484] Additional agents included in a cell composition can include pharmaceutically acceptable salts of the components therein. Pharmaceutically acceptable salts include the acid addition salts (formed with the free amino groups of the polypeptide) that are formed with inorganic acids, such as, for example, hydrochloric or phosphoric acids, or such organic acids as acetic, tartaric, mandelic and the like. Salts formed with the free carboxyl groups can also be derived from inorganic bases, such as, for example, sodium, potassium, ammonium, calcium or ferric hydroxides, and such organic bases as isopropylamine, trimethylamine, 2-ethylamino ethanol, histidine, procaine and the like.

[0485] Physiologically tolerable carriers are well known in the art. Exemplary liquid carriers are sterile aqueous solutions that contain no materials in addition to the active ingredients and water, or contain a buffer such as sodium phosphate at physiological pH value, physiological saline or both, such as phosphate-buffered saline. Still further, aqueous carriers can contain more than one buffer salt, as well as salts such as sodium and potassium chlorides, dextrose, polyethylene glycol and other solutes. Liquid compositions can also contain liquid phases in addition to and to the exclusion of water. Exemplary of such additional liquid phases are glycerin, vegetable oils such as cottonseed oil, and water-oil emulsions. The amount of an active compound used in the cell compositions that is effective in the treatment of a particular disorder or condition will depend on the nature of the disorder or condition, and can be determined by standard clinical techniques.

[0486] Administration & Efficacy

[0487] The terms “administering,” “introducing” and “transplanting” are used interchangeably in the context of the placement of cells, e.g., progenitor cells, into a subject, by a method or route that results in at least partial localization of the introduced cells at a desired site, such as a site of injury or repair, such that a desired effect(s) is produced. The cells e.g., progenitor cells, or their differentiated progeny can be administered by any appropriate route that results in delivery to a desired location in the subject where at least a portion of the implanted cells or components of the cells remain viable. The period of viability of the cells after administration to a subject can be as short as a few hours, e.g., twenty-four hours, to a few days, to as long as several years, or even the life time of the patient, i.e., long-term engraftment. For example, in some aspects described herein, an effective amount of myogenic progenitor cells is administered via a systemic route of administration, such as an intraperitoneal or intravenous route.

[0488] The terms “individual”, “subject,” “host” and “patient” are used interchangeably herein and refer to any subject for whom diagnosis, treatment or therapy is desired. In some aspects, the subject is a mammal. In some aspects, the subject is a human being.

[0489] When provided prophylactically, progenitor cells described herein can be administered to a subject in advance of any symptom of SCID and/or Omenn Syndrome, e.g., prior to the development of alpha/beta T-cell lymphopenia with gamma/delta T-cell expansion, severe cytomegalovirus (CMV) infection, autoimmunity, chronic inflammation of the skin, eosinophilia, failure to thrive, swollen lymph nodes, swollen spleen, diarrhea and enlarged liver. Accordingly, the prophylactic administration of a hematopoietic progenitor cell population serves to prevent SCID and/or Omenn Syndrome.

[0490] When provided therapeutically, hematopoietic progenitor cells are provided at (or after) the onset of a symptom or indication of SCID and/or Omenn Syndrome, e.g., upon the onset of disease.

[0491] In some embodiments, the hematopoietic progenitor cell population being administered according to the methods described herein comprises allogeneic hematopoietic progenitor cells obtained from one or more donors. “Allogeneic” refers to a hematopoietic progenitor cell or biological samples comprising hematopoietic progenitor cells obtained from one or more different donors of the same species, where the genes at one or more loci are not identical. For example, a hematopoietic progenitor cell population being administered to a subject can be derived from one more unrelated donor subjects, or from one or more non-identical siblings. In some embodiments, syngeneic hematopoietic progenitor cell populations may be used, such as those obtained from genetically identical animals, or from identical twins. In some embodiments, the hematopoietic progenitor cells are autologous cells; that is, the hematopoietic progenitor cells are obtained or isolated from a subject and administered to the same subject, i.e., the donor and recipient are the same.

[0492] The term “effective amount” refers to the amount of a population of progenitor cells or their progeny needed to prevent or alleviate at least one or more signs or symptoms of SCID and/or Omenn Syndrome, and relates to a sufficient amount of a composition to provide the desired effect, e.g., to treat a subject having SCID and/or Omenn Syndrome. The term “therapeutically effective amount” therefore refers to an amount of progenitor cells or a composition comprising progenitor cells that is sufficient to promote a particular effect when administered to a typical subject, such as one who has or is at risk for SCID and/or Omenn Syndrome. An effective amount would also include an amount sufficient to prevent or delay the development of a symptom of the disease, alter the course of a symptom of the disease (for example but not limited to, slow the progression of a symptom of the disease), or reverse a symptom of the disease. It is understood that for any given case, an appropriate “effective amount” can be determined by one of ordinary skill in the art using routine experimentation.

[0493] For use in the various aspects described herein, an effective amount of progenitor cells comprises at least 10² progenitor cells, at least 5×10² progenitor cells, at least 10³ progenitor cells, at least 5×10³ progenitor cells, at least 10⁴ progenitor cells, at least 5×10⁴ progenitor cells, at least 10⁵ progenitor cells, at least 2×10⁵ progenitor cells, at least 3×10⁵ progenitor cells, at least 4×10⁵ progenitor cells, at least 5×10⁵ progenitor cells, at least 6×10⁵ progenitor cells, at least 7×10⁵ progenitor cells, at least 8×10⁵ progenitor cells, at least 9×10⁵ progenitor cells, at least 1×10⁶ progenitor cells, at least 2×10⁶ progenitor cells, at least 3×10⁶ progenitor cells, at least 4×10⁶ progenitor cells, at least 5×10⁶ progenitor cells, at least 6×10⁶ progenitor cells, at least 7×10⁶ progenitor cells, at least 8×10⁶ progenitor cells, at least 9×10⁶ progenitor cells, or multiples thereof. The progenitor cells are derived from one or more donors, or are obtained from an autologous source. In some examples described herein, the progenitor cells are expanded in culture prior to administration to a subject in need thereof.

[0494] Modest and incremental increases in the levels of functional IL7R expressed in cells of patients having SCID and/or Omenn Syndrome can be beneficial for ameliorating one or more symptoms of the disease, for increasing long-term survival, and/or for reducing side effects associated with other treatments. Upon administration of such cells to human patients, the presence of hemaotpoietic progenitors that are producing increased levels of functional IL7R is beneficial. In some embodiments, effective treatment of a subject gives rise to at least about 3%, 5% or 7% functional IL7R relative to total IL7R in the treated subject. In some embodiments, functional IL7R will be at least about 10% of total IL7R. In some embodiments, functional IL7R will be at least about 20% to 30% of total IL7R. Similarly, the introduction of even relatively limited subpopulations of cells having significantly elevated levels of functional IL7R can be beneficial in various patients because in some situations normalized cells will have a selective advantage relative to diseased cells. However, even modest levels of hematopoietic progenitors with elevated levels of functional IL7R can be beneficial for ameliorating one or more aspects of SCID and/or Omenn Syndrome in patients. In some embodiments, about 10%, about 20%, about 30%, about 40%, about 50%, about 60%, about 70%, about 80%, about 90% or more of the hematopoietic progenitors in patients to whom such cells are administered are producing increased levels of functional IL7R.

[0495] “Administered” refers to the delivery of a progenitor cell composition into a subject by a method or route that results in at least partial localization of the cell composition at a desired site. A cell composition can be administered by any appropriate route that results in effective treatment in the subject, i.e. administration results in delivery to a desired location in the subject where at least a portion of the composition delivered, i.e. at least 1×10⁴ cells are delivered to the desired site for a period of time. Modes of administration include injection, infusion, instillation, or ingestion. “Injection” includes, without limitation, intravenous, intramuscular, intra-arterial, intrathecal, intraventricular, intracapsular, intraorbital, intracardiac, intradermal, intraperitoneal, transtracheal, subcutaneous, subcuticular, intraarticular, sub capsular, subarachnoid, intraspinal, intracerebro spinal, and intrasternal injection and infusion. In some embodiments, the route is intravenous. For the delivery of cells, administration by injection or infusion can be made.

[0496] The cells are administered systemically. The phrases “systemic administration,” “administered systemically”, “peripheral administration” and “administered peripherally” refer to the administration of a population of progenitor cells other than directly into a target site, tissue, or organ, such that it enters, instead, the subject's circulatory system and, thus, is subject to metabolism and other like processes.

[0497] The efficacy of a treatment comprising a composition for the treatment of SCID and/or Omenn Syndrome can be determined by the skilled clinician. However, a treatment is considered “effective treatment,” if any one or all of the signs or symptoms of, as but one example, levels of functional IL7R are altered in a beneficial manner (e.g., increased by at least 10%), or other clinically accepted symptoms or markers of disease are improved or ameliorated. Efficacy can also be measured by failure of an individual to worsen as assessed by hospitalization or need for medical interventions (e.g., progression of the disease is halted or at least slowed). Methods of measuring these indicators are known to those of skill in the art and/or described herein. Treatment includes any treatment of a disease in an individual or an animal (some non-limiting examples include a human, or a mammal) and includes: (1) inhibiting the disease, e.g., arresting, or slowing the progression of symptoms; or (2) relieving the disease, e.g., causing regression of symptoms; and (3) preventing or reducing the likelihood of the development of symptoms.

[0498] The treatment according to the present disclosure ameliorates one or more symptoms associated with SCID and/or Omenn Syndrome by increasing the amount of functional IL7R in the individual. Early signs typically associated with SCID and/or Omenn Syndrome include for example, development of alpha/beta T-cell lymphopenia with gamma/delta T-cell expansion, severe cytomegalovirus (CMV) infection, autoimmunity, chronic inflammation of the skin, eosinophilia, failure to thrive, swollen lymph nodes, swollen spleen, diarrhea and enlarged liver.

[0499] Kits

[0500] The present disclosure provides kits for carrying out the methods described herein. A kit can include one or more of a genome-targeting nucleic acid, a polynucleotide encoding a genome-targeting nucleic acid, a site-directed polypeptide, a polynucleotide encoding a site-directed polypeptide, and/or any nucleic acid or proteinaceous molecule necessary to carry out the aspects of the methods described herein, or any combination thereof.

[0501] In some embodiments, a kit comprises: (1) a vector comprising a nucleotide sequence encoding a genome-targeting nucleic acid, (2) the site-directed polypeptide or a vector comprising a nucleotide sequence encoding the site-directed polypeptide, and (3) a reagent for reconstitution and/or dilution of the vector(s) and or polypeptide.

[0502] In some embodiments, a kit comprises: (1) a vector comprising (i) a nucleotide sequence encoding a genome-targeting nucleic acid, and (ii) a nucleotide sequence encoding the site-directed polypeptide; and (2) a reagent for reconstitution and/or dilution of the vector.

[0503] In some embodiments of any of the above kits, the kit comprises a single-molecule guide genome-targeting nucleic acid. In some embodiments of any of the above kits, the kit comprises a double-molecule genome-targeting nucleic acid. In some embodiments of any of the above kits, the kit comprises two or more double-molecule guides or single-molecule guides. In some embodiments, the kits comprises a vector that encodes the nucleic acid targeting nucleic acid.

[0504] In any of the above kits, the kit further comprises a polynucleotide to be inserted to effect the desired genetic modification.

[0505] Components of a kit may be in separate containers, or combined in a single container.

[0506] Any kit described above can further comprise one or more additional reagents, where such additional reagents are selected from a buffer, a buffer for introducing a polypeptide or polynucleotide into a cell, a wash buffer, a control reagent, a control vector, a control RNA polynucleotide, a reagent for in vitro production of the polypeptide from DNA, adaptors for sequencing and the like. A buffer can be a stabilization buffer, a reconstituting buffer, a diluting buffer, or the like. In some embodiments, a kit also comprises one or more components that can be used to facilitate or enhance the on-target binding or the cleavage of DNA by the endonuclease, or improve the specificity of targeting.

[0507] In addition to the above-mentioned components, a kit further comprises instructions for using the components of the kit to practice the methods. The instructions for practicing the methods are generally recorded on a suitable recording medium. For example, the instructions may be printed on a substrate, such as paper or plastic, etc. The instructions nay be present in the kits as a package insert, in the labeling of the container of the kit or components thereof (i.e., associated with the packaging or subpackaging), etc. The instructions can be present as an electronic storage data file present on a suitable computer readable storage medium, e.g. CD-ROM, diskette, flash drive, etc. In some instances, the actual instructions are not present in the kit, but means for obtaining the instructions from a remote source (e.g. via the Internet), can be provided. An example of this case is a kit that comprises a web address where the instructions can be viewed and/or from which the instructions can be downloaded. As with the instructions, this means for obtaining the instructions can be recorded on a suitable substrate.

[0508] Guide RNA Formulation

[0509] Guide RNAs of the present disclosure are formulated with pharmaceutically acceptable excipients such as carriers, solvents, stabilizers, adjuvants, diluents, etc., depending upon the particular mode of administration and dosage form. Guide RNA compositions are generally formulated to achieve a physiologically compatible pH, and range from a pH of about 3 to a pH of about 11, about pH 3 to about pH 7, depending on the formulation and route of administration. In some embodiments, the pH is adjusted to a range from about pH 5.0 to about pH 8. In some embodiments, the compositions comprises a therapeutically effective amount of at least one compound as described herein, together with one or more pharmaceutically acceptable excipients. Optionally, the compositions comprises a combination of the compounds described herein, or may include a second active ingredient useful in the treatment or prevention of bacterial growth (for example and without limitation, anti-bacterial or anti-microbial agents), or may include a combination of reagents of the present disclosure.

[0510] Suitable excipients include, for example, carrier molecules that include large, slowly metabolized macromolecules such as proteins, polysaccharides, polylactic acids, polyglycolic acids, polymeric amino acids, amino acid copolymers, and inactive virus particles. Other exemplary excipients can include antioxidants (for example and without limitation, ascorbic acid), chelating agents (for example and without limitation, EDTA), carbohydrates (for example and without limitation, dextrin, hydroxyalkylcellulose, and hydroxyalkylmethylcellulose), stearic acid, liquids (for example and without limitation, oils, water, saline, glycerol and ethanol), wetting or emulsifying agents, pH buffering substances, and the like.

[0511] Other Possible Therapeutic Approaches

[0512] Gene editing can be conducted using nucleases engineered to target specific sequences. To date there are four major types of nucleases: meganucleases and their derivatives, zinc finger nucleases (ZFNs), transcription activator like effector nucleases (TALENs), and CRISPR-Cas9 nuclease systems. The nuclease platforms vary in difficulty of design, targeting density and mode of action, particularly as the specificity of ZFNs and TALENs is through protein-DNA interactions, while RNA-DNA interactions primarily guide Cas9. Cas9 cleavage also requires an adjacent motif, the PAM, which differs between different CRISPR systems. Cas9 from Streptococcus pyogenes cleaves using a NRG PAM, CRISPR from Neisseria meningitidis can cleave at sites with PAMs including NNNNGATT, NNNNNGTTT and NNNNGCTT. A number of other Cas9 orthologs target protospacer adjacent to alternative PAMs.

[0513] CRISPR endonucleases, such as Cas9, can be used in the methods of the present disclosure. However, the teachings described herein, such as therapeutic target sites, could be applied to other forms of endonucleases, such as ZFNs, TALENs, HEs, or MegaTALs, or using combinations of nucleases. However, in order to apply the teachings of the present disclosure to such endonucleases, one would need to, among other things, engineer proteins directed to the specific target sites.

[0514] Additional binding domains may be fused to the Cas9 protein to increase specificity. The target sites of these constructs would map to the identified gRNA specified site, but would require additional binding motifs, such as for a zinc finger domain. In the case of Mega-TAL, a meganuclease can be fused to a TALE DNA-binding domain. The meganuclease domain can increase specificity and provide the cleavage. Similarly, inactivated or dead Cas9 (dCas9) can be fused to a cleavage domain and require the sgRNA/Cas9 target site and adjacent binding site for the fused DNA-binding domain. This likely would require some protein engineering of the dCas9, in addition to the catalytic inactivation, to decrease binding without the additional binding site.

[0515] Zinc Finger Nucleases

[0516] Zinc finger nucleases (ZFNs) are modular proteins comprised of an engineered zinc finger DNA binding domain linked to the catalytic domain of the type II endonuclease Fokl. Because Fokl functions only as a dimer, a pair of ZFNs must be engineered to bind to cognate target “half-site” sequences on opposite DNA strands and with precise spacing between them to enable the catalytically active Fokl dimer to form. Upon dimerization of the Fokl domain, which itself has no sequence specificity per se, a DNA double-strand break is generated between the ZFN half-sites as the initiating step in genome editing.

[0517] The DNA binding domain of each ZFN is typically comprised of 3-6 zinc fingers of the abundant Cys2-His2 architecture, with each finger primarily recognizing a triplet of nucleotides on one strand of the target DNA sequence, although cross-strand interaction with a fourth nucleotide also can be important. Alteration of the amino acids of a finger in positions that make key contacts with the DNA alters the sequence specificity of a given finger. Thus, a four-finger zinc finger protein will selectively recognize a 12 bp target sequence, where the target sequence is a composite of the triplet preferences contributed by each finger, although triplet preference can be influenced to varying degrees by neighboring fingers. An important aspect of ZFNs is that they can be readily re-targeted to almost any genomic address simply by modifying individual fingers, although considerable expertise is required to do this well. In most applications of ZFNs, proteins of 4-6 fingers are used, recognizing 12-18 bp respectively. Hence, a pair of ZFNs will typically recognize a combined target sequence of 24-36 bp, not including the 5-7 bp spacer between half-sites. The binding sites can be separated further with larger spacers, including 15-17 bp. A target sequence of this length is likely to be unique in the human genome, assuming repetitive sequences or gene homologs are excluded during the design process. Nevertheless, the ZFN protein-DNA interactions are not absolute in their specificity so off-target binding and cleavage events do occur, either as a heterodimer between the two ZFNs, or as a homodimer of one or the other of the ZFNs. The latter possibility has been effectively eliminated by engineering the dimerization interface of the Fokl domain to create “plus” and “minus” variants, also known as obligate heterodimer variants, which can only dimerize with each other, and not with themselves. Forcing the obligate heterodimer prevents formation of the homodimer. This has greatly enhanced specificity of ZFNs, as well as any other nuclease that adopts these Fokl variants.

[0518] A variety of ZFN-based systems have been described in the art, modifications thereof are regularly reported, and numerous references describe rules and parameters that are used to guide the design of ZFNs; see, e.g., Segal et al., Proc Natl Acad Sci USA 96(6):2758-63 (1999); Dreier B et al., J Mol Biol. 303(4):489-502 (2000); Liu Q et al., J Biol Chem. 277(6):3850-6 (2002); Dreier et al., J Biol Chem 280(42):35588-97 (2005); and Dreier et al., J Biol Chem. 276(31):29466-78 (2001).

[0519] Transcription Activator-Like Effector Nucleases (TALENs)

[0520] TALENs represent another format of modular nucleases whereby, as with ZFNs, an engineered DNA binding domain is linked to the Fokl nuclease domain, and a pair of TALENs operate in tandem to achieve targeted DNA cleavage. The major difference from ZFNs is the nature of the DNA binding domain and the associated target DNA sequence recognition properties. The TALEN DNA binding domain derives from TALE proteins, which were originally described in the plant bacterial pathogen Xanthomonas sp. TALEs are comprised of tandem arrays of 33-35 amino acid repeats, with each repeat recognizing a single basepair in the target DNA sequence that is typically up to 20 bp in length, giving a total target sequence length of up to 40 bp. Nucleotide specificity of each repeat is determined by the repeat variable diresidue (RVD), which includes just two amino acids at positions 12 and 13. The bases guanine, adenine, cytosine and thymine are predominantly recognized by the four RVDs: Asn-Asn, Asn-Ile, His-Asp and Asn-Gly, respectively. This constitutes a much simpler recognition code than for zinc fingers, and thus represents an advantage over the latter for nuclease design. Nevertheless, as with ZFNs, the protein-DNA interactions of TALENs are not absolute in their specificity, and TALENs have also benefitted from the use of obligate heterodimer variants of the Fokl domain to reduce off-target activity.

[0521] Additional variants of the Fokl domain have been created that are deactivated in their catalytic function. If one half of either a TALEN or a ZFN pair contains an inactive Fokl domain, then only single-strand DNA cleavage (nicking) will occur at the target site, rather than a DSB. The outcome is comparable to the use of CRISPR/Cas9/Cpf1 “nickase” mutants in which one of the Cas9 cleavage domains has been deactivated. DNA nicks can be used to drive genome editing by HDR, but at lower efficiency than with a DSB. The main benefit is that off-target nicks are quickly and accurately repaired, unlike the DSB, which is prone to NHEJ-mediated mis-repair.

[0522] A variety of TALEN-based systems have been described in the art, and modifications thereof are regularly reported; see, e.g., Boch, Science 326(5959):1509-12 (2009); Mak et al., Science 335(6069):716-9 (2012); and Moscou et al., Science 326(5959):1501 (2009). The use of TALENs based on the “Golden Gate” platform, or cloning scheme, has been described by multiple groups; see, e.g., Cermak et al., Nucleic Acids Res. 39(12):e82 (2011); Li et al., Nucleic Acids Res. 39(14):6315-25(2011); Weber et al., PLoS One. 6(2):e16765 (2011); Wang et al., J Genet Genomics 41(6):339-47, Epub 2014 May 17 (2014); and Cermak T et al., Methods Mol Biol. 1239:133-59 (2015).

[0523] Homing Endonucleases

[0524] Homing endonucleases (HEs) are sequence-specific endonucleases that have long recognition sequences (14-44 base pairs) and cleave DNA with high specificity—often at sites unique in the genome. There are at least six known families of HEs as classified by their structure, including LAGLIDADG (SEQ ID NO: 54,861), GIY-YIG, His-Cis box, H-N-H, PD-(D/E)xK, and Vsr-like that are derived from a broad range of hosts, including eukarya, protists, bacteria, archaea, cyanobacteria and phage. As with ZFNs and TALENs, HEs can be used to create a DSB at a target locus as the initial step in genome editing. In addition, some natural and engineered HEs cut only a single strand of DNA, thereby functioning as site-specific nickases. The large target sequence of HEs and the specificity that they offer have made them attractive candidates to create site-specific DSBs.

[0525] A variety of HE-based systems have been described in the art, and modifications thereof are regularly reported; see, e.g., the reviews by Steentoft et al., Glycobiology 24(8):663-80 (2014); Belfort and Bonocora, Methods Mol Biol. 1123:1-26 (2014); Hafez and Hausner, Genome 55(8):553-69 (2012); and references cited therein.

[0526] MegaTAL/Tev-mTALEN/MegaTev

[0527] As further examples of hybrid nucleases, the MegaTAL platform and Tev-mTALEN platform use a fusion of TALE DNA binding domains and catalytically active HEs, taking advantage of both the tunable DNA binding and specificity of the TALE, as well as the cleavage sequence specificity of the HE; see, e.g., Boissel et al., NAR 42: 2591-2601 (2014); Kleinstiver et al., G3 4:1155-65 (2014); and Boissel and Scharenberg, Methods Mol. Biol. 1239: 171-96 (2015).

[0528] In a further variation, the MegaTev architecture is the fusion of a meganuclease (Mega) with the nuclease domain derived from the GIY-YIG homing endonuclease I-Tevl (Tev). The two active sites are positioned ˜30 bp apart on a DNA substrate and generate two DSBs with non-compatible cohesive ends; see, e.g., Wolfs et al., NAR 42, 8816-29 (2014). It is anticipated that other combinations of existing nuclease-based approaches will evolve and be useful in achieving the targeted genome modifications described herein.

[0529] dCas9-Fokl or dCpf1-Fok1 and Other Nucleases

[0530] Combining the structural and functional properties of the nuclease platforms described above offers a further approach to genome editing that can potentially overcome some of the inherent deficiencies. As an example, the CRISPR genome editing system typically uses a single Cas9 endonuclease to create a DSB. The specificity of targeting is driven by a 20 or 22 nucleotide sequence in the guide RNA that undergoes Watson-Crick base-pairing with the target DNA (plus an additional 2 bases in the adjacent NAG or NGG PAM sequence in the case of Cas9 from S. pyogenes). Such a sequence is long enough to be unique in the human genome, however, the specificity of the RNA/DNA interaction is not absolute, with significant promiscuity sometimes tolerated, particularly in the 5′ half of the target sequence, effectively reducing the number of bases that drive specificity. One solution to this has been to completely deactivate the Cas9 or Cpf1 catalytic function—retaining only the RNA-guided DNA binding function—and instead fusing a Fokl domain to the deactivated Cas9; see, e.g., Tsai et al., Nature Biotech 32: 569-76 (2014); and Guilinger et al., Nature Biotech. 32: 577-82 (2014). Because Fokl must dimerize to become catalytically active, two guide RNAs are required to tether two Fokl fusions in close proximity to form the dimer and cleave DNA. This essentially doubles the number of bases in the combined target sites, thereby increasing the stringency of targeting by CRISPR-based systems.

[0531] As further example, fusion of the TALE DNA binding domain to a catalytically active HE, such as I-Tevl, takes advantage of both the tunable DNA binding and specificity of the TALE, as well as the cleavage sequence specificity of I-Tevl, with the expectation that off-target cleavage may be further reduced.

[0532] Methods and Compositions of the Invention

[0533] Accordingly, the present disclosure relates in particular to the following non-limiting inventions: In a first method, Method 1, the present disclosure provides a method for editing an Interleukin-7 receptor (IL7R) gene in a human cell by genome editing, the method comprising the step of: introducing into the human cell one or more deoxyribonucleic acid (DNA) endonucleases to effect one or more single-strand breaks (SSBs) or double-strand breaks (DSBs) within or near the IL7R gene or other DNA sequences that encode regulatory elements of the IL7R gene that results in a permanent insertion, deletion, correction, or modulation of expression or function of one or more mutations or exons within or near or affecting the expression or function of the IL7R gene or other DNA sequences that encode regulatory elements of the IL7R gene and results in restoration of IL7R protein activity.

[0534] In another method, Method 2, the present disclosure provides a method for inserting a IL7R gene in a human cell by genome editing, the method comprising introducing into the human cell one or more deoxyribonucleic acid (DNA) endonucleases to effect one or more single-strand breaks (SSBs) or double-strand breaks (DSBs) within or near a safe harbor locus that results in a permanent insertion of the IL7R gene or minigene, and results in restoration of IL7R activity.

[0535] In another method, Method 3, the present disclosure provides an ex vivo method for treating a patient with severe combined immunodeficiency (SCID) or Omenn Syndrome, the method comprising the steps of: i) creating a patient specific induced pluripotent stem cell (iPSC); ii) editing within or near an Interleukin-7 receptor (IL7R) gene of the iPSC or other DNA sequences that encode regulatory elements of the IL7R gene of the iPSC or within or near a safe harbor locus of the iPSC; iii) differentiating the genome-edited iPSC into a hematopoietic progenitor cell or a white blood cell; and iv) implanting the hematopoietic progenitor cell or white blood cell into the patient.

[0536] In another method, Method 4, the present disclosure provides an ex vivo method for treating a patient with severe combined immunodeficiency (SCID) or Omenn Syndrome as provided in Method 3, wherein the creating step comprises: a) isolating a somatic cell from the patient; and b) introducing a set of pluripotency-associated genes into the somatic cell to induce the somatic cell to become a pluripotent stem cell.

[0537] In another method, Method 5, the present disclosure provides an ex vivo method for treating a patient with severe combined immunodeficiency (SCID) or Omenn Syndrome as provided in Method 4, wherein the somatic cell is a fibroblast.

[0538] In another method, Method 6, the present disclosure provides an ex vivo method for treating a patient with severe combined immunodeficiency (SCID) or Omenn Syndrome as provided in Methods 4 or 5, wherein the set of pluripotency-associated genes is one or more of the genes selected from the group consisting of OCT4, SOX2, KLF4, Lin28, NANOG and cMYC.

[0539] In another method, Method 7, the present disclosure provides an ex vivo method for treating a patient with severe combined immunodeficiency (SCID) or Omenn Syndrome as provided in any one of Methods 3-6, wherein the editing step comprises introducing into the iPSC one or more deoxyribonucleic acid (DNA) endonucleases to effect one or more single-strand breaks (SSBs) or double-strand breaks (DSBs) within or near the IL7R gene or other DNA sequences that encode regulatory elements of the IL7R gene that results in a permanent insertion, deletion, correction, or modulation of expression or function of one or more mutations or exons within or near or affecting the expression or function of the IL7R gene or other DNA sequences that encode regulatory elements of the IL7R gene, or within or near a safe harbor locus that results in permanent insertion of the IL7R gene or minigene, and results in restoration of IL7R protein activity.

[0540] In another method, Method 8, the present disclosure provides the method of Method 7, wherein the safe harbor locus is selected from the group consisting of AAVS1 (PPP1R12C), ALB, Angptl3, ApoC3, ASGR2, CCR5, FIX (F9), G6PC, Gys2, HGD, Lp(a), Pcsk9, Serpina1, TF, and TTR.

[0541] In another method, Method 9, the present disclosure provides an ex vivo method for treating a patient with severe combined immunodeficiency (SCID) or Omenn Syndrome as provided in any one of Methods 3-8, wherein the differentiating step comprises one or more of the following to differentiate the genome-edited iPSC into a hematopoietic progenitor cell or a white blood cell: treatment with a combination of small molecules or delivery of master transcription factors.

[0542] In another method, Method 10, the present disclosure provides an ex vivo method for treating a patient with severe combined immunodeficiency (SCID) or Omenn Syndrome as provided in any one of Methods 3-9, wherein the implanting step comprises implanting the hematopoietic progenitor cell or white blood cell into the patient by transplantation, local injection, or systemic infusion, or combinations thereof.

[0543] In another method, Method 11, the present disclosure provides an ex vivo method for treating a patient with severe combined immunodeficiency (SCID) or Omenn Syndrome, the method comprising the steps of: i) isolating a white blood cell from the patient; ii) editing within or near an Interleukin-7 receptor (IL7R) gene of the white blood cell or other DNA sequences that encode regulatory elements of the IL7R gene of the white blood cell or editing within or near a safe harbor locus of the white blood cell; and iii) implanting the genome-edited white blood cell into the patient.

[0544] In another method, Method 12, the present disclosure provides an ex vivo method for treating a patient with severe combined immunodeficiency (SCID) or Omenn Syndrome as provided in Method 11, wherein the isolating step comprises: cell differential centrifugation, cell culturing, or combinations thereof.

[0545] In another method, Method 13, the present disclosure provides an ex vivo method for treating a patient with severe combined immunodeficiency (SCID) or Omenn Syndrome as provided in Methods 11 or 12, wherein the editing step comprises introducing into the white blood cell one or more deoxyribonucleic acid (DNA) endonucleases to effect one or more single-strand breaks (SSBs) or double-strand breaks (DSBs) within or near the IL7R gene or other DNA sequences that encode regulatory elements of the IL7R gene that results in a permanent insertion, deletion, correction, or modulation of expression or function of one or more mutations or exons within or near or affecting the expression or function of the IL7R gene or other DNA sequences that encode regulatory elements of the IL7R gene, or within or near a safe harbor locus that results in permanent insertion of the IL7R gene or minigene, and restoration of IL7R protein activity.

[0546] In another method, Method 14, the present disclosure provides the method of Method 13, wherein the safe harbor locus is selected from the group consisting of AAVS1 (PPP1R12C), ALB, Angptl3, ApoC3, ASGR2, CCR5, FIX (F9), G6PC, Gys2, HGD, Lp(a), Pcsk9, Serpina1, TF, and TTR.

[0547] In another method, Method 15, the present disclosure provides an ex vivo method for treating a patient with severe combined immunodeficiency (SCID) or Omenn Syndrome as provided in any one of Methods 11-14, wherein the implanting step comprises implanting the genome-edited white blood cell into the patient by transplantation, local injection, or systemic infusion, or combinations thereof.

[0548] In another method, Method 16, the present disclosure provides an ex vivo method for treating a patient with severe combined immunodeficiency (SCID) or Omenn Syndrome, the method comprising the steps of: i) isolating a mesenchymal stem cell from the patient; ii) editing within or near an Interleukin-7 receptor (IL7R) gene of the mesenchymal stem cell or other DNA sequences that encode regulatory elements of the IL7R gene of the mesenchymal stem cell, or editing within or near a safe harbor locus of the mesenchymal stem cell; iii) differentiating the genome-edited mesenchymal stem cell into a hematopoietic progenitor cell or white blood cell; and iv) implanting the hematopoietic progenitor cell or white blood cell into the patient.

[0549] In another method, Method 17, the present disclosure provides an ex vivo method for treating a patient with severe combined immunodeficiency (SCID) or Omenn Syndrome as provided in Method 16, wherein the mesenchymal stem cell is isolated from the patient's bone marrow or peripheral blood.

[0550] In another method, Method 18, the present disclosure provides an ex vivo method for treating a patient with severe combined immunodeficiency (SCID) or Omenn Syndrome as provided in Methods 16 or 17, wherein the isolating step comprises: aspiration of bone marrow and isolation of mesenchymal cells by density centrifugation using Percoll™.

[0551] In another method, Method 19, the present disclosure provides an ex vivo method for treating a patient with severe combined immunodeficiency (SCID) or Omenn Syndrome as provided in any one of Methods 16-18, wherein the editing step comprises introducing into the mesenchymal stem cell one or more deoxyribonucleic acid (DNA) endonucleases to effect one or more single-strand breaks (SSBs) or double-strand breaks (DSBs) within or near the IL7R gene or other DNA sequences that encode regulatory elements of the IL7R gene that results in a permanent insertion, deletion, correction, or modulation of expression or function of one or more mutations or exons within or near or affecting the expression or function of the IL7R gene or other DNA sequences that encode regulatory elements of the IL7R gene, or editing within or near a safe harbor locus that results in permanent insertion of the IL7R gene or minigene, and restoration of IL7R protein activity.

[0552] In another method, Method 20, the present disclosure provides the method of Method 19, wherein the safe harbor locus is selected from the group consisting of AAVS1 (PPP1R12C), ALB, Angptl3, ApoC3, ASGR2, CCR5, FIX (F9), G6PC, Gys2, HGD, Lp(a), Pcsk9, Serpina1, TF, and TTR.

[0553] In another method, Method 21, the present disclosure provides an ex vivo method for treating a patient with severe combined immunodeficiency (SCID) or Omenn Syndrome as provided in any one of Methods 16-19, wherein the differentiating step comprises one or more of the following to differentiate the genome-edited mesenchymal stem cell into a hematopoietic progenitor cell or white blood cell: treatment with a combination of small molecules or delivery of master transcription factors.

[0554] In another method, Method 22, the present disclosure provides an ex vivo method for treating a patient with severe combined immunodeficiency (SCID) or Omenn Syndrome as provided in any one of Methods 16-21, wherein the implanting step comprises implanting the hematopoietic progenitor cell or white blood cell into the patient by transplantation, local injection, or systemic infusion, or combinations thereof.

[0555] In another method, Method 23, the present disclosure provides an ex vivo method for treating a patient with severe combined immunodeficiency (SCID) or Omenn Syndrome, the method comprising the steps of: i) isolating a hematopoietic progenitor cell from the patient; ii) editing within or near an Interleukin-7 receptor (IL7R) gene of the hematopoietic progenitor cell or other DNA sequences that encode regulatory elements of the IL7R gene of the hematopoietic progenitor cell or editing within or near a safe harbor locus of the hematopoietic progenitor cell; and iii) implanting the genome-edited hematopoietic progenitor cell into the patient.

[0556] In another method, Method 24, the present disclosure provides an ex vivo method for treating a patient with severe combined immunodeficiency (SCID) or Omenn Syndrome as provided in Method 23, wherein the method further comprises treating the patient with granulocyte colony stimulating factor (GCSF) prior to the isolating step.

[0557] In another method, Method 25, the present disclosure provides an ex vivo method for treating a patient with severe combined immunodeficiency (SCID) or Omenn Syndrome as provided in Method 24, wherein the treating step is performed in combination with Plerixaflor.

[0558] In another method, Method 26, the present disclosure provides an ex vivo method for treating a patient with severe combined immunodeficiency (SCID) or Omenn Syndrome as provided in any one of Methods 23-25, wherein the isolating step comprises isolating CD34+ cells.

[0559] In another method, Method 27, the present disclosure provides an ex vivo method for treating a patient with severe combined immunodeficiency (SCID) or Omenn Syndrome as provided in any one of Methods 23-26, wherein the editing step comprises introducing into the hematopoietic progenitor cell one or more deoxyribonucleic acid (DNA) endonucleases to effect one or more single-strand breaks (SSBs) or double-strand breaks (DSBs) within or near the IL7R gene or other DNA sequences that encode regulatory elements of the IL7R gene that results in a permanent insertion, deletion, correction, or modulation of expression or function of one or more mutations or exons within or near or affecting the expression or function of the IL7R gene or other DNA sequences that encode regulatory elements of the IL7R gene, or within or near a safe harbor locus that results in permanent insertion of the IL7R gene or minigene and restoration of IL7R protein activity.

[0560] In another method, Method 28, the present disclosure provides the method of Method 27, wherein the safe harbor locus is selected from the group consisting of AAVS1 (PPP1R12C), ALB, Angptl3, ApoC3, ASGR2, CCR5, FIX (F9), G6PC, Gys2, HGD, Lp(a), Pcsk9, Serpina1, TF, and TTR.

[0561] In another method, Method 29, the present disclosure provides an ex vivo method for treating a patient with severe combined immunodeficiency (SCID) or Omenn Syndrome as provided in any one of Methods 23-28, wherein the implanting step comprises implanting the genome-edited hematopoietic progenitor cell into the patient by transplantation, local injection, or systemic infusion, or combinations thereof.

[0562] In another method, Method 30, the present disclosure provides an in vivo method for treating a patient with severe combined immunodeficiency (SCID) or Omenn Syndrome, the method comprising the step of editing an Interleukin-7 receptor (IL7R) gene in a cell of the patient or other DNA sequences that encode regulatory elements of the IL7R gene in a cell of the patient, or editing within or near a safe harbor locus in a cell of the patient.

[0563] In another method, Method 31, the present disclosure provides an in vivo method for treating a patient with severe combined immunodeficiency (SCID) or Omenn Syndrome as provided in Method 30, wherein the editing step comprises introducing into the cell one or more deoxyribonucleic acid (DNA) endonucleases to effect one or more single-strand breaks (SSBs) or double-strand breaks (DSBs) within or near the IL7R gene or other DNA sequences that encode regulatory elements of the IL7R gene that results in a permanent insertion, deletion, correction, or modulation of expression or function of one or more mutations or exons within or near or affecting the expression or function of the IL7R gene or other DNA sequences that encode regulatory elements of the IL7R gene, or within or near a safe harbor locus that results in permanent insertion of the IL7R gene or minigene, and restoration of IL7R protein activity.

[0564] In another method, Method 32, the present disclosure provides the method of Method 31, wherein the safe harbor locus is selected from the group consisting of AAVS1 (PPP1R12C), ALB, Angptl3, ApoC3, ASGR2, CCR5, FIX (F9), G6PC, Gys2, HGD, Lp(a), Pcsk9, Serpina1, TF, and TTR.

[0565] In another method, Method 33, the present disclosure provides an in vivo method for treating a patient with severe combined immunodeficiency (SCID) or Omenn Syndrome as provided in any one of Methods 30-32, wherein the cell is a bone marrow cell, a hematopoietic progenitor cell, or a CD34+ cell.

[0566] In another method, Method 34, the present disclosure provides a method according to any one of Methods 1, 2, 7, 13, 19, 27, or 31, wherein the one or more DNA endonucleases is a Cas1, Cas1B, Cas2, Cas3, Cas4, Cas5, Cas6, Cas7, Cas8, Cas9 (also known as Csn1 and Csx12), Cas100, Csy1, Csy2, Csy3, Cse1, Cse2, Csc1, Csc2, Csa5, Csn2, Csm2, Csm3, Csm4, Csm5, Csm6, Cmr1, Cmr3, Cmr4, Cmr5, Cmr6, Csb1, Csb2, Csb3, Csx17, Csx14, Csx10, Csx16, CsaX, Csx3, Csx1, Csx15, Csf1, Csf2, Csf3, Csf4, or Cpf1 endonuclease; or a homolog thereof, recombination of the naturally occurring molecule, codon-optimized, or modified version thereof, and combinations thereof.

[0567] In another method, Method 35, the present disclosure provides a method as provided in Method 34, wherein the method comprises introducing into the cell one or more polynucleotides encoding the one or more DNA endonucleases.

[0568] In another method, Method 36, the present disclosure provides a method as provided in Method 34, wherein the method comprises introducing into the cell one or more ribonucleic acids (RNAs) encoding the one or more DNA endonucleases.

[0569] In another method, Method 37, the present disclosure provides a method as provided in Methods 35 or 36, wherein the one or more polynucleotides or one or more RNAs is one or more modified polynucleotides or one or more modified RNAs.

[0570] In another method, Method 38, the present disclosure provides the method of Method 35, wherein the DNA endonuclease is a protein or polypeptide.

[0571] In another method, Method 39, the present disclosure provides a method as provided in any one of the preceding Methods 1-38, wherein the method further comprises introducing into the cell one or more guide ribonucleic acids (gRNAs).

[0572] In another method, Method 40, the present disclosure provides a method as provided in Method 39, wherein the one or more gRNAs are single-molecule guide RNA (sgRNAs).

[0573] In another method, Method 41, the present disclosure provides a method as provided in Methods 39 or 40, wherein the one or more gRNAs or one or more sgRNAs is one or more modified gRNAs or one or more modified sgRNAs.

[0574] In another method, Method 42, the present disclosure provides a method as provided in any one of Methods 39-41, wherein the one or more DNA endonucleases is pre-complexed with one or more gRNAs or one or more sgRNAs.

[0575] In another method, Method 43, the present disclosure provides a method as provided in any one of Methods 1-42, wherein the method further comprises introducing into the cell a polynucleotide donor template comprising at least a portion of the wild-type IL7R gene or minigene or cDNA.

[0576] In another method, Method 44, the present disclosure provides a method as provided in Method 43, wherein the at least a portion of the wild-type IL7R gene or minigene or cDNA is exon 1, intron 1, exon 2, intron 2, exon 3, intron 3, exon 4, intron 4, exon 5, intron 5, exon 6, intron 6, exon 7, intron 7, exon 8, fragments, or combinations thereof, or the entire IL7R gene, DNA sequences that encode wild type regulatory elements of the IL7R gene, minigene, or cDNA.

[0577] In another method, Method 45, the present disclosure provides a method as provided in any one of Methods 43 or 44, wherein the donor template is either a single or double stranded polynucleotide.

[0578] In another method, Method 46, the present disclosure provides a method as provided in any one of Methods 43-45, wherein the donor template has homologous arms to the 5p13.2 region.

[0579] In another method, Method 47, the present disclosure provides a method as provided in any one of Methods 1, 2, 7, 13, 19, 27, or 31, wherein the method further comprises introducing into the cell one guide ribonucleic acid (gRNA) and a polynucleotide donor template comprising at least a portion of the wild-type IL7R gene, and wherein the one or more DNA endonucleases is one or more Cas9 or Cpf1 endonucleases that effect one single-strand break (SSB) or double-strand break (DSB) at a locus within or near the IL7R gene or other DNA sequences that encode regulatory elements of the IL7R gene or within or near a safe harbor locus that facilitates insertion of a new sequence from the polynucleotide donor template into the chromosomal DNA at the locus or safe harbor locus that results in a permanent insertion or correction of a part of the chromosomal DNA of the IL7R gene or other DNA sequences that encode regulatory elements of the IL7R gene proximal to the locus or safe harbor locus and restoration of IL7R protein activity, and wherein the gRNA comprises a spacer sequence that is complementary to a segment of the locus or safe harbor locus.

[0580] In another method, Method 48, the present disclosure provides a method as provided in Method 47, wherein proximal means nucleotides both upstream and downstream of the locus or safe harbor locus.

[0581] In another method, Method 49, the present disclosure provides a method as provided in any one of Methods 1, 2, 7, 13, 19, 27, or 31, wherein the method further comprises introducing into the cell two guide ribonucleic acid (gRNAs) and a polynucleotide donor template comprising at least a portion of the wild-type IL7R gene, and wherein the one or more DNA endonucleases is two or more Cas9 or Cpf1 endonucleases that effect a pair of single-strand breaks (SSBs) or double-strand breaks (DSBs), the first at a 5′ locus and the second at a 3′ locus, within or near the IL7R gene or other DNA sequences that encode regulatory elements of the IL7R gene, or within or near a safe harbor locus that facilitates insertion of a new sequence from the polynucleotide donor template into the chromosomal DNA between the 5′ locus and the 3′ locus that results in a permanent insertion or correction of the chromosomal DNA between the 5′ locus and the 3′ locus within or near the IL7R gene or other DNA sequences that encode regulatory elements of the IL7R gene, or within or near a safe harbor locus and restoration of IL7R protein activity, and wherein the first guide RNA comprises a spacer sequence that is complementary to a segment of the 5′ locus and the second guide RNA comprises a spacer sequence that is complementary to a segment of the 3′ locus.

[0582] In another method, Method 50, the present disclosure provides a method as provided in any one of Methods 47-49, wherein the one or two gRNAs are one or two single-molecule guide RNA (sgRNAs).

[0583] In another method, Method 51, the present disclosure provides a method as provided in any one of Methods 47-50, wherein the one or two gRNAs or one or two sgRNAs is one or two modified gRNAs or one or two modified sgRNAs.

[0584] In another method, Method 52, the present disclosure provides a method as provided in any one of Methods 47-51, wherein the one or more DNA endonucleases is pre-complexed with one or two gRNAs or one or two sgRNAs.

[0585] In another method, Method 53, the present disclosure provides a method as provided in any one of Methods 47-52, wherein the at least a portion of the wild-type IL7R gene or cDNA is exon 1, intron 1, exon 2, intron 2, exon 3, intron 3, exon 4, intron 4, exon 5, intron 5, exon 6, intron 6, exon 7, intron 7, exon 8, fragments, or combinations thereof, the entire IL7R gene, DNA sequences that encode wild type regulatory elements of the IL7R gene, minigene, or cDNA.

[0586] In another method, Method 54, the present disclosure provides a method as provided in any one of Methods 47-53, wherein the donor template is either a single or double stranded polynucleotide.

[0587] In another method, Method 55, the present disclosure provides a method as provided in any one of Methods 47-54, wherein the donor template has arms homologous to the 5p13.2 region.

[0588] In another method, Method 56, the present disclosure provides a method as provided in any one of Method 46, wherein the SSB, DSB, or 5′ DSB and 3′ DSB are in the first, second, third, fourth, fifth, sixth, seventh, or eighth exon or intron of the IL7R gene.

[0589] In another method, Method 57, the present disclosure provides a method as provided in any one of Methods 1, 2, 7, 13, 19, 27, or 31, wherein the insertion or correction is by homology directed repair (HDR) or nonhomologous end-joining (NHEJ).

[0590] In another method, Method 58, the present disclosure provides a method as provided in any one of Methods 1, 2, 7, 13, 19,27, or 31, wherein the method further comprises introducing into the cell two guide ribonucleic acid (gRNAs), and wherein the one or more DNA endonucleases is two or more Cas9 or Cpf1 endonucleases that effect a pair of double-strand breaks (DSBs), the first at a 5′ locus and the second at a 3′ locus, within or near the IL7R gene or other DNA sequences that encode regulatory elements of the IL7R gene that causes a deletion of the chromosomal DNA between the 5′ locus and the 3′ locus that results in a permanent deletion of the chromosomal DNA between the 5′ locus and the 3′ locus within or near the IL7R gene or other DNA sequences that encode regulatory elements of the IL7R gene, and wherein the first guide RNA comprises a spacer sequence that is complementary to a segment of the 5′ locus and the second guide RNA comprises a spacer sequence that is complementary to a segment of the 3′ locus.

[0591] In another method, Method 59, the present disclosure provides a method as provided in Method 58, wherein the two gRNAs are two single-molecule guide RNA (sgRNAs).

[0592] In another method, Method 60, the present disclosure provides a method as provided in Methods 58 or 59 wherein the two gRNAs or two sgRNAs are two modified gRNAs or two modified sgRNAs.

[0593] In another method, Method 61, the present disclosure provides a method as provided in any one of Methods 58-60, wherein the one or more DNA endonucleases is pre-complexed with one or two gRNAs or one or two sgRNAs.

[0594] In another method, Method 62, the present disclosure provides a method as provided in any one of Methods 58-61, wherein both the 5′ locus and 3′ locus are in or near either the first exon, first intron, second exon, second intron, third exon, third intron, fourth exon, fourth intron, fifth exon, fifth intron, sixth exon, sixth intron, seventh exon, seventh intron, or eighth exon of the IL7R gene.

[0595] In another method, Method 63, the present disclosure provides the method of any one of Method 58-61, wherein the deletion is a deletion of 1 kb or less.

[0596] In another method, Method 64, the present disclosure provides a method as provided in any one of Methods 1, 2, 7, 13, 19, 27, or 31-63, wherein the Cas9 or Cpf1 mRNA, gRNA, and donor template are either each formulated into separate lipid nanoparticles or all co-formulated into a lipid nanoparticle.

[0597] In another method, Method 65, the present disclosure provides a method as provided in any one of Methods 1, 2, 7, 13, 19, 27, or 31-63, wherein the Cas9 or Cpf1 mRNA is formulated into a lipid nanoparticle, and both the gRNA and donor template are delivered to the cell by a viral vector.

[0598] In another method, Method 66, the present disclosure provides the method of Method 65, wherein the viral vector is an adeno-associated virus (AAV) vector.

[0599] In another method, Method 67, the present disclosure provides the method of Method 66, wherein the AAV vector is an AAV6 vector.

[0600] In another method, Method 68, the present disclosure provides the method of any one of Methods 1, 2, 7, 13, 19, 27, or 31-63, wherein the Cas9 or Cpf1 mRNA, gRNA and a donor template are either each formulated into separate exosomes or all co-formulated into an exosome.

[0601] In another method, Method 69, the present disclosure provides a method as provided in any one of Methods 1, 2, 7, 13, 19, 27, or 31-63, wherein the Cas9 or Cpf1 mRNA is formulated into a lipid nanoparticle, and the gRNA is delivered to the cell by electroporation and donor template is delivered to the cell by a viral vector.

[0602] In another method, Method 70, the present disclosure provides the method of Method 69, wherein the viral vector is an adeno-associated virus (AAV) vector.

[0603] In another method, Method 71, the present disclosure provides the method of Method 70, wherein the AAV vector is an AAV6 vector.

[0604] In another method, Method 72, the present disclosure provides the method of any one of Methods 1, 2, 5, 12, or 16-43, wherein the gRNA is delivered to the cell by electroporation and donor template is delivered to the cell by a viral vector.

[0605] In another method, Method 73, the present disclosure provides the method of Method 72, wherein the viral vector is an adeno-associated virus (AAV) vector.

[0606] In another method, Method 74, the present disclosure provides the method of Method 73, wherein the AAV vector is an AAV6 vector.

[0607] In another method, Method 75, the present disclosure provides a method as provided in any one of Methods 1-74, wherein the IL7R gene is located on Chromosome 5: 35,856,875-35,879,603 (Genome Reference Consortium—GRCh38).

[0608] In another method, Method 76, the present disclosure provides a method as provided in any one of Methods 1, 2, 7, 13, 19, 27, or 31-63, wherein the restoration of IL7R protein activity is compared to wild-type or normal IL7R protein activity.

[0609] In another method, Method 77, the present disclosure provides the method of Method 1, wherein the human cell is a hematopoietic progenitor cell or a white blood cell.

[0610] In another method, Method 78, the present disclosure provides the method of Method 30, wherein the cell is a hematopoietic progenitor cell or a white blood cell.

[0611] In another method, Method 79, the present disclosure provides the method of any one of Methods 1, 2, 7, 13, 19, 27 or 31-63, wherein the IL7R gene is operably linked to an exogenous promoter that drives expression of the IL7R gene.

[0612] In another method, Method 80, the present disclosure provides the method of any one of Methods 1, 2, 7, 13, 19, 27 or 31-63, wherein the one or more loci occurs at a location immediately 3′ to an endogenous promoter locus.

[0613] In another method, Method 81, the present disclosure provides the method of any one of the preceding Methods, wherein the donor contains one or more target sites for the endonuclease:gRNA.

[0614] In another method, Method 82, the present disclosure provides the method of any one of the preceding Methods, wherein the donor molecule or a molecule derived from the donor molecule is cleaved one or more times by the endonuclease:g RNA.

[0615] The present disclosure also provides a first composition, Composition 1, of one or more guide ribonucleic acids (gRNAs) for editing an IL7R gene in a cell from a patient with severe combined immunodeficiency (SCID) or Omenn Syndrome, the one or more gRNAs comprising a spacer sequence selected from the group consisting of the nucleic acid sequences in SEQ ID NOs: 54,862-63,375 for editing the IL7R gene in a cell from a patient with severe combined immunodeficiency (SCID) or Omenn Syndrome.

[0616] In another composition, Composition 2, the present disclosure provides the one or more gRNAs of Composition 1, wherein the one or more gRNAs are one or more single-molecule guide RNAs (sgRNAs).

[0617] In another composition, Composition 3, the present disclosure provides the one or more gRNAs or sgRNAs of Compositions 1 or 2, wherein the one or more gRNAs or one or more sgRNAs is one or more modified gRNAs or one or more modified sgRNAs.

[0618] The present disclosure also provides a composition, Composition 4, of one or more guide ribonucleic acids (gRNAs) for editing a safe harbor locus in a cell from a patient with severe combined immunodeficiency (SCID) or Omenn Syndrome, the one or more gRNAs comprising a spacer sequence selected from the group consisting of the nucleic acid sequences in SEQ ID NOs: 1-54,859 for editing the safe harbor locus in a cell from a patient with severe combined immunodeficiency (SCID) or Omenn Syndrome, wherein the safe harbor locus is selected from the group consisting of AAVS1 (PPP1R12C), ALB, Angptl3, ApoC3, ASGR2, CCR5, FIX (F9), G6PC, Gys2, HGD, Lp(a), Pcsk9, Serpina1, TF, and TTR.

[0619] In another composition, Composition 5, the present disclosure provides the one or more gRNAs of Composition 4, wherein the one or more gRNAs are single-molecule guide RNAs (sgRNAs).

[0620] In another composition, Composition 6, the present disclosure provides the one or more gRNAs of Composition 4 or Composition 5, wherein the one or more gRNAs or one or more sgRNAs is one or more modified gRNAs or one or more modified sgRNAs.

[0621] In another composition, Composition 7, the present disclosure provides an IL7R transgene donor construct comprising exon 1, some or all of intron 1, exon 2, some or all of intron 2, exon 3, some or all of intron 3, exon 4, some or all of intron 4, exon 5, some or all of intron 5, exon 6, some or all of intron 6, exon 7, some or all of intron 7, exon 8, combinations thereof, or the entire IL7R gene or cDNA.

[0622] Definitions

[0623] The term “comprising” or “comprises” is used in reference to compositions, methods, and respective component(s) thereof, that are essential to the invention, yet open to the inclusion of unspecified elements, whether essential or not.

[0624] The term “consisting essentially of” refers to those elements required for a given aspect. The term permits the presence of additional elements that do not materially affect the basic and novel or functional characteristic(s) of that aspect of the invention.

[0625] The term “consisting of” refers to compositions, methods, and respective components thereof as described herein, which are exclusive of any element not recited in that description of the aspect.

[0626] The singular forms “a,” “an,” and “the” include plural references, unless the context clearly dictates otherwise.

[0627] Certain numerical values presented herein are preceded by the term “about.” The term “about” is used to provide literal support for the numerical value the term “about” precedes, as well as a numerical value that is approximately the numerical value, that is the approximating unrecited numerical value may be a number which, in the context it is presented, is the substantial equivalent of the specifically recited numerical value. The term “about” means numerical values within ±10% of the recited numerical value.

[0628] When a range of numerical values is presented herein, it is contemplated that each intervening value between the lower and upper limit of the range, the values that are the upper and lower limits of the range, and all stated values with the range are encompassed within the disclosure. All the possible sub-ranges within the lower and upper limits of the range are also contemplated by the disclosure.

### EXAMPLES

[0629] The invention will be more fully understood by reference to the following embodiments, which provide illustrative non-limiting aspects of the invention.

[0630] The examples describe the use of the CRISPR system as an illustrative genome editing technique to create defined therapeutic genomic deletions, insertions, or replacements, termed “genomic modifications” herein, in the IL7R gene that lead to permanent correction of mutations in the genomic locus, or expression at a heterologous locus, that restore IL7R protein activity. Introduction of the defined therapeutic modifications represents a novel therapeutic strategy for the potential amelioration of SCID and/or Omenn Syndrome, as described and illustrated herein.

### Example 1

### CRISPR/SpCas9 Target Sites For the IL7R Gene

[0631] Regions of the IL7R gene were scanned for target sites. Each area was scanned for a protospacer adjacent motif (PAM) having the sequence NRG. gRNA 20 bp spacer sequences corresponding to the PAM were identified, as shown in SEQ ID NOs: 54,862-57,013.

### Example 2

### CRISPR/SaCas9 Target Sites For the IL7R Gene

[0632] Regions of the IL7R gene were scanned for target sites. Each area was scanned for a protospacer adjacent motif (PAM) having the sequence NNGRRT. gRNA 20 bp spacer sequences corresponding to the PAM were identified, as shown in SEQ ID NOs: 57,014-57,712.

### Example 3

### CRISPR/StCas9 Target Sites For the IL7R Gene

[0633] Regions of the IL7R gene were scanned for target sites. Each area was scanned for a protospacer adjacent motif (PAM) having the sequence NNAGAAW. gRNA 20 bp spacer sequences corresponding to the PAM were identified, as shown in SEQ ID NOs: 57,713-57,984.

### Example 4

### CRISPR/TdCas9 Target Sites For the IL7R Gene

[0634] Regions of the IL7R gene were scanned for target sites. Each area was scanned for a protospacer adjacent motif (PAM) having the sequence NAAAAC. gRNA 20 bp spacer sequences corresponding to the PAM were identified, as shown in SEQ ID NOs: 57,985-58,076.

### Example 5

### CRISPR/NmCas9 Target Sites For the IL7R Gene

[0635] Regions of the IL7R gene were scanned for target sites. Each area was scanned for a protospacer adjacent motif (PAM) having the sequence NNNNGHTT. gRNA 20 bp spacer sequences corresponding to the PAM were identified, as shown in SEQ ID NOs: 58,077-58,708.

### Example 6

### CRISPR/Cpf1 Target Sites For the IL7R Gene

[0636] Regions of the IL7R gene were scanned for target sites. Each area was scanned for a protospacer adjacent motif (PAM) having the sequence YTN. gRNA 22 bp spacer sequences corresponding to the PAM were identified, as shown in SEQ ID NOs: 58,709-63,375.

### Example 7

### CRISPR/SpCas9 Target Sites For Safe Harbor Loci

[0637] The following safe harbor loci were scanned for target sites: Exons 1-2 of AAVS1 (PPP1R12C), Exons 1-2 of ALB, Exons 1-2 of Angptl3, Exons 1-2 of ApoC3, Exons 1-2 of ASGR2, Exons 1-2 of CCR5, Exons 1-2 of FIX (F9), Exons 1-2 of G6PC, Exons 1-2 of Gys2, Exons 1-2 of HGD, Exons 1-2 of Lp(a), Exons 1-2 of Pcsk9, Exons 1-2 of Serpina1, Exons 1-2 of TF, and Exons 1-2 of TTR. Each area was scanned for a protospacer adjacent motif (PAM) having the sequence NRG. gRNA 20 bp spacer sequences corresponding to the PAM were identified, as shown in the following sequences: AAVS1 (PPP1R12C): SEQ ID NOs: 1-2,032; ALB: SEQ ID NOs: 3,482-3,649; Angptl3: SEQ ID NOs: 4,104-4,448; ApoC3: SEQ ID NOs: 5,432-5,834; ASGR2: SEQ ID NOs: 6,109-7,876; CCR5: SEQ ID NOs: 9,642-9,844; FIX (F9): SEQ ID NOs: 10,221-11,686; G6PC: SEQ ID NOs: 14,230-15,245; Gys2: SEQ ID NOs: 16,581-22,073; HGD: SEQ ID NOs: 32,254-33,946; Lp(a): SEQ ID NOs: 36,789-40,583; Pcsk9: SEQ ID NOs: 46,154-48,173; Serpina1: SEQ ID NOs: 50,345-51,482; TF: SEQ ID NOs: 52,446-53,277; and TTR: SEQ ID NOs: 54,063-54,362. Note that the SEQ ID NOs represent the DNA sequence of the genomic target, while the gRNA or sgRNA spacer sequence will be the RNA version of the DNA sequence.

### Example 8

### CRISPR/SaCas9 Target Sites For Safe Harbor Loci

[0638] The following safe harbor loci were scanned for target sites: Exons 1-2 of AAVS1 (PPP1R12C), Exons 1-2 of ALB, Exons 1-2 of Angptl3, Exons 1-2 of ApoC3, Exons 1-2 of ASGR2, Exons 1-2 of CCR5, Exons 1-2 of FIX (F9), Exons 1-2 of G6PC, Exons 1-2 of Gys2, Exons 1-2 of HGD, Exons 1-2 of Lp(a), Exons 1-2 of Pcsk9, Exons 1-2 of Serpina1, Exons 1-2 of TF, and Exons 1-2 of TTR. Each area was scanned for a protospacer adjacent motif (PAM) having the sequence NNGRRT. gRNA 20 bp spacer sequences corresponding to the PAM were identified, as shown in the following sequences: AAVS1 (PPP1R12C): SEQ ID NOs: 2,033-2,203; ALB: SEQ ID NOs: 3,650-3,677; Angptl3: SEQ ID NOs: 4,449-4,484; ApoC3: SEQ ID NOs: 5,835-5,859; ASGR2: SEQ ID NOs: 7,877-8,082; CCR5: SEQ ID NOs: 9,845-9,876; FIX (F9): SEQ ID NOs: 11,687-11,849; G6PC: SEQ ID NOs: 15,246-15,362; Gys2: SEQ ID NOs: 22,074-22,749; HGD: SEQ ID NOs: 33,947-34,160; Lp(a): SEQ ID NOs: 40,584-40,993; Pcsk9: SEQ ID NOs: 48,174-48,360; Serpina1: SEQ ID NOs: 51,483-51,575; TF: SEQ ID NOs: 53,278-53,363; and TTR: SEQ ID NOs: 54,363-54,403. Note that the SEQ ID NOs represent the DNA sequence of the genomic target, while the gRNA or sgRNA spacer sequence will be the RNA version of the DNA sequence.

### Example 9

### CRISPR/StCas9 Target Sites For Safe Harbor Loci

[0639] The following safe harbor loci were scanned for target sites: Exons 1-2 of AAVS1 (PPP1R12C), Exons 1-2 of ALB, Exons 1-2 of Angptl3, Exons 1-2 of ApoC3, Exons 1-2 of ASGR2, Exons 1-2 of CCR5, Exons 1-2 of FIX (F9), Exons 1-2 of G6PC, Exons 1-2 of Gys2, Exons 1-2 of HGD, Exons 1-2 of Lp(a), Exons 1-2 of Pcsk9, Exons 1-2 of Serpina1, Exons 1-2 of TF, and Exons 1-2 of TTR. Each area was scanned for a protospacer adjacent motif (PAM) having the sequence NNAGAAW. gRNA 20 bp spacer sequences corresponding to the PAM were identified, as shown in the following sequences: AAVS1 (PPP1R12C): SEQ ID NOs: 2,204-2,221; ALB: SEQ ID NOs: 3,678-3,695; Angptl3: SEQ ID NOs: 4,485-4,507; ApoC3: SEQ ID NOs: 5,860-5,862; ASGR2: SEQ ID NOs: 8,083-8,106; CCR5: SEQ ID NOs: 9,877-9,890; FIX (F9): SEQ ID NOs: 11,850-11,910; G6PC: SEQ ID NOs: 15,363-15,386; Gys2: SEQ ID NOs: 22,750-20,327; HGD: SEQ ID NOs: 34,161-34,243; Lp(a): SEQ ID NOs: 40,994-41,129; Pcsk9: SEQ ID NOs: 48,361-48,396; Serpina1: SEQ ID NOs: 51,576-51,587; TF: SEQ ID NOs: 53,364-53,375; and TTR: SEQ ID NOs: 54,404-54,420. Note that the SEQ ID NOs represent the DNA sequence of the genomic target, while the gRNA or sgRNA spacer sequence will be the RNA version of the DNA sequence.

### Example 10

### CRISPR/TdCas9 Target Sites For Safe Harbor Loci

[0640] The following safe harbor loci were scanned for target sites: Exons 1-2 of AAVS1 (PPP1R12C), Exons 1-2 of ALB, Exons 1-2 of Angptl3, Exons 1-2 of ApoC3, Exons 1-2 of ASGR2, Exons 1-2 of CCR5, Exons 1-2 of FIX (F9), Exons 1-2 of G6PC, Exons 1-2 of Gys2, Exons 1-2 of HGD, Exons 1-2 of Lp(a), Exons 1-2 of Pcsk9, Exons 1-2 of Serpina1, Exons 1-2 of TF, and Exons 1-2 of TTR. Each area was scanned for a protospacer adjacent motif (PAM) having the sequence NAAAAC. gRNA 20 bp spacer sequences corresponding to the PAM were identified, as shown in the following sequences: AAVS1 (PPP1R12C): SEQ ID NOs: 2,222-2,230; ALB: SEQ ID NOs: 3,696-3,700; Angptl3: SEQ ID NOs: 4,508-4,520; ApoC3: SEQ ID NOs: 5,863-5,864; ASGR2: SEQ ID NOs: 8,107-8,118; CCR5: SEQ ID NOs: 9,891-9,892; FIX (F9): SEQ ID NOs: 11,911-11,935; G6PC: SEQ ID NOs: 15,387-15,395; Gys2: SEQ ID NOs: 23,028-23,141; HGD: SEQ ID NOs: 34,244-34,262; Lp(a): SEQ ID NOs: 41,130-41,164; Pcsk9: SEQ ID NOs: 48,397-48,410; Serpina1: SEQ ID NOs: 51,588-51,590; TF: SEQ ID NOs: 53,376-53,382; and TTR: SEQ ID NOs: 54,421-54,422. Note that the SEQ ID NOs represent the DNA sequence of the genomic target, while the gRNA or sgRNA spacer sequence will be the RNA version of the DNA sequence.

### Example 11

### CRISPR/NmCas9 Target Sites For Safe Harbor Loci

[0641] The following safe harbor loci were scanned for target sites: Exons 1-2 of AAVS1 (PPP1R12C), Exons 1-2 of ALB, Exons 1-2 of Angptl3, Exons 1-2 of ApoC3, Exons 1-2 of ASGR2, Exons 1-2 of CCR5, Exons 1-2 of FIX (F9), Exons 1-2 of G6PC, Exons 1-2 of Gys2, Exons 1-2 of HGD, Exons 1-2 of Lp(a), Exons 1-2 of Pcsk9, Exons 1-2 of Serpina1, Exons 1-2 of TF, and Exons 1-2 of TTR. Each area was scanned for a protospacer adjacent motif (PAM) having the sequence NNNNGHTT. gRNA 20 bp spacer sequences corresponding to the PAM were identified, as shown in the following sequences: AAVS1 (PPP1R12C): SEQ ID NOs: 2,231-2,305; ALB: SEQ ID NOs: 3,701-3,724; Angptl3: SEQ ID NOs: 4,521-4,583; ApoC3: SEQ ID NOs: 5,865-5,876; ASGR2: SEQ ID NOs: 8,119-8,201; CCR5: SEQ ID NOs: 9,893-9,920; FIX (F9): SEQ ID NOs: 11,936-12,088; G6PC: SEQ ID NOs: 15,396-15,485; Gys2: SEQ ID NOs: 23,142-23,821; HGD: SEQ ID NOs: 34,263-34,463; Lp(a): SEQ ID NOs: 41,165-41,532; Pcsk9: SEQ ID NOs: 48,411-48,550; Serpina1: SEQ ID NOs: 51,591-51,641; TF: SEQ ID NOs: 53,383-53,426; and TTR: SEQ ID NOs: 54,423-54,457. Note that the SEQ ID NOs represent the DNA sequence of the genomic target, while the gRNA or sgRNA spacer sequence will be the RNA version of the DNA sequence.

### Example 12

### CRISPR/Cpf1 Target Sites For Safe Harbor Loci

[0642] The following safe harbor loci were scanned for target sites: Exons 1-2 of AAVS1 (PPP1R12C), Exons 1-2 of ALB, Exons 1-2 of Angptl3, Exons 1-2 of ApoC3, Exons 1-2 of ASGR2, Exons 1-2 of CCR5, Exons 1-2 of FIX (F9), Exons 1-2 of G6PC, Exons 1-2 of Gys2, Exons 1-2 of HGD, Exons 1-2 of Lp(a), Exons 1-2 of Pcsk9, Exons 1-2 of Serpina1, Exons 1-2 of TF, and Exons 1-2 of TTR. Each area was scanned for a protospacer adjacent motif (PAM) having the sequence YTN. gRNA 22 bp spacer sequences corresponding to the PAM were identified, as shown in the following sequences: AAVS1 (PPP1R12C): SEQ ID NOs: 2,306-3,481; ALB: SEQ ID NOs: 3,725-4,103; Angptl3: SEQ ID NOs: 4,584-5,431; ApoC3: SEQ ID NOs: 5,877-6,108; ASGR2: SEQ ID NOs: 8,202-9,641; CCR5: SEQ ID NOs: 9,921-10,220; FIX (F9): SEQ ID NOs: 12,089-14,229; G6PC: SEQ ID NOs: 15,486-16,580; Gys2: SEQ ID NOs: 23,822-32,253; HGD: SEQ ID NOs: 34,464-36,788; Lp(a): SEQ ID NOs: 41,533-46,153; Pcsk9: SEQ ID NOs: 48,551-50,344; Serpina1: SEQ ID NOs: 51,642-52,445; TF: SEQ ID NOs: 53,427-54,062; and TTR: SEQ ID NOs: 54,458-54,859. Note that the SEQ ID NOs represent the DNA sequence of the genomic target, while the gRNA or sgRNA spacer sequence will be the RNA version of the DNA sequence.

### Example 13

### Screening of gRNAs

[0643] To identify a large spectrum of pairs of gRNAs able to edit the IL7R DNA target region, an in vitro transcribed (IVT) gRNA screen was conducted. IL7R genomic sequence was submitted for analysis using a gRNA design software. The resulting list of gRNAs were narrowed to a list of about 185 gRNAs based on uniqueness of sequence (only gRNAs without a perfect match somewhere else in the genome were screened) and minimal predicted off targets. This set of gRNAs were in vitro transcribed, and transfected together with spCas9 protein in human primary mobilized Peripheral Blood CD34+ cells (mPB CD34) using electroporation (Lonza 4D with 96 well shuttle). Cells were harvested 48 hours post transfection, the genomic DNA was isolated, and cutting efficiency was evaluated using TIDE analysis. The cutting efficiency of the gRNA (% indels) is listed in Table 3. Two biological experiments were performed and an average cutting efficiency of gRNA was presented in FIG. 2.

[0644] It was found that about 16% of the tested gRNAs induced cutting efficiencies over 30%.

TABLE 3
gRNA sequences and cutting efficiencies in mPB CD34- cells

| SEQ | | | Donor1 | Donor2 | Avg |
|---|---|---|---|---|---|
| ID | | N + Guide Sequence | (indel | (indel | (indel |
| NO: | Guide Name | (20mer) | %) | %) | %) |
| 56,967 | CTX-I7ex1in1_T128 | TAAAAATAGTATGATCACCA | 73.7 | 70.8 | 72.25 |
| 54,913 | CTX-I7ex1in1_T116 | TTTCCACAAAGACTGATGGG | 65.8 | | 65.8 |
| 54,915 | CTX-I7ex1in1_T13 | CTATACTCACTAGTTCACCC | 63.6 | 63.2 | 63.4 |
| 54,863 | CTX-I7ex1in1_T177 | TCTCTCAGAATGACAATTCT | 70 | 56.3 | 63.15 |
| 54,868 | CTX-I7ex1in1_T90 | GAAAGTGGCTATGCTCAAAA | 62.4 | 54.7 | 58.55 |
| 56,926 | CTX-I7ex1in1_T51 | GCAGTGGTTCTGACCTTACA | 53.4 | 58.6 | 56 |
| 56,919 | CTX-I7ex1in1_T32 | TGGGCACTGCTCACAACCAC | 48.2 | 62.2 | 55 |
| 54,912 | CTX-I7ex1in1_T77 | GGATTTCCACAAAGACTGAT | 59.8 | 49.7 | 54.75 |
| 54,909 | CTX-I7ex1in1_T119 | GTATATGACTCACTTTATGG | 51.7 | 55.1 | 53.4 |
| 56,969 | CTX-I7ex1in1_T153 | TCAGTCTTTGTGGAAATCCA | 55.4 | 46.8 | 51.1 |
| 54,937 | CTX-I7ex1in1_T49 | GTATGCTTTGCCAGACTGAG | 47.9 | 52.2 | 50 |
| 54,864 | CTX-I7ex1in1_T88 | ACAATTCTAGGTACAACTTT | 50 | 46.6 | 48.3 |
| 56,959 | CTX-I7ex1in1_T141 | GAAGTCTTCTTCCTACTGAA | 42.5 | | 42.5 |
| 56,980 | CTX-I7ex1in1_T208 | AATGTGTTTATGTATGGGCA | | 41.1 | 41.1 |
| 54,898 | CTX-I7ex1in1_T164 | AAGCTTCTAACAGCAGCAGG | | 39.9 | 39.9 |
| 56,946 | CTX-I7ex1in1_T50 | TCTACCTGTGGTCCTCTGTC | | 37.6 | 38 |
| 56,962 | CTX-I7ex1in1_T57 | GAATTCCTATACCCCAAACT | 60.2 | 14.4 | 37.3 |
| 56,924 | CTX-I7ex1in1_T261 | TAGATTTCTTCCCTGTGCAG | 38 | 35.6 | 37 |
| 56,915 | CTX-I7ex1in1_T15 | AAACAGCCCTAGCTAGACCA | 35.4 | 37.8 | 37 |
| 56,978 | CTX-I7ex1in1_T222 | ATTACAATGTGTTTATGTAT | 34.6 | 37.5 | 36.05 |
| 54,948 | CTX-I7ex1in1_T26 | TTAGAAAGCTACCACTGCAC | 33.3 | 35.1 | 34 |
| 56,918 | CTX-I7ex1in1_T10 | CCTAGCTAGACCATGGGTGT | 34.7 | 33.4 | 34 |
| 56,976 | CTX-I7ex1in1_T107 | AATTTGCAGGAGCAAGTTGA | 33.9 | 34.1 | 34 |
| 54,891 | CTX-I7ex1in1_T175 | AAAGCATAACTTTCAGGATA | | 33.8 | 33.8 |
| 56,938 | CTX-I7ex1in1_T162 | GCTTTTCAGTAGATATTATG | 32.1 | 33.8 | 33 |
| 54,932 | CTX-I7ex1in1_T226 | ACATTTTATAAGTCATTGAA | 31.7 | 34 | 33 |
| 56,914 | CTX-I7ex1in1_T33 | CAACCAGTTGAATGACAGGT | 28.2 | 37.1 | 33 |
| 56,949 | CTX-I7ex1in1_T211 | CTGAATGGATATTTACAAAG | 36.3 | 23.2 | 30 |
| 56,931 | CTX-I7ex1in1_T71 | TGTCAGCACCCACATAACAA | 31 | 27.6 | 29 |
| 54,980 | CTX-I7ex1in1_T87 | AGATTTTCTCAGGTCCCAGT | | 29.2 | 29 |
| 54,939 | CTX-I7ex1in1_T130 | TTGCCAGACTGAGTGGCAGT | 30.3 | 25.6 | 28 |
| 56,907 | CTX-I7ex1in1_T102 | TTGATTGTCCCAGAGACCAA | 16.9 | 38.4 | 28 |
| 57,002 | CTX-I7ex1in1_T81 | GTGCCTGACTCAGGTCTGTT | 27.5 | | 27.5 |
| 56,913 | CTX-I7ex1in1_T5 | GGACCAACCAGTTGAATGAC | 31.8 | 22.8 | 27 |
| 54,949 | CTX-I7ex1in1_T73 | TAGAAAGCTACCACTGCACA | 24.9 | 29.2 | 27 |
| 54,930 | CTX-I7ex1in1_T44 | CTGTCCAGCTCTAACACCAC | 31 | 21.7 | 26 |
| 54,923 | CTX-I7ex1in1_T268 | AAGGATGATCAAGAGAAGAA | 26.3 | 25.8 | 26.05 |
| 57,003 | CTX-I7ex1in1_T21 | TGCCTGACTCAGGTCTGTTA | 26 | | 26 |
| 54,977 | CTX-I7ex1in1_T111 | ACACTTGAGCACTCTGAGAA | 26.6 | 23 | 25 |
| 54,906 | CTX-I7ex1in1_T146 | ACAGTATATGACTCACTTTA | 25 | 22.8 | 23.9 |
| 54,928 | CTX-I7ex1in1_T39 | AGAAGTTGCCTACCTGACAG | 23 | 22 | 23 |
| 54,890 | CTX-I7ex1in1_T138 | ATCCTGAAAGCATAACTTTC | | 22.4 | 22.4 |
| 54,903 | CTX-I7ex1in1_T25 | AGTCATGTAATTACGAAGGA | 24.2 | 20.5 | 22.35 |
| 54,902 | CTX-I7ex1in1_T46 | TTTGAGTCATGTAATTACGA | 20 | 24.6 | 22.3 |
| 56,941 | CTX-I7ex1in1_T186 | AGAGTAGTTAATGTACACAG | | 22.1 | 22 |
| 54,938 | CTX-I7ex1in1_T145 | TTTGCCAGACTGAGTGGCAG | 26.6 | 17 | 22 |
| 54,961 | CTX-I7ex1in1_T194 | AACTGGATGGATTCTGGGAA | 22.4 | 21.1 | 22 |
| 56,905 | CTX-I7ex1in1_T29 | ATGCTTCCAAGGCTTTACAC | 21.8 | 21.7 | 22 |
| 56,933 | CTX-I7ex1in1_T140 | ACTGTTTCCTGCACCTAAAA | 25.8 | 17.1 | 21 |
| 54,917 | CTX-I7ex1in1_T181 | AAGAATGCTAGTTGAAAGCT | 19.4 | 22.3 | 20.85 |
| 56,930 | CTX-I7ex1in1_T99 | GATTCAGACATCCTGTGGGT | | 20.7 | 21 |
| 54,908 | CTX-I7ex1in1_T139 | AGTATATGACTCACTTTATG | 24 | 17.3 | 20.65 |
| 54,925 | CTX-I7ex1in1_T34 | ATCAACTAACTCCATTCAGT | 20.5 | | 20.5 |
| 56,923 | CTX-I7ex1in1_T113 | TATGTAGTTTCAGCAGGGTA | 20 | 20.7 | 20 |
| 54,941 | CTX-I7ex1in1_T41 | GTGGGAGTCCTTTGTTATGT | 19.6 | 20.7 | 20 |
| 56,971 | CTX-I7ex1in1_T198 | CCCTTAATGAGAAAATTCTA | 25.3 | 14.8 | 20.05 |
| 54,976 | CTX-I7ex1in1_T136 | AAATACATGGAAGCAGTCCT | 20.9 | 19.2 | 20 |
| 54,973 | CTX-I7ex1in1_T14 | GGTCTCTGGGACAATCAACT | 20 | | 20 |
| 56,916 | CTX-I7ex1in1_T8 | AACAGCCCTAGCTAGACCAT | 21.6 | 18.3 | 20 |
| 56,900 | CTX-I7ex1in1_T91 | TCAGAAAATATACACCCACT | 12.8 | 26.5 | 20 |
| 54,950 | CTX-I7ex1in1_T213 | ATCTAAGTCTACAAAATTAG | 19.2 | | 19 |
| 54,944 | CTX-I7ex1in1_T149 | TGTTCTGTGTATAGAATTGG | 11.7 | 26.6 | 19 |
| 54,926 | CTX-I7ex1in1_T84 | AGAAGACTTCTAGATGACAC | 37.7 | 0 | 18.85 |
| 54,867 | CTX-I7ex1in1_T174 | CAAGTCGTTTCTGGAGAAAG | 18.8 | 18.5 | 18.65 |
| 54,954 | CTX-I7ex1in1_T56 | TCGTGCTGTCATCAGAAGGA | 10.7 | 26.4 | 19 |
| 56,932 | CTX-I7ex1in1_T256 | ACTCCCACTGCCACTCAGTC | 19.5 | 17.3 | 18 |
| 56,929 | CTX-I7ex1in1_T123 | TTTGGATTCAGACATCCTGT | 19.3 | 16.5 | 18 |
| 54,862 | CTX-I7ex1in1_T131 | CTCATTCATTTCATACACAC | 17 | | 17 |
| 54,900 | CTX-I7ex1in1_T187 | AACAGCAGCAGGAGGCATGT | 21.2 | 12.7 | 16.95 |
| 56,972 | CTX-I7ex1in1_T135 | AATGCATAAGCTGAGTCATT | 19 | 14.6 | 16.8 |
| 56,954 | CTX-I7ex1in1_T220 | AAAAAGTTTATGTCAATTGA | 29.6 | 4 | 16.8 |
| 56,925 | CTX-I7ex1in1_T133 | TGGTAGCTTTCTAAATGCAG | | 15.9 | 16 |
| 54,968 | CTX-I7ex1in1_T239 | TAAGTAAAGAAAGTGCTATT | 10.9 | 20.9 | 16 |
| 56,904 | CTX-I7ex1in1_T106 | CTAGAAATTAGATGCTTCCA | 18.5 | 13.1 | 16 |
| 54,942 | CTX-I7ex1in1_T9 | TGAAGACAAAGCCGACCCAC | 17.6 | 13.8 | 16 |
| 56,937 | CTX-I7ex1in1_T142 | GGCTTTTCAGTAGATATTAT | 18.1 | 11.9 | 15 |
| 56,947 | CTX-I7ex1in1_T83 | CCTGTGGTCCTCTGTCAGGT | | 14.8 | 15 |
| 56,927 | CTX-I7ex1in1_T251 | ACAGAACATGTATTATTATT | 17.6 | 11.7 | 15 |
| 54,872 | CTX-I7ex1in1_T98 | ATTATCTGTAGCATGGTTTC | 14.2 | 14.9 | 14.55 |
| 54,975 | CTX-I7ex1in1_T248 | ACTGATGAACCAAAAATACA | 7.2 | 21.3 | 14 |
| 56,977 | CTX-I7ex1in1_T216 | AATTACAATGTGTTTATGTA | 14 | 14 | 14 |
| 54,870 | CTX-I7ex1in1_T247 | CTAAGTTTTCTTATGGATTT | 16.3 | 11.6 | 13.95 |
| 57,001 | CTX-I7ex1in1_T155 | TCAAACCCAGTGCCTGACTC | 12.5 | 15 | 13.75 |
| 54,957 | CTX-I7ex1in1_T244 | CTGGTGGCAGAACTGTGAAC | 13.1 | 14.1 | 14 |
| 54,907 | CTX-I7ex1in1_T109 | CAGTATATGACTCACTTTAT | 11.4 | 15.1 | 13.25 |
| 54,966 | CTX-I7ex1in1_T62 | GAACCAACCTGTCATTCAAC | 20.3 | 6.2 | 13 |
| 56,975 | CTX-I7ex1in1_T96 | AGAGAAAGGGCTTAATTTGC | 15.9 | 10.5 | 13.2 |
| 56,952 | CTX-I7ex1in1_T225 | AACACAGTAAGGATTTAATA | 25.6 | 0.6 | 13.1 |
| 54,936 | CTX-I7ex1in1_T201 | TGCAGGAAACAGTGTATAAA | 16.3 | 8.7 | 13 |
| 54,934 | CTX-I7ex1in1_T182 | TCCTAAAACACAGCCATTTT | 18.2 | 6.5 | 12 |
| 54,940 | CTX-I7ex1in1_T100 | AGTGGGAGTCCTTTGTTATG | 11.4 | 12.7 | 12 |
| 54,959 | CTX-I7ex1in1_T89 | ACTGTGAACTGGATGGATTC | 22.4 | 1.6 | 12 |
| 54,960 | CTX-I7ex1in1_T121 | CTGTGAACTGGATGGATTCT | 13.2 | 10.3 | 12 |
| 54,945 | CTX-I7ex1in1_T214 | TTGGTGGAAGAGAAAATGTC | 12.8 | 10.3 | 12 |
| 54,873 | CTX-I7ex1in1_T20 | TTCCCTAACAGACCTGAGTC | 11.3 | | 11.3 |
| 54,933 | CTX-I7ex1in1_T236 | TCATTGAAGGGAATTTTTCT | 15.3 | 5.8 | 11 |
| 56,955 | CTX-I7ex1in1_T74 | TGACGGTGTTATAATTACTA | 17.9 | 2.6 | 10.25 |
| 54,963 | CTX-I7ex1in1_T202 | GTGAGCAGTGCCCACACCCA | 8.9 | 11.4 | 10 |
| 54,919 | CTX-I7ex1in1_T127 | GTCAAAATACTTCCCAGTTT | 17.7 | 2.2 | 9.95 |
| 56,942 | CTX-I7ex1in1_T117 | TACACAGTGGTTAAGACCTG | | 9.8 | 10 |
| 56,951 | CTX-I7ex1in1_T206 | GAACACAGTAAGGATTTAAT | 19.5 | 0 | 9.75 |
| 54,974 | CTX-I7ex1in1_T67 | CTGTCTCCAGTGTAAAGCCT | 8.9 | 10.6 | 10 |
| 54,955 | CTX-I7ex1in1_T124 | ACTACATAAAGAGCTTTTGC | 15.8 | 3.6 | 10 |
| 56,902 | CTX-I7ex1in1_T103 | GAGTGCTCAAGTGTGAGCCT | 6.5 | 12.8 | 10 |
| 54,920 | CTX-I7ex1in1_T171 | TCAAAATACTTCCCAGTTTG | 15.4 | 3.7 | 9.55 |
| 56,940 | CTX-I7ex1in1_T75 | GACGTGAGCTGAAAAATTCT | 9.1 | 9.2 | 9 |
| 54,953 | CTX-I7ex1in1_T66 | TTCGTGCTGTCATCAGAAGG | 10.7 | 7.6 | 9 |
| 54,929 | CTX-I7ex1in1_T18 | CCTACCTGACAGAGGACCAC | | 9 | 9 |
| 54,965 | CTX-I7ex1in1_T4 | CCACACCCATGGTCTAGCTA | 15.1 | 2.8 | 9 |
| 54,958 | CTX-I7ex1in1_T205 | TGGCAGAACTGTGAACTGGA | 10.3 | 7.5 | 9 |
| 54,967 | CTX-I7ex1in1_T38 | CAACCTGTCATTCAACTGGT | 8 | 9.8 | 9 |
| 54,946 | CTX-I7ex1in1_T176 | GAAAATGTCAGGACAGTGTG | 9.1 | 8.6 | 9 |
| 56,945 | CTX-I7ex1in1_T61 | AATTCTGGATACTCTACCTG | | 8.8 | 9 |
| 54,979 | CTX-I7ex1in1_T154 | CAGATTTTCTCAGGTCCCAG | 11.6 | 6 | 9 |
| 56,984 | CTX-I7ex1in1_T101 | ATTACATATGGCCAATTTGT | 6.1 | 10.6 | 8.35 |
| 56,948 | CTX-I7ex1in1_T120 | TGCTATGAGCAATCACTGAA | | 7.8 | 8 |
| 54,935 | CTX-I7ex1in1_T59 | AACACAGCCATTTTAGGTGC | 13.3 | 2.1 | 8 |
| 54,893 | CTX-I7ex1in1_T114 | TTGCCTCCACACCAACAAAT | | 7.6 | 7.6 |
| 56,936 | CTX-I7ex1in1_T184 | TGGCTTTTCAGTAGATATTA | 10.5 | 4.6 | 8 |
| 56,979 | CTX-I7ex1in1_T64 | CAATGTGTTTATGTATGGGC | 6.7 | 7.7 | 7.2 |
| 54,978 | CTX-I7ex1in1_T157 | TGCTTACTCCAGATTTTCTC | 6.9 | 7.4 | 7 |
| 54,962 | CTX-I7ex1in1_T204 | GCCAGAAAAACAAATGCCTG | 6.7 | 7.5 | 7 |
| 54,931 | CTX-I7ex1in1_T151 | CACATTTTATAAGTCATTGA | 11.6 | 1.8 | 7 |
| 54,952 | CTX-I7ex1in1_T55 | TATTTCGTGCTGTCATCAGA | 11.4 | 2 | 7 |
| 56,982 | CTX-I7ex1in1_T165 | TATGGGCAGGGTTGGCTTCT | 8.9 | 4.3 | 6.6 |
| 56,961 | CTX-I7ex1in1_T35 | TGAATTCCTATACCCCAAAC | 10 | 3.1 | 6.55 |
| 54,964 | CTX-I7ex1in1_T28 | CCCACACCCATGGTCTAGCT | 11.9 | 1.1 | 7 |
| 54,972 | CTX-I7ex1in1_T17 | TGGTCTCTGGGACAATCAAC | 5.7 | 7.2 | 6 |
| 56,943 | CTX-I7ex1in1_T30 | AAGACCTGTGGTGTTAGAGC | | 6.4 | 6 |
| 56,911 | CTX-I7ex1in1_T260 | AATAACTCAGTAGGGAAAAT | 7.2 | 5.6 | 6 |
| 56,921 | CTX-I7ex1in1_T112 | GCTCTTTATGTAGTTTCAGC | 11.6 | 0.6 | 6 |
| 54,869 | CTX-I7ex1in1_T250 | GTCATTTCTAAGTTTTCTTA | 5.1 | 6.6 | 5.85 |
| 54,894 | CTX-I7ex1in1_T231 | CCATATGTAATAATTCTTTT | 4.6 | 7.1 | 5.85 |
| 56,963 | CTX-I7ex1in1_T45 | TTTGACGTAATCATGTGAAT | 5.7 | | 5.7 |
| 56,964 | CTX-I7ex1in1_T69 | TTGACGTAATCATGTGAATA | 8.7 | 2.6 | 5.65 |
| 54,866 | CTX-I7ex1in1_T37 | TCTTTACTTCAAGTCGTTTC | 5.6 | | 5.6 |
| 56,901 | CTX-I7ex1in1_T115 | CACTGGGACCTGAGAAAATC | 4.8 | 6.4 | 6 |
| 56,922 | CTX-I7ex1in1_T192 | CTCTTTATGTAGTTTCAGCA | 5.7 | 5.1 | 5 |
| 54,874 | CTX-I7ex1in1_T156 | AACAGACCTGAGTCAGGCAC | 3.1 | 7.2 | 5.15 |
| 56,903 | CTX-I7ex1in1_T125 | GGACTGCTTCCATGTATTTT | 4.9 | 5.2 | 5 |
| 54,899 | CTX-I7ex1in1_T230 | TAACAGCAGCAGGAGGCATG | 5.7 | 4.3 | 5 |
| 56,958 | CTX-I7ex1in1_T134 | TTGTGTGGAATATGTATCAT | 9.9 | 0 | 4.95 |
| 54,943 | CTX-I7ex1in1_T147 | ACATGTTCTGTGTATAGAAT | 2 | 7.6 | 5 |
| 56,990 | CTX-I7ex1in1_T82 | AGGTGCTGAGGATATAGCAC | | 4.6 | 4.6 |
| 54,922 | CTX-I7ex1in1_T196 | TCAATTTTCTGATCATCACA | 8.5 | 0.4 | 4.45 |
| 54,897 | CTX-I7ex1in1_T148 | CAGAAGCTTCTAACAGCAGC | 4.9 | 3.4 | 4.15 |
| 54,916 | CTX-I7ex1in1_T60 | TAAGAATGCTAGTTGAAAGC | 6.9 | 0.8 | 3.85 |
| 54,956 | CTX-I7ex1in1_T143 | ACATAAAGAGCTTTTGCTGG | 3.4 | 4.3 | 4 |
| 56,934 | CTX-I7ex1in1_T179 | ACCTAAAATGGCTGTGTTTT | 5.7 | 1.3 | 4 |
| 54,875 | CTX-I7ex1in1_T158 | ACAGACCTGAGTCAGGCACT | 2.8 | 4 | 3.4 |
| 54,865 | CTX-I7ex1in1_T47 | TCTAGGTACAACTTTTGGCA | 2 | 4.6 | 3.3 |
| 56,917 | CTX-I7ex1in1_T6 | CCCTAGCTAGACCATGGGTG | 4.5 | 1.7 | 3 |
| 56,970 | CTX-I7ex1in1_T199 | TCCCTTAATGAGAAAATTCT | 4.2 | 1.6 | 2.9 |
| 56,960 | CTX-I7ex1in1_T161 | GATTAATAGTGTAAATGATT | 5.4 | 0.4 | 2.9 |
| 56,912 | CTX-I7ex1in1_T168 | TTAATAAAGCTGACTGTGAA | 2.2 | 3.3 | 3 |
| 54,905 | CTX-I7ex1in1_T185 | CCCTAGAATTTTCTCATTAA | 3.6 | 1.5 | 2.55 |
| 54,969 | CTX-I7ex1in1_T2 | AGTGCTATTCGGACAGCCCT | 2.5 | 2.6 | 3 |
| 56,920 | CTX-I7ex1in1_T190 | ACCACAGGCATTTGTTTTTC | | 2.4 | 2 |
| 54,970 | CTX-I7ex1in1_T31 | TTCGGACAGCCCTTGGTCTC | 2.8 | 2 | 2 |
| 54,971 | CTX-I7ex1in1_T36 | TCGGACAGCCCTTGGTCTCT | 3 | 1.7 | 2 |
| 56,953 | CTX-I7ex1in1_T265 | CTGAGAAATAAGTAATGAAA | 4.2 | 0.1 | 2.15 |
| 54,914 | CTX-I7ex1in1_T160 | CACAAAGACTGATGGGAGGC | 2 | 2.1 | 2.05 |
| 56,939 | CTX-I7ex1in1_T232 | CAATGACTTATAAAATGTGA | 4 | 0.1 | 2 |
| 56,968 | CTX-I7ex1in1_T110 | CTGCCTCCCATCAGTCTTTG | 1.1 | 2.6 | 1.85 |
| 56,991 | CTX-I7ex1in1_T126 | ATCCTGAAAGTTATGCTTTC | | 1.4 | 1.4 |
| 54,904 | CTX-I7ex1in1_T197 | TCCCTAGAATTTTCTCATTA | 2.5 | 0.2 | 1.35 |
| 56,985 | CTX-I7ex1in1_T94 | ATATGGCCAATTTGTTGGTG | | 1.1 | 1.1 |
| 54,921 | CTX-I7ex1in1_T58 | TACTTCCCAGTTTGGGGTAT | 1.8 | 0.3 | 1.05 |
| 54,918 | CTX-I7ex1in1_T42 | CGTCAAAATACTTCCCAGTT | 1.6 | 0 | 0.8 |
| 56,957 | CTX-I7ex1in1_T228 | CCATAAAAATTTAAATTGTG | 0.9 | 0 | 0.45 |
| 54,947 | CTX-I7ex1in1_T52 | AGTGTGAGGACTGCCATGTA | | 0.4 | 0 |
| 56,988 | CTX-I7ex1in1_T203 | TATATTCTAGCCACTGATTT | | 0.3 | 0.3 |
| 54,911 | CTX-I7ex1in1_T163 | TGGATTTCCACAAAGACTGA | 0.3 | 0.2 | 0.25 |
| 56,986 | CTX-I7ex1in1_T93 | TGGCCAATTTGTTGGTGTGG | | 0 | 0 |
| 56,983 | CTX-I7ex1in1_T234 | CCAAAAAGAATTATTACATA | | 0 | 0 |
| 56,966 | CTX-I7ex1in1_T85 | TTAAAAATAGTATGATCACC | 0 | 0 | 0 |
| 54,927 | CTX-I7ex1in1_T238 | CCACACAATTTAAATTTTTA | 0 | 0 | 0 |
| 56,950 | CTX-I7ex1in1_T76 | AGGTAGCTTAGAACACAGTA | | 0 | 0 |
| 56,944 | CTX-I7ex1in1_T200 | ACAGATGTGCGTTTAAATTC | | 0 | 0 |

Note that the SEQ ID NOs represent the DNA sequence of the genomic target, while the gRNA or sgRNA spacer sequence will be the RNA version of the DNA sequence.

### Example 14

### Bioinformatics Analysis of the Guide Strands

[0645] Candidate guides will be screened and selected in a multi-step process that involves both theoretical binding and experimentally assessed activity. By way of illustration, candidate guides having sequences that match a particular on-target site, such as a site within the IL7R gene, with adjacent PAM can be assessed for their potential to cleave at off-target sites having similar sequences, using one or more of a variety of bioinformatics tools available for assessing off-target binding, as described and illustrated in more detail below, in order to assess the likelihood of effects at chromosomal positions other than those intended. Candidates predicted to have relatively lower potential for off-target activity can then be assessed experimentally to measure their on-target activity, and then off-target activities at various sites. Suitable guides have sufficiently high on-target activity to achieve desired levels of gene editing at the selected locus, and relatively lower off-target activity to reduce the likelihood of alterations at other chromosomal loci. The ratio of on-target to off-target activity is often referred to as the “specificity” of a guide.

[0646] For initial screening of predicted off-target activities, there are a number of bioinformatics tools known and publicly available that can be used to predict the most likely off-target sites; and since binding to target sites in the CRISPR/Cas9/Cpf1 nuclease system is driven by Watson-Crick base pairing between complementary sequences, the degree of dissimilarity (and therefore reduced potential for off-target binding) is essentially related to primary sequence differences: mismatches and bulges, i.e. bases that are changed to a non-complementary base, and insertions or deletions of bases in the potential off-target site relative to the target site. An exemplary bioinformatics tool called COSMID (CRISPR Off-target Sites with Mismatches, Insertions and Deletions) (available on the web at crispr.bme.gatech.edu) compiles such similarities. Other bioinformatics tools include, but are not limited to, GUIDO, autoCOSMID, and CCtop.

[0647] Bioinformatics were used to minimize off-target cleavage in order to reduce the detrimental effects of mutations and chromosomal rearrangements. Studies on CRISPR/Cas9 systems suggested the possibility of high off-target activity due to nonspecific hybridization of the guide strand to DNA sequences with base pair mismatches and/or bulges, particularly at positions distal from the PAM region. Therefore, it is important to have a bioinformatics tool that can identify potential off-target sites that have insertions and/or deletions between the RNA guide strand and genomic sequences, in addition to base-pair mismatches. The bioinformatics-based tool, COSMID (CRISPR Off-target Sites with Mismatches, Insertions and Deletions) was therefore used to search genomes for potential CRISPR off-target sites (available on the web at crispr.bme.gatech.edu). COSMID output ranked lists of the potential off-target sites based on the number and location of mismatches, allowing more informed choice of target sites, and avoiding the use of sites with more likely off-target cleavage.

[0648] Additional bioinformatics pipelines were employed that weigh the estimated on- and/or off-target activity of gRNA targeting sites in a region. Other features that may be used to predict activity include information about the cell type in question, DNA accessibility, chromatin state, transcription factor binding sites, transcription factor binding data, and other CHIP-seq data. Additional factors are weighed that predict editing efficiency, such as relative positions and directions of pairs of gRNAs, local sequence features and micro-homologies.

### Example 15

### Testing of Preferred Guides in Cells For On-Target Activity

[0649] The gRNAs predicted to have the lowest off-target activity will then be tested for on-target activity in a model cell line, such as HEK293T or K562, and evaluated for indel frequency using TIDE or next generation sequencing. TIDE is a web tool to rapidly assess genome editing by CRISPR-Cas9 of a target locus determined by a guide RNA (gRNA or sgRNA). Based on the quantitative sequence trace data from two standard capillary sequencing reactions, the TIDE software quantifies the editing efficacy and identifies the predominant types of insertions and deletions (indels) in the DNA of a targeted cell pool. See Brinkman et al, Nucl. Acids Res. (2014) for a detailed explanation and examples. Next-generation sequencing (NGS), also known as high-throughput sequencing, is the catch-all term used to describe a number of different modern sequencing technologies including: Illumina (Solexa) sequencing, Roche 454 sequencing, Ion torrent: Proton/PGM sequencing, and SOLiD sequencing. These recent technologies allow one to sequence DNA and RNA much more quickly and cheaply than the previously used Sanger sequencing, and as such have revolutionized the study of genomics and molecular biology.

[0650] Transfection of tissue culture cells, allows screening of different constructs and a robust means of testing activity and specificity. Tissue culture cell lines, such as K562 or HEK293T are easily transfected and result in high activity. These or other cell lines will be evaluated to determine the cell lines that match with CD34+ and provide the best surrogate. These cells will then be used for many early stage tests. For example, individual gRNAs for S. pyogenes Cas9 will be transfected into the cells using plasmids, such as, for example, CTx-1, CTx-2, or CTx-3, which are suitable for expression in human cells. Several days later, the genomic DNA is harvested and the target site amplified by PCR. The cutting activity can be measured by the rate of insertions, deletions and mutations introduced by NHEJ repair of the free DNA ends. Although this method cannot differentiate correctly repaired sequences from uncleaved DNA, the level of cutting can be gauged by the amount of mis-repair. Off-target activity can be observed by amplifying identified putative off-target sites and using similar methods to detect cleavage. Translocation can also be assayed using primers flanking cut sites, to determine if specific cutting and translocations happen. Un-guided assays have been developed allowing complementary testing of off-target cleavage including guide-seq. The gRNA or pairs of gRNA with significant activity can then be followed up in cultured cells to measure correction of the IL7R mutation. Off-target events can be followed again. Similarly, CD34+ cells can be transfected and the level of gene correction and possible off-target events measured. These experiments allow optimization of nuclease and donor design and delivery.

### Example 16

### Testing of Preferred Guides in Cells For Off-Target Activity

[0651] The gRNAs having the best on-target activity from the TIDE and next generation sequencing studies in the above example will then be tested for off-target activity using whole genome sequencing. Candidate gRNAs will be more completely evaluated in CD34+ cells or iPSCs.

### Example 17

### Testing Different Approaches For HDR Gene Editing

[0652] After testing the gRNAs for both on-target activity and off-target activity, the mutation correction and knock-in strategies will be tested for HDR gene editing.

[0653] For the mutation correction approach, the donor DNA template will be provided as a short single-stranded oligonucleotide, a short double-stranded oligonucleotide (PAM sequence intact/PAM sequence mutated), a long single-stranded DNA molecule (PAM sequence intact/PAM sequence mutated) or a long double-stranded DNA molecule (PAM sequence intact/PAM sequence mutated). In addition, the donor DNA template will be delivered by AAV.

[0654] For the cDNA knock-in approach, a single-stranded or double-stranded DNA having homologous arms to the 5p13.2 region may include more than 40 nt of the first exon (the first coding exon) of the IL7R gene, the complete CDS of the IL7R gene and 3′UTR of the IL7R gene, and at least 40 nt of the following intergenic region. The single-stranded or double-stranded DNA having homologous arms to the 5p13.2 region may include more than 80 nt of the first exon of the IL7R gene, the complete CDS of the IL7R gene and 3′UTR of the IL7R gene, and at least 80 nt of the following intergenic region. The single-stranded or double-stranded DNA having homologous arms to the 5p13.2 region may include more than 100 nt of the first exon of the IL7R gene, the complete CDS of the IL7R gene and 3′UTR of the IL7R gene, and at least 100 nt of the following intergenic region. The single-stranded or double-stranded DNA having homologous arms to the 5p13.2 region may include more than 150 nt of the first exon of the IL7R gene, the complete CDS of the IL7R gene and 3′UTR of the IL7R gene, and at least 150 nt of the following intergenic region. The single-stranded or double-stranded DNA having homologous arms to the 5p13.2 region may include more than 300 nt of the first exon of the IL7R gene, the complete CDS of the IL7R gene and 3′UTR of the IL7R gene, and at least 300 nt of the following intergenic region. The single-stranded or double-stranded DNA having homologous arms to the 5p13.2 region may include more than 400 nt of the first exon of the IL7R gene, the complete CDS of the IL7R gene and 3′UTR of the IL7R gene, and at least 400 nt of the following intergenic region. Alternatively, the DNA template will be delivered by AAV.

[0655] For the cDNA or minigene knock-in approach, a single-stranded or double-stranded DNA having homologous arms to the 11p13, which includes more than 80 nt of the second exon (the first coding exon) of the IL7R gene, the complete CDS of the IL7R gene and 3′UTR of the IL7R gene, and at least 80 nt of the following intergenic region. Alternatively, the DNA template will be delivered by AAV.

### Example 18

### Re-Assessment of Lead CRISPR-Cas9/DNA Donor Combinations

[0656] After testing the different strategies for HDR or NHEJ gene editing, the lead CRISPR-Cas9/DNA donor combinations will be re-assessed in primary human cells for efficiency of deletion, recombination, and off-target specificity. Cas9 mRNA or RNP will be formulated into lipid nanoparticles for delivery, sgRNAs will be formulated into nanoparticles or delivered as AAV, and donor DNA will be formulated into nanoparticles or delivered as AAV.

### Example 19

### In Vivo Testing in Relevant Animal Model

[0657] After the CRISPR-Cas9/DNA donor combinations have been re assessed, the lead formulations will be tested in vivo in an animal model.

[0658] Culture in human cells allows direct testing on the human target and the background human genome, as described above.

[0659] Preclinical efficacy and safety evaluations can be observed through engraftment of modified mouse or human CD34+ cells in NSG (NOD/SCID/gamma(c)(null)), or similar mice. The modified cells can be observed in the months after engraftment.

### Example 20

### Clinical Expectations

[0660] Gene therapy would result in developing B and T cells in central lymphoid organs and in the appearance of B and T cells in peripheral blood. Serum Ig levels can be measured and compared to the range found in patients without immunodeficiencies. Ig and TCR Vβ gene segment usage in B- and T-cells, respectively, should be substantially greater than control conditions in which IL7R is deficient, as a measure of the intended IL7R-mediated gene editing. Animal models have indicated that even low frequencies of B cells produced WT levels of serum immunoglobulins. T cell function can be assayed through TCR stimulation and cytokine measurement, and compared to both fully deficient and WT levels.

[0661] Clinical testing would include long term evaluation of B- and T-cells from a IL7R-corrected cell type to determine if there are any resulting growth abnormalities or signs of oncogene activation.

[0662] Note Regarding Illustrative Examples

[0663] While the present disclosure provides descriptions of various specific aspects for the purpose of illustrating various aspects of the present invention and/or its potential applications, it is understood that variations and modifications will occur to those skilled in the art. Accordingly, the invention or inventions described herein should be understood to be at least as broad as they are claimed, and not as more narrowly defined by particular illustrative aspects provided herein.

[0664] Any patent, publication, or other disclosure material identified herein is incorporated by reference into this specification in its entirety unless otherwise indicated, but only to the extent that the incorporated material does not conflict with existing descriptions, definitions, statements, or other disclosure material expressly set forth in this specification. As such, and to the extent necessary, the express disclosure as set forth in this specification supersedes any conflicting material incorporated by reference. Any material, or portion thereof, that is said to be incorporated by reference into this specification, but which conflicts with existing definitions, statements, or other disclosure material set forth herein, is only incorporated to the extent that no conflict arises between that incorporated material and the existing disclosure material. Applicants reserve the right to amend this specification to expressly recite any subject matter, or portion thereof, incorporated by reference herein.

What is claimed is:

1. A method for editing an Interleukin-7 receptor (IL7R) gene in a human cell by genome editing, the method comprising the step of: introducing into the human cell one or more deoxyribonucleic acid (DNA) endonucleases to effect one or more single-strand breaks (SSBs) or double-strand breaks (DSBs) within or near the IL7R gene or other DNA sequences that encode regulatory elements of the IL7R gene that results in a permanent insertion, deletion, correction, or modulation of expression or function of one or more mutations or exons within or near or affecting the expression or function of the IL7R gene or other DNA sequences that encode regulatory elements of the IL7R gene and results in restoration of IL7R protein activity.

2. A method for inserting a IL7R gene in a human cell by genome editing, the method comprising introducing into the human cell one or more deoxyribonucleic acid (DNA) endonucleases to effect one or more single-strand breaks (SSBs) or double-strand breaks (DSBs) within or near a safe harbor locus that results in a permanent insertion of the IL7R gene or minigene, and results in restoration of IL7R activity.

3. An ex vivo method for treating a patient with severe combined immunodeficiency (SCID) or Omenn Syndrome, the method comprising the steps of:
i) creating a patient specific induced pluripotent stem cell (iPSC);
ii) editing within or near an Interleukin-7 receptor (IL7R) gene or other DNA sequences that encode regulatory elements of the IL7R gene of the iPSC;
iii) differentiating the genome-edited iPSC into a hematopoietic progenitor cell or a white blood cell; and
iv) implanting the hematopoietic progenitor cell or white blood cell into the patient.

4. The method of claim 3, wherein the creating step comprises:
a) isolating a somatic cell from the patient; and
b) introducing a set of pluripotency-associated genes into the somatic cell to induce the somatic cell to become a pluripotent stem cell.

5. The method of claim 4, wherein the somatic cell is a fibroblast.

6. The method of claim 4, wherein the set of pluripotency-associated genes is one or more of the genes selected from the group consisting of OCT4, SOX2, KLF4, Lin28, NANOG and cMYC.

7. The method of any one of claims 3-6, wherein the editing step comprises introducing into the iPSC one or more deoxyribonucleic acid (DNA) endonucleases to effect one or more single-strand breaks (SSBs) or double-strand breaks (DSBs) within or near the IL7R gene or other DNA sequences that encode regulatory elements of the IL7R gene that results in a permanent deletion, insertion, correction, or modulation of expression or function of one or more mutations within or near or affecting the expression or function of the IL7R gene and results in restoration of IL7R protein activity.

8. The method of any one of claims 3-7, wherein the differentiating step comprises one or more of the following to differentiate the genome-edited iPSC into a hematopoietic progenitor cell or a white blood cell: treatment with a combination of small molecules or delivery of master transcription factors.

9. The method of any one of claims 3-8, wherein the implanting step comprises implanting the hematopoietic progenitor cell or white blood cell into the patient by local injection, systemic infusion, or combinations thereof.

10. An ex vivo method for treating a patient with severe combined immunodeficiency (SCID) or Omenn Syndrome, the method comprising the steps of:
i) isolating a white blood cell from the patient;
ii) editing within or near an Interleukin-7 receptor (IL7R) gene of the white blood cell or other DNA sequences that encode regulatory elements of the IL7R gene of the white blood cell or editing within or near a safe harbor locus of the white blood cell; and
iii) implanting the genome-edited white blood cell into the patient.

11. The method of claim 10, wherein the isolating step comprises: cell differential centrifugation, cell culturing, or combinations thereof.

12. The method of any one of claims 10-11, wherein the editing step comprises introducing into the white blood cell one or more deoxyribonucleic acid (DNA) endonucleases to effect one or more single-strand breaks (SSBs) or double-strand breaks (DSBs) within or near the IL7R gene or other DNA sequences that encode regulatory elements of the IL7R gene that results in a permanent insertion, deletion, or correction, or modulation of expression or function of one or more mutations or exons within or near or affecting the expression or function of the IL7R gene or other DNA sequences that encode regulatory elements of the IL7R gene, or within or near a safe harbor locus that results in permanent insertion of the IL7R gene or minigene and restoration of IL7R protein activity.

13. The method of claim 11, wherein the safe harbor locus is selected from the group consisting of AAVS1 (PPP1R12C), ALB, Angptl3, ApoC3, ASGR2, CCR5, FIX (F9), G6PC, Gys2, HGD, Lp(a), Pcsk9, Serpina1, TF, and TTR.

14. The method of any one of claims 10-13, wherein the implanting step comprises implanting the genome-edited white blood cell into the patient by transplantation, local injection, or systemic infusion, or combinations thereof.

15. An ex vivo method for treating a patient with severe combined immunodeficiency (SCID) or Omenn Syndrome, the method comprising the steps of:
i) isolating a hematopoietic progenitor cell from the patient;
ii) editing within or near an Interleukin-7 receptor (IL7R) gene of the hematopoietic progenitor cell or other DNA sequences that encode regulatory elements of the IL7R gene of the hematopoietic progenitor cell or editing within or near a safe harbor locus of the hematopoietic progenitor cell; and
iii) implanting the genome-edited hematopoietic progenitor cell into the patient.

16. The method of claim 15, wherein the method further comprises treating the patient with granulocyte colony stimulating factor (GCSF) prior to the isolating step.

17. The method of claim 16, wherein the treating step is performed in combination with Plerixaflor.

18. The method of any one of claims 15-17, wherein the isolating step comprises isolating CD34+ cells.

19. The method of any one of claims 15-18, wherein the editing step comprises introducing into the hematopoietic progenitor cell one or more deoxyribonucleic acid (DNA) endonucleases to effect one or more single-strand breaks (SSBs) or double-strand breaks (DSBs) within or near the IL7R gene or other DNA sequences that encode regulatory elements of the IL7R gene that results in a permanent correction, deletion, insertion, or modulation of expression or function of one or more mutations or exons within or near or affecting the expression or function of the IL7R gene or other DNA sequences that encode regulatory elements of the IL7R gene, or within or near a safe harbor locus that results in permanent insertion of the IL7R gene or minigene and restoration of IL7R protein activity.

20. The method of claim 19, wherein the safe harbor locus is selected from the group consisting of AAVS1 (PPP1R12C), ALB, Angptl3, ApoC3, ASGR2, CCR5, FIX (F9), G6PC, Gys2, HGD, Lp(a), Pcsk9, Serpina1, TF, and TTR.

21. The method of any one of claims 15-20, wherein the implanting step comprises implanting the genome-edited hematopoietic progenitor cell into the patient by transplantation, local injection, or systemic infusion, or combinations thereof.

22. An in vivo method for treating a patient with severe combined immunodeficiency (SCID) or Omenn Syndrome, the method comprising the step of editing an Interleukin-7 receptor (IL7R) gene in a cell of the patient or other DNA sequences that encode regulatory elements of the IL7R gene in a cell of the patient, or editing within or near a safe harbor locus in a cell of the patient.

23. The method of claim 22, wherein the editing step comprises introducing into the cell one or more deoxyribonucleic acid (DNA) endonucleases to effect one or more single-strand breaks (SSBs) or double-strand breaks (DSBs) within or near the IL7R gene or other DNA sequences that encode regulatory elements of the IL7R gene that results in a permanent insertion, deletion, correction, or modulation of expression or function of one or more mutations or exons within or near or affecting the expression or function of the IL7R gene or other DNA sequences that encode regulatory elements of the IL7R gene, or within or near a safe harbor locus that results in permanent insertion of the IL7R gene or minigene, and restoration of IL7R protein activity.

24. The method of claim 23, wherein the safe harbor locus is selected from the group consisting of AAVS1 (PPP1R12C), ALB, Angptl3, ApoC3, ASGR2, CCR5, FIX (F9), G6PC, Gys2, HGD, Lp(a), Pcsk9, Serpina1, TF, and TTR.

25. The method of any one of claims 22-24, wherein the cell is a bone marrow cell, a hematopoietic progenitor cell, or a CD34+ cell.

26. The method of any one of claim 1, 2, 7, 12, 19, or 23, wherein the one or more DNA endonucleases is a Cas1, Cas1B, Cas2, Cas3, Cas4, Cas5, Cas6, Cas7, Cas8, Cas9 (also known as Csn1 and Csx12), Cas100, Csy1, Csy2, Csy3, Cse1, Cse2, Csc1, Csc2, Csa5, Csn2, Csm2, Csm3, Csm4, Csm5, Csm6, Cmr1, Cmr3, Cmr4, Cmr5, Cmr6, Csb1, Csb2, Csb3, Csx17, Csx14, Csx10, Csx16, CsaX, Csx3, Csx1, Csx15, Csf1, Csf2, Csf3, Csf4, or Cpf1 endonuclease; or a homolog thereof, recombination of the naturally occurring molecule, codon-optimized, or modified version thereof, and combinations thereof.

27. The method of claim 26, wherein the method comprises introducing into the cell one or more polynucleotides encoding the one or more DNA endonucleases.

28. The method of claim 26, wherein the method comprises introducing into the cell one or more ribonucleic acids (RNAs) encoding the one or more DNA endonucleases.

29. The method of any one of claim 27 or 28, wherein the one or more polynucleotides or one or more RNAs is one or more modified polynucleotides or one or more modified RNAs.

30. The method of claim 27, wherein the DNA endonuclease is a protein or polypeptide.

31. The method of any one of the preceding claims, wherein the method further comprises introducing into the cell one or more guide ribonucleic acids (gRNAs).

32. The method of claim 31, wherein the one or more gRNAs are single-molecule guide RNA (sgRNAs).

33. The method of any one of claims 31-32, wherein the one or more gRNAs or one or more sgRNAs is one or more modified gRNAs or one or more modified sgRNAs.

34. The method of any one of claims 31-33, wherein the one or more DNA endonucleases is pre-complexed with one or more gRNAs or one or more sgRNAs.

35. The method of any one of the preceding claims, wherein the method further comprises introducing into the cell a polynucleotide donor template comprising at least a portion of the wild-type IL7R gene or minigene or cDNA.

36. The method of claim 35, wherein the at least a portion of the wild-type IL7R gene or minigene or cDNA is exon 1, some or all of intron 1, exon 2, some or all of intron 2, exon 3, some or all of intron 3, exon 4, some or all of intron 4, exon 5, some or all of intron 5, exon 6, some or all of intron 6, exon 7, some or all of intron 7, exon 8, fragments, or combinations thereof, or the entire IL7R gene, DNA sequences that encode wild type regulatory elements of the IL7R gene, minigene, or cDNA.

37. The method of any one of claims 35-36, wherein the donor template is either a single or double stranded polynucleotide.

38. The method of any one of claims 35-37, wherein the donor template has arms homologous to the 5p13.2 region.

39. The method of any one of claim 1, 2, 7, 12, 19, or 23, wherein the method further comprises introducing into the cell one guide ribonucleic acid (gRNA) and a polynucleotide donor template comprising at least a portion of the wild-type IL7R gene, and wherein the two or more DNA endonucleases is two or more Cas9 or Cpf1 endonucleases that effect one single-strand break (SSB) or double-strand break (DSB) at a locus within or near the IL7R gene or other DNA sequences that encode regulatory elements of the IL7R gene, or within or near a safe harbor locus that facilitates insertion of a new sequence from the polynucleotide donor template into the chromosomal DNA at the locus or safe harbor locus that results in a permanent insertion or correction of a part of the chromosomal DNA of the IL7R gene or other DNA sequences that encode regulatory elements of the IL7R gene proximal to the locus or safe harbor locus and restoration of IL7R protein activity, and wherein the gRNA comprises a spacer sequence that is complementary to a segment of the locus or safe harbor locus.

40. The method of claim 39, wherein proximal means nucleotides both upstream and downstream of the locus or safe harbor locus.

41. The method of any one of claim 1, 2, 7, 12, 19, or 23, wherein the method further comprises introducing into the cell two guide ribonucleic acid (gRNAs) and a polynucleotide donor template comprising at least a portion of the wild-type IL7R gene, and wherein the two or more DNA endonucleases is one or more Cas9 or Cpf1 endonucleases that effect a pair of single-strand breaks (SSBs) or double-strand breaks (DSBs), the first at a 5′ locus and the second at a 3′ locus, within or near the IL7R gene or other DNA sequences that encode regulatory elements of the IL7R gene or within or near a safe harbor locus that facilitates insertion of a new sequence from the polynucleotide donor template into the chromosomal DNA between the 5′ locus and the 3′ locus that results in a permanent insertion or correction of the chromosomal DNA between the 5′ locus and the 3′ locus within or near the IL7R gene or other DNA sequences that encode regulatory elements of the IL7R gene, or within or near a safe harbor locus and restoration of IL7R protein activity, and wherein the first guide RNA comprises a spacer sequence that is complementary to a segment of the 5′ locus and the second guide RNA comprises a spacer sequence that is complementary to a segment of the 3′ locus.

42. The method of any one of claims 39-41, wherein the one or two gRNAs are one or two single-molecule guide RNA (sgRNAs).

43. The method of any one of claims 39-42, wherein the one or two gRNAs or one or two sgRNAs is one or two modified gRNAs or one or two modified sgRNAs.

44. The method of any one of claims 39-43, wherein the one or more DNA endonucleases is pre-complexed with one or two gRNAs or one or two sgRNAs.

45. The method of any one of claims 39-44, wherein the at least a portion of the wild-type IL7R gene or cDNA is exon 1, some or all of intron 1, exon 2, some or all of intron 2, exon 3, some or all of intron 3, exon 4, some or all of intron 4, exon 5, some or all of intron 5, exon 6, some or all of intron 6, exon 7, some or all of intron 7, exon 8, intronic regions, fragments, or combinations thereof, or the entire IL7R gene, DNA sequences that encode wild type regulatory elements of the IL7R gene, minigene, or cDNA.

46. The method of any one of claims 39-45, wherein the donor template is either a single or double stranded polynucleotide.

47. The method of any one of claims 39-46, wherein the donor template has arms homologous to the 5p13.2 region.

48. The method of claim 45, wherein the locus, 5′ locus, and 3′ locus are in the first, second, third, fourth, fifth, sixth, seventh, or eighth exon or intron of the IL7R gene.

49. The method of any one of claim 1, 2, 7, 12, 19, or 23-48, wherein the insertion or correction is by homology directed repair (HDR) or non-homologous end joining (NHEJ).

50. The method of any one of claim 1, 2, 7, 12, 19, or 23, wherein the method further comprises introducing into the cell two guide ribonucleic acid (gRNAs), and wherein the one or more DNA endonucleases is two or more Cas9 or Cpf1 endonucleases that effect a pair of double-strand breaks (DSBs), the first at a 5′locus and the second at a 3′ locus, within or near the IL7R gene or other DNA sequences that encode regulatory elements of the IL7R gene that causes a deletion of the chromosomal DNA between the 5′ locus and the 3′ locus that results in a permanent deletion of the chromosomal DNA between the 5′ locus and the 3′ locus within or near the IL7R gene and results in restoration of IL7R protein activity, and wherein the first guide RNA comprises a spacer sequence that is complementary to a segment of the 5′ locus and the second guide RNA comprises a spacer sequence that is complementary to a segment of the 3′ locus.

51. The method of claim 50, wherein the two gRNAs are two single-molecule guide RNA (sgRNAs).

52. The method of any one of claims 50-51, wherein the two gRNAs or two sgRNAs are two modified gRNAs or two modified sgRNAs.

53. The method of any one of claims 50-52, wherein the one or more DNA endonucleases is pre-complexed with one or two gRNAs or one or two sgRNAs.

54. The method of any one of claims 50-53, wherein both the 5′ locus and 3′ locus are in or near either the first exon, first intron, second exon, second intron, third exon, third intron, fourth exon, fourth intron, fifth exon, fifth intron, sixth exon, sixth intron, seventh exon, seventh intron, or eighth exon of the IL7R gene.

55. The method of any one of claim 50-54, wherein the deletion is a deletion of 1 kb or less.

56. The method of any one of claim 1, 2, 7, 12, 19, or 23-55, wherein the Cas9 or Cpf1 mRNA, gRNA, and donor template are either each formulated into separate lipid nanoparticles or all co-formulated into a lipid nanoparticle.

57. The method of any one of claim 1, 2, 7, 12, 19, or 23-55, wherein the Cas9 or Cpf1 mRNA is formulated into a lipid nanoparticle, and both the gRNA and donor template are delivered to the cell by a viral vector.

58. The method of claim 57, wherein the viral vector is an adeno-associated virus (AAV) vector.

59. The method of claim 58, wherein the AAV vector is an AAV6 vector.

60. The method of any one of claim 2, 7, 12, 19, or 23-55, wherein the Cas9 or Cpf1 mRNA, gRNA and a donor template are either each formulated into separate exosomes or all co-formulated into an exosome.

61. The method of any one of claim 1, 2, 7, 12, 19, or 23-55, wherein the Cas9 or Cpf1 mRNA is formulated into a lipid nanoparticle, and the gRNA is delivered to the cell by electroporation and donor template is delivered to the cell by a viral vector.

62. The method of claim 61, wherein the viral vector is an adeno-associated virus (AAV) vector.

63. The method of claim 62, wherein the AAV vector is an AAV6 vector.

64. The method of any one of claim 1, 2, 7, 12, 19, or 23-55, wherein the gRNA is delivered to the cell by electroporation and donor template is delivered to the cell by a viral vector.

65. The method of claim 64, wherein the viral vector is an adeno-associated virus (AAV) vector.

66. The method of claim 65, wherein the AAV vector is an AAV6 vector.

67. The method of any one of the preceding claims, wherein the IL7R gene is located on Chromosome 5: 35,856,875-35,879,603 (Genome Reference Consortium—GRCh38).

68. The method of any one of claim 1, 2, 7, 12, 19, or 23-55, wherein the restoration of IL7R protein activity is compared to wild-type or normal IL7R protein activity.

69. The method of claim 1, wherein the human cell is a hematopoietic progenitor cell or a white blood cell.

70. The method of claim 22, wherein the cell is a hematopoietic progenitor cell or a white blood cell.

71. The method of any one of claim 1, 2, 7, 12, 19, or 23-55, wherein the IL7R gene is operably linked to an exogenous promoter that drives expression of the IL7R gene.

72. The method of any one of claim 1, 2, 7, 12, 19, or 23-55, wherein the one or more loci occurs at a location immediately 3′ to an endogenous promoter locus.

73. The method of any one of the preceding claims, wherein the donor molecule contains one or more target sites for the endonuclease:gRNA.

74. The method of any one of the preceding claims, wherein the donor molecule or a molecule derived from the donor molecule is cleaved one or more times by the endonuclease:gRNA.

75. One or more guide ribonucleic acids (gRNAs) for editing an IL7R gene in a cell from a patient with severe combined immunodeficiency (SCID) or Omenn Syndrome, the one or more gRNAs comprising a spacer sequence selected from the group consisting of the nucleic acid sequences in SEQ ID NOs: 54,862-63,375 for editing the IL7R gene in a cell from a patient with severe combined immunodeficiency (SCID) or Omenn Syndrome.

76. The one or more gRNAs of claim 75, wherein the one or more gRNAs are one or more single-molecule guide RNAs (sgRNAs).

77. The one or more gRNAs or sgRNAs of claim 75 or 76, wherein the one or more gRNAs or one or more sgRNAs is one or more modified gRNAs or one or more modified sgRNAs.

78. One or more guide ribonucleic acids (gRNAs) for editing a safe harbor locus in a cell from a patient with severe combined immunodeficiency (SCID) or Omenn Syndrome, the one or more gRNAs comprising a spacer sequence selected from the group consisting of the nucleic acid sequences in SEQ ID NOs: 1-54,859 for editing the safe harbor locus in a cell from a patient with severe combined immunodeficiency (SCID) or Omenn Syndrome, wherein the safe harbor locus is selected from the group consisting of AAVS1 (PPP1R12C), ALB, Angptl3, ApoC3, ASGR2, CCR5, FIX (F9), G6PC, Gys2, HGD, Lp(a), Pcsk9, Serpina1, TF, and TTR.

79. The one or more gRNAs of claim 78, wherein the one or more gRNAs are one or more single-molecule guide RNAs (sgRNAs).

80. The one or more gRNAs or sgRNAs of claim 78 or 79, wherein the one or more gRNAs or one or more sgRNAs is one or more modified gRNAs or one or more modified sgRNAs.

The application's sequence listing, which the Patent Office published only in electronic form, follows.

SEQUENCE LISTING (63375 sequences)

SEQ ID NO: 1 - DNA, 20 bp, Artificial Sequence
  chemically synthesized
tggcgatatctaggtagcca

SEQ ID NO: 2 - DNA, 20 bp, Artificial Sequence
  chemically synthesized
ggcgatatctaggtagccac

SEQ ID NO: 3 - DNA, 20 bp, Artificial Sequence
  chemically synthesized
cgatatctaggtagccacag

SEQ ID NO: 4 - DNA, 20 bp, Artificial Sequence
  chemically synthesized
gatatctaggtagccacagg

SEQ ID NO: 5 - DNA, 20 bp, Artificial Sequence
  chemically synthesized
atctaggtagccacaggagg

SEQ ID NO: 6 - DNA, 20 bp, Artificial Sequence
  chemically synthesized
ccacaggaggcggccacgtg

SEQ ID NO: 7 - DNA, 20 bp, Artificial Sequence
  chemically synthesized
caggaggcggccacgtgcag

SEQ ID NO: 8 - DNA, 20 bp, Artificial Sequence
  chemically synthesized
cggccacgtgcagtggcgtc

SEQ ID NO: 9 - DNA, 20 bp, Artificial Sequence
  chemically synthesized
tccagccctcgttgtctgcc

SEQ ID NO: 10 - DNA, 20 bp, Artificial Sequence
  chemically synthesized
ctcgttgtctgcctggttca

SEQ ID NO: 11 - DNA, 20 bp, Artificial Sequence
  chemically synthesized
gttgtctgcctggttcacag

SEQ ID NO: 12 - DNA, 20 bp, Artificial Sequence
  chemically synthesized
cagtggcgccctgctccacc

SEQ ID NO: 13 - DNA, 20 bp, Artificial Sequence
  chemically synthesized
tggcgccctgctccaccaag

SEQ ID NO: 14 - DNA, 20 bp, Artificial Sequence
  chemically synthesized
accaagaagcgcaccacctc

SEQ ID NO: 15 - DNA, 20 bp, Artificial Sequence
  chemically synthesized
ccaagaagcgcaccacctcc

SEQ ID NO: 16 - DNA, 20 bp, Artificial Sequence
  chemically synthesized
cctccaggttctcatcaatg

SEQ ID NO: 17 - DNA, 20 bp, Artificial Sequence
  chemically synthesized
ctccaggttctcatcaatgc

SEQ ID NO: 18 - DNA, 20 bp, Artificial Sequence
  chemically synthesized
ggttctcatcaatgcaggcc

SEQ ID NO: 19 - DNA, 20 bp, Artificial Sequence
  chemically synthesized
gttctcatcaatgcaggcct

SEQ ID NO: 20 - DNA, 20 bp, Artificial Sequence
  chemically synthesized
ttctcatcaatgcaggcctg

SEQ ID NO: 21 - DNA, 20 bp, Artificial Sequence
  chemically synthesized
tctcatcaatgcaggcctgg

SEQ ID NO: 22 - DNA, 20 bp, Artificial Sequence
  chemically synthesized
catcaatgcaggcctggggg

SEQ ID NO: 23 - DNA, 20 bp, Artificial Sequence
  chemically synthesized
atcaatgcaggcctgggggt

SEQ ID NO: 24 - DNA, 20 bp, Artificial Sequence
  chemically synthesized
gcaggcctgggggtgggaaa

SEQ ID NO: 25 - DNA, 20 bp, Artificial Sequence
  chemically synthesized
tgggggtgggaaacagccgt

SEQ ID NO: 26 - DNA, 20 bp, Artificial Sequence
  chemically synthesized
gccgtcagccgcacctaccc

SEQ ID NO: 27 - DNA, 20 bp, Artificial Sequence
  chemically synthesized
agccgcacctaccccagcca

SEQ ID NO: 28 - DNA, 20 bp, Artificial Sequence
  chemically synthesized
ctaccccagccacggtgtcc

SEQ ID NO: 29 - DNA, 20 bp, Artificial Sequence
  chemically synthesized
cccagccacggtgtcccagc

SEQ ID NO: 30 - DNA, 20 bp, Artificial Sequence
  chemically synthesized
gccacggtgtcccagcaagt

SEQ ID NO: 31 - DNA, 20 bp, Artificial Sequence
  chemically synthesized
ccacggtgtcccagcaagtc

SEQ ID NO: 32 - DNA, 20 bp, Artificial Sequence
  chemically synthesized
gtcccagcaagtcgggactc

SEQ ID NO: 33 - DNA, 20 bp, Artificial Sequence
  chemically synthesized
cccagcaagtcgggactcca

SEQ ID NO: 34 - DNA, 20 bp, Artificial Sequence
  chemically synthesized
ccagcaagtcgggactccag

SEQ ID NO: 35 - DNA, 20 bp, Artificial Sequence
  chemically synthesized
cagcaagtcgggactccaga

SEQ ID NO: 36 - DNA, 20 bp, Artificial Sequence
  chemically synthesized
gcaagtcgggactccagagg

SEQ ID NO: 37 - DNA, 20 bp, Artificial Sequence
  chemically synthesized
tccagagggagccacgaaaa

SEQ ID NO: 38 - DNA, 20 bp, Artificial Sequence
  chemically synthesized
gggagccacgaaaacagatc

SEQ ID NO: 39 - DNA, 20 bp, Artificial Sequence
  chemically synthesized
ggagccacgaaaacagatcc

SEQ ID NO: 40 - DNA, 20 bp, Artificial Sequence
  chemically synthesized
gagccacgaaaacagatcca

SEQ ID NO: 41 - DNA, 20 bp, Artificial Sequence
  chemically synthesized
cgaaaacagatccagggaca

SEQ ID NO: 42 - DNA, 20 bp, Artificial Sequence
  chemically synthesized
cagatccagggacacggtgc

SEQ ID NO: 43 - DNA, 20 bp, Artificial Sequence
  chemically synthesized
agatccagggacacggtgct

SEQ ID NO: 44 - DNA, 20 bp, Artificial Sequence
  chemically synthesized
ccagggacacggtgctagga

SEQ ID NO: 45 - DNA, 20 bp, Artificial Sequence
  chemically synthesized
gggacacggtgctaggacag

SEQ ID NO: 46 - DNA, 20 bp, Artificial Sequence
  chemically synthesized
ggacacggtgctaggacagt

SEQ ID NO: 47 - DNA, 20 bp, Artificial Sequence
  chemically synthesized
gacacggtgctaggacagtg

SEQ ID NO: 48 - DNA, 20 bp, Artificial Sequence
  chemically synthesized
cagtggggaaaatgacccaa

SEQ ID NO: 49 - DNA, 20 bp, Artificial Sequence
  chemically synthesized
gaaaatgacccaacagcctc

SEQ ID NO: 50 - DNA, 20 bp, Artificial Sequence
  chemically synthesized
acccaacagcctctggccac

SEQ ID NO: 51 - DNA, 20 bp, Artificial Sequence
  chemically synthesized
cctctggccactggctgttt

SEQ ID NO: 52 - DNA, 20 bp, Artificial Sequence
  chemically synthesized
ctggctgtttaagatacgcc

SEQ ID NO: 53 - DNA, 20 bp, Artificial Sequence
  chemically synthesized
ttaagatacgcctggttgcc

SEQ ID NO: 54 - DNA, 20 bp, Artificial Sequence
  chemically synthesized
agatacgcctggttgcccag

SEQ ID NO: 55 - DNA, 20 bp, Artificial Sequence
  chemically synthesized
acgcctggttgcccagtggt

SEQ ID NO: 56 - DNA, 20 bp, Artificial Sequence
  chemically synthesized
cgcctggttgcccagtggtc

SEQ ID NO: 57 - DNA, 20 bp, Artificial Sequence
  chemically synthesized
tggttgcccagtggtcaggc

SEQ ID NO: 58 - DNA, 20 bp, Artificial Sequence
  chemically synthesized
tgcccagtggtcaggccggc

SEQ ID NO: 59 - DNA, 20 bp, Artificial Sequence
  chemically synthesized
gcccagtggtcaggccggcc

SEQ ID NO: 60 - DNA, 20 bp, Artificial Sequence
  chemically synthesized
ggtcaggccggccaggcctt

SEQ ID NO: 61 - DNA, 20 bp, Artificial Sequence
  chemically synthesized
ccggccaggccttcagtgct

SEQ ID NO: 62 - DNA, 20 bp, Artificial Sequence
  chemically synthesized
gccaggccttcagtgctcag

SEQ ID NO: 63 - DNA, 20 bp, Artificial Sequence
  chemically synthesized
gtgctcagtggaaaccacga

SEQ ID NO: 64 - DNA, 20 bp, Artificial Sequence
  chemically synthesized
tgctcagtggaaaccacgaa

SEQ ID NO: 65 - DNA, 20 bp, Artificial Sequence
  chemically synthesized
ggaaaccacgaaaggactcc

SEQ ID NO: 66 - DNA, 20 bp, Artificial Sequence
  chemically synthesized
gactcctggctatctgcaaa

SEQ ID NO: 67 - DNA, 20 bp, Artificial Sequence
  chemically synthesized
actcctggctatctgcaaac

SEQ ID NO: 68 - DNA, 20 bp, Artificial Sequence
  chemically synthesized
cctggctatctgcaaacagg

SEQ ID NO: 69 - DNA, 20 bp, Artificial Sequence
  chemically synthesized
atctgcaaacaggaagtgaa

SEQ ID NO: 70 - DNA, 20 bp, Artificial Sequence
  chemically synthesized
tctgcaaacaggaagtgaac

SEQ ID NO: 71 - DNA, 20 bp, Artificial Sequence
  chemically synthesized
ctgcaaacaggaagtgaacg

SEQ ID NO: 72 - DNA, 20 bp, Artificial Sequence
  chemically synthesized
caaacaggaagtgaacgggg

SEQ ID NO: 73 - DNA, 20 bp, Artificial Sequence
  chemically synthesized
aaacaggaagtgaacgggga

SEQ ID NO: 74 - DNA, 20 bp, Artificial Sequence
  chemically synthesized
aacaggaagtgaacggggaa

SEQ ID NO: 75 - DNA, 20 bp, Artificial Sequence
  chemically synthesized
caggaagtgaacggggaagg

SEQ ID NO: 76 - DNA, 20 bp, Artificial Sequence
  chemically synthesized
aggaagtgaacggggaaggg

SEQ ID NO: 77 - DNA, 20 bp, Artificial Sequence
  chemically synthesized
ggaagtgaacggggaaggga

SEQ ID NO: 78 - DNA, 20 bp, Artificial Sequence
  chemically synthesized
gaagtgaacggggaagggag

SEQ ID NO: 79 - DNA, 20 bp, Artificial Sequence
  chemically synthesized
aagtgaacggggaagggagg

SEQ ID NO: 80 - DNA, 20 bp, Artificial Sequence
  chemically synthesized
aagggagggggcttctcatc

SEQ ID NO: 81 - DNA, 20 bp, Artificial Sequence
  chemically synthesized
agggagggggcttctcatct

SEQ ID NO: 82 - DNA, 20 bp, Artificial Sequence
  chemically synthesized
gggggcttctcatctgggtg

SEQ ID NO: 83 - DNA, 20 bp, Artificial Sequence
  chemically synthesized
ggggcttctcatctgggtgc

SEQ ID NO: 84 - DNA, 20 bp, Artificial Sequence
  chemically synthesized
ctgggtgcgggaaccccaca

SEQ ID NO: 85 - DNA, 20 bp, Artificial Sequence
  chemically synthesized
gaaccccacatggtacctgt

SEQ ID NO: 86 - DNA, 20 bp, Artificial Sequence
  chemically synthesized
cacatggtacctgttagaca

SEQ ID NO: 87 - DNA, 20 bp, Artificial Sequence
  chemically synthesized
aaaacccccgtcaccaccca

SEQ ID NO: 88 - DNA, 20 bp, Artificial Sequence
  chemically synthesized
aaacccccgtcaccacccac

SEQ ID NO: 89 - DNA, 20 bp, Artificial Sequence
  chemically synthesized
cccccgtcaccacccacagg

SEQ ID NO: 90 - DNA, 20 bp, Artificial Sequence
  chemically synthesized
ccacccacaggtggcgcttc

SEQ ID NO: 91 - DNA, 20 bp, Artificial Sequence
  chemically synthesized
caggtggcgcttccagtgct

SEQ ID NO: 92 - DNA, 20 bp, Artificial Sequence
  chemically synthesized
ggcgcttccagtgctcagac

SEQ ID NO: 93 - DNA, 20 bp, Artificial Sequence
  chemically synthesized
gcgcttccagtgctcagact

SEQ ID NO: 94 - DNA, 20 bp, Artificial Sequence
  chemically synthesized
cgcttccagtgctcagacta

SEQ ID NO: 95 - DNA, 20 bp, Artificial Sequence
  chemically synthesized
ttccagtgctcagactaggg

SEQ ID NO: 96 - DNA, 20 bp, Artificial Sequence
  chemically synthesized
ccagtgctcagactagggaa

SEQ ID NO: 97 - DNA, 20 bp, Artificial Sequence
  chemically synthesized
cagtgctcagactagggaag

SEQ ID NO: 98 - DNA, 20 bp, Artificial Sequence
  chemically synthesized
tcagactagggaagaggttc

SEQ ID NO: 99 - DNA, 20 bp, Artificial Sequence
  chemically synthesized
ggttccagcccctcctcctt

SEQ ID NO: 100 - DNA, 20 bp, Artificial Sequence
  chemically synthesized
ttccagcccctcctccttca

SEQ ID NO: 101 - DNA, 20 bp, Artificial Sequence
  chemically synthesized
agcccctcctccttcagagc

SEQ ID NO: 102 - DNA, 20 bp, Artificial Sequence
  chemically synthesized
gcccctcctccttcagagcc

SEQ ID NO: 103 - DNA, 20 bp, Artificial Sequence
  chemically synthesized
ccctcctccttcagagccag

SEQ ID NO: 104 - DNA, 20 bp, Artificial Sequence
  chemically synthesized
tccttcagagccaggagtcc

SEQ ID NO: 105 - DNA, 20 bp, Artificial Sequence
  chemically synthesized
gagccaggagtcctggcccc

SEQ ID NO: 106 - DNA, 20 bp, Artificial Sequence
  chemically synthesized
agcccctcctgccttaaacc

SEQ ID NO: 107 - DNA, 20 bp, Artificial Sequence
  chemically synthesized
cctcctgccttaaacccagc

SEQ ID NO: 108 - DNA, 20 bp, Artificial Sequence
  chemically synthesized
ctcctgccttaaacccagcc

SEQ ID NO: 109 - DNA, 20 bp, Artificial Sequence
  chemically synthesized
aaacccagccaggtccttcc

SEQ ID NO: 110 - DNA, 20 bp, Artificial Sequence
  chemically synthesized
aacccagccaggtccttcca

SEQ ID NO: 111 - DNA, 20 bp, Artificial Sequence
  chemically synthesized
acccagccaggtccttccaa

SEQ ID NO: 112 - DNA, 20 bp, Artificial Sequence
  chemically synthesized
gccaggtccttccaagggtc

SEQ ID NO: 113 - DNA, 20 bp, Artificial Sequence
  chemically synthesized
gtccttccaagggtcaagct

SEQ ID NO: 114 - DNA, 20 bp, Artificial Sequence
  chemically synthesized
gtcaagctcggaaaccaccc

SEQ ID NO: 115 - DNA, 20 bp, Artificial Sequence
  chemically synthesized
aagctcggaaaccaccccag

SEQ ID NO: 116 - DNA, 20 bp, Artificial Sequence
  chemically synthesized
ccaccccagcagatactctg

SEQ ID NO: 117 - DNA, 20 bp, Artificial Sequence
  chemically synthesized
caccccagcagatactctgc

SEQ ID NO: 118 - DNA, 20 bp, Artificial Sequence
  chemically synthesized
gcagatactctgcaggaacg

SEQ ID NO: 119 - DNA, 20 bp, Artificial Sequence
  chemically synthesized
actctgcaggaacgaagccg

SEQ ID NO: 120 - DNA, 20 bp, Artificial Sequence
  chemically synthesized
ctctgcaggaacgaagccgt

SEQ ID NO: 121 - DNA, 20 bp, Artificial Sequence
  chemically synthesized
caggaacgaagccgtgggcc

SEQ ID NO: 122 - DNA, 20 bp, Artificial Sequence
  chemically synthesized
aggaacgaagccgtgggccc

SEQ ID NO: 123 - DNA, 20 bp, Artificial Sequence
  chemically synthesized
ggaacgaagccgtgggccca

SEQ ID NO: 124 - DNA, 20 bp, Artificial Sequence
  chemically synthesized
gccgtgggcccagggctatg

SEQ ID NO: 125 - DNA, 20 bp, Artificial Sequence
  chemically synthesized
ccgtgggcccagggctatgc

SEQ ID NO: 126 - DNA, 20 bp, Artificial Sequence
  chemically synthesized
cgtgggcccagggctatgca

SEQ ID NO: 127 - DNA, 20 bp, Artificial Sequence
  chemically synthesized
gggcccagggctatgcaggg

SEQ ID NO: 128 - DNA, 20 bp, Artificial Sequence
  chemically synthesized
gcccagggctatgcagggtg

SEQ ID NO: 129 - DNA, 20 bp, Artificial Sequence
  chemically synthesized
cccagggctatgcagggtgg

SEQ ID NO: 130 - DNA, 20 bp, Artificial Sequence
  chemically synthesized
agggctatgcagggtggagg

SEQ ID NO: 131 - DNA, 20 bp, Artificial Sequence
  chemically synthesized
gggctatgcagggtggagga

SEQ ID NO: 132 - DNA, 20 bp, Artificial Sequence
  chemically synthesized
ggaggaaggccaccctgtgc

SEQ ID NO: 133 - DNA, 20 bp, Artificial Sequence
  chemically synthesized
gaggaaggccaccctgtgct

SEQ ID NO: 134 - DNA, 20 bp, Artificial Sequence
  chemically synthesized
aaggccaccctgtgctggga

SEQ ID NO: 135 - DNA, 20 bp, Artificial Sequence
  chemically synthesized
accctgtgctgggacagact

SEQ ID NO: 136 - DNA, 20 bp, Artificial Sequence
  chemically synthesized
ccctgtgctgggacagactc

SEQ ID NO: 137 - DNA, 20 bp, Artificial Sequence
  chemically synthesized
cctgtgctgggacagactca

SEQ ID NO: 138 - DNA, 20 bp, Artificial Sequence
  chemically synthesized
ctgtgctgggacagactcag

SEQ ID NO: 139 - DNA, 20 bp, Artificial Sequence
  chemically synthesized
ctgggacagactcaggggcc

SEQ ID NO: 140 - DNA, 20 bp, Artificial Sequence
  chemically synthesized
tgggacagactcaggggcct

SEQ ID NO: 141 - DNA, 20 bp, Artificial Sequence
  chemically synthesized
gacagactcaggggcctggg

SEQ ID NO: 142 - DNA, 20 bp, Artificial Sequence
  chemically synthesized
acagactcaggggcctgggc

SEQ ID NO: 143 - DNA, 20 bp, Artificial Sequence
  chemically synthesized
aggggcctgggcgggactcc

SEQ ID NO: 144 - DNA, 20 bp, Artificial Sequence
  chemically synthesized
gggcctgggcgggactccca

SEQ ID NO: 145 - DNA, 20 bp, Artificial Sequence
  chemically synthesized
ggcctgggcgggactcccag

SEQ ID NO: 146 - DNA, 20 bp, Artificial Sequence
  chemically synthesized
gcctgggcgggactcccaga

SEQ ID NO: 147 - DNA, 20 bp, Artificial Sequence
  chemically synthesized
cctgggcgggactcccagag

SEQ ID NO: 148 - DNA, 20 bp, Artificial Sequence
  chemically synthesized
ggcgggactcccagaggggt

SEQ ID NO: 149 - DNA, 20 bp, Artificial Sequence
  chemically synthesized
ggactcccagaggggtgaga

SEQ ID NO: 150 - DNA, 20 bp, Artificial Sequence
  chemically synthesized
cagctgcacacctgtgtgcc

SEQ ID NO: 151 - DNA, 20 bp, Artificial Sequence
  chemically synthesized
agctgcacacctgtgtgcct

SEQ ID NO: 152 - DNA, 20 bp, Artificial Sequence
  chemically synthesized
acacctgtgtgcctgggccc

SEQ ID NO: 153 - DNA, 20 bp, Artificial Sequence
  chemically synthesized
cacctgtgtgcctgggcccc

SEQ ID NO: 154 - DNA, 20 bp, Artificial Sequence
  chemically synthesized
ggccccaggctgtcacactc

SEQ ID NO: 155 - DNA, 20 bp, Artificial Sequence
  chemically synthesized
ctgtcacactccagttcact

SEQ ID NO: 156 - DNA, 20 bp, Artificial Sequence
  chemically synthesized
tgtcacactccagttcactg

SEQ ID NO: 157 - DNA, 20 bp, Artificial Sequence
  chemically synthesized
tcactgaggccccctctgca

SEQ ID NO: 158 - DNA, 20 bp, Artificial Sequence
  chemically synthesized
cactgaggccccctctgcac

SEQ ID NO: 159 - DNA, 20 bp, Artificial Sequence
  chemically synthesized
actgaggccccctctgcacg

SEQ ID NO: 160 - DNA, 20 bp, Artificial Sequence
  chemically synthesized
cccctctgcacggggccctg

SEQ ID NO: 161 - DNA, 20 bp, Artificial Sequence
  chemically synthesized
tctgcacggggccctgcagc

SEQ ID NO: 162 - DNA, 20 bp, Artificial Sequence
  chemically synthesized
ctgcacggggccctgcagcc

SEQ ID NO: 163 - DNA, 20 bp, Artificial Sequence
  chemically synthesized
tgcacggggccctgcagcca

SEQ ID NO: 164 - DNA, 20 bp, Artificial Sequence
  chemically synthesized
gcacggggccctgcagccag

SEQ ID NO: 165 - DNA, 20 bp, Artificial Sequence
  chemically synthesized
cctgcagccaggggctgaca

SEQ ID NO: 166 - DNA, 20 bp, Artificial Sequence
  chemically synthesized
ctgcagccaggggctgacac

SEQ ID NO: 167 - DNA, 20 bp, Artificial Sequence
  chemically synthesized
accgtttctcattcttccct

SEQ ID NO: 168 - DNA, 20 bp, Artificial Sequence
  chemically synthesized
ccgtttctcattcttccctt

SEQ ID NO: 169 - DNA, 20 bp, Artificial Sequence
  chemically synthesized
cgtttctcattcttccctta

SEQ ID NO: 170 - DNA, 20 bp, Artificial Sequence
  chemically synthesized
gtttctcattcttcccttag

SEQ ID NO: 171 - DNA, 20 bp, Artificial Sequence
  chemically synthesized
tcccttaggggtccaaaact

SEQ ID NO: 172 - DNA, 20 bp, Artificial Sequence
  chemically synthesized
cccttaggggtccaaaactt

SEQ ID NO: 173 - DNA, 20 bp, Artificial Sequence
  chemically synthesized
ccttaggggtccaaaacttg

SEQ ID NO: 174 - DNA, 20 bp, Artificial Sequence
  chemically synthesized
cttaggggtccaaaacttgg

SEQ ID NO: 175 - DNA, 20 bp, Artificial Sequence
  chemically synthesized
ttaggggtccaaaacttggg

SEQ ID NO: 176 - DNA, 20 bp, Artificial Sequence
  chemically synthesized
tccaaaacttggggggacaa

SEQ ID NO: 177 - DNA, 20 bp, Artificial Sequence
  chemically synthesized
acttggggggacaaaagccg

SEQ ID NO: 178 - DNA, 20 bp, Artificial Sequence
  chemically synthesized
gggggacaaaagccgaagtc

SEQ ID NO: 179 - DNA, 20 bp, Artificial Sequence
  chemically synthesized
ggggacaaaagccgaagtcc

SEQ ID NO: 180 - DNA, 20 bp, Artificial Sequence
  chemically synthesized
gggacaaaagccgaagtcca

SEQ ID NO: 181 - DNA, 20 bp, Artificial Sequence
  chemically synthesized
ggacaaaagccgaagtccag

SEQ ID NO: 182 - DNA, 20 bp, Artificial Sequence
  chemically synthesized
gacaaaagccgaagtccagg

SEQ ID NO: 183 - DNA, 20 bp, Artificial Sequence
  chemically synthesized
aaagccgaagtccagggggt

SEQ ID NO: 184 - DNA, 20 bp, Artificial Sequence
  chemically synthesized
agccgaagtccagggggtcg

SEQ ID NO: 185 - DNA, 20 bp, Artificial Sequence
  chemically synthesized
gccgaagtccagggggtcgg

SEQ ID NO: 186 - DNA, 20 bp, Artificial Sequence
  chemically synthesized
cgaagtccagggggtcggag

SEQ ID NO: 187 - DNA, 20 bp, Artificial Sequence
  chemically synthesized
gaagtccagggggtcggagg

SEQ ID NO: 188 - DNA, 20 bp, Artificial Sequence
  chemically synthesized
aagtccagggggtcggagga

SEQ ID NO: 189 - DNA, 20 bp, Artificial Sequence
  chemically synthesized
gtcggaggagggacttgccc

SEQ ID NO: 190 - DNA, 20 bp, Artificial Sequence
  chemically synthesized
tcggaggagggacttgcccc

SEQ ID NO: 191 - DNA, 20 bp, Artificial Sequence
  chemically synthesized
gggacttgccccaggccttg

SEQ ID NO: 192 - DNA, 20 bp, Artificial Sequence
  chemically synthesized
gccccaggccttgtggacac

SEQ ID NO: 193 - DNA, 20 bp, Artificial Sequence
  chemically synthesized
ccccaggccttgtggacact

SEQ ID NO: 194 - DNA, 20 bp, Artificial Sequence
  chemically synthesized
caggccttgtggacactggg

SEQ ID NO: 195 - DNA, 20 bp, Artificial Sequence
  chemically synthesized
aggccttgtggacactgggt

SEQ ID NO: 196 - DNA, 20 bp, Artificial Sequence
  chemically synthesized
tgtggacactgggtgggctc

SEQ ID NO: 197 - DNA, 20 bp, Artificial Sequence
  chemically synthesized
gtggacactgggtgggctcc

SEQ ID NO: 198 - DNA, 20 bp, Artificial Sequence
  chemically synthesized
gtgggctccgggacctgaac

SEQ ID NO: 199 - DNA, 20 bp, Artificial Sequence
  chemically synthesized
gggctccgggacctgaactg

SEQ ID NO: 200 - DNA, 20 bp, Artificial Sequence
  chemically synthesized
ccgggacctgaactggagct

SEQ ID NO: 201 - DNA, 20 bp, Artificial Sequence
  chemically synthesized
cgggacctgaactggagctg

SEQ ID NO: 202 - DNA, 20 bp, Artificial Sequence
  chemically synthesized
gacctgaactggagctgagg

SEQ ID NO: 203 - DNA, 20 bp, Artificial Sequence
  chemically synthesized
acctgaactggagctgagga

SEQ ID NO: 204 - DNA, 20 bp, Artificial Sequence
  chemically synthesized
ctgaactggagctgaggaag

SEQ ID NO: 205 - DNA, 20 bp, Artificial Sequence
  chemically synthesized
ctggagctgaggaaggagtg

SEQ ID NO: 206 - DNA, 20 bp, Artificial Sequence
  chemically synthesized
aaggagtgaagctaaactcc

SEQ ID NO: 207 - DNA, 20 bp, Artificial Sequence
  chemically synthesized
aagctaaactcctagatcca

SEQ ID NO: 208 - DNA, 20 bp, Artificial Sequence
  chemically synthesized
agctaaactcctagatccac

SEQ ID NO: 209 - DNA, 20 bp, Artificial Sequence
  chemically synthesized
cacgggataaattacccccc

SEQ ID NO: 210 - DNA, 20 bp, Artificial Sequence
  chemically synthesized
ccaagtccctcacctctcca

SEQ ID NO: 211 - DNA, 20 bp, Artificial Sequence
  chemically synthesized
cctctccaaagctgcccatc

SEQ ID NO: 212 - DNA, 20 bp, Artificial Sequence
  chemically synthesized
tctccaaagctgcccatctg

SEQ ID NO: 213 - DNA, 20 bp, Artificial Sequence
  chemically synthesized
ctccaaagctgcccatctgg

SEQ ID NO: 214 - DNA, 20 bp, Artificial Sequence
  chemically synthesized
ccaaagctgcccatctggag

SEQ ID NO: 215 - DNA, 20 bp, Artificial Sequence
  chemically synthesized
caaagctgcccatctggagg

SEQ ID NO: 216 - DNA, 20 bp, Artificial Sequence
  chemically synthesized
agctgcccatctggaggagg

SEQ ID NO: 217 - DNA, 20 bp, Artificial Sequence
  chemically synthesized
gctgcccatctggaggaggc

SEQ ID NO: 218 - DNA, 20 bp, Artificial Sequence
  chemically synthesized
tgcccatctggaggaggcgg

SEQ ID NO: 219 - DNA, 20 bp, Artificial Sequence
  chemically synthesized
gcccatctggaggaggcggg

SEQ ID NO: 220 - DNA, 20 bp, Artificial Sequence
  chemically synthesized
cccatctggaggaggcggga

SEQ ID NO: 221 - DNA, 20 bp, Artificial Sequence
  chemically synthesized
catctggaggaggcgggagg

SEQ ID NO: 222 - DNA, 20 bp, Artificial Sequence
  chemically synthesized
aggaggcgggagggagctac

SEQ ID NO: 223 - DNA, 20 bp, Artificial Sequence
  chemically synthesized
ggaggcgggagggagctacg

SEQ ID NO: 224 - DNA, 20 bp, Artificial Sequence
  chemically synthesized
gaggcgggagggagctacga

SEQ ID NO: 225 - DNA, 20 bp, Artificial Sequence
  chemically synthesized
gggagggagctacgagggcc

SEQ ID NO: 226 - DNA, 20 bp, Artificial Sequence
  chemically synthesized
gagggagctacgagggccaa

SEQ ID NO: 227 - DNA, 20 bp, Artificial Sequence
  chemically synthesized
gctacgagggccaagagcat

SEQ ID NO: 228 - DNA, 20 bp, Artificial Sequence
  chemically synthesized
ctacgagggccaagagcatg

SEQ ID NO: 229 - DNA, 20 bp, Artificial Sequence
  chemically synthesized
gggccaagagcatgaggtca

SEQ ID NO: 230 - DNA, 20 bp, Artificial Sequence
  chemically synthesized
agcatgaggtcatggaaact

SEQ ID NO: 231 - DNA, 20 bp, Artificial Sequence
  chemically synthesized
gcatgaggtcatggaaactc

SEQ ID NO: 232 - DNA, 20 bp, Artificial Sequence
  chemically synthesized
tcatggaaactcgggctgtg

SEQ ID NO: 233 - DNA, 20 bp, Artificial Sequence
  chemically synthesized
catggaaactcgggctgtga

SEQ ID NO: 234 - DNA, 20 bp, Artificial Sequence
  chemically synthesized
atggaaactcgggctgtgaa

SEQ ID NO: 235 - DNA, 20 bp, Artificial Sequence
  chemically synthesized
tggaaactcgggctgtgaag

SEQ ID NO: 236 - DNA, 20 bp, Artificial Sequence
  chemically synthesized
tgaaggggccgcacgtgccc

SEQ ID NO: 237 - DNA, 20 bp, Artificial Sequence
  chemically synthesized
gaaggggccgcacgtgccct

SEQ ID NO: 238 - DNA, 20 bp, Artificial Sequence
  chemically synthesized
ggccgcacgtgccctgggaa

SEQ ID NO: 239 - DNA, 20 bp, Artificial Sequence
  chemically synthesized
gccgcacgtgccctgggaac

SEQ ID NO: 240 - DNA, 20 bp, Artificial Sequence
  chemically synthesized
ccctgggaacgggatgaact

SEQ ID NO: 241 - DNA, 20 bp, Artificial Sequence
  chemically synthesized
tcggctcgtttatttccacc

SEQ ID NO: 242 - DNA, 20 bp, Artificial Sequence
  chemically synthesized
ttatttccacccagttgtca

SEQ ID NO: 243 - DNA, 20 bp, Artificial Sequence
  chemically synthesized
ccacccagttgtcatggcga

SEQ ID NO: 244 - DNA, 20 bp, Artificial Sequence
  chemically synthesized
cacccagttgtcatggcgat

SEQ ID NO: 245 - DNA, 20 bp, Artificial Sequence
  chemically synthesized
acccagttgtcatggcgata

SEQ ID NO: 246 - DNA, 20 bp, Artificial Sequence
  chemically synthesized
cccagttgtcatggcgatag

SEQ ID NO: 247 - DNA, 20 bp, Artificial Sequence
  chemically synthesized
cagttgtcatggcgataggg

SEQ ID NO: 248 - DNA, 20 bp, Artificial Sequence
  chemically synthesized
agttgtcatggcgatagggg

SEQ ID NO: 249 - DNA, 20 bp, Artificial Sequence
  chemically synthesized
gttgtcatggcgatagggga

SEQ ID NO: 250 - DNA, 20 bp, Artificial Sequence
  chemically synthesized
ttgtcatggcgataggggag

SEQ ID NO: 251 - DNA, 20 bp, Artificial Sequence
  chemically synthesized
tgtcatggcgataggggagg

SEQ ID NO: 252 - DNA, 20 bp, Artificial Sequence
  chemically synthesized
gtcatggcgataggggaggg

SEQ ID NO: 253 - DNA, 20 bp, Artificial Sequence
  chemically synthesized
tggcgataggggaggggggc

SEQ ID NO: 254 - DNA, 20 bp, Artificial Sequence
  chemically synthesized
ggcgataggggaggggggca

SEQ ID NO: 255 - DNA, 20 bp, Artificial Sequence
  chemically synthesized
cgataggggaggggggcaag

SEQ ID NO: 256 - DNA, 20 bp, Artificial Sequence
  chemically synthesized
ataggggaggggggcaagga

SEQ ID NO: 257 - DNA, 20 bp, Artificial Sequence
  chemically synthesized
gaggggggcaaggagagcaa

SEQ ID NO: 258 - DNA, 20 bp, Artificial Sequence
  chemically synthesized
aggggggcaaggagagcaat

SEQ ID NO: 259 - DNA, 20 bp, Artificial Sequence
  chemically synthesized
gcaatgggcctttccctttc

SEQ ID NO: 260 - DNA, 20 bp, Artificial Sequence
  chemically synthesized
caatgggcctttccctttca

SEQ ID NO: 261 - DNA, 20 bp, Artificial Sequence
  chemically synthesized
ttccctttcaaggacctgcc

SEQ ID NO: 262 - DNA, 20 bp, Artificial Sequence
  chemically synthesized
tttcaaggacctgcccagta

SEQ ID NO: 263 - DNA, 20 bp, Artificial Sequence
  chemically synthesized
ttcaaggacctgcccagtac

SEQ ID NO: 264 - DNA, 20 bp, Artificial Sequence
  chemically synthesized
cagtacaggcatccctgtga

SEQ ID NO: 265 - DNA, 20 bp, Artificial Sequence
  chemically synthesized
catccctgtgaaagatgcct

SEQ ID NO: 266 - DNA, 20 bp, Artificial Sequence
  chemically synthesized
atccctgtgaaagatgcctg

SEQ ID NO: 267 - DNA, 20 bp, Artificial Sequence
  chemically synthesized
tgtgaaagatgcctgaggcc

SEQ ID NO: 268 - DNA, 20 bp, Artificial Sequence
  chemically synthesized
gtgaaagatgcctgaggcct

SEQ ID NO: 269 - DNA, 20 bp, Artificial Sequence
  chemically synthesized
gatgcctgaggcctgggcac

SEQ ID NO: 270 - DNA, 20 bp, Artificial Sequence
  chemically synthesized
atgcctgaggcctgggcacc

SEQ ID NO: 271 - DNA, 20 bp, Artificial Sequence
  chemically synthesized
tgcctgaggcctgggcacca

SEQ ID NO: 272 - DNA, 20 bp, Artificial Sequence
  chemically synthesized
ggcctgggcaccagggactc

SEQ ID NO: 273 - DNA, 20 bp, Artificial Sequence
  chemically synthesized
cctgggcaccagggactcca

SEQ ID NO: 274 - DNA, 20 bp, Artificial Sequence
  chemically synthesized
gcaccagggactccagagtc

SEQ ID NO: 275 - DNA, 20 bp, Artificial Sequence
  chemically synthesized
caccagggactccagagtcc

SEQ ID NO: 276 - DNA, 20 bp, Artificial Sequence
  chemically synthesized
caacccctccccattcaacc

SEQ ID NO: 277 - DNA, 20 bp, Artificial Sequence
  chemically synthesized
aacccctccccattcaaccc

SEQ ID NO: 278 - DNA, 20 bp, Artificial Sequence
  chemically synthesized
cccctccccattcaacccag

SEQ ID NO: 279 - DNA, 20 bp, Artificial Sequence
  chemically synthesized
ccctccccattcaacccagg

SEQ ID NO: 280 - DNA, 20 bp, Artificial Sequence
  chemically synthesized
ccccattcaacccaggaggc

SEQ ID NO: 281 - DNA, 20 bp, Artificial Sequence
  chemically synthesized
cccattcaacccaggaggcc

SEQ ID NO: 282 - DNA, 20 bp, Artificial Sequence
  chemically synthesized
caacccaggaggccaggccc

SEQ ID NO: 283 - DNA, 20 bp, Artificial Sequence
  chemically synthesized
ggccccagcccttccgccct

SEQ ID NO: 284 - DNA, 20 bp, Artificial Sequence
  chemically synthesized
agcccttccgccctcagatg

SEQ ID NO: 285 - DNA, 20 bp, Artificial Sequence
  chemically synthesized
gcccttccgccctcagatga

SEQ ID NO: 286 - DNA, 20 bp, Artificial Sequence
  chemically synthesized
ccttccgccctcagatgaag

SEQ ID NO: 287 - DNA, 20 bp, Artificial Sequence
  chemically synthesized
cgccctcagatgaaggagtc

SEQ ID NO: 288 - DNA, 20 bp, Artificial Sequence
  chemically synthesized
gccctcagatgaaggagtcc

SEQ ID NO: 289 - DNA, 20 bp, Artificial Sequence
  chemically synthesized
gatgaaggagtccaggcccc

SEQ ID NO: 290 - DNA, 20 bp, Artificial Sequence
  chemically synthesized
gcccccagcctctccccatt

SEQ ID NO: 291 - DNA, 20 bp, Artificial Sequence
  chemically synthesized
agcctctccccattcagacc

SEQ ID NO: 292 - DNA, 20 bp, Artificial Sequence
  chemically synthesized
gcctctccccattcagaccc

SEQ ID NO: 293 - DNA, 20 bp, Artificial Sequence
  chemically synthesized
cctctccccattcagaccca

SEQ ID NO: 294 - DNA, 20 bp, Artificial Sequence
  chemically synthesized
ctctccccattcagacccag

SEQ ID NO: 295 - DNA, 20 bp, Artificial Sequence
  chemically synthesized
cccattcagacccaggggtc

SEQ ID NO: 296 - DNA, 20 bp, Artificial Sequence
  chemically synthesized
ccattcagacccaggggtcc

SEQ ID NO: 297 - DNA, 20 bp, Artificial Sequence
  chemically synthesized
cagacccaggggtccaggcc

SEQ ID NO: 298 - DNA, 20 bp, Artificial Sequence
  chemically synthesized
aggcccagccccgcctccct

SEQ ID NO: 299 - DNA, 20 bp, Artificial Sequence
  chemically synthesized
agccccgcctccctaagacc

SEQ ID NO: 300 - DNA, 20 bp, Artificial Sequence
  chemically synthesized
cccgcctccctaagacccag

SEQ ID NO: 301 - DNA, 20 bp, Artificial Sequence
  chemically synthesized
ctccctaagacccagaagtc

SEQ ID NO: 302 - DNA, 20 bp, Artificial Sequence
  chemically synthesized
tccctaagacccagaagtcc

SEQ ID NO: 303 - DNA, 20 bp, Artificial Sequence
  chemically synthesized
gacccagaagtccaggcccc

SEQ ID NO: 304 - DNA, 20 bp, Artificial Sequence
  chemically synthesized
gcccccagcccctcctccct

SEQ ID NO: 305 - DNA, 20 bp, Artificial Sequence
  chemically synthesized
ccctcctccctcagacccac

SEQ ID NO: 306 - DNA, 20 bp, Artificial Sequence
  chemically synthesized
ctccctcagacccacgagtc

SEQ ID NO: 307 - DNA, 20 bp, Artificial Sequence
  chemically synthesized
tccctcagacccacgagtcc

SEQ ID NO: 308 - DNA, 20 bp, Artificial Sequence
  chemically synthesized
agacccacgagtccaggccc

SEQ ID NO: 309 - DNA, 20 bp, Artificial Sequence
  chemically synthesized
ggccccagcccctcctccct

SEQ ID NO: 310 - DNA, 20 bp, Artificial Sequence
  chemically synthesized
agcccctcctccctcggacc

SEQ ID NO: 311 - DNA, 20 bp, Artificial Sequence
  chemically synthesized
gcccctcctccctcggaccc

SEQ ID NO: 312 - DNA, 20 bp, Artificial Sequence
  chemically synthesized
ccctcctccctcggacccag

SEQ ID NO: 313 - DNA, 20 bp, Artificial Sequence
  chemically synthesized
ctccctcggacccaggagtc

SEQ ID NO: 314 - DNA, 20 bp, Artificial Sequence
  chemically synthesized
tccctcggacccaggagtcc

SEQ ID NO: 315 - DNA, 20 bp, Artificial Sequence
  chemically synthesized
gacccaggagtccaggcccc

SEQ ID NO: 316 - DNA, 20 bp, Artificial Sequence
  chemically synthesized
gcccccagtccctccaccct

SEQ ID NO: 317 - DNA, 20 bp, Artificial Sequence
  chemically synthesized
agtccctccaccctcagacc

SEQ ID NO: 318 - DNA, 20 bp, Artificial Sequence
  chemically synthesized
gtccctccaccctcagaccc

SEQ ID NO: 319 - DNA, 20 bp, Artificial Sequence
  chemically synthesized
ccctccaccctcagacccag

SEQ ID NO: 320 - DNA, 20 bp, Artificial Sequence
  chemically synthesized
caccctcagacccaggagtc

SEQ ID NO: 321 - DNA, 20 bp, Artificial Sequence
  chemically synthesized
accctcagacccaggagtcc

SEQ ID NO: 322 - DNA, 20 bp, Artificial Sequence
  chemically synthesized
agacccaggagtccaggccc

SEQ ID NO: 323 - DNA, 20 bp, Artificial Sequence
  chemically synthesized
ggccccagcccctcctccct

SEQ ID NO: 324 - DNA, 20 bp, Artificial Sequence
  chemically synthesized
agcccctcctccctcggacc

SEQ ID NO: 325 - DNA, 20 bp, Artificial Sequence
  chemically synthesized
gcccctcctccctcggaccc

SEQ ID NO: 326 - DNA, 20 bp, Artificial Sequence
  chemically synthesized
ccctcctccctcggacccag

SEQ ID NO: 327 - DNA, 20 bp, Artificial Sequence
  chemically synthesized
ctccctcggacccaggagtc

SEQ ID NO: 328 - DNA, 20 bp, Artificial Sequence
  chemically synthesized
tccctcggacccaggagtcc

SEQ ID NO: 329 - DNA, 20 bp, Artificial Sequence
  chemically synthesized
ggacccaggagtccaggccc

SEQ ID NO: 330 - DNA, 20 bp, Artificial Sequence
  chemically synthesized
agcccctcctctctcaaacc

SEQ ID NO: 331 - DNA, 20 bp, Artificial Sequence
  chemically synthesized
gcccctcctctctcaaaccc

SEQ ID NO: 332 - DNA, 20 bp, Artificial Sequence
  chemically synthesized
ccctcctctctcaaacccag

SEQ ID NO: 333 - DNA, 20 bp, Artificial Sequence
  chemically synthesized
ctctctcaaacccaggagcc

SEQ ID NO: 334 - DNA, 20 bp, Artificial Sequence
  chemically synthesized
tctctcaaacccaggagccc

SEQ ID NO: 335 - DNA, 20 bp, Artificial Sequence
  chemically synthesized
aacccaggagcccaggcccc

SEQ ID NO: 336 - DNA, 20 bp, Artificial Sequence
  chemically synthesized
gcccccagctcttctctgtt

SEQ ID NO: 337 - DNA, 20 bp, Artificial Sequence
  chemically synthesized
gctcttctctgttcagccct

SEQ ID NO: 338 - DNA, 20 bp, Artificial Sequence
  chemically synthesized
ctgttcagccctaagaatcc

SEQ ID NO: 339 - DNA, 20 bp, Artificial Sequence
  chemically synthesized
agccctaagaatcctggctc

SEQ ID NO: 340 - DNA, 20 bp, Artificial Sequence
  chemically synthesized
ggctccagcccctcctactc

SEQ ID NO: 341 - DNA, 20 bp, Artificial Sequence
  chemically synthesized
tactctagcccccaaccccc

SEQ ID NO: 342 - DNA, 20 bp, Artificial Sequence
  chemically synthesized
cccccaaccccctagccact

SEQ ID NO: 343 - DNA, 20 bp, Artificial Sequence
  chemically synthesized
ccccaaccccctagccacta

SEQ ID NO: 344 - DNA, 20 bp, Artificial Sequence
  chemically synthesized
cccctagccactaaggcaat

SEQ ID NO: 345 - DNA, 20 bp, Artificial Sequence
  chemically synthesized
ccctagccactaaggcaatt

SEQ ID NO: 346 - DNA, 20 bp, Artificial Sequence
  chemically synthesized
cctagccactaaggcaattg

SEQ ID NO: 347 - DNA, 20 bp, Artificial Sequence
  chemically synthesized
ccactaaggcaattggggtg

SEQ ID NO: 348 - DNA, 20 bp, Artificial Sequence
  chemically synthesized
cactaaggcaattggggtgc

SEQ ID NO: 349 - DNA, 20 bp, Artificial Sequence
  chemically synthesized
aggcaattggggtgcaggaa

SEQ ID NO: 350 - DNA, 20 bp, Artificial Sequence
  chemically synthesized
ggcaattggggtgcaggaat

SEQ ID NO: 351 - DNA, 20 bp, Artificial Sequence
  chemically synthesized
gcaattggggtgcaggaatg

SEQ ID NO: 352 - DNA, 20 bp, Artificial Sequence
  chemically synthesized
caattggggtgcaggaatgg

SEQ ID NO: 353 - DNA, 20 bp, Artificial Sequence
  chemically synthesized
ttggggtgcaggaatggggg

SEQ ID NO: 354 - DNA, 20 bp, Artificial Sequence
  chemically synthesized
tggggtgcaggaatgggggc

SEQ ID NO: 355 - DNA, 20 bp, Artificial Sequence
  chemically synthesized
ggggtgcaggaatgggggca

SEQ ID NO: 356 - DNA, 20 bp, Artificial Sequence
  chemically synthesized
caggaatgggggcagggtac

SEQ ID NO: 357 - DNA, 20 bp, Artificial Sequence
  chemically synthesized
ggcagggtaccagcctcacc

SEQ ID NO: 358 - DNA, 20 bp, Artificial Sequence
  chemically synthesized
agggtaccagcctcaccaag

SEQ ID NO: 359 - DNA, 20 bp, Artificial Sequence
  chemically synthesized
aagtggttgataaacccacg

SEQ ID NO: 360 - DNA, 20 bp, Artificial Sequence
  chemically synthesized
agtggttgataaacccacgt

SEQ ID NO: 361 - DNA, 20 bp, Artificial Sequence
  chemically synthesized
gtggttgataaacccacgtg

SEQ ID NO: 362 - DNA, 20 bp, Artificial Sequence
  chemically synthesized
aaacccacgtggggtaccct

SEQ ID NO: 363 - DNA, 20 bp, Artificial Sequence
  chemically synthesized
cgtggggtaccctaagaact

SEQ ID NO: 364 - DNA, 20 bp, Artificial Sequence
  chemically synthesized
gtggggtaccctaagaactt

SEQ ID NO: 365 - DNA, 20 bp, Artificial Sequence
  chemically synthesized
gtaccctaagaacttgggaa

SEQ ID NO: 366 - DNA, 20 bp, Artificial Sequence
  chemically synthesized
taagaacttgggaacagcca

SEQ ID NO: 367 - DNA, 20 bp, Artificial Sequence
  chemically synthesized
gaacttgggaacagccacag

SEQ ID NO: 368 - DNA, 20 bp, Artificial Sequence
  chemically synthesized
aacttgggaacagccacagc

SEQ ID NO: 369 - DNA, 20 bp, Artificial Sequence
  chemically synthesized
acttgggaacagccacagca

SEQ ID NO: 370 - DNA, 20 bp, Artificial Sequence
  chemically synthesized
cttgggaacagccacagcag

SEQ ID NO: 371 - DNA, 20 bp, Artificial Sequence
  chemically synthesized
ttgggaacagccacagcagg

SEQ ID NO: 372 - DNA, 20 bp, Artificial Sequence
  chemically synthesized
tgggaacagccacagcaggg

SEQ ID NO: 373 - DNA, 20 bp, Artificial Sequence
  chemically synthesized
cacagcaggggggcgatgct

SEQ ID NO: 374 - DNA, 20 bp, Artificial Sequence
  chemically synthesized
acagcaggggggcgatgctt

SEQ ID NO: 375 - DNA, 20 bp, Artificial Sequence
  chemically synthesized
cagcaggggggcgatgcttg

SEQ ID NO: 376 - DNA, 20 bp, Artificial Sequence
  chemically synthesized
gcgatgcttggggacctgcc

SEQ ID NO: 377 - DNA, 20 bp, Artificial Sequence
  chemically synthesized
gatgcttggggacctgcctg

SEQ ID NO: 378 - DNA, 20 bp, Artificial Sequence
  chemically synthesized
gcttggggacctgcctggag

SEQ ID NO: 379 - DNA, 20 bp, Artificial Sequence
  chemically synthesized
cttggggacctgcctggaga

SEQ ID NO: 380 - DNA, 20 bp, Artificial Sequence
  chemically synthesized
gacctgcctggagaaggatg

SEQ ID NO: 381 - DNA, 20 bp, Artificial Sequence
  chemically synthesized
acctgcctggagaaggatgc

SEQ ID NO: 382 - DNA, 20 bp, Artificial Sequence
  chemically synthesized
cctggagaaggatgcaggac

SEQ ID NO: 383 - DNA, 20 bp, Artificial Sequence
  chemically synthesized
aggatgcaggacgagaaaca

SEQ ID NO: 384 - DNA, 20 bp, Artificial Sequence
  chemically synthesized
caggacgagaaacacagccc

SEQ ID NO: 385 - DNA, 20 bp, Artificial Sequence
  chemically synthesized
aggacgagaaacacagcccc

SEQ ID NO: 386 - DNA, 20 bp, Artificial Sequence
  chemically synthesized
acgagaaacacagccccagg

SEQ ID NO: 387 - DNA, 20 bp, Artificial Sequence
  chemically synthesized
gagaaacacagccccaggtg

SEQ ID NO: 388 - DNA, 20 bp, Artificial Sequence
  chemically synthesized
acagccccaggtggagaaac

SEQ ID NO: 389 - DNA, 20 bp, Artificial Sequence
  chemically synthesized
ccccaggtggagaaactggc

SEQ ID NO: 390 - DNA, 20 bp, Artificial Sequence
  chemically synthesized
cccaggtggagaaactggcc

SEQ ID NO: 391 - DNA, 20 bp, Artificial Sequence
  chemically synthesized
ggagaaactggccgggaatc

SEQ ID NO: 392 - DNA, 20 bp, Artificial Sequence
  chemically synthesized
agaaactggccgggaatcaa

SEQ ID NO: 393 - DNA, 20 bp, Artificial Sequence
  chemically synthesized
gccgggaatcaagagtcacc

SEQ ID NO: 394 - DNA, 20 bp, Artificial Sequence
  chemically synthesized
cgggaatcaagagtcaccca

SEQ ID NO: 395 - DNA, 20 bp, Artificial Sequence
  chemically synthesized
aatcaagagtcacccagaga

SEQ ID NO: 396 - DNA, 20 bp, Artificial Sequence
  chemically synthesized
accaaccatccctgttttcc

SEQ ID NO: 397 - DNA, 20 bp, Artificial Sequence
  chemically synthesized
ccaaccatccctgttttcct

SEQ ID NO: 398 - DNA, 20 bp, Artificial Sequence
  chemically synthesized
atccctgttttcctaggact

SEQ ID NO: 399 - DNA, 20 bp, Artificial Sequence
  chemically synthesized
tccctgttttcctaggactg

SEQ ID NO: 400 - DNA, 20 bp, Artificial Sequence
  chemically synthesized
ccctgttttcctaggactga

SEQ ID NO: 401 - DNA, 20 bp, Artificial Sequence
  chemically synthesized
tttcctaggactgagggttt

SEQ ID NO: 402 - DNA, 20 bp, Artificial Sequence
  chemically synthesized
gagggtttcagtgctaaaac

SEQ ID NO: 403 - DNA, 20 bp, Artificial Sequence
  chemically synthesized
agggtttcagtgctaaaact

SEQ ID NO: 404 - DNA, 20 bp, Artificial Sequence
  chemically synthesized
gtgctaaaactaggctgtcc

SEQ ID NO: 405 - DNA, 20 bp, Artificial Sequence
  chemically synthesized
tgctaaaactaggctgtcct

SEQ ID NO: 406 - DNA, 20 bp, Artificial Sequence
  chemically synthesized
actaggctgtcctgggcaaa

SEQ ID NO: 407 - DNA, 20 bp, Artificial Sequence
  chemically synthesized
ctgtcctgggcaaacagcat

SEQ ID NO: 408 - DNA, 20 bp, Artificial Sequence
  chemically synthesized
cctgggcaaacagcataagc

SEQ ID NO: 409 - DNA, 20 bp, Artificial Sequence
  chemically synthesized
taagctggtcaccccacacc

SEQ ID NO: 410 - DNA, 20 bp, Artificial Sequence
  chemically synthesized
acccagacctgacccaaacc

SEQ ID NO: 411 - DNA, 20 bp, Artificial Sequence
  chemically synthesized
aacccagctcccctgcttct

SEQ ID NO: 412 - DNA, 20 bp, Artificial Sequence
  chemically synthesized
gcttcttggccacgtaacct

SEQ ID NO: 413 - DNA, 20 bp, Artificial Sequence
  chemically synthesized
tcttggccacgtaacctgag

SEQ ID NO: 414 - DNA, 20 bp, Artificial Sequence
  chemically synthesized
cttggccacgtaacctgaga

SEQ ID NO: 415 - DNA, 20 bp, Artificial Sequence
  chemically synthesized
ttggccacgtaacctgagaa

SEQ ID NO: 416 - DNA, 20 bp, Artificial Sequence
  chemically synthesized
aatccctcctctctgaaccc

SEQ ID NO: 417 - DNA, 20 bp, Artificial Sequence
  chemically synthesized
cccagcccaccccaatgctc

SEQ ID NO: 418 - DNA, 20 bp, Artificial Sequence
  chemically synthesized
ccagcccaccccaatgctcc

SEQ ID NO: 419 - DNA, 20 bp, Artificial Sequence
  chemically synthesized
ccccaatgctccaggcctcc

SEQ ID NO: 420 - DNA, 20 bp, Artificial Sequence
  chemically synthesized
cccaatgctccaggcctcct

SEQ ID NO: 421 - DNA, 20 bp, Artificial Sequence
  chemically synthesized
aggcctcctgggataccccg

SEQ ID NO: 422 - DNA, 20 bp, Artificial Sequence
  chemically synthesized
gcctcctgggataccccgaa

SEQ ID NO: 423 - DNA, 20 bp, Artificial Sequence
  chemically synthesized
cctgggataccccgaagagt

SEQ ID NO: 424 - DNA, 20 bp, Artificial Sequence
  chemically synthesized
ccccgaagagtgagtttgcc

SEQ ID NO: 425 - DNA, 20 bp, Artificial Sequence
  chemically synthesized
cgaagagtgagtttgccaag

SEQ ID NO: 426 - DNA, 20 bp, Artificial Sequence
  chemically synthesized
tttgccaagcagtcacccca

SEQ ID NO: 427 - DNA, 20 bp, Artificial Sequence
  chemically synthesized
ccaagcagtcaccccacagt

SEQ ID NO: 428 - DNA, 20 bp, Artificial Sequence
  chemically synthesized
aagcagtcaccccacagttg

SEQ ID NO: 429 - DNA, 20 bp, Artificial Sequence
  chemically synthesized
agcagtcaccccacagttgg

SEQ ID NO: 430 - DNA, 20 bp, Artificial Sequence
  chemically synthesized
cagtcaccccacagttggag

SEQ ID NO: 431 - DNA, 20 bp, Artificial Sequence
  chemically synthesized
ttggaggagaatccacccaa

SEQ ID NO: 432 - DNA, 20 bp, Artificial Sequence
  chemically synthesized
tggaggagaatccacccaaa

SEQ ID NO: 433 - DNA, 20 bp, Artificial Sequence
  chemically synthesized
aggagaatccacccaaaagg

SEQ ID NO: 434 - DNA, 20 bp, Artificial Sequence
  chemically synthesized
aatccacccaaaaggcagcc

SEQ ID NO: 435 - DNA, 20 bp, Artificial Sequence
  chemically synthesized
ccacccaaaaggcagcctgg

SEQ ID NO: 436 - DNA, 20 bp, Artificial Sequence
  chemically synthesized
ccaaaaggcagcctggtaga

SEQ ID NO: 437 - DNA, 20 bp, Artificial Sequence
  chemically synthesized
caaaaggcagcctggtagac

SEQ ID NO: 438 - DNA, 20 bp, Artificial Sequence
  chemically synthesized
aaaaggcagcctggtagaca

SEQ ID NO: 439 - DNA, 20 bp, Artificial Sequence
  chemically synthesized
ggcagcctggtagacagggc

SEQ ID NO: 440 - DNA, 20 bp, Artificial Sequence
  chemically synthesized
gcagcctggtagacagggct

SEQ ID NO: 441 - DNA, 20 bp, Artificial Sequence
  chemically synthesized
cagcctggtagacagggctg

SEQ ID NO: 442 - DNA, 20 bp, Artificial Sequence
  chemically synthesized
cctggtagacagggctgggg

SEQ ID NO: 443 - DNA, 20 bp, Artificial Sequence
  chemically synthesized
agggctggggtggcctctcg

SEQ ID NO: 444 - DNA, 20 bp, Artificial Sequence
  chemically synthesized
gggctggggtggcctctcgt

SEQ ID NO: 445 - DNA, 20 bp, Artificial Sequence
  chemically synthesized
ggctggggtggcctctcgtg

SEQ ID NO: 446 - DNA, 20 bp, Artificial Sequence
  chemically synthesized
gggtggcctctcgtggggtc

SEQ ID NO: 447 - DNA, 20 bp, Artificial Sequence
  chemically synthesized
ggtggcctctcgtggggtcc

SEQ ID NO: 448 - DNA, 20 bp, Artificial Sequence
  chemically synthesized
cctctcgtggggtccaggcc

SEQ ID NO: 449 - DNA, 20 bp, Artificial Sequence
  chemically synthesized
ctcgtggggtccaggccaag

SEQ ID NO: 450 - DNA, 20 bp, Artificial Sequence
  chemically synthesized
tcgtggggtccaggccaagt

SEQ ID NO: 451 - DNA, 20 bp, Artificial Sequence
  chemically synthesized
tggggtccaggccaagtagg

SEQ ID NO: 452 - DNA, 20 bp, Artificial Sequence
  chemically synthesized
tccaggccaagtaggtggcc

SEQ ID NO: 453 - DNA, 20 bp, Artificial Sequence
  chemically synthesized
ccaggccaagtaggtggcct

SEQ ID NO: 454 - DNA, 20 bp, Artificial Sequence
  chemically synthesized
caggccaagtaggtggcctg

SEQ ID NO: 455 - DNA, 20 bp, Artificial Sequence
  chemically synthesized
agtaggtggcctggggcctc

SEQ ID NO: 456 - DNA, 20 bp, Artificial Sequence
  chemically synthesized
gtaggtggcctggggcctct

SEQ ID NO: 457 - DNA, 20 bp, Artificial Sequence
  chemically synthesized
taggtggcctggggcctctg

SEQ ID NO: 458 - DNA, 20 bp, Artificial Sequence
  chemically synthesized
aggtggcctggggcctctgg

SEQ ID NO: 459 - DNA, 20 bp, Artificial Sequence
  chemically synthesized
cctggggcctctgggggatg

SEQ ID NO: 460 - DNA, 20 bp, Artificial Sequence
  chemically synthesized
ctggggcctctgggggatgc

SEQ ID NO: 461 - DNA, 20 bp, Artificial Sequence
  chemically synthesized
tggggcctctgggggatgca

SEQ ID NO: 462 - DNA, 20 bp, Artificial Sequence
  chemically synthesized
ggggcctctgggggatgcag

SEQ ID NO: 463 - DNA, 20 bp, Artificial Sequence
  chemically synthesized
gcctctgggggatgcagggg

SEQ ID NO: 464 - DNA, 20 bp, Artificial Sequence
  chemically synthesized
cctctgggggatgcagggga

SEQ ID NO: 465 - DNA, 20 bp, Artificial Sequence
  chemically synthesized
ctctgggggatgcaggggaa

SEQ ID NO: 466 - DNA, 20 bp, Artificial Sequence
  chemically synthesized
tctgggggatgcaggggaag

SEQ ID NO: 467 - DNA, 20 bp, Artificial Sequence
  chemically synthesized
ctgggggatgcaggggaagg

SEQ ID NO: 468 - DNA, 20 bp, Artificial Sequence
  chemically synthesized
gatgcaggggaagggggatg

SEQ ID NO: 469 - DNA, 20 bp, Artificial Sequence
  chemically synthesized
atgcaggggaagggggatgc

SEQ ID NO: 470 - DNA, 20 bp, Artificial Sequence
  chemically synthesized
tgcaggggaagggggatgca

SEQ ID NO: 471 - DNA, 20 bp, Artificial Sequence
  chemically synthesized
gcaggggaagggggatgcag

SEQ ID NO: 472 - DNA, 20 bp, Artificial Sequence
  chemically synthesized
ggaagggggatgcaggggaa

SEQ ID NO: 473 - DNA, 20 bp, Artificial Sequence
  chemically synthesized
gaagggggatgcaggggaac

SEQ ID NO: 474 - DNA, 20 bp, Artificial Sequence
  chemically synthesized
aagggggatgcaggggaacg

SEQ ID NO: 475 - DNA, 20 bp, Artificial Sequence
  chemically synthesized
gatgcaggggaacggggatg

SEQ ID NO: 476 - DNA, 20 bp, Artificial Sequence
  chemically synthesized
atgcaggggaacggggatgc

SEQ ID NO: 477 - DNA, 20 bp, Artificial Sequence
  chemically synthesized
tgcaggggaacggggatgca

SEQ ID NO: 478 - DNA, 20 bp, Artificial Sequence
  chemically synthesized
gcaggggaacggggatgcag

SEQ ID NO: 479 - DNA, 20 bp, Artificial Sequence
  chemically synthesized
ggaacggggatgcaggggaa

SEQ ID NO: 480 - DNA, 20 bp, Artificial Sequence
  chemically synthesized
gaacggggatgcaggggaac

SEQ ID NO: 481 - DNA, 20 bp, Artificial Sequence
  chemically synthesized
aacggggatgcaggggaacg

SEQ ID NO: 482 - DNA, 20 bp, Artificial Sequence
  chemically synthesized
ggatgcaggggaacggggct

SEQ ID NO: 483 - DNA, 20 bp, Artificial Sequence
  chemically synthesized
ggggaacggggctcagtctg

SEQ ID NO: 484 - DNA, 20 bp, Artificial Sequence
  chemically synthesized
ggaacggggctcagtctgaa

SEQ ID NO: 485 - DNA, 20 bp, Artificial Sequence
  chemically synthesized
acggggctcagtctgaagag

SEQ ID NO: 486 - DNA, 20 bp, Artificial Sequence
  chemically synthesized
ggggctcagtctgaagagca

SEQ ID NO: 487 - DNA, 20 bp, Artificial Sequence
  chemically synthesized
ctcagtctgaagagcagagc

SEQ ID NO: 488 - DNA, 20 bp, Artificial Sequence
  chemically synthesized
tcagtctgaagagcagagcc

SEQ ID NO: 489 - DNA, 20 bp, Artificial Sequence
  chemically synthesized
agcagagccaggaacccctg

SEQ ID NO: 490 - DNA, 20 bp, Artificial Sequence
  chemically synthesized
gcagagccaggaacccctgt

SEQ ID NO: 491 - DNA, 20 bp, Artificial Sequence
  chemically synthesized
cagagccaggaacccctgta

SEQ ID NO: 492 - DNA, 20 bp, Artificial Sequence
  chemically synthesized
agccaggaacccctgtaggg

SEQ ID NO: 493 - DNA, 20 bp, Artificial Sequence
  chemically synthesized
gccaggaacccctgtaggga

SEQ ID NO: 494 - DNA, 20 bp, Artificial Sequence
  chemically synthesized
ccaggaacccctgtagggaa

SEQ ID NO: 495 - DNA, 20 bp, Artificial Sequence
  chemically synthesized
caggaacccctgtagggaag

SEQ ID NO: 496 - DNA, 20 bp, Artificial Sequence
  chemically synthesized
gaacccctgtagggaagggg

SEQ ID NO: 497 - DNA, 20 bp, Artificial Sequence
  chemically synthesized
aacccctgtagggaaggggc

SEQ ID NO: 498 - DNA, 20 bp, Artificial Sequence
  chemically synthesized
cccctgtagggaaggggcag

SEQ ID NO: 499 - DNA, 20 bp, Artificial Sequence
  chemically synthesized
cctgtagggaaggggcagga

SEQ ID NO: 500 - DNA, 20 bp, Artificial Sequence
  chemically synthesized
tagggaaggggcaggagagc

SEQ ID NO: 501 - DNA, 20 bp, Artificial Sequence
  chemically synthesized
agggaaggggcaggagagcc

SEQ ID NO: 502 - DNA, 20 bp, Artificial Sequence
  chemically synthesized
gggaaggggcaggagagcca

SEQ ID NO: 503 - DNA, 20 bp, Artificial Sequence
  chemically synthesized
ggaaggggcaggagagccag

SEQ ID NO: 504 - DNA, 20 bp, Artificial Sequence
  chemically synthesized
ggcaggagagccaggggcat

SEQ ID NO: 505 - DNA, 20 bp, Artificial Sequence
  chemically synthesized
ggagagccaggggcatgaga

SEQ ID NO: 506 - DNA, 20 bp, Artificial Sequence
  chemically synthesized
gagccaggggcatgagatgg

SEQ ID NO: 507 - DNA, 20 bp, Artificial Sequence
  chemically synthesized
aggggcatgagatggtggac

SEQ ID NO: 508 - DNA, 20 bp, Artificial Sequence
  chemically synthesized
ggggcatgagatggtggacg

SEQ ID NO: 509 - DNA, 20 bp, Artificial Sequence
  chemically synthesized
gcatgagatggtggacgagg

SEQ ID NO: 510 - DNA, 20 bp, Artificial Sequence
  chemically synthesized
catgagatggtggacgagga

SEQ ID NO: 511 - DNA, 20 bp, Artificial Sequence
  chemically synthesized
atgagatggtggacgaggaa

SEQ ID NO: 512 - DNA, 20 bp, Artificial Sequence
  chemically synthesized
tgagatggtggacgaggaag

SEQ ID NO: 513 - DNA, 20 bp, Artificial Sequence
  chemically synthesized
gagatggtggacgaggaagg

SEQ ID NO: 514 - DNA, 20 bp, Artificial Sequence
  chemically synthesized
tggtggacgaggaaggggga

SEQ ID NO: 515 - DNA, 20 bp, Artificial Sequence
  chemically synthesized
ggtggacgaggaagggggac

SEQ ID NO: 516 - DNA, 20 bp, Artificial Sequence
  chemically synthesized
gtggacgaggaagggggaca

SEQ ID NO: 517 - DNA, 20 bp, Artificial Sequence
  chemically synthesized
gacgaggaagggggacaggg

SEQ ID NO: 518 - DNA, 20 bp, Artificial Sequence
  chemically synthesized
gaagggggacagggaagcct

SEQ ID NO: 519 - DNA, 20 bp, Artificial Sequence
  chemically synthesized
ggaagcctgagcgcctctcc

SEQ ID NO: 520 - DNA, 20 bp, Artificial Sequence
  chemically synthesized
gaagcctgagcgcctctcct

SEQ ID NO: 521 - DNA, 20 bp, Artificial Sequence
  chemically synthesized
gcgcctctcctgggcttgcc

SEQ ID NO: 522 - DNA, 20 bp, Artificial Sequence
  chemically synthesized
cgcctctcctgggcttgcca

SEQ ID NO: 523 - DNA, 20 bp, Artificial Sequence
  chemically synthesized
gcttgccaaggactcaaacc

SEQ ID NO: 524 - DNA, 20 bp, Artificial Sequence
  chemically synthesized
tgccaaggactcaaacccag

SEQ ID NO: 525 - DNA, 20 bp, Artificial Sequence
  chemically synthesized
aggactcaaacccagaagcc

SEQ ID NO: 526 - DNA, 20 bp, Artificial Sequence
  chemically synthesized
gactcaaacccagaagccca

SEQ ID NO: 527 - DNA, 20 bp, Artificial Sequence
  chemically synthesized
tcaaacccagaagcccagag

SEQ ID NO: 528 - DNA, 20 bp, Artificial Sequence
  chemically synthesized
caaacccagaagcccagagc

SEQ ID NO: 529 - DNA, 20 bp, Artificial Sequence
  chemically synthesized
aaacccagaagcccagagca

SEQ ID NO: 530 - DNA, 20 bp, Artificial Sequence
  chemically synthesized
agaagcccagagcagggcct

SEQ ID NO: 531 - DNA, 20 bp, Artificial Sequence
  chemically synthesized
gaagcccagagcagggcctt

SEQ ID NO: 532 - DNA, 20 bp, Artificial Sequence
  chemically synthesized
aagcccagagcagggcctta

SEQ ID NO: 533 - DNA, 20 bp, Artificial Sequence
  chemically synthesized
cccagagcagggccttaggg

SEQ ID NO: 534 - DNA, 20 bp, Artificial Sequence
  chemically synthesized
agagcagggccttagggaag

SEQ ID NO: 535 - DNA, 20 bp, Artificial Sequence
  chemically synthesized
gagcagggccttagggaagc

SEQ ID NO: 536 - DNA, 20 bp, Artificial Sequence
  chemically synthesized
agggaagcgggaccctgctc

SEQ ID NO: 537 - DNA, 20 bp, Artificial Sequence
  chemically synthesized
gggaagcgggaccctgctct

SEQ ID NO: 538 - DNA, 20 bp, Artificial Sequence
  chemically synthesized
aagcgggaccctgctctggg

SEQ ID NO: 539 - DNA, 20 bp, Artificial Sequence
  chemically synthesized
gcgggaccctgctctgggcg

SEQ ID NO: 540 - DNA, 20 bp, Artificial Sequence
  chemically synthesized
cgggaccctgctctgggcgg

SEQ ID NO: 541 - DNA, 20 bp, Artificial Sequence
  chemically synthesized
ctgggcggaggaatatgtcc

SEQ ID NO: 542 - DNA, 20 bp, Artificial Sequence
  chemically synthesized
gcggaggaatatgtcccaga

SEQ ID NO: 543 - DNA, 20 bp, Artificial Sequence
  chemically synthesized
gaatatgtcccagatagcac

SEQ ID NO: 544 - DNA, 20 bp, Artificial Sequence
  chemically synthesized
aatatgtcccagatagcact

SEQ ID NO: 545 - DNA, 20 bp, Artificial Sequence
  chemically synthesized
atatgtcccagatagcactg

SEQ ID NO: 546 - DNA, 20 bp, Artificial Sequence
  chemically synthesized
gatagcactggggactcttt

SEQ ID NO: 547 - DNA, 20 bp, Artificial Sequence
  chemically synthesized
atagcactggggactcttta

SEQ ID NO: 548 - DNA, 20 bp, Artificial Sequence
  chemically synthesized
cactggggactctttaagga

SEQ ID NO: 549 - DNA, 20 bp, Artificial Sequence
  chemically synthesized
tggggactctttaaggaaag

SEQ ID NO: 550 - DNA, 20 bp, Artificial Sequence
  chemically synthesized
ggggactctttaaggaaaga

SEQ ID NO: 551 - DNA, 20 bp, Artificial Sequence
  chemically synthesized
actctttaaggaaagaagga

SEQ ID NO: 552 - DNA, 20 bp, Artificial Sequence
  chemically synthesized
tctttaaggaaagaaggatg

SEQ ID NO: 553 - DNA, 20 bp, Artificial Sequence
  chemically synthesized
taaggaaagaaggatggaga

SEQ ID NO: 554 - DNA, 20 bp, Artificial Sequence
  chemically synthesized
aggaaagaaggatggagaaa

SEQ ID NO: 555 - DNA, 20 bp, Artificial Sequence
  chemically synthesized
aagaaggatggagaaagaga

SEQ ID NO: 556 - DNA, 20 bp, Artificial Sequence
  chemically synthesized
agaaggatggagaaagagaa

SEQ ID NO: 557 - DNA, 20 bp, Artificial Sequence
  chemically synthesized
gaaggatggagaaagagaaa

SEQ ID NO: 558 - DNA, 20 bp, Artificial Sequence
  chemically synthesized
aggatggagaaagagaaagg

SEQ ID NO: 559 - DNA, 20 bp, Artificial Sequence
  chemically synthesized
atggagaaagagaaagggag

SEQ ID NO: 560 - DNA, 20 bp, Artificial Sequence
  chemically synthesized
ggagaaagagaaagggagta

SEQ ID NO: 561 - DNA, 20 bp, Artificial Sequence
  chemically synthesized
gagaaagagaaagggagtag

SEQ ID NO: 562 - DNA, 20 bp, Artificial Sequence
  chemically synthesized
aaagagaaagggagtagagg

SEQ ID NO: 563 - DNA, 20 bp, Artificial Sequence
  chemically synthesized
gagtagaggcggccacgacc

SEQ ID NO: 564 - DNA, 20 bp, Artificial Sequence
  chemically synthesized
gccacgacctggtgaacacc

SEQ ID NO: 565 - DNA, 20 bp, Artificial Sequence
  chemically synthesized
ccacgacctggtgaacacct

SEQ ID NO: 566 - DNA, 20 bp, Artificial Sequence
  chemically synthesized
taggacgcaccattctcaca

SEQ ID NO: 567 - DNA, 20 bp, Artificial Sequence
  chemically synthesized
aggacgcaccattctcacaa

SEQ ID NO: 568 - DNA, 20 bp, Artificial Sequence
  chemically synthesized
ggacgcaccattctcacaaa

SEQ ID NO: 569 - DNA, 20 bp, Artificial Sequence
  chemically synthesized
acgcaccattctcacaaagg

SEQ ID NO: 570 - DNA, 20 bp, Artificial Sequence
  chemically synthesized
cacaaagggagttttccaca

SEQ ID NO: 571 - DNA, 20 bp, Artificial Sequence
  chemically synthesized
ggacacccccctcctcacca

SEQ ID NO: 572 - DNA, 20 bp, Artificial Sequence
  chemically synthesized
cctcctcaccacagccctgc

SEQ ID NO: 573 - DNA, 20 bp, Artificial Sequence
  chemically synthesized
ctcctcaccacagccctgcc

SEQ ID NO: 574 - DNA, 20 bp, Artificial Sequence
  chemically synthesized
tcaccacagccctgccagga

SEQ ID NO: 575 - DNA, 20 bp, Artificial Sequence
  chemically synthesized
caccacagccctgccaggac

SEQ ID NO: 576 - DNA, 20 bp, Artificial Sequence
  chemically synthesized
accacagccctgccaggacg

SEQ ID NO: 577 - DNA, 20 bp, Artificial Sequence
  chemically synthesized
cagccctgccaggacggggc

SEQ ID NO: 578 - DNA, 20 bp, Artificial Sequence
  chemically synthesized
gccaggacggggctggctac

SEQ ID NO: 579 - DNA, 20 bp, Artificial Sequence
  chemically synthesized
tggctactggccttatctca

SEQ ID NO: 580 - DNA, 20 bp, Artificial Sequence
  chemically synthesized
ggctactggccttatctcac

SEQ ID NO: 581 - DNA, 20 bp, Artificial Sequence
  chemically synthesized
tcacaggtaaaactgacgca

SEQ ID NO: 582 - DNA, 20 bp, Artificial Sequence
  chemically synthesized
acaggtaaaactgacgcacg

SEQ ID NO: 583 - DNA, 20 bp, Artificial Sequence
  chemically synthesized
caggtaaaactgacgcacgg

SEQ ID NO: 584 - DNA, 20 bp, Artificial Sequence
  chemically synthesized
cacggaggaacaatataaat

SEQ ID NO: 585 - DNA, 20 bp, Artificial Sequence
  chemically synthesized
acggaggaacaatataaatt

SEQ ID NO: 586 - DNA, 20 bp, Artificial Sequence
  chemically synthesized
cggaggaacaatataaattg

SEQ ID NO: 587 - DNA, 20 bp, Artificial Sequence
  chemically synthesized
gaacaatataaattggggac

SEQ ID NO: 588 - DNA, 20 bp, Artificial Sequence
  chemically synthesized
aatataaattggggactaga

SEQ ID NO: 589 - DNA, 20 bp, Artificial Sequence
  chemically synthesized
atataaattggggactagaa

SEQ ID NO: 590 - DNA, 20 bp, Artificial Sequence
  chemically synthesized
aattggggactagaaaggtg

SEQ ID NO: 591 - DNA, 20 bp, Artificial Sequence
  chemically synthesized
ttggggactagaaaggtgaa

SEQ ID NO: 592 - DNA, 20 bp, Artificial Sequence
  chemically synthesized
actagaaaggtgaagagcca

SEQ ID NO: 593 - DNA, 20 bp, Artificial Sequence
  chemically synthesized
gaaaggtgaagagccaaagt

SEQ ID NO: 594 - DNA, 20 bp, Artificial Sequence
  chemically synthesized
gaagagccaaagttagaact

SEQ ID NO: 595 - DNA, 20 bp, Artificial Sequence
  chemically synthesized
aagagccaaagttagaactc

SEQ ID NO: 596 - DNA, 20 bp, Artificial Sequence
  chemically synthesized
ttccaaactgcttctcctct

SEQ ID NO: 597 - DNA, 20 bp, Artificial Sequence
  chemically synthesized
tccaaactgcttctcctctt

SEQ ID NO: 598 - DNA, 20 bp, Artificial Sequence
  chemically synthesized
aaactgcttctcctcttggg

SEQ ID NO: 599 - DNA, 20 bp, Artificial Sequence
  chemically synthesized
cttctcctcttgggaagtgt

SEQ ID NO: 600 - DNA, 20 bp, Artificial Sequence
  chemically synthesized
ttctcctcttgggaagtgta

SEQ ID NO: 601 - DNA, 20 bp, Artificial Sequence
  chemically synthesized
tcctcttgggaagtgtaagg

SEQ ID NO: 602 - DNA, 20 bp, Artificial Sequence
  chemically synthesized
tgggaagtgtaaggaagctg

SEQ ID NO: 603 - DNA, 20 bp, Artificial Sequence
  chemically synthesized
gtgtaaggaagctgcagcac

SEQ ID NO: 604 - DNA, 20 bp, Artificial Sequence
  chemically synthesized
tgtaaggaagctgcagcacc

SEQ ID NO: 605 - DNA, 20 bp, Artificial Sequence
  chemically synthesized
ggaagctgcagcaccaggat

SEQ ID NO: 606 - DNA, 20 bp, Artificial Sequence
  chemically synthesized
ccaggatcagtgaaacgcac

SEQ ID NO: 607 - DNA, 20 bp, Artificial Sequence
  chemically synthesized
gatcagtgaaacgcaccaga

SEQ ID NO: 608 - DNA, 20 bp, Artificial Sequence
  chemically synthesized
aacgcaccagacggccgcgt

SEQ ID NO: 609 - DNA, 20 bp, Artificial Sequence
  chemically synthesized
cgcaccagacggccgcgtca

SEQ ID NO: 610 - DNA, 20 bp, Artificial Sequence
  chemically synthesized
accagacggccgcgtcagag

SEQ ID NO: 611 - DNA, 20 bp, Artificial Sequence
  chemically synthesized
acggccgcgtcagagcagct

SEQ ID NO: 612 - DNA, 20 bp, Artificial Sequence
  chemically synthesized
cggccgcgtcagagcagctc

SEQ ID NO: 613 - DNA, 20 bp, Artificial Sequence
  chemically synthesized
cgtcagagcagctcaggttc

SEQ ID NO: 614 - DNA, 20 bp, Artificial Sequence
  chemically synthesized
gtcagagcagctcaggttct

SEQ ID NO: 615 - DNA, 20 bp, Artificial Sequence
  chemically synthesized
cagagcagctcaggttctgg

SEQ ID NO: 616 - DNA, 20 bp, Artificial Sequence
  chemically synthesized
gagcagctcaggttctggga

SEQ ID NO: 617 - DNA, 20 bp, Artificial Sequence
  chemically synthesized
agcagctcaggttctgggag

SEQ ID NO: 618 - DNA, 20 bp, Artificial Sequence
  chemically synthesized
gcagctcaggttctgggaga

SEQ ID NO: 619 - DNA, 20 bp, Artificial Sequence
  chemically synthesized
gctcaggttctgggagaggg

SEQ ID NO: 620 - DNA, 20 bp, Artificial Sequence
  chemically synthesized
ggttctgggagagggtagcg

SEQ ID NO: 621 - DNA, 20 bp, Artificial Sequence
  chemically synthesized
gttctgggagagggtagcgc

SEQ ID NO: 622 - DNA, 20 bp, Artificial Sequence
  chemically synthesized
ttctgggagagggtagcgca

SEQ ID NO: 623 - DNA, 20 bp, Artificial Sequence
  chemically synthesized
tgggagagggtagcgcaggg

SEQ ID NO: 624 - DNA, 20 bp, Artificial Sequence
  chemically synthesized
ggtagcgcagggtggccact

SEQ ID NO: 625 - DNA, 20 bp, Artificial Sequence
  chemically synthesized
gcagggtggccactgagaac

SEQ ID NO: 626 - DNA, 20 bp, Artificial Sequence
  chemically synthesized
cagggtggccactgagaacc

SEQ ID NO: 627 - DNA, 20 bp, Artificial Sequence
  chemically synthesized
ggtggccactgagaaccggg

SEQ ID NO: 628 - DNA, 20 bp, Artificial Sequence
  chemically synthesized
gtggccactgagaaccgggc

SEQ ID NO: 629 - DNA, 20 bp, Artificial Sequence
  chemically synthesized
cttccctcccaccccctgcc

SEQ ID NO: 630 - DNA, 20 bp, Artificial Sequence
  chemically synthesized
ccctgccaagctctccctcc

SEQ ID NO: 631 - DNA, 20 bp, Artificial Sequence
  chemically synthesized
cctgccaagctctccctccc

SEQ ID NO: 632 - DNA, 20 bp, Artificial Sequence
  chemically synthesized
ctccctcccaggatcctctc

SEQ ID NO: 633 - DNA, 20 bp, Artificial Sequence
  chemically synthesized
atcctctctggctccatcgt

SEQ ID NO: 634 - DNA, 20 bp, Artificial Sequence
  chemically synthesized
gctccatcgtaagcaaacct

SEQ ID NO: 635 - DNA, 20 bp, Artificial Sequence
  chemically synthesized
tccatcgtaagcaaacctta

SEQ ID NO: 636 - DNA, 20 bp, Artificial Sequence
  chemically synthesized
ccatcgtaagcaaaccttag

SEQ ID NO: 637 - DNA, 20 bp, Artificial Sequence
  chemically synthesized
taagcaaaccttagaggttc

SEQ ID NO: 638 - DNA, 20 bp, Artificial Sequence
  chemically synthesized
caaaccttagaggttctggc

SEQ ID NO: 639 - DNA, 20 bp, Artificial Sequence
  chemically synthesized
aaaccttagaggttctggca

SEQ ID NO: 640 - DNA, 20 bp, Artificial Sequence
  chemically synthesized
accttagaggttctggcaag

SEQ ID NO: 641 - DNA, 20 bp, Artificial Sequence
  chemically synthesized
cttagaggttctggcaagga

SEQ ID NO: 642 - DNA, 20 bp, Artificial Sequence
  chemically synthesized
tagaggttctggcaaggaga

SEQ ID NO: 643 - DNA, 20 bp, Artificial Sequence
  chemically synthesized
ggttctggcaaggagagaga

SEQ ID NO: 644 - DNA, 20 bp, Artificial Sequence
  chemically synthesized
ggcaaggagagagatggctc

SEQ ID NO: 645 - DNA, 20 bp, Artificial Sequence
  chemically synthesized
gcaaggagagagatggctcc

SEQ ID NO: 646 - DNA, 20 bp, Artificial Sequence
  chemically synthesized
agagagatggctccaggaaa

SEQ ID NO: 647 - DNA, 20 bp, Artificial Sequence
  chemically synthesized
gagagatggctccaggaaat

SEQ ID NO: 648 - DNA, 20 bp, Artificial Sequence
  chemically synthesized
agagatggctccaggaaatg

SEQ ID NO: 649 - DNA, 20 bp, Artificial Sequence
  chemically synthesized
gagatggctccaggaaatgg

SEQ ID NO: 650 - DNA, 20 bp, Artificial Sequence
  chemically synthesized
aggaaatgggggtgtgtcac

SEQ ID NO: 651 - DNA, 20 bp, Artificial Sequence
  chemically synthesized
atgggggtgtgtcaccagat

SEQ ID NO: 652 - DNA, 20 bp, Artificial Sequence
  chemically synthesized
tgggggtgtgtcaccagata

SEQ ID NO: 653 - DNA, 20 bp, Artificial Sequence
  chemically synthesized
cagataaggaatctgcctaa

SEQ ID NO: 654 - DNA, 20 bp, Artificial Sequence
  chemically synthesized
agataaggaatctgcctaac

SEQ ID NO: 655 - DNA, 20 bp, Artificial Sequence
  chemically synthesized
ataaggaatctgcctaacag

SEQ ID NO: 656 - DNA, 20 bp, Artificial Sequence
  chemically synthesized
taaggaatctgcctaacagg

SEQ ID NO: 657 - DNA, 20 bp, Artificial Sequence
  chemically synthesized
ggaatctgcctaacaggagg

SEQ ID NO: 658 - DNA, 20 bp, Artificial Sequence
  chemically synthesized
gaatctgcctaacaggaggt

SEQ ID NO: 659 - DNA, 20 bp, Artificial Sequence
  chemically synthesized
aatctgcctaacaggaggtg

SEQ ID NO: 660 - DNA, 20 bp, Artificial Sequence
  chemically synthesized
atctgcctaacaggaggtgg

SEQ ID NO: 661 - DNA, 20 bp, Artificial Sequence
  chemically synthesized
gcctaacaggaggtgggggt

SEQ ID NO: 662 - DNA, 20 bp, Artificial Sequence
  chemically synthesized
gtgggggttagacccaatat

SEQ ID NO: 663 - DNA, 20 bp, Artificial Sequence
  chemically synthesized
tgggggttagacccaatatc

SEQ ID NO: 664 - DNA, 20 bp, Artificial Sequence
  chemically synthesized
ggggttagacccaatatcag

SEQ ID NO: 665 - DNA, 20 bp, Artificial Sequence
  chemically synthesized
tagacccaatatcaggagac

SEQ ID NO: 666 - DNA, 20 bp, Artificial Sequence
  chemically synthesized
agacccaatatcaggagact

SEQ ID NO: 667 - DNA, 20 bp, Artificial Sequence
  chemically synthesized
cccaatatcaggagactagg

SEQ ID NO: 668 - DNA, 20 bp, Artificial Sequence
  chemically synthesized
ccaatatcaggagactagga

SEQ ID NO: 669 - DNA, 20 bp, Artificial Sequence
  chemically synthesized
aatatcaggagactaggaag

SEQ ID NO: 670 - DNA, 20 bp, Artificial Sequence
  chemically synthesized
atatcaggagactaggaagg

SEQ ID NO: 671 - DNA, 20 bp, Artificial Sequence
  chemically synthesized
atcaggagactaggaaggag

SEQ ID NO: 672 - DNA, 20 bp, Artificial Sequence
  chemically synthesized
tcaggagactaggaaggagg

SEQ ID NO: 673 - DNA, 20 bp, Artificial Sequence
  chemically synthesized
gactaggaaggaggaggcct

SEQ ID NO: 674 - DNA, 20 bp, Artificial Sequence
  chemically synthesized
actaggaaggaggaggccta

SEQ ID NO: 675 - DNA, 20 bp, Artificial Sequence
  chemically synthesized
ggaaggaggaggcctaagga

SEQ ID NO: 676 - DNA, 20 bp, Artificial Sequence
  chemically synthesized
gaaggaggaggcctaaggat

SEQ ID NO: 677 - DNA, 20 bp, Artificial Sequence
  chemically synthesized
aaggaggaggcctaaggatg

SEQ ID NO: 678 - DNA, 20 bp, Artificial Sequence
  chemically synthesized
tctgtcaccaatcctgtccc

SEQ ID NO: 679 - DNA, 20 bp, Artificial Sequence
  chemically synthesized
gtcaccaatcctgtccctag

SEQ ID NO: 680 - DNA, 20 bp, Artificial Sequence
  chemically synthesized
tgtccctagtggccccactg

SEQ ID NO: 681 - DNA, 20 bp, Artificial Sequence
  chemically synthesized
gtccctagtggccccactgt

SEQ ID NO: 682 - DNA, 20 bp, Artificial Sequence
  chemically synthesized
tccctagtggccccactgtg

SEQ ID NO: 683 - DNA, 20 bp, Artificial Sequence
  chemically synthesized
ctagtggccccactgtgggg

SEQ ID NO: 684 - DNA, 20 bp, Artificial Sequence
  chemically synthesized
agtggccccactgtggggtg

SEQ ID NO: 685 - DNA, 20 bp, Artificial Sequence
  chemically synthesized
gtggccccactgtggggtgg

SEQ ID NO: 686 - DNA, 20 bp, Artificial Sequence
  chemically synthesized
tggccccactgtggggtgga

SEQ ID NO: 687 - DNA, 20 bp, Artificial Sequence
  chemically synthesized
ggccccactgtggggtggag

SEQ ID NO: 688 - DNA, 20 bp, Artificial Sequence
  chemically synthesized
ccactgtggggtggagggga

SEQ ID NO: 689 - DNA, 20 bp, Artificial Sequence
  chemically synthesized
ggggtggaggggacagataa

SEQ ID NO: 690 - DNA, 20 bp, Artificial Sequence
  chemically synthesized
aggggacagataaaagtacc

SEQ ID NO: 691 - DNA, 20 bp, Artificial Sequence
  chemically synthesized
cagataaaagtacccagaac

SEQ ID NO: 692 - DNA, 20 bp, Artificial Sequence
  chemically synthesized
gataaaagtacccagaacca

SEQ ID NO: 693 - DNA, 20 bp, Artificial Sequence
  chemically synthesized
agaaccagagccacattaac

SEQ ID NO: 694 - DNA, 20 bp, Artificial Sequence
  chemically synthesized
agagccacattaaccggccc

SEQ ID NO: 695 - DNA, 20 bp, Artificial Sequence
  chemically synthesized
gagccacattaaccggccct

SEQ ID NO: 696 - DNA, 20 bp, Artificial Sequence
  chemically synthesized
ttaaccggccctgggaatat

SEQ ID NO: 697 - DNA, 20 bp, Artificial Sequence
  chemically synthesized
taaccggccctgggaatata

SEQ ID NO: 698 - DNA, 20 bp, Artificial Sequence
  chemically synthesized
ccggccctgggaatataagg

SEQ ID NO: 699 - DNA, 20 bp, Artificial Sequence
  chemically synthesized
ctgggaatataaggtggtcc

SEQ ID NO: 700 - DNA, 20 bp, Artificial Sequence
  chemically synthesized
aatataaggtggtcccagct

SEQ ID NO: 701 - DNA, 20 bp, Artificial Sequence
  chemically synthesized
atataaggtggtcccagctc

SEQ ID NO: 702 - DNA, 20 bp, Artificial Sequence
  chemically synthesized
tataaggtggtcccagctcg

SEQ ID NO: 703 - DNA, 20 bp, Artificial Sequence
  chemically synthesized
gtggtcccagctcggggaca

SEQ ID NO: 704 - DNA, 20 bp, Artificial Sequence
  chemically synthesized
tggtcccagctcggggacac

SEQ ID NO: 705 - DNA, 20 bp, Artificial Sequence
  chemically synthesized
gctcggggacacaggatccc

SEQ ID NO: 706 - DNA, 20 bp, Artificial Sequence
  chemically synthesized
tcggggacacaggatccctg

SEQ ID NO: 707 - DNA, 20 bp, Artificial Sequence
  chemically synthesized
cggggacacaggatccctgg

SEQ ID NO: 708 - DNA, 20 bp, Artificial Sequence
  chemically synthesized
ggacacaggatccctggagg

SEQ ID NO: 709 - DNA, 20 bp, Artificial Sequence
  chemically synthesized
gcagcaaacatgctgtcctg

SEQ ID NO: 710 - DNA, 20 bp, Artificial Sequence
  chemically synthesized
gcaaacatgctgtcctgaag

SEQ ID NO: 711 - DNA, 20 bp, Artificial Sequence
  chemically synthesized
atgctgtcctgaagtggaca

SEQ ID NO: 712 - DNA, 20 bp, Artificial Sequence
  chemically synthesized
tgctgtcctgaagtggacat

SEQ ID NO: 713 - DNA, 20 bp, Artificial Sequence
  chemically synthesized
gctgtcctgaagtggacata

SEQ ID NO: 714 - DNA, 20 bp, Artificial Sequence
  chemically synthesized
ctgtcctgaagtggacatag

SEQ ID NO: 715 - DNA, 20 bp, Artificial Sequence
  chemically synthesized
ctgaagtggacataggggcc

SEQ ID NO: 716 - DNA, 20 bp, Artificial Sequence
  chemically synthesized
tgaagtggacataggggccc

SEQ ID NO: 717 - DNA, 20 bp, Artificial Sequence
  chemically synthesized
gtggacataggggcccgggt

SEQ ID NO: 718 - DNA, 20 bp, Artificial Sequence
  chemically synthesized
ggacataggggcccgggttg

SEQ ID NO: 719 - DNA, 20 bp, Artificial Sequence
  chemically synthesized
gacataggggcccgggttgg

SEQ ID NO: 720 - DNA, 20 bp, Artificial Sequence
  chemically synthesized
ataggggcccgggttggagg

SEQ ID NO: 721 - DNA, 20 bp, Artificial Sequence
  chemically synthesized
ggggcccgggttggaggaag

SEQ ID NO: 722 - DNA, 20 bp, Artificial Sequence
  chemically synthesized
ccgggttggaggaagaagac

SEQ ID NO: 723 - DNA, 20 bp, Artificial Sequence
  chemically synthesized
ttggaggaagaagactagct

SEQ ID NO: 724 - DNA, 20 bp, Artificial Sequence
  chemically synthesized
aagaagactagctgagctct

SEQ ID NO: 725 - DNA, 20 bp, Artificial Sequence
  chemically synthesized
tagctgagctctcggacccc

SEQ ID NO: 726 - DNA, 20 bp, Artificial Sequence
  chemically synthesized
ctgagctctcggacccctgg

SEQ ID NO: 727 - DNA, 20 bp, Artificial Sequence
  chemically synthesized
acccctggaagatgccatga

SEQ ID NO: 728 - DNA, 20 bp, Artificial Sequence
  chemically synthesized
cccctggaagatgccatgac

SEQ ID NO: 729 - DNA, 20 bp, Artificial Sequence
  chemically synthesized
ccctggaagatgccatgaca

SEQ ID NO: 730 - DNA, 20 bp, Artificial Sequence
  chemically synthesized
cctggaagatgccatgacag

SEQ ID NO: 731 - DNA, 20 bp, Artificial Sequence
  chemically synthesized
ctggaagatgccatgacagg

SEQ ID NO: 732 - DNA, 20 bp, Artificial Sequence
  chemically synthesized
aagatgccatgacagggggc

SEQ ID NO: 733 - DNA, 20 bp, Artificial Sequence
  chemically synthesized
atgccatgacagggggctgg

SEQ ID NO: 734 - DNA, 20 bp, Artificial Sequence
  chemically synthesized
gccatgacagggggctggaa

SEQ ID NO: 735 - DNA, 20 bp, Artificial Sequence
  chemically synthesized
tgacagggggctggaagagc

SEQ ID NO: 736 - DNA, 20 bp, Artificial Sequence
  chemically synthesized
gggggctggaagagctagca

SEQ ID NO: 737 - DNA, 20 bp, Artificial Sequence
  chemically synthesized
ctggaagagctagcacagac

SEQ ID NO: 738 - DNA, 20 bp, Artificial Sequence
  chemically synthesized
ggaagagctagcacagacta

SEQ ID NO: 739 - DNA, 20 bp, Artificial Sequence
  chemically synthesized
aagagctagcacagactaga

SEQ ID NO: 740 - DNA, 20 bp, Artificial Sequence
  chemically synthesized
agagctagcacagactagag

SEQ ID NO: 741 - DNA, 20 bp, Artificial Sequence
  chemically synthesized
ctagcacagactagagaggt

SEQ ID NO: 742 - DNA, 20 bp, Artificial Sequence
  chemically synthesized
tagcacagactagagaggta

SEQ ID NO: 743 - DNA, 20 bp, Artificial Sequence
  chemically synthesized
agcacagactagagaggtaa

SEQ ID NO: 744 - DNA, 20 bp, Artificial Sequence
  chemically synthesized
gcacagactagagaggtaag

SEQ ID NO: 745 - DNA, 20 bp, Artificial Sequence
  chemically synthesized
cacagactagagaggtaagg

SEQ ID NO: 746 - DNA, 20 bp, Artificial Sequence
  chemically synthesized
acagactagagaggtaaggg

SEQ ID NO: 747 - DNA, 20 bp, Artificial Sequence
  chemically synthesized
gactagagaggtaagggggg

SEQ ID NO: 748 - DNA, 20 bp, Artificial Sequence
  chemically synthesized
actagagaggtaaggggggt

SEQ ID NO: 749 - DNA, 20 bp, Artificial Sequence
  chemically synthesized
ctagagaggtaaggggggta

SEQ ID NO: 750 - DNA, 20 bp, Artificial Sequence
  chemically synthesized
tagagaggtaaggggggtag

SEQ ID NO: 751 - DNA, 20 bp, Artificial Sequence
  chemically synthesized
gagaggtaaggggggtaggg

SEQ ID NO: 752 - DNA, 20 bp, Artificial Sequence
  chemically synthesized
taggggagctgcccaaatga

SEQ ID NO: 753 - DNA, 20 bp, Artificial Sequence
  chemically synthesized
aggggagctgcccaaatgaa

SEQ ID NO: 754 - DNA, 20 bp, Artificial Sequence
  chemically synthesized
gggagctgcccaaatgaaag

SEQ ID NO: 755 - DNA, 20 bp, Artificial Sequence
  chemically synthesized
gctgcccaaatgaaaggagt

SEQ ID NO: 756 - DNA, 20 bp, Artificial Sequence
  chemically synthesized
tgcccaaatgaaaggagtga

SEQ ID NO: 757 - DNA, 20 bp, Artificial Sequence
  chemically synthesized
gcccaaatgaaaggagtgag

SEQ ID NO: 758 - DNA, 20 bp, Artificial Sequence
  chemically synthesized
tgagaggtgacccgaatcca

SEQ ID NO: 759 - DNA, 20 bp, Artificial Sequence
  chemically synthesized
gagaggtgacccgaatccac

SEQ ID NO: 760 - DNA, 20 bp, Artificial Sequence
  chemically synthesized
gaggtgacccgaatccacag

SEQ ID NO: 761 - DNA, 20 bp, Artificial Sequence
  chemically synthesized
gacccgaatccacaggagaa

SEQ ID NO: 762 - DNA, 20 bp, Artificial Sequence
  chemically synthesized
acccgaatccacaggagaac

SEQ ID NO: 763 - DNA, 20 bp, Artificial Sequence
  chemically synthesized
cccgaatccacaggagaacg

SEQ ID NO: 764 - DNA, 20 bp, Artificial Sequence
  chemically synthesized
ccacaggagaacggggtgtc

SEQ ID NO: 765 - DNA, 20 bp, Artificial Sequence
  chemically synthesized
cacaggagaacggggtgtcc

SEQ ID NO: 766 - DNA, 20 bp, Artificial Sequence
  chemically synthesized
gagaacggggtgtccaggca

SEQ ID NO: 767 - DNA, 20 bp, Artificial Sequence
  chemically synthesized
acggggtgtccaggcaaaga

SEQ ID NO: 768 - DNA, 20 bp, Artificial Sequence
  chemically synthesized
ggtgtccaggcaaagaaagc

SEQ ID NO: 769 - DNA, 20 bp, Artificial Sequence
  chemically synthesized
tgtccaggcaaagaaagcaa

SEQ ID NO: 770 - DNA, 20 bp, Artificial Sequence
  chemically synthesized
gtccaggcaaagaaagcaag

SEQ ID NO: 771 - DNA, 20 bp, Artificial Sequence
  chemically synthesized
aggcaaagaaagcaagagga

SEQ ID NO: 772 - DNA, 20 bp, Artificial Sequence
  chemically synthesized
gcaaagaaagcaagaggatg

SEQ ID NO: 773 - DNA, 20 bp, Artificial Sequence
  chemically synthesized
aaagaaagcaagaggatgga

SEQ ID NO: 774 - DNA, 20 bp, Artificial Sequence
  chemically synthesized
aagaaagcaagaggatggag

SEQ ID NO: 775 - DNA, 20 bp, Artificial Sequence
  chemically synthesized
aaagcaagaggatggagagg

SEQ ID NO: 776 - DNA, 20 bp, Artificial Sequence
  chemically synthesized
agaggatggagaggtggcta

SEQ ID NO: 777 - DNA, 20 bp, Artificial Sequence
  chemically synthesized
gatggagaggtggctaaagc

SEQ ID NO: 778 - DNA, 20 bp, Artificial Sequence
  chemically synthesized
atggagaggtggctaaagcc

SEQ ID NO: 779 - DNA, 20 bp, Artificial Sequence
  chemically synthesized
tggagaggtggctaaagcca

SEQ ID NO: 780 - DNA, 20 bp, Artificial Sequence
  chemically synthesized
gagaggtggctaaagccagg

SEQ ID NO: 781 - DNA, 20 bp, Artificial Sequence
  chemically synthesized
ggtggctaaagccagggaga

SEQ ID NO: 782 - DNA, 20 bp, Artificial Sequence
  chemically synthesized
gtggctaaagccagggagac

SEQ ID NO: 783 - DNA, 20 bp, Artificial Sequence
  chemically synthesized
tggctaaagccagggagacg

SEQ ID NO: 784 - DNA, 20 bp, Artificial Sequence
  chemically synthesized
gccagggagacggggtactt

SEQ ID NO: 785 - DNA, 20 bp, Artificial Sequence
  chemically synthesized
ccagggagacggggtacttt

SEQ ID NO: 786 - DNA, 20 bp, Artificial Sequence
  chemically synthesized
cagggagacggggtactttg

SEQ ID NO: 787 - DNA, 20 bp, Artificial Sequence
  chemically synthesized
cggggtactttggggttgtc

SEQ ID NO: 788 - DNA, 20 bp, Artificial Sequence
  chemically synthesized
tttggggttgtccagaaaaa

SEQ ID NO: 789 - DNA, 20 bp, Artificial Sequence
  chemically synthesized
ccagaaaaacggtgatgatg

SEQ ID NO: 790 - DNA, 20 bp, Artificial Sequence
  chemically synthesized
cagaaaaacggtgatgatgc

SEQ ID NO: 791 - DNA, 20 bp, Artificial Sequence
  chemically synthesized
cggtgatgatgcaggcctac

SEQ ID NO: 792 - DNA, 20 bp, Artificial Sequence
  chemically synthesized
tgatgatgcaggcctacaag

SEQ ID NO: 793 - DNA, 20 bp, Artificial Sequence
  chemically synthesized
gatgatgcaggcctacaaga

SEQ ID NO: 794 - DNA, 20 bp, Artificial Sequence
  chemically synthesized
atgatgcaggcctacaagaa

SEQ ID NO: 795 - DNA, 20 bp, Artificial Sequence
  chemically synthesized
tgatgcaggcctacaagaag

SEQ ID NO: 796 - DNA, 20 bp, Artificial Sequence
  chemically synthesized
atgcaggcctacaagaaggg

SEQ ID NO: 797 - DNA, 20 bp, Artificial Sequence
  chemically synthesized
tgcaggcctacaagaagggg

SEQ ID NO: 798 - DNA, 20 bp, Artificial Sequence
  chemically synthesized
aggcctacaagaaggggagg

SEQ ID NO: 799 - DNA, 20 bp, Artificial Sequence
  chemically synthesized
ggcctacaagaaggggaggc

SEQ ID NO: 800 - DNA, 20 bp, Artificial Sequence
  chemically synthesized
aagaaggggaggcgggacgc

SEQ ID NO: 801 - DNA, 20 bp, Artificial Sequence
  chemically synthesized
agaaggggaggcgggacgca

SEQ ID NO: 802 - DNA, 20 bp, Artificial Sequence
  chemically synthesized
gaaggggaggcgggacgcaa

SEQ ID NO: 803 - DNA, 20 bp, Artificial Sequence
  chemically synthesized
aggggaggcgggacgcaagg

SEQ ID NO: 804 - DNA, 20 bp, Artificial Sequence
  chemically synthesized
gacgcaagggagacatccgt

SEQ ID NO: 805 - DNA, 20 bp, Artificial Sequence
  chemically synthesized
cgcaagggagacatccgtcg

SEQ ID NO: 806 - DNA, 20 bp, Artificial Sequence
  chemically synthesized
aagggagacatccgtcggag

SEQ ID NO: 807 - DNA, 20 bp, Artificial Sequence
  chemically synthesized
agggagacatccgtcggaga

SEQ ID NO: 808 - DNA, 20 bp, Artificial Sequence
  chemically synthesized
ccgtcggagaaggccatcct

SEQ ID NO: 809 - DNA, 20 bp, Artificial Sequence
  chemically synthesized
agaaggccatcctaagaaac

SEQ ID NO: 810 - DNA, 20 bp, Artificial Sequence
  chemically synthesized
aaggccatcctaagaaacga

SEQ ID NO: 811 - DNA, 20 bp, Artificial Sequence
  chemically synthesized
ccatcctaagaaacgagaga

SEQ ID NO: 812 - DNA, 20 bp, Artificial Sequence
  chemically synthesized
ctaagaaacgagagatggca

SEQ ID NO: 813 - DNA, 20 bp, Artificial Sequence
  chemically synthesized
taagaaacgagagatggcac

SEQ ID NO: 814 - DNA, 20 bp, Artificial Sequence
  chemically synthesized
acgagagatggcacaggccc

SEQ ID NO: 815 - DNA, 20 bp, Artificial Sequence
  chemically synthesized
agagatggcacaggccccag

SEQ ID NO: 816 - DNA, 20 bp, Artificial Sequence
  chemically synthesized
gagatggcacaggccccaga

SEQ ID NO: 817 - DNA, 20 bp, Artificial Sequence
  chemically synthesized
gatggcacaggccccagaag

SEQ ID NO: 818 - DNA, 20 bp, Artificial Sequence
  chemically synthesized
ggcacaggccccagaaggag

SEQ ID NO: 819 - DNA, 20 bp, Artificial Sequence
  chemically synthesized
gcacaggccccagaaggaga

SEQ ID NO: 820 - DNA, 20 bp, Artificial Sequence
  chemically synthesized
ggccccagaaggagaaggaa

SEQ ID NO: 821 - DNA, 20 bp, Artificial Sequence
  chemically synthesized
gccccagaaggagaaggaaa

SEQ ID NO: 822 - DNA, 20 bp, Artificial Sequence
  chemically synthesized
ccccagaaggagaaggaaaa

SEQ ID NO: 823 - DNA, 20 bp, Artificial Sequence
  chemically synthesized
aggagaaggaaaagggaacc

SEQ ID NO: 824 - DNA, 20 bp, Artificial Sequence
  chemically synthesized
gaaggaaaagggaacccagc

SEQ ID NO: 825 - DNA, 20 bp, Artificial Sequence
  chemically synthesized
aaaagggaacccagcgagtg

SEQ ID NO: 826 - DNA, 20 bp, Artificial Sequence
  chemically synthesized
gggaacccagcgagtgaaga

SEQ ID NO: 827 - DNA, 20 bp, Artificial Sequence
  chemically synthesized
cccagcgagtgaagacggca

SEQ ID NO: 828 - DNA, 20 bp, Artificial Sequence
  chemically synthesized
ccagcgagtgaagacggcat

SEQ ID NO: 829 - DNA, 20 bp, Artificial Sequence
  chemically synthesized
cagcgagtgaagacggcatg

SEQ ID NO: 830 - DNA, 20 bp, Artificial Sequence
  chemically synthesized
gagtgaagacggcatggggt

SEQ ID NO: 831 - DNA, 20 bp, Artificial Sequence
  chemically synthesized
agtgaagacggcatggggtt

SEQ ID NO: 832 - DNA, 20 bp, Artificial Sequence
  chemically synthesized
aagacggcatggggttgggt

SEQ ID NO: 833 - DNA, 20 bp, Artificial Sequence
  chemically synthesized
agacggcatggggttgggtg

SEQ ID NO: 834 - DNA, 20 bp, Artificial Sequence
  chemically synthesized
gacggcatggggttgggtga

SEQ ID NO: 835 - DNA, 20 bp, Artificial Sequence
  chemically synthesized
cggcatggggttgggtgagg

SEQ ID NO: 836 - DNA, 20 bp, Artificial Sequence
  chemically synthesized
ggcatggggttgggtgaggg

SEQ ID NO: 837 - DNA, 20 bp, Artificial Sequence
  chemically synthesized
catggggttgggtgagggag

SEQ ID NO: 838 - DNA, 20 bp, Artificial Sequence
  chemically synthesized
tggggttgggtgagggagga

SEQ ID NO: 839 - DNA, 20 bp, Artificial Sequence
  chemically synthesized
ggtgagggaggagagatgcc

SEQ ID NO: 840 - DNA, 20 bp, Artificial Sequence
  chemically synthesized
tgagggaggagagatgcccg

SEQ ID NO: 841 - DNA, 20 bp, Artificial Sequence
  chemically synthesized
agggaggagagatgcccgga

SEQ ID NO: 842 - DNA, 20 bp, Artificial Sequence
  chemically synthesized
gggaggagagatgcccggag

SEQ ID NO: 843 - DNA, 20 bp, Artificial Sequence
  chemically synthesized
agagatgcccggagaggacc

SEQ ID NO: 844 - DNA, 20 bp, Artificial Sequence
  chemically synthesized
gcccggagaggacccagaca

SEQ ID NO: 845 - DNA, 20 bp, Artificial Sequence
  chemically synthesized
cccggagaggacccagacac

SEQ ID NO: 846 - DNA, 20 bp, Artificial Sequence
  chemically synthesized
ccggagaggacccagacacg

SEQ ID NO: 847 - DNA, 20 bp, Artificial Sequence
  chemically synthesized
ggagaggacccagacacggg

SEQ ID NO: 848 - DNA, 20 bp, Artificial Sequence
  chemically synthesized
gagaggacccagacacgggg

SEQ ID NO: 849 - DNA, 20 bp, Artificial Sequence
  chemically synthesized
agacacggggaggatccgct

SEQ ID NO: 850 - DNA, 20 bp, Artificial Sequence
  chemically synthesized
acacggggaggatccgctca

SEQ ID NO: 851 - DNA, 20 bp, Artificial Sequence
  chemically synthesized
cacggggaggatccgctcag

SEQ ID NO: 852 - DNA, 20 bp, Artificial Sequence
  chemically synthesized
tccgctcagaggacatcacg

SEQ ID NO: 853 - DNA, 20 bp, Artificial Sequence
  chemically synthesized
tcagaggacatcacgtggtg

SEQ ID NO: 854 - DNA, 20 bp, Artificial Sequence
  chemically synthesized
acatcacgtggtgcagcgcc

SEQ ID NO: 855 - DNA, 20 bp, Artificial Sequence
  chemically synthesized
tcacgtggtgcagcgccgag

SEQ ID NO: 856 - DNA, 20 bp, Artificial Sequence
  chemically synthesized
cacgtggtgcagcgccgaga

SEQ ID NO: 857 - DNA, 20 bp, Artificial Sequence
  chemically synthesized
gtggtgcagcgccgagaagg

SEQ ID NO: 858 - DNA, 20 bp, Artificial Sequence
  chemically synthesized
gcgccgagaaggaagtgctc

SEQ ID NO: 859 - DNA, 20 bp, Artificial Sequence
  chemically synthesized
cgagaaggaagtgctccgga

SEQ ID NO: 860 - DNA, 20 bp, Artificial Sequence
  chemically synthesized
agaaggaagtgctccggaaa

SEQ ID NO: 861 - DNA, 20 bp, Artificial Sequence
  chemically synthesized
tgctccggaaagagcatcct

SEQ ID NO: 862 - DNA, 20 bp, Artificial Sequence
  chemically synthesized
gctccggaaagagcatcctt

SEQ ID NO: 863 - DNA, 20 bp, Artificial Sequence
  chemically synthesized
ccggaaagagcatccttggg

SEQ ID NO: 864 - DNA, 20 bp, Artificial Sequence
  chemically synthesized
agcatccttgggcagcaaca

SEQ ID NO: 865 - DNA, 20 bp, Artificial Sequence
  chemically synthesized
atccttgggcagcaacacag

SEQ ID NO: 866 - DNA, 20 bp, Artificial Sequence
  chemically synthesized
ccttgggcagcaacacagca

SEQ ID NO: 867 - DNA, 20 bp, Artificial Sequence
  chemically synthesized
ttgggcagcaacacagcaga

SEQ ID NO: 868 - DNA, 20 bp, Artificial Sequence
  chemically synthesized
gcagcaacacagcagagagc

SEQ ID NO: 869 - DNA, 20 bp, Artificial Sequence
  chemically synthesized
cagcaacacagcagagagca

SEQ ID NO: 870 - DNA, 20 bp, Artificial Sequence
  chemically synthesized
agcaacacagcagagagcaa

SEQ ID NO: 871 - DNA, 20 bp, Artificial Sequence
  chemically synthesized
gcaacacagcagagagcaag

SEQ ID NO: 872 - DNA, 20 bp, Artificial Sequence
  chemically synthesized
acacagcagagagcaagggg

SEQ ID NO: 873 - DNA, 20 bp, Artificial Sequence
  chemically synthesized
acagcagagagcaaggggaa

SEQ ID NO: 874 - DNA, 20 bp, Artificial Sequence
  chemically synthesized
cagcagagagcaaggggaag

SEQ ID NO: 875 - DNA, 20 bp, Artificial Sequence
  chemically synthesized
agcagagagcaaggggaaga

SEQ ID NO: 876 - DNA, 20 bp, Artificial Sequence
  chemically synthesized
cagagagcaaggggaagagg

SEQ ID NO: 877 - DNA, 20 bp, Artificial Sequence
  chemically synthesized
agagcaaggggaagagggag

SEQ ID NO: 878 - DNA, 20 bp, Artificial Sequence
  chemically synthesized
agcaaggggaagagggagtg

SEQ ID NO: 879 - DNA, 20 bp, Artificial Sequence
  chemically synthesized
gcaaggggaagagggagtgg

SEQ ID NO: 880 - DNA, 20 bp, Artificial Sequence
  chemically synthesized
aggggaagagggagtggagg

SEQ ID NO: 881 - DNA, 20 bp, Artificial Sequence
  chemically synthesized
gaagagggagtggaggaaga

SEQ ID NO: 882 - DNA, 20 bp, Artificial Sequence
  chemically synthesized
gtggaggaagacggaacctg

SEQ ID NO: 883 - DNA, 20 bp, Artificial Sequence
  chemically synthesized
tggaggaagacggaacctga

SEQ ID NO: 884 - DNA, 20 bp, Artificial Sequence
  chemically synthesized
gaggaagacggaacctgaag

SEQ ID NO: 885 - DNA, 20 bp, Artificial Sequence
  chemically synthesized
aggaagacggaacctgaagg

SEQ ID NO: 886 - DNA, 20 bp, Artificial Sequence
  chemically synthesized
aagacggaacctgaaggagg

SEQ ID NO: 887 - DNA, 20 bp, Artificial Sequence
  chemically synthesized
acggaacctgaaggaggcgg

SEQ ID NO: 888 - DNA, 20 bp, Artificial Sequence
  chemically synthesized
cggaacctgaaggaggcggc

SEQ ID NO: 889 - DNA, 20 bp, Artificial Sequence
  chemically synthesized
ggaacctgaaggaggcggca

SEQ ID NO: 890 - DNA, 20 bp, Artificial Sequence
  chemically synthesized
acctgaaggaggcggcaggg

SEQ ID NO: 891 - DNA, 20 bp, Artificial Sequence
  chemically synthesized
cctgaaggaggcggcaggga

SEQ ID NO: 892 - DNA, 20 bp, Artificial Sequence
  chemically synthesized
ggaggcggcagggaaggatc

SEQ ID NO: 893 - DNA, 20 bp, Artificial Sequence
  chemically synthesized
gaggcggcagggaaggatct

SEQ ID NO: 894 - DNA, 20 bp, Artificial Sequence
  chemically synthesized
cggcagggaaggatctgggc

SEQ ID NO: 895 - DNA, 20 bp, Artificial Sequence
  chemically synthesized
ggaaggatctgggccagccg

SEQ ID NO: 896 - DNA, 20 bp, Artificial Sequence
  chemically synthesized
aaggatctgggccagccgta

SEQ ID NO: 897 - DNA, 20 bp, Artificial Sequence
  chemically synthesized
aggatctgggccagccgtag

SEQ ID NO: 898 - DNA, 20 bp, Artificial Sequence
  chemically synthesized
ggccagccgtagaggtgacc

SEQ ID NO: 899 - DNA, 20 bp, Artificial Sequence
  chemically synthesized
gccagccgtagaggtgaccc

SEQ ID NO: 900 - DNA, 20 bp, Artificial Sequence
  chemically synthesized
gtagaggtgacccaggccac

SEQ ID NO: 901 - DNA, 20 bp, Artificial Sequence
  chemically synthesized
gtgacccaggccacaagctg

SEQ ID NO: 902 - DNA, 20 bp, Artificial Sequence
  chemically synthesized
cccaggccacaagctgcaga

SEQ ID NO: 903 - DNA, 20 bp, Artificial Sequence
  chemically synthesized
ggccacaagctgcagacaga

SEQ ID NO: 904 - DNA, 20 bp, Artificial Sequence
  chemically synthesized
cacaagctgcagacagaaag

SEQ ID NO: 905 - DNA, 20 bp, Artificial Sequence
  chemically synthesized
gctgcagacagaaagcggca

SEQ ID NO: 906 - DNA, 20 bp, Artificial Sequence
  chemically synthesized
ctgcagacagaaagcggcac

SEQ ID NO: 907 - DNA, 20 bp, Artificial Sequence
  chemically synthesized
gacagaaagcggcacaggcc

SEQ ID NO: 908 - DNA, 20 bp, Artificial Sequence
  chemically synthesized
acagaaagcggcacaggccc

SEQ ID NO: 909 - DNA, 20 bp, Artificial Sequence
  chemically synthesized
cagaaagcggcacaggccca

SEQ ID NO: 910 - DNA, 20 bp, Artificial Sequence
  chemically synthesized
agaaagcggcacaggcccag

SEQ ID NO: 911 - DNA, 20 bp, Artificial Sequence
  chemically synthesized
aaagcggcacaggcccaggg

SEQ ID NO: 912 - DNA, 20 bp, Artificial Sequence
  chemically synthesized
agcggcacaggcccagggga

SEQ ID NO: 913 - DNA, 20 bp, Artificial Sequence
  chemically synthesized
caggcccaggggagagaatg

SEQ ID NO: 914 - DNA, 20 bp, Artificial Sequence
  chemically synthesized
aggcccaggggagagaatgc

SEQ ID NO: 915 - DNA, 20 bp, Artificial Sequence
  chemically synthesized
ccaggggagagaatgcaggt

SEQ ID NO: 916 - DNA, 20 bp, Artificial Sequence
  chemically synthesized
aggggagagaatgcaggtca

SEQ ID NO: 917 - DNA, 20 bp, Artificial Sequence
  chemically synthesized
gagagaatgcaggtcagaga

SEQ ID NO: 918 - DNA, 20 bp, Artificial Sequence
  chemically synthesized
agaatgcaggtcagagaaag

SEQ ID NO: 919 - DNA, 20 bp, Artificial Sequence
  chemically synthesized
gaatgcaggtcagagaaagc

SEQ ID NO: 920 - DNA, 20 bp, Artificial Sequence
  chemically synthesized
cagagaaagcaggacctgcc

SEQ ID NO: 921 - DNA, 20 bp, Artificial Sequence
  chemically synthesized
agagaaagcaggacctgcct

SEQ ID NO: 922 - DNA, 20 bp, Artificial Sequence
  chemically synthesized
gaaagcaggacctgcctggg

SEQ ID NO: 923 - DNA, 20 bp, Artificial Sequence
  chemically synthesized
aaagcaggacctgcctggga

SEQ ID NO: 924 - DNA, 20 bp, Artificial Sequence
  chemically synthesized
aagcaggacctgcctgggaa

SEQ ID NO: 925 - DNA, 20 bp, Artificial Sequence
  chemically synthesized
agcaggacctgcctgggaag

SEQ ID NO: 926 - DNA, 20 bp, Artificial Sequence
  chemically synthesized
acctgcctgggaaggggaaa

SEQ ID NO: 927 - DNA, 20 bp, Artificial Sequence
  chemically synthesized
tgcctgggaaggggaaacag

SEQ ID NO: 928 - DNA, 20 bp, Artificial Sequence
  chemically synthesized
gcctgggaaggggaaacagt

SEQ ID NO: 929 - DNA, 20 bp, Artificial Sequence
  chemically synthesized
gggaaggggaaacagtgggc

SEQ ID NO: 930 - DNA, 20 bp, Artificial Sequence
  chemically synthesized
gaaggggaaacagtgggcca

SEQ ID NO: 931 - DNA, 20 bp, Artificial Sequence
  chemically synthesized
aaggggaaacagtgggccag

SEQ ID NO: 932 - DNA, 20 bp, Artificial Sequence
  chemically synthesized
gggaaacagtgggccagagg

SEQ ID NO: 933 - DNA, 20 bp, Artificial Sequence
  chemically synthesized
acagtgggccagaggcggcg

SEQ ID NO: 934 - DNA, 20 bp, Artificial Sequence
  chemically synthesized
gtgggccagaggcggcgcag

SEQ ID NO: 935 - DNA, 20 bp, Artificial Sequence
  chemically synthesized
gccagaggcggcgcagaagc

SEQ ID NO: 936 - DNA, 20 bp, Artificial Sequence
  chemically synthesized
agaggcggcgcagaagccag

SEQ ID NO: 937 - DNA, 20 bp, Artificial Sequence
  chemically synthesized
aggcggcgcagaagccagta

SEQ ID NO: 938 - DNA, 20 bp, Artificial Sequence
  chemically synthesized
gcagaagccagtagagctca

SEQ ID NO: 939 - DNA, 20 bp, Artificial Sequence
  chemically synthesized
gaagccagtagagctcaaag

SEQ ID NO: 940 - DNA, 20 bp, Artificial Sequence
  chemically synthesized
cagtagagctcaaagtggtc

SEQ ID NO: 941 - DNA, 20 bp, Artificial Sequence
  chemically synthesized
agctcaaagtggtccggact

SEQ ID NO: 942 - DNA, 20 bp, Artificial Sequence
  chemically synthesized
gctcaaagtggtccggactc

SEQ ID NO: 943 - DNA, 20 bp, Artificial Sequence
  chemically synthesized
tcaaagtggtccggactcag

SEQ ID NO: 944 - DNA, 20 bp, Artificial Sequence
  chemically synthesized
aaagtggtccggactcagga

SEQ ID NO: 945 - DNA, 20 bp, Artificial Sequence
  chemically synthesized
agtggtccggactcaggaga

SEQ ID NO: 946 - DNA, 20 bp, Artificial Sequence
  chemically synthesized
gtccggactcaggagagaga

SEQ ID NO: 947 - DNA, 20 bp, Artificial Sequence
  chemically synthesized
cggactcaggagagagacgg

SEQ ID NO: 948 - DNA, 20 bp, Artificial Sequence
  chemically synthesized
caggagagagacggcagcgt

SEQ ID NO: 949 - DNA, 20 bp, Artificial Sequence
  chemically synthesized
ggagagagacggcagcgtta

SEQ ID NO: 950 - DNA, 20 bp, Artificial Sequence
  chemically synthesized
gagagagacggcagcgttag

SEQ ID NO: 951 - DNA, 20 bp, Artificial Sequence
  chemically synthesized
agagagacggcagcgttaga

SEQ ID NO: 952 - DNA, 20 bp, Artificial Sequence
  chemically synthesized
gagacggcagcgttagaggg

SEQ ID NO: 953 - DNA, 20 bp, Artificial Sequence
  chemically synthesized
gacggcagcgttagagggca

SEQ ID NO: 954 - DNA, 20 bp, Artificial Sequence
  chemically synthesized
agcgttagagggcagagttc

SEQ ID NO: 955 - DNA, 20 bp, Artificial Sequence
  chemically synthesized
gttagagggcagagttccgg

SEQ ID NO: 956 - DNA, 20 bp, Artificial Sequence
  chemically synthesized
agggcagagttccggcggca

SEQ ID NO: 957 - DNA, 20 bp, Artificial Sequence
  chemically synthesized
cagagttccggcggcacagc

SEQ ID NO: 958 - DNA, 20 bp, Artificial Sequence
  chemically synthesized
agagttccggcggcacagca

SEQ ID NO: 959 - DNA, 20 bp, Artificial Sequence
  chemically synthesized
gagttccggcggcacagcaa

SEQ ID NO: 960 - DNA, 20 bp, Artificial Sequence
  chemically synthesized
ggcggcacagcaagggcact

SEQ ID NO: 961 - DNA, 20 bp, Artificial Sequence
  chemically synthesized
gcggcacagcaagggcactc

SEQ ID NO: 962 - DNA, 20 bp, Artificial Sequence
  chemically synthesized
cggcacagcaagggcactcg

SEQ ID NO: 963 - DNA, 20 bp, Artificial Sequence
  chemically synthesized
ggcacagcaagggcactcgg

SEQ ID NO: 964 - DNA, 20 bp, Artificial Sequence
  chemically synthesized
cagcaagggcactcgggggc

SEQ ID NO: 965 - DNA, 20 bp, Artificial Sequence
  chemically synthesized
gcaagggcactcgggggcga

SEQ ID NO: 966 - DNA, 20 bp, Artificial Sequence
  chemically synthesized
caagggcactcgggggcgag

SEQ ID NO: 967 - DNA, 20 bp, Artificial Sequence
  chemically synthesized
agggcactcgggggcgagag

SEQ ID NO: 968 - DNA, 20 bp, Artificial Sequence
  chemically synthesized
gggcactcgggggcgagagg

SEQ ID NO: 969 - DNA, 20 bp, Artificial Sequence
  chemically synthesized
ggcactcgggggcgagagga

SEQ ID NO: 970 - DNA, 20 bp, Artificial Sequence
  chemically synthesized
actcgggggcgagaggaggg

SEQ ID NO: 971 - DNA, 20 bp, Artificial Sequence
  chemically synthesized
ggcgagaggagggcagcgca

SEQ ID NO: 972 - DNA, 20 bp, Artificial Sequence
  chemically synthesized
agggcagcgcaaagtgacaa

SEQ ID NO: 973 - DNA, 20 bp, Artificial Sequence
  chemically synthesized
cagcgcaaagtgacaatggc

SEQ ID NO: 974 - DNA, 20 bp, Artificial Sequence
  chemically synthesized
agcgcaaagtgacaatggcc

SEQ ID NO: 975 - DNA, 20 bp, Artificial Sequence
  chemically synthesized
gcgcaaagtgacaatggcca

SEQ ID NO: 976 - DNA, 20 bp, Artificial Sequence
  chemically synthesized
aaagtgacaatggccagggc

SEQ ID NO: 977 - DNA, 20 bp, Artificial Sequence
  chemically synthesized
aagtgacaatggccagggcc

SEQ ID NO: 978 - DNA, 20 bp, Artificial Sequence
  chemically synthesized
tgacaatggccagggccagg

SEQ ID NO: 979 - DNA, 20 bp, Artificial Sequence
  chemically synthesized
aatggccagggccaggcaga

SEQ ID NO: 980 - DNA, 20 bp, Artificial Sequence
  chemically synthesized
ccagggccaggcagatagac

SEQ ID NO: 981 - DNA, 20 bp, Artificial Sequence
  chemically synthesized
ccaggcagatagaccagact

SEQ ID NO: 982 - DNA, 20 bp, Artificial Sequence
  chemically synthesized
agatagaccagactgagcta

SEQ ID NO: 983 - DNA, 20 bp, Artificial Sequence
  chemically synthesized
gatagaccagactgagctat

SEQ ID NO: 984 - DNA, 20 bp, Artificial Sequence
  chemically synthesized
tagaccagactgagctatgg

SEQ ID NO: 985 - DNA, 20 bp, Artificial Sequence
  chemically synthesized
ccagactgagctatgggagc

SEQ ID NO: 986 - DNA, 20 bp, Artificial Sequence
  chemically synthesized
ctgagctatgggagctggct

SEQ ID NO: 987 - DNA, 20 bp, Artificial Sequence
  chemically synthesized
tgagctatgggagctggctc

SEQ ID NO: 988 - DNA, 20 bp, Artificial Sequence
  chemically synthesized
tatgggagctggctcaggtt

SEQ ID NO: 989 - DNA, 20 bp, Artificial Sequence
  chemically synthesized
atgggagctggctcaggttc

SEQ ID NO: 990 - DNA, 20 bp, Artificial Sequence
  chemically synthesized
gggagctggctcaggttcag

SEQ ID NO: 991 - DNA, 20 bp, Artificial Sequence
  chemically synthesized
gagctggctcaggttcagga

SEQ ID NO: 992 - DNA, 20 bp, Artificial Sequence
  chemically synthesized
agctggctcaggttcaggag

SEQ ID NO: 993 - DNA, 20 bp, Artificial Sequence
  chemically synthesized
gctggctcaggttcaggaga

SEQ ID NO: 994 - DNA, 20 bp, Artificial Sequence
  chemically synthesized
ggctcaggttcaggagaggg

SEQ ID NO: 995 - DNA, 20 bp, Artificial Sequence
  chemically synthesized
gctcaggttcaggagagggc

SEQ ID NO: 996 - DNA, 20 bp, Artificial Sequence
  chemically synthesized
ctcaggttcaggagagggca

SEQ ID NO: 997 - DNA, 20 bp, Artificial Sequence
  chemically synthesized
aggttcaggagagggcaggg

SEQ ID NO: 998 - DNA, 20 bp, Artificial Sequence
  chemically synthesized
ggttcaggagagggcagggc

SEQ ID NO: 999 - DNA, 20 bp, Artificial Sequence
  chemically synthesized
gttcaggagagggcagggca

SEQ ID NO: 1000 - DNA, 20 bp, Artificial Sequence
  chemically synthesized
caggagagggcagggcaggg

SEQ ID NO: 1001 - DNA, 20 bp, Artificial Sequence
  chemically synthesized
aggagagggcagggcaggga

SEQ ID NO: 1002 - DNA, 20 bp, Artificial Sequence
  chemically synthesized
gagagggcagggcagggaag

SEQ ID NO: 1003 - DNA, 20 bp, Artificial Sequence
  chemically synthesized
gcagggcagggaaggagaca

SEQ ID NO: 1004 - DNA, 20 bp, Artificial Sequence
  chemically synthesized
gcagggaaggagacaaagtc

SEQ ID NO: 1005 - DNA, 20 bp, Artificial Sequence
  chemically synthesized
cagggaaggagacaaagtcc

SEQ ID NO: 1006 - DNA, 20 bp, Artificial Sequence
  chemically synthesized
aaggagacaaagtccaggac

SEQ ID NO: 1007 - DNA, 20 bp, Artificial Sequence
  chemically synthesized
agacaaagtccaggaccggc

SEQ ID NO: 1008 - DNA, 20 bp, Artificial Sequence
  chemically synthesized
acaaagtccaggaccggctg

SEQ ID NO: 1009 - DNA, 20 bp, Artificial Sequence
  chemically synthesized
caaagtccaggaccggctgg

SEQ ID NO: 1010 - DNA, 20 bp, Artificial Sequence
  chemically synthesized
aaagtccaggaccggctgga

SEQ ID NO: 1011 - DNA, 20 bp, Artificial Sequence
  chemically synthesized
aagtccaggaccggctggag

SEQ ID NO: 1012 - DNA, 20 bp, Artificial Sequence
  chemically synthesized
cggctggaggggctcaacat

SEQ ID NO: 1013 - DNA, 20 bp, Artificial Sequence
  chemically synthesized
ctggaggggctcaacatcgg

SEQ ID NO: 1014 - DNA, 20 bp, Artificial Sequence
  chemically synthesized
ggaggggctcaacatcggaa

SEQ ID NO: 1015 - DNA, 20 bp, Artificial Sequence
  chemically synthesized
gaggggctcaacatcggaag

SEQ ID NO: 1016 - DNA, 20 bp, Artificial Sequence
  chemically synthesized
aggggctcaacatcggaaga

SEQ ID NO: 1017 - DNA, 20 bp, Artificial Sequence
  chemically synthesized
ggggctcaacatcggaagag

SEQ ID NO: 1018 - DNA, 20 bp, Artificial Sequence
  chemically synthesized
gctcaacatcggaagagggg

SEQ ID NO: 1019 - DNA, 20 bp, Artificial Sequence
  chemically synthesized
acatcggaagaggggaagtc

SEQ ID NO: 1020 - DNA, 20 bp, Artificial Sequence
  chemically synthesized
catcggaagaggggaagtcg

SEQ ID NO: 1021 - DNA, 20 bp, Artificial Sequence
  chemically synthesized
atcggaagaggggaagtcga

SEQ ID NO: 1022 - DNA, 20 bp, Artificial Sequence
  chemically synthesized
cggaagaggggaagtcgagg

SEQ ID NO: 1023 - DNA, 20 bp, Artificial Sequence
  chemically synthesized
ggaagaggggaagtcgaggg

SEQ ID NO: 1024 - DNA, 20 bp, Artificial Sequence
  chemically synthesized
gaagaggggaagtcgaggga

SEQ ID NO: 1025 - DNA, 20 bp, Artificial Sequence
  chemically synthesized
aggggaagtcgagggaggga

SEQ ID NO: 1026 - DNA, 20 bp, Artificial Sequence
  chemically synthesized
gaagtcgagggagggatggt

SEQ ID NO: 1027 - DNA, 20 bp, Artificial Sequence
  chemically synthesized
aagtcgagggagggatggta

SEQ ID NO: 1028 - DNA, 20 bp, Artificial Sequence
  chemically synthesized
gtcgagggagggatggtaag

SEQ ID NO: 1029 - DNA, 20 bp, Artificial Sequence
  chemically synthesized
tcgagggagggatggtaagg

SEQ ID NO: 1030 - DNA, 20 bp, Artificial Sequence
  chemically synthesized
ggatggtaaggaggactgca

SEQ ID NO: 1031 - DNA, 20 bp, Artificial Sequence
  chemically synthesized
gatggtaaggaggactgcat

SEQ ID NO: 1032 - DNA, 20 bp, Artificial Sequence
  chemically synthesized
gtaaggaggactgcatgggt

SEQ ID NO: 1033 - DNA, 20 bp, Artificial Sequence
  chemically synthesized
gaggactgcatgggtcagca

SEQ ID NO: 1034 - DNA, 20 bp, Artificial Sequence
  chemically synthesized
aggactgcatgggtcagcac

SEQ ID NO: 1035 - DNA, 20 bp, Artificial Sequence
  chemically synthesized
tgggtcagcacaggctgcca

SEQ ID NO: 1036 - DNA, 20 bp, Artificial Sequence
  chemically synthesized
tcagcacaggctgccaaagc

SEQ ID NO: 1037 - DNA, 20 bp, Artificial Sequence
  chemically synthesized
cagcacaggctgccaaagcc

SEQ ID NO: 1038 - DNA, 20 bp, Artificial Sequence
  chemically synthesized
agcacaggctgccaaagcca

SEQ ID NO: 1039 - DNA, 20 bp, Artificial Sequence
  chemically synthesized
caggctgccaaagccagggc

SEQ ID NO: 1040 - DNA, 20 bp, Artificial Sequence
  chemically synthesized
gccaaagccagggccagtta

SEQ ID NO: 1041 - DNA, 20 bp, Artificial Sequence
  chemically synthesized
cagttaaagcgactccaatg

SEQ ID NO: 1042 - DNA, 20 bp, Artificial Sequence
  chemically synthesized
ttaaagcgactccaatgcgg

SEQ ID NO: 1043 - DNA, 20 bp, Artificial Sequence
  chemically synthesized
aaagcgactccaatgcggaa

SEQ ID NO: 1044 - DNA, 20 bp, Artificial Sequence
  chemically synthesized
agcgactccaatgcggaaga

SEQ ID NO: 1045 - DNA, 20 bp, Artificial Sequence
  chemically synthesized
gactccaatgcggaagagag

SEQ ID NO: 1046 - DNA, 20 bp, Artificial Sequence
  chemically synthesized
actccaatgcggaagagagt

SEQ ID NO: 1047 - DNA, 20 bp, Artificial Sequence
  chemically synthesized
atgcggaagagagtaggtcg

SEQ ID NO: 1048 - DNA, 20 bp, Artificial Sequence
  chemically synthesized
tgcggaagagagtaggtcga

SEQ ID NO: 1049 - DNA, 20 bp, Artificial Sequence
  chemically synthesized
gcggaagagagtaggtcgaa

SEQ ID NO: 1050 - DNA, 20 bp, Artificial Sequence
  chemically synthesized
cggaagagagtaggtcgaag

SEQ ID NO: 1051 - DNA, 20 bp, Artificial Sequence
  chemically synthesized
gagagtaggtcgaaggggaa

SEQ ID NO: 1052 - DNA, 20 bp, Artificial Sequence
  chemically synthesized
gtaggtcgaaggggaatggt

SEQ ID NO: 1053 - DNA, 20 bp, Artificial Sequence
  chemically synthesized
taggtcgaaggggaatggta

SEQ ID NO: 1054 - DNA, 20 bp, Artificial Sequence
  chemically synthesized
ggtcgaaggggaatggtaag

SEQ ID NO: 1055 - DNA, 20 bp, Artificial Sequence
  chemically synthesized
gtcgaaggggaatggtaagg

SEQ ID NO: 1056 - DNA, 20 bp, Artificial Sequence
  chemically synthesized
aggggaatggtaaggaggcc

SEQ ID NO: 1057 - DNA, 20 bp, Artificial Sequence
  chemically synthesized
ggggaatggtaaggaggcct

SEQ ID NO: 1058 - DNA, 20 bp, Artificial Sequence
  chemically synthesized
gggaatggtaaggaggcctg

SEQ ID NO: 1059 - DNA, 20 bp, Artificial Sequence
  chemically synthesized
aatggtaaggaggcctgggg

SEQ ID NO: 1060 - DNA, 20 bp, Artificial Sequence
  chemically synthesized
tggtaaggaggcctggggca

SEQ ID NO: 1061 - DNA, 20 bp, Artificial Sequence
  chemically synthesized
taaggaggcctggggcagag

SEQ ID NO: 1062 - DNA, 20 bp, Artificial Sequence
  chemically synthesized
gaggcctggggcagagtggt

SEQ ID NO: 1063 - DNA, 20 bp, Artificial Sequence
  chemically synthesized
ctggggcagagtggtcagca

SEQ ID NO: 1064 - DNA, 20 bp, Artificial Sequence
  chemically synthesized
ggggcagagtggtcagcaca

SEQ ID NO: 1065 - DNA, 20 bp, Artificial Sequence
  chemically synthesized
gcagagtggtcagcacagag

SEQ ID NO: 1066 - DNA, 20 bp, Artificial Sequence
  chemically synthesized
gtggtcagcacagagtggct

SEQ ID NO: 1067 - DNA, 20 bp, Artificial Sequence
  chemically synthesized
cagcacagagtggctaagcc

SEQ ID NO: 1068 - DNA, 20 bp, Artificial Sequence
  chemically synthesized
agcacagagtggctaagccc

SEQ ID NO: 1069 - DNA, 20 bp, Artificial Sequence
  chemically synthesized
gcacagagtggctaagccca

SEQ ID NO: 1070 - DNA, 20 bp, Artificial Sequence
  chemically synthesized
agagtggctaagcccagggc

SEQ ID NO: 1071 - DNA, 20 bp, Artificial Sequence
  chemically synthesized
gctaagcccagggccagttg

SEQ ID NO: 1072 - DNA, 20 bp, Artificial Sequence
  chemically synthesized
aagcccagggccagttgaag

SEQ ID NO: 1073 - DNA, 20 bp, Artificial Sequence
  chemically synthesized
cagttgaagcggctccaatt

SEQ ID NO: 1074 - DNA, 20 bp, Artificial Sequence
  chemically synthesized
ttgaagcggctccaattcgg

SEQ ID NO: 1075 - DNA, 20 bp, Artificial Sequence
  chemically synthesized
aagcggctccaattcggaag

SEQ ID NO: 1076 - DNA, 20 bp, Artificial Sequence
  chemically synthesized
agcggctccaattcggaagt

SEQ ID NO: 1077 - DNA, 20 bp, Artificial Sequence
  chemically synthesized
gcggctccaattcggaagtg

SEQ ID NO: 1078 - DNA, 20 bp, Artificial Sequence
  chemically synthesized
gctccaattcggaagtgggg

SEQ ID NO: 1079 - DNA, 20 bp, Artificial Sequence
  chemically synthesized
attcggaagtggggtggtcg

SEQ ID NO: 1080 - DNA, 20 bp, Artificial Sequence
  chemically synthesized
ttcggaagtggggtggtcga

SEQ ID NO: 1081 - DNA, 20 bp, Artificial Sequence
  chemically synthesized
tcggaagtggggtggtcgaa

SEQ ID NO: 1082 - DNA, 20 bp, Artificial Sequence
  chemically synthesized
cggaagtggggtggtcgaag

SEQ ID NO: 1083 - DNA, 20 bp, Artificial Sequence
  chemically synthesized
gtggggtggtcgaaggggaa

SEQ ID NO: 1084 - DNA, 20 bp, Artificial Sequence
  chemically synthesized
ggtggtcgaaggggaatggt

SEQ ID NO: 1085 - DNA, 20 bp, Artificial Sequence
  chemically synthesized
gtggtcgaaggggaatggta

SEQ ID NO: 1086 - DNA, 20 bp, Artificial Sequence
  chemically synthesized
tggtcgaaggggaatggtaa

SEQ ID NO: 1087 - DNA, 20 bp, Artificial Sequence
  chemically synthesized
ggtcgaaggggaatggtaag

SEQ ID NO: 1088 - DNA, 20 bp, Artificial Sequence
  chemically synthesized
gtcgaaggggaatggtaagg

SEQ ID NO: 1089 - DNA, 20 bp, Artificial Sequence
  chemically synthesized
aggggaatggtaagggggac

SEQ ID NO: 1090 - DNA, 20 bp, Artificial Sequence
  chemically synthesized
ggggaatggtaagggggact

SEQ ID NO: 1091 - DNA, 20 bp, Artificial Sequence
  chemically synthesized
aatggtaagggggactggga

SEQ ID NO: 1092 - DNA, 20 bp, Artificial Sequence
  chemically synthesized
atggtaagggggactgggac

SEQ ID NO: 1093 - DNA, 20 bp, Artificial Sequence
  chemically synthesized
tggtaagggggactgggacg

SEQ ID NO: 1094 - DNA, 20 bp, Artificial Sequence
  chemically synthesized
gggggactgggacggggtgt

SEQ ID NO: 1095 - DNA, 20 bp, Artificial Sequence
  chemically synthesized
actgggacggggtgtcagca

SEQ ID NO: 1096 - DNA, 20 bp, Artificial Sequence
  chemically synthesized
ctgggacggggtgtcagcat

SEQ ID NO: 1097 - DNA, 20 bp, Artificial Sequence
  chemically synthesized
tgggacggggtgtcagcata

SEQ ID NO: 1098 - DNA, 20 bp, Artificial Sequence
  chemically synthesized
gacggggtgtcagcataggg

SEQ ID NO: 1099 - DNA, 20 bp, Artificial Sequence
  chemically synthesized
ggtgtcagcatagggtggca

SEQ ID NO: 1100 - DNA, 20 bp, Artificial Sequence
  chemically synthesized
cagcatagggtggcaaagcc

SEQ ID NO: 1101 - DNA, 20 bp, Artificial Sequence
  chemically synthesized
agcatagggtggcaaagccc

SEQ ID NO: 1102 - DNA, 20 bp, Artificial Sequence
  chemically synthesized
gcatagggtggcaaagccca

SEQ ID NO: 1103 - DNA, 20 bp, Artificial Sequence
  chemically synthesized
agggtggcaaagcccagggc

SEQ ID NO: 1104 - DNA, 20 bp, Artificial Sequence
  chemically synthesized
gggtggcaaagcccagggcc

SEQ ID NO: 1105 - DNA, 20 bp, Artificial Sequence
  chemically synthesized
aagcccagggccaggaacga

SEQ ID NO: 1106 - DNA, 20 bp, Artificial Sequence
  chemically synthesized
agcccagggccaggaacgac

SEQ ID NO: 1107 - DNA, 20 bp, Artificial Sequence
  chemically synthesized
gcccagggccaggaacgacg

SEQ ID NO: 1108 - DNA, 20 bp, Artificial Sequence
  chemically synthesized
cagggccaggaacgacgggg

SEQ ID NO: 1109 - DNA, 20 bp, Artificial Sequence
  chemically synthesized
caggaacgacggggcggatc

SEQ ID NO: 1110 - DNA, 20 bp, Artificial Sequence
  chemically synthesized
acgacggggcggatcgagac

SEQ ID NO: 1111 - DNA, 20 bp, Artificial Sequence
  chemically synthesized
gggcggatcgagactggcaa

SEQ ID NO: 1112 - DNA, 20 bp, Artificial Sequence
  chemically synthesized
ggcggatcgagactggcaac

SEQ ID NO: 1113 - DNA, 20 bp, Artificial Sequence
  chemically synthesized
gcggatcgagactggcaacg

SEQ ID NO: 1114 - DNA, 20 bp, Artificial Sequence
  chemically synthesized
gatcgagactggcaacgggg

SEQ ID NO: 1115 - DNA, 20 bp, Artificial Sequence
  chemically synthesized
atcgagactggcaacgggga

SEQ ID NO: 1116 - DNA, 20 bp, Artificial Sequence
  chemically synthesized
cgagactggcaacggggaag

SEQ ID NO: 1117 - DNA, 20 bp, Artificial Sequence
  chemically synthesized
gagactggcaacggggaagg

SEQ ID NO: 1118 - DNA, 20 bp, Artificial Sequence
  chemically synthesized
aacggggaaggaggatgccc

SEQ ID NO: 1119 - DNA, 20 bp, Artificial Sequence
  chemically synthesized
acggggaaggaggatgcccc

SEQ ID NO: 1120 - DNA, 20 bp, Artificial Sequence
  chemically synthesized
gggaaggaggatgccccagg

SEQ ID NO: 1121 - DNA, 20 bp, Artificial Sequence
  chemically synthesized
ggaggatgccccaggtggcg

SEQ ID NO: 1122 - DNA, 20 bp, Artificial Sequence
  chemically synthesized
ggatgccccaggtggcgcag

SEQ ID NO: 1123 - DNA, 20 bp, Artificial Sequence
  chemically synthesized
atgccccaggtggcgcagca

SEQ ID NO: 1124 - DNA, 20 bp, Artificial Sequence
  chemically synthesized
tgccccaggtggcgcagcag

SEQ ID NO: 1125 - DNA, 20 bp, Artificial Sequence
  chemically synthesized
gccccaggtggcgcagcaga

SEQ ID NO: 1126 - DNA, 20 bp, Artificial Sequence
  chemically synthesized
ccaggtggcgcagcagaggg

SEQ ID NO: 1127 - DNA, 20 bp, Artificial Sequence
  chemically synthesized
ggcgcagcagagggtggacc

SEQ ID NO: 1128 - DNA, 20 bp, Artificial Sequence
  chemically synthesized
gcagagggtggacctggccc

SEQ ID NO: 1129 - DNA, 20 bp, Artificial Sequence
  chemically synthesized
cagagggtggacctggcccc

SEQ ID NO: 1130 - DNA, 20 bp, Artificial Sequence
  chemically synthesized
gagggtggacctggccccgg

SEQ ID NO: 1131 - DNA, 20 bp, Artificial Sequence
  chemically synthesized
gacctggccccgggagacgc

SEQ ID NO: 1132 - DNA, 20 bp, Artificial Sequence
  chemically synthesized
acctggccccgggagacgcc

SEQ ID NO: 1133 - DNA, 20 bp, Artificial Sequence
  chemically synthesized
tggccccgggagacgccggg

SEQ ID NO: 1134 - DNA, 20 bp, Artificial Sequence
  chemically synthesized
ggccccgggagacgccgggc

SEQ ID NO: 1135 - DNA, 20 bp, Artificial Sequence
  chemically synthesized
gccccgggagacgccgggcg

SEQ ID NO: 1136 - DNA, 20 bp, Artificial Sequence
  chemically synthesized
ccccgggagacgccgggcgg

SEQ ID NO: 1137 - DNA, 20 bp, Artificial Sequence
  chemically synthesized
cccgggagacgccgggcggg

SEQ ID NO: 1138 - DNA, 20 bp, Artificial Sequence
  chemically synthesized
ccgggcggggggcgctgacc

SEQ ID NO: 1139 - DNA, 20 bp, Artificial Sequence
  chemically synthesized
cggggggcgctgacctggtg

SEQ ID NO: 1140 - DNA, 20 bp, Artificial Sequence
  chemically synthesized
ggggggcgctgacctggtgc

SEQ ID NO: 1141 - DNA, 20 bp, Artificial Sequence
  chemically synthesized
gggggcgctgacctggtgca

SEQ ID NO: 1142 - DNA, 20 bp, Artificial Sequence
  chemically synthesized
gtgcagggcgctgataccgt

SEQ ID NO: 1143 - DNA, 20 bp, Artificial Sequence
  chemically synthesized
ggcgctgataccgtcggcgt

SEQ ID NO: 1144 - DNA, 20 bp, Artificial Sequence
  chemically synthesized
gctgataccgtcggcgttgg

SEQ ID NO: 1145 - DNA, 20 bp, Artificial Sequence
  chemically synthesized
tgataccgtcggcgttggtg

SEQ ID NO: 1146 - DNA, 20 bp, Artificial Sequence
  chemically synthesized
ccgtcggcgttggtggagtc

SEQ ID NO: 1147 - DNA, 20 bp, Artificial Sequence
  chemically synthesized
ggcgttggtggagtccagca

SEQ ID NO: 1148 - DNA, 20 bp, Artificial Sequence
  chemically synthesized
tggtggagtccagcacggcg

SEQ ID NO: 1149 - DNA, 20 bp, Artificial Sequence
  chemically synthesized
ggtggagtccagcacggcgc

SEQ ID NO: 1150 - DNA, 20 bp, Artificial Sequence
  chemically synthesized
ggagtccagcacggcgcggg

SEQ ID NO: 1151 - DNA, 20 bp, Artificial Sequence
  chemically synthesized
gagtccagcacggcgcgggc

SEQ ID NO: 1152 - DNA, 20 bp, Artificial Sequence
  chemically synthesized
tccagcacggcgcgggcggg

SEQ ID NO: 1153 - DNA, 20 bp, Artificial Sequence
  chemically synthesized
agcacggcgcgggcgggcgg

SEQ ID NO: 1154 - DNA, 20 bp, Artificial Sequence
  chemically synthesized
ggcgcgggcgggcggcggcg

SEQ ID NO: 1155 - DNA, 20 bp, Artificial Sequence
  chemically synthesized
gcgggcgggcggcggcgcgg

SEQ ID NO: 1156 - DNA, 20 bp, Artificial Sequence
  chemically synthesized
cgggcgggcggcggcgcggc

SEQ ID NO: 1157 - DNA, 20 bp, Artificial Sequence
  chemically synthesized
gggcgggcggcggcgcggcg

SEQ ID NO: 1158 - DNA, 20 bp, Artificial Sequence
  chemically synthesized
ggcggcggcgcggcggggtc

SEQ ID NO: 1159 - DNA, 20 bp, Artificial Sequence
  chemically synthesized
cggcgcggcggggtcgagct

SEQ ID NO: 1160 - DNA, 20 bp, Artificial Sequence
  chemically synthesized
ggcggggtcgagctcggcgc

SEQ ID NO: 1161 - DNA, 20 bp, Artificial Sequence
  chemically synthesized
gcggggtcgagctcggcgcc

SEQ ID NO: 1162 - DNA, 20 bp, Artificial Sequence
  chemically synthesized
cggggtcgagctcggcgccg

SEQ ID NO: 1163 - DNA, 20 bp, Artificial Sequence
  chemically synthesized
gtcgagctcggcgccggggc

SEQ ID NO: 1164 - DNA, 20 bp, Artificial Sequence
  chemically synthesized
tcgagctcggcgccggggcc

SEQ ID NO: 1165 - DNA, 20 bp, Artificial Sequence
  chemically synthesized
cgagctcggcgccggggcca

SEQ ID NO: 1166 - DNA, 20 bp, Artificial Sequence
  chemically synthesized
ctcggcgccggggccagggt

SEQ ID NO: 1167 - DNA, 20 bp, Artificial Sequence
  chemically synthesized
ggcgccggggccagggtcgg

SEQ ID NO: 1168 - DNA, 20 bp, Artificial Sequence
  chemically synthesized
gggccagggtcggcggcgcg

SEQ ID NO: 1169 - DNA, 20 bp, Artificial Sequence
  chemically synthesized
gggtcggcggcgcgcagcat

SEQ ID NO: 1170 - DNA, 20 bp, Artificial Sequence
  chemically synthesized
agcatcagacgcgcctcgtc

SEQ ID NO: 1171 - DNA, 20 bp, Artificial Sequence
  chemically synthesized
gcatcagacgcgcctcgtcc

SEQ ID NO: 1172 - DNA, 20 bp, Artificial Sequence
  chemically synthesized
cgtccaggtcgccgcccgca

SEQ ID NO: 1173 - DNA, 20 bp, Artificial Sequence
  chemically synthesized
gtccaggtcgccgcccgcac

SEQ ID NO: 1174 - DNA, 20 bp, Artificial Sequence
  chemically synthesized
tcgccgcccgcacaggccgc

SEQ ID NO: 1175 - DNA, 20 bp, Artificial Sequence
  chemically synthesized
cgccgcccgcacaggccgcc

SEQ ID NO: 1176 - DNA, 20 bp, Artificial Sequence
  chemically synthesized
cgcacaggccgccaggaact

SEQ ID NO: 1177 - DNA, 20 bp, Artificial Sequence
  chemically synthesized
acaggccgccaggaactcgg

SEQ ID NO: 1178 - DNA, 20 bp, Artificial Sequence
  chemically synthesized
ggaactcggcggcgcgctcg

SEQ ID NO: 1179 - DNA, 20 bp, Artificial Sequence
  chemically synthesized
actcggcggcgcgctcgaag

SEQ ID NO: 1180 - DNA, 20 bp, Artificial Sequence
  chemically synthesized
ggcggcgcgctcgaagcgga

SEQ ID NO: 1181 - DNA, 20 bp, Artificial Sequence
  chemically synthesized
cgcgctcgaagcggacggtg

SEQ ID NO: 1182 - DNA, 20 bp, Artificial Sequence
  chemically synthesized
gcgctcgaagcggacggtgc

SEQ ID NO: 1183 - DNA, 20 bp, Artificial Sequence
  chemically synthesized
cgaagcggacggtgcgggcg

SEQ ID NO: 1184 - DNA, 20 bp, Artificial Sequence
  chemically synthesized
ggtgcgggcgcggcgctctc

SEQ ID NO: 1185 - DNA, 20 bp, Artificial Sequence
  chemically synthesized
gtgcgggcgcggcgctctcc

SEQ ID NO: 1186 - DNA, 20 bp, Artificial Sequence
  chemically synthesized
tgcgggcgcggcgctctccg

SEQ ID NO: 1187 - DNA, 20 bp, Artificial Sequence
  chemically synthesized
ggcgcggcgctctccggggc

SEQ ID NO: 1188 - DNA, 20 bp, Artificial Sequence
  chemically synthesized
gcgcggcgctctccggggcc

SEQ ID NO: 1189 - DNA, 20 bp, Artificial Sequence
  chemically synthesized
gcgctctccggggccaggct

SEQ ID NO: 1190 - DNA, 20 bp, Artificial Sequence
  chemically synthesized
gcccgcgccccccactgccg

SEQ ID NO: 1191 - DNA, 20 bp, Artificial Sequence
  chemically synthesized
gctgctcccgtcgccgctcc

SEQ ID NO: 1192 - DNA, 20 bp, Artificial Sequence
  chemically synthesized
ctgctcccgtcgccgctccc

SEQ ID NO: 1193 - DNA, 20 bp, Artificial Sequence
  chemically synthesized
ctcccgtcgccgctcccggg

SEQ ID NO: 1194 - DNA, 20 bp, Artificial Sequence
  chemically synthesized
gcagccgccgccgccgcccc

SEQ ID NO: 1195 - DNA, 20 bp, Artificial Sequence
  chemically synthesized
cagccgccgccgccgccccc

SEQ ID NO: 1196 - DNA, 20 bp, Artificial Sequence
  chemically synthesized
cgccgccgccgcccccgggc

SEQ ID NO: 1197 - DNA, 20 bp, Artificial Sequence
  chemically synthesized
gccgcccccgggccagccgc

SEQ ID NO: 1198 - DNA, 20 bp, Artificial Sequence
  chemically synthesized
ccgcccccgggccagccgcc

SEQ ID NO: 1199 - DNA, 20 bp, Artificial Sequence
  chemically synthesized
agccgccgggccatcctctc

SEQ ID NO: 1200 - DNA, 20 bp, Artificial Sequence
  chemically synthesized
catcgcaccgcccgcccgcc

SEQ ID NO: 1201 - DNA, 20 bp, Artificial Sequence
  chemically synthesized
gcaccgcccgcccgcccagc

SEQ ID NO: 1202 - DNA, 20 bp, Artificial Sequence
  chemically synthesized
cgcccgcccgcccagcgagc

SEQ ID NO: 1203 - DNA, 20 bp, Artificial Sequence
  chemically synthesized
cgcccgcccagcgagcgagc

SEQ ID NO: 1204 - DNA, 20 bp, Artificial Sequence
  chemically synthesized
ccagcgagcgagcgagcgcc

SEQ ID NO: 1205 - DNA, 20 bp, Artificial Sequence
  chemically synthesized
tggtggcggcggttggggct

SEQ ID NO: 1206 - DNA, 20 bp, Artificial Sequence
  chemically synthesized
ctcggcgctcgctcgctcgc

SEQ ID NO: 1207 - DNA, 20 bp, Artificial Sequence
  chemically synthesized
tcggcgctcgctcgctcgct

SEQ ID NO: 1208 - DNA, 20 bp, Artificial Sequence
  chemically synthesized
gcgctcgctcgctcgctggg

SEQ ID NO: 1209 - DNA, 20 bp, Artificial Sequence
  chemically synthesized
cgctcgctcgctcgctgggc

SEQ ID NO: 1210 - DNA, 20 bp, Artificial Sequence
  chemically synthesized
tcgctcgctcgctgggcggg

SEQ ID NO: 1211 - DNA, 20 bp, Artificial Sequence
  chemically synthesized
cgctcgctcgctgggcgggc

SEQ ID NO: 1212 - DNA, 20 bp, Artificial Sequence
  chemically synthesized
tcgctcgctgggcgggcggg

SEQ ID NO: 1213 - DNA, 20 bp, Artificial Sequence
  chemically synthesized
cgggcgggcggtgcgatgtc

SEQ ID NO: 1214 - DNA, 20 bp, Artificial Sequence
  chemically synthesized
ggcgggcggtgcgatgtccg

SEQ ID NO: 1215 - DNA, 20 bp, Artificial Sequence
  chemically synthesized
cgggcggtgcgatgtccgga

SEQ ID NO: 1216 - DNA, 20 bp, Artificial Sequence
  chemically synthesized
gggcggtgcgatgtccggag

SEQ ID NO: 1217 - DNA, 20 bp, Artificial Sequence
  chemically synthesized
ggtgcgatgtccggagagga

SEQ ID NO: 1218 - DNA, 20 bp, Artificial Sequence
  chemically synthesized
gatgtccggagaggatggcc

SEQ ID NO: 1219 - DNA, 20 bp, Artificial Sequence
  chemically synthesized
gtccggagaggatggcccgg

SEQ ID NO: 1220 - DNA, 20 bp, Artificial Sequence
  chemically synthesized
ggagaggatggcccggcggc

SEQ ID NO: 1221 - DNA, 20 bp, Artificial Sequence
  chemically synthesized
ggatggcccggcggctggcc

SEQ ID NO: 1222 - DNA, 20 bp, Artificial Sequence
  chemically synthesized
gatggcccggcggctggccc

SEQ ID NO: 1223 - DNA, 20 bp, Artificial Sequence
  chemically synthesized
atggcccggcggctggcccg

SEQ ID NO: 1224 - DNA, 20 bp, Artificial Sequence
  chemically synthesized
tggcccggcggctggcccgg

SEQ ID NO: 1225 - DNA, 20 bp, Artificial Sequence
  chemically synthesized
cccggcggctggcccggggg

SEQ ID NO: 1226 - DNA, 20 bp, Artificial Sequence
  chemically synthesized
ggcggctggcccgggggcgg

SEQ ID NO: 1227 - DNA, 20 bp, Artificial Sequence
  chemically synthesized
ggctggcccgggggcggcgg

SEQ ID NO: 1228 - DNA, 20 bp, Artificial Sequence
  chemically synthesized
tggcccgggggcggcggcgg

SEQ ID NO: 1229 - DNA, 20 bp, Artificial Sequence
  chemically synthesized
gggcggcggcggcggctgcc

SEQ ID NO: 1230 - DNA, 20 bp, Artificial Sequence
  chemically synthesized
ggcggcggcggcggctgccc

SEQ ID NO: 1231 - DNA, 20 bp, Artificial Sequence
  chemically synthesized
cggcggcggcggctgcccgg

SEQ ID NO: 1232 - DNA, 20 bp, Artificial Sequence
  chemically synthesized
cggcggcggctgcccgggag

SEQ ID NO: 1233 - DNA, 20 bp, Artificial Sequence
  chemically synthesized
cggctgcccgggagcggcga

SEQ ID NO: 1234 - DNA, 20 bp, Artificial Sequence
  chemically synthesized
ggctgcccgggagcggcgac

SEQ ID NO: 1235 - DNA, 20 bp, Artificial Sequence
  chemically synthesized
ctgcccgggagcggcgacgg

SEQ ID NO: 1236 - DNA, 20 bp, Artificial Sequence
  chemically synthesized
cccgggagcggcgacgggag

SEQ ID NO: 1237 - DNA, 20 bp, Artificial Sequence
  chemically synthesized
agcggcgacgggagcagctg

SEQ ID NO: 1238 - DNA, 20 bp, Artificial Sequence
  chemically synthesized
ggcgacgggagcagctgcgg

SEQ ID NO: 1239 - DNA, 20 bp, Artificial Sequence
  chemically synthesized
gacgggagcagctgcggcag

SEQ ID NO: 1240 - DNA, 20 bp, Artificial Sequence
  chemically synthesized
acgggagcagctgcggcagt

SEQ ID NO: 1241 - DNA, 20 bp, Artificial Sequence
  chemically synthesized
cgggagcagctgcggcagtg

SEQ ID NO: 1242 - DNA, 20 bp, Artificial Sequence
  chemically synthesized
gggagcagctgcggcagtgg

SEQ ID NO: 1243 - DNA, 20 bp, Artificial Sequence
  chemically synthesized
ggagcagctgcggcagtggg

SEQ ID NO: 1244 - DNA, 20 bp, Artificial Sequence
  chemically synthesized
agctgcggcagtggggggcg

SEQ ID NO: 1245 - DNA, 20 bp, Artificial Sequence
  chemically synthesized
gctgcggcagtggggggcgc

SEQ ID NO: 1246 - DNA, 20 bp, Artificial Sequence
  chemically synthesized
gcggcagtggggggcgcggg

SEQ ID NO: 1247 - DNA, 20 bp, Artificial Sequence
  chemically synthesized
cggcagtggggggcgcgggc

SEQ ID NO: 1248 - DNA, 20 bp, Artificial Sequence
  chemically synthesized
ggggggcgcgggcgggcgcc

SEQ ID NO: 1249 - DNA, 20 bp, Artificial Sequence
  chemically synthesized
gcgcgggcgggcgccgagcc

SEQ ID NO: 1250 - DNA, 20 bp, Artificial Sequence
  chemically synthesized
gcgggcgccgagcctggccc

SEQ ID NO: 1251 - DNA, 20 bp, Artificial Sequence
  chemically synthesized
gggcgccgagcctggccccg

SEQ ID NO: 1252 - DNA, 20 bp, Artificial Sequence
  chemically synthesized
gcgccgagcctggccccgga

SEQ ID NO: 1253 - DNA, 20 bp, Artificial Sequence
  chemically synthesized
gcgcccgcaccgtccgcttc

SEQ ID NO: 1254 - DNA, 20 bp, Artificial Sequence
  chemically synthesized
tccgcttcgagcgcgccgcc

SEQ ID NO: 1255 - DNA, 20 bp, Artificial Sequence
  chemically synthesized
cgagcgcgccgccgagttcc

SEQ ID NO: 1256 - DNA, 20 bp, Artificial Sequence
  chemically synthesized
gcgcgccgccgagttcctgg

SEQ ID NO: 1257 - DNA, 20 bp, Artificial Sequence
  chemically synthesized
cgagttcctggcggcctgtg

SEQ ID NO: 1258 - DNA, 20 bp, Artificial Sequence
  chemically synthesized
gagttcctggcggcctgtgc

SEQ ID NO: 1259 - DNA, 20 bp, Artificial Sequence
  chemically synthesized
ttcctggcggcctgtgcggg

SEQ ID NO: 1260 - DNA, 20 bp, Artificial Sequence
  chemically synthesized
ggcctgtgcgggcggcgacc

SEQ ID NO: 1261 - DNA, 20 bp, Artificial Sequence
  chemically synthesized
gtgcgggcggcgacctggac

SEQ ID NO: 1262 - DNA, 20 bp, Artificial Sequence
  chemically synthesized
tgcgggcggcgacctggacg

SEQ ID NO: 1263 - DNA, 20 bp, Artificial Sequence
  chemically synthesized
atgctgcgcgccgccgaccc

SEQ ID NO: 1264 - DNA, 20 bp, Artificial Sequence
  chemically synthesized
cgcgccgccgaccctggccc

SEQ ID NO: 1265 - DNA, 20 bp, Artificial Sequence
  chemically synthesized
ccgaccctggccccggcgcc

SEQ ID NO: 1266 - DNA, 20 bp, Artificial Sequence
  chemically synthesized
gccgcccgcccgcgccgtgc

SEQ ID NO: 1267 - DNA, 20 bp, Artificial Sequence
  chemically synthesized
ctggactccaccaacgccga

SEQ ID NO: 1268 - DNA, 20 bp, Artificial Sequence
  chemically synthesized
tccaccaacgccgacggtat

SEQ ID NO: 1269 - DNA, 20 bp, Artificial Sequence
  chemically synthesized
acggtatcagcgccctgcac

SEQ ID NO: 1270 - DNA, 20 bp, Artificial Sequence
  chemically synthesized
cggtatcagcgccctgcacc

SEQ ID NO: 1271 - DNA, 20 bp, Artificial Sequence
  chemically synthesized
atcagcgccctgcaccaggt

SEQ ID NO: 1272 - DNA, 20 bp, Artificial Sequence
  chemically synthesized
ccaggtcagcgccccccgcc

SEQ ID NO: 1273 - DNA, 20 bp, Artificial Sequence
  chemically synthesized
gccccccgcccggcgtctcc

SEQ ID NO: 1274 - DNA, 20 bp, Artificial Sequence
  chemically synthesized
ccccccgcccggcgtctccc

SEQ ID NO: 1275 - DNA, 20 bp, Artificial Sequence
  chemically synthesized
cccccgcccggcgtctcccg

SEQ ID NO: 1276 - DNA, 20 bp, Artificial Sequence
  chemically synthesized
cgcccggcgtctcccggggc

SEQ ID NO: 1277 - DNA, 20 bp, Artificial Sequence
  chemically synthesized
gcccggcgtctcccggggcc

SEQ ID NO: 1278 - DNA, 20 bp, Artificial Sequence
  chemically synthesized
ccaccctctgctgcgccacc

SEQ ID NO: 1279 - DNA, 20 bp, Artificial Sequence
  chemically synthesized
caccctctgctgcgccacct

SEQ ID NO: 1280 - DNA, 20 bp, Artificial Sequence
  chemically synthesized
accctctgctgcgccacctg

SEQ ID NO: 1281 - DNA, 20 bp, Artificial Sequence
  chemically synthesized
gcatcctccttccccgttgc

SEQ ID NO: 1282 - DNA, 20 bp, Artificial Sequence
  chemically synthesized
tcgatccgccccgtcgttcc

SEQ ID NO: 1283 - DNA, 20 bp, Artificial Sequence
  chemically synthesized
cgccccgtcgttcctggccc

SEQ ID NO: 1284 - DNA, 20 bp, Artificial Sequence
  chemically synthesized
gccccgtcgttcctggccct

SEQ ID NO: 1285 - DNA, 20 bp, Artificial Sequence
  chemically synthesized
cctatgctgacaccccgtcc

SEQ ID NO: 1286 - DNA, 20 bp, Artificial Sequence
  chemically synthesized
cgaccaccccacttccgaat

SEQ ID NO: 1287 - DNA, 20 bp, Artificial Sequence
  chemically synthesized
accaccccacttccgaattg

SEQ ID NO: 1288 - DNA, 20 bp, Artificial Sequence
  chemically synthesized
cgaattggagccgcttcaac

SEQ ID NO: 1289 - DNA, 20 bp, Artificial Sequence
  chemically synthesized
ggagccgcttcaactggccc

SEQ ID NO: 1290 - DNA, 20 bp, Artificial Sequence
  chemically synthesized
gagccgcttcaactggccct

SEQ ID NO: 1291 - DNA, 20 bp, Artificial Sequence
  chemically synthesized
gcttcaactggccctgggct

SEQ ID NO: 1292 - DNA, 20 bp, Artificial Sequence
  chemically synthesized
ctgtgctgaccactctgccc

SEQ ID NO: 1293 - DNA, 20 bp, Artificial Sequence
  chemically synthesized
tgtgctgaccactctgcccc

SEQ ID NO: 1294 - DNA, 20 bp, Artificial Sequence
  chemically synthesized
cgacctactctcttccgcat

SEQ ID NO: 1295 - DNA, 20 bp, Artificial Sequence
  chemically synthesized
acctactctcttccgcattg

SEQ ID NO: 1296 - DNA, 20 bp, Artificial Sequence
  chemically synthesized
cgcattggagtcgctttaac

SEQ ID NO: 1297 - DNA, 20 bp, Artificial Sequence
  chemically synthesized
ggagtcgctttaactggccc

SEQ ID NO: 1298 - DNA, 20 bp, Artificial Sequence
  chemically synthesized
gctttaactggccctggctt

SEQ ID NO: 1299 - DNA, 20 bp, Artificial Sequence
  chemically synthesized
ttaactggccctggctttgg

SEQ ID NO: 1300 - DNA, 20 bp, Artificial Sequence
  chemically synthesized
gcagcctgtgctgacccatg

SEQ ID NO: 1301 - DNA, 20 bp, Artificial Sequence
  chemically synthesized
acttcccctcttccgatgtt

SEQ ID NO: 1302 - DNA, 20 bp, Artificial Sequence
  chemically synthesized
cttccgatgttgagcccctc

SEQ ID NO: 1303 - DNA, 20 bp, Artificial Sequence
  chemically synthesized
cgatgttgagcccctccagc

SEQ ID NO: 1304 - DNA, 20 bp, Artificial Sequence
  chemically synthesized
tgagcccctccagccggtcc

SEQ ID NO: 1305 - DNA, 20 bp, Artificial Sequence
  chemically synthesized
ccctgccctctcctgaacct

SEQ ID NO: 1306 - DNA, 20 bp, Artificial Sequence
  chemically synthesized
gccctctcctgaacctgagc

SEQ ID NO: 1307 - DNA, 20 bp, Artificial Sequence
  chemically synthesized
tgaacctgagccagctccca

SEQ ID NO: 1308 - DNA, 20 bp, Artificial Sequence
  chemically synthesized
ctgagccagctcccatagct

SEQ ID NO: 1309 - DNA, 20 bp, Artificial Sequence
  chemically synthesized
ccagctcccatagctcagtc

SEQ ID NO: 1310 - DNA, 20 bp, Artificial Sequence
  chemically synthesized
ctcagtctggtctatctgcc

SEQ ID NO: 1311 - DNA, 20 bp, Artificial Sequence
  chemically synthesized
ctggtctatctgcctggccc

SEQ ID NO: 1312 - DNA, 20 bp, Artificial Sequence
  chemically synthesized
gctgccctcctctcgccccc

SEQ ID NO: 1313 - DNA, 20 bp, Artificial Sequence
  chemically synthesized
gagtgcccttgctgtgccgc

SEQ ID NO: 1314 - DNA, 20 bp, Artificial Sequence
  chemically synthesized
aacgctgccgtctctctcct

SEQ ID NO: 1315 - DNA, 20 bp, Artificial Sequence
  chemically synthesized
tgccgtctctctcctgagtc

SEQ ID NO: 1316 - DNA, 20 bp, Artificial Sequence
  chemically synthesized
tcctgagtccggaccacttt

SEQ ID NO: 1317 - DNA, 20 bp, Artificial Sequence
  chemically synthesized
cggaccactttgagctctac

SEQ ID NO: 1318 - DNA, 20 bp, Artificial Sequence
  chemically synthesized
actggcttctgcgccgcctc

SEQ ID NO: 1319 - DNA, 20 bp, Artificial Sequence
  chemically synthesized
ggcccactgtttccccttcc

SEQ ID NO: 1320 - DNA, 20 bp, Artificial Sequence
  chemically synthesized
gcccactgtttccccttccc

SEQ ID NO: 1321 - DNA, 20 bp, Artificial Sequence
  chemically synthesized
cactgtttccccttcccagg

SEQ ID NO: 1322 - DNA, 20 bp, Artificial Sequence
  chemically synthesized
actgtttccccttcccaggc

SEQ ID NO: 1323 - DNA, 20 bp, Artificial Sequence
  chemically synthesized
ctgacctgcattctctcccc

SEQ ID NO: 1324 - DNA, 20 bp, Artificial Sequence
  chemically synthesized
tgacctgcattctctcccct

SEQ ID NO: 1325 - DNA, 20 bp, Artificial Sequence
  chemically synthesized
cctgtgccgctttctgtctg

SEQ ID NO: 1326 - DNA, 20 bp, Artificial Sequence
  chemically synthesized
cgctttctgtctgcagcttg

SEQ ID NO: 1327 - DNA, 20 bp, Artificial Sequence
  chemically synthesized
tctgtctgcagcttgtggcc

SEQ ID NO: 1328 - DNA, 20 bp, Artificial Sequence
  chemically synthesized
ctgtctgcagcttgtggcct

SEQ ID NO: 1329 - DNA, 20 bp, Artificial Sequence
  chemically synthesized
tgtggcctgggtcacctcta

SEQ ID NO: 1330 - DNA, 20 bp, Artificial Sequence
  chemically synthesized
gcctgggtcacctctacggc

SEQ ID NO: 1331 - DNA, 20 bp, Artificial Sequence
  chemically synthesized
ggtcacctctacggctggcc

SEQ ID NO: 1332 - DNA, 20 bp, Artificial Sequence
  chemically synthesized
tccttccctgccgcctcctt

SEQ ID NO: 1333 - DNA, 20 bp, Artificial Sequence
  chemically synthesized
ccttccctgccgcctccttc

SEQ ID NO: 1334 - DNA, 20 bp, Artificial Sequence
  chemically synthesized
tctctgctgtgttgctgccc

SEQ ID NO: 1335 - DNA, 20 bp, Artificial Sequence
  chemically synthesized
ctctgctgtgttgctgccca

SEQ ID NO: 1336 - DNA, 20 bp, Artificial Sequence
  chemically synthesized
ctgcccaaggatgctctttc

SEQ ID NO: 1337 - DNA, 20 bp, Artificial Sequence
  chemically synthesized
gcccaaggatgctctttccg

SEQ ID NO: 1338 - DNA, 20 bp, Artificial Sequence
  chemically synthesized
tttccggagcacttccttct

SEQ ID NO: 1339 - DNA, 20 bp, Artificial Sequence
  chemically synthesized
tgcaccacgtgatgtcctct

SEQ ID NO: 1340 - DNA, 20 bp, Artificial Sequence
  chemically synthesized
accacgtgatgtcctctgag

SEQ ID NO: 1341 - DNA, 20 bp, Artificial Sequence
  chemically synthesized
gagcggatcctccccgtgtc

SEQ ID NO: 1342 - DNA, 20 bp, Artificial Sequence
  chemically synthesized
agcggatcctccccgtgtct

SEQ ID NO: 1343 - DNA, 20 bp, Artificial Sequence
  chemically synthesized
ccccgtgtctgggtcctctc

SEQ ID NO: 1344 - DNA, 20 bp, Artificial Sequence
  chemically synthesized
cccgtgtctgggtcctctcc

SEQ ID NO: 1345 - DNA, 20 bp, Artificial Sequence
  chemically synthesized
cccatgccgtcttcactcgc

SEQ ID NO: 1346 - DNA, 20 bp, Artificial Sequence
  chemically synthesized
ccatgccgtcttcactcgct

SEQ ID NO: 1347 - DNA, 20 bp, Artificial Sequence
  chemically synthesized
ttcccttttccttctccttc

SEQ ID NO: 1348 - DNA, 20 bp, Artificial Sequence
  chemically synthesized
tcccttttccttctccttct

SEQ ID NO: 1349 - DNA, 20 bp, Artificial Sequence
  chemically synthesized
cccttttccttctccttctg

SEQ ID NO: 1350 - DNA, 20 bp, Artificial Sequence
  chemically synthesized
ctgtgccatctctcgtttct

SEQ ID NO: 1351 - DNA, 20 bp, Artificial Sequence
  chemically synthesized
tgtgccatctctcgtttctt

SEQ ID NO: 1352 - DNA, 20 bp, Artificial Sequence
  chemically synthesized
ccatctctcgtttcttagga

SEQ ID NO: 1353 - DNA, 20 bp, Artificial Sequence
  chemically synthesized
cttaggatggccttctccga

SEQ ID NO: 1354 - DNA, 20 bp, Artificial Sequence
  chemically synthesized
cgtcccgcctccccttcttg

SEQ ID NO: 1355 - DNA, 20 bp, Artificial Sequence
  chemically synthesized
gtcccgcctccccttcttgt

SEQ ID NO: 1356 - DNA, 20 bp, Artificial Sequence
  chemically synthesized
ctgcatcatcaccgtttttc

SEQ ID NO: 1357 - DNA, 20 bp, Artificial Sequence
  chemically synthesized
cgtttttctggacaacccca

SEQ ID NO: 1358 - DNA, 20 bp, Artificial Sequence
  chemically synthesized
cccaaagtaccccgtctccc

SEQ ID NO: 1359 - DNA, 20 bp, Artificial Sequence
  chemically synthesized
gtaccccgtctccctggctt

SEQ ID NO: 1360 - DNA, 20 bp, Artificial Sequence
  chemically synthesized
atcctcttgctttctttgcc

SEQ ID NO: 1361 - DNA, 20 bp, Artificial Sequence
  chemically synthesized
ctggacaccccgttctcctg

SEQ ID NO: 1362 - DNA, 20 bp, Artificial Sequence
  chemically synthesized
accccgttctcctgtggatt

SEQ ID NO: 1363 - DNA, 20 bp, Artificial Sequence
  chemically synthesized
ccccgttctcctgtggattc

SEQ ID NO: 1364 - DNA, 20 bp, Artificial Sequence
  chemically synthesized
cacctctcactcctttcatt

SEQ ID NO: 1365 - DNA, 20 bp, Artificial Sequence
  chemically synthesized
acctctcactcctttcattt

SEQ ID NO: 1366 - DNA, 20 bp, Artificial Sequence
  chemically synthesized
tctcactcctttcatttggg

SEQ ID NO: 1367 - DNA, 20 bp, Artificial Sequence
  chemically synthesized
ccctaccccccttacctctc

SEQ ID NO: 1368 - DNA, 20 bp, Artificial Sequence
  chemically synthesized
cttacctctctagtctgtgc

SEQ ID NO: 1369 - DNA, 20 bp, Artificial Sequence
  chemically synthesized
ctagtctgtgctagctcttc

SEQ ID NO: 1370 - DNA, 20 bp, Artificial Sequence
  chemically synthesized
gctcttccagccccctgtca

SEQ ID NO: 1371 - DNA, 20 bp, Artificial Sequence
  chemically synthesized
ccccctgtcatggcatcttc

SEQ ID NO: 1372 - DNA, 20 bp, Artificial Sequence
  chemically synthesized
cccctgtcatggcatcttcc

SEQ ID NO: 1373 - DNA, 20 bp, Artificial Sequence
  chemically synthesized
ccctgtcatggcatcttcca

SEQ ID NO: 1374 - DNA, 20 bp, Artificial Sequence
  chemically synthesized
cctgtcatggcatcttccag

SEQ ID NO: 1375 - DNA, 20 bp, Artificial Sequence
  chemically synthesized
atggcatcttccaggggtcc

SEQ ID NO: 1376 - DNA, 20 bp, Artificial Sequence
  chemically synthesized
ggcatcttccaggggtccga

SEQ ID NO: 1377 - DNA, 20 bp, Artificial Sequence
  chemically synthesized
cttccaggggtccgagagct

SEQ ID NO: 1378 - DNA, 20 bp, Artificial Sequence
  chemically synthesized
caggggtccgagagctcagc

SEQ ID NO: 1379 - DNA, 20 bp, Artificial Sequence
  chemically synthesized
ctagtcttcttcctccaacc

SEQ ID NO: 1380 - DNA, 20 bp, Artificial Sequence
  chemically synthesized
tagtcttcttcctccaaccc

SEQ ID NO: 1381 - DNA, 20 bp, Artificial Sequence
  chemically synthesized
ccgggcccctatgtccactt

SEQ ID NO: 1382 - DNA, 20 bp, Artificial Sequence
  chemically synthesized
cgggcccctatgtccacttc

SEQ ID NO: 1383 - DNA, 20 bp, Artificial Sequence
  chemically synthesized
cccctatgtccacttcagga

SEQ ID NO: 1384 - DNA, 20 bp, Artificial Sequence
  chemically synthesized
gacagcatgtttgctgcctc

SEQ ID NO: 1385 - DNA, 20 bp, Artificial Sequence
  chemically synthesized
acagcatgtttgctgcctcc

SEQ ID NO: 1386 - DNA, 20 bp, Artificial Sequence
  chemically synthesized
cagcatgtttgctgcctcca

SEQ ID NO: 1387 - DNA, 20 bp, Artificial Sequence
  chemically synthesized
tccagggatcctgtgtcccc

SEQ ID NO: 1388 - DNA, 20 bp, Artificial Sequence
  chemically synthesized
gggatcctgtgtccccgagc

SEQ ID NO: 1389 - DNA, 20 bp, Artificial Sequence
  chemically synthesized
ggatcctgtgtccccgagct

SEQ ID NO: 1390 - DNA, 20 bp, Artificial Sequence
  chemically synthesized
ctgggaccaccttatattcc

SEQ ID NO: 1391 - DNA, 20 bp, Artificial Sequence
  chemically synthesized
tgggaccaccttatattccc

SEQ ID NO: 1392 - DNA, 20 bp, Artificial Sequence
  chemically synthesized
gggaccaccttatattccca

SEQ ID NO: 1393 - DNA, 20 bp, Artificial Sequence
  chemically synthesized
ccaccttatattcccagggc

SEQ ID NO: 1394 - DNA, 20 bp, Artificial Sequence
  chemically synthesized
attcccagggccggttaatg

SEQ ID NO: 1395 - DNA, 20 bp, Artificial Sequence
  chemically synthesized
agggccggttaatgtggctc

SEQ ID NO: 1396 - DNA, 20 bp, Artificial Sequence
  chemically synthesized
ggttaatgtggctctggttc

SEQ ID NO: 1397 - DNA, 20 bp, Artificial Sequence
  chemically synthesized
gttaatgtggctctggttct

SEQ ID NO: 1398 - DNA, 20 bp, Artificial Sequence
  chemically synthesized
tatctgtcccctccacccca

SEQ ID NO: 1399 - DNA, 20 bp, Artificial Sequence
  chemically synthesized
ctgtcccctccaccccacag

SEQ ID NO: 1400 - DNA, 20 bp, Artificial Sequence
  chemically synthesized
tgtcccctccaccccacagt

SEQ ID NO: 1401 - DNA, 20 bp, Artificial Sequence
  chemically synthesized
gtcccctccaccccacagtg

SEQ ID NO: 1402 - DNA, 20 bp, Artificial Sequence
  chemically synthesized
ccaccccacagtggggccac

SEQ ID NO: 1403 - DNA, 20 bp, Artificial Sequence
  chemically synthesized
caccccacagtggggccact

SEQ ID NO: 1404 - DNA, 20 bp, Artificial Sequence
  chemically synthesized
accccacagtggggccacta

SEQ ID NO: 1405 - DNA, 20 bp, Artificial Sequence
  chemically synthesized
cacagtggggccactaggga

SEQ ID NO: 1406 - DNA, 20 bp, Artificial Sequence
  chemically synthesized
acagtggggccactagggac

SEQ ID NO: 1407 - DNA, 20 bp, Artificial Sequence
  chemically synthesized
ggggccactagggacaggat

SEQ ID NO: 1408 - DNA, 20 bp, Artificial Sequence
  chemically synthesized
actagggacaggattggtga

SEQ ID NO: 1409 - DNA, 20 bp, Artificial Sequence
  chemically synthesized
ggacaggattggtgacagaa

SEQ ID NO: 1410 - DNA, 20 bp, Artificial Sequence
  chemically synthesized
tgacagaaaagccccatcct

SEQ ID NO: 1411 - DNA, 20 bp, Artificial Sequence
  chemically synthesized
gacagaaaagccccatcctt

SEQ ID NO: 1412 - DNA, 20 bp, Artificial Sequence
  chemically synthesized
tccttaggcctcctccttcc

SEQ ID NO: 1413 - DNA, 20 bp, Artificial Sequence
  chemically synthesized
ccttcctagtctcctgatat

SEQ ID NO: 1414 - DNA, 20 bp, Artificial Sequence
  chemically synthesized
cttcctagtctcctgatatt

SEQ ID NO: 1415 - DNA, 20 bp, Artificial Sequence
  chemically synthesized
gtctaacccccacctcctgt

SEQ ID NO: 1416 - DNA, 20 bp, Artificial Sequence
  chemically synthesized
tctaacccccacctcctgtt

SEQ ID NO: 1417 - DNA, 20 bp, Artificial Sequence
  chemically synthesized
aacccccacctcctgttagg

SEQ ID NO: 1418 - DNA, 20 bp, Artificial Sequence
  chemically synthesized
tgttaggcagattccttatc

SEQ ID NO: 1419 - DNA, 20 bp, Artificial Sequence
  chemically synthesized
ggtgacacacccccatttcc

SEQ ID NO: 1420 - DNA, 20 bp, Artificial Sequence
  chemically synthesized
tgacacacccccatttcctg

SEQ ID NO: 1421 - DNA, 20 bp, Artificial Sequence
  chemically synthesized
ggagccatctctctccttgc

SEQ ID NO: 1422 - DNA, 20 bp, Artificial Sequence
  chemically synthesized
ctctccttgccagaacctct

SEQ ID NO: 1423 - DNA, 20 bp, Artificial Sequence
  chemically synthesized
tctccttgccagaacctcta

SEQ ID NO: 1424 - DNA, 20 bp, Artificial Sequence
  chemically synthesized
cctctaaggtttgcttacga

SEQ ID NO: 1425 - DNA, 20 bp, Artificial Sequence
  chemically synthesized
tctaaggtttgcttacgatg

SEQ ID NO: 1426 - DNA, 20 bp, Artificial Sequence
  chemically synthesized
aggtttgcttacgatggagc

SEQ ID NO: 1427 - DNA, 20 bp, Artificial Sequence
  chemically synthesized
gtttgcttacgatggagcca

SEQ ID NO: 1428 - DNA, 20 bp, Artificial Sequence
  chemically synthesized
ttgcttacgatggagccaga

SEQ ID NO: 1429 - DNA, 20 bp, Artificial Sequence
  chemically synthesized
tgcttacgatggagccagag

SEQ ID NO: 1430 - DNA, 20 bp, Artificial Sequence
  chemically synthesized
gatggagccagagaggatcc

SEQ ID NO: 1431 - DNA, 20 bp, Artificial Sequence
  chemically synthesized
atggagccagagaggatcct

SEQ ID NO: 1432 - DNA, 20 bp, Artificial Sequence
  chemically synthesized
ggagccagagaggatcctgg

SEQ ID NO: 1433 - DNA, 20 bp, Artificial Sequence
  chemically synthesized
gagccagagaggatcctggg

SEQ ID NO: 1434 - DNA, 20 bp, Artificial Sequence
  chemically synthesized
agccagagaggatcctggga

SEQ ID NO: 1435 - DNA, 20 bp, Artificial Sequence
  chemically synthesized
ccagagaggatcctgggagg

SEQ ID NO: 1436 - DNA, 20 bp, Artificial Sequence
  chemically synthesized
agagaggatcctgggaggga

SEQ ID NO: 1437 - DNA, 20 bp, Artificial Sequence
  chemically synthesized
ggatcctgggagggagagct

SEQ ID NO: 1438 - DNA, 20 bp, Artificial Sequence
  chemically synthesized
tcctgggagggagagcttgg

SEQ ID NO: 1439 - DNA, 20 bp, Artificial Sequence
  chemically synthesized
cctgggagggagagcttggc

SEQ ID NO: 1440 - DNA, 20 bp, Artificial Sequence
  chemically synthesized
ctgggagggagagcttggca

SEQ ID NO: 1441 - DNA, 20 bp, Artificial Sequence
  chemically synthesized
tgggagggagagcttggcag

SEQ ID NO: 1442 - DNA, 20 bp, Artificial Sequence
  chemically synthesized
gggagggagagcttggcagg

SEQ ID NO: 1443 - DNA, 20 bp, Artificial Sequence
  chemically synthesized
agggagagcttggcaggggg

SEQ ID NO: 1444 - DNA, 20 bp, Artificial Sequence
  chemically synthesized
gggagagcttggcagggggt

SEQ ID NO: 1445 - DNA, 20 bp, Artificial Sequence
  chemically synthesized
gagagcttggcagggggtgg

SEQ ID NO: 1446 - DNA, 20 bp, Artificial Sequence
  chemically synthesized
agagcttggcagggggtggg

SEQ ID NO: 1447 - DNA, 20 bp, Artificial Sequence
  chemically synthesized
gagcttggcagggggtggga

SEQ ID NO: 1448 - DNA, 20 bp, Artificial Sequence
  chemically synthesized
cttggcagggggtgggaggg

SEQ ID NO: 1449 - DNA, 20 bp, Artificial Sequence
  chemically synthesized
ttggcagggggtgggaggga

SEQ ID NO: 1450 - DNA, 20 bp, Artificial Sequence
  chemically synthesized
tggcagggggtgggagggaa

SEQ ID NO: 1451 - DNA, 20 bp, Artificial Sequence
  chemically synthesized
ggcagggggtgggagggaag

SEQ ID NO: 1452 - DNA, 20 bp, Artificial Sequence
  chemically synthesized
gcagggggtgggagggaagg

SEQ ID NO: 1453 - DNA, 20 bp, Artificial Sequence
  chemically synthesized
cagggggtgggagggaaggg

SEQ ID NO: 1454 - DNA, 20 bp, Artificial Sequence
  chemically synthesized
agggggtgggagggaagggg

SEQ ID NO: 1455 - DNA, 20 bp, Artificial Sequence
  chemically synthesized
ggggggatgcgtgacctgcc

SEQ ID NO: 1456 - DNA, 20 bp, Artificial Sequence
  chemically synthesized
tgcgtgacctgcccggttct

SEQ ID NO: 1457 - DNA, 20 bp, Artificial Sequence
  chemically synthesized
gtgacctgcccggttctcag

SEQ ID NO: 1458 - DNA, 20 bp, Artificial Sequence
  chemically synthesized
caccctgcgctaccctctcc

SEQ ID NO: 1459 - DNA, 20 bp, Artificial Sequence
  chemically synthesized
gctaccctctcccagaacct

SEQ ID NO: 1460 - DNA, 20 bp, Artificial Sequence
  chemically synthesized
gaacctgagctgctctgacg

SEQ ID NO: 1461 - DNA, 20 bp, Artificial Sequence
  chemically synthesized
gctgctctgacgcggccgtc

SEQ ID NO: 1462 - DNA, 20 bp, Artificial Sequence
  chemically synthesized
ctggtgcgtttcactgatcc

SEQ ID NO: 1463 - DNA, 20 bp, Artificial Sequence
  chemically synthesized
tttcactgatcctggtgctg

SEQ ID NO: 1464 - DNA, 20 bp, Artificial Sequence
  chemically synthesized
gcagcttccttacacttccc

SEQ ID NO: 1465 - DNA, 20 bp, Artificial Sequence
  chemically synthesized
agcttccttacacttcccaa

SEQ ID NO: 1466 - DNA, 20 bp, Artificial Sequence
  chemically synthesized
gcttccttacacttcccaag

SEQ ID NO: 1467 - DNA, 20 bp, Artificial Sequence
  chemically synthesized
ttccttacacttcccaagag

SEQ ID NO: 1468 - DNA, 20 bp, Artificial Sequence
  chemically synthesized
cttacacttcccaagaggag

SEQ ID NO: 1469 - DNA, 20 bp, Artificial Sequence
  chemically synthesized
acacttcccaagaggagaag

SEQ ID NO: 1470 - DNA, 20 bp, Artificial Sequence
  chemically synthesized
tcccaagaggagaagcagtt

SEQ ID NO: 1471 - DNA, 20 bp, Artificial Sequence
  chemically synthesized
gcagtttggaaaaacaaaat

SEQ ID NO: 1472 - DNA, 20 bp, Artificial Sequence
  chemically synthesized
tggaaaaacaaaatcagaat

SEQ ID NO: 1473 - DNA, 20 bp, Artificial Sequence
  chemically synthesized
aaaacaaaatcagaataagt

SEQ ID NO: 1474 - DNA, 20 bp, Artificial Sequence
  chemically synthesized
aatcagaataagttggtcct

SEQ ID NO: 1475 - DNA, 20 bp, Artificial Sequence
  chemically synthesized
ttggtcctgagttctaactt

SEQ ID NO: 1476 - DNA, 20 bp, Artificial Sequence
  chemically synthesized
actttggctcttcacctttc

SEQ ID NO: 1477 - DNA, 20 bp, Artificial Sequence
  chemically synthesized
tatattgttcctccgtgcgt

SEQ ID NO: 1478 - DNA, 20 bp, Artificial Sequence
  chemically synthesized
cgtgcgtcagttttacctgt

SEQ ID NO: 1479 - DNA, 20 bp, Artificial Sequence
  chemically synthesized
gtcagttttacctgtgagat

SEQ ID NO: 1480 - DNA, 20 bp, Artificial Sequence
  chemically synthesized
tcagttttacctgtgagata

SEQ ID NO: 1481 - DNA, 20 bp, Artificial Sequence
  chemically synthesized
ttttacctgtgagataaggc

SEQ ID NO: 1482 - DNA, 20 bp, Artificial Sequence
  chemically synthesized
tacctgtgagataaggccag

SEQ ID NO: 1483 - DNA, 20 bp, Artificial Sequence
  chemically synthesized
tgtgagataaggccagtagc

SEQ ID NO: 1484 - DNA, 20 bp, Artificial Sequence
  chemically synthesized
gccagtagccagccccgtcc

SEQ ID NO: 1485 - DNA, 20 bp, Artificial Sequence
  chemically synthesized
agtagccagccccgtcctgg

SEQ ID NO: 1486 - DNA, 20 bp, Artificial Sequence
  chemically synthesized
gtagccagccccgtcctggc

SEQ ID NO: 1487 - DNA, 20 bp, Artificial Sequence
  chemically synthesized
tagccagccccgtcctggca

SEQ ID NO: 1488 - DNA, 20 bp, Artificial Sequence
  chemically synthesized
gccccgtcctggcagggctg

SEQ ID NO: 1489 - DNA, 20 bp, Artificial Sequence
  chemically synthesized
cgtcctggcagggctgtggt

SEQ ID NO: 1490 - DNA, 20 bp, Artificial Sequence
  chemically synthesized
gtcctggcagggctgtggtg

SEQ ID NO: 1491 - DNA, 20 bp, Artificial Sequence
  chemically synthesized
cctggcagggctgtggtgag

SEQ ID NO: 1492 - DNA, 20 bp, Artificial Sequence
  chemically synthesized
ctggcagggctgtggtgagg

SEQ ID NO: 1493 - DNA, 20 bp, Artificial Sequence
  chemically synthesized
tggcagggctgtggtgagga

SEQ ID NO: 1494 - DNA, 20 bp, Artificial Sequence
  chemically synthesized
ggcagggctgtggtgaggag

SEQ ID NO: 1495 - DNA, 20 bp, Artificial Sequence
  chemically synthesized
gcagggctgtggtgaggagg

SEQ ID NO: 1496 - DNA, 20 bp, Artificial Sequence
  chemically synthesized
cagggctgtggtgaggaggg

SEQ ID NO: 1497 - DNA, 20 bp, Artificial Sequence
  chemically synthesized
tgaggaggggggtgtccgtg

SEQ ID NO: 1498 - DNA, 20 bp, Artificial Sequence
  chemically synthesized
gtgtggaaaactccctttgt

SEQ ID NO: 1499 - DNA, 20 bp, Artificial Sequence
  chemically synthesized
gaaaactccctttgtgagaa

SEQ ID NO: 1500 - DNA, 20 bp, Artificial Sequence
  chemically synthesized
tttgtgagaatggtgcgtcc

SEQ ID NO: 1501 - DNA, 20 bp, Artificial Sequence
  chemically synthesized
ttgtgagaatggtgcgtcct

SEQ ID NO: 1502 - DNA, 20 bp, Artificial Sequence
  chemically synthesized
ggtgcgtcctaggtgttcac

SEQ ID NO: 1503 - DNA, 20 bp, Artificial Sequence
  chemically synthesized
gtgcgtcctaggtgttcacc

SEQ ID NO: 1504 - DNA, 20 bp, Artificial Sequence
  chemically synthesized
cctaggtgttcaccaggtcg

SEQ ID NO: 1505 - DNA, 20 bp, Artificial Sequence
  chemically synthesized
tctccatccttctttcctta

SEQ ID NO: 1506 - DNA, 20 bp, Artificial Sequence
  chemically synthesized
tccatccttctttccttaaa

SEQ ID NO: 1507 - DNA, 20 bp, Artificial Sequence
  chemically synthesized
ttctttccttaaagagtccc

SEQ ID NO: 1508 - DNA, 20 bp, Artificial Sequence
  chemically synthesized
aaagagtccccagtgctatc

SEQ ID NO: 1509 - DNA, 20 bp, Artificial Sequence
  chemically synthesized
aagagtccccagtgctatct

SEQ ID NO: 1510 - DNA, 20 bp, Artificial Sequence
  chemically synthesized
ctgggacatattcctccgcc

SEQ ID NO: 1511 - DNA, 20 bp, Artificial Sequence
  chemically synthesized
gggacatattcctccgccca

SEQ ID NO: 1512 - DNA, 20 bp, Artificial Sequence
  chemically synthesized
acatattcctccgcccagag

SEQ ID NO: 1513 - DNA, 20 bp, Artificial Sequence
  chemically synthesized
catattcctccgcccagagc

SEQ ID NO: 1514 - DNA, 20 bp, Artificial Sequence
  chemically synthesized
atattcctccgcccagagca

SEQ ID NO: 1515 - DNA, 20 bp, Artificial Sequence
  chemically synthesized
gagcagggtcccgcttccct

SEQ ID NO: 1516 - DNA, 20 bp, Artificial Sequence
  chemically synthesized
agcagggtcccgcttcccta

SEQ ID NO: 1517 - DNA, 20 bp, Artificial Sequence
  chemically synthesized
gcttccctaaggccctgctc

SEQ ID NO: 1518 - DNA, 20 bp, Artificial Sequence
  chemically synthesized
cttccctaaggccctgctct

SEQ ID NO: 1519 - DNA, 20 bp, Artificial Sequence
  chemically synthesized
aaggccctgctctgggcttc

SEQ ID NO: 1520 - DNA, 20 bp, Artificial Sequence
  chemically synthesized
aggccctgctctgggcttct

SEQ ID NO: 1521 - DNA, 20 bp, Artificial Sequence
  chemically synthesized
tgctctgggcttctgggttt

SEQ ID NO: 1522 - DNA, 20 bp, Artificial Sequence
  chemically synthesized
ggcttctgggtttgagtcct

SEQ ID NO: 1523 - DNA, 20 bp, Artificial Sequence
  chemically synthesized
tctgggtttgagtccttggc

SEQ ID NO: 1524 - DNA, 20 bp, Artificial Sequence
  chemically synthesized
gtttgagtccttggcaagcc

SEQ ID NO: 1525 - DNA, 20 bp, Artificial Sequence
  chemically synthesized
tttgagtccttggcaagccc

SEQ ID NO: 1526 - DNA, 20 bp, Artificial Sequence
  chemically synthesized
tgagtccttggcaagcccag

SEQ ID NO: 1527 - DNA, 20 bp, Artificial Sequence
  chemically synthesized
agtccttggcaagcccagga

SEQ ID NO: 1528 - DNA, 20 bp, Artificial Sequence
  chemically synthesized
gtccttggcaagcccaggag

SEQ ID NO: 1529 - DNA, 20 bp, Artificial Sequence
  chemically synthesized
gcaagcccaggagaggcgct

SEQ ID NO: 1530 - DNA, 20 bp, Artificial Sequence
  chemically synthesized
caagcccaggagaggcgctc

SEQ ID NO: 1531 - DNA, 20 bp, Artificial Sequence
  chemically synthesized
cgtccaccatctcatgcccc

SEQ ID NO: 1532 - DNA, 20 bp, Artificial Sequence
  chemically synthesized
gctctcctgccccttcccta

SEQ ID NO: 1533 - DNA, 20 bp, Artificial Sequence
  chemically synthesized
ctctcctgccccttccctac

SEQ ID NO: 1534 - DNA, 20 bp, Artificial Sequence
  chemically synthesized
tctcctgccccttccctaca

SEQ ID NO: 1535 - DNA, 20 bp, Artificial Sequence
  chemically synthesized
ctcctgccccttccctacag

SEQ ID NO: 1536 - DNA, 20 bp, Artificial Sequence
  chemically synthesized
cccttccctacaggggttcc

SEQ ID NO: 1537 - DNA, 20 bp, Artificial Sequence
  chemically synthesized
gggttcctggctctgctctt

SEQ ID NO: 1538 - DNA, 20 bp, Artificial Sequence
  chemically synthesized
ctggctctgctcttcagact

SEQ ID NO: 1539 - DNA, 20 bp, Artificial Sequence
  chemically synthesized
cccccttcccctgcatcccc

SEQ ID NO: 1540 - DNA, 20 bp, Artificial Sequence
  chemically synthesized
cccttcccctgcatccccca

SEQ ID NO: 1541 - DNA, 20 bp, Artificial Sequence
  chemically synthesized
ccttcccctgcatcccccag

SEQ ID NO: 1542 - DNA, 20 bp, Artificial Sequence
  chemically synthesized
cctgcatcccccagaggccc

SEQ ID NO: 1543 - DNA, 20 bp, Artificial Sequence
  chemically synthesized
ctgcatcccccagaggcccc

SEQ ID NO: 1544 - DNA, 20 bp, Artificial Sequence
  chemically synthesized
gaggccccaggccacctact

SEQ ID NO: 1545 - DNA, 20 bp, Artificial Sequence
  chemically synthesized
cccaggccacctacttggcc

SEQ ID NO: 1546 - DNA, 20 bp, Artificial Sequence
  chemically synthesized
ctacttggcctggaccccac

SEQ ID NO: 1547 - DNA, 20 bp, Artificial Sequence
  chemically synthesized
acttggcctggaccccacga

SEQ ID NO: 1548 - DNA, 20 bp, Artificial Sequence
  chemically synthesized
cttggcctggaccccacgag

SEQ ID NO: 1549 - DNA, 20 bp, Artificial Sequence
  chemically synthesized
gaccccacgagaggccaccc

SEQ ID NO: 1550 - DNA, 20 bp, Artificial Sequence
  chemically synthesized
gccaccccagccctgtctac

SEQ ID NO: 1551 - DNA, 20 bp, Artificial Sequence
  chemically synthesized
ccaccccagccctgtctacc

SEQ ID NO: 1552 - DNA, 20 bp, Artificial Sequence
  chemically synthesized
ctgtctaccaggctgccttt

SEQ ID NO: 1553 - DNA, 20 bp, Artificial Sequence
  chemically synthesized
tgtctaccaggctgcctttt

SEQ ID NO: 1554 - DNA, 20 bp, Artificial Sequence
  chemically synthesized
ctaccaggctgccttttggg

SEQ ID NO: 1555 - DNA, 20 bp, Artificial Sequence
  chemically synthesized
ggtggattctcctccaactg

SEQ ID NO: 1556 - DNA, 20 bp, Artificial Sequence
  chemically synthesized
gtggattctcctccaactgt

SEQ ID NO: 1557 - DNA, 20 bp, Artificial Sequence
  chemically synthesized
tggattctcctccaactgtg

SEQ ID NO: 1558 - DNA, 20 bp, Artificial Sequence
  chemically synthesized
ccaactgtggggtgactgct

SEQ ID NO: 1559 - DNA, 20 bp, Artificial Sequence
  chemically synthesized
tgcttggcaaactcactctt

SEQ ID NO: 1560 - DNA, 20 bp, Artificial Sequence
  chemically synthesized
gcttggcaaactcactcttc

SEQ ID NO: 1561 - DNA, 20 bp, Artificial Sequence
  chemically synthesized
cttggcaaactcactcttcg

SEQ ID NO: 1562 - DNA, 20 bp, Artificial Sequence
  chemically synthesized
actcactcttcggggtatcc

SEQ ID NO: 1563 - DNA, 20 bp, Artificial Sequence
  chemically synthesized
ctcactcttcggggtatccc

SEQ ID NO: 1564 - DNA, 20 bp, Artificial Sequence
  chemically synthesized
cactcttcggggtatcccag

SEQ ID NO: 1565 - DNA, 20 bp, Artificial Sequence
  chemically synthesized
actcttcggggtatcccagg

SEQ ID NO: 1566 - DNA, 20 bp, Artificial Sequence
  chemically synthesized
tcggggtatcccaggaggcc

SEQ ID NO: 1567 - DNA, 20 bp, Artificial Sequence
  chemically synthesized
ggggtatcccaggaggcctg

SEQ ID NO: 1568 - DNA, 20 bp, Artificial Sequence
  chemically synthesized
tcccaggaggcctggagcat

SEQ ID NO: 1569 - DNA, 20 bp, Artificial Sequence
  chemically synthesized
cccaggaggcctggagcatt

SEQ ID NO: 1570 - DNA, 20 bp, Artificial Sequence
  chemically synthesized
ccaggaggcctggagcattg

SEQ ID NO: 1571 - DNA, 20 bp, Artificial Sequence
  chemically synthesized
ggaggcctggagcattgggg

SEQ ID NO: 1572 - DNA, 20 bp, Artificial Sequence
  chemically synthesized
gaggcctggagcattggggt

SEQ ID NO: 1573 - DNA, 20 bp, Artificial Sequence
  chemically synthesized
cctggagcattggggtgggc

SEQ ID NO: 1574 - DNA, 20 bp, Artificial Sequence
  chemically synthesized
ctggagcattggggtgggct

SEQ ID NO: 1575 - DNA, 20 bp, Artificial Sequence
  chemically synthesized
tggagcattggggtgggctg

SEQ ID NO: 1576 - DNA, 20 bp, Artificial Sequence
  chemically synthesized
cattggggtgggctggggtt

SEQ ID NO: 1577 - DNA, 20 bp, Artificial Sequence
  chemically synthesized
ttggggtgggctggggttca

SEQ ID NO: 1578 - DNA, 20 bp, Artificial Sequence
  chemically synthesized
ggggtgggctggggttcaga

SEQ ID NO: 1579 - DNA, 20 bp, Artificial Sequence
  chemically synthesized
gggtgggctggggttcagag

SEQ ID NO: 1580 - DNA, 20 bp, Artificial Sequence
  chemically synthesized
gtgggctggggttcagagag

SEQ ID NO: 1581 - DNA, 20 bp, Artificial Sequence
  chemically synthesized
tgggctggggttcagagagg

SEQ ID NO: 1582 - DNA, 20 bp, Artificial Sequence
  chemically synthesized
gggctggggttcagagagga

SEQ ID NO: 1583 - DNA, 20 bp, Artificial Sequence
  chemically synthesized
gagaggagggattcccttct

SEQ ID NO: 1584 - DNA, 20 bp, Artificial Sequence
  chemically synthesized
agaggagggattcccttctc

SEQ ID NO: 1585 - DNA, 20 bp, Artificial Sequence
  chemically synthesized
gattcccttctcaggttacg

SEQ ID NO: 1586 - DNA, 20 bp, Artificial Sequence
  chemically synthesized
ccttctcaggttacgtggcc

SEQ ID NO: 1587 - DNA, 20 bp, Artificial Sequence
  chemically synthesized
tctcaggttacgtggccaag

SEQ ID NO: 1588 - DNA, 20 bp, Artificial Sequence
  chemically synthesized
caggttacgtggccaagaag

SEQ ID NO: 1589 - DNA, 20 bp, Artificial Sequence
  chemically synthesized
aggttacgtggccaagaagc

SEQ ID NO: 1590 - DNA, 20 bp, Artificial Sequence
  chemically synthesized
ggttacgtggccaagaagca

SEQ ID NO: 1591 - DNA, 20 bp, Artificial Sequence
  chemically synthesized
gttacgtggccaagaagcag

SEQ ID NO: 1592 - DNA, 20 bp, Artificial Sequence
  chemically synthesized
tacgtggccaagaagcaggg

SEQ ID NO: 1593 - DNA, 20 bp, Artificial Sequence
  chemically synthesized
tggccaagaagcaggggagc

SEQ ID NO: 1594 - DNA, 20 bp, Artificial Sequence
  chemically synthesized
ggccaagaagcaggggagct

SEQ ID NO: 1595 - DNA, 20 bp, Artificial Sequence
  chemically synthesized
agaagcaggggagctgggtt

SEQ ID NO: 1596 - DNA, 20 bp, Artificial Sequence
  chemically synthesized
gaagcaggggagctgggttt

SEQ ID NO: 1597 - DNA, 20 bp, Artificial Sequence
  chemically synthesized
caggggagctgggtttgggt

SEQ ID NO: 1598 - DNA, 20 bp, Artificial Sequence
  chemically synthesized
aggggagctgggtttgggtc

SEQ ID NO: 1599 - DNA, 20 bp, Artificial Sequence
  chemically synthesized
agctgggtttgggtcaggtc

SEQ ID NO: 1600 - DNA, 20 bp, Artificial Sequence
  chemically synthesized
gctgggtttgggtcaggtct

SEQ ID NO: 1601 - DNA, 20 bp, Artificial Sequence
  chemically synthesized
gtttgggtcaggtctgggtg

SEQ ID NO: 1602 - DNA, 20 bp, Artificial Sequence
  chemically synthesized
tttgggtcaggtctgggtgt

SEQ ID NO: 1603 - DNA, 20 bp, Artificial Sequence
  chemically synthesized
ttgggtcaggtctgggtgtg

SEQ ID NO: 1604 - DNA, 20 bp, Artificial Sequence
  chemically synthesized
aggtctgggtgtggggtgac

SEQ ID NO: 1605 - DNA, 20 bp, Artificial Sequence
  chemically synthesized
accagcttatgctgtttgcc

SEQ ID NO: 1606 - DNA, 20 bp, Artificial Sequence
  chemically synthesized
ccagcttatgctgtttgccc

SEQ ID NO: 1607 - DNA, 20 bp, Artificial Sequence
  chemically synthesized
cttatgctgtttgcccagga

SEQ ID NO: 1608 - DNA, 20 bp, Artificial Sequence
  chemically synthesized
gctgtttgcccaggacagcc

SEQ ID NO: 1609 - DNA, 20 bp, Artificial Sequence
  chemically synthesized
tgcccaggacagcctagttt

SEQ ID NO: 1610 - DNA, 20 bp, Artificial Sequence
  chemically synthesized
agttttagcactgaaaccct

SEQ ID NO: 1611 - DNA, 20 bp, Artificial Sequence
  chemically synthesized
agcactgaaaccctcagtcc

SEQ ID NO: 1612 - DNA, 20 bp, Artificial Sequence
  chemically synthesized
gcactgaaaccctcagtcct

SEQ ID NO: 1613 - DNA, 20 bp, Artificial Sequence
  chemically synthesized
aaccctcagtcctaggaaaa

SEQ ID NO: 1614 - DNA, 20 bp, Artificial Sequence
  chemically synthesized
accctcagtcctaggaaaac

SEQ ID NO: 1615 - DNA, 20 bp, Artificial Sequence
  chemically synthesized
ccctcagtcctaggaaaaca

SEQ ID NO: 1616 - DNA, 20 bp, Artificial Sequence
  chemically synthesized
cagtcctaggaaaacaggga

SEQ ID NO: 1617 - DNA, 20 bp, Artificial Sequence
  chemically synthesized
cctaggaaaacagggatggt

SEQ ID NO: 1618 - DNA, 20 bp, Artificial Sequence
  chemically synthesized
ggatggttggtcactgtctc

SEQ ID NO: 1619 - DNA, 20 bp, Artificial Sequence
  chemically synthesized
gatggttggtcactgtctct

SEQ ID NO: 1620 - DNA, 20 bp, Artificial Sequence
  chemically synthesized
tctgggtgactcttgattcc

SEQ ID NO: 1621 - DNA, 20 bp, Artificial Sequence
  chemically synthesized
ggtgactcttgattcccggc

SEQ ID NO: 1622 - DNA, 20 bp, Artificial Sequence
  chemically synthesized
tcccggccagtttctccacc

SEQ ID NO: 1623 - DNA, 20 bp, Artificial Sequence
  chemically synthesized
cccggccagtttctccacct

SEQ ID NO: 1624 - DNA, 20 bp, Artificial Sequence
  chemically synthesized
ccggccagtttctccacctg

SEQ ID NO: 1625 - DNA, 20 bp, Artificial Sequence
  chemically synthesized
tctcgtcctgcatccttctc

SEQ ID NO: 1626 - DNA, 20 bp, Artificial Sequence
  chemically synthesized
ctcgtcctgcatccttctcc

SEQ ID NO: 1627 - DNA, 20 bp, Artificial Sequence
  chemically synthesized
gtcctgcatccttctccagg

SEQ ID NO: 1628 - DNA, 20 bp, Artificial Sequence
  chemically synthesized
tcctgcatccttctccaggc

SEQ ID NO: 1629 - DNA, 20 bp, Artificial Sequence
  chemically synthesized
ccttctccaggcaggtcccc

SEQ ID NO: 1630 - DNA, 20 bp, Artificial Sequence
  chemically synthesized
caagcatcgcccccctgctg

SEQ ID NO: 1631 - DNA, 20 bp, Artificial Sequence
  chemically synthesized
cccctgctgtggctgttccc

SEQ ID NO: 1632 - DNA, 20 bp, Artificial Sequence
  chemically synthesized
tgtggctgttcccaagttct

SEQ ID NO: 1633 - DNA, 20 bp, Artificial Sequence
  chemically synthesized
gtggctgttcccaagttctt

SEQ ID NO: 1634 - DNA, 20 bp, Artificial Sequence
  chemically synthesized
tggctgttcccaagttctta

SEQ ID NO: 1635 - DNA, 20 bp, Artificial Sequence
  chemically synthesized
agttcttagggtaccccacg

SEQ ID NO: 1636 - DNA, 20 bp, Artificial Sequence
  chemically synthesized
gttcttagggtaccccacgt

SEQ ID NO: 1637 - DNA, 20 bp, Artificial Sequence
  chemically synthesized
acgtgggtttatcaaccact

SEQ ID NO: 1638 - DNA, 20 bp, Artificial Sequence
  chemically synthesized
gggtttatcaaccacttggt

SEQ ID NO: 1639 - DNA, 20 bp, Artificial Sequence
  chemically synthesized
ggtttatcaaccacttggtg

SEQ ID NO: 1640 - DNA, 20 bp, Artificial Sequence
  chemically synthesized
tatcaaccacttggtgaggc

SEQ ID NO: 1641 - DNA, 20 bp, Artificial Sequence
  chemically synthesized
ttcctgcaccccaattgcct

SEQ ID NO: 1642 - DNA, 20 bp, Artificial Sequence
  chemically synthesized
ctgcaccccaattgccttag

SEQ ID NO: 1643 - DNA, 20 bp, Artificial Sequence
  chemically synthesized
accccaattgccttagtggc

SEQ ID NO: 1644 - DNA, 20 bp, Artificial Sequence
  chemically synthesized
ccccaattgccttagtggct

SEQ ID NO: 1645 - DNA, 20 bp, Artificial Sequence
  chemically synthesized
cccaattgccttagtggcta

SEQ ID NO: 1646 - DNA, 20 bp, Artificial Sequence
  chemically synthesized
ccaattgccttagtggctag

SEQ ID NO: 1647 - DNA, 20 bp, Artificial Sequence
  chemically synthesized
caattgccttagtggctagg

SEQ ID NO: 1648 - DNA, 20 bp, Artificial Sequence
  chemically synthesized
tgccttagtggctagggggt

SEQ ID NO: 1649 - DNA, 20 bp, Artificial Sequence
  chemically synthesized
gccttagtggctagggggtt

SEQ ID NO: 1650 - DNA, 20 bp, Artificial Sequence
  chemically synthesized
ccttagtggctagggggttg

SEQ ID NO: 1651 - DNA, 20 bp, Artificial Sequence
  chemically synthesized
cttagtggctagggggttgg

SEQ ID NO: 1652 - DNA, 20 bp, Artificial Sequence
  chemically synthesized
gtggctagggggttgggggc

SEQ ID NO: 1653 - DNA, 20 bp, Artificial Sequence
  chemically synthesized
ggctagggggttgggggcta

SEQ ID NO: 1654 - DNA, 20 bp, Artificial Sequence
  chemically synthesized
tagggggttgggggctagag

SEQ ID NO: 1655 - DNA, 20 bp, Artificial Sequence
  chemically synthesized
agggggttgggggctagagt

SEQ ID NO: 1656 - DNA, 20 bp, Artificial Sequence
  chemically synthesized
ggggttgggggctagagtag

SEQ ID NO: 1657 - DNA, 20 bp, Artificial Sequence
  chemically synthesized
gggttgggggctagagtagg

SEQ ID NO: 1658 - DNA, 20 bp, Artificial Sequence
  chemically synthesized
ggttgggggctagagtagga

SEQ ID NO: 1659 - DNA, 20 bp, Artificial Sequence
  chemically synthesized
gttgggggctagagtaggag

SEQ ID NO: 1660 - DNA, 20 bp, Artificial Sequence
  chemically synthesized
ggggctagagtaggaggggc

SEQ ID NO: 1661 - DNA, 20 bp, Artificial Sequence
  chemically synthesized
ggctagagtaggaggggctg

SEQ ID NO: 1662 - DNA, 20 bp, Artificial Sequence
  chemically synthesized
agagtaggaggggctggagc

SEQ ID NO: 1663 - DNA, 20 bp, Artificial Sequence
  chemically synthesized
gagtaggaggggctggagcc

SEQ ID NO: 1664 - DNA, 20 bp, Artificial Sequence
  chemically synthesized
ggggctggagccaggattct

SEQ ID NO: 1665 - DNA, 20 bp, Artificial Sequence
  chemically synthesized
gggctggagccaggattctt

SEQ ID NO: 1666 - DNA, 20 bp, Artificial Sequence
  chemically synthesized
ggctggagccaggattctta

SEQ ID NO: 1667 - DNA, 20 bp, Artificial Sequence
  chemically synthesized
ccaggattcttagggctgaa

SEQ ID NO: 1668 - DNA, 20 bp, Artificial Sequence
  chemically synthesized
aggattcttagggctgaaca

SEQ ID NO: 1669 - DNA, 20 bp, Artificial Sequence
  chemically synthesized
attcttagggctgaacagag

SEQ ID NO: 1670 - DNA, 20 bp, Artificial Sequence
  chemically synthesized
tcttagggctgaacagagaa

SEQ ID NO: 1671 - DNA, 20 bp, Artificial Sequence
  chemically synthesized
agggctgaacagagaagagc

SEQ ID NO: 1672 - DNA, 20 bp, Artificial Sequence
  chemically synthesized
gggctgaacagagaagagct

SEQ ID NO: 1673 - DNA, 20 bp, Artificial Sequence
  chemically synthesized
ggctgaacagagaagagctg

SEQ ID NO: 1674 - DNA, 20 bp, Artificial Sequence
  chemically synthesized
gctgaacagagaagagctgg

SEQ ID NO: 1675 - DNA, 20 bp, Artificial Sequence
  chemically synthesized
acagagaagagctgggggcc

SEQ ID NO: 1676 - DNA, 20 bp, Artificial Sequence
  chemically synthesized
cagagaagagctgggggcct

SEQ ID NO: 1677 - DNA, 20 bp, Artificial Sequence
  chemically synthesized
gagctgggggcctgggctcc

SEQ ID NO: 1678 - DNA, 20 bp, Artificial Sequence
  chemically synthesized
agctgggggcctgggctcct

SEQ ID NO: 1679 - DNA, 20 bp, Artificial Sequence
  chemically synthesized
gggcctgggctcctgggttt

SEQ ID NO: 1680 - DNA, 20 bp, Artificial Sequence
  chemically synthesized
gcctgggctcctgggtttga

SEQ ID NO: 1681 - DNA, 20 bp, Artificial Sequence
  chemically synthesized
ctgggctcctgggtttgaga

SEQ ID NO: 1682 - DNA, 20 bp, Artificial Sequence
  chemically synthesized
tgggctcctgggtttgagag

SEQ ID NO: 1683 - DNA, 20 bp, Artificial Sequence
  chemically synthesized
ggctcctgggtttgagagag

SEQ ID NO: 1684 - DNA, 20 bp, Artificial Sequence
  chemically synthesized
gctcctgggtttgagagagg

SEQ ID NO: 1685 - DNA, 20 bp, Artificial Sequence
  chemically synthesized
ctcctgggtttgagagagga

SEQ ID NO: 1686 - DNA, 20 bp, Artificial Sequence
  chemically synthesized
tcctgggtttgagagaggag

SEQ ID NO: 1687 - DNA, 20 bp, Artificial Sequence
  chemically synthesized
gggtttgagagaggaggggc

SEQ ID NO: 1688 - DNA, 20 bp, Artificial Sequence
  chemically synthesized
ggtttgagagaggaggggct

SEQ ID NO: 1689 - DNA, 20 bp, Artificial Sequence
  chemically synthesized
gtttgagagaggaggggctg

SEQ ID NO: 1690 - DNA, 20 bp, Artificial Sequence
  chemically synthesized
agagaggaggggctggggcc

SEQ ID NO: 1691 - DNA, 20 bp, Artificial Sequence
  chemically synthesized
ggggctggggcctggactcc

SEQ ID NO: 1692 - DNA, 20 bp, Artificial Sequence
  chemically synthesized
gggctggggcctggactcct

SEQ ID NO: 1693 - DNA, 20 bp, Artificial Sequence
  chemically synthesized
gggcctggactcctgggtcc

SEQ ID NO: 1694 - DNA, 20 bp, Artificial Sequence
  chemically synthesized
ggcctggactcctgggtccg

SEQ ID NO: 1695 - DNA, 20 bp, Artificial Sequence
  chemically synthesized
gcctggactcctgggtccga

SEQ ID NO: 1696 - DNA, 20 bp, Artificial Sequence
  chemically synthesized
ctggactcctgggtccgagg

SEQ ID NO: 1697 - DNA, 20 bp, Artificial Sequence
  chemically synthesized
tggactcctgggtccgaggg

SEQ ID NO: 1698 - DNA, 20 bp, Artificial Sequence
  chemically synthesized
gactcctgggtccgagggag

SEQ ID NO: 1699 - DNA, 20 bp, Artificial Sequence
  chemically synthesized
actcctgggtccgagggagg

SEQ ID NO: 1700 - DNA, 20 bp, Artificial Sequence
  chemically synthesized
ctcctgggtccgagggagga

SEQ ID NO: 1701 - DNA, 20 bp, Artificial Sequence
  chemically synthesized
tcctgggtccgagggaggag

SEQ ID NO: 1702 - DNA, 20 bp, Artificial Sequence
  chemically synthesized
gggtccgagggaggaggggc

SEQ ID NO: 1703 - DNA, 20 bp, Artificial Sequence
  chemically synthesized
ggtccgagggaggaggggct

SEQ ID NO: 1704 - DNA, 20 bp, Artificial Sequence
  chemically synthesized
gtccgagggaggaggggctg

SEQ ID NO: 1705 - DNA, 20 bp, Artificial Sequence
  chemically synthesized
agggaggaggggctggggcc

SEQ ID NO: 1706 - DNA, 20 bp, Artificial Sequence
  chemically synthesized
ggggctggggcctggactcc

SEQ ID NO: 1707 - DNA, 20 bp, Artificial Sequence
  chemically synthesized
gggctggggcctggactcct

SEQ ID NO: 1708 - DNA, 20 bp, Artificial Sequence
  chemically synthesized
gggcctggactcctgggtct

SEQ ID NO: 1709 - DNA, 20 bp, Artificial Sequence
  chemically synthesized
ggcctggactcctgggtctg

SEQ ID NO: 1710 - DNA, 20 bp, Artificial Sequence
  chemically synthesized
gcctggactcctgggtctga

SEQ ID NO: 1711 - DNA, 20 bp, Artificial Sequence
  chemically synthesized
tggactcctgggtctgaggg

SEQ ID NO: 1712 - DNA, 20 bp, Artificial Sequence
  chemically synthesized
gactcctgggtctgagggtg

SEQ ID NO: 1713 - DNA, 20 bp, Artificial Sequence
  chemically synthesized
actcctgggtctgagggtgg

SEQ ID NO: 1714 - DNA, 20 bp, Artificial Sequence
  chemically synthesized
ctcctgggtctgagggtgga

SEQ ID NO: 1715 - DNA, 20 bp, Artificial Sequence
  chemically synthesized
gggtctgagggtggagggac

SEQ ID NO: 1716 - DNA, 20 bp, Artificial Sequence
  chemically synthesized
ggtctgagggtggagggact

SEQ ID NO: 1717 - DNA, 20 bp, Artificial Sequence
  chemically synthesized
gtctgagggtggagggactg

SEQ ID NO: 1718 - DNA, 20 bp, Artificial Sequence
  chemically synthesized
tctgagggtggagggactgg

SEQ ID NO: 1719 - DNA, 20 bp, Artificial Sequence
  chemically synthesized
gggtggagggactgggggcc

SEQ ID NO: 1720 - DNA, 20 bp, Artificial Sequence
  chemically synthesized
ggactgggggcctggactcc

SEQ ID NO: 1721 - DNA, 20 bp, Artificial Sequence
  chemically synthesized
gactgggggcctggactcct

SEQ ID NO: 1722 - DNA, 20 bp, Artificial Sequence
  chemically synthesized
gggcctggactcctgggtcc

SEQ ID NO: 1723 - DNA, 20 bp, Artificial Sequence
  chemically synthesized
ggcctggactcctgggtccg

SEQ ID NO: 1724 - DNA, 20 bp, Artificial Sequence
  chemically synthesized
gcctggactcctgggtccga

SEQ ID NO: 1725 - DNA, 20 bp, Artificial Sequence
  chemically synthesized
ctggactcctgggtccgagg

SEQ ID NO: 1726 - DNA, 20 bp, Artificial Sequence
  chemically synthesized
tggactcctgggtccgaggg

SEQ ID NO: 1727 - DNA, 20 bp, Artificial Sequence
  chemically synthesized
gactcctgggtccgagggag

SEQ ID NO: 1728 - DNA, 20 bp, Artificial Sequence
  chemically synthesized
actcctgggtccgagggagg

SEQ ID NO: 1729 - DNA, 20 bp, Artificial Sequence
  chemically synthesized
ctcctgggtccgagggagga

SEQ ID NO: 1730 - DNA, 20 bp, Artificial Sequence
  chemically synthesized
tcctgggtccgagggaggag

SEQ ID NO: 1731 - DNA, 20 bp, Artificial Sequence
  chemically synthesized
gggtccgagggaggaggggc

SEQ ID NO: 1732 - DNA, 20 bp, Artificial Sequence
  chemically synthesized
ggtccgagggaggaggggct

SEQ ID NO: 1733 - DNA, 20 bp, Artificial Sequence
  chemically synthesized
gtccgagggaggaggggctg

SEQ ID NO: 1734 - DNA, 20 bp, Artificial Sequence
  chemically synthesized
agggaggaggggctggggcc

SEQ ID NO: 1735 - DNA, 20 bp, Artificial Sequence
  chemically synthesized
ggggctggggcctggactcg

SEQ ID NO: 1736 - DNA, 20 bp, Artificial Sequence
  chemically synthesized
gggctggggcctggactcgt

SEQ ID NO: 1737 - DNA, 20 bp, Artificial Sequence
  chemically synthesized
gggcctggactcgtgggtct

SEQ ID NO: 1738 - DNA, 20 bp, Artificial Sequence
  chemically synthesized
ggcctggactcgtgggtctg

SEQ ID NO: 1739 - DNA, 20 bp, Artificial Sequence
  chemically synthesized
gcctggactcgtgggtctga

SEQ ID NO: 1740 - DNA, 20 bp, Artificial Sequence
  chemically synthesized
ctggactcgtgggtctgagg

SEQ ID NO: 1741 - DNA, 20 bp, Artificial Sequence
  chemically synthesized
tggactcgtgggtctgaggg

SEQ ID NO: 1742 - DNA, 20 bp, Artificial Sequence
  chemically synthesized
gactcgtgggtctgagggag

SEQ ID NO: 1743 - DNA, 20 bp, Artificial Sequence
  chemically synthesized
actcgtgggtctgagggagg

SEQ ID NO: 1744 - DNA, 20 bp, Artificial Sequence
  chemically synthesized
ctcgtgggtctgagggagga

SEQ ID NO: 1745 - DNA, 20 bp, Artificial Sequence
  chemically synthesized
tcgtgggtctgagggaggag

SEQ ID NO: 1746 - DNA, 20 bp, Artificial Sequence
  chemically synthesized
gggtctgagggaggaggggc

SEQ ID NO: 1747 - DNA, 20 bp, Artificial Sequence
  chemically synthesized
ggtctgagggaggaggggct

SEQ ID NO: 1748 - DNA, 20 bp, Artificial Sequence
  chemically synthesized
gtctgagggaggaggggctg

SEQ ID NO: 1749 - DNA, 20 bp, Artificial Sequence
  chemically synthesized
tctgagggaggaggggctgg

SEQ ID NO: 1750 - DNA, 20 bp, Artificial Sequence
  chemically synthesized
gggaggaggggctgggggcc

SEQ ID NO: 1751 - DNA, 20 bp, Artificial Sequence
  chemically synthesized
gggctgggggcctggacttc

SEQ ID NO: 1752 - DNA, 20 bp, Artificial Sequence
  chemically synthesized
ggctgggggcctggacttct

SEQ ID NO: 1753 - DNA, 20 bp, Artificial Sequence
  chemically synthesized
gggcctggacttctgggtct

SEQ ID NO: 1754 - DNA, 20 bp, Artificial Sequence
  chemically synthesized
ggcctggacttctgggtctt

SEQ ID NO: 1755 - DNA, 20 bp, Artificial Sequence
  chemically synthesized
gcctggacttctgggtctta

SEQ ID NO: 1756 - DNA, 20 bp, Artificial Sequence
  chemically synthesized
ctggacttctgggtcttagg

SEQ ID NO: 1757 - DNA, 20 bp, Artificial Sequence
  chemically synthesized
tggacttctgggtcttaggg

SEQ ID NO: 1758 - DNA, 20 bp, Artificial Sequence
  chemically synthesized
acttctgggtcttagggagg

SEQ ID NO: 1759 - DNA, 20 bp, Artificial Sequence
  chemically synthesized
cttctgggtcttagggaggc

SEQ ID NO: 1760 - DNA, 20 bp, Artificial Sequence
  chemically synthesized
ttctgggtcttagggaggcg

SEQ ID NO: 1761 - DNA, 20 bp, Artificial Sequence
  chemically synthesized
gggtcttagggaggcggggc

SEQ ID NO: 1762 - DNA, 20 bp, Artificial Sequence
  chemically synthesized
ggtcttagggaggcggggct

SEQ ID NO: 1763 - DNA, 20 bp, Artificial Sequence
  chemically synthesized
tagggaggcggggctgggcc

SEQ ID NO: 1764 - DNA, 20 bp, Artificial Sequence
  chemically synthesized
cggggctgggcctggacccc

SEQ ID NO: 1765 - DNA, 20 bp, Artificial Sequence
  chemically synthesized
ggggctgggcctggacccct

SEQ ID NO: 1766 - DNA, 20 bp, Artificial Sequence
  chemically synthesized
cctggacccctgggtctgaa

SEQ ID NO: 1767 - DNA, 20 bp, Artificial Sequence
  chemically synthesized
ctggacccctgggtctgaat

SEQ ID NO: 1768 - DNA, 20 bp, Artificial Sequence
  chemically synthesized
tggacccctgggtctgaatg

SEQ ID NO: 1769 - DNA, 20 bp, Artificial Sequence
  chemically synthesized
gacccctgggtctgaatggg

SEQ ID NO: 1770 - DNA, 20 bp, Artificial Sequence
  chemically synthesized
cccctgggtctgaatgggga

SEQ ID NO: 1771 - DNA, 20 bp, Artificial Sequence
  chemically synthesized
ccctgggtctgaatggggag

SEQ ID NO: 1772 - DNA, 20 bp, Artificial Sequence
  chemically synthesized
gggtctgaatggggagaggc

SEQ ID NO: 1773 - DNA, 20 bp, Artificial Sequence
  chemically synthesized
ggtctgaatggggagaggct

SEQ ID NO: 1774 - DNA, 20 bp, Artificial Sequence
  chemically synthesized
gtctgaatggggagaggctg

SEQ ID NO: 1775 - DNA, 20 bp, Artificial Sequence
  chemically synthesized
tctgaatggggagaggctgg

SEQ ID NO: 1776 - DNA, 20 bp, Artificial Sequence
  chemically synthesized
atggggagaggctgggggcc

SEQ ID NO: 1777 - DNA, 20 bp, Artificial Sequence
  chemically synthesized
gggcctggactccttcatct

SEQ ID NO: 1778 - DNA, 20 bp, Artificial Sequence
  chemically synthesized
ggcctggactccttcatctg

SEQ ID NO: 1779 - DNA, 20 bp, Artificial Sequence
  chemically synthesized
gcctggactccttcatctga

SEQ ID NO: 1780 - DNA, 20 bp, Artificial Sequence
  chemically synthesized
tggactccttcatctgaggg

SEQ ID NO: 1781 - DNA, 20 bp, Artificial Sequence
  chemically synthesized
actccttcatctgagggcgg

SEQ ID NO: 1782 - DNA, 20 bp, Artificial Sequence
  chemically synthesized
ctccttcatctgagggcgga

SEQ ID NO: 1783 - DNA, 20 bp, Artificial Sequence
  chemically synthesized
tccttcatctgagggcggaa

SEQ ID NO: 1784 - DNA, 20 bp, Artificial Sequence
  chemically synthesized
tcatctgagggcggaagggc

SEQ ID NO: 1785 - DNA, 20 bp, Artificial Sequence
  chemically synthesized
catctgagggcggaagggct

SEQ ID NO: 1786 - DNA, 20 bp, Artificial Sequence
  chemically synthesized
atctgagggcggaagggctg

SEQ ID NO: 1787 - DNA, 20 bp, Artificial Sequence
  chemically synthesized
agggcggaagggctggggcc

SEQ ID NO: 1788 - DNA, 20 bp, Artificial Sequence
  chemically synthesized
agggctggggcctggcctcc

SEQ ID NO: 1789 - DNA, 20 bp, Artificial Sequence
  chemically synthesized
gggctggggcctggcctcct

SEQ ID NO: 1790 - DNA, 20 bp, Artificial Sequence
  chemically synthesized
gcctggcctcctgggttgaa

SEQ ID NO: 1791 - DNA, 20 bp, Artificial Sequence
  chemically synthesized
cctggcctcctgggttgaat

SEQ ID NO: 1792 - DNA, 20 bp, Artificial Sequence
  chemically synthesized
ctggcctcctgggttgaatg

SEQ ID NO: 1793 - DNA, 20 bp, Artificial Sequence
  chemically synthesized
ggcctcctgggttgaatggg

SEQ ID NO: 1794 - DNA, 20 bp, Artificial Sequence
  chemically synthesized
gcctcctgggttgaatgggg

SEQ ID NO: 1795 - DNA, 20 bp, Artificial Sequence
  chemically synthesized
cctcctgggttgaatgggga

SEQ ID NO: 1796 - DNA, 20 bp, Artificial Sequence
  chemically synthesized
ctcctgggttgaatggggag

SEQ ID NO: 1797 - DNA, 20 bp, Artificial Sequence
  chemically synthesized
tgggttgaatggggaggggt

SEQ ID NO: 1798 - DNA, 20 bp, Artificial Sequence
  chemically synthesized
gggttgaatggggaggggtt

SEQ ID NO: 1799 - DNA, 20 bp, Artificial Sequence
  chemically synthesized
gaatggggaggggttgggcc

SEQ ID NO: 1800 - DNA, 20 bp, Artificial Sequence
  chemically synthesized
gaggggttgggcctggactc

SEQ ID NO: 1801 - DNA, 20 bp, Artificial Sequence
  chemically synthesized
ggggttgggcctggactctg

SEQ ID NO: 1802 - DNA, 20 bp, Artificial Sequence
  chemically synthesized
ggcctggactctggagtccc

SEQ ID NO: 1803 - DNA, 20 bp, Artificial Sequence
  chemically synthesized
actctggagtccctggtgcc

SEQ ID NO: 1804 - DNA, 20 bp, Artificial Sequence
  chemically synthesized
ctctggagtccctggtgccc

SEQ ID NO: 1805 - DNA, 20 bp, Artificial Sequence
  chemically synthesized
agtccctggtgcccaggcct

SEQ ID NO: 1806 - DNA, 20 bp, Artificial Sequence
  chemically synthesized
gtccctggtgcccaggcctc

SEQ ID NO: 1807 - DNA, 20 bp, Artificial Sequence
  chemically synthesized
caggcctcaggcatctttca

SEQ ID NO: 1808 - DNA, 20 bp, Artificial Sequence
  chemically synthesized
aggcctcaggcatctttcac

SEQ ID NO: 1809 - DNA, 20 bp, Artificial Sequence
  chemically synthesized
ggcctcaggcatctttcaca

SEQ ID NO: 1810 - DNA, 20 bp, Artificial Sequence
  chemically synthesized
tttcacagggatgcctgtac

SEQ ID NO: 1811 - DNA, 20 bp, Artificial Sequence
  chemically synthesized
ttcacagggatgcctgtact

SEQ ID NO: 1812 - DNA, 20 bp, Artificial Sequence
  chemically synthesized
acagggatgcctgtactggg

SEQ ID NO: 1813 - DNA, 20 bp, Artificial Sequence
  chemically synthesized
cagggatgcctgtactgggc

SEQ ID NO: 1814 - DNA, 20 bp, Artificial Sequence
  chemically synthesized
tgtactgggcaggtccttga

SEQ ID NO: 1815 - DNA, 20 bp, Artificial Sequence
  chemically synthesized
gtactgggcaggtccttgaa

SEQ ID NO: 1816 - DNA, 20 bp, Artificial Sequence
  chemically synthesized
tactgggcaggtccttgaaa

SEQ ID NO: 1817 - DNA, 20 bp, Artificial Sequence
  chemically synthesized
gggcaggtccttgaaaggga

SEQ ID NO: 1818 - DNA, 20 bp, Artificial Sequence
  chemically synthesized
ggcaggtccttgaaagggaa

SEQ ID NO: 1819 - DNA, 20 bp, Artificial Sequence
  chemically synthesized
tcccctatcgccatgacaac

SEQ ID NO: 1820 - DNA, 20 bp, Artificial Sequence
  chemically synthesized
cccctatcgccatgacaact

SEQ ID NO: 1821 - DNA, 20 bp, Artificial Sequence
  chemically synthesized
ctatcgccatgacaactggg

SEQ ID NO: 1822 - DNA, 20 bp, Artificial Sequence
  chemically synthesized
acaactgggtggaaataaac

SEQ ID NO: 1823 - DNA, 20 bp, Artificial Sequence
  chemically synthesized
tgggtggaaataaacgagcc

SEQ ID NO: 1824 - DNA, 20 bp, Artificial Sequence
  chemically synthesized
agccgagttcatcccgttcc

SEQ ID NO: 1825 - DNA, 20 bp, Artificial Sequence
  chemically synthesized
gccgagttcatcccgttccc

SEQ ID NO: 1826 - DNA, 20 bp, Artificial Sequence
  chemically synthesized
ccgagttcatcccgttccca

SEQ ID NO: 1827 - DNA, 20 bp, Artificial Sequence
  chemically synthesized
tcccgttcccagggcacgtg

SEQ ID NO: 1828 - DNA, 20 bp, Artificial Sequence
  chemically synthesized
gggcacgtgcggccccttca

SEQ ID NO: 1829 - DNA, 20 bp, Artificial Sequence
  chemically synthesized
gtgcggccccttcacagccc

SEQ ID NO: 1830 - DNA, 20 bp, Artificial Sequence
  chemically synthesized
tttccatgacctcatgctct

SEQ ID NO: 1831 - DNA, 20 bp, Artificial Sequence
  chemically synthesized
cctcatgctcttggccctcg

SEQ ID NO: 1832 - DNA, 20 bp, Artificial Sequence
  chemically synthesized
tagctccctcccgcctcctc

SEQ ID NO: 1833 - DNA, 20 bp, Artificial Sequence
  chemically synthesized
tccctcccgcctcctccaga

SEQ ID NO: 1834 - DNA, 20 bp, Artificial Sequence
  chemically synthesized
ccctcccgcctcctccagat

SEQ ID NO: 1835 - DNA, 20 bp, Artificial Sequence
  chemically synthesized
tcccgcctcctccagatggg

SEQ ID NO: 1836 - DNA, 20 bp, Artificial Sequence
  chemically synthesized
ctcctccagatgggcagctt

SEQ ID NO: 1837 - DNA, 20 bp, Artificial Sequence
  chemically synthesized
cctccagatgggcagctttg

SEQ ID NO: 1838 - DNA, 20 bp, Artificial Sequence
  chemically synthesized
tccagatgggcagctttgga

SEQ ID NO: 1839 - DNA, 20 bp, Artificial Sequence
  chemically synthesized
ccagatgggcagctttggag

SEQ ID NO: 1840 - DNA, 20 bp, Artificial Sequence
  chemically synthesized
atgggcagctttggagaggt

SEQ ID NO: 1841 - DNA, 20 bp, Artificial Sequence
  chemically synthesized
tgggcagctttggagaggtg

SEQ ID NO: 1842 - DNA, 20 bp, Artificial Sequence
  chemically synthesized
gggcagctttggagaggtga

SEQ ID NO: 1843 - DNA, 20 bp, Artificial Sequence
  chemically synthesized
ctttggagaggtgagggact

SEQ ID NO: 1844 - DNA, 20 bp, Artificial Sequence
  chemically synthesized
tttggagaggtgagggactt

SEQ ID NO: 1845 - DNA, 20 bp, Artificial Sequence
  chemically synthesized
ttggagaggtgagggacttg

SEQ ID NO: 1846 - DNA, 20 bp, Artificial Sequence
  chemically synthesized
tggagaggtgagggacttgg

SEQ ID NO: 1847 - DNA, 20 bp, Artificial Sequence
  chemically synthesized
ggagaggtgagggacttggg

SEQ ID NO: 1848 - DNA, 20 bp, Artificial Sequence
  chemically synthesized
ttggggggtaatttatcccg

SEQ ID NO: 1849 - DNA, 20 bp, Artificial Sequence
  chemically synthesized
ggtaatttatcccgtggatc

SEQ ID NO: 1850 - DNA, 20 bp, Artificial Sequence
  chemically synthesized
gtaatttatcccgtggatct

SEQ ID NO: 1851 - DNA, 20 bp, Artificial Sequence
  chemically synthesized
aatttatcccgtggatctag

SEQ ID NO: 1852 - DNA, 20 bp, Artificial Sequence
  chemically synthesized
atcccgtggatctaggagtt

SEQ ID NO: 1853 - DNA, 20 bp, Artificial Sequence
  chemically synthesized
gtttagcttcactccttcct

SEQ ID NO: 1854 - DNA, 20 bp, Artificial Sequence
  chemically synthesized
cttcactccttcctcagctc

SEQ ID NO: 1855 - DNA, 20 bp, Artificial Sequence
  chemically synthesized
ctccttcctcagctccagtt

SEQ ID NO: 1856 - DNA, 20 bp, Artificial Sequence
  chemically synthesized
tccttcctcagctccagttc

SEQ ID NO: 1857 - DNA, 20 bp, Artificial Sequence
  chemically synthesized
ctcagctccagttcaggtcc

SEQ ID NO: 1858 - DNA, 20 bp, Artificial Sequence
  chemically synthesized
cagctccagttcaggtcccg

SEQ ID NO: 1859 - DNA, 20 bp, Artificial Sequence
  chemically synthesized
ttcaggtcccggagcccacc

SEQ ID NO: 1860 - DNA, 20 bp, Artificial Sequence
  chemically synthesized
ggagcccacccagtgtccac

SEQ ID NO: 1861 - DNA, 20 bp, Artificial Sequence
  chemically synthesized
gagcccacccagtgtccaca

SEQ ID NO: 1862 - DNA, 20 bp, Artificial Sequence
  chemically synthesized
cacccagtgtccacaaggcc

SEQ ID NO: 1863 - DNA, 20 bp, Artificial Sequence
  chemically synthesized
acccagtgtccacaaggcct

SEQ ID NO: 1864 - DNA, 20 bp, Artificial Sequence
  chemically synthesized
cccagtgtccacaaggcctg

SEQ ID NO: 1865 - DNA, 20 bp, Artificial Sequence
  chemically synthesized
gtgtccacaaggcctggggc

SEQ ID NO: 1866 - DNA, 20 bp, Artificial Sequence
  chemically synthesized
aagtccctcctccgaccccc

SEQ ID NO: 1867 - DNA, 20 bp, Artificial Sequence
  chemically synthesized
tcctccgaccccctggactt

SEQ ID NO: 1868 - DNA, 20 bp, Artificial Sequence
  chemically synthesized
acttcggcttttgtcccccc

SEQ ID NO: 1869 - DNA, 20 bp, Artificial Sequence
  chemically synthesized
gcttttgtccccccaagttt

SEQ ID NO: 1870 - DNA, 20 bp, Artificial Sequence
  chemically synthesized
cccccaagttttggacccct

SEQ ID NO: 1871 - DNA, 20 bp, Artificial Sequence
  chemically synthesized
ccccaagttttggaccccta

SEQ ID NO: 1872 - DNA, 20 bp, Artificial Sequence
  chemically synthesized
cccaagttttggacccctaa

SEQ ID NO: 1873 - DNA, 20 bp, Artificial Sequence
  chemically synthesized
aagttttggacccctaaggg

SEQ ID NO: 1874 - DNA, 20 bp, Artificial Sequence
  chemically synthesized
tggacccctaagggaagaat

SEQ ID NO: 1875 - DNA, 20 bp, Artificial Sequence
  chemically synthesized
cctaagggaagaatgagaaa

SEQ ID NO: 1876 - DNA, 20 bp, Artificial Sequence
  chemically synthesized
aagggaagaatgagaaacgg

SEQ ID NO: 1877 - DNA, 20 bp, Artificial Sequence
  chemically synthesized
tgagaaacggtggcccgtgt

SEQ ID NO: 1878 - DNA, 20 bp, Artificial Sequence
  chemically synthesized
cggtggcccgtgtcagcccc

SEQ ID NO: 1879 - DNA, 20 bp, Artificial Sequence
  chemically synthesized
cccgtgtcagcccctggctg

SEQ ID NO: 1880 - DNA, 20 bp, Artificial Sequence
  chemically synthesized
ccgtgtcagcccctggctgc

SEQ ID NO: 1881 - DNA, 20 bp, Artificial Sequence
  chemically synthesized
cgtgtcagcccctggctgca

SEQ ID NO: 1882 - DNA, 20 bp, Artificial Sequence
  chemically synthesized
cctggctgcagggccccgtg

SEQ ID NO: 1883 - DNA, 20 bp, Artificial Sequence
  chemically synthesized
tggctgcagggccccgtgca

SEQ ID NO: 1884 - DNA, 20 bp, Artificial Sequence
  chemically synthesized
ggctgcagggccccgtgcag

SEQ ID NO: 1885 - DNA, 20 bp, Artificial Sequence
  chemically synthesized
gctgcagggccccgtgcaga

SEQ ID NO: 1886 - DNA, 20 bp, Artificial Sequence
  chemically synthesized
ctgcagggccccgtgcagag

SEQ ID NO: 1887 - DNA, 20 bp, Artificial Sequence
  chemically synthesized
tgcagggccccgtgcagagg

SEQ ID NO: 1888 - DNA, 20 bp, Artificial Sequence
  chemically synthesized
gccccgtgcagagggggcct

SEQ ID NO: 1889 - DNA, 20 bp, Artificial Sequence
  chemically synthesized
cagagggggcctcagtgaac

SEQ ID NO: 1890 - DNA, 20 bp, Artificial Sequence
  chemically synthesized
gagggggcctcagtgaactg

SEQ ID NO: 1891 - DNA, 20 bp, Artificial Sequence
  chemically synthesized
ctcagtgaactggagtgtga

SEQ ID NO: 1892 - DNA, 20 bp, Artificial Sequence
  chemically synthesized
tgaactggagtgtgacagcc

SEQ ID NO: 1893 - DNA, 20 bp, Artificial Sequence
  chemically synthesized
gaactggagtgtgacagcct

SEQ ID NO: 1894 - DNA, 20 bp, Artificial Sequence
  chemically synthesized
aactggagtgtgacagcctg

SEQ ID NO: 1895 - DNA, 20 bp, Artificial Sequence
  chemically synthesized
gagtgtgacagcctggggcc

SEQ ID NO: 1896 - DNA, 20 bp, Artificial Sequence
  chemically synthesized
agtgtgacagcctggggccc

SEQ ID NO: 1897 - DNA, 20 bp, Artificial Sequence
  chemically synthesized
cagcctggggcccaggcaca

SEQ ID NO: 1898 - DNA, 20 bp, Artificial Sequence
  chemically synthesized
agcctggggcccaggcacac

SEQ ID NO: 1899 - DNA, 20 bp, Artificial Sequence
  chemically synthesized
ggcccaggcacacaggtgtg

SEQ ID NO: 1900 - DNA, 20 bp, Artificial Sequence
  chemically synthesized
gtgcagctgtctcacccctc

SEQ ID NO: 1901 - DNA, 20 bp, Artificial Sequence
  chemically synthesized
tgcagctgtctcacccctct

SEQ ID NO: 1902 - DNA, 20 bp, Artificial Sequence
  chemically synthesized
cagctgtctcacccctctgg

SEQ ID NO: 1903 - DNA, 20 bp, Artificial Sequence
  chemically synthesized
acccctctgggagtcccgcc

SEQ ID NO: 1904 - DNA, 20 bp, Artificial Sequence
  chemically synthesized
cccctctgggagtcccgccc

SEQ ID NO: 1905 - DNA, 20 bp, Artificial Sequence
  chemically synthesized
ggagtcccgcccaggcccct

SEQ ID NO: 1906 - DNA, 20 bp, Artificial Sequence
  chemically synthesized
ccaggcccctgagtctgtcc

SEQ ID NO: 1907 - DNA, 20 bp, Artificial Sequence
  chemically synthesized
cccctgagtctgtcccagca

SEQ ID NO: 1908 - DNA, 20 bp, Artificial Sequence
  chemically synthesized
ccctgagtctgtcccagcac

SEQ ID NO: 1909 - DNA, 20 bp, Artificial Sequence
  chemically synthesized
cctgagtctgtcccagcaca

SEQ ID NO: 1910 - DNA, 20 bp, Artificial Sequence
  chemically synthesized
gagtctgtcccagcacaggg

SEQ ID NO: 1911 - DNA, 20 bp, Artificial Sequence
  chemically synthesized
tggccttcctccaccctgca

SEQ ID NO: 1912 - DNA, 20 bp, Artificial Sequence
  chemically synthesized
tcctccaccctgcatagccc

SEQ ID NO: 1913 - DNA, 20 bp, Artificial Sequence
  chemically synthesized
cctccaccctgcatagccct

SEQ ID NO: 1914 - DNA, 20 bp, Artificial Sequence
  chemically synthesized
cctgcatagccctgggccca

SEQ ID NO: 1915 - DNA, 20 bp, Artificial Sequence
  chemically synthesized
ggcccacggcttcgttcctg

SEQ ID NO: 1916 - DNA, 20 bp, Artificial Sequence
  chemically synthesized
cccacggcttcgttcctgca

SEQ ID NO: 1917 - DNA, 20 bp, Artificial Sequence
  chemically synthesized
cgttcctgcagagtatctgc

SEQ ID NO: 1918 - DNA, 20 bp, Artificial Sequence
  chemically synthesized
gttcctgcagagtatctgct

SEQ ID NO: 1919 - DNA, 20 bp, Artificial Sequence
  chemically synthesized
ttcctgcagagtatctgctg

SEQ ID NO: 1920 - DNA, 20 bp, Artificial Sequence
  chemically synthesized
ctgcagagtatctgctgggg

SEQ ID NO: 1921 - DNA, 20 bp, Artificial Sequence
  chemically synthesized
tatctgctggggtggtttcc

SEQ ID NO: 1922 - DNA, 20 bp, Artificial Sequence
  chemically synthesized
tggtttccgagcttgaccct

SEQ ID NO: 1923 - DNA, 20 bp, Artificial Sequence
  chemically synthesized
tttccgagcttgacccttgg

SEQ ID NO: 1924 - DNA, 20 bp, Artificial Sequence
  chemically synthesized
ttccgagcttgacccttgga

SEQ ID NO: 1925 - DNA, 20 bp, Artificial Sequence
  chemically synthesized
gcttgacccttggaaggacc

SEQ ID NO: 1926 - DNA, 20 bp, Artificial Sequence
  chemically synthesized
gacccttggaaggacctggc

SEQ ID NO: 1927 - DNA, 20 bp, Artificial Sequence
  chemically synthesized
acccttggaaggacctggct

SEQ ID NO: 1928 - DNA, 20 bp, Artificial Sequence
  chemically synthesized
ggaaggacctggctgggttt

SEQ ID NO: 1929 - DNA, 20 bp, Artificial Sequence
  chemically synthesized
gaaggacctggctgggttta

SEQ ID NO: 1930 - DNA, 20 bp, Artificial Sequence
  chemically synthesized
ggacctggctgggtttaagg

SEQ ID NO: 1931 - DNA, 20 bp, Artificial Sequence
  chemically synthesized
gacctggctgggtttaaggc

SEQ ID NO: 1932 - DNA, 20 bp, Artificial Sequence
  chemically synthesized
cctggctgggtttaaggcag

SEQ ID NO: 1933 - DNA, 20 bp, Artificial Sequence
  chemically synthesized
ctggctgggtttaaggcagg

SEQ ID NO: 1934 - DNA, 20 bp, Artificial Sequence
  chemically synthesized
tggctgggtttaaggcagga

SEQ ID NO: 1935 - DNA, 20 bp, Artificial Sequence
  chemically synthesized
ggctgggtttaaggcaggag

SEQ ID NO: 1936 - DNA, 20 bp, Artificial Sequence
  chemically synthesized
gggtttaaggcaggaggggc

SEQ ID NO: 1937 - DNA, 20 bp, Artificial Sequence
  chemically synthesized
ggtttaaggcaggaggggct

SEQ ID NO: 1938 - DNA, 20 bp, Artificial Sequence
  chemically synthesized
gtttaaggcaggaggggctg

SEQ ID NO: 1939 - DNA, 20 bp, Artificial Sequence
  chemically synthesized
tttaaggcaggaggggctgg

SEQ ID NO: 1940 - DNA, 20 bp, Artificial Sequence
  chemically synthesized
aggcaggaggggctgggggc

SEQ ID NO: 1941 - DNA, 20 bp, Artificial Sequence
  chemically synthesized
ggcaggaggggctgggggcc

SEQ ID NO: 1942 - DNA, 20 bp, Artificial Sequence
  chemically synthesized
gggctgggggccaggactcc

SEQ ID NO: 1943 - DNA, 20 bp, Artificial Sequence
  chemically synthesized
ggccaggactcctggctctg

SEQ ID NO: 1944 - DNA, 20 bp, Artificial Sequence
  chemically synthesized
gccaggactcctggctctga

SEQ ID NO: 1945 - DNA, 20 bp, Artificial Sequence
  chemically synthesized
caggactcctggctctgaag

SEQ ID NO: 1946 - DNA, 20 bp, Artificial Sequence
  chemically synthesized
aggactcctggctctgaagg

SEQ ID NO: 1947 - DNA, 20 bp, Artificial Sequence
  chemically synthesized
gactcctggctctgaaggag

SEQ ID NO: 1948 - DNA, 20 bp, Artificial Sequence
  chemically synthesized
actcctggctctgaaggagg

SEQ ID NO: 1949 - DNA, 20 bp, Artificial Sequence
  chemically synthesized
ctcctggctctgaaggagga

SEQ ID NO: 1950 - DNA, 20 bp, Artificial Sequence
  chemically synthesized
tcctggctctgaaggaggag

SEQ ID NO: 1951 - DNA, 20 bp, Artificial Sequence
  chemically synthesized
ggctctgaaggaggaggggc

SEQ ID NO: 1952 - DNA, 20 bp, Artificial Sequence
  chemically synthesized
aggggctggaacctcttccc

SEQ ID NO: 1953 - DNA, 20 bp, Artificial Sequence
  chemically synthesized
tggaacctcttccctagtct

SEQ ID NO: 1954 - DNA, 20 bp, Artificial Sequence
  chemically synthesized
ctcttccctagtctgagcac

SEQ ID NO: 1955 - DNA, 20 bp, Artificial Sequence
  chemically synthesized
ttccctagtctgagcactgg

SEQ ID NO: 1956 - DNA, 20 bp, Artificial Sequence
  chemically synthesized
agcactggaagcgccacctg

SEQ ID NO: 1957 - DNA, 20 bp, Artificial Sequence
  chemically synthesized
gcactggaagcgccacctgt

SEQ ID NO: 1958 - DNA, 20 bp, Artificial Sequence
  chemically synthesized
ctggaagcgccacctgtggg

SEQ ID NO: 1959 - DNA, 20 bp, Artificial Sequence
  chemically synthesized
gcgccacctgtgggtggtga

SEQ ID NO: 1960 - DNA, 20 bp, Artificial Sequence
  chemically synthesized
cgccacctgtgggtggtgac

SEQ ID NO: 1961 - DNA, 20 bp, Artificial Sequence
  chemically synthesized
gccacctgtgggtggtgacg

SEQ ID NO: 1962 - DNA, 20 bp, Artificial Sequence
  chemically synthesized
ccacctgtgggtggtgacgg

SEQ ID NO: 1963 - DNA, 20 bp, Artificial Sequence
  chemically synthesized
gggggttttgccgtgtctaa

SEQ ID NO: 1964 - DNA, 20 bp, Artificial Sequence
  chemically synthesized
ggggttttgccgtgtctaac

SEQ ID NO: 1965 - DNA, 20 bp, Artificial Sequence
  chemically synthesized
cgtgtctaacaggtaccatg

SEQ ID NO: 1966 - DNA, 20 bp, Artificial Sequence
  chemically synthesized
gtgtctaacaggtaccatgt

SEQ ID NO: 1967 - DNA, 20 bp, Artificial Sequence
  chemically synthesized
tgtctaacaggtaccatgtg

SEQ ID NO: 1968 - DNA, 20 bp, Artificial Sequence
  chemically synthesized
ccatgtggggttcccgcacc

SEQ ID NO: 1969 - DNA, 20 bp, Artificial Sequence
  chemically synthesized
tggggttcccgcacccagat

SEQ ID NO: 1970 - DNA, 20 bp, Artificial Sequence
  chemically synthesized
ggttcccgcacccagatgag

SEQ ID NO: 1971 - DNA, 20 bp, Artificial Sequence
  chemically synthesized
ccccgttcacttcctgtttg

SEQ ID NO: 1972 - DNA, 20 bp, Artificial Sequence
  chemically synthesized
gttcacttcctgtttgcaga

SEQ ID NO: 1973 - DNA, 20 bp, Artificial Sequence
  chemically synthesized
acttcctgtttgcagatagc

SEQ ID NO: 1974 - DNA, 20 bp, Artificial Sequence
  chemically synthesized
cttcctgtttgcagatagcc

SEQ ID NO: 1975 - DNA, 20 bp, Artificial Sequence
  chemically synthesized
tcctgtttgcagatagccag

SEQ ID NO: 1976 - DNA, 20 bp, Artificial Sequence
  chemically synthesized
gatagccaggagtcctttcg

SEQ ID NO: 1977 - DNA, 20 bp, Artificial Sequence
  chemically synthesized
gtcctttcgtggtttccact

SEQ ID NO: 1978 - DNA, 20 bp, Artificial Sequence
  chemically synthesized
gtggtttccactgagcactg

SEQ ID NO: 1979 - DNA, 20 bp, Artificial Sequence
  chemically synthesized
tggtttccactgagcactga

SEQ ID NO: 1980 - DNA, 20 bp, Artificial Sequence
  chemically synthesized
tccactgagcactgaaggcc

SEQ ID NO: 1981 - DNA, 20 bp, Artificial Sequence
  chemically synthesized
ctgagcactgaaggcctggc

SEQ ID NO: 1982 - DNA, 20 bp, Artificial Sequence
  chemically synthesized
ggcctggccggcctgaccac

SEQ ID NO: 1983 - DNA, 20 bp, Artificial Sequence
  chemically synthesized
gcctggccggcctgaccact

SEQ ID NO: 1984 - DNA, 20 bp, Artificial Sequence
  chemically synthesized
cggcctgaccactgggcaac

SEQ ID NO: 1985 - DNA, 20 bp, Artificial Sequence
  chemically synthesized
ggcctgaccactgggcaacc

SEQ ID NO: 1986 - DNA, 20 bp, Artificial Sequence
  chemically synthesized
gcaaccaggcgtatcttaaa

SEQ ID NO: 1987 - DNA, 20 bp, Artificial Sequence
  chemically synthesized
ccaggcgtatcttaaacagc

SEQ ID NO: 1988 - DNA, 20 bp, Artificial Sequence
  chemically synthesized
ggcgtatcttaaacagccag

SEQ ID NO: 1989 - DNA, 20 bp, Artificial Sequence
  chemically synthesized
tatcttaaacagccagtggc

SEQ ID NO: 1990 - DNA, 20 bp, Artificial Sequence
  chemically synthesized
tcttaaacagccagtggcca

SEQ ID NO: 1991 - DNA, 20 bp, Artificial Sequence
  chemically synthesized
cttaaacagccagtggccag

SEQ ID NO: 1992 - DNA, 20 bp, Artificial Sequence
  chemically synthesized
agccagtggccagaggctgt

SEQ ID NO: 1993 - DNA, 20 bp, Artificial Sequence
  chemically synthesized
gccagtggccagaggctgtt

SEQ ID NO: 1994 - DNA, 20 bp, Artificial Sequence
  chemically synthesized
ggtcattttccccactgtcc

SEQ ID NO: 1995 - DNA, 20 bp, Artificial Sequence
  chemically synthesized
ctgtcctagcaccgtgtccc

SEQ ID NO: 1996 - DNA, 20 bp, Artificial Sequence
  chemically synthesized
tgtccctggatctgttttcg

SEQ ID NO: 1997 - DNA, 20 bp, Artificial Sequence
  chemically synthesized
tctgttttcgtggctccctc

SEQ ID NO: 1998 - DNA, 20 bp, Artificial Sequence
  chemically synthesized
tgttttcgtggctccctctg

SEQ ID NO: 1999 - DNA, 20 bp, Artificial Sequence
  chemically synthesized
cctctggagtcccgacttgc

SEQ ID NO: 2000 - DNA, 20 bp, Artificial Sequence
  chemically synthesized
ctctggagtcccgacttgct

SEQ ID NO: 2001 - DNA, 20 bp, Artificial Sequence
  chemically synthesized
cccgacttgctgggacaccg

SEQ ID NO: 2002 - DNA, 20 bp, Artificial Sequence
  chemically synthesized
acttgctgggacaccgtggc

SEQ ID NO: 2003 - DNA, 20 bp, Artificial Sequence
  chemically synthesized
cttgctgggacaccgtggct

SEQ ID NO: 2004 - DNA, 20 bp, Artificial Sequence
  chemically synthesized
ttgctgggacaccgtggctg

SEQ ID NO: 2005 - DNA, 20 bp, Artificial Sequence
  chemically synthesized
ctgggacaccgtggctgggg

SEQ ID NO: 2006 - DNA, 20 bp, Artificial Sequence
  chemically synthesized
tgggacaccgtggctggggt

SEQ ID NO: 2007 - DNA, 20 bp, Artificial Sequence
  chemically synthesized
caccgtggctggggtaggtg

SEQ ID NO: 2008 - DNA, 20 bp, Artificial Sequence
  chemically synthesized
gctggggtaggtgcggctga

SEQ ID NO: 2009 - DNA, 20 bp, Artificial Sequence
  chemically synthesized
tgacggctgtttcccacccc

SEQ ID NO: 2010 - DNA, 20 bp, Artificial Sequence
  chemically synthesized
gacggctgtttcccaccccc

SEQ ID NO: 2011 - DNA, 20 bp, Artificial Sequence
  chemically synthesized
acccccaggcctgcattgat

SEQ ID NO: 2012 - DNA, 20 bp, Artificial Sequence
  chemically synthesized
ggcctgcattgatgagaacc

SEQ ID NO: 2013 - DNA, 20 bp, Artificial Sequence
  chemically synthesized
cctgcattgatgagaacctg

SEQ ID NO: 2014 - DNA, 20 bp, Artificial Sequence
  chemically synthesized
ctgcattgatgagaacctgg

SEQ ID NO: 2015 - DNA, 20 bp, Artificial Sequence
  chemically synthesized
cattgatgagaacctggagg

SEQ ID NO: 2016 - DNA, 20 bp, Artificial Sequence
  chemically synthesized
cctggaggtggtgcgcttct

SEQ ID NO: 2017 - DNA, 20 bp, Artificial Sequence
  chemically synthesized
ggaggtggtgcgcttcttgg

SEQ ID NO: 2018 - DNA, 20 bp, Artificial Sequence
  chemically synthesized
aggtggtgcgcttcttggtg

SEQ ID NO: 2019 - DNA, 20 bp, Artificial Sequence
  chemically synthesized
tggtgcgcttcttggtggag

SEQ ID NO: 2020 - DNA, 20 bp, Artificial Sequence
  chemically synthesized
ggtgcgcttcttggtggagc

SEQ ID NO: 2021 - DNA, 20 bp, Artificial Sequence
  chemically synthesized
gtgcgcttcttggtggagca

SEQ ID NO: 2022 - DNA, 20 bp, Artificial Sequence
  chemically synthesized
agcagggcgccactgtgaac

SEQ ID NO: 2023 - DNA, 20 bp, Artificial Sequence
  chemically synthesized
gcagggcgccactgtgaacc

SEQ ID NO: 2024 - DNA, 20 bp, Artificial Sequence
  chemically synthesized
gggcgccactgtgaaccagg

SEQ ID NO: 2025 - DNA, 20 bp, Artificial Sequence
  chemically synthesized
ctgtgaaccaggcagacaac

SEQ ID NO: 2026 - DNA, 20 bp, Artificial Sequence
  chemically synthesized
tgtgaaccaggcagacaacg

SEQ ID NO: 2027 - DNA, 20 bp, Artificial Sequence
  chemically synthesized
gtgaaccaggcagacaacga

SEQ ID NO: 2028 - DNA, 20 bp, Artificial Sequence
  chemically synthesized
accaggcagacaacgagggc

SEQ ID NO: 2029 - DNA, 20 bp, Artificial Sequence
  chemically synthesized
gggctggacgccactgcacg

SEQ ID NO: 2030 - DNA, 20 bp, Artificial Sequence
  chemically synthesized
ctgcacgtggccgcctcctg

SEQ ID NO: 2031 - DNA, 20 bp, Artificial Sequence
  chemically synthesized
ggccgcctcctgtggctacc

SEQ ID NO: 2032 - DNA, 20 bp, Artificial Sequence
  chemically synthesized
tgtggctacctagatatcgc

SEQ ID NO: 2033 - DNA, 20 bp, Artificial Sequence
  chemically synthesized
gttctcatcaatgcaggcct

SEQ ID NO: 2034 - DNA, 20 bp, Artificial Sequence
  chemically synthesized
gaagggagggggcttctcat

SEQ ID NO: 2035 - DNA, 20 bp, Artificial Sequence
  chemically synthesized
gcccctcctccttcagagcc

SEQ ID NO: 2036 - DNA, 20 bp, Artificial Sequence
  chemically synthesized
aaacccagccaggtccttcc

SEQ ID NO: 2037 - DNA, 20 bp, Artificial Sequence
  chemically synthesized
gccgtgggcccagggctatg

SEQ ID NO: 2038 - DNA, 20 bp, Artificial Sequence
  chemically synthesized
ggcctgggcgggactcccag

SEQ ID NO: 2039 - DNA, 20 bp, Artificial Sequence
  chemically synthesized
ccgtttctcattcttccctt

SEQ ID NO: 2040 - DNA, 20 bp, Artificial Sequence
  chemically synthesized
gggacaaaagccgaagtcca

SEQ ID NO: 2041 - DNA, 20 bp, Artificial Sequence
  chemically synthesized
tgccccaggccttgtggaca

SEQ ID NO: 2042 - DNA, 20 bp, Artificial Sequence
  chemically synthesized
acctgaactggagctgagga

SEQ ID NO: 2043 - DNA, 20 bp, Artificial Sequence
  chemically synthesized
aagctaaactcctagatcca

SEQ ID NO: 2044 - DNA, 20 bp, Artificial Sequence
  chemically synthesized
ggccgcacgtgccctgggaa

SEQ ID NO: 2045 - DNA, 20 bp, Artificial Sequence
  chemically synthesized
ggcctgggcaccagggactc

SEQ ID NO: 2046 - DNA, 20 bp, Artificial Sequence
  chemically synthesized
gcccttccgccctcagatga

SEQ ID NO: 2047 - DNA, 20 bp, Artificial Sequence
  chemically synthesized
gcctctccccattcagaccc

SEQ ID NO: 2048 - DNA, 20 bp, Artificial Sequence
  chemically synthesized
gcccctcctccctcagaccc

SEQ ID NO: 2049 - DNA, 20 bp, Artificial Sequence
  chemically synthesized
gcccctcctccctcggaccc

SEQ ID NO: 2050 - DNA, 20 bp, Artificial Sequence
  chemically synthesized
gtccctccaccctcagaccc

SEQ ID NO: 2051 - DNA, 20 bp, Artificial Sequence
  chemically synthesized
gcccctcctccctcggaccc

SEQ ID NO: 2052 - DNA, 20 bp, Artificial Sequence
  chemically synthesized
gctcttctctgttcagccct

SEQ ID NO: 2053 - DNA, 20 bp, Artificial Sequence
  chemically synthesized
cccctagccactaaggcaat

SEQ ID NO: 2054 - DNA, 20 bp, Artificial Sequence
  chemically synthesized
cactaaggcaattggggtgc

SEQ ID NO: 2055 - DNA, 20 bp, Artificial Sequence
  chemically synthesized
ttggggtgcaggaatggggg

SEQ ID NO: 2056 - DNA, 20 bp, Artificial Sequence
  chemically synthesized
aagtggttgataaacccacg

SEQ ID NO: 2057 - DNA, 20 bp, Artificial Sequence
  chemically synthesized
gcttggggacctgcctggag

SEQ ID NO: 2058 - DNA, 20 bp, Artificial Sequence
  chemically synthesized
cccaggtggagaaactggcc

SEQ ID NO: 2059 - DNA, 20 bp, Artificial Sequence
  chemically synthesized
ggagaaactggccgggaatc

SEQ ID NO: 2060 - DNA, 20 bp, Artificial Sequence
  chemically synthesized
atccctgttttcctaggact

SEQ ID NO: 2061 - DNA, 20 bp, Artificial Sequence
  chemically synthesized
ttggccacgtaacctgagaa

SEQ ID NO: 2062 - DNA, 20 bp, Artificial Sequence
  chemically synthesized
ccccaatgctccaggcctcc

SEQ ID NO: 2063 - DNA, 20 bp, Artificial Sequence
  chemically synthesized
aggcctcctgggataccccg

SEQ ID NO: 2064 - DNA, 20 bp, Artificial Sequence
  chemically synthesized
ctcctgggataccccgaaga

SEQ ID NO: 2065 - DNA, 20 bp, Artificial Sequence
  chemically synthesized
cagtcaccccacagttggag

SEQ ID NO: 2066 - DNA, 20 bp, Artificial Sequence
  chemically synthesized
ggcagcctggtagacagggc

SEQ ID NO: 2067 - DNA, 20 bp, Artificial Sequence
  chemically synthesized
agggctggggtggcctctcg

SEQ ID NO: 2068 - DNA, 20 bp, Artificial Sequence
  chemically synthesized
taggtggcctggggcctctg

SEQ ID NO: 2069 - DNA, 20 bp, Artificial Sequence
  chemically synthesized
tctgggggatgcaggggaag

SEQ ID NO: 2070 - DNA, 20 bp, Artificial Sequence
  chemically synthesized
gaagggggatgcaggggaac

SEQ ID NO: 2071 - DNA, 20 bp, Artificial Sequence
  chemically synthesized
cgggaccctgctctgggcgg

SEQ ID NO: 2072 - DNA, 20 bp, Artificial Sequence
  chemically synthesized
tggggactctttaaggaaag

SEQ ID NO: 2073 - DNA, 20 bp, Artificial Sequence
  chemically synthesized
gaaggatggagaaagagaaa

SEQ ID NO: 2074 - DNA, 20 bp, Artificial Sequence
  chemically synthesized
ggacgcaccattctcacaaa

SEQ ID NO: 2075 - DNA, 20 bp, Artificial Sequence
  chemically synthesized
gtgtaaggaagctgcagcac

SEQ ID NO: 2076 - DNA, 20 bp, Artificial Sequence
  chemically synthesized
gagcagctcaggttctggga

SEQ ID NO: 2077 - DNA, 20 bp, Artificial Sequence
  chemically synthesized
ggttctgggagagggtagcg

SEQ ID NO: 2078 - DNA, 20 bp, Artificial Sequence
  chemically synthesized
ccctgccaagctctccctcc

SEQ ID NO: 2079 - DNA, 20 bp, Artificial Sequence
  chemically synthesized
gagagatggctccaggaaat

SEQ ID NO: 2080 - DNA, 20 bp, Artificial Sequence
  chemically synthesized
tgggggtgtgtcaccagata

SEQ ID NO: 2081 - DNA, 20 bp, Artificial Sequence
  chemically synthesized
gaatctgcctaacaggaggt

SEQ ID NO: 2082 - DNA, 20 bp, Artificial Sequence
  chemically synthesized
gactaggaaggaggaggcct

SEQ ID NO: 2083 - DNA, 20 bp, Artificial Sequence
  chemically synthesized
tgtccctagtggccccactg

SEQ ID NO: 2084 - DNA, 20 bp, Artificial Sequence
  chemically synthesized
gagccacattaaccggccct

SEQ ID NO: 2085 - DNA, 20 bp, Artificial Sequence
  chemically synthesized
gtggtcccagctcggggaca

SEQ ID NO: 2086 - DNA, 20 bp, Artificial Sequence
  chemically synthesized
cctgaagtggacataggggc

SEQ ID NO: 2087 - DNA, 20 bp, Artificial Sequence
  chemically synthesized
gcacagactagagaggtaag

SEQ ID NO: 2088 - DNA, 20 bp, Artificial Sequence
  chemically synthesized
aggggagctgcccaaatgaa

SEQ ID NO: 2089 - DNA, 20 bp, Artificial Sequence
  chemically synthesized
tgaaaggagtgagaggtgac

SEQ ID NO: 2090 - DNA, 20 bp, Artificial Sequence
  chemically synthesized
gacccgaatccacaggagaa

SEQ ID NO: 2091 - DNA, 20 bp, Artificial Sequence
  chemically synthesized
tgtccaggcaaagaaagcaa

SEQ ID NO: 2092 - DNA, 20 bp, Artificial Sequence
  chemically synthesized
ggtggctaaagccagggaga

SEQ ID NO: 2093 - DNA, 20 bp, Artificial Sequence
  chemically synthesized
gccagggagacggggtactt

SEQ ID NO: 2094 - DNA, 20 bp, Artificial Sequence
  chemically synthesized
gagaaggaaaagggaaccca

SEQ ID NO: 2095 - DNA, 20 bp, Artificial Sequence
  chemically synthesized
cccagcgagtgaagacggca

SEQ ID NO: 2096 - DNA, 20 bp, Artificial Sequence
  chemically synthesized
cgagtgaagacggcatgggg

SEQ ID NO: 2097 - DNA, 20 bp, Artificial Sequence
  chemically synthesized
ggagaggacccagacacggg

SEQ ID NO: 2098 - DNA, 20 bp, Artificial Sequence
  chemically synthesized
agcagagagcaaggggaaga

SEQ ID NO: 2099 - DNA, 20 bp, Artificial Sequence
  chemically synthesized
acctgaaggaggcggcaggg

SEQ ID NO: 2100 - DNA, 20 bp, Artificial Sequence
  chemically synthesized
agcggcacaggcccagggga

SEQ ID NO: 2101 - DNA, 20 bp, Artificial Sequence
  chemically synthesized
gagacggcagcgttagaggg

SEQ ID NO: 2102 - DNA, 20 bp, Artificial Sequence
  chemically synthesized
ggaagaggggaagtcgaggg

SEQ ID NO: 2103 - DNA, 20 bp, Artificial Sequence
  chemically synthesized
gggatggtaaggaggactgc

SEQ ID NO: 2104 - DNA, 20 bp, Artificial Sequence
  chemically synthesized
aaagcgactccaatgcggaa

SEQ ID NO: 2105 - DNA, 20 bp, Artificial Sequence
  chemically synthesized
cggaagagagtaggtcgaag

SEQ ID NO: 2106 - DNA, 20 bp, Artificial Sequence
  chemically synthesized
aatggtaaggaggcctgggg

SEQ ID NO: 2107 - DNA, 20 bp, Artificial Sequence
  chemically synthesized
ctggggcagagtggtcagca

SEQ ID NO: 2108 - DNA, 20 bp, Artificial Sequence
  chemically synthesized
aagcggctccaattcggaag

SEQ ID NO: 2109 - DNA, 20 bp, Artificial Sequence
  chemically synthesized
cggaagtggggtggtcgaag

SEQ ID NO: 2110 - DNA, 20 bp, Artificial Sequence
  chemically synthesized
aatggtaagggggactggga

SEQ ID NO: 2111 - DNA, 20 bp, Artificial Sequence
  chemically synthesized
actgggacggggtgtcagca

SEQ ID NO: 2112 - DNA, 20 bp, Artificial Sequence
  chemically synthesized
ccagggccaggaacgacggg

SEQ ID NO: 2113 - DNA, 20 bp, Artificial Sequence
  chemically synthesized
cgagactggcaacggggaag

SEQ ID NO: 2114 - DNA, 20 bp, Artificial Sequence
  chemically synthesized
atgccccaggtggcgcagca

SEQ ID NO: 2115 - DNA, 20 bp, Artificial Sequence
  chemically synthesized
gctgataccgtcggcgttgg

SEQ ID NO: 2116 - DNA, 20 bp, Artificial Sequence
  chemically synthesized
gcgggcgggcggcggcgcgg

SEQ ID NO: 2117 - DNA, 20 bp, Artificial Sequence
  chemically synthesized
gtcgagctcggcgccggggc

SEQ ID NO: 2118 - DNA, 20 bp, Artificial Sequence
  chemically synthesized
cgggcggtgcgatgtccgga

SEQ ID NO: 2119 - DNA, 20 bp, Artificial Sequence
  chemically synthesized
cgtccgcttcgagcgcgccg

SEQ ID NO: 2120 - DNA, 20 bp, Artificial Sequence
  chemically synthesized
ccccttcgaccaccccactt

SEQ ID NO: 2121 - DNA, 20 bp, Artificial Sequence
  chemically synthesized
cgacctactctcttccgcat

SEQ ID NO: 2122 - DNA, 20 bp, Artificial Sequence
  chemically synthesized
gcgctgccctcctctcgccc

SEQ ID NO: 2123 - DNA, 20 bp, Artificial Sequence
  chemically synthesized
ctaacgctgccgtctctctc

SEQ ID NO: 2124 - DNA, 20 bp, Artificial Sequence
  chemically synthesized
ttctgtctgcagcttgtggc

SEQ ID NO: 2125 - DNA, 20 bp, Artificial Sequence
  chemically synthesized
tctctgctgtgttgctgccc

SEQ ID NO: 2126 - DNA, 20 bp, Artificial Sequence
  chemically synthesized
caccacgtgatgtcctctga

SEQ ID NO: 2127 - DNA, 20 bp, Artificial Sequence
  chemically synthesized
tgagcggatcctccccgtgt

SEQ ID NO: 2128 - DNA, 20 bp, Artificial Sequence
  chemically synthesized
ccccatgccgtcttcactcg

SEQ ID NO: 2129 - DNA, 20 bp, Artificial Sequence
  chemically synthesized
ctgtgccatctctcgtttct

SEQ ID NO: 2130 - DNA, 20 bp, Artificial Sequence
  chemically synthesized
tcttaggatggccttctccg

SEQ ID NO: 2131 - DNA, 20 bp, Artificial Sequence
  chemically synthesized
cctggacaccccgttctcct

SEQ ID NO: 2132 - DNA, 20 bp, Artificial Sequence
  chemically synthesized
caccccgttctcctgtggat

SEQ ID NO: 2133 - DNA, 20 bp, Artificial Sequence
  chemically synthesized
cccctgtcatggcatcttcc

SEQ ID NO: 2134 - DNA, 20 bp, Artificial Sequence
  chemically synthesized
acagcatgtttgctgcctcc

SEQ ID NO: 2135 - DNA, 20 bp, Artificial Sequence
  chemically synthesized
cggttaatgtggctctggtt

SEQ ID NO: 2136 - DNA, 20 bp, Artificial Sequence
  chemically synthesized
cacagtggggccactaggga

SEQ ID NO: 2137 - DNA, 20 bp, Artificial Sequence
  chemically synthesized
tccttcctagtctcctgata

SEQ ID NO: 2138 - DNA, 20 bp, Artificial Sequence
  chemically synthesized
ttgcttacgatggagccaga

SEQ ID NO: 2139 - DNA, 20 bp, Artificial Sequence
  chemically synthesized
ctgggagggagagcttggca

SEQ ID NO: 2140 - DNA, 20 bp, Artificial Sequence
  chemically synthesized
cagggggtgggagggaaggg

SEQ ID NO: 2141 - DNA, 20 bp, Artificial Sequence
  chemically synthesized
gcagtttggaaaaacaaaat

SEQ ID NO: 2142 - DNA, 20 bp, Artificial Sequence
  chemically synthesized
aaaatcagaataagttggtc

SEQ ID NO: 2143 - DNA, 20 bp, Artificial Sequence
  chemically synthesized
ggcagggctgtggtgaggag

SEQ ID NO: 2144 - DNA, 20 bp, Artificial Sequence
  chemically synthesized
gtgtggaaaactccctttgt

SEQ ID NO: 2145 - DNA, 20 bp, Artificial Sequence
  chemically synthesized
tctccatccttctttcctta

SEQ ID NO: 2146 - DNA, 20 bp, Artificial Sequence
  chemically synthesized
acatattcctccgcccagag

SEQ ID NO: 2147 - DNA, 20 bp, Artificial Sequence
  chemically synthesized
taaggccctgctctgggctt

SEQ ID NO: 2148 - DNA, 20 bp, Artificial Sequence
  chemically synthesized
cctgctctgggcttctgggt

SEQ ID NO: 2149 - DNA, 20 bp, Artificial Sequence
  chemically synthesized
ctctcctgccccttccctac

SEQ ID NO: 2150 - DNA, 20 bp, Artificial Sequence
  chemically synthesized
cctgtctaccaggctgcctt

SEQ ID NO: 2151 - DNA, 20 bp, Artificial Sequence
  chemically synthesized
tctaccaggctgccttttgg

SEQ ID NO: 2152 - DNA, 20 bp, Artificial Sequence
  chemically synthesized
ggtggattctcctccaactg

SEQ ID NO: 2153 - DNA, 20 bp, Artificial Sequence
  chemically synthesized
tgcttggcaaactcactctt

SEQ ID NO: 2154 - DNA, 20 bp, Artificial Sequence
  chemically synthesized
tcccaggaggcctggagcat

SEQ ID NO: 2155 - DNA, 20 bp, Artificial Sequence
  chemically synthesized
cctggagcattggggtgggc

SEQ ID NO: 2156 - DNA, 20 bp, Artificial Sequence
  chemically synthesized
tgggctggggttcagagagg

SEQ ID NO: 2157 - DNA, 20 bp, Artificial Sequence
  chemically synthesized
gtggccaagaagcaggggag

SEQ ID NO: 2158 - DNA, 20 bp, Artificial Sequence
  chemically synthesized
aagaagcaggggagctgggt

SEQ ID NO: 2159 - DNA, 20 bp, Artificial Sequence
  chemically synthesized
gagctgggtttgggtcaggt

SEQ ID NO: 2160 - DNA, 20 bp, Artificial Sequence
  chemically synthesized
gtttgggtcaggtctgggtg

SEQ ID NO: 2161 - DNA, 20 bp, Artificial Sequence
  chemically synthesized
accctcagtcctaggaaaac

SEQ ID NO: 2162 - DNA, 20 bp, Artificial Sequence
  chemically synthesized
gggatggttggtcactgtct

SEQ ID NO: 2163 - DNA, 20 bp, Artificial Sequence
  chemically synthesized
tgtggctgttcccaagttct

SEQ ID NO: 2164 - DNA, 20 bp, Artificial Sequence
  chemically synthesized
aagttcttagggtaccccac

SEQ ID NO: 2165 - DNA, 20 bp, Artificial Sequence
  chemically synthesized
cccaattgccttagtggcta

SEQ ID NO: 2166 - DNA, 20 bp, Artificial Sequence
  chemically synthesized
gtggctagggggttgggggc

SEQ ID NO: 2167 - DNA, 20 bp, Artificial Sequence
  chemically synthesized
agagtaggaggggctggagc

SEQ ID NO: 2168 - DNA, 20 bp, Artificial Sequence
  chemically synthesized
agagctgggggcctgggctc

SEQ ID NO: 2169 - DNA, 20 bp, Artificial Sequence
  chemically synthesized
aggggctggggcctggactc

SEQ ID NO: 2170 - DNA, 20 bp, Artificial Sequence
  chemically synthesized
aggggctggggcctggactc

SEQ ID NO: 2171 - DNA, 20 bp, Artificial Sequence
  chemically synthesized
gggcctggactcctgggtct

SEQ ID NO: 2172 - DNA, 20 bp, Artificial Sequence
  chemically synthesized
gggactgggggcctggactc

SEQ ID NO: 2173 - DNA, 20 bp, Artificial Sequence
  chemically synthesized
aggggctggggcctggactc

SEQ ID NO: 2174 - DNA, 20 bp, Artificial Sequence
  chemically synthesized
ggggctgggggcctggactt

SEQ ID NO: 2175 - DNA, 20 bp, Artificial Sequence
  chemically synthesized
gcggggctgggcctggaccc

SEQ ID NO: 2176 - DNA, 20 bp, Artificial Sequence
  chemically synthesized
ctgggcctggacccctgggt

SEQ ID NO: 2177 - DNA, 20 bp, Artificial Sequence
  chemically synthesized
aagggctggggcctggcctc

SEQ ID NO: 2178 - DNA, 20 bp, Artificial Sequence
  chemically synthesized
ctggggcctggcctcctggg

SEQ ID NO: 2179 - DNA, 20 bp, Artificial Sequence
  chemically synthesized
gcctcctgggttgaatgggg

SEQ ID NO: 2180 - DNA, 20 bp, Artificial Sequence
  chemically synthesized
gaggggttgggcctggactc

SEQ ID NO: 2181 - DNA, 20 bp, Artificial Sequence
  chemically synthesized
aggcctcaggcatctttcac

SEQ ID NO: 2182 - DNA, 20 bp, Artificial Sequence
  chemically synthesized
ctcccctatcgccatgacaa

SEQ ID NO: 2183 - DNA, 20 bp, Artificial Sequence
  chemically synthesized
actgggtggaaataaacgag

SEQ ID NO: 2184 - DNA, 20 bp, Artificial Sequence
  chemically synthesized
acgtgcggccccttcacagc

SEQ ID NO: 2185 - DNA, 20 bp, Artificial Sequence
  chemically synthesized
ttggagaggtgagggacttg

SEQ ID NO: 2186 - DNA, 20 bp, Artificial Sequence
  chemically synthesized
cttggggggtaatttatccc

SEQ ID NO: 2187 - DNA, 20 bp, Artificial Sequence
  chemically synthesized
gtaatttatcccgtggatct

SEQ ID NO: 2188 - DNA, 20 bp, Artificial Sequence
  chemically synthesized
aagttttggacccctaaggg

SEQ ID NO: 2189 - DNA, 20 bp, Artificial Sequence
  chemically synthesized
cagagggggcctcagtgaac

SEQ ID NO: 2190 - DNA, 20 bp, Artificial Sequence
  chemically synthesized
tgcagctgtctcacccctct

SEQ ID NO: 2191 - DNA, 20 bp, Artificial Sequence
  chemically synthesized
tgggagtcccgcccaggccc

SEQ ID NO: 2192 - DNA, 20 bp, Artificial Sequence
  chemically synthesized
cccctgagtctgtcccagca

SEQ ID NO: 2193 - DNA, 20 bp, Artificial Sequence
  chemically synthesized
ggcccacggcttcgttcctg

SEQ ID NO: 2194 - DNA, 20 bp, Artificial Sequence
  chemically synthesized
cgttcctgcagagtatctgc

SEQ ID NO: 2195 - DNA, 20 bp, Artificial Sequence
  chemically synthesized
tgacccttggaaggacctgg

SEQ ID NO: 2196 - DNA, 20 bp, Artificial Sequence
  chemically synthesized
gagcactggaagcgccacct

SEQ ID NO: 2197 - DNA, 20 bp, Artificial Sequence
  chemically synthesized
cgccacctgtgggtggtgac

SEQ ID NO: 2198 - DNA, 20 bp, Artificial Sequence
  chemically synthesized
cgtgtctaacaggtaccatg

SEQ ID NO: 2199 - DNA, 20 bp, Artificial Sequence
  chemically synthesized
cttcctgtttgcagatagcc

SEQ ID NO: 2200 - DNA, 20 bp, Artificial Sequence
  chemically synthesized
cagccagtggccagaggctg

SEQ ID NO: 2201 - DNA, 20 bp, Artificial Sequence
  chemically synthesized
actgtcctagcaccgtgtcc

SEQ ID NO: 2202 - DNA, 20 bp, Artificial Sequence
  chemically synthesized
tctgttttcgtggctccctc

SEQ ID NO: 2203 - DNA, 20 bp, Artificial Sequence
  chemically synthesized
acttgctgggacaccgtggc

SEQ ID NO: 2204 - DNA, 20 bp, Artificial Sequence
  chemically synthesized
agctcttctctgttcagccc

SEQ ID NO: 2205 - DNA, 20 bp, Artificial Sequence
  chemically synthesized
gcctggagaaggatgcagga

SEQ ID NO: 2206 - DNA, 20 bp, Artificial Sequence
  chemically synthesized
cgagaaacacagccccaggt

SEQ ID NO: 2207 - DNA, 20 bp, Artificial Sequence
  chemically synthesized
gcagtcaccccacagttgga

SEQ ID NO: 2208 - DNA, 20 bp, Artificial Sequence
  chemically synthesized
ctctttaaggaaagaaggat

SEQ ID NO: 2209 - DNA, 20 bp, Artificial Sequence
  chemically synthesized
aaggaaagaaggatggagaa

SEQ ID NO: 2210 - DNA, 20 bp, Artificial Sequence
  chemically synthesized
ggaacaatataaattgggga

SEQ ID NO: 2211 - DNA, 20 bp, Artificial Sequence
  chemically synthesized
ggagaacggggtgtccaggc

SEQ ID NO: 2212 - DNA, 20 bp, Artificial Sequence
  chemically synthesized
acggggtactttggggttgt

SEQ ID NO: 2213 - DNA, 20 bp, Artificial Sequence
  chemically synthesized
tccgtcggagaaggccatcc

SEQ ID NO: 2214 - DNA, 20 bp, Artificial Sequence
  chemically synthesized
acccaggccacaagctgcag

SEQ ID NO: 2215 - DNA, 20 bp, Artificial Sequence
  chemically synthesized
aagcggcacaggcccagggg

SEQ ID NO: 2216 - DNA, 20 bp, Artificial Sequence
  chemically synthesized
caggggagagaatgcaggtc

SEQ ID NO: 2217 - DNA, 20 bp, Artificial Sequence
  chemically synthesized
cactagggacaggattggtg

SEQ ID NO: 2218 - DNA, 20 bp, Artificial Sequence
  chemically synthesized
agcagtttggaaaaacaaaa

SEQ ID NO: 2219 - DNA, 20 bp, Artificial Sequence
  chemically synthesized
cgtgtggaaaactccctttg

SEQ ID NO: 2220 - DNA, 20 bp, Artificial Sequence
  chemically synthesized
caagttttggacccctaagg

SEQ ID NO: 2221 - DNA, 20 bp, Artificial Sequence
  chemically synthesized
ttggacccctaagggaagaa

SEQ ID NO: 2222 - DNA, 20 bp, Artificial Sequence
  chemically synthesized
gggactccagagggagccac

SEQ ID NO: 2223 - DNA, 20 bp, Artificial Sequence
  chemically synthesized
atggtacctgttagacacgg

SEQ ID NO: 2224 - DNA, 20 bp, Artificial Sequence
  chemically synthesized
tcattcttcccttaggggtc

SEQ ID NO: 2225 - DNA, 20 bp, Artificial Sequence
  chemically synthesized
aggactgagggtttcagtgc

SEQ ID NO: 2226 - DNA, 20 bp, Artificial Sequence
  chemically synthesized
tactggccttatctcacagg

SEQ ID NO: 2227 - DNA, 20 bp, Artificial Sequence
  chemically synthesized
ggtactttggggttgtccag

SEQ ID NO: 2228 - DNA, 20 bp, Artificial Sequence
  chemically synthesized
caagaggagaagcagtttgg

SEQ ID NO: 2229 - DNA, 20 bp, Artificial Sequence
  chemically synthesized
aggaggggggtgtccgtgtg

SEQ ID NO: 2230 - DNA, 20 bp, Artificial Sequence
  chemically synthesized
actgaaaccctcagtcctag

SEQ ID NO: 2231 - DNA, 20 bp, Artificial Sequence
  chemically synthesized
cccaacagcctctggccact

SEQ ID NO: 2232 - DNA, 20 bp, Artificial Sequence
  chemically synthesized
ggaagtgaacggggaaggga

SEQ ID NO: 2233 - DNA, 20 bp, Artificial Sequence
  chemically synthesized
cccccgtcaccacccacagg

SEQ ID NO: 2234 - DNA, 20 bp, Artificial Sequence
  chemically synthesized
agccaggggctgacacgggc

SEQ ID NO: 2235 - DNA, 20 bp, Artificial Sequence
  chemically synthesized
ctgggaacgggatgaactcg

SEQ ID NO: 2236 - DNA, 20 bp, Artificial Sequence
  chemically synthesized
gaacagccacagcagggggg

SEQ ID NO: 2237 - DNA, 20 bp, Artificial Sequence
  chemically synthesized
cagagacagtgaccaaccat

SEQ ID NO: 2238 - DNA, 20 bp, Artificial Sequence
  chemically synthesized
atccctgttttcctaggact

SEQ ID NO: 2239 - DNA, 20 bp, Artificial Sequence
  chemically synthesized
acctgacccaaacccagctc

SEQ ID NO: 2240 - DNA, 20 bp, Artificial Sequence
  chemically synthesized
ctcctgggataccccgaaga

SEQ ID NO: 2241 - DNA, 20 bp, Artificial Sequence
  chemically synthesized
gggaagcctgagcgcctctc

SEQ ID NO: 2242 - DNA, 20 bp, Artificial Sequence
  chemically synthesized
ggacgcaccattctcacaaa

SEQ ID NO: 2243 - DNA, 20 bp, Artificial Sequence
  chemically synthesized
tagaactcaggaccaactta

SEQ ID NO: 2244 - DNA, 20 bp, Artificial Sequence
  chemically synthesized
tcaggaccaacttattctga

SEQ ID NO: 2245 - DNA, 20 bp, Artificial Sequence
  chemically synthesized
attctgattttgtttttcca

SEQ ID NO: 2246 - DNA, 20 bp, Artificial Sequence
  chemically synthesized
ggaaggaggaggcctaagga

SEQ ID NO: 2247 - DNA, 20 bp, Artificial Sequence
  chemically synthesized
gagagcgccgcgcccgcacc

SEQ ID NO: 2248 - DNA, 20 bp, Artificial Sequence
  chemically synthesized
ccgccccgtcgttcctggcc

SEQ ID NO: 2249 - DNA, 20 bp, Artificial Sequence
  chemically synthesized
ccaccccacttccgaattgg

SEQ ID NO: 2250 - DNA, 20 bp, Artificial Sequence
  chemically synthesized
tggagccgcttcaactggcc

SEQ ID NO: 2251 - DNA, 20 bp, Artificial Sequence
  chemically synthesized
cctactctcttccgcattgg

SEQ ID NO: 2252 - DNA, 20 bp, Artificial Sequence
  chemically synthesized
ttggagtcgctttaactggc

SEQ ID NO: 2253 - DNA, 20 bp, Artificial Sequence
  chemically synthesized
tccggaccactttgagctct

SEQ ID NO: 2254 - DNA, 20 bp, Artificial Sequence
  chemically synthesized
cttctgcgccgcctctggcc

SEQ ID NO: 2255 - DNA, 20 bp, Artificial Sequence
  chemically synthesized
gtttccccttcccaggcagg

SEQ ID NO: 2256 - DNA, 20 bp, Artificial Sequence
  chemically synthesized
cattctctcccctgggcctg

SEQ ID NO: 2257 - DNA, 20 bp, Artificial Sequence
  chemically synthesized
ggcctgtgccgctttctgtc

SEQ ID NO: 2258 - DNA, 20 bp, Artificial Sequence
  chemically synthesized
cttctggggcctgtgccatc

SEQ ID NO: 2259 - DNA, 20 bp, Artificial Sequence
  chemically synthesized
ttcttgtaggcctgcatcat

SEQ ID NO: 2260 - DNA, 20 bp, Artificial Sequence
  chemically synthesized
accccaaagtaccccgtctc

SEQ ID NO: 2261 - DNA, 20 bp, Artificial Sequence
  chemically synthesized
ctttagccacctctccatcc

SEQ ID NO: 2262 - DNA, 20 bp, Artificial Sequence
  chemically synthesized
gcctggacaccccgttctcc

SEQ ID NO: 2263 - DNA, 20 bp, Artificial Sequence
  chemically synthesized
cctatgtccacttcaggaca

SEQ ID NO: 2264 - DNA, 20 bp, Artificial Sequence
  chemically synthesized
ccacagtggggccactaggg

SEQ ID NO: 2265 - DNA, 20 bp, Artificial Sequence
  chemically synthesized
ctaacccccacctcctgtta

SEQ ID NO: 2266 - DNA, 20 bp, Artificial Sequence
  chemically synthesized
tctctccttgccagaacctc

SEQ ID NO: 2267 - DNA, 20 bp, Artificial Sequence
  chemically synthesized
tccttgccagaacctctaag

SEQ ID NO: 2268 - DNA, 20 bp, Artificial Sequence
  chemically synthesized
ccagagaggatcctgggagg

SEQ ID NO: 2269 - DNA, 20 bp, Artificial Sequence
  chemically synthesized
tgctctgacgcggccgtctg

SEQ ID NO: 2270 - DNA, 20 bp, Artificial Sequence
  chemically synthesized
cgtttcactgatcctggtgc

SEQ ID NO: 2271 - DNA, 20 bp, Artificial Sequence
  chemically synthesized
ttacacttcccaagaggaga

SEQ ID NO: 2272 - DNA, 20 bp, Artificial Sequence
  chemically synthesized
tttatattgttcctccgtgc

SEQ ID NO: 2273 - DNA, 20 bp, Artificial Sequence
  chemically synthesized
ttcctccgcccagagcaggg

SEQ ID NO: 2274 - DNA, 20 bp, Artificial Sequence
  chemically synthesized
cgcttccctaaggccctgct

SEQ ID NO: 2275 - DNA, 20 bp, Artificial Sequence
  chemically synthesized
taaggccctgctctgggctt

SEQ ID NO: 2276 - DNA, 20 bp, Artificial Sequence
  chemically synthesized
ggcaagcccaggagaggcgc

SEQ ID NO: 2277 - DNA, 20 bp, Artificial Sequence
  chemically synthesized
gtctaccaggctgccttttg

SEQ ID NO: 2278 - DNA, 20 bp, Artificial Sequence
  chemically synthesized
ttctcctccaactgtggggt

SEQ ID NO: 2279 - DNA, 20 bp, Artificial Sequence
  chemically synthesized
gtgggctggggttcagagag

SEQ ID NO: 2280 - DNA, 20 bp, Artificial Sequence
  chemically synthesized
gtggccaagaagcaggggag

SEQ ID NO: 2281 - DNA, 20 bp, Artificial Sequence
  chemically synthesized
tcaggtctgggtgtggggtg

SEQ ID NO: 2282 - DNA, 20 bp, Artificial Sequence
  chemically synthesized
ggtgtggggtgaccagctta

SEQ ID NO: 2283 - DNA, 20 bp, Artificial Sequence
  chemically synthesized
atgctgtttgcccaggacag

SEQ ID NO: 2284 - DNA, 20 bp, Artificial Sequence
  chemically synthesized
ggtcactgtctctgggtgac

SEQ ID NO: 2285 - DNA, 20 bp, Artificial Sequence
  chemically synthesized
tgggtgactcttgattcccg

SEQ ID NO: 2286 - DNA, 20 bp, Artificial Sequence
  chemically synthesized
gccagtttctccacctgggg

SEQ ID NO: 2287 - DNA, 20 bp, Artificial Sequence
  chemically synthesized
aagttcttagggtaccccac

SEQ ID NO: 2288 - DNA, 20 bp, Artificial Sequence
  chemically synthesized
tagagtaggaggggctggag

SEQ ID NO: 2289 - DNA, 20 bp, Artificial Sequence
  chemically synthesized
agagctgggggcctgggctc

SEQ ID NO: 2290 - DNA, 20 bp, Artificial Sequence
  chemically synthesized
acgtgcggccccttcacagc

SEQ ID NO: 2291 - DNA, 20 bp, Artificial Sequence
  chemically synthesized
cctcccgcctcctccagatg

SEQ ID NO: 2292 - DNA, 20 bp, Artificial Sequence
  chemically synthesized
gtaatttatcccgtggatct

SEQ ID NO: 2293 - DNA, 20 bp, Artificial Sequence
  chemically synthesized
ttatcccgtggatctaggag

SEQ ID NO: 2294 - DNA, 20 bp, Artificial Sequence
  chemically synthesized
cctcctccgaccccctggac

SEQ ID NO: 2295 - DNA, 20 bp, Artificial Sequence
  chemically synthesized
ggacttcggcttttgtcccc

SEQ ID NO: 2296 - DNA, 20 bp, Artificial Sequence
  chemically synthesized
accctgcatagccctgggcc

SEQ ID NO: 2297 - DNA, 20 bp, Artificial Sequence
  chemically synthesized
tcctgcagagtatctgctgg

SEQ ID NO: 2298 - DNA, 20 bp, Artificial Sequence
  chemically synthesized
agtatctgctggggtggttt

SEQ ID NO: 2299 - DNA, 20 bp, Artificial Sequence
  chemically synthesized
tgacccttggaaggacctgg

SEQ ID NO: 2300 - DNA, 20 bp, Artificial Sequence
  chemically synthesized
cgccacctgtgggtggtgac

SEQ ID NO: 2301 - DNA, 20 bp, Artificial Sequence
  chemically synthesized
ccctcccttccccgttcact

SEQ ID NO: 2302 - DNA, 20 bp, Artificial Sequence
  chemically synthesized
cagatagccaggagtccttt

SEQ ID NO: 2303 - DNA, 20 bp, Artificial Sequence
  chemically synthesized
tcctagcaccgtgtccctgg

SEQ ID NO: 2304 - DNA, 20 bp, Artificial Sequence
  chemically synthesized
ctggggtaggtgcggctgac

SEQ ID NO: 2305 - DNA, 20 bp, Artificial Sequence
  chemically synthesized
ttgatgagaacctggaggtg

SEQ ID NO: 2306 - DNA, 22 bp, Artificial Sequence
  chemically synthesized
gcgatatctaggtagccacagg

SEQ ID NO: 2307 - DNA, 22 bp, Artificial Sequence
  chemically synthesized
ggtagccacaggaggcggccac

SEQ ID NO: 2308 - DNA, 22 bp, Artificial Sequence
  chemically synthesized
gttgtctgcctggttcacagtg

SEQ ID NO: 2309 - DNA, 22 bp, Artificial Sequence
  chemically synthesized
tctgcctggttcacagtggcgc

SEQ ID NO: 2310 - DNA, 22 bp, Artificial Sequence
  chemically synthesized
cctggttcacagtggcgccctg

SEQ ID NO: 2311 - DNA, 22 bp, Artificial Sequence
  chemically synthesized
gttcacagtggcgccctgctcc

SEQ ID NO: 2312 - DNA, 22 bp, Artificial Sequence
  chemically synthesized
acagtggcgccctgctccacca

SEQ ID NO: 2313 - DNA, 22 bp, Artificial Sequence
  chemically synthesized
ctccaccaagaagcgcaccacc

SEQ ID NO: 2314 - DNA, 22 bp, Artificial Sequence
  chemically synthesized
caccaagaagcgcaccacctcc

SEQ ID NO: 2315 - DNA, 22 bp, Artificial Sequence
  chemically synthesized
caggttctcatcaatgcaggcc

SEQ ID NO: 2316 - DNA, 22 bp, Artificial Sequence
  chemically synthesized
tcatcaatgcaggcctgggggt

SEQ ID NO: 2317 - DNA, 22 bp, Artificial Sequence
  chemically synthesized
atcaatgcaggcctgggggtgg

SEQ ID NO: 2318 - DNA, 22 bp, Artificial Sequence
  chemically synthesized
ggggtgggaaacagccgtcagc

SEQ ID NO: 2319 - DNA, 22 bp, Artificial Sequence
  chemically synthesized
ccccagccacggtgtcccagca

SEQ ID NO: 2320 - DNA, 22 bp, Artificial Sequence
  chemically synthesized
cagagggagccacgaaaacaga

SEQ ID NO: 2321 - DNA, 22 bp, Artificial Sequence
  chemically synthesized
ggacagtggggaaaatgaccca

SEQ ID NO: 2322 - DNA, 22 bp, Artificial Sequence
  chemically synthesized
tggccactggctgtttaagata

SEQ ID NO: 2323 - DNA, 22 bp, Artificial Sequence
  chemically synthesized
gccactggctgtttaagatacg

SEQ ID NO: 2324 - DNA, 22 bp, Artificial Sequence
  chemically synthesized
gctgtttaagatacgcctggtt

SEQ ID NO: 2325 - DNA, 22 bp, Artificial Sequence
  chemically synthesized
tttaagatacgcctggttgccc

SEQ ID NO: 2326 - DNA, 22 bp, Artificial Sequence
  chemically synthesized
aagatacgcctggttgcccagt

SEQ ID NO: 2327 - DNA, 22 bp, Artificial Sequence
  chemically synthesized
agatacgcctggttgcccagtg

SEQ ID NO: 2328 - DNA, 22 bp, Artificial Sequence
  chemically synthesized
gttgcccagtggtcaggccggc

SEQ ID NO: 2329 - DNA, 22 bp, Artificial Sequence
  chemically synthesized
cccagtggtcaggccggccagg

SEQ ID NO: 2330 - DNA, 22 bp, Artificial Sequence
  chemically synthesized
cagtgctcagtggaaaccacga

SEQ ID NO: 2331 - DNA, 22 bp, Artificial Sequence
  chemically synthesized
agtgctcagtggaaaccacgaa

SEQ ID NO: 2332 - DNA, 22 bp, Artificial Sequence
  chemically synthesized
agtggaaaccacgaaaggactc

SEQ ID NO: 2333 - DNA, 22 bp, Artificial Sequence
  chemically synthesized
ctggctatctgcaaacaggaag

SEQ ID NO: 2334 - DNA, 22 bp, Artificial Sequence
  chemically synthesized
gctatctgcaaacaggaagtga

SEQ ID NO: 2335 - DNA, 22 bp, Artificial Sequence
  chemically synthesized
tctgcaaacaggaagtgaacgg

SEQ ID NO: 2336 - DNA, 22 bp, Artificial Sequence
  chemically synthesized
caaacaggaagtgaacggggaa

SEQ ID NO: 2337 - DNA, 22 bp, Artificial Sequence
  chemically synthesized
ctcatctgggtgcgggaacccc

SEQ ID NO: 2338 - DNA, 22 bp, Artificial Sequence
  chemically synthesized
tcatctgggtgcgggaacccca

SEQ ID NO: 2339 - DNA, 22 bp, Artificial Sequence
  chemically synthesized
atctgggtgcgggaaccccaca

SEQ ID NO: 2340 - DNA, 22 bp, Artificial Sequence
  chemically synthesized
ggtgcgggaaccccacatggta

SEQ ID NO: 2341 - DNA, 22 bp, Artificial Sequence
  chemically synthesized
ttagacacggcaaaacccccgt

SEQ ID NO: 2342 - DNA, 22 bp, Artificial Sequence
  chemically synthesized
gacacggcaaaacccccgtcac

SEQ ID NO: 2343 - DNA, 22 bp, Artificial Sequence
  chemically synthesized
ccagtgctcagactagggaaga

SEQ ID NO: 2344 - DNA, 22 bp, Artificial Sequence
  chemically synthesized
cagtgctcagactagggaagag

SEQ ID NO: 2345 - DNA, 22 bp, Artificial Sequence
  chemically synthesized
agactagggaagaggttccagc

SEQ ID NO: 2346 - DNA, 22 bp, Artificial Sequence
  chemically synthesized
gggaagaggttccagcccctcc

SEQ ID NO: 2347 - DNA, 22 bp, Artificial Sequence
  chemically synthesized
cagcccctcctccttcagagcc

SEQ ID NO: 2348 - DNA, 22 bp, Artificial Sequence
  chemically synthesized
ctccttcagagccaggagtcct

SEQ ID NO: 2349 - DNA, 22 bp, Artificial Sequence
  chemically synthesized
cttcagagccaggagtcctggc

SEQ ID NO: 2350 - DNA, 22 bp, Artificial Sequence
  chemically synthesized
cagagccaggagtcctggcccc

SEQ ID NO: 2351 - DNA, 22 bp, Artificial Sequence
  chemically synthesized
agagccaggagtcctggccccc

SEQ ID NO: 2352 - DNA, 22 bp, Artificial Sequence
  chemically synthesized
gcccccagcccctcctgcctta

SEQ ID NO: 2353 - DNA, 22 bp, Artificial Sequence
  chemically synthesized
ctgccttaaacccagccaggtc

SEQ ID NO: 2354 - DNA, 22 bp, Artificial Sequence
  chemically synthesized
ccttaaacccagccaggtcctt

SEQ ID NO: 2355 - DNA, 22 bp, Artificial Sequence
  chemically synthesized
aaacccagccaggtccttccaa

SEQ ID NO: 2356 - DNA, 22 bp, Artificial Sequence
  chemically synthesized
aacccagccaggtccttccaag

SEQ ID NO: 2357 - DNA, 22 bp, Artificial Sequence
  chemically synthesized
ccaagggtcaagctcggaaacc

SEQ ID NO: 2358 - DNA, 22 bp, Artificial Sequence
  chemically synthesized
caagggtcaagctcggaaacca

SEQ ID NO: 2359 - DNA, 22 bp, Artificial Sequence
  chemically synthesized
ggaaaccaccccagcagatact

SEQ ID NO: 2360 - DNA, 22 bp, Artificial Sequence
  chemically synthesized
tgcaggaacgaagccgtgggcc

SEQ ID NO: 2361 - DNA, 22 bp, Artificial Sequence
  chemically synthesized
caggaacgaagccgtgggccca

SEQ ID NO: 2362 - DNA, 22 bp, Artificial Sequence
  chemically synthesized
tgcagggtggaggaaggccacc

SEQ ID NO: 2363 - DNA, 22 bp, Artificial Sequence
  chemically synthesized
tgctgggacagactcaggggcc

SEQ ID NO: 2364 - DNA, 22 bp, Artificial Sequence
  chemically synthesized
ggacagactcaggggcctgggc

SEQ ID NO: 2365 - DNA, 22 bp, Artificial Sequence
  chemically synthesized
aggggcctgggcgggactccca

SEQ ID NO: 2366 - DNA, 22 bp, Artificial Sequence
  chemically synthesized
ggcgggactcccagaggggtga

SEQ ID NO: 2367 - DNA, 22 bp, Artificial Sequence
  chemically synthesized
ccagaggggtgagacagctgca

SEQ ID NO: 2368 - DNA, 22 bp, Artificial Sequence
  chemically synthesized
cacacctgtgtgcctgggcccc

SEQ ID NO: 2369 - DNA, 22 bp, Artificial Sequence
  chemically synthesized
tgtgcctgggccccaggctgtc

SEQ ID NO: 2370 - DNA, 22 bp, Artificial Sequence
  chemically synthesized
ggccccaggctgtcacactcca

SEQ ID NO: 2371 - DNA, 22 bp, Artificial Sequence
  chemically synthesized
tcacactccagttcactgaggc

SEQ ID NO: 2372 - DNA, 22 bp, Artificial Sequence
  chemically synthesized
cagttcactgaggccccctctg

SEQ ID NO: 2373 - DNA, 22 bp, Artificial Sequence
  chemically synthesized
actgaggccccctctgcacggg

SEQ ID NO: 2374 - DNA, 22 bp, Artificial Sequence
  chemically synthesized
aggccccctctgcacggggccc

SEQ ID NO: 2375 - DNA, 22 bp, Artificial Sequence
  chemically synthesized
tgcacggggccctgcagccagg

SEQ ID NO: 2376 - DNA, 22 bp, Artificial Sequence
  chemically synthesized
cacggggccctgcagccagggg

SEQ ID NO: 2377 - DNA, 22 bp, Artificial Sequence
  chemically synthesized
cagccaggggctgacacgggcc

SEQ ID NO: 2378 - DNA, 22 bp, Artificial Sequence
  chemically synthesized
acacgggccaccgtttctcatt

SEQ ID NO: 2379 - DNA, 22 bp, Artificial Sequence
  chemically synthesized
ctcattcttcccttaggggtcc

SEQ ID NO: 2380 - DNA, 22 bp, Artificial Sequence
  chemically synthesized
tcattcttcccttaggggtcca

SEQ ID NO: 2381 - DNA, 22 bp, Artificial Sequence
  chemically synthesized
attcttcccttaggggtccaaa

SEQ ID NO: 2382 - DNA, 22 bp, Artificial Sequence
  chemically synthesized
ttcccttaggggtccaaaactt

SEQ ID NO: 2383 - DNA, 22 bp, Artificial Sequence
  chemically synthesized
cccttaggggtccaaaacttgg

SEQ ID NO: 2384 - DNA, 22 bp, Artificial Sequence
  chemically synthesized
ccttaggggtccaaaacttggg

SEQ ID NO: 2385 - DNA, 22 bp, Artificial Sequence
  chemically synthesized
aggggtccaaaacttgggggga

SEQ ID NO: 2386 - DNA, 22 bp, Artificial Sequence
  chemically synthesized
ggggtccaaaacttggggggac

SEQ ID NO: 2387 - DNA, 22 bp, Artificial Sequence
  chemically synthesized
ggggggacaaaagccgaagtcc

SEQ ID NO: 2388 - DNA, 22 bp, Artificial Sequence
  chemically synthesized
gggggacaaaagccgaagtcca

SEQ ID NO: 2389 - DNA, 22 bp, Artificial Sequence
  chemically synthesized
gccccaggccttgtggacactg

SEQ ID NO: 2390 - DNA, 22 bp, Artificial Sequence
  chemically synthesized
ccccaggccttgtggacactgg

SEQ ID NO: 2391 - DNA, 22 bp, Artificial Sequence
  chemically synthesized
gtggacactgggtgggctccgg

SEQ ID NO: 2392 - DNA, 22 bp, Artificial Sequence
  chemically synthesized
tggacactgggtgggctccggg

SEQ ID NO: 2393 - DNA, 22 bp, Artificial Sequence
  chemically synthesized
ggtgggctccgggacctgaact

SEQ ID NO: 2394 - DNA, 22 bp, Artificial Sequence
  chemically synthesized
cgggacctgaactggagctgag

SEQ ID NO: 2395 - DNA, 22 bp, Artificial Sequence
  chemically synthesized
aactggagctgaggaaggagtg

SEQ ID NO: 2396 - DNA, 22 bp, Artificial Sequence
  chemically synthesized
gagctgaggaaggagtgaagct

SEQ ID NO: 2397 - DNA, 22 bp, Artificial Sequence
  chemically synthesized
aggaaggagtgaagctaaactc

SEQ ID NO: 2398 - DNA, 22 bp, Artificial Sequence
  chemically synthesized
aactcctagatccacgggataa

SEQ ID NO: 2399 - DNA, 22 bp, Artificial Sequence
  chemically synthesized
ctagatccacgggataaattac

SEQ ID NO: 2400 - DNA, 22 bp, Artificial Sequence
  chemically synthesized
gatccacgggataaattacccc

SEQ ID NO: 2401 - DNA, 22 bp, Artificial Sequence
  chemically synthesized
ccccccaagtccctcacctctc

SEQ ID NO: 2402 - DNA, 22 bp, Artificial Sequence
  chemically synthesized
acctctccaaagctgcccatct

SEQ ID NO: 2403 - DNA, 22 bp, Artificial Sequence
  chemically synthesized
tccaaagctgcccatctggagg

SEQ ID NO: 2404 - DNA, 22 bp, Artificial Sequence
  chemically synthesized
caaagctgcccatctggaggag

SEQ ID NO: 2405 - DNA, 22 bp, Artificial Sequence
  chemically synthesized
cccatctggaggaggcgggagg

SEQ ID NO: 2406 - DNA, 22 bp, Artificial Sequence
  chemically synthesized
gaggaggcgggagggagctacg

SEQ ID NO: 2407 - DNA, 22 bp, Artificial Sequence
  chemically synthesized
cgagggccaagagcatgaggtc

SEQ ID NO: 2408 - DNA, 22 bp, Artificial Sequence
  chemically synthesized
gggctgtgaaggggccgcacgt

SEQ ID NO: 2409 - DNA, 22 bp, Artificial Sequence
  chemically synthesized
tgaaggggccgcacgtgccctg

SEQ ID NO: 2410 - DNA, 22 bp, Artificial Sequence
  chemically synthesized
ggaacgggatgaactcggctcg

SEQ ID NO: 2411 - DNA, 22 bp, Artificial Sequence
  chemically synthesized
ggctcgtttatttccacccagt

SEQ ID NO: 2412 - DNA, 22 bp, Artificial Sequence
  chemically synthesized
gtttatttccacccagttgtca

SEQ ID NO: 2413 - DNA, 22 bp, Artificial Sequence
  chemically synthesized
atttccacccagttgtcatggc

SEQ ID NO: 2414 - DNA, 22 bp, Artificial Sequence
  chemically synthesized
tttccacccagttgtcatggcg

SEQ ID NO: 2415 - DNA, 22 bp, Artificial Sequence
  chemically synthesized
ccacccagttgtcatggcgata

SEQ ID NO: 2416 - DNA, 22 bp, Artificial Sequence
  chemically synthesized
cacccagttgtcatggcgatag

SEQ ID NO: 2417 - DNA, 22 bp, Artificial Sequence
  chemically synthesized
tcatggcgataggggagggggg

SEQ ID NO: 2418 - DNA, 22 bp, Artificial Sequence
  chemically synthesized
tccctttcaaggacctgcccag

SEQ ID NO: 2419 - DNA, 22 bp, Artificial Sequence
  chemically synthesized
ccctttcaaggacctgcccagt

SEQ ID NO: 2420 - DNA, 22 bp, Artificial Sequence
  chemically synthesized
cctttcaaggacctgcccagta

SEQ ID NO: 2421 - DNA, 22 bp, Artificial Sequence
  chemically synthesized
tcaaggacctgcccagtacagg

SEQ ID NO: 2422 - DNA, 22 bp, Artificial Sequence
  chemically synthesized
caaggacctgcccagtacaggc

SEQ ID NO: 2423 - DNA, 22 bp, Artificial Sequence
  chemically synthesized
aaggacctgcccagtacaggca

SEQ ID NO: 2424 - DNA, 22 bp, Artificial Sequence
  chemically synthesized
cccagtacaggcatccctgtga

SEQ ID NO: 2425 - DNA, 22 bp, Artificial Sequence
  chemically synthesized
tgaaagatgcctgaggcctggg

SEQ ID NO: 2426 - DNA, 22 bp, Artificial Sequence
  chemically synthesized
aggcctgggcaccagggactcc

SEQ ID NO: 2427 - DNA, 22 bp, Artificial Sequence
  chemically synthesized
ggcaccagggactccagagtcc

SEQ ID NO: 2428 - DNA, 22 bp, Artificial Sequence
  chemically synthesized
cagagtccaggcccaacccctc

SEQ ID NO: 2429 - DNA, 22 bp, Artificial Sequence
  chemically synthesized
cccattcaacccaggaggccag

SEQ ID NO: 2430 - DNA, 22 bp, Artificial Sequence
  chemically synthesized
aacccaggaggccaggccccag

SEQ ID NO: 2431 - DNA, 22 bp, Artificial Sequence
  chemically synthesized
ccgccctcagatgaaggagtcc

SEQ ID NO: 2432 - DNA, 22 bp, Artificial Sequence
  chemically synthesized
cgccctcagatgaaggagtcca

SEQ ID NO: 2433 - DNA, 22 bp, Artificial Sequence
  chemically synthesized
agatgaaggagtccaggccccc

SEQ ID NO: 2434 - DNA, 22 bp, Artificial Sequence
  chemically synthesized
tccccattcagacccaggggtc

SEQ ID NO: 2435 - DNA, 22 bp, Artificial Sequence
  chemically synthesized
cccattcagacccaggggtcca

SEQ ID NO: 2436 - DNA, 22 bp, Artificial Sequence
  chemically synthesized
agacccaggggtccaggcccag

SEQ ID NO: 2437 - DNA, 22 bp, Artificial Sequence
  chemically synthesized
cctaagacccagaagtccaggc

SEQ ID NO: 2438 - DNA, 22 bp, Artificial Sequence
  chemically synthesized
agacccagaagtccaggccccc

SEQ ID NO: 2439 - DNA, 22 bp, Artificial Sequence
  chemically synthesized
ctccctcagacccacgagtcca

SEQ ID NO: 2440 - DNA, 22 bp, Artificial Sequence
  chemically synthesized
cctcagacccacgagtccaggc

SEQ ID NO: 2441 - DNA, 22 bp, Artificial Sequence
  chemically synthesized
agacccacgagtccaggcccca

SEQ ID NO: 2442 - DNA, 22 bp, Artificial Sequence
  chemically synthesized
ctccctcggacccaggagtcca

SEQ ID NO: 2443 - DNA, 22 bp, Artificial Sequence
  chemically synthesized
cctcggacccaggagtccaggc

SEQ ID NO: 2444 - DNA, 22 bp, Artificial Sequence
  chemically synthesized
ggacccaggagtccaggccccc

SEQ ID NO: 2445 - DNA, 22 bp, Artificial Sequence
  chemically synthesized
caccctcagacccaggagtcca

SEQ ID NO: 2446 - DNA, 22 bp, Artificial Sequence
  chemically synthesized
agacccaggagtccaggcccca

SEQ ID NO: 2447 - DNA, 22 bp, Artificial Sequence
  chemically synthesized
ctccctcggacccaggagtcca

SEQ ID NO: 2448 - DNA, 22 bp, Artificial Sequence
  chemically synthesized
cctcggacccaggagtccaggc

SEQ ID NO: 2449 - DNA, 22 bp, Artificial Sequence
  chemically synthesized
ggacccaggagtccaggcccca

SEQ ID NO: 2450 - DNA, 22 bp, Artificial Sequence
  chemically synthesized
ctctctcaaacccaggagccca

SEQ ID NO: 2451 - DNA, 22 bp, Artificial Sequence
  chemically synthesized
tctcaaacccaggagcccaggc

SEQ ID NO: 2452 - DNA, 22 bp, Artificial Sequence
  chemically synthesized
tcaaacccaggagcccaggccc

SEQ ID NO: 2453 - DNA, 22 bp, Artificial Sequence
  chemically synthesized
aaacccaggagcccaggccccc

SEQ ID NO: 2454 - DNA, 22 bp, Artificial Sequence
  chemically synthesized
ttctctgttcagccctaagaat

SEQ ID NO: 2455 - DNA, 22 bp, Artificial Sequence
  chemically synthesized
ctctgttcagccctaagaatcc

SEQ ID NO: 2456 - DNA, 22 bp, Artificial Sequence
  chemically synthesized
tctgttcagccctaagaatcct

SEQ ID NO: 2457 - DNA, 22 bp, Artificial Sequence
  chemically synthesized
tgttcagccctaagaatcctgg

SEQ ID NO: 2458 - DNA, 22 bp, Artificial Sequence
  chemically synthesized
ttcagccctaagaatcctggct

SEQ ID NO: 2459 - DNA, 22 bp, Artificial Sequence
  chemically synthesized
agccctaagaatcctggctcca

SEQ ID NO: 2460 - DNA, 22 bp, Artificial Sequence
  chemically synthesized
agaatcctggctccagcccctc

SEQ ID NO: 2461 - DNA, 22 bp, Artificial Sequence
  chemically synthesized
gctccagcccctcctactctag

SEQ ID NO: 2462 - DNA, 22 bp, Artificial Sequence
  chemically synthesized
cagcccctcctactctagcccc

SEQ ID NO: 2463 - DNA, 22 bp, Artificial Sequence
  chemically synthesized
ctactctagcccccaaccccct

SEQ ID NO: 2464 - DNA, 22 bp, Artificial Sequence
  chemically synthesized
ctctagcccccaaccccctagc

SEQ ID NO: 2465 - DNA, 22 bp, Artificial Sequence
  chemically synthesized
tagcccccaaccccctagccac

SEQ ID NO: 2466 - DNA, 22 bp, Artificial Sequence
  chemically synthesized
gcccccaaccccctagccacta

SEQ ID NO: 2467 - DNA, 22 bp, Artificial Sequence
  chemically synthesized
gccactaaggcaattggggtgc

SEQ ID NO: 2468 - DNA, 22 bp, Artificial Sequence
  chemically synthesized
aggcaattggggtgcaggaatg

SEQ ID NO: 2469 - DNA, 22 bp, Artificial Sequence
  chemically synthesized
gggtgcaggaatgggggcaggg

SEQ ID NO: 2470 - DNA, 22 bp, Artificial Sequence
  chemically synthesized
accaagtggttgataaacccac

SEQ ID NO: 2471 - DNA, 22 bp, Artificial Sequence
  chemically synthesized
ataaacccacgtggggtaccct

SEQ ID NO: 2472 - DNA, 22 bp, Artificial Sequence
  chemically synthesized
agaacttgggaacagccacagc

SEQ ID NO: 2473 - DNA, 22 bp, Artificial Sequence
  chemically synthesized
gggaacagccacagcagggggg

SEQ ID NO: 2474 - DNA, 22 bp, Artificial Sequence
  chemically synthesized
ggaacagccacagcaggggggc

SEQ ID NO: 2475 - DNA, 22 bp, Artificial Sequence
  chemically synthesized
ggggacctgcctggagaaggat

SEQ ID NO: 2476 - DNA, 22 bp, Artificial Sequence
  chemically synthesized
gggacctgcctggagaaggatg

SEQ ID NO: 2477 - DNA, 22 bp, Artificial Sequence
  chemically synthesized
cctggagaaggatgcaggacga

SEQ ID NO: 2478 - DNA, 22 bp, Artificial Sequence
  chemically synthesized
gagaaggatgcaggacgagaaa

SEQ ID NO: 2479 - DNA, 22 bp, Artificial Sequence
  chemically synthesized
gccgggaatcaagagtcaccca

SEQ ID NO: 2480 - DNA, 22 bp, Artificial Sequence
  chemically synthesized
ttttcctaggactgagggtttc

SEQ ID NO: 2481 - DNA, 22 bp, Artificial Sequence
  chemically synthesized
tcctaggactgagggtttcagt

SEQ ID NO: 2482 - DNA, 22 bp, Artificial Sequence
  chemically synthesized
cctaggactgagggtttcagtg

SEQ ID NO: 2483 - DNA, 22 bp, Artificial Sequence
  chemically synthesized
ctaggactgagggtttcagtgc

SEQ ID NO: 2484 - DNA, 22 bp, Artificial Sequence
  chemically synthesized
ggactgagggtttcagtgctaa

SEQ ID NO: 2485 - DNA, 22 bp, Artificial Sequence
  chemically synthesized
agggtttcagtgctaaaactag

SEQ ID NO: 2486 - DNA, 22 bp, Artificial Sequence
  chemically synthesized
cagtgctaaaactaggctgtcc

SEQ ID NO: 2487 - DNA, 22 bp, Artificial Sequence
  chemically synthesized
agtgctaaaactaggctgtcct

SEQ ID NO: 2488 - DNA, 22 bp, Artificial Sequence
  chemically synthesized
aaactaggctgtcctgggcaaa

SEQ ID NO: 2489 - DNA, 22 bp, Artificial Sequence
  chemically synthesized
ggctgtcctgggcaaacagcat

SEQ ID NO: 2490 - DNA, 22 bp, Artificial Sequence
  chemically synthesized
tcctgggcaaacagcataagct

SEQ ID NO: 2491 - DNA, 22 bp, Artificial Sequence
  chemically synthesized
ggcaaacagcataagctggtca

SEQ ID NO: 2492 - DNA, 22 bp, Artificial Sequence
  chemically synthesized
gtcaccccacacccagacctga

SEQ ID NO: 2493 - DNA, 22 bp, Artificial Sequence
  chemically synthesized
acccaaacccagctcccctgct

SEQ ID NO: 2494 - DNA, 22 bp, Artificial Sequence
  chemically synthesized
ccctgcttcttggccacgtaac

SEQ ID NO: 2495 - DNA, 22 bp, Artificial Sequence
  chemically synthesized
cttcttggccacgtaacctgag

SEQ ID NO: 2496 - DNA, 22 bp, Artificial Sequence
  chemically synthesized
cttggccacgtaacctgagaag

SEQ ID NO: 2497 - DNA, 22 bp, Artificial Sequence
  chemically synthesized
ttggccacgtaacctgagaagg

SEQ ID NO: 2498 - DNA, 22 bp, Artificial Sequence
  chemically synthesized
ggccacgtaacctgagaaggga

SEQ ID NO: 2499 - DNA, 22 bp, Artificial Sequence
  chemically synthesized
gccacgtaacctgagaagggaa

SEQ ID NO: 2500 - DNA, 22 bp, Artificial Sequence
  chemically synthesized
agaagggaatccctcctctctg

SEQ ID NO: 2501 - DNA, 22 bp, Artificial Sequence
  chemically synthesized
ctctctgaaccccagcccaccc

SEQ ID NO: 2502 - DNA, 22 bp, Artificial Sequence
  chemically synthesized
tctgaaccccagcccaccccaa

SEQ ID NO: 2503 - DNA, 22 bp, Artificial Sequence
  chemically synthesized
tgaaccccagcccaccccaatg

SEQ ID NO: 2504 - DNA, 22 bp, Artificial Sequence
  chemically synthesized
aaccccagcccaccccaatgct

SEQ ID NO: 2505 - DNA, 22 bp, Artificial Sequence
  chemically synthesized
caggcctcctgggataccccga

SEQ ID NO: 2506 - DNA, 22 bp, Artificial Sequence
  chemically synthesized
ctgggataccccgaagagtgag

SEQ ID NO: 2507 - DNA, 22 bp, Artificial Sequence
  chemically synthesized
ggataccccgaagagtgagttt

SEQ ID NO: 2508 - DNA, 22 bp, Artificial Sequence
  chemically synthesized
gccaagcagtcaccccacagtt

SEQ ID NO: 2509 - DNA, 22 bp, Artificial Sequence
  chemically synthesized
ccaagcagtcaccccacagttg

SEQ ID NO: 2510 - DNA, 22 bp, Artificial Sequence
  chemically synthesized
gaggagaatccacccaaaaggc

SEQ ID NO: 2511 - DNA, 22 bp, Artificial Sequence
  chemically synthesized
gtagacagggctggggtggcct

SEQ ID NO: 2512 - DNA, 22 bp, Artificial Sequence
  chemically synthesized
gggtggcctctcgtggggtcca

SEQ ID NO: 2513 - DNA, 22 bp, Artificial Sequence
  chemically synthesized
tcgtggggtccaggccaagtag

SEQ ID NO: 2514 - DNA, 22 bp, Artificial Sequence
  chemically synthesized
gtggggtccaggccaagtaggt

SEQ ID NO: 2515 - DNA, 22 bp, Artificial Sequence
  chemically synthesized
gggcctctgggggatgcagggg

SEQ ID NO: 2516 - DNA, 22 bp, Artificial Sequence
  chemically synthesized
tgggggatgcaggggaaggggg

SEQ ID NO: 2517 - DNA, 22 bp, Artificial Sequence
  chemically synthesized
ggggatgcaggggaagggggat

SEQ ID NO: 2518 - DNA, 22 bp, Artificial Sequence
  chemically synthesized
agtctgaagagcagagccagga

SEQ ID NO: 2519 - DNA, 22 bp, Artificial Sequence
  chemically synthesized
aagagcagagccaggaacccct

SEQ ID NO: 2520 - DNA, 22 bp, Artificial Sequence
  chemically synthesized
tagggaaggggcaggagagcca

SEQ ID NO: 2521 - DNA, 22 bp, Artificial Sequence
  chemically synthesized
agcgcctctcctgggcttgcca

SEQ ID NO: 2522 - DNA, 22 bp, Artificial Sequence
  chemically synthesized
tcctgggcttgccaaggactca

SEQ ID NO: 2523 - DNA, 22 bp, Artificial Sequence
  chemically synthesized
ctgggcttgccaaggactcaaa

SEQ ID NO: 2524 - DNA, 22 bp, Artificial Sequence
  chemically synthesized
ggcttgccaaggactcaaaccc

SEQ ID NO: 2525 - DNA, 22 bp, Artificial Sequence
  chemically synthesized
gccaaggactcaaacccagaag

SEQ ID NO: 2526 - DNA, 22 bp, Artificial Sequence
  chemically synthesized
ccaaggactcaaacccagaagc

SEQ ID NO: 2527 - DNA, 22 bp, Artificial Sequence
  chemically synthesized
aaacccagaagcccagagcagg

SEQ ID NO: 2528 - DNA, 22 bp, Artificial Sequence
  chemically synthesized
agggaagcgggaccctgctctg

SEQ ID NO: 2529 - DNA, 22 bp, Artificial Sequence
  chemically synthesized
gggaagcgggaccctgctctgg

SEQ ID NO: 2530 - DNA, 22 bp, Artificial Sequence
  chemically synthesized
ctctgggcggaggaatatgtcc

SEQ ID NO: 2531 - DNA, 22 bp, Artificial Sequence
  chemically synthesized
tgggcggaggaatatgtcccag

SEQ ID NO: 2532 - DNA, 22 bp, Artificial Sequence
  chemically synthesized
ggcggaggaatatgtcccagat

SEQ ID NO: 2533 - DNA, 22 bp, Artificial Sequence
  chemically synthesized
gggactctttaaggaaagaagg

SEQ ID NO: 2534 - DNA, 22 bp, Artificial Sequence
  chemically synthesized
tttaaggaaagaaggatggaga

SEQ ID NO: 2535 - DNA, 22 bp, Artificial Sequence
  chemically synthesized
taaggaaagaaggatggagaaa

SEQ ID NO: 2536 - DNA, 22 bp, Artificial Sequence
  chemically synthesized
aaggaaagaaggatggagaaag

SEQ ID NO: 2537 - DNA, 22 bp, Artificial Sequence
  chemically synthesized
aggaaagaaggatggagaaaga

SEQ ID NO: 2538 - DNA, 22 bp, Artificial Sequence
  chemically synthesized
gtgaacacctaggacgcaccat

SEQ ID NO: 2539 - DNA, 22 bp, Artificial Sequence
  chemically synthesized
ggacgcaccattctcacaaagg

SEQ ID NO: 2540 - DNA, 22 bp, Artificial Sequence
  chemically synthesized
tcacaaagggagttttccacac

SEQ ID NO: 2541 - DNA, 22 bp, Artificial Sequence
  chemically synthesized
acaaagggagttttccacacgg

SEQ ID NO: 2542 - DNA, 22 bp, Artificial Sequence
  chemically synthesized
tccacacggacacccccctcct

SEQ ID NO: 2543 - DNA, 22 bp, Artificial Sequence
  chemically synthesized
ccacacggacacccccctcctc

SEQ ID NO: 2544 - DNA, 22 bp, Artificial Sequence
  chemically synthesized
cacacggacacccccctcctca

SEQ ID NO: 2545 - DNA, 22 bp, Artificial Sequence
  chemically synthesized
ctcaccacagccctgccaggac

SEQ ID NO: 2546 - DNA, 22 bp, Artificial Sequence
  chemically synthesized
accacagccctgccaggacggg

SEQ ID NO: 2547 - DNA, 22 bp, Artificial Sequence
  chemically synthesized
ccaggacggggctggctactgg

SEQ ID NO: 2548 - DNA, 22 bp, Artificial Sequence
  chemically synthesized
gctactggccttatctcacagg

SEQ ID NO: 2549 - DNA, 22 bp, Artificial Sequence
  chemically synthesized
ctggccttatctcacaggtaaa

SEQ ID NO: 2550 - DNA, 22 bp, Artificial Sequence
  chemically synthesized
gccttatctcacaggtaaaact

SEQ ID NO: 2551 - DNA, 22 bp, Artificial Sequence
  chemically synthesized
atctcacaggtaaaactgacgc

SEQ ID NO: 2552 - DNA, 22 bp, Artificial Sequence
  chemically synthesized
tctcacaggtaaaactgacgca

SEQ ID NO: 2553 - DNA, 22 bp, Artificial Sequence
  chemically synthesized
acaggtaaaactgacgcacgga

SEQ ID NO: 2554 - DNA, 22 bp, Artificial Sequence
  chemically synthesized
acgcacggaggaacaatataaa

SEQ ID NO: 2555 - DNA, 22 bp, Artificial Sequence
  chemically synthesized
gggactagaaaggtgaagagcc

SEQ ID NO: 2556 - DNA, 22 bp, Artificial Sequence
  chemically synthesized
gaaaggtgaagagccaaagtta

SEQ ID NO: 2557 - DNA, 22 bp, Artificial Sequence
  chemically synthesized
gaactcaggaccaacttattct

SEQ ID NO: 2558 - DNA, 22 bp, Artificial Sequence
  chemically synthesized
aggaccaacttattctgatttt

SEQ ID NO: 2559 - DNA, 22 bp, Artificial Sequence
  chemically synthesized
attctgattttgtttttccaaa

SEQ ID NO: 2560 - DNA, 22 bp, Artificial Sequence
  chemically synthesized
ttctgattttgtttttccaaac

SEQ ID NO: 2561 - DNA, 22 bp, Artificial Sequence
  chemically synthesized
tgattttgtttttccaaactgc

SEQ ID NO: 2562 - DNA, 22 bp, Artificial Sequence
  chemically synthesized
attttgtttttccaaactgctt

SEQ ID NO: 2563 - DNA, 22 bp, Artificial Sequence
  chemically synthesized
tgtttttccaaactgcttctcc

SEQ ID NO: 2564 - DNA, 22 bp, Artificial Sequence
  chemically synthesized
gtttttccaaactgcttctcct

SEQ ID NO: 2565 - DNA, 22 bp, Artificial Sequence
  chemically synthesized
tttttccaaactgcttctcctc

SEQ ID NO: 2566 - DNA, 22 bp, Artificial Sequence
  chemically synthesized
ttccaaactgcttctcctcttg

SEQ ID NO: 2567 - DNA, 22 bp, Artificial Sequence
  chemically synthesized
tccaaactgcttctcctcttgg

SEQ ID NO: 2568 - DNA, 22 bp, Artificial Sequence
  chemically synthesized
ccaaactgcttctcctcttggg

SEQ ID NO: 2569 - DNA, 22 bp, Artificial Sequence
  chemically synthesized
caaactgcttctcctcttggga

SEQ ID NO: 2570 - DNA, 22 bp, Artificial Sequence
  chemically synthesized
cttctcctcttgggaagtgtaa

SEQ ID NO: 2571 - DNA, 22 bp, Artificial Sequence
  chemically synthesized
ctcctcttgggaagtgtaagga

SEQ ID NO: 2572 - DNA, 22 bp, Artificial Sequence
  chemically synthesized
tcctcttgggaagtgtaaggaa

SEQ ID NO: 2573 - DNA, 22 bp, Artificial Sequence
  chemically synthesized
ctcttgggaagtgtaaggaagc

SEQ ID NO: 2574 - DNA, 22 bp, Artificial Sequence
  chemically synthesized
ttgggaagtgtaaggaagctgc

SEQ ID NO: 2575 - DNA, 22 bp, Artificial Sequence
  chemically synthesized
gggaagtgtaaggaagctgcag

SEQ ID NO: 2576 - DNA, 22 bp, Artificial Sequence
  chemically synthesized
ggaagtgtaaggaagctgcagc

SEQ ID NO: 2577 - DNA, 22 bp, Artificial Sequence
  chemically synthesized
cagcaccaggatcagtgaaacg

SEQ ID NO: 2578 - DNA, 22 bp, Artificial Sequence
  chemically synthesized
aggttctgggagagggtagcgc

SEQ ID NO: 2579 - DNA, 22 bp, Artificial Sequence
  chemically synthesized
tgggagagggtagcgcagggtg

SEQ ID NO: 2580 - DNA, 22 bp, Artificial Sequence
  chemically synthesized
ggagagggtagcgcagggtggc

SEQ ID NO: 2581 - DNA, 22 bp, Artificial Sequence
  chemically synthesized
agaaccgggcaggtcacgcatc

SEQ ID NO: 2582 - DNA, 22 bp, Artificial Sequence
  chemically synthesized
ccctcccaccccctgccaagct

SEQ ID NO: 2583 - DNA, 22 bp, Artificial Sequence
  chemically synthesized
cctcccaccccctgccaagctc

SEQ ID NO: 2584 - DNA, 22 bp, Artificial Sequence
  chemically synthesized
ccaccccctgccaagctctccc

SEQ ID NO: 2585 - DNA, 22 bp, Artificial Sequence
  chemically synthesized
ccaagctctccctcccaggatc

SEQ ID NO: 2586 - DNA, 22 bp, Artificial Sequence
  chemically synthesized
tccctcccaggatcctctctgg

SEQ ID NO: 2587 - DNA, 22 bp, Artificial Sequence
  chemically synthesized
cctcccaggatcctctctggct

SEQ ID NO: 2588 - DNA, 22 bp, Artificial Sequence
  chemically synthesized
ccaggatcctctctggctccat

SEQ ID NO: 2589 - DNA, 22 bp, Artificial Sequence
  chemically synthesized
tctggctccatcgtaagcaaac

SEQ ID NO: 2590 - DNA, 22 bp, Artificial Sequence
  chemically synthesized
tggctccatcgtaagcaaacct

SEQ ID NO: 2591 - DNA, 22 bp, Artificial Sequence
  chemically synthesized
gctccatcgtaagcaaacctta

SEQ ID NO: 2592 - DNA, 22 bp, Artificial Sequence
  chemically synthesized
catcgtaagcaaaccttagagg

SEQ ID NO: 2593 - DNA, 22 bp, Artificial Sequence
  chemically synthesized
agaggttctggcaaggagagag

SEQ ID NO: 2594 - DNA, 22 bp, Artificial Sequence
  chemically synthesized
gaggttctggcaaggagagaga

SEQ ID NO: 2595 - DNA, 22 bp, Artificial Sequence
  chemically synthesized
tggcaaggagagagatggctcc

SEQ ID NO: 2596 - DNA, 22 bp, Artificial Sequence
  chemically synthesized
gcaaggagagagatggctccag

SEQ ID NO: 2597 - DNA, 22 bp, Artificial Sequence
  chemically synthesized
caggaaatgggggtgtgtcacc

SEQ ID NO: 2598 - DNA, 22 bp, Artificial Sequence
  chemically synthesized
cctaacaggaggtgggggttag

SEQ ID NO: 2599 - DNA, 22 bp, Artificial Sequence
  chemically synthesized
acaggaggtgggggttagaccc

SEQ ID NO: 2600 - DNA, 22 bp, Artificial Sequence
  chemically synthesized
gacccaatatcaggagactagg

SEQ ID NO: 2601 - DNA, 22 bp, Artificial Sequence
  chemically synthesized
ggaaggaggaggcctaaggatg

SEQ ID NO: 2602 - DNA, 22 bp, Artificial Sequence
  chemically synthesized
aggatggggcttttctgtcacc

SEQ ID NO: 2603 - DNA, 22 bp, Artificial Sequence
  chemically synthesized
ttctgtcaccaatcctgtccct

SEQ ID NO: 2604 - DNA, 22 bp, Artificial Sequence
  chemically synthesized
tctgtcaccaatcctgtcccta

SEQ ID NO: 2605 - DNA, 22 bp, Artificial Sequence
  chemically synthesized
ctgtcaccaatcctgtccctag

SEQ ID NO: 2606 - DNA, 22 bp, Artificial Sequence
  chemically synthesized
tgtcaccaatcctgtccctagt

SEQ ID NO: 2607 - DNA, 22 bp, Artificial Sequence
  chemically synthesized
tcaccaatcctgtccctagtgg

SEQ ID NO: 2608 - DNA, 22 bp, Artificial Sequence
  chemically synthesized
tccctagtggccccactgtggg

SEQ ID NO: 2609 - DNA, 22 bp, Artificial Sequence
  chemically synthesized
gtggccccactgtggggtggag

SEQ ID NO: 2610 - DNA, 22 bp, Artificial Sequence
  chemically synthesized
tggggtggaggggacagataaa

SEQ ID NO: 2611 - DNA, 22 bp, Artificial Sequence
  chemically synthesized
accggccctgggaatataaggt

SEQ ID NO: 2612 - DNA, 22 bp, Artificial Sequence
  chemically synthesized
ggaatataaggtggtcccagct

SEQ ID NO: 2613 - DNA, 22 bp, Artificial Sequence
  chemically synthesized
ggggacacaggatccctggagg

SEQ ID NO: 2614 - DNA, 22 bp, Artificial Sequence
  chemically synthesized
gaggcagcaaacatgctgtcct

SEQ ID NO: 2615 - DNA, 22 bp, Artificial Sequence
  chemically synthesized
tcctgaagtggacataggggcc

SEQ ID NO: 2616 - DNA, 22 bp, Artificial Sequence
  chemically synthesized
aagtggacataggggcccgggt

SEQ ID NO: 2617 - DNA, 22 bp, Artificial Sequence
  chemically synthesized
gaggaagaagactagctgagct

SEQ ID NO: 2618 - DNA, 22 bp, Artificial Sequence
  chemically synthesized
gctgagctctcggacccctgga

SEQ ID NO: 2619 - DNA, 22 bp, Artificial Sequence
  chemically synthesized
agctctcggacccctggaagat

SEQ ID NO: 2620 - DNA, 22 bp, Artificial Sequence
  chemically synthesized
tcggacccctggaagatgccat

SEQ ID NO: 2621 - DNA, 22 bp, Artificial Sequence
  chemically synthesized
ggacccctggaagatgccatga

SEQ ID NO: 2622 - DNA, 22 bp, Artificial Sequence
  chemically synthesized
gaagatgccatgacagggggct

SEQ ID NO: 2623 - DNA, 22 bp, Artificial Sequence
  chemically synthesized
gaagagctagcacagactagag

SEQ ID NO: 2624 - DNA, 22 bp, Artificial Sequence
  chemically synthesized
gcacagactagagaggtaaggg

SEQ ID NO: 2625 - DNA, 22 bp, Artificial Sequence
  chemically synthesized
gagaggtaaggggggtagggga

SEQ ID NO: 2626 - DNA, 22 bp, Artificial Sequence
  chemically synthesized
cccaaatgaaaggagtgagagg

SEQ ID NO: 2627 - DNA, 22 bp, Artificial Sequence
  chemically synthesized
aagccagggagacggggtactt

SEQ ID NO: 2628 - DNA, 22 bp, Artificial Sequence
  chemically synthesized
tggggttgtccagaaaaacggt

SEQ ID NO: 2629 - DNA, 22 bp, Artificial Sequence
  chemically synthesized
ggggttgtccagaaaaacggtg

SEQ ID NO: 2630 - DNA, 22 bp, Artificial Sequence
  chemically synthesized
gggttgtccagaaaaacggtga

SEQ ID NO: 2631 - DNA, 22 bp, Artificial Sequence
  chemically synthesized
tccagaaaaacggtgatgatgc

SEQ ID NO: 2632 - DNA, 22 bp, Artificial Sequence
  chemically synthesized
caagaaggggaggcgggacgca

SEQ ID NO: 2633 - DNA, 22 bp, Artificial Sequence
  chemically synthesized
agaaacgagagatggcacaggc

SEQ ID NO: 2634 - DNA, 22 bp, Artificial Sequence
  chemically synthesized
ggtgagggaggagagatgcccg

SEQ ID NO: 2635 - DNA, 22 bp, Artificial Sequence
  chemically synthesized
agaggacatcacgtggtgcagc

SEQ ID NO: 2636 - DNA, 22 bp, Artificial Sequence
  chemically synthesized
cggaaagagcatccttgggcag

SEQ ID NO: 2637 - DNA, 22 bp, Artificial Sequence
  chemically synthesized
gggcagcaacacagcagagagc

SEQ ID NO: 2638 - DNA, 22 bp, Artificial Sequence
  chemically synthesized
ggcagcaacacagcagagagca

SEQ ID NO: 2639 - DNA, 22 bp, Artificial Sequence
  chemically synthesized
aaggaggcggcagggaaggatc

SEQ ID NO: 2640 - DNA, 22 bp, Artificial Sequence
  chemically synthesized
ggccagccgtagaggtgaccca

SEQ ID NO: 2641 - DNA, 22 bp, Artificial Sequence
  chemically synthesized
cagacagaaagcggcacaggcc

SEQ ID NO: 2642 - DNA, 22 bp, Artificial Sequence
  chemically synthesized
cctgggaaggggaaacagtggg

SEQ ID NO: 2643 - DNA, 22 bp, Artificial Sequence
  chemically synthesized
ggaaggggaaacagtgggccag

SEQ ID NO: 2644 - DNA, 22 bp, Artificial Sequence
  chemically synthesized
aaagtggtccggactcaggaga

SEQ ID NO: 2645 - DNA, 22 bp, Artificial Sequence
  chemically synthesized
aggagagagacggcagcgttag

SEQ ID NO: 2646 - DNA, 22 bp, Artificial Sequence
  chemically synthesized
gagggcagagttccggcggcac

SEQ ID NO: 2647 - DNA, 22 bp, Artificial Sequence
  chemically synthesized
cggcggcacagcaagggcactc

SEQ ID NO: 2648 - DNA, 22 bp, Artificial Sequence
  chemically synthesized
gggggcgagaggagggcagcgc

SEQ ID NO: 2649 - DNA, 22 bp, Artificial Sequence
  chemically synthesized
agctatgggagctggctcaggt

SEQ ID NO: 2650 - DNA, 22 bp, Artificial Sequence
  chemically synthesized
tgggagctggctcaggttcagg

SEQ ID NO: 2651 - DNA, 22 bp, Artificial Sequence
  chemically synthesized
gctcaggttcaggagagggcag

SEQ ID NO: 2652 - DNA, 22 bp, Artificial Sequence
  chemically synthesized
aggttcaggagagggcagggca

SEQ ID NO: 2653 - DNA, 22 bp, Artificial Sequence
  chemically synthesized
aggagagggcagggcagggaag

SEQ ID NO: 2654 - DNA, 22 bp, Artificial Sequence
  chemically synthesized
gaggggctcaacatcggaagag

SEQ ID NO: 2655 - DNA, 22 bp, Artificial Sequence
  chemically synthesized
aacatcggaagaggggaagtcg

SEQ ID NO: 2656 - DNA, 22 bp, Artificial Sequence
  chemically synthesized
catgggtcagcacaggctgcca

SEQ ID NO: 2657 - DNA, 22 bp, Artificial Sequence
  chemically synthesized
ccaaagccagggccagttaaag

SEQ ID NO: 2658 - DNA, 22 bp, Artificial Sequence
  chemically synthesized
aagcgactccaatgcggaagag

SEQ ID NO: 2659 - DNA, 22 bp, Artificial Sequence
  chemically synthesized
caatgcggaagagagtaggtcg

SEQ ID NO: 2660 - DNA, 22 bp, Artificial Sequence
  chemically synthesized
gggcagagtggtcagcacagag

SEQ ID NO: 2661 - DNA, 22 bp, Artificial Sequence
  chemically synthesized
agcccagggccagttgaagcgg

SEQ ID NO: 2662 - DNA, 22 bp, Artificial Sequence
  chemically synthesized
aagcggctccaattcggaagtg

SEQ ID NO: 2663 - DNA, 22 bp, Artificial Sequence
  chemically synthesized
caattcggaagtggggtggtcg

SEQ ID NO: 2664 - DNA, 22 bp, Artificial Sequence
  chemically synthesized
ggaagtggggtggtcgaagggg

SEQ ID NO: 2665 - DNA, 22 bp, Artificial Sequence
  chemically synthesized
ggacggggtgtcagcatagggt

SEQ ID NO: 2666 - DNA, 22 bp, Artificial Sequence
  chemically synthesized
gcaacggggaaggaggatgccc

SEQ ID NO: 2667 - DNA, 22 bp, Artificial Sequence
  chemically synthesized
gccccgggagacgccgggcggg

SEQ ID NO: 2668 - DNA, 22 bp, Artificial Sequence
  chemically synthesized
acctggtgcagggcgctgatac

SEQ ID NO: 2669 - DNA, 22 bp, Artificial Sequence
  chemically synthesized
gtgcagggcgctgataccgtcg

SEQ ID NO: 2670 - DNA, 22 bp, Artificial Sequence
  chemically synthesized
ataccgtcggcgttggtggagt

SEQ ID NO: 2671 - DNA, 22 bp, Artificial Sequence
  chemically synthesized
gtggagtccagcacggcgcggg

SEQ ID NO: 2672 - DNA, 22 bp, Artificial Sequence
  chemically synthesized
ggcgccggggccagggtcggcg

SEQ ID NO: 2673 - DNA, 22 bp, Artificial Sequence
  chemically synthesized
gtccaggtcgccgcccgcacag

SEQ ID NO: 2674 - DNA, 22 bp, Artificial Sequence
  chemically synthesized
ggcggcgcgctcgaagcggacg

SEQ ID NO: 2675 - DNA, 22 bp, Artificial Sequence
  chemically synthesized
gaagcggacggtgcgggcgcgg

SEQ ID NO: 2676 - DNA, 22 bp, Artificial Sequence
  chemically synthesized
tccggggccaggctcggcgccc

SEQ ID NO: 2677 - DNA, 22 bp, Artificial Sequence
  chemically synthesized
cggggccaggctcggcgcccgc

SEQ ID NO: 2678 - DNA, 22 bp, Artificial Sequence
  chemically synthesized
ggcgcccgcccgcgccccccac

SEQ ID NO: 2679 - DNA, 22 bp, Artificial Sequence
  chemically synthesized
ccgcagctgctcccgtcgccgc

SEQ ID NO: 2680 - DNA, 22 bp, Artificial Sequence
  chemically synthesized
ctcccgtcgccgctcccgggca

SEQ ID NO: 2681 - DNA, 22 bp, Artificial Sequence
  chemically synthesized
ccgtcgccgctcccgggcagcc

SEQ ID NO: 2682 - DNA, 22 bp, Artificial Sequence
  chemically synthesized
ccgggcagccgccgccgccgcc

SEQ ID NO: 2683 - DNA, 22 bp, Artificial Sequence
  chemically synthesized
tccggacatcgcaccgcccgcc

SEQ ID NO: 2684 - DNA, 22 bp, Artificial Sequence
  chemically synthesized
cggacatcgcaccgcccgcccg

SEQ ID NO: 2685 - DNA, 22 bp, Artificial Sequence
  chemically synthesized
gggctcggcgctcgctcgctcg

SEQ ID NO: 2686 - DNA, 22 bp, Artificial Sequence
  chemically synthesized
ggcgctcgctcgctcgctgggc

SEQ ID NO: 2687 - DNA, 22 bp, Artificial Sequence
  chemically synthesized
gctcgctcgctgggcgggcggg

SEQ ID NO: 2688 - DNA, 22 bp, Artificial Sequence
  chemically synthesized
gctcgctgggcgggcgggcggt

SEQ ID NO: 2689 - DNA, 22 bp, Artificial Sequence
  chemically synthesized
gctgggcgggcgggcggtgcga

SEQ ID NO: 2690 - DNA, 22 bp, Artificial Sequence
  chemically synthesized
ggcgggcgggcggtgcgatgtc

SEQ ID NO: 2691 - DNA, 22 bp, Artificial Sequence
  chemically synthesized
gcccgggggcggcggcggcggc

SEQ ID NO: 2692 - DNA, 22 bp, Artificial Sequence
  chemically synthesized
cccgggagcggcgacgggagca

SEQ ID NO: 2693 - DNA, 22 bp, Artificial Sequence
  chemically synthesized
cggcagtggggggcgcgggcgg

SEQ ID NO: 2694 - DNA, 22 bp, Artificial Sequence
  chemically synthesized
gccccggagagcgccgcgcccg

SEQ ID NO: 2695 - DNA, 22 bp, Artificial Sequence
  chemically synthesized
cgagcgcgccgccgagttcctg

SEQ ID NO: 2696 - DNA, 22 bp, Artificial Sequence
  chemically synthesized
gagcgcgccgccgagttcctgg

SEQ ID NO: 2697 - DNA, 22 bp, Artificial Sequence
  chemically synthesized
ctggcggcctgtgcgggcggcg

SEQ ID NO: 2698 - DNA, 22 bp, Artificial Sequence
  chemically synthesized
gcggcctgtgcgggcggcgacc

SEQ ID NO: 2699 - DNA, 22 bp, Artificial Sequence
  chemically synthesized
tgcgggcggcgacctggacgag

SEQ ID NO: 2700 - DNA, 22 bp, Artificial Sequence
  chemically synthesized
gacgaggcgcgtctgatgctgc

SEQ ID NO: 2701 - DNA, 22 bp, Artificial Sequence
  chemically synthesized
atgctgcgcgccgccgaccctg

SEQ ID NO: 2702 - DNA, 22 bp, Artificial Sequence
  chemically synthesized
cgcgccgccgaccctggccccg

SEQ ID NO: 2703 - DNA, 22 bp, Artificial Sequence
  chemically synthesized
gccccggcgccgagctcgaccc

SEQ ID NO: 2704 - DNA, 22 bp, Artificial Sequence
  chemically synthesized
gaccccgccgcgccgccgcccg

SEQ ID NO: 2705 - DNA, 22 bp, Artificial Sequence
  chemically synthesized
gactccaccaacgccgacggta

SEQ ID NO: 2706 - DNA, 22 bp, Artificial Sequence
  chemically synthesized
caccaacgccgacggtatcagc

SEQ ID NO: 2707 - DNA, 22 bp, Artificial Sequence
  chemically synthesized
caccaggtcagcgccccccgcc

SEQ ID NO: 2708 - DNA, 22 bp, Artificial Sequence
  chemically synthesized
ccggggccaggtccaccctctg

SEQ ID NO: 2709 - DNA, 22 bp, Artificial Sequence
  chemically synthesized
tgctgcgccacctggggcatcc

SEQ ID NO: 2710 - DNA, 22 bp, Artificial Sequence
  chemically synthesized
ctgcgccacctggggcatcctc

SEQ ID NO: 2711 - DNA, 22 bp, Artificial Sequence
  chemically synthesized
cgccacctggggcatcctcctt

SEQ ID NO: 2712 - DNA, 22 bp, Artificial Sequence
  chemically synthesized
gggcatcctccttccccgttgc

SEQ ID NO: 2713 - DNA, 22 bp, Artificial Sequence
  chemically synthesized
cttccccgttgccagtctcgat

SEQ ID NO: 2714 - DNA, 22 bp, Artificial Sequence
  chemically synthesized
ccccgttgccagtctcgatccg

SEQ ID NO: 2715 - DNA, 22 bp, Artificial Sequence
  chemically synthesized
cccgttgccagtctcgatccgc

SEQ ID NO: 2716 - DNA, 22 bp, Artificial Sequence
  chemically synthesized
ccagtctcgatccgccccgtcg

SEQ ID NO: 2717 - DNA, 22 bp, Artificial Sequence
  chemically synthesized
gatccgccccgtcgttcctggc

SEQ ID NO: 2718 - DNA, 22 bp, Artificial Sequence
  chemically synthesized
ctggccctgggctttgccaccc

SEQ ID NO: 2719 - DNA, 22 bp, Artificial Sequence
  chemically synthesized
gccctgggctttgccaccctat

SEQ ID NO: 2720 - DNA, 22 bp, Artificial Sequence
  chemically synthesized
ggctttgccaccctatgctgac

SEQ ID NO: 2721 - DNA, 22 bp, Artificial Sequence
  chemically synthesized
tgccaccctatgctgacacccc

SEQ ID NO: 2722 - DNA, 22 bp, Artificial Sequence
  chemically synthesized
gccaccctatgctgacaccccg

SEQ ID NO: 2723 - DNA, 22 bp, Artificial Sequence
  chemically synthesized
ccaccctatgctgacaccccgt

SEQ ID NO: 2724 - DNA, 22 bp, Artificial Sequence
  chemically synthesized
tgctgacaccccgtcccagtcc

SEQ ID NO: 2725 - DNA, 22 bp, Artificial Sequence
  chemically synthesized
acaccccgtcccagtccccctt

SEQ ID NO: 2726 - DNA, 22 bp, Artificial Sequence
  chemically synthesized
accattccccttcgaccacccc

SEQ ID NO: 2727 - DNA, 22 bp, Artificial Sequence
  chemically synthesized
ccattccccttcgaccacccca

SEQ ID NO: 2728 - DNA, 22 bp, Artificial Sequence
  chemically synthesized
cccttcgaccaccccacttccg

SEQ ID NO: 2729 - DNA, 22 bp, Artificial Sequence
  chemically synthesized
cgaccaccccacttccgaattg

SEQ ID NO: 2730 - DNA, 22 bp, Artificial Sequence
  chemically synthesized
gaccaccccacttccgaattgg

SEQ ID NO: 2731 - DNA, 22 bp, Artificial Sequence
  chemically synthesized
ccgaattggagccgcttcaact

SEQ ID NO: 2732 - DNA, 22 bp, Artificial Sequence
  chemically synthesized
cgaattggagccgcttcaactg

SEQ ID NO: 2733 - DNA, 22 bp, Artificial Sequence
  chemically synthesized
gagccgcttcaactggccctgg

SEQ ID NO: 2734 - DNA, 22 bp, Artificial Sequence
  chemically synthesized
caactggccctgggcttagcca

SEQ ID NO: 2735 - DNA, 22 bp, Artificial Sequence
  chemically synthesized
aactggccctgggcttagccac

SEQ ID NO: 2736 - DNA, 22 bp, Artificial Sequence
  chemically synthesized
gccctgggcttagccactctgt

SEQ ID NO: 2737 - DNA, 22 bp, Artificial Sequence
  chemically synthesized
ggcttagccactctgtgctgac

SEQ ID NO: 2738 - DNA, 22 bp, Artificial Sequence
  chemically synthesized
agccactctgtgctgaccactc

SEQ ID NO: 2739 - DNA, 22 bp, Artificial Sequence
  chemically synthesized
gccactctgtgctgaccactct

SEQ ID NO: 2740 - DNA, 22 bp, Artificial Sequence
  chemically synthesized
tgtgctgaccactctgccccag

SEQ ID NO: 2741 - DNA, 22 bp, Artificial Sequence
  chemically synthesized
tgctgaccactctgccccaggc

SEQ ID NO: 2742 - DNA, 22 bp, Artificial Sequence
  chemically synthesized
accactctgccccaggcctcct

SEQ ID NO: 2743 - DNA, 22 bp, Artificial Sequence
  chemically synthesized
tgccccaggcctccttaccatt

SEQ ID NO: 2744 - DNA, 22 bp, Artificial Sequence
  chemically synthesized
ccccaggcctccttaccattcc

SEQ ID NO: 2745 - DNA, 22 bp, Artificial Sequence
  chemically synthesized
cttaccattccccttcgaccta

SEQ ID NO: 2746 - DNA, 22 bp, Artificial Sequence
  chemically synthesized
accattccccttcgacctactc

SEQ ID NO: 2747 - DNA, 22 bp, Artificial Sequence
  chemically synthesized
ccattccccttcgacctactct

SEQ ID NO: 2748 - DNA, 22 bp, Artificial Sequence
  chemically synthesized
cccttcgacctactctcttccg

SEQ ID NO: 2749 - DNA, 22 bp, Artificial Sequence
  chemically synthesized
cgacctactctcttccgcattg

SEQ ID NO: 2750 - DNA, 22 bp, Artificial Sequence
  chemically synthesized
gacctactctcttccgcattgg

SEQ ID NO: 2751 - DNA, 22 bp, Artificial Sequence
  chemically synthesized
ctctcttccgcattggagtcgc

SEQ ID NO: 2752 - DNA, 22 bp, Artificial Sequence
  chemically synthesized
tcttccgcattggagtcgcttt

SEQ ID NO: 2753 - DNA, 22 bp, Artificial Sequence
  chemically synthesized
ttccgcattggagtcgctttaa

SEQ ID NO: 2754 - DNA, 22 bp, Artificial Sequence
  chemically synthesized
ccgcattggagtcgctttaact

SEQ ID NO: 2755 - DNA, 22 bp, Artificial Sequence
  chemically synthesized
cgcattggagtcgctttaactg

SEQ ID NO: 2756 - DNA, 22 bp, Artificial Sequence
  chemically synthesized
gagtcgctttaactggccctgg

SEQ ID NO: 2757 - DNA, 22 bp, Artificial Sequence
  chemically synthesized
taactggccctggctttggcag

SEQ ID NO: 2758 - DNA, 22 bp, Artificial Sequence
  chemically synthesized
aactggccctggctttggcagc

SEQ ID NO: 2759 - DNA, 22 bp, Artificial Sequence
  chemically synthesized
actggccctggctttggcagcc

SEQ ID NO: 2760 - DNA, 22 bp, Artificial Sequence
  chemically synthesized
gccctggctttggcagcctgtg

SEQ ID NO: 2761 - DNA, 22 bp, Artificial Sequence
  chemically synthesized
gctttggcagcctgtgctgacc

SEQ ID NO: 2762 - DNA, 22 bp, Artificial Sequence
  chemically synthesized
tggcagcctgtgctgacccatg

SEQ ID NO: 2763 - DNA, 22 bp, Artificial Sequence
  chemically synthesized
ggcagcctgtgctgacccatgc

SEQ ID NO: 2764 - DNA, 22 bp, Artificial Sequence
  chemically synthesized
gcagcctgtgctgacccatgca

SEQ ID NO: 2765 - DNA, 22 bp, Artificial Sequence
  chemically synthesized
tgctgacccatgcagtcctcct

SEQ ID NO: 2766 - DNA, 22 bp, Artificial Sequence
  chemically synthesized
acccatgcagtcctccttacca

SEQ ID NO: 2767 - DNA, 22 bp, Artificial Sequence
  chemically synthesized
cttaccatccctccctcgactt

SEQ ID NO: 2768 - DNA, 22 bp, Artificial Sequence
  chemically synthesized
accatccctccctcgacttccc

SEQ ID NO: 2769 - DNA, 22 bp, Artificial Sequence
  chemically synthesized
ccatccctccctcgacttcccc

SEQ ID NO: 2770 - DNA, 22 bp, Artificial Sequence
  chemically synthesized
cctcgacttcccctcttccgat

SEQ ID NO: 2771 - DNA, 22 bp, Artificial Sequence
  chemically synthesized
gacttcccctcttccgatgttg

SEQ ID NO: 2772 - DNA, 22 bp, Artificial Sequence
  chemically synthesized
cccctcttccgatgttgagccc

SEQ ID NO: 2773 - DNA, 22 bp, Artificial Sequence
  chemically synthesized
ccctcttccgatgttgagcccc

SEQ ID NO: 2774 - DNA, 22 bp, Artificial Sequence
  chemically synthesized
ttccgatgttgagcccctccag

SEQ ID NO: 2775 - DNA, 22 bp, Artificial Sequence
  chemically synthesized
ccgatgttgagcccctccagcc

SEQ ID NO: 2776 - DNA, 22 bp, Artificial Sequence
  chemically synthesized
cgatgttgagcccctccagccg

SEQ ID NO: 2777 - DNA, 22 bp, Artificial Sequence
  chemically synthesized
agcccctccagccggtcctgga

SEQ ID NO: 2778 - DNA, 22 bp, Artificial Sequence
  chemically synthesized
cagccggtcctggactttgtct

SEQ ID NO: 2779 - DNA, 22 bp, Artificial Sequence
  chemically synthesized
gactttgtctccttccctgccc

SEQ ID NO: 2780 - DNA, 22 bp, Artificial Sequence
  chemically synthesized
tgtctccttccctgccctgccc

SEQ ID NO: 2781 - DNA, 22 bp, Artificial Sequence
  chemically synthesized
gtctccttccctgccctgccct

SEQ ID NO: 2782 - DNA, 22 bp, Artificial Sequence
  chemically synthesized
tctccttccctgccctgccctc

SEQ ID NO: 2783 - DNA, 22 bp, Artificial Sequence
  chemically synthesized
cttccctgccctgccctctcct

SEQ ID NO: 2784 - DNA, 22 bp, Artificial Sequence
  chemically synthesized
ccctgccctgccctctcctgaa

SEQ ID NO: 2785 - DNA, 22 bp, Artificial Sequence
  chemically synthesized
cctgccctgccctctcctgaac

SEQ ID NO: 2786 - DNA, 22 bp, Artificial Sequence
  chemically synthesized
ccctgccctctcctgaacctga

SEQ ID NO: 2787 - DNA, 22 bp, Artificial Sequence
  chemically synthesized
ccctctcctgaacctgagccag

SEQ ID NO: 2788 - DNA, 22 bp, Artificial Sequence
  chemically synthesized
tcctgaacctgagccagctccc

SEQ ID NO: 2789 - DNA, 22 bp, Artificial Sequence
  chemically synthesized
ctgaacctgagccagctcccat

SEQ ID NO: 2790 - DNA, 22 bp, Artificial Sequence
  chemically synthesized
aacctgagccagctcccatagc

SEQ ID NO: 2791 - DNA, 22 bp, Artificial Sequence
  chemically synthesized
agccagctcccatagctcagtc

SEQ ID NO: 2792 - DNA, 22 bp, Artificial Sequence
  chemically synthesized
ccatagctcagtctggtctatc

SEQ ID NO: 2793 - DNA, 22 bp, Artificial Sequence
  chemically synthesized
agtctggtctatctgcctggcc

SEQ ID NO: 2794 - DNA, 22 bp, Artificial Sequence
  chemically synthesized
gtctatctgcctggccctggcc

SEQ ID NO: 2795 - DNA, 22 bp, Artificial Sequence
  chemically synthesized
tctgcctggccctggccattgt

SEQ ID NO: 2796 - DNA, 22 bp, Artificial Sequence
  chemically synthesized
cctggccctggccattgtcact

SEQ ID NO: 2797 - DNA, 22 bp, Artificial Sequence
  chemically synthesized
gccctggccattgtcactttgc

SEQ ID NO: 2798 - DNA, 22 bp, Artificial Sequence
  chemically synthesized
gccattgtcactttgcgctgcc

SEQ ID NO: 2799 - DNA, 22 bp, Artificial Sequence
  chemically synthesized
tcactttgcgctgccctcctct

SEQ ID NO: 2800 - DNA, 22 bp, Artificial Sequence
  chemically synthesized
tgcgctgccctcctctcgcccc

SEQ ID NO: 2801 - DNA, 22 bp, Artificial Sequence
  chemically synthesized
gcgctgccctcctctcgccccc

SEQ ID NO: 2802 - DNA, 22 bp, Artificial Sequence
  chemically synthesized
cgctgccctcctctcgcccccg

SEQ ID NO: 2803 - DNA, 22 bp, Artificial Sequence
  chemically synthesized
ccctcctctcgcccccgagtgc

SEQ ID NO: 2804 - DNA, 22 bp, Artificial Sequence
  chemically synthesized
ctctcgcccccgagtgcccttg

SEQ ID NO: 2805 - DNA, 22 bp, Artificial Sequence
  chemically synthesized
tcgcccccgagtgcccttgctg

SEQ ID NO: 2806 - DNA, 22 bp, Artificial Sequence
  chemically synthesized
gcccccgagtgcccttgctgtg

SEQ ID NO: 2807 - DNA, 22 bp, Artificial Sequence
  chemically synthesized
gctgtgccgccggaactctgcc

SEQ ID NO: 2808 - DNA, 22 bp, Artificial Sequence
  chemically synthesized
ctgtgccgccggaactctgccc

SEQ ID NO: 2809 - DNA, 22 bp, Artificial Sequence
  chemically synthesized
tgccgccggaactctgccctct

SEQ ID NO: 2810 - DNA, 22 bp, Artificial Sequence
  chemically synthesized
tgccctctaacgctgccgtctc

SEQ ID NO: 2811 - DNA, 22 bp, Artificial Sequence
  chemically synthesized
ccctctaacgctgccgtctctc

SEQ ID NO: 2812 - DNA, 22 bp, Artificial Sequence
  chemically synthesized
taacgctgccgtctctctcctg

SEQ ID NO: 2813 - DNA, 22 bp, Artificial Sequence
  chemically synthesized
acgctgccgtctctctcctgag

SEQ ID NO: 2814 - DNA, 22 bp, Artificial Sequence
  chemically synthesized
ccgtctctctcctgagtccgga

SEQ ID NO: 2815 - DNA, 22 bp, Artificial Sequence
  chemically synthesized
tctcctgagtccggaccacttt

SEQ ID NO: 2816 - DNA, 22 bp, Artificial Sequence
  chemically synthesized
tcctgagtccggaccactttga

SEQ ID NO: 2817 - DNA, 22 bp, Artificial Sequence
  chemically synthesized
ctgagtccggaccactttgagc

SEQ ID NO: 2818 - DNA, 22 bp, Artificial Sequence
  chemically synthesized
agtccggaccactttgagctct

SEQ ID NO: 2819 - DNA, 22 bp, Artificial Sequence
  chemically synthesized
tgagctctactggcttctgcgc

SEQ ID NO: 2820 - DNA, 22 bp, Artificial Sequence
  chemically synthesized
gagctctactggcttctgcgcc

SEQ ID NO: 2821 - DNA, 22 bp, Artificial Sequence
  chemically synthesized
agctctactggcttctgcgccg

SEQ ID NO: 2822 - DNA, 22 bp, Artificial Sequence
  chemically synthesized
tactggcttctgcgccgcctct

SEQ ID NO: 2823 - DNA, 22 bp, Artificial Sequence
  chemically synthesized
ctggcttctgcgccgcctctgg

SEQ ID NO: 2824 - DNA, 22 bp, Artificial Sequence
  chemically synthesized
gcttctgcgccgcctctggccc

SEQ ID NO: 2825 - DNA, 22 bp, Artificial Sequence
  chemically synthesized
ctgcgccgcctctggcccactg

SEQ ID NO: 2826 - DNA, 22 bp, Artificial Sequence
  chemically synthesized
tgcgccgcctctggcccactgt

SEQ ID NO: 2827 - DNA, 22 bp, Artificial Sequence
  chemically synthesized
cgccgcctctggcccactgttt

SEQ ID NO: 2828 - DNA, 22 bp, Artificial Sequence
  chemically synthesized
tggcccactgtttccccttccc

SEQ ID NO: 2829 - DNA, 22 bp, Artificial Sequence
  chemically synthesized
gcccactgtttccccttcccag

SEQ ID NO: 2830 - DNA, 22 bp, Artificial Sequence
  chemically synthesized
tttccccttcccaggcaggtcc

SEQ ID NO: 2831 - DNA, 22 bp, Artificial Sequence
  chemically synthesized
ccccttcccaggcaggtcctgc

SEQ ID NO: 2832 - DNA, 22 bp, Artificial Sequence
  chemically synthesized
cccttcccaggcaggtcctgct

SEQ ID NO: 2833 - DNA, 22 bp, Artificial Sequence
  chemically synthesized
cccaggcaggtcctgctttctc

SEQ ID NO: 2834 - DNA, 22 bp, Artificial Sequence
  chemically synthesized
ccaggcaggtcctgctttctct

SEQ ID NO: 2835 - DNA, 22 bp, Artificial Sequence
  chemically synthesized
ctttctctgacctgcattctct

SEQ ID NO: 2836 - DNA, 22 bp, Artificial Sequence
  chemically synthesized
tctctgacctgcattctctccc

SEQ ID NO: 2837 - DNA, 22 bp, Artificial Sequence
  chemically synthesized
ctctgacctgcattctctcccc

SEQ ID NO: 2838 - DNA, 22 bp, Artificial Sequence
  chemically synthesized
tctgacctgcattctctcccct

SEQ ID NO: 2839 - DNA, 22 bp, Artificial Sequence
  chemically synthesized
tgacctgcattctctcccctgg

SEQ ID NO: 2840 - DNA, 22 bp, Artificial Sequence
  chemically synthesized
acctgcattctctcccctgggc

SEQ ID NO: 2841 - DNA, 22 bp, Artificial Sequence
  chemically synthesized
cattctctcccctgggcctgtg

SEQ ID NO: 2842 - DNA, 22 bp, Artificial Sequence
  chemically synthesized
tctcccctgggcctgtgccgct

SEQ ID NO: 2843 - DNA, 22 bp, Artificial Sequence
  chemically synthesized
tcccctgggcctgtgccgcttt

SEQ ID NO: 2844 - DNA, 22 bp, Artificial Sequence
  chemically synthesized
ccctgggcctgtgccgctttct

SEQ ID NO: 2845 - DNA, 22 bp, Artificial Sequence
  chemically synthesized
ggcctgtgccgctttctgtctg

SEQ ID NO: 2846 - DNA, 22 bp, Artificial Sequence
  chemically synthesized
tgccgctttctgtctgcagctt

SEQ ID NO: 2847 - DNA, 22 bp, Artificial Sequence
  chemically synthesized
tctgtctgcagcttgtggcctg

SEQ ID NO: 2848 - DNA, 22 bp, Artificial Sequence
  chemically synthesized
ctgtctgcagcttgtggcctgg

SEQ ID NO: 2849 - DNA, 22 bp, Artificial Sequence
  chemically synthesized
tgtctgcagcttgtggcctggg

SEQ ID NO: 2850 - DNA, 22 bp, Artificial Sequence
  chemically synthesized
tctgcagcttgtggcctgggtc

SEQ ID NO: 2851 - DNA, 22 bp, Artificial Sequence
  chemically synthesized
cagcttgtggcctgggtcacct

SEQ ID NO: 2852 - DNA, 22 bp, Artificial Sequence
  chemically synthesized
gtggcctgggtcacctctacgg

SEQ ID NO: 2853 - DNA, 22 bp, Artificial Sequence
  chemically synthesized
tggcctgggtcacctctacggc

SEQ ID NO: 2854 - DNA, 22 bp, Artificial Sequence
  chemically synthesized
ggtcacctctacggctggccca

SEQ ID NO: 2855 - DNA, 22 bp, Artificial Sequence
  chemically synthesized
tacggctggcccagatccttcc

SEQ ID NO: 2856 - DNA, 22 bp, Artificial Sequence
  chemically synthesized
cggctggcccagatccttccct

SEQ ID NO: 2857 - DNA, 22 bp, Artificial Sequence
  chemically synthesized
gcccagatccttccctgccgcc

SEQ ID NO: 2858 - DNA, 22 bp, Artificial Sequence
  chemically synthesized
ccctgccgcctccttcaggttc

SEQ ID NO: 2859 - DNA, 22 bp, Artificial Sequence
  chemically synthesized
cctgccgcctccttcaggttcc

SEQ ID NO: 2860 - DNA, 22 bp, Artificial Sequence
  chemically synthesized
ccgcctccttcaggttccgtct

SEQ ID NO: 2861 - DNA, 22 bp, Artificial Sequence
  chemically synthesized
cttcaggttccgtcttcctcca

SEQ ID NO: 2862 - DNA, 22 bp, Artificial Sequence
  chemically synthesized
caggttccgtcttcctccactc

SEQ ID NO: 2863 - DNA, 22 bp, Artificial Sequence
  chemically synthesized
aggttccgtcttcctccactcc

SEQ ID NO: 2864 - DNA, 22 bp, Artificial Sequence
  chemically synthesized
cgtcttcctccactccctcttc

SEQ ID NO: 2865 - DNA, 22 bp, Artificial Sequence
  chemically synthesized
cctccactccctcttccccttg

SEQ ID NO: 2866 - DNA, 22 bp, Artificial Sequence
  chemically synthesized
ctccactccctcttccccttgc

SEQ ID NO: 2867 - DNA, 22 bp, Artificial Sequence
  chemically synthesized
cactccctcttccccttgctct

SEQ ID NO: 2868 - DNA, 22 bp, Artificial Sequence
  chemically synthesized
cctcttccccttgctctctgct

SEQ ID NO: 2869 - DNA, 22 bp, Artificial Sequence
  chemically synthesized
ttccccttgctctctgctgtgt

SEQ ID NO: 2870 - DNA, 22 bp, Artificial Sequence
  chemically synthesized
ccccttgctctctgctgtgttg

SEQ ID NO: 2871 - DNA, 22 bp, Artificial Sequence
  chemically synthesized
cccttgctctctgctgtgttgc

SEQ ID NO: 2872 - DNA, 22 bp, Artificial Sequence
  chemically synthesized
gctctctgctgtgttgctgccc

SEQ ID NO: 2873 - DNA, 22 bp, Artificial Sequence
  chemically synthesized
ctctctgctgtgttgctgccca

SEQ ID NO: 2874 - DNA, 22 bp, Artificial Sequence
  chemically synthesized
tctgctgtgttgctgcccaagg

SEQ ID NO: 2875 - DNA, 22 bp, Artificial Sequence
  chemically synthesized
tgctgtgttgctgcccaaggat

SEQ ID NO: 2876 - DNA, 22 bp, Artificial Sequence
  chemically synthesized
ctgtgttgctgcccaaggatgc

SEQ ID NO: 2877 - DNA, 22 bp, Artificial Sequence
  chemically synthesized
tgttgctgcccaaggatgctct

SEQ ID NO: 2878 - DNA, 22 bp, Artificial Sequence
  chemically synthesized
ctgcccaaggatgctctttccg

SEQ ID NO: 2879 - DNA, 22 bp, Artificial Sequence
  chemically synthesized
cccaaggatgctctttccggag

SEQ ID NO: 2880 - DNA, 22 bp, Artificial Sequence
  chemically synthesized
tttccggagcacttccttctcg

SEQ ID NO: 2881 - DNA, 22 bp, Artificial Sequence
  chemically synthesized
tccggagcacttccttctcggc

SEQ ID NO: 2882 - DNA, 22 bp, Artificial Sequence
  chemically synthesized
ccggagcacttccttctcggcg

SEQ ID NO: 2883 - DNA, 22 bp, Artificial Sequence
  chemically synthesized
cggagcacttccttctcggcgc

SEQ ID NO: 2884 - DNA, 22 bp, Artificial Sequence
  chemically synthesized
ccttctcggcgctgcaccacgt

SEQ ID NO: 2885 - DNA, 22 bp, Artificial Sequence
  chemically synthesized
cttctcggcgctgcaccacgtg

SEQ ID NO: 2886 - DNA, 22 bp, Artificial Sequence
  chemically synthesized
ctcggcgctgcaccacgtgatg

SEQ ID NO: 2887 - DNA, 22 bp, Artificial Sequence
  chemically synthesized
tcggcgctgcaccacgtgatgt

SEQ ID NO: 2888 - DNA, 22 bp, Artificial Sequence
  chemically synthesized
ggcgctgcaccacgtgatgtcc

SEQ ID NO: 2889 - DNA, 22 bp, Artificial Sequence
  chemically synthesized
caccacgtgatgtcctctgagc

SEQ ID NO: 2890 - DNA, 22 bp, Artificial Sequence
  chemically synthesized
tgagcggatcctccccgtgtct

SEQ ID NO: 2891 - DNA, 22 bp, Artificial Sequence
  chemically synthesized
agcggatcctccccgtgtctgg

SEQ ID NO: 2892 - DNA, 22 bp, Artificial Sequence
  chemically synthesized
cccgtgtctgggtcctctccgg

SEQ ID NO: 2893 - DNA, 22 bp, Artificial Sequence
  chemically synthesized
ggtcctctccgggcatctctcc

SEQ ID NO: 2894 - DNA, 22 bp, Artificial Sequence
  chemically synthesized
tccgggcatctctcctccctca

SEQ ID NO: 2895 - DNA, 22 bp, Artificial Sequence
  chemically synthesized
cgggcatctctcctccctcacc

SEQ ID NO: 2896 - DNA, 22 bp, Artificial Sequence
  chemically synthesized
tcctccctcacccaaccccatg

SEQ ID NO: 2897 - DNA, 22 bp, Artificial Sequence
  chemically synthesized
ctccctcacccaaccccatgcc

SEQ ID NO: 2898 - DNA, 22 bp, Artificial Sequence
  chemically synthesized
cctcacccaaccccatgccgtc

SEQ ID NO: 2899 - DNA, 22 bp, Artificial Sequence
  chemically synthesized
acccaaccccatgccgtcttca

SEQ ID NO: 2900 - DNA, 22 bp, Artificial Sequence
  chemically synthesized
cactcgctgggttcccttttcc

SEQ ID NO: 2901 - DNA, 22 bp, Artificial Sequence
  chemically synthesized
actcgctgggttcccttttcct

SEQ ID NO: 2902 - DNA, 22 bp, Artificial Sequence
  chemically synthesized
gctgggttcccttttccttctc

SEQ ID NO: 2903 - DNA, 22 bp, Artificial Sequence
  chemically synthesized
ggttcccttttccttctccttc

SEQ ID NO: 2904 - DNA, 22 bp, Artificial Sequence
  chemically synthesized
ccttttccttctccttctgggg

SEQ ID NO: 2905 - DNA, 22 bp, Artificial Sequence
  chemically synthesized
ttccttctccttctggggcctg

SEQ ID NO: 2906 - DNA, 22 bp, Artificial Sequence
  chemically synthesized
tccttctccttctggggcctgt

SEQ ID NO: 2907 - DNA, 22 bp, Artificial Sequence
  chemically synthesized
ccttctccttctggggcctgtg

SEQ ID NO: 2908 - DNA, 22 bp, Artificial Sequence
  chemically synthesized
cttctccttctggggcctgtgc

SEQ ID NO: 2909 - DNA, 22 bp, Artificial Sequence
  chemically synthesized
ctccttctggggcctgtgccat

SEQ ID NO: 2910 - DNA, 22 bp, Artificial Sequence
  chemically synthesized
tccttctggggcctgtgccatc

SEQ ID NO: 2911 - DNA, 22 bp, Artificial Sequence
  chemically synthesized
cttctggggcctgtgccatctc

SEQ ID NO: 2912 - DNA, 22 bp, Artificial Sequence
  chemically synthesized
ctggggcctgtgccatctctcg

SEQ ID NO: 2913 - DNA, 22 bp, Artificial Sequence
  chemically synthesized
tggggcctgtgccatctctcgt

SEQ ID NO: 2914 - DNA, 22 bp, Artificial Sequence
  chemically synthesized
gggcctgtgccatctctcgttt

SEQ ID NO: 2915 - DNA, 22 bp, Artificial Sequence
  chemically synthesized
tgccatctctcgtttcttagga

SEQ ID NO: 2916 - DNA, 22 bp, Artificial Sequence
  chemically synthesized
tcgtttcttaggatggccttct

SEQ ID NO: 2917 - DNA, 22 bp, Artificial Sequence
  chemically synthesized
gtttcttaggatggccttctcc

SEQ ID NO: 2918 - DNA, 22 bp, Artificial Sequence
  chemically synthesized
cttaggatggccttctccgacg

SEQ ID NO: 2919 - DNA, 22 bp, Artificial Sequence
  chemically synthesized
ttaggatggccttctccgacgg

SEQ ID NO: 2920 - DNA, 22 bp, Artificial Sequence
  chemically synthesized
aggatggccttctccgacggat

SEQ ID NO: 2921 - DNA, 22 bp, Artificial Sequence
  chemically synthesized
ggatggccttctccgacggatg

SEQ ID NO: 2922 - DNA, 22 bp, Artificial Sequence
  chemically synthesized
ctccgacggatgtctcccttgc

SEQ ID NO: 2923 - DNA, 22 bp, Artificial Sequence
  chemically synthesized
tccgacggatgtctcccttgcg

SEQ ID NO: 2924 - DNA, 22 bp, Artificial Sequence
  chemically synthesized
cgacggatgtctcccttgcgtc

SEQ ID NO: 2925 - DNA, 22 bp, Artificial Sequence
  chemically synthesized
ccttgcgtcccgcctccccttc

SEQ ID NO: 2926 - DNA, 22 bp, Artificial Sequence
  chemically synthesized
gcgtcccgcctccccttcttgt

SEQ ID NO: 2927 - DNA, 22 bp, Artificial Sequence
  chemically synthesized
cgtcccgcctccccttcttgta

SEQ ID NO: 2928 - DNA, 22 bp, Artificial Sequence
  chemically synthesized
cccttcttgtaggcctgcatca

SEQ ID NO: 2929 - DNA, 22 bp, Artificial Sequence
  chemically synthesized
cttgtaggcctgcatcatcacc

SEQ ID NO: 2930 - DNA, 22 bp, Artificial Sequence
  chemically synthesized
ttgtaggcctgcatcatcaccg

SEQ ID NO: 2931 - DNA, 22 bp, Artificial Sequence
  chemically synthesized
gtaggcctgcatcatcaccgtt

SEQ ID NO: 2932 - DNA, 22 bp, Artificial Sequence
  chemically synthesized
taggcctgcatcatcaccgttt

SEQ ID NO: 2933 - DNA, 22 bp, Artificial Sequence
  chemically synthesized
catcatcaccgtttttctggac

SEQ ID NO: 2934 - DNA, 22 bp, Artificial Sequence
  chemically synthesized
ttctggacaaccccaaagtacc

SEQ ID NO: 2935 - DNA, 22 bp, Artificial Sequence
  chemically synthesized
tctggacaaccccaaagtaccc

SEQ ID NO: 2936 - DNA, 22 bp, Artificial Sequence
  chemically synthesized
ctggacaaccccaaagtacccc

SEQ ID NO: 2937 - DNA, 22 bp, Artificial Sequence
  chemically synthesized
tggacaaccccaaagtaccccg

SEQ ID NO: 2938 - DNA, 22 bp, Artificial Sequence
  chemically synthesized
gacaaccccaaagtaccccgtc

SEQ ID NO: 2939 - DNA, 22 bp, Artificial Sequence
  chemically synthesized
cctggctttagccacctctcca

SEQ ID NO: 2940 - DNA, 22 bp, Artificial Sequence
  chemically synthesized
gctttagccacctctccatcct

SEQ ID NO: 2941 - DNA, 22 bp, Artificial Sequence
  chemically synthesized
tagccacctctccatcctcttg

SEQ ID NO: 2942 - DNA, 22 bp, Artificial Sequence
  chemically synthesized
agccacctctccatcctcttgc

SEQ ID NO: 2943 - DNA, 22 bp, Artificial Sequence
  chemically synthesized
gccacctctccatcctcttgct

SEQ ID NO: 2944 - DNA, 22 bp, Artificial Sequence
  chemically synthesized
tccatcctcttgctttctttgc

SEQ ID NO: 2945 - DNA, 22 bp, Artificial Sequence
  chemically synthesized
catcctcttgctttctttgcct

SEQ ID NO: 2946 - DNA, 22 bp, Artificial Sequence
  chemically synthesized
ttgctttctttgcctggacacc

SEQ ID NO: 2947 - DNA, 22 bp, Artificial Sequence
  chemically synthesized
gctttctttgcctggacacccc

SEQ ID NO: 2948 - DNA, 22 bp, Artificial Sequence
  chemically synthesized
ctttctttgcctggacaccccg

SEQ ID NO: 2949 - DNA, 22 bp, Artificial Sequence
  chemically synthesized
tctttgcctggacaccccgttc

SEQ ID NO: 2950 - DNA, 22 bp, Artificial Sequence
  chemically synthesized
ctttgcctggacaccccgttct

SEQ ID NO: 2951 - DNA, 22 bp, Artificial Sequence
  chemically synthesized
tttgcctggacaccccgttctc

SEQ ID NO: 2952 - DNA, 22 bp, Artificial Sequence
  chemically synthesized
tgcctggacaccccgttctcct

SEQ ID NO: 2953 - DNA, 22 bp, Artificial Sequence
  chemically synthesized
gcctggacaccccgttctcctg

SEQ ID NO: 2954 - DNA, 22 bp, Artificial Sequence
  chemically synthesized
cctggacaccccgttctcctgt

SEQ ID NO: 2955 - DNA, 22 bp, Artificial Sequence
  chemically synthesized
gacaccccgttctcctgtggat

SEQ ID NO: 2956 - DNA, 22 bp, Artificial Sequence
  chemically synthesized
tcctgtggattcgggtcacctc

SEQ ID NO: 2957 - DNA, 22 bp, Artificial Sequence
  chemically synthesized
ctgtggattcgggtcacctctc

SEQ ID NO: 2958 - DNA, 22 bp, Artificial Sequence
  chemically synthesized
tggattcgggtcacctctcact

SEQ ID NO: 2959 - DNA, 22 bp, Artificial Sequence
  chemically synthesized
gggtcacctctcactcctttca

SEQ ID NO: 2960 - DNA, 22 bp, Artificial Sequence
  chemically synthesized
tcactcctttcatttgggcagc

SEQ ID NO: 2961 - DNA, 22 bp, Artificial Sequence
  chemically synthesized
actcctttcatttgggcagctc

SEQ ID NO: 2962 - DNA, 22 bp, Artificial Sequence
  chemically synthesized
ctttcatttgggcagctcccct

SEQ ID NO: 2963 - DNA, 22 bp, Artificial Sequence
  chemically synthesized
tcatttgggcagctcccctacc

SEQ ID NO: 2964 - DNA, 22 bp, Artificial Sequence
  chemically synthesized
catttgggcagctcccctaccc

SEQ ID NO: 2965 - DNA, 22 bp, Artificial Sequence
  chemically synthesized
atttgggcagctcccctacccc

SEQ ID NO: 2966 - DNA, 22 bp, Artificial Sequence
  chemically synthesized
gggcagctcccctacccccctt

SEQ ID NO: 2967 - DNA, 22 bp, Artificial Sequence
  chemically synthesized
ggcagctcccctacccccctta

SEQ ID NO: 2968 - DNA, 22 bp, Artificial Sequence
  chemically synthesized
ccctaccccccttacctctcta

SEQ ID NO: 2969 - DNA, 22 bp, Artificial Sequence
  chemically synthesized
ccccccttacctctctagtctg

SEQ ID NO: 2970 - DNA, 22 bp, Artificial Sequence
  chemically synthesized
acctctctagtctgtgctagct

SEQ ID NO: 2971 - DNA, 22 bp, Artificial Sequence
  chemically synthesized
cctctctagtctgtgctagctc

SEQ ID NO: 2972 - DNA, 22 bp, Artificial Sequence
  chemically synthesized
tctagtctgtgctagctcttcc

SEQ ID NO: 2973 - DNA, 22 bp, Artificial Sequence
  chemically synthesized
tagtctgtgctagctcttccag

SEQ ID NO: 2974 - DNA, 22 bp, Artificial Sequence
  chemically synthesized
gtctgtgctagctcttccagcc

SEQ ID NO: 2975 - DNA, 22 bp, Artificial Sequence
  chemically synthesized
tgctagctcttccagccccctg

SEQ ID NO: 2976 - DNA, 22 bp, Artificial Sequence
  chemically synthesized
gctcttccagccccctgtcatg

SEQ ID NO: 2977 - DNA, 22 bp, Artificial Sequence
  chemically synthesized
ttccagccccctgtcatggcat

SEQ ID NO: 2978 - DNA, 22 bp, Artificial Sequence
  chemically synthesized
ccagccccctgtcatggcatct

SEQ ID NO: 2979 - DNA, 22 bp, Artificial Sequence
  chemically synthesized
cagccccctgtcatggcatctt

SEQ ID NO: 2980 - DNA, 22 bp, Artificial Sequence
  chemically synthesized
tcatggcatcttccaggggtcc

SEQ ID NO: 2981 - DNA, 22 bp, Artificial Sequence
  chemically synthesized
ccaggggtccgagagctcagct

SEQ ID NO: 2982 - DNA, 22 bp, Artificial Sequence
  chemically synthesized
caggggtccgagagctcagcta

SEQ ID NO: 2983 - DNA, 22 bp, Artificial Sequence
  chemically synthesized
agctagtcttcttcctccaacc

SEQ ID NO: 2984 - DNA, 22 bp, Artificial Sequence
  chemically synthesized
gtcttcttcctccaacccgggc

SEQ ID NO: 2985 - DNA, 22 bp, Artificial Sequence
  chemically synthesized
cttcctccaacccgggccccta

SEQ ID NO: 2986 - DNA, 22 bp, Artificial Sequence
  chemically synthesized
ttcctccaacccgggcccctat

SEQ ID NO: 2987 - DNA, 22 bp, Artificial Sequence
  chemically synthesized
cctccaacccgggcccctatgt

SEQ ID NO: 2988 - DNA, 22 bp, Artificial Sequence
  chemically synthesized
ctccaacccgggcccctatgtc

SEQ ID NO: 2989 - DNA, 22 bp, Artificial Sequence
  chemically synthesized
caacccgggcccctatgtccac

SEQ ID NO: 2990 - DNA, 22 bp, Artificial Sequence
  chemically synthesized
tgtccacttcaggacagcatgt

SEQ ID NO: 2991 - DNA, 22 bp, Artificial Sequence
  chemically synthesized
caggacagcatgtttgctgcct

SEQ ID NO: 2992 - DNA, 22 bp, Artificial Sequence
  chemically synthesized
aggacagcatgtttgctgcctc

SEQ ID NO: 2993 - DNA, 22 bp, Artificial Sequence
  chemically synthesized
gctgcctccagggatcctgtgt

SEQ ID NO: 2994 - DNA, 22 bp, Artificial Sequence
  chemically synthesized
ctgcctccagggatcctgtgtc

SEQ ID NO: 2995 - DNA, 22 bp, Artificial Sequence
  chemically synthesized
cctccagggatcctgtgtcccc

SEQ ID NO: 2996 - DNA, 22 bp, Artificial Sequence
  chemically synthesized
cagggatcctgtgtccccgagc

SEQ ID NO: 2997 - DNA, 22 bp, Artificial Sequence
  chemically synthesized
tgtccccgagctgggaccacct

SEQ ID NO: 2998 - DNA, 22 bp, Artificial Sequence
  chemically synthesized
ggaccaccttatattcccaggg

SEQ ID NO: 2999 - DNA, 22 bp, Artificial Sequence
  chemically synthesized
atattcccagggccggttaatg

SEQ ID NO: 3000 - DNA, 22 bp, Artificial Sequence
  chemically synthesized
tattcccagggccggttaatgt

SEQ ID NO: 3001 - DNA, 22 bp, Artificial Sequence
  chemically synthesized
ccagggccggttaatgtggctc

SEQ ID NO: 3002 - DNA, 22 bp, Artificial Sequence
  chemically synthesized
atgtggctctggttctgggtac

SEQ ID NO: 3003 - DNA, 22 bp, Artificial Sequence
  chemically synthesized
tggttctgggtacttttatctg

SEQ ID NO: 3004 - DNA, 22 bp, Artificial Sequence
  chemically synthesized
gttctgggtacttttatctgtc

SEQ ID NO: 3005 - DNA, 22 bp, Artificial Sequence
  chemically synthesized
tgggtacttttatctgtcccct

SEQ ID NO: 3006 - DNA, 22 bp, Artificial Sequence
  chemically synthesized
ggtacttttatctgtcccctcc

SEQ ID NO: 3007 - DNA, 22 bp, Artificial Sequence
  chemically synthesized
ttatctgtcccctccaccccac

SEQ ID NO: 3008 - DNA, 22 bp, Artificial Sequence
  chemically synthesized
tatctgtcccctccaccccaca

SEQ ID NO: 3009 - DNA, 22 bp, Artificial Sequence
  chemically synthesized
atctgtcccctccaccccacag

SEQ ID NO: 3010 - DNA, 22 bp, Artificial Sequence
  chemically synthesized
tctgtcccctccaccccacagt

SEQ ID NO: 3011 - DNA, 22 bp, Artificial Sequence
  chemically synthesized
tcccctccaccccacagtgggg

SEQ ID NO: 3012 - DNA, 22 bp, Artificial Sequence
  chemically synthesized
caccccacagtggggccactag

SEQ ID NO: 3013 - DNA, 22 bp, Artificial Sequence
  chemically synthesized
gggacaggattggtgacagaaa

SEQ ID NO: 3014 - DNA, 22 bp, Artificial Sequence
  chemically synthesized
gtgacagaaaagccccatcctt

SEQ ID NO: 3015 - DNA, 22 bp, Artificial Sequence
  chemically synthesized
aggcctcctccttcctagtctc

SEQ ID NO: 3016 - DNA, 22 bp, Artificial Sequence
  chemically synthesized
ggcctcctccttcctagtctcc

SEQ ID NO: 3017 - DNA, 22 bp, Artificial Sequence
  chemically synthesized
ctccttcctagtctcctgatat

SEQ ID NO: 3018 - DNA, 22 bp, Artificial Sequence
  chemically synthesized
cttcctagtctcctgatattgg

SEQ ID NO: 3019 - DNA, 22 bp, Artificial Sequence
  chemically synthesized
cctagtctcctgatattgggtc

SEQ ID NO: 3020 - DNA, 22 bp, Artificial Sequence
  chemically synthesized
ctagtctcctgatattgggtct

SEQ ID NO: 3021 - DNA, 22 bp, Artificial Sequence
  chemically synthesized
gtctcctgatattgggtctaac

SEQ ID NO: 3022 - DNA, 22 bp, Artificial Sequence
  chemically synthesized
ctgatattgggtctaaccccca

SEQ ID NO: 3023 - DNA, 22 bp, Artificial Sequence
  chemically synthesized
atattgggtctaacccccacct

SEQ ID NO: 3024 - DNA, 22 bp, Artificial Sequence
  chemically synthesized
ggtctaacccccacctcctgtt

SEQ ID NO: 3025 - DNA, 22 bp, Artificial Sequence
  chemically synthesized
acccccacctcctgttaggcag

SEQ ID NO: 3026 - DNA, 22 bp, Artificial Sequence
  chemically synthesized
ctgttaggcagattccttatct

SEQ ID NO: 3027 - DNA, 22 bp, Artificial Sequence
  chemically synthesized
ttaggcagattccttatctggt

SEQ ID NO: 3028 - DNA, 22 bp, Artificial Sequence
  chemically synthesized
ggcagattccttatctggtgac

SEQ ID NO: 3029 - DNA, 22 bp, Artificial Sequence
  chemically synthesized
cttatctggtgacacaccccca

SEQ ID NO: 3030 - DNA, 22 bp, Artificial Sequence
  chemically synthesized
atctggtgacacacccccattt

SEQ ID NO: 3031 - DNA, 22 bp, Artificial Sequence
  chemically synthesized
tctggtgacacacccccatttc

SEQ ID NO: 3032 - DNA, 22 bp, Artificial Sequence
  chemically synthesized
gtgacacacccccatttcctgg

SEQ ID NO: 3033 - DNA, 22 bp, Artificial Sequence
  chemically synthesized
cctggagccatctctctccttg

SEQ ID NO: 3034 - DNA, 22 bp, Artificial Sequence
  chemically synthesized
ctggagccatctctctccttgc

SEQ ID NO: 3035 - DNA, 22 bp, Artificial Sequence
  chemically synthesized
gagccatctctctccttgccag

SEQ ID NO: 3036 - DNA, 22 bp, Artificial Sequence
  chemically synthesized
tctccttgccagaacctctaag

SEQ ID NO: 3037 - DNA, 22 bp, Artificial Sequence
  chemically synthesized
tccttgccagaacctctaaggt

SEQ ID NO: 3038 - DNA, 22 bp, Artificial Sequence
  chemically synthesized
cttgccagaacctctaaggttt

SEQ ID NO: 3039 - DNA, 22 bp, Artificial Sequence
  chemically synthesized
gccagaacctctaaggtttgct

SEQ ID NO: 3040 - DNA, 22 bp, Artificial Sequence
  chemically synthesized
ccagaacctctaaggtttgctt

SEQ ID NO: 3041 - DNA, 22 bp, Artificial Sequence
  chemically synthesized
taaggtttgcttacgatggagc

SEQ ID NO: 3042 - DNA, 22 bp, Artificial Sequence
  chemically synthesized
aggtttgcttacgatggagcca

SEQ ID NO: 3043 - DNA, 22 bp, Artificial Sequence
  chemically synthesized
gcttacgatggagccagagagg

SEQ ID NO: 3044 - DNA, 22 bp, Artificial Sequence
  chemically synthesized
cttacgatggagccagagagga

SEQ ID NO: 3045 - DNA, 22 bp, Artificial Sequence
  chemically synthesized
acgatggagccagagaggatcc

SEQ ID NO: 3046 - DNA, 22 bp, Artificial Sequence
  chemically synthesized
cgatggagccagagaggatcct

SEQ ID NO: 3047 - DNA, 22 bp, Artificial Sequence
  chemically synthesized
ggagggagagcttggcaggggg

SEQ ID NO: 3048 - DNA, 22 bp, Artificial Sequence
  chemically synthesized
ggcagggggtgggagggaaggg

SEQ ID NO: 3049 - DNA, 22 bp, Artificial Sequence
  chemically synthesized
gcagggggtgggagggaagggg

SEQ ID NO: 3050 - DNA, 22 bp, Artificial Sequence
  chemically synthesized
cccggttctcagtggccaccct

SEQ ID NO: 3051 - DNA, 22 bp, Artificial Sequence
  chemically synthesized
tcagtggccaccctgcgctacc

SEQ ID NO: 3052 - DNA, 22 bp, Artificial Sequence
  chemically synthesized
agtggccaccctgcgctaccct

SEQ ID NO: 3053 - DNA, 22 bp, Artificial Sequence
  chemically synthesized
cgctaccctctcccagaacctg

SEQ ID NO: 3054 - DNA, 22 bp, Artificial Sequence
  chemically synthesized
ccctctcccagaacctgagctg

SEQ ID NO: 3055 - DNA, 22 bp, Artificial Sequence
  chemically synthesized
tcccagaacctgagctgctctg

SEQ ID NO: 3056 - DNA, 22 bp, Artificial Sequence
  chemically synthesized
ccagaacctgagctgctctgac

SEQ ID NO: 3057 - DNA, 22 bp, Artificial Sequence
  chemically synthesized
agctgctctgacgcggccgtct

SEQ ID NO: 3058 - DNA, 22 bp, Artificial Sequence
  chemically synthesized
ctctgacgcggccgtctggtgc

SEQ ID NO: 3059 - DNA, 22 bp, Artificial Sequence
  chemically synthesized
tgacgcggccgtctggtgcgtt

SEQ ID NO: 3060 - DNA, 22 bp, Artificial Sequence
  chemically synthesized
acgcggccgtctggtgcgtttc

SEQ ID NO: 3061 - DNA, 22 bp, Artificial Sequence
  chemically synthesized
gtgcgtttcactgatcctggtg

SEQ ID NO: 3062 - DNA, 22 bp, Artificial Sequence
  chemically synthesized
cactgatcctggtgctgcagct

SEQ ID NO: 3063 - DNA, 22 bp, Artificial Sequence
  chemically synthesized
actgatcctggtgctgcagctt

SEQ ID NO: 3064 - DNA, 22 bp, Artificial Sequence
  chemically synthesized
atcctggtgctgcagcttcctt

SEQ ID NO: 3065 - DNA, 22 bp, Artificial Sequence
  chemically synthesized
gtgctgcagcttccttacactt

SEQ ID NO: 3066 - DNA, 22 bp, Artificial Sequence
  chemically synthesized
cagcttccttacacttcccaag

SEQ ID NO: 3067 - DNA, 22 bp, Artificial Sequence
  chemically synthesized
ccttacacttcccaagaggaga

SEQ ID NO: 3068 - DNA, 22 bp, Artificial Sequence
  chemically synthesized
cttacacttcccaagaggagaa

SEQ ID NO: 3069 - DNA, 22 bp, Artificial Sequence
  chemically synthesized
acacttcccaagaggagaagca

SEQ ID NO: 3070 - DNA, 22 bp, Artificial Sequence
  chemically synthesized
cacttcccaagaggagaagcag

SEQ ID NO: 3071 - DNA, 22 bp, Artificial Sequence
  chemically synthesized
cccaagaggagaagcagtttgg

SEQ ID NO: 3072 - DNA, 22 bp, Artificial Sequence
  chemically synthesized
ccaagaggagaagcagtttgga

SEQ ID NO: 3073 - DNA, 22 bp, Artificial Sequence
  chemically synthesized
ggaaaaacaaaatcagaataag

SEQ ID NO: 3074 - DNA, 22 bp, Artificial Sequence
  chemically synthesized
gaaaaacaaaatcagaataagt

SEQ ID NO: 3075 - DNA, 22 bp, Artificial Sequence
  chemically synthesized
gtcctgagttctaactttggct

SEQ ID NO: 3076 - DNA, 22 bp, Artificial Sequence
  chemically synthesized
agttctaactttggctcttcac

SEQ ID NO: 3077 - DNA, 22 bp, Artificial Sequence
  chemically synthesized
taactttggctcttcacctttc

SEQ ID NO: 3078 - DNA, 22 bp, Artificial Sequence
  chemically synthesized
actttggctcttcacctttcta

SEQ ID NO: 3079 - DNA, 22 bp, Artificial Sequence
  chemically synthesized
tggctcttcacctttctagtcc

SEQ ID NO: 3080 - DNA, 22 bp, Artificial Sequence
  chemically synthesized
ggctcttcacctttctagtccc

SEQ ID NO: 3081 - DNA, 22 bp, Artificial Sequence
  chemically synthesized
gctcttcacctttctagtcccc

SEQ ID NO: 3082 - DNA, 22 bp, Artificial Sequence
  chemically synthesized
ttcacctttctagtccccaatt

SEQ ID NO: 3083 - DNA, 22 bp, Artificial Sequence
  chemically synthesized
cacctttctagtccccaattta

SEQ ID NO: 3084 - DNA, 22 bp, Artificial Sequence
  chemically synthesized
acctttctagtccccaatttat

SEQ ID NO: 3085 - DNA, 22 bp, Artificial Sequence
  chemically synthesized
tctagtccccaatttatattgt

SEQ ID NO: 3086 - DNA, 22 bp, Artificial Sequence
  chemically synthesized
ctagtccccaatttatattgtt

SEQ ID NO: 3087 - DNA, 22 bp, Artificial Sequence
  chemically synthesized
tagtccccaatttatattgttc

SEQ ID NO: 3088 - DNA, 22 bp, Artificial Sequence
  chemically synthesized
gtccccaatttatattgttcct

SEQ ID NO: 3089 - DNA, 22 bp, Artificial Sequence
  chemically synthesized
atattgttcctccgtgcgtcag

SEQ ID NO: 3090 - DNA, 22 bp, Artificial Sequence
  chemically synthesized
tattgttcctccgtgcgtcagt

SEQ ID NO: 3091 - DNA, 22 bp, Artificial Sequence
  chemically synthesized
ttcctccgtgcgtcagttttac

SEQ ID NO: 3092 - DNA, 22 bp, Artificial Sequence
  chemically synthesized
ctccgtgcgtcagttttacctg

SEQ ID NO: 3093 - DNA, 22 bp, Artificial Sequence
  chemically synthesized
cgtgcgtcagttttacctgtga

SEQ ID NO: 3094 - DNA, 22 bp, Artificial Sequence
  chemically synthesized
tacctgtgagataaggccagta

SEQ ID NO: 3095 - DNA, 22 bp, Artificial Sequence
  chemically synthesized
acctgtgagataaggccagtag

SEQ ID NO: 3096 - DNA, 22 bp, Artificial Sequence
  chemically synthesized
cctgtgagataaggccagtagc

SEQ ID NO: 3097 - DNA, 22 bp, Artificial Sequence
  chemically synthesized
tgagataaggccagtagccagc

SEQ ID NO: 3098 - DNA, 22 bp, Artificial Sequence
  chemically synthesized
gcagggctgtggtgaggagggg

SEQ ID NO: 3099 - DNA, 22 bp, Artificial Sequence
  chemically synthesized
tggtgaggaggggggtgtccgt

SEQ ID NO: 3100 - DNA, 22 bp, Artificial Sequence
  chemically synthesized
cctttgtgagaatggtgcgtcc

SEQ ID NO: 3101 - DNA, 22 bp, Artificial Sequence
  chemically synthesized
tgtgagaatggtgcgtcctagg

SEQ ID NO: 3102 - DNA, 22 bp, Artificial Sequence
  chemically synthesized
gtgagaatggtgcgtcctaggt

SEQ ID NO: 3103 - DNA, 22 bp, Artificial Sequence
  chemically synthesized
tgagaatggtgcgtcctaggtg

SEQ ID NO: 3104 - DNA, 22 bp, Artificial Sequence
  chemically synthesized
ggtgttcaccaggtcgtggccg

SEQ ID NO: 3105 - DNA, 22 bp, Artificial Sequence
  chemically synthesized
accaggtcgtggccgcctctac

SEQ ID NO: 3106 - DNA, 22 bp, Artificial Sequence
  chemically synthesized
tactccctttctctttctccat

SEQ ID NO: 3107 - DNA, 22 bp, Artificial Sequence
  chemically synthesized
ctccctttctctttctccatcc

SEQ ID NO: 3108 - DNA, 22 bp, Artificial Sequence
  chemically synthesized
cctttctctttctccatccttc

SEQ ID NO: 3109 - DNA, 22 bp, Artificial Sequence
  chemically synthesized
tctctttctccatccttctttc

SEQ ID NO: 3110 - DNA, 22 bp, Artificial Sequence
  chemically synthesized
ctctttctccatccttctttcc

SEQ ID NO: 3111 - DNA, 22 bp, Artificial Sequence
  chemically synthesized
tctttctccatccttctttcct

SEQ ID NO: 3112 - DNA, 22 bp, Artificial Sequence
  chemically synthesized
tttctccatccttctttcctta

SEQ ID NO: 3113 - DNA, 22 bp, Artificial Sequence
  chemically synthesized
tctccatccttctttccttaaa

SEQ ID NO: 3114 - DNA, 22 bp, Artificial Sequence
  chemically synthesized
ctccatccttctttccttaaag

SEQ ID NO: 3115 - DNA, 22 bp, Artificial Sequence
  chemically synthesized
tccatccttctttccttaaaga

SEQ ID NO: 3116 - DNA, 22 bp, Artificial Sequence
  chemically synthesized
catccttctttccttaaagagt

SEQ ID NO: 3117 - DNA, 22 bp, Artificial Sequence
  chemically synthesized
ctttccttaaagagtccccagt

SEQ ID NO: 3118 - DNA, 22 bp, Artificial Sequence
  chemically synthesized
tttccttaaagagtccccagtg

SEQ ID NO: 3119 - DNA, 22 bp, Artificial Sequence
  chemically synthesized
tccttaaagagtccccagtgct

SEQ ID NO: 3120 - DNA, 22 bp, Artificial Sequence
  chemically synthesized
ccttaaagagtccccagtgcta

SEQ ID NO: 3121 - DNA, 22 bp, Artificial Sequence
  chemically synthesized
cttaaagagtccccagtgctat

SEQ ID NO: 3122 - DNA, 22 bp, Artificial Sequence
  chemically synthesized
aaagagtccccagtgctatctg

SEQ ID NO: 3123 - DNA, 22 bp, Artificial Sequence
  chemically synthesized
aagagtccccagtgctatctgg

SEQ ID NO: 3124 - DNA, 22 bp, Artificial Sequence
  chemically synthesized
tctgggacatattcctccgccc

SEQ ID NO: 3125 - DNA, 22 bp, Artificial Sequence
  chemically synthesized
ggacatattcctccgcccagag

SEQ ID NO: 3126 - DNA, 22 bp, Artificial Sequence
  chemically synthesized
ctccgcccagagcagggtcccg

SEQ ID NO: 3127 - DNA, 22 bp, Artificial Sequence
  chemically synthesized
cgcccagagcagggtcccgctt

SEQ ID NO: 3128 - DNA, 22 bp, Artificial Sequence
  chemically synthesized
ccctaaggccctgctctgggct

SEQ ID NO: 3129 - DNA, 22 bp, Artificial Sequence
  chemically synthesized
cctaaggccctgctctgggctt

SEQ ID NO: 3130 - DNA, 22 bp, Artificial Sequence
  chemically synthesized
aggccctgctctgggcttctgg

SEQ ID NO: 3131 - DNA, 22 bp, Artificial Sequence
  chemically synthesized
ctctgggcttctgggtttgagt

SEQ ID NO: 3132 - DNA, 22 bp, Artificial Sequence
  chemically synthesized
tgggcttctgggtttgagtcct

SEQ ID NO: 3133 - DNA, 22 bp, Artificial Sequence
  chemically synthesized
ggcttctgggtttgagtccttg

SEQ ID NO: 3134 - DNA, 22 bp, Artificial Sequence
  chemically synthesized
ctgggtttgagtccttggcaag

SEQ ID NO: 3135 - DNA, 22 bp, Artificial Sequence
  chemically synthesized
tgggtttgagtccttggcaagc

SEQ ID NO: 3136 - DNA, 22 bp, Artificial Sequence
  chemically synthesized
ggtttgagtccttggcaagccc

SEQ ID NO: 3137 - DNA, 22 bp, Artificial Sequence
  chemically synthesized
gagtccttggcaagcccaggag

SEQ ID NO: 3138 - DNA, 22 bp, Artificial Sequence
  chemically synthesized
agtccttggcaagcccaggaga

SEQ ID NO: 3139 - DNA, 22 bp, Artificial Sequence
  chemically synthesized
ggcaagcccaggagaggcgctc

SEQ ID NO: 3140 - DNA, 22 bp, Artificial Sequence
  chemically synthesized
gcaagcccaggagaggcgctca

SEQ ID NO: 3141 - DNA, 22 bp, Artificial Sequence
  chemically synthesized
aggcttccctgtcccccttcct

SEQ ID NO: 3142 - DNA, 22 bp, Artificial Sequence
  chemically synthesized
ccctgtcccccttcctcgtcca

SEQ ID NO: 3143 - DNA, 22 bp, Artificial Sequence
  chemically synthesized
cctgtcccccttcctcgtccac

SEQ ID NO: 3144 - DNA, 22 bp, Artificial Sequence
  chemically synthesized
tcccccttcctcgtccaccatc

SEQ ID NO: 3145 - DNA, 22 bp, Artificial Sequence
  chemically synthesized
cctcgtccaccatctcatgccc

SEQ ID NO: 3146 - DNA, 22 bp, Artificial Sequence
  chemically synthesized
ctcgtccaccatctcatgcccc

SEQ ID NO: 3147 - DNA, 22 bp, Artificial Sequence
  chemically synthesized
gtccaccatctcatgcccctgg

SEQ ID NO: 3148 - DNA, 22 bp, Artificial Sequence
  chemically synthesized
atgcccctggctctcctgcccc

SEQ ID NO: 3149 - DNA, 22 bp, Artificial Sequence
  chemically synthesized
gctctcctgccccttccctaca

SEQ ID NO: 3150 - DNA, 22 bp, Artificial Sequence
  chemically synthesized
tcctgccccttccctacagggg

SEQ ID NO: 3151 - DNA, 22 bp, Artificial Sequence
  chemically synthesized
ctgccccttccctacaggggtt

SEQ ID NO: 3152 - DNA, 22 bp, Artificial Sequence
  chemically synthesized
ccccttccctacaggggttcct

SEQ ID NO: 3153 - DNA, 22 bp, Artificial Sequence
  chemically synthesized
ccctacaggggttcctggctct

SEQ ID NO: 3154 - DNA, 22 bp, Artificial Sequence
  chemically synthesized
cctacaggggttcctggctctg

SEQ ID NO: 3155 - DNA, 22 bp, Artificial Sequence
  chemically synthesized
caggggttcctggctctgctct

SEQ ID NO: 3156 - DNA, 22 bp, Artificial Sequence
  chemically synthesized
ctggctctgctcttcagactga

SEQ ID NO: 3157 - DNA, 22 bp, Artificial Sequence
  chemically synthesized
gctctgctcttcagactgagcc

SEQ ID NO: 3158 - DNA, 22 bp, Artificial Sequence
  chemically synthesized
tgctcttcagactgagccccgt

SEQ ID NO: 3159 - DNA, 22 bp, Artificial Sequence
  chemically synthesized
ctcttcagactgagccccgttc

SEQ ID NO: 3160 - DNA, 22 bp, Artificial Sequence
  chemically synthesized
ttcagactgagccccgttcccc

SEQ ID NO: 3161 - DNA, 22 bp, Artificial Sequence
  chemically synthesized
cagactgagccccgttcccctg

SEQ ID NO: 3162 - DNA, 22 bp, Artificial Sequence
  chemically synthesized
agactgagccccgttcccctgc

SEQ ID NO: 3163 - DNA, 22 bp, Artificial Sequence
  chemically synthesized
agccccgttcccctgcatcccc

SEQ ID NO: 3164 - DNA, 22 bp, Artificial Sequence
  chemically synthesized
ccctgcatccccgttcccctgc

SEQ ID NO: 3165 - DNA, 22 bp, Artificial Sequence
  chemically synthesized
catccccgttcccctgcatccc

SEQ ID NO: 3166 - DNA, 22 bp, Artificial Sequence
  chemically synthesized
ccctgcatcccccttcccctgc

SEQ ID NO: 3167 - DNA, 22 bp, Artificial Sequence
  chemically synthesized
catcccccttcccctgcatccc

SEQ ID NO: 3168 - DNA, 22 bp, Artificial Sequence
  chemically synthesized
cccctgcatcccccagaggccc

SEQ ID NO: 3169 - DNA, 22 bp, Artificial Sequence
  chemically synthesized
ccctgcatcccccagaggcccc

SEQ ID NO: 3170 - DNA, 22 bp, Artificial Sequence
  chemically synthesized
catcccccagaggccccaggcc

SEQ ID NO: 3171 - DNA, 22 bp, Artificial Sequence
  chemically synthesized
cttggcctggaccccacgagag

SEQ ID NO: 3172 - DNA, 22 bp, Artificial Sequence
  chemically synthesized
ggcctggaccccacgagaggcc

SEQ ID NO: 3173 - DNA, 22 bp, Artificial Sequence
  chemically synthesized
gcctggaccccacgagaggcca

SEQ ID NO: 3174 - DNA, 22 bp, Artificial Sequence
  chemically synthesized
gaccccacgagaggccacccca

SEQ ID NO: 3175 - DNA, 22 bp, Artificial Sequence
  chemically synthesized
tctaccaggctgccttttgggt

SEQ ID NO: 3176 - DNA, 22 bp, Artificial Sequence
  chemically synthesized
ccaggctgccttttgggtggat

SEQ ID NO: 3177 - DNA, 22 bp, Artificial Sequence
  chemically synthesized
ccttttgggtggattctcctcc

SEQ ID NO: 3178 - DNA, 22 bp, Artificial Sequence
  chemically synthesized
ttgggtggattctcctccaact

SEQ ID NO: 3179 - DNA, 22 bp, Artificial Sequence
  chemically synthesized
tgggtggattctcctccaactg

SEQ ID NO: 3180 - DNA, 22 bp, Artificial Sequence
  chemically synthesized
gggtggattctcctccaactgt

SEQ ID NO: 3181 - DNA, 22 bp, Artificial Sequence
  chemically synthesized
ggtggattctcctccaactgtg

SEQ ID NO: 3182 - DNA, 22 bp, Artificial Sequence
  chemically synthesized
tcctccaactgtggggtgactg

SEQ ID NO: 3183 - DNA, 22 bp, Artificial Sequence
  chemically synthesized
ctccaactgtggggtgactgct

SEQ ID NO: 3184 - DNA, 22 bp, Artificial Sequence
  chemically synthesized
caactgtggggtgactgcttgg

SEQ ID NO: 3185 - DNA, 22 bp, Artificial Sequence
  chemically synthesized
tggggtgactgcttggcaaact

SEQ ID NO: 3186 - DNA, 22 bp, Artificial Sequence
  chemically synthesized
cttggcaaactcactcttcggg

SEQ ID NO: 3187 - DNA, 22 bp, Artificial Sequence
  chemically synthesized
ggcaaactcactcttcggggta

SEQ ID NO: 3188 - DNA, 22 bp, Artificial Sequence
  chemically synthesized
gcaaactcactcttcggggtat

SEQ ID NO: 3189 - DNA, 22 bp, Artificial Sequence
  chemically synthesized
actcttcggggtatcccaggag

SEQ ID NO: 3190 - DNA, 22 bp, Artificial Sequence
  chemically synthesized
ttcggggtatcccaggaggcct

SEQ ID NO: 3191 - DNA, 22 bp, Artificial Sequence
  chemically synthesized
cggggtatcccaggaggcctgg

SEQ ID NO: 3192 - DNA, 22 bp, Artificial Sequence
  chemically synthesized
ggggtatcccaggaggcctgga

SEQ ID NO: 3193 - DNA, 22 bp, Artificial Sequence
  chemically synthesized
gagcattggggtgggctggggt

SEQ ID NO: 3194 - DNA, 22 bp, Artificial Sequence
  chemically synthesized
gggtgggctggggttcagagag

SEQ ID NO: 3195 - DNA, 22 bp, Artificial Sequence
  chemically synthesized
gggttcagagaggagggattcc

SEQ ID NO: 3196 - DNA, 22 bp, Artificial Sequence
  chemically synthesized
agagaggagggattcccttctc

SEQ ID NO: 3197 - DNA, 22 bp, Artificial Sequence
  chemically synthesized
ccttctcaggttacgtggccaa

SEQ ID NO: 3198 - DNA, 22 bp, Artificial Sequence
  chemically synthesized
ctcaggttacgtggccaagaag

SEQ ID NO: 3199 - DNA, 22 bp, Artificial Sequence
  chemically synthesized
tcaggttacgtggccaagaagc

SEQ ID NO: 3200 - DNA, 22 bp, Artificial Sequence
  chemically synthesized
aggttacgtggccaagaagcag

SEQ ID NO: 3201 - DNA, 22 bp, Artificial Sequence
  chemically synthesized
cgtggccaagaagcaggggagc

SEQ ID NO: 3202 - DNA, 22 bp, Artificial Sequence
  chemically synthesized
ggtttgggtcaggtctgggtgt

SEQ ID NO: 3203 - DNA, 22 bp, Artificial Sequence
  chemically synthesized
gggtcaggtctgggtgtggggt

SEQ ID NO: 3204 - DNA, 22 bp, Artificial Sequence
  chemically synthesized
ggtcaggtctgggtgtggggtg

SEQ ID NO: 3205 - DNA, 22 bp, Artificial Sequence
  chemically synthesized
ggtgtggggtgaccagcttatg

SEQ ID NO: 3206 - DNA, 22 bp, Artificial Sequence
  chemically synthesized
atgctgtttgcccaggacagcc

SEQ ID NO: 3207 - DNA, 22 bp, Artificial Sequence
  chemically synthesized
tgctgtttgcccaggacagcct

SEQ ID NO: 3208 - DNA, 22 bp, Artificial Sequence
  chemically synthesized
tttgcccaggacagcctagttt

SEQ ID NO: 3209 - DNA, 22 bp, Artificial Sequence
  chemically synthesized
gcccaggacagcctagttttag

SEQ ID NO: 3210 - DNA, 22 bp, Artificial Sequence
  chemically synthesized
cccaggacagcctagttttagc

SEQ ID NO: 3211 - DNA, 22 bp, Artificial Sequence
  chemically synthesized
gttttagcactgaaaccctcag

SEQ ID NO: 3212 - DNA, 22 bp, Artificial Sequence
  chemically synthesized
tagcactgaaaccctcagtcct

SEQ ID NO: 3213 - DNA, 22 bp, Artificial Sequence
  chemically synthesized
agcactgaaaccctcagtccta

SEQ ID NO: 3214 - DNA, 22 bp, Artificial Sequence
  chemically synthesized
gcactgaaaccctcagtcctag

SEQ ID NO: 3215 - DNA, 22 bp, Artificial Sequence
  chemically synthesized
aaaccctcagtcctaggaaaac

SEQ ID NO: 3216 - DNA, 22 bp, Artificial Sequence
  chemically synthesized
agtcctaggaaaacagggatgg

SEQ ID NO: 3217 - DNA, 22 bp, Artificial Sequence
  chemically synthesized
ggaaaacagggatggttggtca

SEQ ID NO: 3218 - DNA, 22 bp, Artificial Sequence
  chemically synthesized
gtcactgtctctgggtgactct

SEQ ID NO: 3219 - DNA, 22 bp, Artificial Sequence
  chemically synthesized
tctctgggtgactcttgattcc

SEQ ID NO: 3220 - DNA, 22 bp, Artificial Sequence
  chemically synthesized
tgggtgactcttgattcccggc

SEQ ID NO: 3221 - DNA, 22 bp, Artificial Sequence
  chemically synthesized
ggtgactcttgattcccggcca

SEQ ID NO: 3222 - DNA, 22 bp, Artificial Sequence
  chemically synthesized
ttgattcccggccagtttctcc

SEQ ID NO: 3223 - DNA, 22 bp, Artificial Sequence
  chemically synthesized
gattcccggccagtttctccac

SEQ ID NO: 3224 - DNA, 22 bp, Artificial Sequence
  chemically synthesized
attcccggccagtttctccacc

SEQ ID NO: 3225 - DNA, 22 bp, Artificial Sequence
  chemically synthesized
ccggccagtttctccacctggg

SEQ ID NO: 3226 - DNA, 22 bp, Artificial Sequence
  chemically synthesized
ctccacctggggctgtgtttct

SEQ ID NO: 3227 - DNA, 22 bp, Artificial Sequence
  chemically synthesized
tccacctggggctgtgtttctc

SEQ ID NO: 3228 - DNA, 22 bp, Artificial Sequence
  chemically synthesized
cacctggggctgtgtttctcgt

SEQ ID NO: 3229 - DNA, 22 bp, Artificial Sequence
  chemically synthesized
gggctgtgtttctcgtcctgca

SEQ ID NO: 3230 - DNA, 22 bp, Artificial Sequence
  chemically synthesized
tgtttctcgtcctgcatccttc

SEQ ID NO: 3231 - DNA, 22 bp, Artificial Sequence
  chemically synthesized
ctcgtcctgcatccttctccag

SEQ ID NO: 3232 - DNA, 22 bp, Artificial Sequence
  chemically synthesized
tcgtcctgcatccttctccagg

SEQ ID NO: 3233 - DNA, 22 bp, Artificial Sequence
  chemically synthesized
gtcctgcatccttctccaggca

SEQ ID NO: 3234 - DNA, 22 bp, Artificial Sequence
  chemically synthesized
catccttctccaggcaggtccc

SEQ ID NO: 3235 - DNA, 22 bp, Artificial Sequence
  chemically synthesized
ctccaggcaggtccccaagcat

SEQ ID NO: 3236 - DNA, 22 bp, Artificial Sequence
  chemically synthesized
tccaggcaggtccccaagcatc

SEQ ID NO: 3237 - DNA, 22 bp, Artificial Sequence
  chemically synthesized
caggcaggtccccaagcatcgc

SEQ ID NO: 3238 - DNA, 22 bp, Artificial Sequence
  chemically synthesized
ctgtggctgttcccaagttctt

SEQ ID NO: 3239 - DNA, 22 bp, Artificial Sequence
  chemically synthesized
tggctgttcccaagttcttagg

SEQ ID NO: 3240 - DNA, 22 bp, Artificial Sequence
  chemically synthesized
ttcccaagttcttagggtaccc

SEQ ID NO: 3241 - DNA, 22 bp, Artificial Sequence
  chemically synthesized
ccaagttcttagggtaccccac

SEQ ID NO: 3242 - DNA, 22 bp, Artificial Sequence
  chemically synthesized
ttagggtaccccacgtgggttt

SEQ ID NO: 3243 - DNA, 22 bp, Artificial Sequence
  chemically synthesized
agggtaccccacgtgggtttat

SEQ ID NO: 3244 - DNA, 22 bp, Artificial Sequence
  chemically synthesized
gggtaccccacgtgggtttatc

SEQ ID NO: 3245 - DNA, 22 bp, Artificial Sequence
  chemically synthesized
atcaaccacttggtgaggctgg

SEQ ID NO: 3246 - DNA, 22 bp, Artificial Sequence
  chemically synthesized
tcaaccacttggtgaggctggt

SEQ ID NO: 3247 - DNA, 22 bp, Artificial Sequence
  chemically synthesized
ggtgaggctggtaccctgcccc

SEQ ID NO: 3248 - DNA, 22 bp, Artificial Sequence
  chemically synthesized
gtgaggctggtaccctgccccc

SEQ ID NO: 3249 - DNA, 22 bp, Artificial Sequence
  chemically synthesized
gtaccctgcccccattcctgca

SEQ ID NO: 3250 - DNA, 22 bp, Artificial Sequence
  chemically synthesized
cccccattcctgcaccccaatt

SEQ ID NO: 3251 - DNA, 22 bp, Artificial Sequence
  chemically synthesized
ctgcaccccaattgccttagtg

SEQ ID NO: 3252 - DNA, 22 bp, Artificial Sequence
  chemically synthesized
caccccaattgccttagtggct

SEQ ID NO: 3253 - DNA, 22 bp, Artificial Sequence
  chemically synthesized
ccttagtggctagggggttggg

SEQ ID NO: 3254 - DNA, 22 bp, Artificial Sequence
  chemically synthesized
agtggctagggggttgggggct

SEQ ID NO: 3255 - DNA, 22 bp, Artificial Sequence
  chemically synthesized
gtggctagggggttgggggcta

SEQ ID NO: 3256 - DNA, 22 bp, Artificial Sequence
  chemically synthesized
gggggttgggggctagagtagg

SEQ ID NO: 3257 - DNA, 22 bp, Artificial Sequence
  chemically synthesized
ggggctagagtaggaggggctg

SEQ ID NO: 3258 - DNA, 22 bp, Artificial Sequence
  chemically synthesized
gagtaggaggggctggagccag

SEQ ID NO: 3259 - DNA, 22 bp, Artificial Sequence
  chemically synthesized
gagccaggattcttagggctga

SEQ ID NO: 3260 - DNA, 22 bp, Artificial Sequence
  chemically synthesized
ttagggctgaacagagaagagc

SEQ ID NO: 3261 - DNA, 22 bp, Artificial Sequence
  chemically synthesized
agggctgaacagagaagagctg

SEQ ID NO: 3262 - DNA, 22 bp, Artificial Sequence
  chemically synthesized
gggctgaacagagaagagctgg

SEQ ID NO: 3263 - DNA, 22 bp, Artificial Sequence
  chemically synthesized
aacagagaagagctgggggcct

SEQ ID NO: 3264 - DNA, 22 bp, Artificial Sequence
  chemically synthesized
ggggcctgggctcctgggtttg

SEQ ID NO: 3265 - DNA, 22 bp, Artificial Sequence
  chemically synthesized
ggctcctgggtttgagagagga

SEQ ID NO: 3266 - DNA, 22 bp, Artificial Sequence
  chemically synthesized
ctgggtttgagagaggaggggc

SEQ ID NO: 3267 - DNA, 22 bp, Artificial Sequence
  chemically synthesized
ggtttgagagaggaggggctgg

SEQ ID NO: 3268 - DNA, 22 bp, Artificial Sequence
  chemically synthesized
gagagaggaggggctggggcct

SEQ ID NO: 3269 - DNA, 22 bp, Artificial Sequence
  chemically synthesized
agagaggaggggctggggcctg

SEQ ID NO: 3270 - DNA, 22 bp, Artificial Sequence
  chemically synthesized
gggcctggactcctgggtccga

SEQ ID NO: 3271 - DNA, 22 bp, Artificial Sequence
  chemically synthesized
gactcctgggtccgagggagga

SEQ ID NO: 3272 - DNA, 22 bp, Artificial Sequence
  chemically synthesized
ctgggtccgagggaggaggggc

SEQ ID NO: 3273 - DNA, 22 bp, Artificial Sequence
  chemically synthesized
ggtccgagggaggaggggctgg

SEQ ID NO: 3274 - DNA, 22 bp, Artificial Sequence
  chemically synthesized
gggcctggactcctgggtctga

SEQ ID NO: 3275 - DNA, 22 bp, Artificial Sequence
  chemically synthesized
gactcctgggtctgagggtgga

SEQ ID NO: 3276 - DNA, 22 bp, Artificial Sequence
  chemically synthesized
ctgggtctgagggtggagggac

SEQ ID NO: 3277 - DNA, 22 bp, Artificial Sequence
  chemically synthesized
ggtctgagggtggagggactgg

SEQ ID NO: 3278 - DNA, 22 bp, Artificial Sequence
  chemically synthesized
agggtggagggactgggggcct

SEQ ID NO: 3279 - DNA, 22 bp, Artificial Sequence
  chemically synthesized
ggggcctggactcctgggtccg

SEQ ID NO: 3280 - DNA, 22 bp, Artificial Sequence
  chemically synthesized
gactcctgggtccgagggagga

SEQ ID NO: 3281 - DNA, 22 bp, Artificial Sequence
  chemically synthesized
ctgggtccgagggaggaggggc

SEQ ID NO: 3282 - DNA, 22 bp, Artificial Sequence
  chemically synthesized
ggtccgagggaggaggggctgg

SEQ ID NO: 3283 - DNA, 22 bp, Artificial Sequence
  chemically synthesized
gggcctggactcgtgggtctga

SEQ ID NO: 3284 - DNA, 22 bp, Artificial Sequence
  chemically synthesized
gactcgtgggtctgagggagga

SEQ ID NO: 3285 - DNA, 22 bp, Artificial Sequence
  chemically synthesized
gtgggtctgagggaggaggggc

SEQ ID NO: 3286 - DNA, 22 bp, Artificial Sequence
  chemically synthesized
agggaggaggggctgggggcct

SEQ ID NO: 3287 - DNA, 22 bp, Artificial Sequence
  chemically synthesized
ggggcctggacttctgggtctt

SEQ ID NO: 3288 - DNA, 22 bp, Artificial Sequence
  chemically synthesized
gacttctgggtcttagggaggc

SEQ ID NO: 3289 - DNA, 22 bp, Artificial Sequence
  chemically synthesized
ctgggtcttagggaggcggggc

SEQ ID NO: 3290 - DNA, 22 bp, Artificial Sequence
  chemically synthesized
tgggtcttagggaggcggggct

SEQ ID NO: 3291 - DNA, 22 bp, Artificial Sequence
  chemically synthesized
ggtcttagggaggcggggctgg

SEQ ID NO: 3292 - DNA, 22 bp, Artificial Sequence
  chemically synthesized
agggaggcggggctgggcctgg

SEQ ID NO: 3293 - DNA, 22 bp, Artificial Sequence
  chemically synthesized
gggaggcggggctgggcctgga

SEQ ID NO: 3294 - DNA, 22 bp, Artificial Sequence
  chemically synthesized
ggcctggacccctgggtctgaa

SEQ ID NO: 3295 - DNA, 22 bp, Artificial Sequence
  chemically synthesized
gacccctgggtctgaatgggga

SEQ ID NO: 3296 - DNA, 22 bp, Artificial Sequence
  chemically synthesized
ggtctgaatggggagaggctgg

SEQ ID NO: 3297 - DNA, 22 bp, Artificial Sequence
  chemically synthesized
aatggggagaggctgggggcct

SEQ ID NO: 3298 - DNA, 22 bp, Artificial Sequence
  chemically synthesized
ggggcctggactccttcatctg

SEQ ID NO: 3299 - DNA, 22 bp, Artificial Sequence
  chemically synthesized
gactccttcatctgagggcgga

SEQ ID NO: 3300 - DNA, 22 bp, Artificial Sequence
  chemically synthesized
cttcatctgagggcggaagggc

SEQ ID NO: 3301 - DNA, 22 bp, Artificial Sequence
  chemically synthesized
catctgagggcggaagggctgg

SEQ ID NO: 3302 - DNA, 22 bp, Artificial Sequence
  chemically synthesized
atctgagggcggaagggctggg

SEQ ID NO: 3303 - DNA, 22 bp, Artificial Sequence
  chemically synthesized
agggcggaagggctggggcctg

SEQ ID NO: 3304 - DNA, 22 bp, Artificial Sequence
  chemically synthesized
gggcctggcctcctgggttgaa

SEQ ID NO: 3305 - DNA, 22 bp, Artificial Sequence
  chemically synthesized
gcctcctgggttgaatggggag

SEQ ID NO: 3306 - DNA, 22 bp, Artificial Sequence
  chemically synthesized
ctgggttgaatggggaggggtt

SEQ ID NO: 3307 - DNA, 22 bp, Artificial Sequence
  chemically synthesized
ggttgaatggggaggggttggg

SEQ ID NO: 3308 - DNA, 22 bp, Artificial Sequence
  chemically synthesized
aatggggaggggttgggcctgg

SEQ ID NO: 3309 - DNA, 22 bp, Artificial Sequence
  chemically synthesized
ggcctggactctggagtccctg

SEQ ID NO: 3310 - DNA, 22 bp, Artificial Sequence
  chemically synthesized
gactctggagtccctggtgccc

SEQ ID NO: 3311 - DNA, 22 bp, Artificial Sequence
  chemically synthesized
tggagtccctggtgcccaggcc

SEQ ID NO: 3312 - DNA, 22 bp, Artificial Sequence
  chemically synthesized
gagtccctggtgcccaggcctc

SEQ ID NO: 3313 - DNA, 22 bp, Artificial Sequence
  chemically synthesized
gtgcccaggcctcaggcatctt

SEQ ID NO: 3314 - DNA, 22 bp, Artificial Sequence
  chemically synthesized
aggcatctttcacagggatgcc

SEQ ID NO: 3315 - DNA, 22 bp, Artificial Sequence
  chemically synthesized
tcacagggatgcctgtactggg

SEQ ID NO: 3316 - DNA, 22 bp, Artificial Sequence
  chemically synthesized
cacagggatgcctgtactgggc

SEQ ID NO: 3317 - DNA, 22 bp, Artificial Sequence
  chemically synthesized
acagggatgcctgtactgggca

SEQ ID NO: 3318 - DNA, 22 bp, Artificial Sequence
  chemically synthesized
tactgggcaggtccttgaaagg

SEQ ID NO: 3319 - DNA, 22 bp, Artificial Sequence
  chemically synthesized
ggcaggtccttgaaagggaaag

SEQ ID NO: 3320 - DNA, 22 bp, Artificial Sequence
  chemically synthesized
gaaagggaaaggcccattgctc

SEQ ID NO: 3321 - DNA, 22 bp, Artificial Sequence
  chemically synthesized
aaagggaaaggcccattgctct

SEQ ID NO: 3322 - DNA, 22 bp, Artificial Sequence
  chemically synthesized
ctctccttgcccccctccccta

SEQ ID NO: 3323 - DNA, 22 bp, Artificial Sequence
  chemically synthesized
tccttgcccccctcccctatcg

SEQ ID NO: 3324 - DNA, 22 bp, Artificial Sequence
  chemically synthesized
cttgcccccctcccctatcgcc

SEQ ID NO: 3325 - DNA, 22 bp, Artificial Sequence
  chemically synthesized
gcccccctcccctatcgccatg

SEQ ID NO: 3326 - DNA, 22 bp, Artificial Sequence
  chemically synthesized
cccccctcccctatcgccatga

SEQ ID NO: 3327 - DNA, 22 bp, Artificial Sequence
  chemically synthesized
ccctatcgccatgacaactggg

SEQ ID NO: 3328 - DNA, 22 bp, Artificial Sequence
  chemically synthesized
tcgccatgacaactgggtggaa

SEQ ID NO: 3329 - DNA, 22 bp, Artificial Sequence
  chemically synthesized
ggtggaaataaacgagccgagt

SEQ ID NO: 3330 - DNA, 22 bp, Artificial Sequence
  chemically synthesized
atcccgttcccagggcacgtgc

SEQ ID NO: 3331 - DNA, 22 bp, Artificial Sequence
  chemically synthesized
ccagggcacgtgcggccccttc

SEQ ID NO: 3332 - DNA, 22 bp, Artificial Sequence
  chemically synthesized
cacagcccgagtttccatgacc

SEQ ID NO: 3333 - DNA, 22 bp, Artificial Sequence
  chemically synthesized
acagcccgagtttccatgacct

SEQ ID NO: 3334 - DNA, 22 bp, Artificial Sequence
  chemically synthesized
ccatgacctcatgctcttggcc

SEQ ID NO: 3335 - DNA, 22 bp, Artificial Sequence
  chemically synthesized
catgacctcatgctcttggccc

SEQ ID NO: 3336 - DNA, 22 bp, Artificial Sequence
  chemically synthesized
atgctcttggccctcgtagctc

SEQ ID NO: 3337 - DNA, 22 bp, Artificial Sequence
  chemically synthesized
ttggccctcgtagctccctccc

SEQ ID NO: 3338 - DNA, 22 bp, Artificial Sequence
  chemically synthesized
ggccctcgtagctccctcccgc

SEQ ID NO: 3339 - DNA, 22 bp, Artificial Sequence
  chemically synthesized
gccctcgtagctccctcccgcc

SEQ ID NO: 3340 - DNA, 22 bp, Artificial Sequence
  chemically synthesized
gtagctccctcccgcctcctcc

SEQ ID NO: 3341 - DNA, 22 bp, Artificial Sequence
  chemically synthesized
cctcccgcctcctccagatggg

SEQ ID NO: 3342 - DNA, 22 bp, Artificial Sequence
  chemically synthesized
ccgcctcctccagatgggcagc

SEQ ID NO: 3343 - DNA, 22 bp, Artificial Sequence
  chemically synthesized
ctccagatgggcagctttggag

SEQ ID NO: 3344 - DNA, 22 bp, Artificial Sequence
  chemically synthesized
cagatgggcagctttggagagg

SEQ ID NO: 3345 - DNA, 22 bp, Artificial Sequence
  chemically synthesized
tggagaggtgagggacttgggg

SEQ ID NO: 3346 - DNA, 22 bp, Artificial Sequence
  chemically synthesized
ggagaggtgagggacttggggg

SEQ ID NO: 3347 - DNA, 22 bp, Artificial Sequence
  chemically synthesized
gagaggtgagggacttgggggg

SEQ ID NO: 3348 - DNA, 22 bp, Artificial Sequence
  chemically synthesized
ggggggtaatttatcccgtgga

SEQ ID NO: 3349 - DNA, 22 bp, Artificial Sequence
  chemically synthesized
gggggtaatttatcccgtggat

SEQ ID NO: 3350 - DNA, 22 bp, Artificial Sequence
  chemically synthesized
atcccgtggatctaggagttta

SEQ ID NO: 3351 - DNA, 22 bp, Artificial Sequence
  chemically synthesized
tcccgtggatctaggagtttag

SEQ ID NO: 3352 - DNA, 22 bp, Artificial Sequence
  chemically synthesized
ggagtttagcttcactccttcc

SEQ ID NO: 3353 - DNA, 22 bp, Artificial Sequence
  chemically synthesized
agcttcactccttcctcagctc

SEQ ID NO: 3354 - DNA, 22 bp, Artificial Sequence
  chemically synthesized
gcttcactccttcctcagctcc

SEQ ID NO: 3355 - DNA, 22 bp, Artificial Sequence
  chemically synthesized
cactccttcctcagctccagtt

SEQ ID NO: 3356 - DNA, 22 bp, Artificial Sequence
  chemically synthesized
actccttcctcagctccagttc

SEQ ID NO: 3357 - DNA, 22 bp, Artificial Sequence
  chemically synthesized
cttcctcagctccagttcaggt

SEQ ID NO: 3358 - DNA, 22 bp, Artificial Sequence
  chemically synthesized
cctcagctccagttcaggtccc

SEQ ID NO: 3359 - DNA, 22 bp, Artificial Sequence
  chemically synthesized
ctcagctccagttcaggtcccg

SEQ ID NO: 3360 - DNA, 22 bp, Artificial Sequence
  chemically synthesized
agctccagttcaggtcccggag

SEQ ID NO: 3361 - DNA, 22 bp, Artificial Sequence
  chemically synthesized
cagttcaggtcccggagcccac

SEQ ID NO: 3362 - DNA, 22 bp, Artificial Sequence
  chemically synthesized
aggtcccggagcccacccagtg

SEQ ID NO: 3363 - DNA, 22 bp, Artificial Sequence
  chemically synthesized
gggcaagtccctcctccgaccc

SEQ ID NO: 3364 - DNA, 22 bp, Artificial Sequence
  chemically synthesized
ctccgaccccctggacttcggc

SEQ ID NO: 3365 - DNA, 22 bp, Artificial Sequence
  chemically synthesized
cgaccccctggacttcggcttt

SEQ ID NO: 3366 - DNA, 22 bp, Artificial Sequence
  chemically synthesized
gacttcggcttttgtcccccca

SEQ ID NO: 3367 - DNA, 22 bp, Artificial Sequence
  chemically synthesized
cggcttttgtccccccaagttt

SEQ ID NO: 3368 - DNA, 22 bp, Artificial Sequence
  chemically synthesized
ggcttttgtccccccaagtttt

SEQ ID NO: 3369 - DNA, 22 bp, Artificial Sequence
  chemically synthesized
ttgtccccccaagttttggacc

SEQ ID NO: 3370 - DNA, 22 bp, Artificial Sequence
  chemically synthesized
tgtccccccaagttttggaccc

SEQ ID NO: 3371 - DNA, 22 bp, Artificial Sequence
  chemically synthesized
gtccccccaagttttggacccc

SEQ ID NO: 3372 - DNA, 22 bp, Artificial Sequence
  chemically synthesized
tccccccaagttttggacccct

SEQ ID NO: 3373 - DNA, 22 bp, Artificial Sequence
  chemically synthesized
tggacccctaagggaagaatga

SEQ ID NO: 3374 - DNA, 22 bp, Artificial Sequence
  chemically synthesized
ggacccctaagggaagaatgag

SEQ ID NO: 3375 - DNA, 22 bp, Artificial Sequence
  chemically synthesized
gacccctaagggaagaatgaga

SEQ ID NO: 3376 - DNA, 22 bp, Artificial Sequence
  chemically synthesized
agggaagaatgagaaacggtgg

SEQ ID NO: 3377 - DNA, 22 bp, Artificial Sequence
  chemically synthesized
gctgcagggccccgtgcagagg

SEQ ID NO: 3378 - DNA, 22 bp, Artificial Sequence
  chemically synthesized
cagggccccgtgcagagggggc

SEQ ID NO: 3379 - DNA, 22 bp, Artificial Sequence
  chemically synthesized
agtgaactggagtgtgacagcc

SEQ ID NO: 3380 - DNA, 22 bp, Artificial Sequence
  chemically synthesized
gagtgtgacagcctggggccca

SEQ ID NO: 3381 - DNA, 22 bp, Artificial Sequence
  chemically synthesized
gggcccaggcacacaggtgtgc

SEQ ID NO: 3382 - DNA, 22 bp, Artificial Sequence
  chemically synthesized
tctcacccctctgggagtcccg

SEQ ID NO: 3383 - DNA, 22 bp, Artificial Sequence
  chemically synthesized
acccctctgggagtcccgccca

SEQ ID NO: 3384 - DNA, 22 bp, Artificial Sequence
  chemically synthesized
tgggagtcccgcccaggcccct

SEQ ID NO: 3385 - DNA, 22 bp, Artificial Sequence
  chemically synthesized
ggagtcccgcccaggcccctga

SEQ ID NO: 3386 - DNA, 22 bp, Artificial Sequence
  chemically synthesized
agtctgtcccagcacagggtgg

SEQ ID NO: 3387 - DNA, 22 bp, Artificial Sequence
  chemically synthesized
tcccagcacagggtggccttcc

SEQ ID NO: 3388 - DNA, 22 bp, Artificial Sequence
  chemically synthesized
cctccaccctgcatagccctgg

SEQ ID NO: 3389 - DNA, 22 bp, Artificial Sequence
  chemically synthesized
ctccaccctgcatagccctggg

SEQ ID NO: 3390 - DNA, 22 bp, Artificial Sequence
  chemically synthesized
caccctgcatagccctgggccc

SEQ ID NO: 3391 - DNA, 22 bp, Artificial Sequence
  chemically synthesized
catagccctgggcccacggctt

SEQ ID NO: 3392 - DNA, 22 bp, Artificial Sequence
  chemically synthesized
ggcccacggcttcgttcctgca

SEQ ID NO: 3393 - DNA, 22 bp, Artificial Sequence
  chemically synthesized
cgttcctgcagagtatctgctg

SEQ ID NO: 3394 - DNA, 22 bp, Artificial Sequence
  chemically synthesized
gttcctgcagagtatctgctgg

SEQ ID NO: 3395 - DNA, 22 bp, Artificial Sequence
  chemically synthesized
ctgcagagtatctgctggggtg

SEQ ID NO: 3396 - DNA, 22 bp, Artificial Sequence
  chemically synthesized
cagagtatctgctggggtggtt

SEQ ID NO: 3397 - DNA, 22 bp, Artificial Sequence
  chemically synthesized
ctggggtggtttccgagcttga

SEQ ID NO: 3398 - DNA, 22 bp, Artificial Sequence
  chemically synthesized
gggtggtttccgagcttgaccc

SEQ ID NO: 3399 - DNA, 22 bp, Artificial Sequence
  chemically synthesized
ccgagcttgacccttggaagga

SEQ ID NO: 3400 - DNA, 22 bp, Artificial Sequence
  chemically synthesized
cgagcttgacccttggaaggac

SEQ ID NO: 3401 - DNA, 22 bp, Artificial Sequence
  chemically synthesized
gacccttggaaggacctggctg

SEQ ID NO: 3402 - DNA, 22 bp, Artificial Sequence
  chemically synthesized
acccttggaaggacctggctgg

SEQ ID NO: 3403 - DNA, 22 bp, Artificial Sequence
  chemically synthesized
ggaaggacctggctgggtttaa

SEQ ID NO: 3404 - DNA, 22 bp, Artificial Sequence
  chemically synthesized
gaaggacctggctgggtttaag

SEQ ID NO: 3405 - DNA, 22 bp, Artificial Sequence
  chemically synthesized
gctgggtttaaggcaggagggg

SEQ ID NO: 3406 - DNA, 22 bp, Artificial Sequence
  chemically synthesized
ggtttaaggcaggaggggctgg

SEQ ID NO: 3407 - DNA, 22 bp, Artificial Sequence
  chemically synthesized
aaggcaggaggggctgggggcc

SEQ ID NO: 3408 - DNA, 22 bp, Artificial Sequence
  chemically synthesized
aggcaggaggggctgggggcca

SEQ ID NO: 3409 - DNA, 22 bp, Artificial Sequence
  chemically synthesized
ggggccaggactcctggctctg

SEQ ID NO: 3410 - DNA, 22 bp, Artificial Sequence
  chemically synthesized
ctggctctgaaggaggaggggc

SEQ ID NO: 3411 - DNA, 22 bp, Artificial Sequence
  chemically synthesized
gctctgaaggaggaggggctgg

SEQ ID NO: 3412 - DNA, 22 bp, Artificial Sequence
  chemically synthesized
tgaaggaggaggggctggaacc

SEQ ID NO: 3413 - DNA, 22 bp, Artificial Sequence
  chemically synthesized
aaggaggaggggctggaacctc

SEQ ID NO: 3414 - DNA, 22 bp, Artificial Sequence
  chemically synthesized
gaacctcttccctagtctgagc

SEQ ID NO: 3415 - DNA, 22 bp, Artificial Sequence
  chemically synthesized
ttccctagtctgagcactggaa

SEQ ID NO: 3416 - DNA, 22 bp, Artificial Sequence
  chemically synthesized
ccctagtctgagcactggaagc

SEQ ID NO: 3417 - DNA, 22 bp, Artificial Sequence
  chemically synthesized
cctagtctgagcactggaagcg

SEQ ID NO: 3418 - DNA, 22 bp, Artificial Sequence
  chemically synthesized
gtctgagcactggaagcgccac

SEQ ID NO: 3419 - DNA, 22 bp, Artificial Sequence
  chemically synthesized
agcactggaagcgccacctgtg

SEQ ID NO: 3420 - DNA, 22 bp, Artificial Sequence
  chemically synthesized
gaagcgccacctgtgggtggtg

SEQ ID NO: 3421 - DNA, 22 bp, Artificial Sequence
  chemically synthesized
tgggtggtgacgggggttttgc

SEQ ID NO: 3422 - DNA, 22 bp, Artificial Sequence
  chemically synthesized
tgccgtgtctaacaggtaccat

SEQ ID NO: 3423 - DNA, 22 bp, Artificial Sequence
  chemically synthesized
gccgtgtctaacaggtaccatg

SEQ ID NO: 3424 - DNA, 22 bp, Artificial Sequence
  chemically synthesized
ccgtgtctaacaggtaccatgt

SEQ ID NO: 3425 - DNA, 22 bp, Artificial Sequence
  chemically synthesized
acaggtaccatgtggggttccc

SEQ ID NO: 3426 - DNA, 22 bp, Artificial Sequence
  chemically synthesized
ccgcacccagatgagaagcccc

SEQ ID NO: 3427 - DNA, 22 bp, Artificial Sequence
  chemically synthesized
ccttccccgttcacttcctgtt

SEQ ID NO: 3428 - DNA, 22 bp, Artificial Sequence
  chemically synthesized
ccccgttcacttcctgtttgca

SEQ ID NO: 3429 - DNA, 22 bp, Artificial Sequence
  chemically synthesized
cccgttcacttcctgtttgcag

SEQ ID NO: 3430 - DNA, 22 bp, Artificial Sequence
  chemically synthesized
acttcctgtttgcagatagcca

SEQ ID NO: 3431 - DNA, 22 bp, Artificial Sequence
  chemically synthesized
cctgtttgcagatagccaggag

SEQ ID NO: 3432 - DNA, 22 bp, Artificial Sequence
  chemically synthesized
ctgtttgcagatagccaggagt

SEQ ID NO: 3433 - DNA, 22 bp, Artificial Sequence
  chemically synthesized
tttgcagatagccaggagtcct

SEQ ID NO: 3434 - DNA, 22 bp, Artificial Sequence
  chemically synthesized
gcagatagccaggagtcctttc

SEQ ID NO: 3435 - DNA, 22 bp, Artificial Sequence
  chemically synthesized
cagatagccaggagtcctttcg

SEQ ID NO: 3436 - DNA, 22 bp, Artificial Sequence
  chemically synthesized
tcgtggtttccactgagcactg

SEQ ID NO: 3437 - DNA, 22 bp, Artificial Sequence
  chemically synthesized
cgtggtttccactgagcactga

SEQ ID NO: 3438 - DNA, 22 bp, Artificial Sequence
  chemically synthesized
gtggtttccactgagcactgaa

SEQ ID NO: 3439 - DNA, 22 bp, Artificial Sequence
  chemically synthesized
ccactgagcactgaaggcctgg

SEQ ID NO: 3440 - DNA, 22 bp, Artificial Sequence
  chemically synthesized
cactgagcactgaaggcctggc

SEQ ID NO: 3441 - DNA, 22 bp, Artificial Sequence
  chemically synthesized
agcactgaaggcctggccggcc

SEQ ID NO: 3442 - DNA, 22 bp, Artificial Sequence
  chemically synthesized
aaggcctggccggcctgaccac

SEQ ID NO: 3443 - DNA, 22 bp, Artificial Sequence
  chemically synthesized
gccggcctgaccactgggcaac

SEQ ID NO: 3444 - DNA, 22 bp, Artificial Sequence
  chemically synthesized
accactgggcaaccaggcgtat

SEQ ID NO: 3445 - DNA, 22 bp, Artificial Sequence
  chemically synthesized
ggcaaccaggcgtatcttaaac

SEQ ID NO: 3446 - DNA, 22 bp, Artificial Sequence
  chemically synthesized
aaacagccagtggccagaggct

SEQ ID NO: 3447 - DNA, 22 bp, Artificial Sequence
  chemically synthesized
aacagccagtggccagaggctg

SEQ ID NO: 3448 - DNA, 22 bp, Artificial Sequence
  chemically synthesized
ttgggtcattttccccactgtc

SEQ ID NO: 3449 - DNA, 22 bp, Artificial Sequence
  chemically synthesized
ggtcattttccccactgtccta

SEQ ID NO: 3450 - DNA, 22 bp, Artificial Sequence
  chemically synthesized
tccccactgtcctagcaccgtg

SEQ ID NO: 3451 - DNA, 22 bp, Artificial Sequence
  chemically synthesized
ccccactgtcctagcaccgtgt

SEQ ID NO: 3452 - DNA, 22 bp, Artificial Sequence
  chemically synthesized
cccactgtcctagcaccgtgtc

SEQ ID NO: 3453 - DNA, 22 bp, Artificial Sequence
  chemically synthesized
tcctagcaccgtgtccctggat

SEQ ID NO: 3454 - DNA, 22 bp, Artificial Sequence
  chemically synthesized
gcaccgtgtccctggatctgtt

SEQ ID NO: 3455 - DNA, 22 bp, Artificial Sequence
  chemically synthesized
gatctgttttcgtggctccctc

SEQ ID NO: 3456 - DNA, 22 bp, Artificial Sequence
  chemically synthesized
ttttcgtggctccctctggagt

SEQ ID NO: 3457 - DNA, 22 bp, Artificial Sequence
  chemically synthesized
tcgtggctccctctggagtccc

SEQ ID NO: 3458 - DNA, 22 bp, Artificial Sequence
  chemically synthesized
cgtggctccctctggagtcccg

SEQ ID NO: 3459 - DNA, 22 bp, Artificial Sequence
  chemically synthesized
gtggctccctctggagtcccga

SEQ ID NO: 3460 - DNA, 22 bp, Artificial Sequence
  chemically synthesized
cctctggagtcccgacttgctg

SEQ ID NO: 3461 - DNA, 22 bp, Artificial Sequence
  chemically synthesized
tggagtcccgacttgctgggac

SEQ ID NO: 3462 - DNA, 22 bp, Artificial Sequence
  chemically synthesized
gagtcccgacttgctgggacac

SEQ ID NO: 3463 - DNA, 22 bp, Artificial Sequence
  chemically synthesized
gctgggacaccgtggctggggt

SEQ ID NO: 3464 - DNA, 22 bp, Artificial Sequence
  chemically synthesized
ctgggacaccgtggctggggta

SEQ ID NO: 3465 - DNA, 22 bp, Artificial Sequence
  chemically synthesized
ggacaccgtggctggggtaggt

SEQ ID NO: 3466 - DNA, 22 bp, Artificial Sequence
  chemically synthesized
gggtaggtgcggctgacggctg

SEQ ID NO: 3467 - DNA, 22 bp, Artificial Sequence
  chemically synthesized
acggctgtttcccacccccagg

SEQ ID NO: 3468 - DNA, 22 bp, Artificial Sequence
  chemically synthesized
tttcccacccccaggcctgcat

SEQ ID NO: 3469 - DNA, 22 bp, Artificial Sequence
  chemically synthesized
cccacccccaggcctgcattga

SEQ ID NO: 3470 - DNA, 22 bp, Artificial Sequence
  chemically synthesized
ccacccccaggcctgcattgat

SEQ ID NO: 3471 - DNA, 22 bp, Artificial Sequence
  chemically synthesized
cattgatgagaacctggaggtg

SEQ ID NO: 3472 - DNA, 22 bp, Artificial Sequence
  chemically synthesized
atgagaacctggaggtggtgcg

SEQ ID NO: 3473 - DNA, 22 bp, Artificial Sequence
  chemically synthesized
gaggtggtgcgcttcttggtgg

SEQ ID NO: 3474 - DNA, 22 bp, Artificial Sequence
  chemically synthesized
cttggtggagcagggcgccact

SEQ ID NO: 3475 - DNA, 22 bp, Artificial Sequence
  chemically synthesized
ttggtggagcagggcgccactg

SEQ ID NO: 3476 - DNA, 22 bp, Artificial Sequence
  chemically synthesized
ggtggagcagggcgccactgtg

SEQ ID NO: 3477 - DNA, 22 bp, Artificial Sequence
  chemically synthesized
gtggagcagggcgccactgtga

SEQ ID NO: 3478 - DNA, 22 bp, Artificial Sequence
  chemically synthesized
tgaaccaggcagacaacgaggg

SEQ ID NO: 3479 - DNA, 22 bp, Artificial Sequence
  chemically synthesized
gacgccactgcacgtggccgcc

SEQ ID NO: 3480 - DNA, 22 bp, Artificial Sequence
  chemically synthesized
cacgtggccgcctcctgtggct

SEQ ID NO: 3481 - DNA, 22 bp, Artificial Sequence
  chemically synthesized
ctgtggctacctagatatcgcc

SEQ ID NO: 3482 - DNA, 20 bp, Artificial Sequence
  chemically synthesized
taatttccctccgtttgtcc

SEQ ID NO: 3483 - DNA, 20 bp, Artificial Sequence
  chemically synthesized
ctgtcaaccccacacgcctt

SEQ ID NO: 3484 - DNA, 20 bp, Artificial Sequence
  chemically synthesized
cacacgcctttggcacaatg

SEQ ID NO: 3485 - DNA, 20 bp, Artificial Sequence
  chemically synthesized
acgcctttggcacaatgaag

SEQ ID NO: 3486 - DNA, 20 bp, Artificial Sequence
  chemically synthesized
cgcctttggcacaatgaagt

SEQ ID NO: 3487 - DNA, 20 bp, Artificial Sequence
  chemically synthesized
atttcccttctttttctctt

SEQ ID NO: 3488 - DNA, 20 bp, Artificial Sequence
  chemically synthesized
ccttctttttctctttagct

SEQ ID NO: 3489 - DNA, 20 bp, Artificial Sequence
  chemically synthesized
ctctttagctcggcttattc

SEQ ID NO: 3490 - DNA, 20 bp, Artificial Sequence
  chemically synthesized
tctttagctcggcttattcc

SEQ ID NO: 3491 - DNA, 20 bp, Artificial Sequence
  chemically synthesized
ctttagctcggcttattcca

SEQ ID NO: 3492 - DNA, 20 bp, Artificial Sequence
  chemically synthesized
tttagctcggcttattccag

SEQ ID NO: 3493 - DNA, 20 bp, Artificial Sequence
  chemically synthesized
ttccaggggtgtgtttcgtc

SEQ ID NO: 3494 - DNA, 20 bp, Artificial Sequence
  chemically synthesized
tgtttcgtcgagatgcacgt

SEQ ID NO: 3495 - DNA, 20 bp, Artificial Sequence
  chemically synthesized
caacttttattctattttcc

SEQ ID NO: 3496 - DNA, 20 bp, Artificial Sequence
  chemically synthesized
tctattttcccagtaaaata

SEQ ID NO: 3497 - DNA, 20 bp, Artificial Sequence
  chemically synthesized
ttcccagtaaaataaagttt

SEQ ID NO: 3498 - DNA, 20 bp, Artificial Sequence
  chemically synthesized
tagtaaactctgcatcttta

SEQ ID NO: 3499 - DNA, 20 bp, Artificial Sequence
  chemically synthesized
gcatctttaaagaattattt

SEQ ID NO: 3500 - DNA, 20 bp, Artificial Sequence
  chemically synthesized
tttggcatttatttctaaaa

SEQ ID NO: 3501 - DNA, 20 bp, Artificial Sequence
  chemically synthesized
catttatttctaaaatggca

SEQ ID NO: 3502 - DNA, 20 bp, Artificial Sequence
  chemically synthesized
catagtattttgtatttgtg

SEQ ID NO: 3503 - DNA, 20 bp, Artificial Sequence
  chemically synthesized
ttgtatttgtgaagtcttac

SEQ ID NO: 3504 - DNA, 20 bp, Artificial Sequence
  chemically synthesized
tgtatttgtgaagtcttaca

SEQ ID NO: 3505 - DNA, 20 bp, Artificial Sequence
  chemically synthesized
ttaataaaattcaaacatcc

SEQ ID NO: 3506 - DNA, 20 bp, Artificial Sequence
  chemically synthesized
taataaaattcaaacatcct

SEQ ID NO: 3507 - DNA, 20 bp, Artificial Sequence
  chemically synthesized
atcctaggtaaaaaaaaaaa

SEQ ID NO: 3508 - DNA, 20 bp, Artificial Sequence
  chemically synthesized
tcctaggtaaaaaaaaaaaa

SEQ ID NO: 3509 - DNA, 20 bp, Artificial Sequence
  chemically synthesized
aggtaaaaaaaaaaaaaggt

SEQ ID NO: 3510 - DNA, 20 bp, Artificial Sequence
  chemically synthesized
aaaaaaaggtcagaattgtt

SEQ ID NO: 3511 - DNA, 20 bp, Artificial Sequence
  chemically synthesized
gtaattttcttttgcgcact

SEQ ID NO: 3512 - DNA, 20 bp, Artificial Sequence
  chemically synthesized
taattttcttttgcgcacta

SEQ ID NO: 3513 - DNA, 20 bp, Artificial Sequence
  chemically synthesized
tttcttttgcgcactaagga

SEQ ID NO: 3514 - DNA, 20 bp, Artificial Sequence
  chemically synthesized
tgcgcactaaggaaagtgca

SEQ ID NO: 3515 - DNA, 20 bp, Artificial Sequence
  chemically synthesized
aaggaaagtgcaaagtaact

SEQ ID NO: 3516 - DNA, 20 bp, Artificial Sequence
  chemically synthesized
ggaaagtgcaaagtaactta

SEQ ID NO: 3517 - DNA, 20 bp, Artificial Sequence
  chemically synthesized
ttagagtgactgaaacttca

SEQ ID NO: 3518 - DNA, 20 bp, Artificial Sequence
  chemically synthesized
gtgactgaaacttcacagaa

SEQ ID NO: 3519 - DNA, 20 bp, Artificial Sequence
  chemically synthesized
tgactgaaacttcacagaat

SEQ ID NO: 3520 - DNA, 20 bp, Artificial Sequence
  chemically synthesized
gactgaaacttcacagaata

SEQ ID NO: 3521 - DNA, 20 bp, Artificial Sequence
  chemically synthesized
aacttcacagaatagggttg

SEQ ID NO: 3522 - DNA, 20 bp, Artificial Sequence
  chemically synthesized
ttgaattcataactatccca

SEQ ID NO: 3523 - DNA, 20 bp, Artificial Sequence
  chemically synthesized
tgtgctgttgatctcataaa

SEQ ID NO: 3524 - DNA, 20 bp, Artificial Sequence
  chemically synthesized
atttatatttattttcattt

SEQ ID NO: 3525 - DNA, 20 bp, Artificial Sequence
  chemically synthesized
ttcattttagtctgtcttct

SEQ ID NO: 3526 - DNA, 20 bp, Artificial Sequence
  chemically synthesized
gtcttcttggttgctgttga

SEQ ID NO: 3527 - DNA, 20 bp, Artificial Sequence
  chemically synthesized
ttgctgttgatagacactaa

SEQ ID NO: 3528 - DNA, 20 bp, Artificial Sequence
  chemically synthesized
gctgttgatagacactaaaa

SEQ ID NO: 3529 - DNA, 20 bp, Artificial Sequence
  chemically synthesized
gatagacactaaaagagtat

SEQ ID NO: 3530 - DNA, 20 bp, Artificial Sequence
  chemically synthesized
aagagtattagatattatct

SEQ ID NO: 3531 - DNA, 20 bp, Artificial Sequence
  chemically synthesized
tattatctaagtttgaatat

SEQ ID NO: 3532 - DNA, 20 bp, Artificial Sequence
  chemically synthesized
attatctaagtttgaatata

SEQ ID NO: 3533 - DNA, 20 bp, Artificial Sequence
  chemically synthesized
atatttaataatttttaaaa

SEQ ID NO: 3534 - DNA, 20 bp, Artificial Sequence
  chemically synthesized
aatttttaaaatagtattct

SEQ ID NO: 3535 - DNA, 20 bp, Artificial Sequence
  chemically synthesized
ttgaattattcttctgttta

SEQ ID NO: 3536 - DNA, 20 bp, Artificial Sequence
  chemically synthesized
tgaattattcttctgtttaa

SEQ ID NO: 3537 - DNA, 20 bp, Artificial Sequence
  chemically synthesized
attattcttctgtttaaagg

SEQ ID NO: 3538 - DNA, 20 bp, Artificial Sequence
  chemically synthesized
attcttctgtttaaaggcag

SEQ ID NO: 3539 - DNA, 20 bp, Artificial Sequence
  chemically synthesized
aaataattgaacatcatcct

SEQ ID NO: 3540 - DNA, 20 bp, Artificial Sequence
  chemically synthesized
catcatcctgagtttttctg

SEQ ID NO: 3541 - DNA, 20 bp, Artificial Sequence
  chemically synthesized
atcatcctgagtttttctgt

SEQ ID NO: 3542 - DNA, 20 bp, Artificial Sequence
  chemically synthesized
ctgagtttttctgtaggaat

SEQ ID NO: 3543 - DNA, 20 bp, Artificial Sequence
  chemically synthesized
gagtttttctgtaggaatca

SEQ ID NO: 3544 - DNA, 20 bp, Artificial Sequence
  chemically synthesized
ttgaaacaaatgcataatct

SEQ ID NO: 3545 - DNA, 20 bp, Artificial Sequence
  chemically synthesized
aatgcataatctaagtcaaa

SEQ ID NO: 3546 - DNA, 20 bp, Artificial Sequence
  chemically synthesized
cataatctaagtcaaatgga

SEQ ID NO: 3547 - DNA, 20 bp, Artificial Sequence
  chemically synthesized
caaatggaaagaaatataaa

SEQ ID NO: 3548 - DNA, 20 bp, Artificial Sequence
  chemically synthesized
ttattacttcttgttttctt

SEQ ID NO: 3549 - DNA, 20 bp, Artificial Sequence
  chemically synthesized
cttttttttcttcccttgcc

SEQ ID NO: 3550 - DNA, 20 bp, Artificial Sequence
  chemically synthesized
ttttcttcccttgcccagac

SEQ ID NO: 3551 - DNA, 20 bp, Artificial Sequence
  chemically synthesized
ttcttcccttgcccagacaa

SEQ ID NO: 3552 - DNA, 20 bp, Artificial Sequence
  chemically synthesized
tcccttgcccagacaagagt

SEQ ID NO: 3553 - DNA, 20 bp, Artificial Sequence
  chemically synthesized
cccttgcccagacaagagtg

SEQ ID NO: 3554 - DNA, 20 bp, Artificial Sequence
  chemically synthesized
acaagagtgaggttgctcat

SEQ ID NO: 3555 - DNA, 20 bp, Artificial Sequence
  chemically synthesized
tgaggttgctcatcggttta

SEQ ID NO: 3556 - DNA, 20 bp, Artificial Sequence
  chemically synthesized
tgctcatcggtttaaagatt

SEQ ID NO: 3557 - DNA, 20 bp, Artificial Sequence
  chemically synthesized
gctcatcggtttaaagattt

SEQ ID NO: 3558 - DNA, 20 bp, Artificial Sequence
  chemically synthesized
tcatcggtttaaagatttgg

SEQ ID NO: 3559 - DNA, 20 bp, Artificial Sequence
  chemically synthesized
tcggtttaaagatttgggag

SEQ ID NO: 3560 - DNA, 20 bp, Artificial Sequence
  chemically synthesized
tttgggagaagaaaatttca

SEQ ID NO: 3561 - DNA, 20 bp, Artificial Sequence
  chemically synthesized
tcccaaatctttaaaccgat

SEQ ID NO: 3562 - DNA, 20 bp, Artificial Sequence
  chemically synthesized
tgagcaacctcactcttgtc

SEQ ID NO: 3563 - DNA, 20 bp, Artificial Sequence
  chemically synthesized
gagcaacctcactcttgtct

SEQ ID NO: 3564 - DNA, 20 bp, Artificial Sequence
  chemically synthesized
aacctcactcttgtctgggc

SEQ ID NO: 3565 - DNA, 20 bp, Artificial Sequence
  chemically synthesized
acctcactcttgtctgggca

SEQ ID NO: 3566 - DNA, 20 bp, Artificial Sequence
  chemically synthesized
cctcactcttgtctgggcaa

SEQ ID NO: 3567 - DNA, 20 bp, Artificial Sequence
  chemically synthesized
cactcttgtctgggcaaggg

SEQ ID NO: 3568 - DNA, 20 bp, Artificial Sequence
  chemically synthesized
ctgggcaagggaagaaaaaa

SEQ ID NO: 3569 - DNA, 20 bp, Artificial Sequence
  chemically synthesized
tgggcaagggaagaaaaaaa

SEQ ID NO: 3570 - DNA, 20 bp, Artificial Sequence
  chemically synthesized
aaaaggattgttaaatactg

SEQ ID NO: 3571 - DNA, 20 bp, Artificial Sequence
  chemically synthesized
tgttaaatactgaagaaaac

SEQ ID NO: 3572 - DNA, 20 bp, Artificial Sequence
  chemically synthesized
taaatactgaagaaaacaag

SEQ ID NO: 3573 - DNA, 20 bp, Artificial Sequence
  chemically synthesized
atatttctttccatttgact

SEQ ID NO: 3574 - DNA, 20 bp, Artificial Sequence
  chemically synthesized
atgcatttgtttcaaaatat

SEQ ID NO: 3575 - DNA, 20 bp, Artificial Sequence
  chemically synthesized
tgcatttgtttcaaaatatt

SEQ ID NO: 3576 - DNA, 20 bp, Artificial Sequence
  chemically synthesized
atattgggctctgattccta

SEQ ID NO: 3577 - DNA, 20 bp, Artificial Sequence
  chemically synthesized
ctgattcctacagaaaaact

SEQ ID NO: 3578 - DNA, 20 bp, Artificial Sequence
  chemically synthesized
tgattcctacagaaaaactc

SEQ ID NO: 3579 - DNA, 20 bp, Artificial Sequence
  chemically synthesized
ttatttcttctgcctttaaa

SEQ ID NO: 3580 - DNA, 20 bp, Artificial Sequence
  chemically synthesized
tttcttctgcctttaaacag

SEQ ID NO: 3581 - DNA, 20 bp, Artificial Sequence
  chemically synthesized
agaagaataattcaattacc

SEQ ID NO: 3582 - DNA, 20 bp, Artificial Sequence
  chemically synthesized
taaaaattattaaatattta

SEQ ID NO: 3583 - DNA, 20 bp, Artificial Sequence
  chemically synthesized
tatagccttatattcaaact

SEQ ID NO: 3584 - DNA, 20 bp, Artificial Sequence
  chemically synthesized
gataatatctaatactcttt

SEQ ID NO: 3585 - DNA, 20 bp, Artificial Sequence
  chemically synthesized
actcttttagtgtctatcaa

SEQ ID NO: 3586 - DNA, 20 bp, Artificial Sequence
  chemically synthesized
agtgtctatcaacagcaacc

SEQ ID NO: 3587 - DNA, 20 bp, Artificial Sequence
  chemically synthesized
gtctatcaacagcaaccaag

SEQ ID NO: 3588 - DNA, 20 bp, Artificial Sequence
  chemically synthesized
atcaacagcaaccaagaaga

SEQ ID NO: 3589 - DNA, 20 bp, Artificial Sequence
  chemically synthesized
atgaaaataaatataaatac

SEQ ID NO: 3590 - DNA, 20 bp, Artificial Sequence
  chemically synthesized
taaatacaagttctatttat

SEQ ID NO: 3591 - DNA, 20 bp, Artificial Sequence
  chemically synthesized
agttctatttatgagatcaa

SEQ ID NO: 3592 - DNA, 20 bp, Artificial Sequence
  chemically synthesized
tatttatgagatcaacagca

SEQ ID NO: 3593 - DNA, 20 bp, Artificial Sequence
  chemically synthesized
atttatgagatcaacagcac

SEQ ID NO: 3594 - DNA, 20 bp, Artificial Sequence
  chemically synthesized
gatcaacagcacaggttttg

SEQ ID NO: 3595 - DNA, 20 bp, Artificial Sequence
  chemically synthesized
ggttttgtggtttttaaata

SEQ ID NO: 3596 - DNA, 20 bp, Artificial Sequence
  chemically synthesized
tgtggtttttaaataaagca

SEQ ID NO: 3597 - DNA, 20 bp, Artificial Sequence
  chemically synthesized
ttaaataaagcatagtgcaa

SEQ ID NO: 3598 - DNA, 20 bp, Artificial Sequence
  chemically synthesized
ataaagcatagtgcaatgga

SEQ ID NO: 3599 - DNA, 20 bp, Artificial Sequence
  chemically synthesized
taaagcatagtgcaatggat

SEQ ID NO: 3600 - DNA, 20 bp, Artificial Sequence
  chemically synthesized
tagtgcaatggataggtctt

SEQ ID NO: 3601 - DNA, 20 bp, Artificial Sequence
  chemically synthesized
agtgcaatggataggtcttt

SEQ ID NO: 3602 - DNA, 20 bp, Artificial Sequence
  chemically synthesized
caatggataggtctttggga

SEQ ID NO: 3603 - DNA, 20 bp, Artificial Sequence
  chemically synthesized
atcttcaaccctattctgtg

SEQ ID NO: 3604 - DNA, 20 bp, Artificial Sequence
  chemically synthesized
aaccctattctgtgaagttt

SEQ ID NO: 3605 - DNA, 20 bp, Artificial Sequence
  chemically synthesized
tgtgaagtttcagtcactct

SEQ ID NO: 3606 - DNA, 20 bp, Artificial Sequence
  chemically synthesized
aagttactttgcactttcct

SEQ ID NO: 3607 - DNA, 20 bp, Artificial Sequence
  chemically synthesized
gcactttccttagtgcgcaa

SEQ ID NO: 3608 - DNA, 20 bp, Artificial Sequence
  chemically synthesized
tagtgcgcaaaagaaaatta

SEQ ID NO: 3609 - DNA, 20 bp, Artificial Sequence
  chemically synthesized
gacctttttttttttttacc

SEQ ID NO: 3610 - DNA, 20 bp, Artificial Sequence
  chemically synthesized
acctttttttttttttacct

SEQ ID NO: 3611 - DNA, 20 bp, Artificial Sequence
  chemically synthesized
gatgtttgaattttattaat

SEQ ID NO: 3612 - DNA, 20 bp, Artificial Sequence
  chemically synthesized
tattaataagataaccttgt

SEQ ID NO: 3613 - DNA, 20 bp, Artificial Sequence
  chemically synthesized
tacaaaatactatgccattt

SEQ ID NO: 3614 - DNA, 20 bp, Artificial Sequence
  chemically synthesized
aatgccaaaataattcttta

SEQ ID NO: 3615 - DNA, 20 bp, Artificial Sequence
  chemically synthesized
aaaataattctttaaagatg

SEQ ID NO: 3616 - DNA, 20 bp, Artificial Sequence
  chemically synthesized
aataattctttaaagatgca

SEQ ID NO: 3617 - DNA, 20 bp, Artificial Sequence
  chemically synthesized
ttactaaaactttattttac

SEQ ID NO: 3618 - DNA, 20 bp, Artificial Sequence
  chemically synthesized
tactaaaactttattttact

SEQ ID NO: 3619 - DNA, 20 bp, Artificial Sequence
  chemically synthesized
actttattttactgggaaaa

SEQ ID NO: 3620 - DNA, 20 bp, Artificial Sequence
  chemically synthesized
ttactgggaaaatagaataa

SEQ ID NO: 3621 - DNA, 20 bp, Artificial Sequence
  chemically synthesized
atagaataaaagttgaacaa

SEQ ID NO: 3622 - DNA, 20 bp, Artificial Sequence
  chemically synthesized
aaagttgaacaatagaaaaa

SEQ ID NO: 3623 - DNA, 20 bp, Artificial Sequence
  chemically synthesized
atctcgacgaaacacacccc

SEQ ID NO: 3624 - DNA, 20 bp, Artificial Sequence
  chemically synthesized
acgaaacacacccctggaat

SEQ ID NO: 3625 - DNA, 20 bp, Artificial Sequence
  chemically synthesized
acacacccctggaataagcc

SEQ ID NO: 3626 - DNA, 20 bp, Artificial Sequence
  chemically synthesized
ccctggaataagccgagcta

SEQ ID NO: 3627 - DNA, 20 bp, Artificial Sequence
  chemically synthesized
ctggaataagccgagctaaa

SEQ ID NO: 3628 - DNA, 20 bp, Artificial Sequence
  chemically synthesized
taagccgagctaaagagaaa

SEQ ID NO: 3629 - DNA, 20 bp, Artificial Sequence
  chemically synthesized
gccgagctaaagagaaaaag

SEQ ID NO: 3630 - DNA, 20 bp, Artificial Sequence
  chemically synthesized
ccgagctaaagagaaaaaga

SEQ ID NO: 3631 - DNA, 20 bp, Artificial Sequence
  chemically synthesized
cgagctaaagagaaaaagaa

SEQ ID NO: 3632 - DNA, 20 bp, Artificial Sequence
  chemically synthesized
agagaaaaagaagggaaata

SEQ ID NO: 3633 - DNA, 20 bp, Artificial Sequence
  chemically synthesized
gagaaaaagaagggaaataa

SEQ ID NO: 3634 - DNA, 20 bp, Artificial Sequence
  chemically synthesized
ttacccacttcattgtgcca

SEQ ID NO: 3635 - DNA, 20 bp, Artificial Sequence
  chemically synthesized
tacccacttcattgtgccaa

SEQ ID NO: 3636 - DNA, 20 bp, Artificial Sequence
  chemically synthesized
ttcattgtgccaaaggcgtg

SEQ ID NO: 3637 - DNA, 20 bp, Artificial Sequence
  chemically synthesized
tcattgtgccaaaggcgtgt

SEQ ID NO: 3638 - DNA, 20 bp, Artificial Sequence
  chemically synthesized
cattgtgccaaaggcgtgtg

SEQ ID NO: 3639 - DNA, 20 bp, Artificial Sequence
  chemically synthesized
ccaaaggcgtgtggggttga

SEQ ID NO: 3640 - DNA, 20 bp, Artificial Sequence
  chemically synthesized
aaggcgtgtggggttgacag

SEQ ID NO: 3641 - DNA, 20 bp, Artificial Sequence
  chemically synthesized
ggcgtgtggggttgacagaa

SEQ ID NO: 3642 - DNA, 20 bp, Artificial Sequence
  chemically synthesized
gtggggttgacagaagagaa

SEQ ID NO: 3643 - DNA, 20 bp, Artificial Sequence
  chemically synthesized
ggttgacagaagagaaaagc

SEQ ID NO: 3644 - DNA, 20 bp, Artificial Sequence
  chemically synthesized
gttgacagaagagaaaagct

SEQ ID NO: 3645 - DNA, 20 bp, Artificial Sequence
  chemically synthesized
aagagaaaagctaggacaaa

SEQ ID NO: 3646 - DNA, 20 bp, Artificial Sequence
  chemically synthesized
gagaaaagctaggacaaacg

SEQ ID NO: 3647 - DNA, 20 bp, Artificial Sequence
  chemically synthesized
agaaaagctaggacaaacgg

SEQ ID NO: 3648 - DNA, 20 bp, Artificial Sequence
  chemically synthesized
gaaaagctaggacaaacgga

SEQ ID NO: 3649 - DNA, 20 bp, Artificial Sequence
  chemically synthesized
taggacaaacggagggaaat

SEQ ID NO: 3650 - DNA, 20 bp, Artificial Sequence
  chemically synthesized
cacgcctttggcacaatgaa

SEQ ID NO: 3651 - DNA, 20 bp, Artificial Sequence
  chemically synthesized
tctttagctcggcttattcc

SEQ ID NO: 3652 - DNA, 20 bp, Artificial Sequence
  chemically synthesized
tagtaaactctgcatcttta

SEQ ID NO: 3653 - DNA, 20 bp, Artificial Sequence
  chemically synthesized
aggtaaaaaaaaaaaaaggt

SEQ ID NO: 3654 - DNA, 20 bp, Artificial Sequence
  chemically synthesized
aaggaaagtgcaaagtaact

SEQ ID NO: 3655 - DNA, 20 bp, Artificial Sequence
  chemically synthesized
ttagagtgactgaaacttca

SEQ ID NO: 3656 - DNA, 20 bp, Artificial Sequence
  chemically synthesized
gtgactgaaacttcacagaa

SEQ ID NO: 3657 - DNA, 20 bp, Artificial Sequence
  chemically synthesized
tcacagaatagggttgaaga

SEQ ID NO: 3658 - DNA, 20 bp, Artificial Sequence
  chemically synthesized
ttgctgttgatagacactaa

SEQ ID NO: 3659 - DNA, 20 bp, Artificial Sequence
  chemically synthesized
gtattagatattatctaagt

SEQ ID NO: 3660 - DNA, 20 bp, Artificial Sequence
  chemically synthesized
taaaatagtattcttggtaa

SEQ ID NO: 3661 - DNA, 20 bp, Artificial Sequence
  chemically synthesized
agaaataattgaacatcatc

SEQ ID NO: 3662 - DNA, 20 bp, Artificial Sequence
  chemically synthesized
atcatcctgagtttttctgt

SEQ ID NO: 3663 - DNA, 20 bp, Artificial Sequence
  chemically synthesized
ttttcttcccttgcccagac

SEQ ID NO: 3664 - DNA, 20 bp, Artificial Sequence
  chemically synthesized
ctgggcaagggaagaaaaaa

SEQ ID NO: 3665 - DNA, 20 bp, Artificial Sequence
  chemically synthesized
ctgattcctacagaaaaact

SEQ ID NO: 3666 - DNA, 20 bp, Artificial Sequence
  chemically synthesized
tttcttctgcctttaaacag

SEQ ID NO: 3667 - DNA, 20 bp, Artificial Sequence
  chemically synthesized
agaagaataattcaattacc

SEQ ID NO: 3668 - DNA, 20 bp, Artificial Sequence
  chemically synthesized
tttaaataaagcatagtgca

SEQ ID NO: 3669 - DNA, 20 bp, Artificial Sequence
  chemically synthesized
tagtgcaatggataggtctt

SEQ ID NO: 3670 - DNA, 20 bp, Artificial Sequence
  chemically synthesized
gataggtctttgggatagtt

SEQ ID NO: 3671 - DNA, 20 bp, Artificial Sequence
  chemically synthesized
gacctttttttttttttacc

SEQ ID NO: 3672 - DNA, 20 bp, Artificial Sequence
  chemically synthesized
tttttttttacctaggatgt

SEQ ID NO: 3673 - DNA, 20 bp, Artificial Sequence
  chemically synthesized
aaaataattctttaaagatg

SEQ ID NO: 3674 - DNA, 20 bp, Artificial Sequence
  chemically synthesized
actttattttactgggaaaa

SEQ ID NO: 3675 - DNA, 20 bp, Artificial Sequence
  chemically synthesized
aaaagttgaacaatagaaaa

SEQ ID NO: 3676 - DNA, 20 bp, Artificial Sequence
  chemically synthesized
atctcgacgaaacacacccc

SEQ ID NO: 3677 - DNA, 20 bp, Artificial Sequence
  chemically synthesized
ttcattgtgccaaaggcgtg

SEQ ID NO: 3678 - DNA, 20 bp, Artificial Sequence
  chemically synthesized
gtgtttcgtcgagatgcacg

SEQ ID NO: 3679 - DNA, 20 bp, Artificial Sequence
  chemically synthesized
ttagtaaactctgcatcttt

SEQ ID NO: 3680 - DNA, 20 bp, Artificial Sequence
  chemically synthesized
taggtaaaaaaaaaaaaagg

SEQ ID NO: 3681 - DNA, 20 bp, Artificial Sequence
  chemically synthesized
cttagagtgactgaaacttc

SEQ ID NO: 3682 - DNA, 20 bp, Artificial Sequence
  chemically synthesized
tattcttctgtttaaaggca

SEQ ID NO: 3683 - DNA, 20 bp, Artificial Sequence
  chemically synthesized
gcataatctaagtcaaatgg

SEQ ID NO: 3684 - DNA, 20 bp, Artificial Sequence
  chemically synthesized
atcggtttaaagatttggga

SEQ ID NO: 3685 - DNA, 20 bp, Artificial Sequence
  chemically synthesized
tcactcttgtctgggcaagg

SEQ ID NO: 3686 - DNA, 20 bp, Artificial Sequence
  chemically synthesized
aaaaaggattgttaaatact

SEQ ID NO: 3687 - DNA, 20 bp, Artificial Sequence
  chemically synthesized
aatattgggctctgattcct

SEQ ID NO: 3688 - DNA, 20 bp, Artificial Sequence
  chemically synthesized
atttcttctgcctttaaaca

SEQ ID NO: 3689 - DNA, 20 bp, Artificial Sequence
  chemically synthesized
cagaagaataattcaattac

SEQ ID NO: 3690 - DNA, 20 bp, Artificial Sequence
  chemically synthesized
tgcactttccttagtgcgca

SEQ ID NO: 3691 - DNA, 20 bp, Artificial Sequence
  chemically synthesized
atacaaaatactatgccatt

SEQ ID NO: 3692 - DNA, 20 bp, Artificial Sequence
  chemically synthesized
aactttattttactgggaaa

SEQ ID NO: 3693 - DNA, 20 bp, Artificial Sequence
  chemically synthesized
aatagaataaaagttgaaca

SEQ ID NO: 3694 - DNA, 20 bp, Artificial Sequence
  chemically synthesized
cctggaataagccgagctaa

SEQ ID NO: 3695 - DNA, 20 bp, Artificial Sequence
  chemically synthesized
aggcgtgtggggttgacaga

SEQ ID NO: 3696 - DNA, 20 bp, Artificial Sequence
  chemically synthesized
cattgcactatgctttattt

SEQ ID NO: 3697 - DNA, 20 bp, Artificial Sequence
  chemically synthesized
tatgctttatttaaaaacca

SEQ ID NO: 3698 - DNA, 20 bp, Artificial Sequence
  chemically synthesized
aaggattgttaaatactgaa

SEQ ID NO: 3699 - DNA, 20 bp, Artificial Sequence
  chemically synthesized
ttgggctctgattcctacag

SEQ ID NO: 3700 - DNA, 20 bp, Artificial Sequence
  chemically synthesized
tttaaagatgcagagtttac

SEQ ID NO: 3701 - DNA, 20 bp, Artificial Sequence
  chemically synthesized
gtatattagtgctaatttcc

SEQ ID NO: 3702 - DNA, 20 bp, Artificial Sequence
  chemically synthesized
gctaatttccctccgtttgt

SEQ ID NO: 3703 - DNA, 20 bp, Artificial Sequence
  chemically synthesized
tcccttctttttctctttag

SEQ ID NO: 3704 - DNA, 20 bp, Artificial Sequence
  chemically synthesized
tagctcggcttattccaggg

SEQ ID NO: 3705 - DNA, 20 bp, Artificial Sequence
  chemically synthesized
attctattttcccagtaaaa

SEQ ID NO: 3706 - DNA, 20 bp, Artificial Sequence
  chemically synthesized
taaaaaaaaaaaaaggtcag

SEQ ID NO: 3707 - DNA, 20 bp, Artificial Sequence
  chemically synthesized
gaaacttcacagaatagggt

SEQ ID NO: 3708 - DNA, 20 bp, Artificial Sequence
  chemically synthesized
ccaaagacctatccattgca

SEQ ID NO: 3709 - DNA, 20 bp, Artificial Sequence
  chemically synthesized
aaaagagtattagatattat

SEQ ID NO: 3710 - DNA, 20 bp, Artificial Sequence
  chemically synthesized
tcttggtaattgaattattc

SEQ ID NO: 3711 - DNA, 20 bp, Artificial Sequence
  chemically synthesized
agaaataattgaacatcatc

SEQ ID NO: 3712 - DNA, 20 bp, Artificial Sequence
  chemically synthesized
taaaaagtaacattattact

SEQ ID NO: 3713 - DNA, 20 bp, Artificial Sequence
  chemically synthesized
agacaagagtgaggttgctc

SEQ ID NO: 3714 - DNA, 20 bp, Artificial Sequence
  chemically synthesized
agtgaggttgctcatcggtt

SEQ ID NO: 3715 - DNA, 20 bp, Artificial Sequence
  chemically synthesized
tctgggcaagggaagaaaaa

SEQ ID NO: 3716 - DNA, 20 bp, Artificial Sequence
  chemically synthesized
ttatatttctttccatttga

SEQ ID NO: 3717 - DNA, 20 bp, Artificial Sequence
  chemically synthesized
ccatttgacttagattatgc

SEQ ID NO: 3718 - DNA, 20 bp, Artificial Sequence
  chemically synthesized
atttgtttcaaaatattggg

SEQ ID NO: 3719 - DNA, 20 bp, Artificial Sequence
  chemically synthesized
ctatttatgagatcaacagc

SEQ ID NO: 3720 - DNA, 20 bp, Artificial Sequence
  chemically synthesized
gagatcaacagcacaggttt

SEQ ID NO: 3721 - DNA, 20 bp, Artificial Sequence
  chemically synthesized
caatcttcaaccctattctg

SEQ ID NO: 3722 - DNA, 20 bp, Artificial Sequence
  chemically synthesized
cctttttttttttttaccta

SEQ ID NO: 3723 - DNA, 20 bp, Artificial Sequence
  chemically synthesized
aaaataattctttaaagatg

SEQ ID NO: 3724 - DNA, 20 bp, Artificial Sequence
  chemically synthesized
taaaagttgaacaatagaaa

SEQ ID NO: 3725 - DNA, 22 bp, Artificial Sequence
  chemically synthesized
gtgctaatttccctccgtttgt

SEQ ID NO: 3726 - DNA, 22 bp, Artificial Sequence
  chemically synthesized
atttccctccgtttgtcctagc

SEQ ID NO: 3727 - DNA, 22 bp, Artificial Sequence
  chemically synthesized
ccctccgtttgtcctagctttt

SEQ ID NO: 3728 - DNA, 22 bp, Artificial Sequence
  chemically synthesized
cctccgtttgtcctagcttttc

SEQ ID NO: 3729 - DNA, 22 bp, Artificial Sequence
  chemically synthesized
cgtttgtcctagcttttctctt

SEQ ID NO: 3730 - DNA, 22 bp, Artificial Sequence
  chemically synthesized
gtcctagcttttctcttctgtc

SEQ ID NO: 3731 - DNA, 22 bp, Artificial Sequence
  chemically synthesized
tcctagcttttctcttctgtca

SEQ ID NO: 3732 - DNA, 22 bp, Artificial Sequence
  chemically synthesized
gcttttctcttctgtcaacccc

SEQ ID NO: 3733 - DNA, 22 bp, Artificial Sequence
  chemically synthesized
ttctcttctgtcaaccccacac

SEQ ID NO: 3734 - DNA, 22 bp, Artificial Sequence
  chemically synthesized
tctcttctgtcaaccccacacg

SEQ ID NO: 3735 - DNA, 22 bp, Artificial Sequence
  chemically synthesized
ctcttctgtcaaccccacacgc

SEQ ID NO: 3736 - DNA, 22 bp, Artificial Sequence
  chemically synthesized
tcttctgtcaaccccacacgcc

SEQ ID NO: 3737 - DNA, 22 bp, Artificial Sequence
  chemically synthesized
ttctgtcaaccccacacgcctt

SEQ ID NO: 3738 - DNA, 22 bp, Artificial Sequence
  chemically synthesized
ctgtcaaccccacacgcctttg

SEQ ID NO: 3739 - DNA, 22 bp, Artificial Sequence
  chemically synthesized
tgtcaaccccacacgcctttgg

SEQ ID NO: 3740 - DNA, 22 bp, Artificial Sequence
  chemically synthesized
tcaaccccacacgcctttggca

SEQ ID NO: 3741 - DNA, 22 bp, Artificial Sequence
  chemically synthesized
tggcacaatgaagtgggtaacc

SEQ ID NO: 3742 - DNA, 22 bp, Artificial Sequence
  chemically synthesized
ggcacaatgaagtgggtaacct

SEQ ID NO: 3743 - DNA, 22 bp, Artificial Sequence
  chemically synthesized
gcacaatgaagtgggtaacctt

SEQ ID NO: 3744 - DNA, 22 bp, Artificial Sequence
  chemically synthesized
tatttcccttctttttctcttt

SEQ ID NO: 3745 - DNA, 22 bp, Artificial Sequence
  chemically synthesized
atttcccttctttttctcttta

SEQ ID NO: 3746 - DNA, 22 bp, Artificial Sequence
  chemically synthesized
tttcccttctttttctctttag

SEQ ID NO: 3747 - DNA, 22 bp, Artificial Sequence
  chemically synthesized
cccttctttttctctttagctc

SEQ ID NO: 3748 - DNA, 22 bp, Artificial Sequence
  chemically synthesized
ccttctttttctctttagctcg

SEQ ID NO: 3749 - DNA, 22 bp, Artificial Sequence
  chemically synthesized
ctttttctctttagctcggctt

SEQ ID NO: 3750 - DNA, 22 bp, Artificial Sequence
  chemically synthesized
tttttctctttagctcggctta

SEQ ID NO: 3751 - DNA, 22 bp, Artificial Sequence
  chemically synthesized
tttctctttagctcggcttatt

SEQ ID NO: 3752 - DNA, 22 bp, Artificial Sequence
  chemically synthesized
ttctctttagctcggcttattc

SEQ ID NO: 3753 - DNA, 22 bp, Artificial Sequence
  chemically synthesized
tctctttagctcggcttattcc

SEQ ID NO: 3754 - DNA, 22 bp, Artificial Sequence
  chemically synthesized
ctctttagctcggcttattcca

SEQ ID NO: 3755 - DNA, 22 bp, Artificial Sequence
  chemically synthesized
tctttagctcggcttattccag

SEQ ID NO: 3756 - DNA, 22 bp, Artificial Sequence
  chemically synthesized
tttagctcggcttattccaggg

SEQ ID NO: 3757 - DNA, 22 bp, Artificial Sequence
  chemically synthesized
tagctcggcttattccaggggt

SEQ ID NO: 3758 - DNA, 22 bp, Artificial Sequence
  chemically synthesized
agctcggcttattccaggggtg

SEQ ID NO: 3759 - DNA, 22 bp, Artificial Sequence
  chemically synthesized
gctcggcttattccaggggtgt

SEQ ID NO: 3760 - DNA, 22 bp, Artificial Sequence
  chemically synthesized
ggcttattccaggggtgtgttt

SEQ ID NO: 3761 - DNA, 22 bp, Artificial Sequence
  chemically synthesized
attccaggggtgtgtttcgtcg

SEQ ID NO: 3762 - DNA, 22 bp, Artificial Sequence
  chemically synthesized
ttccaggggtgtgtttcgtcga

SEQ ID NO: 3763 - DNA, 22 bp, Artificial Sequence
  chemically synthesized
caggggtgtgtttcgtcgagat

SEQ ID NO: 3764 - DNA, 22 bp, Artificial Sequence
  chemically synthesized
cgtcgagatgcacgtaagaaat

SEQ ID NO: 3765 - DNA, 22 bp, Artificial Sequence
  chemically synthesized
gtcgagatgcacgtaagaaatc

SEQ ID NO: 3766 - DNA, 22 bp, Artificial Sequence
  chemically synthesized
ttctattgttcaacttttattc

SEQ ID NO: 3767 - DNA, 22 bp, Artificial Sequence
  chemically synthesized
tctattgttcaacttttattct

SEQ ID NO: 3768 - DNA, 22 bp, Artificial Sequence
  chemically synthesized
ctattgttcaacttttattcta

SEQ ID NO: 3769 - DNA, 22 bp, Artificial Sequence
  chemically synthesized
tattgttcaacttttattctat

SEQ ID NO: 3770 - DNA, 22 bp, Artificial Sequence
  chemically synthesized
ttgttcaacttttattctattt

SEQ ID NO: 3771 - DNA, 22 bp, Artificial Sequence
  chemically synthesized
ttcaacttttattctattttcc

SEQ ID NO: 3772 - DNA, 22 bp, Artificial Sequence
  chemically synthesized
aacttttattctattttcccag

SEQ ID NO: 3773 - DNA, 22 bp, Artificial Sequence
  chemically synthesized
ttattctattttcccagtaaaa

SEQ ID NO: 3774 - DNA, 22 bp, Artificial Sequence
  chemically synthesized
tattctattttcccagtaaaat

SEQ ID NO: 3775 - DNA, 22 bp, Artificial Sequence
  chemically synthesized
attctattttcccagtaaaata

SEQ ID NO: 3776 - DNA, 22 bp, Artificial Sequence
  chemically synthesized
ttctattttcccagtaaaataa

SEQ ID NO: 3777 - DNA, 22 bp, Artificial Sequence
  chemically synthesized
tattttcccagtaaaataaagt

SEQ ID NO: 3778 - DNA, 22 bp, Artificial Sequence
  chemically synthesized
ttttcccagtaaaataaagttt

SEQ ID NO: 3779 - DNA, 22 bp, Artificial Sequence
  chemically synthesized
tcccagtaaaataaagttttag

SEQ ID NO: 3780 - DNA, 22 bp, Artificial Sequence
  chemically synthesized
cccagtaaaataaagttttagt

SEQ ID NO: 3781 - DNA, 22 bp, Artificial Sequence
  chemically synthesized
ccagtaaaataaagttttagta

SEQ ID NO: 3782 - DNA, 22 bp, Artificial Sequence
  chemically synthesized
tagtaaactctgcatctttaaa

SEQ ID NO: 3783 - DNA, 22 bp, Artificial Sequence
  chemically synthesized
agtaaactctgcatctttaaag

SEQ ID NO: 3784 - DNA, 22 bp, Artificial Sequence
  chemically synthesized
gtaaactctgcatctttaaaga

SEQ ID NO: 3785 - DNA, 22 bp, Artificial Sequence
  chemically synthesized
tgcatctttaaagaattatttt

SEQ ID NO: 3786 - DNA, 22 bp, Artificial Sequence
  chemically synthesized
catctttaaagaattattttgg

SEQ ID NO: 3787 - DNA, 22 bp, Artificial Sequence
  chemically synthesized
taaagaattattttggcattta

SEQ ID NO: 3788 - DNA, 22 bp, Artificial Sequence
  chemically synthesized
aaagaattattttggcatttat

SEQ ID NO: 3789 - DNA, 22 bp, Artificial Sequence
  chemically synthesized
aagaattattttggcatttatt

SEQ ID NO: 3790 - DNA, 22 bp, Artificial Sequence
  chemically synthesized
ttttggcatttatttctaaaat

SEQ ID NO: 3791 - DNA, 22 bp, Artificial Sequence
  chemically synthesized
tggcatttatttctaaaatggc

SEQ ID NO: 3792 - DNA, 22 bp, Artificial Sequence
  chemically synthesized
ggcatttatttctaaaatggca

SEQ ID NO: 3793 - DNA, 22 bp, Artificial Sequence
  chemically synthesized
gcatttatttctaaaatggcat

SEQ ID NO: 3794 - DNA, 22 bp, Artificial Sequence
  chemically synthesized
atttctaaaatggcatagtatt

SEQ ID NO: 3795 - DNA, 22 bp, Artificial Sequence
  chemically synthesized
tttctaaaatggcatagtattt

SEQ ID NO: 3796 - DNA, 22 bp, Artificial Sequence
  chemically synthesized
ctaaaatggcatagtattttgt

SEQ ID NO: 3797 - DNA, 22 bp, Artificial Sequence
  chemically synthesized
taaaatggcatagtattttgta

SEQ ID NO: 3798 - DNA, 22 bp, Artificial Sequence
  chemically synthesized
aaatggcatagtattttgtatt

SEQ ID NO: 3799 - DNA, 22 bp, Artificial Sequence
  chemically synthesized
tgtatttgtgaagtcttacaag

SEQ ID NO: 3800 - DNA, 22 bp, Artificial Sequence
  chemically synthesized
gtatttgtgaagtcttacaagg

SEQ ID NO: 3801 - DNA, 22 bp, Artificial Sequence
  chemically synthesized
tatttgtgaagtcttacaaggt

SEQ ID NO: 3802 - DNA, 22 bp, Artificial Sequence
  chemically synthesized
gtgaagtcttacaaggttatct

SEQ ID NO: 3803 - DNA, 22 bp, Artificial Sequence
  chemically synthesized
tgaagtcttacaaggttatctt

SEQ ID NO: 3804 - DNA, 22 bp, Artificial Sequence
  chemically synthesized
acaaggttatcttattaataaa

SEQ ID NO: 3805 - DNA, 22 bp, Artificial Sequence
  chemically synthesized
caaggttatcttattaataaaa

SEQ ID NO: 3806 - DNA, 22 bp, Artificial Sequence
  chemically synthesized
tcttattaataaaattcaaaca

SEQ ID NO: 3807 - DNA, 22 bp, Artificial Sequence
  chemically synthesized
attaataaaattcaaacatcct

SEQ ID NO: 3808 - DNA, 22 bp, Artificial Sequence
  chemically synthesized
ttaataaaattcaaacatccta

SEQ ID NO: 3809 - DNA, 22 bp, Artificial Sequence
  chemically synthesized
ataaaattcaaacatcctaggt

SEQ ID NO: 3810 - DNA, 22 bp, Artificial Sequence
  chemically synthesized
aaacatcctaggtaaaaaaaaa

SEQ ID NO: 3811 - DNA, 22 bp, Artificial Sequence
  chemically synthesized
ggtaaaaaaaaaaaaaggtcag

SEQ ID NO: 3812 - DNA, 22 bp, Artificial Sequence
  chemically synthesized
tttagtgactgtaattttcttt

SEQ ID NO: 3813 - DNA, 22 bp, Artificial Sequence
  chemically synthesized
agtgactgtaattttcttttgc

SEQ ID NO: 3814 - DNA, 22 bp, Artificial Sequence
  chemically synthesized
gtgactgtaattttcttttgcg

SEQ ID NO: 3815 - DNA, 22 bp, Artificial Sequence
  chemically synthesized
taattttcttttgcgcactaag

SEQ ID NO: 3816 - DNA, 22 bp, Artificial Sequence
  chemically synthesized
tcttttgcgcactaaggaaagt

SEQ ID NO: 3817 - DNA, 22 bp, Artificial Sequence
  chemically synthesized
cttttgcgcactaaggaaagtg

SEQ ID NO: 3818 - DNA, 22 bp, Artificial Sequence
  chemically synthesized
ttttgcgcactaaggaaagtgc

SEQ ID NO: 3819 - DNA, 22 bp, Artificial Sequence
  chemically synthesized
ttgcgcactaaggaaagtgcaa

SEQ ID NO: 3820 - DNA, 22 bp, Artificial Sequence
  chemically synthesized
tgcgcactaaggaaagtgcaaa

SEQ ID NO: 3821 - DNA, 22 bp, Artificial Sequence
  chemically synthesized
gcgcactaaggaaagtgcaaag

SEQ ID NO: 3822 - DNA, 22 bp, Artificial Sequence
  chemically synthesized
cgcactaaggaaagtgcaaagt

SEQ ID NO: 3823 - DNA, 22 bp, Artificial Sequence
  chemically synthesized
aggaaagtgcaaagtaacttag

SEQ ID NO: 3824 - DNA, 22 bp, Artificial Sequence
  chemically synthesized
agagtgactgaaacttcacaga

SEQ ID NO: 3825 - DNA, 22 bp, Artificial Sequence
  chemically synthesized
gagtgactgaaacttcacagaa

SEQ ID NO: 3826 - DNA, 22 bp, Artificial Sequence
  chemically synthesized
aaacttcacagaatagggttga

SEQ ID NO: 3827 - DNA, 22 bp, Artificial Sequence
  chemically synthesized
cacagaatagggttgaagattg

SEQ ID NO: 3828 - DNA, 22 bp, Artificial Sequence
  chemically synthesized
acagaatagggttgaagattga

SEQ ID NO: 3829 - DNA, 22 bp, Artificial Sequence
  chemically synthesized
aagattgaattcataactatcc

SEQ ID NO: 3830 - DNA, 22 bp, Artificial Sequence
  chemically synthesized
aattcataactatcccaaagac

SEQ ID NO: 3831 - DNA, 22 bp, Artificial Sequence
  chemically synthesized
ataactatcccaaagacctatc

SEQ ID NO: 3832 - DNA, 22 bp, Artificial Sequence
  chemically synthesized
tcccaaagacctatccattgca

SEQ ID NO: 3833 - DNA, 22 bp, Artificial Sequence
  chemically synthesized
tccattgcactatgctttattt

SEQ ID NO: 3834 - DNA, 22 bp, Artificial Sequence
  chemically synthesized
cactatgctttatttaaaaacc

SEQ ID NO: 3835 - DNA, 22 bp, Artificial Sequence
  chemically synthesized
tgctttatttaaaaaccacaaa

SEQ ID NO: 3836 - DNA, 22 bp, Artificial Sequence
  chemically synthesized
tatttaaaaaccacaaaacctg

SEQ ID NO: 3837 - DNA, 22 bp, Artificial Sequence
  chemically synthesized
atttaaaaaccacaaaacctgt

SEQ ID NO: 3838 - DNA, 22 bp, Artificial Sequence
  chemically synthesized
tttaaaaaccacaaaacctgtg

SEQ ID NO: 3839 - DNA, 22 bp, Artificial Sequence
  chemically synthesized
aaaaaccacaaaacctgtgctg

SEQ ID NO: 3840 - DNA, 22 bp, Artificial Sequence
  chemically synthesized
aaaaccacaaaacctgtgctgt

SEQ ID NO: 3841 - DNA, 22 bp, Artificial Sequence
  chemically synthesized
tgctgttgatctcataaataga

SEQ ID NO: 3842 - DNA, 22 bp, Artificial Sequence
  chemically synthesized
ttgatctcataaatagaacttg

SEQ ID NO: 3843 - DNA, 22 bp, Artificial Sequence
  chemically synthesized
atctcataaatagaacttgtat

SEQ ID NO: 3844 - DNA, 22 bp, Artificial Sequence
  chemically synthesized
ataaatagaacttgtatttata

SEQ ID NO: 3845 - DNA, 22 bp, Artificial Sequence
  chemically synthesized
gtatttatatttattttcattt

SEQ ID NO: 3846 - DNA, 22 bp, Artificial Sequence
  chemically synthesized
tatttatatttattttcatttt

SEQ ID NO: 3847 - DNA, 22 bp, Artificial Sequence
  chemically synthesized
atatttattttcattttagtct

SEQ ID NO: 3848 - DNA, 22 bp, Artificial Sequence
  chemically synthesized
tatttattttcattttagtctg

SEQ ID NO: 3849 - DNA, 22 bp, Artificial Sequence
  chemically synthesized
attttcattttagtctgtcttc

SEQ ID NO: 3850 - DNA, 22 bp, Artificial Sequence
  chemically synthesized
ttttcattttagtctgtcttct

SEQ ID NO: 3851 - DNA, 22 bp, Artificial Sequence
  chemically synthesized
tcattttagtctgtcttcttgg

SEQ ID NO: 3852 - DNA, 22 bp, Artificial Sequence
  chemically synthesized
cattttagtctgtcttcttggt

SEQ ID NO: 3853 - DNA, 22 bp, Artificial Sequence
  chemically synthesized
attttagtctgtcttcttggtt

SEQ ID NO: 3854 - DNA, 22 bp, Artificial Sequence
  chemically synthesized
tagtctgtcttcttggttgctg

SEQ ID NO: 3855 - DNA, 22 bp, Artificial Sequence
  chemically synthesized
agtctgtcttcttggttgctgt

SEQ ID NO: 3856 - DNA, 22 bp, Artificial Sequence
  chemically synthesized
gtctgtcttcttggttgctgtt

SEQ ID NO: 3857 - DNA, 22 bp, Artificial Sequence
  chemically synthesized
tcttcttggttgctgttgatag

SEQ ID NO: 3858 - DNA, 22 bp, Artificial Sequence
  chemically synthesized
cttggttgctgttgatagacac

SEQ ID NO: 3859 - DNA, 22 bp, Artificial Sequence
  chemically synthesized
ttggttgctgttgatagacact

SEQ ID NO: 3860 - DNA, 22 bp, Artificial Sequence
  chemically synthesized
ggttgctgttgatagacactaa

SEQ ID NO: 3861 - DNA, 22 bp, Artificial Sequence
  chemically synthesized
gttgctgttgatagacactaaa

SEQ ID NO: 3862 - DNA, 22 bp, Artificial Sequence
  chemically synthesized
ctgttgatagacactaaaagag

SEQ ID NO: 3863 - DNA, 22 bp, Artificial Sequence
  chemically synthesized
ttgatagacactaaaagagtat

SEQ ID NO: 3864 - DNA, 22 bp, Artificial Sequence
  chemically synthesized
atagacactaaaagagtattag

SEQ ID NO: 3865 - DNA, 22 bp, Artificial Sequence
  chemically synthesized
aaagagtattagatattatcta

SEQ ID NO: 3866 - DNA, 22 bp, Artificial Sequence
  chemically synthesized
gatattatctaagtttgaatat

SEQ ID NO: 3867 - DNA, 22 bp, Artificial Sequence
  chemically synthesized
tctaagtttgaatataaggcta

SEQ ID NO: 3868 - DNA, 22 bp, Artificial Sequence
  chemically synthesized
agtttgaatataaggctataaa

SEQ ID NO: 3869 - DNA, 22 bp, Artificial Sequence
  chemically synthesized
gaatataaggctataaatattt

SEQ ID NO: 3870 - DNA, 22 bp, Artificial Sequence
  chemically synthesized
aatataaggctataaatattta

SEQ ID NO: 3871 - DNA, 22 bp, Artificial Sequence
  chemically synthesized
taaatatttaataatttttaaa

SEQ ID NO: 3872 - DNA, 22 bp, Artificial Sequence
  chemically synthesized
aataatttttaaaatagtattc

SEQ ID NO: 3873 - DNA, 22 bp, Artificial Sequence
  chemically synthesized
ataatttttaaaatagtattct

SEQ ID NO: 3874 - DNA, 22 bp, Artificial Sequence
  chemically synthesized
ttaaaatagtattcttggtaat

SEQ ID NO: 3875 - DNA, 22 bp, Artificial Sequence
  chemically synthesized
taaaatagtattcttggtaatt

SEQ ID NO: 3876 - DNA, 22 bp, Artificial Sequence
  chemically synthesized
aaaatagtattcttggtaattg

SEQ ID NO: 3877 - DNA, 22 bp, Artificial Sequence
  chemically synthesized
aaatagtattcttggtaattga

SEQ ID NO: 3878 - DNA, 22 bp, Artificial Sequence
  chemically synthesized
ttggtaattgaattattcttct

SEQ ID NO: 3879 - DNA, 22 bp, Artificial Sequence
  chemically synthesized
ggtaattgaattattcttctgt

SEQ ID NO: 3880 - DNA, 22 bp, Artificial Sequence
  chemically synthesized
gtaattgaattattcttctgtt

SEQ ID NO: 3881 - DNA, 22 bp, Artificial Sequence
  chemically synthesized
aattattcttctgtttaaaggc

SEQ ID NO: 3882 - DNA, 22 bp, Artificial Sequence
  chemically synthesized
ttcttctgtttaaaggcagaag

SEQ ID NO: 3883 - DNA, 22 bp, Artificial Sequence
  chemically synthesized
ttctgtttaaaggcagaagaaa

SEQ ID NO: 3884 - DNA, 22 bp, Artificial Sequence
  chemically synthesized
ctgtttaaaggcagaagaaata

SEQ ID NO: 3885 - DNA, 22 bp, Artificial Sequence
  chemically synthesized
tgtttaaaggcagaagaaataa

SEQ ID NO: 3886 - DNA, 22 bp, Artificial Sequence
  chemically synthesized
tttaaaggcagaagaaataatt

SEQ ID NO: 3887 - DNA, 22 bp, Artificial Sequence
  chemically synthesized
aaaggcagaagaaataattgaa

SEQ ID NO: 3888 - DNA, 22 bp, Artificial Sequence
  chemically synthesized
aaggcagaagaaataattgaac

SEQ ID NO: 3889 - DNA, 22 bp, Artificial Sequence
  chemically synthesized
aacatcatcctgagtttttctg

SEQ ID NO: 3890 - DNA, 22 bp, Artificial Sequence
  chemically synthesized
agtttttctgtaggaatcagag

SEQ ID NO: 3891 - DNA, 22 bp, Artificial Sequence
  chemically synthesized
ttctgtaggaatcagagcccaa

SEQ ID NO: 3892 - DNA, 22 bp, Artificial Sequence
  chemically synthesized
tctgtaggaatcagagcccaat

SEQ ID NO: 3893 - DNA, 22 bp, Artificial Sequence
  chemically synthesized
ctgtaggaatcagagcccaata

SEQ ID NO: 3894 - DNA, 22 bp, Artificial Sequence
  chemically synthesized
tgtaggaatcagagcccaatat

SEQ ID NO: 3895 - DNA, 22 bp, Artificial Sequence
  chemically synthesized
taggaatcagagcccaatattt

SEQ ID NO: 3896 - DNA, 22 bp, Artificial Sequence
  chemically synthesized
tgaaacaaatgcataatctaag

SEQ ID NO: 3897 - DNA, 22 bp, Artificial Sequence
  chemically synthesized
gaaacaaatgcataatctaagt

SEQ ID NO: 3898 - DNA, 22 bp, Artificial Sequence
  chemically synthesized
aaacaaatgcataatctaagtc

SEQ ID NO: 3899 - DNA, 22 bp, Artificial Sequence
  chemically synthesized
agtcaaatggaaagaaatataa

SEQ ID NO: 3900 - DNA, 22 bp, Artificial Sequence
  chemically synthesized
ttacttcttgttttcttcagta

SEQ ID NO: 3901 - DNA, 22 bp, Artificial Sequence
  chemically synthesized
cttcttgttttcttcagtattt

SEQ ID NO: 3902 - DNA, 22 bp, Artificial Sequence
  chemically synthesized
cttgttttcttcagtatttaac

SEQ ID NO: 3903 - DNA, 22 bp, Artificial Sequence
  chemically synthesized
ttgttttcttcagtatttaaca

SEQ ID NO: 3904 - DNA, 22 bp, Artificial Sequence
  chemically synthesized
gttttcttcagtatttaacaat

SEQ ID NO: 3905 - DNA, 22 bp, Artificial Sequence
  chemically synthesized
ttttcttcagtatttaacaatc

SEQ ID NO: 3906 - DNA, 22 bp, Artificial Sequence
  chemically synthesized
tcttcagtatttaacaatcctt

SEQ ID NO: 3907 - DNA, 22 bp, Artificial Sequence
  chemically synthesized
cttcagtatttaacaatccttt

SEQ ID NO: 3908 - DNA, 22 bp, Artificial Sequence
  chemically synthesized
ttcagtatttaacaatcctttt

SEQ ID NO: 3909 - DNA, 22 bp, Artificial Sequence
  chemically synthesized
cagtatttaacaatcctttttt

SEQ ID NO: 3910 - DNA, 22 bp, Artificial Sequence
  chemically synthesized
agtatttaacaatccttttttt

SEQ ID NO: 3911 - DNA, 22 bp, Artificial Sequence
  chemically synthesized
aacaatccttttttttcttccc

SEQ ID NO: 3912 - DNA, 22 bp, Artificial Sequence
  chemically synthesized
acaatccttttttttcttccct

SEQ ID NO: 3913 - DNA, 22 bp, Artificial Sequence
  chemically synthesized
ttttttcttcccttgcccagac

SEQ ID NO: 3914 - DNA, 22 bp, Artificial Sequence
  chemically synthesized
tttttcttcccttgcccagaca

SEQ ID NO: 3915 - DNA, 22 bp, Artificial Sequence
  chemically synthesized
ttttcttcccttgcccagacaa

SEQ ID NO: 3916 - DNA, 22 bp, Artificial Sequence
  chemically synthesized
tttcttcccttgcccagacaag

SEQ ID NO: 3917 - DNA, 22 bp, Artificial Sequence
  chemically synthesized
ttcttcccttgcccagacaaga

SEQ ID NO: 3918 - DNA, 22 bp, Artificial Sequence
  chemically synthesized
tcttcccttgcccagacaagag

SEQ ID NO: 3919 - DNA, 22 bp, Artificial Sequence
  chemically synthesized
cttcccttgcccagacaagagt

SEQ ID NO: 3920 - DNA, 22 bp, Artificial Sequence
  chemically synthesized
ttcccttgcccagacaagagtg

SEQ ID NO: 3921 - DNA, 22 bp, Artificial Sequence
  chemically synthesized
cccttgcccagacaagagtgag

SEQ ID NO: 3922 - DNA, 22 bp, Artificial Sequence
  chemically synthesized
ccttgcccagacaagagtgagg

SEQ ID NO: 3923 - DNA, 22 bp, Artificial Sequence
  chemically synthesized
gcccagacaagagtgaggttgc

SEQ ID NO: 3924 - DNA, 22 bp, Artificial Sequence
  chemically synthesized
cccagacaagagtgaggttgct

SEQ ID NO: 3925 - DNA, 22 bp, Artificial Sequence
  chemically synthesized
ctcatcggtttaaagatttggg

SEQ ID NO: 3926 - DNA, 22 bp, Artificial Sequence
  chemically synthesized
atcggtttaaagatttgggaga

SEQ ID NO: 3927 - DNA, 22 bp, Artificial Sequence
  chemically synthesized
aaagatttgggagaagaaaatt

SEQ ID NO: 3928 - DNA, 22 bp, Artificial Sequence
  chemically synthesized
aagatttgggagaagaaaattt

SEQ ID NO: 3929 - DNA, 22 bp, Artificial Sequence
  chemically synthesized
gggagaagaaaatttcaaagcc

SEQ ID NO: 3930 - DNA, 22 bp, Artificial Sequence
  chemically synthesized
ggagaagaaaatttcaaagcct

SEQ ID NO: 3931 - DNA, 22 bp, Artificial Sequence
  chemically synthesized
tgaaattttcttctcccaaatc

SEQ ID NO: 3932 - DNA, 22 bp, Artificial Sequence
  chemically synthesized
gaaattttcttctcccaaatct

SEQ ID NO: 3933 - DNA, 22 bp, Artificial Sequence
  chemically synthesized
aaattttcttctcccaaatctt

SEQ ID NO: 3934 - DNA, 22 bp, Artificial Sequence
  chemically synthesized
tcttctcccaaatctttaaacc

SEQ ID NO: 3935 - DNA, 22 bp, Artificial Sequence
  chemically synthesized
cttctcccaaatctttaaaccg

SEQ ID NO: 3936 - DNA, 22 bp, Artificial Sequence
  chemically synthesized
ttctcccaaatctttaaaccga

SEQ ID NO: 3937 - DNA, 22 bp, Artificial Sequence
  chemically synthesized
ctcccaaatctttaaaccgatg

SEQ ID NO: 3938 - DNA, 22 bp, Artificial Sequence
  chemically synthesized
tcccaaatctttaaaccgatga

SEQ ID NO: 3939 - DNA, 22 bp, Artificial Sequence
  chemically synthesized
ccaaatctttaaaccgatgagc

SEQ ID NO: 3940 - DNA, 22 bp, Artificial Sequence
  chemically synthesized
taaaccgatgagcaacctcact

SEQ ID NO: 3941 - DNA, 22 bp, Artificial Sequence
  chemically synthesized
aaaccgatgagcaacctcactc

SEQ ID NO: 3942 - DNA, 22 bp, Artificial Sequence
  chemically synthesized
aaccgatgagcaacctcactct

SEQ ID NO: 3943 - DNA, 22 bp, Artificial Sequence
  chemically synthesized
actcttgtctgggcaagggaag

SEQ ID NO: 3944 - DNA, 22 bp, Artificial Sequence
  chemically synthesized
ttgtctgggcaagggaagaaaa

SEQ ID NO: 3945 - DNA, 22 bp, Artificial Sequence
  chemically synthesized
gtctgggcaagggaagaaaaaa

SEQ ID NO: 3946 - DNA, 22 bp, Artificial Sequence
  chemically synthesized
tctgggcaagggaagaaaaaaa

SEQ ID NO: 3947 - DNA, 22 bp, Artificial Sequence
  chemically synthesized
ggcaagggaagaaaaaaaagga

SEQ ID NO: 3948 - DNA, 22 bp, Artificial Sequence
  chemically synthesized
ttaaatactgaagaaaacaaga

SEQ ID NO: 3949 - DNA, 22 bp, Artificial Sequence
  chemically synthesized
aatactgaagaaaacaagaagt

SEQ ID NO: 3950 - DNA, 22 bp, Artificial Sequence
  chemically synthesized
aagaaaacaagaagtaataatg

SEQ ID NO: 3951 - DNA, 22 bp, Artificial Sequence
  chemically synthesized
ctttttatatttctttccattt

SEQ ID NO: 3952 - DNA, 22 bp, Artificial Sequence
  chemically synthesized
tttatatttctttccatttgac

SEQ ID NO: 3953 - DNA, 22 bp, Artificial Sequence
  chemically synthesized
ttatatttctttccatttgact

SEQ ID NO: 3954 - DNA, 22 bp, Artificial Sequence
  chemically synthesized
tatatttctttccatttgactt

SEQ ID NO: 3955 - DNA, 22 bp, Artificial Sequence
  chemically synthesized
atatttctttccatttgactta

SEQ ID NO: 3956 - DNA, 22 bp, Artificial Sequence
  chemically synthesized
tatttctttccatttgacttag

SEQ ID NO: 3957 - DNA, 22 bp, Artificial Sequence
  chemically synthesized
ctttccatttgacttagattat

SEQ ID NO: 3958 - DNA, 22 bp, Artificial Sequence
  chemically synthesized
tttccatttgacttagattatg

SEQ ID NO: 3959 - DNA, 22 bp, Artificial Sequence
  chemically synthesized
tccatttgacttagattatgca

SEQ ID NO: 3960 - DNA, 22 bp, Artificial Sequence
  chemically synthesized
ccatttgacttagattatgcat

SEQ ID NO: 3961 - DNA, 22 bp, Artificial Sequence
  chemically synthesized
catttgacttagattatgcatt

SEQ ID NO: 3962 - DNA, 22 bp, Artificial Sequence
  chemically synthesized
gacttagattatgcatttgttt

SEQ ID NO: 3963 - DNA, 22 bp, Artificial Sequence
  chemically synthesized
acttagattatgcatttgtttc

SEQ ID NO: 3964 - DNA, 22 bp, Artificial Sequence
  chemically synthesized
agattatgcatttgtttcaaaa

SEQ ID NO: 3965 - DNA, 22 bp, Artificial Sequence
  chemically synthesized
gattatgcatttgtttcaaaat

SEQ ID NO: 3966 - DNA, 22 bp, Artificial Sequence
  chemically synthesized
tgcatttgtttcaaaatattgg

SEQ ID NO: 3967 - DNA, 22 bp, Artificial Sequence
  chemically synthesized
gtttcaaaatattgggctctga

SEQ ID NO: 3968 - DNA, 22 bp, Artificial Sequence
  chemically synthesized
tttcaaaatattgggctctgat

SEQ ID NO: 3969 - DNA, 22 bp, Artificial Sequence
  chemically synthesized
caaaatattgggctctgattcc

SEQ ID NO: 3970 - DNA, 22 bp, Artificial Sequence
  chemically synthesized
aaaatattgggctctgattcct

SEQ ID NO: 3971 - DNA, 22 bp, Artificial Sequence
  chemically synthesized
ggctctgattcctacagaaaaa

SEQ ID NO: 3972 - DNA, 22 bp, Artificial Sequence
  chemically synthesized
tgattcctacagaaaaactcag

SEQ ID NO: 3973 - DNA, 22 bp, Artificial Sequence
  chemically synthesized
attcctacagaaaaactcagga

SEQ ID NO: 3974 - DNA, 22 bp, Artificial Sequence
  chemically synthesized
ctacagaaaaactcaggatgat

SEQ ID NO: 3975 - DNA, 22 bp, Artificial Sequence
  chemically synthesized
cagaaaaactcaggatgatgtt

SEQ ID NO: 3976 - DNA, 22 bp, Artificial Sequence
  chemically synthesized
aggatgatgttcaattatttct

SEQ ID NO: 3977 - DNA, 22 bp, Artificial Sequence
  chemically synthesized
aattatttcttctgcctttaaa

SEQ ID NO: 3978 - DNA, 22 bp, Artificial Sequence
  chemically synthesized
tttcttctgcctttaaacagaa

SEQ ID NO: 3979 - DNA, 22 bp, Artificial Sequence
  chemically synthesized
cttctgcctttaaacagaagaa

SEQ ID NO: 3980 - DNA, 22 bp, Artificial Sequence
  chemically synthesized
ttctgcctttaaacagaagaat

SEQ ID NO: 3981 - DNA, 22 bp, Artificial Sequence
  chemically synthesized
ctgcctttaaacagaagaataa

SEQ ID NO: 3982 - DNA, 22 bp, Artificial Sequence
  chemically synthesized
tgcctttaaacagaagaataat

SEQ ID NO: 3983 - DNA, 22 bp, Artificial Sequence
  chemically synthesized
cctttaaacagaagaataattc

SEQ ID NO: 3984 - DNA, 22 bp, Artificial Sequence
  chemically synthesized
taaacagaagaataattcaatt

SEQ ID NO: 3985 - DNA, 22 bp, Artificial Sequence
  chemically synthesized
aaacagaagaataattcaatta

SEQ ID NO: 3986 - DNA, 22 bp, Artificial Sequence
  chemically synthesized
aacagaagaataattcaattac

SEQ ID NO: 3987 - DNA, 22 bp, Artificial Sequence
  chemically synthesized
aattaccaagaatactatttta

SEQ ID NO: 3988 - DNA, 22 bp, Artificial Sequence
  chemically synthesized
ccaagaatactattttaaaaat

SEQ ID NO: 3989 - DNA, 22 bp, Artificial Sequence
  chemically synthesized
ttttaaaaattattaaatattt

SEQ ID NO: 3990 - DNA, 22 bp, Artificial Sequence
  chemically synthesized
taaaaattattaaatatttata

SEQ ID NO: 3991 - DNA, 22 bp, Artificial Sequence
  chemically synthesized
aaaaattattaaatatttatag

SEQ ID NO: 3992 - DNA, 22 bp, Artificial Sequence
  chemically synthesized
aaaattattaaatatttatagc

SEQ ID NO: 3993 - DNA, 22 bp, Artificial Sequence
  chemically synthesized
ttaaatatttatagccttatat

SEQ ID NO: 3994 - DNA, 22 bp, Artificial Sequence
  chemically synthesized
aatatttatagccttatattca

SEQ ID NO: 3995 - DNA, 22 bp, Artificial Sequence
  chemically synthesized
atagccttatattcaaacttag

SEQ ID NO: 3996 - DNA, 22 bp, Artificial Sequence
  chemically synthesized
tagccttatattcaaacttaga

SEQ ID NO: 3997 - DNA, 22 bp, Artificial Sequence
  chemically synthesized
atattcaaacttagataatatc

SEQ ID NO: 3998 - DNA, 22 bp, Artificial Sequence
  chemically synthesized
tattcaaacttagataatatct

SEQ ID NO: 3999 - DNA, 22 bp, Artificial Sequence
  chemically synthesized
aaacttagataatatctaatac

SEQ ID NO: 4000 - DNA, 22 bp, Artificial Sequence
  chemically synthesized
agataatatctaatactctttt

SEQ ID NO: 4001 - DNA, 22 bp, Artificial Sequence
  chemically synthesized
gataatatctaatactctttta

SEQ ID NO: 4002 - DNA, 22 bp, Artificial Sequence
  chemically synthesized
atactcttttagtgtctatcaa

SEQ ID NO: 4003 - DNA, 22 bp, Artificial Sequence
  chemically synthesized
ttttagtgtctatcaacagcaa

SEQ ID NO: 4004 - DNA, 22 bp, Artificial Sequence
  chemically synthesized
ttagtgtctatcaacagcaacc

SEQ ID NO: 4005 - DNA, 22 bp, Artificial Sequence
  chemically synthesized
tagtgtctatcaacagcaacca

SEQ ID NO: 4006 - DNA, 22 bp, Artificial Sequence
  chemically synthesized
agtgtctatcaacagcaaccaa

SEQ ID NO: 4007 - DNA, 22 bp, Artificial Sequence
  chemically synthesized
gtgtctatcaacagcaaccaag

SEQ ID NO: 4008 - DNA, 22 bp, Artificial Sequence
  chemically synthesized
tcaacagcaaccaagaagacag

SEQ ID NO: 4009 - DNA, 22 bp, Artificial Sequence
  chemically synthesized
aaatgaaaataaatataaatac

SEQ ID NO: 4010 - DNA, 22 bp, Artificial Sequence
  chemically synthesized
tatttatgagatcaacagcaca

SEQ ID NO: 4011 - DNA, 22 bp, Artificial Sequence
  chemically synthesized
tttatgagatcaacagcacagg

SEQ ID NO: 4012 - DNA, 22 bp, Artificial Sequence
  chemically synthesized
atgagatcaacagcacaggttt

SEQ ID NO: 4013 - DNA, 22 bp, Artificial Sequence
  chemically synthesized
tgagatcaacagcacaggtttt

SEQ ID NO: 4014 - DNA, 22 bp, Artificial Sequence
  chemically synthesized
tgtggtttttaaataaagcata

SEQ ID NO: 4015 - DNA, 22 bp, Artificial Sequence
  chemically synthesized
gtggtttttaaataaagcatag

SEQ ID NO: 4016 - DNA, 22 bp, Artificial Sequence
  chemically synthesized
tggtttttaaataaagcatagt

SEQ ID NO: 4017 - DNA, 22 bp, Artificial Sequence
  chemically synthesized
ttaaataaagcatagtgcaatg

SEQ ID NO: 4018 - DNA, 22 bp, Artificial Sequence
  chemically synthesized
taaataaagcatagtgcaatgg

SEQ ID NO: 4019 - DNA, 22 bp, Artificial Sequence
  chemically synthesized
aaataaagcatagtgcaatgga

SEQ ID NO: 4020 - DNA, 22 bp, Artificial Sequence
  chemically synthesized
aataaagcatagtgcaatggat

SEQ ID NO: 4021 - DNA, 22 bp, Artificial Sequence
  chemically synthesized
tgggatagttatgaattcaatc

SEQ ID NO: 4022 - DNA, 22 bp, Artificial Sequence
  chemically synthesized
gggatagttatgaattcaatct

SEQ ID NO: 4023 - DNA, 22 bp, Artificial Sequence
  chemically synthesized
ggatagttatgaattcaatctt

SEQ ID NO: 4024 - DNA, 22 bp, Artificial Sequence
  chemically synthesized
tgaattcaatcttcaaccctat

SEQ ID NO: 4025 - DNA, 22 bp, Artificial Sequence
  chemically synthesized
aatcttcaaccctattctgtga

SEQ ID NO: 4026 - DNA, 22 bp, Artificial Sequence
  chemically synthesized
caaccctattctgtgaagtttc

SEQ ID NO: 4027 - DNA, 22 bp, Artificial Sequence
  chemically synthesized
aaccctattctgtgaagtttca

SEQ ID NO: 4028 - DNA, 22 bp, Artificial Sequence
  chemically synthesized
ttctgtgaagtttcagtcactc

SEQ ID NO: 4029 - DNA, 22 bp, Artificial Sequence
  chemically synthesized
tgtgaagtttcagtcactctaa

SEQ ID NO: 4030 - DNA, 22 bp, Artificial Sequence
  chemically synthesized
tgaagtttcagtcactctaagt

SEQ ID NO: 4031 - DNA, 22 bp, Artificial Sequence
  chemically synthesized
cagtcactctaagttactttgc

SEQ ID NO: 4032 - DNA, 22 bp, Artificial Sequence
  chemically synthesized
agtcactctaagttactttgca

SEQ ID NO: 4033 - DNA, 22 bp, Artificial Sequence
  chemically synthesized
taagttactttgcactttcctt

SEQ ID NO: 4034 - DNA, 22 bp, Artificial Sequence
  chemically synthesized
agttactttgcactttccttag

SEQ ID NO: 4035 - DNA, 22 bp, Artificial Sequence
  chemically synthesized
ctttgcactttccttagtgcgc

SEQ ID NO: 4036 - DNA, 22 bp, Artificial Sequence
  chemically synthesized
tgcactttccttagtgcgcaaa

SEQ ID NO: 4037 - DNA, 22 bp, Artificial Sequence
  chemically synthesized
gcactttccttagtgcgcaaaa

SEQ ID NO: 4038 - DNA, 22 bp, Artificial Sequence
  chemically synthesized
cactttccttagtgcgcaaaag

SEQ ID NO: 4039 - DNA, 22 bp, Artificial Sequence
  chemically synthesized
tccttagtgcgcaaaagaaaat

SEQ ID NO: 4040 - DNA, 22 bp, Artificial Sequence
  chemically synthesized
ccttagtgcgcaaaagaaaatt

SEQ ID NO: 4041 - DNA, 22 bp, Artificial Sequence
  chemically synthesized
cttagtgcgcaaaagaaaatta

SEQ ID NO: 4042 - DNA, 22 bp, Artificial Sequence
  chemically synthesized
agtgcgcaaaagaaaattacag

SEQ ID NO: 4043 - DNA, 22 bp, Artificial Sequence
  chemically synthesized
gtgcgcaaaagaaaattacagt

SEQ ID NO: 4044 - DNA, 22 bp, Artificial Sequence
  chemically synthesized
cagtcactaaacaattctgacc

SEQ ID NO: 4045 - DNA, 22 bp, Artificial Sequence
  chemically synthesized
aacaattctgaccttttttttt

SEQ ID NO: 4046 - DNA, 22 bp, Artificial Sequence
  chemically synthesized
tgacctttttttttttttacct

SEQ ID NO: 4047 - DNA, 22 bp, Artificial Sequence
  chemically synthesized
acctttttttttttttacctag

SEQ ID NO: 4048 - DNA, 22 bp, Artificial Sequence
  chemically synthesized
tttttttttttacctaggatgt

SEQ ID NO: 4049 - DNA, 22 bp, Artificial Sequence
  chemically synthesized
ttttttttttacctaggatgtt

SEQ ID NO: 4050 - DNA, 22 bp, Artificial Sequence
  chemically synthesized
tttttttttacctaggatgttt

SEQ ID NO: 4051 - DNA, 22 bp, Artificial Sequence
  chemically synthesized
ttttttttacctaggatgtttg

SEQ ID NO: 4052 - DNA, 22 bp, Artificial Sequence
  chemically synthesized
tttttttacctaggatgtttga

SEQ ID NO: 4053 - DNA, 22 bp, Artificial Sequence
  chemically synthesized
ttttttacctaggatgtttgaa

SEQ ID NO: 4054 - DNA, 22 bp, Artificial Sequence
  chemically synthesized
tttttacctaggatgtttgaat

SEQ ID NO: 4055 - DNA, 22 bp, Artificial Sequence
  chemically synthesized
ttttacctaggatgtttgaatt

SEQ ID NO: 4056 - DNA, 22 bp, Artificial Sequence
  chemically synthesized
tttacctaggatgtttgaattt

SEQ ID NO: 4057 - DNA, 22 bp, Artificial Sequence
  chemically synthesized
ttacctaggatgtttgaatttt

SEQ ID NO: 4058 - DNA, 22 bp, Artificial Sequence
  chemically synthesized
tacctaggatgtttgaatttta

SEQ ID NO: 4059 - DNA, 22 bp, Artificial Sequence
  chemically synthesized
acctaggatgtttgaattttat

SEQ ID NO: 4060 - DNA, 22 bp, Artificial Sequence
  chemically synthesized
cctaggatgtttgaattttatt

SEQ ID NO: 4061 - DNA, 22 bp, Artificial Sequence
  chemically synthesized
ggatgtttgaattttattaata

SEQ ID NO: 4062 - DNA, 22 bp, Artificial Sequence
  chemically synthesized
gaattttattaataagataacc

SEQ ID NO: 4063 - DNA, 22 bp, Artificial Sequence
  chemically synthesized
aattttattaataagataacct

SEQ ID NO: 4064 - DNA, 22 bp, Artificial Sequence
  chemically synthesized
tattaataagataaccttgtaa

SEQ ID NO: 4065 - DNA, 22 bp, Artificial Sequence
  chemically synthesized
attaataagataaccttgtaag

SEQ ID NO: 4066 - DNA, 22 bp, Artificial Sequence
  chemically synthesized
ttaataagataaccttgtaaga

SEQ ID NO: 4067 - DNA, 22 bp, Artificial Sequence
  chemically synthesized
ataagataaccttgtaagactt

SEQ ID NO: 4068 - DNA, 22 bp, Artificial Sequence
  chemically synthesized
gtaagacttcacaaatacaaaa

SEQ ID NO: 4069 - DNA, 22 bp, Artificial Sequence
  chemically synthesized
taagacttcacaaatacaaaat

SEQ ID NO: 4070 - DNA, 22 bp, Artificial Sequence
  chemically synthesized
cacaaatacaaaatactatgcc

SEQ ID NO: 4071 - DNA, 22 bp, Artificial Sequence
  chemically synthesized
acaaatacaaaatactatgcca

SEQ ID NO: 4072 - DNA, 22 bp, Artificial Sequence
  chemically synthesized
tgccattttagaaataaatgcc

SEQ ID NO: 4073 - DNA, 22 bp, Artificial Sequence
  chemically synthesized
tagaaataaatgccaaaataat

SEQ ID NO: 4074 - DNA, 22 bp, Artificial Sequence
  chemically synthesized
agaaataaatgccaaaataatt

SEQ ID NO: 4075 - DNA, 22 bp, Artificial Sequence
  chemically synthesized
gaaataaatgccaaaataattc

SEQ ID NO: 4076 - DNA, 22 bp, Artificial Sequence
  chemically synthesized
tttaaagatgcagagtttacta

SEQ ID NO: 4077 - DNA, 22 bp, Artificial Sequence
  chemically synthesized
taaagatgcagagtttactaaa

SEQ ID NO: 4078 - DNA, 22 bp, Artificial Sequence
  chemically synthesized
aaagatgcagagtttactaaaa

SEQ ID NO: 4079 - DNA, 22 bp, Artificial Sequence
  chemically synthesized
aagatgcagagtttactaaaac

SEQ ID NO: 4080 - DNA, 22 bp, Artificial Sequence
  chemically synthesized
actaaaactttattttactggg

SEQ ID NO: 4081 - DNA, 22 bp, Artificial Sequence
  chemically synthesized
ctaaaactttattttactggga

SEQ ID NO: 4082 - DNA, 22 bp, Artificial Sequence
  chemically synthesized
aaactttattttactgggaaaa

SEQ ID NO: 4083 - DNA, 22 bp, Artificial Sequence
  chemically synthesized
tattttactgggaaaatagaat

SEQ ID NO: 4084 - DNA, 22 bp, Artificial Sequence
  chemically synthesized
attttactgggaaaatagaata

SEQ ID NO: 4085 - DNA, 22 bp, Artificial Sequence
  chemically synthesized
ttttactgggaaaatagaataa

SEQ ID NO: 4086 - DNA, 22 bp, Artificial Sequence
  chemically synthesized
tactgggaaaatagaataaaag

SEQ ID NO: 4087 - DNA, 22 bp, Artificial Sequence
  chemically synthesized
actgggaaaatagaataaaagt

SEQ ID NO: 4088 - DNA, 22 bp, Artificial Sequence
  chemically synthesized
ctgggaaaatagaataaaagtt

SEQ ID NO: 4089 - DNA, 22 bp, Artificial Sequence
  chemically synthesized
ggaaaatagaataaaagttgaa

SEQ ID NO: 4090 - DNA, 22 bp, Artificial Sequence
  chemically synthesized
aacaatagaaaaatggatttct

SEQ ID NO: 4091 - DNA, 22 bp, Artificial Sequence
  chemically synthesized
cttacgtgcatctcgacgaaac

SEQ ID NO: 4092 - DNA, 22 bp, Artificial Sequence
  chemically synthesized
ttacgtgcatctcgacgaaaca

SEQ ID NO: 4093 - DNA, 22 bp, Artificial Sequence
  chemically synthesized
acgtgcatctcgacgaaacaca

SEQ ID NO: 4094 - DNA, 22 bp, Artificial Sequence
  chemically synthesized
cgtgcatctcgacgaaacacac

SEQ ID NO: 4095 - DNA, 22 bp, Artificial Sequence
  chemically synthesized
gacgaaacacacccctggaata

SEQ ID NO: 4096 - DNA, 22 bp, Artificial Sequence
  chemically synthesized
gaataagccgagctaaagagaa

SEQ ID NO: 4097 - DNA, 22 bp, Artificial Sequence
  chemically synthesized
aagagaaaaagaagggaaataa

SEQ ID NO: 4098 - DNA, 22 bp, Artificial Sequence
  chemically synthesized
cccacttcattgtgccaaaggc

SEQ ID NO: 4099 - DNA, 22 bp, Artificial Sequence
  chemically synthesized
cattgtgccaaaggcgtgtggg

SEQ ID NO: 4100 - DNA, 22 bp, Artificial Sequence
  chemically synthesized
attgtgccaaaggcgtgtgggg

SEQ ID NO: 4101 - DNA, 22 bp, Artificial Sequence
  chemically synthesized
tgccaaaggcgtgtggggttga

SEQ ID NO: 4102 - DNA, 22 bp, Artificial Sequence
  chemically synthesized
acagaagagaaaagctaggaca

SEQ ID NO: 4103 - DNA, 22 bp, Artificial Sequence
  chemically synthesized
ggacaaacggagggaaattagc

SEQ ID NO: 4104 - DNA, 20 bp, Artificial Sequence
  chemically synthesized
aataaatttacccaacaaaa

SEQ ID NO: 4105 - DNA, 20 bp, Artificial Sequence
  chemically synthesized
aatctcttaaaatcataaaa

SEQ ID NO: 4106 - DNA, 20 bp, Artificial Sequence
  chemically synthesized
aaatcataaaaaagtaaaat

SEQ ID NO: 4107 - DNA, 20 bp, Artificial Sequence
  chemically synthesized
gtaaaattagcttttaaaaa

SEQ ID NO: 4108 - DNA, 20 bp, Artificial Sequence
  chemically synthesized
taaaattagcttttaaaaac

SEQ ID NO: 4109 - DNA, 20 bp, Artificial Sequence
  chemically synthesized
aattagcttttaaaaacagg

SEQ ID NO: 4110 - DNA, 20 bp, Artificial Sequence
  chemically synthesized
ttaaaaacaggtagtcacca

SEQ ID NO: 4111 - DNA, 20 bp, Artificial Sequence
  chemically synthesized
tcaccatagcattgaatgtg

SEQ ID NO: 4112 - DNA, 20 bp, Artificial Sequence
  chemically synthesized
tgaatgtgtagtttataata

SEQ ID NO: 4113 - DNA, 20 bp, Artificial Sequence
  chemically synthesized
gtgtagtttataatacagca

SEQ ID NO: 4114 - DNA, 20 bp, Artificial Sequence
  chemically synthesized
acaatttcaaattacctatt

SEQ ID NO: 4115 - DNA, 20 bp, Artificial Sequence
  chemically synthesized
tttcaaattacctattaagt

SEQ ID NO: 4116 - DNA, 20 bp, Artificial Sequence
  chemically synthesized
ctcatttctttgatttcatt

SEQ ID NO: 4117 - DNA, 20 bp, Artificial Sequence
  chemically synthesized
agcattgatctaactcaatg

SEQ ID NO: 4118 - DNA, 20 bp, Artificial Sequence
  chemically synthesized
attgatctaactcaatgtgg

SEQ ID NO: 4119 - DNA, 20 bp, Artificial Sequence
  chemically synthesized
gatctaactcaatgtggaag

SEQ ID NO: 4120 - DNA, 20 bp, Artificial Sequence
  chemically synthesized
atctaactcaatgtggaaga

SEQ ID NO: 4121 - DNA, 20 bp, Artificial Sequence
  chemically synthesized
gaagaaggttacattcgtgc

SEQ ID NO: 4122 - DNA, 20 bp, Artificial Sequence
  chemically synthesized
tacattcgtgcaagttaaca

SEQ ID NO: 4123 - DNA, 20 bp, Artificial Sequence
  chemically synthesized
cctaccaaccttaccttttc

SEQ ID NO: 4124 - DNA, 20 bp, Artificial Sequence
  chemically synthesized
ctaccaaccttaccttttct

SEQ ID NO: 4125 - DNA, 20 bp, Artificial Sequence
  chemically synthesized
taccttttctgggcaaatat

SEQ ID NO: 4126 - DNA, 20 bp, Artificial Sequence
  chemically synthesized
tgggcaaatattggtatata

SEQ ID NO: 4127 - DNA, 20 bp, Artificial Sequence
  chemically synthesized
ggcaaatattggtatatata

SEQ ID NO: 4128 - DNA, 20 bp, Artificial Sequence
  chemically synthesized
atattggtatatatagagtt

SEQ ID NO: 4129 - DNA, 20 bp, Artificial Sequence
  chemically synthesized
ttggtatatatagagttaag

SEQ ID NO: 4130 - DNA, 20 bp, Artificial Sequence
  chemically synthesized
atatatagagttaagaagtc

SEQ ID NO: 4131 - DNA, 20 bp, Artificial Sequence
  chemically synthesized
tatatagagttaagaagtct

SEQ ID NO: 4132 - DNA, 20 bp, Artificial Sequence
  chemically synthesized
aagaagtctaggtctgcttc

SEQ ID NO: 4133 - DNA, 20 bp, Artificial Sequence
  chemically synthesized
aagtctaggtctgcttccag

SEQ ID NO: 4134 - DNA, 20 bp, Artificial Sequence
  chemically synthesized
ggtctgcttccagaagaaaa

SEQ ID NO: 4135 - DNA, 20 bp, Artificial Sequence
  chemically synthesized
gttgcttgaaattgaaaatc

SEQ ID NO: 4136 - DNA, 20 bp, Artificial Sequence
  chemically synthesized
agataaaaatgttcacaatt

SEQ ID NO: 4137 - DNA, 20 bp, Artificial Sequence
  chemically synthesized
ccttctttttattgttcctc

SEQ ID NO: 4138 - DNA, 20 bp, Artificial Sequence
  chemically synthesized
gttcctctagttatttcctc

SEQ ID NO: 4139 - DNA, 20 bp, Artificial Sequence
  chemically synthesized
tatttcctccagaattgatc

SEQ ID NO: 4140 - DNA, 20 bp, Artificial Sequence
  chemically synthesized
atcatttgattctctatctc

SEQ ID NO: 4141 - DNA, 20 bp, Artificial Sequence
  chemically synthesized
catttgattctctatctcca

SEQ ID NO: 4142 - DNA, 20 bp, Artificial Sequence
  chemically synthesized
ctatctccagagccaaaatc

SEQ ID NO: 4143 - DNA, 20 bp, Artificial Sequence
  chemically synthesized
aaaatcaagatttgctatgt

SEQ ID NO: 4144 - DNA, 20 bp, Artificial Sequence
  chemically synthesized
gttagacgatgtaaaaattt

SEQ ID NO: 4145 - DNA, 20 bp, Artificial Sequence
  chemically synthesized
gatgtaaaaattttagccaa

SEQ ID NO: 4146 - DNA, 20 bp, Artificial Sequence
  chemically synthesized
ttttagccaatggcctcctt

SEQ ID NO: 4147 - DNA, 20 bp, Artificial Sequence
  chemically synthesized
agccaatggcctccttcagt

SEQ ID NO: 4148 - DNA, 20 bp, Artificial Sequence
  chemically synthesized
gccaatggcctccttcagtt

SEQ ID NO: 4149 - DNA, 20 bp, Artificial Sequence
  chemically synthesized
ggcctccttcagttgggaca

SEQ ID NO: 4150 - DNA, 20 bp, Artificial Sequence
  chemically synthesized
tcagttgggacatggtctta

SEQ ID NO: 4151 - DNA, 20 bp, Artificial Sequence
  chemically synthesized
gtcttaaagactttgtccat

SEQ ID NO: 4152 - DNA, 20 bp, Artificial Sequence
  chemically synthesized
aagactttgtccataagacg

SEQ ID NO: 4153 - DNA, 20 bp, Artificial Sequence
  chemically synthesized
agactttgtccataagacga

SEQ ID NO: 4154 - DNA, 20 bp, Artificial Sequence
  chemically synthesized
gactttgtccataagacgaa

SEQ ID NO: 4155 - DNA, 20 bp, Artificial Sequence
  chemically synthesized
aaaaactcaacatatttgat

SEQ ID NO: 4156 - DNA, 20 bp, Artificial Sequence
  chemically synthesized
tatgatctatcgctgcaaac

SEQ ID NO: 4157 - DNA, 20 bp, Artificial Sequence
  chemically synthesized
gctgcaaaccagtgaaatca

SEQ ID NO: 4158 - DNA, 20 bp, Artificial Sequence
  chemically synthesized
gcaaaccagtgaaatcaaag

SEQ ID NO: 4159 - DNA, 20 bp, Artificial Sequence
  chemically synthesized
aaccagtgaaatcaaagaag

SEQ ID NO: 4160 - DNA, 20 bp, Artificial Sequence
  chemically synthesized
gtgaaatcaaagaagaagaa

SEQ ID NO: 4161 - DNA, 20 bp, Artificial Sequence
  chemically synthesized
tgaaatcaaagaagaagaaa

SEQ ID NO: 4162 - DNA, 20 bp, Artificial Sequence
  chemically synthesized
aaagaagaagaaaaggaact

SEQ ID NO: 4163 - DNA, 20 bp, Artificial Sequence
  chemically synthesized
gaagaagaaaaggaactgag

SEQ ID NO: 4164 - DNA, 20 bp, Artificial Sequence
  chemically synthesized
aagaactacatataaactac

SEQ ID NO: 4165 - DNA, 20 bp, Artificial Sequence
  chemically synthesized
taaactacaagtcaaaaatg

SEQ ID NO: 4166 - DNA, 20 bp, Artificial Sequence
  chemically synthesized
aactacaagtcaaaaatgaa

SEQ ID NO: 4167 - DNA, 20 bp, Artificial Sequence
  chemically synthesized
actacaagtcaaaaatgaag

SEQ ID NO: 4168 - DNA, 20 bp, Artificial Sequence
  chemically synthesized
aagtcaaaaatgaagaggta

SEQ ID NO: 4169 - DNA, 20 bp, Artificial Sequence
  chemically synthesized
gaactcaactcaaaacttga

SEQ ID NO: 4170 - DNA, 20 bp, Artificial Sequence
  chemically synthesized
ctcaaaacttgaaagcctcc

SEQ ID NO: 4171 - DNA, 20 bp, Artificial Sequence
  chemically synthesized
aaaacttgaaagcctcctag

SEQ ID NO: 4172 - DNA, 20 bp, Artificial Sequence
  chemically synthesized
aaaaattctacttcaacaaa

SEQ ID NO: 4173 - DNA, 20 bp, Artificial Sequence
  chemically synthesized
tcaacaaaaagtgaaatatt

SEQ ID NO: 4174 - DNA, 20 bp, Artificial Sequence
  chemically synthesized
acaaaaagtgaaatatttag

SEQ ID NO: 4175 - DNA, 20 bp, Artificial Sequence
  chemically synthesized
aaaaagtgaaatatttagaa

SEQ ID NO: 4176 - DNA, 20 bp, Artificial Sequence
  chemically synthesized
tcaaaatcaacctgaaactc

SEQ ID NO: 4177 - DNA, 20 bp, Artificial Sequence
  chemically synthesized
acctgaaactccagaacacc

SEQ ID NO: 4178 - DNA, 20 bp, Artificial Sequence
  chemically synthesized
tgaaactccagaacacccag

SEQ ID NO: 4179 - DNA, 20 bp, Artificial Sequence
  chemically synthesized
cccagaagtaacttcactta

SEQ ID NO: 4180 - DNA, 20 bp, Artificial Sequence
  chemically synthesized
gaagtaacttcacttaaagt

SEQ ID NO: 4181 - DNA, 20 bp, Artificial Sequence
  chemically synthesized
gtaacttcacttaaagtaag

SEQ ID NO: 4182 - DNA, 20 bp, Artificial Sequence
  chemically synthesized
cttaaagtaagtagaaaata

SEQ ID NO: 4183 - DNA, 20 bp, Artificial Sequence
  chemically synthesized
taaagtaagtagaaaataaa

SEQ ID NO: 4184 - DNA, 20 bp, Artificial Sequence
  chemically synthesized
aaagtaagtagaaaataaag

SEQ ID NO: 4185 - DNA, 20 bp, Artificial Sequence
  chemically synthesized
aagtaagtagaaaataaaga

SEQ ID NO: 4186 - DNA, 20 bp, Artificial Sequence
  chemically synthesized
tcatgtttatgttttcaatg

SEQ ID NO: 4187 - DNA, 20 bp, Artificial Sequence
  chemically synthesized
cttttaaaaaaaatatttct

SEQ ID NO: 4188 - DNA, 20 bp, Artificial Sequence
  chemically synthesized
ttttaaaaaaaatatttcta

SEQ ID NO: 4189 - DNA, 20 bp, Artificial Sequence
  chemically synthesized
gttgaaatacttttttttcc

SEQ ID NO: 4190 - DNA, 20 bp, Artificial Sequence
  chemically synthesized
tttccaagaaaaataatctc

SEQ ID NO: 4191 - DNA, 20 bp, Artificial Sequence
  chemically synthesized
aaatttcctattataatttc

SEQ ID NO: 4192 - DNA, 20 bp, Artificial Sequence
  chemically synthesized
ttcctattataatttcaagt

SEQ ID NO: 4193 - DNA, 20 bp, Artificial Sequence
  chemically synthesized
tttatatgaaaattacaaat

SEQ ID NO: 4194 - DNA, 20 bp, Artificial Sequence
  chemically synthesized
atcggttaaattatacaatc

SEQ ID NO: 4195 - DNA, 20 bp, Artificial Sequence
  chemically synthesized
tacactattgtaaattactg

SEQ ID NO: 4196 - DNA, 20 bp, Artificial Sequence
  chemically synthesized
acactattgtaaattactga

SEQ ID NO: 4197 - DNA, 20 bp, Artificial Sequence
  chemically synthesized
tattgtaaattactgaaggt

SEQ ID NO: 4198 - DNA, 20 bp, Artificial Sequence
  chemically synthesized
aattactgaaggtaagtaaa

SEQ ID NO: 4199 - DNA, 20 bp, Artificial Sequence
  chemically synthesized
aaaaatttaaaactattctc

SEQ ID NO: 4200 - DNA, 20 bp, Artificial Sequence
  chemically synthesized
ctattctccagtgtttaaaa

SEQ ID NO: 4201 - DNA, 20 bp, Artificial Sequence
  chemically synthesized
ttaaaacagattaaataata

SEQ ID NO: 4202 - DNA, 20 bp, Artificial Sequence
  chemically synthesized
agattaaataatacagtaaa

SEQ ID NO: 4203 - DNA, 20 bp, Artificial Sequence
  chemically synthesized
aaataatacagtaaatggaa

SEQ ID NO: 4204 - DNA, 20 bp, Artificial Sequence
  chemically synthesized
ttattcatatgaaaatatgc

SEQ ID NO: 4205 - DNA, 20 bp, Artificial Sequence
  chemically synthesized
tattcatatgaaaatatgct

SEQ ID NO: 4206 - DNA, 20 bp, Artificial Sequence
  chemically synthesized
tgggctttttcttttaattg

SEQ ID NO: 4207 - DNA, 20 bp, Artificial Sequence
  chemically synthesized
tttttcttttaattgaagtt

SEQ ID NO: 4208 - DNA, 20 bp, Artificial Sequence
  chemically synthesized
aagttcagaaaatcaaattt

SEQ ID NO: 4209 - DNA, 20 bp, Artificial Sequence
  chemically synthesized
gttcagaaaatcaaatttta

SEQ ID NO: 4210 - DNA, 20 bp, Artificial Sequence
  chemically synthesized
agaaaatcaaattttagaga

SEQ ID NO: 4211 - DNA, 20 bp, Artificial Sequence
  chemically synthesized
tacaatttaaataaaatgtt

SEQ ID NO: 4212 - DNA, 20 bp, Artificial Sequence
  chemically synthesized
acaatttaaataaaatgtta

SEQ ID NO: 4213 - DNA, 20 bp, Artificial Sequence
  chemically synthesized
caaaaatatgtgctatttga

SEQ ID NO: 4214 - DNA, 20 bp, Artificial Sequence
  chemically synthesized
aaatatgtgctatttgaaag

SEQ ID NO: 4215 - DNA, 20 bp, Artificial Sequence
  chemically synthesized
gctatttgaaagaagcatac

SEQ ID NO: 4216 - DNA, 20 bp, Artificial Sequence
  chemically synthesized
ctatttgaaagaagcataca

SEQ ID NO: 4217 - DNA, 20 bp, Artificial Sequence
  chemically synthesized
tatttgaaagaagcatacaa

SEQ ID NO: 4218 - DNA, 20 bp, Artificial Sequence
  chemically synthesized
atttgaaagaagcatacaag

SEQ ID NO: 4219 - DNA, 20 bp, Artificial Sequence
  chemically synthesized
tgaaagaagcatacaagggg

SEQ ID NO: 4220 - DNA, 20 bp, Artificial Sequence
  chemically synthesized
gaaagaagcatacaagggga

SEQ ID NO: 4221 - DNA, 20 bp, Artificial Sequence
  chemically synthesized
tcatttttcaaatccattat

SEQ ID NO: 4222 - DNA, 20 bp, Artificial Sequence
  chemically synthesized
ccattattagtttaaaaatt

SEQ ID NO: 4223 - DNA, 20 bp, Artificial Sequence
  chemically synthesized
tttaaaaatttagattatga

SEQ ID NO: 4224 - DNA, 20 bp, Artificial Sequence
  chemically synthesized
tttagattatgatagtgtta

SEQ ID NO: 4225 - DNA, 20 bp, Artificial Sequence
  chemically synthesized
ttagattatgatagtgttac

SEQ ID NO: 4226 - DNA, 20 bp, Artificial Sequence
  chemically synthesized
atagtgttacaggaaattaa

SEQ ID NO: 4227 - DNA, 20 bp, Artificial Sequence
  chemically synthesized
gttacaggaaattaatagaa

SEQ ID NO: 4228 - DNA, 20 bp, Artificial Sequence
  chemically synthesized
caggaaattaatagaaaaga

SEQ ID NO: 4229 - DNA, 20 bp, Artificial Sequence
  chemically synthesized
ggaaattaatagaaaagaaa

SEQ ID NO: 4230 - DNA, 20 bp, Artificial Sequence
  chemically synthesized
gaaattaatagaaaagaaag

SEQ ID NO: 4231 - DNA, 20 bp, Artificial Sequence
  chemically synthesized
ttaatagaaaagaaagagga

SEQ ID NO: 4232 - DNA, 20 bp, Artificial Sequence
  chemically synthesized
accaacctactctctatatc

SEQ ID NO: 4233 - DNA, 20 bp, Artificial Sequence
  chemically synthesized
tctctatatccagacttttg

SEQ ID NO: 4234 - DNA, 20 bp, Artificial Sequence
  chemically synthesized
ccagacttttgtagaaaaac

SEQ ID NO: 4235 - DNA, 20 bp, Artificial Sequence
  chemically synthesized
tttgtagaaaaacaagataa

SEQ ID NO: 4236 - DNA, 20 bp, Artificial Sequence
  chemically synthesized
aaaacaagataatagcatca

SEQ ID NO: 4237 - DNA, 20 bp, Artificial Sequence
  chemically synthesized
atagcatcaaagaccttctc

SEQ ID NO: 4238 - DNA, 20 bp, Artificial Sequence
  chemically synthesized
caaagaccttctccagaccg

SEQ ID NO: 4239 - DNA, 20 bp, Artificial Sequence
  chemically synthesized
agaccttctccagaccgtgg

SEQ ID NO: 4240 - DNA, 20 bp, Artificial Sequence
  chemically synthesized
aatataaacaattaaaccaa

SEQ ID NO: 4241 - DNA, 20 bp, Artificial Sequence
  chemically synthesized
aaacaattaaaccaacagca

SEQ ID NO: 4242 - DNA, 20 bp, Artificial Sequence
  chemically synthesized
ccaacagcatagtcaaataa

SEQ ID NO: 4243 - DNA, 20 bp, Artificial Sequence
  chemically synthesized
gcatagtcaaataaaagaaa

SEQ ID NO: 4244 - DNA, 20 bp, Artificial Sequence
  chemically synthesized
aaataaaagaaatagaaaat

SEQ ID NO: 4245 - DNA, 20 bp, Artificial Sequence
  chemically synthesized
aataaaagaaatagaaaatc

SEQ ID NO: 4246 - DNA, 20 bp, Artificial Sequence
  chemically synthesized
aaagaaatagaaaatcaggt

SEQ ID NO: 4247 - DNA, 20 bp, Artificial Sequence
  chemically synthesized
aaatagaaaatcaggtaagt

SEQ ID NO: 4248 - DNA, 20 bp, Artificial Sequence
  chemically synthesized
caggtaagtcagtattttaa

SEQ ID NO: 4249 - DNA, 20 bp, Artificial Sequence
  chemically synthesized
ggtatgtcccatctttcaca

SEQ ID NO: 4250 - DNA, 20 bp, Artificial Sequence
  chemically synthesized
gtatgtcccatctttcacac

SEQ ID NO: 4251 - DNA, 20 bp, Artificial Sequence
  chemically synthesized
tgaatcctaaaattatttac

SEQ ID NO: 4252 - DNA, 20 bp, Artificial Sequence
  chemically synthesized
aattatttacaagctttaac

SEQ ID NO: 4253 - DNA, 20 bp, Artificial Sequence
  chemically synthesized
acaagctttaactggatcat

SEQ ID NO: 4254 - DNA, 20 bp, Artificial Sequence
  chemically synthesized
catgagtaaaattatcacat

SEQ ID NO: 4255 - DNA, 20 bp, Artificial Sequence
  chemically synthesized
cagcataactgttaaaattg

SEQ ID NO: 4256 - DNA, 20 bp, Artificial Sequence
  chemically synthesized
agcataactgttaaaattgc

SEQ ID NO: 4257 - DNA, 20 bp, Artificial Sequence
  chemically synthesized
tgttaaaattgcaggctctg

SEQ ID NO: 4258 - DNA, 20 bp, Artificial Sequence
  chemically synthesized
aactacctgcatttaaacca

SEQ ID NO: 4259 - DNA, 20 bp, Artificial Sequence
  chemically synthesized
tacttcacccctttatctct

SEQ ID NO: 4260 - DNA, 20 bp, Artificial Sequence
  chemically synthesized
gtttcctcacatatactaca

SEQ ID NO: 4261 - DNA, 20 bp, Artificial Sequence
  chemically synthesized
atatactacaaagataataa

SEQ ID NO: 4262 - DNA, 20 bp, Artificial Sequence
  chemically synthesized
aaagataataacagaactta

SEQ ID NO: 4263 - DNA, 20 bp, Artificial Sequence
  chemically synthesized
aagataataacagaacttat

SEQ ID NO: 4264 - DNA, 20 bp, Artificial Sequence
  chemically synthesized
agaacttataggattattgt

SEQ ID NO: 4265 - DNA, 20 bp, Artificial Sequence
  chemically synthesized
taagaaaaaaaattaattca

SEQ ID NO: 4266 - DNA, 20 bp, Artificial Sequence
  chemically synthesized
gaaaaaaaattaattcatag

SEQ ID NO: 4267 - DNA, 20 bp, Artificial Sequence
  chemically synthesized
catcttactaaaattcaaat

SEQ ID NO: 4268 - DNA, 20 bp, Artificial Sequence
  chemically synthesized
ctttgctcaaaaccacacaa

SEQ ID NO: 4269 - DNA, 20 bp, Artificial Sequence
  chemically synthesized
gctttccatttcactcatat

SEQ ID NO: 4270 - DNA, 20 bp, Artificial Sequence
  chemically synthesized
tttcactcatattggctctt

SEQ ID NO: 4271 - DNA, 20 bp, Artificial Sequence
  chemically synthesized
tcatattggctctttagacc

SEQ ID NO: 4272 - DNA, 20 bp, Artificial Sequence
  chemically synthesized
ttgggtaatcttggtctaaa

SEQ ID NO: 4273 - DNA, 20 bp, Artificial Sequence
  chemically synthesized
ttggtctaaagagccaatat

SEQ ID NO: 4274 - DNA, 20 bp, Artificial Sequence
  chemically synthesized
aagagccaatatgagtgaaa

SEQ ID NO: 4275 - DNA, 20 bp, Artificial Sequence
  chemically synthesized
gccaatatgagtgaaatgga

SEQ ID NO: 4276 - DNA, 20 bp, Artificial Sequence
  chemically synthesized
tgaaatggaaagctattgtg

SEQ ID NO: 4277 - DNA, 20 bp, Artificial Sequence
  chemically synthesized
gaaagctattgtgtggtttt

SEQ ID NO: 4278 - DNA, 20 bp, Artificial Sequence
  chemically synthesized
ctattgtgtggttttgagca

SEQ ID NO: 4279 - DNA, 20 bp, Artificial Sequence
  chemically synthesized
attgtgtggttttgagcaaa

SEQ ID NO: 4280 - DNA, 20 bp, Artificial Sequence
  chemically synthesized
acatgatctaatttgaattt

SEQ ID NO: 4281 - DNA, 20 bp, Artificial Sequence
  chemically synthesized
gatctaatttgaattttagt

SEQ ID NO: 4282 - DNA, 20 bp, Artificial Sequence
  chemically synthesized
gaattttagtaagatgacat

SEQ ID NO: 4283 - DNA, 20 bp, Artificial Sequence
  chemically synthesized
ttttcttacaataatcctat

SEQ ID NO: 4284 - DNA, 20 bp, Artificial Sequence
  chemically synthesized
aagttctgttattatctttg

SEQ ID NO: 4285 - DNA, 20 bp, Artificial Sequence
  chemically synthesized
attatctttgtagtatatgt

SEQ ID NO: 4286 - DNA, 20 bp, Artificial Sequence
  chemically synthesized
ttatctttgtagtatatgtg

SEQ ID NO: 4287 - DNA, 20 bp, Artificial Sequence
  chemically synthesized
gtagtatatgtgaggaaact

SEQ ID NO: 4288 - DNA, 20 bp, Artificial Sequence
  chemically synthesized
agtatatgtgaggaaactga

SEQ ID NO: 4289 - DNA, 20 bp, Artificial Sequence
  chemically synthesized
tgtgaggaaactgagagata

SEQ ID NO: 4290 - DNA, 20 bp, Artificial Sequence
  chemically synthesized
gtgaggaaactgagagataa

SEQ ID NO: 4291 - DNA, 20 bp, Artificial Sequence
  chemically synthesized
tgaggaaactgagagataaa

SEQ ID NO: 4292 - DNA, 20 bp, Artificial Sequence
  chemically synthesized
gaggaaactgagagataaag

SEQ ID NO: 4293 - DNA, 20 bp, Artificial Sequence
  chemically synthesized
aactgagagataaaggggtg

SEQ ID NO: 4294 - DNA, 20 bp, Artificial Sequence
  chemically synthesized
aggggtgaagtaatttattc

SEQ ID NO: 4295 - DNA, 20 bp, Artificial Sequence
  chemically synthesized
ggggtgaagtaatttattca

SEQ ID NO: 4296 - DNA, 20 bp, Artificial Sequence
  chemically synthesized
aatttattcaaggtcacaca

SEQ ID NO: 4297 - DNA, 20 bp, Artificial Sequence
  chemically synthesized
ttcaaggtcacacaaagttt

SEQ ID NO: 4298 - DNA, 20 bp, Artificial Sequence
  chemically synthesized
caaggtcacacaaagtttta

SEQ ID NO: 4299 - DNA, 20 bp, Artificial Sequence
  chemically synthesized
cacacaaagttttagagcca

SEQ ID NO: 4300 - DNA, 20 bp, Artificial Sequence
  chemically synthesized
ttagagccatggtttaaatg

SEQ ID NO: 4301 - DNA, 20 bp, Artificial Sequence
  chemically synthesized
tagagccatggtttaaatgc

SEQ ID NO: 4302 - DNA, 20 bp, Artificial Sequence
  chemically synthesized
agccatggtttaaatgcagg

SEQ ID NO: 4303 - DNA, 20 bp, Artificial Sequence
  chemically synthesized
tttaaatgcaggtagtttat

SEQ ID NO: 4304 - DNA, 20 bp, Artificial Sequence
  chemically synthesized
tgcaggtagtttattagctt

SEQ ID NO: 4305 - DNA, 20 bp, Artificial Sequence
  chemically synthesized
caggtagtttattagcttca

SEQ ID NO: 4306 - DNA, 20 bp, Artificial Sequence
  chemically synthesized
ttcagagcctgcaattttaa

SEQ ID NO: 4307 - DNA, 20 bp, Artificial Sequence
  chemically synthesized
tgataattttactcatgatc

SEQ ID NO: 4308 - DNA, 20 bp, Artificial Sequence
  chemically synthesized
ttttactcatgatccagtta

SEQ ID NO: 4309 - DNA, 20 bp, Artificial Sequence
  chemically synthesized
ttaaagcttgtaaataattt

SEQ ID NO: 4310 - DNA, 20 bp, Artificial Sequence
  chemically synthesized
taaagcttgtaaataatttt

SEQ ID NO: 4311 - DNA, 20 bp, Artificial Sequence
  chemically synthesized
ttgtaaataattttaggatt

SEQ ID NO: 4312 - DNA, 20 bp, Artificial Sequence
  chemically synthesized
tttaggattcagtgttttta

SEQ ID NO: 4313 - DNA, 20 bp, Artificial Sequence
  chemically synthesized
gtttttacagacctgtgtga

SEQ ID NO: 4314 - DNA, 20 bp, Artificial Sequence
  chemically synthesized
ttacagacctgtgtgaaaga

SEQ ID NO: 4315 - DNA, 20 bp, Artificial Sequence
  chemically synthesized
tacagacctgtgtgaaagat

SEQ ID NO: 4316 - DNA, 20 bp, Artificial Sequence
  chemically synthesized
cttttatttgactatgctgt

SEQ ID NO: 4317 - DNA, 20 bp, Artificial Sequence
  chemically synthesized
gttggtttaattgtttatat

SEQ ID NO: 4318 - DNA, 20 bp, Artificial Sequence
  chemically synthesized
ttgtttatattggtcttcca

SEQ ID NO: 4319 - DNA, 20 bp, Artificial Sequence
  chemically synthesized
tatattggtcttccacggtc

SEQ ID NO: 4320 - DNA, 20 bp, Artificial Sequence
  chemically synthesized
tattggtcttccacggtctg

SEQ ID NO: 4321 - DNA, 20 bp, Artificial Sequence
  chemically synthesized
tggtcttccacggtctggag

SEQ ID NO: 4322 - DNA, 20 bp, Artificial Sequence
  chemically synthesized
ggtcttccacggtctggaga

SEQ ID NO: 4323 - DNA, 20 bp, Artificial Sequence
  chemically synthesized
attatcttgtttttctacaa

SEQ ID NO: 4324 - DNA, 20 bp, Artificial Sequence
  chemically synthesized
cttgtttttctacaaaagtc

SEQ ID NO: 4325 - DNA, 20 bp, Artificial Sequence
  chemically synthesized
tttctacaaaagtctggata

SEQ ID NO: 4326 - DNA, 20 bp, Artificial Sequence
  chemically synthesized
tctacaaaagtctggatata

SEQ ID NO: 4327 - DNA, 20 bp, Artificial Sequence
  chemically synthesized
tacaaaagtctggatataga

SEQ ID NO: 4328 - DNA, 20 bp, Artificial Sequence
  chemically synthesized
aaaagtctggatatagagag

SEQ ID NO: 4329 - DNA, 20 bp, Artificial Sequence
  chemically synthesized
aaagtctggatatagagagt

SEQ ID NO: 4330 - DNA, 20 bp, Artificial Sequence
  chemically synthesized
tctggatatagagagtaggt

SEQ ID NO: 4331 - DNA, 20 bp, Artificial Sequence
  chemically synthesized
atagagagtaggttggttat

SEQ ID NO: 4332 - DNA, 20 bp, Artificial Sequence
  chemically synthesized
ctaaatttttaaactaataa

SEQ ID NO: 4333 - DNA, 20 bp, Artificial Sequence
  chemically synthesized
tggatttgaaaaatgaatat

SEQ ID NO: 4334 - DNA, 20 bp, Artificial Sequence
  chemically synthesized
ccttgtatgcttctttcaaa

SEQ ID NO: 4335 - DNA, 20 bp, Artificial Sequence
  chemically synthesized
attttctgaacttcaattaa

SEQ ID NO: 4336 - DNA, 20 bp, Artificial Sequence
  chemically synthesized
tgaacttcaattaaaagaaa

SEQ ID NO: 4337 - DNA, 20 bp, Artificial Sequence
  chemically synthesized
ttcaattaaaagaaaaagcc

SEQ ID NO: 4338 - DNA, 20 bp, Artificial Sequence
  chemically synthesized
atttaatctgttttaaacac

SEQ ID NO: 4339 - DNA, 20 bp, Artificial Sequence
  chemically synthesized
ttaatctgttttaaacactg

SEQ ID NO: 4340 - DNA, 20 bp, Artificial Sequence
  chemically synthesized
ctgttttaaacactggagaa

SEQ ID NO: 4341 - DNA, 20 bp, Artificial Sequence
  chemically synthesized
tttaactttttacttacctt

SEQ ID NO: 4342 - DNA, 20 bp, Artificial Sequence
  chemically synthesized
ttaccttcagtaatttacaa

SEQ ID NO: 4343 - DNA, 20 bp, Artificial Sequence
  chemically synthesized
tttacaatagtgtaatgaca

SEQ ID NO: 4344 - DNA, 20 bp, Artificial Sequence
  chemically synthesized
agtgtaatgacatagtgttc

SEQ ID NO: 4345 - DNA, 20 bp, Artificial Sequence
  chemically synthesized
tcatataaaatgcaaatttt

SEQ ID NO: 4346 - DNA, 20 bp, Artificial Sequence
  chemically synthesized
agtgttttcatatataacat

SEQ ID NO: 4347 - DNA, 20 bp, Artificial Sequence
  chemically synthesized
gtgttttcatatataacatt

SEQ ID NO: 4348 - DNA, 20 bp, Artificial Sequence
  chemically synthesized
tgttttcatatataacatta

SEQ ID NO: 4349 - DNA, 20 bp, Artificial Sequence
  chemically synthesized
aaactaacttgaaattataa

SEQ ID NO: 4350 - DNA, 20 bp, Artificial Sequence
  chemically synthesized
aactaacttgaaattataat

SEQ ID NO: 4351 - DNA, 20 bp, Artificial Sequence
  chemically synthesized
taataggaaattttattttc

SEQ ID NO: 4352 - DNA, 20 bp, Artificial Sequence
  chemically synthesized
ataggaaattttattttctg

SEQ ID NO: 4353 - DNA, 20 bp, Artificial Sequence
  chemically synthesized
tttctggagattatttttct

SEQ ID NO: 4354 - DNA, 20 bp, Artificial Sequence
  chemically synthesized
attatttttcttggaaaaaa

SEQ ID NO: 4355 - DNA, 20 bp, Artificial Sequence
  chemically synthesized
agtatttcaacaatgcaaca

SEQ ID NO: 4356 - DNA, 20 bp, Artificial Sequence
  chemically synthesized
atgcaacaaagtatttcaaa

SEQ ID NO: 4357 - DNA, 20 bp, Artificial Sequence
  chemically synthesized
gtatttcaaatggcatgcct

SEQ ID NO: 4358 - DNA, 20 bp, Artificial Sequence
  chemically synthesized
cttagaaatattttttttaa

SEQ ID NO: 4359 - DNA, 20 bp, Artificial Sequence
  chemically synthesized
ctttattttctacttacttt

SEQ ID NO: 4360 - DNA, 20 bp, Artificial Sequence
  chemically synthesized
ttttctacttactttaagtg

SEQ ID NO: 4361 - DNA, 20 bp, Artificial Sequence
  chemically synthesized
actttaagtgaagttacttc

SEQ ID NO: 4362 - DNA, 20 bp, Artificial Sequence
  chemically synthesized
ctttaagtgaagttacttct

SEQ ID NO: 4363 - DNA, 20 bp, Artificial Sequence
  chemically synthesized
gaagttacttctgggtgttc

SEQ ID NO: 4364 - DNA, 20 bp, Artificial Sequence
  chemically synthesized
agttacttctgggtgttctg

SEQ ID NO: 4365 - DNA, 20 bp, Artificial Sequence
  chemically synthesized
ttctgggtgttctggagttt

SEQ ID NO: 4366 - DNA, 20 bp, Artificial Sequence
  chemically synthesized
tctgggtgttctggagtttc

SEQ ID NO: 4367 - DNA, 20 bp, Artificial Sequence
  chemically synthesized
tttcaggttgattttgaatt

SEQ ID NO: 4368 - DNA, 20 bp, Artificial Sequence
  chemically synthesized
aggttgattttgaattaagt

SEQ ID NO: 4369 - DNA, 20 bp, Artificial Sequence
  chemically synthesized
tgattttgaattaagttagt

SEQ ID NO: 4370 - DNA, 20 bp, Artificial Sequence
  chemically synthesized
aaatatttcactttttgttg

SEQ ID NO: 4371 - DNA, 20 bp, Artificial Sequence
  chemically synthesized
tatttcactttttgttgaag

SEQ ID NO: 4372 - DNA, 20 bp, Artificial Sequence
  chemically synthesized
tgaagtagaattttttcttc

SEQ ID NO: 4373 - DNA, 20 bp, Artificial Sequence
  chemically synthesized
gaagtagaattttttcttct

SEQ ID NO: 4374 - DNA, 20 bp, Artificial Sequence
  chemically synthesized
agtagaattttttcttctag

SEQ ID NO: 4375 - DNA, 20 bp, Artificial Sequence
  chemically synthesized
gtagaattttttcttctagg

SEQ ID NO: 4376 - DNA, 20 bp, Artificial Sequence
  chemically synthesized
ttttcttctaggaggctttc

SEQ ID NO: 4377 - DNA, 20 bp, Artificial Sequence
  chemically synthesized
ctaggaggctttcaagtttt

SEQ ID NO: 4378 - DNA, 20 bp, Artificial Sequence
  chemically synthesized
aggctttcaagttttgagtt

SEQ ID NO: 4379 - DNA, 20 bp, Artificial Sequence
  chemically synthesized
tcaagttttgagttgagttc

SEQ ID NO: 4380 - DNA, 20 bp, Artificial Sequence
  chemically synthesized
acctcttcatttttgacttg

SEQ ID NO: 4381 - DNA, 20 bp, Artificial Sequence
  chemically synthesized
tttgacttgtagtttatatg

SEQ ID NO: 4382 - DNA, 20 bp, Artificial Sequence
  chemically synthesized
agtttatatgtagttcttct

SEQ ID NO: 4383 - DNA, 20 bp, Artificial Sequence
  chemically synthesized
ttcttcttctttgatttcac

SEQ ID NO: 4384 - DNA, 20 bp, Artificial Sequence
  chemically synthesized
tctttgatttcactggtttg

SEQ ID NO: 4385 - DNA, 20 bp, Artificial Sequence
  chemically synthesized
atttcactggtttgcagcga

SEQ ID NO: 4386 - DNA, 20 bp, Artificial Sequence
  chemically synthesized
ttgcagcgatagatcataaa

SEQ ID NO: 4387 - DNA, 20 bp, Artificial Sequence
  chemically synthesized
aaagactgatcaaatatgtt

SEQ ID NO: 4388 - DNA, 20 bp, Artificial Sequence
  chemically synthesized
tttgaaatatgtcattaatt

SEQ ID NO: 4389 - DNA, 20 bp, Artificial Sequence
  chemically synthesized
taatttggcccttcgtctta

SEQ ID NO: 4390 - DNA, 20 bp, Artificial Sequence
  chemically synthesized
ggcccttcgtcttatggaca

SEQ ID NO: 4391 - DNA, 20 bp, Artificial Sequence
  chemically synthesized
gtcttatggacaaagtcttt

SEQ ID NO: 4392 - DNA, 20 bp, Artificial Sequence
  chemically synthesized
ttaagaccatgtcccaactg

SEQ ID NO: 4393 - DNA, 20 bp, Artificial Sequence
  chemically synthesized
taagaccatgtcccaactga

SEQ ID NO: 4394 - DNA, 20 bp, Artificial Sequence
  chemically synthesized
agaccatgtcccaactgaag

SEQ ID NO: 4395 - DNA, 20 bp, Artificial Sequence
  chemically synthesized
gaccatgtcccaactgaagg

SEQ ID NO: 4396 - DNA, 20 bp, Artificial Sequence
  chemically synthesized
tcccaactgaaggaggccat

SEQ ID NO: 4397 - DNA, 20 bp, Artificial Sequence
  chemically synthesized
aatttttacatcgtctaaca

SEQ ID NO: 4398 - DNA, 20 bp, Artificial Sequence
  chemically synthesized
aacatagcaaatcttgattt

SEQ ID NO: 4399 - DNA, 20 bp, Artificial Sequence
  chemically synthesized
gcaaatcttgattttggctc

SEQ ID NO: 4400 - DNA, 20 bp, Artificial Sequence
  chemically synthesized
aaatcttgattttggctctg

SEQ ID NO: 4401 - DNA, 20 bp, Artificial Sequence
  chemically synthesized
cttgattttggctctggaga

SEQ ID NO: 4402 - DNA, 20 bp, Artificial Sequence
  chemically synthesized
tgattttggctctggagata

SEQ ID NO: 4403 - DNA, 20 bp, Artificial Sequence
  chemically synthesized
tgaattgtcttgatcaattc

SEQ ID NO: 4404 - DNA, 20 bp, Artificial Sequence
  chemically synthesized
aattgtcttgatcaattctg

SEQ ID NO: 4405 - DNA, 20 bp, Artificial Sequence
  chemically synthesized
attgtcttgatcaattctgg

SEQ ID NO: 4406 - DNA, 20 bp, Artificial Sequence
  chemically synthesized
tcaattctggaggaaataac

SEQ ID NO: 4407 - DNA, 20 bp, Artificial Sequence
  chemically synthesized
aattctggaggaaataacta

SEQ ID NO: 4408 - DNA, 20 bp, Artificial Sequence
  chemically synthesized
attctggaggaaataactag

SEQ ID NO: 4409 - DNA, 20 bp, Artificial Sequence
  chemically synthesized
ataactagaggaacaataaa

SEQ ID NO: 4410 - DNA, 20 bp, Artificial Sequence
  chemically synthesized
actagaggaacaataaaaag

SEQ ID NO: 4411 - DNA, 20 bp, Artificial Sequence
  chemically synthesized
ctagaggaacaataaaaaga

SEQ ID NO: 4412 - DNA, 20 bp, Artificial Sequence
  chemically synthesized
agaggaacaataaaaagaag

SEQ ID NO: 4413 - DNA, 20 bp, Artificial Sequence
  chemically synthesized
ttatcttgattttcaatttc

SEQ ID NO: 4414 - DNA, 20 bp, Artificial Sequence
  chemically synthesized
attttcaatttcaagcaacg

SEQ ID NO: 4415 - DNA, 20 bp, Artificial Sequence
  chemically synthesized
aacgtggaactgttttcttc

SEQ ID NO: 4416 - DNA, 20 bp, Artificial Sequence
  chemically synthesized
gtggaactgttttcttctgg

SEQ ID NO: 4417 - DNA, 20 bp, Artificial Sequence
  chemically synthesized
gaactgttttcttctggaag

SEQ ID NO: 4418 - DNA, 20 bp, Artificial Sequence
  chemically synthesized
ttttcttctggaagcagacc

SEQ ID NO: 4419 - DNA, 20 bp, Artificial Sequence
  chemically synthesized
tatatataccaatatttgcc

SEQ ID NO: 4420 - DNA, 20 bp, Artificial Sequence
  chemically synthesized
ataccaatatttgcccagaa

SEQ ID NO: 4421 - DNA, 20 bp, Artificial Sequence
  chemically synthesized
taccaatatttgcccagaaa

SEQ ID NO: 4422 - DNA, 20 bp, Artificial Sequence
  chemically synthesized
aatatttgcccagaaaaggt

SEQ ID NO: 4423 - DNA, 20 bp, Artificial Sequence
  chemically synthesized
atatttgcccagaaaaggta

SEQ ID NO: 4424 - DNA, 20 bp, Artificial Sequence
  chemically synthesized
ttgcccagaaaaggtaaggt

SEQ ID NO: 4425 - DNA, 20 bp, Artificial Sequence
  chemically synthesized
cccagaaaaggtaaggttgg

SEQ ID NO: 4426 - DNA, 20 bp, Artificial Sequence
  chemically synthesized
ccagaaaaggtaaggttggt

SEQ ID NO: 4427 - DNA, 20 bp, Artificial Sequence
  chemically synthesized
gtaaggttggtaggtgaaca

SEQ ID NO: 4428 - DNA, 20 bp, Artificial Sequence
  chemically synthesized
ggtgaacatagttaatcatt

SEQ ID NO: 4429 - DNA, 20 bp, Artificial Sequence
  chemically synthesized
atgtaaccttcttccacatt

SEQ ID NO: 4430 - DNA, 20 bp, Artificial Sequence
  chemically synthesized
aaccttcttccacattgagt

SEQ ID NO: 4431 - DNA, 20 bp, Artificial Sequence
  chemically synthesized
atcaatgctaaatgaaatca

SEQ ID NO: 4432 - DNA, 20 bp, Artificial Sequence
  chemically synthesized
ctaaatgaaatcaaagaaat

SEQ ID NO: 4433 - DNA, 20 bp, Artificial Sequence
  chemically synthesized
gaaatgagcaactaacttaa

SEQ ID NO: 4434 - DNA, 20 bp, Artificial Sequence
  chemically synthesized
aaatgagcaactaacttaat

SEQ ID NO: 4435 - DNA, 20 bp, Artificial Sequence
  chemically synthesized
aaactacacattcaatgcta

SEQ ID NO: 4436 - DNA, 20 bp, Artificial Sequence
  chemically synthesized
tggtgactacctgtttttaa

SEQ ID NO: 4437 - DNA, 20 bp, Artificial Sequence
  chemically synthesized
ttttacttttttatgatttt

SEQ ID NO: 4438 - DNA, 20 bp, Artificial Sequence
  chemically synthesized
ttacttttttatgattttaa

SEQ ID NO: 4439 - DNA, 20 bp, Artificial Sequence
  chemically synthesized
tatgattttaagagatttac

SEQ ID NO: 4440 - DNA, 20 bp, Artificial Sequence
  chemically synthesized
tcaaaaataaacttttttgt

SEQ ID NO: 4441 - DNA, 20 bp, Artificial Sequence
  chemically synthesized
caaaaataaacttttttgtt

SEQ ID NO: 4442 - DNA, 20 bp, Artificial Sequence
  chemically synthesized
gttgggtaaatttattatta

SEQ ID NO: 4443 - DNA, 20 bp, Artificial Sequence
  chemically synthesized
gtaaatttattattaaagtt

SEQ ID NO: 4444 - DNA, 20 bp, Artificial Sequence
  chemically synthesized
taaatttattattaaagttg

SEQ ID NO: 4445 - DNA, 20 bp, Artificial Sequence
  chemically synthesized
aaatttattattaaagttga

SEQ ID NO: 4446 - DNA, 20 bp, Artificial Sequence
  chemically synthesized
aatttattattaaagttgag

SEQ ID NO: 4447 - DNA, 20 bp, Artificial Sequence
  chemically synthesized
tattaaagttgaggggaaaa

SEQ ID NO: 4448 - DNA, 20 bp, Artificial Sequence
  chemically synthesized
ggggaaaaaagtaatgaatt

SEQ ID NO: 4449 - DNA, 20 bp, Artificial Sequence
  chemically synthesized
aacaggtagtcaccatagca

SEQ ID NO: 4450 - DNA, 20 bp, Artificial Sequence
  chemically synthesized
tgggcaaatattggtatata

SEQ ID NO: 4451 - DNA, 20 bp, Artificial Sequence
  chemically synthesized
gttcctctagttatttcctc

SEQ ID NO: 4452 - DNA, 20 bp, Artificial Sequence
  chemically synthesized
aagtcaaaaatgaagaggta

SEQ ID NO: 4453 - DNA, 20 bp, Artificial Sequence
  chemically synthesized
taaagtaagtagaaaataaa

SEQ ID NO: 4454 - DNA, 20 bp, Artificial Sequence
  chemically synthesized
ttcatgtttatgttttcaat

SEQ ID NO: 4455 - DNA, 20 bp, Artificial Sequence
  chemically synthesized
gaaagaagcatacaagggga

SEQ ID NO: 4456 - DNA, 20 bp, Artificial Sequence
  chemically synthesized
cacacaggtctgtaaaaaca

SEQ ID NO: 4457 - DNA, 20 bp, Artificial Sequence
  chemically synthesized
aaattatttacaagctttaa

SEQ ID NO: 4458 - DNA, 20 bp, Artificial Sequence
  chemically synthesized
ttacaagctttaactggatc

SEQ ID NO: 4459 - DNA, 20 bp, Artificial Sequence
  chemically synthesized
ctctaaaactttgtgtgacc

SEQ ID NO: 4460 - DNA, 20 bp, Artificial Sequence
  chemically synthesized
aaagataataacagaactta

SEQ ID NO: 4461 - DNA, 20 bp, Artificial Sequence
  chemically synthesized
tcttggtctaaagagccaat

SEQ ID NO: 4462 - DNA, 20 bp, Artificial Sequence
  chemically synthesized
aaagagaaacatgatctaat

SEQ ID NO: 4463 - DNA, 20 bp, Artificial Sequence
  chemically synthesized
gtaagatgacattggctgct

SEQ ID NO: 4464 - DNA, 20 bp, Artificial Sequence
  chemically synthesized
gtgaggaaactgagagataa

SEQ ID NO: 4465 - DNA, 20 bp, Artificial Sequence
  chemically synthesized
ttaaagcttgtaaataattt

SEQ ID NO: 4466 - DNA, 20 bp, Artificial Sequence
  chemically synthesized
tcttgtttttctacaaaagt

SEQ ID NO: 4467 - DNA, 20 bp, Artificial Sequence
  chemically synthesized
tctacaaaagtctggatata

SEQ ID NO: 4468 - DNA, 20 bp, Artificial Sequence
  chemically synthesized
tctaaatttttaaactaata

SEQ ID NO: 4469 - DNA, 20 bp, Artificial Sequence
  chemically synthesized
actaataatggatttgaaaa

SEQ ID NO: 4470 - DNA, 20 bp, Artificial Sequence
  chemically synthesized
aaagcccagcatattttcat

SEQ ID NO: 4471 - DNA, 20 bp, Artificial Sequence
  chemically synthesized
ttaatctgttttaaacactg

SEQ ID NO: 4472 - DNA, 20 bp, Artificial Sequence
  chemically synthesized
tactttaagtgaagttactt

SEQ ID NO: 4473 - DNA, 20 bp, Artificial Sequence
  chemically synthesized
gaagttacttctgggtgttc

SEQ ID NO: 4474 - DNA, 20 bp, Artificial Sequence
  chemically synthesized
tctggagtttcaggttgatt

SEQ ID NO: 4475 - DNA, 20 bp, Artificial Sequence
  chemically synthesized
tatttcactttttgttgaag

SEQ ID NO: 4476 - DNA, 20 bp, Artificial Sequence
  chemically synthesized
ttctaggaggctttcaagtt

SEQ ID NO: 4477 - DNA, 20 bp, Artificial Sequence
  chemically synthesized
ggaggctttcaagttttgag

SEQ ID NO: 4478 - DNA, 20 bp, Artificial Sequence
  chemically synthesized
aaaaagactgatcaaatatg

SEQ ID NO: 4479 - DNA, 20 bp, Artificial Sequence
  chemically synthesized
tgattttggctctggagata

SEQ ID NO: 4480 - DNA, 20 bp, Artificial Sequence
  chemically synthesized
tggagatagagaatcaaatg

SEQ ID NO: 4481 - DNA, 20 bp, Artificial Sequence
  chemically synthesized
attaagccgtgttaacttgc

SEQ ID NO: 4482 - DNA, 20 bp, Artificial Sequence
  chemically synthesized
gaatgtaaccttcttccaca

SEQ ID NO: 4483 - DNA, 20 bp, Artificial Sequence
  chemically synthesized
gtcaaaaataaacttttttg

SEQ ID NO: 4484 - DNA, 20 bp, Artificial Sequence
  chemically synthesized
aagttgaggggaaaaaagta

SEQ ID NO: 4485 - DNA, 20 bp, Artificial Sequence
  chemically synthesized
gaagtctaggtctgcttcca

SEQ ID NO: 4486 - DNA, 20 bp, Artificial Sequence
  chemically synthesized
tgttcctctagttatttcct

SEQ ID NO: 4487 - DNA, 20 bp, Artificial Sequence
  chemically synthesized
aaaccagtgaaatcaaagaa

SEQ ID NO: 4488 - DNA, 20 bp, Artificial Sequence
  chemically synthesized
caagtcaaaaatgaagaggt

SEQ ID NO: 4489 - DNA, 20 bp, Artificial Sequence
  chemically synthesized
caaaacttgaaagcctccta

SEQ ID NO: 4490 - DNA, 20 bp, Artificial Sequence
  chemically synthesized
agtaacttcacttaaagtaa

SEQ ID NO: 4491 - DNA, 20 bp, Artificial Sequence
  chemically synthesized
tgttgaaatacttttttttc

SEQ ID NO: 4492 - DNA, 20 bp, Artificial Sequence
  chemically synthesized
ttttccaagaaaaataatct

SEQ ID NO: 4493 - DNA, 20 bp, Artificial Sequence
  chemically synthesized
ctttttcttttaattgaagt

SEQ ID NO: 4494 - DNA, 20 bp, Artificial Sequence
  chemically synthesized
gatagtgttacaggaaatta

SEQ ID NO: 4495 - DNA, 20 bp, Artificial Sequence
  chemically synthesized
tgttacaggaaattaataga

SEQ ID NO: 4496 - DNA, 20 bp, Artificial Sequence
  chemically synthesized
ctctctatatccagactttt

SEQ ID NO: 4497 - DNA, 20 bp, Artificial Sequence
  chemically synthesized
accaacagcatagtcaaata

SEQ ID NO: 4498 - DNA, 20 bp, Artificial Sequence
  chemically synthesized
agcatagtcaaataaaagaa

SEQ ID NO: 4499 - DNA, 20 bp, Artificial Sequence
  chemically synthesized
cagaacttataggattattg

SEQ ID NO: 4500 - DNA, 20 bp, Artificial Sequence
  chemically synthesized
tattgtgtggttttgagcaa

SEQ ID NO: 4501 - DNA, 20 bp, Artificial Sequence
  chemically synthesized
gattttctgaacttcaatta

SEQ ID NO: 4502 - DNA, 20 bp, Artificial Sequence
  chemically synthesized
tttaatctgttttaaacact

SEQ ID NO: 4503 - DNA, 20 bp, Artificial Sequence
  chemically synthesized
agtatttcaaatggcatgcc

SEQ ID NO: 4504 - DNA, 20 bp, Artificial Sequence
  chemically synthesized
atatttcactttttgttgaa

SEQ ID NO: 4505 - DNA, 20 bp, Artificial Sequence
  chemically synthesized
ttgattttggctctggagat

SEQ ID NO: 4506 - DNA, 20 bp, Artificial Sequence
  chemically synthesized
ctatatataccaatatttgc

SEQ ID NO: 4507 - DNA, 20 bp, Artificial Sequence
  chemically synthesized
gatcaatgctaaatgaaatc

SEQ ID NO: 4508 - DNA, 20 bp, Artificial Sequence
  chemically synthesized
aaaaagtaaaattagctttt

SEQ ID NO: 4509 - DNA, 20 bp, Artificial Sequence
  chemically synthesized
gtctaggtctgcttccagaa

SEQ ID NO: 4510 - DNA, 20 bp, Artificial Sequence
  chemically synthesized
ccaaattaatgacatatttc

SEQ ID NO: 4511 - DNA, 20 bp, Artificial Sequence
  chemically synthesized
tatgtcacttgaactcaact

SEQ ID NO: 4512 - DNA, 20 bp, Artificial Sequence
  chemically synthesized
gtttccctaatgttatatat

SEQ ID NO: 4513 - DNA, 20 bp, Artificial Sequence
  chemically synthesized
gtaaaaagttaaaaaaaatt

SEQ ID NO: 4514 - DNA, 20 bp, Artificial Sequence
  chemically synthesized
taaaactattctccagtgtt

SEQ ID NO: 4515 - DNA, 20 bp, Artificial Sequence
  chemically synthesized
ctatatccagacttttgtag

SEQ ID NO: 4516 - DNA, 20 bp, Artificial Sequence
  chemically synthesized
catctttcacacaggtctgt

SEQ ID NO: 4517 - DNA, 20 bp, Artificial Sequence
  chemically synthesized
ctgcatttaaaccatggctc

SEQ ID NO: 4518 - DNA, 20 bp, Artificial Sequence
  chemically synthesized
agatcatgtttctctttgct

SEQ ID NO: 4519 - DNA, 20 bp, Artificial Sequence
  chemically synthesized
tatataacattagggaaaca

SEQ ID NO: 4520 - DNA, 20 bp, Artificial Sequence
  chemically synthesized
ttttttaaaagatccacatt

SEQ ID NO: 4521 - DNA, 20 bp, Artificial Sequence
  chemically synthesized
ataataaatttacccaacaa

SEQ ID NO: 4522 - DNA, 20 bp, Artificial Sequence
  chemically synthesized
taaaatcataaaaaagtaaa

SEQ ID NO: 4523 - DNA, 20 bp, Artificial Sequence
  chemically synthesized
agtcaccatagcattgaatg

SEQ ID NO: 4524 - DNA, 20 bp, Artificial Sequence
  chemically synthesized
attaagttagttgctcattt

SEQ ID NO: 4525 - DNA, 20 bp, Artificial Sequence
  chemically synthesized
gttacattcgtgcaagttaa

SEQ ID NO: 4526 - DNA, 20 bp, Artificial Sequence
  chemically synthesized
tcgtgcaagttaacacggct

SEQ ID NO: 4527 - DNA, 20 bp, Artificial Sequence
  chemically synthesized
tatagagttaagaagtctag

SEQ ID NO: 4528 - DNA, 20 bp, Artificial Sequence
  chemically synthesized
tccagaagaaaacagttcca

SEQ ID NO: 4529 - DNA, 20 bp, Artificial Sequence
  chemically synthesized
attgatcaagacaattcatc

SEQ ID NO: 4530 - DNA, 20 bp, Artificial Sequence
  chemically synthesized
ctctatctccagagccaaaa

SEQ ID NO: 4531 - DNA, 20 bp, Artificial Sequence
  chemically synthesized
aagtagaaaataaagagggt

SEQ ID NO: 4532 - DNA, 20 bp, Artificial Sequence
  chemically synthesized
aaaataaagagggttcatgt

SEQ ID NO: 4533 - DNA, 20 bp, Artificial Sequence
  chemically synthesized
atttcctattataatttcaa

SEQ ID NO: 4534 - DNA, 20 bp, Artificial Sequence
  chemically synthesized
attataatttcaagttagtt

SEQ ID NO: 4535 - DNA, 20 bp, Artificial Sequence
  chemically synthesized
aaaaatttaaaactattctc

SEQ ID NO: 4536 - DNA, 20 bp, Artificial Sequence
  chemically synthesized
aactattctccagtgtttaa

SEQ ID NO: 4537 - DNA, 20 bp, Artificial Sequence
  chemically synthesized
ttaaataatacagtaaatgg

SEQ ID NO: 4538 - DNA, 20 bp, Artificial Sequence
  chemically synthesized
tttattcatatgaaaatatg

SEQ ID NO: 4539 - DNA, 20 bp, Artificial Sequence
  chemically synthesized
attcatttttcaaatccatt

SEQ ID NO: 4540 - DNA, 20 bp, Artificial Sequence
  chemically synthesized
atccattattagtttaaaaa

SEQ ID NO: 4541 - DNA, 20 bp, Artificial Sequence
  chemically synthesized
actgaatcctaaaattattt

SEQ ID NO: 4542 - DNA, 20 bp, Artificial Sequence
  chemically synthesized
attacttcacccctttatct

SEQ ID NO: 4543 - DNA, 20 bp, Artificial Sequence
  chemically synthesized
caaagataataacagaactt

SEQ ID NO: 4544 - DNA, 20 bp, Artificial Sequence
  chemically synthesized
ttactaaaattcaaattaga

SEQ ID NO: 4545 - DNA, 20 bp, Artificial Sequence
  chemically synthesized
ctctttgctcaaaaccacac

SEQ ID NO: 4546 - DNA, 20 bp, Artificial Sequence
  chemically synthesized
actcatattggctctttaga

SEQ ID NO: 4547 - DNA, 20 bp, Artificial Sequence
  chemically synthesized
agtgaaatggaaagctattg

SEQ ID NO: 4548 - DNA, 20 bp, Artificial Sequence
  chemically synthesized
gtaatttattcaaggtcaca

SEQ ID NO: 4549 - DNA, 20 bp, Artificial Sequence
  chemically synthesized
gtcacacaaagttttagagc

SEQ ID NO: 4550 - DNA, 20 bp, Artificial Sequence
  chemically synthesized
agagccatggtttaaatgca

SEQ ID NO: 4551 - DNA, 20 bp, Artificial Sequence
  chemically synthesized
ggtttaaatgcaggtagttt

SEQ ID NO: 4552 - DNA, 20 bp, Artificial Sequence
  chemically synthesized
aattttactcatgatccagt

SEQ ID NO: 4553 - DNA, 20 bp, Artificial Sequence
  chemically synthesized
gttaaagcttgtaaataatt

SEQ ID NO: 4554 - DNA, 20 bp, Artificial Sequence
  chemically synthesized
ttgtaaataattttaggatt

SEQ ID NO: 4555 - DNA, 20 bp, Artificial Sequence
  chemically synthesized
taccattaaaatactgactt

SEQ ID NO: 4556 - DNA, 20 bp, Artificial Sequence
  chemically synthesized
ttcttttatttgactatgct

SEQ ID NO: 4557 - DNA, 20 bp, Artificial Sequence
  chemically synthesized
tttgactatgctgttggttt

SEQ ID NO: 4558 - DNA, 20 bp, Artificial Sequence
  chemically synthesized
gaaggtctttgatgctatta

SEQ ID NO: 4559 - DNA, 20 bp, Artificial Sequence
  chemically synthesized
tagagagtaggttggttata

SEQ ID NO: 4560 - DNA, 20 bp, Artificial Sequence
  chemically synthesized
atctaaatttttaaactaat

SEQ ID NO: 4561 - DNA, 20 bp, Artificial Sequence
  chemically synthesized
attggcaattccttcccctt

SEQ ID NO: 4562 - DNA, 20 bp, Artificial Sequence
  chemically synthesized
taaattgtactatctctaaa

SEQ ID NO: 4563 - DNA, 20 bp, Artificial Sequence
  chemically synthesized
tccatttactgtattattta

SEQ ID NO: 4564 - DNA, 20 bp, Artificial Sequence
  chemically synthesized
atctgttttaaacactggag

SEQ ID NO: 4565 - DNA, 20 bp, Artificial Sequence
  chemically synthesized
atagtgtaatgacatagtgt

SEQ ID NO: 4566 - DNA, 20 bp, Artificial Sequence
  chemically synthesized
tgttctagattgtataattt

SEQ ID NO: 4567 - DNA, 20 bp, Artificial Sequence
  chemically synthesized
tcatataaaatgcaaatttt

SEQ ID NO: 4568 - DNA, 20 bp, Artificial Sequence
  chemically synthesized
taataggaaattttattttc

SEQ ID NO: 4569 - DNA, 20 bp, Artificial Sequence
  chemically synthesized
gaagttacttctgggtgttc

SEQ ID NO: 4570 - DNA, 20 bp, Artificial Sequence
  chemically synthesized
ctgggtgttctggagtttca

SEQ ID NO: 4571 - DNA, 20 bp, Artificial Sequence
  chemically synthesized
aagtagaattttttcttcta

SEQ ID NO: 4572 - DNA, 20 bp, Artificial Sequence
  chemically synthesized
ttttttcttctaggaggctt

SEQ ID NO: 4573 - DNA, 20 bp, Artificial Sequence
  chemically synthesized
ttacctcttcatttttgact

SEQ ID NO: 4574 - DNA, 20 bp, Artificial Sequence
  chemically synthesized
tctcagttccttttcttctt

SEQ ID NO: 4575 - DNA, 20 bp, Artificial Sequence
  chemically synthesized
ttttcttcttctttgatttc

SEQ ID NO: 4576 - DNA, 20 bp, Artificial Sequence
  chemically synthesized
aaaaagactgatcaaatatg

SEQ ID NO: 4577 - DNA, 20 bp, Artificial Sequence
  chemically synthesized
acatcgtctaacatagcaaa

SEQ ID NO: 4578 - DNA, 20 bp, Artificial Sequence
  chemically synthesized
ctagaggaacaataaaaaga

SEQ ID NO: 4579 - DNA, 20 bp, Artificial Sequence
  chemically synthesized
cttaattgtgaacattttta

SEQ ID NO: 4580 - DNA, 20 bp, Artificial Sequence
  chemically synthesized
ttcaatttcaagcaacgtgg

SEQ ID NO: 4581 - DNA, 20 bp, Artificial Sequence
  chemically synthesized
cattcaatgctatggtgact

SEQ ID NO: 4582 - DNA, 20 bp, Artificial Sequence
  chemically synthesized
taaaagctaattttactttt

SEQ ID NO: 4583 - DNA, 20 bp, Artificial Sequence
  chemically synthesized
ttttacttttttatgatttt

SEQ ID NO: 4584 - DNA, 22 bp, Artificial Sequence
  chemically synthesized
aattcattacttttttcccctc

SEQ ID NO: 4585 - DNA, 22 bp, Artificial Sequence
  chemically synthesized
attcattacttttttcccctca

SEQ ID NO: 4586 - DNA, 22 bp, Artificial Sequence
  chemically synthesized
attacttttttcccctcaactt

SEQ ID NO: 4587 - DNA, 22 bp, Artificial Sequence
  chemically synthesized
cttttttcccctcaactttaat

SEQ ID NO: 4588 - DNA, 22 bp, Artificial Sequence
  chemically synthesized
ttttcccctcaactttaataat

SEQ ID NO: 4589 - DNA, 22 bp, Artificial Sequence
  chemically synthesized
tttcccctcaactttaataata

SEQ ID NO: 4590 - DNA, 22 bp, Artificial Sequence
  chemically synthesized
ttcccctcaactttaataataa

SEQ ID NO: 4591 - DNA, 22 bp, Artificial Sequence
  chemically synthesized
tcccctcaactttaataataaa

SEQ ID NO: 4592 - DNA, 22 bp, Artificial Sequence
  chemically synthesized
cccctcaactttaataataaat

SEQ ID NO: 4593 - DNA, 22 bp, Artificial Sequence
  chemically synthesized
ccctcaactttaataataaatt

SEQ ID NO: 4594 - DNA, 22 bp, Artificial Sequence
  chemically synthesized
aactttaataataaatttaccc

SEQ ID NO: 4595 - DNA, 22 bp, Artificial Sequence
  chemically synthesized
taataataaatttacccaacaa

SEQ ID NO: 4596 - DNA, 22 bp, Artificial Sequence
  chemically synthesized
aataataaatttacccaacaaa

SEQ ID NO: 4597 - DNA, 22 bp, Artificial Sequence
  chemically synthesized
ataataaatttacccaacaaaa

SEQ ID NO: 4598 - DNA, 22 bp, Artificial Sequence
  chemically synthesized
acccaacaaaaaagtttatttt

SEQ ID NO: 4599 - DNA, 22 bp, Artificial Sequence
  chemically synthesized
cccaacaaaaaagtttattttt

SEQ ID NO: 4600 - DNA, 22 bp, Artificial Sequence
  chemically synthesized
atttttgacttgtaaatctctt

SEQ ID NO: 4601 - DNA, 22 bp, Artificial Sequence
  chemically synthesized
tttttgacttgtaaatctctta

SEQ ID NO: 4602 - DNA, 22 bp, Artificial Sequence
  chemically synthesized
ttgacttgtaaatctcttaaaa

SEQ ID NO: 4603 - DNA, 22 bp, Artificial Sequence
  chemically synthesized
tgacttgtaaatctcttaaaat

SEQ ID NO: 4604 - DNA, 22 bp, Artificial Sequence
  chemically synthesized
gacttgtaaatctcttaaaatc

SEQ ID NO: 4605 - DNA, 22 bp, Artificial Sequence
  chemically synthesized
acttgtaaatctcttaaaatca

SEQ ID NO: 4606 - DNA, 22 bp, Artificial Sequence
  chemically synthesized
gtaaatctcttaaaatcataaa

SEQ ID NO: 4607 - DNA, 22 bp, Artificial Sequence
  chemically synthesized
taaatctcttaaaatcataaaa

SEQ ID NO: 4608 - DNA, 22 bp, Artificial Sequence
  chemically synthesized
ttaaaatcataaaaaagtaaaa

SEQ ID NO: 4609 - DNA, 22 bp, Artificial Sequence
  chemically synthesized
aaaatcataaaaaagtaaaatt

SEQ ID NO: 4610 - DNA, 22 bp, Artificial Sequence
  chemically synthesized
aaatcataaaaaagtaaaatta

SEQ ID NO: 4611 - DNA, 22 bp, Artificial Sequence
  chemically synthesized
gcttttaaaaacaggtagtcac

SEQ ID NO: 4612 - DNA, 22 bp, Artificial Sequence
  chemically synthesized
ttaaaaacaggtagtcaccata

SEQ ID NO: 4613 - DNA, 22 bp, Artificial Sequence
  chemically synthesized
taaaaacaggtagtcaccatag

SEQ ID NO: 4614 - DNA, 22 bp, Artificial Sequence
  chemically synthesized
aaaaacaggtagtcaccatagc

SEQ ID NO: 4615 - DNA, 22 bp, Artificial Sequence
  chemically synthesized
aaaacaggtagtcaccatagca

SEQ ID NO: 4616 - DNA, 22 bp, Artificial Sequence
  chemically synthesized
aatgtgtagtttataatacagc

SEQ ID NO: 4617 - DNA, 22 bp, Artificial Sequence
  chemically synthesized
ataatacagcaaagttaaatac

SEQ ID NO: 4618 - DNA, 22 bp, Artificial Sequence
  chemically synthesized
taatacagcaaagttaaataca

SEQ ID NO: 4619 - DNA, 22 bp, Artificial Sequence
  chemically synthesized
aatacaatttcaaattacctat

SEQ ID NO: 4620 - DNA, 22 bp, Artificial Sequence
  chemically synthesized
caaattacctattaagttagtt

SEQ ID NO: 4621 - DNA, 22 bp, Artificial Sequence
  chemically synthesized
aaattacctattaagttagttg

SEQ ID NO: 4622 - DNA, 22 bp, Artificial Sequence
  chemically synthesized
cctattaagttagttgctcatt

SEQ ID NO: 4623 - DNA, 22 bp, Artificial Sequence
  chemically synthesized
ttaagttagttgctcatttctt

SEQ ID NO: 4624 - DNA, 22 bp, Artificial Sequence
  chemically synthesized
agttagttgctcatttctttga

SEQ ID NO: 4625 - DNA, 22 bp, Artificial Sequence
  chemically synthesized
gttgctcatttctttgatttca

SEQ ID NO: 4626 - DNA, 22 bp, Artificial Sequence
  chemically synthesized
ctcatttctttgatttcattta

SEQ ID NO: 4627 - DNA, 22 bp, Artificial Sequence
  chemically synthesized
atttctttgatttcatttagca

SEQ ID NO: 4628 - DNA, 22 bp, Artificial Sequence
  chemically synthesized
ctttgatttcatttagcattga

SEQ ID NO: 4629 - DNA, 22 bp, Artificial Sequence
  chemically synthesized
tttgatttcatttagcattgat

SEQ ID NO: 4630 - DNA, 22 bp, Artificial Sequence
  chemically synthesized
tgatttcatttagcattgatct

SEQ ID NO: 4631 - DNA, 22 bp, Artificial Sequence
  chemically synthesized
gatttcatttagcattgatcta

SEQ ID NO: 4632 - DNA, 22 bp, Artificial Sequence
  chemically synthesized
atttcatttagcattgatctaa

SEQ ID NO: 4633 - DNA, 22 bp, Artificial Sequence
  chemically synthesized
catttagcattgatctaactca

SEQ ID NO: 4634 - DNA, 22 bp, Artificial Sequence
  chemically synthesized
atttagcattgatctaactcaa

SEQ ID NO: 4635 - DNA, 22 bp, Artificial Sequence
  chemically synthesized
agcattgatctaactcaatgtg

SEQ ID NO: 4636 - DNA, 22 bp, Artificial Sequence
  chemically synthesized
gcattgatctaactcaatgtgg

SEQ ID NO: 4637 - DNA, 22 bp, Artificial Sequence
  chemically synthesized
atctaactcaatgtggaagaag

SEQ ID NO: 4638 - DNA, 22 bp, Artificial Sequence
  chemically synthesized
actcaatgtggaagaaggttac

SEQ ID NO: 4639 - DNA, 22 bp, Artificial Sequence
  chemically synthesized
aatgtggaagaaggttacattc

SEQ ID NO: 4640 - DNA, 22 bp, Artificial Sequence
  chemically synthesized
cattcgtgcaagttaacacggc

SEQ ID NO: 4641 - DNA, 22 bp, Artificial Sequence
  chemically synthesized
gtgcaagttaacacggcttaat

SEQ ID NO: 4642 - DNA, 22 bp, Artificial Sequence
  chemically synthesized
acacggcttaatgattaactat

SEQ ID NO: 4643 - DNA, 22 bp, Artificial Sequence
  chemically synthesized
aatgattaactatgttcaccta

SEQ ID NO: 4644 - DNA, 22 bp, Artificial Sequence
  chemically synthesized
atgattaactatgttcacctac

SEQ ID NO: 4645 - DNA, 22 bp, Artificial Sequence
  chemically synthesized
actatgttcacctaccaacctt

SEQ ID NO: 4646 - DNA, 22 bp, Artificial Sequence
  chemically synthesized
tgttcacctaccaaccttacct

SEQ ID NO: 4647 - DNA, 22 bp, Artificial Sequence
  chemically synthesized
acctaccaaccttaccttttct

SEQ ID NO: 4648 - DNA, 22 bp, Artificial Sequence
  chemically synthesized
ccaaccttaccttttctgggca

SEQ ID NO: 4649 - DNA, 22 bp, Artificial Sequence
  chemically synthesized
accttttctgggcaaatattgg

SEQ ID NO: 4650 - DNA, 22 bp, Artificial Sequence
  chemically synthesized
ccttttctgggcaaatattggt

SEQ ID NO: 4651 - DNA, 22 bp, Artificial Sequence
  chemically synthesized
ttctgggcaaatattggtatat

SEQ ID NO: 4652 - DNA, 22 bp, Artificial Sequence
  chemically synthesized
tctgggcaaatattggtatata

SEQ ID NO: 4653 - DNA, 22 bp, Artificial Sequence
  chemically synthesized
ctgggcaaatattggtatatat

SEQ ID NO: 4654 - DNA, 22 bp, Artificial Sequence
  chemically synthesized
tgggcaaatattggtatatata

SEQ ID NO: 4655 - DNA, 22 bp, Artificial Sequence
  chemically synthesized
ggcaaatattggtatatataga

SEQ ID NO: 4656 - DNA, 22 bp, Artificial Sequence
  chemically synthesized
gtatatatagagttaagaagtc

SEQ ID NO: 4657 - DNA, 22 bp, Artificial Sequence
  chemically synthesized
agaagtctaggtctgcttccag

SEQ ID NO: 4658 - DNA, 22 bp, Artificial Sequence
  chemically synthesized
ggtctgcttccagaagaaaaca

SEQ ID NO: 4659 - DNA, 22 bp, Artificial Sequence
  chemically synthesized
cttccagaagaaaacagttcca

SEQ ID NO: 4660 - DNA, 22 bp, Artificial Sequence
  chemically synthesized
ccagaagaaaacagttccacgt

SEQ ID NO: 4661 - DNA, 22 bp, Artificial Sequence
  chemically synthesized
cagaagaaaacagttccacgtt

SEQ ID NO: 4662 - DNA, 22 bp, Artificial Sequence
  chemically synthesized
cacgttgcttgaaattgaaaat

SEQ ID NO: 4663 - DNA, 22 bp, Artificial Sequence
  chemically synthesized
cttgaaattgaaaatcaagata

SEQ ID NO: 4664 - DNA, 22 bp, Artificial Sequence
  chemically synthesized
gaaattgaaaatcaagataaaa

SEQ ID NO: 4665 - DNA, 22 bp, Artificial Sequence
  chemically synthesized
aaattgaaaatcaagataaaaa

SEQ ID NO: 4666 - DNA, 22 bp, Artificial Sequence
  chemically synthesized
aaaatcaagataaaaatgttca

SEQ ID NO: 4667 - DNA, 22 bp, Artificial Sequence
  chemically synthesized
acaattaagctccttcttttta

SEQ ID NO: 4668 - DNA, 22 bp, Artificial Sequence
  chemically synthesized
agctccttctttttattgttcc

SEQ ID NO: 4669 - DNA, 22 bp, Artificial Sequence
  chemically synthesized
cttctttttattgttcctctag

SEQ ID NO: 4670 - DNA, 22 bp, Artificial Sequence
  chemically synthesized
ctttttattgttcctctagtta

SEQ ID NO: 4671 - DNA, 22 bp, Artificial Sequence
  chemically synthesized
tttttattgttcctctagttat

SEQ ID NO: 4672 - DNA, 22 bp, Artificial Sequence
  chemically synthesized
tttattgttcctctagttattt

SEQ ID NO: 4673 - DNA, 22 bp, Artificial Sequence
  chemically synthesized
ttattgttcctctagttatttc

SEQ ID NO: 4674 - DNA, 22 bp, Artificial Sequence
  chemically synthesized
tattgttcctctagttatttcc

SEQ ID NO: 4675 - DNA, 22 bp, Artificial Sequence
  chemically synthesized
attgttcctctagttatttcct

SEQ ID NO: 4676 - DNA, 22 bp, Artificial Sequence
  chemically synthesized
ttgttcctctagttatttcctc

SEQ ID NO: 4677 - DNA, 22 bp, Artificial Sequence
  chemically synthesized
ttcctctagttatttcctccag

SEQ ID NO: 4678 - DNA, 22 bp, Artificial Sequence
  chemically synthesized
ctctagttatttcctccagaat

SEQ ID NO: 4679 - DNA, 22 bp, Artificial Sequence
  chemically synthesized
tagttatttcctccagaattga

SEQ ID NO: 4680 - DNA, 22 bp, Artificial Sequence
  chemically synthesized
gttatttcctccagaattgatc

SEQ ID NO: 4681 - DNA, 22 bp, Artificial Sequence
  chemically synthesized
tttcctccagaattgatcaaga

SEQ ID NO: 4682 - DNA, 22 bp, Artificial Sequence
  chemically synthesized
cctccagaattgatcaagacaa

SEQ ID NO: 4683 - DNA, 22 bp, Artificial Sequence
  chemically synthesized
ctccagaattgatcaagacaat

SEQ ID NO: 4684 - DNA, 22 bp, Artificial Sequence
  chemically synthesized
cagaattgatcaagacaattca

SEQ ID NO: 4685 - DNA, 22 bp, Artificial Sequence
  chemically synthesized
atcaagacaattcatcatttga

SEQ ID NO: 4686 - DNA, 22 bp, Artificial Sequence
  chemically synthesized
atcatttgattctctatctcca

SEQ ID NO: 4687 - DNA, 22 bp, Artificial Sequence
  chemically synthesized
gattctctatctccagagccaa

SEQ ID NO: 4688 - DNA, 22 bp, Artificial Sequence
  chemically synthesized
attctctatctccagagccaaa

SEQ ID NO: 4689 - DNA, 22 bp, Artificial Sequence
  chemically synthesized
tctatctccagagccaaaatca

SEQ ID NO: 4690 - DNA, 22 bp, Artificial Sequence
  chemically synthesized
tatctccagagccaaaatcaag

SEQ ID NO: 4691 - DNA, 22 bp, Artificial Sequence
  chemically synthesized
tctccagagccaaaatcaagat

SEQ ID NO: 4692 - DNA, 22 bp, Artificial Sequence
  chemically synthesized
cagagccaaaatcaagatttgc

SEQ ID NO: 4693 - DNA, 22 bp, Artificial Sequence
  chemically synthesized
gctatgttagacgatgtaaaaa

SEQ ID NO: 4694 - DNA, 22 bp, Artificial Sequence
  chemically synthesized
ctatgttagacgatgtaaaaat

SEQ ID NO: 4695 - DNA, 22 bp, Artificial Sequence
  chemically synthesized
tgttagacgatgtaaaaatttt

SEQ ID NO: 4696 - DNA, 22 bp, Artificial Sequence
  chemically synthesized
gacgatgtaaaaattttagcca

SEQ ID NO: 4697 - DNA, 22 bp, Artificial Sequence
  chemically synthesized
tagccaatggcctccttcagtt

SEQ ID NO: 4698 - DNA, 22 bp, Artificial Sequence
  chemically synthesized
agccaatggcctccttcagttg

SEQ ID NO: 4699 - DNA, 22 bp, Artificial Sequence
  chemically synthesized
gccaatggcctccttcagttgg

SEQ ID NO: 4700 - DNA, 22 bp, Artificial Sequence
  chemically synthesized
cttcagttgggacatggtctta

SEQ ID NO: 4701 - DNA, 22 bp, Artificial Sequence
  chemically synthesized
cagttgggacatggtcttaaag

SEQ ID NO: 4702 - DNA, 22 bp, Artificial Sequence
  chemically synthesized
agttgggacatggtcttaaaga

SEQ ID NO: 4703 - DNA, 22 bp, Artificial Sequence
  chemically synthesized
ggacatggtcttaaagactttg

SEQ ID NO: 4704 - DNA, 22 bp, Artificial Sequence
  chemically synthesized
aaagactttgtccataagacga

SEQ ID NO: 4705 - DNA, 22 bp, Artificial Sequence
  chemically synthesized
aagactttgtccataagacgaa

SEQ ID NO: 4706 - DNA, 22 bp, Artificial Sequence
  chemically synthesized
tgtccataagacgaagggccaa

SEQ ID NO: 4707 - DNA, 22 bp, Artificial Sequence
  chemically synthesized
gtccataagacgaagggccaaa

SEQ ID NO: 4708 - DNA, 22 bp, Artificial Sequence
  chemically synthesized
tccataagacgaagggccaaat

SEQ ID NO: 4709 - DNA, 22 bp, Artificial Sequence
  chemically synthesized
atgacatatttcaaaaactcaa

SEQ ID NO: 4710 - DNA, 22 bp, Artificial Sequence
  chemically synthesized
caaaaactcaacatatttgatc

SEQ ID NO: 4711 - DNA, 22 bp, Artificial Sequence
  chemically synthesized
aaaaactcaacatatttgatca

SEQ ID NO: 4712 - DNA, 22 bp, Artificial Sequence
  chemically synthesized
aacatatttgatcagtcttttt

SEQ ID NO: 4713 - DNA, 22 bp, Artificial Sequence
  chemically synthesized
gatcagtctttttatgatctat

SEQ ID NO: 4714 - DNA, 22 bp, Artificial Sequence
  chemically synthesized
atcagtctttttatgatctatc

SEQ ID NO: 4715 - DNA, 22 bp, Artificial Sequence
  chemically synthesized
tttatgatctatcgctgcaaac

SEQ ID NO: 4716 - DNA, 22 bp, Artificial Sequence
  chemically synthesized
ttatgatctatcgctgcaaacc

SEQ ID NO: 4717 - DNA, 22 bp, Artificial Sequence
  chemically synthesized
tatgatctatcgctgcaaacca

SEQ ID NO: 4718 - DNA, 22 bp, Artificial Sequence
  chemically synthesized
atgatctatcgctgcaaaccag

SEQ ID NO: 4719 - DNA, 22 bp, Artificial Sequence
  chemically synthesized
tgatctatcgctgcaaaccagt

SEQ ID NO: 4720 - DNA, 22 bp, Artificial Sequence
  chemically synthesized
tcgctgcaaaccagtgaaatca

SEQ ID NO: 4721 - DNA, 22 bp, Artificial Sequence
  chemically synthesized
caaaccagtgaaatcaaagaag

SEQ ID NO: 4722 - DNA, 22 bp, Artificial Sequence
  chemically synthesized
agaagaactacatataaactac

SEQ ID NO: 4723 - DNA, 22 bp, Artificial Sequence
  chemically synthesized
catataaactacaagtcaaaaa

SEQ ID NO: 4724 - DNA, 22 bp, Artificial Sequence
  chemically synthesized
caagtcaaaaatgaagaggtaa

SEQ ID NO: 4725 - DNA, 22 bp, Artificial Sequence
  chemically synthesized
gaactcaactcaaaacttgaaa

SEQ ID NO: 4726 - DNA, 22 bp, Artificial Sequence
  chemically synthesized
aactcaactcaaaacttgaaag

SEQ ID NO: 4727 - DNA, 22 bp, Artificial Sequence
  chemically synthesized
aactcaaaacttgaaagcctcc

SEQ ID NO: 4728 - DNA, 22 bp, Artificial Sequence
  chemically synthesized
aaaacttgaaagcctcctagaa

SEQ ID NO: 4729 - DNA, 22 bp, Artificial Sequence
  chemically synthesized
gaaagcctcctagaagaaaaaa

SEQ ID NO: 4730 - DNA, 22 bp, Artificial Sequence
  chemically synthesized
aaagcctcctagaagaaaaaat

SEQ ID NO: 4731 - DNA, 22 bp, Artificial Sequence
  chemically synthesized
ctagaagaaaaaattctacttc

SEQ ID NO: 4732 - DNA, 22 bp, Artificial Sequence
  chemically synthesized
gaagaaaaaattctacttcaac

SEQ ID NO: 4733 - DNA, 22 bp, Artificial Sequence
  chemically synthesized
tacttcaacaaaaagtgaaata

SEQ ID NO: 4734 - DNA, 22 bp, Artificial Sequence
  chemically synthesized
cttcaacaaaaagtgaaatatt

SEQ ID NO: 4735 - DNA, 22 bp, Artificial Sequence
  chemically synthesized
caacaaaaagtgaaatatttag

SEQ ID NO: 4736 - DNA, 22 bp, Artificial Sequence
  chemically synthesized
aacaaaaagtgaaatatttaga

SEQ ID NO: 4737 - DNA, 22 bp, Artificial Sequence
  chemically synthesized
agaagagcaactaactaactta

SEQ ID NO: 4738 - DNA, 22 bp, Artificial Sequence
  chemically synthesized
gaagagcaactaactaacttaa

SEQ ID NO: 4739 - DNA, 22 bp, Artificial Sequence
  chemically synthesized
actaacttaattcaaaatcaac

SEQ ID NO: 4740 - DNA, 22 bp, Artificial Sequence
  chemically synthesized
acttaattcaaaatcaacctga

SEQ ID NO: 4741 - DNA, 22 bp, Artificial Sequence
  chemically synthesized
aattcaaaatcaacctgaaact

SEQ ID NO: 4742 - DNA, 22 bp, Artificial Sequence
  chemically synthesized
attcaaaatcaacctgaaactc

SEQ ID NO: 4743 - DNA, 22 bp, Artificial Sequence
  chemically synthesized
aaaatcaacctgaaactccaga

SEQ ID NO: 4744 - DNA, 22 bp, Artificial Sequence
  chemically synthesized
aaactccagaacacccagaagt

SEQ ID NO: 4745 - DNA, 22 bp, Artificial Sequence
  chemically synthesized
cagaacacccagaagtaacttc

SEQ ID NO: 4746 - DNA, 22 bp, Artificial Sequence
  chemically synthesized
cacttaaagtaagtagaaaata

SEQ ID NO: 4747 - DNA, 22 bp, Artificial Sequence
  chemically synthesized
acttaaagtaagtagaaaataa

SEQ ID NO: 4748 - DNA, 22 bp, Artificial Sequence
  chemically synthesized
aaagtaagtagaaaataaagag

SEQ ID NO: 4749 - DNA, 22 bp, Artificial Sequence
  chemically synthesized
aagtaagtagaaaataaagagg

SEQ ID NO: 4750 - DNA, 22 bp, Artificial Sequence
  chemically synthesized
atgtttatgttttcaatgtgga

SEQ ID NO: 4751 - DNA, 22 bp, Artificial Sequence
  chemically synthesized
atgttttcaatgtggatctttt

SEQ ID NO: 4752 - DNA, 22 bp, Artificial Sequence
  chemically synthesized
tgttttcaatgtggatctttta

SEQ ID NO: 4753 - DNA, 22 bp, Artificial Sequence
  chemically synthesized
tcaatgtggatcttttaaaaaa

SEQ ID NO: 4754 - DNA, 22 bp, Artificial Sequence
  chemically synthesized
caatgtggatcttttaaaaaaa

SEQ ID NO: 4755 - DNA, 22 bp, Artificial Sequence
  chemically synthesized
aatgtggatcttttaaaaaaaa

SEQ ID NO: 4756 - DNA, 22 bp, Artificial Sequence
  chemically synthesized
ttaaaaaaaatatttctaaggc

SEQ ID NO: 4757 - DNA, 22 bp, Artificial Sequence
  chemically synthesized
taaaaaaaatatttctaaggca

SEQ ID NO: 4758 - DNA, 22 bp, Artificial Sequence
  chemically synthesized
aaaaaaaatatttctaaggcat

SEQ ID NO: 4759 - DNA, 22 bp, Artificial Sequence
  chemically synthesized
aaaaaaatatttctaaggcatg

SEQ ID NO: 4760 - DNA, 22 bp, Artificial Sequence
  chemically synthesized
ctaaggcatgccatttgaaata

SEQ ID NO: 4761 - DNA, 22 bp, Artificial Sequence
  chemically synthesized
taaggcatgccatttgaaatac

SEQ ID NO: 4762 - DNA, 22 bp, Artificial Sequence
  chemically synthesized
aggcatgccatttgaaatactt

SEQ ID NO: 4763 - DNA, 22 bp, Artificial Sequence
  chemically synthesized
gaaatactttgttgcattgttg

SEQ ID NO: 4764 - DNA, 22 bp, Artificial Sequence
  chemically synthesized
aaatactttgttgcattgttga

SEQ ID NO: 4765 - DNA, 22 bp, Artificial Sequence
  chemically synthesized
tgttgcattgttgaaatacttt

SEQ ID NO: 4766 - DNA, 22 bp, Artificial Sequence
  chemically synthesized
gttgcattgttgaaatactttt

SEQ ID NO: 4767 - DNA, 22 bp, Artificial Sequence
  chemically synthesized
ttgcattgttgaaatacttttt

SEQ ID NO: 4768 - DNA, 22 bp, Artificial Sequence
  chemically synthesized
cattgttgaaatactttttttt

SEQ ID NO: 4769 - DNA, 22 bp, Artificial Sequence
  chemically synthesized
ttgaaatacttttttttccaag

SEQ ID NO: 4770 - DNA, 22 bp, Artificial Sequence
  chemically synthesized
aaatacttttttttccaagaaa

SEQ ID NO: 4771 - DNA, 22 bp, Artificial Sequence
  chemically synthesized
ttttttccaagaaaaataatct

SEQ ID NO: 4772 - DNA, 22 bp, Artificial Sequence
  chemically synthesized
tttttccaagaaaaataatctc

SEQ ID NO: 4773 - DNA, 22 bp, Artificial Sequence
  chemically synthesized
ttttccaagaaaaataatctcc

SEQ ID NO: 4774 - DNA, 22 bp, Artificial Sequence
  chemically synthesized
tttccaagaaaaataatctcca

SEQ ID NO: 4775 - DNA, 22 bp, Artificial Sequence
  chemically synthesized
ttccaagaaaaataatctccag

SEQ ID NO: 4776 - DNA, 22 bp, Artificial Sequence
  chemically synthesized
tccaagaaaaataatctccaga

SEQ ID NO: 4777 - DNA, 22 bp, Artificial Sequence
  chemically synthesized
ccaagaaaaataatctccagaa

SEQ ID NO: 4778 - DNA, 22 bp, Artificial Sequence
  chemically synthesized
caagaaaaataatctccagaaa

SEQ ID NO: 4779 - DNA, 22 bp, Artificial Sequence
  chemically synthesized
cagaaaataaaatttcctatta

SEQ ID NO: 4780 - DNA, 22 bp, Artificial Sequence
  chemically synthesized
cctattataatttcaagttagt

SEQ ID NO: 4781 - DNA, 22 bp, Artificial Sequence
  chemically synthesized
ctattataatttcaagttagtt

SEQ ID NO: 4782 - DNA, 22 bp, Artificial Sequence
  chemically synthesized
ttataatttcaagttagttttt

SEQ ID NO: 4783 - DNA, 22 bp, Artificial Sequence
  chemically synthesized
taatttcaagttagttttttgt

SEQ ID NO: 4784 - DNA, 22 bp, Artificial Sequence
  chemically synthesized
caagttagttttttgtttccct

SEQ ID NO: 4785 - DNA, 22 bp, Artificial Sequence
  chemically synthesized
aagttagttttttgtttcccta

SEQ ID NO: 4786 - DNA, 22 bp, Artificial Sequence
  chemically synthesized
gttttttgtttccctaatgtta

SEQ ID NO: 4787 - DNA, 22 bp, Artificial Sequence
  chemically synthesized
tttgtttccctaatgttatata

SEQ ID NO: 4788 - DNA, 22 bp, Artificial Sequence
  chemically synthesized
ttgtttccctaatgttatatat

SEQ ID NO: 4789 - DNA, 22 bp, Artificial Sequence
  chemically synthesized
tgtttccctaatgttatatatg

SEQ ID NO: 4790 - DNA, 22 bp, Artificial Sequence
  chemically synthesized
gtttccctaatgttatatatga

SEQ ID NO: 4791 - DNA, 22 bp, Artificial Sequence
  chemically synthesized
tttccctaatgttatatatgaa

SEQ ID NO: 4792 - DNA, 22 bp, Artificial Sequence
  chemically synthesized
ccctaatgttatatatgaaaac

SEQ ID NO: 4793 - DNA, 22 bp, Artificial Sequence
  chemically synthesized
cctaatgttatatatgaaaaca

SEQ ID NO: 4794 - DNA, 22 bp, Artificial Sequence
  chemically synthesized
atgttatatatgaaaacactga

SEQ ID NO: 4795 - DNA, 22 bp, Artificial Sequence
  chemically synthesized
tatatgaaaacactgaaaattt

SEQ ID NO: 4796 - DNA, 22 bp, Artificial Sequence
  chemically synthesized
aaaatttgcattttatatgaaa

SEQ ID NO: 4797 - DNA, 22 bp, Artificial Sequence
  chemically synthesized
gcattttatatgaaaattacaa

SEQ ID NO: 4798 - DNA, 22 bp, Artificial Sequence
  chemically synthesized
cattttatatgaaaattacaaa

SEQ ID NO: 4799 - DNA, 22 bp, Artificial Sequence
  chemically synthesized
tatatgaaaattacaaatcggt

SEQ ID NO: 4800 - DNA, 22 bp, Artificial Sequence
  chemically synthesized
atatgaaaattacaaatcggtt

SEQ ID NO: 4801 - DNA, 22 bp, Artificial Sequence
  chemically synthesized
tatgaaaattacaaatcggtta

SEQ ID NO: 4802 - DNA, 22 bp, Artificial Sequence
  chemically synthesized
caaatcggttaaattatacaat

SEQ ID NO: 4803 - DNA, 22 bp, Artificial Sequence
  chemically synthesized
aattatacaatctagaacacta

SEQ ID NO: 4804 - DNA, 22 bp, Artificial Sequence
  chemically synthesized
tacaatctagaacactatgtca

SEQ ID NO: 4805 - DNA, 22 bp, Artificial Sequence
  chemically synthesized
gaacactatgtcattacactat

SEQ ID NO: 4806 - DNA, 22 bp, Artificial Sequence
  chemically synthesized
tgtcattacactattgtaaatt

SEQ ID NO: 4807 - DNA, 22 bp, Artificial Sequence
  chemically synthesized
cactattgtaaattactgaagg

SEQ ID NO: 4808 - DNA, 22 bp, Artificial Sequence
  chemically synthesized
ttgtaaattactgaaggtaagt

SEQ ID NO: 4809 - DNA, 22 bp, Artificial Sequence
  chemically synthesized
taaattactgaaggtaagtaaa

SEQ ID NO: 4810 - DNA, 22 bp, Artificial Sequence
  chemically synthesized
ctgaaggtaagtaaaaagttaa

SEQ ID NO: 4811 - DNA, 22 bp, Artificial Sequence
  chemically synthesized
aaggtaagtaaaaagttaaaaa

SEQ ID NO: 4812 - DNA, 22 bp, Artificial Sequence
  chemically synthesized
aaaaaaatttaaaactattctc

SEQ ID NO: 4813 - DNA, 22 bp, Artificial Sequence
  chemically synthesized
aaaactattctccagtgtttaa

SEQ ID NO: 4814 - DNA, 22 bp, Artificial Sequence
  chemically synthesized
aaactattctccagtgtttaaa

SEQ ID NO: 4815 - DNA, 22 bp, Artificial Sequence
  chemically synthesized
ttctccagtgtttaaaacagat

SEQ ID NO: 4816 - DNA, 22 bp, Artificial Sequence
  chemically synthesized
tccagtgtttaaaacagattaa

SEQ ID NO: 4817 - DNA, 22 bp, Artificial Sequence
  chemically synthesized
cagtgtttaaaacagattaaat

SEQ ID NO: 4818 - DNA, 22 bp, Artificial Sequence
  chemically synthesized
aaaacagattaaataatacagt

SEQ ID NO: 4819 - DNA, 22 bp, Artificial Sequence
  chemically synthesized
aaacagattaaataatacagta

SEQ ID NO: 4820 - DNA, 22 bp, Artificial Sequence
  chemically synthesized
aataatacagtaaatggaaaag

SEQ ID NO: 4821 - DNA, 22 bp, Artificial Sequence
  chemically synthesized
attcatatgaaaatatgctggg

SEQ ID NO: 4822 - DNA, 22 bp, Artificial Sequence
  chemically synthesized
ttcatatgaaaatatgctgggc

SEQ ID NO: 4823 - DNA, 22 bp, Artificial Sequence
  chemically synthesized
atatgaaaatatgctgggcttt

SEQ ID NO: 4824 - DNA, 22 bp, Artificial Sequence
  chemically synthesized
ggctttttcttttaattgaagt

SEQ ID NO: 4825 - DNA, 22 bp, Artificial Sequence
  chemically synthesized
tttcttttaattgaagttcaga

SEQ ID NO: 4826 - DNA, 22 bp, Artificial Sequence
  chemically synthesized
ttcttttaattgaagttcagaa

SEQ ID NO: 4827 - DNA, 22 bp, Artificial Sequence
  chemically synthesized
tcttttaattgaagttcagaaa

SEQ ID NO: 4828 - DNA, 22 bp, Artificial Sequence
  chemically synthesized
cttttaattgaagttcagaaaa

SEQ ID NO: 4829 - DNA, 22 bp, Artificial Sequence
  chemically synthesized
ttttaattgaagttcagaaaat

SEQ ID NO: 4830 - DNA, 22 bp, Artificial Sequence
  chemically synthesized
ttaattgaagttcagaaaatca

SEQ ID NO: 4831 - DNA, 22 bp, Artificial Sequence
  chemically synthesized
taattgaagttcagaaaatcaa

SEQ ID NO: 4832 - DNA, 22 bp, Artificial Sequence
  chemically synthesized
aattgaagttcagaaaatcaaa

SEQ ID NO: 4833 - DNA, 22 bp, Artificial Sequence
  chemically synthesized
attgaagttcagaaaatcaaat

SEQ ID NO: 4834 - DNA, 22 bp, Artificial Sequence
  chemically synthesized
aagttcagaaaatcaaatttta

SEQ ID NO: 4835 - DNA, 22 bp, Artificial Sequence
  chemically synthesized
agaaaatcaaattttagagata

SEQ ID NO: 4836 - DNA, 22 bp, Artificial Sequence
  chemically synthesized
tagagatagtacaatttaaata

SEQ ID NO: 4837 - DNA, 22 bp, Artificial Sequence
  chemically synthesized
agagatagtacaatttaaataa

SEQ ID NO: 4838 - DNA, 22 bp, Artificial Sequence
  chemically synthesized
gagatagtacaatttaaataaa

SEQ ID NO: 4839 - DNA, 22 bp, Artificial Sequence
  chemically synthesized
aaataaaatgttaaggacaaaa

SEQ ID NO: 4840 - DNA, 22 bp, Artificial Sequence
  chemically synthesized
aataaaatgttaaggacaaaaa

SEQ ID NO: 4841 - DNA, 22 bp, Artificial Sequence
  chemically synthesized
aggacaaaaatatgtgctattt

SEQ ID NO: 4842 - DNA, 22 bp, Artificial Sequence
  chemically synthesized
tttgaaagaagcatacaagggg

SEQ ID NO: 4843 - DNA, 22 bp, Artificial Sequence
  chemically synthesized
gaaagaagcatacaaggggaag

SEQ ID NO: 4844 - DNA, 22 bp, Artificial Sequence
  chemically synthesized
aaagaagcatacaaggggaagg

SEQ ID NO: 4845 - DNA, 22 bp, Artificial Sequence
  chemically synthesized
ccaatattcatttttcaaatcc

SEQ ID NO: 4846 - DNA, 22 bp, Artificial Sequence
  chemically synthesized
atttttcaaatccattattagt

SEQ ID NO: 4847 - DNA, 22 bp, Artificial Sequence
  chemically synthesized
ttcaaatccattattagtttaa

SEQ ID NO: 4848 - DNA, 22 bp, Artificial Sequence
  chemically synthesized
tcaaatccattattagtttaaa

SEQ ID NO: 4849 - DNA, 22 bp, Artificial Sequence
  chemically synthesized
caaatccattattagtttaaaa

SEQ ID NO: 4850 - DNA, 22 bp, Artificial Sequence
  chemically synthesized
aaatccattattagtttaaaaa

SEQ ID NO: 4851 - DNA, 22 bp, Artificial Sequence
  chemically synthesized
ttagtttaaaaatttagattat

SEQ ID NO: 4852 - DNA, 22 bp, Artificial Sequence
  chemically synthesized
gtttaaaaatttagattatgat

SEQ ID NO: 4853 - DNA, 22 bp, Artificial Sequence
  chemically synthesized
aaaaatttagattatgatagtg

SEQ ID NO: 4854 - DNA, 22 bp, Artificial Sequence
  chemically synthesized
aaaatttagattatgatagtgt

SEQ ID NO: 4855 - DNA, 22 bp, Artificial Sequence
  chemically synthesized
agattatgatagtgttacagga

SEQ ID NO: 4856 - DNA, 22 bp, Artificial Sequence
  chemically synthesized
gattatgatagtgttacaggaa

SEQ ID NO: 4857 - DNA, 22 bp, Artificial Sequence
  chemically synthesized
tgatagtgttacaggaaattaa

SEQ ID NO: 4858 - DNA, 22 bp, Artificial Sequence
  chemically synthesized
caggaaattaatagaaaagaaa

SEQ ID NO: 4859 - DNA, 22 bp, Artificial Sequence
  chemically synthesized
atagaaaagaaagaggaaagca

SEQ ID NO: 4860 - DNA, 22 bp, Artificial Sequence
  chemically synthesized
ataaccaacctactctctatat

SEQ ID NO: 4861 - DNA, 22 bp, Artificial Sequence
  chemically synthesized
taaccaacctactctctatatc

SEQ ID NO: 4862 - DNA, 22 bp, Artificial Sequence
  chemically synthesized
ctctctatatccagacttttgt

SEQ ID NO: 4863 - DNA, 22 bp, Artificial Sequence
  chemically synthesized
tctatatccagacttttgtaga

SEQ ID NO: 4864 - DNA, 22 bp, Artificial Sequence
  chemically synthesized
tatatccagacttttgtagaaa

SEQ ID NO: 4865 - DNA, 22 bp, Artificial Sequence
  chemically synthesized
tatccagacttttgtagaaaaa

SEQ ID NO: 4866 - DNA, 22 bp, Artificial Sequence
  chemically synthesized
ttgtagaaaaacaagataatag

SEQ ID NO: 4867 - DNA, 22 bp, Artificial Sequence
  chemically synthesized
tgtagaaaaacaagataatagc

SEQ ID NO: 4868 - DNA, 22 bp, Artificial Sequence
  chemically synthesized
gtagaaaaacaagataatagca

SEQ ID NO: 4869 - DNA, 22 bp, Artificial Sequence
  chemically synthesized
tagaaaaacaagataatagcat

SEQ ID NO: 4870 - DNA, 22 bp, Artificial Sequence
  chemically synthesized
ctccagaccgtggaagaccaat

SEQ ID NO: 4871 - DNA, 22 bp, Artificial Sequence
  chemically synthesized
tccagaccgtggaagaccaata

SEQ ID NO: 4872 - DNA, 22 bp, Artificial Sequence
  chemically synthesized
cagaccgtggaagaccaatata

SEQ ID NO: 4873 - DNA, 22 bp, Artificial Sequence
  chemically synthesized
aaccaacagcatagtcaaataa

SEQ ID NO: 4874 - DNA, 22 bp, Artificial Sequence
  chemically synthesized
taatggtatgtcccatctttca

SEQ ID NO: 4875 - DNA, 22 bp, Artificial Sequence
  chemically synthesized
aatggtatgtcccatctttcac

SEQ ID NO: 4876 - DNA, 22 bp, Artificial Sequence
  chemically synthesized
atggtatgtcccatctttcaca

SEQ ID NO: 4877 - DNA, 22 bp, Artificial Sequence
  chemically synthesized
tcacacaggtctgtaaaaacac

SEQ ID NO: 4878 - DNA, 22 bp, Artificial Sequence
  chemically synthesized
cacacaggtctgtaaaaacact

SEQ ID NO: 4879 - DNA, 22 bp, Artificial Sequence
  chemically synthesized
acacaggtctgtaaaaacactg

SEQ ID NO: 4880 - DNA, 22 bp, Artificial Sequence
  chemically synthesized
taaaaacactgaatcctaaaat

SEQ ID NO: 4881 - DNA, 22 bp, Artificial Sequence
  chemically synthesized
aatcctaaaattatttacaagc

SEQ ID NO: 4882 - DNA, 22 bp, Artificial Sequence
  chemically synthesized
aaattatttacaagctttaact

SEQ ID NO: 4883 - DNA, 22 bp, Artificial Sequence
  chemically synthesized
tttacaagctttaactggatca

SEQ ID NO: 4884 - DNA, 22 bp, Artificial Sequence
  chemically synthesized
acaagctttaactggatcatga

SEQ ID NO: 4885 - DNA, 22 bp, Artificial Sequence
  chemically synthesized
caagctttaactggatcatgag

SEQ ID NO: 4886 - DNA, 22 bp, Artificial Sequence
  chemically synthesized
taactggatcatgagtaaaatt

SEQ ID NO: 4887 - DNA, 22 bp, Artificial Sequence
  chemically synthesized
aactggatcatgagtaaaatta

SEQ ID NO: 4888 - DNA, 22 bp, Artificial Sequence
  chemically synthesized
actggatcatgagtaaaattat

SEQ ID NO: 4889 - DNA, 22 bp, Artificial Sequence
  chemically synthesized
gatcatgagtaaaattatcaca

SEQ ID NO: 4890 - DNA, 22 bp, Artificial Sequence
  chemically synthesized
tcacatcagcataactgttaaa

SEQ ID NO: 4891 - DNA, 22 bp, Artificial Sequence
  chemically synthesized
ttaaaattgcaggctctgaagc

SEQ ID NO: 4892 - DNA, 22 bp, Artificial Sequence
  chemically synthesized
aaattgcaggctctgaagctaa

SEQ ID NO: 4893 - DNA, 22 bp, Artificial Sequence
  chemically synthesized
caggctctgaagctaataaact

SEQ ID NO: 4894 - DNA, 22 bp, Artificial Sequence
  chemically synthesized
tgaagctaataaactacctgca

SEQ ID NO: 4895 - DNA, 22 bp, Artificial Sequence
  chemically synthesized
aagctaataaactacctgcatt

SEQ ID NO: 4896 - DNA, 22 bp, Artificial Sequence
  chemically synthesized
ataaactacctgcatttaaacc

SEQ ID NO: 4897 - DNA, 22 bp, Artificial Sequence
  chemically synthesized
cctgcatttaaaccatggctct

SEQ ID NO: 4898 - DNA, 22 bp, Artificial Sequence
  chemically synthesized
catttaaaccatggctctaaaa

SEQ ID NO: 4899 - DNA, 22 bp, Artificial Sequence
  chemically synthesized
aaaccatggctctaaaactttg

SEQ ID NO: 4900 - DNA, 22 bp, Artificial Sequence
  chemically synthesized
aaccatggctctaaaactttgt

SEQ ID NO: 4901 - DNA, 22 bp, Artificial Sequence
  chemically synthesized
taaaactttgtgtgaccttgaa

SEQ ID NO: 4902 - DNA, 22 bp, Artificial Sequence
  chemically synthesized
aaactttgtgtgaccttgaata

SEQ ID NO: 4903 - DNA, 22 bp, Artificial Sequence
  chemically synthesized
tgtgtgaccttgaataaattac

SEQ ID NO: 4904 - DNA, 22 bp, Artificial Sequence
  chemically synthesized
gtgtgaccttgaataaattact

SEQ ID NO: 4905 - DNA, 22 bp, Artificial Sequence
  chemically synthesized
tgtgaccttgaataaattactt

SEQ ID NO: 4906 - DNA, 22 bp, Artificial Sequence
  chemically synthesized
gaataaattacttcaccccttt

SEQ ID NO: 4907 - DNA, 22 bp, Artificial Sequence
  chemically synthesized
aataaattacttcaccccttta

SEQ ID NO: 4908 - DNA, 22 bp, Artificial Sequence
  chemically synthesized
cttcacccctttatctctcagt

SEQ ID NO: 4909 - DNA, 22 bp, Artificial Sequence
  chemically synthesized
cacccctttatctctcagtttc

SEQ ID NO: 4910 - DNA, 22 bp, Artificial Sequence
  chemically synthesized
acccctttatctctcagtttcc

SEQ ID NO: 4911 - DNA, 22 bp, Artificial Sequence
  chemically synthesized
tatctctcagtttcctcacata

SEQ ID NO: 4912 - DNA, 22 bp, Artificial Sequence
  chemically synthesized
atctctcagtttcctcacatat

SEQ ID NO: 4913 - DNA, 22 bp, Artificial Sequence
  chemically synthesized
tctctcagtttcctcacatata

SEQ ID NO: 4914 - DNA, 22 bp, Artificial Sequence
  chemically synthesized
tcagtttcctcacatatactac

SEQ ID NO: 4915 - DNA, 22 bp, Artificial Sequence
  chemically synthesized
agtttcctcacatatactacaa

SEQ ID NO: 4916 - DNA, 22 bp, Artificial Sequence
  chemically synthesized
cctcacatatactacaaagata

SEQ ID NO: 4917 - DNA, 22 bp, Artificial Sequence
  chemically synthesized
ctcacatatactacaaagataa

SEQ ID NO: 4918 - DNA, 22 bp, Artificial Sequence
  chemically synthesized
acatatactacaaagataataa

SEQ ID NO: 4919 - DNA, 22 bp, Artificial Sequence
  chemically synthesized
caaagataataacagaacttat

SEQ ID NO: 4920 - DNA, 22 bp, Artificial Sequence
  chemically synthesized
ataggattattgtaagaaaaaa

SEQ ID NO: 4921 - DNA, 22 bp, Artificial Sequence
  chemically synthesized
taggattattgtaagaaaaaaa

SEQ ID NO: 4922 - DNA, 22 bp, Artificial Sequence
  chemically synthesized
ttgtaagaaaaaaaattaattc

SEQ ID NO: 4923 - DNA, 22 bp, Artificial Sequence
  chemically synthesized
taagaaaaaaaattaattcata

SEQ ID NO: 4924 - DNA, 22 bp, Artificial Sequence
  chemically synthesized
attcatagcagccaatgtcatc

SEQ ID NO: 4925 - DNA, 22 bp, Artificial Sequence
  chemically synthesized
atagcagccaatgtcatcttac

SEQ ID NO: 4926 - DNA, 22 bp, Artificial Sequence
  chemically synthesized
actaaaattcaaattagatcat

SEQ ID NO: 4927 - DNA, 22 bp, Artificial Sequence
  chemically synthesized
ctaaaattcaaattagatcatg

SEQ ID NO: 4928 - DNA, 22 bp, Artificial Sequence
  chemically synthesized
aaattcaaattagatcatgttt

SEQ ID NO: 4929 - DNA, 22 bp, Artificial Sequence
  chemically synthesized
aaattagatcatgtttctcttt

SEQ ID NO: 4930 - DNA, 22 bp, Artificial Sequence
  chemically synthesized
gatcatgtttctctttgctcaa

SEQ ID NO: 4931 - DNA, 22 bp, Artificial Sequence
  chemically synthesized
ctctttgctcaaaaccacacaa

SEQ ID NO: 4932 - DNA, 22 bp, Artificial Sequence
  chemically synthesized
tctttgctcaaaaccacacaat

SEQ ID NO: 4933 - DNA, 22 bp, Artificial Sequence
  chemically synthesized
tttgctcaaaaccacacaatag

SEQ ID NO: 4934 - DNA, 22 bp, Artificial Sequence
  chemically synthesized
tgctcaaaaccacacaatagct

SEQ ID NO: 4935 - DNA, 22 bp, Artificial Sequence
  chemically synthesized
gctcaaaaccacacaatagctt

SEQ ID NO: 4936 - DNA, 22 bp, Artificial Sequence
  chemically synthesized
ctcaaaaccacacaatagcttt

SEQ ID NO: 4937 - DNA, 22 bp, Artificial Sequence
  chemically synthesized
aaaaccacacaatagctttcca

SEQ ID NO: 4938 - DNA, 22 bp, Artificial Sequence
  chemically synthesized
tccatttcactcatattggctc

SEQ ID NO: 4939 - DNA, 22 bp, Artificial Sequence
  chemically synthesized
ccatttcactcatattggctct

SEQ ID NO: 4940 - DNA, 22 bp, Artificial Sequence
  chemically synthesized
catttcactcatattggctctt

SEQ ID NO: 4941 - DNA, 22 bp, Artificial Sequence
  chemically synthesized
cactcatattggctctttagac

SEQ ID NO: 4942 - DNA, 22 bp, Artificial Sequence
  chemically synthesized
actcatattggctctttagacc

SEQ ID NO: 4943 - DNA, 22 bp, Artificial Sequence
  chemically synthesized
atattggctctttagaccaaga

SEQ ID NO: 4944 - DNA, 22 bp, Artificial Sequence
  chemically synthesized
gctctttagaccaagattaccc

SEQ ID NO: 4945 - DNA, 22 bp, Artificial Sequence
  chemically synthesized
ggtaatcttggtctaaagagcc

SEQ ID NO: 4946 - DNA, 22 bp, Artificial Sequence
  chemically synthesized
ggtctaaagagccaatatgagt

SEQ ID NO: 4947 - DNA, 22 bp, Artificial Sequence
  chemically synthesized
gtctaaagagccaatatgagtg

SEQ ID NO: 4948 - DNA, 22 bp, Artificial Sequence
  chemically synthesized
aagagccaatatgagtgaaatg

SEQ ID NO: 4949 - DNA, 22 bp, Artificial Sequence
  chemically synthesized
ttgtgtggttttgagcaaagag

SEQ ID NO: 4950 - DNA, 22 bp, Artificial Sequence
  chemically synthesized
tgtggttttgagcaaagagaaa

SEQ ID NO: 4951 - DNA, 22 bp, Artificial Sequence
  chemically synthesized
tgagcaaagagaaacatgatct

SEQ ID NO: 4952 - DNA, 22 bp, Artificial Sequence
  chemically synthesized
gagcaaagagaaacatgatcta

SEQ ID NO: 4953 - DNA, 22 bp, Artificial Sequence
  chemically synthesized
agcaaagagaaacatgatctaa

SEQ ID NO: 4954 - DNA, 22 bp, Artificial Sequence
  chemically synthesized
atttgaattttagtaagatgac

SEQ ID NO: 4955 - DNA, 22 bp, Artificial Sequence
  chemically synthesized
gaattttagtaagatgacattg

SEQ ID NO: 4956 - DNA, 22 bp, Artificial Sequence
  chemically synthesized
aattttagtaagatgacattgg

SEQ ID NO: 4957 - DNA, 22 bp, Artificial Sequence
  chemically synthesized
tagtaagatgacattggctgct

SEQ ID NO: 4958 - DNA, 22 bp, Artificial Sequence
  chemically synthesized
agtaagatgacattggctgcta

SEQ ID NO: 4959 - DNA, 22 bp, Artificial Sequence
  chemically synthesized
gtaagatgacattggctgctat

SEQ ID NO: 4960 - DNA, 22 bp, Artificial Sequence
  chemically synthesized
gctgctatgaattaattttttt

SEQ ID NO: 4961 - DNA, 22 bp, Artificial Sequence
  chemically synthesized
ctatgaattaattttttttctt

SEQ ID NO: 4962 - DNA, 22 bp, Artificial Sequence
  chemically synthesized
tgaattaattttttttcttaca

SEQ ID NO: 4963 - DNA, 22 bp, Artificial Sequence
  chemically synthesized
attttttttcttacaataatcc

SEQ ID NO: 4964 - DNA, 22 bp, Artificial Sequence
  chemically synthesized
tttttcttacaataatcctata

SEQ ID NO: 4965 - DNA, 22 bp, Artificial Sequence
  chemically synthesized
ttttcttacaataatcctataa

SEQ ID NO: 4966 - DNA, 22 bp, Artificial Sequence
  chemically synthesized
tttcttacaataatcctataag

SEQ ID NO: 4967 - DNA, 22 bp, Artificial Sequence
  chemically synthesized
ttcttacaataatcctataagt

SEQ ID NO: 4968 - DNA, 22 bp, Artificial Sequence
  chemically synthesized
tcttacaataatcctataagtt

SEQ ID NO: 4969 - DNA, 22 bp, Artificial Sequence
  chemically synthesized
cttacaataatcctataagttc

SEQ ID NO: 4970 - DNA, 22 bp, Artificial Sequence
  chemically synthesized
ttacaataatcctataagttct

SEQ ID NO: 4971 - DNA, 22 bp, Artificial Sequence
  chemically synthesized
acaataatcctataagttctgt

SEQ ID NO: 4972 - DNA, 22 bp, Artificial Sequence
  chemically synthesized
caataatcctataagttctgtt

SEQ ID NO: 4973 - DNA, 22 bp, Artificial Sequence
  chemically synthesized
taagttctgttattatctttgt

SEQ ID NO: 4974 - DNA, 22 bp, Artificial Sequence
  chemically synthesized
tgttattatctttgtagtatat

SEQ ID NO: 4975 - DNA, 22 bp, Artificial Sequence
  chemically synthesized
ttattatctttgtagtatatgt

SEQ ID NO: 4976 - DNA, 22 bp, Artificial Sequence
  chemically synthesized
ttatctttgtagtatatgtgag

SEQ ID NO: 4977 - DNA, 22 bp, Artificial Sequence
  chemically synthesized
tctttgtagtatatgtgaggaa

SEQ ID NO: 4978 - DNA, 22 bp, Artificial Sequence
  chemically synthesized
tgtagtatatgtgaggaaactg

SEQ ID NO: 4979 - DNA, 22 bp, Artificial Sequence
  chemically synthesized
gtagtatatgtgaggaaactga

SEQ ID NO: 4980 - DNA, 22 bp, Artificial Sequence
  chemically synthesized
tagtatatgtgaggaaactgag

SEQ ID NO: 4981 - DNA, 22 bp, Artificial Sequence
  chemically synthesized
agagataaaggggtgaagtaat

SEQ ID NO: 4982 - DNA, 22 bp, Artificial Sequence
  chemically synthesized
attcaaggtcacacaaagtttt

SEQ ID NO: 4983 - DNA, 22 bp, Artificial Sequence
  chemically synthesized
ttcaaggtcacacaaagtttta

SEQ ID NO: 4984 - DNA, 22 bp, Artificial Sequence
  chemically synthesized
aaggtcacacaaagttttagag

SEQ ID NO: 4985 - DNA, 22 bp, Artificial Sequence
  chemically synthesized
tagagccatggtttaaatgcag

SEQ ID NO: 4986 - DNA, 22 bp, Artificial Sequence
  chemically synthesized
agagccatggtttaaatgcagg

SEQ ID NO: 4987 - DNA, 22 bp, Artificial Sequence
  chemically synthesized
gagccatggtttaaatgcaggt

SEQ ID NO: 4988 - DNA, 22 bp, Artificial Sequence
  chemically synthesized
aaatgcaggtagtttattagct

SEQ ID NO: 4989 - DNA, 22 bp, Artificial Sequence
  chemically synthesized
aatgcaggtagtttattagctt

SEQ ID NO: 4990 - DNA, 22 bp, Artificial Sequence
  chemically synthesized
attagcttcagagcctgcaatt

SEQ ID NO: 4991 - DNA, 22 bp, Artificial Sequence
  chemically synthesized
ttagcttcagagcctgcaattt

SEQ ID NO: 4992 - DNA, 22 bp, Artificial Sequence
  chemically synthesized
gcttcagagcctgcaattttaa

SEQ ID NO: 4993 - DNA, 22 bp, Artificial Sequence
  chemically synthesized
cagagcctgcaattttaacagt

SEQ ID NO: 4994 - DNA, 22 bp, Artificial Sequence
  chemically synthesized
agagcctgcaattttaacagtt

SEQ ID NO: 4995 - DNA, 22 bp, Artificial Sequence
  chemically synthesized
caattttaacagttatgctgat

SEQ ID NO: 4996 - DNA, 22 bp, Artificial Sequence
  chemically synthesized
taacagttatgctgatgtgata

SEQ ID NO: 4997 - DNA, 22 bp, Artificial Sequence
  chemically synthesized
aacagttatgctgatgtgataa

SEQ ID NO: 4998 - DNA, 22 bp, Artificial Sequence
  chemically synthesized
acagttatgctgatgtgataat

SEQ ID NO: 4999 - DNA, 22 bp, Artificial Sequence
  chemically synthesized
tgctgatgtgataattttactc

SEQ ID NO: 5000 - DNA, 22 bp, Artificial Sequence
  chemically synthesized
atgtgataattttactcatgat

SEQ ID NO: 5001 - DNA, 22 bp, Artificial Sequence
  chemically synthesized
tactcatgatccagttaaagct

SEQ ID NO: 5002 - DNA, 22 bp, Artificial Sequence
  chemically synthesized
actcatgatccagttaaagctt

SEQ ID NO: 5003 - DNA, 22 bp, Artificial Sequence
  chemically synthesized
ctcatgatccagttaaagcttg

SEQ ID NO: 5004 - DNA, 22 bp, Artificial Sequence
  chemically synthesized
atgatccagttaaagcttgtaa

SEQ ID NO: 5005 - DNA, 22 bp, Artificial Sequence
  chemically synthesized
aagcttgtaaataattttagga

SEQ ID NO: 5006 - DNA, 22 bp, Artificial Sequence
  chemically synthesized
gtaaataattttaggattcagt

SEQ ID NO: 5007 - DNA, 22 bp, Artificial Sequence
  chemically synthesized
taaataattttaggattcagtg

SEQ ID NO: 5008 - DNA, 22 bp, Artificial Sequence
  chemically synthesized
taggattcagtgtttttacaga

SEQ ID NO: 5009 - DNA, 22 bp, Artificial Sequence
  chemically synthesized
aggattcagtgtttttacagac

SEQ ID NO: 5010 - DNA, 22 bp, Artificial Sequence
  chemically synthesized
ggattcagtgtttttacagacc

SEQ ID NO: 5011 - DNA, 22 bp, Artificial Sequence
  chemically synthesized
agtgtttttacagacctgtgtg

SEQ ID NO: 5012 - DNA, 22 bp, Artificial Sequence
  chemically synthesized
ttacagacctgtgtgaaagatg

SEQ ID NO: 5013 - DNA, 22 bp, Artificial Sequence
  chemically synthesized
tacagacctgtgtgaaagatgg

SEQ ID NO: 5014 - DNA, 22 bp, Artificial Sequence
  chemically synthesized
acagacctgtgtgaaagatggg

SEQ ID NO: 5015 - DNA, 22 bp, Artificial Sequence
  chemically synthesized
cagacctgtgtgaaagatggga

SEQ ID NO: 5016 - DNA, 22 bp, Artificial Sequence
  chemically synthesized
tgtgaaagatgggacataccat

SEQ ID NO: 5017 - DNA, 22 bp, Artificial Sequence
  chemically synthesized
aaatactgacttacctgatttt

SEQ ID NO: 5018 - DNA, 22 bp, Artificial Sequence
  chemically synthesized
acttacctgattttctatttct

SEQ ID NO: 5019 - DNA, 22 bp, Artificial Sequence
  chemically synthesized
acctgattttctatttctttta

SEQ ID NO: 5020 - DNA, 22 bp, Artificial Sequence
  chemically synthesized
cctgattttctatttcttttat

SEQ ID NO: 5021 - DNA, 22 bp, Artificial Sequence
  chemically synthesized
attttctatttcttttatttga

SEQ ID NO: 5022 - DNA, 22 bp, Artificial Sequence
  chemically synthesized
tctatttcttttatttgactat

SEQ ID NO: 5023 - DNA, 22 bp, Artificial Sequence
  chemically synthesized
ctatttcttttatttgactatg

SEQ ID NO: 5024 - DNA, 22 bp, Artificial Sequence
  chemically synthesized
tatttcttttatttgactatgc

SEQ ID NO: 5025 - DNA, 22 bp, Artificial Sequence
  chemically synthesized
tttcttttatttgactatgctg

SEQ ID NO: 5026 - DNA, 22 bp, Artificial Sequence
  chemically synthesized
cttttatttgactatgctgttg

SEQ ID NO: 5027 - DNA, 22 bp, Artificial Sequence
  chemically synthesized
ttttatttgactatgctgttgg

SEQ ID NO: 5028 - DNA, 22 bp, Artificial Sequence
  chemically synthesized
ttatttgactatgctgttggtt

SEQ ID NO: 5029 - DNA, 22 bp, Artificial Sequence
  chemically synthesized
tatttgactatgctgttggttt

SEQ ID NO: 5030 - DNA, 22 bp, Artificial Sequence
  chemically synthesized
atttgactatgctgttggttta

SEQ ID NO: 5031 - DNA, 22 bp, Artificial Sequence
  chemically synthesized
tttgactatgctgttggtttaa

SEQ ID NO: 5032 - DNA, 22 bp, Artificial Sequence
  chemically synthesized
gactatgctgttggtttaattg

SEQ ID NO: 5033 - DNA, 22 bp, Artificial Sequence
  chemically synthesized
actatgctgttggtttaattgt

SEQ ID NO: 5034 - DNA, 22 bp, Artificial Sequence
  chemically synthesized
tgctgttggtttaattgtttat

SEQ ID NO: 5035 - DNA, 22 bp, Artificial Sequence
  chemically synthesized
ttggtttaattgtttatattgg

SEQ ID NO: 5036 - DNA, 22 bp, Artificial Sequence
  chemically synthesized
gtttaattgtttatattggtct

SEQ ID NO: 5037 - DNA, 22 bp, Artificial Sequence
  chemically synthesized
aattgtttatattggtcttcca

SEQ ID NO: 5038 - DNA, 22 bp, Artificial Sequence
  chemically synthesized
attgtttatattggtcttccac

SEQ ID NO: 5039 - DNA, 22 bp, Artificial Sequence
  chemically synthesized
tttatattggtcttccacggtc

SEQ ID NO: 5040 - DNA, 22 bp, Artificial Sequence
  chemically synthesized
atattggtcttccacggtctgg

SEQ ID NO: 5041 - DNA, 22 bp, Artificial Sequence
  chemically synthesized
tattggtcttccacggtctgga

SEQ ID NO: 5042 - DNA, 22 bp, Artificial Sequence
  chemically synthesized
gtcttccacggtctggagaagg

SEQ ID NO: 5043 - DNA, 22 bp, Artificial Sequence
  chemically synthesized
ccacggtctggagaaggtcttt

SEQ ID NO: 5044 - DNA, 22 bp, Artificial Sequence
  chemically synthesized
cacggtctggagaaggtctttg

SEQ ID NO: 5045 - DNA, 22 bp, Artificial Sequence
  chemically synthesized
gagaaggtctttgatgctatta

SEQ ID NO: 5046 - DNA, 22 bp, Artificial Sequence
  chemically synthesized
tgatgctattatcttgtttttc

SEQ ID NO: 5047 - DNA, 22 bp, Artificial Sequence
  chemically synthesized
gatgctattatcttgtttttct

SEQ ID NO: 5048 - DNA, 22 bp, Artificial Sequence
  chemically synthesized
atgctattatcttgtttttcta

SEQ ID NO: 5049 - DNA, 22 bp, Artificial Sequence
  chemically synthesized
ttatcttgtttttctacaaaag

SEQ ID NO: 5050 - DNA, 22 bp, Artificial Sequence
  chemically synthesized
tcttgtttttctacaaaagtct

SEQ ID NO: 5051 - DNA, 22 bp, Artificial Sequence
  chemically synthesized
gtttttctacaaaagtctggat

SEQ ID NO: 5052 - DNA, 22 bp, Artificial Sequence
  chemically synthesized
tttttctacaaaagtctggata

SEQ ID NO: 5053 - DNA, 22 bp, Artificial Sequence
  chemically synthesized
ttctacaaaagtctggatatag

SEQ ID NO: 5054 - DNA, 22 bp, Artificial Sequence
  chemically synthesized
tctacaaaagtctggatataga

SEQ ID NO: 5055 - DNA, 22 bp, Artificial Sequence
  chemically synthesized
ctacaaaagtctggatatagag

SEQ ID NO: 5056 - DNA, 22 bp, Artificial Sequence
  chemically synthesized
tacaaaagtctggatatagaga

SEQ ID NO: 5057 - DNA, 22 bp, Artificial Sequence
  chemically synthesized
caaaagtctggatatagagagt

SEQ ID NO: 5058 - DNA, 22 bp, Artificial Sequence
  chemically synthesized
gatatagagagtaggttggtta

SEQ ID NO: 5059 - DNA, 22 bp, Artificial Sequence
  chemically synthesized
gttataagttgctttcctcttt

SEQ ID NO: 5060 - DNA, 22 bp, Artificial Sequence
  chemically synthesized
taagttgctttcctctttcttt

SEQ ID NO: 5061 - DNA, 22 bp, Artificial Sequence
  chemically synthesized
ctttcctctttcttttctatta

SEQ ID NO: 5062 - DNA, 22 bp, Artificial Sequence
  chemically synthesized
tcctctttcttttctattaatt

SEQ ID NO: 5063 - DNA, 22 bp, Artificial Sequence
  chemically synthesized
cctctttcttttctattaattt

SEQ ID NO: 5064 - DNA, 22 bp, Artificial Sequence
  chemically synthesized
ctctttcttttctattaatttc

SEQ ID NO: 5065 - DNA, 22 bp, Artificial Sequence
  chemically synthesized
tttcttttctattaatttcctg

SEQ ID NO: 5066 - DNA, 22 bp, Artificial Sequence
  chemically synthesized
tcttttctattaatttcctgta

SEQ ID NO: 5067 - DNA, 22 bp, Artificial Sequence
  chemically synthesized
cttttctattaatttcctgtaa

SEQ ID NO: 5068 - DNA, 22 bp, Artificial Sequence
  chemically synthesized
ttttctattaatttcctgtaac

SEQ ID NO: 5069 - DNA, 22 bp, Artificial Sequence
  chemically synthesized
ttctattaatttcctgtaacac

SEQ ID NO: 5070 - DNA, 22 bp, Artificial Sequence
  chemically synthesized
tctattaatttcctgtaacact

SEQ ID NO: 5071 - DNA, 22 bp, Artificial Sequence
  chemically synthesized
ctattaatttcctgtaacacta

SEQ ID NO: 5072 - DNA, 22 bp, Artificial Sequence
  chemically synthesized
tattaatttcctgtaacactat

SEQ ID NO: 5073 - DNA, 22 bp, Artificial Sequence
  chemically synthesized
ttaatttcctgtaacactatca

SEQ ID NO: 5074 - DNA, 22 bp, Artificial Sequence
  chemically synthesized
atttcctgtaacactatcataa

SEQ ID NO: 5075 - DNA, 22 bp, Artificial Sequence
  chemically synthesized
cctgtaacactatcataatcta

SEQ ID NO: 5076 - DNA, 22 bp, Artificial Sequence
  chemically synthesized
ctgtaacactatcataatctaa

SEQ ID NO: 5077 - DNA, 22 bp, Artificial Sequence
  chemically synthesized
taacactatcataatctaaatt

SEQ ID NO: 5078 - DNA, 22 bp, Artificial Sequence
  chemically synthesized
tcataatctaaatttttaaact

SEQ ID NO: 5079 - DNA, 22 bp, Artificial Sequence
  chemically synthesized
aatttttaaactaataatggat

SEQ ID NO: 5080 - DNA, 22 bp, Artificial Sequence
  chemically synthesized
ttaaactaataatggatttgaa

SEQ ID NO: 5081 - DNA, 22 bp, Artificial Sequence
  chemically synthesized
taaactaataatggatttgaaa

SEQ ID NO: 5082 - DNA, 22 bp, Artificial Sequence
  chemically synthesized
aaactaataatggatttgaaaa

SEQ ID NO: 5083 - DNA, 22 bp, Artificial Sequence
  chemically synthesized
aactaataatggatttgaaaaa

SEQ ID NO: 5084 - DNA, 22 bp, Artificial Sequence
  chemically synthesized
ataatggatttgaaaaatgaat

SEQ ID NO: 5085 - DNA, 22 bp, Artificial Sequence
  chemically synthesized
gaaaaatgaatattggcaattc

SEQ ID NO: 5086 - DNA, 22 bp, Artificial Sequence
  chemically synthesized
aaaaatgaatattggcaattcc

SEQ ID NO: 5087 - DNA, 22 bp, Artificial Sequence
  chemically synthesized
gcaattccttccccttgtatgc

SEQ ID NO: 5088 - DNA, 22 bp, Artificial Sequence
  chemically synthesized
cttccccttgtatgcttctttc

SEQ ID NO: 5089 - DNA, 22 bp, Artificial Sequence
  chemically synthesized
ccccttgtatgcttctttcaaa

SEQ ID NO: 5090 - DNA, 22 bp, Artificial Sequence
  chemically synthesized
cccttgtatgcttctttcaaat

SEQ ID NO: 5091 - DNA, 22 bp, Artificial Sequence
  chemically synthesized
gtatgcttctttcaaatagcac

SEQ ID NO: 5092 - DNA, 22 bp, Artificial Sequence
  chemically synthesized
tatgcttctttcaaatagcaca

SEQ ID NO: 5093 - DNA, 22 bp, Artificial Sequence
  chemically synthesized
ctttcaaatagcacatattttt

SEQ ID NO: 5094 - DNA, 22 bp, Artificial Sequence
  chemically synthesized
tttcaaatagcacatatttttg

SEQ ID NO: 5095 - DNA, 22 bp, Artificial Sequence
  chemically synthesized
tcaaatagcacatatttttgtc

SEQ ID NO: 5096 - DNA, 22 bp, Artificial Sequence
  chemically synthesized
caaatagcacatatttttgtcc

SEQ ID NO: 5097 - DNA, 22 bp, Artificial Sequence
  chemically synthesized
aaatagcacatatttttgtcct

SEQ ID NO: 5098 - DNA, 22 bp, Artificial Sequence
  chemically synthesized
ttgtccttaacattttatttaa

SEQ ID NO: 5099 - DNA, 22 bp, Artificial Sequence
  chemically synthesized
tgtccttaacattttatttaaa

SEQ ID NO: 5100 - DNA, 22 bp, Artificial Sequence
  chemically synthesized
gtccttaacattttatttaaat

SEQ ID NO: 5101 - DNA, 22 bp, Artificial Sequence
  chemically synthesized
tccttaacattttatttaaatt

SEQ ID NO: 5102 - DNA, 22 bp, Artificial Sequence
  chemically synthesized
aacattttatttaaattgtact

SEQ ID NO: 5103 - DNA, 22 bp, Artificial Sequence
  chemically synthesized
acattttatttaaattgtacta

SEQ ID NO: 5104 - DNA, 22 bp, Artificial Sequence
  chemically synthesized
tatttaaattgtactatctcta

SEQ ID NO: 5105 - DNA, 22 bp, Artificial Sequence
  chemically synthesized
atttaaattgtactatctctaa

SEQ ID NO: 5106 - DNA, 22 bp, Artificial Sequence
  chemically synthesized
tttaaattgtactatctctaaa

SEQ ID NO: 5107 - DNA, 22 bp, Artificial Sequence
  chemically synthesized
aaattgtactatctctaaaatt

SEQ ID NO: 5108 - DNA, 22 bp, Artificial Sequence
  chemically synthesized
aattgtactatctctaaaattt

SEQ ID NO: 5109 - DNA, 22 bp, Artificial Sequence
  chemically synthesized
tactatctctaaaatttgattt

SEQ ID NO: 5110 - DNA, 22 bp, Artificial Sequence
  chemically synthesized
tctctaaaatttgattttctga

SEQ ID NO: 5111 - DNA, 22 bp, Artificial Sequence
  chemically synthesized
taaaatttgattttctgaactt

SEQ ID NO: 5112 - DNA, 22 bp, Artificial Sequence
  chemically synthesized
aaatttgattttctgaacttca

SEQ ID NO: 5113 - DNA, 22 bp, Artificial Sequence
  chemically synthesized
gattttctgaacttcaattaaa

SEQ ID NO: 5114 - DNA, 22 bp, Artificial Sequence
  chemically synthesized
attttctgaacttcaattaaaa

SEQ ID NO: 5115 - DNA, 22 bp, Artificial Sequence
  chemically synthesized
tctgaacttcaattaaaagaaa

SEQ ID NO: 5116 - DNA, 22 bp, Artificial Sequence
  chemically synthesized
ctgaacttcaattaaaagaaaa

SEQ ID NO: 5117 - DNA, 22 bp, Artificial Sequence
  chemically synthesized
tgaacttcaattaaaagaaaaa

SEQ ID NO: 5118 - DNA, 22 bp, Artificial Sequence
  chemically synthesized
aacttcaattaaaagaaaaagc

SEQ ID NO: 5119 - DNA, 22 bp, Artificial Sequence
  chemically synthesized
caattaaaagaaaaagcccagc

SEQ ID NO: 5120 - DNA, 22 bp, Artificial Sequence
  chemically synthesized
aattaaaagaaaaagcccagca

SEQ ID NO: 5121 - DNA, 22 bp, Artificial Sequence
  chemically synthesized
aaagaaaaagcccagcatattt

SEQ ID NO: 5122 - DNA, 22 bp, Artificial Sequence
  chemically synthesized
tcatatgaataaatcttttcca

SEQ ID NO: 5123 - DNA, 22 bp, Artificial Sequence
  chemically synthesized
catatgaataaatcttttccat

SEQ ID NO: 5124 - DNA, 22 bp, Artificial Sequence
  chemically synthesized
atatgaataaatcttttccatt

SEQ ID NO: 5125 - DNA, 22 bp, Artificial Sequence
  chemically synthesized
ttccatttactgtattatttaa

SEQ ID NO: 5126 - DNA, 22 bp, Artificial Sequence
  chemically synthesized
tccatttactgtattatttaat

SEQ ID NO: 5127 - DNA, 22 bp, Artificial Sequence
  chemically synthesized
ccatttactgtattatttaatc

SEQ ID NO: 5128 - DNA, 22 bp, Artificial Sequence
  chemically synthesized
catttactgtattatttaatct

SEQ ID NO: 5129 - DNA, 22 bp, Artificial Sequence
  chemically synthesized
actgtattatttaatctgtttt

SEQ ID NO: 5130 - DNA, 22 bp, Artificial Sequence
  chemically synthesized
ctgtattatttaatctgtttta

SEQ ID NO: 5131 - DNA, 22 bp, Artificial Sequence
  chemically synthesized
tattatttaatctgttttaaac

SEQ ID NO: 5132 - DNA, 22 bp, Artificial Sequence
  chemically synthesized
tttaatctgttttaaacactgg

SEQ ID NO: 5133 - DNA, 22 bp, Artificial Sequence
  chemically synthesized
aatctgttttaaacactggaga

SEQ ID NO: 5134 - DNA, 22 bp, Artificial Sequence
  chemically synthesized
atctgttttaaacactggagaa

SEQ ID NO: 5135 - DNA, 22 bp, Artificial Sequence
  chemically synthesized
ttttaaacactggagaatagtt

SEQ ID NO: 5136 - DNA, 22 bp, Artificial Sequence
  chemically synthesized
taaacactggagaatagtttta

SEQ ID NO: 5137 - DNA, 22 bp, Artificial Sequence
  chemically synthesized
aaacactggagaatagttttaa

SEQ ID NO: 5138 - DNA, 22 bp, Artificial Sequence
  chemically synthesized
aacactggagaatagttttaaa

SEQ ID NO: 5139 - DNA, 22 bp, Artificial Sequence
  chemically synthesized
gagaatagttttaaattttttt

SEQ ID NO: 5140 - DNA, 22 bp, Artificial Sequence
  chemically synthesized
taaattttttttaactttttac

SEQ ID NO: 5141 - DNA, 22 bp, Artificial Sequence
  chemically synthesized
aaattttttttaactttttact

SEQ ID NO: 5142 - DNA, 22 bp, Artificial Sequence
  chemically synthesized
aattttttttaactttttactt

SEQ ID NO: 5143 - DNA, 22 bp, Artificial Sequence
  chemically synthesized
tttttaactttttacttacctt

SEQ ID NO: 5144 - DNA, 22 bp, Artificial Sequence
  chemically synthesized
ttttaactttttacttaccttc

SEQ ID NO: 5145 - DNA, 22 bp, Artificial Sequence
  chemically synthesized
tttaactttttacttaccttca

SEQ ID NO: 5146 - DNA, 22 bp, Artificial Sequence
  chemically synthesized
ttaactttttacttaccttcag

SEQ ID NO: 5147 - DNA, 22 bp, Artificial Sequence
  chemically synthesized
taactttttacttaccttcagt

SEQ ID NO: 5148 - DNA, 22 bp, Artificial Sequence
  chemically synthesized
aactttttacttaccttcagta

SEQ ID NO: 5149 - DNA, 22 bp, Artificial Sequence
  chemically synthesized
actttttacttaccttcagtaa

SEQ ID NO: 5150 - DNA, 22 bp, Artificial Sequence
  chemically synthesized
tttacttaccttcagtaattta

SEQ ID NO: 5151 - DNA, 22 bp, Artificial Sequence
  chemically synthesized
ttacttaccttcagtaatttac

SEQ ID NO: 5152 - DNA, 22 bp, Artificial Sequence
  chemically synthesized
tacttaccttcagtaatttaca

SEQ ID NO: 5153 - DNA, 22 bp, Artificial Sequence
  chemically synthesized
acttaccttcagtaatttacaa

SEQ ID NO: 5154 - DNA, 22 bp, Artificial Sequence
  chemically synthesized
cttaccttcagtaatttacaat

SEQ ID NO: 5155 - DNA, 22 bp, Artificial Sequence
  chemically synthesized
accttcagtaatttacaatagt

SEQ ID NO: 5156 - DNA, 22 bp, Artificial Sequence
  chemically synthesized
ccttcagtaatttacaatagtg

SEQ ID NO: 5157 - DNA, 22 bp, Artificial Sequence
  chemically synthesized
cagtaatttacaatagtgtaat

SEQ ID NO: 5158 - DNA, 22 bp, Artificial Sequence
  chemically synthesized
agtaatttacaatagtgtaatg

SEQ ID NO: 5159 - DNA, 22 bp, Artificial Sequence
  chemically synthesized
acaatagtgtaatgacatagtg

SEQ ID NO: 5160 - DNA, 22 bp, Artificial Sequence
  chemically synthesized
caatagtgtaatgacatagtgt

SEQ ID NO: 5161 - DNA, 22 bp, Artificial Sequence
  chemically synthesized
tagattgtataatttaaccgat

SEQ ID NO: 5162 - DNA, 22 bp, Artificial Sequence
  chemically synthesized
gattgtataatttaaccgattt

SEQ ID NO: 5163 - DNA, 22 bp, Artificial Sequence
  chemically synthesized
tataatttaaccgatttgtaat

SEQ ID NO: 5164 - DNA, 22 bp, Artificial Sequence
  chemically synthesized
aaccgatttgtaattttcatat

SEQ ID NO: 5165 - DNA, 22 bp, Artificial Sequence
  chemically synthesized
accgatttgtaattttcatata

SEQ ID NO: 5166 - DNA, 22 bp, Artificial Sequence
  chemically synthesized
gtaattttcatataaaatgcaa

SEQ ID NO: 5167 - DNA, 22 bp, Artificial Sequence
  chemically synthesized
taattttcatataaaatgcaaa

SEQ ID NO: 5168 - DNA, 22 bp, Artificial Sequence
  chemically synthesized
tcatataaaatgcaaattttca

SEQ ID NO: 5169 - DNA, 22 bp, Artificial Sequence
  chemically synthesized
catataaaatgcaaattttcag

SEQ ID NO: 5170 - DNA, 22 bp, Artificial Sequence
  chemically synthesized
atataaaatgcaaattttcagt

SEQ ID NO: 5171 - DNA, 22 bp, Artificial Sequence
  chemically synthesized
tcagtgttttcatatataacat

SEQ ID NO: 5172 - DNA, 22 bp, Artificial Sequence
  chemically synthesized
cagtgttttcatatataacatt

SEQ ID NO: 5173 - DNA, 22 bp, Artificial Sequence
  chemically synthesized
agtgttttcatatataacatta

SEQ ID NO: 5174 - DNA, 22 bp, Artificial Sequence
  chemically synthesized
tcatatataacattagggaaac

SEQ ID NO: 5175 - DNA, 22 bp, Artificial Sequence
  chemically synthesized
catatataacattagggaaaca

SEQ ID NO: 5176 - DNA, 22 bp, Artificial Sequence
  chemically synthesized
atatataacattagggaaacaa

SEQ ID NO: 5177 - DNA, 22 bp, Artificial Sequence
  chemically synthesized
gggaaacaaaaaactaacttga

SEQ ID NO: 5178 - DNA, 22 bp, Artificial Sequence
  chemically synthesized
acttgaaattataataggaaat

SEQ ID NO: 5179 - DNA, 22 bp, Artificial Sequence
  chemically synthesized
gaaattataataggaaatttta

SEQ ID NO: 5180 - DNA, 22 bp, Artificial Sequence
  chemically synthesized
aaattataataggaaattttat

SEQ ID NO: 5181 - DNA, 22 bp, Artificial Sequence
  chemically synthesized
taataggaaattttattttctg

SEQ ID NO: 5182 - DNA, 22 bp, Artificial Sequence
  chemically synthesized
tattttctggagattatttttc

SEQ ID NO: 5183 - DNA, 22 bp, Artificial Sequence
  chemically synthesized
attttctggagattatttttct

SEQ ID NO: 5184 - DNA, 22 bp, Artificial Sequence
  chemically synthesized
ttttctggagattatttttctt

SEQ ID NO: 5185 - DNA, 22 bp, Artificial Sequence
  chemically synthesized
tctggagattatttttcttgga

SEQ ID NO: 5186 - DNA, 22 bp, Artificial Sequence
  chemically synthesized
ctggagattatttttcttggaa

SEQ ID NO: 5187 - DNA, 22 bp, Artificial Sequence
  chemically synthesized
tggagattatttttcttggaaa

SEQ ID NO: 5188 - DNA, 22 bp, Artificial Sequence
  chemically synthesized
gagattatttttcttggaaaaa

SEQ ID NO: 5189 - DNA, 22 bp, Artificial Sequence
  chemically synthesized
tttttcttggaaaaaaaagtat

SEQ ID NO: 5190 - DNA, 22 bp, Artificial Sequence
  chemically synthesized
ttcttggaaaaaaaagtatttc

SEQ ID NO: 5191 - DNA, 22 bp, Artificial Sequence
  chemically synthesized
tcttggaaaaaaaagtatttca

SEQ ID NO: 5192 - DNA, 22 bp, Artificial Sequence
  chemically synthesized
cttggaaaaaaaagtatttcaa

SEQ ID NO: 5193 - DNA, 22 bp, Artificial Sequence
  chemically synthesized
ttggaaaaaaaagtatttcaac

SEQ ID NO: 5194 - DNA, 22 bp, Artificial Sequence
  chemically synthesized
ggaaaaaaaagtatttcaacaa

SEQ ID NO: 5195 - DNA, 22 bp, Artificial Sequence
  chemically synthesized
gaaaaaaaagtatttcaacaat

SEQ ID NO: 5196 - DNA, 22 bp, Artificial Sequence
  chemically synthesized
caacaatgcaacaaagtatttc

SEQ ID NO: 5197 - DNA, 22 bp, Artificial Sequence
  chemically synthesized
aacaatgcaacaaagtatttca

SEQ ID NO: 5198 - DNA, 22 bp, Artificial Sequence
  chemically synthesized
caaatggcatgccttagaaata

SEQ ID NO: 5199 - DNA, 22 bp, Artificial Sequence
  chemically synthesized
aaatggcatgccttagaaatat

SEQ ID NO: 5200 - DNA, 22 bp, Artificial Sequence
  chemically synthesized
agaaatattttttttaaaagat

SEQ ID NO: 5201 - DNA, 22 bp, Artificial Sequence
  chemically synthesized
gaaatattttttttaaaagatc

SEQ ID NO: 5202 - DNA, 22 bp, Artificial Sequence
  chemically synthesized
tttttaaaagatccacattgaa

SEQ ID NO: 5203 - DNA, 22 bp, Artificial Sequence
  chemically synthesized
ttttaaaagatccacattgaaa

SEQ ID NO: 5204 - DNA, 22 bp, Artificial Sequence
  chemically synthesized
tttaaaagatccacattgaaaa

SEQ ID NO: 5205 - DNA, 22 bp, Artificial Sequence
  chemically synthesized
ttaaaagatccacattgaaaac

SEQ ID NO: 5206 - DNA, 22 bp, Artificial Sequence
  chemically synthesized
taaaagatccacattgaaaaca

SEQ ID NO: 5207 - DNA, 22 bp, Artificial Sequence
  chemically synthesized
aaaagatccacattgaaaacat

SEQ ID NO: 5208 - DNA, 22 bp, Artificial Sequence
  chemically synthesized
aaagatccacattgaaaacata

SEQ ID NO: 5209 - DNA, 22 bp, Artificial Sequence
  chemically synthesized
aaaacataaacatgaaccctct

SEQ ID NO: 5210 - DNA, 22 bp, Artificial Sequence
  chemically synthesized
tttattttctacttactttaag

SEQ ID NO: 5211 - DNA, 22 bp, Artificial Sequence
  chemically synthesized
tattttctacttactttaagtg

SEQ ID NO: 5212 - DNA, 22 bp, Artificial Sequence
  chemically synthesized
attttctacttactttaagtga

SEQ ID NO: 5213 - DNA, 22 bp, Artificial Sequence
  chemically synthesized
ttttctacttactttaagtgaa

SEQ ID NO: 5214 - DNA, 22 bp, Artificial Sequence
  chemically synthesized
tctacttactttaagtgaagtt

SEQ ID NO: 5215 - DNA, 22 bp, Artificial Sequence
  chemically synthesized
ctacttactttaagtgaagtta

SEQ ID NO: 5216 - DNA, 22 bp, Artificial Sequence
  chemically synthesized
tacttactttaagtgaagttac

SEQ ID NO: 5217 - DNA, 22 bp, Artificial Sequence
  chemically synthesized
cttactttaagtgaagttactt

SEQ ID NO: 5218 - DNA, 22 bp, Artificial Sequence
  chemically synthesized
actttaagtgaagttacttctg

SEQ ID NO: 5219 - DNA, 22 bp, Artificial Sequence
  chemically synthesized
ctttaagtgaagttacttctgg

SEQ ID NO: 5220 - DNA, 22 bp, Artificial Sequence
  chemically synthesized
taagtgaagttacttctgggtg

SEQ ID NO: 5221 - DNA, 22 bp, Artificial Sequence
  chemically synthesized
aagtgaagttacttctgggtgt

SEQ ID NO: 5222 - DNA, 22 bp, Artificial Sequence
  chemically synthesized
agtgaagttacttctgggtgtt

SEQ ID NO: 5223 - DNA, 22 bp, Artificial Sequence
  chemically synthesized
cttctgggtgttctggagtttc

SEQ ID NO: 5224 - DNA, 22 bp, Artificial Sequence
  chemically synthesized
ctgggtgttctggagtttcagg

SEQ ID NO: 5225 - DNA, 22 bp, Artificial Sequence
  chemically synthesized
tgggtgttctggagtttcaggt

SEQ ID NO: 5226 - DNA, 22 bp, Artificial Sequence
  chemically synthesized
ggtgttctggagtttcaggttg

SEQ ID NO: 5227 - DNA, 22 bp, Artificial Sequence
  chemically synthesized
tggagtttcaggttgattttga

SEQ ID NO: 5228 - DNA, 22 bp, Artificial Sequence
  chemically synthesized
gagtttcaggttgattttgaat

SEQ ID NO: 5229 - DNA, 22 bp, Artificial Sequence
  chemically synthesized
caggttgattttgaattaagtt

SEQ ID NO: 5230 - DNA, 22 bp, Artificial Sequence
  chemically synthesized
aggttgattttgaattaagtta

SEQ ID NO: 5231 - DNA, 22 bp, Artificial Sequence
  chemically synthesized
attttgaattaagttagttagt

SEQ ID NO: 5232 - DNA, 22 bp, Artificial Sequence
  chemically synthesized
tgaattaagttagttagttgct

SEQ ID NO: 5233 - DNA, 22 bp, Artificial Sequence
  chemically synthesized
gaattaagttagttagttgctc

SEQ ID NO: 5234 - DNA, 22 bp, Artificial Sequence
  chemically synthesized
aattaagttagttagttgctct

SEQ ID NO: 5235 - DNA, 22 bp, Artificial Sequence
  chemically synthesized
agttagttagttgctcttctaa

SEQ ID NO: 5236 - DNA, 22 bp, Artificial Sequence
  chemically synthesized
gttagttgctcttctaaatatt

SEQ ID NO: 5237 - DNA, 22 bp, Artificial Sequence
  chemically synthesized
gttgctcttctaaatatttcac

SEQ ID NO: 5238 - DNA, 22 bp, Artificial Sequence
  chemically synthesized
ctcttctaaatatttcactttt

SEQ ID NO: 5239 - DNA, 22 bp, Artificial Sequence
  chemically synthesized
ttctaaatatttcactttttgt

SEQ ID NO: 5240 - DNA, 22 bp, Artificial Sequence
  chemically synthesized
ctaaatatttcactttttgttg

SEQ ID NO: 5241 - DNA, 22 bp, Artificial Sequence
  chemically synthesized
taaatatttcactttttgttga

SEQ ID NO: 5242 - DNA, 22 bp, Artificial Sequence
  chemically synthesized
aatatttcactttttgttgaag

SEQ ID NO: 5243 - DNA, 22 bp, Artificial Sequence
  chemically synthesized
cactttttgttgaagtagaatt

SEQ ID NO: 5244 - DNA, 22 bp, Artificial Sequence
  chemically synthesized
actttttgttgaagtagaattt

SEQ ID NO: 5245 - DNA, 22 bp, Artificial Sequence
  chemically synthesized
tttgttgaagtagaattttttc

SEQ ID NO: 5246 - DNA, 22 bp, Artificial Sequence
  chemically synthesized
ttgttgaagtagaattttttct

SEQ ID NO: 5247 - DNA, 22 bp, Artificial Sequence
  chemically synthesized
tgttgaagtagaattttttctt

SEQ ID NO: 5248 - DNA, 22 bp, Artificial Sequence
  chemically synthesized
gttgaagtagaattttttcttc

SEQ ID NO: 5249 - DNA, 22 bp, Artificial Sequence
  chemically synthesized
ttgaagtagaattttttcttct

SEQ ID NO: 5250 - DNA, 22 bp, Artificial Sequence
  chemically synthesized
aagtagaattttttcttctagg

SEQ ID NO: 5251 - DNA, 22 bp, Artificial Sequence
  chemically synthesized
tttcttctaggaggctttcaag

SEQ ID NO: 5252 - DNA, 22 bp, Artificial Sequence
  chemically synthesized
ttcttctaggaggctttcaagt

SEQ ID NO: 5253 - DNA, 22 bp, Artificial Sequence
  chemically synthesized
tcttctaggaggctttcaagtt

SEQ ID NO: 5254 - DNA, 22 bp, Artificial Sequence
  chemically synthesized
cttctaggaggctttcaagttt

SEQ ID NO: 5255 - DNA, 22 bp, Artificial Sequence
  chemically synthesized
ttctaggaggctttcaagtttt

SEQ ID NO: 5256 - DNA, 22 bp, Artificial Sequence
  chemically synthesized
ctaggaggctttcaagttttga

SEQ ID NO: 5257 - DNA, 22 bp, Artificial Sequence
  chemically synthesized
taggaggctttcaagttttgag

SEQ ID NO: 5258 - DNA, 22 bp, Artificial Sequence
  chemically synthesized
ggaggctttcaagttttgagtt

SEQ ID NO: 5259 - DNA, 22 bp, Artificial Sequence
  chemically synthesized
tcaagttttgagttgagttcaa

SEQ ID NO: 5260 - DNA, 22 bp, Artificial Sequence
  chemically synthesized
caagttttgagttgagttcaag

SEQ ID NO: 5261 - DNA, 22 bp, Artificial Sequence
  chemically synthesized
aagttttgagttgagttcaagt

SEQ ID NO: 5262 - DNA, 22 bp, Artificial Sequence
  chemically synthesized
tgagttgagttcaagtgacata

SEQ ID NO: 5263 - DNA, 22 bp, Artificial Sequence
  chemically synthesized
gagttgagttcaagtgacatat

SEQ ID NO: 5264 - DNA, 22 bp, Artificial Sequence
  chemically synthesized
agttgagttcaagtgacatatt

SEQ ID NO: 5265 - DNA, 22 bp, Artificial Sequence
  chemically synthesized
agttcaagtgacatattcttta

SEQ ID NO: 5266 - DNA, 22 bp, Artificial Sequence
  chemically synthesized
aagtgacatattctttacctct

SEQ ID NO: 5267 - DNA, 22 bp, Artificial Sequence
  chemically synthesized
tttacctcttcatttttgactt

SEQ ID NO: 5268 - DNA, 22 bp, Artificial Sequence
  chemically synthesized
tacctcttcatttttgacttgt

SEQ ID NO: 5269 - DNA, 22 bp, Artificial Sequence
  chemically synthesized
acctcttcatttttgacttgta

SEQ ID NO: 5270 - DNA, 22 bp, Artificial Sequence
  chemically synthesized
cctcttcatttttgacttgtag

SEQ ID NO: 5271 - DNA, 22 bp, Artificial Sequence
  chemically synthesized
ttcatttttgacttgtagttta

SEQ ID NO: 5272 - DNA, 22 bp, Artificial Sequence
  chemically synthesized
catttttgacttgtagtttata

SEQ ID NO: 5273 - DNA, 22 bp, Artificial Sequence
  chemically synthesized
atttttgacttgtagtttatat

SEQ ID NO: 5274 - DNA, 22 bp, Artificial Sequence
  chemically synthesized
ttgacttgtagtttatatgtag

SEQ ID NO: 5275 - DNA, 22 bp, Artificial Sequence
  chemically synthesized
tgacttgtagtttatatgtagt

SEQ ID NO: 5276 - DNA, 22 bp, Artificial Sequence
  chemically synthesized
gacttgtagtttatatgtagtt

SEQ ID NO: 5277 - DNA, 22 bp, Artificial Sequence
  chemically synthesized
acttgtagtttatatgtagttc

SEQ ID NO: 5278 - DNA, 22 bp, Artificial Sequence
  chemically synthesized
gtagtttatatgtagttcttct

SEQ ID NO: 5279 - DNA, 22 bp, Artificial Sequence
  chemically synthesized
tagtttatatgtagttcttctc

SEQ ID NO: 5280 - DNA, 22 bp, Artificial Sequence
  chemically synthesized
atatgtagttcttctcagttcc

SEQ ID NO: 5281 - DNA, 22 bp, Artificial Sequence
  chemically synthesized
tatgtagttcttctcagttcct

SEQ ID NO: 5282 - DNA, 22 bp, Artificial Sequence
  chemically synthesized
ttctcagttccttttcttcttc

SEQ ID NO: 5283 - DNA, 22 bp, Artificial Sequence
  chemically synthesized
ctcagttccttttcttcttctt

SEQ ID NO: 5284 - DNA, 22 bp, Artificial Sequence
  chemically synthesized
tcagttccttttcttcttcttt

SEQ ID NO: 5285 - DNA, 22 bp, Artificial Sequence
  chemically synthesized
agttccttttcttcttctttga

SEQ ID NO: 5286 - DNA, 22 bp, Artificial Sequence
  chemically synthesized
cttttcttcttctttgatttca

SEQ ID NO: 5287 - DNA, 22 bp, Artificial Sequence
  chemically synthesized
ttcttcttctttgatttcactg

SEQ ID NO: 5288 - DNA, 22 bp, Artificial Sequence
  chemically synthesized
tcttcttctttgatttcactgg

SEQ ID NO: 5289 - DNA, 22 bp, Artificial Sequence
  chemically synthesized
cttcttctttgatttcactggt

SEQ ID NO: 5290 - DNA, 22 bp, Artificial Sequence
  chemically synthesized
ttcttctttgatttcactggtt

SEQ ID NO: 5291 - DNA, 22 bp, Artificial Sequence
  chemically synthesized
cttctttgatttcactggtttg

SEQ ID NO: 5292 - DNA, 22 bp, Artificial Sequence
  chemically synthesized
ttctttgatttcactggtttgc

SEQ ID NO: 5293 - DNA, 22 bp, Artificial Sequence
  chemically synthesized
ctttgatttcactggtttgcag

SEQ ID NO: 5294 - DNA, 22 bp, Artificial Sequence
  chemically synthesized
tttgatttcactggtttgcagc

SEQ ID NO: 5295 - DNA, 22 bp, Artificial Sequence
  chemically synthesized
tgatttcactggtttgcagcga

SEQ ID NO: 5296 - DNA, 22 bp, Artificial Sequence
  chemically synthesized
gatttcactggtttgcagcgat

SEQ ID NO: 5297 - DNA, 22 bp, Artificial Sequence
  chemically synthesized
atttcactggtttgcagcgata

SEQ ID NO: 5298 - DNA, 22 bp, Artificial Sequence
  chemically synthesized
cactggtttgcagcgatagatc

SEQ ID NO: 5299 - DNA, 22 bp, Artificial Sequence
  chemically synthesized
actggtttgcagcgatagatca

SEQ ID NO: 5300 - DNA, 22 bp, Artificial Sequence
  chemically synthesized
gtttgcagcgatagatcataaa

SEQ ID NO: 5301 - DNA, 22 bp, Artificial Sequence
  chemically synthesized
gcagcgatagatcataaaaaga

SEQ ID NO: 5302 - DNA, 22 bp, Artificial Sequence
  chemically synthesized
cagcgatagatcataaaaagac

SEQ ID NO: 5303 - DNA, 22 bp, Artificial Sequence
  chemically synthesized
atcaaatatgttgagtttttga

SEQ ID NO: 5304 - DNA, 22 bp, Artificial Sequence
  chemically synthesized
agtttttgaaatatgtcattaa

SEQ ID NO: 5305 - DNA, 22 bp, Artificial Sequence
  chemically synthesized
ttgaaatatgtcattaatttgg

SEQ ID NO: 5306 - DNA, 22 bp, Artificial Sequence
  chemically synthesized
tgaaatatgtcattaatttggc

SEQ ID NO: 5307 - DNA, 22 bp, Artificial Sequence
  chemically synthesized
gaaatatgtcattaatttggcc

SEQ ID NO: 5308 - DNA, 22 bp, Artificial Sequence
  chemically synthesized
aaatatgtcattaatttggccc

SEQ ID NO: 5309 - DNA, 22 bp, Artificial Sequence
  chemically synthesized
atttggcccttcgtcttatgga

SEQ ID NO: 5310 - DNA, 22 bp, Artificial Sequence
  chemically synthesized
ggcccttcgtcttatggacaaa

SEQ ID NO: 5311 - DNA, 22 bp, Artificial Sequence
  chemically synthesized
gcccttcgtcttatggacaaag

SEQ ID NO: 5312 - DNA, 22 bp, Artificial Sequence
  chemically synthesized
cgtcttatggacaaagtcttta

SEQ ID NO: 5313 - DNA, 22 bp, Artificial Sequence
  chemically synthesized
gtcttatggacaaagtctttaa

SEQ ID NO: 5314 - DNA, 22 bp, Artificial Sequence
  chemically synthesized
atggacaaagtctttaagacca

SEQ ID NO: 5315 - DNA, 22 bp, Artificial Sequence
  chemically synthesized
tggacaaagtctttaagaccat

SEQ ID NO: 5316 - DNA, 22 bp, Artificial Sequence
  chemically synthesized
taagaccatgtcccaactgaag

SEQ ID NO: 5317 - DNA, 22 bp, Artificial Sequence
  chemically synthesized
aagaccatgtcccaactgaagg

SEQ ID NO: 5318 - DNA, 22 bp, Artificial Sequence
  chemically synthesized
agaccatgtcccaactgaagga

SEQ ID NO: 5319 - DNA, 22 bp, Artificial Sequence
  chemically synthesized
aaggaggccattggctaaaatt

SEQ ID NO: 5320 - DNA, 22 bp, Artificial Sequence
  chemically synthesized
gctaaaatttttacatcgtcta

SEQ ID NO: 5321 - DNA, 22 bp, Artificial Sequence
  chemically synthesized
aaatttttacatcgtctaacat

SEQ ID NO: 5322 - DNA, 22 bp, Artificial Sequence
  chemically synthesized
ttacatcgtctaacatagcaaa

SEQ ID NO: 5323 - DNA, 22 bp, Artificial Sequence
  chemically synthesized
tacatcgtctaacatagcaaat

SEQ ID NO: 5324 - DNA, 22 bp, Artificial Sequence
  chemically synthesized
acatcgtctaacatagcaaatc

SEQ ID NO: 5325 - DNA, 22 bp, Artificial Sequence
  chemically synthesized
catcgtctaacatagcaaatct

SEQ ID NO: 5326 - DNA, 22 bp, Artificial Sequence
  chemically synthesized
acatagcaaatcttgattttgg

SEQ ID NO: 5327 - DNA, 22 bp, Artificial Sequence
  chemically synthesized
gattttggctctggagatagag

SEQ ID NO: 5328 - DNA, 22 bp, Artificial Sequence
  chemically synthesized
attttggctctggagatagaga

SEQ ID NO: 5329 - DNA, 22 bp, Artificial Sequence
  chemically synthesized
tggctctggagatagagaatca

SEQ ID NO: 5330 - DNA, 22 bp, Artificial Sequence
  chemically synthesized
ggctctggagatagagaatcaa

SEQ ID NO: 5331 - DNA, 22 bp, Artificial Sequence
  chemically synthesized
gctctggagatagagaatcaaa

SEQ ID NO: 5332 - DNA, 22 bp, Artificial Sequence
  chemically synthesized
tggagatagagaatcaaatgat

SEQ ID NO: 5333 - DNA, 22 bp, Artificial Sequence
  chemically synthesized
gagatagagaatcaaatgatga

SEQ ID NO: 5334 - DNA, 22 bp, Artificial Sequence
  chemically synthesized
tcttgatcaattctggaggaaa

SEQ ID NO: 5335 - DNA, 22 bp, Artificial Sequence
  chemically synthesized
gatcaattctggaggaaataac

SEQ ID NO: 5336 - DNA, 22 bp, Artificial Sequence
  chemically synthesized
atcaattctggaggaaataact

SEQ ID NO: 5337 - DNA, 22 bp, Artificial Sequence
  chemically synthesized
tggaggaaataactagaggaac

SEQ ID NO: 5338 - DNA, 22 bp, Artificial Sequence
  chemically synthesized
gaggaaataactagaggaacaa

SEQ ID NO: 5339 - DNA, 22 bp, Artificial Sequence
  chemically synthesized
gaggaacaataaaaagaaggag

SEQ ID NO: 5340 - DNA, 22 bp, Artificial Sequence
  chemically synthesized
aattgtgaacatttttatcttg

SEQ ID NO: 5341 - DNA, 22 bp, Artificial Sequence
  chemically synthesized
attgtgaacatttttatcttga

SEQ ID NO: 5342 - DNA, 22 bp, Artificial Sequence
  chemically synthesized
tgaacatttttatcttgatttt

SEQ ID NO: 5343 - DNA, 22 bp, Artificial Sequence
  chemically synthesized
ttatcttgattttcaatttcaa

SEQ ID NO: 5344 - DNA, 22 bp, Artificial Sequence
  chemically synthesized
tatcttgattttcaatttcaag

SEQ ID NO: 5345 - DNA, 22 bp, Artificial Sequence
  chemically synthesized
atcttgattttcaatttcaagc

SEQ ID NO: 5346 - DNA, 22 bp, Artificial Sequence
  chemically synthesized
tcttgattttcaatttcaagca

SEQ ID NO: 5347 - DNA, 22 bp, Artificial Sequence
  chemically synthesized
gattttcaatttcaagcaacgt

SEQ ID NO: 5348 - DNA, 22 bp, Artificial Sequence
  chemically synthesized
attttcaatttcaagcaacgtg

SEQ ID NO: 5349 - DNA, 22 bp, Artificial Sequence
  chemically synthesized
tcaatttcaagcaacgtggaac

SEQ ID NO: 5350 - DNA, 22 bp, Artificial Sequence
  chemically synthesized
caatttcaagcaacgtggaact

SEQ ID NO: 5351 - DNA, 22 bp, Artificial Sequence
  chemically synthesized
aatttcaagcaacgtggaactg

SEQ ID NO: 5352 - DNA, 22 bp, Artificial Sequence
  chemically synthesized
caagcaacgtggaactgttttc

SEQ ID NO: 5353 - DNA, 22 bp, Artificial Sequence
  chemically synthesized
aagcaacgtggaactgttttct

SEQ ID NO: 5354 - DNA, 22 bp, Artificial Sequence
  chemically synthesized
ttttcttctggaagcagaccta

SEQ ID NO: 5355 - DNA, 22 bp, Artificial Sequence
  chemically synthesized
tcttctggaagcagacctagac

SEQ ID NO: 5356 - DNA, 22 bp, Artificial Sequence
  chemically synthesized
cttctggaagcagacctagact

SEQ ID NO: 5357 - DNA, 22 bp, Artificial Sequence
  chemically synthesized
ttctggaagcagacctagactt

SEQ ID NO: 5358 - DNA, 22 bp, Artificial Sequence
  chemically synthesized
ctggaagcagacctagacttct

SEQ ID NO: 5359 - DNA, 22 bp, Artificial Sequence
  chemically synthesized
tggaagcagacctagacttctt

SEQ ID NO: 5360 - DNA, 22 bp, Artificial Sequence
  chemically synthesized
gaagcagacctagacttcttaa

SEQ ID NO: 5361 - DNA, 22 bp, Artificial Sequence
  chemically synthesized
gacttcttaactctatatatac

SEQ ID NO: 5362 - DNA, 22 bp, Artificial Sequence
  chemically synthesized
cttaactctatatataccaata

SEQ ID NO: 5363 - DNA, 22 bp, Artificial Sequence
  chemically synthesized
ttaactctatatataccaatat

SEQ ID NO: 5364 - DNA, 22 bp, Artificial Sequence
  chemically synthesized
aactctatatataccaatattt

SEQ ID NO: 5365 - DNA, 22 bp, Artificial Sequence
  chemically synthesized
actctatatataccaatatttg

SEQ ID NO: 5366 - DNA, 22 bp, Artificial Sequence
  chemically synthesized
tatatataccaatatttgccca

SEQ ID NO: 5367 - DNA, 22 bp, Artificial Sequence
  chemically synthesized
tatataccaatatttgcccaga

SEQ ID NO: 5368 - DNA, 22 bp, Artificial Sequence
  chemically synthesized
gcccagaaaaggtaaggttggt

SEQ ID NO: 5369 - DNA, 22 bp, Artificial Sequence
  chemically synthesized
cccagaaaaggtaaggttggta

SEQ ID NO: 5370 - DNA, 22 bp, Artificial Sequence
  chemically synthesized
gtaggtgaacatagttaatcat

SEQ ID NO: 5371 - DNA, 22 bp, Artificial Sequence
  chemically synthesized
atcattaagccgtgttaacttg

SEQ ID NO: 5372 - DNA, 22 bp, Artificial Sequence
  chemically synthesized
agccgtgttaacttgcacgaat

SEQ ID NO: 5373 - DNA, 22 bp, Artificial Sequence
  chemically synthesized
acttgcacgaatgtaaccttct

SEQ ID NO: 5374 - DNA, 22 bp, Artificial Sequence
  chemically synthesized
gcacgaatgtaaccttcttcca

SEQ ID NO: 5375 - DNA, 22 bp, Artificial Sequence
  chemically synthesized
cacgaatgtaaccttcttccac

SEQ ID NO: 5376 - DNA, 22 bp, Artificial Sequence
  chemically synthesized
cttccacattgagttagatcaa

SEQ ID NO: 5377 - DNA, 22 bp, Artificial Sequence
  chemically synthesized
ttccacattgagttagatcaat

SEQ ID NO: 5378 - DNA, 22 bp, Artificial Sequence
  chemically synthesized
ccacattgagttagatcaatgc

SEQ ID NO: 5379 - DNA, 22 bp, Artificial Sequence
  chemically synthesized
cacattgagttagatcaatgct

SEQ ID NO: 5380 - DNA, 22 bp, Artificial Sequence
  chemically synthesized
agttagatcaatgctaaatgaa

SEQ ID NO: 5381 - DNA, 22 bp, Artificial Sequence
  chemically synthesized
gatcaatgctaaatgaaatcaa

SEQ ID NO: 5382 - DNA, 22 bp, Artificial Sequence
  chemically synthesized
aatgaaatcaaagaaatgagca

SEQ ID NO: 5383 - DNA, 22 bp, Artificial Sequence
  chemically synthesized
acttaataggtaatttgaaatt

SEQ ID NO: 5384 - DNA, 22 bp, Artificial Sequence
  chemically synthesized
aataggtaatttgaaattgtat

SEQ ID NO: 5385 - DNA, 22 bp, Artificial Sequence
  chemically synthesized
ataggtaatttgaaattgtatt

SEQ ID NO: 5386 - DNA, 22 bp, Artificial Sequence
  chemically synthesized
gaaattgtatttaactttgctg

SEQ ID NO: 5387 - DNA, 22 bp, Artificial Sequence
  chemically synthesized
aaattgtatttaactttgctgt

SEQ ID NO: 5388 - DNA, 22 bp, Artificial Sequence
  chemically synthesized
tatttaactttgctgtattata

SEQ ID NO: 5389 - DNA, 22 bp, Artificial Sequence
  chemically synthesized
aactttgctgtattataaacta

SEQ ID NO: 5390 - DNA, 22 bp, Artificial Sequence
  chemically synthesized
actttgctgtattataaactac

SEQ ID NO: 5391 - DNA, 22 bp, Artificial Sequence
  chemically synthesized
tgctgtattataaactacacat

SEQ ID NO: 5392 - DNA, 22 bp, Artificial Sequence
  chemically synthesized
gctgtattataaactacacatt

SEQ ID NO: 5393 - DNA, 22 bp, Artificial Sequence
  chemically synthesized
ctgtattataaactacacattc

SEQ ID NO: 5394 - DNA, 22 bp, Artificial Sequence
  chemically synthesized
tattataaactacacattcaat

SEQ ID NO: 5395 - DNA, 22 bp, Artificial Sequence
  chemically synthesized
taaactacacattcaatgctat

SEQ ID NO: 5396 - DNA, 22 bp, Artificial Sequence
  chemically synthesized
cacattcaatgctatggtgact

SEQ ID NO: 5397 - DNA, 22 bp, Artificial Sequence
  chemically synthesized
aatgctatggtgactacctgtt

SEQ ID NO: 5398 - DNA, 22 bp, Artificial Sequence
  chemically synthesized
tggtgactacctgtttttaaaa

SEQ ID NO: 5399 - DNA, 22 bp, Artificial Sequence
  chemically synthesized
cctgtttttaaaagctaatttt

SEQ ID NO: 5400 - DNA, 22 bp, Artificial Sequence
  chemically synthesized
tttttaaaagctaattttactt

SEQ ID NO: 5401 - DNA, 22 bp, Artificial Sequence
  chemically synthesized
ttaaaagctaattttacttttt

SEQ ID NO: 5402 - DNA, 22 bp, Artificial Sequence
  chemically synthesized
taaaagctaattttactttttt

SEQ ID NO: 5403 - DNA, 22 bp, Artificial Sequence
  chemically synthesized
aaaagctaattttactttttta

SEQ ID NO: 5404 - DNA, 22 bp, Artificial Sequence
  chemically synthesized
aaagctaattttacttttttat

SEQ ID NO: 5405 - DNA, 22 bp, Artificial Sequence
  chemically synthesized
attttacttttttatgatttta

SEQ ID NO: 5406 - DNA, 22 bp, Artificial Sequence
  chemically synthesized
tacttttttatgattttaagag

SEQ ID NO: 5407 - DNA, 22 bp, Artificial Sequence
  chemically synthesized
acttttttatgattttaagaga

SEQ ID NO: 5408 - DNA, 22 bp, Artificial Sequence
  chemically synthesized
cttttttatgattttaagagat

SEQ ID NO: 5409 - DNA, 22 bp, Artificial Sequence
  chemically synthesized
ttttatgattttaagagattta

SEQ ID NO: 5410 - DNA, 22 bp, Artificial Sequence
  chemically synthesized
tttatgattttaagagatttac

SEQ ID NO: 5411 - DNA, 22 bp, Artificial Sequence
  chemically synthesized
ttatgattttaagagatttaca

SEQ ID NO: 5412 - DNA, 22 bp, Artificial Sequence
  chemically synthesized
tatgattttaagagatttacaa

SEQ ID NO: 5413 - DNA, 22 bp, Artificial Sequence
  chemically synthesized
atgattttaagagatttacaag

SEQ ID NO: 5414 - DNA, 22 bp, Artificial Sequence
  chemically synthesized
tgattttaagagatttacaagt

SEQ ID NO: 5415 - DNA, 22 bp, Artificial Sequence
  chemically synthesized
taagagatttacaagtcaaaaa

SEQ ID NO: 5416 - DNA, 22 bp, Artificial Sequence
  chemically synthesized
aagagatttacaagtcaaaaat

SEQ ID NO: 5417 - DNA, 22 bp, Artificial Sequence
  chemically synthesized
agagatttacaagtcaaaaata

SEQ ID NO: 5418 - DNA, 22 bp, Artificial Sequence
  chemically synthesized
acaagtcaaaaataaacttttt

SEQ ID NO: 5419 - DNA, 22 bp, Artificial Sequence
  chemically synthesized
caagtcaaaaataaactttttt

SEQ ID NO: 5420 - DNA, 22 bp, Artificial Sequence
  chemically synthesized
ttttgttgggtaaatttattat

SEQ ID NO: 5421 - DNA, 22 bp, Artificial Sequence
  chemically synthesized
tttgttgggtaaatttattatt

SEQ ID NO: 5422 - DNA, 22 bp, Artificial Sequence
  chemically synthesized
ttgttgggtaaatttattatta

SEQ ID NO: 5423 - DNA, 22 bp, Artificial Sequence
  chemically synthesized
tgttgggtaaatttattattaa

SEQ ID NO: 5424 - DNA, 22 bp, Artificial Sequence
  chemically synthesized
gttgggtaaatttattattaaa

SEQ ID NO: 5425 - DNA, 22 bp, Artificial Sequence
  chemically synthesized
ttgggtaaatttattattaaag

SEQ ID NO: 5426 - DNA, 22 bp, Artificial Sequence
  chemically synthesized
ggtaaatttattattaaagttg

SEQ ID NO: 5427 - DNA, 22 bp, Artificial Sequence
  chemically synthesized
attattaaagttgaggggaaaa

SEQ ID NO: 5428 - DNA, 22 bp, Artificial Sequence
  chemically synthesized
ttattaaagttgaggggaaaaa

SEQ ID NO: 5429 - DNA, 22 bp, Artificial Sequence
  chemically synthesized
ttaaagttgaggggaaaaaagt

SEQ ID NO: 5430 - DNA, 22 bp, Artificial Sequence
  chemically synthesized
aagttgaggggaaaaaagtaat

SEQ ID NO: 5431 - DNA, 22 bp, Artificial Sequence
  chemically synthesized
aggggaaaaaagtaatgaatta

SEQ ID NO: 5432 - DNA, 20 bp, Artificial Sequence
  chemically synthesized
tcccgcccgcttgctgcatc

SEQ ID NO: 5433 - DNA, 20 bp, Artificial Sequence
  chemically synthesized
tgcatctggacaccctgcct

SEQ ID NO: 5434 - DNA, 20 bp, Artificial Sequence
  chemically synthesized
gcatctggacaccctgcctc

SEQ ID NO: 5435 - DNA, 20 bp, Artificial Sequence
  chemically synthesized
cctcaggccctcatctccac

SEQ ID NO: 5436 - DNA, 20 bp, Artificial Sequence
  chemically synthesized
aggccctcatctccactggt

SEQ ID NO: 5437 - DNA, 20 bp, Artificial Sequence
  chemically synthesized
ccctcatctccactggtcag

SEQ ID NO: 5438 - DNA, 20 bp, Artificial Sequence
  chemically synthesized
cctcatctccactggtcagc

SEQ ID NO: 5439 - DNA, 20 bp, Artificial Sequence
  chemically synthesized
gtcagcaggtgacctttgcc

SEQ ID NO: 5440 - DNA, 20 bp, Artificial Sequence
  chemically synthesized
gtgacctttgcccagcgccc

SEQ ID NO: 5441 - DNA, 20 bp, Artificial Sequence
  chemically synthesized
tgacctttgcccagcgccct

SEQ ID NO: 5442 - DNA, 20 bp, Artificial Sequence
  chemically synthesized
tgcccagcgccctgggtcct

SEQ ID NO: 5443 - DNA, 20 bp, Artificial Sequence
  chemically synthesized
gtcctcagtgcctgctgccc

SEQ ID NO: 5444 - DNA, 20 bp, Artificial Sequence
  chemically synthesized
cctcagtgcctgctgccctg

SEQ ID NO: 5445 - DNA, 20 bp, Artificial Sequence
  chemically synthesized
gccctggagatgatataaaa

SEQ ID NO: 5446 - DNA, 20 bp, Artificial Sequence
  chemically synthesized
ccctggagatgatataaaac

SEQ ID NO: 5447 - DNA, 20 bp, Artificial Sequence
  chemically synthesized
ggagatgatataaaacaggt

SEQ ID NO: 5448 - DNA, 20 bp, Artificial Sequence
  chemically synthesized
aaccctcctgcctgtctgct

SEQ ID NO: 5449 - DNA, 20 bp, Artificial Sequence
  chemically synthesized
ctgtctgctcagttcatccc

SEQ ID NO: 5450 - DNA, 20 bp, Artificial Sequence
  chemically synthesized
gtctgctcagttcatcccta

SEQ ID NO: 5451 - DNA, 20 bp, Artificial Sequence
  chemically synthesized
tctgctcagttcatccctag

SEQ ID NO: 5452 - DNA, 20 bp, Artificial Sequence
  chemically synthesized
gctcagttcatccctagagg

SEQ ID NO: 5453 - DNA, 20 bp, Artificial Sequence
  chemically synthesized
atccctagaggcagctgctc

SEQ ID NO: 5454 - DNA, 20 bp, Artificial Sequence
  chemically synthesized
tccctagaggcagctgctcc

SEQ ID NO: 5455 - DNA, 20 bp, Artificial Sequence
  chemically synthesized
ctgctccaggtaatgccctc

SEQ ID NO: 5456 - DNA, 20 bp, Artificial Sequence
  chemically synthesized
tgctccaggtaatgccctct

SEQ ID NO: 5457 - DNA, 20 bp, Artificial Sequence
  chemically synthesized
gctccaggtaatgccctctg

SEQ ID NO: 5458 - DNA, 20 bp, Artificial Sequence
  chemically synthesized
tccaggtaatgccctctggg

SEQ ID NO: 5459 - DNA, 20 bp, Artificial Sequence
  chemically synthesized
ccaggtaatgccctctgggg

SEQ ID NO: 5460 - DNA, 20 bp, Artificial Sequence
  chemically synthesized
caggtaatgccctctgggga

SEQ ID NO: 5461 - DNA, 20 bp, Artificial Sequence
  chemically synthesized
aggtaatgccctctggggag

SEQ ID NO: 5462 - DNA, 20 bp, Artificial Sequence
  chemically synthesized
aatgccctctggggagggga

SEQ ID NO: 5463 - DNA, 20 bp, Artificial Sequence
  chemically synthesized
tgccctctggggaggggaaa

SEQ ID NO: 5464 - DNA, 20 bp, Artificial Sequence
  chemically synthesized
gccctctggggaggggaaag

SEQ ID NO: 5465 - DNA, 20 bp, Artificial Sequence
  chemically synthesized
cctctggggaggggaaagag

SEQ ID NO: 5466 - DNA, 20 bp, Artificial Sequence
  chemically synthesized
ctctggggaggggaaagagg

SEQ ID NO: 5467 - DNA, 20 bp, Artificial Sequence
  chemically synthesized
tctggggaggggaaagagga

SEQ ID NO: 5468 - DNA, 20 bp, Artificial Sequence
  chemically synthesized
ctggggaggggaaagaggag

SEQ ID NO: 5469 - DNA, 20 bp, Artificial Sequence
  chemically synthesized
ggggaggggaaagaggaggg

SEQ ID NO: 5470 - DNA, 20 bp, Artificial Sequence
  chemically synthesized
gggaggggaaagaggagggg

SEQ ID NO: 5471 - DNA, 20 bp, Artificial Sequence
  chemically synthesized
gaggggaaagaggaggggag

SEQ ID NO: 5472 - DNA, 20 bp, Artificial Sequence
  chemically synthesized
aggggaaagaggaggggagg

SEQ ID NO: 5473 - DNA, 20 bp, Artificial Sequence
  chemically synthesized
aagaggaggggaggaggatg

SEQ ID NO: 5474 - DNA, 20 bp, Artificial Sequence
  chemically synthesized
gaggaggggaggaggatgaa

SEQ ID NO: 5475 - DNA, 20 bp, Artificial Sequence
  chemically synthesized
aggaggggaggaggatgaag

SEQ ID NO: 5476 - DNA, 20 bp, Artificial Sequence
  chemically synthesized
ggaggggaggaggatgaaga

SEQ ID NO: 5477 - DNA, 20 bp, Artificial Sequence
  chemically synthesized
gaggggaggaggatgaagag

SEQ ID NO: 5478 - DNA, 20 bp, Artificial Sequence
  chemically synthesized
ggaggaggatgaagaggggc

SEQ ID NO: 5479 - DNA, 20 bp, Artificial Sequence
  chemically synthesized
aggaggatgaagaggggcaa

SEQ ID NO: 5480 - DNA, 20 bp, Artificial Sequence
  chemically synthesized
ggaggatgaagaggggcaag

SEQ ID NO: 5481 - DNA, 20 bp, Artificial Sequence
  chemically synthesized
aggatgaagaggggcaagag

SEQ ID NO: 5482 - DNA, 20 bp, Artificial Sequence
  chemically synthesized
ggcaagaggagctccctgcc

SEQ ID NO: 5483 - DNA, 20 bp, Artificial Sequence
  chemically synthesized
gaggagctccctgcccagcc

SEQ ID NO: 5484 - DNA, 20 bp, Artificial Sequence
  chemically synthesized
agctccctgcccagcccagc

SEQ ID NO: 5485 - DNA, 20 bp, Artificial Sequence
  chemically synthesized
ccctgcccagcccagccagc

SEQ ID NO: 5486 - DNA, 20 bp, Artificial Sequence
  chemically synthesized
cccagcccagccagcaagcc

SEQ ID NO: 5487 - DNA, 20 bp, Artificial Sequence
  chemically synthesized
cagcccagccagcaagcctg

SEQ ID NO: 5488 - DNA, 20 bp, Artificial Sequence
  chemically synthesized
cccagccagcaagcctggag

SEQ ID NO: 5489 - DNA, 20 bp, Artificial Sequence
  chemically synthesized
aagcctggagaagcacttgc

SEQ ID NO: 5490 - DNA, 20 bp, Artificial Sequence
  chemically synthesized
gcctggagaagcacttgcta

SEQ ID NO: 5491 - DNA, 20 bp, Artificial Sequence
  chemically synthesized
gagaagcacttgctagagct

SEQ ID NO: 5492 - DNA, 20 bp, Artificial Sequence
  chemically synthesized
agaagcacttgctagagcta

SEQ ID NO: 5493 - DNA, 20 bp, Artificial Sequence
  chemically synthesized
agcacttgctagagctaagg

SEQ ID NO: 5494 - DNA, 20 bp, Artificial Sequence
  chemically synthesized
tgctagagctaaggaagcct

SEQ ID NO: 5495 - DNA, 20 bp, Artificial Sequence
  chemically synthesized
ctagagctaaggaagcctcg

SEQ ID NO: 5496 - DNA, 20 bp, Artificial Sequence
  chemically synthesized
agctaaggaagcctcggagc

SEQ ID NO: 5497 - DNA, 20 bp, Artificial Sequence
  chemically synthesized
aaggaagcctcggagctgga

SEQ ID NO: 5498 - DNA, 20 bp, Artificial Sequence
  chemically synthesized
aggaagcctcggagctggac

SEQ ID NO: 5499 - DNA, 20 bp, Artificial Sequence
  chemically synthesized
ccacccctcatcataacctg

SEQ ID NO: 5500 - DNA, 20 bp, Artificial Sequence
  chemically synthesized
tcatcataacctgaagaaca

SEQ ID NO: 5501 - DNA, 20 bp, Artificial Sequence
  chemically synthesized
atcataacctgaagaacatg

SEQ ID NO: 5502 - DNA, 20 bp, Artificial Sequence
  chemically synthesized
tcataacctgaagaacatgg

SEQ ID NO: 5503 - DNA, 20 bp, Artificial Sequence
  chemically synthesized
acctgaagaacatggaggcc

SEQ ID NO: 5504 - DNA, 20 bp, Artificial Sequence
  chemically synthesized
cctgaagaacatggaggccc

SEQ ID NO: 5505 - DNA, 20 bp, Artificial Sequence
  chemically synthesized
tgaagaacatggaggcccgg

SEQ ID NO: 5506 - DNA, 20 bp, Artificial Sequence
  chemically synthesized
gaagaacatggaggcccggg

SEQ ID NO: 5507 - DNA, 20 bp, Artificial Sequence
  chemically synthesized
aagaacatggaggcccggga

SEQ ID NO: 5508 - DNA, 20 bp, Artificial Sequence
  chemically synthesized
agaacatggaggcccgggag

SEQ ID NO: 5509 - DNA, 20 bp, Artificial Sequence
  chemically synthesized
ggaggggtgtcacttgccca

SEQ ID NO: 5510 - DNA, 20 bp, Artificial Sequence
  chemically synthesized
gtcacttgcccaaagctaca

SEQ ID NO: 5511 - DNA, 20 bp, Artificial Sequence
  chemically synthesized
tcacttgcccaaagctacac

SEQ ID NO: 5512 - DNA, 20 bp, Artificial Sequence
  chemically synthesized
cacttgcccaaagctacaca

SEQ ID NO: 5513 - DNA, 20 bp, Artificial Sequence
  chemically synthesized
acttgcccaaagctacacag

SEQ ID NO: 5514 - DNA, 20 bp, Artificial Sequence
  chemically synthesized
cttgcccaaagctacacagg

SEQ ID NO: 5515 - DNA, 20 bp, Artificial Sequence
  chemically synthesized
gcccaaagctacacaggggg

SEQ ID NO: 5516 - DNA, 20 bp, Artificial Sequence
  chemically synthesized
cccaaagctacacagggggt

SEQ ID NO: 5517 - DNA, 20 bp, Artificial Sequence
  chemically synthesized
ccaaagctacacagggggtg

SEQ ID NO: 5518 - DNA, 20 bp, Artificial Sequence
  chemically synthesized
agctacacagggggtggggc

SEQ ID NO: 5519 - DNA, 20 bp, Artificial Sequence
  chemically synthesized
tacacagggggtggggctgg

SEQ ID NO: 5520 - DNA, 20 bp, Artificial Sequence
  chemically synthesized
acagggggtggggctggaag

SEQ ID NO: 5521 - DNA, 20 bp, Artificial Sequence
  chemically synthesized
gtggggctggaagtggctcc

SEQ ID NO: 5522 - DNA, 20 bp, Artificial Sequence
  chemically synthesized
gctggaagtggctccaagtg

SEQ ID NO: 5523 - DNA, 20 bp, Artificial Sequence
  chemically synthesized
ctggaagtggctccaagtgc

SEQ ID NO: 5524 - DNA, 20 bp, Artificial Sequence
  chemically synthesized
caggttcccccctcattctt

SEQ ID NO: 5525 - DNA, 20 bp, Artificial Sequence
  chemically synthesized
aggttcccccctcattcttc

SEQ ID NO: 5526 - DNA, 20 bp, Artificial Sequence
  chemically synthesized
cccccctcattcttcaggct

SEQ ID NO: 5527 - DNA, 20 bp, Artificial Sequence
  chemically synthesized
ccccctcattcttcaggctt

SEQ ID NO: 5528 - DNA, 20 bp, Artificial Sequence
  chemically synthesized
cccctcattcttcaggctta

SEQ ID NO: 5529 - DNA, 20 bp, Artificial Sequence
  chemically synthesized
tcattcttcaggcttagggc

SEQ ID NO: 5530 - DNA, 20 bp, Artificial Sequence
  chemically synthesized
attcttcaggcttagggctg

SEQ ID NO: 5531 - DNA, 20 bp, Artificial Sequence
  chemically synthesized
ttcttcaggcttagggctgg

SEQ ID NO: 5532 - DNA, 20 bp, Artificial Sequence
  chemically synthesized
ttcaggcttagggctggagg

SEQ ID NO: 5533 - DNA, 20 bp, Artificial Sequence
  chemically synthesized
cttagggctggaggaagcct

SEQ ID NO: 5534 - DNA, 20 bp, Artificial Sequence
  chemically synthesized
gggctggaggaagccttaga

SEQ ID NO: 5535 - DNA, 20 bp, Artificial Sequence
  chemically synthesized
ggaggaagccttagacagcc

SEQ ID NO: 5536 - DNA, 20 bp, Artificial Sequence
  chemically synthesized
tagacagcccagtcctaccc

SEQ ID NO: 5537 - DNA, 20 bp, Artificial Sequence
  chemically synthesized
cagcccagtcctaccccaga

SEQ ID NO: 5538 - DNA, 20 bp, Artificial Sequence
  chemically synthesized
agcccagtcctaccccagac

SEQ ID NO: 5539 - DNA, 20 bp, Artificial Sequence
  chemically synthesized
gcccagtcctaccccagaca

SEQ ID NO: 5540 - DNA, 20 bp, Artificial Sequence
  chemically synthesized
ctaccccagacagggaaact

SEQ ID NO: 5541 - DNA, 20 bp, Artificial Sequence
  chemically synthesized
taccccagacagggaaactg

SEQ ID NO: 5542 - DNA, 20 bp, Artificial Sequence
  chemically synthesized
cagacagggaaactgaggcc

SEQ ID NO: 5543 - DNA, 20 bp, Artificial Sequence
  chemically synthesized
gacagggaaactgaggcctg

SEQ ID NO: 5544 - DNA, 20 bp, Artificial Sequence
  chemically synthesized
cagggaaactgaggcctgga

SEQ ID NO: 5545 - DNA, 20 bp, Artificial Sequence
  chemically synthesized
agggaaactgaggcctggag

SEQ ID NO: 5546 - DNA, 20 bp, Artificial Sequence
  chemically synthesized
gggaaactgaggcctggaga

SEQ ID NO: 5547 - DNA, 20 bp, Artificial Sequence
  chemically synthesized
aactgaggcctggagagggc

SEQ ID NO: 5548 - DNA, 20 bp, Artificial Sequence
  chemically synthesized
agagggccagaaatcaccca

SEQ ID NO: 5549 - DNA, 20 bp, Artificial Sequence
  chemically synthesized
agaaatcacccaaagacaca

SEQ ID NO: 5550 - DNA, 20 bp, Artificial Sequence
  chemically synthesized
cccaaagacacacagcatgt

SEQ ID NO: 5551 - DNA, 20 bp, Artificial Sequence
  chemically synthesized
aagacacacagcatgttggc

SEQ ID NO: 5552 - DNA, 20 bp, Artificial Sequence
  chemically synthesized
acacagcatgttggctggac

SEQ ID NO: 5553 - DNA, 20 bp, Artificial Sequence
  chemically synthesized
agcatgttggctggactgga

SEQ ID NO: 5554 - DNA, 20 bp, Artificial Sequence
  chemically synthesized
catgttggctggactggacg

SEQ ID NO: 5555 - DNA, 20 bp, Artificial Sequence
  chemically synthesized
tggctggactggacggagat

SEQ ID NO: 5556 - DNA, 20 bp, Artificial Sequence
  chemically synthesized
ggactggacggagatcagtc

SEQ ID NO: 5557 - DNA, 20 bp, Artificial Sequence
  chemically synthesized
acggagatcagtccagaccg

SEQ ID NO: 5558 - DNA, 20 bp, Artificial Sequence
  chemically synthesized
cggagatcagtccagaccgc

SEQ ID NO: 5559 - DNA, 20 bp, Artificial Sequence
  chemically synthesized
accgcaggtgccttgatgtt

SEQ ID NO: 5560 - DNA, 20 bp, Artificial Sequence
  chemically synthesized
aggtgccttgatgttcagtc

SEQ ID NO: 5561 - DNA, 20 bp, Artificial Sequence
  chemically synthesized
tgccttgatgttcagtctgg

SEQ ID NO: 5562 - DNA, 20 bp, Artificial Sequence
  chemically synthesized
gccttgatgttcagtctggt

SEQ ID NO: 5563 - DNA, 20 bp, Artificial Sequence
  chemically synthesized
ccatcccacccacctccctt

SEQ ID NO: 5564 - DNA, 20 bp, Artificial Sequence
  chemically synthesized
catcccacccacctcccttt

SEQ ID NO: 5565 - DNA, 20 bp, Artificial Sequence
  chemically synthesized
ctcgatccctcgcccctcac

SEQ ID NO: 5566 - DNA, 20 bp, Artificial Sequence
  chemically synthesized
ccctcaccagtcccccttct

SEQ ID NO: 5567 - DNA, 20 bp, Artificial Sequence
  chemically synthesized
ctcaccagtcccccttctga

SEQ ID NO: 5568 - DNA, 20 bp, Artificial Sequence
  chemically synthesized
ccccttctgagagcccgtat

SEQ ID NO: 5569 - DNA, 20 bp, Artificial Sequence
  chemically synthesized
cttctgagagcccgtattag

SEQ ID NO: 5570 - DNA, 20 bp, Artificial Sequence
  chemically synthesized
ttctgagagcccgtattagc

SEQ ID NO: 5571 - DNA, 20 bp, Artificial Sequence
  chemically synthesized
tctgagagcccgtattagca

SEQ ID NO: 5572 - DNA, 20 bp, Artificial Sequence
  chemically synthesized
tgagagcccgtattagcagg

SEQ ID NO: 5573 - DNA, 20 bp, Artificial Sequence
  chemically synthesized
agcccgtattagcagggagc

SEQ ID NO: 5574 - DNA, 20 bp, Artificial Sequence
  chemically synthesized
gagccggcccctactccttc

SEQ ID NO: 5575 - DNA, 20 bp, Artificial Sequence
  chemically synthesized
ccggcccctactccttctgg

SEQ ID NO: 5576 - DNA, 20 bp, Artificial Sequence
  chemically synthesized
cctactccttctggcagacc

SEQ ID NO: 5577 - DNA, 20 bp, Artificial Sequence
  chemically synthesized
tccttctggcagacccagct

SEQ ID NO: 5578 - DNA, 20 bp, Artificial Sequence
  chemically synthesized
ccttctggcagacccagcta

SEQ ID NO: 5579 - DNA, 20 bp, Artificial Sequence
  chemically synthesized
acccagctaaggttctacct

SEQ ID NO: 5580 - DNA, 20 bp, Artificial Sequence
  chemically synthesized
cccagctaaggttctacctt

SEQ ID NO: 5581 - DNA, 20 bp, Artificial Sequence
  chemically synthesized
ccagctaaggttctacctta

SEQ ID NO: 5582 - DNA, 20 bp, Artificial Sequence
  chemically synthesized
cagctaaggttctaccttag

SEQ ID NO: 5583 - DNA, 20 bp, Artificial Sequence
  chemically synthesized
taggggccacgccacctccc

SEQ ID NO: 5584 - DNA, 20 bp, Artificial Sequence
  chemically synthesized
aggggccacgccacctcccc

SEQ ID NO: 5585 - DNA, 20 bp, Artificial Sequence
  chemically synthesized
ggggccacgccacctcccca

SEQ ID NO: 5586 - DNA, 20 bp, Artificial Sequence
  chemically synthesized
ggccacgccacctccccagg

SEQ ID NO: 5587 - DNA, 20 bp, Artificial Sequence
  chemically synthesized
gccacgccacctccccaggg

SEQ ID NO: 5588 - DNA, 20 bp, Artificial Sequence
  chemically synthesized
ccacgccacctccccaggga

SEQ ID NO: 5589 - DNA, 20 bp, Artificial Sequence
  chemically synthesized
cacgccacctccccagggag

SEQ ID NO: 5590 - DNA, 20 bp, Artificial Sequence
  chemically synthesized
cacctccccagggaggggtc

SEQ ID NO: 5591 - DNA, 20 bp, Artificial Sequence
  chemically synthesized
cctccccagggaggggtcca

SEQ ID NO: 5592 - DNA, 20 bp, Artificial Sequence
  chemically synthesized
ctccccagggaggggtccag

SEQ ID NO: 5593 - DNA, 20 bp, Artificial Sequence
  chemically synthesized
cagggaggggtccagaggca

SEQ ID NO: 5594 - DNA, 20 bp, Artificial Sequence
  chemically synthesized
agggaggggtccagaggcat

SEQ ID NO: 5595 - DNA, 20 bp, Artificial Sequence
  chemically synthesized
gggaggggtccagaggcatg

SEQ ID NO: 5596 - DNA, 20 bp, Artificial Sequence
  chemically synthesized
ggtccagaggcatggggacc

SEQ ID NO: 5597 - DNA, 20 bp, Artificial Sequence
  chemically synthesized
gtccagaggcatggggacct

SEQ ID NO: 5598 - DNA, 20 bp, Artificial Sequence
  chemically synthesized
tccagaggcatggggacctg

SEQ ID NO: 5599 - DNA, 20 bp, Artificial Sequence
  chemically synthesized
gggacctggggtgcccctca

SEQ ID NO: 5600 - DNA, 20 bp, Artificial Sequence
  chemically synthesized
ggacctggggtgcccctcac

SEQ ID NO: 5601 - DNA, 20 bp, Artificial Sequence
  chemically synthesized
cctcacaggacacttccttg

SEQ ID NO: 5602 - DNA, 20 bp, Artificial Sequence
  chemically synthesized
ctcacaggacacttccttgc

SEQ ID NO: 5603 - DNA, 20 bp, Artificial Sequence
  chemically synthesized
aggacacttccttgcaggaa

SEQ ID NO: 5604 - DNA, 20 bp, Artificial Sequence
  chemically synthesized
gacacttccttgcaggaaca

SEQ ID NO: 5605 - DNA, 20 bp, Artificial Sequence
  chemically synthesized
acacttccttgcaggaacag

SEQ ID NO: 5606 - DNA, 20 bp, Artificial Sequence
  chemically synthesized
gcaggaacagaggtgccatg

SEQ ID NO: 5607 - DNA, 20 bp, Artificial Sequence
  chemically synthesized
acagaggtgccatgcagccc

SEQ ID NO: 5608 - DNA, 20 bp, Artificial Sequence
  chemically synthesized
cagaggtgccatgcagcccc

SEQ ID NO: 5609 - DNA, 20 bp, Artificial Sequence
  chemically synthesized
actccttgttgttgccctcc

SEQ ID NO: 5610 - DNA, 20 bp, Artificial Sequence
  chemically synthesized
tgttgccctcctggcgctcc

SEQ ID NO: 5611 - DNA, 20 bp, Artificial Sequence
  chemically synthesized
cgctcctggcctctgcccgt

SEQ ID NO: 5612 - DNA, 20 bp, Artificial Sequence
  chemically synthesized
ggcctctgcccgtaagcact

SEQ ID NO: 5613 - DNA, 20 bp, Artificial Sequence
  chemically synthesized
ctctgcccgtaagcacttgg

SEQ ID NO: 5614 - DNA, 20 bp, Artificial Sequence
  chemically synthesized
tctgcccgtaagcacttggt

SEQ ID NO: 5615 - DNA, 20 bp, Artificial Sequence
  chemically synthesized
ccgtaagcacttggtgggac

SEQ ID NO: 5616 - DNA, 20 bp, Artificial Sequence
  chemically synthesized
cgtaagcacttggtgggact

SEQ ID NO: 5617 - DNA, 20 bp, Artificial Sequence
  chemically synthesized
agcacttggtgggactgggc

SEQ ID NO: 5618 - DNA, 20 bp, Artificial Sequence
  chemically synthesized
gcacttggtgggactgggct

SEQ ID NO: 5619 - DNA, 20 bp, Artificial Sequence
  chemically synthesized
cacttggtgggactgggctg

SEQ ID NO: 5620 - DNA, 20 bp, Artificial Sequence
  chemically synthesized
acttggtgggactgggctgg

SEQ ID NO: 5621 - DNA, 20 bp, Artificial Sequence
  chemically synthesized
tggtgggactgggctggggg

SEQ ID NO: 5622 - DNA, 20 bp, Artificial Sequence
  chemically synthesized
ggtgggactgggctgggggc

SEQ ID NO: 5623 - DNA, 20 bp, Artificial Sequence
  chemically synthesized
gtgggactgggctgggggca

SEQ ID NO: 5624 - DNA, 20 bp, Artificial Sequence
  chemically synthesized
gcccccagcccagtcccacc

SEQ ID NO: 5625 - DNA, 20 bp, Artificial Sequence
  chemically synthesized
ccagtcccaccaagtgctta

SEQ ID NO: 5626 - DNA, 20 bp, Artificial Sequence
  chemically synthesized
cagtcccaccaagtgcttac

SEQ ID NO: 5627 - DNA, 20 bp, Artificial Sequence
  chemically synthesized
tcccaccaagtgcttacggg

SEQ ID NO: 5628 - DNA, 20 bp, Artificial Sequence
  chemically synthesized
ccaccaagtgcttacgggca

SEQ ID NO: 5629 - DNA, 20 bp, Artificial Sequence
  chemically synthesized
caccaagtgcttacgggcag

SEQ ID NO: 5630 - DNA, 20 bp, Artificial Sequence
  chemically synthesized
aagtgcttacgggcagaggc

SEQ ID NO: 5631 - DNA, 20 bp, Artificial Sequence
  chemically synthesized
agtgcttacgggcagaggcc

SEQ ID NO: 5632 - DNA, 20 bp, Artificial Sequence
  chemically synthesized
tgcttacgggcagaggccag

SEQ ID NO: 5633 - DNA, 20 bp, Artificial Sequence
  chemically synthesized
cgggcagaggccaggagcgc

SEQ ID NO: 5634 - DNA, 20 bp, Artificial Sequence
  chemically synthesized
gggcagaggccaggagcgcc

SEQ ID NO: 5635 - DNA, 20 bp, Artificial Sequence
  chemically synthesized
gcagaggccaggagcgccag

SEQ ID NO: 5636 - DNA, 20 bp, Artificial Sequence
  chemically synthesized
cagaggccaggagcgccagg

SEQ ID NO: 5637 - DNA, 20 bp, Artificial Sequence
  chemically synthesized
agaggccaggagcgccagga

SEQ ID NO: 5638 - DNA, 20 bp, Artificial Sequence
  chemically synthesized
agcgccaggagggcaacaac

SEQ ID NO: 5639 - DNA, 20 bp, Artificial Sequence
  chemically synthesized
gcgccaggagggcaacaaca

SEQ ID NO: 5640 - DNA, 20 bp, Artificial Sequence
  chemically synthesized
gccaggagggcaacaacaag

SEQ ID NO: 5641 - DNA, 20 bp, Artificial Sequence
  chemically synthesized
gggcaacaacaaggagtacc

SEQ ID NO: 5642 - DNA, 20 bp, Artificial Sequence
  chemically synthesized
ggcaacaacaaggagtaccc

SEQ ID NO: 5643 - DNA, 20 bp, Artificial Sequence
  chemically synthesized
gcaacaacaaggagtacccg

SEQ ID NO: 5644 - DNA, 20 bp, Artificial Sequence
  chemically synthesized
aaggagtacccggggctgca

SEQ ID NO: 5645 - DNA, 20 bp, Artificial Sequence
  chemically synthesized
catggcacctctgttcctgc

SEQ ID NO: 5646 - DNA, 20 bp, Artificial Sequence
  chemically synthesized
atggcacctctgttcctgca

SEQ ID NO: 5647 - DNA, 20 bp, Artificial Sequence
  chemically synthesized
gcacctctgttcctgcaagg

SEQ ID NO: 5648 - DNA, 20 bp, Artificial Sequence
  chemically synthesized
cctgcaaggaagtgtcctgt

SEQ ID NO: 5649 - DNA, 20 bp, Artificial Sequence
  chemically synthesized
ctgcaaggaagtgtcctgtg

SEQ ID NO: 5650 - DNA, 20 bp, Artificial Sequence
  chemically synthesized
tgcaaggaagtgtcctgtga

SEQ ID NO: 5651 - DNA, 20 bp, Artificial Sequence
  chemically synthesized
gcaaggaagtgtcctgtgag

SEQ ID NO: 5652 - DNA, 20 bp, Artificial Sequence
  chemically synthesized
gtgtcctgtgaggggcaccc

SEQ ID NO: 5653 - DNA, 20 bp, Artificial Sequence
  chemically synthesized
tgtcctgtgaggggcacccc

SEQ ID NO: 5654 - DNA, 20 bp, Artificial Sequence
  chemically synthesized
accccaggtccccatgcctc

SEQ ID NO: 5655 - DNA, 20 bp, Artificial Sequence
  chemically synthesized
catgcctctggacccctccc

SEQ ID NO: 5656 - DNA, 20 bp, Artificial Sequence
  chemically synthesized
atgcctctggacccctccct

SEQ ID NO: 5657 - DNA, 20 bp, Artificial Sequence
  chemically synthesized
tgcctctggacccctccctg

SEQ ID NO: 5658 - DNA, 20 bp, Artificial Sequence
  chemically synthesized
cctctggacccctccctggg

SEQ ID NO: 5659 - DNA, 20 bp, Artificial Sequence
  chemically synthesized
ctctggacccctccctgggg

SEQ ID NO: 5660 - DNA, 20 bp, Artificial Sequence
  chemically synthesized
tggacccctccctggggagg

SEQ ID NO: 5661 - DNA, 20 bp, Artificial Sequence
  chemically synthesized
ccctccctggggaggtggcg

SEQ ID NO: 5662 - DNA, 20 bp, Artificial Sequence
  chemically synthesized
ggggaggtggcgtggcccct

SEQ ID NO: 5663 - DNA, 20 bp, Artificial Sequence
  chemically synthesized
gggaggtggcgtggccccta

SEQ ID NO: 5664 - DNA, 20 bp, Artificial Sequence
  chemically synthesized
aggtggcgtggcccctaagg

SEQ ID NO: 5665 - DNA, 20 bp, Artificial Sequence
  chemically synthesized
tggcccctaaggtagaacct

SEQ ID NO: 5666 - DNA, 20 bp, Artificial Sequence
  chemically synthesized
ccctaaggtagaaccttagc

SEQ ID NO: 5667 - DNA, 20 bp, Artificial Sequence
  chemically synthesized
cctaaggtagaaccttagct

SEQ ID NO: 5668 - DNA, 20 bp, Artificial Sequence
  chemically synthesized
agaaccttagctgggtctgc

SEQ ID NO: 5669 - DNA, 20 bp, Artificial Sequence
  chemically synthesized
accttagctgggtctgccag

SEQ ID NO: 5670 - DNA, 20 bp, Artificial Sequence
  chemically synthesized
ccttagctgggtctgccaga

SEQ ID NO: 5671 - DNA, 20 bp, Artificial Sequence
  chemically synthesized
ttagctgggtctgccagaag

SEQ ID NO: 5672 - DNA, 20 bp, Artificial Sequence
  chemically synthesized
gctgggtctgccagaaggag

SEQ ID NO: 5673 - DNA, 20 bp, Artificial Sequence
  chemically synthesized
ctgggtctgccagaaggagt

SEQ ID NO: 5674 - DNA, 20 bp, Artificial Sequence
  chemically synthesized
tgggtctgccagaaggagta

SEQ ID NO: 5675 - DNA, 20 bp, Artificial Sequence
  chemically synthesized
gggtctgccagaaggagtag

SEQ ID NO: 5676 - DNA, 20 bp, Artificial Sequence
  chemically synthesized
ctgccagaaggagtaggggc

SEQ ID NO: 5677 - DNA, 20 bp, Artificial Sequence
  chemically synthesized
gggccggctccctgctaata

SEQ ID NO: 5678 - DNA, 20 bp, Artificial Sequence
  chemically synthesized
ggccggctccctgctaatac

SEQ ID NO: 5679 - DNA, 20 bp, Artificial Sequence
  chemically synthesized
tccctgctaatacgggctct

SEQ ID NO: 5680 - DNA, 20 bp, Artificial Sequence
  chemically synthesized
ctgctaatacgggctctcag

SEQ ID NO: 5681 - DNA, 20 bp, Artificial Sequence
  chemically synthesized
tgctaatacgggctctcaga

SEQ ID NO: 5682 - DNA, 20 bp, Artificial Sequence
  chemically synthesized
gctaatacgggctctcagaa

SEQ ID NO: 5683 - DNA, 20 bp, Artificial Sequence
  chemically synthesized
ctaatacgggctctcagaag

SEQ ID NO: 5684 - DNA, 20 bp, Artificial Sequence
  chemically synthesized
taatacgggctctcagaagg

SEQ ID NO: 5685 - DNA, 20 bp, Artificial Sequence
  chemically synthesized
cgggctctcagaagggggac

SEQ ID NO: 5686 - DNA, 20 bp, Artificial Sequence
  chemically synthesized
ctctcagaagggggactggt

SEQ ID NO: 5687 - DNA, 20 bp, Artificial Sequence
  chemically synthesized
tctcagaagggggactggtg

SEQ ID NO: 5688 - DNA, 20 bp, Artificial Sequence
  chemically synthesized
ctcagaagggggactggtga

SEQ ID NO: 5689 - DNA, 20 bp, Artificial Sequence
  chemically synthesized
tcagaagggggactggtgag

SEQ ID NO: 5690 - DNA, 20 bp, Artificial Sequence
  chemically synthesized
aagggggactggtgaggggc

SEQ ID NO: 5691 - DNA, 20 bp, Artificial Sequence
  chemically synthesized
agggggactggtgaggggcg

SEQ ID NO: 5692 - DNA, 20 bp, Artificial Sequence
  chemically synthesized
gggggactggtgaggggcga

SEQ ID NO: 5693 - DNA, 20 bp, Artificial Sequence
  chemically synthesized
ctggtgaggggcgagggatc

SEQ ID NO: 5694 - DNA, 20 bp, Artificial Sequence
  chemically synthesized
tggtgaggggcgagggatcg

SEQ ID NO: 5695 - DNA, 20 bp, Artificial Sequence
  chemically synthesized
gggcgagggatcgaggccca

SEQ ID NO: 5696 - DNA, 20 bp, Artificial Sequence
  chemically synthesized
ggcgagggatcgaggcccaa

SEQ ID NO: 5697 - DNA, 20 bp, Artificial Sequence
  chemically synthesized
gcgagggatcgaggcccaaa

SEQ ID NO: 5698 - DNA, 20 bp, Artificial Sequence
  chemically synthesized
gagggatcgaggcccaaagg

SEQ ID NO: 5699 - DNA, 20 bp, Artificial Sequence
  chemically synthesized
agggatcgaggcccaaaggg

SEQ ID NO: 5700 - DNA, 20 bp, Artificial Sequence
  chemically synthesized
gatcgaggcccaaagggagg

SEQ ID NO: 5701 - DNA, 20 bp, Artificial Sequence
  chemically synthesized
atcgaggcccaaagggaggt

SEQ ID NO: 5702 - DNA, 20 bp, Artificial Sequence
  chemically synthesized
gaggcccaaagggaggtggg

SEQ ID NO: 5703 - DNA, 20 bp, Artificial Sequence
  chemically synthesized
aggcccaaagggaggtgggt

SEQ ID NO: 5704 - DNA, 20 bp, Artificial Sequence
  chemically synthesized
ccaaagggaggtgggtggga

SEQ ID NO: 5705 - DNA, 20 bp, Artificial Sequence
  chemically synthesized
aaagggaggtgggtgggatg

SEQ ID NO: 5706 - DNA, 20 bp, Artificial Sequence
  chemically synthesized
gggaggtgggtgggatggag

SEQ ID NO: 5707 - DNA, 20 bp, Artificial Sequence
  chemically synthesized
ggatggagcagaaaacccac

SEQ ID NO: 5708 - DNA, 20 bp, Artificial Sequence
  chemically synthesized
aacccaccagactgaacatc

SEQ ID NO: 5709 - DNA, 20 bp, Artificial Sequence
  chemically synthesized
acccaccagactgaacatca

SEQ ID NO: 5710 - DNA, 20 bp, Artificial Sequence
  chemically synthesized
actgaacatcaaggcacctg

SEQ ID NO: 5711 - DNA, 20 bp, Artificial Sequence
  chemically synthesized
acatcaaggcacctgcggtc

SEQ ID NO: 5712 - DNA, 20 bp, Artificial Sequence
  chemically synthesized
ggtctggactgatctccgtc

SEQ ID NO: 5713 - DNA, 20 bp, Artificial Sequence
  chemically synthesized
ggactgatctccgtccagtc

SEQ ID NO: 5714 - DNA, 20 bp, Artificial Sequence
  chemically synthesized
gccaacatgctgtgtgtctt

SEQ ID NO: 5715 - DNA, 20 bp, Artificial Sequence
  chemically synthesized
ccaacatgctgtgtgtcttt

SEQ ID NO: 5716 - DNA, 20 bp, Artificial Sequence
  chemically synthesized
gtgtgtctttgggtgatttc

SEQ ID NO: 5717 - DNA, 20 bp, Artificial Sequence
  chemically synthesized
gggtgatttctggccctctc

SEQ ID NO: 5718 - DNA, 20 bp, Artificial Sequence
  chemically synthesized
ggtgatttctggccctctcc

SEQ ID NO: 5719 - DNA, 20 bp, Artificial Sequence
  chemically synthesized
ttctggccctctccaggcct

SEQ ID NO: 5720 - DNA, 20 bp, Artificial Sequence
  chemically synthesized
caggcctcagtttccctgtc

SEQ ID NO: 5721 - DNA, 20 bp, Artificial Sequence
  chemically synthesized
aggcctcagtttccctgtct

SEQ ID NO: 5722 - DNA, 20 bp, Artificial Sequence
  chemically synthesized
ggcctcagtttccctgtctg

SEQ ID NO: 5723 - DNA, 20 bp, Artificial Sequence
  chemically synthesized
ctcagtttccctgtctgggg

SEQ ID NO: 5724 - DNA, 20 bp, Artificial Sequence
  chemically synthesized
tcagtttccctgtctggggt

SEQ ID NO: 5725 - DNA, 20 bp, Artificial Sequence
  chemically synthesized
ttccctgtctggggtaggac

SEQ ID NO: 5726 - DNA, 20 bp, Artificial Sequence
  chemically synthesized
tccctgtctggggtaggact

SEQ ID NO: 5727 - DNA, 20 bp, Artificial Sequence
  chemically synthesized
ggggtaggactgggctgtct

SEQ ID NO: 5728 - DNA, 20 bp, Artificial Sequence
  chemically synthesized
gggtaggactgggctgtcta

SEQ ID NO: 5729 - DNA, 20 bp, Artificial Sequence
  chemically synthesized
gggctgtctaaggcttcctc

SEQ ID NO: 5730 - DNA, 20 bp, Artificial Sequence
  chemically synthesized
ctaaggcttcctccagccct

SEQ ID NO: 5731 - DNA, 20 bp, Artificial Sequence
  chemically synthesized
ttcctccagccctaagcctg

SEQ ID NO: 5732 - DNA, 20 bp, Artificial Sequence
  chemically synthesized
cagccctaagcctgaagaat

SEQ ID NO: 5733 - DNA, 20 bp, Artificial Sequence
  chemically synthesized
agccctaagcctgaagaatg

SEQ ID NO: 5734 - DNA, 20 bp, Artificial Sequence
  chemically synthesized
gccctaagcctgaagaatga

SEQ ID NO: 5735 - DNA, 20 bp, Artificial Sequence
  chemically synthesized
ccctaagcctgaagaatgag

SEQ ID NO: 5736 - DNA, 20 bp, Artificial Sequence
  chemically synthesized
cctaagcctgaagaatgagg

SEQ ID NO: 5737 - DNA, 20 bp, Artificial Sequence
  chemically synthesized
ctaagcctgaagaatgaggg

SEQ ID NO: 5738 - DNA, 20 bp, Artificial Sequence
  chemically synthesized
atgaggggggaacctgcact

SEQ ID NO: 5739 - DNA, 20 bp, Artificial Sequence
  chemically synthesized
gaggggggaacctgcacttg

SEQ ID NO: 5740 - DNA, 20 bp, Artificial Sequence
  chemically synthesized
cctgcacttggagccacttc

SEQ ID NO: 5741 - DNA, 20 bp, Artificial Sequence
  chemically synthesized
ttccagccccaccccctgtg

SEQ ID NO: 5742 - DNA, 20 bp, Artificial Sequence
  chemically synthesized
ccccaccccctgtgtagctt

SEQ ID NO: 5743 - DNA, 20 bp, Artificial Sequence
  chemically synthesized
cccaccccctgtgtagcttt

SEQ ID NO: 5744 - DNA, 20 bp, Artificial Sequence
  chemically synthesized
ccccctgtgtagctttgggc

SEQ ID NO: 5745 - DNA, 20 bp, Artificial Sequence
  chemically synthesized
tgggcaagtgacacccctcc

SEQ ID NO: 5746 - DNA, 20 bp, Artificial Sequence
  chemically synthesized
gggcaagtgacacccctccc

SEQ ID NO: 5747 - DNA, 20 bp, Artificial Sequence
  chemically synthesized
tcccgggcctccatgttctt

SEQ ID NO: 5748 - DNA, 20 bp, Artificial Sequence
  chemically synthesized
cccgggcctccatgttcttc

SEQ ID NO: 5749 - DNA, 20 bp, Artificial Sequence
  chemically synthesized
catgttcttcaggttatgat

SEQ ID NO: 5750 - DNA, 20 bp, Artificial Sequence
  chemically synthesized
atgttcttcaggttatgatg

SEQ ID NO: 5751 - DNA, 20 bp, Artificial Sequence
  chemically synthesized
tgttcttcaggttatgatga

SEQ ID NO: 5752 - DNA, 20 bp, Artificial Sequence
  chemically synthesized
gttcttcaggttatgatgag

SEQ ID NO: 5753 - DNA, 20 bp, Artificial Sequence
  chemically synthesized
cttcaggttatgatgagggg

SEQ ID NO: 5754 - DNA, 20 bp, Artificial Sequence
  chemically synthesized
ttcaggttatgatgaggggt

SEQ ID NO: 5755 - DNA, 20 bp, Artificial Sequence
  chemically synthesized
tcaggttatgatgaggggtg

SEQ ID NO: 5756 - DNA, 20 bp, Artificial Sequence
  chemically synthesized
caggttatgatgaggggtgg

SEQ ID NO: 5757 - DNA, 20 bp, Artificial Sequence
  chemically synthesized
aggttatgatgaggggtggg

SEQ ID NO: 5758 - DNA, 20 bp, Artificial Sequence
  chemically synthesized
aggggtggggggcacccgtc

SEQ ID NO: 5759 - DNA, 20 bp, Artificial Sequence
  chemically synthesized
gggggcacccgtccagctcc

SEQ ID NO: 5760 - DNA, 20 bp, Artificial Sequence
  chemically synthesized
ggggcacccgtccagctccg

SEQ ID NO: 5761 - DNA, 20 bp, Artificial Sequence
  chemically synthesized
gtccagctccgaggcttcct

SEQ ID NO: 5762 - DNA, 20 bp, Artificial Sequence
  chemically synthesized
ctccgaggcttccttagctc

SEQ ID NO: 5763 - DNA, 20 bp, Artificial Sequence
  chemically synthesized
gaggcttccttagctctagc

SEQ ID NO: 5764 - DNA, 20 bp, Artificial Sequence
  chemically synthesized
agctctagcaagtgcttctc

SEQ ID NO: 5765 - DNA, 20 bp, Artificial Sequence
  chemically synthesized
gctctagcaagtgcttctcc

SEQ ID NO: 5766 - DNA, 20 bp, Artificial Sequence
  chemically synthesized
aagtgcttctccaggcttgc

SEQ ID NO: 5767 - DNA, 20 bp, Artificial Sequence
  chemically synthesized
gcttctccaggcttgctggc

SEQ ID NO: 5768 - DNA, 20 bp, Artificial Sequence
  chemically synthesized
cttctccaggcttgctggct

SEQ ID NO: 5769 - DNA, 20 bp, Artificial Sequence
  chemically synthesized
tccaggcttgctggctgggc

SEQ ID NO: 5770 - DNA, 20 bp, Artificial Sequence
  chemically synthesized
ccaggcttgctggctgggct

SEQ ID NO: 5771 - DNA, 20 bp, Artificial Sequence
  chemically synthesized
ggcttgctggctgggctggg

SEQ ID NO: 5772 - DNA, 20 bp, Artificial Sequence
  chemically synthesized
gcttgctggctgggctgggc

SEQ ID NO: 5773 - DNA, 20 bp, Artificial Sequence
  chemically synthesized
cttgctggctgggctgggca

SEQ ID NO: 5774 - DNA, 20 bp, Artificial Sequence
  chemically synthesized
tgctggctgggctgggcagg

SEQ ID NO: 5775 - DNA, 20 bp, Artificial Sequence
  chemically synthesized
cccctcctctttcccctccc

SEQ ID NO: 5776 - DNA, 20 bp, Artificial Sequence
  chemically synthesized
cctcctctttcccctcccca

SEQ ID NO: 5777 - DNA, 20 bp, Artificial Sequence
  chemically synthesized
ctcctctttcccctccccag

SEQ ID NO: 5778 - DNA, 20 bp, Artificial Sequence
  chemically synthesized
tcctctttcccctccccaga

SEQ ID NO: 5779 - DNA, 20 bp, Artificial Sequence
  chemically synthesized
cctccccagagggcattacc

SEQ ID NO: 5780 - DNA, 20 bp, Artificial Sequence
  chemically synthesized
tccccagagggcattacctg

SEQ ID NO: 5781 - DNA, 20 bp, Artificial Sequence
  chemically synthesized
ccagagggcattacctggag

SEQ ID NO: 5782 - DNA, 20 bp, Artificial Sequence
  chemically synthesized
ttacctggagcagctgcctc

SEQ ID NO: 5783 - DNA, 20 bp, Artificial Sequence
  chemically synthesized
tacctggagcagctgcctct

SEQ ID NO: 5784 - DNA, 20 bp, Artificial Sequence
  chemically synthesized
acctggagcagctgcctcta

SEQ ID NO: 5785 - DNA, 20 bp, Artificial Sequence
  chemically synthesized
gctgcctctagggatgaact

SEQ ID NO: 5786 - DNA, 20 bp, Artificial Sequence
  chemically synthesized
gcctctagggatgaactgag

SEQ ID NO: 5787 - DNA, 20 bp, Artificial Sequence
  chemically synthesized
ctagggatgaactgagcaga

SEQ ID NO: 5788 - DNA, 20 bp, Artificial Sequence
  chemically synthesized
tagggatgaactgagcagac

SEQ ID NO: 5789 - DNA, 20 bp, Artificial Sequence
  chemically synthesized
ggatgaactgagcagacagg

SEQ ID NO: 5790 - DNA, 20 bp, Artificial Sequence
  chemically synthesized
gatgaactgagcagacaggc

SEQ ID NO: 5791 - DNA, 20 bp, Artificial Sequence
  chemically synthesized
tgaactgagcagacaggcag

SEQ ID NO: 5792 - DNA, 20 bp, Artificial Sequence
  chemically synthesized
gaactgagcagacaggcagg

SEQ ID NO: 5793 - DNA, 20 bp, Artificial Sequence
  chemically synthesized
aactgagcagacaggcagga

SEQ ID NO: 5794 - DNA, 20 bp, Artificial Sequence
  chemically synthesized
gacctgttttatatcatctc

SEQ ID NO: 5795 - DNA, 20 bp, Artificial Sequence
  chemically synthesized
acctgttttatatcatctcc

SEQ ID NO: 5796 - DNA, 20 bp, Artificial Sequence
  chemically synthesized
cctgttttatatcatctcca

SEQ ID NO: 5797 - DNA, 20 bp, Artificial Sequence
  chemically synthesized
gttttatatcatctccaggg

SEQ ID NO: 5798 - DNA, 20 bp, Artificial Sequence
  chemically synthesized
ttatatcatctccagggcag

SEQ ID NO: 5799 - DNA, 20 bp, Artificial Sequence
  chemically synthesized
tatatcatctccagggcagc

SEQ ID NO: 5800 - DNA, 20 bp, Artificial Sequence
  chemically synthesized
tctccagggcagcaggcact

SEQ ID NO: 5801 - DNA, 20 bp, Artificial Sequence
  chemically synthesized
ctccagggcagcaggcactg

SEQ ID NO: 5802 - DNA, 20 bp, Artificial Sequence
  chemically synthesized
ggcagcaggcactgaggacc

SEQ ID NO: 5803 - DNA, 20 bp, Artificial Sequence
  chemically synthesized
gcagcaggcactgaggaccc

SEQ ID NO: 5804 - DNA, 20 bp, Artificial Sequence
  chemically synthesized
cagcaggcactgaggaccca

SEQ ID NO: 5805 - DNA, 20 bp, Artificial Sequence
  chemically synthesized
gcactgaggacccagggcgc

SEQ ID NO: 5806 - DNA, 20 bp, Artificial Sequence
  chemically synthesized
cactgaggacccagggcgct

SEQ ID NO: 5807 - DNA, 20 bp, Artificial Sequence
  chemically synthesized
aggacccagggcgctgggca

SEQ ID NO: 5808 - DNA, 20 bp, Artificial Sequence
  chemically synthesized
ggacccagggcgctgggcaa

SEQ ID NO: 5809 - DNA, 20 bp, Artificial Sequence
  chemically synthesized
ggcaaaggtcacctgctgac

SEQ ID NO: 5810 - DNA, 20 bp, Artificial Sequence
  chemically synthesized
aaaggtcacctgctgaccag

SEQ ID NO: 5811 - DNA, 20 bp, Artificial Sequence
  chemically synthesized
aggtcacctgctgaccagtg

SEQ ID NO: 5812 - DNA, 20 bp, Artificial Sequence
  chemically synthesized
acctgctgaccagtggagat

SEQ ID NO: 5813 - DNA, 20 bp, Artificial Sequence
  chemically synthesized
cctgctgaccagtggagatg

SEQ ID NO: 5814 - DNA, 20 bp, Artificial Sequence
  chemically synthesized
ctgctgaccagtggagatga

SEQ ID NO: 5815 - DNA, 20 bp, Artificial Sequence
  chemically synthesized
accagtggagatgagggcct

SEQ ID NO: 5816 - DNA, 20 bp, Artificial Sequence
  chemically synthesized
ccagtggagatgagggcctg

SEQ ID NO: 5817 - DNA, 20 bp, Artificial Sequence
  chemically synthesized
gtggagatgagggcctgagg

SEQ ID NO: 5818 - DNA, 20 bp, Artificial Sequence
  chemically synthesized
tggagatgagggcctgaggc

SEQ ID NO: 5819 - DNA, 20 bp, Artificial Sequence
  chemically synthesized
ggagatgagggcctgaggca

SEQ ID NO: 5820 - DNA, 20 bp, Artificial Sequence
  chemically synthesized
agggcctgaggcagggtgtc

SEQ ID NO: 5821 - DNA, 20 bp, Artificial Sequence
  chemically synthesized
tgaggcagggtgtccagatg

SEQ ID NO: 5822 - DNA, 20 bp, Artificial Sequence
  chemically synthesized
gcagggtgtccagatgcagc

SEQ ID NO: 5823 - DNA, 20 bp, Artificial Sequence
  chemically synthesized
gggtgtccagatgcagcaag

SEQ ID NO: 5824 - DNA, 20 bp, Artificial Sequence
  chemically synthesized
ggtgtccagatgcagcaagc

SEQ ID NO: 5825 - DNA, 20 bp, Artificial Sequence
  chemically synthesized
gtccagatgcagcaagcggg

SEQ ID NO: 5826 - DNA, 20 bp, Artificial Sequence
  chemically synthesized
tccagatgcagcaagcgggc

SEQ ID NO: 5827 - DNA, 20 bp, Artificial Sequence
  chemically synthesized
cagatgcagcaagcgggcgg

SEQ ID NO: 5828 - DNA, 20 bp, Artificial Sequence
  chemically synthesized
gatgcagcaagcgggcggga

SEQ ID NO: 5829 - DNA, 20 bp, Artificial Sequence
  chemically synthesized
cagcaagcgggcgggagagt

SEQ ID NO: 5830 - DNA, 20 bp, Artificial Sequence
  chemically synthesized
agcaagcgggcgggagagtt

SEQ ID NO: 5831 - DNA, 20 bp, Artificial Sequence
  chemically synthesized
cgggagagttgggaaatccc

SEQ ID NO: 5832 - DNA, 20 bp, Artificial Sequence
  chemically synthesized
gggagagttgggaaatccct

SEQ ID NO: 5833 - DNA, 20 bp, Artificial Sequence
  chemically synthesized
gagagttgggaaatccctag

SEQ ID NO: 5834 - DNA, 20 bp, Artificial Sequence
  chemically synthesized
tgggaaatccctaggagact

SEQ ID NO: 5835 - DNA, 20 bp, Artificial Sequence
  chemically synthesized
ggtgacctttgcccagcgcc

SEQ ID NO: 5836 - DNA, 20 bp, Artificial Sequence
  chemically synthesized
gaggggaaagaggaggggag

SEQ ID NO: 5837 - DNA, 20 bp, Artificial Sequence
  chemically synthesized
taaggaagcctcggagctgg

SEQ ID NO: 5838 - DNA, 20 bp, Artificial Sequence
  chemically synthesized
gaagaacatggaggcccggg

SEQ ID NO: 5839 - DNA, 20 bp, Artificial Sequence
  chemically synthesized
cacttgcccaaagctacaca

SEQ ID NO: 5840 - DNA, 20 bp, Artificial Sequence
  chemically synthesized
gtgccttgatgttcagtctg

SEQ ID NO: 5841 - DNA, 20 bp, Artificial Sequence
  chemically synthesized
gccacgccacctccccaggg

SEQ ID NO: 5842 - DNA, 20 bp, Artificial Sequence
  chemically synthesized
ggtccagaggcatggggacc

SEQ ID NO: 5843 - DNA, 20 bp, Artificial Sequence
  chemically synthesized
aacagaggtgccatgcagcc

SEQ ID NO: 5844 - DNA, 20 bp, Artificial Sequence
  chemically synthesized
tggtgggactgggctggggg

SEQ ID NO: 5845 - DNA, 20 bp, Artificial Sequence
  chemically synthesized
gcgccaggagggcaacaaca

SEQ ID NO: 5846 - DNA, 20 bp, Artificial Sequence
  chemically synthesized
cccctaaggtagaaccttag

SEQ ID NO: 5847 - DNA, 20 bp, Artificial Sequence
  chemically synthesized
ccttagctgggtctgccaga

SEQ ID NO: 5848 - DNA, 20 bp, Artificial Sequence
  chemically synthesized
agggggactggtgaggggcg

SEQ ID NO: 5849 - DNA, 20 bp, Artificial Sequence
  chemically synthesized
ggatcgaggcccaaagggag

SEQ ID NO: 5850 - DNA, 20 bp, Artificial Sequence
  chemically synthesized
gaggcccaaagggaggtggg

SEQ ID NO: 5851 - DNA, 20 bp, Artificial Sequence
  chemically synthesized
agccaacatgctgtgtgtct

SEQ ID NO: 5852 - DNA, 20 bp, Artificial Sequence
  chemically synthesized
caggcctcagtttccctgtc

SEQ ID NO: 5853 - DNA, 20 bp, Artificial Sequence
  chemically synthesized
ttcctccagccctaagcctg

SEQ ID NO: 5854 - DNA, 20 bp, Artificial Sequence
  chemically synthesized
atgttcttcaggttatgatg

SEQ ID NO: 5855 - DNA, 20 bp, Artificial Sequence
  chemically synthesized
tacctggagcagctgcctct

SEQ ID NO: 5856 - DNA, 20 bp, Artificial Sequence
  chemically synthesized
tgaactgagcagacaggcag

SEQ ID NO: 5857 - DNA, 20 bp, Artificial Sequence
  chemically synthesized
gtggagatgagggcctgagg

SEQ ID NO: 5858 - DNA, 20 bp, Artificial Sequence
  chemically synthesized
cagatgcagcaagcgggcgg

SEQ ID NO: 5859 - DNA, 20 bp, Artificial Sequence
  chemically synthesized
gttgggaaatccctaggaga

SEQ ID NO: 5860 - DNA, 20 bp, Artificial Sequence
  chemically synthesized
aaactgaggcctggagaggg

SEQ ID NO: 5861 - DNA, 20 bp, Artificial Sequence
  chemically synthesized
agggaggtgggtgggatgga

SEQ ID NO: 5862 - DNA, 20 bp, Artificial Sequence
  chemically synthesized
cttcctccagccctaagcct

SEQ ID NO: 5863 - DNA, 20 bp, Artificial Sequence
  chemically synthesized
ctgctgccctggagatgata

SEQ ID NO: 5864 - DNA, 20 bp, Artificial Sequence
  chemically synthesized
gaggtgggtgggatggagca

SEQ ID NO: 5865 - DNA, 20 bp, Artificial Sequence
  chemically synthesized
agggatttcccaactctccc

SEQ ID NO: 5866 - DNA, 20 bp, Artificial Sequence
  chemically synthesized
gcaggttcccccctcattct

SEQ ID NO: 5867 - DNA, 20 bp, Artificial Sequence
  chemically synthesized
gtgccttgatgttcagtctg

SEQ ID NO: 5868 - DNA, 20 bp, Artificial Sequence
  chemically synthesized
gcccccagcccagtcccacc

SEQ ID NO: 5869 - DNA, 20 bp, Artificial Sequence
  chemically synthesized
ccaacatgctgtgtgtcttt

SEQ ID NO: 5870 - DNA, 20 bp, Artificial Sequence
  chemically synthesized
atttctggccctctccaggc

SEQ ID NO: 5871 - DNA, 20 bp, Artificial Sequence
  chemically synthesized
tggggtaggactgggctgtc

SEQ ID NO: 5872 - DNA, 20 bp, Artificial Sequence
  chemically synthesized
acttccagccccaccccctg

SEQ ID NO: 5873 - DNA, 20 bp, Artificial Sequence
  chemically synthesized
ggggggcacccgtccagctc

SEQ ID NO: 5874 - DNA, 20 bp, Artificial Sequence
  chemically synthesized
gaggcttccttagctctagc

SEQ ID NO: 5875 - DNA, 20 bp, Artificial Sequence
  chemically synthesized
tagctctagcaagtgcttct

SEQ ID NO: 5876 - DNA, 20 bp, Artificial Sequence
  chemically synthesized
agacaggcaggagggttctg

SEQ ID NO: 5877 - DNA, 22 bp, Artificial Sequence
  chemically synthesized
agtctcctagggatttcccaac

SEQ ID NO: 5878 - DNA, 22 bp, Artificial Sequence
  chemically synthesized
ctagggatttcccaactctccc

SEQ ID NO: 5879 - DNA, 22 bp, Artificial Sequence
  chemically synthesized
gggatttcccaactctcccgcc

SEQ ID NO: 5880 - DNA, 22 bp, Artificial Sequence
  chemically synthesized
cccaactctcccgcccgcttgc

SEQ ID NO: 5881 - DNA, 22 bp, Artificial Sequence
  chemically synthesized
ccaactctcccgcccgcttgct

SEQ ID NO: 5882 - DNA, 22 bp, Artificial Sequence
  chemically synthesized
tcccgcccgcttgctgcatctg

SEQ ID NO: 5883 - DNA, 22 bp, Artificial Sequence
  chemically synthesized
ccgcccgcttgctgcatctgga

SEQ ID NO: 5884 - DNA, 22 bp, Artificial Sequence
  chemically synthesized
gctgcatctggacaccctgcct

SEQ ID NO: 5885 - DNA, 22 bp, Artificial Sequence
  chemically synthesized
ctgcatctggacaccctgcctc

SEQ ID NO: 5886 - DNA, 22 bp, Artificial Sequence
  chemically synthesized
catctggacaccctgcctcagg

SEQ ID NO: 5887 - DNA, 22 bp, Artificial Sequence
  chemically synthesized
gacaccctgcctcaggccctca

SEQ ID NO: 5888 - DNA, 22 bp, Artificial Sequence
  chemically synthesized
cctcaggccctcatctccactg

SEQ ID NO: 5889 - DNA, 22 bp, Artificial Sequence
  chemically synthesized
aggccctcatctccactggtca

SEQ ID NO: 5890 - DNA, 22 bp, Artificial Sequence
  chemically synthesized
atctccactggtcagcaggtga

SEQ ID NO: 5891 - DNA, 22 bp, Artificial Sequence
  chemically synthesized
cactggtcagcaggtgaccttt

SEQ ID NO: 5892 - DNA, 22 bp, Artificial Sequence
  chemically synthesized
gtcagcaggtgacctttgccca

SEQ ID NO: 5893 - DNA, 22 bp, Artificial Sequence
  chemically synthesized
tgcccagcgccctgggtcctca

SEQ ID NO: 5894 - DNA, 22 bp, Artificial Sequence
  chemically synthesized
gcccagcgccctgggtcctcag

SEQ ID NO: 5895 - DNA, 22 bp, Artificial Sequence
  chemically synthesized
cccagcgccctgggtcctcagt

SEQ ID NO: 5896 - DNA, 22 bp, Artificial Sequence
  chemically synthesized
ggtcctcagtgcctgctgccct

SEQ ID NO: 5897 - DNA, 22 bp, Artificial Sequence
  chemically synthesized
agtgcctgctgccctggagatg

SEQ ID NO: 5898 - DNA, 22 bp, Artificial Sequence
  chemically synthesized
ctgccctggagatgatataaaa

SEQ ID NO: 5899 - DNA, 22 bp, Artificial Sequence
  chemically synthesized
ccctggagatgatataaaacag

SEQ ID NO: 5900 - DNA, 22 bp, Artificial Sequence
  chemically synthesized
gagatgatataaaacaggtcag

SEQ ID NO: 5901 - DNA, 22 bp, Artificial Sequence
  chemically synthesized
ctgcctgtctgctcagttcatc

SEQ ID NO: 5902 - DNA, 22 bp, Artificial Sequence
  chemically synthesized
cctgtctgctcagttcatccct

SEQ ID NO: 5903 - DNA, 22 bp, Artificial Sequence
  chemically synthesized
tctgctcagttcatccctagag

SEQ ID NO: 5904 - DNA, 22 bp, Artificial Sequence
  chemically synthesized
ctcagttcatccctagaggcag

SEQ ID NO: 5905 - DNA, 22 bp, Artificial Sequence
  chemically synthesized
agttcatccctagaggcagctg

SEQ ID NO: 5906 - DNA, 22 bp, Artificial Sequence
  chemically synthesized
atccctagaggcagctgctcca

SEQ ID NO: 5907 - DNA, 22 bp, Artificial Sequence
  chemically synthesized
gaggcagctgctccaggtaatg

SEQ ID NO: 5908 - DNA, 22 bp, Artificial Sequence
  chemically synthesized
ctccaggtaatgccctctgggg

SEQ ID NO: 5909 - DNA, 22 bp, Artificial Sequence
  chemically synthesized
caggtaatgccctctggggagg

SEQ ID NO: 5910 - DNA, 22 bp, Artificial Sequence
  chemically synthesized
tggggaggggaaagaggagggg

SEQ ID NO: 5911 - DNA, 22 bp, Artificial Sequence
  chemically synthesized
gggaggggaaagaggaggggag

SEQ ID NO: 5912 - DNA, 22 bp, Artificial Sequence
  chemically synthesized
cctgcccagcccagccagcaag

SEQ ID NO: 5913 - DNA, 22 bp, Artificial Sequence
  chemically synthesized
cccagcccagccagcaagcctg

SEQ ID NO: 5914 - DNA, 22 bp, Artificial Sequence
  chemically synthesized
gagaagcacttgctagagctaa

SEQ ID NO: 5915 - DNA, 22 bp, Artificial Sequence
  chemically synthesized
gctagagctaaggaagcctcgg

SEQ ID NO: 5916 - DNA, 22 bp, Artificial Sequence
  chemically synthesized
ctagagctaaggaagcctcgga

SEQ ID NO: 5917 - DNA, 22 bp, Artificial Sequence
  chemically synthesized
gagctaaggaagcctcggagct

SEQ ID NO: 5918 - DNA, 22 bp, Artificial Sequence
  chemically synthesized
aggaagcctcggagctggacgg

SEQ ID NO: 5919 - DNA, 22 bp, Artificial Sequence
  chemically synthesized
ggagctggacgggtgcccccca

SEQ ID NO: 5920 - DNA, 22 bp, Artificial Sequence
  chemically synthesized
gacgggtgccccccacccctca

SEQ ID NO: 5921 - DNA, 22 bp, Artificial Sequence
  chemically synthesized
atcataacctgaagaacatgga

SEQ ID NO: 5922 - DNA, 22 bp, Artificial Sequence
  chemically synthesized
aagaacatggaggcccgggagg

SEQ ID NO: 5923 - DNA, 22 bp, Artificial Sequence
  chemically synthesized
gcccaaagctacacagggggtg

SEQ ID NO: 5924 - DNA, 22 bp, Artificial Sequence
  chemically synthesized
cccaaagctacacagggggtgg

SEQ ID NO: 5925 - DNA, 22 bp, Artificial Sequence
  chemically synthesized
cacagggggtggggctggaagt

SEQ ID NO: 5926 - DNA, 22 bp, Artificial Sequence
  chemically synthesized
gaagtggctccaagtgcaggtt

SEQ ID NO: 5927 - DNA, 22 bp, Artificial Sequence
  chemically synthesized
caagtgcaggttcccccctcat

SEQ ID NO: 5928 - DNA, 22 bp, Artificial Sequence
  chemically synthesized
ccccctcattcttcaggcttag

SEQ ID NO: 5929 - DNA, 22 bp, Artificial Sequence
  chemically synthesized
attcttcaggcttagggctgga

SEQ ID NO: 5930 - DNA, 22 bp, Artificial Sequence
  chemically synthesized
ttcaggcttagggctggaggaa

SEQ ID NO: 5931 - DNA, 22 bp, Artificial Sequence
  chemically synthesized
caggcttagggctggaggaagc

SEQ ID NO: 5932 - DNA, 22 bp, Artificial Sequence
  chemically synthesized
aggcttagggctggaggaagcc

SEQ ID NO: 5933 - DNA, 22 bp, Artificial Sequence
  chemically synthesized
agggctggaggaagccttagac

SEQ ID NO: 5934 - DNA, 22 bp, Artificial Sequence
  chemically synthesized
gggctggaggaagccttagaca

SEQ ID NO: 5935 - DNA, 22 bp, Artificial Sequence
  chemically synthesized
gaggaagccttagacagcccag

SEQ ID NO: 5936 - DNA, 22 bp, Artificial Sequence
  chemically synthesized
agacagcccagtcctaccccag

SEQ ID NO: 5937 - DNA, 22 bp, Artificial Sequence
  chemically synthesized
gacagcccagtcctaccccaga

SEQ ID NO: 5938 - DNA, 22 bp, Artificial Sequence
  chemically synthesized
ccccagacagggaaactgaggc

SEQ ID NO: 5939 - DNA, 22 bp, Artificial Sequence
  chemically synthesized
aggcctggagagggccagaaat

SEQ ID NO: 5940 - DNA, 22 bp, Artificial Sequence
  chemically synthesized
gagagggccagaaatcacccaa

SEQ ID NO: 5941 - DNA, 22 bp, Artificial Sequence
  chemically synthesized
gctggactggacggagatcagt

SEQ ID NO: 5942 - DNA, 22 bp, Artificial Sequence
  chemically synthesized
gactggacggagatcagtccag

SEQ ID NO: 5943 - DNA, 22 bp, Artificial Sequence
  chemically synthesized
gacggagatcagtccagaccgc

SEQ ID NO: 5944 - DNA, 22 bp, Artificial Sequence
  chemically synthesized
gatgttcagtctggtgggtttt

SEQ ID NO: 5945 - DNA, 22 bp, Artificial Sequence
  chemically synthesized
atgttcagtctggtgggttttc

SEQ ID NO: 5946 - DNA, 22 bp, Artificial Sequence
  chemically synthesized
agtctggtgggttttctgctcc

SEQ ID NO: 5947 - DNA, 22 bp, Artificial Sequence
  chemically synthesized
gtgggttttctgctccatccca

SEQ ID NO: 5948 - DNA, 22 bp, Artificial Sequence
  chemically synthesized
tctgctccatcccacccacctc

SEQ ID NO: 5949 - DNA, 22 bp, Artificial Sequence
  chemically synthesized
ctgctccatcccacccacctcc

SEQ ID NO: 5950 - DNA, 22 bp, Artificial Sequence
  chemically synthesized
tgctccatcccacccacctccc

SEQ ID NO: 5951 - DNA, 22 bp, Artificial Sequence
  chemically synthesized
ctccatcccacccacctccctt

SEQ ID NO: 5952 - DNA, 22 bp, Artificial Sequence
  chemically synthesized
catcccacccacctccctttgg

SEQ ID NO: 5953 - DNA, 22 bp, Artificial Sequence
  chemically synthesized
cctttgggcctcgatccctcgc

SEQ ID NO: 5954 - DNA, 22 bp, Artificial Sequence
  chemically synthesized
tgggcctcgatccctcgcccct

SEQ ID NO: 5955 - DNA, 22 bp, Artificial Sequence
  chemically synthesized
gggcctcgatccctcgcccctc

SEQ ID NO: 5956 - DNA, 22 bp, Artificial Sequence
  chemically synthesized
ggcctcgatccctcgcccctca

SEQ ID NO: 5957 - DNA, 22 bp, Artificial Sequence
  chemically synthesized
gatccctcgcccctcaccagtc

SEQ ID NO: 5958 - DNA, 22 bp, Artificial Sequence
  chemically synthesized
gcccctcaccagtcccccttct

SEQ ID NO: 5959 - DNA, 22 bp, Artificial Sequence
  chemically synthesized
accagtcccccttctgagagcc

SEQ ID NO: 5960 - DNA, 22 bp, Artificial Sequence
  chemically synthesized
ctgagagcccgtattagcaggg

SEQ ID NO: 5961 - DNA, 22 bp, Artificial Sequence
  chemically synthesized
tgagagcccgtattagcaggga

SEQ ID NO: 5962 - DNA, 22 bp, Artificial Sequence
  chemically synthesized
agagcccgtattagcagggagc

SEQ ID NO: 5963 - DNA, 22 bp, Artificial Sequence
  chemically synthesized
gcagggagccggcccctactcc

SEQ ID NO: 5964 - DNA, 22 bp, Artificial Sequence
  chemically synthesized
ctccttctggcagacccagcta

SEQ ID NO: 5965 - DNA, 22 bp, Artificial Sequence
  chemically synthesized
cttctggcagacccagctaagg

SEQ ID NO: 5966 - DNA, 22 bp, Artificial Sequence
  chemically synthesized
ctggcagacccagctaaggttc

SEQ ID NO: 5967 - DNA, 22 bp, Artificial Sequence
  chemically synthesized
tggcagacccagctaaggttct

SEQ ID NO: 5968 - DNA, 22 bp, Artificial Sequence
  chemically synthesized
gcagacccagctaaggttctac

SEQ ID NO: 5969 - DNA, 22 bp, Artificial Sequence
  chemically synthesized
aggttctaccttaggggccacg

SEQ ID NO: 5970 - DNA, 22 bp, Artificial Sequence
  chemically synthesized
taccttaggggccacgccacct

SEQ ID NO: 5971 - DNA, 22 bp, Artificial Sequence
  chemically synthesized
ccttaggggccacgccacctcc

SEQ ID NO: 5972 - DNA, 22 bp, Artificial Sequence
  chemically synthesized
aggggccacgccacctccccag

SEQ ID NO: 5973 - DNA, 22 bp, Artificial Sequence
  chemically synthesized
ggggccacgccacctccccagg

SEQ ID NO: 5974 - DNA, 22 bp, Artificial Sequence
  chemically synthesized
cccagggaggggtccagaggca

SEQ ID NO: 5975 - DNA, 22 bp, Artificial Sequence
  chemically synthesized
gggtgcccctcacaggacactt

SEQ ID NO: 5976 - DNA, 22 bp, Artificial Sequence
  chemically synthesized
acaggacacttccttgcaggaa

SEQ ID NO: 5977 - DNA, 22 bp, Artificial Sequence
  chemically synthesized
ccttgcaggaacagaggtgcca

SEQ ID NO: 5978 - DNA, 22 bp, Artificial Sequence
  chemically synthesized
cttgcaggaacagaggtgccat

SEQ ID NO: 5979 - DNA, 22 bp, Artificial Sequence
  chemically synthesized
gcaggaacagaggtgccatgca

SEQ ID NO: 5980 - DNA, 22 bp, Artificial Sequence
  chemically synthesized
caggaacagaggtgccatgcag

SEQ ID NO: 5981 - DNA, 22 bp, Artificial Sequence
  chemically synthesized
cttgttgttgccctcctggcgc

SEQ ID NO: 5982 - DNA, 22 bp, Artificial Sequence
  chemically synthesized
gttgttgccctcctggcgctcc

SEQ ID NO: 5983 - DNA, 22 bp, Artificial Sequence
  chemically synthesized
ttgttgccctcctggcgctcct

SEQ ID NO: 5984 - DNA, 22 bp, Artificial Sequence
  chemically synthesized
ttgccctcctggcgctcctggc

SEQ ID NO: 5985 - DNA, 22 bp, Artificial Sequence
  chemically synthesized
ccctcctggcgctcctggcctc

SEQ ID NO: 5986 - DNA, 22 bp, Artificial Sequence
  chemically synthesized
ctggcgctcctggcctctgccc

SEQ ID NO: 5987 - DNA, 22 bp, Artificial Sequence
  chemically synthesized
gcgctcctggcctctgcccgta

SEQ ID NO: 5988 - DNA, 22 bp, Artificial Sequence
  chemically synthesized
ctggcctctgcccgtaagcact

SEQ ID NO: 5989 - DNA, 22 bp, Artificial Sequence
  chemically synthesized
gcctctgcccgtaagcacttgg

SEQ ID NO: 5990 - DNA, 22 bp, Artificial Sequence
  chemically synthesized
tgcccgtaagcacttggtggga

SEQ ID NO: 5991 - DNA, 22 bp, Artificial Sequence
  chemically synthesized
cccgtaagcacttggtgggact

SEQ ID NO: 5992 - DNA, 22 bp, Artificial Sequence
  chemically synthesized
ggtgggactgggctgggggcag

SEQ ID NO: 5993 - DNA, 22 bp, Artificial Sequence
  chemically synthesized
gtgggactgggctgggggcagg

SEQ ID NO: 5994 - DNA, 22 bp, Artificial Sequence
  chemically synthesized
cccccagcccagtcccaccaag

SEQ ID NO: 5995 - DNA, 22 bp, Artificial Sequence
  chemically synthesized
acgggcagaggccaggagcgcc

SEQ ID NO: 5996 - DNA, 22 bp, Artificial Sequence
  chemically synthesized
cgggcagaggccaggagcgcca

SEQ ID NO: 5997 - DNA, 22 bp, Artificial Sequence
  chemically synthesized
catggcacctctgttcctgcaa

SEQ ID NO: 5998 - DNA, 22 bp, Artificial Sequence
  chemically synthesized
tgttcctgcaaggaagtgtcct

SEQ ID NO: 5999 - DNA, 22 bp, Artificial Sequence
  chemically synthesized
ttcctgcaaggaagtgtcctgt

SEQ ID NO: 6000 - DNA, 22 bp, Artificial Sequence
  chemically synthesized
ctgcaaggaagtgtcctgtgag

SEQ ID NO: 6001 - DNA, 22 bp, Artificial Sequence
  chemically synthesized
caaggaagtgtcctgtgagggg

SEQ ID NO: 6002 - DNA, 22 bp, Artificial Sequence
  chemically synthesized
tgaggggcaccccaggtcccca

SEQ ID NO: 6003 - DNA, 22 bp, Artificial Sequence
  chemically synthesized
tggacccctccctggggaggtg

SEQ ID NO: 6004 - DNA, 22 bp, Artificial Sequence
  chemically synthesized
gacccctccctggggaggtggc

SEQ ID NO: 6005 - DNA, 22 bp, Artificial Sequence
  chemically synthesized
cctggggaggtggcgtggcccc

SEQ ID NO: 6006 - DNA, 22 bp, Artificial Sequence
  chemically synthesized
gggaggtggcgtggcccctaag

SEQ ID NO: 6007 - DNA, 22 bp, Artificial Sequence
  chemically synthesized
aggtagaaccttagctgggtct

SEQ ID NO: 6008 - DNA, 22 bp, Artificial Sequence
  chemically synthesized
agctgggtctgccagaaggagt

SEQ ID NO: 6009 - DNA, 22 bp, Artificial Sequence
  chemically synthesized
gctgggtctgccagaaggagta

SEQ ID NO: 6010 - DNA, 22 bp, Artificial Sequence
  chemically synthesized
ggtctgccagaaggagtagggg

SEQ ID NO: 6011 - DNA, 22 bp, Artificial Sequence
  chemically synthesized
ccagaaggagtaggggccggct

SEQ ID NO: 6012 - DNA, 22 bp, Artificial Sequence
  chemically synthesized
cctgctaatacgggctctcaga

SEQ ID NO: 6013 - DNA, 22 bp, Artificial Sequence
  chemically synthesized
ctaatacgggctctcagaaggg

SEQ ID NO: 6014 - DNA, 22 bp, Artificial Sequence
  chemically synthesized
atacgggctctcagaaggggga

SEQ ID NO: 6015 - DNA, 22 bp, Artificial Sequence
  chemically synthesized
tcagaagggggactggtgaggg

SEQ ID NO: 6016 - DNA, 22 bp, Artificial Sequence
  chemically synthesized
agaagggggactggtgaggggc

SEQ ID NO: 6017 - DNA, 22 bp, Artificial Sequence
  chemically synthesized
gtgaggggcgagggatcgaggc

SEQ ID NO: 6018 - DNA, 22 bp, Artificial Sequence
  chemically synthesized
aacatcaaggcacctgcggtct

SEQ ID NO: 6019 - DNA, 22 bp, Artificial Sequence
  chemically synthesized
cggtctggactgatctccgtcc

SEQ ID NO: 6020 - DNA, 22 bp, Artificial Sequence
  chemically synthesized
gactgatctccgtccagtccag

SEQ ID NO: 6021 - DNA, 22 bp, Artificial Sequence
  chemically synthesized
atctccgtccagtccagccaac

SEQ ID NO: 6022 - DNA, 22 bp, Artificial Sequence
  chemically synthesized
cgtccagtccagccaacatgct

SEQ ID NO: 6023 - DNA, 22 bp, Artificial Sequence
  chemically synthesized
tgtgtctttgggtgatttctgg

SEQ ID NO: 6024 - DNA, 22 bp, Artificial Sequence
  chemically synthesized
tgggtgatttctggccctctcc

SEQ ID NO: 6025 - DNA, 22 bp, Artificial Sequence
  chemically synthesized
gggtgatttctggccctctcca

SEQ ID NO: 6026 - DNA, 22 bp, Artificial Sequence
  chemically synthesized
ggtgatttctggccctctccag

SEQ ID NO: 6027 - DNA, 22 bp, Artificial Sequence
  chemically synthesized
ctggccctctccaggcctcagt

SEQ ID NO: 6028 - DNA, 22 bp, Artificial Sequence
  chemically synthesized
tggccctctccaggcctcagtt

SEQ ID NO: 6029 - DNA, 22 bp, Artificial Sequence
  chemically synthesized
gccctctccaggcctcagtttc

SEQ ID NO: 6030 - DNA, 22 bp, Artificial Sequence
  chemically synthesized
tccaggcctcagtttccctgtc

SEQ ID NO: 6031 - DNA, 22 bp, Artificial Sequence
  chemically synthesized
caggcctcagtttccctgtctg

SEQ ID NO: 6032 - DNA, 22 bp, Artificial Sequence
  chemically synthesized
agtttccctgtctggggtagga

SEQ ID NO: 6033 - DNA, 22 bp, Artificial Sequence
  chemically synthesized
ccctgtctggggtaggactggg

SEQ ID NO: 6034 - DNA, 22 bp, Artificial Sequence
  chemically synthesized
cctgtctggggtaggactgggc

SEQ ID NO: 6035 - DNA, 22 bp, Artificial Sequence
  chemically synthesized
tctggggtaggactgggctgtc

SEQ ID NO: 6036 - DNA, 22 bp, Artificial Sequence
  chemically synthesized
gggtaggactgggctgtctaag

SEQ ID NO: 6037 - DNA, 22 bp, Artificial Sequence
  chemically synthesized
ggctgtctaaggcttcctccag

SEQ ID NO: 6038 - DNA, 22 bp, Artificial Sequence
  chemically synthesized
tctaaggcttcctccagcccta

SEQ ID NO: 6039 - DNA, 22 bp, Artificial Sequence
  chemically synthesized
aggcttcctccagccctaagcc

SEQ ID NO: 6040 - DNA, 22 bp, Artificial Sequence
  chemically synthesized
cctccagccctaagcctgaaga

SEQ ID NO: 6041 - DNA, 22 bp, Artificial Sequence
  chemically synthesized
ctccagccctaagcctgaagaa

SEQ ID NO: 6042 - DNA, 22 bp, Artificial Sequence
  chemically synthesized
cagccctaagcctgaagaatga

SEQ ID NO: 6043 - DNA, 22 bp, Artificial Sequence
  chemically synthesized
agcctgaagaatgaggggggaa

SEQ ID NO: 6044 - DNA, 22 bp, Artificial Sequence
  chemically synthesized
aagaatgaggggggaacctgca

SEQ ID NO: 6045 - DNA, 22 bp, Artificial Sequence
  chemically synthesized
cacttggagccacttccagccc

SEQ ID NO: 6046 - DNA, 22 bp, Artificial Sequence
  chemically synthesized
ggagccacttccagccccaccc

SEQ ID NO: 6047 - DNA, 22 bp, Artificial Sequence
  chemically synthesized
gagccacttccagccccacccc

SEQ ID NO: 6048 - DNA, 22 bp, Artificial Sequence
  chemically synthesized
ccagccccaccccctgtgtagc

SEQ ID NO: 6049 - DNA, 22 bp, Artificial Sequence
  chemically synthesized
cagccccaccccctgtgtagct

SEQ ID NO: 6050 - DNA, 22 bp, Artificial Sequence
  chemically synthesized
tgtagctttgggcaagtgacac

SEQ ID NO: 6051 - DNA, 22 bp, Artificial Sequence
  chemically synthesized
tgggcaagtgacacccctcccg

SEQ ID NO: 6052 - DNA, 22 bp, Artificial Sequence
  chemically synthesized
gggcaagtgacacccctcccgg

SEQ ID NO: 6053 - DNA, 22 bp, Artificial Sequence
  chemically synthesized
ggcaagtgacacccctcccggg

SEQ ID NO: 6054 - DNA, 22 bp, Artificial Sequence
  chemically synthesized
ccgggcctccatgttcttcagg

SEQ ID NO: 6055 - DNA, 22 bp, Artificial Sequence
  chemically synthesized
catgttcttcaggttatgatga

SEQ ID NO: 6056 - DNA, 22 bp, Artificial Sequence
  chemically synthesized
ttcaggttatgatgaggggtgg

SEQ ID NO: 6057 - DNA, 22 bp, Artificial Sequence
  chemically synthesized
caggttatgatgaggggtgggg

SEQ ID NO: 6058 - DNA, 22 bp, Artificial Sequence
  chemically synthesized
aggttatgatgaggggtggggg

SEQ ID NO: 6059 - DNA, 22 bp, Artificial Sequence
  chemically synthesized
tgatgaggggtggggggcaccc

SEQ ID NO: 6060 - DNA, 22 bp, Artificial Sequence
  chemically synthesized
cgaggcttccttagctctagca

SEQ ID NO: 6061 - DNA, 22 bp, Artificial Sequence
  chemically synthesized
ccttagctctagcaagtgcttc

SEQ ID NO: 6062 - DNA, 22 bp, Artificial Sequence
  chemically synthesized
cttagctctagcaagtgcttct

SEQ ID NO: 6063 - DNA, 22 bp, Artificial Sequence
  chemically synthesized
agctctagcaagtgcttctcca

SEQ ID NO: 6064 - DNA, 22 bp, Artificial Sequence
  chemically synthesized
gctctagcaagtgcttctccag

SEQ ID NO: 6065 - DNA, 22 bp, Artificial Sequence
  chemically synthesized
tagcaagtgcttctccaggctt

SEQ ID NO: 6066 - DNA, 22 bp, Artificial Sequence
  chemically synthesized
gcaagtgcttctccaggcttgc

SEQ ID NO: 6067 - DNA, 22 bp, Artificial Sequence
  chemically synthesized
ctccaggcttgctggctgggct

SEQ ID NO: 6068 - DNA, 22 bp, Artificial Sequence
  chemically synthesized
tccaggcttgctggctgggctg

SEQ ID NO: 6069 - DNA, 22 bp, Artificial Sequence
  chemically synthesized
caggcttgctggctgggctggg

SEQ ID NO: 6070 - DNA, 22 bp, Artificial Sequence
  chemically synthesized
gctggctgggctgggcagggag

SEQ ID NO: 6071 - DNA, 22 bp, Artificial Sequence
  chemically synthesized
ctggctgggctgggcagggagc

SEQ ID NO: 6072 - DNA, 22 bp, Artificial Sequence
  chemically synthesized
gctgggctgggcagggagctcc

SEQ ID NO: 6073 - DNA, 22 bp, Artificial Sequence
  chemically synthesized
ggctgggcagggagctcctctt

SEQ ID NO: 6074 - DNA, 22 bp, Artificial Sequence
  chemically synthesized
ggcagggagctcctcttgcccc

SEQ ID NO: 6075 - DNA, 22 bp, Artificial Sequence
  chemically synthesized
ctcttgcccctcttcatcctcc

SEQ ID NO: 6076 - DNA, 22 bp, Artificial Sequence
  chemically synthesized
ttgcccctcttcatcctcctcc

SEQ ID NO: 6077 - DNA, 22 bp, Artificial Sequence
  chemically synthesized
gcccctcttcatcctcctcccc

SEQ ID NO: 6078 - DNA, 22 bp, Artificial Sequence
  chemically synthesized
cccctcttcatcctcctcccct

SEQ ID NO: 6079 - DNA, 22 bp, Artificial Sequence
  chemically synthesized
ttcatcctcctcccctcctctt

SEQ ID NO: 6080 - DNA, 22 bp, Artificial Sequence
  chemically synthesized
catcctcctcccctcctctttc

SEQ ID NO: 6081 - DNA, 22 bp, Artificial Sequence
  chemically synthesized
atcctcctcccctcctctttcc

SEQ ID NO: 6082 - DNA, 22 bp, Artificial Sequence
  chemically synthesized
ctcccctcctctttcccctccc

SEQ ID NO: 6083 - DNA, 22 bp, Artificial Sequence
  chemically synthesized
ccctcctctttcccctccccag

SEQ ID NO: 6084 - DNA, 22 bp, Artificial Sequence
  chemically synthesized
ctctttcccctccccagagggc

SEQ ID NO: 6085 - DNA, 22 bp, Artificial Sequence
  chemically synthesized
tttcccctccccagagggcatt

SEQ ID NO: 6086 - DNA, 22 bp, Artificial Sequence
  chemically synthesized
tcccctccccagagggcattac

SEQ ID NO: 6087 - DNA, 22 bp, Artificial Sequence
  chemically synthesized
cccctccccagagggcattacc

SEQ ID NO: 6088 - DNA, 22 bp, Artificial Sequence
  chemically synthesized
ccctccccagagggcattacct

SEQ ID NO: 6089 - DNA, 22 bp, Artificial Sequence
  chemically synthesized
cccagagggcattacctggagc

SEQ ID NO: 6090 - DNA, 22 bp, Artificial Sequence
  chemically synthesized
cctggagcagctgcctctaggg

SEQ ID NO: 6091 - DNA, 22 bp, Artificial Sequence
  chemically synthesized
gagcagctgcctctagggatga

SEQ ID NO: 6092 - DNA, 22 bp, Artificial Sequence
  chemically synthesized
cctctagggatgaactgagcag

SEQ ID NO: 6093 - DNA, 22 bp, Artificial Sequence
  chemically synthesized
tagggatgaactgagcagacag

SEQ ID NO: 6094 - DNA, 22 bp, Artificial Sequence
  chemically synthesized
gggatgaactgagcagacaggc

SEQ ID NO: 6095 - DNA, 22 bp, Artificial Sequence
  chemically synthesized
agcagacaggcaggagggttct

SEQ ID NO: 6096 - DNA, 22 bp, Artificial Sequence
  chemically synthesized
tgacctgttttatatcatctcc

SEQ ID NO: 6097 - DNA, 22 bp, Artificial Sequence
  chemically synthesized
acctgttttatatcatctccag

SEQ ID NO: 6098 - DNA, 22 bp, Artificial Sequence
  chemically synthesized
ttttatatcatctccagggcag

SEQ ID NO: 6099 - DNA, 22 bp, Artificial Sequence
  chemically synthesized
tatatcatctccagggcagcag

SEQ ID NO: 6100 - DNA, 22 bp, Artificial Sequence
  chemically synthesized
atatcatctccagggcagcagg

SEQ ID NO: 6101 - DNA, 22 bp, Artificial Sequence
  chemically synthesized
tatcatctccagggcagcaggc

SEQ ID NO: 6102 - DNA, 22 bp, Artificial Sequence
  chemically synthesized
cagggcagcaggcactgaggac

SEQ ID NO: 6103 - DNA, 22 bp, Artificial Sequence
  chemically synthesized
aggacccagggcgctgggcaaa

SEQ ID NO: 6104 - DNA, 22 bp, Artificial Sequence
  chemically synthesized
ggcaaaggtcacctgctgacca

SEQ ID NO: 6105 - DNA, 22 bp, Artificial Sequence
  chemically synthesized
ctgaccagtggagatgagggcc

SEQ ID NO: 6106 - DNA, 22 bp, Artificial Sequence
  chemically synthesized
accagtggagatgagggcctga

SEQ ID NO: 6107 - DNA, 22 bp, Artificial Sequence
  chemically synthesized
aggcagggtgtccagatgcagc

SEQ ID NO: 6108 - DNA, 22 bp, Artificial Sequence
  chemically synthesized
ggaaatccctaggagactgagt

SEQ ID NO: 6109 - DNA, 20 bp, Artificial Sequence
  chemically synthesized
taccccttgcccatccctgc

SEQ ID NO: 6110 - DNA, 20 bp, Artificial Sequence
  chemically synthesized
ggcccccgtgaccctcactt

SEQ ID NO: 6111 - DNA, 20 bp, Artificial Sequence
  chemically synthesized
gcccccgtgaccctcacttt

SEQ ID NO: 6112 - DNA, 20 bp, Artificial Sequence
  chemically synthesized
gtgaccctcactttgggacc

SEQ ID NO: 6113 - DNA, 20 bp, Artificial Sequence
  chemically synthesized
cactttgggacccagtcaca

SEQ ID NO: 6114 - DNA, 20 bp, Artificial Sequence
  chemically synthesized
ccagtcacacagatgaccac

SEQ ID NO: 6115 - DNA, 20 bp, Artificial Sequence
  chemically synthesized
gtcacacagatgaccaccag

SEQ ID NO: 6116 - DNA, 20 bp, Artificial Sequence
  chemically synthesized
acacagatgaccaccagcag

SEQ ID NO: 6117 - DNA, 20 bp, Artificial Sequence
  chemically synthesized
cacagatgaccaccagcagc

SEQ ID NO: 6118 - DNA, 20 bp, Artificial Sequence
  chemically synthesized
ccaccagcagcaggatgttg

SEQ ID NO: 6119 - DNA, 20 bp, Artificial Sequence
  chemically synthesized
agcagcaggatgttgaagct

SEQ ID NO: 6120 - DNA, 20 bp, Artificial Sequence
  chemically synthesized
gcagcaggatgttgaagctc

SEQ ID NO: 6121 - DNA, 20 bp, Artificial Sequence
  chemically synthesized
cagcaggatgttgaagctca

SEQ ID NO: 6122 - DNA, 20 bp, Artificial Sequence
  chemically synthesized
aggatgttgaagctcagggc

SEQ ID NO: 6123 - DNA, 20 bp, Artificial Sequence
  chemically synthesized
atgttgaagctcagggcaag

SEQ ID NO: 6124 - DNA, 20 bp, Artificial Sequence
  chemically synthesized
agctcagggcaagcagactg

SEQ ID NO: 6125 - DNA, 20 bp, Artificial Sequence
  chemically synthesized
tcagggcaagcagactgaag

SEQ ID NO: 6126 - DNA, 20 bp, Artificial Sequence
  chemically synthesized
aagcagactgaagcagacca

SEQ ID NO: 6127 - DNA, 20 bp, Artificial Sequence
  chemically synthesized
gcagactgaagcagaccatg

SEQ ID NO: 6128 - DNA, 20 bp, Artificial Sequence
  chemically synthesized
gactgaagcagaccatggag

SEQ ID NO: 6129 - DNA, 20 bp, Artificial Sequence
  chemically synthesized
ctgaagcagaccatggagca

SEQ ID NO: 6130 - DNA, 20 bp, Artificial Sequence
  chemically synthesized
atggagcagagacgctgtgc

SEQ ID NO: 6131 - DNA, 20 bp, Artificial Sequence
  chemically synthesized
tggagcagagacgctgtgcc

SEQ ID NO: 6132 - DNA, 20 bp, Artificial Sequence
  chemically synthesized
ggagcagagacgctgtgcca

SEQ ID NO: 6133 - DNA, 20 bp, Artificial Sequence
  chemically synthesized
gagcagagacgctgtgccag

SEQ ID NO: 6134 - DNA, 20 bp, Artificial Sequence
  chemically synthesized
agagacgctgtgccaggggc

SEQ ID NO: 6135 - DNA, 20 bp, Artificial Sequence
  chemically synthesized
gagacgctgtgccaggggct

SEQ ID NO: 6136 - DNA, 20 bp, Artificial Sequence
  chemically synthesized
acgctgtgccaggggctggg

SEQ ID NO: 6137 - DNA, 20 bp, Artificial Sequence
  chemically synthesized
cgctgtgccaggggctgggc

SEQ ID NO: 6138 - DNA, 20 bp, Artificial Sequence
  chemically synthesized
ctgtgccaggggctgggcag

SEQ ID NO: 6139 - DNA, 20 bp, Artificial Sequence
  chemically synthesized
tgtgccaggggctgggcagg

SEQ ID NO: 6140 - DNA, 20 bp, Artificial Sequence
  chemically synthesized
gccaggggctgggcaggagg

SEQ ID NO: 6141 - DNA, 20 bp, Artificial Sequence
  chemically synthesized
ctgggcaggaggtggccctg

SEQ ID NO: 6142 - DNA, 20 bp, Artificial Sequence
  chemically synthesized
tgggcaggaggtggccctgt

SEQ ID NO: 6143 - DNA, 20 bp, Artificial Sequence
  chemically synthesized
ggcaggaggtggccctgtgg

SEQ ID NO: 6144 - DNA, 20 bp, Artificial Sequence
  chemically synthesized
caggaggtggccctgtggga

SEQ ID NO: 6145 - DNA, 20 bp, Artificial Sequence
  chemically synthesized
aggaggtggccctgtgggag

SEQ ID NO: 6146 - DNA, 20 bp, Artificial Sequence
  chemically synthesized
ggaggtggccctgtgggaga

SEQ ID NO: 6147 - DNA, 20 bp, Artificial Sequence
  chemically synthesized
gaggtggccctgtgggagag

SEQ ID NO: 6148 - DNA, 20 bp, Artificial Sequence
  chemically synthesized
gccctgtgggagaggggcat

SEQ ID NO: 6149 - DNA, 20 bp, Artificial Sequence
  chemically synthesized
ccctgtgggagaggggcatc

SEQ ID NO: 6150 - DNA, 20 bp, Artificial Sequence
  chemically synthesized
ctgtgggagaggggcatcag

SEQ ID NO: 6151 - DNA, 20 bp, Artificial Sequence
  chemically synthesized
gggagaggggcatcaggagc

SEQ ID NO: 6152 - DNA, 20 bp, Artificial Sequence
  chemically synthesized
agaggggcatcaggagccgg

SEQ ID NO: 6153 - DNA, 20 bp, Artificial Sequence
  chemically synthesized
ggcatcaggagccggcagcc

SEQ ID NO: 6154 - DNA, 20 bp, Artificial Sequence
  chemically synthesized
gcatcaggagccggcagcct

SEQ ID NO: 6155 - DNA, 20 bp, Artificial Sequence
  chemically synthesized
aggagccggcagcctgggtg

SEQ ID NO: 6156 - DNA, 20 bp, Artificial Sequence
  chemically synthesized
ggagccggcagcctgggtgt

SEQ ID NO: 6157 - DNA, 20 bp, Artificial Sequence
  chemically synthesized
gagccggcagcctgggtgtg

SEQ ID NO: 6158 - DNA, 20 bp, Artificial Sequence
  chemically synthesized
gccggcagcctgggtgtggg

SEQ ID NO: 6159 - DNA, 20 bp, Artificial Sequence
  chemically synthesized
gcagcctgggtgtggggagc

SEQ ID NO: 6160 - DNA, 20 bp, Artificial Sequence
  chemically synthesized
agcctgggtgtggggagccg

SEQ ID NO: 6161 - DNA, 20 bp, Artificial Sequence
  chemically synthesized
gcctgggtgtggggagccgg

SEQ ID NO: 6162 - DNA, 20 bp, Artificial Sequence
  chemically synthesized
cctgggtgtggggagccgga

SEQ ID NO: 6163 - DNA, 20 bp, Artificial Sequence
  chemically synthesized
gtgtggggagccggagggta

SEQ ID NO: 6164 - DNA, 20 bp, Artificial Sequence
  chemically synthesized
ggggagccggagggtaaaga

SEQ ID NO: 6165 - DNA, 20 bp, Artificial Sequence
  chemically synthesized
gggagccggagggtaaagac

SEQ ID NO: 6166 - DNA, 20 bp, Artificial Sequence
  chemically synthesized
ggagccggagggtaaagaca

SEQ ID NO: 6167 - DNA, 20 bp, Artificial Sequence
  chemically synthesized
agggtaaagacagggcaccg

SEQ ID NO: 6168 - DNA, 20 bp, Artificial Sequence
  chemically synthesized
aagacagggcaccgaagcct

SEQ ID NO: 6169 - DNA, 20 bp, Artificial Sequence
  chemically synthesized
agacagggcaccgaagcctg

SEQ ID NO: 6170 - DNA, 20 bp, Artificial Sequence
  chemically synthesized
acagggcaccgaagcctgag

SEQ ID NO: 6171 - DNA, 20 bp, Artificial Sequence
  chemically synthesized
cagggcaccgaagcctgagg

SEQ ID NO: 6172 - DNA, 20 bp, Artificial Sequence
  chemically synthesized
aagcctgaggaggcataacc

SEQ ID NO: 6173 - DNA, 20 bp, Artificial Sequence
  chemically synthesized
agcctgaggaggcataacct

SEQ ID NO: 6174 - DNA, 20 bp, Artificial Sequence
  chemically synthesized
ctgaggaggcataacctggg

SEQ ID NO: 6175 - DNA, 20 bp, Artificial Sequence
  chemically synthesized
tgaggaggcataacctgggc

SEQ ID NO: 6176 - DNA, 20 bp, Artificial Sequence
  chemically synthesized
gaggaggcataacctgggcg

SEQ ID NO: 6177 - DNA, 20 bp, Artificial Sequence
  chemically synthesized
aggaggcataacctgggcgg

SEQ ID NO: 6178 - DNA, 20 bp, Artificial Sequence
  chemically synthesized
ggaggcataacctgggcggg

SEQ ID NO: 6179 - DNA, 20 bp, Artificial Sequence
  chemically synthesized
cataacctgggcggggggat

SEQ ID NO: 6180 - DNA, 20 bp, Artificial Sequence
  chemically synthesized
acctgggcggggggattggt

SEQ ID NO: 6181 - DNA, 20 bp, Artificial Sequence
  chemically synthesized
cctgggcggggggattggtt

SEQ ID NO: 6182 - DNA, 20 bp, Artificial Sequence
  chemically synthesized
ctgggcggggggattggttg

SEQ ID NO: 6183 - DNA, 20 bp, Artificial Sequence
  chemically synthesized
ggggggattggttggggcca

SEQ ID NO: 6184 - DNA, 20 bp, Artificial Sequence
  chemically synthesized
gggggattggttggggccat

SEQ ID NO: 6185 - DNA, 20 bp, Artificial Sequence
  chemically synthesized
ggggattggttggggccatg

SEQ ID NO: 6186 - DNA, 20 bp, Artificial Sequence
  chemically synthesized
gggattggttggggccatgg

SEQ ID NO: 6187 - DNA, 20 bp, Artificial Sequence
  chemically synthesized
ggattggttggggccatggg

SEQ ID NO: 6188 - DNA, 20 bp, Artificial Sequence
  chemically synthesized
gattggttggggccatgggg

SEQ ID NO: 6189 - DNA, 20 bp, Artificial Sequence
  chemically synthesized
attggttggggccatggggg

SEQ ID NO: 6190 - DNA, 20 bp, Artificial Sequence
  chemically synthesized
ttggttggggccatgggggg

SEQ ID NO: 6191 - DNA, 20 bp, Artificial Sequence
  chemically synthesized
gccatgggggggggtcatca

SEQ ID NO: 6192 - DNA, 20 bp, Artificial Sequence
  chemically synthesized
ccatgggggggggtcatcat

SEQ ID NO: 6193 - DNA, 20 bp, Artificial Sequence
  chemically synthesized
gtcatcataggctttgaccc

SEQ ID NO: 6194 - DNA, 20 bp, Artificial Sequence
  chemically synthesized
aggctttgaccccagcattt

SEQ ID NO: 6195 - DNA, 20 bp, Artificial Sequence
  chemically synthesized
catgtataaatatacacacg

SEQ ID NO: 6196 - DNA, 20 bp, Artificial Sequence
  chemically synthesized
atatacacacgcagctaatc

SEQ ID NO: 6197 - DNA, 20 bp, Artificial Sequence
  chemically synthesized
acacacccatgcacacgact

SEQ ID NO: 6198 - DNA, 20 bp, Artificial Sequence
  chemically synthesized
cacacccatgcacacgactc

SEQ ID NO: 6199 - DNA, 20 bp, Artificial Sequence
  chemically synthesized
acgactcaggatattcacat

SEQ ID NO: 6200 - DNA, 20 bp, Artificial Sequence
  chemically synthesized
attcacatcagctgtgtgca

SEQ ID NO: 6201 - DNA, 20 bp, Artificial Sequence
  chemically synthesized
catcagctgtgtgcaaagcc

SEQ ID NO: 6202 - DNA, 20 bp, Artificial Sequence
  chemically synthesized
tgtgtgcaaagcccggatcc

SEQ ID NO: 6203 - DNA, 20 bp, Artificial Sequence
  chemically synthesized
tgtgcaaagcccggatcctg

SEQ ID NO: 6204 - DNA, 20 bp, Artificial Sequence
  chemically synthesized
caaagcccggatcctggagc

SEQ ID NO: 6205 - DNA, 20 bp, Artificial Sequence
  chemically synthesized
aaagcccggatcctggagct

SEQ ID NO: 6206 - DNA, 20 bp, Artificial Sequence
  chemically synthesized
aagcccggatcctggagctg

SEQ ID NO: 6207 - DNA, 20 bp, Artificial Sequence
  chemically synthesized
agcccggatcctggagctgg

SEQ ID NO: 6208 - DNA, 20 bp, Artificial Sequence
  chemically synthesized
ggatcctggagctgggggac

SEQ ID NO: 6209 - DNA, 20 bp, Artificial Sequence
  chemically synthesized
gatcctggagctgggggact

SEQ ID NO: 6210 - DNA, 20 bp, Artificial Sequence
  chemically synthesized
tcctggagctgggggactgg

SEQ ID NO: 6211 - DNA, 20 bp, Artificial Sequence
  chemically synthesized
ctgggggactgggagacgca

SEQ ID NO: 6212 - DNA, 20 bp, Artificial Sequence
  chemically synthesized
tgggggactgggagacgcac

SEQ ID NO: 6213 - DNA, 20 bp, Artificial Sequence
  chemically synthesized
gggggactgggagacgcaca

SEQ ID NO: 6214 - DNA, 20 bp, Artificial Sequence
  chemically synthesized
ggggactgggagacgcacag

SEQ ID NO: 6215 - DNA, 20 bp, Artificial Sequence
  chemically synthesized
gggactgggagacgcacagg

SEQ ID NO: 6216 - DNA, 20 bp, Artificial Sequence
  chemically synthesized
actgggagacgcacaggggg

SEQ ID NO: 6217 - DNA, 20 bp, Artificial Sequence
  chemically synthesized
ctgggagacgcacagggggc

SEQ ID NO: 6218 - DNA, 20 bp, Artificial Sequence
  chemically synthesized
tgggagacgcacagggggcg

SEQ ID NO: 6219 - DNA, 20 bp, Artificial Sequence
  chemically synthesized
gggagacgcacagggggcgg

SEQ ID NO: 6220 - DNA, 20 bp, Artificial Sequence
  chemically synthesized
ggagacgcacagggggcggg

SEQ ID NO: 6221 - DNA, 20 bp, Artificial Sequence
  chemically synthesized
gagacgcacagggggcgggg

SEQ ID NO: 6222 - DNA, 20 bp, Artificial Sequence
  chemically synthesized
acgcacagggggcggggggg

SEQ ID NO: 6223 - DNA, 20 bp, Artificial Sequence
  chemically synthesized
agggggcgggggggcagacc

SEQ ID NO: 6224 - DNA, 20 bp, Artificial Sequence
  chemically synthesized
ggggcagacccggccctgcc

SEQ ID NO: 6225 - DNA, 20 bp, Artificial Sequence
  chemically synthesized
gggcagacccggccctgcct

SEQ ID NO: 6226 - DNA, 20 bp, Artificial Sequence
  chemically synthesized
cctgcctaggcacacatcct

SEQ ID NO: 6227 - DNA, 20 bp, Artificial Sequence
  chemically synthesized
gcctaggcacacatcctgag

SEQ ID NO: 6228 - DNA, 20 bp, Artificial Sequence
  chemically synthesized
cctaggcacacatcctgaga

SEQ ID NO: 6229 - DNA, 20 bp, Artificial Sequence
  chemically synthesized
ctaggcacacatcctgagaa

SEQ ID NO: 6230 - DNA, 20 bp, Artificial Sequence
  chemically synthesized
taggcacacatcctgagaag

SEQ ID NO: 6231 - DNA, 20 bp, Artificial Sequence
  chemically synthesized
aggcacacatcctgagaagg

SEQ ID NO: 6232 - DNA, 20 bp, Artificial Sequence
  chemically synthesized
tgagaagggggatctgtgaa

SEQ ID NO: 6233 - DNA, 20 bp, Artificial Sequence
  chemically synthesized
tgaatggttttcctcccatc

SEQ ID NO: 6234 - DNA, 20 bp, Artificial Sequence
  chemically synthesized
tggttttcctcccatccagc

SEQ ID NO: 6235 - DNA, 20 bp, Artificial Sequence
  chemically synthesized
ttttcctcccatccagccag

SEQ ID NO: 6236 - DNA, 20 bp, Artificial Sequence
  chemically synthesized
tcctcccatccagccagtgg

SEQ ID NO: 6237 - DNA, 20 bp, Artificial Sequence
  chemically synthesized
ctcccatccagccagtggca

SEQ ID NO: 6238 - DNA, 20 bp, Artificial Sequence
  chemically synthesized
tcccatccagccagtggcag

SEQ ID NO: 6239 - DNA, 20 bp, Artificial Sequence
  chemically synthesized
cagccagtggcagaggcctc

SEQ ID NO: 6240 - DNA, 20 bp, Artificial Sequence
  chemically synthesized
cagaggcctccagatcacct

SEQ ID NO: 6241 - DNA, 20 bp, Artificial Sequence
  chemically synthesized
agaggcctccagatcacctc

SEQ ID NO: 6242 - DNA, 20 bp, Artificial Sequence
  chemically synthesized
ctccagatcacctcgggcct

SEQ ID NO: 6243 - DNA, 20 bp, Artificial Sequence
  chemically synthesized
atcacctcgggccttagtct

SEQ ID NO: 6244 - DNA, 20 bp, Artificial Sequence
  chemically synthesized
gccttagtctcagctcttct

SEQ ID NO: 6245 - DNA, 20 bp, Artificial Sequence
  chemically synthesized
ccttagtctcagctcttcta

SEQ ID NO: 6246 - DNA, 20 bp, Artificial Sequence
  chemically synthesized
ttctaaggctcctgtcccct

SEQ ID NO: 6247 - DNA, 20 bp, Artificial Sequence
  chemically synthesized
aggctcctgtcccctcagat

SEQ ID NO: 6248 - DNA, 20 bp, Artificial Sequence
  chemically synthesized
gctcctgtcccctcagattg

SEQ ID NO: 6249 - DNA, 20 bp, Artificial Sequence
  chemically synthesized
tcccctcagattggagactc

SEQ ID NO: 6250 - DNA, 20 bp, Artificial Sequence
  chemically synthesized
cctcagattggagactccag

SEQ ID NO: 6251 - DNA, 20 bp, Artificial Sequence
  chemically synthesized
agattggagactccagaagc

SEQ ID NO: 6252 - DNA, 20 bp, Artificial Sequence
  chemically synthesized
gattggagactccagaagct

SEQ ID NO: 6253 - DNA, 20 bp, Artificial Sequence
  chemically synthesized
gttcttcctaaaatccatac

SEQ ID NO: 6254 - DNA, 20 bp, Artificial Sequence
  chemically synthesized
tcctaaaatccatactggaa

SEQ ID NO: 6255 - DNA, 20 bp, Artificial Sequence
  chemically synthesized
tcccctgccaaaattccatt

SEQ ID NO: 6256 - DNA, 20 bp, Artificial Sequence
  chemically synthesized
tccattgagatccttaaatc

SEQ ID NO: 6257 - DNA, 20 bp, Artificial Sequence
  chemically synthesized
ccattgagatccttaaatct

SEQ ID NO: 6258 - DNA, 20 bp, Artificial Sequence
  chemically synthesized
aaatctgggtcattccacca

SEQ ID NO: 6259 - DNA, 20 bp, Artificial Sequence
  chemically synthesized
tccaccatagcccactctcc

SEQ ID NO: 6260 - DNA, 20 bp, Artificial Sequence
  chemically synthesized
actctccaagcacaaccctc

SEQ ID NO: 6261 - DNA, 20 bp, Artificial Sequence
  chemically synthesized
ctctccaagcacaaccctcc

SEQ ID NO: 6262 - DNA, 20 bp, Artificial Sequence
  chemically synthesized
gtcctcatcccccaccacgc

SEQ ID NO: 6263 - DNA, 20 bp, Artificial Sequence
  chemically synthesized
tcctcatcccccaccacgca

SEQ ID NO: 6264 - DNA, 20 bp, Artificial Sequence
  chemically synthesized
accacgcaaggcctcctccc

SEQ ID NO: 6265 - DNA, 20 bp, Artificial Sequence
  chemically synthesized
gccctttgccctcgcttccc

SEQ ID NO: 6266 - DNA, 20 bp, Artificial Sequence
  chemically synthesized
cacactaaatttgctcccct

SEQ ID NO: 6267 - DNA, 20 bp, Artificial Sequence
  chemically synthesized
aaatttgctcccctcagccc

SEQ ID NO: 6268 - DNA, 20 bp, Artificial Sequence
  chemically synthesized
aatttgctcccctcagcccg

SEQ ID NO: 6269 - DNA, 20 bp, Artificial Sequence
  chemically synthesized
ctcagcccgaggtcatctca

SEQ ID NO: 6270 - DNA, 20 bp, Artificial Sequence
  chemically synthesized
tcagcccgaggtcatctcac

SEQ ID NO: 6271 - DNA, 20 bp, Artificial Sequence
  chemically synthesized
ttgatccatctgcaccctga

SEQ ID NO: 6272 - DNA, 20 bp, Artificial Sequence
  chemically synthesized
cacccacgtcttcctgcaca

SEQ ID NO: 6273 - DNA, 20 bp, Artificial Sequence
  chemically synthesized
cccacgtcttcctgcacaca

SEQ ID NO: 6274 - DNA, 20 bp, Artificial Sequence
  chemically synthesized
cgtcttcctgcacacagagc

SEQ ID NO: 6275 - DNA, 20 bp, Artificial Sequence
  chemically synthesized
gtcttcctgcacacagagct

SEQ ID NO: 6276 - DNA, 20 bp, Artificial Sequence
  chemically synthesized
ggctccctctctgctgcctc

SEQ ID NO: 6277 - DNA, 20 bp, Artificial Sequence
  chemically synthesized
ctctctgctgcctccagacc

SEQ ID NO: 6278 - DNA, 20 bp, Artificial Sequence
  chemically synthesized
ctctgctgcctccagaccca

SEQ ID NO: 6279 - DNA, 20 bp, Artificial Sequence
  chemically synthesized
tgctgcctccagacccagag

SEQ ID NO: 6280 - DNA, 20 bp, Artificial Sequence
  chemically synthesized
ctccagacccagagcagctc

SEQ ID NO: 6281 - DNA, 20 bp, Artificial Sequence
  chemically synthesized
cagagcagctccagttgtcc

SEQ ID NO: 6282 - DNA, 20 bp, Artificial Sequence
  chemically synthesized
gctccagttgtcccagccct

SEQ ID NO: 6283 - DNA, 20 bp, Artificial Sequence
  chemically synthesized
gccctgagctcctctctttg

SEQ ID NO: 6284 - DNA, 20 bp, Artificial Sequence
  chemically synthesized
ttgcagcatccacctgcaaa

SEQ ID NO: 6285 - DNA, 20 bp, Artificial Sequence
  chemically synthesized
cctgcaaacagaacaccttc

SEQ ID NO: 6286 - DNA, 20 bp, Artificial Sequence
  chemically synthesized
ctgcaaacagaacaccttct

SEQ ID NO: 6287 - DNA, 20 bp, Artificial Sequence
  chemically synthesized
acagaacaccttctaggcct

SEQ ID NO: 6288 - DNA, 20 bp, Artificial Sequence
  chemically synthesized
ggccttggaccctgactctg

SEQ ID NO: 6289 - DNA, 20 bp, Artificial Sequence
  chemically synthesized
attcctatcaccccccgacc

SEQ ID NO: 6290 - DNA, 20 bp, Artificial Sequence
  chemically synthesized
cctatcaccccccgacccag

SEQ ID NO: 6291 - DNA, 20 bp, Artificial Sequence
  chemically synthesized
ctatcaccccccgacccagc

SEQ ID NO: 6292 - DNA, 20 bp, Artificial Sequence
  chemically synthesized
gacccagcaggaccacatcc

SEQ ID NO: 6293 - DNA, 20 bp, Artificial Sequence
  chemically synthesized
acccagcaggaccacatcct

SEQ ID NO: 6294 - DNA, 20 bp, Artificial Sequence
  chemically synthesized
cccagcaggaccacatcctg

SEQ ID NO: 6295 - DNA, 20 bp, Artificial Sequence
  chemically synthesized
cagcaggaccacatcctggg

SEQ ID NO: 6296 - DNA, 20 bp, Artificial Sequence
  chemically synthesized
agcaggaccacatcctgggg

SEQ ID NO: 6297 - DNA, 20 bp, Artificial Sequence
  chemically synthesized
gaccacatcctggggaggct

SEQ ID NO: 6298 - DNA, 20 bp, Artificial Sequence
  chemically synthesized
acatcctggggaggctcagt

SEQ ID NO: 6299 - DNA, 20 bp, Artificial Sequence
  chemically synthesized
catcctggggaggctcagtc

SEQ ID NO: 6300 - DNA, 20 bp, Artificial Sequence
  chemically synthesized
atcctggggaggctcagtca

SEQ ID NO: 6301 - DNA, 20 bp, Artificial Sequence
  chemically synthesized
tcctggggaggctcagtcag

SEQ ID NO: 6302 - DNA, 20 bp, Artificial Sequence
  chemically synthesized
gggaggctcagtcaggggcc

SEQ ID NO: 6303 - DNA, 20 bp, Artificial Sequence
  chemically synthesized
gggcccagaatcttcctccc

SEQ ID NO: 6304 - DNA, 20 bp, Artificial Sequence
  chemically synthesized
ggcccagaatcttcctcccc

SEQ ID NO: 6305 - DNA, 20 bp, Artificial Sequence
  chemically synthesized
tcacttcctgccactgtcct

SEQ ID NO: 6306 - DNA, 20 bp, Artificial Sequence
  chemically synthesized
ttcctgccactgtcctgagt

SEQ ID NO: 6307 - DNA, 20 bp, Artificial Sequence
  chemically synthesized
gagtcagacactgcccctgt

SEQ ID NO: 6308 - DNA, 20 bp, Artificial Sequence
  chemically synthesized
actcttcatctttttcacac

SEQ ID NO: 6309 - DNA, 20 bp, Artificial Sequence
  chemically synthesized
gacttccaccttccccactg

SEQ ID NO: 6310 - DNA, 20 bp, Artificial Sequence
  chemically synthesized
ttccccactgcagccacact

SEQ ID NO: 6311 - DNA, 20 bp, Artificial Sequence
  chemically synthesized
tccccactgcagccacactc

SEQ ID NO: 6312 - DNA, 20 bp, Artificial Sequence
  chemically synthesized
actcaggaccccatttgacc

SEQ ID NO: 6313 - DNA, 20 bp, Artificial Sequence
  chemically synthesized
ctcaggaccccatttgaccc

SEQ ID NO: 6314 - DNA, 20 bp, Artificial Sequence
  chemically synthesized
tcaggaccccatttgaccca

SEQ ID NO: 6315 - DNA, 20 bp, Artificial Sequence
  chemically synthesized
aggaccccatttgacccagg

SEQ ID NO: 6316 - DNA, 20 bp, Artificial Sequence
  chemically synthesized
ggaccccatttgacccaggg

SEQ ID NO: 6317 - DNA, 20 bp, Artificial Sequence
  chemically synthesized
ccactgcccactcccgctct

SEQ ID NO: 6318 - DNA, 20 bp, Artificial Sequence
  chemically synthesized
gcccactcccgctctgagca

SEQ ID NO: 6319 - DNA, 20 bp, Artificial Sequence
  chemically synthesized
ctgcccccaccccttcctcc

SEQ ID NO: 6320 - DNA, 20 bp, Artificial Sequence
  chemically synthesized
tgcccccaccccttcctcca

SEQ ID NO: 6321 - DNA, 20 bp, Artificial Sequence
  chemically synthesized
cctttgcattcctctccatc

SEQ ID NO: 6322 - DNA, 20 bp, Artificial Sequence
  chemically synthesized
ttgcattcctctccatccag

SEQ ID NO: 6323 - DNA, 20 bp, Artificial Sequence
  chemically synthesized
ccagaagcgctccatgacca

SEQ ID NO: 6324 - DNA, 20 bp, Artificial Sequence
  chemically synthesized
tgaccacggtgttccccacc

SEQ ID NO: 6325 - DNA, 20 bp, Artificial Sequence
  chemically synthesized
cacggtgttccccaccaagc

SEQ ID NO: 6326 - DNA, 20 bp, Artificial Sequence
  chemically synthesized
cccaccaagctggccctcca

SEQ ID NO: 6327 - DNA, 20 bp, Artificial Sequence
  chemically synthesized
caagctggccctccatggct

SEQ ID NO: 6328 - DNA, 20 bp, Artificial Sequence
  chemically synthesized
gagtccctgactgctgtctt

SEQ ID NO: 6329 - DNA, 20 bp, Artificial Sequence
  chemically synthesized
tgtcttcagcaccctccact

SEQ ID NO: 6330 - DNA, 20 bp, Artificial Sequence
  chemically synthesized
tcttcagcaccctccactca

SEQ ID NO: 6331 - DNA, 20 bp, Artificial Sequence
  chemically synthesized
cttcagcaccctccactcag

SEQ ID NO: 6332 - DNA, 20 bp, Artificial Sequence
  chemically synthesized
ttcagcaccctccactcaga

SEQ ID NO: 6333 - DNA, 20 bp, Artificial Sequence
  chemically synthesized
gagggtcctgtcctgcttcc

SEQ ID NO: 6334 - DNA, 20 bp, Artificial Sequence
  chemically synthesized
gacttatcaactcccaatgc

SEQ ID NO: 6335 - DNA, 20 bp, Artificial Sequence
  chemically synthesized
acttatcaactcccaatgct

SEQ ID NO: 6336 - DNA, 20 bp, Artificial Sequence
  chemically synthesized
atcaactcccaatgctgggt

SEQ ID NO: 6337 - DNA, 20 bp, Artificial Sequence
  chemically synthesized
ctcccaatgctgggtcagcc

SEQ ID NO: 6338 - DNA, 20 bp, Artificial Sequence
  chemically synthesized
ctgtatatccaccctgaaac

SEQ ID NO: 6339 - DNA, 20 bp, Artificial Sequence
  chemically synthesized
ccctgaaaccagactgccca

SEQ ID NO: 6340 - DNA, 20 bp, Artificial Sequence
  chemically synthesized
cctgaaaccagactgcccac

SEQ ID NO: 6341 - DNA, 20 bp, Artificial Sequence
  chemically synthesized
ctgaaaccagactgcccaca

SEQ ID NO: 6342 - DNA, 20 bp, Artificial Sequence
  chemically synthesized
aaaccagactgcccacaggg

SEQ ID NO: 6343 - DNA, 20 bp, Artificial Sequence
  chemically synthesized
agactgcccacagggtagcc

SEQ ID NO: 6344 - DNA, 20 bp, Artificial Sequence
  chemically synthesized
gggtagcccagctgtgcctc

SEQ ID NO: 6345 - DNA, 20 bp, Artificial Sequence
  chemically synthesized
ggtagcccagctgtgcctcc

SEQ ID NO: 6346 - DNA, 20 bp, Artificial Sequence
  chemically synthesized
agcccagctgtgcctccagg

SEQ ID NO: 6347 - DNA, 20 bp, Artificial Sequence
  chemically synthesized
ctgtgcctccaggtagctct

SEQ ID NO: 6348 - DNA, 20 bp, Artificial Sequence
  chemically synthesized
gtagctctgagatcatgcac

SEQ ID NO: 6349 - DNA, 20 bp, Artificial Sequence
  chemically synthesized
ccattttctcgtgtgtaaaa

SEQ ID NO: 6350 - DNA, 20 bp, Artificial Sequence
  chemically synthesized
attttctcgtgtgtaaaatg

SEQ ID NO: 6351 - DNA, 20 bp, Artificial Sequence
  chemically synthesized
cgtgtgtaaaatggagatca

SEQ ID NO: 6352 - DNA, 20 bp, Artificial Sequence
  chemically synthesized
taaaatggagatcacagtcg

SEQ ID NO: 6353 - DNA, 20 bp, Artificial Sequence
  chemically synthesized
cacagtcgtagctacccgat

SEQ ID NO: 6354 - DNA, 20 bp, Artificial Sequence
  chemically synthesized
agctacccgattggattgct

SEQ ID NO: 6355 - DNA, 20 bp, Artificial Sequence
  chemically synthesized
gattggattgctcggataat

SEQ ID NO: 6356 - DNA, 20 bp, Artificial Sequence
  chemically synthesized
gattgctcggataattagat

SEQ ID NO: 6357 - DNA, 20 bp, Artificial Sequence
  chemically synthesized
aaaatatgtaatgtgcttct

SEQ ID NO: 6358 - DNA, 20 bp, Artificial Sequence
  chemically synthesized
aaatatgtaatgtgcttctt

SEQ ID NO: 6359 - DNA, 20 bp, Artificial Sequence
  chemically synthesized
gtaatgtgcttcttaggcaa

SEQ ID NO: 6360 - DNA, 20 bp, Artificial Sequence
  chemically synthesized
aggcaaaagtttgaacataa

SEQ ID NO: 6361 - DNA, 20 bp, Artificial Sequence
  chemically synthesized
aaaagtttgaacataaaaga

SEQ ID NO: 6362 - DNA, 20 bp, Artificial Sequence
  chemically synthesized
aaagtttgaacataaaagac

SEQ ID NO: 6363 - DNA, 20 bp, Artificial Sequence
  chemically synthesized
aagtttgaacataaaagaca

SEQ ID NO: 6364 - DNA, 20 bp, Artificial Sequence
  chemically synthesized
ataaaagacagggtctgccc

SEQ ID NO: 6365 - DNA, 20 bp, Artificial Sequence
  chemically synthesized
aagacagggtctgcccaaga

SEQ ID NO: 6366 - DNA, 20 bp, Artificial Sequence
  chemically synthesized
agacagggtctgcccaagat

SEQ ID NO: 6367 - DNA, 20 bp, Artificial Sequence
  chemically synthesized
cagggtctgcccaagatggg

SEQ ID NO: 6368 - DNA, 20 bp, Artificial Sequence
  chemically synthesized
gggtctgcccaagatgggaa

SEQ ID NO: 6369 - DNA, 20 bp, Artificial Sequence
  chemically synthesized
gggaagagttcttctctccc

SEQ ID NO: 6370 - DNA, 20 bp, Artificial Sequence
  chemically synthesized
agaaacaatcaaaacaaaaa

SEQ ID NO: 6371 - DNA, 20 bp, Artificial Sequence
  chemically synthesized
aaaacaaaaacagacaacta

SEQ ID NO: 6372 - DNA, 20 bp, Artificial Sequence
  chemically synthesized
aaacagacaactatagaaca

SEQ ID NO: 6373 - DNA, 20 bp, Artificial Sequence
  chemically synthesized
cagacaactatagaacatgg

SEQ ID NO: 6374 - DNA, 20 bp, Artificial Sequence
  chemically synthesized
tatagaacatggcagctttc

SEQ ID NO: 6375 - DNA, 20 bp, Artificial Sequence
  chemically synthesized
catggcagctttcaagactc

SEQ ID NO: 6376 - DNA, 20 bp, Artificial Sequence
  chemically synthesized
gctttcaagactctggacat

SEQ ID NO: 6377 - DNA, 20 bp, Artificial Sequence
  chemically synthesized
ctttcaagactctggacatc

SEQ ID NO: 6378 - DNA, 20 bp, Artificial Sequence
  chemically synthesized
caagactctggacatcaggc

SEQ ID NO: 6379 - DNA, 20 bp, Artificial Sequence
  chemically synthesized
aagactctggacatcaggca

SEQ ID NO: 6380 - DNA, 20 bp, Artificial Sequence
  chemically synthesized
gactctggacatcaggcaag

SEQ ID NO: 6381 - DNA, 20 bp, Artificial Sequence
  chemically synthesized
actctggacatcaggcaagg

SEQ ID NO: 6382 - DNA, 20 bp, Artificial Sequence
  chemically synthesized
tctggacatcaggcaaggag

SEQ ID NO: 6383 - DNA, 20 bp, Artificial Sequence
  chemically synthesized
acatcaggcaaggaggagta

SEQ ID NO: 6384 - DNA, 20 bp, Artificial Sequence
  chemically synthesized
aaggaggagtaaagatccct

SEQ ID NO: 6385 - DNA, 20 bp, Artificial Sequence
  chemically synthesized
aggaggagtaaagatccctg

SEQ ID NO: 6386 - DNA, 20 bp, Artificial Sequence
  chemically synthesized
ggaggagtaaagatccctga

SEQ ID NO: 6387 - DNA, 20 bp, Artificial Sequence
  chemically synthesized
agtaaagatccctgagggat

SEQ ID NO: 6388 - DNA, 20 bp, Artificial Sequence
  chemically synthesized
aaagatccctgagggataag

SEQ ID NO: 6389 - DNA, 20 bp, Artificial Sequence
  chemically synthesized
gagggataagaagcaaacaa

SEQ ID NO: 6390 - DNA, 20 bp, Artificial Sequence
  chemically synthesized
agggataagaagcaaacaac

SEQ ID NO: 6391 - DNA, 20 bp, Artificial Sequence
  chemically synthesized
caggaaccctccgatcaccc

SEQ ID NO: 6392 - DNA, 20 bp, Artificial Sequence
  chemically synthesized
gatcaccccagcttactgtt

SEQ ID NO: 6393 - DNA, 20 bp, Artificial Sequence
  chemically synthesized
tcaccccagcttactgtttg

SEQ ID NO: 6394 - DNA, 20 bp, Artificial Sequence
  chemically synthesized
accccagcttactgtttgga

SEQ ID NO: 6395 - DNA, 20 bp, Artificial Sequence
  chemically synthesized
cccagcttactgtttggaga

SEQ ID NO: 6396 - DNA, 20 bp, Artificial Sequence
  chemically synthesized
tactgtttggagagagtctg

SEQ ID NO: 6397 - DNA, 20 bp, Artificial Sequence
  chemically synthesized
actgtttggagagagtctgc

SEQ ID NO: 6398 - DNA, 20 bp, Artificial Sequence
  chemically synthesized
tggagagagtctgcaggtta

SEQ ID NO: 6399 - DNA, 20 bp, Artificial Sequence
  chemically synthesized
ggagagagtctgcaggttac

SEQ ID NO: 6400 - DNA, 20 bp, Artificial Sequence
  chemically synthesized
agagtctgcaggttacaggc

SEQ ID NO: 6401 - DNA, 20 bp, Artificial Sequence
  chemically synthesized
gagtctgcaggttacaggcc

SEQ ID NO: 6402 - DNA, 20 bp, Artificial Sequence
  chemically synthesized
ctgcaggttacaggccagga

SEQ ID NO: 6403 - DNA, 20 bp, Artificial Sequence
  chemically synthesized
tgcaggttacaggccaggaa

SEQ ID NO: 6404 - DNA, 20 bp, Artificial Sequence
  chemically synthesized
gcaggttacaggccaggaaa

SEQ ID NO: 6405 - DNA, 20 bp, Artificial Sequence
  chemically synthesized
ggttacaggccaggaaaggg

SEQ ID NO: 6406 - DNA, 20 bp, Artificial Sequence
  chemically synthesized
caggccaggaaagggaagtc

SEQ ID NO: 6407 - DNA, 20 bp, Artificial Sequence
  chemically synthesized
aggccaggaaagggaagtcc

SEQ ID NO: 6408 - DNA, 20 bp, Artificial Sequence
  chemically synthesized
ccaggaaagggaagtccagg

SEQ ID NO: 6409 - DNA, 20 bp, Artificial Sequence
  chemically synthesized
aggaaagggaagtccaggca

SEQ ID NO: 6410 - DNA, 20 bp, Artificial Sequence
  chemically synthesized
gggaagtccaggcagagccc

SEQ ID NO: 6411 - DNA, 20 bp, Artificial Sequence
  chemically synthesized
gaagtccaggcagagcccaa

SEQ ID NO: 6412 - DNA, 20 bp, Artificial Sequence
  chemically synthesized
cccaagagactccccacgtt

SEQ ID NO: 6413 - DNA, 20 bp, Artificial Sequence
  chemically synthesized
ccaagagactccccacgttg

SEQ ID NO: 6414 - DNA, 20 bp, Artificial Sequence
  chemically synthesized
aagagactccccacgttgag

SEQ ID NO: 6415 - DNA, 20 bp, Artificial Sequence
  chemically synthesized
gactccccacgttgaggaga

SEQ ID NO: 6416 - DNA, 20 bp, Artificial Sequence
  chemically synthesized
ctccccacgttgaggagatg

SEQ ID NO: 6417 - DNA, 20 bp, Artificial Sequence
  chemically synthesized
cacgttgaggagatggagct

SEQ ID NO: 6418 - DNA, 20 bp, Artificial Sequence
  chemically synthesized
cgttgaggagatggagctga

SEQ ID NO: 6419 - DNA, 20 bp, Artificial Sequence
  chemically synthesized
ggagatggagctgagagtcc

SEQ ID NO: 6420 - DNA, 20 bp, Artificial Sequence
  chemically synthesized
gagatggagctgagagtccg

SEQ ID NO: 6421 - DNA, 20 bp, Artificial Sequence
  chemically synthesized
gatggagctgagagtccgag

SEQ ID NO: 6422 - DNA, 20 bp, Artificial Sequence
  chemically synthesized
ccgaggagaccaaaacaatt

SEQ ID NO: 6423 - DNA, 20 bp, Artificial Sequence
  chemically synthesized
gaggagaccaaaacaattaa

SEQ ID NO: 6424 - DNA, 20 bp, Artificial Sequence
  chemically synthesized
caaacgatcaaactgactct

SEQ ID NO: 6425 - DNA, 20 bp, Artificial Sequence
  chemically synthesized
taagttgcttaactgcatcc

SEQ ID NO: 6426 - DNA, 20 bp, Artificial Sequence
  chemically synthesized
agttgcttaactgcatcccg

SEQ ID NO: 6427 - DNA, 20 bp, Artificial Sequence
  chemically synthesized
cttaactgcatcccggagca

SEQ ID NO: 6428 - DNA, 20 bp, Artificial Sequence
  chemically synthesized
tgcatcccggagcaaagctc

SEQ ID NO: 6429 - DNA, 20 bp, Artificial Sequence
  chemically synthesized
gagcaaagctcaagaacatt

SEQ ID NO: 6430 - DNA, 20 bp, Artificial Sequence
  chemically synthesized
gcaaagctcaagaacattta

SEQ ID NO: 6431 - DNA, 20 bp, Artificial Sequence
  chemically synthesized
caaagctcaagaacatttag

SEQ ID NO: 6432 - DNA, 20 bp, Artificial Sequence
  chemically synthesized
tagaggaatacaaaaatatc

SEQ ID NO: 6433 - DNA, 20 bp, Artificial Sequence
  chemically synthesized
aaaaatatccagcacccaac

SEQ ID NO: 6434 - DNA, 20 bp, Artificial Sequence
  chemically synthesized
aaaatatccagcacccaaca

SEQ ID NO: 6435 - DNA, 20 bp, Artificial Sequence
  chemically synthesized
aaggtgaaattgacaatgtc

SEQ ID NO: 6436 - DNA, 20 bp, Artificial Sequence
  chemically synthesized
gtgaaattgacaatgtctgg

SEQ ID NO: 6437 - DNA, 20 bp, Artificial Sequence
  chemically synthesized
caatgtctggcagccaatca

SEQ ID NO: 6438 - DNA, 20 bp, Artificial Sequence
  chemically synthesized
ggcagccaatcaaagattac

SEQ ID NO: 6439 - DNA, 20 bp, Artificial Sequence
  chemically synthesized
gcagccaatcaaagattaca

SEQ ID NO: 6440 - DNA, 20 bp, Artificial Sequence
  chemically synthesized
ttacaaggcatgcaatgaaa

SEQ ID NO: 6441 - DNA, 20 bp, Artificial Sequence
  chemically synthesized
tacaaggcatgcaatgaaac

SEQ ID NO: 6442 - DNA, 20 bp, Artificial Sequence
  chemically synthesized
gggaaaacacaatgcataac

SEQ ID NO: 6443 - DNA, 20 bp, Artificial Sequence
  chemically synthesized
ggaaaacacaatgcataacg

SEQ ID NO: 6444 - DNA, 20 bp, Artificial Sequence
  chemically synthesized
aaaacacaatgcataacgag

SEQ ID NO: 6445 - DNA, 20 bp, Artificial Sequence
  chemically synthesized
aaacacaatgcataacgagg

SEQ ID NO: 6446 - DNA, 20 bp, Artificial Sequence
  chemically synthesized
aggaggttcataaatatcaa

SEQ ID NO: 6447 - DNA, 20 bp, Artificial Sequence
  chemically synthesized
gaggttcataaatatcaaaa

SEQ ID NO: 6448 - DNA, 20 bp, Artificial Sequence
  chemically synthesized
cataaatatcaaaagagatc

SEQ ID NO: 6449 - DNA, 20 bp, Artificial Sequence
  chemically synthesized
aaagagatccagaactgaca

SEQ ID NO: 6450 - DNA, 20 bp, Artificial Sequence
  chemically synthesized
tccagaactgacacggatgc

SEQ ID NO: 6451 - DNA, 20 bp, Artificial Sequence
  chemically synthesized
actgacacggatgctagaat

SEQ ID NO: 6452 - DNA, 20 bp, Artificial Sequence
  chemically synthesized
gacacggatgctagaattag

SEQ ID NO: 6453 - DNA, 20 bp, Artificial Sequence
  chemically synthesized
acacggatgctagaattagc

SEQ ID NO: 6454 - DNA, 20 bp, Artificial Sequence
  chemically synthesized
ggatgctagaattagcaggc

SEQ ID NO: 6455 - DNA, 20 bp, Artificial Sequence
  chemically synthesized
gatgctagaattagcaggca

SEQ ID NO: 6456 - DNA, 20 bp, Artificial Sequence
  chemically synthesized
ctagaattagcaggcaagga

SEQ ID NO: 6457 - DNA, 20 bp, Artificial Sequence
  chemically synthesized
agcaggcaaggatggtaaaa

SEQ ID NO: 6458 - DNA, 20 bp, Artificial Sequence
  chemically synthesized
ggatggtaaaacagatatta

SEQ ID NO: 6459 - DNA, 20 bp, Artificial Sequence
  chemically synthesized
cccattatgttcaaaaaatt

SEQ ID NO: 6460 - DNA, 20 bp, Artificial Sequence
  chemically synthesized
attatgttcaaaaaattaag

SEQ ID NO: 6461 - DNA, 20 bp, Artificial Sequence
  chemically synthesized
caaaaaattaagtagaattg

SEQ ID NO: 6462 - DNA, 20 bp, Artificial Sequence
  chemically synthesized
aaaaattaagtagaattgtg

SEQ ID NO: 6463 - DNA, 20 bp, Artificial Sequence
  chemically synthesized
aaaattaagtagaattgtgg

SEQ ID NO: 6464 - DNA, 20 bp, Artificial Sequence
  chemically synthesized
tagaattgtggaggatattt

SEQ ID NO: 6465 - DNA, 20 bp, Artificial Sequence
  chemically synthesized
gaattgtggaggatatttaa

SEQ ID NO: 6466 - DNA, 20 bp, Artificial Sequence
  chemically synthesized
ggaggatatttaagagtccc

SEQ ID NO: 6467 - DNA, 20 bp, Artificial Sequence
  chemically synthesized
gaggatatttaagagtcccc

SEQ ID NO: 6468 - DNA, 20 bp, Artificial Sequence
  chemically synthesized
agagtccccaggtgaacttc

SEQ ID NO: 6469 - DNA, 20 bp, Artificial Sequence
  chemically synthesized
agtccccaggtgaacttcta

SEQ ID NO: 6470 - DNA, 20 bp, Artificial Sequence
  chemically synthesized
tctgaaatgaaaaaacacac

SEQ ID NO: 6471 - DNA, 20 bp, Artificial Sequence
  chemically synthesized
aaatgaaaaaacacactggc

SEQ ID NO: 6472 - DNA, 20 bp, Artificial Sequence
  chemically synthesized
aatgaaaaaacacactggcc

SEQ ID NO: 6473 - DNA, 20 bp, Artificial Sequence
  chemically synthesized
aacacactggccaggcgccg

SEQ ID NO: 6474 - DNA, 20 bp, Artificial Sequence
  chemically synthesized
caggcgccgtggctcacgcc

SEQ ID NO: 6475 - DNA, 20 bp, Artificial Sequence
  chemically synthesized
gtggctcacgcctggaatcc

SEQ ID NO: 6476 - DNA, 20 bp, Artificial Sequence
  chemically synthesized
cgcctggaatcccagcactg

SEQ ID NO: 6477 - DNA, 20 bp, Artificial Sequence
  chemically synthesized
gcctggaatcccagcactgt

SEQ ID NO: 6478 - DNA, 20 bp, Artificial Sequence
  chemically synthesized
ctggaatcccagcactgtgg

SEQ ID NO: 6479 - DNA, 20 bp, Artificial Sequence
  chemically synthesized
tggaatcccagcactgtggg

SEQ ID NO: 6480 - DNA, 20 bp, Artificial Sequence
  chemically synthesized
tcccagcactgtgggaggcc

SEQ ID NO: 6481 - DNA, 20 bp, Artificial Sequence
  chemically synthesized
cccagcactgtgggaggcca

SEQ ID NO: 6482 - DNA, 20 bp, Artificial Sequence
  chemically synthesized
agcactgtgggaggccaagg

SEQ ID NO: 6483 - DNA, 20 bp, Artificial Sequence
  chemically synthesized
gcactgtgggaggccaaggc

SEQ ID NO: 6484 - DNA, 20 bp, Artificial Sequence
  chemically synthesized
ctgtgggaggccaaggcggg

SEQ ID NO: 6485 - DNA, 20 bp, Artificial Sequence
  chemically synthesized
ggccaaggcgggcagatcat

SEQ ID NO: 6486 - DNA, 20 bp, Artificial Sequence
  chemically synthesized
gccaaggcgggcagatcatg

SEQ ID NO: 6487 - DNA, 20 bp, Artificial Sequence
  chemically synthesized
aggcgggcagatcatgaggt

SEQ ID NO: 6488 - DNA, 20 bp, Artificial Sequence
  chemically synthesized
ggcgggcagatcatgaggtc

SEQ ID NO: 6489 - DNA, 20 bp, Artificial Sequence
  chemically synthesized
cgggcagatcatgaggtcag

SEQ ID NO: 6490 - DNA, 20 bp, Artificial Sequence
  chemically synthesized
tcaggagatcgacaccatcc

SEQ ID NO: 6491 - DNA, 20 bp, Artificial Sequence
  chemically synthesized
cgacaccatcctggctaaca

SEQ ID NO: 6492 - DNA, 20 bp, Artificial Sequence
  chemically synthesized
ctactaaaaatacaaaaaat

SEQ ID NO: 6493 - DNA, 20 bp, Artificial Sequence
  chemically synthesized
taaaaatacaaaaaattagc

SEQ ID NO: 6494 - DNA, 20 bp, Artificial Sequence
  chemically synthesized
tacaaaaaattagccagacg

SEQ ID NO: 6495 - DNA, 20 bp, Artificial Sequence
  chemically synthesized
aaaaaattagccagacgtgg

SEQ ID NO: 6496 - DNA, 20 bp, Artificial Sequence
  chemically synthesized
aaattagccagacgtggtgg

SEQ ID NO: 6497 - DNA, 20 bp, Artificial Sequence
  chemically synthesized
aattagccagacgtggtggc

SEQ ID NO: 6498 - DNA, 20 bp, Artificial Sequence
  chemically synthesized
gacgtggtggcaggcgcctg

SEQ ID NO: 6499 - DNA, 20 bp, Artificial Sequence
  chemically synthesized
gtggcaggcgcctgtagtcc

SEQ ID NO: 6500 - DNA, 20 bp, Artificial Sequence
  chemically synthesized
cgcctgtagtcccagctact

SEQ ID NO: 6501 - DNA, 20 bp, Artificial Sequence
  chemically synthesized
gcctgtagtcccagctactc

SEQ ID NO: 6502 - DNA, 20 bp, Artificial Sequence
  chemically synthesized
ctgtagtcccagctactcgg

SEQ ID NO: 6503 - DNA, 20 bp, Artificial Sequence
  chemically synthesized
tgtagtcccagctactcggg

SEQ ID NO: 6504 - DNA, 20 bp, Artificial Sequence
  chemically synthesized
tcccagctactcgggaggct

SEQ ID NO: 6505 - DNA, 20 bp, Artificial Sequence
  chemically synthesized
cccagctactcgggaggctg

SEQ ID NO: 6506 - DNA, 20 bp, Artificial Sequence
  chemically synthesized
agctactcgggaggctgagg

SEQ ID NO: 6507 - DNA, 20 bp, Artificial Sequence
  chemically synthesized
gctactcgggaggctgaggc

SEQ ID NO: 6508 - DNA, 20 bp, Artificial Sequence
  chemically synthesized
tactcgggaggctgaggcag

SEQ ID NO: 6509 - DNA, 20 bp, Artificial Sequence
  chemically synthesized
gggaggctgaggcaggagaa

SEQ ID NO: 6510 - DNA, 20 bp, Artificial Sequence
  chemically synthesized
gcaggagaatggcatgaacc

SEQ ID NO: 6511 - DNA, 20 bp, Artificial Sequence
  chemically synthesized
caggagaatggcatgaaccc

SEQ ID NO: 6512 - DNA, 20 bp, Artificial Sequence
  chemically synthesized
ggagaatggcatgaacccgg

SEQ ID NO: 6513 - DNA, 20 bp, Artificial Sequence
  chemically synthesized
gagaatggcatgaacccggg

SEQ ID NO: 6514 - DNA, 20 bp, Artificial Sequence
  chemically synthesized
aatggcatgaacccgggagg

SEQ ID NO: 6515 - DNA, 20 bp, Artificial Sequence
  chemically synthesized
tggcatgaacccgggaggca

SEQ ID NO: 6516 - DNA, 20 bp, Artificial Sequence
  chemically synthesized
aacccgggaggcagagcttg

SEQ ID NO: 6517 - DNA, 20 bp, Artificial Sequence
  chemically synthesized
cgggaggcagagcttgcagt

SEQ ID NO: 6518 - DNA, 20 bp, Artificial Sequence
  chemically synthesized
ggcagagcttgcagtgagcc

SEQ ID NO: 6519 - DNA, 20 bp, Artificial Sequence
  chemically synthesized
aagatcgcgccactgcactc

SEQ ID NO: 6520 - DNA, 20 bp, Artificial Sequence
  chemically synthesized
cgcgccactgcactccggcc

SEQ ID NO: 6521 - DNA, 20 bp, Artificial Sequence
  chemically synthesized
gcgccactgcactccggcct

SEQ ID NO: 6522 - DNA, 20 bp, Artificial Sequence
  chemically synthesized
ctgcactccggcctgggcaa

SEQ ID NO: 6523 - DNA, 20 bp, Artificial Sequence
  chemically synthesized
gcactccggcctgggcaaca

SEQ ID NO: 6524 - DNA, 20 bp, Artificial Sequence
  chemically synthesized
tccggcctgggcaacagagc

SEQ ID NO: 6525 - DNA, 20 bp, Artificial Sequence
  chemically synthesized
ccgcctccaaaaaaaaaaaa

SEQ ID NO: 6526 - DNA, 20 bp, Artificial Sequence
  chemically synthesized
tccaaaaaaaaaaaaaagaa

SEQ ID NO: 6527 - DNA, 20 bp, Artificial Sequence
  chemically synthesized
aaaaaaaaaaaaagaaaaga

SEQ ID NO: 6528 - DNA, 20 bp, Artificial Sequence
  chemically synthesized
aaaaaaaagaaaagaaagaa

SEQ ID NO: 6529 - DNA, 20 bp, Artificial Sequence
  chemically synthesized
aaagaaaagaaaaaacacac

SEQ ID NO: 6530 - DNA, 20 bp, Artificial Sequence
  chemically synthesized
aaaagaaaaaacacactgga

SEQ ID NO: 6531 - DNA, 20 bp, Artificial Sequence
  chemically synthesized
aacacactggatggaaataa

SEQ ID NO: 6532 - DNA, 20 bp, Artificial Sequence
  chemically synthesized
acactggatggaaataatgg

SEQ ID NO: 6533 - DNA, 20 bp, Artificial Sequence
  chemically synthesized
ggatggaaataatggaagat

SEQ ID NO: 6534 - DNA, 20 bp, Artificial Sequence
  chemically synthesized
atggaagatgagaaatgcgt

SEQ ID NO: 6535 - DNA, 20 bp, Artificial Sequence
  chemically synthesized
agaaatgcgtaagaaaaatt

SEQ ID NO: 6536 - DNA, 20 bp, Artificial Sequence
  chemically synthesized
gaaatgcgtaagaaaaattt

SEQ ID NO: 6537 - DNA, 20 bp, Artificial Sequence
  chemically synthesized
aaatgcgtaagaaaaattta

SEQ ID NO: 6538 - DNA, 20 bp, Artificial Sequence
  chemically synthesized
gcgtaagaaaaatttagggc

SEQ ID NO: 6539 - DNA, 20 bp, Artificial Sequence
  chemically synthesized
cgtaagaaaaatttagggcc

SEQ ID NO: 6540 - DNA, 20 bp, Artificial Sequence
  chemically synthesized
aaatttagggccaggcactg

SEQ ID NO: 6541 - DNA, 20 bp, Artificial Sequence
  chemically synthesized
gtggatcacatctgtaatcc

SEQ ID NO: 6542 - DNA, 20 bp, Artificial Sequence
  chemically synthesized
catctgtaatcccagcactt

SEQ ID NO: 6543 - DNA, 20 bp, Artificial Sequence
  chemically synthesized
atctgtaatcccagcacttt

SEQ ID NO: 6544 - DNA, 20 bp, Artificial Sequence
  chemically synthesized
ctgtaatcccagcactttgg

SEQ ID NO: 6545 - DNA, 20 bp, Artificial Sequence
  chemically synthesized
tgtaatcccagcactttggg

SEQ ID NO: 6546 - DNA, 20 bp, Artificial Sequence
  chemically synthesized
agcactttgggaggtcgaca

SEQ ID NO: 6547 - DNA, 20 bp, Artificial Sequence
  chemically synthesized
gcactttgggaggtcgacac

SEQ ID NO: 6548 - DNA, 20 bp, Artificial Sequence
  chemically synthesized
cactttgggaggtcgacacg

SEQ ID NO: 6549 - DNA, 20 bp, Artificial Sequence
  chemically synthesized
actttgggaggtcgacacgg

SEQ ID NO: 6550 - DNA, 20 bp, Artificial Sequence
  chemically synthesized
ctttgggaggtcgacacggg

SEQ ID NO: 6551 - DNA, 20 bp, Artificial Sequence
  chemically synthesized
cgacacggggggaatcactt

SEQ ID NO: 6552 - DNA, 20 bp, Artificial Sequence
  chemically synthesized
cggggggaatcacttgagcc

SEQ ID NO: 6553 - DNA, 20 bp, Artificial Sequence
  chemically synthesized
ggggggaatcacttgagccc

SEQ ID NO: 6554 - DNA, 20 bp, Artificial Sequence
  chemically synthesized
ggggaatcacttgagcccag

SEQ ID NO: 6555 - DNA, 20 bp, Artificial Sequence
  chemically synthesized
tcacttgagcccaggagctc

SEQ ID NO: 6556 - DNA, 20 bp, Artificial Sequence
  chemically synthesized
tgagcccaggagctcaagac

SEQ ID NO: 6557 - DNA, 20 bp, Artificial Sequence
  chemically synthesized
ccaggagctcaagactagtc

SEQ ID NO: 6558 - DNA, 20 bp, Artificial Sequence
  chemically synthesized
caggagctcaagactagtct

SEQ ID NO: 6559 - DNA, 20 bp, Artificial Sequence
  chemically synthesized
gagctcaagactagtctggg

SEQ ID NO: 6560 - DNA, 20 bp, Artificial Sequence
  chemically synthesized
caagactagtctgggcagca

SEQ ID NO: 6561 - DNA, 20 bp, Artificial Sequence
  chemically synthesized
catggcaaaacccctctaca

SEQ ID NO: 6562 - DNA, 20 bp, Artificial Sequence
  chemically synthesized
tacaaaaaaaaatttttaat

SEQ ID NO: 6563 - DNA, 20 bp, Artificial Sequence
  chemically synthesized
aaaaaaaatttttaattagc

SEQ ID NO: 6564 - DNA, 20 bp, Artificial Sequence
  chemically synthesized
aaaaaaatttttaattagcc

SEQ ID NO: 6565 - DNA, 20 bp, Artificial Sequence
  chemically synthesized
aatttttaattagccaggtg

SEQ ID NO: 6566 - DNA, 20 bp, Artificial Sequence
  chemically synthesized
ggtgtggtgccacatgccta

SEQ ID NO: 6567 - DNA, 20 bp, Artificial Sequence
  chemically synthesized
gtgccacatgcctatagtcc

SEQ ID NO: 6568 - DNA, 20 bp, Artificial Sequence
  chemically synthesized
tgcctatagtcccagctacc

SEQ ID NO: 6569 - DNA, 20 bp, Artificial Sequence
  chemically synthesized
gcctatagtcccagctacct

SEQ ID NO: 6570 - DNA, 20 bp, Artificial Sequence
  chemically synthesized
ctatagtcccagctacctgg

SEQ ID NO: 6571 - DNA, 20 bp, Artificial Sequence
  chemically synthesized
tatagtcccagctacctggg

SEQ ID NO: 6572 - DNA, 20 bp, Artificial Sequence
  chemically synthesized
cccagctacctgggaggctg

SEQ ID NO: 6573 - DNA, 20 bp, Artificial Sequence
  chemically synthesized
agctacctgggaggctgaag

SEQ ID NO: 6574 - DNA, 20 bp, Artificial Sequence
  chemically synthesized
tacctgggaggctgaagtgg

SEQ ID NO: 6575 - DNA, 20 bp, Artificial Sequence
  chemically synthesized
acctgggaggctgaagtgga

SEQ ID NO: 6576 - DNA, 20 bp, Artificial Sequence
  chemically synthesized
ctgaagtggaaggatcgcct

SEQ ID NO: 6577 - DNA, 20 bp, Artificial Sequence
  chemically synthesized
gtggaaggatcgcctgagcc

SEQ ID NO: 6578 - DNA, 20 bp, Artificial Sequence
  chemically synthesized
tggaaggatcgcctgagccc

SEQ ID NO: 6579 - DNA, 20 bp, Artificial Sequence
  chemically synthesized
gaaggatcgcctgagcccag

SEQ ID NO: 6580 - DNA, 20 bp, Artificial Sequence
  chemically synthesized
aaggatcgcctgagcccagg

SEQ ID NO: 6581 - DNA, 20 bp, Artificial Sequence
  chemically synthesized
gatcgcctgagcccaggagg

SEQ ID NO: 6582 - DNA, 20 bp, Artificial Sequence
  chemically synthesized
tcgcctgagcccaggaggtg

SEQ ID NO: 6583 - DNA, 20 bp, Artificial Sequence
  chemically synthesized
cgcctgagcccaggaggtgg

SEQ ID NO: 6584 - DNA, 20 bp, Artificial Sequence
  chemically synthesized
agcccaggaggtggaggcca

SEQ ID NO: 6585 - DNA, 20 bp, Artificial Sequence
  chemically synthesized
caggaggtggaggccacagt

SEQ ID NO: 6586 - DNA, 20 bp, Artificial Sequence
  chemically synthesized
aggccacagtgagttgtgac

SEQ ID NO: 6587 - DNA, 20 bp, Artificial Sequence
  chemically synthesized
tgtgacaagctactgcattc

SEQ ID NO: 6588 - DNA, 20 bp, Artificial Sequence
  chemically synthesized
caagctactgcattccagcc

SEQ ID NO: 6589 - DNA, 20 bp, Artificial Sequence
  chemically synthesized
aagctactgcattccagcct

SEQ ID NO: 6590 - DNA, 20 bp, Artificial Sequence
  chemically synthesized
ctgcattccagcctgggcaa

SEQ ID NO: 6591 - DNA, 20 bp, Artificial Sequence
  chemically synthesized
gcattccagcctgggcaaca

SEQ ID NO: 6592 - DNA, 20 bp, Artificial Sequence
  chemically synthesized
tccagcctgggcaacagagt

SEQ ID NO: 6593 - DNA, 20 bp, Artificial Sequence
  chemically synthesized
cctgggcaacagagtgagat

SEQ ID NO: 6594 - DNA, 20 bp, Artificial Sequence
  chemically synthesized
tgggcaacagagtgagatga

SEQ ID NO: 6595 - DNA, 20 bp, Artificial Sequence
  chemically synthesized
ggcaacagagtgagatgaga

SEQ ID NO: 6596 - DNA, 20 bp, Artificial Sequence
  chemically synthesized
caacagagtgagatgagaga

SEQ ID NO: 6597 - DNA, 20 bp, Artificial Sequence
  chemically synthesized
acagagtgagatgagagaga

SEQ ID NO: 6598 - DNA, 20 bp, Artificial Sequence
  chemically synthesized
agagtgagatgagagagaga

SEQ ID NO: 6599 - DNA, 20 bp, Artificial Sequence
  chemically synthesized
gagtgagatgagagagagag

SEQ ID NO: 6600 - DNA, 20 bp, Artificial Sequence
  chemically synthesized
agtgagatgagagagagaga

SEQ ID NO: 6601 - DNA, 20 bp, Artificial Sequence
  chemically synthesized
gtgagatgagagagagagag

SEQ ID NO: 6602 - DNA, 20 bp, Artificial Sequence
  chemically synthesized
gagatgagagagagagaggg

SEQ ID NO: 6603 - DNA, 20 bp, Artificial Sequence
  chemically synthesized
agatgagagagagagagggg

SEQ ID NO: 6604 - DNA, 20 bp, Artificial Sequence
  chemically synthesized
gatgagagagagagagggga

SEQ ID NO: 6605 - DNA, 20 bp, Artificial Sequence
  chemically synthesized
atgagagagagagaggggag

SEQ ID NO: 6606 - DNA, 20 bp, Artificial Sequence
  chemically synthesized
agagagagagaggggagggg

SEQ ID NO: 6607 - DNA, 20 bp, Artificial Sequence
  chemically synthesized
agagagaggggaggggaagc

SEQ ID NO: 6608 - DNA, 20 bp, Artificial Sequence
  chemically synthesized
gagagaggggaggggaagcg

SEQ ID NO: 6609 - DNA, 20 bp, Artificial Sequence
  chemically synthesized
agagaggggaggggaagcga

SEQ ID NO: 6610 - DNA, 20 bp, Artificial Sequence
  chemically synthesized
gaggggaggggaagcgaggg

SEQ ID NO: 6611 - DNA, 20 bp, Artificial Sequence
  chemically synthesized
aggggaggggaagcgaggga

SEQ ID NO: 6612 - DNA, 20 bp, Artificial Sequence
  chemically synthesized
gaggggaagcgagggaagga

SEQ ID NO: 6613 - DNA, 20 bp, Artificial Sequence
  chemically synthesized
aggggaagcgagggaaggaa

SEQ ID NO: 6614 - DNA, 20 bp, Artificial Sequence
  chemically synthesized
gggaagcgagggaaggaaag

SEQ ID NO: 6615 - DNA, 20 bp, Artificial Sequence
  chemically synthesized
ggaagcgagggaaggaaagg

SEQ ID NO: 6616 - DNA, 20 bp, Artificial Sequence
  chemically synthesized
gaagcgagggaaggaaagga

SEQ ID NO: 6617 - DNA, 20 bp, Artificial Sequence
  chemically synthesized
aagcgagggaaggaaaggag

SEQ ID NO: 6618 - DNA, 20 bp, Artificial Sequence
  chemically synthesized
gcgagggaaggaaaggaggg

SEQ ID NO: 6619 - DNA, 20 bp, Artificial Sequence
  chemically synthesized
cgagggaaggaaaggagggg

SEQ ID NO: 6620 - DNA, 20 bp, Artificial Sequence
  chemically synthesized
gagggaaggaaaggagggga

SEQ ID NO: 6621 - DNA, 20 bp, Artificial Sequence
  chemically synthesized
agggaaggaaaggaggggag

SEQ ID NO: 6622 - DNA, 20 bp, Artificial Sequence
  chemically synthesized
ggaaggaaaggaggggaggg

SEQ ID NO: 6623 - DNA, 20 bp, Artificial Sequence
  chemically synthesized
gaaggaaaggaggggagggg

SEQ ID NO: 6624 - DNA, 20 bp, Artificial Sequence
  chemically synthesized
aaggaaaggaggggagggga

SEQ ID NO: 6625 - DNA, 20 bp, Artificial Sequence
  chemically synthesized
aggaaaggaggggaggggag

SEQ ID NO: 6626 - DNA, 20 bp, Artificial Sequence
  chemically synthesized
ggaaaggaggggaggggagg

SEQ ID NO: 6627 - DNA, 20 bp, Artificial Sequence
  chemically synthesized
aaaggaggggaggggagggg

SEQ ID NO: 6628 - DNA, 20 bp, Artificial Sequence
  chemically synthesized
aaggaggggaggggaggggg

SEQ ID NO: 6629 - DNA, 20 bp, Artificial Sequence
  chemically synthesized
aggaggggaggggaggggga

SEQ ID NO: 6630 - DNA, 20 bp, Artificial Sequence
  chemically synthesized
ggaggggaggggagggggag

SEQ ID NO: 6631 - DNA, 20 bp, Artificial Sequence
  chemically synthesized
ggggaggggagggggagggg

SEQ ID NO: 6632 - DNA, 20 bp, Artificial Sequence
  chemically synthesized
gggaggggagggggagggga

SEQ ID NO: 6633 - DNA, 20 bp, Artificial Sequence
  chemically synthesized
ggaggggagggggaggggaa

SEQ ID NO: 6634 - DNA, 20 bp, Artificial Sequence
  chemically synthesized
gaggggagggggaggggaag

SEQ ID NO: 6635 - DNA, 20 bp, Artificial Sequence
  chemically synthesized
ggaggggaaggggaaaattt

SEQ ID NO: 6636 - DNA, 20 bp, Artificial Sequence
  chemically synthesized
attttagttaacttaatgaa

SEQ ID NO: 6637 - DNA, 20 bp, Artificial Sequence
  chemically synthesized
aactctataaaatgaaacac

SEQ ID NO: 6638 - DNA, 20 bp, Artificial Sequence
  chemically synthesized
actctataaaatgaaacact

SEQ ID NO: 6639 - DNA, 20 bp, Artificial Sequence
  chemically synthesized
tctataaaatgaaacactgg

SEQ ID NO: 6640 - DNA, 20 bp, Artificial Sequence
  chemically synthesized
aatgaaacactgggagaaaa

SEQ ID NO: 6641 - DNA, 20 bp, Artificial Sequence
  chemically synthesized
gagaaaaaagaattaaaaaa

SEQ ID NO: 6642 - DNA, 20 bp, Artificial Sequence
  chemically synthesized
aaaaagaattaaaaaatgga

SEQ ID NO: 6643 - DNA, 20 bp, Artificial Sequence
  chemically synthesized
aaagaattaaaaaatggaaa

SEQ ID NO: 6644 - DNA, 20 bp, Artificial Sequence
  chemically synthesized
ttaaaaaatggaaagagaat

SEQ ID NO: 6645 - DNA, 20 bp, Artificial Sequence
  chemically synthesized
aaaatggaaagagaatgagt

SEQ ID NO: 6646 - DNA, 20 bp, Artificial Sequence
  chemically synthesized
gaaagagaatgagtgagctg

SEQ ID NO: 6647 - DNA, 20 bp, Artificial Sequence
  chemically synthesized
aaagagaatgagtgagctgt

SEQ ID NO: 6648 - DNA, 20 bp, Artificial Sequence
  chemically synthesized
tgcataattgaaatctttaa

SEQ ID NO: 6649 - DNA, 20 bp, Artificial Sequence
  chemically synthesized
attgaaatctttaaaagaaa

SEQ ID NO: 6650 - DNA, 20 bp, Artificial Sequence
  chemically synthesized
ttgaaatctttaaaagaaaa

SEQ ID NO: 6651 - DNA, 20 bp, Artificial Sequence
  chemically synthesized
tgaaatctttaaaagaaaaa

SEQ ID NO: 6652 - DNA, 20 bp, Artificial Sequence
  chemically synthesized
gaaatctttaaaagaaaaag

SEQ ID NO: 6653 - DNA, 20 bp, Artificial Sequence
  chemically synthesized
aaatctttaaaagaaaaagg

SEQ ID NO: 6654 - DNA, 20 bp, Artificial Sequence
  chemically synthesized
tctttaaaagaaaaaggggg

SEQ ID NO: 6655 - DNA, 20 bp, Artificial Sequence
  chemically synthesized
ttaaaagaaaaagggggtag

SEQ ID NO: 6656 - DNA, 20 bp, Artificial Sequence
  chemically synthesized
gggggtagcagaaaaaaatc

SEQ ID NO: 6657 - DNA, 20 bp, Artificial Sequence
  chemically synthesized
gcagaaaaaaatcaagtgct

SEQ ID NO: 6658 - DNA, 20 bp, Artificial Sequence
  chemically synthesized
aaaaaatcaagtgctgagac

SEQ ID NO: 6659 - DNA, 20 bp, Artificial Sequence
  chemically synthesized
aaatcaagtgctgagacaag

SEQ ID NO: 6660 - DNA, 20 bp, Artificial Sequence
  chemically synthesized
tcaagtgctgagacaagtgg

SEQ ID NO: 6661 - DNA, 20 bp, Artificial Sequence
  chemically synthesized
gtgctgagacaagtggaaga

SEQ ID NO: 6662 - DNA, 20 bp, Artificial Sequence
  chemically synthesized
tgctgagacaagtggaagat

SEQ ID NO: 6663 - DNA, 20 bp, Artificial Sequence
  chemically synthesized
gacaagtggaagatgggccc

SEQ ID NO: 6664 - DNA, 20 bp, Artificial Sequence
  chemically synthesized
agtggaagatgggccccggt

SEQ ID NO: 6665 - DNA, 20 bp, Artificial Sequence
  chemically synthesized
ggaagatgggccccggtgag

SEQ ID NO: 6666 - DNA, 20 bp, Artificial Sequence
  chemically synthesized
ggccccggtgagcagctgat

SEQ ID NO: 6667 - DNA, 20 bp, Artificial Sequence
  chemically synthesized
ggtgagcagctgatcagtgt

SEQ ID NO: 6668 - DNA, 20 bp, Artificial Sequence
  chemically synthesized
ctcccatgatgacgttcccc

SEQ ID NO: 6669 - DNA, 20 bp, Artificial Sequence
  chemically synthesized
ttcccccagcccccaccacc

SEQ ID NO: 6670 - DNA, 20 bp, Artificial Sequence
  chemically synthesized
tcccccagcccccaccaccc

SEQ ID NO: 6671 - DNA, 20 bp, Artificial Sequence
  chemically synthesized
gcccccaccacccgggctgc

SEQ ID NO: 6672 - DNA, 20 bp, Artificial Sequence
  chemically synthesized
ccccaccacccgggctgctg

SEQ ID NO: 6673 - DNA, 20 bp, Artificial Sequence
  chemically synthesized
cccaccacccgggctgctgg

SEQ ID NO: 6674 - DNA, 20 bp, Artificial Sequence
  chemically synthesized
ccaccacccgggctgctgga

SEQ ID NO: 6675 - DNA, 20 bp, Artificial Sequence
  chemically synthesized
cgggctgctggagggaaatg

SEQ ID NO: 6676 - DNA, 20 bp, Artificial Sequence
  chemically synthesized
gtgactttgctacatccctt

SEQ ID NO: 6677 - DNA, 20 bp, Artificial Sequence
  chemically synthesized
ctttgctacatcccttcaga

SEQ ID NO: 6678 - DNA, 20 bp, Artificial Sequence
  chemically synthesized
cccttcagacggtccctcac

SEQ ID NO: 6679 - DNA, 20 bp, Artificial Sequence
  chemically synthesized
ggtccctcactggtgtccct

SEQ ID NO: 6680 - DNA, 20 bp, Artificial Sequence
  chemically synthesized
gtccctcagcccattcgcgt

SEQ ID NO: 6681 - DNA, 20 bp, Artificial Sequence
  chemically synthesized
gctcactctcccattaattt

SEQ ID NO: 6682 - DNA, 20 bp, Artificial Sequence
  chemically synthesized
cccattaatttcagaaatcc

SEQ ID NO: 6683 - DNA, 20 bp, Artificial Sequence
  chemically synthesized
agaaatcctggcctctctcc

SEQ ID NO: 6684 - DNA, 20 bp, Artificial Sequence
  chemically synthesized
actctaaattctgtcaccct

SEQ ID NO: 6685 - DNA, 20 bp, Artificial Sequence
  chemically synthesized
ctaaattctgtcaccctcag

SEQ ID NO: 6686 - DNA, 20 bp, Artificial Sequence
  chemically synthesized
tctgtcaccctcagaagatt

SEQ ID NO: 6687 - DNA, 20 bp, Artificial Sequence
  chemically synthesized
gtcaccctcagaagattcag

SEQ ID NO: 6688 - DNA, 20 bp, Artificial Sequence
  chemically synthesized
cagcatcccgtattctctct

SEQ ID NO: 6689 - DNA, 20 bp, Artificial Sequence
  chemically synthesized
tctgagtgttcactatgtac

SEQ ID NO: 6690 - DNA, 20 bp, Artificial Sequence
  chemically synthesized
ctgagtgttcactatgtacc

SEQ ID NO: 6691 - DNA, 20 bp, Artificial Sequence
  chemically synthesized
actatgtaccgggtgccgtg

SEQ ID NO: 6692 - DNA, 20 bp, Artificial Sequence
  chemically synthesized
ctatgtaccgggtgccgtgt

SEQ ID NO: 6693 - DNA, 20 bp, Artificial Sequence
  chemically synthesized
accgggtgccgtgtgggcac

SEQ ID NO: 6694 - DNA, 20 bp, Artificial Sequence
  chemically synthesized
cgggtgccgtgtgggcactg

SEQ ID NO: 6695 - DNA, 20 bp, Artificial Sequence
  chemically synthesized
ccgtgtgggcactggagttg

SEQ ID NO: 6696 - DNA, 20 bp, Artificial Sequence
  chemically synthesized
gtgtgggcactggagttgca

SEQ ID NO: 6697 - DNA, 20 bp, Artificial Sequence
  chemically synthesized
tgtgggcactggagttgcag

SEQ ID NO: 6698 - DNA, 20 bp, Artificial Sequence
  chemically synthesized
tgggcactggagttgcagag

SEQ ID NO: 6699 - DNA, 20 bp, Artificial Sequence
  chemically synthesized
ggcactggagttgcagagga

SEQ ID NO: 6700 - DNA, 20 bp, Artificial Sequence
  chemically synthesized
ctggagttgcagaggagagt

SEQ ID NO: 6701 - DNA, 20 bp, Artificial Sequence
  chemically synthesized
tggagttgcagaggagagtg

SEQ ID NO: 6702 - DNA, 20 bp, Artificial Sequence
  chemically synthesized
agttgcagaggagagtgagg

SEQ ID NO: 6703 - DNA, 20 bp, Artificial Sequence
  chemically synthesized
gcagaggagagtgaggcgga

SEQ ID NO: 6704 - DNA, 20 bp, Artificial Sequence
  chemically synthesized
cagaggagagtgaggcggac

SEQ ID NO: 6705 - DNA, 20 bp, Artificial Sequence
  chemically synthesized
agaggagagtgaggcggaca

SEQ ID NO: 6706 - DNA, 20 bp, Artificial Sequence
  chemically synthesized
gcggacagggcctctgcctg

SEQ ID NO: 6707 - DNA, 20 bp, Artificial Sequence
  chemically synthesized
cggacagggcctctgcctgt

SEQ ID NO: 6708 - DNA, 20 bp, Artificial Sequence
  chemically synthesized
ggacagggcctctgcctgtg

SEQ ID NO: 6709 - DNA, 20 bp, Artificial Sequence
  chemically synthesized
ctgcctgtggggacaccgcc

SEQ ID NO: 6710 - DNA, 20 bp, Artificial Sequence
  chemically synthesized
cctgtggggacaccgcctgg

SEQ ID NO: 6711 - DNA, 20 bp, Artificial Sequence
  chemically synthesized
ctgtggggacaccgcctggt

SEQ ID NO: 6712 - DNA, 20 bp, Artificial Sequence
  chemically synthesized
tggggacaccgcctggtggg

SEQ ID NO: 6713 - DNA, 20 bp, Artificial Sequence
  chemically synthesized
acaccgcctggtgggaagtc

SEQ ID NO: 6714 - DNA, 20 bp, Artificial Sequence
  chemically synthesized
cgcctggtgggaagtccagc

SEQ ID NO: 6715 - DNA, 20 bp, Artificial Sequence
  chemically synthesized
gaagtccagccagcccccta

SEQ ID NO: 6716 - DNA, 20 bp, Artificial Sequence
  chemically synthesized
agtccagccagccccctaca

SEQ ID NO: 6717 - DNA, 20 bp, Artificial Sequence
  chemically synthesized
tccagccagccccctacaga

SEQ ID NO: 6718 - DNA, 20 bp, Artificial Sequence
  chemically synthesized
cagccagccccctacagaga

SEQ ID NO: 6719 - DNA, 20 bp, Artificial Sequence
  chemically synthesized
agccagccccctacagagag

SEQ ID NO: 6720 - DNA, 20 bp, Artificial Sequence
  chemically synthesized
ccagccccctacagagagag

SEQ ID NO: 6721 - DNA, 20 bp, Artificial Sequence
  chemically synthesized
acagagagaggagatgctac

SEQ ID NO: 6722 - DNA, 20 bp, Artificial Sequence
  chemically synthesized
gagatgctactggtgttcct

SEQ ID NO: 6723 - DNA, 20 bp, Artificial Sequence
  chemically synthesized
atgctactggtgttcctgag

SEQ ID NO: 6724 - DNA, 20 bp, Artificial Sequence
  chemically synthesized
tggtgttcctgagtggtcct

SEQ ID NO: 6725 - DNA, 20 bp, Artificial Sequence
  chemically synthesized
ggtgttcctgagtggtcctc

SEQ ID NO: 6726 - DNA, 20 bp, Artificial Sequence
  chemically synthesized
tgttcctgagtggtcctcgg

SEQ ID NO: 6727 - DNA, 20 bp, Artificial Sequence
  chemically synthesized
gttcctgagtggtcctcggg

SEQ ID NO: 6728 - DNA, 20 bp, Artificial Sequence
  chemically synthesized
ttcctgagtggtcctcggga

SEQ ID NO: 6729 - DNA, 20 bp, Artificial Sequence
  chemically synthesized
gtcccctgccctgccctgcc

SEQ ID NO: 6730 - DNA, 20 bp, Artificial Sequence
  chemically synthesized
tgccctgccctgcccagcac

SEQ ID NO: 6731 - DNA, 20 bp, Artificial Sequence
  chemically synthesized
gcccagcaccggccctccct

SEQ ID NO: 6732 - DNA, 20 bp, Artificial Sequence
  chemically synthesized
agcaccggccctccctcggt

SEQ ID NO: 6733 - DNA, 20 bp, Artificial Sequence
  chemically synthesized
ccggccctccctcggttggc

SEQ ID NO: 6734 - DNA, 20 bp, Artificial Sequence
  chemically synthesized
ctccctcggttggccagcct

SEQ ID NO: 6735 - DNA, 20 bp, Artificial Sequence
  chemically synthesized
tccctcggttggccagcctc

SEQ ID NO: 6736 - DNA, 20 bp, Artificial Sequence
  chemically synthesized
ggttggccagcctcaggaat

SEQ ID NO: 6737 - DNA, 20 bp, Artificial Sequence
  chemically synthesized
gttggccagcctcaggaatg

SEQ ID NO: 6738 - DNA, 20 bp, Artificial Sequence
  chemically synthesized
tggccagcctcaggaatgag

SEQ ID NO: 6739 - DNA, 20 bp, Artificial Sequence
  chemically synthesized
gaatgaggagtccctcattc

SEQ ID NO: 6740 - DNA, 20 bp, Artificial Sequence
  chemically synthesized
aggagtccctcattccagcc

SEQ ID NO: 6741 - DNA, 20 bp, Artificial Sequence
  chemically synthesized
agctaaccaatccccttcct

SEQ ID NO: 6742 - DNA, 20 bp, Artificial Sequence
  chemically synthesized
caatccccttcctaagctcc

SEQ ID NO: 6743 - DNA, 20 bp, Artificial Sequence
  chemically synthesized
ccctgctcctcctgcctcca

SEQ ID NO: 6744 - DNA, 20 bp, Artificial Sequence
  chemically synthesized
cctcctgcctccatggaacc

SEQ ID NO: 6745 - DNA, 20 bp, Artificial Sequence
  chemically synthesized
atggaacccggctccaccac

SEQ ID NO: 6746 - DNA, 20 bp, Artificial Sequence
  chemically synthesized
acctgacactcctccattcc

SEQ ID NO: 6747 - DNA, 20 bp, Artificial Sequence
  chemically synthesized
ctggctcttgcccttctgcc

SEQ ID NO: 6748 - DNA, 20 bp, Artificial Sequence
  chemically synthesized
cccttctgcctagcactgct

SEQ ID NO: 6749 - DNA, 20 bp, Artificial Sequence
  chemically synthesized
accttaaaatcttttcccac

SEQ ID NO: 6750 - DNA, 20 bp, Artificial Sequence
  chemically synthesized
aaaatcttttcccaccagcc

SEQ ID NO: 6751 - DNA, 20 bp, Artificial Sequence
  chemically synthesized
aaatcttttcccaccagcct

SEQ ID NO: 6752 - DNA, 20 bp, Artificial Sequence
  chemically synthesized
tcccaccagcctgggcaaca

SEQ ID NO: 6753 - DNA, 20 bp, Artificial Sequence
  chemically synthesized
accagcctgggcaacatagc

SEQ ID NO: 6754 - DNA, 20 bp, Artificial Sequence
  chemically synthesized
aaaaattttttttaatttgc

SEQ ID NO: 6755 - DNA, 20 bp, Artificial Sequence
  chemically synthesized
aaaattttttttaatttgcc

SEQ ID NO: 6756 - DNA, 20 bp, Artificial Sequence
  chemically synthesized
tttttttaatttgccaggca

SEQ ID NO: 6757 - DNA, 20 bp, Artificial Sequence
  chemically synthesized
ttttaatttgccaggcacag

SEQ ID NO: 6758 - DNA, 20 bp, Artificial Sequence
  chemically synthesized
gcacagtggtgcacacctgt

SEQ ID NO: 6759 - DNA, 20 bp, Artificial Sequence
  chemically synthesized
acctgtaagtcctaactact

SEQ ID NO: 6760 - DNA, 20 bp, Artificial Sequence
  chemically synthesized
cctgtaagtcctaactactt

SEQ ID NO: 6761 - DNA, 20 bp, Artificial Sequence
  chemically synthesized
tgtaagtcctaactacttgg

SEQ ID NO: 6762 - DNA, 20 bp, Artificial Sequence
  chemically synthesized
gtaagtcctaactacttggg

SEQ ID NO: 6763 - DNA, 20 bp, Artificial Sequence
  chemically synthesized
tcctaactacttgggaggct

SEQ ID NO: 6764 - DNA, 20 bp, Artificial Sequence
  chemically synthesized
cctaactacttgggaggctg

SEQ ID NO: 6765 - DNA, 20 bp, Artificial Sequence
  chemically synthesized
aactacttgggaggctgagg

SEQ ID NO: 6766 - DNA, 20 bp, Artificial Sequence
  chemically synthesized
actacttgggaggctgaggt

SEQ ID NO: 6767 - DNA, 20 bp, Artificial Sequence
  chemically synthesized
tacttgggaggctgaggtgg

SEQ ID NO: 6768 - DNA, 20 bp, Artificial Sequence
  chemically synthesized
acttgggaggctgaggtggg

SEQ ID NO: 6769 - DNA, 20 bp, Artificial Sequence
  chemically synthesized
gggaggctgaggtgggagga

SEQ ID NO: 6770 - DNA, 20 bp, Artificial Sequence
  chemically synthesized
ctgaggtgggaggatggctt

SEQ ID NO: 6771 - DNA, 20 bp, Artificial Sequence
  chemically synthesized
gtgggaggatggcttgagcc

SEQ ID NO: 6772 - DNA, 20 bp, Artificial Sequence
  chemically synthesized
tgggaggatggcttgagccc

SEQ ID NO: 6773 - DNA, 20 bp, Artificial Sequence
  chemically synthesized
ggaggatggcttgagcccag

SEQ ID NO: 6774 - DNA, 20 bp, Artificial Sequence
  chemically synthesized
tggcttgagcccaggagttc

SEQ ID NO: 6775 - DNA, 20 bp, Artificial Sequence
  chemically synthesized
ggcttgagcccaggagttcg

SEQ ID NO: 6776 - DNA, 20 bp, Artificial Sequence
  chemically synthesized
agcccaggagttcgaggttg

SEQ ID NO: 6777 - DNA, 20 bp, Artificial Sequence
  chemically synthesized
caggagttcgaggttgcagt

SEQ ID NO: 6778 - DNA, 20 bp, Artificial Sequence
  chemically synthesized
tctctaaaaaaaaaatgtcc

SEQ ID NO: 6779 - DNA, 20 bp, Artificial Sequence
  chemically synthesized
aaaaaaatgtccaagatact

SEQ ID NO: 6780 - DNA, 20 bp, Artificial Sequence
  chemically synthesized
aaaaaatgtccaagatactt

SEQ ID NO: 6781 - DNA, 20 bp, Artificial Sequence
  chemically synthesized
tccaagatacttaggtcctt

SEQ ID NO: 6782 - DNA, 20 bp, Artificial Sequence
  chemically synthesized
gatacttaggtccttcagtc

SEQ ID NO: 6783 - DNA, 20 bp, Artificial Sequence
  chemically synthesized
ccttcagtcaagatttatta

SEQ ID NO: 6784 - DNA, 20 bp, Artificial Sequence
  chemically synthesized
tcagtcaagatttattacag

SEQ ID NO: 6785 - DNA, 20 bp, Artificial Sequence
  chemically synthesized
cagtcaagatttattacaga

SEQ ID NO: 6786 - DNA, 20 bp, Artificial Sequence
  chemically synthesized
agatttattacagaaggatc

SEQ ID NO: 6787 - DNA, 20 bp, Artificial Sequence
  chemically synthesized
gatttattacagaaggatcc

SEQ ID NO: 6788 - DNA, 20 bp, Artificial Sequence
  chemically synthesized
atttattacagaaggatcca

SEQ ID NO: 6789 - DNA, 20 bp, Artificial Sequence
  chemically synthesized
tattacagaaggatccaggg

SEQ ID NO: 6790 - DNA, 20 bp, Artificial Sequence
  chemically synthesized
attacagaaggatccaggga

SEQ ID NO: 6791 - DNA, 20 bp, Artificial Sequence
  chemically synthesized
ttacagaaggatccagggaa

SEQ ID NO: 6792 - DNA, 20 bp, Artificial Sequence
  chemically synthesized
aaggatccagggaagggtct

SEQ ID NO: 6793 - DNA, 20 bp, Artificial Sequence
  chemically synthesized
aggatccagggaagggtctt

SEQ ID NO: 6794 - DNA, 20 bp, Artificial Sequence
  chemically synthesized
gatccagggaagggtcttgg

SEQ ID NO: 6795 - DNA, 20 bp, Artificial Sequence
  chemically synthesized
agggaagggtcttgggagat

SEQ ID NO: 6796 - DNA, 20 bp, Artificial Sequence
  chemically synthesized
ggaagggtcttgggagatga

SEQ ID NO: 6797 - DNA, 20 bp, Artificial Sequence
  chemically synthesized
gaagggtcttgggagatgag

SEQ ID NO: 6798 - DNA, 20 bp, Artificial Sequence
  chemically synthesized
agggtcttgggagatgagag

SEQ ID NO: 6799 - DNA, 20 bp, Artificial Sequence
  chemically synthesized
gtcttgggagatgagaggag

SEQ ID NO: 6800 - DNA, 20 bp, Artificial Sequence
  chemically synthesized
tcttgggagatgagaggagc

SEQ ID NO: 6801 - DNA, 20 bp, Artificial Sequence
  chemically synthesized
cttgggagatgagaggagca

SEQ ID NO: 6802 - DNA, 20 bp, Artificial Sequence
  chemically synthesized
tgagaggagcagggatcttc

SEQ ID NO: 6803 - DNA, 20 bp, Artificial Sequence
  chemically synthesized
gagaggagcagggatcttcc

SEQ ID NO: 6804 - DNA, 20 bp, Artificial Sequence
  chemically synthesized
cacaacatacacacatgcac

SEQ ID NO: 6805 - DNA, 20 bp, Artificial Sequence
  chemically synthesized
cacaacatacactcacacac

SEQ ID NO: 6806 - DNA, 20 bp, Artificial Sequence
  chemically synthesized
cattcactcacacacacaca

SEQ ID NO: 6807 - DNA, 20 bp, Artificial Sequence
  chemically synthesized
ttcactcacacacacacaca

SEQ ID NO: 6808 - DNA, 20 bp, Artificial Sequence
  chemically synthesized
cacacacacacacagagtcc

SEQ ID NO: 6809 - DNA, 20 bp, Artificial Sequence
  chemically synthesized
atacgtgcacacgcacatac

SEQ ID NO: 6810 - DNA, 20 bp, Artificial Sequence
  chemically synthesized
tacgtgcacacgcacatacg

SEQ ID NO: 6811 - DNA, 20 bp, Artificial Sequence
  chemically synthesized
atacgaggcacatgtgttct

SEQ ID NO: 6812 - DNA, 20 bp, Artificial Sequence
  chemically synthesized
tacgaggcacatgtgttctt

SEQ ID NO: 6813 - DNA, 20 bp, Artificial Sequence
  chemically synthesized
aggcacatgtgttcttgggt

SEQ ID NO: 6814 - DNA, 20 bp, Artificial Sequence
  chemically synthesized
ggcacatgtgttcttgggtt

SEQ ID NO: 6815 - DNA, 20 bp, Artificial Sequence
  chemically synthesized
cacatgtgttcttgggttgg

SEQ ID NO: 6816 - DNA, 20 bp, Artificial Sequence
  chemically synthesized
acatgtgttcttgggttggg

SEQ ID NO: 6817 - DNA, 20 bp, Artificial Sequence
  chemically synthesized
atgtgttcttgggttgggag

SEQ ID NO: 6818 - DNA, 20 bp, Artificial Sequence
  chemically synthesized
tgttcttgggttgggaggag

SEQ ID NO: 6819 - DNA, 20 bp, Artificial Sequence
  chemically synthesized
gttcttgggttgggaggaga

SEQ ID NO: 6820 - DNA, 20 bp, Artificial Sequence
  chemically synthesized
ttcttgggttgggaggagaa

SEQ ID NO: 6821 - DNA, 20 bp, Artificial Sequence
  chemically synthesized
ttgggttgggaggagaaggg

SEQ ID NO: 6822 - DNA, 20 bp, Artificial Sequence
  chemically synthesized
tgggttgggaggagaagggc

SEQ ID NO: 6823 - DNA, 20 bp, Artificial Sequence
  chemically synthesized
gttgggaggagaagggcagg

SEQ ID NO: 6824 - DNA, 20 bp, Artificial Sequence
  chemically synthesized
aagggcaggcagttatcttc

SEQ ID NO: 6825 - DNA, 20 bp, Artificial Sequence
  chemically synthesized
tccagatctccccacacctc

SEQ ID NO: 6826 - DNA, 20 bp, Artificial Sequence
  chemically synthesized
cctctggcacatgcctttcc

SEQ ID NO: 6827 - DNA, 20 bp, Artificial Sequence
  chemically synthesized
ctctggcacatgcctttcct

SEQ ID NO: 6828 - DNA, 20 bp, Artificial Sequence
  chemically synthesized
tctggcacatgcctttcctg

SEQ ID NO: 6829 - DNA, 20 bp, Artificial Sequence
  chemically synthesized
acatgcctttcctggggtcc

SEQ ID NO: 6830 - DNA, 20 bp, Artificial Sequence
  chemically synthesized
catgcctttcctggggtcct

SEQ ID NO: 6831 - DNA, 20 bp, Artificial Sequence
  chemically synthesized
atgcctttcctggggtcctg

SEQ ID NO: 6832 - DNA, 20 bp, Artificial Sequence
  chemically synthesized
cctttcctggggtcctgggg

SEQ ID NO: 6833 - DNA, 20 bp, Artificial Sequence
  chemically synthesized
tcctggggtcctggggtaga

SEQ ID NO: 6834 - DNA, 20 bp, Artificial Sequence
  chemically synthesized
cctggggtcctggggtagac

SEQ ID NO: 6835 - DNA, 20 bp, Artificial Sequence
  chemically synthesized
ggggtcctggggtagacagg

SEQ ID NO: 6836 - DNA, 20 bp, Artificial Sequence
  chemically synthesized
gggtcctggggtagacagga

SEQ ID NO: 6837 - DNA, 20 bp, Artificial Sequence
  chemically synthesized
cctggggtagacaggaaggt

SEQ ID NO: 6838 - DNA, 20 bp, Artificial Sequence
  chemically synthesized
ctggggtagacaggaaggtg

SEQ ID NO: 6839 - DNA, 20 bp, Artificial Sequence
  chemically synthesized
ggtagacaggaaggtgaggt

SEQ ID NO: 6840 - DNA, 20 bp, Artificial Sequence
  chemically synthesized
gtagacaggaaggtgaggtg

SEQ ID NO: 6841 - DNA, 20 bp, Artificial Sequence
  chemically synthesized
tagacaggaaggtgaggtga

SEQ ID NO: 6842 - DNA, 20 bp, Artificial Sequence
  chemically synthesized
ggaaggtgaggtgagggaac

SEQ ID NO: 6843 - DNA, 20 bp, Artificial Sequence
  chemically synthesized
aggtgaggtgagggaacaag

SEQ ID NO: 6844 - DNA, 20 bp, Artificial Sequence
  chemically synthesized
ggtgaggtgagggaacaagc

SEQ ID NO: 6845 - DNA, 20 bp, Artificial Sequence
  chemically synthesized
gtgaggtgagggaacaagcg

SEQ ID NO: 6846 - DNA, 20 bp, Artificial Sequence
  chemically synthesized
tgaggtgagggaacaagcgg

SEQ ID NO: 6847 - DNA, 20 bp, Artificial Sequence
  chemically synthesized
gagggaacaagcgggggtgt

SEQ ID NO: 6848 - DNA, 20 bp, Artificial Sequence
  chemically synthesized
agggaacaagcgggggtgtc

SEQ ID NO: 6849 - DNA, 20 bp, Artificial Sequence
  chemically synthesized
cgggggtgtcgggccctcct

SEQ ID NO: 6850 - DNA, 20 bp, Artificial Sequence
  chemically synthesized
ccctcctcagtccctgttca

SEQ ID NO: 6851 - DNA, 20 bp, Artificial Sequence
  chemically synthesized
ctcctcagtccctgttcaca

SEQ ID NO: 6852 - DNA, 20 bp, Artificial Sequence
  chemically synthesized
ctcagtccctgttcacagag

SEQ ID NO: 6853 - DNA, 20 bp, Artificial Sequence
  chemically synthesized
tcagtccctgttcacagagt

SEQ ID NO: 6854 - DNA, 20 bp, Artificial Sequence
  chemically synthesized
ccctgttcacagagtgggtg

SEQ ID NO: 6855 - DNA, 20 bp, Artificial Sequence
  chemically synthesized
tgttcacagagtgggtgcgg

SEQ ID NO: 6856 - DNA, 20 bp, Artificial Sequence
  chemically synthesized
ttcacagagtgggtgcggca

SEQ ID NO: 6857 - DNA, 20 bp, Artificial Sequence
  chemically synthesized
tgggtgcggcagagacctca

SEQ ID NO: 6858 - DNA, 20 bp, Artificial Sequence
  chemically synthesized
gggtgcggcagagacctcaa

SEQ ID NO: 6859 - DNA, 20 bp, Artificial Sequence
  chemically synthesized
ggtgcggcagagacctcaaa

SEQ ID NO: 6860 - DNA, 20 bp, Artificial Sequence
  chemically synthesized
cggcagagacctcaaaggga

SEQ ID NO: 6861 - DNA, 20 bp, Artificial Sequence
  chemically synthesized
gcagagacctcaaagggaca

SEQ ID NO: 6862 - DNA, 20 bp, Artificial Sequence
  chemically synthesized
caaagggacagagcaatcat

SEQ ID NO: 6863 - DNA, 20 bp, Artificial Sequence
  chemically synthesized
ggacagagcaatcatgagct

SEQ ID NO: 6864 - DNA, 20 bp, Artificial Sequence
  chemically synthesized
agagcaatcatgagctgaga

SEQ ID NO: 6865 - DNA, 20 bp, Artificial Sequence
  chemically synthesized
agcaatcatgagctgagaca

SEQ ID NO: 6866 - DNA, 20 bp, Artificial Sequence
  chemically synthesized
gcaatcatgagctgagacag

SEQ ID NO: 6867 - DNA, 20 bp, Artificial Sequence
  chemically synthesized
caatcatgagctgagacaga

SEQ ID NO: 6868 - DNA, 20 bp, Artificial Sequence
  chemically synthesized
aatcatgagctgagacagag

SEQ ID NO: 6869 - DNA, 20 bp, Artificial Sequence
  chemically synthesized
atcatgagctgagacagagg

SEQ ID NO: 6870 - DNA, 20 bp, Artificial Sequence
  chemically synthesized
catgagctgagacagagggg

SEQ ID NO: 6871 - DNA, 20 bp, Artificial Sequence
  chemically synthesized
gctgagacagagggggagca

SEQ ID NO: 6872 - DNA, 20 bp, Artificial Sequence
  chemically synthesized
acagagggggagcaaagccg

SEQ ID NO: 6873 - DNA, 20 bp, Artificial Sequence
  chemically synthesized
gcacacttgcctttcaaaaa

SEQ ID NO: 6874 - DNA, 20 bp, Artificial Sequence
  chemically synthesized
caaaaatggatttcctctcc

SEQ ID NO: 6875 - DNA, 20 bp, Artificial Sequence
  chemically synthesized
aaaaatggatttcctctcct

SEQ ID NO: 6876 - DNA, 20 bp, Artificial Sequence
  chemically synthesized
ggatttcctctcctgggatt

SEQ ID NO: 6877 - DNA, 20 bp, Artificial Sequence
  chemically synthesized
tctcctgggattcagcctgc

SEQ ID NO: 6878 - DNA, 20 bp, Artificial Sequence
  chemically synthesized
ggattcagcctgcgagtgcc

SEQ ID NO: 6879 - DNA, 20 bp, Artificial Sequence
  chemically synthesized
tgcctggcccctcaccttga

SEQ ID NO: 6880 - DNA, 20 bp, Artificial Sequence
  chemically synthesized
tggcccctcaccttgatgga

SEQ ID NO: 6881 - DNA, 20 bp, Artificial Sequence
  chemically synthesized
ggcccctcaccttgatggaa

SEQ ID NO: 6882 - DNA, 20 bp, Artificial Sequence
  chemically synthesized
cctcaccttgatggaaagga

SEQ ID NO: 6883 - DNA, 20 bp, Artificial Sequence
  chemically synthesized
aaggatggtcattttcctcc

SEQ ID NO: 6884 - DNA, 20 bp, Artificial Sequence
  chemically synthesized
tggtcattttcctccgagct

SEQ ID NO: 6885 - DNA, 20 bp, Artificial Sequence
  chemically synthesized
tttcctccgagctcagctgc

SEQ ID NO: 6886 - DNA, 20 bp, Artificial Sequence
  chemically synthesized
tcagctgctggatatcttga

SEQ ID NO: 6887 - DNA, 20 bp, Artificial Sequence
  chemically synthesized
ctggatatcttgaaagtcct

SEQ ID NO: 6888 - DNA, 20 bp, Artificial Sequence
  chemically synthesized
ttgaaagtccttggccatga

SEQ ID NO: 6889 - DNA, 20 bp, Artificial Sequence
  chemically synthesized
tgaaagtccttggccatgat

SEQ ID NO: 6890 - DNA, 20 bp, Artificial Sequence
  chemically synthesized
gaaagtccttggccatgatg

SEQ ID NO: 6891 - DNA, 20 bp, Artificial Sequence
  chemically synthesized
tccttggccatgatggggcc

SEQ ID NO: 6892 - DNA, 20 bp, Artificial Sequence
  chemically synthesized
ccttggccatgatggggccc

SEQ ID NO: 6893 - DNA, 20 bp, Artificial Sequence
  chemically synthesized
ggccatgatggggcccgggc

SEQ ID NO: 6894 - DNA, 20 bp, Artificial Sequence
  chemically synthesized
ccatgatggggcccgggctg

SEQ ID NO: 6895 - DNA, 20 bp, Artificial Sequence
  chemically synthesized
gatggggcccgggctggagc

SEQ ID NO: 6896 - DNA, 20 bp, Artificial Sequence
  chemically synthesized
tggggcccgggctggagctg

SEQ ID NO: 6897 - DNA, 20 bp, Artificial Sequence
  chemically synthesized
gcccgggctggagctggagc

SEQ ID NO: 6898 - DNA, 20 bp, Artificial Sequence
  chemically synthesized
ccgggctggagctggagctg

SEQ ID NO: 6899 - DNA, 20 bp, Artificial Sequence
  chemically synthesized
gctggagctggagctggagc

SEQ ID NO: 6900 - DNA, 20 bp, Artificial Sequence
  chemically synthesized
ctggagctggagctggagct

SEQ ID NO: 6901 - DNA, 20 bp, Artificial Sequence
  chemically synthesized
agctggagctggagctgggc

SEQ ID NO: 6902 - DNA, 20 bp, Artificial Sequence
  chemically synthesized
gctggagctggagctgggct

SEQ ID NO: 6903 - DNA, 20 bp, Artificial Sequence
  chemically synthesized
gagctggagctgggctgggc

SEQ ID NO: 6904 - DNA, 20 bp, Artificial Sequence
  chemically synthesized
agctggagctgggctgggct

SEQ ID NO: 6905 - DNA, 20 bp, Artificial Sequence
  chemically synthesized
gagctgggctgggctgggct

SEQ ID NO: 6906 - DNA, 20 bp, Artificial Sequence
  chemically synthesized
agctgggctgggctgggctg

SEQ ID NO: 6907 - DNA, 20 bp, Artificial Sequence
  chemically synthesized
ggctgggctgaggttgctct

SEQ ID NO: 6908 - DNA, 20 bp, Artificial Sequence
  chemically synthesized
gctgggctgaggttgctctg

SEQ ID NO: 6909 - DNA, 20 bp, Artificial Sequence
  chemically synthesized
ctgggctgaggttgctctga

SEQ ID NO: 6910 - DNA, 20 bp, Artificial Sequence
  chemically synthesized
gctgaggttgctctgagggc

SEQ ID NO: 6911 - DNA, 20 bp, Artificial Sequence
  chemically synthesized
ctgaggttgctctgagggct

SEQ ID NO: 6912 - DNA, 20 bp, Artificial Sequence
  chemically synthesized
tgaggttgctctgagggctg

SEQ ID NO: 6913 - DNA, 20 bp, Artificial Sequence
  chemically synthesized
gttgctctgagggctggggc

SEQ ID NO: 6914 - DNA, 20 bp, Artificial Sequence
  chemically synthesized
ttgctctgagggctggggct

SEQ ID NO: 6915 - DNA, 20 bp, Artificial Sequence
  chemically synthesized
tgctctgagggctggggctg

SEQ ID NO: 6916 - DNA, 20 bp, Artificial Sequence
  chemically synthesized
tctgagggctggggctgggg

SEQ ID NO: 6917 - DNA, 20 bp, Artificial Sequence
  chemically synthesized
tgagggctggggctggggca

SEQ ID NO: 6918 - DNA, 20 bp, Artificial Sequence
  chemically synthesized
gagggctggggctggggcag

SEQ ID NO: 6919 - DNA, 20 bp, Artificial Sequence
  chemically synthesized
ctggggctggggcagaggtg

SEQ ID NO: 6920 - DNA, 20 bp, Artificial Sequence
  chemically synthesized
ggcagaggtgcagattcacg

SEQ ID NO: 6921 - DNA, 20 bp, Artificial Sequence
  chemically synthesized
cagaggtgcagattcacgtg

SEQ ID NO: 6922 - DNA, 20 bp, Artificial Sequence
  chemically synthesized
agaggtgcagattcacgtgg

SEQ ID NO: 6923 - DNA, 20 bp, Artificial Sequence
  chemically synthesized
cagattcacgtggaggttga

SEQ ID NO: 6924 - DNA, 20 bp, Artificial Sequence
  chemically synthesized
attcacgtggaggttgatgg

SEQ ID NO: 6925 - DNA, 20 bp, Artificial Sequence
  chemically synthesized
ttcacgtggaggttgatggt

SEQ ID NO: 6926 - DNA, 20 bp, Artificial Sequence
  chemically synthesized
cgtggaggttgatggtggga

SEQ ID NO: 6927 - DNA, 20 bp, Artificial Sequence
  chemically synthesized
gttgatggtgggatggaacg

SEQ ID NO: 6928 - DNA, 20 bp, Artificial Sequence
  chemically synthesized
ttgatggtgggatggaacgc

SEQ ID NO: 6929 - DNA, 20 bp, Artificial Sequence
  chemically synthesized
tgatggtgggatggaacgca

SEQ ID NO: 6930 - DNA, 20 bp, Artificial Sequence
  chemically synthesized
ggtgggatggaacgcagggt

SEQ ID NO: 6931 - DNA, 20 bp, Artificial Sequence
  chemically synthesized
tgggatggaacgcagggtcg

SEQ ID NO: 6932 - DNA, 20 bp, Artificial Sequence
  chemically synthesized
gggatggaacgcagggtcgg

SEQ ID NO: 6933 - DNA, 20 bp, Artificial Sequence
  chemically synthesized
ggatggaacgcagggtcgga

SEQ ID NO: 6934 - DNA, 20 bp, Artificial Sequence
  chemically synthesized
gatggaacgcagggtcggag

SEQ ID NO: 6935 - DNA, 20 bp, Artificial Sequence
  chemically synthesized
aacgcagggtcggaggggtt

SEQ ID NO: 6936 - DNA, 20 bp, Artificial Sequence
  chemically synthesized
acgcagggtcggaggggttc

SEQ ID NO: 6937 - DNA, 20 bp, Artificial Sequence
  chemically synthesized
cgcagggtcggaggggttcg

SEQ ID NO: 6938 - DNA, 20 bp, Artificial Sequence
  chemically synthesized
agggtcggaggggttcgggg

SEQ ID NO: 6939 - DNA, 20 bp, Artificial Sequence
  chemically synthesized
gtcggaggggttcggggtgg

SEQ ID NO: 6940 - DNA, 20 bp, Artificial Sequence
  chemically synthesized
aggggttcggggtggtggcc

SEQ ID NO: 6941 - DNA, 20 bp, Artificial Sequence
  chemically synthesized
ggggttcggggtggtggcct

SEQ ID NO: 6942 - DNA, 20 bp, Artificial Sequence
  chemically synthesized
gttcggggtggtggcctggg

SEQ ID NO: 6943 - DNA, 20 bp, Artificial Sequence
  chemically synthesized
ttcggggtggtggcctgggt

SEQ ID NO: 6944 - DNA, 20 bp, Artificial Sequence
  chemically synthesized
tggtggcctgggtaggatct

SEQ ID NO: 6945 - DNA, 20 bp, Artificial Sequence
  chemically synthesized
ggtggcctgggtaggatctg

SEQ ID NO: 6946 - DNA, 20 bp, Artificial Sequence
  chemically synthesized
gcctgggtaggatctgaggt

SEQ ID NO: 6947 - DNA, 20 bp, Artificial Sequence
  chemically synthesized
tgccaacctcagatcctacc

SEQ ID NO: 6948 - DNA, 20 bp, Artificial Sequence
  chemically synthesized
gccaacctcagatcctaccc

SEQ ID NO: 6949 - DNA, 20 bp, Artificial Sequence
  chemically synthesized
gtgaatctgcacctctgccc

SEQ ID NO: 6950 - DNA, 20 bp, Artificial Sequence
  chemically synthesized
ctgcacctctgccccagccc

SEQ ID NO: 6951 - DNA, 20 bp, Artificial Sequence
  chemically synthesized
tctgccccagccccagccct

SEQ ID NO: 6952 - DNA, 20 bp, Artificial Sequence
  chemically synthesized
tgccccagccccagccctca

SEQ ID NO: 6953 - DNA, 20 bp, Artificial Sequence
  chemically synthesized
cccagccctcagagcaacct

SEQ ID NO: 6954 - DNA, 20 bp, Artificial Sequence
  chemically synthesized
ccctcagagcaacctcagcc

SEQ ID NO: 6955 - DNA, 20 bp, Artificial Sequence
  chemically synthesized
agagcaacctcagcccagcc

SEQ ID NO: 6956 - DNA, 20 bp, Artificial Sequence
  chemically synthesized
aacctcagcccagcccagcc

SEQ ID NO: 6957 - DNA, 20 bp, Artificial Sequence
  chemically synthesized
agcccagcccagcccagctc

SEQ ID NO: 6958 - DNA, 20 bp, Artificial Sequence
  chemically synthesized
gcccagcccagctccagctc

SEQ ID NO: 6959 - DNA, 20 bp, Artificial Sequence
  chemically synthesized
cccagctccagctccagctc

SEQ ID NO: 6960 - DNA, 20 bp, Artificial Sequence
  chemically synthesized
ctccagctccagctccagcc

SEQ ID NO: 6961 - DNA, 20 bp, Artificial Sequence
  chemically synthesized
tccagctccagctccagccc

SEQ ID NO: 6962 - DNA, 20 bp, Artificial Sequence
  chemically synthesized
ctccagcccgggccccatca

SEQ ID NO: 6963 - DNA, 20 bp, Artificial Sequence
  chemically synthesized
gcccgggccccatcatggcc

SEQ ID NO: 6964 - DNA, 20 bp, Artificial Sequence
  chemically synthesized
cccgggccccatcatggcca

SEQ ID NO: 6965 - DNA, 20 bp, Artificial Sequence
  chemically synthesized
catcatggccaaggactttc

SEQ ID NO: 6966 - DNA, 20 bp, Artificial Sequence
  chemically synthesized
ccaaggactttcaagatatc

SEQ ID NO: 6967 - DNA, 20 bp, Artificial Sequence
  chemically synthesized
aggactttcaagatatccag

SEQ ID NO: 6968 - DNA, 20 bp, Artificial Sequence
  chemically synthesized
tttcaagatatccagcagct

SEQ ID NO: 6969 - DNA, 20 bp, Artificial Sequence
  chemically synthesized
agatatccagcagctgagct

SEQ ID NO: 6970 - DNA, 20 bp, Artificial Sequence
  chemically synthesized
atatccagcagctgagctcg

SEQ ID NO: 6971 - DNA, 20 bp, Artificial Sequence
  chemically synthesized
tatccagcagctgagctcgg

SEQ ID NO: 6972 - DNA, 20 bp, Artificial Sequence
  chemically synthesized
aaatgaccatcctttccatc

SEQ ID NO: 6973 - DNA, 20 bp, Artificial Sequence
  chemically synthesized
aatgaccatcctttccatca

SEQ ID NO: 6974 - DNA, 20 bp, Artificial Sequence
  chemically synthesized
accatcctttccatcaaggt

SEQ ID NO: 6975 - DNA, 20 bp, Artificial Sequence
  chemically synthesized
ccatcctttccatcaaggtg

SEQ ID NO: 6976 - DNA, 20 bp, Artificial Sequence
  chemically synthesized
catcctttccatcaaggtga

SEQ ID NO: 6977 - DNA, 20 bp, Artificial Sequence
  chemically synthesized
atcctttccatcaaggtgag

SEQ ID NO: 6978 - DNA, 20 bp, Artificial Sequence
  chemically synthesized
tttccatcaaggtgaggggc

SEQ ID NO: 6979 - DNA, 20 bp, Artificial Sequence
  chemically synthesized
ttccatcaaggtgaggggcc

SEQ ID NO: 6980 - DNA, 20 bp, Artificial Sequence
  chemically synthesized
ggtgaggggccaggcactcg

SEQ ID NO: 6981 - DNA, 20 bp, Artificial Sequence
  chemically synthesized
gtgaggggccaggcactcgc

SEQ ID NO: 6982 - DNA, 20 bp, Artificial Sequence
  chemically synthesized
ggcactcgcaggctgaatcc

SEQ ID NO: 6983 - DNA, 20 bp, Artificial Sequence
  chemically synthesized
gcactcgcaggctgaatccc

SEQ ID NO: 6984 - DNA, 20 bp, Artificial Sequence
  chemically synthesized
actcgcaggctgaatcccag

SEQ ID NO: 6985 - DNA, 20 bp, Artificial Sequence
  chemically synthesized
tcgcaggctgaatcccagga

SEQ ID NO: 6986 - DNA, 20 bp, Artificial Sequence
  chemically synthesized
cgcaggctgaatcccaggag

SEQ ID NO: 6987 - DNA, 20 bp, Artificial Sequence
  chemically synthesized
gagaggaaatccatttttga

SEQ ID NO: 6988 - DNA, 20 bp, Artificial Sequence
  chemically synthesized
agaggaaatccatttttgaa

SEQ ID NO: 6989 - DNA, 20 bp, Artificial Sequence
  chemically synthesized
gaaatccatttttgaaaggc

SEQ ID NO: 6990 - DNA, 20 bp, Artificial Sequence
  chemically synthesized
atttttgaaaggcaagtgtg

SEQ ID NO: 6991 - DNA, 20 bp, Artificial Sequence
  chemically synthesized
aggcaagtgtgcagtttctg

SEQ ID NO: 6992 - DNA, 20 bp, Artificial Sequence
  chemically synthesized
gctttgctccccctctgtct

SEQ ID NO: 6993 - DNA, 20 bp, Artificial Sequence
  chemically synthesized
catgattgctctgtcccttt

SEQ ID NO: 6994 - DNA, 20 bp, Artificial Sequence
  chemically synthesized
atgattgctctgtccctttg

SEQ ID NO: 6995 - DNA, 20 bp, Artificial Sequence
  chemically synthesized
tgccgcacccactctgtgaa

SEQ ID NO: 6996 - DNA, 20 bp, Artificial Sequence
  chemically synthesized
gccgcacccactctgtgaac

SEQ ID NO: 6997 - DNA, 20 bp, Artificial Sequence
  chemically synthesized
ccgcacccactctgtgaaca

SEQ ID NO: 6998 - DNA, 20 bp, Artificial Sequence
  chemically synthesized
ccactctgtgaacagggact

SEQ ID NO: 6999 - DNA, 20 bp, Artificial Sequence
  chemically synthesized
cactctgtgaacagggactg

SEQ ID NO: 7000 - DNA, 20 bp, Artificial Sequence
  chemically synthesized
ctctgtgaacagggactgag

SEQ ID NO: 7001 - DNA, 20 bp, Artificial Sequence
  chemically synthesized
tctgtgaacagggactgagg

SEQ ID NO: 7002 - DNA, 20 bp, Artificial Sequence
  chemically synthesized
ctgtgaacagggactgagga

SEQ ID NO: 7003 - DNA, 20 bp, Artificial Sequence
  chemically synthesized
cctcaccttcctgtctaccc

SEQ ID NO: 7004 - DNA, 20 bp, Artificial Sequence
  chemically synthesized
ctcaccttcctgtctacccc

SEQ ID NO: 7005 - DNA, 20 bp, Artificial Sequence
  chemically synthesized
tcctgtctaccccaggaccc

SEQ ID NO: 7006 - DNA, 20 bp, Artificial Sequence
  chemically synthesized
cctgtctaccccaggacccc

SEQ ID NO: 7007 - DNA, 20 bp, Artificial Sequence
  chemically synthesized
tctaccccaggaccccagga

SEQ ID NO: 7008 - DNA, 20 bp, Artificial Sequence
  chemically synthesized
ctaccccaggaccccaggaa

SEQ ID NO: 7009 - DNA, 20 bp, Artificial Sequence
  chemically synthesized
accccaggaaaggcatgtgc

SEQ ID NO: 7010 - DNA, 20 bp, Artificial Sequence
  chemically synthesized
cccaggaaaggcatgtgcca

SEQ ID NO: 7011 - DNA, 20 bp, Artificial Sequence
  chemically synthesized
ccaggaaaggcatgtgccag

SEQ ID NO: 7012 - DNA, 20 bp, Artificial Sequence
  chemically synthesized
aaaggcatgtgccagaggtg

SEQ ID NO: 7013 - DNA, 20 bp, Artificial Sequence
  chemically synthesized
aaggcatgtgccagaggtgt

SEQ ID NO: 7014 - DNA, 20 bp, Artificial Sequence
  chemically synthesized
aggcatgtgccagaggtgtg

SEQ ID NO: 7015 - DNA, 20 bp, Artificial Sequence
  chemically synthesized
gcatgtgccagaggtgtggg

SEQ ID NO: 7016 - DNA, 20 bp, Artificial Sequence
  chemically synthesized
gccagaggtgtggggagatc

SEQ ID NO: 7017 - DNA, 20 bp, Artificial Sequence
  chemically synthesized
agaggtgtggggagatctgg

SEQ ID NO: 7018 - DNA, 20 bp, Artificial Sequence
  chemically synthesized
tgcccttctcctcccaaccc

SEQ ID NO: 7019 - DNA, 20 bp, Artificial Sequence
  chemically synthesized
gtgtgcacgtatgtgcatat

SEQ ID NO: 7020 - DNA, 20 bp, Artificial Sequence
  chemically synthesized
tgtgcacgtatgtgcatatg

SEQ ID NO: 7021 - DNA, 20 bp, Artificial Sequence
  chemically synthesized
gtatgtgcatatgaggaatg

SEQ ID NO: 7022 - DNA, 20 bp, Artificial Sequence
  chemically synthesized
gcatatgaggaatgcagatt

SEQ ID NO: 7023 - DNA, 20 bp, Artificial Sequence
  chemically synthesized
atgaggaatgcagattcagc

SEQ ID NO: 7024 - DNA, 20 bp, Artificial Sequence
  chemically synthesized
tgaggaatgcagattcagct

SEQ ID NO: 7025 - DNA, 20 bp, Artificial Sequence
  chemically synthesized
gggactctgtgtgtgtgtgt

SEQ ID NO: 7026 - DNA, 20 bp, Artificial Sequence
  chemically synthesized
gtgtgtgtgtatatgtgcgc

SEQ ID NO: 7027 - DNA, 20 bp, Artificial Sequence
  chemically synthesized
gtgtgtgtatatgtgcgcga

SEQ ID NO: 7028 - DNA, 20 bp, Artificial Sequence
  chemically synthesized
tgtgtgtatgtcgtgtatgt

SEQ ID NO: 7029 - DNA, 20 bp, Artificial Sequence
  chemically synthesized
tgtgtatgtcgtgtatgtga

SEQ ID NO: 7030 - DNA, 20 bp, Artificial Sequence
  chemically synthesized
gtgtatgtcgtgtatgtgag

SEQ ID NO: 7031 - DNA, 20 bp, Artificial Sequence
  chemically synthesized
tgtatgtcgtgtatgtgaga

SEQ ID NO: 7032 - DNA, 20 bp, Artificial Sequence
  chemically synthesized
tgagagggtatgttgtgtgt

SEQ ID NO: 7033 - DNA, 20 bp, Artificial Sequence
  chemically synthesized
agagggtatgttgtgtgtga

SEQ ID NO: 7034 - DNA, 20 bp, Artificial Sequence
  chemically synthesized
gttgtgtgtgtatgttgtgt

SEQ ID NO: 7035 - DNA, 20 bp, Artificial Sequence
  chemically synthesized
gttgtgtgtatcttgtgtgt

SEQ ID NO: 7036 - DNA, 20 bp, Artificial Sequence
  chemically synthesized
tgcatgtgtgtatgttgtgc

SEQ ID NO: 7037 - DNA, 20 bp, Artificial Sequence
  chemically synthesized
cgagtgtatgttgtgtatgt

SEQ ID NO: 7038 - DNA, 20 bp, Artificial Sequence
  chemically synthesized
tgtgtatgtatgttgtgtat

SEQ ID NO: 7039 - DNA, 20 bp, Artificial Sequence
  chemically synthesized
gttgtgtgtgtgtattgtgt

SEQ ID NO: 7040 - DNA, 20 bp, Artificial Sequence
  chemically synthesized
tgtatgtttgtgtgttgtgt

SEQ ID NO: 7041 - DNA, 20 bp, Artificial Sequence
  chemically synthesized
tgcgtgtgtgtatgttgtgc

SEQ ID NO: 7042 - DNA, 20 bp, Artificial Sequence
  chemically synthesized
gtgttgtgtgtgtatgttgt

SEQ ID NO: 7043 - DNA, 20 bp, Artificial Sequence
  chemically synthesized
gttatgtatgttgtgtgtgt

SEQ ID NO: 7044 - DNA, 20 bp, Artificial Sequence
  chemically synthesized
tgtgtgtgagtgtgttgcgt

SEQ ID NO: 7045 - DNA, 20 bp, Artificial Sequence
  chemically synthesized
tgttgcgtgagtgtgtgtgt

SEQ ID NO: 7046 - DNA, 20 bp, Artificial Sequence
  chemically synthesized
tgtgtgtgtgtgtgtgtgtg

SEQ ID NO: 7047 - DNA, 20 bp, Artificial Sequence
  chemically synthesized
tgtgtgtgtgtgtgtgtgta

SEQ ID NO: 7048 - DNA, 20 bp, Artificial Sequence
  chemically synthesized
gtgtgtgtgtgtgtgtgtag

SEQ ID NO: 7049 - DNA, 20 bp, Artificial Sequence
  chemically synthesized
tgtgtgtgtgtgtgtagagg

SEQ ID NO: 7050 - DNA, 20 bp, Artificial Sequence
  chemically synthesized
gtgtgtgtgtgtgtagaggt

SEQ ID NO: 7051 - DNA, 20 bp, Artificial Sequence
  chemically synthesized
tgtgtgtgtgtgtagaggtg

SEQ ID NO: 7052 - DNA, 20 bp, Artificial Sequence
  chemically synthesized
tgtgtgtgtagaggtggggt

SEQ ID NO: 7053 - DNA, 20 bp, Artificial Sequence
  chemically synthesized
tgtgtagaggtggggtgagt

SEQ ID NO: 7054 - DNA, 20 bp, Artificial Sequence
  chemically synthesized
gtgtagaggtggggtgagtt

SEQ ID NO: 7055 - DNA, 20 bp, Artificial Sequence
  chemically synthesized
agaggtggggtgagttggga

SEQ ID NO: 7056 - DNA, 20 bp, Artificial Sequence
  chemically synthesized
gaggtggggtgagttgggat

SEQ ID NO: 7057 - DNA, 20 bp, Artificial Sequence
  chemically synthesized
gtggggtgagttgggatggg

SEQ ID NO: 7058 - DNA, 20 bp, Artificial Sequence
  chemically synthesized
tggggtgagttgggatgggt

SEQ ID NO: 7059 - DNA, 20 bp, Artificial Sequence
  chemically synthesized
ggggtgagttgggatgggtg

SEQ ID NO: 7060 - DNA, 20 bp, Artificial Sequence
  chemically synthesized
gggtgagttgggatgggtgg

SEQ ID NO: 7061 - DNA, 20 bp, Artificial Sequence
  chemically synthesized
ttgggatgggtgggggacgt

SEQ ID NO: 7062 - DNA, 20 bp, Artificial Sequence
  chemically synthesized
atgggtgggggacgtgagca

SEQ ID NO: 7063 - DNA, 20 bp, Artificial Sequence
  chemically synthesized
gggtgggggacgtgagcaca

SEQ ID NO: 7064 - DNA, 20 bp, Artificial Sequence
  chemically synthesized
gtgggggacgtgagcacaga

SEQ ID NO: 7065 - DNA, 20 bp, Artificial Sequence
  chemically synthesized
acgtgagcacagagagatcc

SEQ ID NO: 7066 - DNA, 20 bp, Artificial Sequence
  chemically synthesized
tgagcacagagagatcctgg

SEQ ID NO: 7067 - DNA, 20 bp, Artificial Sequence
  chemically synthesized
ccctgctcctctcatctccc

SEQ ID NO: 7068 - DNA, 20 bp, Artificial Sequence
  chemically synthesized
catctcccaagacccttccc

SEQ ID NO: 7069 - DNA, 20 bp, Artificial Sequence
  chemically synthesized
tctgtaataaatcttgactg

SEQ ID NO: 7070 - DNA, 20 bp, Artificial Sequence
  chemically synthesized
ctgtaataaatcttgactga

SEQ ID NO: 7071 - DNA, 20 bp, Artificial Sequence
  chemically synthesized
aaatcttgactgaaggacct

SEQ ID NO: 7072 - DNA, 20 bp, Artificial Sequence
  chemically synthesized
actgaaggacctaagtatct

SEQ ID NO: 7073 - DNA, 20 bp, Artificial Sequence
  chemically synthesized
tatcttggacattttttttt

SEQ ID NO: 7074 - DNA, 20 bp, Artificial Sequence
  chemically synthesized
tcttggacatttttttttta

SEQ ID NO: 7075 - DNA, 20 bp, Artificial Sequence
  chemically synthesized
ggacattttttttttagaga

SEQ ID NO: 7076 - DNA, 20 bp, Artificial Sequence
  chemically synthesized
gacattttttttttagagac

SEQ ID NO: 7077 - DNA, 20 bp, Artificial Sequence
  chemically synthesized
cattttttttttagagacag

SEQ ID NO: 7078 - DNA, 20 bp, Artificial Sequence
  chemically synthesized
tttttttagagacaggagtg

SEQ ID NO: 7079 - DNA, 20 bp, Artificial Sequence
  chemically synthesized
ttttagagacaggagtgtag

SEQ ID NO: 7080 - DNA, 20 bp, Artificial Sequence
  chemically synthesized
tagagacaggagtgtagtgg

SEQ ID NO: 7081 - DNA, 20 bp, Artificial Sequence
  chemically synthesized
agagacaggagtgtagtggc

SEQ ID NO: 7082 - DNA, 20 bp, Artificial Sequence
  chemically synthesized
ggagtgtagtggcaggatca

SEQ ID NO: 7083 - DNA, 20 bp, Artificial Sequence
  chemically synthesized
tcactgcaacctcgaactcc

SEQ ID NO: 7084 - DNA, 20 bp, Artificial Sequence
  chemically synthesized
cactgcaacctcgaactcct

SEQ ID NO: 7085 - DNA, 20 bp, Artificial Sequence
  chemically synthesized
aacctcgaactcctgggctc

SEQ ID NO: 7086 - DNA, 20 bp, Artificial Sequence
  chemically synthesized
ctcaagccatcctcccacct

SEQ ID NO: 7087 - DNA, 20 bp, Artificial Sequence
  chemically synthesized
tcctcccacctcagcctccc

SEQ ID NO: 7088 - DNA, 20 bp, Artificial Sequence
  chemically synthesized
tcccacctcagcctcccaag

SEQ ID NO: 7089 - DNA, 20 bp, Artificial Sequence
  chemically synthesized
acctcagcctcccaagtagt

SEQ ID NO: 7090 - DNA, 20 bp, Artificial Sequence
  chemically synthesized
cctcagcctcccaagtagtt

SEQ ID NO: 7091 - DNA, 20 bp, Artificial Sequence
  chemically synthesized
tcccaagtagttaggactta

SEQ ID NO: 7092 - DNA, 20 bp, Artificial Sequence
  chemically synthesized
cccaagtagttaggacttac

SEQ ID NO: 7093 - DNA, 20 bp, Artificial Sequence
  chemically synthesized
caggtgtgcaccactgtgcc

SEQ ID NO: 7094 - DNA, 20 bp, Artificial Sequence
  chemically synthesized
gcaaattaaaaaaaattttt

SEQ ID NO: 7095 - DNA, 20 bp, Artificial Sequence
  chemically synthesized
aaattaaaaaaaatttttta

SEQ ID NO: 7096 - DNA, 20 bp, Artificial Sequence
  chemically synthesized
aaaaaaattttttagagaaa

SEQ ID NO: 7097 - DNA, 20 bp, Artificial Sequence
  chemically synthesized
aaaaaattttttagagaaat

SEQ ID NO: 7098 - DNA, 20 bp, Artificial Sequence
  chemically synthesized
aaaaattttttagagaaatg

SEQ ID NO: 7099 - DNA, 20 bp, Artificial Sequence
  chemically synthesized
tggggtcttgctatgttgcc

SEQ ID NO: 7100 - DNA, 20 bp, Artificial Sequence
  chemically synthesized
ggggtcttgctatgttgccc

SEQ ID NO: 7101 - DNA, 20 bp, Artificial Sequence
  chemically synthesized
tcttgctatgttgcccaggc

SEQ ID NO: 7102 - DNA, 20 bp, Artificial Sequence
  chemically synthesized
tgctatgttgcccaggctgg

SEQ ID NO: 7103 - DNA, 20 bp, Artificial Sequence
  chemically synthesized
gctatgttgcccaggctggt

SEQ ID NO: 7104 - DNA, 20 bp, Artificial Sequence
  chemically synthesized
gttgcccaggctggtgggaa

SEQ ID NO: 7105 - DNA, 20 bp, Artificial Sequence
  chemically synthesized
ggctggtgggaaaagatttt

SEQ ID NO: 7106 - DNA, 20 bp, Artificial Sequence
  chemically synthesized
gctggtgggaaaagatttta

SEQ ID NO: 7107 - DNA, 20 bp, Artificial Sequence
  chemically synthesized
gtgggaaaagattttaaggt

SEQ ID NO: 7108 - DNA, 20 bp, Artificial Sequence
  chemically synthesized
gggaaaagattttaaggtga

SEQ ID NO: 7109 - DNA, 20 bp, Artificial Sequence
  chemically synthesized
gaaaagattttaaggtgaga

SEQ ID NO: 7110 - DNA, 20 bp, Artificial Sequence
  chemically synthesized
ttttaaggtgagagagatct

SEQ ID NO: 7111 - DNA, 20 bp, Artificial Sequence
  chemically synthesized
taaggtgagagagatctgag

SEQ ID NO: 7112 - DNA, 20 bp, Artificial Sequence
  chemically synthesized
gagagagatctgagcagtgc

SEQ ID NO: 7113 - DNA, 20 bp, Artificial Sequence
  chemically synthesized
agagagatctgagcagtgct

SEQ ID NO: 7114 - DNA, 20 bp, Artificial Sequence
  chemically synthesized
gagatctgagcagtgctagg

SEQ ID NO: 7115 - DNA, 20 bp, Artificial Sequence
  chemically synthesized
atctgagcagtgctaggcag

SEQ ID NO: 7116 - DNA, 20 bp, Artificial Sequence
  chemically synthesized
tctgagcagtgctaggcaga

SEQ ID NO: 7117 - DNA, 20 bp, Artificial Sequence
  chemically synthesized
ctgagcagtgctaggcagaa

SEQ ID NO: 7118 - DNA, 20 bp, Artificial Sequence
  chemically synthesized
gcagtgctaggcagaagggc

SEQ ID NO: 7119 - DNA, 20 bp, Artificial Sequence
  chemically synthesized
agtgctaggcagaagggcaa

SEQ ID NO: 7120 - DNA, 20 bp, Artificial Sequence
  chemically synthesized
ctaggcagaagggcaagagc

SEQ ID NO: 7121 - DNA, 20 bp, Artificial Sequence
  chemically synthesized
taggcagaagggcaagagcc

SEQ ID NO: 7122 - DNA, 20 bp, Artificial Sequence
  chemically synthesized
agaagggcaagagccaggaa

SEQ ID NO: 7123 - DNA, 20 bp, Artificial Sequence
  chemically synthesized
aagggcaagagccaggaatg

SEQ ID NO: 7124 - DNA, 20 bp, Artificial Sequence
  chemically synthesized
agggcaagagccaggaatgg

SEQ ID NO: 7125 - DNA, 20 bp, Artificial Sequence
  chemically synthesized
ggcaagagccaggaatggag

SEQ ID NO: 7126 - DNA, 20 bp, Artificial Sequence
  chemically synthesized
agccaggaatggaggagtgt

SEQ ID NO: 7127 - DNA, 20 bp, Artificial Sequence
  chemically synthesized
gccaggaatggaggagtgtc

SEQ ID NO: 7128 - DNA, 20 bp, Artificial Sequence
  chemically synthesized
atggaggagtgtcaggtgtg

SEQ ID NO: 7129 - DNA, 20 bp, Artificial Sequence
  chemically synthesized
tggaggagtgtcaggtgtgt

SEQ ID NO: 7130 - DNA, 20 bp, Artificial Sequence
  chemically synthesized
agtgtcaggtgtgtgggtgc

SEQ ID NO: 7131 - DNA, 20 bp, Artificial Sequence
  chemically synthesized
gtcaggtgtgtgggtgctgg

SEQ ID NO: 7132 - DNA, 20 bp, Artificial Sequence
  chemically synthesized
aggtgtgtgggtgctggtgg

SEQ ID NO: 7133 - DNA, 20 bp, Artificial Sequence
  chemically synthesized
gtgtgtgggtgctggtggtg

SEQ ID NO: 7134 - DNA, 20 bp, Artificial Sequence
  chemically synthesized
gtgggtgctggtggtggagc

SEQ ID NO: 7135 - DNA, 20 bp, Artificial Sequence
  chemically synthesized
tgggtgctggtggtggagcc

SEQ ID NO: 7136 - DNA, 20 bp, Artificial Sequence
  chemically synthesized
ggtggtggagccgggttcca

SEQ ID NO: 7137 - DNA, 20 bp, Artificial Sequence
  chemically synthesized
tggtggagccgggttccatg

SEQ ID NO: 7138 - DNA, 20 bp, Artificial Sequence
  chemically synthesized
ggtggagccgggttccatgg

SEQ ID NO: 7139 - DNA, 20 bp, Artificial Sequence
  chemically synthesized
ggagccgggttccatggagg

SEQ ID NO: 7140 - DNA, 20 bp, Artificial Sequence
  chemically synthesized
gagccgggttccatggaggc

SEQ ID NO: 7141 - DNA, 20 bp, Artificial Sequence
  chemically synthesized
gccgggttccatggaggcag

SEQ ID NO: 7142 - DNA, 20 bp, Artificial Sequence
  chemically synthesized
ccgggttccatggaggcagg

SEQ ID NO: 7143 - DNA, 20 bp, Artificial Sequence
  chemically synthesized
gggttccatggaggcaggag

SEQ ID NO: 7144 - DNA, 20 bp, Artificial Sequence
  chemically synthesized
ttccatggaggcaggaggag

SEQ ID NO: 7145 - DNA, 20 bp, Artificial Sequence
  chemically synthesized
tccatggaggcaggaggagc

SEQ ID NO: 7146 - DNA, 20 bp, Artificial Sequence
  chemically synthesized
ccatggaggcaggaggagca

SEQ ID NO: 7147 - DNA, 20 bp, Artificial Sequence
  chemically synthesized
catggaggcaggaggagcag

SEQ ID NO: 7148 - DNA, 20 bp, Artificial Sequence
  chemically synthesized
aggcaggaggagcaggggct

SEQ ID NO: 7149 - DNA, 20 bp, Artificial Sequence
  chemically synthesized
gcaggaggagcaggggcttg

SEQ ID NO: 7150 - DNA, 20 bp, Artificial Sequence
  chemically synthesized
aggagcaggggcttggagct

SEQ ID NO: 7151 - DNA, 20 bp, Artificial Sequence
  chemically synthesized
ggagcaggggcttggagctt

SEQ ID NO: 7152 - DNA, 20 bp, Artificial Sequence
  chemically synthesized
gcaggggcttggagcttagg

SEQ ID NO: 7153 - DNA, 20 bp, Artificial Sequence
  chemically synthesized
caggggcttggagcttagga

SEQ ID NO: 7154 - DNA, 20 bp, Artificial Sequence
  chemically synthesized
aggggcttggagcttaggaa

SEQ ID NO: 7155 - DNA, 20 bp, Artificial Sequence
  chemically synthesized
ggggcttggagcttaggaag

SEQ ID NO: 7156 - DNA, 20 bp, Artificial Sequence
  chemically synthesized
ttggagcttaggaaggggat

SEQ ID NO: 7157 - DNA, 20 bp, Artificial Sequence
  chemically synthesized
agcttaggaaggggattggt

SEQ ID NO: 7158 - DNA, 20 bp, Artificial Sequence
  chemically synthesized
taggaaggggattggttagc

SEQ ID NO: 7159 - DNA, 20 bp, Artificial Sequence
  chemically synthesized
aggaaggggattggttagct

SEQ ID NO: 7160 - DNA, 20 bp, Artificial Sequence
  chemically synthesized
aggggattggttagctgggc

SEQ ID NO: 7161 - DNA, 20 bp, Artificial Sequence
  chemically synthesized
ttggttagctgggctggaat

SEQ ID NO: 7162 - DNA, 20 bp, Artificial Sequence
  chemically synthesized
tggttagctgggctggaatg

SEQ ID NO: 7163 - DNA, 20 bp, Artificial Sequence
  chemically synthesized
ggttagctgggctggaatga

SEQ ID NO: 7164 - DNA, 20 bp, Artificial Sequence
  chemically synthesized
atgagggactcctcattcct

SEQ ID NO: 7165 - DNA, 20 bp, Artificial Sequence
  chemically synthesized
tgagggactcctcattcctg

SEQ ID NO: 7166 - DNA, 20 bp, Artificial Sequence
  chemically synthesized
ggactcctcattcctgaggc

SEQ ID NO: 7167 - DNA, 20 bp, Artificial Sequence
  chemically synthesized
attcctgaggctggccaacc

SEQ ID NO: 7168 - DNA, 20 bp, Artificial Sequence
  chemically synthesized
ttcctgaggctggccaaccg

SEQ ID NO: 7169 - DNA, 20 bp, Artificial Sequence
  chemically synthesized
tcctgaggctggccaaccga

SEQ ID NO: 7170 - DNA, 20 bp, Artificial Sequence
  chemically synthesized
ctgaggctggccaaccgagg

SEQ ID NO: 7171 - DNA, 20 bp, Artificial Sequence
  chemically synthesized
tgaggctggccaaccgaggg

SEQ ID NO: 7172 - DNA, 20 bp, Artificial Sequence
  chemically synthesized
gaggctggccaaccgaggga

SEQ ID NO: 7173 - DNA, 20 bp, Artificial Sequence
  chemically synthesized
ctggccaaccgagggagggc

SEQ ID NO: 7174 - DNA, 20 bp, Artificial Sequence
  chemically synthesized
aaccgagggagggccggtgc

SEQ ID NO: 7175 - DNA, 20 bp, Artificial Sequence
  chemically synthesized
accgagggagggccggtgct

SEQ ID NO: 7176 - DNA, 20 bp, Artificial Sequence
  chemically synthesized
gagggagggccggtgctggg

SEQ ID NO: 7177 - DNA, 20 bp, Artificial Sequence
  chemically synthesized
agggagggccggtgctgggc

SEQ ID NO: 7178 - DNA, 20 bp, Artificial Sequence
  chemically synthesized
gggagggccggtgctgggca

SEQ ID NO: 7179 - DNA, 20 bp, Artificial Sequence
  chemically synthesized
agggccggtgctgggcaggg

SEQ ID NO: 7180 - DNA, 20 bp, Artificial Sequence
  chemically synthesized
gggccggtgctgggcagggc

SEQ ID NO: 7181 - DNA, 20 bp, Artificial Sequence
  chemically synthesized
ggccggtgctgggcagggca

SEQ ID NO: 7182 - DNA, 20 bp, Artificial Sequence
  chemically synthesized
cggtgctgggcagggcaggg

SEQ ID NO: 7183 - DNA, 20 bp, Artificial Sequence
  chemically synthesized
ggtgctgggcagggcagggc

SEQ ID NO: 7184 - DNA, 20 bp, Artificial Sequence
  chemically synthesized
gtgctgggcagggcagggca

SEQ ID NO: 7185 - DNA, 20 bp, Artificial Sequence
  chemically synthesized
tgctgggcagggcagggcag

SEQ ID NO: 7186 - DNA, 20 bp, Artificial Sequence
  chemically synthesized
gggcagggcagggcagggga

SEQ ID NO: 7187 - DNA, 20 bp, Artificial Sequence
  chemically synthesized
ggcagggcagggcaggggac

SEQ ID NO: 7188 - DNA, 20 bp, Artificial Sequence
  chemically synthesized
cagggcagggcaggggacag

SEQ ID NO: 7189 - DNA, 20 bp, Artificial Sequence
  chemically synthesized
agggcagggcaggggacagg

SEQ ID NO: 7190 - DNA, 20 bp, Artificial Sequence
  chemically synthesized
gggcagggcaggggacagga

SEQ ID NO: 7191 - DNA, 20 bp, Artificial Sequence
  chemically synthesized
agggcaggggacaggaggga

SEQ ID NO: 7192 - DNA, 20 bp, Artificial Sequence
  chemically synthesized
gggcaggggacaggagggat

SEQ ID NO: 7193 - DNA, 20 bp, Artificial Sequence
  chemically synthesized
gcaggggacaggagggatag

SEQ ID NO: 7194 - DNA, 20 bp, Artificial Sequence
  chemically synthesized
caggggacaggagggatagg

SEQ ID NO: 7195 - DNA, 20 bp, Artificial Sequence
  chemically synthesized
agggataggaggtccctccc

SEQ ID NO: 7196 - DNA, 20 bp, Artificial Sequence
  chemically synthesized
gggataggaggtccctcccg

SEQ ID NO: 7197 - DNA, 20 bp, Artificial Sequence
  chemically synthesized
ggtccctcccgaggaccact

SEQ ID NO: 7198 - DNA, 20 bp, Artificial Sequence
  chemically synthesized
gtccctcccgaggaccactc

SEQ ID NO: 7199 - DNA, 20 bp, Artificial Sequence
  chemically synthesized
cgaggaccactcaggaacac

SEQ ID NO: 7200 - DNA, 20 bp, Artificial Sequence
  chemically synthesized
ggaccactcaggaacaccag

SEQ ID NO: 7201 - DNA, 20 bp, Artificial Sequence
  chemically synthesized
agtagcatctcctctctctg

SEQ ID NO: 7202 - DNA, 20 bp, Artificial Sequence
  chemically synthesized
gtagcatctcctctctctgt

SEQ ID NO: 7203 - DNA, 20 bp, Artificial Sequence
  chemically synthesized
tagcatctcctctctctgta

SEQ ID NO: 7204 - DNA, 20 bp, Artificial Sequence
  chemically synthesized
agcatctcctctctctgtag

SEQ ID NO: 7205 - DNA, 20 bp, Artificial Sequence
  chemically synthesized
gcatctcctctctctgtagg

SEQ ID NO: 7206 - DNA, 20 bp, Artificial Sequence
  chemically synthesized
ctcctctctctgtagggggc

SEQ ID NO: 7207 - DNA, 20 bp, Artificial Sequence
  chemically synthesized
tctctctgtagggggctggc

SEQ ID NO: 7208 - DNA, 20 bp, Artificial Sequence
  chemically synthesized
gggctggctggacttcccac

SEQ ID NO: 7209 - DNA, 20 bp, Artificial Sequence
  chemically synthesized
ggctggctggacttcccacc

SEQ ID NO: 7210 - DNA, 20 bp, Artificial Sequence
  chemically synthesized
tggctggacttcccaccagg

SEQ ID NO: 7211 - DNA, 20 bp, Artificial Sequence
  chemically synthesized
cccaccaggcggtgtcccca

SEQ ID NO: 7212 - DNA, 20 bp, Artificial Sequence
  chemically synthesized
ccaccaggcggtgtccccac

SEQ ID NO: 7213 - DNA, 20 bp, Artificial Sequence
  chemically synthesized
ccaggcggtgtccccacagg

SEQ ID NO: 7214 - DNA, 20 bp, Artificial Sequence
  chemically synthesized
aggcggtgtccccacaggca

SEQ ID NO: 7215 - DNA, 20 bp, Artificial Sequence
  chemically synthesized
ggcggtgtccccacaggcag

SEQ ID NO: 7216 - DNA, 20 bp, Artificial Sequence
  chemically synthesized
ctcactctcctctgcaactc

SEQ ID NO: 7217 - DNA, 20 bp, Artificial Sequence
  chemically synthesized
ctgcaactccagtgcccaca

SEQ ID NO: 7218 - DNA, 20 bp, Artificial Sequence
  chemically synthesized
tccagtgcccacacggcacc

SEQ ID NO: 7219 - DNA, 20 bp, Artificial Sequence
  chemically synthesized
cccacacggcacccggtaca

SEQ ID NO: 7220 - DNA, 20 bp, Artificial Sequence
  chemically synthesized
cccggtacatagtgaacact

SEQ ID NO: 7221 - DNA, 20 bp, Artificial Sequence
  chemically synthesized
cggtacatagtgaacactca

SEQ ID NO: 7222 - DNA, 20 bp, Artificial Sequence
  chemically synthesized
gtacatagtgaacactcaga

SEQ ID NO: 7223 - DNA, 20 bp, Artificial Sequence
  chemically synthesized
gtgaacactcagagagaata

SEQ ID NO: 7224 - DNA, 20 bp, Artificial Sequence
  chemically synthesized
tgaacactcagagagaatac

SEQ ID NO: 7225 - DNA, 20 bp, Artificial Sequence
  chemically synthesized
gggatgctgctgaatcttct

SEQ ID NO: 7226 - DNA, 20 bp, Artificial Sequence
  chemically synthesized
ggatgctgctgaatcttctg

SEQ ID NO: 7227 - DNA, 20 bp, Artificial Sequence
  chemically synthesized
gatgctgctgaatcttctga

SEQ ID NO: 7228 - DNA, 20 bp, Artificial Sequence
  chemically synthesized
gctgaatcttctgagggtga

SEQ ID NO: 7229 - DNA, 20 bp, Artificial Sequence
  chemically synthesized
cttctgagggtgacagaatt

SEQ ID NO: 7230 - DNA, 20 bp, Artificial Sequence
  chemically synthesized
tctgagggtgacagaattta

SEQ ID NO: 7231 - DNA, 20 bp, Artificial Sequence
  chemically synthesized
ggtgacagaatttagagttt

SEQ ID NO: 7232 - DNA, 20 bp, Artificial Sequence
  chemically synthesized
gacagaatttagagtttgag

SEQ ID NO: 7233 - DNA, 20 bp, Artificial Sequence
  chemically synthesized
acagaatttagagtttgagc

SEQ ID NO: 7234 - DNA, 20 bp, Artificial Sequence
  chemically synthesized
agaatttagagtttgagcag

SEQ ID NO: 7235 - DNA, 20 bp, Artificial Sequence
  chemically synthesized
gaatttagagtttgagcagg

SEQ ID NO: 7236 - DNA, 20 bp, Artificial Sequence
  chemically synthesized
tagagtttgagcaggaggct

SEQ ID NO: 7237 - DNA, 20 bp, Artificial Sequence
  chemically synthesized
gagtttgagcaggaggcttg

SEQ ID NO: 7238 - DNA, 20 bp, Artificial Sequence
  chemically synthesized
gtttgagcaggaggcttgga

SEQ ID NO: 7239 - DNA, 20 bp, Artificial Sequence
  chemically synthesized
ttgagcaggaggcttggaga

SEQ ID NO: 7240 - DNA, 20 bp, Artificial Sequence
  chemically synthesized
tgagcaggaggcttggagag

SEQ ID NO: 7241 - DNA, 20 bp, Artificial Sequence
  chemically synthesized
caggaggcttggagagaggc

SEQ ID NO: 7242 - DNA, 20 bp, Artificial Sequence
  chemically synthesized
aggaggcttggagagaggcc

SEQ ID NO: 7243 - DNA, 20 bp, Artificial Sequence
  chemically synthesized
gccaggatttctgaaattaa

SEQ ID NO: 7244 - DNA, 20 bp, Artificial Sequence
  chemically synthesized
ccaggatttctgaaattaat

SEQ ID NO: 7245 - DNA, 20 bp, Artificial Sequence
  chemically synthesized
aggatttctgaaattaatgg

SEQ ID NO: 7246 - DNA, 20 bp, Artificial Sequence
  chemically synthesized
gatttctgaaattaatggga

SEQ ID NO: 7247 - DNA, 20 bp, Artificial Sequence
  chemically synthesized
tctgaaattaatgggagagt

SEQ ID NO: 7248 - DNA, 20 bp, Artificial Sequence
  chemically synthesized
ggagagtgagctcacgcgaa

SEQ ID NO: 7249 - DNA, 20 bp, Artificial Sequence
  chemically synthesized
gagagtgagctcacgcgaat

SEQ ID NO: 7250 - DNA, 20 bp, Artificial Sequence
  chemically synthesized
tgagctcacgcgaatgggct

SEQ ID NO: 7251 - DNA, 20 bp, Artificial Sequence
  chemically synthesized
gagctcacgcgaatgggctg

SEQ ID NO: 7252 - DNA, 20 bp, Artificial Sequence
  chemically synthesized
agctcacgcgaatgggctga

SEQ ID NO: 7253 - DNA, 20 bp, Artificial Sequence
  chemically synthesized
gcgaatgggctgagggacac

SEQ ID NO: 7254 - DNA, 20 bp, Artificial Sequence
  chemically synthesized
atgggctgagggacaccagt

SEQ ID NO: 7255 - DNA, 20 bp, Artificial Sequence
  chemically synthesized
tgggctgagggacaccagtg

SEQ ID NO: 7256 - DNA, 20 bp, Artificial Sequence
  chemically synthesized
gggctgagggacaccagtga

SEQ ID NO: 7257 - DNA, 20 bp, Artificial Sequence
  chemically synthesized
caccagtgagggaccgtctg

SEQ ID NO: 7258 - DNA, 20 bp, Artificial Sequence
  chemically synthesized
accagtgagggaccgtctga

SEQ ID NO: 7259 - DNA, 20 bp, Artificial Sequence
  chemically synthesized
ccagtgagggaccgtctgaa

SEQ ID NO: 7260 - DNA, 20 bp, Artificial Sequence
  chemically synthesized
agggaccgtctgaagggatg

SEQ ID NO: 7261 - DNA, 20 bp, Artificial Sequence
  chemically synthesized
ccgtctgaagggatgtagca

SEQ ID NO: 7262 - DNA, 20 bp, Artificial Sequence
  chemically synthesized
aaagtcaccgcatttccctc

SEQ ID NO: 7263 - DNA, 20 bp, Artificial Sequence
  chemically synthesized
gtcaccgcatttccctccag

SEQ ID NO: 7264 - DNA, 20 bp, Artificial Sequence
  chemically synthesized
cgcatttccctccagcagcc

SEQ ID NO: 7265 - DNA, 20 bp, Artificial Sequence
  chemically synthesized
gcatttccctccagcagccc

SEQ ID NO: 7266 - DNA, 20 bp, Artificial Sequence
  chemically synthesized
tttccctccagcagcccggg

SEQ ID NO: 7267 - DNA, 20 bp, Artificial Sequence
  chemically synthesized
ccctccagcagcccgggtgg

SEQ ID NO: 7268 - DNA, 20 bp, Artificial Sequence
  chemically synthesized
cctccagcagcccgggtggt

SEQ ID NO: 7269 - DNA, 20 bp, Artificial Sequence
  chemically synthesized
ctccagcagcccgggtggtg

SEQ ID NO: 7270 - DNA, 20 bp, Artificial Sequence
  chemically synthesized
tccagcagcccgggtggtgg

SEQ ID NO: 7271 - DNA, 20 bp, Artificial Sequence
  chemically synthesized
gcagcccgggtggtgggggc

SEQ ID NO: 7272 - DNA, 20 bp, Artificial Sequence
  chemically synthesized
cagcccgggtggtgggggct

SEQ ID NO: 7273 - DNA, 20 bp, Artificial Sequence
  chemically synthesized
agcccgggtggtgggggctg

SEQ ID NO: 7274 - DNA, 20 bp, Artificial Sequence
  chemically synthesized
gcccgggtggtgggggctgg

SEQ ID NO: 7275 - DNA, 20 bp, Artificial Sequence
  chemically synthesized
gggctgggggaacgtcatca

SEQ ID NO: 7276 - DNA, 20 bp, Artificial Sequence
  chemically synthesized
ggctgggggaacgtcatcat

SEQ ID NO: 7277 - DNA, 20 bp, Artificial Sequence
  chemically synthesized
ctgggggaacgtcatcatgg

SEQ ID NO: 7278 - DNA, 20 bp, Artificial Sequence
  chemically synthesized
tcatgggagctgacactgat

SEQ ID NO: 7279 - DNA, 20 bp, Artificial Sequence
  chemically synthesized
gacactgatcagctgctcac

SEQ ID NO: 7280 - DNA, 20 bp, Artificial Sequence
  chemically synthesized
acactgatcagctgctcacc

SEQ ID NO: 7281 - DNA, 20 bp, Artificial Sequence
  chemically synthesized
cactgatcagctgctcaccg

SEQ ID NO: 7282 - DNA, 20 bp, Artificial Sequence
  chemically synthesized
ggcccatcttccacttgtct

SEQ ID NO: 7283 - DNA, 20 bp, Artificial Sequence
  chemically synthesized
gctaccccctttttctttta

SEQ ID NO: 7284 - DNA, 20 bp, Artificial Sequence
  chemically synthesized
atttcaattatgcatgtatt

SEQ ID NO: 7285 - DNA, 20 bp, Artificial Sequence
  chemically synthesized
tttcaattatgcatgtatta

SEQ ID NO: 7286 - DNA, 20 bp, Artificial Sequence
  chemically synthesized
ttcaattatgcatgtattaa

SEQ ID NO: 7287 - DNA, 20 bp, Artificial Sequence
  chemically synthesized
tgcatgtattaagggtccca

SEQ ID NO: 7288 - DNA, 20 bp, Artificial Sequence
  chemically synthesized
tttttaattcttttttctcc

SEQ ID NO: 7289 - DNA, 20 bp, Artificial Sequence
  chemically synthesized
tctcccagtgtttcatttta

SEQ ID NO: 7290 - DNA, 20 bp, Artificial Sequence
  chemically synthesized
tcccagtgtttcattttata

SEQ ID NO: 7291 - DNA, 20 bp, Artificial Sequence
  chemically synthesized
tagagttattgctgttcatt

SEQ ID NO: 7292 - DNA, 20 bp, Artificial Sequence
  chemically synthesized
tctcatctcactctgttgcc

SEQ ID NO: 7293 - DNA, 20 bp, Artificial Sequence
  chemically synthesized
ctcatctcactctgttgccc

SEQ ID NO: 7294 - DNA, 20 bp, Artificial Sequence
  chemically synthesized
tctcactctgttgcccaggc

SEQ ID NO: 7295 - DNA, 20 bp, Artificial Sequence
  chemically synthesized
ctgttgcccaggctggaatg

SEQ ID NO: 7296 - DNA, 20 bp, Artificial Sequence
  chemically synthesized
ttgcccaggctggaatgcag

SEQ ID NO: 7297 - DNA, 20 bp, Artificial Sequence
  chemically synthesized
tagcttgtcacaactcactg

SEQ ID NO: 7298 - DNA, 20 bp, Artificial Sequence
  chemically synthesized
tcactgtggcctccacctcc

SEQ ID NO: 7299 - DNA, 20 bp, Artificial Sequence
  chemically synthesized
cactgtggcctccacctcct

SEQ ID NO: 7300 - DNA, 20 bp, Artificial Sequence
  chemically synthesized
tggcctccacctcctgggct

SEQ ID NO: 7301 - DNA, 20 bp, Artificial Sequence
  chemically synthesized
ggcctccacctcctgggctc

SEQ ID NO: 7302 - DNA, 20 bp, Artificial Sequence
  chemically synthesized
ctcaggcgatccttccactt

SEQ ID NO: 7303 - DNA, 20 bp, Artificial Sequence
  chemically synthesized
atccttccacttcagcctcc

SEQ ID NO: 7304 - DNA, 20 bp, Artificial Sequence
  chemically synthesized
tccttccacttcagcctccc

SEQ ID NO: 7305 - DNA, 20 bp, Artificial Sequence
  chemically synthesized
ttccacttcagcctcccagg

SEQ ID NO: 7306 - DNA, 20 bp, Artificial Sequence
  chemically synthesized
acttcagcctcccaggtagc

SEQ ID NO: 7307 - DNA, 20 bp, Artificial Sequence
  chemically synthesized
cttcagcctcccaggtagct

SEQ ID NO: 7308 - DNA, 20 bp, Artificial Sequence
  chemically synthesized
ctcccaggtagctgggacta

SEQ ID NO: 7309 - DNA, 20 bp, Artificial Sequence
  chemically synthesized
tcccaggtagctgggactat

SEQ ID NO: 7310 - DNA, 20 bp, Artificial Sequence
  chemically synthesized
tagctgggactataggcatg

SEQ ID NO: 7311 - DNA, 20 bp, Artificial Sequence
  chemically synthesized
taggcatgtggcaccacacc

SEQ ID NO: 7312 - DNA, 20 bp, Artificial Sequence
  chemically synthesized
taattaaaaatttttttttg

SEQ ID NO: 7313 - DNA, 20 bp, Artificial Sequence
  chemically synthesized
attaaaaatttttttttgta

SEQ ID NO: 7314 - DNA, 20 bp, Artificial Sequence
  chemically synthesized
aaaatttttttttgtagaga

SEQ ID NO: 7315 - DNA, 20 bp, Artificial Sequence
  chemically synthesized
gtagagacggttttgccatg

SEQ ID NO: 7316 - DNA, 20 bp, Artificial Sequence
  chemically synthesized
agagacggttttgccatgta

SEQ ID NO: 7317 - DNA, 20 bp, Artificial Sequence
  chemically synthesized
gagacggttttgccatgtag

SEQ ID NO: 7318 - DNA, 20 bp, Artificial Sequence
  chemically synthesized
agacggttttgccatgtaga

SEQ ID NO: 7319 - DNA, 20 bp, Artificial Sequence
  chemically synthesized
gacggttttgccatgtagag

SEQ ID NO: 7320 - DNA, 20 bp, Artificial Sequence
  chemically synthesized
aggggttttgccatgctgcc

SEQ ID NO: 7321 - DNA, 20 bp, Artificial Sequence
  chemically synthesized
ttttgccatgctgcccagac

SEQ ID NO: 7322 - DNA, 20 bp, Artificial Sequence
  chemically synthesized
atgctgcccagactagtctt

SEQ ID NO: 7323 - DNA, 20 bp, Artificial Sequence
  chemically synthesized
ccagactagtcttgagctcc

SEQ ID NO: 7324 - DNA, 20 bp, Artificial Sequence
  chemically synthesized
cagactagtcttgagctcct

SEQ ID NO: 7325 - DNA, 20 bp, Artificial Sequence
  chemically synthesized
agtcttgagctcctgggctc

SEQ ID NO: 7326 - DNA, 20 bp, Artificial Sequence
  chemically synthesized
ccccccgtgtcgacctccca

SEQ ID NO: 7327 - DNA, 20 bp, Artificial Sequence
  chemically synthesized
gtgtcgacctcccaaagtgc

SEQ ID NO: 7328 - DNA, 20 bp, Artificial Sequence
  chemically synthesized
tgtcgacctcccaaagtgct

SEQ ID NO: 7329 - DNA, 20 bp, Artificial Sequence
  chemically synthesized
ctcccaaagtgctgggatta

SEQ ID NO: 7330 - DNA, 20 bp, Artificial Sequence
  chemically synthesized
gggattacagatgtgatcca

SEQ ID NO: 7331 - DNA, 20 bp, Artificial Sequence
  chemically synthesized
cagatgtgatccacagtgcc

SEQ ID NO: 7332 - DNA, 20 bp, Artificial Sequence
  chemically synthesized
catcttccattatttccatc

SEQ ID NO: 7333 - DNA, 20 bp, Artificial Sequence
  chemically synthesized
tcttttcttttttttttttt

SEQ ID NO: 7334 - DNA, 20 bp, Artificial Sequence
  chemically synthesized
ttttcttttttttttttttg

SEQ ID NO: 7335 - DNA, 20 bp, Artificial Sequence
  chemically synthesized
tttcttttttttttttttgg

SEQ ID NO: 7336 - DNA, 20 bp, Artificial Sequence
  chemically synthesized
cttttttttttttttggagg

SEQ ID NO: 7337 - DNA, 20 bp, Artificial Sequence
  chemically synthesized
tttttttttttttggaggcg

SEQ ID NO: 7338 - DNA, 20 bp, Artificial Sequence
  chemically synthesized
cggagtctcgctctgttgcc

SEQ ID NO: 7339 - DNA, 20 bp, Artificial Sequence
  chemically synthesized
ggagtctcgctctgttgccc

SEQ ID NO: 7340 - DNA, 20 bp, Artificial Sequence
  chemically synthesized
tctcgctctgttgcccaggc

SEQ ID NO: 7341 - DNA, 20 bp, Artificial Sequence
  chemically synthesized
tcgctctgttgcccaggccg

SEQ ID NO: 7342 - DNA, 20 bp, Artificial Sequence
  chemically synthesized
ctgttgcccaggccggagtg

SEQ ID NO: 7343 - DNA, 20 bp, Artificial Sequence
  chemically synthesized
ttgcccaggccggagtgcag

SEQ ID NO: 7344 - DNA, 20 bp, Artificial Sequence
  chemically synthesized
ggagtgcagtggcgcgatct

SEQ ID NO: 7345 - DNA, 20 bp, Artificial Sequence
  chemically synthesized
gcgcgatcttggctcactgc

SEQ ID NO: 7346 - DNA, 20 bp, Artificial Sequence
  chemically synthesized
tcactgcaagctctgcctcc

SEQ ID NO: 7347 - DNA, 20 bp, Artificial Sequence
  chemically synthesized
cactgcaagctctgcctccc

SEQ ID NO: 7348 - DNA, 20 bp, Artificial Sequence
  chemically synthesized
ttcatgccattctcctgcct

SEQ ID NO: 7349 - DNA, 20 bp, Artificial Sequence
  chemically synthesized
ttctcctgcctcagcctccc

SEQ ID NO: 7350 - DNA, 20 bp, Artificial Sequence
  chemically synthesized
tcctgcctcagcctcccgag

SEQ ID NO: 7351 - DNA, 20 bp, Artificial Sequence
  chemically synthesized
gcctcagcctcccgagtagc

SEQ ID NO: 7352 - DNA, 20 bp, Artificial Sequence
  chemically synthesized
cctcagcctcccgagtagct

SEQ ID NO: 7353 - DNA, 20 bp, Artificial Sequence
  chemically synthesized
ctcccgagtagctgggacta

SEQ ID NO: 7354 - DNA, 20 bp, Artificial Sequence
  chemically synthesized
tcccgagtagctgggactac

SEQ ID NO: 7355 - DNA, 20 bp, Artificial Sequence
  chemically synthesized
caggcgcctgccaccacgtc

SEQ ID NO: 7356 - DNA, 20 bp, Artificial Sequence
  chemically synthesized
tggctaattttttgtatttt

SEQ ID NO: 7357 - DNA, 20 bp, Artificial Sequence
  chemically synthesized
ctaattttttgtatttttag

SEQ ID NO: 7358 - DNA, 20 bp, Artificial Sequence
  chemically synthesized
aattttttgtatttttagta

SEQ ID NO: 7359 - DNA, 20 bp, Artificial Sequence
  chemically synthesized
ttttgtatttttagtagaga

SEQ ID NO: 7360 - DNA, 20 bp, Artificial Sequence
  chemically synthesized
tttgtatttttagtagagat

SEQ ID NO: 7361 - DNA, 20 bp, Artificial Sequence
  chemically synthesized
ttgtatttttagtagagatg

SEQ ID NO: 7362 - DNA, 20 bp, Artificial Sequence
  chemically synthesized
gagatggggtttcaccatgt

SEQ ID NO: 7363 - DNA, 20 bp, Artificial Sequence
  chemically synthesized
tggggtttcaccatgttagc

SEQ ID NO: 7364 - DNA, 20 bp, Artificial Sequence
  chemically synthesized
ggggtttcaccatgttagcc

SEQ ID NO: 7365 - DNA, 20 bp, Artificial Sequence
  chemically synthesized
tttcaccatgttagccagga

SEQ ID NO: 7366 - DNA, 20 bp, Artificial Sequence
  chemically synthesized
acctcatgatctgcccgcct

SEQ ID NO: 7367 - DNA, 20 bp, Artificial Sequence
  chemically synthesized
ctgcccgccttggcctccca

SEQ ID NO: 7368 - DNA, 20 bp, Artificial Sequence
  chemically synthesized
gccttggcctcccacagtgc

SEQ ID NO: 7369 - DNA, 20 bp, Artificial Sequence
  chemically synthesized
ccttggcctcccacagtgct

SEQ ID NO: 7370 - DNA, 20 bp, Artificial Sequence
  chemically synthesized
ctcccacagtgctgggattc

SEQ ID NO: 7371 - DNA, 20 bp, Artificial Sequence
  chemically synthesized
tcccacagtgctgggattcc

SEQ ID NO: 7372 - DNA, 20 bp, Artificial Sequence
  chemically synthesized
agtgctgggattccaggcgt

SEQ ID NO: 7373 - DNA, 20 bp, Artificial Sequence
  chemically synthesized
gggattccaggcgtgagcca

SEQ ID NO: 7374 - DNA, 20 bp, Artificial Sequence
  chemically synthesized
caggcgtgagccacggcgcc

SEQ ID NO: 7375 - DNA, 20 bp, Artificial Sequence
  chemically synthesized
cgtgagccacggcgcctggc

SEQ ID NO: 7376 - DNA, 20 bp, Artificial Sequence
  chemically synthesized
gccagtgtgttttttcattt

SEQ ID NO: 7377 - DNA, 20 bp, Artificial Sequence
  chemically synthesized
ttttttcatttcagacattg

SEQ ID NO: 7378 - DNA, 20 bp, Artificial Sequence
  chemically synthesized
gacattgtagtttttatctc

SEQ ID NO: 7379 - DNA, 20 bp, Artificial Sequence
  chemically synthesized
attgtagtttttatctctag

SEQ ID NO: 7380 - DNA, 20 bp, Artificial Sequence
  chemically synthesized
tttatctctagaagttcacc

SEQ ID NO: 7381 - DNA, 20 bp, Artificial Sequence
  chemically synthesized
ttatctctagaagttcacct

SEQ ID NO: 7382 - DNA, 20 bp, Artificial Sequence
  chemically synthesized
tatctctagaagttcacctg

SEQ ID NO: 7383 - DNA, 20 bp, Artificial Sequence
  chemically synthesized
acttaattttttgaacataa

SEQ ID NO: 7384 - DNA, 20 bp, Artificial Sequence
  chemically synthesized
cttaattttttgaacataat

SEQ ID NO: 7385 - DNA, 20 bp, Artificial Sequence
  chemically synthesized
tttttgaacataatgggata

SEQ ID NO: 7386 - DNA, 20 bp, Artificial Sequence
  chemically synthesized
ccatccttgcctgctaattc

SEQ ID NO: 7387 - DNA, 20 bp, Artificial Sequence
  chemically synthesized
gctaattctagcatccgtgt

SEQ ID NO: 7388 - DNA, 20 bp, Artificial Sequence
  chemically synthesized
tctagcatccgtgtcagttc

SEQ ID NO: 7389 - DNA, 20 bp, Artificial Sequence
  chemically synthesized
catgccttgtaatctttgat

SEQ ID NO: 7390 - DNA, 20 bp, Artificial Sequence
  chemically synthesized
tgtaatctttgattggctgc

SEQ ID NO: 7391 - DNA, 20 bp, Artificial Sequence
  chemically synthesized
cattgtcaatttcaccttgt

SEQ ID NO: 7392 - DNA, 20 bp, Artificial Sequence
  chemically synthesized
attgtcaatttcaccttgtt

SEQ ID NO: 7393 - DNA, 20 bp, Artificial Sequence
  chemically synthesized
aatttcaccttgttgggtgc

SEQ ID NO: 7394 - DNA, 20 bp, Artificial Sequence
  chemically synthesized
gtattcctctaaatgttctt

SEQ ID NO: 7395 - DNA, 20 bp, Artificial Sequence
  chemically synthesized
aatgttcttgagctttgctc

SEQ ID NO: 7396 - DNA, 20 bp, Artificial Sequence
  chemically synthesized
atgttcttgagctttgctcc

SEQ ID NO: 7397 - DNA, 20 bp, Artificial Sequence
  chemically synthesized
ttgagctttgctccgggatg

SEQ ID NO: 7398 - DNA, 20 bp, Artificial Sequence
  chemically synthesized
ctttgctccgggatgcagtt

SEQ ID NO: 7399 - DNA, 20 bp, Artificial Sequence
  chemically synthesized
cgggatgcagttaagcaact

SEQ ID NO: 7400 - DNA, 20 bp, Artificial Sequence
  chemically synthesized
ggatgcagttaagcaactta

SEQ ID NO: 7401 - DNA, 20 bp, Artificial Sequence
  chemically synthesized
gcagttaagcaacttagagt

SEQ ID NO: 7402 - DNA, 20 bp, Artificial Sequence
  chemically synthesized
gtttgaactcttaattgttt

SEQ ID NO: 7403 - DNA, 20 bp, Artificial Sequence
  chemically synthesized
cttaattgttttggtctcct

SEQ ID NO: 7404 - DNA, 20 bp, Artificial Sequence
  chemically synthesized
ttttggtctcctcggactct

SEQ ID NO: 7405 - DNA, 20 bp, Artificial Sequence
  chemically synthesized
tcagctccatctcctcaacg

SEQ ID NO: 7406 - DNA, 20 bp, Artificial Sequence
  chemically synthesized
cagctccatctcctcaacgt

SEQ ID NO: 7407 - DNA, 20 bp, Artificial Sequence
  chemically synthesized
agctccatctcctcaacgtg

SEQ ID NO: 7408 - DNA, 20 bp, Artificial Sequence
  chemically synthesized
ctccatctcctcaacgtggg

SEQ ID NO: 7409 - DNA, 20 bp, Artificial Sequence
  chemically synthesized
cctcaacgtggggagtctct

SEQ ID NO: 7410 - DNA, 20 bp, Artificial Sequence
  chemically synthesized
ctcaacgtggggagtctctt

SEQ ID NO: 7411 - DNA, 20 bp, Artificial Sequence
  chemically synthesized
ggagtctcttgggctctgcc

SEQ ID NO: 7412 - DNA, 20 bp, Artificial Sequence
  chemically synthesized
ctgcctggacttccctttcc

SEQ ID NO: 7413 - DNA, 20 bp, Artificial Sequence
  chemically synthesized
ctttcctggcctgtaacctg

SEQ ID NO: 7414 - DNA, 20 bp, Artificial Sequence
  chemically synthesized
acctgcagactctctccaaa

SEQ ID NO: 7415 - DNA, 20 bp, Artificial Sequence
  chemically synthesized
gcagactctctccaaacagt

SEQ ID NO: 7416 - DNA, 20 bp, Artificial Sequence
  chemically synthesized
actctctccaaacagtaagc

SEQ ID NO: 7417 - DNA, 20 bp, Artificial Sequence
  chemically synthesized
ctctctccaaacagtaagct

SEQ ID NO: 7418 - DNA, 20 bp, Artificial Sequence
  chemically synthesized
tctctccaaacagtaagctg

SEQ ID NO: 7419 - DNA, 20 bp, Artificial Sequence
  chemically synthesized
aaacagtaagctggggtgat

SEQ ID NO: 7420 - DNA, 20 bp, Artificial Sequence
  chemically synthesized
acagtaagctggggtgatcg

SEQ ID NO: 7421 - DNA, 20 bp, Artificial Sequence
  chemically synthesized
cagtaagctggggtgatcgg

SEQ ID NO: 7422 - DNA, 20 bp, Artificial Sequence
  chemically synthesized
agtaagctggggtgatcgga

SEQ ID NO: 7423 - DNA, 20 bp, Artificial Sequence
  chemically synthesized
gttgtttgcttcttatccct

SEQ ID NO: 7424 - DNA, 20 bp, Artificial Sequence
  chemically synthesized
ttgtttgcttcttatccctc

SEQ ID NO: 7425 - DNA, 20 bp, Artificial Sequence
  chemically synthesized
tgtttgcttcttatccctca

SEQ ID NO: 7426 - DNA, 20 bp, Artificial Sequence
  chemically synthesized
actcctccttgcctgatgtc

SEQ ID NO: 7427 - DNA, 20 bp, Artificial Sequence
  chemically synthesized
tcctccttgcctgatgtcca

SEQ ID NO: 7428 - DNA, 20 bp, Artificial Sequence
  chemically synthesized
cctgatgtccagagtcttga

SEQ ID NO: 7429 - DNA, 20 bp, Artificial Sequence
  chemically synthesized
ttgaaagctgccatgttcta

SEQ ID NO: 7430 - DNA, 20 bp, Artificial Sequence
  chemically synthesized
gtttttgttttgattgtttc

SEQ ID NO: 7431 - DNA, 20 bp, Artificial Sequence
  chemically synthesized
tttttgttttgattgtttct

SEQ ID NO: 7432 - DNA, 20 bp, Artificial Sequence
  chemically synthesized
ttttgttttgattgtttctg

SEQ ID NO: 7433 - DNA, 20 bp, Artificial Sequence
  chemically synthesized
ttgttttgattgtttctggg

SEQ ID NO: 7434 - DNA, 20 bp, Artificial Sequence
  chemically synthesized
gttttgattgtttctgggga

SEQ ID NO: 7435 - DNA, 20 bp, Artificial Sequence
  chemically synthesized
ttgattgtttctggggagag

SEQ ID NO: 7436 - DNA, 20 bp, Artificial Sequence
  chemically synthesized
gagaagaactcttcccatct

SEQ ID NO: 7437 - DNA, 20 bp, Artificial Sequence
  chemically synthesized
agaagaactcttcccatctt

SEQ ID NO: 7438 - DNA, 20 bp, Artificial Sequence
  chemically synthesized
agaactcttcccatcttggg

SEQ ID NO: 7439 - DNA, 20 bp, Artificial Sequence
  chemically synthesized
ttatgttcaaacttttgcct

SEQ ID NO: 7440 - DNA, 20 bp, Artificial Sequence
  chemically synthesized
tgttcaaacttttgcctaag

SEQ ID NO: 7441 - DNA, 20 bp, Artificial Sequence
  chemically synthesized
tttaactcatctaattatcc

SEQ ID NO: 7442 - DNA, 20 bp, Artificial Sequence
  chemically synthesized
aattatccgagcaatccaat

SEQ ID NO: 7443 - DNA, 20 bp, Artificial Sequence
  chemically synthesized
attatccgagcaatccaatc

SEQ ID NO: 7444 - DNA, 20 bp, Artificial Sequence
  chemically synthesized
atccgagcaatccaatcggg

SEQ ID NO: 7445 - DNA, 20 bp, Artificial Sequence
  chemically synthesized
gtgatctccattttacacac

SEQ ID NO: 7446 - DNA, 20 bp, Artificial Sequence
  chemically synthesized
ccattttacacacgagaaaa

SEQ ID NO: 7447 - DNA, 20 bp, Artificial Sequence
  chemically synthesized
ttttacacacgagaaaatgg

SEQ ID NO: 7448 - DNA, 20 bp, Artificial Sequence
  chemically synthesized
cacacgagaaaatggaagca

SEQ ID NO: 7449 - DNA, 20 bp, Artificial Sequence
  chemically synthesized
cacgagaaaatggaagcatg

SEQ ID NO: 7450 - DNA, 20 bp, Artificial Sequence
  chemically synthesized
agcatggagaaattgaatgc

SEQ ID NO: 7451 - DNA, 20 bp, Artificial Sequence
  chemically synthesized
tgaatgctggtgcatgatct

SEQ ID NO: 7452 - DNA, 20 bp, Artificial Sequence
  chemically synthesized
aatgctggtgcatgatctca

SEQ ID NO: 7453 - DNA, 20 bp, Artificial Sequence
  chemically synthesized
tgcatgatctcagagctacc

SEQ ID NO: 7454 - DNA, 20 bp, Artificial Sequence
  chemically synthesized
catgatctcagagctacctg

SEQ ID NO: 7455 - DNA, 20 bp, Artificial Sequence
  chemically synthesized
atgatctcagagctacctgg

SEQ ID NO: 7456 - DNA, 20 bp, Artificial Sequence
  chemically synthesized
ctcagagctacctggaggca

SEQ ID NO: 7457 - DNA, 20 bp, Artificial Sequence
  chemically synthesized
gagctacctggaggcacagc

SEQ ID NO: 7458 - DNA, 20 bp, Artificial Sequence
  chemically synthesized
agctacctggaggcacagct

SEQ ID NO: 7459 - DNA, 20 bp, Artificial Sequence
  chemically synthesized
ggcacagctgggctaccctg

SEQ ID NO: 7460 - DNA, 20 bp, Artificial Sequence
  chemically synthesized
gcacagctgggctaccctgt

SEQ ID NO: 7461 - DNA, 20 bp, Artificial Sequence
  chemically synthesized
cagctgggctaccctgtggg

SEQ ID NO: 7462 - DNA, 20 bp, Artificial Sequence
  chemically synthesized
gggctaccctgtgggcagtc

SEQ ID NO: 7463 - DNA, 20 bp, Artificial Sequence
  chemically synthesized
ccctgtgggcagtctggttt

SEQ ID NO: 7464 - DNA, 20 bp, Artificial Sequence
  chemically synthesized
cctgtgggcagtctggtttc

SEQ ID NO: 7465 - DNA, 20 bp, Artificial Sequence
  chemically synthesized
ctgtgggcagtctggtttca

SEQ ID NO: 7466 - DNA, 20 bp, Artificial Sequence
  chemically synthesized
tgggcagtctggtttcaggg

SEQ ID NO: 7467 - DNA, 20 bp, Artificial Sequence
  chemically synthesized
ctggtttcagggtggatata

SEQ ID NO: 7468 - DNA, 20 bp, Artificial Sequence
  chemically synthesized
tggatatacagacacgttgc

SEQ ID NO: 7469 - DNA, 20 bp, Artificial Sequence
  chemically synthesized
ggatatacagacacgttgct

SEQ ID NO: 7470 - DNA, 20 bp, Artificial Sequence
  chemically synthesized
gacacgttgctgggctgacc

SEQ ID NO: 7471 - DNA, 20 bp, Artificial Sequence
  chemically synthesized
ttgctgggctgacccagcat

SEQ ID NO: 7472 - DNA, 20 bp, Artificial Sequence
  chemically synthesized
tgctgggctgacccagcatt

SEQ ID NO: 7473 - DNA, 20 bp, Artificial Sequence
  chemically synthesized
ctgggctgacccagcattgg

SEQ ID NO: 7474 - DNA, 20 bp, Artificial Sequence
  chemically synthesized
acccagcattgggagttgat

SEQ ID NO: 7475 - DNA, 20 bp, Artificial Sequence
  chemically synthesized
agcattgggagttgataagt

SEQ ID NO: 7476 - DNA, 20 bp, Artificial Sequence
  chemically synthesized
tgggagttgataagtcggac

SEQ ID NO: 7477 - DNA, 20 bp, Artificial Sequence
  chemically synthesized
gggagttgataagtcggact

SEQ ID NO: 7478 - DNA, 20 bp, Artificial Sequence
  chemically synthesized
agttgataagtcggactggg

SEQ ID NO: 7479 - DNA, 20 bp, Artificial Sequence
  chemically synthesized
tgataagtcggactgggaag

SEQ ID NO: 7480 - DNA, 20 bp, Artificial Sequence
  chemically synthesized
gataagtcggactgggaagc

SEQ ID NO: 7481 - DNA, 20 bp, Artificial Sequence
  chemically synthesized
agtcggactgggaagcagga

SEQ ID NO: 7482 - DNA, 20 bp, Artificial Sequence
  chemically synthesized
gtcggactgggaagcaggac

SEQ ID NO: 7483 - DNA, 20 bp, Artificial Sequence
  chemically synthesized
gaagcaggacaggaccctct

SEQ ID NO: 7484 - DNA, 20 bp, Artificial Sequence
  chemically synthesized
gcaggacaggaccctctgag

SEQ ID NO: 7485 - DNA, 20 bp, Artificial Sequence
  chemically synthesized
aggacaggaccctctgagtg

SEQ ID NO: 7486 - DNA, 20 bp, Artificial Sequence
  chemically synthesized
ggacaggaccctctgagtgg

SEQ ID NO: 7487 - DNA, 20 bp, Artificial Sequence
  chemically synthesized
gacaggaccctctgagtgga

SEQ ID NO: 7488 - DNA, 20 bp, Artificial Sequence
  chemically synthesized
cctctgagtggagggtgctg

SEQ ID NO: 7489 - DNA, 20 bp, Artificial Sequence
  chemically synthesized
tgagtggagggtgctgaaga

SEQ ID NO: 7490 - DNA, 20 bp, Artificial Sequence
  chemically synthesized
gtggagggtgctgaagacag

SEQ ID NO: 7491 - DNA, 20 bp, Artificial Sequence
  chemically synthesized
agggtgctgaagacagcagt

SEQ ID NO: 7492 - DNA, 20 bp, Artificial Sequence
  chemically synthesized
gggtgctgaagacagcagtc

SEQ ID NO: 7493 - DNA, 20 bp, Artificial Sequence
  chemically synthesized
ggtgctgaagacagcagtca

SEQ ID NO: 7494 - DNA, 20 bp, Artificial Sequence
  chemically synthesized
gaagacagcagtcagggact

SEQ ID NO: 7495 - DNA, 20 bp, Artificial Sequence
  chemically synthesized
agcagtcagggactcagcca

SEQ ID NO: 7496 - DNA, 20 bp, Artificial Sequence
  chemically synthesized
cagtcagggactcagccatg

SEQ ID NO: 7497 - DNA, 20 bp, Artificial Sequence
  chemically synthesized
agtcagggactcagccatgg

SEQ ID NO: 7498 - DNA, 20 bp, Artificial Sequence
  chemically synthesized
gtcagggactcagccatgga

SEQ ID NO: 7499 - DNA, 20 bp, Artificial Sequence
  chemically synthesized
gggactcagccatggagggc

SEQ ID NO: 7500 - DNA, 20 bp, Artificial Sequence
  chemically synthesized
tcagccatggagggccagct

SEQ ID NO: 7501 - DNA, 20 bp, Artificial Sequence
  chemically synthesized
gccatggagggccagcttgg

SEQ ID NO: 7502 - DNA, 20 bp, Artificial Sequence
  chemically synthesized
ccatggagggccagcttggt

SEQ ID NO: 7503 - DNA, 20 bp, Artificial Sequence
  chemically synthesized
catggagggccagcttggtg

SEQ ID NO: 7504 - DNA, 20 bp, Artificial Sequence
  chemically synthesized
cagcttggtggggaacaccg

SEQ ID NO: 7505 - DNA, 20 bp, Artificial Sequence
  chemically synthesized
ggtggggaacaccgtggtca

SEQ ID NO: 7506 - DNA, 20 bp, Artificial Sequence
  chemically synthesized
tggggaacaccgtggtcatg

SEQ ID NO: 7507 - DNA, 20 bp, Artificial Sequence
  chemically synthesized
ccgtggtcatggagcgcttc

SEQ ID NO: 7508 - DNA, 20 bp, Artificial Sequence
  chemically synthesized
ggtcatggagcgcttctgga

SEQ ID NO: 7509 - DNA, 20 bp, Artificial Sequence
  chemically synthesized
tcatggagcgcttctggatg

SEQ ID NO: 7510 - DNA, 20 bp, Artificial Sequence
  chemically synthesized
atggagcgcttctggatgga

SEQ ID NO: 7511 - DNA, 20 bp, Artificial Sequence
  chemically synthesized
tggagcgcttctggatggag

SEQ ID NO: 7512 - DNA, 20 bp, Artificial Sequence
  chemically synthesized
tctggatggagaggaatgca

SEQ ID NO: 7513 - DNA, 20 bp, Artificial Sequence
  chemically synthesized
ctggatggagaggaatgcaa

SEQ ID NO: 7514 - DNA, 20 bp, Artificial Sequence
  chemically synthesized
ggagaggaatgcaaaggcct

SEQ ID NO: 7515 - DNA, 20 bp, Artificial Sequence
  chemically synthesized
agaggaatgcaaaggccttg

SEQ ID NO: 7516 - DNA, 20 bp, Artificial Sequence
  chemically synthesized
gaggaatgcaaaggccttgg

SEQ ID NO: 7517 - DNA, 20 bp, Artificial Sequence
  chemically synthesized
gaatgcaaaggccttggagg

SEQ ID NO: 7518 - DNA, 20 bp, Artificial Sequence
  chemically synthesized
aatgcaaaggccttggagga

SEQ ID NO: 7519 - DNA, 20 bp, Artificial Sequence
  chemically synthesized
atgcaaaggccttggaggaa

SEQ ID NO: 7520 - DNA, 20 bp, Artificial Sequence
  chemically synthesized
tgcaaaggccttggaggaag

SEQ ID NO: 7521 - DNA, 20 bp, Artificial Sequence
  chemically synthesized
aaaggccttggaggaagggg

SEQ ID NO: 7522 - DNA, 20 bp, Artificial Sequence
  chemically synthesized
aaggccttggaggaaggggt

SEQ ID NO: 7523 - DNA, 20 bp, Artificial Sequence
  chemically synthesized
aggccttggaggaaggggtg

SEQ ID NO: 7524 - DNA, 20 bp, Artificial Sequence
  chemically synthesized
ggccttggaggaaggggtgg

SEQ ID NO: 7525 - DNA, 20 bp, Artificial Sequence
  chemically synthesized
cttggaggaaggggtggggg

SEQ ID NO: 7526 - DNA, 20 bp, Artificial Sequence
  chemically synthesized
gaggaaggggtgggggcagt

SEQ ID NO: 7527 - DNA, 20 bp, Artificial Sequence
  chemically synthesized
ggaaggggtgggggcagtga

SEQ ID NO: 7528 - DNA, 20 bp, Artificial Sequence
  chemically synthesized
gaaggggtgggggcagtgag

SEQ ID NO: 7529 - DNA, 20 bp, Artificial Sequence
  chemically synthesized
aaggggtgggggcagtgaga

SEQ ID NO: 7530 - DNA, 20 bp, Artificial Sequence
  chemically synthesized
ggggtgggggcagtgagagg

SEQ ID NO: 7531 - DNA, 20 bp, Artificial Sequence
  chemically synthesized
gggtgggggcagtgagaggg

SEQ ID NO: 7532 - DNA, 20 bp, Artificial Sequence
  chemically synthesized
ggtgggggcagtgagaggga

SEQ ID NO: 7533 - DNA, 20 bp, Artificial Sequence
  chemically synthesized
gggggcagtgagagggaggg

SEQ ID NO: 7534 - DNA, 20 bp, Artificial Sequence
  chemically synthesized
ggggcagtgagagggagggt

SEQ ID NO: 7535 - DNA, 20 bp, Artificial Sequence
  chemically synthesized
gggcagtgagagggagggtg

SEQ ID NO: 7536 - DNA, 20 bp, Artificial Sequence
  chemically synthesized
agggagggtggggctgtgct

SEQ ID NO: 7537 - DNA, 20 bp, Artificial Sequence
  chemically synthesized
ggagggtggggctgtgctca

SEQ ID NO: 7538 - DNA, 20 bp, Artificial Sequence
  chemically synthesized
gggtggggctgtgctcagag

SEQ ID NO: 7539 - DNA, 20 bp, Artificial Sequence
  chemically synthesized
ggtggggctgtgctcagagc

SEQ ID NO: 7540 - DNA, 20 bp, Artificial Sequence
  chemically synthesized
tggggctgtgctcagagcgg

SEQ ID NO: 7541 - DNA, 20 bp, Artificial Sequence
  chemically synthesized
ggctgtgctcagagcgggag

SEQ ID NO: 7542 - DNA, 20 bp, Artificial Sequence
  chemically synthesized
gctgtgctcagagcgggagt

SEQ ID NO: 7543 - DNA, 20 bp, Artificial Sequence
  chemically synthesized
gtgctcagagcgggagtggg

SEQ ID NO: 7544 - DNA, 20 bp, Artificial Sequence
  chemically synthesized
ctcagagcgggagtgggcag

SEQ ID NO: 7545 - DNA, 20 bp, Artificial Sequence
  chemically synthesized
cagagcgggagtgggcagtg

SEQ ID NO: 7546 - DNA, 20 bp, Artificial Sequence
  chemically synthesized
agagcgggagtgggcagtgg

SEQ ID NO: 7547 - DNA, 20 bp, Artificial Sequence
  chemically synthesized
ggagtgggcagtggaggtgt

SEQ ID NO: 7548 - DNA, 20 bp, Artificial Sequence
  chemically synthesized
agtgggcagtggaggtgtca

SEQ ID NO: 7549 - DNA, 20 bp, Artificial Sequence
  chemically synthesized
gtgggcagtggaggtgtcag

SEQ ID NO: 7550 - DNA, 20 bp, Artificial Sequence
  chemically synthesized
ggaggtgtcagaggcctccc

SEQ ID NO: 7551 - DNA, 20 bp, Artificial Sequence
  chemically synthesized
gaggtgtcagaggcctccct

SEQ ID NO: 7552 - DNA, 20 bp, Artificial Sequence
  chemically synthesized
agaggcctccctgggtcaaa

SEQ ID NO: 7553 - DNA, 20 bp, Artificial Sequence
  chemically synthesized
gaggcctccctgggtcaaat

SEQ ID NO: 7554 - DNA, 20 bp, Artificial Sequence
  chemically synthesized
aggcctccctgggtcaaatg

SEQ ID NO: 7555 - DNA, 20 bp, Artificial Sequence
  chemically synthesized
cctgggtcaaatggggtcct

SEQ ID NO: 7556 - DNA, 20 bp, Artificial Sequence
  chemically synthesized
gtcaaatggggtcctgagtg

SEQ ID NO: 7557 - DNA, 20 bp, Artificial Sequence
  chemically synthesized
tggggtcctgagtgtggctg

SEQ ID NO: 7558 - DNA, 20 bp, Artificial Sequence
  chemically synthesized
ggtcctgagtgtggctgcag

SEQ ID NO: 7559 - DNA, 20 bp, Artificial Sequence
  chemically synthesized
gtcctgagtgtggctgcagt

SEQ ID NO: 7560 - DNA, 20 bp, Artificial Sequence
  chemically synthesized
tcctgagtgtggctgcagtg

SEQ ID NO: 7561 - DNA, 20 bp, Artificial Sequence
  chemically synthesized
tgagtgtggctgcagtgggg

SEQ ID NO: 7562 - DNA, 20 bp, Artificial Sequence
  chemically synthesized
gagtgtggctgcagtgggga

SEQ ID NO: 7563 - DNA, 20 bp, Artificial Sequence
  chemically synthesized
tgtggctgcagtggggaagg

SEQ ID NO: 7564 - DNA, 20 bp, Artificial Sequence
  chemically synthesized
ggctgcagtggggaaggtgg

SEQ ID NO: 7565 - DNA, 20 bp, Artificial Sequence
  chemically synthesized
gtggggaaggtggaagtcac

SEQ ID NO: 7566 - DNA, 20 bp, Artificial Sequence
  chemically synthesized
tggaagtcactggtgtgaaa

SEQ ID NO: 7567 - DNA, 20 bp, Artificial Sequence
  chemically synthesized
tcactggtgtgaaaaagatg

SEQ ID NO: 7568 - DNA, 20 bp, Artificial Sequence
  chemically synthesized
actggtgtgaaaaagatgaa

SEQ ID NO: 7569 - DNA, 20 bp, Artificial Sequence
  chemically synthesized
gtgaaaaagatgaagagtta

SEQ ID NO: 7570 - DNA, 20 bp, Artificial Sequence
  chemically synthesized
aaaagatgaagagttatgga

SEQ ID NO: 7571 - DNA, 20 bp, Artificial Sequence
  chemically synthesized
gagttatggacagtcactta

SEQ ID NO: 7572 - DNA, 20 bp, Artificial Sequence
  chemically synthesized
agttatggacagtcacttac

SEQ ID NO: 7573 - DNA, 20 bp, Artificial Sequence
  chemically synthesized
gttatggacagtcacttaca

SEQ ID NO: 7574 - DNA, 20 bp, Artificial Sequence
  chemically synthesized
ttatggacagtcacttacag

SEQ ID NO: 7575 - DNA, 20 bp, Artificial Sequence
  chemically synthesized
tggacagtcacttacagggg

SEQ ID NO: 7576 - DNA, 20 bp, Artificial Sequence
  chemically synthesized
tacaggggcagtgtctgact

SEQ ID NO: 7577 - DNA, 20 bp, Artificial Sequence
  chemically synthesized
acaggggcagtgtctgactc

SEQ ID NO: 7578 - DNA, 20 bp, Artificial Sequence
  chemically synthesized
gggcagtgtctgactcagga

SEQ ID NO: 7579 - DNA, 20 bp, Artificial Sequence
  chemically synthesized
cagtgtctgactcaggacag

SEQ ID NO: 7580 - DNA, 20 bp, Artificial Sequence
  chemically synthesized
tgtctgactcaggacagtgg

SEQ ID NO: 7581 - DNA, 20 bp, Artificial Sequence
  chemically synthesized
gtctgactcaggacagtggc

SEQ ID NO: 7582 - DNA, 20 bp, Artificial Sequence
  chemically synthesized
tgactcaggacagtggcagg

SEQ ID NO: 7583 - DNA, 20 bp, Artificial Sequence
  chemically synthesized
gacagtggcaggaagtgacc

SEQ ID NO: 7584 - DNA, 20 bp, Artificial Sequence
  chemically synthesized
acagtggcaggaagtgacct

SEQ ID NO: 7585 - DNA, 20 bp, Artificial Sequence
  chemically synthesized
cagtggcaggaagtgacctg

SEQ ID NO: 7586 - DNA, 20 bp, Artificial Sequence
  chemically synthesized
gtggcaggaagtgacctggg

SEQ ID NO: 7587 - DNA, 20 bp, Artificial Sequence
  chemically synthesized
tggcaggaagtgacctgggg

SEQ ID NO: 7588 - DNA, 20 bp, Artificial Sequence
  chemically synthesized
caggaagtgacctggggagg

SEQ ID NO: 7589 - DNA, 20 bp, Artificial Sequence
  chemically synthesized
tgacctggggaggaagattc

SEQ ID NO: 7590 - DNA, 20 bp, Artificial Sequence
  chemically synthesized
gacctggggaggaagattct

SEQ ID NO: 7591 - DNA, 20 bp, Artificial Sequence
  chemically synthesized
aagattctgggcccctgact

SEQ ID NO: 7592 - DNA, 20 bp, Artificial Sequence
  chemically synthesized
ggcccctgactgagcctccc

SEQ ID NO: 7593 - DNA, 20 bp, Artificial Sequence
  chemically synthesized
gcccctgactgagcctcccc

SEQ ID NO: 7594 - DNA, 20 bp, Artificial Sequence
  chemically synthesized
gactgagcctccccaggatg

SEQ ID NO: 7595 - DNA, 20 bp, Artificial Sequence
  chemically synthesized
tccccaggatgtggtcctgc

SEQ ID NO: 7596 - DNA, 20 bp, Artificial Sequence
  chemically synthesized
ccccaggatgtggtcctgct

SEQ ID NO: 7597 - DNA, 20 bp, Artificial Sequence
  chemically synthesized
aggatgtggtcctgctgggt

SEQ ID NO: 7598 - DNA, 20 bp, Artificial Sequence
  chemically synthesized
ggatgtggtcctgctgggtc

SEQ ID NO: 7599 - DNA, 20 bp, Artificial Sequence
  chemically synthesized
gatgtggtcctgctgggtcg

SEQ ID NO: 7600 - DNA, 20 bp, Artificial Sequence
  chemically synthesized
atgtggtcctgctgggtcgg

SEQ ID NO: 7601 - DNA, 20 bp, Artificial Sequence
  chemically synthesized
tgtggtcctgctgggtcggg

SEQ ID NO: 7602 - DNA, 20 bp, Artificial Sequence
  chemically synthesized
cctgctgggtcggggggtga

SEQ ID NO: 7603 - DNA, 20 bp, Artificial Sequence
  chemically synthesized
ctgctgggtcggggggtgat

SEQ ID NO: 7604 - DNA, 20 bp, Artificial Sequence
  chemically synthesized
ggtcggggggtgataggaat

SEQ ID NO: 7605 - DNA, 20 bp, Artificial Sequence
  chemically synthesized
cggggggtgataggaatgag

SEQ ID NO: 7606 - DNA, 20 bp, Artificial Sequence
  chemically synthesized
ggtgataggaatgagaagac

SEQ ID NO: 7607 - DNA, 20 bp, Artificial Sequence
  chemically synthesized
gtgataggaatgagaagaca

SEQ ID NO: 7608 - DNA, 20 bp, Artificial Sequence
  chemically synthesized
ataggaatgagaagacaagg

SEQ ID NO: 7609 - DNA, 20 bp, Artificial Sequence
  chemically synthesized
tgagaagacaaggaagtcca

SEQ ID NO: 7610 - DNA, 20 bp, Artificial Sequence
  chemically synthesized
agaagacaaggaagtccaca

SEQ ID NO: 7611 - DNA, 20 bp, Artificial Sequence
  chemically synthesized
gacaaggaagtccacagagt

SEQ ID NO: 7612 - DNA, 20 bp, Artificial Sequence
  chemically synthesized
acaaggaagtccacagagtc

SEQ ID NO: 7613 - DNA, 20 bp, Artificial Sequence
  chemically synthesized
caaggaagtccacagagtca

SEQ ID NO: 7614 - DNA, 20 bp, Artificial Sequence
  chemically synthesized
agtccacagagtcagggtcc

SEQ ID NO: 7615 - DNA, 20 bp, Artificial Sequence
  chemically synthesized
gtccacagagtcagggtcca

SEQ ID NO: 7616 - DNA, 20 bp, Artificial Sequence
  chemically synthesized
cagagtcagggtccaaggcc

SEQ ID NO: 7617 - DNA, 20 bp, Artificial Sequence
  chemically synthesized
agtcagggtccaaggcctag

SEQ ID NO: 7618 - DNA, 20 bp, Artificial Sequence
  chemically synthesized
gtcagggtccaaggcctaga

SEQ ID NO: 7619 - DNA, 20 bp, Artificial Sequence
  chemically synthesized
cctagaaggtgttctgtttg

SEQ ID NO: 7620 - DNA, 20 bp, Artificial Sequence
  chemically synthesized
ctagaaggtgttctgtttgc

SEQ ID NO: 7621 - DNA, 20 bp, Artificial Sequence
  chemically synthesized
gaaggtgttctgtttgcagg

SEQ ID NO: 7622 - DNA, 20 bp, Artificial Sequence
  chemically synthesized
gtttgcaggtggatgctgca

SEQ ID NO: 7623 - DNA, 20 bp, Artificial Sequence
  chemically synthesized
ttgcaggtggatgctgcaaa

SEQ ID NO: 7624 - DNA, 20 bp, Artificial Sequence
  chemically synthesized
gcaggtggatgctgcaaaga

SEQ ID NO: 7625 - DNA, 20 bp, Artificial Sequence
  chemically synthesized
caggtggatgctgcaaagag

SEQ ID NO: 7626 - DNA, 20 bp, Artificial Sequence
  chemically synthesized
ggtggatgctgcaaagagag

SEQ ID NO: 7627 - DNA, 20 bp, Artificial Sequence
  chemically synthesized
atgctgcaaagagaggagct

SEQ ID NO: 7628 - DNA, 20 bp, Artificial Sequence
  chemically synthesized
tgctgcaaagagaggagctc

SEQ ID NO: 7629 - DNA, 20 bp, Artificial Sequence
  chemically synthesized
gctgcaaagagaggagctca

SEQ ID NO: 7630 - DNA, 20 bp, Artificial Sequence
  chemically synthesized
caaagagaggagctcagggc

SEQ ID NO: 7631 - DNA, 20 bp, Artificial Sequence
  chemically synthesized
aaagagaggagctcagggct

SEQ ID NO: 7632 - DNA, 20 bp, Artificial Sequence
  chemically synthesized
gagctcagggctgggacaac

SEQ ID NO: 7633 - DNA, 20 bp, Artificial Sequence
  chemically synthesized
gctcagggctgggacaactg

SEQ ID NO: 7634 - DNA, 20 bp, Artificial Sequence
  chemically synthesized
tgggacaactggagctgctc

SEQ ID NO: 7635 - DNA, 20 bp, Artificial Sequence
  chemically synthesized
gggacaactggagctgctct

SEQ ID NO: 7636 - DNA, 20 bp, Artificial Sequence
  chemically synthesized
aactggagctgctctgggtc

SEQ ID NO: 7637 - DNA, 20 bp, Artificial Sequence
  chemically synthesized
ctggagctgctctgggtctg

SEQ ID NO: 7638 - DNA, 20 bp, Artificial Sequence
  chemically synthesized
tggagctgctctgggtctgg

SEQ ID NO: 7639 - DNA, 20 bp, Artificial Sequence
  chemically synthesized
agctgctctgggtctggagg

SEQ ID NO: 7640 - DNA, 20 bp, Artificial Sequence
  chemically synthesized
tgctctgggtctggaggcag

SEQ ID NO: 7641 - DNA, 20 bp, Artificial Sequence
  chemically synthesized
ctctgggtctggaggcagca

SEQ ID NO: 7642 - DNA, 20 bp, Artificial Sequence
  chemically synthesized
ctgggtctggaggcagcaga

SEQ ID NO: 7643 - DNA, 20 bp, Artificial Sequence
  chemically synthesized
tgggtctggaggcagcagag

SEQ ID NO: 7644 - DNA, 20 bp, Artificial Sequence
  chemically synthesized
gggtctggaggcagcagaga

SEQ ID NO: 7645 - DNA, 20 bp, Artificial Sequence
  chemically synthesized
gtctggaggcagcagagagg

SEQ ID NO: 7646 - DNA, 20 bp, Artificial Sequence
  chemically synthesized
gaggcagcagagagggagcc

SEQ ID NO: 7647 - DNA, 20 bp, Artificial Sequence
  chemically synthesized
agggagcccagctctgtgtg

SEQ ID NO: 7648 - DNA, 20 bp, Artificial Sequence
  chemically synthesized
gggagcccagctctgtgtgc

SEQ ID NO: 7649 - DNA, 20 bp, Artificial Sequence
  chemically synthesized
agcccagctctgtgtgcagg

SEQ ID NO: 7650 - DNA, 20 bp, Artificial Sequence
  chemically synthesized
gctctgtgtgcaggaagacg

SEQ ID NO: 7651 - DNA, 20 bp, Artificial Sequence
  chemically synthesized
ctctgtgtgcaggaagacgt

SEQ ID NO: 7652 - DNA, 20 bp, Artificial Sequence
  chemically synthesized
gcaggaagacgtgggtgtgt

SEQ ID NO: 7653 - DNA, 20 bp, Artificial Sequence
  chemically synthesized
ggtgtgtgagtgtacgtgtg

SEQ ID NO: 7654 - DNA, 20 bp, Artificial Sequence
  chemically synthesized
gtgtgtgagtgtacgtgtgt

SEQ ID NO: 7655 - DNA, 20 bp, Artificial Sequence
  chemically synthesized
gtgtacgtgtgtgggtgtgt

SEQ ID NO: 7656 - DNA, 20 bp, Artificial Sequence
  chemically synthesized
tgtacgtgtgtgggtgtgtc

SEQ ID NO: 7657 - DNA, 20 bp, Artificial Sequence
  chemically synthesized
gtgtgtcaggtgtgtgtgtg

SEQ ID NO: 7658 - DNA, 20 bp, Artificial Sequence
  chemically synthesized
tgtgtcaggtgtgtgtgtgt

SEQ ID NO: 7659 - DNA, 20 bp, Artificial Sequence
  chemically synthesized
tgtcaggtgtgtgtgtgtgg

SEQ ID NO: 7660 - DNA, 20 bp, Artificial Sequence
  chemically synthesized
gtcaggtgtgtgtgtgtggg

SEQ ID NO: 7661 - DNA, 20 bp, Artificial Sequence
  chemically synthesized
tcaggtgtgtgtgtgtggga

SEQ ID NO: 7662 - DNA, 20 bp, Artificial Sequence
  chemically synthesized
aggtgtgtgtgtgtgggagg

SEQ ID NO: 7663 - DNA, 20 bp, Artificial Sequence
  chemically synthesized
gggagtatgaatgtgtgcat

SEQ ID NO: 7664 - DNA, 20 bp, Artificial Sequence
  chemically synthesized
tagcatgcatatgcacatgt

SEQ ID NO: 7665 - DNA, 20 bp, Artificial Sequence
  chemically synthesized
gcatgcatatgcacatgtga

SEQ ID NO: 7666 - DNA, 20 bp, Artificial Sequence
  chemically synthesized
tgcatatgcacatgtgagag

SEQ ID NO: 7667 - DNA, 20 bp, Artificial Sequence
  chemically synthesized
gcatatgcacatgtgagagt

SEQ ID NO: 7668 - DNA, 20 bp, Artificial Sequence
  chemically synthesized
tgcacatgtgagagtgggta

SEQ ID NO: 7669 - DNA, 20 bp, Artificial Sequence
  chemically synthesized
acatgtgagagtgggtacag

SEQ ID NO: 7670 - DNA, 20 bp, Artificial Sequence
  chemically synthesized
atgtgagagtgggtacagca

SEQ ID NO: 7671 - DNA, 20 bp, Artificial Sequence
  chemically synthesized
agagtgggtacagcagagcg

SEQ ID NO: 7672 - DNA, 20 bp, Artificial Sequence
  chemically synthesized
gtacagcagagcgtggtcat

SEQ ID NO: 7673 - DNA, 20 bp, Artificial Sequence
  chemically synthesized
gtgtgcaaatgtgtgttttt

SEQ ID NO: 7674 - DNA, 20 bp, Artificial Sequence
  chemically synthesized
caaatgtgtgtttttgagtg

SEQ ID NO: 7675 - DNA, 20 bp, Artificial Sequence
  chemically synthesized
tgtgtgtttttgagtgaagt

SEQ ID NO: 7676 - DNA, 20 bp, Artificial Sequence
  chemically synthesized
gagtgaagtgagcaatgtgt

SEQ ID NO: 7677 - DNA, 20 bp, Artificial Sequence
  chemically synthesized
tgagcaatgtgtgagtgtgt

SEQ ID NO: 7678 - DNA, 20 bp, Artificial Sequence
  chemically synthesized
gtgagtgtgtgagtgtgtgt

SEQ ID NO: 7679 - DNA, 20 bp, Artificial Sequence
  chemically synthesized
gtgagtgtgtgtgagtttgt

SEQ ID NO: 7680 - DNA, 20 bp, Artificial Sequence
  chemically synthesized
tgagtgtgtgtgagtttgtg

SEQ ID NO: 7681 - DNA, 20 bp, Artificial Sequence
  chemically synthesized
gagtgtgtgtgagtttgtga

SEQ ID NO: 7682 - DNA, 20 bp, Artificial Sequence
  chemically synthesized
gggcatgtgaatgtgtgtgt

SEQ ID NO: 7683 - DNA, 20 bp, Artificial Sequence
  chemically synthesized
aatgtgtgtgtcagtgctgt

SEQ ID NO: 7684 - DNA, 20 bp, Artificial Sequence
  chemically synthesized
atgtgtgtgtcagtgctgtc

SEQ ID NO: 7685 - DNA, 20 bp, Artificial Sequence
  chemically synthesized
tgtgtgtgtcagtgctgtca

SEQ ID NO: 7686 - DNA, 20 bp, Artificial Sequence
  chemically synthesized
gtgtcagtgctgtcagggtg

SEQ ID NO: 7687 - DNA, 20 bp, Artificial Sequence
  chemically synthesized
cagtgctgtcagggtgcaga

SEQ ID NO: 7688 - DNA, 20 bp, Artificial Sequence
  chemically synthesized
tgtcagggtgcagatggatc

SEQ ID NO: 7689 - DNA, 20 bp, Artificial Sequence
  chemically synthesized
gtcagggtgcagatggatca

SEQ ID NO: 7690 - DNA, 20 bp, Artificial Sequence
  chemically synthesized
tcagggtgcagatggatcaa

SEQ ID NO: 7691 - DNA, 20 bp, Artificial Sequence
  chemically synthesized
cagggtgcagatggatcaag

SEQ ID NO: 7692 - DNA, 20 bp, Artificial Sequence
  chemically synthesized
ggtgcagatggatcaagggg

SEQ ID NO: 7693 - DNA, 20 bp, Artificial Sequence
  chemically synthesized
gtgcagatggatcaaggggc

SEQ ID NO: 7694 - DNA, 20 bp, Artificial Sequence
  chemically synthesized
gcagatggatcaaggggcag

SEQ ID NO: 7695 - DNA, 20 bp, Artificial Sequence
  chemically synthesized
agatggatcaaggggcagga

SEQ ID NO: 7696 - DNA, 20 bp, Artificial Sequence
  chemically synthesized
gatggatcaaggggcaggag

SEQ ID NO: 7697 - DNA, 20 bp, Artificial Sequence
  chemically synthesized
ggggcaggagaggtacctgt

SEQ ID NO: 7698 - DNA, 20 bp, Artificial Sequence
  chemically synthesized
aggtacctgtgagatgacct

SEQ ID NO: 7699 - DNA, 20 bp, Artificial Sequence
  chemically synthesized
ggtacctgtgagatgacctc

SEQ ID NO: 7700 - DNA, 20 bp, Artificial Sequence
  chemically synthesized
ctgtgagatgacctcgggct

SEQ ID NO: 7701 - DNA, 20 bp, Artificial Sequence
  chemically synthesized
tgtgagatgacctcgggctg

SEQ ID NO: 7702 - DNA, 20 bp, Artificial Sequence
  chemically synthesized
gtgagatgacctcgggctga

SEQ ID NO: 7703 - DNA, 20 bp, Artificial Sequence
  chemically synthesized
tgagatgacctcgggctgag

SEQ ID NO: 7704 - DNA, 20 bp, Artificial Sequence
  chemically synthesized
agatgacctcgggctgaggg

SEQ ID NO: 7705 - DNA, 20 bp, Artificial Sequence
  chemically synthesized
cgggctgaggggagcaaatt

SEQ ID NO: 7706 - DNA, 20 bp, Artificial Sequence
  chemically synthesized
tgaggggagcaaatttagtg

SEQ ID NO: 7707 - DNA, 20 bp, Artificial Sequence
  chemically synthesized
gagcaaatttagtgtggaac

SEQ ID NO: 7708 - DNA, 20 bp, Artificial Sequence
  chemically synthesized
agcaaatttagtgtggaacg

SEQ ID NO: 7709 - DNA, 20 bp, Artificial Sequence
  chemically synthesized
ttagtgtggaacgaggtttc

SEQ ID NO: 7710 - DNA, 20 bp, Artificial Sequence
  chemically synthesized
tagtgtggaacgaggtttct

SEQ ID NO: 7711 - DNA, 20 bp, Artificial Sequence
  chemically synthesized
agtgtggaacgaggtttcta

SEQ ID NO: 7712 - DNA, 20 bp, Artificial Sequence
  chemically synthesized
gtggaacgaggtttctaggg

SEQ ID NO: 7713 - DNA, 20 bp, Artificial Sequence
  chemically synthesized
aacgaggtttctagggaagc

SEQ ID NO: 7714 - DNA, 20 bp, Artificial Sequence
  chemically synthesized
acgaggtttctagggaagcg

SEQ ID NO: 7715 - DNA, 20 bp, Artificial Sequence
  chemically synthesized
cgaggtttctagggaagcga

SEQ ID NO: 7716 - DNA, 20 bp, Artificial Sequence
  chemically synthesized
tttctagggaagcgagggca

SEQ ID NO: 7717 - DNA, 20 bp, Artificial Sequence
  chemically synthesized
ttctagggaagcgagggcaa

SEQ ID NO: 7718 - DNA, 20 bp, Artificial Sequence
  chemically synthesized
tctagggaagcgagggcaaa

SEQ ID NO: 7719 - DNA, 20 bp, Artificial Sequence
  chemically synthesized
gaagcgagggcaaagggcgc

SEQ ID NO: 7720 - DNA, 20 bp, Artificial Sequence
  chemically synthesized
aagcgagggcaaagggcgct

SEQ ID NO: 7721 - DNA, 20 bp, Artificial Sequence
  chemically synthesized
agcgagggcaaagggcgctg

SEQ ID NO: 7722 - DNA, 20 bp, Artificial Sequence
  chemically synthesized
cgagggcaaagggcgctggg

SEQ ID NO: 7723 - DNA, 20 bp, Artificial Sequence
  chemically synthesized
gagggcaaagggcgctgggg

SEQ ID NO: 7724 - DNA, 20 bp, Artificial Sequence
  chemically synthesized
gggcaaagggcgctggggag

SEQ ID NO: 7725 - DNA, 20 bp, Artificial Sequence
  chemically synthesized
ggcaaagggcgctggggagg

SEQ ID NO: 7726 - DNA, 20 bp, Artificial Sequence
  chemically synthesized
gctggggaggaggccttgcg

SEQ ID NO: 7727 - DNA, 20 bp, Artificial Sequence
  chemically synthesized
ggggaggaggccttgcgtgg

SEQ ID NO: 7728 - DNA, 20 bp, Artificial Sequence
  chemically synthesized
gggaggaggccttgcgtggt

SEQ ID NO: 7729 - DNA, 20 bp, Artificial Sequence
  chemically synthesized
ggaggaggccttgcgtggtg

SEQ ID NO: 7730 - DNA, 20 bp, Artificial Sequence
  chemically synthesized
gaggaggccttgcgtggtgg

SEQ ID NO: 7731 - DNA, 20 bp, Artificial Sequence
  chemically synthesized
ggccttgcgtggtgggggat

SEQ ID NO: 7732 - DNA, 20 bp, Artificial Sequence
  chemically synthesized
gccttgcgtggtgggggatg

SEQ ID NO: 7733 - DNA, 20 bp, Artificial Sequence
  chemically synthesized
gtggtgggggatgaggacaa

SEQ ID NO: 7734 - DNA, 20 bp, Artificial Sequence
  chemically synthesized
tggtgggggatgaggacaac

SEQ ID NO: 7735 - DNA, 20 bp, Artificial Sequence
  chemically synthesized
tgggggatgaggacaacagg

SEQ ID NO: 7736 - DNA, 20 bp, Artificial Sequence
  chemically synthesized
gggggatgaggacaacaggt

SEQ ID NO: 7737 - DNA, 20 bp, Artificial Sequence
  chemically synthesized
tgaggacaacaggtgggacc

SEQ ID NO: 7738 - DNA, 20 bp, Artificial Sequence
  chemically synthesized
aggacaacaggtgggacctg

SEQ ID NO: 7739 - DNA, 20 bp, Artificial Sequence
  chemically synthesized
ggacaacaggtgggacctgg

SEQ ID NO: 7740 - DNA, 20 bp, Artificial Sequence
  chemically synthesized
gacaacaggtgggacctgga

SEQ ID NO: 7741 - DNA, 20 bp, Artificial Sequence
  chemically synthesized
gggacctggagggttgtgct

SEQ ID NO: 7742 - DNA, 20 bp, Artificial Sequence
  chemically synthesized
gacctggagggttgtgcttg

SEQ ID NO: 7743 - DNA, 20 bp, Artificial Sequence
  chemically synthesized
cctggagggttgtgcttgga

SEQ ID NO: 7744 - DNA, 20 bp, Artificial Sequence
  chemically synthesized
ggagggttgtgcttggagag

SEQ ID NO: 7745 - DNA, 20 bp, Artificial Sequence
  chemically synthesized
gagggttgtgcttggagagt

SEQ ID NO: 7746 - DNA, 20 bp, Artificial Sequence
  chemically synthesized
tgtgcttggagagtgggcta

SEQ ID NO: 7747 - DNA, 20 bp, Artificial Sequence
  chemically synthesized
gcttggagagtgggctatgg

SEQ ID NO: 7748 - DNA, 20 bp, Artificial Sequence
  chemically synthesized
tgggctatggtggaatgacc

SEQ ID NO: 7749 - DNA, 20 bp, Artificial Sequence
  chemically synthesized
tggtggaatgacccagattt

SEQ ID NO: 7750 - DNA, 20 bp, Artificial Sequence
  chemically synthesized
ggtggaatgacccagattta

SEQ ID NO: 7751 - DNA, 20 bp, Artificial Sequence
  chemically synthesized
cccagatttaaggatctcaa

SEQ ID NO: 7752 - DNA, 20 bp, Artificial Sequence
  chemically synthesized
taaggatctcaatggaattt

SEQ ID NO: 7753 - DNA, 20 bp, Artificial Sequence
  chemically synthesized
ggatctcaatggaattttgg

SEQ ID NO: 7754 - DNA, 20 bp, Artificial Sequence
  chemically synthesized
gatctcaatggaattttggc

SEQ ID NO: 7755 - DNA, 20 bp, Artificial Sequence
  chemically synthesized
atctcaatggaattttggca

SEQ ID NO: 7756 - DNA, 20 bp, Artificial Sequence
  chemically synthesized
tctcaatggaattttggcag

SEQ ID NO: 7757 - DNA, 20 bp, Artificial Sequence
  chemically synthesized
tcaatggaattttggcaggg

SEQ ID NO: 7758 - DNA, 20 bp, Artificial Sequence
  chemically synthesized
caatggaattttggcagggg

SEQ ID NO: 7759 - DNA, 20 bp, Artificial Sequence
  chemically synthesized
aatggaattttggcagggga

SEQ ID NO: 7760 - DNA, 20 bp, Artificial Sequence
  chemically synthesized
tggcaggggagggactgttc

SEQ ID NO: 7761 - DNA, 20 bp, Artificial Sequence
  chemically synthesized
ggggagggactgttccagta

SEQ ID NO: 7762 - DNA, 20 bp, Artificial Sequence
  chemically synthesized
gactgttccagtatggattt

SEQ ID NO: 7763 - DNA, 20 bp, Artificial Sequence
  chemically synthesized
actgttccagtatggatttt

SEQ ID NO: 7764 - DNA, 20 bp, Artificial Sequence
  chemically synthesized
gttccagtatggattttagg

SEQ ID NO: 7765 - DNA, 20 bp, Artificial Sequence
  chemically synthesized
tatggattttaggaagaaca

SEQ ID NO: 7766 - DNA, 20 bp, Artificial Sequence
  chemically synthesized
atggattttaggaagaacac

SEQ ID NO: 7767 - DNA, 20 bp, Artificial Sequence
  chemically synthesized
tggattttaggaagaacaca

SEQ ID NO: 7768 - DNA, 20 bp, Artificial Sequence
  chemically synthesized
tttaggaagaacacagggcc

SEQ ID NO: 7769 - DNA, 20 bp, Artificial Sequence
  chemically synthesized
agaacacagggcccagcttc

SEQ ID NO: 7770 - DNA, 20 bp, Artificial Sequence
  chemically synthesized
aacacagggcccagcttctg

SEQ ID NO: 7771 - DNA, 20 bp, Artificial Sequence
  chemically synthesized
gcttctggagtctccaatct

SEQ ID NO: 7772 - DNA, 20 bp, Artificial Sequence
  chemically synthesized
cttctggagtctccaatctg

SEQ ID NO: 7773 - DNA, 20 bp, Artificial Sequence
  chemically synthesized
ttctggagtctccaatctga

SEQ ID NO: 7774 - DNA, 20 bp, Artificial Sequence
  chemically synthesized
tctggagtctccaatctgag

SEQ ID NO: 7775 - DNA, 20 bp, Artificial Sequence
  chemically synthesized
gagtctccaatctgagggga

SEQ ID NO: 7776 - DNA, 20 bp, Artificial Sequence
  chemically synthesized
agtctccaatctgaggggac

SEQ ID NO: 7777 - DNA, 20 bp, Artificial Sequence
  chemically synthesized
tctccaatctgaggggacag

SEQ ID NO: 7778 - DNA, 20 bp, Artificial Sequence
  chemically synthesized
atctgaggggacaggagcct

SEQ ID NO: 7779 - DNA, 20 bp, Artificial Sequence
  chemically synthesized
tgaggggacaggagccttag

SEQ ID NO: 7780 - DNA, 20 bp, Artificial Sequence
  chemically synthesized
aggggacaggagccttagaa

SEQ ID NO: 7781 - DNA, 20 bp, Artificial Sequence
  chemically synthesized
acaggagccttagaagagct

SEQ ID NO: 7782 - DNA, 20 bp, Artificial Sequence
  chemically synthesized
gccttagaagagctgagact

SEQ ID NO: 7783 - DNA, 20 bp, Artificial Sequence
  chemically synthesized
ccttagaagagctgagacta

SEQ ID NO: 7784 - DNA, 20 bp, Artificial Sequence
  chemically synthesized
aagagctgagactaaggccc

SEQ ID NO: 7785 - DNA, 20 bp, Artificial Sequence
  chemically synthesized
agagctgagactaaggcccg

SEQ ID NO: 7786 - DNA, 20 bp, Artificial Sequence
  chemically synthesized
gactaaggcccgaggtgatc

SEQ ID NO: 7787 - DNA, 20 bp, Artificial Sequence
  chemically synthesized
ctaaggcccgaggtgatctg

SEQ ID NO: 7788 - DNA, 20 bp, Artificial Sequence
  chemically synthesized
taaggcccgaggtgatctgg

SEQ ID NO: 7789 - DNA, 20 bp, Artificial Sequence
  chemically synthesized
gatctggaggcctctgccac

SEQ ID NO: 7790 - DNA, 20 bp, Artificial Sequence
  chemically synthesized
tggaggcctctgccactggc

SEQ ID NO: 7791 - DNA, 20 bp, Artificial Sequence
  chemically synthesized
ggcctctgccactggctgga

SEQ ID NO: 7792 - DNA, 20 bp, Artificial Sequence
  chemically synthesized
gcctctgccactggctggat

SEQ ID NO: 7793 - DNA, 20 bp, Artificial Sequence
  chemically synthesized
ctctgccactggctggatgg

SEQ ID NO: 7794 - DNA, 20 bp, Artificial Sequence
  chemically synthesized
tctgccactggctggatggg

SEQ ID NO: 7795 - DNA, 20 bp, Artificial Sequence
  chemically synthesized
gatgggaggaaaaccattca

SEQ ID NO: 7796 - DNA, 20 bp, Artificial Sequence
  chemically synthesized
cattcacagatcccccttct

SEQ ID NO: 7797 - DNA, 20 bp, Artificial Sequence
  chemically synthesized
attcacagatcccccttctc

SEQ ID NO: 7798 - DNA, 20 bp, Artificial Sequence
  chemically synthesized
cccttctcaggatgtgtgcc

SEQ ID NO: 7799 - DNA, 20 bp, Artificial Sequence
  chemically synthesized
ccttctcaggatgtgtgcct

SEQ ID NO: 7800 - DNA, 20 bp, Artificial Sequence
  chemically synthesized
tctcaggatgtgtgcctagg

SEQ ID NO: 7801 - DNA, 20 bp, Artificial Sequence
  chemically synthesized
ctcaggatgtgtgcctaggc

SEQ ID NO: 7802 - DNA, 20 bp, Artificial Sequence
  chemically synthesized
tcaggatgtgtgcctaggca

SEQ ID NO: 7803 - DNA, 20 bp, Artificial Sequence
  chemically synthesized
gatgtgtgcctaggcagggc

SEQ ID NO: 7804 - DNA, 20 bp, Artificial Sequence
  chemically synthesized
atgtgtgcctaggcagggcc

SEQ ID NO: 7805 - DNA, 20 bp, Artificial Sequence
  chemically synthesized
cccgccccctgtgcgtctcc

SEQ ID NO: 7806 - DNA, 20 bp, Artificial Sequence
  chemically synthesized
ctgtgcgtctcccagtcccc

SEQ ID NO: 7807 - DNA, 20 bp, Artificial Sequence
  chemically synthesized
gtctcccagtcccccagctc

SEQ ID NO: 7808 - DNA, 20 bp, Artificial Sequence
  chemically synthesized
tctcccagtcccccagctcc

SEQ ID NO: 7809 - DNA, 20 bp, Artificial Sequence
  chemically synthesized
agtcccccagctccaggatc

SEQ ID NO: 7810 - DNA, 20 bp, Artificial Sequence
  chemically synthesized
gtcccccagctccaggatcc

SEQ ID NO: 7811 - DNA, 20 bp, Artificial Sequence
  chemically synthesized
caggatccgggctttgcaca

SEQ ID NO: 7812 - DNA, 20 bp, Artificial Sequence
  chemically synthesized
acagctgatgtgaatatcct

SEQ ID NO: 7813 - DNA, 20 bp, Artificial Sequence
  chemically synthesized
aatatcctgagtcgtgtgca

SEQ ID NO: 7814 - DNA, 20 bp, Artificial Sequence
  chemically synthesized
atatcctgagtcgtgtgcat

SEQ ID NO: 7815 - DNA, 20 bp, Artificial Sequence
  chemically synthesized
gtgcatgggtgtgtgtgcac

SEQ ID NO: 7816 - DNA, 20 bp, Artificial Sequence
  chemically synthesized
tgggtgtgtgtgcaccagat

SEQ ID NO: 7817 - DNA, 20 bp, Artificial Sequence
  chemically synthesized
tgcgtgtgtatatttataca

SEQ ID NO: 7818 - DNA, 20 bp, Artificial Sequence
  chemically synthesized
tatatttatacatggtaata

SEQ ID NO: 7819 - DNA, 20 bp, Artificial Sequence
  chemically synthesized
atatttatacatggtaatat

SEQ ID NO: 7820 - DNA, 20 bp, Artificial Sequence
  chemically synthesized
atacatggtaatatgggtgc

SEQ ID NO: 7821 - DNA, 20 bp, Artificial Sequence
  chemically synthesized
taatatgggtgcgagtgtgt

SEQ ID NO: 7822 - DNA, 20 bp, Artificial Sequence
  chemically synthesized
atatgggtgcgagtgtgtaa

SEQ ID NO: 7823 - DNA, 20 bp, Artificial Sequence
  chemically synthesized
tgtgtgtaatgctcaaatgc

SEQ ID NO: 7824 - DNA, 20 bp, Artificial Sequence
  chemically synthesized
gtgtgtaatgctcaaatgct

SEQ ID NO: 7825 - DNA, 20 bp, Artificial Sequence
  chemically synthesized
tgtgtaatgctcaaatgctg

SEQ ID NO: 7826 - DNA, 20 bp, Artificial Sequence
  chemically synthesized
atgctcaaatgctggggtca

SEQ ID NO: 7827 - DNA, 20 bp, Artificial Sequence
  chemically synthesized
cctatgatgaccccccccca

SEQ ID NO: 7828 - DNA, 20 bp, Artificial Sequence
  chemically synthesized
ccccaaccaatccccccgcc

SEQ ID NO: 7829 - DNA, 20 bp, Artificial Sequence
  chemically synthesized
cccaaccaatccccccgccc

SEQ ID NO: 7830 - DNA, 20 bp, Artificial Sequence
  chemically synthesized
ccgcccaggttatgcctcct

SEQ ID NO: 7831 - DNA, 20 bp, Artificial Sequence
  chemically synthesized
cgcccaggttatgcctcctc

SEQ ID NO: 7832 - DNA, 20 bp, Artificial Sequence
  chemically synthesized
ggttatgcctcctcaggctt

SEQ ID NO: 7833 - DNA, 20 bp, Artificial Sequence
  chemically synthesized
ggtgccctgtctttaccctc

SEQ ID NO: 7834 - DNA, 20 bp, Artificial Sequence
  chemically synthesized
accctccggctccccacacc

SEQ ID NO: 7835 - DNA, 20 bp, Artificial Sequence
  chemically synthesized
ccctccggctccccacaccc

SEQ ID NO: 7836 - DNA, 20 bp, Artificial Sequence
  chemically synthesized
gctccccacacccaggctgc

SEQ ID NO: 7837 - DNA, 20 bp, Artificial Sequence
  chemically synthesized
ctcctgatgcccctctccca

SEQ ID NO: 7838 - DNA, 20 bp, Artificial Sequence
  chemically synthesized
tcctgatgcccctctcccac

SEQ ID NO: 7839 - DNA, 20 bp, Artificial Sequence
  chemically synthesized
cctgatgcccctctcccaca

SEQ ID NO: 7840 - DNA, 20 bp, Artificial Sequence
  chemically synthesized
ccacagggccacctcctgcc

SEQ ID NO: 7841 - DNA, 20 bp, Artificial Sequence
  chemically synthesized
gccacctcctgcccagcccc

SEQ ID NO: 7842 - DNA, 20 bp, Artificial Sequence
  chemically synthesized
ctcctgcccagcccctggca

SEQ ID NO: 7843 - DNA, 20 bp, Artificial Sequence
  chemically synthesized
ggcacagcgtctctgctcca

SEQ ID NO: 7844 - DNA, 20 bp, Artificial Sequence
  chemically synthesized
ctctgctccatggtctgctt

SEQ ID NO: 7845 - DNA, 20 bp, Artificial Sequence
  chemically synthesized
tgcttcagtctgcttgccct

SEQ ID NO: 7846 - DNA, 20 bp, Artificial Sequence
  chemically synthesized
gagcttcaacatcctgctgc

SEQ ID NO: 7847 - DNA, 20 bp, Artificial Sequence
  chemically synthesized
cttcaacatcctgctgctgg

SEQ ID NO: 7848 - DNA, 20 bp, Artificial Sequence
  chemically synthesized
ctggtggtcatctgtgtgac

SEQ ID NO: 7849 - DNA, 20 bp, Artificial Sequence
  chemically synthesized
tggtggtcatctgtgtgact

SEQ ID NO: 7850 - DNA, 20 bp, Artificial Sequence
  chemically synthesized
atctgtgtgactgggtccca

SEQ ID NO: 7851 - DNA, 20 bp, Artificial Sequence
  chemically synthesized
gtgtgactgggtcccaaagt

SEQ ID NO: 7852 - DNA, 20 bp, Artificial Sequence
  chemically synthesized
tgtgactgggtcccaaagtg

SEQ ID NO: 7853 - DNA, 20 bp, Artificial Sequence
  chemically synthesized
gtgactgggtcccaaagtga

SEQ ID NO: 7854 - DNA, 20 bp, Artificial Sequence
  chemically synthesized
gggtcccaaagtgagggtca

SEQ ID NO: 7855 - DNA, 20 bp, Artificial Sequence
  chemically synthesized
ggtcccaaagtgagggtcac

SEQ ID NO: 7856 - DNA, 20 bp, Artificial Sequence
  chemically synthesized
gtcccaaagtgagggtcacg

SEQ ID NO: 7857 - DNA, 20 bp, Artificial Sequence
  chemically synthesized
tcccaaagtgagggtcacgg

SEQ ID NO: 7858 - DNA, 20 bp, Artificial Sequence
  chemically synthesized
aaagtgagggtcacgggggc

SEQ ID NO: 7859 - DNA, 20 bp, Artificial Sequence
  chemically synthesized
gtgagggtcacgggggccag

SEQ ID NO: 7860 - DNA, 20 bp, Artificial Sequence
  chemically synthesized
tgagggtcacgggggccagc

SEQ ID NO: 7861 - DNA, 20 bp, Artificial Sequence
  chemically synthesized
gagggtcacgggggccagca

SEQ ID NO: 7862 - DNA, 20 bp, Artificial Sequence
  chemically synthesized
gtcacgggggccagcaggga

SEQ ID NO: 7863 - DNA, 20 bp, Artificial Sequence
  chemically synthesized
tcacgggggccagcagggat

SEQ ID NO: 7864 - DNA, 20 bp, Artificial Sequence
  chemically synthesized
gggggccagcagggatgggc

SEQ ID NO: 7865 - DNA, 20 bp, Artificial Sequence
  chemically synthesized
ggggccagcagggatgggca

SEQ ID NO: 7866 - DNA, 20 bp, Artificial Sequence
  chemically synthesized
gggccagcagggatgggcaa

SEQ ID NO: 7867 - DNA, 20 bp, Artificial Sequence
  chemically synthesized
ggccagcagggatgggcaag

SEQ ID NO: 7868 - DNA, 20 bp, Artificial Sequence
  chemically synthesized
cagcagggatgggcaagggg

SEQ ID NO: 7869 - DNA, 20 bp, Artificial Sequence
  chemically synthesized
agcagggatgggcaaggggt

SEQ ID NO: 7870 - DNA, 20 bp, Artificial Sequence
  chemically synthesized
gcagggatgggcaaggggta

SEQ ID NO: 7871 - DNA, 20 bp, Artificial Sequence
  chemically synthesized
ggatgggcaaggggtaggga

SEQ ID NO: 7872 - DNA, 20 bp, Artificial Sequence
  chemically synthesized
atgggcaaggggtagggaaa

SEQ ID NO: 7873 - DNA, 20 bp, Artificial Sequence
  chemically synthesized
aaggggtagggaaagagaca

SEQ ID NO: 7874 - DNA, 20 bp, Artificial Sequence
  chemically synthesized
aggggtagggaaagagacat

SEQ ID NO: 7875 - DNA, 20 bp, Artificial Sequence
  chemically synthesized
ggtagggaaagagacatggg

SEQ ID NO: 7876 - DNA, 20 bp, Artificial Sequence
  chemically synthesized
agggaaagagacatgggcag

SEQ ID NO: 7877 - DNA, 20 bp, Artificial Sequence
  chemically synthesized
acacagatgaccaccagcag

SEQ ID NO: 7878 - DNA, 20 bp, Artificial Sequence
  chemically synthesized
gggcatcaggagccggcagc

SEQ ID NO: 7879 - DNA, 20 bp, Artificial Sequence
  chemically synthesized
agcctgggtgtggggagccg

SEQ ID NO: 7880 - DNA, 20 bp, Artificial Sequence
  chemically synthesized
aggaggcataacctgggcgg

SEQ ID NO: 7881 - DNA, 20 bp, Artificial Sequence
  chemically synthesized
gattggttggggccatgggg

SEQ ID NO: 7882 - DNA, 20 bp, Artificial Sequence
  chemically synthesized
acacacccatgcacacgact

SEQ ID NO: 7883 - DNA, 20 bp, Artificial Sequence
  chemically synthesized
acatcagctgtgtgcaaagc

SEQ ID NO: 7884 - DNA, 20 bp, Artificial Sequence
  chemically synthesized
taggcacacatcctgagaag

SEQ ID NO: 7885 - DNA, 20 bp, Artificial Sequence
  chemically synthesized
catcctgagaagggggatct

SEQ ID NO: 7886 - DNA, 20 bp, Artificial Sequence
  chemically synthesized
ttccattgagatccttaaat

SEQ ID NO: 7887 - DNA, 20 bp, Artificial Sequence
  chemically synthesized
gggaggctcagtcaggggcc

SEQ ID NO: 7888 - DNA, 20 bp, Artificial Sequence
  chemically synthesized
ggtcacttcctgccactgtc

SEQ ID NO: 7889 - DNA, 20 bp, Artificial Sequence
  chemically synthesized
accaagctggccctccatgg

SEQ ID NO: 7890 - DNA, 20 bp, Artificial Sequence
  chemically synthesized
tcttcagcaccctccactca

SEQ ID NO: 7891 - DNA, 20 bp, Artificial Sequence
  chemically synthesized
cgacttatcaactcccaatg

SEQ ID NO: 7892 - DNA, 20 bp, Artificial Sequence
  chemically synthesized
ccctgaaaccagactgccca

SEQ ID NO: 7893 - DNA, 20 bp, Artificial Sequence
  chemically synthesized
tcacagtcgtagctacccga

SEQ ID NO: 7894 - DNA, 20 bp, Artificial Sequence
  chemically synthesized
tagctacccgattggattgc

SEQ ID NO: 7895 - DNA, 20 bp, Artificial Sequence
  chemically synthesized
tggattgctcggataattag

SEQ ID NO: 7896 - DNA, 20 bp, Artificial Sequence
  chemically synthesized
aaaagtttgaacataaaaga

SEQ ID NO: 7897 - DNA, 20 bp, Artificial Sequence
  chemically synthesized
cagggtctgcccaagatggg

SEQ ID NO: 7898 - DNA, 20 bp, Artificial Sequence
  chemically synthesized
actctggacatcaggcaagg

SEQ ID NO: 7899 - DNA, 20 bp, Artificial Sequence
  chemically synthesized
aggaggagtaaagatccctg

SEQ ID NO: 7900 - DNA, 20 bp, Artificial Sequence
  chemically synthesized
accccagcttactgtttgga

SEQ ID NO: 7901 - DNA, 20 bp, Artificial Sequence
  chemically synthesized
cacgttgaggagatggagct

SEQ ID NO: 7902 - DNA, 20 bp, Artificial Sequence
  chemically synthesized
ccgaggagaccaaaacaatt

SEQ ID NO: 7903 - DNA, 20 bp, Artificial Sequence
  chemically synthesized
caaagctcaagaacatttag

SEQ ID NO: 7904 - DNA, 20 bp, Artificial Sequence
  chemically synthesized
aaaagagatccagaactgac

SEQ ID NO: 7905 - DNA, 20 bp, Artificial Sequence
  chemically synthesized
tccagaactgacacggatgc

SEQ ID NO: 7906 - DNA, 20 bp, Artificial Sequence
  chemically synthesized
ggatgctagaattagcaggc

SEQ ID NO: 7907 - DNA, 20 bp, Artificial Sequence
  chemically synthesized
attatgttcaaaaaattaag

SEQ ID NO: 7908 - DNA, 20 bp, Artificial Sequence
  chemically synthesized
aaaaattaagtagaattgtg

SEQ ID NO: 7909 - DNA, 20 bp, Artificial Sequence
  chemically synthesized
tagaattgtggaggatattt

SEQ ID NO: 7910 - DNA, 20 bp, Artificial Sequence
  chemically synthesized
caggcgccgtggctcacgcc

SEQ ID NO: 7911 - DNA, 20 bp, Artificial Sequence
  chemically synthesized
tactcgggaggctgaggcag

SEQ ID NO: 7912 - DNA, 20 bp, Artificial Sequence
  chemically synthesized
gaaagaaaagaaaaaacaca

SEQ ID NO: 7913 - DNA, 20 bp, Artificial Sequence
  chemically synthesized
aaaatttagggccaggcact

SEQ ID NO: 7914 - DNA, 20 bp, Artificial Sequence
  chemically synthesized
ctttgggaggtcgacacggg

SEQ ID NO: 7915 - DNA, 20 bp, Artificial Sequence
  chemically synthesized
tacctgggaggctgaagtgg

SEQ ID NO: 7916 - DNA, 20 bp, Artificial Sequence
  chemically synthesized
cccaggaggtggaggccaca

SEQ ID NO: 7917 - DNA, 20 bp, Artificial Sequence
  chemically synthesized
ctgcattccagcctgggcaa

SEQ ID NO: 7918 - DNA, 20 bp, Artificial Sequence
  chemically synthesized
aatgaaacactgggagaaaa

SEQ ID NO: 7919 - DNA, 20 bp, Artificial Sequence
  chemically synthesized
aaagaattaaaaaatggaaa

SEQ ID NO: 7920 - DNA, 20 bp, Artificial Sequence
  chemically synthesized
aattaaaaaatggaaagaga

SEQ ID NO: 7921 - DNA, 20 bp, Artificial Sequence
  chemically synthesized
tgaaatctttaaaagaaaaa

SEQ ID NO: 7922 - DNA, 20 bp, Artificial Sequence
  chemically synthesized
agcagcatcccgtattctct

SEQ ID NO: 7923 - DNA, 20 bp, Artificial Sequence
  chemically synthesized
ctctgagtgttcactatgta

SEQ ID NO: 7924 - DNA, 20 bp, Artificial Sequence
  chemically synthesized
accgggtgccgtgtgggcac

SEQ ID NO: 7925 - DNA, 20 bp, Artificial Sequence
  chemically synthesized
tgggcactggagttgcagag

SEQ ID NO: 7926 - DNA, 20 bp, Artificial Sequence
  chemically synthesized
aggagatgctactggtgttc

SEQ ID NO: 7927 - DNA, 20 bp, Artificial Sequence
  chemically synthesized
tccctcggttggccagcctc

SEQ ID NO: 7928 - DNA, 20 bp, Artificial Sequence
  chemically synthesized
gttggccagcctcaggaatg

SEQ ID NO: 7929 - DNA, 20 bp, Artificial Sequence
  chemically synthesized
tacttgggaggctgaggtgg

SEQ ID NO: 7930 - DNA, 20 bp, Artificial Sequence
  chemically synthesized
tgggaggatggcttgagccc

SEQ ID NO: 7931 - DNA, 20 bp, Artificial Sequence
  chemically synthesized
tcagtcaagatttattacag

SEQ ID NO: 7932 - DNA, 20 bp, Artificial Sequence
  chemically synthesized
tattacagaaggatccaggg

SEQ ID NO: 7933 - DNA, 20 bp, Artificial Sequence
  chemically synthesized
tcttgggagatgagaggagc

SEQ ID NO: 7934 - DNA, 20 bp, Artificial Sequence
  chemically synthesized
tgagaggagcagggatcttc

SEQ ID NO: 7935 - DNA, 20 bp, Artificial Sequence
  chemically synthesized
cattcactcacacacacaca

SEQ ID NO: 7936 - DNA, 20 bp, Artificial Sequence
  chemically synthesized
acacacacacagagtcccag

SEQ ID NO: 7937 - DNA, 20 bp, Artificial Sequence
  chemically synthesized
catacgaggcacatgtgttc

SEQ ID NO: 7938 - DNA, 20 bp, Artificial Sequence
  chemically synthesized
cctctggcacatgcctttcc

SEQ ID NO: 7939 - DNA, 20 bp, Artificial Sequence
  chemically synthesized
acatgcctttcctggggtcc

SEQ ID NO: 7940 - DNA, 20 bp, Artificial Sequence
  chemically synthesized
ggtgaggtgagggaacaagc

SEQ ID NO: 7941 - DNA, 20 bp, Artificial Sequence
  chemically synthesized
ccctcctcagtccctgttca

SEQ ID NO: 7942 - DNA, 20 bp, Artificial Sequence
  chemically synthesized
cctcagtccctgttcacaga

SEQ ID NO: 7943 - DNA, 20 bp, Artificial Sequence
  chemically synthesized
tgcacacttgcctttcaaaa

SEQ ID NO: 7944 - DNA, 20 bp, Artificial Sequence
  chemically synthesized
caaaaatggatttcctctcc

SEQ ID NO: 7945 - DNA, 20 bp, Artificial Sequence
  chemically synthesized
cctctcctgggattcagcct

SEQ ID NO: 7946 - DNA, 20 bp, Artificial Sequence
  chemically synthesized
tggcccctcaccttgatgga

SEQ ID NO: 7947 - DNA, 20 bp, Artificial Sequence
  chemically synthesized
ttttcctccgagctcagctg

SEQ ID NO: 7948 - DNA, 20 bp, Artificial Sequence
  chemically synthesized
attcacgtggaggttgatgg

SEQ ID NO: 7949 - DNA, 20 bp, Artificial Sequence
  chemically synthesized
gttgatggtgggatggaacg

SEQ ID NO: 7950 - DNA, 20 bp, Artificial Sequence
  chemically synthesized
gggatggaacgcagggtcgg

SEQ ID NO: 7951 - DNA, 20 bp, Artificial Sequence
  chemically synthesized
aacgcagggtcggaggggtt

SEQ ID NO: 7952 - DNA, 20 bp, Artificial Sequence
  chemically synthesized
gaggggttcggggtggtggc

SEQ ID NO: 7953 - DNA, 20 bp, Artificial Sequence
  chemically synthesized
gttcggggtggtggcctggg

SEQ ID NO: 7954 - DNA, 20 bp, Artificial Sequence
  chemically synthesized
atcccaccatcaacctccac

SEQ ID NO: 7955 - DNA, 20 bp, Artificial Sequence
  chemically synthesized
aggggccaggcactcgcagg

SEQ ID NO: 7956 - DNA, 20 bp, Artificial Sequence
  chemically synthesized
tgtgcacgtatgtgcatatg

SEQ ID NO: 7957 - DNA, 20 bp, Artificial Sequence
  chemically synthesized
ctgggactctgtgtgtgtgt

SEQ ID NO: 7958 - DNA, 20 bp, Artificial Sequence
  chemically synthesized
gactctgtgtgtgtgtgtga

SEQ ID NO: 7959 - DNA, 20 bp, Artificial Sequence
  chemically synthesized
tgtgtatgtcgtgtatgtga

SEQ ID NO: 7960 - DNA, 20 bp, Artificial Sequence
  chemically synthesized
tgagagggtatgttgtgtgt

SEQ ID NO: 7961 - DNA, 20 bp, Artificial Sequence
  chemically synthesized
gtgttgtgtgtgtatgttgt

SEQ ID NO: 7962 - DNA, 20 bp, Artificial Sequence
  chemically synthesized
atgttgtgtgtatcttgtgt

SEQ ID NO: 7963 - DNA, 20 bp, Artificial Sequence
  chemically synthesized
tgtgcatgtgtgtatgttgt

SEQ ID NO: 7964 - DNA, 20 bp, Artificial Sequence
  chemically synthesized
tgcgagtgtatgttgtgtat

SEQ ID NO: 7965 - DNA, 20 bp, Artificial Sequence
  chemically synthesized
tgtgtgtatgtatgttgtgt

SEQ ID NO: 7966 - DNA, 20 bp, Artificial Sequence
  chemically synthesized
gtgttgtgtgtgtgtattgt

SEQ ID NO: 7967 - DNA, 20 bp, Artificial Sequence
  chemically synthesized
tatgtatgtttgtgtgttgt

SEQ ID NO: 7968 - DNA, 20 bp, Artificial Sequence
  chemically synthesized
tgtgcgtgtgtgtatgttgt

SEQ ID NO: 7969 - DNA, 20 bp, Artificial Sequence
  chemically synthesized
gtgtgttgtgtgtgtatgtt

SEQ ID NO: 7970 - DNA, 20 bp, Artificial Sequence
  chemically synthesized
gtgttatgtatgttgtgtgt

SEQ ID NO: 7971 - DNA, 20 bp, Artificial Sequence
  chemically synthesized
tgtgtgtgtgagtgtgttgc

SEQ ID NO: 7972 - DNA, 20 bp, Artificial Sequence
  chemically synthesized
tgtgtgtgtgtgtgtagagg

SEQ ID NO: 7973 - DNA, 20 bp, Artificial Sequence
  chemically synthesized
tgtgtgtgtgtagaggtggg

SEQ ID NO: 7974 - DNA, 20 bp, Artificial Sequence
  chemically synthesized
tgtgtagaggtggggtgagt

SEQ ID NO: 7975 - DNA, 20 bp, Artificial Sequence
  chemically synthesized
tagaggtggggtgagttggg

SEQ ID NO: 7976 - DNA, 20 bp, Artificial Sequence
  chemically synthesized
tcatctcccaagacccttcc

SEQ ID NO: 7977 - DNA, 20 bp, Artificial Sequence
  chemically synthesized
gacattttttttttagagac

SEQ ID NO: 7978 - DNA, 20 bp, Artificial Sequence
  chemically synthesized
tagagacaggagtgtagtgg

SEQ ID NO: 7979 - DNA, 20 bp, Artificial Sequence
  chemically synthesized
aaaaaaattttttagagaaa

SEQ ID NO: 7980 - DNA, 20 bp, Artificial Sequence
  chemically synthesized
taggcagaagggcaagagcc

SEQ ID NO: 7981 - DNA, 20 bp, Artificial Sequence
  chemically synthesized
agggcaagagccaggaatgg

SEQ ID NO: 7982 - DNA, 20 bp, Artificial Sequence
  chemically synthesized
aatggaggagtgtcaggtgt

SEQ ID NO: 7983 - DNA, 20 bp, Artificial Sequence
  chemically synthesized
tgtgggtgctggtggtggag

SEQ ID NO: 7984 - DNA, 20 bp, Artificial Sequence
  chemically synthesized
aggggcttggagcttaggaa

SEQ ID NO: 7985 - DNA, 20 bp, Artificial Sequence
  chemically synthesized
aggggattggttagctgggc

SEQ ID NO: 7986 - DNA, 20 bp, Artificial Sequence
  chemically synthesized
agggcagggcaggggacagg

SEQ ID NO: 7987 - DNA, 20 bp, Artificial Sequence
  chemically synthesized
gtacatagtgaacactcaga

SEQ ID NO: 7988 - DNA, 20 bp, Artificial Sequence
  chemically synthesized
gtgaacactcagagagaata

SEQ ID NO: 7989 - DNA, 20 bp, Artificial Sequence
  chemically synthesized
agagagaatacgggatgctg

SEQ ID NO: 7990 - DNA, 20 bp, Artificial Sequence
  chemically synthesized
gggatgctgctgaatcttct

SEQ ID NO: 7991 - DNA, 20 bp, Artificial Sequence
  chemically synthesized
gctgaatcttctgagggtga

SEQ ID NO: 7992 - DNA, 20 bp, Artificial Sequence
  chemically synthesized
cttctgagggtgacagaatt

SEQ ID NO: 7993 - DNA, 20 bp, Artificial Sequence
  chemically synthesized
caggaggcttggagagaggc

SEQ ID NO: 7994 - DNA, 20 bp, Artificial Sequence
  chemically synthesized
aggatttctgaaattaatgg

SEQ ID NO: 7995 - DNA, 20 bp, Artificial Sequence
  chemically synthesized
taatgggagagtgagctcac

SEQ ID NO: 7996 - DNA, 20 bp, Artificial Sequence
  chemically synthesized
accagtgagggaccgtctga

SEQ ID NO: 7997 - DNA, 20 bp, Artificial Sequence
  chemically synthesized
ccgcatttccctccagcagc

SEQ ID NO: 7998 - DNA, 20 bp, Artificial Sequence
  chemically synthesized
atttcaattatgcatgtatt

SEQ ID NO: 7999 - DNA, 20 bp, Artificial Sequence
  chemically synthesized
tctcccagtgtttcatttta

SEQ ID NO: 8000 - DNA, 20 bp, Artificial Sequence
  chemically synthesized
tctcactctgttgcccaggc

SEQ ID NO: 8001 - DNA, 20 bp, Artificial Sequence
  chemically synthesized
gagacggttttgccatgtag

SEQ ID NO: 8002 - DNA, 20 bp, Artificial Sequence
  chemically synthesized
gtgtcgacctcccaaagtgc

SEQ ID NO: 8003 - DNA, 20 bp, Artificial Sequence
  chemically synthesized
cttttttttttttttggagg

SEQ ID NO: 8004 - DNA, 20 bp, Artificial Sequence
  chemically synthesized
tctcgctctgttgcccaggc

SEQ ID NO: 8005 - DNA, 20 bp, Artificial Sequence
  chemically synthesized
ctcactgcaagctctgcctc

SEQ ID NO: 8006 - DNA, 20 bp, Artificial Sequence
  chemically synthesized
cattctcctgcctcagcctc

SEQ ID NO: 8007 - DNA, 20 bp, Artificial Sequence
  chemically synthesized
ttttgtatttttagtagaga

SEQ ID NO: 8008 - DNA, 20 bp, Artificial Sequence
  chemically synthesized
tggggtttcaccatgttagc

SEQ ID NO: 8009 - DNA, 20 bp, Artificial Sequence
  chemically synthesized
gccttggcctcccacagtgc

SEQ ID NO: 8010 - DNA, 20 bp, Artificial Sequence
  chemically synthesized
acttaattttttgaacataa

SEQ ID NO: 8011 - DNA, 20 bp, Artificial Sequence
  chemically synthesized
ttctagcatccgtgtcagtt

SEQ ID NO: 8012 - DNA, 20 bp, Artificial Sequence
  chemically synthesized
acattgtcaatttcaccttg

SEQ ID NO: 8013 - DNA, 20 bp, Artificial Sequence
  chemically synthesized
caatttcaccttgttgggtg

SEQ ID NO: 8014 - DNA, 20 bp, Artificial Sequence
  chemically synthesized
aatgttcttgagctttgctc

SEQ ID NO: 8015 - DNA, 20 bp, Artificial Sequence
  chemically synthesized
cgggatgcagttaagcaact

SEQ ID NO: 8016 - DNA, 20 bp, Artificial Sequence
  chemically synthesized
agctccatctcctcaacgtg

SEQ ID NO: 8017 - DNA, 20 bp, Artificial Sequence
  chemically synthesized
actctctccaaacagtaagc

SEQ ID NO: 8018 - DNA, 20 bp, Artificial Sequence
  chemically synthesized
acagtaagctggggtgatcg

SEQ ID NO: 8019 - DNA, 20 bp, Artificial Sequence
  chemically synthesized
ttgtttgcttcttatccctc

SEQ ID NO: 8020 - DNA, 20 bp, Artificial Sequence
  chemically synthesized
actcctccttgcctgatgtc

SEQ ID NO: 8021 - DNA, 20 bp, Artificial Sequence
  chemically synthesized
taattatccgagcaatccaa

SEQ ID NO: 8022 - DNA, 20 bp, Artificial Sequence
  chemically synthesized
aaaatggaagcatggagaaa

SEQ ID NO: 8023 - DNA, 20 bp, Artificial Sequence
  chemically synthesized
ccctgtgggcagtctggttt

SEQ ID NO: 8024 - DNA, 20 bp, Artificial Sequence
  chemically synthesized
gtgggcagtctggtttcagg

SEQ ID NO: 8025 - DNA, 20 bp, Artificial Sequence
  chemically synthesized
tgctgggctgacccagcatt

SEQ ID NO: 8026 - DNA, 20 bp, Artificial Sequence
  chemically synthesized
gggaagcaggacaggaccct

SEQ ID NO: 8027 - DNA, 20 bp, Artificial Sequence
  chemically synthesized
aggacaggaccctctgagtg

SEQ ID NO: 8028 - DNA, 20 bp, Artificial Sequence
  chemically synthesized
accgtggtcatggagcgctt

SEQ ID NO: 8029 - DNA, 20 bp, Artificial Sequence
  chemically synthesized
tggagcgcttctggatggag

SEQ ID NO: 8030 - DNA, 20 bp, Artificial Sequence
  chemically synthesized
aatgcaaaggccttggagga

SEQ ID NO: 8031 - DNA, 20 bp, Artificial Sequence
  chemically synthesized
ggggtgggggcagtgagagg

SEQ ID NO: 8032 - DNA, 20 bp, Artificial Sequence
  chemically synthesized
ggtggggctgtgctcagagc

SEQ ID NO: 8033 - DNA, 20 bp, Artificial Sequence
  chemically synthesized
tggaggtgtcagaggcctcc

SEQ ID NO: 8034 - DNA, 20 bp, Artificial Sequence
  chemically synthesized
agaggcctccctgggtcaaa

SEQ ID NO: 8035 - DNA, 20 bp, Artificial Sequence
  chemically synthesized
tccctgggtcaaatggggtc

SEQ ID NO: 8036 - DNA, 20 bp, Artificial Sequence
  chemically synthesized
tcactggtgtgaaaaagatg

SEQ ID NO: 8037 - DNA, 20 bp, Artificial Sequence
  chemically synthesized
ggcccctgactgagcctccc

SEQ ID NO: 8038 - DNA, 20 bp, Artificial Sequence
  chemically synthesized
ctccccaggatgtggtcctg

SEQ ID NO: 8039 - DNA, 20 bp, Artificial Sequence
  chemically synthesized
gatgtggtcctgctgggtcg

SEQ ID NO: 8040 - DNA, 20 bp, Artificial Sequence
  chemically synthesized
ctgctgggtcggggggtgat

SEQ ID NO: 8041 - DNA, 20 bp, Artificial Sequence
  chemically synthesized
tgagaagacaaggaagtcca

SEQ ID NO: 8042 - DNA, 20 bp, Artificial Sequence
  chemically synthesized
gacaaggaagtccacagagt

SEQ ID NO: 8043 - DNA, 20 bp, Artificial Sequence
  chemically synthesized
agaaggtgttctgtttgcag

SEQ ID NO: 8044 - DNA, 20 bp, Artificial Sequence
  chemically synthesized
ctgggacaactggagctgct

SEQ ID NO: 8045 - DNA, 20 bp, Artificial Sequence
  chemically synthesized
agctctgtgtgcaggaagac

SEQ ID NO: 8046 - DNA, 20 bp, Artificial Sequence
  chemically synthesized
gtgcaggaagacgtgggtgt

SEQ ID NO: 8047 - DNA, 20 bp, Artificial Sequence
  chemically synthesized
gggtgtgtgagtgtacgtgt

SEQ ID NO: 8048 - DNA, 20 bp, Artificial Sequence
  chemically synthesized
tcaggtgtgtgtgtgtggga

SEQ ID NO: 8049 - DNA, 20 bp, Artificial Sequence
  chemically synthesized
gtgtgtgtgtgggagggagt

SEQ ID NO: 8050 - DNA, 20 bp, Artificial Sequence
  chemically synthesized
tagcatgcatatgcacatgt

SEQ ID NO: 8051 - DNA, 20 bp, Artificial Sequence
  chemically synthesized
atgcatatgcacatgtgaga

SEQ ID NO: 8052 - DNA, 20 bp, Artificial Sequence
  chemically synthesized
gggtacagcagagcgtggtc

SEQ ID NO: 8053 - DNA, 20 bp, Artificial Sequence
  chemically synthesized
gtgtgtgcaaatgtgtgttt

SEQ ID NO: 8054 - DNA, 20 bp, Artificial Sequence
  chemically synthesized
ttgagtgaagtgagcaatgt

SEQ ID NO: 8055 - DNA, 20 bp, Artificial Sequence
  chemically synthesized
agtgagcaatgtgtgagtgt

SEQ ID NO: 8056 - DNA, 20 bp, Artificial Sequence
  chemically synthesized
gtgtgagtgtgtgagtgtgt

SEQ ID NO: 8057 - DNA, 20 bp, Artificial Sequence
  chemically synthesized
gtgtgagtttgtgagggcat

SEQ ID NO: 8058 - DNA, 20 bp, Artificial Sequence
  chemically synthesized
aatgtgtgtgtcagtgctgt

SEQ ID NO: 8059 - DNA, 20 bp, Artificial Sequence
  chemically synthesized
tcagtgctgtcagggtgcag

SEQ ID NO: 8060 - DNA, 20 bp, Artificial Sequence
  chemically synthesized
ggaggaggccttgcgtggtg

SEQ ID NO: 8061 - DNA, 20 bp, Artificial Sequence
  chemically synthesized
aggacaacaggtgggacctg

SEQ ID NO: 8062 - DNA, 20 bp, Artificial Sequence
  chemically synthesized
gacctggagggttgtgcttg

SEQ ID NO: 8063 - DNA, 20 bp, Artificial Sequence
  chemically synthesized
gcttggagagtgggctatgg

SEQ ID NO: 8064 - DNA, 20 bp, Artificial Sequence
  chemically synthesized
tggtggaatgacccagattt

SEQ ID NO: 8065 - DNA, 20 bp, Artificial Sequence
  chemically synthesized
cccagatttaaggatctcaa

SEQ ID NO: 8066 - DNA, 20 bp, Artificial Sequence
  chemically synthesized
aggggagggactgttccagt

SEQ ID NO: 8067 - DNA, 20 bp, Artificial Sequence
  chemically synthesized
agaacacagggcccagcttc

SEQ ID NO: 8068 - DNA, 20 bp, Artificial Sequence
  chemically synthesized
ctggaggcctctgccactgg

SEQ ID NO: 8069 - DNA, 20 bp, Artificial Sequence
  chemically synthesized
cattcacagatcccccttct

SEQ ID NO: 8070 - DNA, 20 bp, Artificial Sequence
  chemically synthesized
ggatgtgtgcctaggcaggg

SEQ ID NO: 8071 - DNA, 20 bp, Artificial Sequence
  chemically synthesized
gtctcccagtcccccagctc

SEQ ID NO: 8072 - DNA, 20 bp, Artificial Sequence
  chemically synthesized
gggctttgcacacagctgat

SEQ ID NO: 8073 - DNA, 20 bp, Artificial Sequence
  chemically synthesized
acacagctgatgtgaatatc

SEQ ID NO: 8074 - DNA, 20 bp, Artificial Sequence
  chemically synthesized
gaatatcctgagtcgtgtgc

SEQ ID NO: 8075 - DNA, 20 bp, Artificial Sequence
  chemically synthesized
gtatatttatacatggtaat

SEQ ID NO: 8076 - DNA, 20 bp, Artificial Sequence
  chemically synthesized
ttatacatggtaatatgggt

SEQ ID NO: 8077 - DNA, 20 bp, Artificial Sequence
  chemically synthesized
taatatgggtgcgagtgtgt

SEQ ID NO: 8078 - DNA, 20 bp, Artificial Sequence
  chemically synthesized
tgtgtgtaatgctcaaatgc

SEQ ID NO: 8079 - DNA, 20 bp, Artificial Sequence
  chemically synthesized
gctggtggtcatctgtgtga

SEQ ID NO: 8080 - DNA, 20 bp, Artificial Sequence
  chemically synthesized
gtgtgactgggtcccaaagt

SEQ ID NO: 8081 - DNA, 20 bp, Artificial Sequence
  chemically synthesized
tgagggtcacgggggccagc

SEQ ID NO: 8082 - DNA, 20 bp, Artificial Sequence
  chemically synthesized
ggggccagcagggatgggca

SEQ ID NO: 8083 - DNA, 20 bp, Artificial Sequence
  chemically synthesized
cgccctttgccctcgcttcc

SEQ ID NO: 8084 - DNA, 20 bp, Artificial Sequence
  chemically synthesized
ggggaggctcagtcaggggc

SEQ ID NO: 8085 - DNA, 20 bp, Artificial Sequence
  chemically synthesized
tgggaagagttcttctctcc

SEQ ID NO: 8086 - DNA, 20 bp, Artificial Sequence
  chemically synthesized
atccagaactgacacggatg

SEQ ID NO: 8087 - DNA, 20 bp, Artificial Sequence
  chemically synthesized
cattatgttcaaaaaattaa

SEQ ID NO: 8088 - DNA, 20 bp, Artificial Sequence
  chemically synthesized
ctactcgggaggctgaggca

SEQ ID NO: 8089 - DNA, 20 bp, Artificial Sequence
  chemically synthesized
tccgcctccaaaaaaaaaaa

SEQ ID NO: 8090 - DNA, 20 bp, Artificial Sequence
  chemically synthesized
ctccaaaaaaaaaaaaaaga

SEQ ID NO: 8091 - DNA, 20 bp, Artificial Sequence
  chemically synthesized
aaaaaaaaaaaaaagaaaag

SEQ ID NO: 8092 - DNA, 20 bp, Artificial Sequence
  chemically synthesized
aaaaaaaaagaaaagaaaga

SEQ ID NO: 8093 - DNA, 20 bp, Artificial Sequence
  chemically synthesized
tggatggaaataatggaaga

SEQ ID NO: 8094 - DNA, 20 bp, Artificial Sequence
  chemically synthesized
aatggaagatgagaaatgcg

SEQ ID NO: 8095 - DNA, 20 bp, Artificial Sequence
  chemically synthesized
ctctataaaatgaaacactg

SEQ ID NO: 8096 - DNA, 20 bp, Artificial Sequence
  chemically synthesized
aaatgaaacactgggagaaa

SEQ ID NO: 8097 - DNA, 20 bp, Artificial Sequence
  chemically synthesized
aaaagaattaaaaaatggaa

SEQ ID NO: 8098 - DNA, 20 bp, Artificial Sequence
  chemically synthesized
atgcataattgaaatcttta

SEQ ID NO: 8099 - DNA, 20 bp, Artificial Sequence
  chemically synthesized
tttaaaagaaaaagggggta

SEQ ID NO: 8100 - DNA, 20 bp, Artificial Sequence
  chemically synthesized
agctcactctcccattaatt

SEQ ID NO: 8101 - DNA, 20 bp, Artificial Sequence
  chemically synthesized
gacagagggggagcaaagcc

SEQ ID NO: 8102 - DNA, 20 bp, Artificial Sequence
  chemically synthesized
caaattaaaaaaaatttttt

SEQ ID NO: 8103 - DNA, 20 bp, Artificial Sequence
  chemically synthesized
ggtacatagtgaacactcag

SEQ ID NO: 8104 - DNA, 20 bp, Artificial Sequence
  chemically synthesized
tgctgaatcttctgagggtg

SEQ ID NO: 8105 - DNA, 20 bp, Artificial Sequence
  chemically synthesized
tgtgatctccattttacaca

SEQ ID NO: 8106 - DNA, 20 bp, Artificial Sequence
  chemically synthesized
acacgagaaaatggaagcat

SEQ ID NO: 8107 - DNA, 20 bp, Artificial Sequence
  chemically synthesized
acacattgctcacttcactc

SEQ ID NO: 8108 - DNA, 20 bp, Artificial Sequence
  chemically synthesized
cttctctccccagaaacaat

SEQ ID NO: 8109 - DNA, 20 bp, Artificial Sequence
  chemically synthesized
tccccagaaacaatcaaaac

SEQ ID NO: 8110 - DNA, 20 bp, Artificial Sequence
  chemically synthesized
agctgagagtccgaggagac

SEQ ID NO: 8111 - DNA, 20 bp, Artificial Sequence
  chemically synthesized
caaggcatgcaatgaaacgg

SEQ ID NO: 8112 - DNA, 20 bp, Artificial Sequence
  chemically synthesized
gaattagcaggcaaggatgg

SEQ ID NO: 8113 - DNA, 20 bp, Artificial Sequence
  chemically synthesized
ccaggtgaacttctagagat

SEQ ID NO: 8114 - DNA, 20 bp, Artificial Sequence
  chemically synthesized
aactacaatgtctgaaatga

SEQ ID NO: 8115 - DNA, 20 bp, Artificial Sequence
  chemically synthesized
aaaagaaaagaaagaaaaga

SEQ ID NO: 8116 - DNA, 20 bp, Artificial Sequence
  chemically synthesized
gactagtctgggcagcatgg

SEQ ID NO: 8117 - DNA, 20 bp, Artificial Sequence
  chemically synthesized
ggcaaaacccctctacatgg

SEQ ID NO: 8118 - DNA, 20 bp, Artificial Sequence
  chemically synthesized
tgccactggctggatgggag

SEQ ID NO: 8119 - DNA, 20 bp, Artificial Sequence
  chemically synthesized
gaggaggcataacctgggcg

SEQ ID NO: 8120 - DNA, 20 bp, Artificial Sequence
  chemically synthesized
ggccatgggggggggtcatc

SEQ ID NO: 8121 - DNA, 20 bp, Artificial Sequence
  chemically synthesized
cctgagaagggggatctgtg

SEQ ID NO: 8122 - DNA, 20 bp, Artificial Sequence
  chemically synthesized
tcttctaaggctcctgtccc

SEQ ID NO: 8123 - DNA, 20 bp, Artificial Sequence
  chemically synthesized
tcctccccagcgccctttgc

SEQ ID NO: 8124 - DNA, 20 bp, Artificial Sequence
  chemically synthesized
cctccactcagagggtcctg

SEQ ID NO: 8125 - DNA, 20 bp, Artificial Sequence
  chemically synthesized
tgcaccagcattcaatttct

SEQ ID NO: 8126 - DNA, 20 bp, Artificial Sequence
  chemically synthesized
tggagatcacagtcgtagct

SEQ ID NO: 8127 - DNA, 20 bp, Artificial Sequence
  chemically synthesized
atcacagtcgtagctacccg

SEQ ID NO: 8128 - DNA, 20 bp, Artificial Sequence
  chemically synthesized
tagatgagttaaaatatgta

SEQ ID NO: 8129 - DNA, 20 bp, Artificial Sequence
  chemically synthesized
atgtaatgtgcttcttaggc

SEQ ID NO: 8130 - DNA, 20 bp, Artificial Sequence
  chemically synthesized
aacagacaactatagaacat

SEQ ID NO: 8131 - DNA, 20 bp, Artificial Sequence
  chemically synthesized
aacaggaaccctccgatcac

SEQ ID NO: 8132 - DNA, 20 bp, Artificial Sequence
  chemically synthesized
accctccgatcaccccagct

SEQ ID NO: 8133 - DNA, 20 bp, Artificial Sequence
  chemically synthesized
aaacgatcaaactgactcta

SEQ ID NO: 8134 - DNA, 20 bp, Artificial Sequence
  chemically synthesized
gacaatgtctggcagccaat

SEQ ID NO: 8135 - DNA, 20 bp, Artificial Sequence
  chemically synthesized
aatggcatgaacccgggagg

SEQ ID NO: 8136 - DNA, 20 bp, Artificial Sequence
  chemically synthesized
ctctaaattctgtcaccctc

SEQ ID NO: 8137 - DNA, 20 bp, Artificial Sequence
  chemically synthesized
ttgggaggctgaggtgggag

SEQ ID NO: 8138 - DNA, 20 bp, Artificial Sequence
  chemically synthesized
aagatacttaggtccttcag

SEQ ID NO: 8139 - DNA, 20 bp, Artificial Sequence
  chemically synthesized
ctgcacacttgcctttcaaa

SEQ ID NO: 8140 - DNA, 20 bp, Artificial Sequence
  chemically synthesized
tcaaaaatggatttcctctc

SEQ ID NO: 8141 - DNA, 20 bp, Artificial Sequence
  chemically synthesized
ggctggggctggggcagagg

SEQ ID NO: 8142 - DNA, 20 bp, Artificial Sequence
  chemically synthesized
ccatttttgaaaggcaagtg

SEQ ID NO: 8143 - DNA, 20 bp, Artificial Sequence
  chemically synthesized
aaaggcaagtgtgcagtttc

SEQ ID NO: 8144 - DNA, 20 bp, Artificial Sequence
  chemically synthesized
tgctccccctctgtctcagc

SEQ ID NO: 8145 - DNA, 20 bp, Artificial Sequence
  chemically synthesized
gactgaggagggcccgacac

SEQ ID NO: 8146 - DNA, 20 bp, Artificial Sequence
  chemically synthesized
acgtatgtgcatatgaggaa

SEQ ID NO: 8147 - DNA, 20 bp, Artificial Sequence
  chemically synthesized
tgtgtattgtgtgagtgtat

SEQ ID NO: 8148 - DNA, 20 bp, Artificial Sequence
  chemically synthesized
gtgtgtgtgttagtgtgtgt

SEQ ID NO: 8149 - DNA, 20 bp, Artificial Sequence
  chemically synthesized
atgttgcccaggctggtggg

SEQ ID NO: 8150 - DNA, 20 bp, Artificial Sequence
  chemically synthesized
tccatggaggcaggaggagc

SEQ ID NO: 8151 - DNA, 20 bp, Artificial Sequence
  chemically synthesized
aggcaggaggagcaggggct

SEQ ID NO: 8152 - DNA, 20 bp, Artificial Sequence
  chemically synthesized
caggggcttggagcttagga

SEQ ID NO: 8153 - DNA, 20 bp, Artificial Sequence
  chemically synthesized
cttctgagggtgacagaatt

SEQ ID NO: 8154 - DNA, 20 bp, Artificial Sequence
  chemically synthesized
cagaatttagagtttgagca

SEQ ID NO: 8155 - DNA, 20 bp, Artificial Sequence
  chemically synthesized
gcaggaggcttggagagagg

SEQ ID NO: 8156 - DNA, 20 bp, Artificial Sequence
  chemically synthesized
catcttccacttgtctcagc

SEQ ID NO: 8157 - DNA, 20 bp, Artificial Sequence
  chemically synthesized
ctgctaccccctttttcttt

SEQ ID NO: 8158 - DNA, 20 bp, Artificial Sequence
  chemically synthesized
tttttaattcttttttctcc

SEQ ID NO: 8159 - DNA, 20 bp, Artificial Sequence
  chemically synthesized
cccctcccctcctttccttc

SEQ ID NO: 8160 - DNA, 20 bp, Artificial Sequence
  chemically synthesized
tgttgcccaggctggaatgc

SEQ ID NO: 8161 - DNA, 20 bp, Artificial Sequence
  chemically synthesized
taaaaatttttttttgtaga

SEQ ID NO: 8162 - DNA, 20 bp, Artificial Sequence
  chemically synthesized
gagacggttttgccatgtag

SEQ ID NO: 8163 - DNA, 20 bp, Artificial Sequence
  chemically synthesized
agtcttgagctcctgggctc

SEQ ID NO: 8164 - DNA, 20 bp, Artificial Sequence
  chemically synthesized
cgtgtcgacctcccaaagtg

SEQ ID NO: 8165 - DNA, 20 bp, Artificial Sequence
  chemically synthesized
tcttccattatttccatcca

SEQ ID NO: 8166 - DNA, 20 bp, Artificial Sequence
  chemically synthesized
ttttgtatttttagtagaga

SEQ ID NO: 8167 - DNA, 20 bp, Artificial Sequence
  chemically synthesized
cgccttggcctcccacagtg

SEQ ID NO: 8168 - DNA, 20 bp, Artificial Sequence
  chemically synthesized
tgagccacggcgcctggcca

SEQ ID NO: 8169 - DNA, 20 bp, Artificial Sequence
  chemically synthesized
tgttttttcatttcagacat

SEQ ID NO: 8170 - DNA, 20 bp, Artificial Sequence
  chemically synthesized
taatgggatatggctataat

SEQ ID NO: 8171 - DNA, 20 bp, Artificial Sequence
  chemically synthesized
atgaacctcctcgttatgca

SEQ ID NO: 8172 - DNA, 20 bp, Artificial Sequence
  chemically synthesized
cctcgttatgcattgtgttt

SEQ ID NO: 8173 - DNA, 20 bp, Artificial Sequence
  chemically synthesized
ttcattgcatgccttgtaat

SEQ ID NO: 8174 - DNA, 20 bp, Artificial Sequence
  chemically synthesized
ttgtattcctctaaatgttc

SEQ ID NO: 8175 - DNA, 20 bp, Artificial Sequence
  chemically synthesized
atgcagttaagcaacttaga

SEQ ID NO: 8176 - DNA, 20 bp, Artificial Sequence
  chemically synthesized
aagcaacttagagtcagttt

SEQ ID NO: 8177 - DNA, 20 bp, Artificial Sequence
  chemically synthesized
gtttgatcgtttgaactctt

SEQ ID NO: 8178 - DNA, 20 bp, Artificial Sequence
  chemically synthesized
tggggtgatcggagggttcc

SEQ ID NO: 8179 - DNA, 20 bp, Artificial Sequence
  chemically synthesized
gtgatcggagggttcctgtt

SEQ ID NO: 8180 - DNA, 20 bp, Artificial Sequence
  chemically synthesized
agctgccatgttctatagtt

SEQ ID NO: 8181 - DNA, 20 bp, Artificial Sequence
  chemically synthesized
catgttctatagttgtctgt

SEQ ID NO: 8182 - DNA, 20 bp, Artificial Sequence
  chemically synthesized
tctatagttgtctgtttttg

SEQ ID NO: 8183 - DNA, 20 bp, Artificial Sequence
  chemically synthesized
tagttgtctgtttttgtttt

SEQ ID NO: 8184 - DNA, 20 bp, Artificial Sequence
  chemically synthesized
ctgggctaccctgtgggcag

SEQ ID NO: 8185 - DNA, 20 bp, Artificial Sequence
  chemically synthesized
cagggactcagccatggagg

SEQ ID NO: 8186 - DNA, 20 bp, Artificial Sequence
  chemically synthesized
tggggaacaccgtggtcatg

SEQ ID NO: 8187 - DNA, 20 bp, Artificial Sequence
  chemically synthesized
ggcaggaagtgacctgggga

SEQ ID NO: 8188 - DNA, 20 bp, Artificial Sequence
  chemically synthesized
ggtccaaggcctagaaggtg

SEQ ID NO: 8189 - DNA, 20 bp, Artificial Sequence
  chemically synthesized
ggtcatgagtgtgtgcaaat

SEQ ID NO: 8190 - DNA, 20 bp, Artificial Sequence
  chemically synthesized
gtgtgagtgtgtgagtgtgt

SEQ ID NO: 8191 - DNA, 20 bp, Artificial Sequence
  chemically synthesized
ggagcaaatttagtgtggaa

SEQ ID NO: 8192 - DNA, 20 bp, Artificial Sequence
  chemically synthesized
aacaggtgggacctggaggg

SEQ ID NO: 8193 - DNA, 20 bp, Artificial Sequence
  chemically synthesized
agtgggctatggtggaatga

SEQ ID NO: 8194 - DNA, 20 bp, Artificial Sequence
  chemically synthesized
caggggagggactgttccag

SEQ ID NO: 8195 - DNA, 20 bp, Artificial Sequence
  chemically synthesized
attttaggaagaacacaggg

SEQ ID NO: 8196 - DNA, 20 bp, Artificial Sequence
  chemically synthesized
cagtcccccagctccaggat

SEQ ID NO: 8197 - DNA, 20 bp, Artificial Sequence
  chemically synthesized
gtgtgcatgggtgtgtgtgc

SEQ ID NO: 8198 - DNA, 20 bp, Artificial Sequence
  chemically synthesized
cccgcccaggttatgcctcc

SEQ ID NO: 8199 - DNA, 20 bp, Artificial Sequence
  chemically synthesized
cacagcgtctctgctccatg

SEQ ID NO: 8200 - DNA, 20 bp, Artificial Sequence
  chemically synthesized
ctgctccatggtctgcttca

SEQ ID NO: 8201 - DNA, 20 bp, Artificial Sequence
  chemically synthesized
tctgcttcagtctgcttgcc

SEQ ID NO: 8202 - DNA, 22 bp, Artificial Sequence
  chemically synthesized
cccatgtctctttccctacccc

SEQ ID NO: 8203 - DNA, 22 bp, Artificial Sequence
  chemically synthesized
tttccctaccccttgcccatcc

SEQ ID NO: 8204 - DNA, 22 bp, Artificial Sequence
  chemically synthesized
tccctaccccttgcccatccct

SEQ ID NO: 8205 - DNA, 22 bp, Artificial Sequence
  chemically synthesized
ccctaccccttgcccatccctg

SEQ ID NO: 8206 - DNA, 22 bp, Artificial Sequence
  chemically synthesized
cctaccccttgcccatccctgc

SEQ ID NO: 8207 - DNA, 22 bp, Artificial Sequence
  chemically synthesized
ccccttgcccatccctgctggc

SEQ ID NO: 8208 - DNA, 22 bp, Artificial Sequence
  chemically synthesized
gcccatccctgctggcccccgt

SEQ ID NO: 8209 - DNA, 22 bp, Artificial Sequence
  chemically synthesized
cccatccctgctggcccccgtg

SEQ ID NO: 8210 - DNA, 22 bp, Artificial Sequence
  chemically synthesized
ctggcccccgtgaccctcactt

SEQ ID NO: 8211 - DNA, 22 bp, Artificial Sequence
  chemically synthesized
gcccccgtgaccctcactttgg

SEQ ID NO: 8212 - DNA, 22 bp, Artificial Sequence
  chemically synthesized
actttgggacccagtcacacag

SEQ ID NO: 8213 - DNA, 22 bp, Artificial Sequence
  chemically synthesized
tgggacccagtcacacagatga

SEQ ID NO: 8214 - DNA, 22 bp, Artificial Sequence
  chemically synthesized
gggacccagtcacacagatgac

SEQ ID NO: 8215 - DNA, 22 bp, Artificial Sequence
  chemically synthesized
ggacccagtcacacagatgacc

SEQ ID NO: 8216 - DNA, 22 bp, Artificial Sequence
  chemically synthesized
aagctcagggcaagcagactga

SEQ ID NO: 8217 - DNA, 22 bp, Artificial Sequence
  chemically synthesized
agggcaagcagactgaagcaga

SEQ ID NO: 8218 - DNA, 22 bp, Artificial Sequence
  chemically synthesized
aagcagaccatggagcagagac

SEQ ID NO: 8219 - DNA, 22 bp, Artificial Sequence
  chemically synthesized
tgccaggggctgggcaggaggt

SEQ ID NO: 8220 - DNA, 22 bp, Artificial Sequence
  chemically synthesized
ggcaggaggtggccctgtggga

SEQ ID NO: 8221 - DNA, 22 bp, Artificial Sequence
  chemically synthesized
tgggagaggggcatcaggagcc

SEQ ID NO: 8222 - DNA, 22 bp, Artificial Sequence
  chemically synthesized
ggtgtggggagccggagggtaa

SEQ ID NO: 8223 - DNA, 22 bp, Artificial Sequence
  chemically synthesized
aggaggcataacctgggcgggg

SEQ ID NO: 8224 - DNA, 22 bp, Artificial Sequence
  chemically synthesized
ggcggggggattggttggggcc

SEQ ID NO: 8225 - DNA, 22 bp, Artificial Sequence
  chemically synthesized
gttggggccatgggggggggtc

SEQ ID NO: 8226 - DNA, 22 bp, Artificial Sequence
  chemically synthesized
gggccatgggggggggtcatca

SEQ ID NO: 8227 - DNA, 22 bp, Artificial Sequence
  chemically synthesized
tgaccccagcatttgagcatta

SEQ ID NO: 8228 - DNA, 22 bp, Artificial Sequence
  chemically synthesized
gaccccagcatttgagcattac

SEQ ID NO: 8229 - DNA, 22 bp, Artificial Sequence
  chemically synthesized
accccagcatttgagcattaca

SEQ ID NO: 8230 - DNA, 22 bp, Artificial Sequence
  chemically synthesized
gagcattacacacacactctta

SEQ ID NO: 8231 - DNA, 22 bp, Artificial Sequence
  chemically synthesized
agcattacacacacactcttac

SEQ ID NO: 8232 - DNA, 22 bp, Artificial Sequence
  chemically synthesized
cacacacactcttacacactcg

SEQ ID NO: 8233 - DNA, 22 bp, Artificial Sequence
  chemically synthesized
ttacacactcgcacccatatta

SEQ ID NO: 8234 - DNA, 22 bp, Artificial Sequence
  chemically synthesized
acacactcgcacccatattacc

SEQ ID NO: 8235 - DNA, 22 bp, Artificial Sequence
  chemically synthesized
cacactcgcacccatattacca

SEQ ID NO: 8236 - DNA, 22 bp, Artificial Sequence
  chemically synthesized
gcacccatattaccatgtataa

SEQ ID NO: 8237 - DNA, 22 bp, Artificial Sequence
  chemically synthesized
ccatgtataaatatacacacgc

SEQ ID NO: 8238 - DNA, 22 bp, Artificial Sequence
  chemically synthesized
atctggtgcacacacacccatg

SEQ ID NO: 8239 - DNA, 22 bp, Artificial Sequence
  chemically synthesized
gtgcacacacacccatgcacac

SEQ ID NO: 8240 - DNA, 22 bp, Artificial Sequence
  chemically synthesized
aggatattcacatcagctgtgt

SEQ ID NO: 8241 - DNA, 22 bp, Artificial Sequence
  chemically synthesized
acatcagctgtgtgcaaagccc

SEQ ID NO: 8242 - DNA, 22 bp, Artificial Sequence
  chemically synthesized
tgtgcaaagcccggatcctgga

SEQ ID NO: 8243 - DNA, 22 bp, Artificial Sequence
  chemically synthesized
gagctgggggactgggagacgc

SEQ ID NO: 8244 - DNA, 22 bp, Artificial Sequence
  chemically synthesized
ggggactgggagacgcacaggg

SEQ ID NO: 8245 - DNA, 22 bp, Artificial Sequence
  chemically synthesized
ggagacgcacagggggcggggg

SEQ ID NO: 8246 - DNA, 22 bp, Artificial Sequence
  chemically synthesized
cctaggcacacatcctgagaag

SEQ ID NO: 8247 - DNA, 22 bp, Artificial Sequence
  chemically synthesized
ggcacacatcctgagaaggggg

SEQ ID NO: 8248 - DNA, 22 bp, Artificial Sequence
  chemically synthesized
agaagggggatctgtgaatggt

SEQ ID NO: 8249 - DNA, 22 bp, Artificial Sequence
  chemically synthesized
tgaatggttttcctcccatcca

SEQ ID NO: 8250 - DNA, 22 bp, Artificial Sequence
  chemically synthesized
tcctcccatccagccagtggca

SEQ ID NO: 8251 - DNA, 22 bp, Artificial Sequence
  chemically synthesized
cctcccatccagccagtggcag

SEQ ID NO: 8252 - DNA, 22 bp, Artificial Sequence
  chemically synthesized
ctcccatccagccagtggcaga

SEQ ID NO: 8253 - DNA, 22 bp, Artificial Sequence
  chemically synthesized
ccatccagccagtggcagaggc

SEQ ID NO: 8254 - DNA, 22 bp, Artificial Sequence
  chemically synthesized
cagatcacctcgggccttagtc

SEQ ID NO: 8255 - DNA, 22 bp, Artificial Sequence
  chemically synthesized
gggccttagtctcagctcttct

SEQ ID NO: 8256 - DNA, 22 bp, Artificial Sequence
  chemically synthesized
agtctcagctcttctaaggctc

SEQ ID NO: 8257 - DNA, 22 bp, Artificial Sequence
  chemically synthesized
gtctcagctcttctaaggctcc

SEQ ID NO: 8258 - DNA, 22 bp, Artificial Sequence
  chemically synthesized
agctcttctaaggctcctgtcc

SEQ ID NO: 8259 - DNA, 22 bp, Artificial Sequence
  chemically synthesized
ttctaaggctcctgtcccctca

SEQ ID NO: 8260 - DNA, 22 bp, Artificial Sequence
  chemically synthesized
ctaaggctcctgtcccctcaga

SEQ ID NO: 8261 - DNA, 22 bp, Artificial Sequence
  chemically synthesized
taaggctcctgtcccctcagat

SEQ ID NO: 8262 - DNA, 22 bp, Artificial Sequence
  chemically synthesized
aggctcctgtcccctcagattg

SEQ ID NO: 8263 - DNA, 22 bp, Artificial Sequence
  chemically synthesized
ctgtcccctcagattggagact

SEQ ID NO: 8264 - DNA, 22 bp, Artificial Sequence
  chemically synthesized
tcccctcagattggagactcca

SEQ ID NO: 8265 - DNA, 22 bp, Artificial Sequence
  chemically synthesized
agattggagactccagaagctg

SEQ ID NO: 8266 - DNA, 22 bp, Artificial Sequence
  chemically synthesized
gagactccagaagctgggccct

SEQ ID NO: 8267 - DNA, 22 bp, Artificial Sequence
  chemically synthesized
cagaagctgggccctgtgttct

SEQ ID NO: 8268 - DNA, 22 bp, Artificial Sequence
  chemically synthesized
ggccctgtgttcttcctaaaat

SEQ ID NO: 8269 - DNA, 22 bp, Artificial Sequence
  chemically synthesized
tgttcttcctaaaatccatact

SEQ ID NO: 8270 - DNA, 22 bp, Artificial Sequence
  chemically synthesized
ttcctaaaatccatactggaac

SEQ ID NO: 8271 - DNA, 22 bp, Artificial Sequence
  chemically synthesized
cctaaaatccatactggaacag

SEQ ID NO: 8272 - DNA, 22 bp, Artificial Sequence
  chemically synthesized
ctaaaatccatactggaacagt

SEQ ID NO: 8273 - DNA, 22 bp, Artificial Sequence
  chemically synthesized
aaatccatactggaacagtccc

SEQ ID NO: 8274 - DNA, 22 bp, Artificial Sequence
  chemically synthesized
gaacagtccctcccctgccaaa

SEQ ID NO: 8275 - DNA, 22 bp, Artificial Sequence
  chemically synthesized
ccctgccaaaattccattgaga

SEQ ID NO: 8276 - DNA, 22 bp, Artificial Sequence
  chemically synthesized
ccaaaattccattgagatcctt

SEQ ID NO: 8277 - DNA, 22 bp, Artificial Sequence
  chemically synthesized
cattgagatccttaaatctggg

SEQ ID NO: 8278 - DNA, 22 bp, Artificial Sequence
  chemically synthesized
agatccttaaatctgggtcatt

SEQ ID NO: 8279 - DNA, 22 bp, Artificial Sequence
  chemically synthesized
aaatctgggtcattccaccata

SEQ ID NO: 8280 - DNA, 22 bp, Artificial Sequence
  chemically synthesized
aatctgggtcattccaccatag

SEQ ID NO: 8281 - DNA, 22 bp, Artificial Sequence
  chemically synthesized
ggtcattccaccatagcccact

SEQ ID NO: 8282 - DNA, 22 bp, Artificial Sequence
  chemically synthesized
caccatagcccactctccaagc

SEQ ID NO: 8283 - DNA, 22 bp, Artificial Sequence
  chemically synthesized
tccaagcacaaccctccaggtc

SEQ ID NO: 8284 - DNA, 22 bp, Artificial Sequence
  chemically synthesized
caagcacaaccctccaggtccc

SEQ ID NO: 8285 - DNA, 22 bp, Artificial Sequence
  chemically synthesized
caggtcccacctgttgtcctca

SEQ ID NO: 8286 - DNA, 22 bp, Artificial Sequence
  chemically synthesized
ttgtcctcatcccccaccacgc

SEQ ID NO: 8287 - DNA, 22 bp, Artificial Sequence
  chemically synthesized
tcctcatcccccaccacgcaag

SEQ ID NO: 8288 - DNA, 22 bp, Artificial Sequence
  chemically synthesized
atcccccaccacgcaaggcctc

SEQ ID NO: 8289 - DNA, 22 bp, Artificial Sequence
  chemically synthesized
ctccccagcgccctttgccctc

SEQ ID NO: 8290 - DNA, 22 bp, Artificial Sequence
  chemically synthesized
cccagcgccctttgccctcgct

SEQ ID NO: 8291 - DNA, 22 bp, Artificial Sequence
  chemically synthesized
tgccctcgcttccctagaaacc

SEQ ID NO: 8292 - DNA, 22 bp, Artificial Sequence
  chemically synthesized
gccctcgcttccctagaaacct

SEQ ID NO: 8293 - DNA, 22 bp, Artificial Sequence
  chemically synthesized
ccctcgcttccctagaaacctc

SEQ ID NO: 8294 - DNA, 22 bp, Artificial Sequence
  chemically synthesized
gcttccctagaaacctcgttcc

SEQ ID NO: 8295 - DNA, 22 bp, Artificial Sequence
  chemically synthesized
ccctagaaacctcgttccacac

SEQ ID NO: 8296 - DNA, 22 bp, Artificial Sequence
  chemically synthesized
cctagaaacctcgttccacact

SEQ ID NO: 8297 - DNA, 22 bp, Artificial Sequence
  chemically synthesized
gaaacctcgttccacactaaat

SEQ ID NO: 8298 - DNA, 22 bp, Artificial Sequence
  chemically synthesized
gttccacactaaatttgctccc

SEQ ID NO: 8299 - DNA, 22 bp, Artificial Sequence
  chemically synthesized
cacactaaatttgctcccctca

SEQ ID NO: 8300 - DNA, 22 bp, Artificial Sequence
  chemically synthesized
aatttgctcccctcagcccgag

SEQ ID NO: 8301 - DNA, 22 bp, Artificial Sequence
  chemically synthesized
gctcccctcagcccgaggtcat

SEQ ID NO: 8302 - DNA, 22 bp, Artificial Sequence
  chemically synthesized
ctcccctcagcccgaggtcatc

SEQ ID NO: 8303 - DNA, 22 bp, Artificial Sequence
  chemically synthesized
ccctcagcccgaggtcatctca

SEQ ID NO: 8304 - DNA, 22 bp, Artificial Sequence
  chemically synthesized
agcccgaggtcatctcacaggt

SEQ ID NO: 8305 - DNA, 22 bp, Artificial Sequence
  chemically synthesized
acaggtacctctcctgcccctt

SEQ ID NO: 8306 - DNA, 22 bp, Artificial Sequence
  chemically synthesized
tcctgccccttgatccatctgc

SEQ ID NO: 8307 - DNA, 22 bp, Artificial Sequence
  chemically synthesized
ctgccccttgatccatctgcac

SEQ ID NO: 8308 - DNA, 22 bp, Artificial Sequence
  chemically synthesized
ccccttgatccatctgcaccct

SEQ ID NO: 8309 - DNA, 22 bp, Artificial Sequence
  chemically synthesized
gatccatctgcaccctgacagc

SEQ ID NO: 8310 - DNA, 22 bp, Artificial Sequence
  chemically synthesized
atccatctgcaccctgacagca

SEQ ID NO: 8311 - DNA, 22 bp, Artificial Sequence
  chemically synthesized
caccctgacagcactgacacac

SEQ ID NO: 8312 - DNA, 22 bp, Artificial Sequence
  chemically synthesized
acagcactgacacacacattca

SEQ ID NO: 8313 - DNA, 22 bp, Artificial Sequence
  chemically synthesized
acacacacattcacatgccctc

SEQ ID NO: 8314 - DNA, 22 bp, Artificial Sequence
  chemically synthesized
acatgccctcacaaactcacac

SEQ ID NO: 8315 - DNA, 22 bp, Artificial Sequence
  chemically synthesized
acaaactcacacacactcacac

SEQ ID NO: 8316 - DNA, 22 bp, Artificial Sequence
  chemically synthesized
acacacactcacacactcacac

SEQ ID NO: 8317 - DNA, 22 bp, Artificial Sequence
  chemically synthesized
acacactcacacattgctcact

SEQ ID NO: 8318 - DNA, 22 bp, Artificial Sequence
  chemically synthesized
acacattgctcacttcactcaa

SEQ ID NO: 8319 - DNA, 22 bp, Artificial Sequence
  chemically synthesized
ctcacttcactcaaaaacacac

SEQ ID NO: 8320 - DNA, 22 bp, Artificial Sequence
  chemically synthesized
acttcactcaaaaacacacatt

SEQ ID NO: 8321 - DNA, 22 bp, Artificial Sequence
  chemically synthesized
cactcaaaaacacacatttgca

SEQ ID NO: 8322 - DNA, 22 bp, Artificial Sequence
  chemically synthesized
actcaaaaacacacatttgcac

SEQ ID NO: 8323 - DNA, 22 bp, Artificial Sequence
  chemically synthesized
aaaaacacacatttgcacacac

SEQ ID NO: 8324 - DNA, 22 bp, Artificial Sequence
  chemically synthesized
gcacacactcatgaccacgctc

SEQ ID NO: 8325 - DNA, 22 bp, Artificial Sequence
  chemically synthesized
cacacactcatgaccacgctct

SEQ ID NO: 8326 - DNA, 22 bp, Artificial Sequence
  chemically synthesized
atgaccacgctctgctgtaccc

SEQ ID NO: 8327 - DNA, 22 bp, Artificial Sequence
  chemically synthesized
tgctgtacccactctcacatgt

SEQ ID NO: 8328 - DNA, 22 bp, Artificial Sequence
  chemically synthesized
ctgtacccactctcacatgtgc

SEQ ID NO: 8329 - DNA, 22 bp, Artificial Sequence
  chemically synthesized
tacccactctcacatgtgcata

SEQ ID NO: 8330 - DNA, 22 bp, Artificial Sequence
  chemically synthesized
tcacatgtgcatatgcatgcta

SEQ ID NO: 8331 - DNA, 22 bp, Artificial Sequence
  chemically synthesized
acatgtgcatatgcatgctaat

SEQ ID NO: 8332 - DNA, 22 bp, Artificial Sequence
  chemically synthesized
atgcacacattcatactccctc

SEQ ID NO: 8333 - DNA, 22 bp, Artificial Sequence
  chemically synthesized
atactccctcccacacacacac

SEQ ID NO: 8334 - DNA, 22 bp, Artificial Sequence
  chemically synthesized
cctcccacacacacacacctga

SEQ ID NO: 8335 - DNA, 22 bp, Artificial Sequence
  chemically synthesized
ccacacacacacacctgacaca

SEQ ID NO: 8336 - DNA, 22 bp, Artificial Sequence
  chemically synthesized
acacacccacacacgtacactc

SEQ ID NO: 8337 - DNA, 22 bp, Artificial Sequence
  chemically synthesized
acacacccacgtcttcctgcac

SEQ ID NO: 8338 - DNA, 22 bp, Artificial Sequence
  chemically synthesized
cctgcacacagagctgggctcc

SEQ ID NO: 8339 - DNA, 22 bp, Artificial Sequence
  chemically synthesized
ctgcacacagagctgggctccc

SEQ ID NO: 8340 - DNA, 22 bp, Artificial Sequence
  chemically synthesized
cacacagagctgggctccctct

SEQ ID NO: 8341 - DNA, 22 bp, Artificial Sequence
  chemically synthesized
ggctccctctctgctgcctcca

SEQ ID NO: 8342 - DNA, 22 bp, Artificial Sequence
  chemically synthesized
cctctctgctgcctccagaccc

SEQ ID NO: 8343 - DNA, 22 bp, Artificial Sequence
  chemically synthesized
tctgctgcctccagacccagag

SEQ ID NO: 8344 - DNA, 22 bp, Artificial Sequence
  chemically synthesized
tgctgcctccagacccagagca

SEQ ID NO: 8345 - DNA, 22 bp, Artificial Sequence
  chemically synthesized
ctgcctccagacccagagcagc

SEQ ID NO: 8346 - DNA, 22 bp, Artificial Sequence
  chemically synthesized
cctccagacccagagcagctcc

SEQ ID NO: 8347 - DNA, 22 bp, Artificial Sequence
  chemically synthesized
cagacccagagcagctccagtt

SEQ ID NO: 8348 - DNA, 22 bp, Artificial Sequence
  chemically synthesized
cagttgtcccagccctgagctc

SEQ ID NO: 8349 - DNA, 22 bp, Artificial Sequence
  chemically synthesized
tcccagccctgagctcctctct

SEQ ID NO: 8350 - DNA, 22 bp, Artificial Sequence
  chemically synthesized
agctcctctctttgcagcatcc

SEQ ID NO: 8351 - DNA, 22 bp, Artificial Sequence
  chemically synthesized
ctctctttgcagcatccacctg

SEQ ID NO: 8352 - DNA, 22 bp, Artificial Sequence
  chemically synthesized
tctttgcagcatccacctgcaa

SEQ ID NO: 8353 - DNA, 22 bp, Artificial Sequence
  chemically synthesized
tttgcagcatccacctgcaaac

SEQ ID NO: 8354 - DNA, 22 bp, Artificial Sequence
  chemically synthesized
tgcagcatccacctgcaaacag

SEQ ID NO: 8355 - DNA, 22 bp, Artificial Sequence
  chemically synthesized
gcagcatccacctgcaaacaga

SEQ ID NO: 8356 - DNA, 22 bp, Artificial Sequence
  chemically synthesized
cagcatccacctgcaaacagaa

SEQ ID NO: 8357 - DNA, 22 bp, Artificial Sequence
  chemically synthesized
caaacagaacaccttctaggcc

SEQ ID NO: 8358 - DNA, 22 bp, Artificial Sequence
  chemically synthesized
ctaggccttggaccctgactct

SEQ ID NO: 8359 - DNA, 22 bp, Artificial Sequence
  chemically synthesized
taggccttggaccctgactctg

SEQ ID NO: 8360 - DNA, 22 bp, Artificial Sequence
  chemically synthesized
ggccttggaccctgactctgtg

SEQ ID NO: 8361 - DNA, 22 bp, Artificial Sequence
  chemically synthesized
ggaccctgactctgtggacttc

SEQ ID NO: 8362 - DNA, 22 bp, Artificial Sequence
  chemically synthesized
gaccctgactctgtggacttcc

SEQ ID NO: 8363 - DNA, 22 bp, Artificial Sequence
  chemically synthesized
actctgtggacttccttgtctt

SEQ ID NO: 8364 - DNA, 22 bp, Artificial Sequence
  chemically synthesized
tgtggacttccttgtcttctca

SEQ ID NO: 8365 - DNA, 22 bp, Artificial Sequence
  chemically synthesized
tggacttccttgtcttctcatt

SEQ ID NO: 8366 - DNA, 22 bp, Artificial Sequence
  chemically synthesized
ccttgtcttctcattcctatca

SEQ ID NO: 8367 - DNA, 22 bp, Artificial Sequence
  chemically synthesized
cttgtcttctcattcctatcac

SEQ ID NO: 8368 - DNA, 22 bp, Artificial Sequence
  chemically synthesized
gtcttctcattcctatcacccc

SEQ ID NO: 8369 - DNA, 22 bp, Artificial Sequence
  chemically synthesized
tcttctcattcctatcaccccc

SEQ ID NO: 8370 - DNA, 22 bp, Artificial Sequence
  chemically synthesized
ctcattcctatcaccccccgac

SEQ ID NO: 8371 - DNA, 22 bp, Artificial Sequence
  chemically synthesized
tcattcctatcaccccccgacc

SEQ ID NO: 8372 - DNA, 22 bp, Artificial Sequence
  chemically synthesized
attcctatcaccccccgaccca

SEQ ID NO: 8373 - DNA, 22 bp, Artificial Sequence
  chemically synthesized
ctatcaccccccgacccagcag

SEQ ID NO: 8374 - DNA, 22 bp, Artificial Sequence
  chemically synthesized
tcaccccccgacccagcaggac

SEQ ID NO: 8375 - DNA, 22 bp, Artificial Sequence
  chemically synthesized
gggaggctcagtcaggggccca

SEQ ID NO: 8376 - DNA, 22 bp, Artificial Sequence
  chemically synthesized
agtcaggggcccagaatcttcc

SEQ ID NO: 8377 - DNA, 22 bp, Artificial Sequence
  chemically synthesized
cctccccaggtcacttcctgcc

SEQ ID NO: 8378 - DNA, 22 bp, Artificial Sequence
  chemically synthesized
ctccccaggtcacttcctgcca

SEQ ID NO: 8379 - DNA, 22 bp, Artificial Sequence
  chemically synthesized
cccaggtcacttcctgccactg

SEQ ID NO: 8380 - DNA, 22 bp, Artificial Sequence
  chemically synthesized
cctgccactgtcctgagtcaga

SEQ ID NO: 8381 - DNA, 22 bp, Artificial Sequence
  chemically synthesized
ctgccactgtcctgagtcagac

SEQ ID NO: 8382 - DNA, 22 bp, Artificial Sequence
  chemically synthesized
ccactgtcctgagtcagacact

SEQ ID NO: 8383 - DNA, 22 bp, Artificial Sequence
  chemically synthesized
tcctgagtcagacactgcccct

SEQ ID NO: 8384 - DNA, 22 bp, Artificial Sequence
  chemically synthesized
agtcagacactgcccctgtaag

SEQ ID NO: 8385 - DNA, 22 bp, Artificial Sequence
  chemically synthesized
cccctgtaagtgactgtccata

SEQ ID NO: 8386 - DNA, 22 bp, Artificial Sequence
  chemically synthesized
taagtgactgtccataactctt

SEQ ID NO: 8387 - DNA, 22 bp, Artificial Sequence
  chemically synthesized
tccataactcttcatctttttc

SEQ ID NO: 8388 - DNA, 22 bp, Artificial Sequence
  chemically synthesized
ttcatctttttcacaccagtga

SEQ ID NO: 8389 - DNA, 22 bp, Artificial Sequence
  chemically synthesized
catctttttcacaccagtgact

SEQ ID NO: 8390 - DNA, 22 bp, Artificial Sequence
  chemically synthesized
atctttttcacaccagtgactt

SEQ ID NO: 8391 - DNA, 22 bp, Artificial Sequence
  chemically synthesized
tttcacaccagtgacttccacc

SEQ ID NO: 8392 - DNA, 22 bp, Artificial Sequence
  chemically synthesized
ttcacaccagtgacttccacct

SEQ ID NO: 8393 - DNA, 22 bp, Artificial Sequence
  chemically synthesized
tcacaccagtgacttccacctt

SEQ ID NO: 8394 - DNA, 22 bp, Artificial Sequence
  chemically synthesized
cacaccagtgacttccaccttc

SEQ ID NO: 8395 - DNA, 22 bp, Artificial Sequence
  chemically synthesized
acaccagtgacttccaccttcc

SEQ ID NO: 8396 - DNA, 22 bp, Artificial Sequence
  chemically synthesized
ccaccttccccactgcagccac

SEQ ID NO: 8397 - DNA, 22 bp, Artificial Sequence
  chemically synthesized
caccttccccactgcagccaca

SEQ ID NO: 8398 - DNA, 22 bp, Artificial Sequence
  chemically synthesized
ccccactgcagccacactcagg

SEQ ID NO: 8399 - DNA, 22 bp, Artificial Sequence
  chemically synthesized
cccactgcagccacactcagga

SEQ ID NO: 8400 - DNA, 22 bp, Artificial Sequence
  chemically synthesized
cagccacactcaggaccccatt

SEQ ID NO: 8401 - DNA, 22 bp, Artificial Sequence
  chemically synthesized
aggaccccatttgacccaggga

SEQ ID NO: 8402 - DNA, 22 bp, Artificial Sequence
  chemically synthesized
gacccagggaggcctctgacac

SEQ ID NO: 8403 - DNA, 22 bp, Artificial Sequence
  chemically synthesized
acccagggaggcctctgacacc

SEQ ID NO: 8404 - DNA, 22 bp, Artificial Sequence
  chemically synthesized
tgacacctccactgcccactcc

SEQ ID NO: 8405 - DNA, 22 bp, Artificial Sequence
  chemically synthesized
acacctccactgcccactcccg

SEQ ID NO: 8406 - DNA, 22 bp, Artificial Sequence
  chemically synthesized
cactgcccactcccgctctgag

SEQ ID NO: 8407 - DNA, 22 bp, Artificial Sequence
  chemically synthesized
cccactcccgctctgagcacag

SEQ ID NO: 8408 - DNA, 22 bp, Artificial Sequence
  chemically synthesized
ccgctctgagcacagccccacc

SEQ ID NO: 8409 - DNA, 22 bp, Artificial Sequence
  chemically synthesized
tgagcacagccccaccctccct

SEQ ID NO: 8410 - DNA, 22 bp, Artificial Sequence
  chemically synthesized
agcacagccccaccctccctct

SEQ ID NO: 8411 - DNA, 22 bp, Artificial Sequence
  chemically synthesized
cctctcactgcccccacccctt

SEQ ID NO: 8412 - DNA, 22 bp, Artificial Sequence
  chemically synthesized
tcactgcccccaccccttcctc

SEQ ID NO: 8413 - DNA, 22 bp, Artificial Sequence
  chemically synthesized
actgcccccaccccttcctcca

SEQ ID NO: 8414 - DNA, 22 bp, Artificial Sequence
  chemically synthesized
cccccaccccttcctccaaggc

SEQ ID NO: 8415 - DNA, 22 bp, Artificial Sequence
  chemically synthesized
cctccaaggcctttgcattcct

SEQ ID NO: 8416 - DNA, 22 bp, Artificial Sequence
  chemically synthesized
ctccaaggcctttgcattcctc

SEQ ID NO: 8417 - DNA, 22 bp, Artificial Sequence
  chemically synthesized
caaggcctttgcattcctctcc

SEQ ID NO: 8418 - DNA, 22 bp, Artificial Sequence
  chemically synthesized
tgcattcctctccatccagaag

SEQ ID NO: 8419 - DNA, 22 bp, Artificial Sequence
  chemically synthesized
gcattcctctccatccagaagc

SEQ ID NO: 8420 - DNA, 22 bp, Artificial Sequence
  chemically synthesized
cattcctctccatccagaagcg

SEQ ID NO: 8421 - DNA, 22 bp, Artificial Sequence
  chemically synthesized
ctctccatccagaagcgctcca

SEQ ID NO: 8422 - DNA, 22 bp, Artificial Sequence
  chemically synthesized
tccatccagaagcgctccatga

SEQ ID NO: 8423 - DNA, 22 bp, Artificial Sequence
  chemically synthesized
catccagaagcgctccatgacc

SEQ ID NO: 8424 - DNA, 22 bp, Artificial Sequence
  chemically synthesized
catgaccacggtgttccccacc

SEQ ID NO: 8425 - DNA, 22 bp, Artificial Sequence
  chemically synthesized
cccaccaagctggccctccatg

SEQ ID NO: 8426 - DNA, 22 bp, Artificial Sequence
  chemically synthesized
gccctccatggctgagtccctg

SEQ ID NO: 8427 - DNA, 22 bp, Artificial Sequence
  chemically synthesized
catggctgagtccctgactgct

SEQ ID NO: 8428 - DNA, 22 bp, Artificial Sequence
  chemically synthesized
agtccctgactgctgtcttcag

SEQ ID NO: 8429 - DNA, 22 bp, Artificial Sequence
  chemically synthesized
actgctgtcttcagcaccctcc

SEQ ID NO: 8430 - DNA, 22 bp, Artificial Sequence
  chemically synthesized
ctgtcttcagcaccctccactc

SEQ ID NO: 8431 - DNA, 22 bp, Artificial Sequence
  chemically synthesized
tcttcagcaccctccactcaga

SEQ ID NO: 8432 - DNA, 22 bp, Artificial Sequence
  chemically synthesized
cagcaccctccactcagagggt

SEQ ID NO: 8433 - DNA, 22 bp, Artificial Sequence
  chemically synthesized
agcaccctccactcagagggtc

SEQ ID NO: 8434 - DNA, 22 bp, Artificial Sequence
  chemically synthesized
cactcagagggtcctgtcctgc

SEQ ID NO: 8435 - DNA, 22 bp, Artificial Sequence
  chemically synthesized
agagggtcctgtcctgcttccc

SEQ ID NO: 8436 - DNA, 22 bp, Artificial Sequence
  chemically synthesized
tcctgcttcccagtccgactta

SEQ ID NO: 8437 - DNA, 22 bp, Artificial Sequence
  chemically synthesized
cttcccagtccgacttatcaac

SEQ ID NO: 8438 - DNA, 22 bp, Artificial Sequence
  chemically synthesized
cccagtccgacttatcaactcc

SEQ ID NO: 8439 - DNA, 22 bp, Artificial Sequence
  chemically synthesized
ccagtccgacttatcaactccc

SEQ ID NO: 8440 - DNA, 22 bp, Artificial Sequence
  chemically synthesized
atcaactcccaatgctgggtca

SEQ ID NO: 8441 - DNA, 22 bp, Artificial Sequence
  chemically synthesized
tcaactcccaatgctgggtcag

SEQ ID NO: 8442 - DNA, 22 bp, Artificial Sequence
  chemically synthesized
ccaatgctgggtcagcccagca

SEQ ID NO: 8443 - DNA, 22 bp, Artificial Sequence
  chemically synthesized
ggtcagcccagcaacgtgtctg

SEQ ID NO: 8444 - DNA, 22 bp, Artificial Sequence
  chemically synthesized
tatatccaccctgaaaccagac

SEQ ID NO: 8445 - DNA, 22 bp, Artificial Sequence
  chemically synthesized
aaaccagactgcccacagggta

SEQ ID NO: 8446 - DNA, 22 bp, Artificial Sequence
  chemically synthesized
cccacagggtagcccagctgtg

SEQ ID NO: 8447 - DNA, 22 bp, Artificial Sequence
  chemically synthesized
tgcctccaggtagctctgagat

SEQ ID NO: 8448 - DNA, 22 bp, Artificial Sequence
  chemically synthesized
caggtagctctgagatcatgca

SEQ ID NO: 8449 - DNA, 22 bp, Artificial Sequence
  chemically synthesized
tgagatcatgcaccagcattca

SEQ ID NO: 8450 - DNA, 22 bp, Artificial Sequence
  chemically synthesized
agatcatgcaccagcattcaat

SEQ ID NO: 8451 - DNA, 22 bp, Artificial Sequence
  chemically synthesized
aatttctccatgcttccatttt

SEQ ID NO: 8452 - DNA, 22 bp, Artificial Sequence
  chemically synthesized
ctccatgcttccattttctcgt

SEQ ID NO: 8453 - DNA, 22 bp, Artificial Sequence
  chemically synthesized
tccatgcttccattttctcgtg

SEQ ID NO: 8454 - DNA, 22 bp, Artificial Sequence
  chemically synthesized
catgcttccattttctcgtgtg

SEQ ID NO: 8455 - DNA, 22 bp, Artificial Sequence
  chemically synthesized
ccattttctcgtgtgtaaaatg

SEQ ID NO: 8456 - DNA, 22 bp, Artificial Sequence
  chemically synthesized
cattttctcgtgtgtaaaatgg

SEQ ID NO: 8457 - DNA, 22 bp, Artificial Sequence
  chemically synthesized
tctcgtgtgtaaaatggagatc

SEQ ID NO: 8458 - DNA, 22 bp, Artificial Sequence
  chemically synthesized
ctcgtgtgtaaaatggagatca

SEQ ID NO: 8459 - DNA, 22 bp, Artificial Sequence
  chemically synthesized
tcgtgtgtaaaatggagatcac

SEQ ID NO: 8460 - DNA, 22 bp, Artificial Sequence
  chemically synthesized
gtgtgtaaaatggagatcacag

SEQ ID NO: 8461 - DNA, 22 bp, Artificial Sequence
  chemically synthesized
cccgattggattgctcggataa

SEQ ID NO: 8462 - DNA, 22 bp, Artificial Sequence
  chemically synthesized
gattgctcggataattagatga

SEQ ID NO: 8463 - DNA, 22 bp, Artificial Sequence
  chemically synthesized
ctcggataattagatgagttaa

SEQ ID NO: 8464 - DNA, 22 bp, Artificial Sequence
  chemically synthesized
ggataattagatgagttaaaat

SEQ ID NO: 8465 - DNA, 22 bp, Artificial Sequence
  chemically synthesized
gatgagttaaaatatgtaatgt

SEQ ID NO: 8466 - DNA, 22 bp, Artificial Sequence
  chemically synthesized
aaatatgtaatgtgcttcttag

SEQ ID NO: 8467 - DNA, 22 bp, Artificial Sequence
  chemically synthesized
cttaggcaaaagtttgaacata

SEQ ID NO: 8468 - DNA, 22 bp, Artificial Sequence
  chemically synthesized
ttaggcaaaagtttgaacataa

SEQ ID NO: 8469 - DNA, 22 bp, Artificial Sequence
  chemically synthesized
aggcaaaagtttgaacataaaa

SEQ ID NO: 8470 - DNA, 22 bp, Artificial Sequence
  chemically synthesized
ggcaaaagtttgaacataaaag

SEQ ID NO: 8471 - DNA, 22 bp, Artificial Sequence
  chemically synthesized
gaacataaaagacagggtctgc

SEQ ID NO: 8472 - DNA, 22 bp, Artificial Sequence
  chemically synthesized
aacataaaagacagggtctgcc

SEQ ID NO: 8473 - DNA, 22 bp, Artificial Sequence
  chemically synthesized
cccaagatgggaagagttcttc

SEQ ID NO: 8474 - DNA, 22 bp, Artificial Sequence
  chemically synthesized
ttctctccccagaaacaatcaa

SEQ ID NO: 8475 - DNA, 22 bp, Artificial Sequence
  chemically synthesized
ctctccccagaaacaatcaaaa

SEQ ID NO: 8476 - DNA, 22 bp, Artificial Sequence
  chemically synthesized
tctccccagaaacaatcaaaac

SEQ ID NO: 8477 - DNA, 22 bp, Artificial Sequence
  chemically synthesized
tccccagaaacaatcaaaacaa

SEQ ID NO: 8478 - DNA, 22 bp, Artificial Sequence
  chemically synthesized
cccagaaacaatcaaaacaaaa

SEQ ID NO: 8479 - DNA, 22 bp, Artificial Sequence
  chemically synthesized
tagaacatggcagctttcaaga

SEQ ID NO: 8480 - DNA, 22 bp, Artificial Sequence
  chemically synthesized
tcaagactctggacatcaggca

SEQ ID NO: 8481 - DNA, 22 bp, Artificial Sequence
  chemically synthesized
caagactctggacatcaggcaa

SEQ ID NO: 8482 - DNA, 22 bp, Artificial Sequence
  chemically synthesized
aagactctggacatcaggcaag

SEQ ID NO: 8483 - DNA, 22 bp, Artificial Sequence
  chemically synthesized
tggacatcaggcaaggaggagt

SEQ ID NO: 8484 - DNA, 22 bp, Artificial Sequence
  chemically synthesized
gacatcaggcaaggaggagtaa

SEQ ID NO: 8485 - DNA, 22 bp, Artificial Sequence
  chemically synthesized
agggataagaagcaaacaacag

SEQ ID NO: 8486 - DNA, 22 bp, Artificial Sequence
  chemically synthesized
cgatcaccccagcttactgttt

SEQ ID NO: 8487 - DNA, 22 bp, Artificial Sequence
  chemically synthesized
actgtttggagagagtctgcag

SEQ ID NO: 8488 - DNA, 22 bp, Artificial Sequence
  chemically synthesized
ctgtttggagagagtctgcagg

SEQ ID NO: 8489 - DNA, 22 bp, Artificial Sequence
  chemically synthesized
tttggagagagtctgcaggtta

SEQ ID NO: 8490 - DNA, 22 bp, Artificial Sequence
  chemically synthesized
ggagagagtctgcaggttacag

SEQ ID NO: 8491 - DNA, 22 bp, Artificial Sequence
  chemically synthesized
gagagagtctgcaggttacagg

SEQ ID NO: 8492 - DNA, 22 bp, Artificial Sequence
  chemically synthesized
caggttacaggccaggaaaggg

SEQ ID NO: 8493 - DNA, 22 bp, Artificial Sequence
  chemically synthesized
caggccaggaaagggaagtcca

SEQ ID NO: 8494 - DNA, 22 bp, Artificial Sequence
  chemically synthesized
cccacgttgaggagatggagct

SEQ ID NO: 8495 - DNA, 22 bp, Artificial Sequence
  chemically synthesized
aggagatggagctgagagtccg

SEQ ID NO: 8496 - DNA, 22 bp, Artificial Sequence
  chemically synthesized
agagtccgaggagaccaaaaca

SEQ ID NO: 8497 - DNA, 22 bp, Artificial Sequence
  chemically synthesized
agagttcaaacgatcaaactga

SEQ ID NO: 8498 - DNA, 22 bp, Artificial Sequence
  chemically synthesized
aaacgatcaaactgactctaag

SEQ ID NO: 8499 - DNA, 22 bp, Artificial Sequence
  chemically synthesized
actctaagttgcttaactgcat

SEQ ID NO: 8500 - DNA, 22 bp, Artificial Sequence
  chemically synthesized
taagttgcttaactgcatcccg

SEQ ID NO: 8501 - DNA, 22 bp, Artificial Sequence
  chemically synthesized
agttgcttaactgcatcccgga

SEQ ID NO: 8502 - DNA, 22 bp, Artificial Sequence
  chemically synthesized
cttaactgcatcccggagcaaa

SEQ ID NO: 8503 - DNA, 22 bp, Artificial Sequence
  chemically synthesized
aactgcatcccggagcaaagct

SEQ ID NO: 8504 - DNA, 22 bp, Artificial Sequence
  chemically synthesized
actgcatcccggagcaaagctc

SEQ ID NO: 8505 - DNA, 22 bp, Artificial Sequence
  chemically synthesized
catcccggagcaaagctcaaga

SEQ ID NO: 8506 - DNA, 22 bp, Artificial Sequence
  chemically synthesized
aagaacatttagaggaatacaa

SEQ ID NO: 8507 - DNA, 22 bp, Artificial Sequence
  chemically synthesized
agaggaatacaaaaatatccag

SEQ ID NO: 8508 - DNA, 22 bp, Artificial Sequence
  chemically synthesized
gaggaatacaaaaatatccagc

SEQ ID NO: 8509 - DNA, 22 bp, Artificial Sequence
  chemically synthesized
acaatgtctggcagccaatcaa

SEQ ID NO: 8510 - DNA, 22 bp, Artificial Sequence
  chemically synthesized
gcagccaatcaaagattacaag

SEQ ID NO: 8511 - DNA, 22 bp, Artificial Sequence
  chemically synthesized
caaggcatgcaatgaaacggga

SEQ ID NO: 8512 - DNA, 22 bp, Artificial Sequence
  chemically synthesized
ataaatatcaaaagagatccag

SEQ ID NO: 8513 - DNA, 22 bp, Artificial Sequence
  chemically synthesized
acacggatgctagaattagcag

SEQ ID NO: 8514 - DNA, 22 bp, Artificial Sequence
  chemically synthesized
gaattagcaggcaaggatggta

SEQ ID NO: 8515 - DNA, 22 bp, Artificial Sequence
  chemically synthesized
gcaggcaaggatggtaaaacag

SEQ ID NO: 8516 - DNA, 22 bp, Artificial Sequence
  chemically synthesized
tagccatatcccattatgttca

SEQ ID NO: 8517 - DNA, 22 bp, Artificial Sequence
  chemically synthesized
tgttcaaaaaattaagtagaat

SEQ ID NO: 8518 - DNA, 22 bp, Artificial Sequence
  chemically synthesized
aaaaaattaagtagaattgtgg

SEQ ID NO: 8519 - DNA, 22 bp, Artificial Sequence
  chemically synthesized
agtagaattgtggaggatattt

SEQ ID NO: 8520 - DNA, 22 bp, Artificial Sequence
  chemically synthesized
tggaggatatttaagagtcccc

SEQ ID NO: 8521 - DNA, 22 bp, Artificial Sequence
  chemically synthesized
aagagtccccaggtgaacttct

SEQ ID NO: 8522 - DNA, 22 bp, Artificial Sequence
  chemically synthesized
agagtccccaggtgaacttcta

SEQ ID NO: 8523 - DNA, 22 bp, Artificial Sequence
  chemically synthesized
ctagagataaaaactacaatgt

SEQ ID NO: 8524 - DNA, 22 bp, Artificial Sequence
  chemically synthesized
tagagataaaaactacaatgtc

SEQ ID NO: 8525 - DNA, 22 bp, Artificial Sequence
  chemically synthesized
gagataaaaactacaatgtctg

SEQ ID NO: 8526 - DNA, 22 bp, Artificial Sequence
  chemically synthesized
caatgtctgaaatgaaaaaaca

SEQ ID NO: 8527 - DNA, 22 bp, Artificial Sequence
  chemically synthesized
aaatgaaaaaacacactggcca

SEQ ID NO: 8528 - DNA, 22 bp, Artificial Sequence
  chemically synthesized
gccaggcgccgtggctcacgcc

SEQ ID NO: 8529 - DNA, 22 bp, Artificial Sequence
  chemically synthesized
acgcctggaatcccagcactgt

SEQ ID NO: 8530 - DNA, 22 bp, Artificial Sequence
  chemically synthesized
gaatcccagcactgtgggaggc

SEQ ID NO: 8531 - DNA, 22 bp, Artificial Sequence
  chemically synthesized
tgggaggccaaggcgggcagat

SEQ ID NO: 8532 - DNA, 22 bp, Artificial Sequence
  chemically synthesized
gctaacatggtgaaaccccatc

SEQ ID NO: 8533 - DNA, 22 bp, Artificial Sequence
  chemically synthesized
acatggtgaaaccccatctcta

SEQ ID NO: 8534 - DNA, 22 bp, Artificial Sequence
  chemically synthesized
tactaaaaatacaaaaaattag

SEQ ID NO: 8535 - DNA, 22 bp, Artificial Sequence
  chemically synthesized
ctaaaaatacaaaaaattagcc

SEQ ID NO: 8536 - DNA, 22 bp, Artificial Sequence
  chemically synthesized
aaaatacaaaaaattagccaga

SEQ ID NO: 8537 - DNA, 22 bp, Artificial Sequence
  chemically synthesized
gccagacgtggtggcaggcgcc

SEQ ID NO: 8538 - DNA, 22 bp, Artificial Sequence
  chemically synthesized
tagtcccagctactcgggaggc

SEQ ID NO: 8539 - DNA, 22 bp, Artificial Sequence
  chemically synthesized
ctcgggaggctgaggcaggaga

SEQ ID NO: 8540 - DNA, 22 bp, Artificial Sequence
  chemically synthesized
gggaggctgaggcaggagaatg

SEQ ID NO: 8541 - DNA, 22 bp, Artificial Sequence
  chemically synthesized
aggcaggagaatggcatgaacc

SEQ ID NO: 8542 - DNA, 22 bp, Artificial Sequence
  chemically synthesized
gcagtgagccaagatcgcgcca

SEQ ID NO: 8543 - DNA, 22 bp, Artificial Sequence
  chemically synthesized
cagtgagccaagatcgcgccac

SEQ ID NO: 8544 - DNA, 22 bp, Artificial Sequence
  chemically synthesized
cactccggcctgggcaacagag

SEQ ID NO: 8545 - DNA, 22 bp, Artificial Sequence
  chemically synthesized
cggcctgggcaacagagcgaga

SEQ ID NO: 8546 - DNA, 22 bp, Artificial Sequence
  chemically synthesized
ggcaacagagcgagactccgcc

SEQ ID NO: 8547 - DNA, 22 bp, Artificial Sequence
  chemically synthesized
cgcctccaaaaaaaaaaaaaag

SEQ ID NO: 8548 - DNA, 22 bp, Artificial Sequence
  chemically synthesized
caaaaaaaaaaaaaagaaaaga

SEQ ID NO: 8549 - DNA, 22 bp, Artificial Sequence
  chemically synthesized
gatggaaataatggaagatgag

SEQ ID NO: 8550 - DNA, 22 bp, Artificial Sequence
  chemically synthesized
agggccaggcactgtggatcac

SEQ ID NO: 8551 - DNA, 22 bp, Artificial Sequence
  chemically synthesized
gggccaggcactgtggatcaca

SEQ ID NO: 8552 - DNA, 22 bp, Artificial Sequence
  chemically synthesized
tggatcacatctgtaatcccag

SEQ ID NO: 8553 - DNA, 22 bp, Artificial Sequence
  chemically synthesized
taatcccagcactttgggaggt

SEQ ID NO: 8554 - DNA, 22 bp, Artificial Sequence
  chemically synthesized
tgggaggtcgacacggggggaa

SEQ ID NO: 8555 - DNA, 22 bp, Artificial Sequence
  chemically synthesized
gggaggtcgacacggggggaat

SEQ ID NO: 8556 - DNA, 22 bp, Artificial Sequence
  chemically synthesized
ggaggtcgacacggggggaatc

SEQ ID NO: 8557 - DNA, 22 bp, Artificial Sequence
  chemically synthesized
gagcccaggagctcaagactag

SEQ ID NO: 8558 - DNA, 22 bp, Artificial Sequence
  chemically synthesized
agcccaggagctcaagactagt

SEQ ID NO: 8559 - DNA, 22 bp, Artificial Sequence
  chemically synthesized
aagactagtctgggcagcatgg

SEQ ID NO: 8560 - DNA, 22 bp, Artificial Sequence
  chemically synthesized
gtctgggcagcatggcaaaacc

SEQ ID NO: 8561 - DNA, 22 bp, Artificial Sequence
  chemically synthesized
ggcagcatggcaaaacccctct

SEQ ID NO: 8562 - DNA, 22 bp, Artificial Sequence
  chemically synthesized
tacatggcaaaaccgtctctac

SEQ ID NO: 8563 - DNA, 22 bp, Artificial Sequence
  chemically synthesized
catggcaaaaccgtctctacaa

SEQ ID NO: 8564 - DNA, 22 bp, Artificial Sequence
  chemically synthesized
tacaaaaaaaaatttttaatta

SEQ ID NO: 8565 - DNA, 22 bp, Artificial Sequence
  chemically synthesized
caaaaaaaaatttttaattagc

SEQ ID NO: 8566 - DNA, 22 bp, Artificial Sequence
  chemically synthesized
ttaattagccaggtgtggtgcc

SEQ ID NO: 8567 - DNA, 22 bp, Artificial Sequence
  chemically synthesized
taattagccaggtgtggtgcca

SEQ ID NO: 8568 - DNA, 22 bp, Artificial Sequence
  chemically synthesized
aattagccaggtgtggtgccac

SEQ ID NO: 8569 - DNA, 22 bp, Artificial Sequence
  chemically synthesized
attagccaggtgtggtgccaca

SEQ ID NO: 8570 - DNA, 22 bp, Artificial Sequence
  chemically synthesized
gccaggtgtggtgccacatgcc

SEQ ID NO: 8571 - DNA, 22 bp, Artificial Sequence
  chemically synthesized
tagtcccagctacctgggaggc

SEQ ID NO: 8572 - DNA, 22 bp, Artificial Sequence
  chemically synthesized
cctgggaggctgaagtggaagg

SEQ ID NO: 8573 - DNA, 22 bp, Artificial Sequence
  chemically synthesized
ggaggctgaagtggaaggatcg

SEQ ID NO: 8574 - DNA, 22 bp, Artificial Sequence
  chemically synthesized
aagtggaaggatcgcctgagcc

SEQ ID NO: 8575 - DNA, 22 bp, Artificial Sequence
  chemically synthesized
agcccaggaggtggaggccaca

SEQ ID NO: 8576 - DNA, 22 bp, Artificial Sequence
  chemically synthesized
tgacaagctactgcattccagc

SEQ ID NO: 8577 - DNA, 22 bp, Artificial Sequence
  chemically synthesized
ctgcattccagcctgggcaaca

SEQ ID NO: 8578 - DNA, 22 bp, Artificial Sequence
  chemically synthesized
cattccagcctgggcaacagag

SEQ ID NO: 8579 - DNA, 22 bp, Artificial Sequence
  chemically synthesized
cagcctgggcaacagagtgaga

SEQ ID NO: 8580 - DNA, 22 bp, Artificial Sequence
  chemically synthesized
ggcaacagagtgagatgagaga

SEQ ID NO: 8581 - DNA, 22 bp, Artificial Sequence
  chemically synthesized
tagttaacttaatgaacagcaa

SEQ ID NO: 8582 - DNA, 22 bp, Artificial Sequence
  chemically synthesized
agttaacttaatgaacagcaat

SEQ ID NO: 8583 - DNA, 22 bp, Artificial Sequence
  chemically synthesized
gttaacttaatgaacagcaata

SEQ ID NO: 8584 - DNA, 22 bp, Artificial Sequence
  chemically synthesized
acttaatgaacagcaataactc

SEQ ID NO: 8585 - DNA, 22 bp, Artificial Sequence
  chemically synthesized
aatgaacagcaataactctata

SEQ ID NO: 8586 - DNA, 22 bp, Artificial Sequence
  chemically synthesized
atgaacagcaataactctataa

SEQ ID NO: 8587 - DNA, 22 bp, Artificial Sequence
  chemically synthesized
tataaaatgaaacactgggaga

SEQ ID NO: 8588 - DNA, 22 bp, Artificial Sequence
  chemically synthesized
taaaatgaaacactgggagaaa

SEQ ID NO: 8589 - DNA, 22 bp, Artificial Sequence
  chemically synthesized
ggagaaaaaagaattaaaaaat

SEQ ID NO: 8590 - DNA, 22 bp, Artificial Sequence
  chemically synthesized
aaaaatggaaagagaatgagtg

SEQ ID NO: 8591 - DNA, 22 bp, Artificial Sequence
  chemically synthesized
tgggacccttaatacatgcata

SEQ ID NO: 8592 - DNA, 22 bp, Artificial Sequence
  chemically synthesized
aatacatgcataattgaaatct

SEQ ID NO: 8593 - DNA, 22 bp, Artificial Sequence
  chemically synthesized
atacatgcataattgaaatctt

SEQ ID NO: 8594 - DNA, 22 bp, Artificial Sequence
  chemically synthesized
aaatctttaaaagaaaaagggg

SEQ ID NO: 8595 - DNA, 22 bp, Artificial Sequence
  chemically synthesized
taaaagaaaaagggggtagcag

SEQ ID NO: 8596 - DNA, 22 bp, Artificial Sequence
  chemically synthesized
aaaagaaaaagggggtagcaga

SEQ ID NO: 8597 - DNA, 22 bp, Artificial Sequence
  chemically synthesized
aaagaaaaagggggtagcagaa

SEQ ID NO: 8598 - DNA, 22 bp, Artificial Sequence
  chemically synthesized
agacaagtggaagatgggcccc

SEQ ID NO: 8599 - DNA, 22 bp, Artificial Sequence
  chemically synthesized
atcagtgtcagctcccatgatg

SEQ ID NO: 8600 - DNA, 22 bp, Artificial Sequence
  chemically synthesized
ccatgatgacgttcccccagcc

SEQ ID NO: 8601 - DNA, 22 bp, Artificial Sequence
  chemically synthesized
ccccagcccccaccacccgggc

SEQ ID NO: 8602 - DNA, 22 bp, Artificial Sequence
  chemically synthesized
ctggagggaaatgcggtgactt

SEQ ID NO: 8603 - DNA, 22 bp, Artificial Sequence
  chemically synthesized
gagggaaatgcggtgactttgc

SEQ ID NO: 8604 - DNA, 22 bp, Artificial Sequence
  chemically synthesized
tgctacatcccttcagacggtc

SEQ ID NO: 8605 - DNA, 22 bp, Artificial Sequence
  chemically synthesized
gctacatcccttcagacggtcc

SEQ ID NO: 8606 - DNA, 22 bp, Artificial Sequence
  chemically synthesized
ctacatcccttcagacggtccc

SEQ ID NO: 8607 - DNA, 22 bp, Artificial Sequence
  chemically synthesized
catcccttcagacggtccctca

SEQ ID NO: 8608 - DNA, 22 bp, Artificial Sequence
  chemically synthesized
cagacggtccctcactggtgtc

SEQ ID NO: 8609 - DNA, 22 bp, Artificial Sequence
  chemically synthesized
agacggtccctcactggtgtcc

SEQ ID NO: 8610 - DNA, 22 bp, Artificial Sequence
  chemically synthesized
actggtgtccctcagcccattc

SEQ ID NO: 8611 - DNA, 22 bp, Artificial Sequence
  chemically synthesized
gtgtccctcagcccattcgcgt

SEQ ID NO: 8612 - DNA, 22 bp, Artificial Sequence
  chemically synthesized
agcccattcgcgtgagctcact

SEQ ID NO: 8613 - DNA, 22 bp, Artificial Sequence
  chemically synthesized
gcgtgagctcactctcccatta

SEQ ID NO: 8614 - DNA, 22 bp, Artificial Sequence
  chemically synthesized
actctcccattaatttcagaaa

SEQ ID NO: 8615 - DNA, 22 bp, Artificial Sequence
  chemically synthesized
tcccattaatttcagaaatcct

SEQ ID NO: 8616 - DNA, 22 bp, Artificial Sequence
  chemically synthesized
ccattaatttcagaaatcctgg

SEQ ID NO: 8617 - DNA, 22 bp, Artificial Sequence
  chemically synthesized
atttcagaaatcctggcctctc

SEQ ID NO: 8618 - DNA, 22 bp, Artificial Sequence
  chemically synthesized
cagaaatcctggcctctctcca

SEQ ID NO: 8619 - DNA, 22 bp, Artificial Sequence
  chemically synthesized
agaaatcctggcctctctccaa

SEQ ID NO: 8620 - DNA, 22 bp, Artificial Sequence
  chemically synthesized
gcctctctccaagcctcctgct

SEQ ID NO: 8621 - DNA, 22 bp, Artificial Sequence
  chemically synthesized
tctccaagcctcctgctcaaac

SEQ ID NO: 8622 - DNA, 22 bp, Artificial Sequence
  chemically synthesized
tccaagcctcctgctcaaactc

SEQ ID NO: 8623 - DNA, 22 bp, Artificial Sequence
  chemically synthesized
caagcctcctgctcaaactcta

SEQ ID NO: 8624 - DNA, 22 bp, Artificial Sequence
  chemically synthesized
ctgctcaaactctaaattctgt

SEQ ID NO: 8625 - DNA, 22 bp, Artificial Sequence
  chemically synthesized
ctcaaactctaaattctgtcac

SEQ ID NO: 8626 - DNA, 22 bp, Artificial Sequence
  chemically synthesized
aaactctaaattctgtcaccct

SEQ ID NO: 8627 - DNA, 22 bp, Artificial Sequence
  chemically synthesized
taaattctgtcaccctcagaag

SEQ ID NO: 8628 - DNA, 22 bp, Artificial Sequence
  chemically synthesized
aattctgtcaccctcagaagat

SEQ ID NO: 8629 - DNA, 22 bp, Artificial Sequence
  chemically synthesized
tgtcaccctcagaagattcagc

SEQ ID NO: 8630 - DNA, 22 bp, Artificial Sequence
  chemically synthesized
tcaccctcagaagattcagcag

SEQ ID NO: 8631 - DNA, 22 bp, Artificial Sequence
  chemically synthesized
agaagattcagcagcatcccgt

SEQ ID NO: 8632 - DNA, 22 bp, Artificial Sequence
  chemically synthesized
agcagcatcccgtattctctct

SEQ ID NO: 8633 - DNA, 22 bp, Artificial Sequence
  chemically synthesized
tctctgagtgttcactatgtac

SEQ ID NO: 8634 - DNA, 22 bp, Artificial Sequence
  chemically synthesized
tctgagtgttcactatgtaccg

SEQ ID NO: 8635 - DNA, 22 bp, Artificial Sequence
  chemically synthesized
tgagtgttcactatgtaccggg

SEQ ID NO: 8636 - DNA, 22 bp, Artificial Sequence
  chemically synthesized
agtgttcactatgtaccgggtg

SEQ ID NO: 8637 - DNA, 22 bp, Artificial Sequence
  chemically synthesized
actatgtaccgggtgccgtgtg

SEQ ID NO: 8638 - DNA, 22 bp, Artificial Sequence
  chemically synthesized
tgtaccgggtgccgtgtgggca

SEQ ID NO: 8639 - DNA, 22 bp, Artificial Sequence
  chemically synthesized
gagttgcagaggagagtgaggc

SEQ ID NO: 8640 - DNA, 22 bp, Artificial Sequence
  chemically synthesized
cagaggagagtgaggcggacag

SEQ ID NO: 8641 - DNA, 22 bp, Artificial Sequence
  chemically synthesized
tgcctgtggggacaccgcctgg

SEQ ID NO: 8642 - DNA, 22 bp, Artificial Sequence
  chemically synthesized
cctgtggggacaccgcctggtg

SEQ ID NO: 8643 - DNA, 22 bp, Artificial Sequence
  chemically synthesized
tggggacaccgcctggtgggaa

SEQ ID NO: 8644 - DNA, 22 bp, Artificial Sequence
  chemically synthesized
gtgggaagtccagccagccccc

SEQ ID NO: 8645 - DNA, 22 bp, Artificial Sequence
  chemically synthesized
cagagagaggagatgctactgg

SEQ ID NO: 8646 - DNA, 22 bp, Artificial Sequence
  chemically synthesized
ctggtgttcctgagtggtcctc

SEQ ID NO: 8647 - DNA, 22 bp, Artificial Sequence
  chemically synthesized
gtgttcctgagtggtcctcggg

SEQ ID NO: 8648 - DNA, 22 bp, Artificial Sequence
  chemically synthesized
ctgagtggtcctcgggagggac

SEQ ID NO: 8649 - DNA, 22 bp, Artificial Sequence
  chemically synthesized
agtggtcctcgggagggacctc

SEQ ID NO: 8650 - DNA, 22 bp, Artificial Sequence
  chemically synthesized
gggagggacctcctatccctcc

SEQ ID NO: 8651 - DNA, 22 bp, Artificial Sequence
  chemically synthesized
ctatccctcctgtcccctgccc

SEQ ID NO: 8652 - DNA, 22 bp, Artificial Sequence
  chemically synthesized
tccctcctgtcccctgccctgc

SEQ ID NO: 8653 - DNA, 22 bp, Artificial Sequence
  chemically synthesized
ctgtcccctgccctgccctgcc

SEQ ID NO: 8654 - DNA, 22 bp, Artificial Sequence
  chemically synthesized
tcccctgccctgccctgcccag

SEQ ID NO: 8655 - DNA, 22 bp, Artificial Sequence
  chemically synthesized
ccctgccctgcccagcaccggc

SEQ ID NO: 8656 - DNA, 22 bp, Artificial Sequence
  chemically synthesized
ccctgcccagcaccggccctcc

SEQ ID NO: 8657 - DNA, 22 bp, Artificial Sequence
  chemically synthesized
cccagcaccggccctccctcgg

SEQ ID NO: 8658 - DNA, 22 bp, Artificial Sequence
  chemically synthesized
cctcggttggccagcctcagga

SEQ ID NO: 8659 - DNA, 22 bp, Artificial Sequence
  chemically synthesized
ggttggccagcctcaggaatga

SEQ ID NO: 8660 - DNA, 22 bp, Artificial Sequence
  chemically synthesized
gccagcctcaggaatgaggagt

SEQ ID NO: 8661 - DNA, 22 bp, Artificial Sequence
  chemically synthesized
aggaatgaggagtccctcattc

SEQ ID NO: 8662 - DNA, 22 bp, Artificial Sequence
  chemically synthesized
attccagcccagctaaccaatc

SEQ ID NO: 8663 - DNA, 22 bp, Artificial Sequence
  chemically synthesized
cagcccagctaaccaatcccct

SEQ ID NO: 8664 - DNA, 22 bp, Artificial Sequence
  chemically synthesized
accaatccccttcctaagctcc

SEQ ID NO: 8665 - DNA, 22 bp, Artificial Sequence
  chemically synthesized
cctaagctccaagcccctgctc

SEQ ID NO: 8666 - DNA, 22 bp, Artificial Sequence
  chemically synthesized
ctaagctccaagcccctgctcc

SEQ ID NO: 8667 - DNA, 22 bp, Artificial Sequence
  chemically synthesized
agctccaagcccctgctcctcc

SEQ ID NO: 8668 - DNA, 22 bp, Artificial Sequence
  chemically synthesized
caagcccctgctcctcctgcct

SEQ ID NO: 8669 - DNA, 22 bp, Artificial Sequence
  chemically synthesized
ctcctcctgcctccatggaacc

SEQ ID NO: 8670 - DNA, 22 bp, Artificial Sequence
  chemically synthesized
ctcctgcctccatggaacccgg

SEQ ID NO: 8671 - DNA, 22 bp, Artificial Sequence
  chemically synthesized
ctgcctccatggaacccggctc

SEQ ID NO: 8672 - DNA, 22 bp, Artificial Sequence
  chemically synthesized
cctccatggaacccggctccac

SEQ ID NO: 8673 - DNA, 22 bp, Artificial Sequence
  chemically synthesized
catggaacccggctccaccacc

SEQ ID NO: 8674 - DNA, 22 bp, Artificial Sequence
  chemically synthesized
caccaccagcacccacacacct

SEQ ID NO: 8675 - DNA, 22 bp, Artificial Sequence
  chemically synthesized
acactcctccattcctggctct

SEQ ID NO: 8676 - DNA, 22 bp, Artificial Sequence
  chemically synthesized
ctccattcctggctcttgccct

SEQ ID NO: 8677 - DNA, 22 bp, Artificial Sequence
  chemically synthesized
cattcctggctcttgcccttct

SEQ ID NO: 8678 - DNA, 22 bp, Artificial Sequence
  chemically synthesized
ctggctcttgcccttctgccta

SEQ ID NO: 8679 - DNA, 22 bp, Artificial Sequence
  chemically synthesized
gctcttgcccttctgcctagca

SEQ ID NO: 8680 - DNA, 22 bp, Artificial Sequence
  chemically synthesized
ttgcccttctgcctagcactgc

SEQ ID NO: 8681 - DNA, 22 bp, Artificial Sequence
  chemically synthesized
gcccttctgcctagcactgctc

SEQ ID NO: 8682 - DNA, 22 bp, Artificial Sequence
  chemically synthesized
cccttctgcctagcactgctca

SEQ ID NO: 8683 - DNA, 22 bp, Artificial Sequence
  chemically synthesized
ctgcctagcactgctcagatct

SEQ ID NO: 8684 - DNA, 22 bp, Artificial Sequence
  chemically synthesized
tgcctagcactgctcagatctc

SEQ ID NO: 8685 - DNA, 22 bp, Artificial Sequence
  chemically synthesized
cctagcactgctcagatctctc

SEQ ID NO: 8686 - DNA, 22 bp, Artificial Sequence
  chemically synthesized
gcactgctcagatctctctcac

SEQ ID NO: 8687 - DNA, 22 bp, Artificial Sequence
  chemically synthesized
ctcagatctctctcaccttaaa

SEQ ID NO: 8688 - DNA, 22 bp, Artificial Sequence
  chemically synthesized
agatctctctcaccttaaaatc

SEQ ID NO: 8689 - DNA, 22 bp, Artificial Sequence
  chemically synthesized
tctcaccttaaaatcttttccc

SEQ ID NO: 8690 - DNA, 22 bp, Artificial Sequence
  chemically synthesized
tcaccttaaaatcttttcccac

SEQ ID NO: 8691 - DNA, 22 bp, Artificial Sequence
  chemically synthesized
accttaaaatcttttcccacca

SEQ ID NO: 8692 - DNA, 22 bp, Artificial Sequence
  chemically synthesized
aaaatcttttcccaccagcctg

SEQ ID NO: 8693 - DNA, 22 bp, Artificial Sequence
  chemically synthesized
aaatcttttcccaccagcctgg

SEQ ID NO: 8694 - DNA, 22 bp, Artificial Sequence
  chemically synthesized
ttcccaccagcctgggcaacat

SEQ ID NO: 8695 - DNA, 22 bp, Artificial Sequence
  chemically synthesized
tcccaccagcctgggcaacata

SEQ ID NO: 8696 - DNA, 22 bp, Artificial Sequence
  chemically synthesized
cccaccagcctgggcaacatag

SEQ ID NO: 8697 - DNA, 22 bp, Artificial Sequence
  chemically synthesized
ccaccagcctgggcaacatagc

SEQ ID NO: 8698 - DNA, 22 bp, Artificial Sequence
  chemically synthesized
ggcaacatagcaagaccccatt

SEQ ID NO: 8699 - DNA, 22 bp, Artificial Sequence
  chemically synthesized
ctctaaaaaattttttttaatt

SEQ ID NO: 8700 - DNA, 22 bp, Artificial Sequence
  chemically synthesized
tctaaaaaattttttttaattt

SEQ ID NO: 8701 - DNA, 22 bp, Artificial Sequence
  chemically synthesized
taaaaaattttttttaatttgc

SEQ ID NO: 8702 - DNA, 22 bp, Artificial Sequence
  chemically synthesized
aaaaattttttttaatttgcca

SEQ ID NO: 8703 - DNA, 22 bp, Artificial Sequence
  chemically synthesized
tttttaatttgccaggcacagt

SEQ ID NO: 8704 - DNA, 22 bp, Artificial Sequence
  chemically synthesized
ttttaatttgccaggcacagtg

SEQ ID NO: 8705 - DNA, 22 bp, Artificial Sequence
  chemically synthesized
tttaatttgccaggcacagtgg

SEQ ID NO: 8706 - DNA, 22 bp, Artificial Sequence
  chemically synthesized
ttaatttgccaggcacagtggt

SEQ ID NO: 8707 - DNA, 22 bp, Artificial Sequence
  chemically synthesized
taatttgccaggcacagtggtg

SEQ ID NO: 8708 - DNA, 22 bp, Artificial Sequence
  chemically synthesized
aatttgccaggcacagtggtgc

SEQ ID NO: 8709 - DNA, 22 bp, Artificial Sequence
  chemically synthesized
atttgccaggcacagtggtgca

SEQ ID NO: 8710 - DNA, 22 bp, Artificial Sequence
  chemically synthesized
gccaggcacagtggtgcacacc

SEQ ID NO: 8711 - DNA, 22 bp, Artificial Sequence
  chemically synthesized
ccaggcacagtggtgcacacct

SEQ ID NO: 8712 - DNA, 22 bp, Artificial Sequence
  chemically synthesized
taagtcctaactacttgggagg

SEQ ID NO: 8713 - DNA, 22 bp, Artificial Sequence
  chemically synthesized
actacttgggaggctgaggtgg

SEQ ID NO: 8714 - DNA, 22 bp, Artificial Sequence
  chemically synthesized
cttgggaggctgaggtgggagg

SEQ ID NO: 8715 - DNA, 22 bp, Artificial Sequence
  chemically synthesized
gggaggctgaggtgggaggatg

SEQ ID NO: 8716 - DNA, 22 bp, Artificial Sequence
  chemically synthesized
ggaggctgaggtgggaggatgg

SEQ ID NO: 8717 - DNA, 22 bp, Artificial Sequence
  chemically synthesized
aggtgggaggatggcttgagcc

SEQ ID NO: 8718 - DNA, 22 bp, Artificial Sequence
  chemically synthesized
gagcccaggagttcgaggttgc

SEQ ID NO: 8719 - DNA, 22 bp, Artificial Sequence
  chemically synthesized
agcccaggagttcgaggttgca

SEQ ID NO: 8720 - DNA, 22 bp, Artificial Sequence
  chemically synthesized
gaggttgcagtgagctatgatc

SEQ ID NO: 8721 - DNA, 22 bp, Artificial Sequence
  chemically synthesized
cagtgagctatgatcctgccac

SEQ ID NO: 8722 - DNA, 22 bp, Artificial Sequence
  chemically synthesized
tgatcctgccactacactcctg

SEQ ID NO: 8723 - DNA, 22 bp, Artificial Sequence
  chemically synthesized
ccactacactcctgtctctaaa

SEQ ID NO: 8724 - DNA, 22 bp, Artificial Sequence
  chemically synthesized
cactcctgtctctaaaaaaaaa

SEQ ID NO: 8725 - DNA, 22 bp, Artificial Sequence
  chemically synthesized
ctgtctctaaaaaaaaaatgtc

SEQ ID NO: 8726 - DNA, 22 bp, Artificial Sequence
  chemically synthesized
tctctaaaaaaaaaatgtccaa

SEQ ID NO: 8727 - DNA, 22 bp, Artificial Sequence
  chemically synthesized
taaaaaaaaaatgtccaagata

SEQ ID NO: 8728 - DNA, 22 bp, Artificial Sequence
  chemically synthesized
aaaaaaaaatgtccaagatact

SEQ ID NO: 8729 - DNA, 22 bp, Artificial Sequence
  chemically synthesized
aggtccttcagtcaagatttat

SEQ ID NO: 8730 - DNA, 22 bp, Artificial Sequence
  chemically synthesized
ggtccttcagtcaagatttatt

SEQ ID NO: 8731 - DNA, 22 bp, Artificial Sequence
  chemically synthesized
cagtcaagatttattacagaag

SEQ ID NO: 8732 - DNA, 22 bp, Artificial Sequence
  chemically synthesized
agtcaagatttattacagaagg

SEQ ID NO: 8733 - DNA, 22 bp, Artificial Sequence
  chemically synthesized
attacagaaggatccagggaag

SEQ ID NO: 8734 - DNA, 22 bp, Artificial Sequence
  chemically synthesized
ttacagaaggatccagggaagg

SEQ ID NO: 8735 - DNA, 22 bp, Artificial Sequence
  chemically synthesized
cagaaggatccagggaagggtc

SEQ ID NO: 8736 - DNA, 22 bp, Artificial Sequence
  chemically synthesized
gggagatgagaggagcagggat

SEQ ID NO: 8737 - DNA, 22 bp, Artificial Sequence
  chemically synthesized
ggagatgagaggagcagggatc

SEQ ID NO: 8738 - DNA, 22 bp, Artificial Sequence
  chemically synthesized
ccaggatctctctgtgctcacg

SEQ ID NO: 8739 - DNA, 22 bp, Artificial Sequence
  chemically synthesized
caggatctctctgtgctcacgt

SEQ ID NO: 8740 - DNA, 22 bp, Artificial Sequence
  chemically synthesized
tctgtgctcacgtcccccaccc

SEQ ID NO: 8741 - DNA, 22 bp, Artificial Sequence
  chemically synthesized
tgtgctcacgtcccccacccat

SEQ ID NO: 8742 - DNA, 22 bp, Artificial Sequence
  chemically synthesized
tgctcacgtcccccacccatcc

SEQ ID NO: 8743 - DNA, 22 bp, Artificial Sequence
  chemically synthesized
acgtcccccacccatcccaact

SEQ ID NO: 8744 - DNA, 22 bp, Artificial Sequence
  chemically synthesized
accccacctctacacacacaca

SEQ ID NO: 8745 - DNA, 22 bp, Artificial Sequence
  chemically synthesized
tacacacacacacacacacaca

SEQ ID NO: 8746 - DNA, 22 bp, Artificial Sequence
  chemically synthesized
cacacacacacacacacacata

SEQ ID NO: 8747 - DNA, 22 bp, Artificial Sequence
  chemically synthesized
acacacacactcacgcaacaca

SEQ ID NO: 8748 - DNA, 22 bp, Artificial Sequence
  chemically synthesized
acgcaacacactcacacacaca

SEQ ID NO: 8749 - DNA, 22 bp, Artificial Sequence
  chemically synthesized
acacacacaacatacataacac

SEQ ID NO: 8750 - DNA, 22 bp, Artificial Sequence
  chemically synthesized
acaacatacacacacaacacac

SEQ ID NO: 8751 - DNA, 22 bp, Artificial Sequence
  chemically synthesized
gcacaacatacacacacgcaca

SEQ ID NO: 8752 - DNA, 22 bp, Artificial Sequence
  chemically synthesized
acacaacacacaaacatacata

SEQ ID NO: 8753 - DNA, 22 bp, Artificial Sequence
  chemically synthesized
acacaatacacacacacaacac

SEQ ID NO: 8754 - DNA, 22 bp, Artificial Sequence
  chemically synthesized
atacacaacatacatacacaca

SEQ ID NO: 8755 - DNA, 22 bp, Artificial Sequence
  chemically synthesized
acatacacaacatacactcgca

SEQ ID NO: 8756 - DNA, 22 bp, Artificial Sequence
  chemically synthesized
gcacaacatacacacatgcaca

SEQ ID NO: 8757 - DNA, 22 bp, Artificial Sequence
  chemically synthesized
acacacaagatacacacaacat

SEQ ID NO: 8758 - DNA, 22 bp, Artificial Sequence
  chemically synthesized
acacaacatacacacacaacac

SEQ ID NO: 8759 - DNA, 22 bp, Artificial Sequence
  chemically synthesized
tcacacacaacataccctctca

SEQ ID NO: 8760 - DNA, 22 bp, Artificial Sequence
  chemically synthesized
acacacaacataccctctcaca

SEQ ID NO: 8761 - DNA, 22 bp, Artificial Sequence
  chemically synthesized
tcacatacacgacatacacaca

SEQ ID NO: 8762 - DNA, 22 bp, Artificial Sequence
  chemically synthesized
acatacacgacatacacacaca

SEQ ID NO: 8763 - DNA, 22 bp, Artificial Sequence
  chemically synthesized
tcgcgcacatatacacacacac

SEQ ID NO: 8764 - DNA, 22 bp, Artificial Sequence
  chemically synthesized
gcgcacatatacacacacacaa

SEQ ID NO: 8765 - DNA, 22 bp, Artificial Sequence
  chemically synthesized
actcacacacacacacagagtc

SEQ ID NO: 8766 - DNA, 22 bp, Artificial Sequence
  chemically synthesized
acacacacacacagagtcccag

SEQ ID NO: 8767 - DNA, 22 bp, Artificial Sequence
  chemically synthesized
aatctgcattcctcatatgcac

SEQ ID NO: 8768 - DNA, 22 bp, Artificial Sequence
  chemically synthesized
cattcctcatatgcacatacgt

SEQ ID NO: 8769 - DNA, 22 bp, Artificial Sequence
  chemically synthesized
ctcatatgcacatacgtgcaca

SEQ ID NO: 8770 - DNA, 22 bp, Artificial Sequence
  chemically synthesized
atatgcacatacgtgcacacgc

SEQ ID NO: 8771 - DNA, 22 bp, Artificial Sequence
  chemically synthesized
ttgggttgggaggagaagggca

SEQ ID NO: 8772 - DNA, 22 bp, Artificial Sequence
  chemically synthesized
gggttgggaggagaagggcagg

SEQ ID NO: 8773 - DNA, 22 bp, Artificial Sequence
  chemically synthesized
ggttgggaggagaagggcaggc

SEQ ID NO: 8774 - DNA, 22 bp, Artificial Sequence
  chemically synthesized
ggaggagaagggcaggcagtta

SEQ ID NO: 8775 - DNA, 22 bp, Artificial Sequence
  chemically synthesized
tcttccagatctccccacacct

SEQ ID NO: 8776 - DNA, 22 bp, Artificial Sequence
  chemically synthesized
ccagatctccccacacctctgg

SEQ ID NO: 8777 - DNA, 22 bp, Artificial Sequence
  chemically synthesized
cagatctccccacacctctggc

SEQ ID NO: 8778 - DNA, 22 bp, Artificial Sequence
  chemically synthesized
cccacacctctggcacatgcct

SEQ ID NO: 8779 - DNA, 22 bp, Artificial Sequence
  chemically synthesized
tggcacatgcctttcctggggt

SEQ ID NO: 8780 - DNA, 22 bp, Artificial Sequence
  chemically synthesized
gcacatgcctttcctggggtcc

SEQ ID NO: 8781 - DNA, 22 bp, Artificial Sequence
  chemically synthesized
tcctggggtcctggggtagaca

SEQ ID NO: 8782 - DNA, 22 bp, Artificial Sequence
  chemically synthesized
cctggggtcctggggtagacag

SEQ ID NO: 8783 - DNA, 22 bp, Artificial Sequence
  chemically synthesized
ctggggtcctggggtagacagg

SEQ ID NO: 8784 - DNA, 22 bp, Artificial Sequence
  chemically synthesized
gggtcctggggtagacaggaag

SEQ ID NO: 8785 - DNA, 22 bp, Artificial Sequence
  chemically synthesized
gggtagacaggaaggtgaggtg

SEQ ID NO: 8786 - DNA, 22 bp, Artificial Sequence
  chemically synthesized
ctcagtccctgttcacagagtg

SEQ ID NO: 8787 - DNA, 22 bp, Artificial Sequence
  chemically synthesized
agtccctgttcacagagtgggt

SEQ ID NO: 8788 - DNA, 22 bp, Artificial Sequence
  chemically synthesized
ttcacagagtgggtgcggcaga

SEQ ID NO: 8789 - DNA, 22 bp, Artificial Sequence
  chemically synthesized
acagagtgggtgcggcagagac

SEQ ID NO: 8790 - DNA, 22 bp, Artificial Sequence
  chemically synthesized
aaagggacagagcaatcatgag

SEQ ID NO: 8791 - DNA, 22 bp, Artificial Sequence
  chemically synthesized
agacagagggggagcaaagccg

SEQ ID NO: 8792 - DNA, 22 bp, Artificial Sequence
  chemically synthesized
cacacttgcctttcaaaaatgg

SEQ ID NO: 8793 - DNA, 22 bp, Artificial Sequence
  chemically synthesized
gcctttcaaaaatggatttcct

SEQ ID NO: 8794 - DNA, 22 bp, Artificial Sequence
  chemically synthesized
cctttcaaaaatggatttcctc

SEQ ID NO: 8795 - DNA, 22 bp, Artificial Sequence
  chemically synthesized
tcaaaaatggatttcctctcct

SEQ ID NO: 8796 - DNA, 22 bp, Artificial Sequence
  chemically synthesized
caaaaatggatttcctctcctg

SEQ ID NO: 8797 - DNA, 22 bp, Artificial Sequence
  chemically synthesized
aaaaatggatttcctctcctgg

SEQ ID NO: 8798 - DNA, 22 bp, Artificial Sequence
  chemically synthesized
cctctcctgggattcagcctgc

SEQ ID NO: 8799 - DNA, 22 bp, Artificial Sequence
  chemically synthesized
ctctcctgggattcagcctgcg

SEQ ID NO: 8800 - DNA, 22 bp, Artificial Sequence
  chemically synthesized
tcctgggattcagcctgcgagt

SEQ ID NO: 8801 - DNA, 22 bp, Artificial Sequence
  chemically synthesized
ctgggattcagcctgcgagtgc

SEQ ID NO: 8802 - DNA, 22 bp, Artificial Sequence
  chemically synthesized
ggattcagcctgcgagtgcctg

SEQ ID NO: 8803 - DNA, 22 bp, Artificial Sequence
  chemically synthesized
agcctgcgagtgcctggcccct

SEQ ID NO: 8804 - DNA, 22 bp, Artificial Sequence
  chemically synthesized
cgagtgcctggcccctcacctt

SEQ ID NO: 8805 - DNA, 22 bp, Artificial Sequence
  chemically synthesized
gcccctcaccttgatggaaagg

SEQ ID NO: 8806 - DNA, 22 bp, Artificial Sequence
  chemically synthesized
accttgatggaaaggatggtca

SEQ ID NO: 8807 - DNA, 22 bp, Artificial Sequence
  chemically synthesized
gatggaaaggatggtcattttc

SEQ ID NO: 8808 - DNA, 22 bp, Artificial Sequence
  chemically synthesized
atggaaaggatggtcattttcc

SEQ ID NO: 8809 - DNA, 22 bp, Artificial Sequence
  chemically synthesized
tcctccgagctcagctgctgga

SEQ ID NO: 8810 - DNA, 22 bp, Artificial Sequence
  chemically synthesized
cctccgagctcagctgctggat

SEQ ID NO: 8811 - DNA, 22 bp, Artificial Sequence
  chemically synthesized
ctccgagctcagctgctggata

SEQ ID NO: 8812 - DNA, 22 bp, Artificial Sequence
  chemically synthesized
cgagctcagctgctggatatct

SEQ ID NO: 8813 - DNA, 22 bp, Artificial Sequence
  chemically synthesized
agctgctggatatcttgaaagt

SEQ ID NO: 8814 - DNA, 22 bp, Artificial Sequence
  chemically synthesized
ctggatatcttgaaagtccttg

SEQ ID NO: 8815 - DNA, 22 bp, Artificial Sequence
  chemically synthesized
gatatcttgaaagtccttggcc

SEQ ID NO: 8816 - DNA, 22 bp, Artificial Sequence
  chemically synthesized
gaaagtccttggccatgatggg

SEQ ID NO: 8817 - DNA, 22 bp, Artificial Sequence
  chemically synthesized
aaagtccttggccatgatgggg

SEQ ID NO: 8818 - DNA, 22 bp, Artificial Sequence
  chemically synthesized
ggccatgatggggcccgggctg

SEQ ID NO: 8819 - DNA, 22 bp, Artificial Sequence
  chemically synthesized
gccatgatggggcccgggctgg

SEQ ID NO: 8820 - DNA, 22 bp, Artificial Sequence
  chemically synthesized
gagctggagctggagctgggct

SEQ ID NO: 8821 - DNA, 22 bp, Artificial Sequence
  chemically synthesized
gagctggagctgggctgggctg

SEQ ID NO: 8822 - DNA, 22 bp, Artificial Sequence
  chemically synthesized
gagctgggctgggctgggctga

SEQ ID NO: 8823 - DNA, 22 bp, Artificial Sequence
  chemically synthesized
ggctgggctgggctgaggttgc

SEQ ID NO: 8824 - DNA, 22 bp, Artificial Sequence
  chemically synthesized
ggctgggctgaggttgctctga

SEQ ID NO: 8825 - DNA, 22 bp, Artificial Sequence
  chemically synthesized
ggctgaggttgctctgagggct

SEQ ID NO: 8826 - DNA, 22 bp, Artificial Sequence
  chemically synthesized
aggttgctctgagggctggggc

SEQ ID NO: 8827 - DNA, 22 bp, Artificial Sequence
  chemically synthesized
ctctgagggctggggctggggc

SEQ ID NO: 8828 - DNA, 22 bp, Artificial Sequence
  chemically synthesized
tgagggctggggctggggcaga

SEQ ID NO: 8829 - DNA, 22 bp, Artificial Sequence
  chemically synthesized
agggctggggctggggcagagg

SEQ ID NO: 8830 - DNA, 22 bp, Artificial Sequence
  chemically synthesized
gggctggggcagaggtgcagat

SEQ ID NO: 8831 - DNA, 22 bp, Artificial Sequence
  chemically synthesized
gggcagaggtgcagattcacgt

SEQ ID NO: 8832 - DNA, 22 bp, Artificial Sequence
  chemically synthesized
acgtggaggttgatggtgggat

SEQ ID NO: 8833 - DNA, 22 bp, Artificial Sequence
  chemically synthesized
atggtgggatggaacgcagggt

SEQ ID NO: 8834 - DNA, 22 bp, Artificial Sequence
  chemically synthesized
ggggtggtggcctgggtaggat

SEQ ID NO: 8835 - DNA, 22 bp, Artificial Sequence
  chemically synthesized
agatcctacccaggccaccacc

SEQ ID NO: 8836 - DNA, 22 bp, Artificial Sequence
  chemically synthesized
cccaggccaccaccccgaaccc

SEQ ID NO: 8837 - DNA, 22 bp, Artificial Sequence
  chemically synthesized
cgaccctgcgttccatcccacc

SEQ ID NO: 8838 - DNA, 22 bp, Artificial Sequence
  chemically synthesized
cgttccatcccaccatcaacct

SEQ ID NO: 8839 - DNA, 22 bp, Artificial Sequence
  chemically synthesized
catcccaccatcaacctccacg

SEQ ID NO: 8840 - DNA, 22 bp, Artificial Sequence
  chemically synthesized
cacgtgaatctgcacctctgcc

SEQ ID NO: 8841 - DNA, 22 bp, Artificial Sequence
  chemically synthesized
cacctctgccccagccccagcc

SEQ ID NO: 8842 - DNA, 22 bp, Artificial Sequence
  chemically synthesized
tgccccagccccagccctcaga

SEQ ID NO: 8843 - DNA, 22 bp, Artificial Sequence
  chemically synthesized
ccccagccccagccctcagagc

SEQ ID NO: 8844 - DNA, 22 bp, Artificial Sequence
  chemically synthesized
agagcaacctcagcccagccca

SEQ ID NO: 8845 - DNA, 22 bp, Artificial Sequence
  chemically synthesized
agcccagcccagcccagctcca

SEQ ID NO: 8846 - DNA, 22 bp, Artificial Sequence
  chemically synthesized
cagctccagctccagcccgggc

SEQ ID NO: 8847 - DNA, 22 bp, Artificial Sequence
  chemically synthesized
cagctccagcccgggccccatc

SEQ ID NO: 8848 - DNA, 22 bp, Artificial Sequence
  chemically synthesized
cagcccgggccccatcatggcc

SEQ ID NO: 8849 - DNA, 22 bp, Artificial Sequence
  chemically synthesized
tcaagatatccagcagctgagc

SEQ ID NO: 8850 - DNA, 22 bp, Artificial Sequence
  chemically synthesized
caagatatccagcagctgagct

SEQ ID NO: 8851 - DNA, 22 bp, Artificial Sequence
  chemically synthesized
aagatatccagcagctgagctc

SEQ ID NO: 8852 - DNA, 22 bp, Artificial Sequence
  chemically synthesized
agctcggaggaaaatgaccatc

SEQ ID NO: 8853 - DNA, 22 bp, Artificial Sequence
  chemically synthesized
ggaggaaaatgaccatcctttc

SEQ ID NO: 8854 - DNA, 22 bp, Artificial Sequence
  chemically synthesized
tccatcaaggtgaggggccagg

SEQ ID NO: 8855 - DNA, 22 bp, Artificial Sequence
  chemically synthesized
ccatcaaggtgaggggccaggc

SEQ ID NO: 8856 - DNA, 22 bp, Artificial Sequence
  chemically synthesized
catcaaggtgaggggccaggca

SEQ ID NO: 8857 - DNA, 22 bp, Artificial Sequence
  chemically synthesized
gcaggctgaatcccaggagagg

SEQ ID NO: 8858 - DNA, 22 bp, Artificial Sequence
  chemically synthesized
aatcccaggagaggaaatccat

SEQ ID NO: 8859 - DNA, 22 bp, Artificial Sequence
  chemically synthesized
ttgaaaggcaagtgtgcagttt

SEQ ID NO: 8860 - DNA, 22 bp, Artificial Sequence
  chemically synthesized
tgaaaggcaagtgtgcagtttc

SEQ ID NO: 8861 - DNA, 22 bp, Artificial Sequence
  chemically synthesized
gaaaggcaagtgtgcagtttct

SEQ ID NO: 8862 - DNA, 22 bp, Artificial Sequence
  chemically synthesized
aaaggcaagtgtgcagtttctg

SEQ ID NO: 8863 - DNA, 22 bp, Artificial Sequence
  chemically synthesized
ctgcggctttgctccccctctg

SEQ ID NO: 8864 - DNA, 22 bp, Artificial Sequence
  chemically synthesized
tgcggctttgctccccctctgt

SEQ ID NO: 8865 - DNA, 22 bp, Artificial Sequence
  chemically synthesized
cggctttgctccccctctgtct

SEQ ID NO: 8866 - DNA, 22 bp, Artificial Sequence
  chemically synthesized
tgctccccctctgtctcagctc

SEQ ID NO: 8867 - DNA, 22 bp, Artificial Sequence
  chemically synthesized
gctccccctctgtctcagctca

SEQ ID NO: 8868 - DNA, 22 bp, Artificial Sequence
  chemically synthesized
ctccccctctgtctcagctcat

SEQ ID NO: 8869 - DNA, 22 bp, Artificial Sequence
  chemically synthesized
cccctctgtctcagctcatgat

SEQ ID NO: 8870 - DNA, 22 bp, Artificial Sequence
  chemically synthesized
tgtctcagctcatgattgctct

SEQ ID NO: 8871 - DNA, 22 bp, Artificial Sequence
  chemically synthesized
tctcagctcatgattgctctgt

SEQ ID NO: 8872 - DNA, 22 bp, Artificial Sequence
  chemically synthesized
agctcatgattgctctgtccct

SEQ ID NO: 8873 - DNA, 22 bp, Artificial Sequence
  chemically synthesized
atgattgctctgtccctttgag

SEQ ID NO: 8874 - DNA, 22 bp, Artificial Sequence
  chemically synthesized
ctctgtccctttgaggtctctg

SEQ ID NO: 8875 - DNA, 22 bp, Artificial Sequence
  chemically synthesized
tgtccctttgaggtctctgccg

SEQ ID NO: 8876 - DNA, 22 bp, Artificial Sequence
  chemically synthesized
tccctttgaggtctctgccgca

SEQ ID NO: 8877 - DNA, 22 bp, Artificial Sequence
  chemically synthesized
tgaggtctctgccgcacccact

SEQ ID NO: 8878 - DNA, 22 bp, Artificial Sequence
  chemically synthesized
gaggtctctgccgcacccactc

SEQ ID NO: 8879 - DNA, 22 bp, Artificial Sequence
  chemically synthesized
aggtctctgccgcacccactct

SEQ ID NO: 8880 - DNA, 22 bp, Artificial Sequence
  chemically synthesized
tgccgcacccactctgtgaaca

SEQ ID NO: 8881 - DNA, 22 bp, Artificial Sequence
  chemically synthesized
ccgcacccactctgtgaacagg

SEQ ID NO: 8882 - DNA, 22 bp, Artificial Sequence
  chemically synthesized
tgtgaacagggactgaggaggg

SEQ ID NO: 8883 - DNA, 22 bp, Artificial Sequence
  chemically synthesized
tgaacagggactgaggagggcc

SEQ ID NO: 8884 - DNA, 22 bp, Artificial Sequence
  chemically synthesized
aggagggcccgacacccccgct

SEQ ID NO: 8885 - DNA, 22 bp, Artificial Sequence
  chemically synthesized
gttccctcacctcaccttcctg

SEQ ID NO: 8886 - DNA, 22 bp, Artificial Sequence
  chemically synthesized
ttccctcacctcaccttcctgt

SEQ ID NO: 8887 - DNA, 22 bp, Artificial Sequence
  chemically synthesized
cctcacctcaccttcctgtcta

SEQ ID NO: 8888 - DNA, 22 bp, Artificial Sequence
  chemically synthesized
acctcaccttcctgtctacccc

SEQ ID NO: 8889 - DNA, 22 bp, Artificial Sequence
  chemically synthesized
accttcctgtctaccccaggac

SEQ ID NO: 8890 - DNA, 22 bp, Artificial Sequence
  chemically synthesized
cctgtctaccccaggaccccag

SEQ ID NO: 8891 - DNA, 22 bp, Artificial Sequence
  chemically synthesized
ctgtctaccccaggaccccagg

SEQ ID NO: 8892 - DNA, 22 bp, Artificial Sequence
  chemically synthesized
tctaccccaggaccccaggaaa

SEQ ID NO: 8893 - DNA, 22 bp, Artificial Sequence
  chemically synthesized
ccccaggaccccaggaaaggca

SEQ ID NO: 8894 - DNA, 22 bp, Artificial Sequence
  chemically synthesized
gaagataactgcctgcccttct

SEQ ID NO: 8895 - DNA, 22 bp, Artificial Sequence
  chemically synthesized
cctgcccttctcctcccaaccc

SEQ ID NO: 8896 - DNA, 22 bp, Artificial Sequence
  chemically synthesized
cccttctcctcccaacccaaga

SEQ ID NO: 8897 - DNA, 22 bp, Artificial Sequence
  chemically synthesized
ctcctcccaacccaagaacaca

SEQ ID NO: 8898 - DNA, 22 bp, Artificial Sequence
  chemically synthesized
tcctcccaacccaagaacacat

SEQ ID NO: 8899 - DNA, 22 bp, Artificial Sequence
  chemically synthesized
ctcccaacccaagaacacatgt

SEQ ID NO: 8900 - DNA, 22 bp, Artificial Sequence
  chemically synthesized
ccaacccaagaacacatgtgcc

SEQ ID NO: 8901 - DNA, 22 bp, Artificial Sequence
  chemically synthesized
gtatgtgcgtgtgcacgtatgt

SEQ ID NO: 8902 - DNA, 22 bp, Artificial Sequence
  chemically synthesized
agctgggactctgtgtgtgtgt

SEQ ID NO: 8903 - DNA, 22 bp, Artificial Sequence
  chemically synthesized
ggactctgtgtgtgtgtgtgag

SEQ ID NO: 8904 - DNA, 22 bp, Artificial Sequence
  chemically synthesized
tgtgtgtgtgtgtgagtgaatg

SEQ ID NO: 8905 - DNA, 22 bp, Artificial Sequence
  chemically synthesized
tgtgtgtgtgtgagtgaatgtt

SEQ ID NO: 8906 - DNA, 22 bp, Artificial Sequence
  chemically synthesized
tgtgtgtgtatatgtgcgcgag

SEQ ID NO: 8907 - DNA, 22 bp, Artificial Sequence
  chemically synthesized
tgtgtgtgtatgtcgtgtatgt

SEQ ID NO: 8908 - DNA, 22 bp, Artificial Sequence
  chemically synthesized
tgtgtgagagtgtgttgtgtgt

SEQ ID NO: 8909 - DNA, 22 bp, Artificial Sequence
  chemically synthesized
tgtgtgtatgttgtgtgagtat

SEQ ID NO: 8910 - DNA, 22 bp, Artificial Sequence
  chemically synthesized
tgtgagtatatgttgtgtgtat

SEQ ID NO: 8911 - DNA, 22 bp, Artificial Sequence
  chemically synthesized
tgtgtatcttgtgtgtgagtgt

SEQ ID NO: 8912 - DNA, 22 bp, Artificial Sequence
  chemically synthesized
gtgtgtgagtgtatgttgtgtg

SEQ ID NO: 8913 - DNA, 22 bp, Artificial Sequence
  chemically synthesized
tgtgtgagtgtatgttgtgtgt

SEQ ID NO: 8914 - DNA, 22 bp, Artificial Sequence
  chemically synthesized
tgtgttgtgtgtgtatcttgtg

SEQ ID NO: 8915 - DNA, 22 bp, Artificial Sequence
  chemically synthesized
tgtgtgtatcttgtgcatgtgt

SEQ ID NO: 8916 - DNA, 22 bp, Artificial Sequence
  chemically synthesized
gtgcatgtgtgtatgttgtgcg

SEQ ID NO: 8917 - DNA, 22 bp, Artificial Sequence
  chemically synthesized
tgcatgtgtgtatgttgtgcga

SEQ ID NO: 8918 - DNA, 22 bp, Artificial Sequence
  chemically synthesized
tgcgagtgtatgttgtgtatgt

SEQ ID NO: 8919 - DNA, 22 bp, Artificial Sequence
  chemically synthesized
tgtatgtgagtgtgtgtatgtt

SEQ ID NO: 8920 - DNA, 22 bp, Artificial Sequence
  chemically synthesized
tgtgtatgttgtgtgtatgtat

SEQ ID NO: 8921 - DNA, 22 bp, Artificial Sequence
  chemically synthesized
tgtgtatgtatgttgtgtatga

SEQ ID NO: 8922 - DNA, 22 bp, Artificial Sequence
  chemically synthesized
tgtatgagtgtgtgtatgttgt

SEQ ID NO: 8923 - DNA, 22 bp, Artificial Sequence
  chemically synthesized
tgtgtgtgtacgttgtgtatgt

SEQ ID NO: 8924 - DNA, 22 bp, Artificial Sequence
  chemically synthesized
tgtatgttgtgtgtgtgttgtg

SEQ ID NO: 8925 - DNA, 22 bp, Artificial Sequence
  chemically synthesized
tgtgtgtgttgtgtgtgtgtat

SEQ ID NO: 8926 - DNA, 22 bp, Artificial Sequence
  chemically synthesized
tgtgtgtgtattgtgtgagtgt

SEQ ID NO: 8927 - DNA, 22 bp, Artificial Sequence
  chemically synthesized
tgtgagtgtatgtatgtttgtg

SEQ ID NO: 8928 - DNA, 22 bp, Artificial Sequence
  chemically synthesized
gtgtgttgtgtgagtgttgtgt

SEQ ID NO: 8929 - DNA, 22 bp, Artificial Sequence
  chemically synthesized
tgtgttgtgtgagtgttgtgta

SEQ ID NO: 8930 - DNA, 22 bp, Artificial Sequence
  chemically synthesized
tgtgagtgttgtgtatgttgtg

SEQ ID NO: 8931 - DNA, 22 bp, Artificial Sequence
  chemically synthesized
tgtatgttgtgcgtgtgtgtat

SEQ ID NO: 8932 - DNA, 22 bp, Artificial Sequence
  chemically synthesized
tgcgtgtgtgtatgttgtgcga

SEQ ID NO: 8933 - DNA, 22 bp, Artificial Sequence
  chemically synthesized
tgcgagtgtgtgtgttgtgtgt

SEQ ID NO: 8934 - DNA, 22 bp, Artificial Sequence
  chemically synthesized
tgtgtgtatgttgtgagtgtgt

SEQ ID NO: 8935 - DNA, 22 bp, Artificial Sequence
  chemically synthesized
tgagtgtgttatgtatgttgtg

SEQ ID NO: 8936 - DNA, 22 bp, Artificial Sequence
  chemically synthesized
tgtatgttgtgtgtgtgagtgt

SEQ ID NO: 8937 - DNA, 22 bp, Artificial Sequence
  chemically synthesized
tgtgtgtgagtgtgttgcgtga

SEQ ID NO: 8938 - DNA, 22 bp, Artificial Sequence
  chemically synthesized
cgtgagtgtgtgtgttagtgtg

SEQ ID NO: 8939 - DNA, 22 bp, Artificial Sequence
  chemically synthesized
gtgtgtgtatgtgattgtatgt

SEQ ID NO: 8940 - DNA, 22 bp, Artificial Sequence
  chemically synthesized
tatgtgtgtgtgtgtgtgtgtg

SEQ ID NO: 8941 - DNA, 22 bp, Artificial Sequence
  chemically synthesized
ggatgggtgggggacgtgagca

SEQ ID NO: 8942 - DNA, 22 bp, Artificial Sequence
  chemically synthesized
gaagatccctgctcctctcatc

SEQ ID NO: 8943 - DNA, 22 bp, Artificial Sequence
  chemically synthesized
ctcctctcatctcccaagaccc

SEQ ID NO: 8944 - DNA, 22 bp, Artificial Sequence
  chemically synthesized
ctctcatctcccaagacccttc

SEQ ID NO: 8945 - DNA, 22 bp, Artificial Sequence
  chemically synthesized
tcatctcccaagacccttccct

SEQ ID NO: 8946 - DNA, 22 bp, Artificial Sequence
  chemically synthesized
atctcccaagacccttccctgg

SEQ ID NO: 8947 - DNA, 22 bp, Artificial Sequence
  chemically synthesized
ccaagacccttccctggatcct

SEQ ID NO: 8948 - DNA, 22 bp, Artificial Sequence
  chemically synthesized
ccctggatccttctgtaataaa

SEQ ID NO: 8949 - DNA, 22 bp, Artificial Sequence
  chemically synthesized
cctggatccttctgtaataaat

SEQ ID NO: 8950 - DNA, 22 bp, Artificial Sequence
  chemically synthesized
gatccttctgtaataaatcttg

SEQ ID NO: 8951 - DNA, 22 bp, Artificial Sequence
  chemically synthesized
ctgtaataaatcttgactgaag

SEQ ID NO: 8952 - DNA, 22 bp, Artificial Sequence
  chemically synthesized
tgtaataaatcttgactgaagg

SEQ ID NO: 8953 - DNA, 22 bp, Artificial Sequence
  chemically synthesized
taataaatcttgactgaaggac

SEQ ID NO: 8954 - DNA, 22 bp, Artificial Sequence
  chemically synthesized
gactgaaggacctaagtatctt

SEQ ID NO: 8955 - DNA, 22 bp, Artificial Sequence
  chemically synthesized
actgaaggacctaagtatcttg

SEQ ID NO: 8956 - DNA, 22 bp, Artificial Sequence
  chemically synthesized
aaggacctaagtatcttggaca

SEQ ID NO: 8957 - DNA, 22 bp, Artificial Sequence
  chemically synthesized
agtatcttggacattttttttt

SEQ ID NO: 8958 - DNA, 22 bp, Artificial Sequence
  chemically synthesized
ggacattttttttttagagaca

SEQ ID NO: 8959 - DNA, 22 bp, Artificial Sequence
  chemically synthesized
gacattttttttttagagacag

SEQ ID NO: 8960 - DNA, 22 bp, Artificial Sequence
  chemically synthesized
tttttttagagacaggagtgta

SEQ ID NO: 8961 - DNA, 22 bp, Artificial Sequence
  chemically synthesized
ttttttagagacaggagtgtag

SEQ ID NO: 8962 - DNA, 22 bp, Artificial Sequence
  chemically synthesized
tttttagagacaggagtgtagt

SEQ ID NO: 8963 - DNA, 22 bp, Artificial Sequence
  chemically synthesized
ttttagagacaggagtgtagtg

SEQ ID NO: 8964 - DNA, 22 bp, Artificial Sequence
  chemically synthesized
tttagagacaggagtgtagtgg

SEQ ID NO: 8965 - DNA, 22 bp, Artificial Sequence
  chemically synthesized
ttagagacaggagtgtagtggc

SEQ ID NO: 8966 - DNA, 22 bp, Artificial Sequence
  chemically synthesized
tagagacaggagtgtagtggca

SEQ ID NO: 8967 - DNA, 22 bp, Artificial Sequence
  chemically synthesized
agagacaggagtgtagtggcag

SEQ ID NO: 8968 - DNA, 22 bp, Artificial Sequence
  chemically synthesized
gagacaggagtgtagtggcagg

SEQ ID NO: 8969 - DNA, 22 bp, Artificial Sequence
  chemically synthesized
actgcaacctcgaactcctggg

SEQ ID NO: 8970 - DNA, 22 bp, Artificial Sequence
  chemically synthesized
caacctcgaactcctgggctca

SEQ ID NO: 8971 - DNA, 22 bp, Artificial Sequence
  chemically synthesized
gaactcctgggctcaagccatc

SEQ ID NO: 8972 - DNA, 22 bp, Artificial Sequence
  chemically synthesized
ctgggctcaagccatcctccca

SEQ ID NO: 8973 - DNA, 22 bp, Artificial Sequence
  chemically synthesized
ggctcaagccatcctcccacct

SEQ ID NO: 8974 - DNA, 22 bp, Artificial Sequence
  chemically synthesized
aagccatcctcccacctcagcc

SEQ ID NO: 8975 - DNA, 22 bp, Artificial Sequence
  chemically synthesized
ccacctcagcctcccaagtagt

SEQ ID NO: 8976 - DNA, 22 bp, Artificial Sequence
  chemically synthesized
agcctcccaagtagttaggact

SEQ ID NO: 8977 - DNA, 22 bp, Artificial Sequence
  chemically synthesized
ccaagtagttaggacttacagg

SEQ ID NO: 8978 - DNA, 22 bp, Artificial Sequence
  chemically synthesized
ggacttacaggtgtgcaccact

SEQ ID NO: 8979 - DNA, 22 bp, Artificial Sequence
  chemically synthesized
acaggtgtgcaccactgtgcct

SEQ ID NO: 8980 - DNA, 22 bp, Artificial Sequence
  chemically synthesized
caggtgtgcaccactgtgcctg

SEQ ID NO: 8981 - DNA, 22 bp, Artificial Sequence
  chemically synthesized
tgcctggcaaattaaaaaaaat

SEQ ID NO: 8982 - DNA, 22 bp, Artificial Sequence
  chemically synthesized
gcaaattaaaaaaaatttttta

SEQ ID NO: 8983 - DNA, 22 bp, Artificial Sequence
  chemically synthesized
aaaaaaattttttagagaaatg

SEQ ID NO: 8984 - DNA, 22 bp, Artificial Sequence
  chemically synthesized
tttagagaaatggggtcttgct

SEQ ID NO: 8985 - DNA, 22 bp, Artificial Sequence
  chemically synthesized
ttagagaaatggggtcttgcta

SEQ ID NO: 8986 - DNA, 22 bp, Artificial Sequence
  chemically synthesized
tagagaaatggggtcttgctat

SEQ ID NO: 8987 - DNA, 22 bp, Artificial Sequence
  chemically synthesized
agagaaatggggtcttgctatg

SEQ ID NO: 8988 - DNA, 22 bp, Artificial Sequence
  chemically synthesized
gagaaatggggtcttgctatgt

SEQ ID NO: 8989 - DNA, 22 bp, Artificial Sequence
  chemically synthesized
gctatgttgcccaggctggtgg

SEQ ID NO: 8990 - DNA, 22 bp, Artificial Sequence
  chemically synthesized
ctatgttgcccaggctggtggg

SEQ ID NO: 8991 - DNA, 22 bp, Artificial Sequence
  chemically synthesized
tgttgcccaggctggtgggaaa

SEQ ID NO: 8992 - DNA, 22 bp, Artificial Sequence
  chemically synthesized
cccaggctggtgggaaaagatt

SEQ ID NO: 8993 - DNA, 22 bp, Artificial Sequence
  chemically synthesized
gtgggaaaagattttaaggtga

SEQ ID NO: 8994 - DNA, 22 bp, Artificial Sequence
  chemically synthesized
taaggtgagagagatctgagca

SEQ ID NO: 8995 - DNA, 22 bp, Artificial Sequence
  chemically synthesized
aaggtgagagagatctgagcag

SEQ ID NO: 8996 - DNA, 22 bp, Artificial Sequence
  chemically synthesized
aggtgagagagatctgagcagt

SEQ ID NO: 8997 - DNA, 22 bp, Artificial Sequence
  chemically synthesized
agcagtgctaggcagaagggca

SEQ ID NO: 8998 - DNA, 22 bp, Artificial Sequence
  chemically synthesized
ggcagaagggcaagagccagga

SEQ ID NO: 8999 - DNA, 22 bp, Artificial Sequence
  chemically synthesized
gtggtggagccgggttccatgg

SEQ ID NO: 9000 - DNA, 22 bp, Artificial Sequence
  chemically synthesized
catggaggcaggaggagcaggg

SEQ ID NO: 9001 - DNA, 22 bp, Artificial Sequence
  chemically synthesized
ggagcttaggaaggggattggt

SEQ ID NO: 9002 - DNA, 22 bp, Artificial Sequence
  chemically synthesized
gagcttaggaaggggattggtt

SEQ ID NO: 9003 - DNA, 22 bp, Artificial Sequence
  chemically synthesized
aggaaggggattggttagctgg

SEQ ID NO: 9004 - DNA, 22 bp, Artificial Sequence
  chemically synthesized
ggaaggggattggttagctggg

SEQ ID NO: 9005 - DNA, 22 bp, Artificial Sequence
  chemically synthesized
gttagctgggctggaatgaggg

SEQ ID NO: 9006 - DNA, 22 bp, Artificial Sequence
  chemically synthesized
gctgggctggaatgagggactc

SEQ ID NO: 9007 - DNA, 22 bp, Artificial Sequence
  chemically synthesized
ggctggaatgagggactcctca

SEQ ID NO: 9008 - DNA, 22 bp, Artificial Sequence
  chemically synthesized
gaatgagggactcctcattcct

SEQ ID NO: 9009 - DNA, 22 bp, Artificial Sequence
  chemically synthesized
ctcattcctgaggctggccaac

SEQ ID NO: 9010 - DNA, 22 bp, Artificial Sequence
  chemically synthesized
attcctgaggctggccaaccga

SEQ ID NO: 9011 - DNA, 22 bp, Artificial Sequence
  chemically synthesized
ctgaggctggccaaccgaggga

SEQ ID NO: 9012 - DNA, 22 bp, Artificial Sequence
  chemically synthesized
aggctggccaaccgagggaggg

SEQ ID NO: 9013 - DNA, 22 bp, Artificial Sequence
  chemically synthesized
gccaaccgagggagggccggtg

SEQ ID NO: 9014 - DNA, 22 bp, Artificial Sequence
  chemically synthesized
ggcagggcagggcaggggacag

SEQ ID NO: 9015 - DNA, 22 bp, Artificial Sequence
  chemically synthesized
ccgaggaccactcaggaacacc

SEQ ID NO: 9016 - DNA, 22 bp, Artificial Sequence
  chemically synthesized
aggaacaccagtagcatctcct

SEQ ID NO: 9017 - DNA, 22 bp, Artificial Sequence
  chemically synthesized
ctctctctgtagggggctggct

SEQ ID NO: 9018 - DNA, 22 bp, Artificial Sequence
  chemically synthesized
tctctgtagggggctggctgga

SEQ ID NO: 9019 - DNA, 22 bp, Artificial Sequence
  chemically synthesized
tctgtagggggctggctggact

SEQ ID NO: 9020 - DNA, 22 bp, Artificial Sequence
  chemically synthesized
tgtagggggctggctggacttc

SEQ ID NO: 9021 - DNA, 22 bp, Artificial Sequence
  chemically synthesized
tagggggctggctggacttccc

SEQ ID NO: 9022 - DNA, 22 bp, Artificial Sequence
  chemically synthesized
gctggacttcccaccaggcggt

SEQ ID NO: 9023 - DNA, 22 bp, Artificial Sequence
  chemically synthesized
gacttcccaccaggcggtgtcc

SEQ ID NO: 9024 - DNA, 22 bp, Artificial Sequence
  chemically synthesized
cccaccaggcggtgtccccaca

SEQ ID NO: 9025 - DNA, 22 bp, Artificial Sequence
  chemically synthesized
ccaccaggcggtgtccccacag

SEQ ID NO: 9026 - DNA, 22 bp, Artificial Sequence
  chemically synthesized
tccgcctcactctcctctgcaa

SEQ ID NO: 9027 - DNA, 22 bp, Artificial Sequence
  chemically synthesized
actctcctctgcaactccagtg

SEQ ID NO: 9028 - DNA, 22 bp, Artificial Sequence
  chemically synthesized
tcctctgcaactccagtgccca

SEQ ID NO: 9029 - DNA, 22 bp, Artificial Sequence
  chemically synthesized
ctctgcaactccagtgcccaca

SEQ ID NO: 9030 - DNA, 22 bp, Artificial Sequence
  chemically synthesized
tgcaactccagtgcccacacgg

SEQ ID NO: 9031 - DNA, 22 bp, Artificial Sequence
  chemically synthesized
caactccagtgcccacacggca

SEQ ID NO: 9032 - DNA, 22 bp, Artificial Sequence
  chemically synthesized
cagtgcccacacggcacccggt

SEQ ID NO: 9033 - DNA, 22 bp, Artificial Sequence
  chemically synthesized
agagagaatacgggatgctgct

SEQ ID NO: 9034 - DNA, 22 bp, Artificial Sequence
  chemically synthesized
ctgaatcttctgagggtgacag

SEQ ID NO: 9035 - DNA, 22 bp, Artificial Sequence
  chemically synthesized
aatcttctgagggtgacagaat

SEQ ID NO: 9036 - DNA, 22 bp, Artificial Sequence
  chemically synthesized
ctgagggtgacagaatttagag

SEQ ID NO: 9037 - DNA, 22 bp, Artificial Sequence
  chemically synthesized
tgagggtgacagaatttagagt

SEQ ID NO: 9038 - DNA, 22 bp, Artificial Sequence
  chemically synthesized
agggtgacagaatttagagttt

SEQ ID NO: 9039 - DNA, 22 bp, Artificial Sequence
  chemically synthesized
agagtttgagcaggaggcttgg

SEQ ID NO: 9040 - DNA, 22 bp, Artificial Sequence
  chemically synthesized
gagtttgagcaggaggcttgga

SEQ ID NO: 9041 - DNA, 22 bp, Artificial Sequence
  chemically synthesized
gagcaggaggcttggagagagg

SEQ ID NO: 9042 - DNA, 22 bp, Artificial Sequence
  chemically synthesized
agcaggaggcttggagagaggc

SEQ ID NO: 9043 - DNA, 22 bp, Artificial Sequence
  chemically synthesized
ggagagaggccaggatttctga

SEQ ID NO: 9044 - DNA, 22 bp, Artificial Sequence
  chemically synthesized
gagagaggccaggatttctgaa

SEQ ID NO: 9045 - DNA, 22 bp, Artificial Sequence
  chemically synthesized
ctgaaattaatgggagagtgag

SEQ ID NO: 9046 - DNA, 22 bp, Artificial Sequence
  chemically synthesized
tgaaattaatgggagagtgagc

SEQ ID NO: 9047 - DNA, 22 bp, Artificial Sequence
  chemically synthesized
aaattaatgggagagtgagctc

SEQ ID NO: 9048 - DNA, 22 bp, Artificial Sequence
  chemically synthesized
atgggagagtgagctcacgcga

SEQ ID NO: 9049 - DNA, 22 bp, Artificial Sequence
  chemically synthesized
acgcgaatgggctgagggacac

SEQ ID NO: 9050 - DNA, 22 bp, Artificial Sequence
  chemically synthesized
agggacaccagtgagggaccgt

SEQ ID NO: 9051 - DNA, 22 bp, Artificial Sequence
  chemically synthesized
aagggatgtagcaaagtcaccg

SEQ ID NO: 9052 - DNA, 22 bp, Artificial Sequence
  chemically synthesized
ccctccagcagcccgggtggtg

SEQ ID NO: 9053 - DNA, 22 bp, Artificial Sequence
  chemically synthesized
cctccagcagcccgggtggtgg

SEQ ID NO: 9054 - DNA, 22 bp, Artificial Sequence
  chemically synthesized
cagcagcccgggtggtgggggc

SEQ ID NO: 9055 - DNA, 22 bp, Artificial Sequence
  chemically synthesized
ggggaacgtcatcatgggagct

SEQ ID NO: 9056 - DNA, 22 bp, Artificial Sequence
  chemically synthesized
acactgatcagctgctcaccgg

SEQ ID NO: 9057 - DNA, 22 bp, Artificial Sequence
  chemically synthesized
atcagctgctcaccggggccca

SEQ ID NO: 9058 - DNA, 22 bp, Artificial Sequence
  chemically synthesized
ctcaccggggcccatcttccac

SEQ ID NO: 9059 - DNA, 22 bp, Artificial Sequence
  chemically synthesized
accggggcccatcttccacttg

SEQ ID NO: 9060 - DNA, 22 bp, Artificial Sequence
  chemically synthesized
ccacttgtctcagcacttgatt

SEQ ID NO: 9061 - DNA, 22 bp, Artificial Sequence
  chemically synthesized
cacttgtctcagcacttgattt

SEQ ID NO: 9062 - DNA, 22 bp, Artificial Sequence
  chemically synthesized
gtctcagcacttgatttttttc

SEQ ID NO: 9063 - DNA, 22 bp, Artificial Sequence
  chemically synthesized
tctcagcacttgatttttttct

SEQ ID NO: 9064 - DNA, 22 bp, Artificial Sequence
  chemically synthesized
agcacttgatttttttctgcta

SEQ ID NO: 9065 - DNA, 22 bp, Artificial Sequence
  chemically synthesized
gatttttttctgctaccccctt

SEQ ID NO: 9066 - DNA, 22 bp, Artificial Sequence
  chemically synthesized
atttttttctgctacccccttt

SEQ ID NO: 9067 - DNA, 22 bp, Artificial Sequence
  chemically synthesized
ttttctgctaccccctttttct

SEQ ID NO: 9068 - DNA, 22 bp, Artificial Sequence
  chemically synthesized
tttctgctaccccctttttctt

SEQ ID NO: 9069 - DNA, 22 bp, Artificial Sequence
  chemically synthesized
ttctgctaccccctttttcttt

SEQ ID NO: 9070 - DNA, 22 bp, Artificial Sequence
  chemically synthesized
tctgctaccccctttttctttt

SEQ ID NO: 9071 - DNA, 22 bp, Artificial Sequence
  chemically synthesized
ctgctaccccctttttctttta

SEQ ID NO: 9072 - DNA, 22 bp, Artificial Sequence
  chemically synthesized
tgctaccccctttttcttttaa

SEQ ID NO: 9073 - DNA, 22 bp, Artificial Sequence
  chemically synthesized
ctaccccctttttcttttaaag

SEQ ID NO: 9074 - DNA, 22 bp, Artificial Sequence
  chemically synthesized
ccccctttttcttttaaagatt

SEQ ID NO: 9075 - DNA, 22 bp, Artificial Sequence
  chemically synthesized
tttcttttaaagatttcaatta

SEQ ID NO: 9076 - DNA, 22 bp, Artificial Sequence
  chemically synthesized
ttcttttaaagatttcaattat

SEQ ID NO: 9077 - DNA, 22 bp, Artificial Sequence
  chemically synthesized
tcttttaaagatttcaattatg

SEQ ID NO: 9078 - DNA, 22 bp, Artificial Sequence
  chemically synthesized
cttttaaagatttcaattatgc

SEQ ID NO: 9079 - DNA, 22 bp, Artificial Sequence
  chemically synthesized
ttttaaagatttcaattatgca

SEQ ID NO: 9080 - DNA, 22 bp, Artificial Sequence
  chemically synthesized
ttaaagatttcaattatgcatg

SEQ ID NO: 9081 - DNA, 22 bp, Artificial Sequence
  chemically synthesized
taaagatttcaattatgcatgt

SEQ ID NO: 9082 - DNA, 22 bp, Artificial Sequence
  chemically synthesized
aaagatttcaattatgcatgta

SEQ ID NO: 9083 - DNA, 22 bp, Artificial Sequence
  chemically synthesized
aagatttcaattatgcatgtat

SEQ ID NO: 9084 - DNA, 22 bp, Artificial Sequence
  chemically synthesized
caattatgcatgtattaagggt

SEQ ID NO: 9085 - DNA, 22 bp, Artificial Sequence
  chemically synthesized
aattatgcatgtattaagggtc

SEQ ID NO: 9086 - DNA, 22 bp, Artificial Sequence
  chemically synthesized
tgcatgtattaagggtcccaca

SEQ ID NO: 9087 - DNA, 22 bp, Artificial Sequence
  chemically synthesized
agggtcccacagctcactcatt

SEQ ID NO: 9088 - DNA, 22 bp, Artificial Sequence
  chemically synthesized
actcattctctttccatttttt

SEQ ID NO: 9089 - DNA, 22 bp, Artificial Sequence
  chemically synthesized
attctctttccattttttaatt

SEQ ID NO: 9090 - DNA, 22 bp, Artificial Sequence
  chemically synthesized
tctttccattttttaattcttt

SEQ ID NO: 9091 - DNA, 22 bp, Artificial Sequence
  chemically synthesized
tttccattttttaattcttttt

SEQ ID NO: 9092 - DNA, 22 bp, Artificial Sequence
  chemically synthesized
tccattttttaattcttttttc

SEQ ID NO: 9093 - DNA, 22 bp, Artificial Sequence
  chemically synthesized
ccattttttaattcttttttct

SEQ ID NO: 9094 - DNA, 22 bp, Artificial Sequence
  chemically synthesized
cattttttaattcttttttctc

SEQ ID NO: 9095 - DNA, 22 bp, Artificial Sequence
  chemically synthesized
tttaattcttttttctcccagt

SEQ ID NO: 9096 - DNA, 22 bp, Artificial Sequence
  chemically synthesized
ttaattcttttttctcccagtg

SEQ ID NO: 9097 - DNA, 22 bp, Artificial Sequence
  chemically synthesized
taattcttttttctcccagtgt

SEQ ID NO: 9098 - DNA, 22 bp, Artificial Sequence
  chemically synthesized
aattcttttttctcccagtgtt

SEQ ID NO: 9099 - DNA, 22 bp, Artificial Sequence
  chemically synthesized
attcttttttctcccagtgttt

SEQ ID NO: 9100 - DNA, 22 bp, Artificial Sequence
  chemically synthesized
ttttttctcccagtgtttcatt

SEQ ID NO: 9101 - DNA, 22 bp, Artificial Sequence
  chemically synthesized
ttttctcccagtgtttcatttt

SEQ ID NO: 9102 - DNA, 22 bp, Artificial Sequence
  chemically synthesized
tttctcccagtgtttcatttta

SEQ ID NO: 9103 - DNA, 22 bp, Artificial Sequence
  chemically synthesized
ttctcccagtgtttcattttat

SEQ ID NO: 9104 - DNA, 22 bp, Artificial Sequence
  chemically synthesized
tctcccagtgtttcattttata

SEQ ID NO: 9105 - DNA, 22 bp, Artificial Sequence
  chemically synthesized
ctcccagtgtttcattttatag

SEQ ID NO: 9106 - DNA, 22 bp, Artificial Sequence
  chemically synthesized
tcccagtgtttcattttataga

SEQ ID NO: 9107 - DNA, 22 bp, Artificial Sequence
  chemically synthesized
ccagtgtttcattttatagagt

SEQ ID NO: 9108 - DNA, 22 bp, Artificial Sequence
  chemically synthesized
cattttatagagttattgctgt

SEQ ID NO: 9109 - DNA, 22 bp, Artificial Sequence
  chemically synthesized
attttatagagttattgctgtt

SEQ ID NO: 9110 - DNA, 22 bp, Artificial Sequence
  chemically synthesized
tatagagttattgctgttcatt

SEQ ID NO: 9111 - DNA, 22 bp, Artificial Sequence
  chemically synthesized
atagagttattgctgttcatta

SEQ ID NO: 9112 - DNA, 22 bp, Artificial Sequence
  chemically synthesized
tagagttattgctgttcattaa

SEQ ID NO: 9113 - DNA, 22 bp, Artificial Sequence
  chemically synthesized
ttgctgttcattaagttaacta

SEQ ID NO: 9114 - DNA, 22 bp, Artificial Sequence
  chemically synthesized
ctgttcattaagttaactaaaa

SEQ ID NO: 9115 - DNA, 22 bp, Artificial Sequence
  chemically synthesized
ttcattaagttaactaaaattt

SEQ ID NO: 9116 - DNA, 22 bp, Artificial Sequence
  chemically synthesized
attaagttaactaaaattttcc

SEQ ID NO: 9117 - DNA, 22 bp, Artificial Sequence
  chemically synthesized
agttaactaaaattttcccctt

SEQ ID NO: 9118 - DNA, 22 bp, Artificial Sequence
  chemically synthesized
actaaaattttccccttcccct

SEQ ID NO: 9119 - DNA, 22 bp, Artificial Sequence
  chemically synthesized
aaattttccccttcccctcccc

SEQ ID NO: 9120 - DNA, 22 bp, Artificial Sequence
  chemically synthesized
tccccttcccctccccctcccc

SEQ ID NO: 9121 - DNA, 22 bp, Artificial Sequence
  chemically synthesized
ccccttcccctccccctcccct

SEQ ID NO: 9122 - DNA, 22 bp, Artificial Sequence
  chemically synthesized
cccttcccctccccctcccctc

SEQ ID NO: 9123 - DNA, 22 bp, Artificial Sequence
  chemically synthesized
cccctccccctcccctcccctc

SEQ ID NO: 9124 - DNA, 22 bp, Artificial Sequence
  chemically synthesized
ccctccccctcccctcccctcc

SEQ ID NO: 9125 - DNA, 22 bp, Artificial Sequence
  chemically synthesized
cccctcccctcccctcctttcc

SEQ ID NO: 9126 - DNA, 22 bp, Artificial Sequence
  chemically synthesized
ccctcccctcctttccttccct

SEQ ID NO: 9127 - DNA, 22 bp, Artificial Sequence
  chemically synthesized
ccctcctttccttccctcgctt

SEQ ID NO: 9128 - DNA, 22 bp, Artificial Sequence
  chemically synthesized
ctttccttccctcgcttcccct

SEQ ID NO: 9129 - DNA, 22 bp, Artificial Sequence
  chemically synthesized
tccttccctcgcttcccctccc

SEQ ID NO: 9130 - DNA, 22 bp, Artificial Sequence
  chemically synthesized
ccttccctcgcttcccctcccc

SEQ ID NO: 9131 - DNA, 22 bp, Artificial Sequence
  chemically synthesized
cttccctcgcttcccctcccct

SEQ ID NO: 9132 - DNA, 22 bp, Artificial Sequence
  chemically synthesized
ccctcgcttcccctcccctctc

SEQ ID NO: 9133 - DNA, 22 bp, Artificial Sequence
  chemically synthesized
cctcgcttcccctcccctctct

SEQ ID NO: 9134 - DNA, 22 bp, Artificial Sequence
  chemically synthesized
gcttcccctcccctctctctct

SEQ ID NO: 9135 - DNA, 22 bp, Artificial Sequence
  chemically synthesized
cccctcccctctctctctctca

SEQ ID NO: 9136 - DNA, 22 bp, Artificial Sequence
  chemically synthesized
ccctcccctctctctctctcat

SEQ ID NO: 9137 - DNA, 22 bp, Artificial Sequence
  chemically synthesized
ccctctctctctctcatctcac

SEQ ID NO: 9138 - DNA, 22 bp, Artificial Sequence
  chemically synthesized
tctctctctcatctcactctgt

SEQ ID NO: 9139 - DNA, 22 bp, Artificial Sequence
  chemically synthesized
tctctctcatctcactctgttg

SEQ ID NO: 9140 - DNA, 22 bp, Artificial Sequence
  chemically synthesized
tctctcatctcactctgttgcc

SEQ ID NO: 9141 - DNA, 22 bp, Artificial Sequence
  chemically synthesized
tctcatctcactctgttgccca

SEQ ID NO: 9142 - DNA, 22 bp, Artificial Sequence
  chemically synthesized
tcatctcactctgttgcccagg

SEQ ID NO: 9143 - DNA, 22 bp, Artificial Sequence
  chemically synthesized
atctcactctgttgcccaggct

SEQ ID NO: 9144 - DNA, 22 bp, Artificial Sequence
  chemically synthesized
actctgttgcccaggctggaat

SEQ ID NO: 9145 - DNA, 22 bp, Artificial Sequence
  chemically synthesized
tgttgcccaggctggaatgcag

SEQ ID NO: 9146 - DNA, 22 bp, Artificial Sequence
  chemically synthesized
ttgcccaggctggaatgcagta

SEQ ID NO: 9147 - DNA, 22 bp, Artificial Sequence
  chemically synthesized
cccaggctggaatgcagtagct

SEQ ID NO: 9148 - DNA, 22 bp, Artificial Sequence
  chemically synthesized
gaatgcagtagcttgtcacaac

SEQ ID NO: 9149 - DNA, 22 bp, Artificial Sequence
  chemically synthesized
gtcacaactcactgtggcctcc

SEQ ID NO: 9150 - DNA, 22 bp, Artificial Sequence
  chemically synthesized
tcacaactcactgtggcctcca

SEQ ID NO: 9151 - DNA, 22 bp, Artificial Sequence
  chemically synthesized
actgtggcctccacctcctggg

SEQ ID NO: 9152 - DNA, 22 bp, Artificial Sequence
  chemically synthesized
tggcctccacctcctgggctca

SEQ ID NO: 9153 - DNA, 22 bp, Artificial Sequence
  chemically synthesized
cacctcctgggctcaggcgatc

SEQ ID NO: 9154 - DNA, 22 bp, Artificial Sequence
  chemically synthesized
ctgggctcaggcgatccttcca

SEQ ID NO: 9155 - DNA, 22 bp, Artificial Sequence
  chemically synthesized
ggctcaggcgatccttccactt

SEQ ID NO: 9156 - DNA, 22 bp, Artificial Sequence
  chemically synthesized
aggcgatccttccacttcagcc

SEQ ID NO: 9157 - DNA, 22 bp, Artificial Sequence
  chemically synthesized
ccacttcagcctcccaggtagc

SEQ ID NO: 9158 - DNA, 22 bp, Artificial Sequence
  chemically synthesized
cacttcagcctcccaggtagct

SEQ ID NO: 9159 - DNA, 22 bp, Artificial Sequence
  chemically synthesized
cagcctcccaggtagctgggac

SEQ ID NO: 9160 - DNA, 22 bp, Artificial Sequence
  chemically synthesized
agcctcccaggtagctgggact

SEQ ID NO: 9161 - DNA, 22 bp, Artificial Sequence
  chemically synthesized
ccaggtagctgggactataggc

SEQ ID NO: 9162 - DNA, 22 bp, Artificial Sequence
  chemically synthesized
ggactataggcatgtggcacca

SEQ ID NO: 9163 - DNA, 22 bp, Artificial Sequence
  chemically synthesized
taggcatgtggcaccacacctg

SEQ ID NO: 9164 - DNA, 22 bp, Artificial Sequence
  chemically synthesized
gctaattaaaaatttttttttg

SEQ ID NO: 9165 - DNA, 22 bp, Artificial Sequence
  chemically synthesized
attaaaaatttttttttgtaga

SEQ ID NO: 9166 - DNA, 22 bp, Artificial Sequence
  chemically synthesized
aaaatttttttttgtagagacg

SEQ ID NO: 9167 - DNA, 22 bp, Artificial Sequence
  chemically synthesized
ttttttgtagagacggttttgc

SEQ ID NO: 9168 - DNA, 22 bp, Artificial Sequence
  chemically synthesized
tttttgtagagacggttttgcc

SEQ ID NO: 9169 - DNA, 22 bp, Artificial Sequence
  chemically synthesized
ttttgtagagacggttttgcca

SEQ ID NO: 9170 - DNA, 22 bp, Artificial Sequence
  chemically synthesized
tttgtagagacggttttgccat

SEQ ID NO: 9171 - DNA, 22 bp, Artificial Sequence
  chemically synthesized
ttgtagagacggttttgccatg

SEQ ID NO: 9172 - DNA, 22 bp, Artificial Sequence
  chemically synthesized
tgtagagacggttttgccatgt

SEQ ID NO: 9173 - DNA, 22 bp, Artificial Sequence
  chemically synthesized
gtagagacggttttgccatgta

SEQ ID NO: 9174 - DNA, 22 bp, Artificial Sequence
  chemically synthesized
tagagacggttttgccatgtag

SEQ ID NO: 9175 - DNA, 22 bp, Artificial Sequence
  chemically synthesized
tgccatgtagaggggttttgcc

SEQ ID NO: 9176 - DNA, 22 bp, Artificial Sequence
  chemically synthesized
gccatgtagaggggttttgcca

SEQ ID NO: 9177 - DNA, 22 bp, Artificial Sequence
  chemically synthesized
ccatgtagaggggttttgccat

SEQ ID NO: 9178 - DNA, 22 bp, Artificial Sequence
  chemically synthesized
tgccatgctgcccagactagtc

SEQ ID NO: 9179 - DNA, 22 bp, Artificial Sequence
  chemically synthesized
gccatgctgcccagactagtct

SEQ ID NO: 9180 - DNA, 22 bp, Artificial Sequence
  chemically synthesized
ccatgctgcccagactagtctt

SEQ ID NO: 9181 - DNA, 22 bp, Artificial Sequence
  chemically synthesized
cccagactagtcttgagctcct

SEQ ID NO: 9182 - DNA, 22 bp, Artificial Sequence
  chemically synthesized
gtcttgagctcctgggctcaag

SEQ ID NO: 9183 - DNA, 22 bp, Artificial Sequence
  chemically synthesized
gagctcctgggctcaagtgatt

SEQ ID NO: 9184 - DNA, 22 bp, Artificial Sequence
  chemically synthesized
agctcctgggctcaagtgattc

SEQ ID NO: 9185 - DNA, 22 bp, Artificial Sequence
  chemically synthesized
ctgggctcaagtgattcccccc

SEQ ID NO: 9186 - DNA, 22 bp, Artificial Sequence
  chemically synthesized
ggctcaagtgattccccccgtg

SEQ ID NO: 9187 - DNA, 22 bp, Artificial Sequence
  chemically synthesized
aagtgattccccccgtgtcgac

SEQ ID NO: 9188 - DNA, 22 bp, Artificial Sequence
  chemically synthesized
cccccgtgtcgacctcccaaag

SEQ ID NO: 9189 - DNA, 22 bp, Artificial Sequence
  chemically synthesized
ccaaagtgctgggattacagat

SEQ ID NO: 9190 - DNA, 22 bp, Artificial Sequence
  chemically synthesized
ggattacagatgtgatccacag

SEQ ID NO: 9191 - DNA, 22 bp, Artificial Sequence
  chemically synthesized
cagatgtgatccacagtgcctg

SEQ ID NO: 9192 - DNA, 22 bp, Artificial Sequence
  chemically synthesized
gccctaaatttttcttacgcat

SEQ ID NO: 9193 - DNA, 22 bp, Artificial Sequence
  chemically synthesized
aatttttcttacgcatttctca

SEQ ID NO: 9194 - DNA, 22 bp, Artificial Sequence
  chemically synthesized
ttcttacgcatttctcatcttc

SEQ ID NO: 9195 - DNA, 22 bp, Artificial Sequence
  chemically synthesized
tcttacgcatttctcatcttcc

SEQ ID NO: 9196 - DNA, 22 bp, Artificial Sequence
  chemically synthesized
cttacgcatttctcatcttcca

SEQ ID NO: 9197 - DNA, 22 bp, Artificial Sequence
  chemically synthesized
ttacgcatttctcatcttccat

SEQ ID NO: 9198 - DNA, 22 bp, Artificial Sequence
  chemically synthesized
acgcatttctcatcttccatta

SEQ ID NO: 9199 - DNA, 22 bp, Artificial Sequence
  chemically synthesized
cgcatttctcatcttccattat

SEQ ID NO: 9200 - DNA, 22 bp, Artificial Sequence
  chemically synthesized
ctcatcttccattatttccatc

SEQ ID NO: 9201 - DNA, 22 bp, Artificial Sequence
  chemically synthesized
tcatcttccattatttccatcc

SEQ ID NO: 9202 - DNA, 22 bp, Artificial Sequence
  chemically synthesized
atcttccattatttccatccag

SEQ ID NO: 9203 - DNA, 22 bp, Artificial Sequence
  chemically synthesized
ccattatttccatccagtgtgt

SEQ ID NO: 9204 - DNA, 22 bp, Artificial Sequence
  chemically synthesized
cattatttccatccagtgtgtt

SEQ ID NO: 9205 - DNA, 22 bp, Artificial Sequence
  chemically synthesized
tttccatccagtgtgttttttc

SEQ ID NO: 9206 - DNA, 22 bp, Artificial Sequence
  chemically synthesized
ccatccagtgtgttttttcttt

SEQ ID NO: 9207 - DNA, 22 bp, Artificial Sequence
  chemically synthesized
catccagtgtgttttttctttt

SEQ ID NO: 9208 - DNA, 22 bp, Artificial Sequence
  chemically synthesized
tttcttttctttcttttctttt

SEQ ID NO: 9209 - DNA, 22 bp, Artificial Sequence
  chemically synthesized
ttcttttctttcttttcttttt

SEQ ID NO: 9210 - DNA, 22 bp, Artificial Sequence
  chemically synthesized
tcttttctttcttttctttttt

SEQ ID NO: 9211 - DNA, 22 bp, Artificial Sequence
  chemically synthesized
cttttctttcttttcttttttt

SEQ ID NO: 9212 - DNA, 22 bp, Artificial Sequence
  chemically synthesized
ttttctttcttttctttttttt

SEQ ID NO: 9213 - DNA, 22 bp, Artificial Sequence
  chemically synthesized
ttctttcttttctttttttttt

SEQ ID NO: 9214 - DNA, 22 bp, Artificial Sequence
  chemically synthesized
tctttcttttcttttttttttt

SEQ ID NO: 9215 - DNA, 22 bp, Artificial Sequence
  chemically synthesized
ctttcttttctttttttttttt

SEQ ID NO: 9216 - DNA, 22 bp, Artificial Sequence
  chemically synthesized
tttcttttcttttttttttttt

SEQ ID NO: 9217 - DNA, 22 bp, Artificial Sequence
  chemically synthesized
tcttttcttttttttttttttg

SEQ ID NO: 9218 - DNA, 22 bp, Artificial Sequence
  chemically synthesized
cttttcttttttttttttttgg

SEQ ID NO: 9219 - DNA, 22 bp, Artificial Sequence
  chemically synthesized
ttttcttttttttttttttgga

SEQ ID NO: 9220 - DNA, 22 bp, Artificial Sequence
  chemically synthesized
ttcttttttttttttttggagg

SEQ ID NO: 9221 - DNA, 22 bp, Artificial Sequence
  chemically synthesized
tcttttttttttttttggaggc

SEQ ID NO: 9222 - DNA, 22 bp, Artificial Sequence
  chemically synthesized
cttttttttttttttggaggcg

SEQ ID NO: 9223 - DNA, 22 bp, Artificial Sequence
  chemically synthesized
ttttttttttttttggaggcgg

SEQ ID NO: 9224 - DNA, 22 bp, Artificial Sequence
  chemically synthesized
ttttttttttttggaggcggag

SEQ ID NO: 9225 - DNA, 22 bp, Artificial Sequence
  chemically synthesized
tttttttttttggaggcggagt

SEQ ID NO: 9226 - DNA, 22 bp, Artificial Sequence
  chemically synthesized
ttttttttttggaggcggagtc

SEQ ID NO: 9227 - DNA, 22 bp, Artificial Sequence
  chemically synthesized
tttttttttggaggcggagtct

SEQ ID NO: 9228 - DNA, 22 bp, Artificial Sequence
  chemically synthesized
ttttttttggaggcggagtctc

SEQ ID NO: 9229 - DNA, 22 bp, Artificial Sequence
  chemically synthesized
tttttttggaggcggagtctcg

SEQ ID NO: 9230 - DNA, 22 bp, Artificial Sequence
  chemically synthesized
ttttttggaggcggagtctcgc

SEQ ID NO: 9231 - DNA, 22 bp, Artificial Sequence
  chemically synthesized
tttttggaggcggagtctcgct

SEQ ID NO: 9232 - DNA, 22 bp, Artificial Sequence
  chemically synthesized
ttttggaggcggagtctcgctc

SEQ ID NO: 9233 - DNA, 22 bp, Artificial Sequence
  chemically synthesized
tttggaggcggagtctcgctct

SEQ ID NO: 9234 - DNA, 22 bp, Artificial Sequence
  chemically synthesized
ttggaggcggagtctcgctctg

SEQ ID NO: 9235 - DNA, 22 bp, Artificial Sequence
  chemically synthesized
tggaggcggagtctcgctctgt

SEQ ID NO: 9236 - DNA, 22 bp, Artificial Sequence
  chemically synthesized
ggaggcggagtctcgctctgtt

SEQ ID NO: 9237 - DNA, 22 bp, Artificial Sequence
  chemically synthesized
gaggcggagtctcgctctgttg

SEQ ID NO: 9238 - DNA, 22 bp, Artificial Sequence
  chemically synthesized
gctctgttgcccaggccggagt

SEQ ID NO: 9239 - DNA, 22 bp, Artificial Sequence
  chemically synthesized
tgttgcccaggccggagtgcag

SEQ ID NO: 9240 - DNA, 22 bp, Artificial Sequence
  chemically synthesized
ttgcccaggccggagtgcagtg

SEQ ID NO: 9241 - DNA, 22 bp, Artificial Sequence
  chemically synthesized
cccaggccggagtgcagtggcg

SEQ ID NO: 9242 - DNA, 22 bp, Artificial Sequence
  chemically synthesized
ggctcactgcaagctctgcctc

SEQ ID NO: 9243 - DNA, 22 bp, Artificial Sequence
  chemically synthesized
gctcactgcaagctctgcctcc

SEQ ID NO: 9244 - DNA, 22 bp, Artificial Sequence
  chemically synthesized
actgcaagctctgcctcccggg

SEQ ID NO: 9245 - DNA, 22 bp, Artificial Sequence
  chemically synthesized
caagctctgcctcccgggttca

SEQ ID NO: 9246 - DNA, 22 bp, Artificial Sequence
  chemically synthesized
tgcctcccgggttcatgccatt

SEQ ID NO: 9247 - DNA, 22 bp, Artificial Sequence
  chemically synthesized
cctcccgggttcatgccattct

SEQ ID NO: 9248 - DNA, 22 bp, Artificial Sequence
  chemically synthesized
ccgggttcatgccattctcctg

SEQ ID NO: 9249 - DNA, 22 bp, Artificial Sequence
  chemically synthesized
atgccattctcctgcctcagcc

SEQ ID NO: 9250 - DNA, 22 bp, Artificial Sequence
  chemically synthesized
tcctgcctcagcctcccgagta

SEQ ID NO: 9251 - DNA, 22 bp, Artificial Sequence
  chemically synthesized
ctgcctcagcctcccgagtagc

SEQ ID NO: 9252 - DNA, 22 bp, Artificial Sequence
  chemically synthesized
cctcagcctcccgagtagctgg

SEQ ID NO: 9253 - DNA, 22 bp, Artificial Sequence
  chemically synthesized
agcctcccgagtagctgggact

SEQ ID NO: 9254 - DNA, 22 bp, Artificial Sequence
  chemically synthesized
ccgagtagctgggactacaggc

SEQ ID NO: 9255 - DNA, 22 bp, Artificial Sequence
  chemically synthesized
ggactacaggcgcctgccacca

SEQ ID NO: 9256 - DNA, 22 bp, Artificial Sequence
  chemically synthesized
caggcgcctgccaccacgtctg

SEQ ID NO: 9257 - DNA, 22 bp, Artificial Sequence
  chemically synthesized
ccaccacgtctggctaattttt

SEQ ID NO: 9258 - DNA, 22 bp, Artificial Sequence
  chemically synthesized
gctaattttttgtatttttagt

SEQ ID NO: 9259 - DNA, 22 bp, Artificial Sequence
  chemically synthesized
attttttgtatttttagtagag

SEQ ID NO: 9260 - DNA, 22 bp, Artificial Sequence
  chemically synthesized
tttgtatttttagtagagatgg

SEQ ID NO: 9261 - DNA, 22 bp, Artificial Sequence
  chemically synthesized
ttgtatttttagtagagatggg

SEQ ID NO: 9262 - DNA, 22 bp, Artificial Sequence
  chemically synthesized
tgtatttttagtagagatgggg

SEQ ID NO: 9263 - DNA, 22 bp, Artificial Sequence
  chemically synthesized
gtatttttagtagagatggggt

SEQ ID NO: 9264 - DNA, 22 bp, Artificial Sequence
  chemically synthesized
tatttttagtagagatggggtt

SEQ ID NO: 9265 - DNA, 22 bp, Artificial Sequence
  chemically synthesized
ttagtagagatggggtttcacc

SEQ ID NO: 9266 - DNA, 22 bp, Artificial Sequence
  chemically synthesized
tagtagagatggggtttcacca

SEQ ID NO: 9267 - DNA, 22 bp, Artificial Sequence
  chemically synthesized
agtagagatggggtttcaccat

SEQ ID NO: 9268 - DNA, 22 bp, Artificial Sequence
  chemically synthesized
gtagagatggggtttcaccatg

SEQ ID NO: 9269 - DNA, 22 bp, Artificial Sequence
  chemically synthesized
caccatgttagccaggatggtg

SEQ ID NO: 9270 - DNA, 22 bp, Artificial Sequence
  chemically synthesized
accatgttagccaggatggtgt

SEQ ID NO: 9271 - DNA, 22 bp, Artificial Sequence
  chemically synthesized
gccaggatggtgtcgatctcct

SEQ ID NO: 9272 - DNA, 22 bp, Artificial Sequence
  chemically synthesized
ctgacctcatgatctgcccgcc

SEQ ID NO: 9273 - DNA, 22 bp, Artificial Sequence
  chemically synthesized
acctcatgatctgcccgccttg

SEQ ID NO: 9274 - DNA, 22 bp, Artificial Sequence
  chemically synthesized
atgatctgcccgccttggcctc

SEQ ID NO: 9275 - DNA, 22 bp, Artificial Sequence
  chemically synthesized
cccgccttggcctcccacagtg

SEQ ID NO: 9276 - DNA, 22 bp, Artificial Sequence
  chemically synthesized
ggcctcccacagtgctgggatt

SEQ ID NO: 9277 - DNA, 22 bp, Artificial Sequence
  chemically synthesized
gcctcccacagtgctgggattc

SEQ ID NO: 9278 - DNA, 22 bp, Artificial Sequence
  chemically synthesized
ccacagtgctgggattccaggc

SEQ ID NO: 9279 - DNA, 22 bp, Artificial Sequence
  chemically synthesized
ggattccaggcgtgagccacgg

SEQ ID NO: 9280 - DNA, 22 bp, Artificial Sequence
  chemically synthesized
caggcgtgagccacggcgcctg

SEQ ID NO: 9281 - DNA, 22 bp, Artificial Sequence
  chemically synthesized
gccagtgtgttttttcatttca

SEQ ID NO: 9282 - DNA, 22 bp, Artificial Sequence
  chemically synthesized
tttcatttcagacattgtagtt

SEQ ID NO: 9283 - DNA, 22 bp, Artificial Sequence
  chemically synthesized
ttcatttcagacattgtagttt

SEQ ID NO: 9284 - DNA, 22 bp, Artificial Sequence
  chemically synthesized
tcatttcagacattgtagtttt

SEQ ID NO: 9285 - DNA, 22 bp, Artificial Sequence
  chemically synthesized
catttcagacattgtagttttt

SEQ ID NO: 9286 - DNA, 22 bp, Artificial Sequence
  chemically synthesized
atttcagacattgtagttttta

SEQ ID NO: 9287 - DNA, 22 bp, Artificial Sequence
  chemically synthesized
cagacattgtagtttttatctc

SEQ ID NO: 9288 - DNA, 22 bp, Artificial Sequence
  chemically synthesized
agacattgtagtttttatctct

SEQ ID NO: 9289 - DNA, 22 bp, Artificial Sequence
  chemically synthesized
tagtttttatctctagaagttc

SEQ ID NO: 9290 - DNA, 22 bp, Artificial Sequence
  chemically synthesized
ttatctctagaagttcacctgg

SEQ ID NO: 9291 - DNA, 22 bp, Artificial Sequence
  chemically synthesized
tatctctagaagttcacctggg

SEQ ID NO: 9292 - DNA, 22 bp, Artificial Sequence
  chemically synthesized
atctctagaagttcacctgggg

SEQ ID NO: 9293 - DNA, 22 bp, Artificial Sequence
  chemically synthesized
tctctagaagttcacctgggga

SEQ ID NO: 9294 - DNA, 22 bp, Artificial Sequence
  chemically synthesized
tagaagttcacctggggactct

SEQ ID NO: 9295 - DNA, 22 bp, Artificial Sequence
  chemically synthesized
gaagttcacctggggactctta

SEQ ID NO: 9296 - DNA, 22 bp, Artificial Sequence
  chemically synthesized
acctggggactcttaaatatcc

SEQ ID NO: 9297 - DNA, 22 bp, Artificial Sequence
  chemically synthesized
gggactcttaaatatcctccac

SEQ ID NO: 9298 - DNA, 22 bp, Artificial Sequence
  chemically synthesized
ttaaatatcctccacaattcta

SEQ ID NO: 9299 - DNA, 22 bp, Artificial Sequence
  chemically synthesized
aaatatcctccacaattctact

SEQ ID NO: 9300 - DNA, 22 bp, Artificial Sequence
  chemically synthesized
aatatcctccacaattctactt

SEQ ID NO: 9301 - DNA, 22 bp, Artificial Sequence
  chemically synthesized
cacaattctacttaattttttg

SEQ ID NO: 9302 - DNA, 22 bp, Artificial Sequence
  chemically synthesized
tacttaattttttgaacataat

SEQ ID NO: 9303 - DNA, 22 bp, Artificial Sequence
  chemically synthesized
cttaattttttgaacataatgg

SEQ ID NO: 9304 - DNA, 22 bp, Artificial Sequence
  chemically synthesized
aattttttgaacataatgggat

SEQ ID NO: 9305 - DNA, 22 bp, Artificial Sequence
  chemically synthesized
attttttgaacataatgggata

SEQ ID NO: 9306 - DNA, 22 bp, Artificial Sequence
  chemically synthesized
tttgaacataatgggatatggc

SEQ ID NO: 9307 - DNA, 22 bp, Artificial Sequence
  chemically synthesized
ttgaacataatgggatatggct

SEQ ID NO: 9308 - DNA, 22 bp, Artificial Sequence
  chemically synthesized
tgaacataatgggatatggcta

SEQ ID NO: 9309 - DNA, 22 bp, Artificial Sequence
  chemically synthesized
gaacataatgggatatggctat

SEQ ID NO: 9310 - DNA, 22 bp, Artificial Sequence
  chemically synthesized
aacataatgggatatggctata

SEQ ID NO: 9311 - DNA, 22 bp, Artificial Sequence
  chemically synthesized
taatatctgttttaccatcctt

SEQ ID NO: 9312 - DNA, 22 bp, Artificial Sequence
  chemically synthesized
ttttaccatccttgcctgctaa

SEQ ID NO: 9313 - DNA, 22 bp, Artificial Sequence
  chemically synthesized
taccatccttgcctgctaattc

SEQ ID NO: 9314 - DNA, 22 bp, Artificial Sequence
  chemically synthesized
accatccttgcctgctaattct

SEQ ID NO: 9315 - DNA, 22 bp, Artificial Sequence
  chemically synthesized
ccatccttgcctgctaattcta

SEQ ID NO: 9316 - DNA, 22 bp, Artificial Sequence
  chemically synthesized
gcctgctaattctagcatccgt

SEQ ID NO: 9317 - DNA, 22 bp, Artificial Sequence
  chemically synthesized
cctgctaattctagcatccgtg

SEQ ID NO: 9318 - DNA, 22 bp, Artificial Sequence
  chemically synthesized
ctaattctagcatccgtgtcag

SEQ ID NO: 9319 - DNA, 22 bp, Artificial Sequence
  chemically synthesized
attctagcatccgtgtcagttc

SEQ ID NO: 9320 - DNA, 22 bp, Artificial Sequence
  chemically synthesized
tagcatccgtgtcagttctgga

SEQ ID NO: 9321 - DNA, 22 bp, Artificial Sequence
  chemically synthesized
gcatccgtgtcagttctggatc

SEQ ID NO: 9322 - DNA, 22 bp, Artificial Sequence
  chemically synthesized
tggatctcttttgatatttatg

SEQ ID NO: 9323 - DNA, 22 bp, Artificial Sequence
  chemically synthesized
gatctcttttgatatttatgaa

SEQ ID NO: 9324 - DNA, 22 bp, Artificial Sequence
  chemically synthesized
ttttgatatttatgaacctcct

SEQ ID NO: 9325 - DNA, 22 bp, Artificial Sequence
  chemically synthesized
ttgatatttatgaacctcctcg

SEQ ID NO: 9326 - DNA, 22 bp, Artificial Sequence
  chemically synthesized
tgatatttatgaacctcctcgt

SEQ ID NO: 9327 - DNA, 22 bp, Artificial Sequence
  chemically synthesized
gatatttatgaacctcctcgtt

SEQ ID NO: 9328 - DNA, 22 bp, Artificial Sequence
  chemically synthesized
atatttatgaacctcctcgtta

SEQ ID NO: 9329 - DNA, 22 bp, Artificial Sequence
  chemically synthesized
atgaacctcctcgttatgcatt

SEQ ID NO: 9330 - DNA, 22 bp, Artificial Sequence
  chemically synthesized
tgaacctcctcgttatgcattg

SEQ ID NO: 9331 - DNA, 22 bp, Artificial Sequence
  chemically synthesized
ctcgttatgcattgtgttttcc

SEQ ID NO: 9332 - DNA, 22 bp, Artificial Sequence
  chemically synthesized
gttatgcattgtgttttcccgt

SEQ ID NO: 9333 - DNA, 22 bp, Artificial Sequence
  chemically synthesized
tgcattgtgttttcccgtttca

SEQ ID NO: 9334 - DNA, 22 bp, Artificial Sequence
  chemically synthesized
tgttttcccgtttcattgcatg

SEQ ID NO: 9335 - DNA, 22 bp, Artificial Sequence
  chemically synthesized
tcccgtttcattgcatgccttg

SEQ ID NO: 9336 - DNA, 22 bp, Artificial Sequence
  chemically synthesized
cccgtttcattgcatgccttgt

SEQ ID NO: 9337 - DNA, 22 bp, Artificial Sequence
  chemically synthesized
ccgtttcattgcatgccttgta

SEQ ID NO: 9338 - DNA, 22 bp, Artificial Sequence
  chemically synthesized
cattgcatgccttgtaatcttt

SEQ ID NO: 9339 - DNA, 22 bp, Artificial Sequence
  chemically synthesized
attgcatgccttgtaatctttg

SEQ ID NO: 9340 - DNA, 22 bp, Artificial Sequence
  chemically synthesized
catgccttgtaatctttgattg

SEQ ID NO: 9341 - DNA, 22 bp, Artificial Sequence
  chemically synthesized
gtaatctttgattggctgccag

SEQ ID NO: 9342 - DNA, 22 bp, Artificial Sequence
  chemically synthesized
taatctttgattggctgccaga

SEQ ID NO: 9343 - DNA, 22 bp, Artificial Sequence
  chemically synthesized
tgattggctgccagacattgtc

SEQ ID NO: 9344 - DNA, 22 bp, Artificial Sequence
  chemically synthesized
gattggctgccagacattgtca

SEQ ID NO: 9345 - DNA, 22 bp, Artificial Sequence
  chemically synthesized
attggctgccagacattgtcaa

SEQ ID NO: 9346 - DNA, 22 bp, Artificial Sequence
  chemically synthesized
gctgccagacattgtcaatttc

SEQ ID NO: 9347 - DNA, 22 bp, Artificial Sequence
  chemically synthesized
ccagacattgtcaatttcacct

SEQ ID NO: 9348 - DNA, 22 bp, Artificial Sequence
  chemically synthesized
tcaatttcaccttgttgggtgc

SEQ ID NO: 9349 - DNA, 22 bp, Artificial Sequence
  chemically synthesized
caccttgttgggtgctggatat

SEQ ID NO: 9350 - DNA, 22 bp, Artificial Sequence
  chemically synthesized
accttgttgggtgctggatatt

SEQ ID NO: 9351 - DNA, 22 bp, Artificial Sequence
  chemically synthesized
gttgggtgctggatatttttgt

SEQ ID NO: 9352 - DNA, 22 bp, Artificial Sequence
  chemically synthesized
ttgggtgctggatatttttgta

SEQ ID NO: 9353 - DNA, 22 bp, Artificial Sequence
  chemically synthesized
ggtgctggatatttttgtattc

SEQ ID NO: 9354 - DNA, 22 bp, Artificial Sequence
  chemically synthesized
gatatttttgtattcctctaaa

SEQ ID NO: 9355 - DNA, 22 bp, Artificial Sequence
  chemically synthesized
ttgtattcctctaaatgttctt

SEQ ID NO: 9356 - DNA, 22 bp, Artificial Sequence
  chemically synthesized
tgtattcctctaaatgttcttg

SEQ ID NO: 9357 - DNA, 22 bp, Artificial Sequence
  chemically synthesized
gtattcctctaaatgttcttga

SEQ ID NO: 9358 - DNA, 22 bp, Artificial Sequence
  chemically synthesized
tattcctctaaatgttcttgag

SEQ ID NO: 9359 - DNA, 22 bp, Artificial Sequence
  chemically synthesized
ctctaaatgttcttgagctttg

SEQ ID NO: 9360 - DNA, 22 bp, Artificial Sequence
  chemically synthesized
taaatgttcttgagctttgctc

SEQ ID NO: 9361 - DNA, 22 bp, Artificial Sequence
  chemically synthesized
aatgttcttgagctttgctccg

SEQ ID NO: 9362 - DNA, 22 bp, Artificial Sequence
  chemically synthesized
ttgagctttgctccgggatgca

SEQ ID NO: 9363 - DNA, 22 bp, Artificial Sequence
  chemically synthesized
gagctttgctccgggatgcagt

SEQ ID NO: 9364 - DNA, 22 bp, Artificial Sequence
  chemically synthesized
agctttgctccgggatgcagtt

SEQ ID NO: 9365 - DNA, 22 bp, Artificial Sequence
  chemically synthesized
tgctccgggatgcagttaagca

SEQ ID NO: 9366 - DNA, 22 bp, Artificial Sequence
  chemically synthesized
gctccgggatgcagttaagcaa

SEQ ID NO: 9367 - DNA, 22 bp, Artificial Sequence
  chemically synthesized
ctccgggatgcagttaagcaac

SEQ ID NO: 9368 - DNA, 22 bp, Artificial Sequence
  chemically synthesized
cgggatgcagttaagcaactta

SEQ ID NO: 9369 - DNA, 22 bp, Artificial Sequence
  chemically synthesized
agcaacttagagtcagtttgat

SEQ ID NO: 9370 - DNA, 22 bp, Artificial Sequence
  chemically synthesized
agagtcagtttgatcgtttgaa

SEQ ID NO: 9371 - DNA, 22 bp, Artificial Sequence
  chemically synthesized
gagtcagtttgatcgtttgaac

SEQ ID NO: 9372 - DNA, 22 bp, Artificial Sequence
  chemically synthesized
gatcgtttgaactcttaattgt

SEQ ID NO: 9373 - DNA, 22 bp, Artificial Sequence
  chemically synthesized
atcgtttgaactcttaattgtt

SEQ ID NO: 9374 - DNA, 22 bp, Artificial Sequence
  chemically synthesized
gaactcttaattgttttggtct

SEQ ID NO: 9375 - DNA, 22 bp, Artificial Sequence
  chemically synthesized
aactcttaattgttttggtctc

SEQ ID NO: 9376 - DNA, 22 bp, Artificial Sequence
  chemically synthesized
ttaattgttttggtctcctcgg

SEQ ID NO: 9377 - DNA, 22 bp, Artificial Sequence
  chemically synthesized
aattgttttggtctcctcggac

SEQ ID NO: 9378 - DNA, 22 bp, Artificial Sequence
  chemically synthesized
attgttttggtctcctcggact

SEQ ID NO: 9379 - DNA, 22 bp, Artificial Sequence
  chemically synthesized
ttttggtctcctcggactctca

SEQ ID NO: 9380 - DNA, 22 bp, Artificial Sequence
  chemically synthesized
tggtctcctcggactctcagct

SEQ ID NO: 9381 - DNA, 22 bp, Artificial Sequence
  chemically synthesized
ggtctcctcggactctcagctc

SEQ ID NO: 9382 - DNA, 22 bp, Artificial Sequence
  chemically synthesized
gtctcctcggactctcagctcc

SEQ ID NO: 9383 - DNA, 22 bp, Artificial Sequence
  chemically synthesized
ctcggactctcagctccatctc

SEQ ID NO: 9384 - DNA, 22 bp, Artificial Sequence
  chemically synthesized
ggactctcagctccatctcctc

SEQ ID NO: 9385 - DNA, 22 bp, Artificial Sequence
  chemically synthesized
tcagctccatctcctcaacgtg

SEQ ID NO: 9386 - DNA, 22 bp, Artificial Sequence
  chemically synthesized
agctccatctcctcaacgtggg

SEQ ID NO: 9387 - DNA, 22 bp, Artificial Sequence
  chemically synthesized
catctcctcaacgtggggagtc

SEQ ID NO: 9388 - DNA, 22 bp, Artificial Sequence
  chemically synthesized
ctcaacgtggggagtctcttgg

SEQ ID NO: 9389 - DNA, 22 bp, Artificial Sequence
  chemically synthesized
aacgtggggagtctcttgggct

SEQ ID NO: 9390 - DNA, 22 bp, Artificial Sequence
  chemically synthesized
ttgggctctgcctggacttccc

SEQ ID NO: 9391 - DNA, 22 bp, Artificial Sequence
  chemically synthesized
gggctctgcctggacttccctt

SEQ ID NO: 9392 - DNA, 22 bp, Artificial Sequence
  chemically synthesized
ggctctgcctggacttcccttt

SEQ ID NO: 9393 - DNA, 22 bp, Artificial Sequence
  chemically synthesized
tgcctggacttccctttcctgg

SEQ ID NO: 9394 - DNA, 22 bp, Artificial Sequence
  chemically synthesized
cctggacttccctttcctggcc

SEQ ID NO: 9395 - DNA, 22 bp, Artificial Sequence
  chemically synthesized
gacttccctttcctggcctgta

SEQ ID NO: 9396 - DNA, 22 bp, Artificial Sequence
  chemically synthesized
ccctttcctggcctgtaacctg

SEQ ID NO: 9397 - DNA, 22 bp, Artificial Sequence
  chemically synthesized
cctttcctggcctgtaacctgc

SEQ ID NO: 9398 - DNA, 22 bp, Artificial Sequence
  chemically synthesized
tcctggcctgtaacctgcagac

SEQ ID NO: 9399 - DNA, 22 bp, Artificial Sequence
  chemically synthesized
cctggcctgtaacctgcagact

SEQ ID NO: 9400 - DNA, 22 bp, Artificial Sequence
  chemically synthesized
ctggcctgtaacctgcagactc

SEQ ID NO: 9401 - DNA, 22 bp, Artificial Sequence
  chemically synthesized
gcctgtaacctgcagactctct

SEQ ID NO: 9402 - DNA, 22 bp, Artificial Sequence
  chemically synthesized
taacctgcagactctctccaaa

SEQ ID NO: 9403 - DNA, 22 bp, Artificial Sequence
  chemically synthesized
cagactctctccaaacagtaag

SEQ ID NO: 9404 - DNA, 22 bp, Artificial Sequence
  chemically synthesized
tctccaaacagtaagctggggt

SEQ ID NO: 9405 - DNA, 22 bp, Artificial Sequence
  chemically synthesized
tccaaacagtaagctggggtga

SEQ ID NO: 9406 - DNA, 22 bp, Artificial Sequence
  chemically synthesized
caaacagtaagctggggtgatc

SEQ ID NO: 9407 - DNA, 22 bp, Artificial Sequence
  chemically synthesized
gggtgatcggagggttcctgtt

SEQ ID NO: 9408 - DNA, 22 bp, Artificial Sequence
  chemically synthesized
ctgttgtttgcttcttatccct

SEQ ID NO: 9409 - DNA, 22 bp, Artificial Sequence
  chemically synthesized
ttgtttgcttcttatccctcag

SEQ ID NO: 9410 - DNA, 22 bp, Artificial Sequence
  chemically synthesized
tttgcttcttatccctcaggga

SEQ ID NO: 9411 - DNA, 22 bp, Artificial Sequence
  chemically synthesized
gcttcttatccctcagggatct

SEQ ID NO: 9412 - DNA, 22 bp, Artificial Sequence
  chemically synthesized
cttcttatccctcagggatctt

SEQ ID NO: 9413 - DNA, 22 bp, Artificial Sequence
  chemically synthesized
cttatccctcagggatctttac

SEQ ID NO: 9414 - DNA, 22 bp, Artificial Sequence
  chemically synthesized
ttatccctcagggatctttact

SEQ ID NO: 9415 - DNA, 22 bp, Artificial Sequence
  chemically synthesized
atccctcagggatctttactcc

SEQ ID NO: 9416 - DNA, 22 bp, Artificial Sequence
  chemically synthesized
tccctcagggatctttactcct

SEQ ID NO: 9417 - DNA, 22 bp, Artificial Sequence
  chemically synthesized
agggatctttactcctccttgc

SEQ ID NO: 9418 - DNA, 22 bp, Artificial Sequence
  chemically synthesized
tactcctccttgcctgatgtcc

SEQ ID NO: 9419 - DNA, 22 bp, Artificial Sequence
  chemically synthesized
actcctccttgcctgatgtcca

SEQ ID NO: 9420 - DNA, 22 bp, Artificial Sequence
  chemically synthesized
ctcctccttgcctgatgtccag

SEQ ID NO: 9421 - DNA, 22 bp, Artificial Sequence
  chemically synthesized
ctccttgcctgatgtccagagt

SEQ ID NO: 9422 - DNA, 22 bp, Artificial Sequence
  chemically synthesized
cttgcctgatgtccagagtctt

SEQ ID NO: 9423 - DNA, 22 bp, Artificial Sequence
  chemically synthesized
gcctgatgtccagagtcttgaa

SEQ ID NO: 9424 - DNA, 22 bp, Artificial Sequence
  chemically synthesized
cctgatgtccagagtcttgaaa

SEQ ID NO: 9425 - DNA, 22 bp, Artificial Sequence
  chemically synthesized
atgtccagagtcttgaaagctg

SEQ ID NO: 9426 - DNA, 22 bp, Artificial Sequence
  chemically synthesized
gaaagctgccatgttctatagt

SEQ ID NO: 9427 - DNA, 22 bp, Artificial Sequence
  chemically synthesized
aaagctgccatgttctatagtt

SEQ ID NO: 9428 - DNA, 22 bp, Artificial Sequence
  chemically synthesized
ccatgttctatagttgtctgtt

SEQ ID NO: 9429 - DNA, 22 bp, Artificial Sequence
  chemically synthesized
tatagttgtctgtttttgtttt

SEQ ID NO: 9430 - DNA, 22 bp, Artificial Sequence
  chemically synthesized
tagttgtctgtttttgttttga

SEQ ID NO: 9431 - DNA, 22 bp, Artificial Sequence
  chemically synthesized
tctgtttttgttttgattgttt

SEQ ID NO: 9432 - DNA, 22 bp, Artificial Sequence
  chemically synthesized
tttttgttttgattgtttctgg

SEQ ID NO: 9433 - DNA, 22 bp, Artificial Sequence
  chemically synthesized
ttgttttgattgtttctgggga

SEQ ID NO: 9434 - DNA, 22 bp, Artificial Sequence
  chemically synthesized
tgttttgattgtttctggggag

SEQ ID NO: 9435 - DNA, 22 bp, Artificial Sequence
  chemically synthesized
gttttgattgtttctggggaga

SEQ ID NO: 9436 - DNA, 22 bp, Artificial Sequence
  chemically synthesized
ttttgattgtttctggggagag

SEQ ID NO: 9437 - DNA, 22 bp, Artificial Sequence
  chemically synthesized
tgattgtttctggggagagaag

SEQ ID NO: 9438 - DNA, 22 bp, Artificial Sequence
  chemically synthesized
gattgtttctggggagagaaga

SEQ ID NO: 9439 - DNA, 22 bp, Artificial Sequence
  chemically synthesized
attgtttctggggagagaagaa

SEQ ID NO: 9440 - DNA, 22 bp, Artificial Sequence
  chemically synthesized
tttctggggagagaagaactct

SEQ ID NO: 9441 - DNA, 22 bp, Artificial Sequence
  chemically synthesized
ctggggagagaagaactcttcc

SEQ ID NO: 9442 - DNA, 22 bp, Artificial Sequence
  chemically synthesized
tggggagagaagaactcttccc

SEQ ID NO: 9443 - DNA, 22 bp, Artificial Sequence
  chemically synthesized
gggagagaagaactcttcccat

SEQ ID NO: 9444 - DNA, 22 bp, Artificial Sequence
  chemically synthesized
ttcccatcttgggcagaccctg

SEQ ID NO: 9445 - DNA, 22 bp, Artificial Sequence
  chemically synthesized
cccatcttgggcagaccctgtc

SEQ ID NO: 9446 - DNA, 22 bp, Artificial Sequence
  chemically synthesized
ccatcttgggcagaccctgtct

SEQ ID NO: 9447 - DNA, 22 bp, Artificial Sequence
  chemically synthesized
gggcagaccctgtcttttatgt

SEQ ID NO: 9448 - DNA, 22 bp, Artificial Sequence
  chemically synthesized
ggcagaccctgtcttttatgtt

SEQ ID NO: 9449 - DNA, 22 bp, Artificial Sequence
  chemically synthesized
tcttttatgttcaaacttttgc

SEQ ID NO: 9450 - DNA, 22 bp, Artificial Sequence
  chemically synthesized
ttatgttcaaacttttgcctaa

SEQ ID NO: 9451 - DNA, 22 bp, Artificial Sequence
  chemically synthesized
tatgttcaaacttttgcctaag

SEQ ID NO: 9452 - DNA, 22 bp, Artificial Sequence
  chemically synthesized
atgttcaaacttttgcctaaga

SEQ ID NO: 9453 - DNA, 22 bp, Artificial Sequence
  chemically synthesized
tgttcaaacttttgcctaagaa

SEQ ID NO: 9454 - DNA, 22 bp, Artificial Sequence
  chemically synthesized
aaacttttgcctaagaagcaca

SEQ ID NO: 9455 - DNA, 22 bp, Artificial Sequence
  chemically synthesized
ttgcctaagaagcacattacat

SEQ ID NO: 9456 - DNA, 22 bp, Artificial Sequence
  chemically synthesized
tgcctaagaagcacattacata

SEQ ID NO: 9457 - DNA, 22 bp, Artificial Sequence
  chemically synthesized
gcctaagaagcacattacatat

SEQ ID NO: 9458 - DNA, 22 bp, Artificial Sequence
  chemically synthesized
cctaagaagcacattacatatt

SEQ ID NO: 9459 - DNA, 22 bp, Artificial Sequence
  chemically synthesized
agaagcacattacatattttaa

SEQ ID NO: 9460 - DNA, 22 bp, Artificial Sequence
  chemically synthesized
catattttaactcatctaatta

SEQ ID NO: 9461 - DNA, 22 bp, Artificial Sequence
  chemically synthesized
taactcatctaattatccgagc

SEQ ID NO: 9462 - DNA, 22 bp, Artificial Sequence
  chemically synthesized
aactcatctaattatccgagca

SEQ ID NO: 9463 - DNA, 22 bp, Artificial Sequence
  chemically synthesized
actcatctaattatccgagcaa

SEQ ID NO: 9464 - DNA, 22 bp, Artificial Sequence
  chemically synthesized
atctaattatccgagcaatcca

SEQ ID NO: 9465 - DNA, 22 bp, Artificial Sequence
  chemically synthesized
attatccgagcaatccaatcgg

SEQ ID NO: 9466 - DNA, 22 bp, Artificial Sequence
  chemically synthesized
tccgagcaatccaatcgggtag

SEQ ID NO: 9467 - DNA, 22 bp, Artificial Sequence
  chemically synthesized
cgactgtgatctccattttaca

SEQ ID NO: 9468 - DNA, 22 bp, Artificial Sequence
  chemically synthesized
tgatctccattttacacacgag

SEQ ID NO: 9469 - DNA, 22 bp, Artificial Sequence
  chemically synthesized
cattttacacacgagaaaatgg

SEQ ID NO: 9470 - DNA, 22 bp, Artificial Sequence
  chemically synthesized
tacacacgagaaaatggaagca

SEQ ID NO: 9471 - DNA, 22 bp, Artificial Sequence
  chemically synthesized
acacacgagaaaatggaagcat

SEQ ID NO: 9472 - DNA, 22 bp, Artificial Sequence
  chemically synthesized
cacacgagaaaatggaagcatg

SEQ ID NO: 9473 - DNA, 22 bp, Artificial Sequence
  chemically synthesized
aatgctggtgcatgatctcaga

SEQ ID NO: 9474 - DNA, 22 bp, Artificial Sequence
  chemically synthesized
gtgcatgatctcagagctacct

SEQ ID NO: 9475 - DNA, 22 bp, Artificial Sequence
  chemically synthesized
agagctacctggaggcacagct

SEQ ID NO: 9476 - DNA, 22 bp, Artificial Sequence
  chemically synthesized
cctggaggcacagctgggctac

SEQ ID NO: 9477 - DNA, 22 bp, Artificial Sequence
  chemically synthesized
gaggcacagctgggctaccctg

SEQ ID NO: 9478 - DNA, 22 bp, Artificial Sequence
  chemically synthesized
ggctaccctgtgggcagtctgg

SEQ ID NO: 9479 - DNA, 22 bp, Artificial Sequence
  chemically synthesized
ccctgtgggcagtctggtttca

SEQ ID NO: 9480 - DNA, 22 bp, Artificial Sequence
  chemically synthesized
tgggcagtctggtttcagggtg

SEQ ID NO: 9481 - DNA, 22 bp, Artificial Sequence
  chemically synthesized
gtttcagggtggatatacagac

SEQ ID NO: 9482 - DNA, 22 bp, Artificial Sequence
  chemically synthesized
cagggtggatatacagacacgt

SEQ ID NO: 9483 - DNA, 22 bp, Artificial Sequence
  chemically synthesized
agggtggatatacagacacgtt

SEQ ID NO: 9484 - DNA, 22 bp, Artificial Sequence
  chemically synthesized
ctgggctgacccagcattggga

SEQ ID NO: 9485 - DNA, 22 bp, Artificial Sequence
  chemically synthesized
ggctgacccagcattgggagtt

SEQ ID NO: 9486 - DNA, 22 bp, Artificial Sequence
  chemically synthesized
acccagcattgggagttgataa

SEQ ID NO: 9487 - DNA, 22 bp, Artificial Sequence
  chemically synthesized
ggagttgataagtcggactggg

SEQ ID NO: 9488 - DNA, 22 bp, Artificial Sequence
  chemically synthesized
ataagtcggactgggaagcagg

SEQ ID NO: 9489 - DNA, 22 bp, Artificial Sequence
  chemically synthesized
ggaagcaggacaggaccctctg

SEQ ID NO: 9490 - DNA, 22 bp, Artificial Sequence
  chemically synthesized
tgagtggagggtgctgaagaca

SEQ ID NO: 9491 - DNA, 22 bp, Artificial Sequence
  chemically synthesized
agtggagggtgctgaagacagc

SEQ ID NO: 9492 - DNA, 22 bp, Artificial Sequence
  chemically synthesized
aagacagcagtcagggactcag

SEQ ID NO: 9493 - DNA, 22 bp, Artificial Sequence
  chemically synthesized
agccatggagggccagcttggt

SEQ ID NO: 9494 - DNA, 22 bp, Artificial Sequence
  chemically synthesized
ggtggggaacaccgtggtcatg

SEQ ID NO: 9495 - DNA, 22 bp, Artificial Sequence
  chemically synthesized
gtggggaacaccgtggtcatgg

SEQ ID NO: 9496 - DNA, 22 bp, Artificial Sequence
  chemically synthesized
ctggatggagaggaatgcaaag

SEQ ID NO: 9497 - DNA, 22 bp, Artificial Sequence
  chemically synthesized
tggatggagaggaatgcaaagg

SEQ ID NO: 9498 - DNA, 22 bp, Artificial Sequence
  chemically synthesized
gatggagaggaatgcaaaggcc

SEQ ID NO: 9499 - DNA, 22 bp, Artificial Sequence
  chemically synthesized
ggaggaaggggtgggggcagtg

SEQ ID NO: 9500 - DNA, 22 bp, Artificial Sequence
  chemically synthesized
gaggaaggggtgggggcagtga

SEQ ID NO: 9501 - DNA, 22 bp, Artificial Sequence
  chemically synthesized
tgctcagagcgggagtgggcag

SEQ ID NO: 9502 - DNA, 22 bp, Artificial Sequence
  chemically synthesized
agagcgggagtgggcagtggag

SEQ ID NO: 9503 - DNA, 22 bp, Artificial Sequence
  chemically synthesized
cctgggtcaaatggggtcctga

SEQ ID NO: 9504 - DNA, 22 bp, Artificial Sequence
  chemically synthesized
ggtcaaatggggtcctgagtgt

SEQ ID NO: 9505 - DNA, 22 bp, Artificial Sequence
  chemically synthesized
agtgtggctgcagtggggaagg

SEQ ID NO: 9506 - DNA, 22 bp, Artificial Sequence
  chemically synthesized
cagtggggaaggtggaagtcac

SEQ ID NO: 9507 - DNA, 22 bp, Artificial Sequence
  chemically synthesized
gtgtgaaaaagatgaagagtta

SEQ ID NO: 9508 - DNA, 22 bp, Artificial Sequence
  chemically synthesized
tggacagtcacttacaggggca

SEQ ID NO: 9509 - DNA, 22 bp, Artificial Sequence
  chemically synthesized
acaggggcagtgtctgactcag

SEQ ID NO: 9510 - DNA, 22 bp, Artificial Sequence
  chemically synthesized
caggggcagtgtctgactcagg

SEQ ID NO: 9511 - DNA, 22 bp, Artificial Sequence
  chemically synthesized
actcaggacagtggcaggaagt

SEQ ID NO: 9512 - DNA, 22 bp, Artificial Sequence
  chemically synthesized
aggacagtggcaggaagtgacc

SEQ ID NO: 9513 - DNA, 22 bp, Artificial Sequence
  chemically synthesized
gggaggaagattctgggcccct

SEQ ID NO: 9514 - DNA, 22 bp, Artificial Sequence
  chemically synthesized
tgggcccctgactgagcctccc

SEQ ID NO: 9515 - DNA, 22 bp, Artificial Sequence
  chemically synthesized
ggcccctgactgagcctcccca

SEQ ID NO: 9516 - DNA, 22 bp, Artificial Sequence
  chemically synthesized
actgagcctccccaggatgtgg

SEQ ID NO: 9517 - DNA, 22 bp, Artificial Sequence
  chemically synthesized
agcctccccaggatgtggtcct

SEQ ID NO: 9518 - DNA, 22 bp, Artificial Sequence
  chemically synthesized
cccaggatgtggtcctgctggg

SEQ ID NO: 9519 - DNA, 22 bp, Artificial Sequence
  chemically synthesized
ctgggtcggggggtgataggaa

SEQ ID NO: 9520 - DNA, 22 bp, Artificial Sequence
  chemically synthesized
ggtcggggggtgataggaatga

SEQ ID NO: 9521 - DNA, 22 bp, Artificial Sequence
  chemically synthesized
gaaggtgttctgtttgcaggtg

SEQ ID NO: 9522 - DNA, 22 bp, Artificial Sequence
  chemically synthesized
tgtttgcaggtggatgctgcaa

SEQ ID NO: 9523 - DNA, 22 bp, Artificial Sequence
  chemically synthesized
tttgcaggtggatgctgcaaag

SEQ ID NO: 9524 - DNA, 22 bp, Artificial Sequence
  chemically synthesized
gcaggtggatgctgcaaagaga

SEQ ID NO: 9525 - DNA, 22 bp, Artificial Sequence
  chemically synthesized
caggtggatgctgcaaagagag

SEQ ID NO: 9526 - DNA, 22 bp, Artificial Sequence
  chemically synthesized
caaagagaggagctcagggctg

SEQ ID NO: 9527 - DNA, 22 bp, Artificial Sequence
  chemically synthesized
agggctgggacaactggagctg

SEQ ID NO: 9528 - DNA, 22 bp, Artificial Sequence
  chemically synthesized
ggacaactggagctgctctggg

SEQ ID NO: 9529 - DNA, 22 bp, Artificial Sequence
  chemically synthesized
gagctgctctgggtctggaggc

SEQ ID NO: 9530 - DNA, 22 bp, Artificial Sequence
  chemically synthesized
ctctgggtctggaggcagcaga

SEQ ID NO: 9531 - DNA, 22 bp, Artificial Sequence
  chemically synthesized
tgggtctggaggcagcagagag

SEQ ID NO: 9532 - DNA, 22 bp, Artificial Sequence
  chemically synthesized
ggtctggaggcagcagagaggg

SEQ ID NO: 9533 - DNA, 22 bp, Artificial Sequence
  chemically synthesized
gaggcagcagagagggagccca

SEQ ID NO: 9534 - DNA, 22 bp, Artificial Sequence
  chemically synthesized
tgtgtgcaggaagacgtgggtg

SEQ ID NO: 9535 - DNA, 22 bp, Artificial Sequence
  chemically synthesized
tgtgcaggaagacgtgggtgtg

SEQ ID NO: 9536 - DNA, 22 bp, Artificial Sequence
  chemically synthesized
gcatgcatatgcacatgtgaga

SEQ ID NO: 9537 - DNA, 22 bp, Artificial Sequence
  chemically synthesized
ttgagtgaagtgagcaatgtgt

SEQ ID NO: 9538 - DNA, 22 bp, Artificial Sequence
  chemically synthesized
tgagtgaagtgagcaatgtgtg

SEQ ID NO: 9539 - DNA, 22 bp, Artificial Sequence
  chemically synthesized
gagtgaagtgagcaatgtgtga

SEQ ID NO: 9540 - DNA, 22 bp, Artificial Sequence
  chemically synthesized
agtgaagtgagcaatgtgtgag

SEQ ID NO: 9541 - DNA, 22 bp, Artificial Sequence
  chemically synthesized
gtgagggcatgtgaatgtgtgt

SEQ ID NO: 9542 - DNA, 22 bp, Artificial Sequence
  chemically synthesized
tgagggcatgtgaatgtgtgtg

SEQ ID NO: 9543 - DNA, 22 bp, Artificial Sequence
  chemically synthesized
tcagggtgcagatggatcaagg

SEQ ID NO: 9544 - DNA, 22 bp, Artificial Sequence
  chemically synthesized
tgagatgacctcgggctgaggg

SEQ ID NO: 9545 - DNA, 22 bp, Artificial Sequence
  chemically synthesized
gggctgaggggagcaaatttag

SEQ ID NO: 9546 - DNA, 22 bp, Artificial Sequence
  chemically synthesized
aggggagcaaatttagtgtgga

SEQ ID NO: 9547 - DNA, 22 bp, Artificial Sequence
  chemically synthesized
agtgtggaacgaggtttctagg

SEQ ID NO: 9548 - DNA, 22 bp, Artificial Sequence
  chemically synthesized
gtgtggaacgaggtttctaggg

SEQ ID NO: 9549 - DNA, 22 bp, Artificial Sequence
  chemically synthesized
ctagggaagcgagggcaaaggg

SEQ ID NO: 9550 - DNA, 22 bp, Artificial Sequence
  chemically synthesized
tagggaagcgagggcaaagggc

SEQ ID NO: 9551 - DNA, 22 bp, Artificial Sequence
  chemically synthesized
gggaagcgagggcaaagggcgc

SEQ ID NO: 9552 - DNA, 22 bp, Artificial Sequence
  chemically synthesized
gggaggaggccttgcgtggtgg

SEQ ID NO: 9553 - DNA, 22 bp, Artificial Sequence
  chemically synthesized
gcgtggtgggggatgaggacaa

SEQ ID NO: 9554 - DNA, 22 bp, Artificial Sequence
  chemically synthesized
cgtggtgggggatgaggacaac

SEQ ID NO: 9555 - DNA, 22 bp, Artificial Sequence
  chemically synthesized
gagggttgtgcttggagagtgg

SEQ ID NO: 9556 - DNA, 22 bp, Artificial Sequence
  chemically synthesized
tgcttggagagtgggctatggt

SEQ ID NO: 9557 - DNA, 22 bp, Artificial Sequence
  chemically synthesized
ggagagtgggctatggtggaat

SEQ ID NO: 9558 - DNA, 22 bp, Artificial Sequence
  chemically synthesized
gagagtgggctatggtggaatg

SEQ ID NO: 9559 - DNA, 22 bp, Artificial Sequence
  chemically synthesized
tggtggaatgacccagatttaa

SEQ ID NO: 9560 - DNA, 22 bp, Artificial Sequence
  chemically synthesized
aaggatctcaatggaattttgg

SEQ ID NO: 9561 - DNA, 22 bp, Artificial Sequence
  chemically synthesized
aggatctcaatggaattttggc

SEQ ID NO: 9562 - DNA, 22 bp, Artificial Sequence
  chemically synthesized
aatggaattttggcaggggagg

SEQ ID NO: 9563 - DNA, 22 bp, Artificial Sequence
  chemically synthesized
tggcaggggagggactgttcca

SEQ ID NO: 9564 - DNA, 22 bp, Artificial Sequence
  chemically synthesized
ggcaggggagggactgttccag

SEQ ID NO: 9565 - DNA, 22 bp, Artificial Sequence
  chemically synthesized
gcaggggagggactgttccagt

SEQ ID NO: 9566 - DNA, 22 bp, Artificial Sequence
  chemically synthesized
ttccagtatggattttaggaag

SEQ ID NO: 9567 - DNA, 22 bp, Artificial Sequence
  chemically synthesized
cagtatggattttaggaagaac

SEQ ID NO: 9568 - DNA, 22 bp, Artificial Sequence
  chemically synthesized
taggaagaacacagggcccagc

SEQ ID NO: 9569 - DNA, 22 bp, Artificial Sequence
  chemically synthesized
aggaagaacacagggcccagct

SEQ ID NO: 9570 - DNA, 22 bp, Artificial Sequence
  chemically synthesized
ggaagaacacagggcccagctt

SEQ ID NO: 9571 - DNA, 22 bp, Artificial Sequence
  chemically synthesized
ctggagtctccaatctgagggg

SEQ ID NO: 9572 - DNA, 22 bp, Artificial Sequence
  chemically synthesized
tggagtctccaatctgagggga

SEQ ID NO: 9573 - DNA, 22 bp, Artificial Sequence
  chemically synthesized
gagtctccaatctgaggggaca

SEQ ID NO: 9574 - DNA, 22 bp, Artificial Sequence
  chemically synthesized
caatctgaggggacaggagcct

SEQ ID NO: 9575 - DNA, 22 bp, Artificial Sequence
  chemically synthesized
aggggacaggagccttagaaga

SEQ ID NO: 9576 - DNA, 22 bp, Artificial Sequence
  chemically synthesized
agaagagctgagactaaggccc

SEQ ID NO: 9577 - DNA, 22 bp, Artificial Sequence
  chemically synthesized
gaagagctgagactaaggcccg

SEQ ID NO: 9578 - DNA, 22 bp, Artificial Sequence
  chemically synthesized
agactaaggcccgaggtgatct

SEQ ID NO: 9579 - DNA, 22 bp, Artificial Sequence
  chemically synthesized
aggcccgaggtgatctggaggc

SEQ ID NO: 9580 - DNA, 22 bp, Artificial Sequence
  chemically synthesized
gaggcctctgccactggctgga

SEQ ID NO: 9581 - DNA, 22 bp, Artificial Sequence
  chemically synthesized
tgccactggctggatgggagga

SEQ ID NO: 9582 - DNA, 22 bp, Artificial Sequence
  chemically synthesized
ccactggctggatgggaggaaa

SEQ ID NO: 9583 - DNA, 22 bp, Artificial Sequence
  chemically synthesized
gctggatgggaggaaaaccatt

SEQ ID NO: 9584 - DNA, 22 bp, Artificial Sequence
  chemically synthesized
gatgggaggaaaaccattcaca

SEQ ID NO: 9585 - DNA, 22 bp, Artificial Sequence
  chemically synthesized
acagatcccccttctcaggatg

SEQ ID NO: 9586 - DNA, 22 bp, Artificial Sequence
  chemically synthesized
ctcaggatgtgtgcctaggcag

SEQ ID NO: 9587 - DNA, 22 bp, Artificial Sequence
  chemically synthesized
tcaggatgtgtgcctaggcagg

SEQ ID NO: 9588 - DNA, 22 bp, Artificial Sequence
  chemically synthesized
aggatgtgtgcctaggcagggc

SEQ ID NO: 9589 - DNA, 22 bp, Artificial Sequence
  chemically synthesized
ggcagggccgggtctgcccccc

SEQ ID NO: 9590 - DNA, 22 bp, Artificial Sequence
  chemically synthesized
cccccccgccccctgtgcgtct

SEQ ID NO: 9591 - DNA, 22 bp, Artificial Sequence
  chemically synthesized
tgcgtctcccagtcccccagct

SEQ ID NO: 9592 - DNA, 22 bp, Artificial Sequence
  chemically synthesized
ccagtcccccagctccaggatc

SEQ ID NO: 9593 - DNA, 22 bp, Artificial Sequence
  chemically synthesized
caggatccgggctttgcacaca

SEQ ID NO: 9594 - DNA, 22 bp, Artificial Sequence
  chemically synthesized
tgcacacagctgatgtgaatat

SEQ ID NO: 9595 - DNA, 22 bp, Artificial Sequence
  chemically synthesized
gcacacagctgatgtgaatatc

SEQ ID NO: 9596 - DNA, 22 bp, Artificial Sequence
  chemically synthesized
cacacagctgatgtgaatatcc

SEQ ID NO: 9597 - DNA, 22 bp, Artificial Sequence
  chemically synthesized
atgtgaatatcctgagtcgtgt

SEQ ID NO: 9598 - DNA, 22 bp, Artificial Sequence
  chemically synthesized
agtcgtgtgcatgggtgtgtgt

SEQ ID NO: 9599 - DNA, 22 bp, Artificial Sequence
  chemically synthesized
gctgcgtgtgtatatttataca

SEQ ID NO: 9600 - DNA, 22 bp, Artificial Sequence
  chemically synthesized
cgtgtgtatatttatacatggt

SEQ ID NO: 9601 - DNA, 22 bp, Artificial Sequence
  chemically synthesized
atacatggtaatatgggtgcga

SEQ ID NO: 9602 - DNA, 22 bp, Artificial Sequence
  chemically synthesized
tacatggtaatatgggtgcgag

SEQ ID NO: 9603 - DNA, 22 bp, Artificial Sequence
  chemically synthesized
aaatgctggggtcaaagcctat

SEQ ID NO: 9604 - DNA, 22 bp, Artificial Sequence
  chemically synthesized
gggtcaaagcctatgatgaccc

SEQ ID NO: 9605 - DNA, 22 bp, Artificial Sequence
  chemically synthesized
tgatgacccccccccatggccc

SEQ ID NO: 9606 - DNA, 22 bp, Artificial Sequence
  chemically synthesized
tgcctcctcaggcttcggtgcc

SEQ ID NO: 9607 - DNA, 22 bp, Artificial Sequence
  chemically synthesized
ctcaggcttcggtgccctgtct

SEQ ID NO: 9608 - DNA, 22 bp, Artificial Sequence
  chemically synthesized
aggcttcggtgccctgtcttta

SEQ ID NO: 9609 - DNA, 22 bp, Artificial Sequence
  chemically synthesized
cggtgccctgtctttaccctcc

SEQ ID NO: 9610 - DNA, 22 bp, Artificial Sequence
  chemically synthesized
ggtgccctgtctttaccctccg

SEQ ID NO: 9611 - DNA, 22 bp, Artificial Sequence
  chemically synthesized
tctttaccctccggctccccac

SEQ ID NO: 9612 - DNA, 22 bp, Artificial Sequence
  chemically synthesized
taccctccggctccccacaccc

SEQ ID NO: 9613 - DNA, 22 bp, Artificial Sequence
  chemically synthesized
accctccggctccccacaccca

SEQ ID NO: 9614 - DNA, 22 bp, Artificial Sequence
  chemically synthesized
ccctccggctccccacacccag

SEQ ID NO: 9615 - DNA, 22 bp, Artificial Sequence
  chemically synthesized
cggctccccacacccaggctgc

SEQ ID NO: 9616 - DNA, 22 bp, Artificial Sequence
  chemically synthesized
cccacacccaggctgccggctc

SEQ ID NO: 9617 - DNA, 22 bp, Artificial Sequence
  chemically synthesized
ccggctcctgatgcccctctcc

SEQ ID NO: 9618 - DNA, 22 bp, Artificial Sequence
  chemically synthesized
ctgatgcccctctcccacaggg

SEQ ID NO: 9619 - DNA, 22 bp, Artificial Sequence
  chemically synthesized
atgcccctctcccacagggcca

SEQ ID NO: 9620 - DNA, 22 bp, Artificial Sequence
  chemically synthesized
tcccacagggccacctcctgcc

SEQ ID NO: 9621 - DNA, 22 bp, Artificial Sequence
  chemically synthesized
ccacagggccacctcctgccca

SEQ ID NO: 9622 - DNA, 22 bp, Artificial Sequence
  chemically synthesized
ctgcccagcccctggcacagcg

SEQ ID NO: 9623 - DNA, 22 bp, Artificial Sequence
  chemically synthesized
cccagcccctggcacagcgtct

SEQ ID NO: 9624 - DNA, 22 bp, Artificial Sequence
  chemically synthesized
gcacagcgtctctgctccatgg

SEQ ID NO: 9625 - DNA, 22 bp, Artificial Sequence
  chemically synthesized
tgctccatggtctgcttcagtc

SEQ ID NO: 9626 - DNA, 22 bp, Artificial Sequence
  chemically synthesized
ctccatggtctgcttcagtctg

SEQ ID NO: 9627 - DNA, 22 bp, Artificial Sequence
  chemically synthesized
catggtctgcttcagtctgctt

SEQ ID NO: 9628 - DNA, 22 bp, Artificial Sequence
  chemically synthesized
cttcagtctgcttgccctgagc

SEQ ID NO: 9629 - DNA, 22 bp, Artificial Sequence
  chemically synthesized
cagtctgcttgccctgagcttc

SEQ ID NO: 9630 - DNA, 22 bp, Artificial Sequence
  chemically synthesized
agtctgcttgccctgagcttca

SEQ ID NO: 9631 - DNA, 22 bp, Artificial Sequence
  chemically synthesized
cttgccctgagcttcaacatcc

SEQ ID NO: 9632 - DNA, 22 bp, Artificial Sequence
  chemically synthesized
gccctgagcttcaacatcctgc

SEQ ID NO: 9633 - DNA, 22 bp, Artificial Sequence
  chemically synthesized
ccctgagcttcaacatcctgct

SEQ ID NO: 9634 - DNA, 22 bp, Artificial Sequence
  chemically synthesized
agcttcaacatcctgctgctgg

SEQ ID NO: 9635 - DNA, 22 bp, Artificial Sequence
  chemically synthesized
caacatcctgctgctggtggtc

SEQ ID NO: 9636 - DNA, 22 bp, Artificial Sequence
  chemically synthesized
aacatcctgctgctggtggtca

SEQ ID NO: 9637 - DNA, 22 bp, Artificial Sequence
  chemically synthesized
ctgctggtggtcatctgtgtga

SEQ ID NO: 9638 - DNA, 22 bp, Artificial Sequence
  chemically synthesized
ctggtggtcatctgtgtgactg

SEQ ID NO: 9639 - DNA, 22 bp, Artificial Sequence
  chemically synthesized
gtggtcatctgtgtgactgggt

SEQ ID NO: 9640 - DNA, 22 bp, Artificial Sequence
  chemically synthesized
tgtgactgggtcccaaagtgag

SEQ ID NO: 9641 - DNA, 22 bp, Artificial Sequence
  chemically synthesized
ggtcccaaagtgagggtcacgg

SEQ ID NO: 9642 - DNA, 20 bp, Artificial Sequence
  chemically synthesized
cttcagatagattatatctg

SEQ ID NO: 9643 - DNA, 20 bp, Artificial Sequence
  chemically synthesized
gatagattatatctggagtg

SEQ ID NO: 9644 - DNA, 20 bp, Artificial Sequence
  chemically synthesized
aatcctgccacctatgtatc

SEQ ID NO: 9645 - DNA, 20 bp, Artificial Sequence
  chemically synthesized
tgccacctatgtatctggca

SEQ ID NO: 9646 - DNA, 20 bp, Artificial Sequence
  chemically synthesized
ctatgtatctggcatagtgt

SEQ ID NO: 9647 - DNA, 20 bp, Artificial Sequence
  chemically synthesized
gagtcctcataaatgcttac

SEQ ID NO: 9648 - DNA, 20 bp, Artificial Sequence
  chemically synthesized
cataaatgcttactggtttg

SEQ ID NO: 9649 - DNA, 20 bp, Artificial Sequence
  chemically synthesized
ataaatgcttactggtttga

SEQ ID NO: 9650 - DNA, 20 bp, Artificial Sequence
  chemically synthesized
taaatgcttactggtttgaa

SEQ ID NO: 9651 - DNA, 20 bp, Artificial Sequence
  chemically synthesized
tggtttgaagggcaacaaaa

SEQ ID NO: 9652 - DNA, 20 bp, Artificial Sequence
  chemically synthesized
aagggcaacaaaatagtgaa

SEQ ID NO: 9653 - DNA, 20 bp, Artificial Sequence
  chemically synthesized
gggcaacaaaatagtgaaca

SEQ ID NO: 9654 - DNA, 20 bp, Artificial Sequence
  chemically synthesized
acagagtgaaaatccccact

SEQ ID NO: 9655 - DNA, 20 bp, Artificial Sequence
  chemically synthesized
gaaaatccccactaagatcc

SEQ ID NO: 9656 - DNA, 20 bp, Artificial Sequence
  chemically synthesized
aaaatccccactaagatcct

SEQ ID NO: 9657 - DNA, 20 bp, Artificial Sequence
  chemically synthesized
ccccactaagatcctgggtc

SEQ ID NO: 9658 - DNA, 20 bp, Artificial Sequence
  chemically synthesized
taagatcctgggtccagaaa

SEQ ID NO: 9659 - DNA, 20 bp, Artificial Sequence
  chemically synthesized
atcctgggtccagaaaaaga

SEQ ID NO: 9660 - DNA, 20 bp, Artificial Sequence
  chemically synthesized
tcctgggtccagaaaaagat

SEQ ID NO: 9661 - DNA, 20 bp, Artificial Sequence
  chemically synthesized
aaaaagatgggaaacctgtt

SEQ ID NO: 9662 - DNA, 20 bp, Artificial Sequence
  chemically synthesized
aacctgtttagctcacccgt

SEQ ID NO: 9663 - DNA, 20 bp, Artificial Sequence
  chemically synthesized
ttagctcacccgtgagccca

SEQ ID NO: 9664 - DNA, 20 bp, Artificial Sequence
  chemically synthesized
agcccatagttaaaactctt

SEQ ID NO: 9665 - DNA, 20 bp, Artificial Sequence
  chemically synthesized
agttaaaactctttagacaa

SEQ ID NO: 9666 - DNA, 20 bp, Artificial Sequence
  chemically synthesized
gttaaaactctttagacaac

SEQ ID NO: 9667 - DNA, 20 bp, Artificial Sequence
  chemically synthesized
caacaggttgtttccgttta

SEQ ID NO: 9668 - DNA, 20 bp, Artificial Sequence
  chemically synthesized
acaggttgtttccgtttaca

SEQ ID NO: 9669 - DNA, 20 bp, Artificial Sequence
  chemically synthesized
tttacagagaacaataatat

SEQ ID NO: 9670 - DNA, 20 bp, Artificial Sequence
  chemically synthesized
ttacagagaacaataatatt

SEQ ID NO: 9671 - DNA, 20 bp, Artificial Sequence
  chemically synthesized
cagagaacaataatattggg

SEQ ID NO: 9672 - DNA, 20 bp, Artificial Sequence
  chemically synthesized
gaacaataatattgggtggt

SEQ ID NO: 9673 - DNA, 20 bp, Artificial Sequence
  chemically synthesized
ttgggtggtgagcatctgtg

SEQ ID NO: 9674 - DNA, 20 bp, Artificial Sequence
  chemically synthesized
tgggtggtgagcatctgtgt

SEQ ID NO: 9675 - DNA, 20 bp, Artificial Sequence
  chemically synthesized
gggtggtgagcatctgtgtg

SEQ ID NO: 9676 - DNA, 20 bp, Artificial Sequence
  chemically synthesized
ggtggtgagcatctgtgtgg

SEQ ID NO: 9677 - DNA, 20 bp, Artificial Sequence
  chemically synthesized
gtgagcatctgtgtgggggt

SEQ ID NO: 9678 - DNA, 20 bp, Artificial Sequence
  chemically synthesized
tgagcatctgtgtgggggtt

SEQ ID NO: 9679 - DNA, 20 bp, Artificial Sequence
  chemically synthesized
gagcatctgtgtgggggttg

SEQ ID NO: 9680 - DNA, 20 bp, Artificial Sequence
  chemically synthesized
catctgtgtgggggttgggg

SEQ ID NO: 9681 - DNA, 20 bp, Artificial Sequence
  chemically synthesized
atctgtgtgggggttggggt

SEQ ID NO: 9682 - DNA, 20 bp, Artificial Sequence
  chemically synthesized
gtgtgggggttggggtggga

SEQ ID NO: 9683 - DNA, 20 bp, Artificial Sequence
  chemically synthesized
tgtgggggttggggtgggat

SEQ ID NO: 9684 - DNA, 20 bp, Artificial Sequence
  chemically synthesized
gtgggggttggggtgggata

SEQ ID NO: 9685 - DNA, 20 bp, Artificial Sequence
  chemically synthesized
tgggggttggggtgggatag

SEQ ID NO: 9686 - DNA, 20 bp, Artificial Sequence
  chemically synthesized
ttggggtgggataggggata

SEQ ID NO: 9687 - DNA, 20 bp, Artificial Sequence
  chemically synthesized
tggggtgggataggggatac

SEQ ID NO: 9688 - DNA, 20 bp, Artificial Sequence
  chemically synthesized
ggggtgggataggggatacg

SEQ ID NO: 9689 - DNA, 20 bp, Artificial Sequence
  chemically synthesized
ggtgggataggggatacggg

SEQ ID NO: 9690 - DNA, 20 bp, Artificial Sequence
  chemically synthesized
tgggataggggatacgggga

SEQ ID NO: 9691 - DNA, 20 bp, Artificial Sequence
  chemically synthesized
gataggggatacggggagag

SEQ ID NO: 9692 - DNA, 20 bp, Artificial Sequence
  chemically synthesized
taggggatacggggagagtg

SEQ ID NO: 9693 - DNA, 20 bp, Artificial Sequence
  chemically synthesized
atacggggagagtggagaaa

SEQ ID NO: 9694 - DNA, 20 bp, Artificial Sequence
  chemically synthesized
tacggggagagtggagaaaa

SEQ ID NO: 9695 - DNA, 20 bp, Artificial Sequence
  chemically synthesized
acggggagagtggagaaaaa

SEQ ID NO: 9696 - DNA, 20 bp, Artificial Sequence
  chemically synthesized
cggggagagtggagaaaaag

SEQ ID NO: 9697 - DNA, 20 bp, Artificial Sequence
  chemically synthesized
gagtggagaaaaaggggaca

SEQ ID NO: 9698 - DNA, 20 bp, Artificial Sequence
  chemically synthesized
agtggagaaaaaggggacac

SEQ ID NO: 9699 - DNA, 20 bp, Artificial Sequence
  chemically synthesized
gtggagaaaaaggggacaca

SEQ ID NO: 9700 - DNA, 20 bp, Artificial Sequence
  chemically synthesized
ggggacacagggttaatgtg

SEQ ID NO: 9701 - DNA, 20 bp, Artificial Sequence
  chemically synthesized
cacagggttaatgtgaagtc

SEQ ID NO: 9702 - DNA, 20 bp, Artificial Sequence
  chemically synthesized
acagggttaatgtgaagtcc

SEQ ID NO: 9703 - DNA, 20 bp, Artificial Sequence
  chemically synthesized
aggatccccctctacattta

SEQ ID NO: 9704 - DNA, 20 bp, Artificial Sequence
  chemically synthesized
tccccctctacatttaaagt

SEQ ID NO: 9705 - DNA, 20 bp, Artificial Sequence
  chemically synthesized
tctacatttaaagttggttt

SEQ ID NO: 9706 - DNA, 20 bp, Artificial Sequence
  chemically synthesized
catttaaagttggtttaagt

SEQ ID NO: 9707 - DNA, 20 bp, Artificial Sequence
  chemically synthesized
tttaagttggctttaattaa

SEQ ID NO: 9708 - DNA, 20 bp, Artificial Sequence
  chemically synthesized
tttaattaatagcaactctt

SEQ ID NO: 9709 - DNA, 20 bp, Artificial Sequence
  chemically synthesized
atagcaactcttaagataat

SEQ ID NO: 9710 - DNA, 20 bp, Artificial Sequence
  chemically synthesized
tcagaattttcttaaccttt

SEQ ID NO: 9711 - DNA, 20 bp, Artificial Sequence
  chemically synthesized
cttttagccttactgttgaa

SEQ ID NO: 9712 - DNA, 20 bp, Artificial Sequence
  chemically synthesized
tgtacaaatcatttgcttct

SEQ ID NO: 9713 - DNA, 20 bp, Artificial Sequence
  chemically synthesized
caaatcatttgcttcttgga

SEQ ID NO: 9714 - DNA, 20 bp, Artificial Sequence
  chemically synthesized
taatttcttttactaaaatg

SEQ ID NO: 9715 - DNA, 20 bp, Artificial Sequence
  chemically synthesized
aatttcttttactaaaatgt

SEQ ID NO: 9716 - DNA, 20 bp, Artificial Sequence
  chemically synthesized
ctaaaatgtgggcttttgac

SEQ ID NO: 9717 - DNA, 20 bp, Artificial Sequence
  chemically synthesized
gatgaatgtaaatgttcttc

SEQ ID NO: 9718 - DNA, 20 bp, Artificial Sequence
  chemically synthesized
ttattctttatattttctaa

SEQ ID NO: 9719 - DNA, 20 bp, Artificial Sequence
  chemically synthesized
attttctaacagattctgtg

SEQ ID NO: 9720 - DNA, 20 bp, Artificial Sequence
  chemically synthesized
ttctaacagattctgtgtag

SEQ ID NO: 9721 - DNA, 20 bp, Artificial Sequence
  chemically synthesized
tctaacagattctgtgtagt

SEQ ID NO: 9722 - DNA, 20 bp, Artificial Sequence
  chemically synthesized
cagattctgtgtagtgggat

SEQ ID NO: 9723 - DNA, 20 bp, Artificial Sequence
  chemically synthesized
attctgtgtagtgggatgag

SEQ ID NO: 9724 - DNA, 20 bp, Artificial Sequence
  chemically synthesized
tctgtgtagtgggatgagca

SEQ ID NO: 9725 - DNA, 20 bp, Artificial Sequence
  chemically synthesized
agaacaaaaacaaaataatc

SEQ ID NO: 9726 - DNA, 20 bp, Artificial Sequence
  chemically synthesized
caaaaacaaaataatccagt

SEQ ID NO: 9727 - DNA, 20 bp, Artificial Sequence
  chemically synthesized
acaaaataatccagtgagaa

SEQ ID NO: 9728 - DNA, 20 bp, Artificial Sequence
  chemically synthesized
aaagcccgtaaataaacctt

SEQ ID NO: 9729 - DNA, 20 bp, Artificial Sequence
  chemically synthesized
ccgtaaataaaccttcagac

SEQ ID NO: 9730 - DNA, 20 bp, Artificial Sequence
  chemically synthesized
gtaaataaaccttcagacca

SEQ ID NO: 9731 - DNA, 20 bp, Artificial Sequence
  chemically synthesized
cagaccagagatctattctc

SEQ ID NO: 9732 - DNA, 20 bp, Artificial Sequence
  chemically synthesized
tctattctctagcttatttt

SEQ ID NO: 9733 - DNA, 20 bp, Artificial Sequence
  chemically synthesized
tattttaagctcaacttaaa

SEQ ID NO: 9734 - DNA, 20 bp, Artificial Sequence
  chemically synthesized
tttaagctcaacttaaaaag

SEQ ID NO: 9735 - DNA, 20 bp, Artificial Sequence
  chemically synthesized
ttaactccaccctccttcaa

SEQ ID NO: 9736 - DNA, 20 bp, Artificial Sequence
  chemically synthesized
ccaccctccttcaaaagaaa

SEQ ID NO: 9737 - DNA, 20 bp, Artificial Sequence
  chemically synthesized
gtctatatgattgatttgca

SEQ ID NO: 9738 - DNA, 20 bp, Artificial Sequence
  chemically synthesized
attgatttgcacagctcatc

SEQ ID NO: 9739 - DNA, 20 bp, Artificial Sequence
  chemically synthesized
atttgcacagctcatctggc

SEQ ID NO: 9740 - DNA, 20 bp, Artificial Sequence
  chemically synthesized
tgcacagctcatctggccag

SEQ ID NO: 9741 - DNA, 20 bp, Artificial Sequence
  chemically synthesized
cacagctcatctggccagaa

SEQ ID NO: 9742 - DNA, 20 bp, Artificial Sequence
  chemically synthesized
ctcatctggccagaagagct

SEQ ID NO: 9743 - DNA, 20 bp, Artificial Sequence
  chemically synthesized
tgagacatccgttcccctac

SEQ ID NO: 9744 - DNA, 20 bp, Artificial Sequence
  chemically synthesized
gagagtttcttgtaggggaa

SEQ ID NO: 9745 - DNA, 20 bp, Artificial Sequence
  chemically synthesized
ttgtaggggaacggatgtct

SEQ ID NO: 9746 - DNA, 20 bp, Artificial Sequence
  chemically synthesized
aacggatgtctcagctcttc

SEQ ID NO: 9747 - DNA, 20 bp, Artificial Sequence
  chemically synthesized
gatgtctcagctcttctggc

SEQ ID NO: 9748 - DNA, 20 bp, Artificial Sequence
  chemically synthesized
ctcagctcttctggccagat

SEQ ID NO: 9749 - DNA, 20 bp, Artificial Sequence
  chemically synthesized
agctgtgcaaatcaatcata

SEQ ID NO: 9750 - DNA, 20 bp, Artificial Sequence
  chemically synthesized
gtgcaaatcaatcatataga

SEQ ID NO: 9751 - DNA, 20 bp, Artificial Sequence
  chemically synthesized
caatcatatagacagtataa

SEQ ID NO: 9752 - DNA, 20 bp, Artificial Sequence
  chemically synthesized
tcatatagacagtataaaag

SEQ ID NO: 9753 - DNA, 20 bp, Artificial Sequence
  chemically synthesized
catatagacagtataaaagt

SEQ ID NO: 9754 - DNA, 20 bp, Artificial Sequence
  chemically synthesized
aggaaatgctgtttcttttg

SEQ ID NO: 9755 - DNA, 20 bp, Artificial Sequence
  chemically synthesized
ggaaatgctgtttcttttga

SEQ ID NO: 9756 - DNA, 20 bp, Artificial Sequence
  chemically synthesized
aaatgctgtttcttttgaag

SEQ ID NO: 9757 - DNA, 20 bp, Artificial Sequence
  chemically synthesized
aatgctgtttcttttgaagg

SEQ ID NO: 9758 - DNA, 20 bp, Artificial Sequence
  chemically synthesized
atgctgtttcttttgaagga

SEQ ID NO: 9759 - DNA, 20 bp, Artificial Sequence
  chemically synthesized
ctgtttcttttgaaggaggg

SEQ ID NO: 9760 - DNA, 20 bp, Artificial Sequence
  chemically synthesized
gtttcttttgaaggagggtg

SEQ ID NO: 9761 - DNA, 20 bp, Artificial Sequence
  chemically synthesized
gagggtggagttaaatcatt

SEQ ID NO: 9762 - DNA, 20 bp, Artificial Sequence
  chemically synthesized
ttaaatcattaagtgtattg

SEQ ID NO: 9763 - DNA, 20 bp, Artificial Sequence
  chemically synthesized
taaatcattaagtgtattga

SEQ ID NO: 9764 - DNA, 20 bp, Artificial Sequence
  chemically synthesized
ttaagtgtattgaaggcgaa

SEQ ID NO: 9765 - DNA, 20 bp, Artificial Sequence
  chemically synthesized
gtattgaaggcgaaaagaat

SEQ ID NO: 9766 - DNA, 20 bp, Artificial Sequence
  chemically synthesized
attgaaggcgaaaagaatca

SEQ ID NO: 9767 - DNA, 20 bp, Artificial Sequence
  chemically synthesized
aggcgaaaagaatcagagaa

SEQ ID NO: 9768 - DNA, 20 bp, Artificial Sequence
  chemically synthesized
agagaacagttcttcttttt

SEQ ID NO: 9769 - DNA, 20 bp, Artificial Sequence
  chemically synthesized
acagttcttctttttaagtt

SEQ ID NO: 9770 - DNA, 20 bp, Artificial Sequence
  chemically synthesized
ttttaagttgagcttaaaat

SEQ ID NO: 9771 - DNA, 20 bp, Artificial Sequence
  chemically synthesized
aagttgagcttaaaataagc

SEQ ID NO: 9772 - DNA, 20 bp, Artificial Sequence
  chemically synthesized
gttgagcttaaaataagcta

SEQ ID NO: 9773 - DNA, 20 bp, Artificial Sequence
  chemically synthesized
gcttaaaataagctagagaa

SEQ ID NO: 9774 - DNA, 20 bp, Artificial Sequence
  chemically synthesized
taagctagagaatagatctc

SEQ ID NO: 9775 - DNA, 20 bp, Artificial Sequence
  chemically synthesized
gagaatagatctctggtctg

SEQ ID NO: 9776 - DNA, 20 bp, Artificial Sequence
  chemically synthesized
agaatagatctctggtctga

SEQ ID NO: 9777 - DNA, 20 bp, Artificial Sequence
  chemically synthesized
ctggtctgaaggtttattta

SEQ ID NO: 9778 - DNA, 20 bp, Artificial Sequence
  chemically synthesized
tggtctgaaggtttatttac

SEQ ID NO: 9779 - DNA, 20 bp, Artificial Sequence
  chemically synthesized
tatttacgggcttttctcac

SEQ ID NO: 9780 - DNA, 20 bp, Artificial Sequence
  chemically synthesized
tctctgctcatcccactaca

SEQ ID NO: 9781 - DNA, 20 bp, Artificial Sequence
  chemically synthesized
tcccactacacagaatctgt

SEQ ID NO: 9782 - DNA, 20 bp, Artificial Sequence
  chemically synthesized
agaatctgttagaaaatata

SEQ ID NO: 9783 - DNA, 20 bp, Artificial Sequence
  chemically synthesized
gttagaaaatataaagaata

SEQ ID NO: 9784 - DNA, 20 bp, Artificial Sequence
  chemically synthesized
ttagaaaatataaagaataa

SEQ ID NO: 9785 - DNA, 20 bp, Artificial Sequence
  chemically synthesized
atataaagaataaaggatat

SEQ ID NO: 9786 - DNA, 20 bp, Artificial Sequence
  chemically synthesized
ataaagaataaaggatatca

SEQ ID NO: 9787 - DNA, 20 bp, Artificial Sequence
  chemically synthesized
agaataaaggatatcagagc

SEQ ID NO: 9788 - DNA, 20 bp, Artificial Sequence
  chemically synthesized
ataaaggatatcagagctag

SEQ ID NO: 9789 - DNA, 20 bp, Artificial Sequence
  chemically synthesized
gaagaacatttacattcatc

SEQ ID NO: 9790 - DNA, 20 bp, Artificial Sequence
  chemically synthesized
atttacattcatctagtcaa

SEQ ID NO: 9791 - DNA, 20 bp, Artificial Sequence
  chemically synthesized
ctagtcaaaagcccacattt

SEQ ID NO: 9792 - DNA, 20 bp, Artificial Sequence
  chemically synthesized
aaaagcccacattttagtaa

SEQ ID NO: 9793 - DNA, 20 bp, Artificial Sequence
  chemically synthesized
agtaaaagaaattactatcc

SEQ ID NO: 9794 - DNA, 20 bp, Artificial Sequence
  chemically synthesized
aaaagaaattactatccaag

SEQ ID NO: 9795 - DNA, 20 bp, Artificial Sequence
  chemically synthesized
aagaagcaaatgatttgtac

SEQ ID NO: 9796 - DNA, 20 bp, Artificial Sequence
  chemically synthesized
aaatgatttgtacaagatca

SEQ ID NO: 9797 - DNA, 20 bp, Artificial Sequence
  chemically synthesized
aatgatttgtacaagatcac

SEQ ID NO: 9798 - DNA, 20 bp, Artificial Sequence
  chemically synthesized
atgatttgtacaagatcaca

SEQ ID NO: 9799 - DNA, 20 bp, Artificial Sequence
  chemically synthesized
aagatcacagggcttttcaa

SEQ ID NO: 9800 - DNA, 20 bp, Artificial Sequence
  chemically synthesized
tcacagggcttttcaacagt

SEQ ID NO: 9801 - DNA, 20 bp, Artificial Sequence
  chemically synthesized
cacagggcttttcaacagta

SEQ ID NO: 9802 - DNA, 20 bp, Artificial Sequence
  chemically synthesized
cttttcaacagtaaggctaa

SEQ ID NO: 9803 - DNA, 20 bp, Artificial Sequence
  chemically synthesized
ttttcaacagtaaggctaaa

SEQ ID NO: 9804 - DNA, 20 bp, Artificial Sequence
  chemically synthesized
aacagtaaggctaaaaggtt

SEQ ID NO: 9805 - DNA, 20 bp, Artificial Sequence
  chemically synthesized
aagaaaattctgattatctt

SEQ ID NO: 9806 - DNA, 20 bp, Artificial Sequence
  chemically synthesized
gaaaattctgattatcttaa

SEQ ID NO: 9807 - DNA, 20 bp, Artificial Sequence
  chemically synthesized
ttaagagttgctattaatta

SEQ ID NO: 9808 - DNA, 20 bp, Artificial Sequence
  chemically synthesized
acttaaaccaactttaaatg

SEQ ID NO: 9809 - DNA, 20 bp, Artificial Sequence
  chemically synthesized
ttaaaccaactttaaatgta

SEQ ID NO: 9810 - DNA, 20 bp, Artificial Sequence
  chemically synthesized
taaaccaactttaaatgtag

SEQ ID NO: 9811 - DNA, 20 bp, Artificial Sequence
  chemically synthesized
aaaccaactttaaatgtaga

SEQ ID NO: 9812 - DNA, 20 bp, Artificial Sequence
  chemically synthesized
aaccaactttaaatgtagag

SEQ ID NO: 9813 - DNA, 20 bp, Artificial Sequence
  chemically synthesized
accaactttaaatgtagagg

SEQ ID NO: 9814 - DNA, 20 bp, Artificial Sequence
  chemically synthesized
ttaaatgtagagggggatcc

SEQ ID NO: 9815 - DNA, 20 bp, Artificial Sequence
  chemically synthesized
atcccaccccaacccccaca

SEQ ID NO: 9816 - DNA, 20 bp, Artificial Sequence
  chemically synthesized
atattattgttctctgtaaa

SEQ ID NO: 9817 - DNA, 20 bp, Artificial Sequence
  chemically synthesized
cggaaacaacctgttgtcta

SEQ ID NO: 9818 - DNA, 20 bp, Artificial Sequence
  chemically synthesized
gaaacaacctgttgtctaaa

SEQ ID NO: 9819 - DNA, 20 bp, Artificial Sequence
  chemically synthesized
tgtctaaagagttttaacta

SEQ ID NO: 9820 - DNA, 20 bp, Artificial Sequence
  chemically synthesized
gtctaaagagttttaactat

SEQ ID NO: 9821 - DNA, 20 bp, Artificial Sequence
  chemically synthesized
gagttttaactatgggctca

SEQ ID NO: 9822 - DNA, 20 bp, Artificial Sequence
  chemically synthesized
agttttaactatgggctcac

SEQ ID NO: 9823 - DNA, 20 bp, Artificial Sequence
  chemically synthesized
ttaactatgggctcacgggt

SEQ ID NO: 9824 - DNA, 20 bp, Artificial Sequence
  chemically synthesized
gggctcacgggtgagctaaa

SEQ ID NO: 9825 - DNA, 20 bp, Artificial Sequence
  chemically synthesized
ggctcacgggtgagctaaac

SEQ ID NO: 9826 - DNA, 20 bp, Artificial Sequence
  chemically synthesized
acaggtttcccatctttttc

SEQ ID NO: 9827 - DNA, 20 bp, Artificial Sequence
  chemically synthesized
ttcccatctttttctggacc

SEQ ID NO: 9828 - DNA, 20 bp, Artificial Sequence
  chemically synthesized
tcccatctttttctggaccc

SEQ ID NO: 9829 - DNA, 20 bp, Artificial Sequence
  chemically synthesized
tttttctggacccaggatct

SEQ ID NO: 9830 - DNA, 20 bp, Artificial Sequence
  chemically synthesized
ttctggacccaggatcttag

SEQ ID NO: 9831 - DNA, 20 bp, Artificial Sequence
  chemically synthesized
tctggacccaggatcttagt

SEQ ID NO: 9832 - DNA, 20 bp, Artificial Sequence
  chemically synthesized
ctggacccaggatcttagtg

SEQ ID NO: 9833 - DNA, 20 bp, Artificial Sequence
  chemically synthesized
tattttgttgcccttcaaac

SEQ ID NO: 9834 - DNA, 20 bp, Artificial Sequence
  chemically synthesized
ttgttgcccttcaaaccagt

SEQ ID NO: 9835 - DNA, 20 bp, Artificial Sequence
  chemically synthesized
tcaaaccagtaagcatttat

SEQ ID NO: 9836 - DNA, 20 bp, Artificial Sequence
  chemically synthesized
caaaccagtaagcatttatg

SEQ ID NO: 9837 - DNA, 20 bp, Artificial Sequence
  chemically synthesized
tatgaggactcacactatgc

SEQ ID NO: 9838 - DNA, 20 bp, Artificial Sequence
  chemically synthesized
ctcacactatgccagataca

SEQ ID NO: 9839 - DNA, 20 bp, Artificial Sequence
  chemically synthesized
tcacactatgccagatacat

SEQ ID NO: 9840 - DNA, 20 bp, Artificial Sequence
  chemically synthesized
cactatgccagatacatagg

SEQ ID NO: 9841 - DNA, 20 bp, Artificial Sequence
  chemically synthesized
tatgccagatacataggtgg

SEQ ID NO: 9842 - DNA, 20 bp, Artificial Sequence
  chemically synthesized
atgccagatacataggtggc

SEQ ID NO: 9843 - DNA, 20 bp, Artificial Sequence
  chemically synthesized
ggtggcaggattcttcactc

SEQ ID NO: 9844 - DNA, 20 bp, Artificial Sequence
  chemically synthesized
ctccagatataatctatctg

SEQ ID NO: 9845 - DNA, 20 bp, Artificial Sequence
  chemically synthesized
gatagattatatctggagtg

SEQ ID NO: 9846 - DNA, 20 bp, Artificial Sequence
  chemically synthesized
acctatgtatctggcatagt

SEQ ID NO: 9847 - DNA, 20 bp, Artificial Sequence
  chemically synthesized
aagggcaacaaaatagtgaa

SEQ ID NO: 9848 - DNA, 20 bp, Artificial Sequence
  chemically synthesized
tgaaaatccccactaagatc

SEQ ID NO: 9849 - DNA, 20 bp, Artificial Sequence
  chemically synthesized
gtttacagagaacaataata

SEQ ID NO: 9850 - DNA, 20 bp, Artificial Sequence
  chemically synthesized
tgggtggtgagcatctgtgt

SEQ ID NO: 9851 - DNA, 20 bp, Artificial Sequence
  chemically synthesized
gtgagcatctgtgtgggggt

SEQ ID NO: 9852 - DNA, 20 bp, Artificial Sequence
  chemically synthesized
catctgtgtgggggttgggg

SEQ ID NO: 9853 - DNA, 20 bp, Artificial Sequence
  chemically synthesized
gtgggggttggggtgggata

SEQ ID NO: 9854 - DNA, 20 bp, Artificial Sequence
  chemically synthesized
ggtgggataggggatacggg

SEQ ID NO: 9855 - DNA, 20 bp, Artificial Sequence
  chemically synthesized
gagtggagaaaaaggggaca

SEQ ID NO: 9856 - DNA, 20 bp, Artificial Sequence
  chemically synthesized
cacagggttaatgtgaagtc

SEQ ID NO: 9857 - DNA, 20 bp, Artificial Sequence
  chemically synthesized
atagcaactcttaagataat

SEQ ID NO: 9858 - DNA, 20 bp, Artificial Sequence
  chemically synthesized
ttgtacaaatcatttgcttc

SEQ ID NO: 9859 - DNA, 20 bp, Artificial Sequence
  chemically synthesized
aaatgtgggcttttgactag

SEQ ID NO: 9860 - DNA, 20 bp, Artificial Sequence
  chemically synthesized
ttctaacagattctgtgtag

SEQ ID NO: 9861 - DNA, 20 bp, Artificial Sequence
  chemically synthesized
ggagagtttcttgtagggga

SEQ ID NO: 9862 - DNA, 20 bp, Artificial Sequence
  chemically synthesized
aaatgctgtttcttttgaag

SEQ ID NO: 9863 - DNA, 20 bp, Artificial Sequence
  chemically synthesized
ctgtttcttttgaaggaggg

SEQ ID NO: 9864 - DNA, 20 bp, Artificial Sequence
  chemically synthesized
ttaagtgtattgaaggcgaa

SEQ ID NO: 9865 - DNA, 20 bp, Artificial Sequence
  chemically synthesized
gttgagcttaaaataagcta

SEQ ID NO: 9866 - DNA, 20 bp, Artificial Sequence
  chemically synthesized
ttatttacgggcttttctca

SEQ ID NO: 9867 - DNA, 20 bp, Artificial Sequence
  chemically synthesized
tctctgctcatcccactaca

SEQ ID NO: 9868 - DNA, 20 bp, Artificial Sequence
  chemically synthesized
agaatctgttagaaaatata

SEQ ID NO: 9869 - DNA, 20 bp, Artificial Sequence
  chemically synthesized
gttagaaaatataaagaata

SEQ ID NO: 9870 - DNA, 20 bp, Artificial Sequence
  chemically synthesized
aagaaaattctgattatctt

SEQ ID NO: 9871 - DNA, 20 bp, Artificial Sequence
  chemically synthesized
aaccaactttaaatgtagag

SEQ ID NO: 9872 - DNA, 20 bp, Artificial Sequence
  chemically synthesized
cggaaacaacctgttgtcta

SEQ ID NO: 9873 - DNA, 20 bp, Artificial Sequence
  chemically synthesized
agagttttaactatgggctc

SEQ ID NO: 9874 - DNA, 20 bp, Artificial Sequence
  chemically synthesized
ttcccatctttttctggacc

SEQ ID NO: 9875 - DNA, 20 bp, Artificial Sequence
  chemically synthesized
tctggacccaggatcttagt

SEQ ID NO: 9876 - DNA, 20 bp, Artificial Sequence
  chemically synthesized
tatgccagatacataggtgg

SEQ ID NO: 9877 - DNA, 20 bp, Artificial Sequence
  chemically synthesized
agatagattatatctggagt

SEQ ID NO: 9878 - DNA, 20 bp, Artificial Sequence
  chemically synthesized
tccccactaagatcctgggt

SEQ ID NO: 9879 - DNA, 20 bp, Artificial Sequence
  chemically synthesized
ataggggatacggggagagt

SEQ ID NO: 9880 - DNA, 20 bp, Artificial Sequence
  chemically synthesized
aatagcaactcttaagataa

SEQ ID NO: 9881 - DNA, 20 bp, Artificial Sequence
  chemically synthesized
acaaaaacaaaataatccag

SEQ ID NO: 9882 - DNA, 20 bp, Artificial Sequence
  chemically synthesized
tttaactccaccctccttca

SEQ ID NO: 9883 - DNA, 20 bp, Artificial Sequence
  chemically synthesized
ctgagacatccgttccccta

SEQ ID NO: 9884 - DNA, 20 bp, Artificial Sequence
  chemically synthesized
attaagtgtattgaaggcga

SEQ ID NO: 9885 - DNA, 20 bp, Artificial Sequence
  chemically synthesized
agttgagcttaaaataagct

SEQ ID NO: 9886 - DNA, 20 bp, Artificial Sequence
  chemically synthesized
ttctctgctcatcccactac

SEQ ID NO: 9887 - DNA, 20 bp, Artificial Sequence
  chemically synthesized
atcccactacacagaatctg

SEQ ID NO: 9888 - DNA, 20 bp, Artificial Sequence
  chemically synthesized
cagaatctgttagaaaatat

SEQ ID NO: 9889 - DNA, 20 bp, Artificial Sequence
  chemically synthesized
caaaagcccacattttagta

SEQ ID NO: 9890 - DNA, 20 bp, Artificial Sequence
  chemically synthesized
caacagtaaggctaaaaggt

SEQ ID NO: 9891 - DNA, 20 bp, Artificial Sequence
  chemically synthesized
ctcacccgtgagcccatagt

SEQ ID NO: 9892 - DNA, 20 bp, Artificial Sequence
  chemically synthesized
tagtgggatgagcagagaac

SEQ ID NO: 9893 - DNA, 20 bp, Artificial Sequence
  chemically synthesized
ggcatagtgtgagtcctcat

SEQ ID NO: 9894 - DNA, 20 bp, Artificial Sequence
  chemically synthesized
gtgagtcctcataaatgctt

SEQ ID NO: 9895 - DNA, 20 bp, Artificial Sequence
  chemically synthesized
ggtccagaaaaagatgggaa

SEQ ID NO: 9896 - DNA, 20 bp, Artificial Sequence
  chemically synthesized
ttaaaactctttagacaaca

SEQ ID NO: 9897 - DNA, 20 bp, Artificial Sequence
  chemically synthesized
ctctttagacaacaggttgt

SEQ ID NO: 9898 - DNA, 20 bp, Artificial Sequence
  chemically synthesized
gatccccctctacatttaaa

SEQ ID NO: 9899 - DNA, 20 bp, Artificial Sequence
  chemically synthesized
tacatttaaagttggtttaa

SEQ ID NO: 9900 - DNA, 20 bp, Artificial Sequence
  chemically synthesized
cctgtgatcttgtacaaatc

SEQ ID NO: 9901 - DNA, 20 bp, Artificial Sequence
  chemically synthesized
gtaatttcttttactaaaat

SEQ ID NO: 9902 - DNA, 20 bp, Artificial Sequence
  chemically synthesized
ctttattctttatattttct

SEQ ID NO: 9903 - DNA, 20 bp, Artificial Sequence
  chemically synthesized
ttcagaccagagatctattc

SEQ ID NO: 9904 - DNA, 20 bp, Artificial Sequence
  chemically synthesized
acttaaaaagaagaactgtt

SEQ ID NO: 9905 - DNA, 20 bp, Artificial Sequence
  chemically synthesized
cttttcgccttcaatacact

SEQ ID NO: 9906 - DNA, 20 bp, Artificial Sequence
  chemically synthesized
ttcctacttttatactgtct

SEQ ID NO: 9907 - DNA, 20 bp, Artificial Sequence
  chemically synthesized
tacttttatactgtctatat

SEQ ID NO: 9908 - DNA, 20 bp, Artificial Sequence
  chemically synthesized
gacagtataaaagtaggaaa

SEQ ID NO: 9909 - DNA, 20 bp, Artificial Sequence
  chemically synthesized
gaacagttcttctttttaag

SEQ ID NO: 9910 - DNA, 20 bp, Artificial Sequence
  chemically synthesized
agagaatagatctctggtct

SEQ ID NO: 9911 - DNA, 20 bp, Artificial Sequence
  chemically synthesized
tctggtctgaaggtttattt

SEQ ID NO: 9912 - DNA, 20 bp, Artificial Sequence
  chemically synthesized
tttatttacgggcttttctc

SEQ ID NO: 9913 - DNA, 20 bp, Artificial Sequence
  chemically synthesized
gggcttttctcactggatta

SEQ ID NO: 9914 - DNA, 20 bp, Artificial Sequence
  chemically synthesized
gaaattactatccaagaagc

SEQ ID NO: 9915 - DNA, 20 bp, Artificial Sequence
  chemically synthesized
aaatgatttgtacaagatca

SEQ ID NO: 9916 - DNA, 20 bp, Artificial Sequence
  chemically synthesized
aggctaaaaggttaagaaaa

SEQ ID NO: 9917 - DNA, 20 bp, Artificial Sequence
  chemically synthesized
cggaaacaacctgttgtcta

SEQ ID NO: 9918 - DNA, 20 bp, Artificial Sequence
  chemically synthesized
tgggctcacgggtgagctaa

SEQ ID NO: 9919 - DNA, 20 bp, Artificial Sequence
  chemically synthesized
ttctggacccaggatcttag

SEQ ID NO: 9920 - DNA, 20 bp, Artificial Sequence
  chemically synthesized
ctatgccagatacataggtg

SEQ ID NO: 9921 - DNA, 22 bp, Artificial Sequence
  chemically synthesized
cagatagattatatctggagtg

SEQ ID NO: 9922 - DNA, 22 bp, Artificial Sequence
  chemically synthesized
agatagattatatctggagtga

SEQ ID NO: 9923 - DNA, 22 bp, Artificial Sequence
  chemically synthesized
tatctggagtgaagaatcctgc

SEQ ID NO: 9924 - DNA, 22 bp, Artificial Sequence
  chemically synthesized
gagtgaagaatcctgccaccta

SEQ ID NO: 9925 - DNA, 22 bp, Artificial Sequence
  chemically synthesized
ccacctatgtatctggcatagt

SEQ ID NO: 9926 - DNA, 22 bp, Artificial Sequence
  chemically synthesized
tgtatctggcatagtgtgagtc

SEQ ID NO: 9927 - DNA, 22 bp, Artificial Sequence
  chemically synthesized
gcatagtgtgagtcctcataaa

SEQ ID NO: 9928 - DNA, 22 bp, Artificial Sequence
  chemically synthesized
ataaatgcttactggtttgaag

SEQ ID NO: 9929 - DNA, 22 bp, Artificial Sequence
  chemically synthesized
actggtttgaagggcaacaaaa

SEQ ID NO: 9930 - DNA, 22 bp, Artificial Sequence
  chemically synthesized
ctggtttgaagggcaacaaaat

SEQ ID NO: 9931 - DNA, 22 bp, Artificial Sequence
  chemically synthesized
gtttgaagggcaacaaaatagt

SEQ ID NO: 9932 - DNA, 22 bp, Artificial Sequence
  chemically synthesized
gaagggcaacaaaatagtgaac

SEQ ID NO: 9933 - DNA, 22 bp, Artificial Sequence
  chemically synthesized
aagggcaacaaaatagtgaaca

SEQ ID NO: 9934 - DNA, 22 bp, Artificial Sequence
  chemically synthesized
agatcctgggtccagaaaaaga

SEQ ID NO: 9935 - DNA, 22 bp, Artificial Sequence
  chemically synthesized
ggtccagaaaaagatgggaaac

SEQ ID NO: 9936 - DNA, 22 bp, Artificial Sequence
  chemically synthesized
tttagctcacccgtgagcccat

SEQ ID NO: 9937 - DNA, 22 bp, Artificial Sequence
  chemically synthesized
agctcacccgtgagcccatagt

SEQ ID NO: 9938 - DNA, 22 bp, Artificial Sequence
  chemically synthesized
gctcacccgtgagcccatagtt

SEQ ID NO: 9939 - DNA, 22 bp, Artificial Sequence
  chemically synthesized
acccgtgagcccatagttaaaa

SEQ ID NO: 9940 - DNA, 22 bp, Artificial Sequence
  chemically synthesized
aaactctttagacaacaggttg

SEQ ID NO: 9941 - DNA, 22 bp, Artificial Sequence
  chemically synthesized
tttagacaacaggttgtttccg

SEQ ID NO: 9942 - DNA, 22 bp, Artificial Sequence
  chemically synthesized
tagacaacaggttgtttccgtt

SEQ ID NO: 9943 - DNA, 22 bp, Artificial Sequence
  chemically synthesized
agacaacaggttgtttccgttt

SEQ ID NO: 9944 - DNA, 22 bp, Artificial Sequence
  chemically synthesized
gacaacaggttgtttccgttta

SEQ ID NO: 9945 - DNA, 22 bp, Artificial Sequence
  chemically synthesized
tttccgtttacagagaacaata

SEQ ID NO: 9946 - DNA, 22 bp, Artificial Sequence
  chemically synthesized
ccgtttacagagaacaataata

SEQ ID NO: 9947 - DNA, 22 bp, Artificial Sequence
  chemically synthesized
cgtttacagagaacaataatat

SEQ ID NO: 9948 - DNA, 22 bp, Artificial Sequence
  chemically synthesized
acagagaacaataatattgggt

SEQ ID NO: 9949 - DNA, 22 bp, Artificial Sequence
  chemically synthesized
cagagaacaataatattgggtg

SEQ ID NO: 9950 - DNA, 22 bp, Artificial Sequence
  chemically synthesized
ggtggtgagcatctgtgtgggg

SEQ ID NO: 9951 - DNA, 22 bp, Artificial Sequence
  chemically synthesized
tgtgggggttggggtgggatag

SEQ ID NO: 9952 - DNA, 22 bp, Artificial Sequence
  chemically synthesized
gggtgggataggggatacgggg

SEQ ID NO: 9953 - DNA, 22 bp, Artificial Sequence
  chemically synthesized
atgtgaagtccaggatccccct

SEQ ID NO: 9954 - DNA, 22 bp, Artificial Sequence
  chemically synthesized
tacatttaaagttggtttaagt

SEQ ID NO: 9955 - DNA, 22 bp, Artificial Sequence
  chemically synthesized
catttaaagttggtttaagttg

SEQ ID NO: 9956 - DNA, 22 bp, Artificial Sequence
  chemically synthesized
aaagttggtttaagttggcttt

SEQ ID NO: 9957 - DNA, 22 bp, Artificial Sequence
  chemically synthesized
aagttggtttaagttggcttta

SEQ ID NO: 9958 - DNA, 22 bp, Artificial Sequence
  chemically synthesized
gtttaagttggctttaattaat

SEQ ID NO: 9959 - DNA, 22 bp, Artificial Sequence
  chemically synthesized
aagttggctttaattaatagca

SEQ ID NO: 9960 - DNA, 22 bp, Artificial Sequence
  chemically synthesized
agttggctttaattaatagcaa

SEQ ID NO: 9961 - DNA, 22 bp, Artificial Sequence
  chemically synthesized
gctttaattaatagcaactctt

SEQ ID NO: 9962 - DNA, 22 bp, Artificial Sequence
  chemically synthesized
taattaatagcaactcttaaga

SEQ ID NO: 9963 - DNA, 22 bp, Artificial Sequence
  chemically synthesized
aattaatagcaactcttaagat

SEQ ID NO: 9964 - DNA, 22 bp, Artificial Sequence
  chemically synthesized
attaatagcaactcttaagata

SEQ ID NO: 9965 - DNA, 22 bp, Artificial Sequence
  chemically synthesized
atagcaactcttaagataatca

SEQ ID NO: 9966 - DNA, 22 bp, Artificial Sequence
  chemically synthesized
ttaagataatcagaattttctt

SEQ ID NO: 9967 - DNA, 22 bp, Artificial Sequence
  chemically synthesized
aagataatcagaattttcttaa

SEQ ID NO: 9968 - DNA, 22 bp, Artificial Sequence
  chemically synthesized
agataatcagaattttcttaac

SEQ ID NO: 9969 - DNA, 22 bp, Artificial Sequence
  chemically synthesized
tcttaaccttttagccttactg

SEQ ID NO: 9970 - DNA, 22 bp, Artificial Sequence
  chemically synthesized
cttaaccttttagccttactgt

SEQ ID NO: 9971 - DNA, 22 bp, Artificial Sequence
  chemically synthesized
ttaaccttttagccttactgtt

SEQ ID NO: 9972 - DNA, 22 bp, Artificial Sequence
  chemically synthesized
aaccttttagccttactgttga

SEQ ID NO: 9973 - DNA, 22 bp, Artificial Sequence
  chemically synthesized
accttttagccttactgttgaa

SEQ ID NO: 9974 - DNA, 22 bp, Artificial Sequence
  chemically synthesized
ttagccttactgttgaaaagcc

SEQ ID NO: 9975 - DNA, 22 bp, Artificial Sequence
  chemically synthesized
tagccttactgttgaaaagccc

SEQ ID NO: 9976 - DNA, 22 bp, Artificial Sequence
  chemically synthesized
agccttactgttgaaaagccct

SEQ ID NO: 9977 - DNA, 22 bp, Artificial Sequence
  chemically synthesized
gccttactgttgaaaagccctg

SEQ ID NO: 9978 - DNA, 22 bp, Artificial Sequence
  chemically synthesized
actgttgaaaagccctgtgatc

SEQ ID NO: 9979 - DNA, 22 bp, Artificial Sequence
  chemically synthesized
ctgttgaaaagccctgtgatct

SEQ ID NO: 9980 - DNA, 22 bp, Artificial Sequence
  chemically synthesized
ttgaaaagccctgtgatcttgt

SEQ ID NO: 9981 - DNA, 22 bp, Artificial Sequence
  chemically synthesized
aaaagccctgtgatcttgtaca

SEQ ID NO: 9982 - DNA, 22 bp, Artificial Sequence
  chemically synthesized
tgatcttgtacaaatcatttgc

SEQ ID NO: 9983 - DNA, 22 bp, Artificial Sequence
  chemically synthesized
gtacaaatcatttgcttcttgg

SEQ ID NO: 9984 - DNA, 22 bp, Artificial Sequence
  chemically synthesized
tacaaatcatttgcttcttgga

SEQ ID NO: 9985 - DNA, 22 bp, Artificial Sequence
  chemically synthesized
gcttcttggatagtaatttctt

SEQ ID NO: 9986 - DNA, 22 bp, Artificial Sequence
  chemically synthesized
cttcttggatagtaatttcttt

SEQ ID NO: 9987 - DNA, 22 bp, Artificial Sequence
  chemically synthesized
cttggatagtaatttcttttac

SEQ ID NO: 9988 - DNA, 22 bp, Artificial Sequence
  chemically synthesized
ttggatagtaatttcttttact

SEQ ID NO: 9989 - DNA, 22 bp, Artificial Sequence
  chemically synthesized
ggatagtaatttcttttactaa

SEQ ID NO: 9990 - DNA, 22 bp, Artificial Sequence
  chemically synthesized
gatagtaatttcttttactaaa

SEQ ID NO: 9991 - DNA, 22 bp, Artificial Sequence
  chemically synthesized
cttttactaaaatgtgggcttt

SEQ ID NO: 9992 - DNA, 22 bp, Artificial Sequence
  chemically synthesized
ttttactaaaatgtgggctttt

SEQ ID NO: 9993 - DNA, 22 bp, Artificial Sequence
  chemically synthesized
ttactaaaatgtgggcttttga

SEQ ID NO: 9994 - DNA, 22 bp, Artificial Sequence
  chemically synthesized
tactaaaatgtgggcttttgac

SEQ ID NO: 9995 - DNA, 22 bp, Artificial Sequence
  chemically synthesized
actaaaatgtgggcttttgact

SEQ ID NO: 9996 - DNA, 22 bp, Artificial Sequence
  chemically synthesized
ctaaaatgtgggcttttgacta

SEQ ID NO: 9997 - DNA, 22 bp, Artificial Sequence
  chemically synthesized
aaatgtgggcttttgactagat

SEQ ID NO: 9998 - DNA, 22 bp, Artificial Sequence
  chemically synthesized
ttgactagatgaatgtaaatgt

SEQ ID NO: 9999 - DNA, 22 bp, Artificial Sequence
  chemically synthesized
tgactagatgaatgtaaatgtt

SEQ ID NO: 10000 - DNA, 22 bp, Artificial Sequence
  chemically synthesized
gactagatgaatgtaaatgttc

SEQ ID NO: 10001 - DNA, 22 bp, Artificial Sequence
  chemically synthesized
actagatgaatgtaaatgttct

SEQ ID NO: 10002 - DNA, 22 bp, Artificial Sequence
  chemically synthesized
gatgaatgtaaatgttcttcta

SEQ ID NO: 10003 - DNA, 22 bp, Artificial Sequence
  chemically synthesized
ttctagctctgatatcctttat

SEQ ID NO: 10004 - DNA, 22 bp, Artificial Sequence
  chemically synthesized
ctagctctgatatcctttattc

SEQ ID NO: 10005 - DNA, 22 bp, Artificial Sequence
  chemically synthesized
tagctctgatatcctttattct

SEQ ID NO: 10006 - DNA, 22 bp, Artificial Sequence
  chemically synthesized
gctctgatatcctttattcttt

SEQ ID NO: 10007 - DNA, 22 bp, Artificial Sequence
  chemically synthesized
tgatatcctttattctttatat

SEQ ID NO: 10008 - DNA, 22 bp, Artificial Sequence
  chemically synthesized
atatcctttattctttatattt

SEQ ID NO: 10009 - DNA, 22 bp, Artificial Sequence
  chemically synthesized
tattctttatattttctaacag

SEQ ID NO: 10010 - DNA, 22 bp, Artificial Sequence
  chemically synthesized
attctttatattttctaacaga

SEQ ID NO: 10011 - DNA, 22 bp, Artificial Sequence
  chemically synthesized
ttctttatattttctaacagat

SEQ ID NO: 10012 - DNA, 22 bp, Artificial Sequence
  chemically synthesized
tttatattttctaacagattct

SEQ ID NO: 10013 - DNA, 22 bp, Artificial Sequence
  chemically synthesized
tatattttctaacagattctgt

SEQ ID NO: 10014 - DNA, 22 bp, Artificial Sequence
  chemically synthesized
atattttctaacagattctgtg

SEQ ID NO: 10015 - DNA, 22 bp, Artificial Sequence
  chemically synthesized
tattttctaacagattctgtgt

SEQ ID NO: 10016 - DNA, 22 bp, Artificial Sequence
  chemically synthesized
tctaacagattctgtgtagtgg

SEQ ID NO: 10017 - DNA, 22 bp, Artificial Sequence
  chemically synthesized
ctaacagattctgtgtagtggg

SEQ ID NO: 10018 - DNA, 22 bp, Artificial Sequence
  chemically synthesized
taacagattctgtgtagtggga

SEQ ID NO: 10019 - DNA, 22 bp, Artificial Sequence
  chemically synthesized
acagattctgtgtagtgggatg

SEQ ID NO: 10020 - DNA, 22 bp, Artificial Sequence
  chemically synthesized
tgtgtagtgggatgagcagaga

SEQ ID NO: 10021 - DNA, 22 bp, Artificial Sequence
  chemically synthesized
tgtagtgggatgagcagagaac

SEQ ID NO: 10022 - DNA, 22 bp, Artificial Sequence
  chemically synthesized
cagaccagagatctattctcta

SEQ ID NO: 10023 - DNA, 22 bp, Artificial Sequence
  chemically synthesized
agaccagagatctattctctag

SEQ ID NO: 10024 - DNA, 22 bp, Artificial Sequence
  chemically synthesized
ttctctagcttattttaagctc

SEQ ID NO: 10025 - DNA, 22 bp, Artificial Sequence
  chemically synthesized
tctagcttattttaagctcaac

SEQ ID NO: 10026 - DNA, 22 bp, Artificial Sequence
  chemically synthesized
tagcttattttaagctcaactt

SEQ ID NO: 10027 - DNA, 22 bp, Artificial Sequence
  chemically synthesized
gcttattttaagctcaacttaa

SEQ ID NO: 10028 - DNA, 22 bp, Artificial Sequence
  chemically synthesized
attttaagctcaacttaaaaag

SEQ ID NO: 10029 - DNA, 22 bp, Artificial Sequence
  chemically synthesized
ttttaagctcaacttaaaaaga

SEQ ID NO: 10030 - DNA, 22 bp, Artificial Sequence
  chemically synthesized
taagctcaacttaaaaagaaga

SEQ ID NO: 10031 - DNA, 22 bp, Artificial Sequence
  chemically synthesized
aagctcaacttaaaaagaagaa

SEQ ID NO: 10032 - DNA, 22 bp, Artificial Sequence
  chemically synthesized
agctcaacttaaaaagaagaac

SEQ ID NO: 10033 - DNA, 22 bp, Artificial Sequence
  chemically synthesized
aacttaaaaagaagaactgttc

SEQ ID NO: 10034 - DNA, 22 bp, Artificial Sequence
  chemically synthesized
aaaaagaagaactgttctctga

SEQ ID NO: 10035 - DNA, 22 bp, Artificial Sequence
  chemically synthesized
aaaagaagaactgttctctgat

SEQ ID NO: 10036 - DNA, 22 bp, Artificial Sequence
  chemically synthesized
ttctctgattcttttcgccttc

SEQ ID NO: 10037 - DNA, 22 bp, Artificial Sequence
  chemically synthesized
tctgattcttttcgccttcaat

SEQ ID NO: 10038 - DNA, 22 bp, Artificial Sequence
  chemically synthesized
tgattcttttcgccttcaatac

SEQ ID NO: 10039 - DNA, 22 bp, Artificial Sequence
  chemically synthesized
attcttttcgccttcaatacac

SEQ ID NO: 10040 - DNA, 22 bp, Artificial Sequence
  chemically synthesized
ttttcgccttcaatacacttaa

SEQ ID NO: 10041 - DNA, 22 bp, Artificial Sequence
  chemically synthesized
ttcgccttcaatacacttaatg

SEQ ID NO: 10042 - DNA, 22 bp, Artificial Sequence
  chemically synthesized
tcgccttcaatacacttaatga

SEQ ID NO: 10043 - DNA, 22 bp, Artificial Sequence
  chemically synthesized
cgccttcaatacacttaatgat

SEQ ID NO: 10044 - DNA, 22 bp, Artificial Sequence
  chemically synthesized
gccttcaatacacttaatgatt

SEQ ID NO: 10045 - DNA, 22 bp, Artificial Sequence
  chemically synthesized
caatacacttaatgatttaact

SEQ ID NO: 10046 - DNA, 22 bp, Artificial Sequence
  chemically synthesized
aatacacttaatgatttaactc

SEQ ID NO: 10047 - DNA, 22 bp, Artificial Sequence
  chemically synthesized
aatgatttaactccaccctcct

SEQ ID NO: 10048 - DNA, 22 bp, Artificial Sequence
  chemically synthesized
atgatttaactccaccctcctt

SEQ ID NO: 10049 - DNA, 22 bp, Artificial Sequence
  chemically synthesized
aactccaccctccttcaaaaga

SEQ ID NO: 10050 - DNA, 22 bp, Artificial Sequence
  chemically synthesized
actccaccctccttcaaaagaa

SEQ ID NO: 10051 - DNA, 22 bp, Artificial Sequence
  chemically synthesized
caccctccttcaaaagaaacag

SEQ ID NO: 10052 - DNA, 22 bp, Artificial Sequence
  chemically synthesized
cttcaaaagaaacagcatttcc

SEQ ID NO: 10053 - DNA, 22 bp, Artificial Sequence
  chemically synthesized
caaaagaaacagcatttcctac

SEQ ID NO: 10054 - DNA, 22 bp, Artificial Sequence
  chemically synthesized
aaaagaaacagcatttcctact

SEQ ID NO: 10055 - DNA, 22 bp, Artificial Sequence
  chemically synthesized
cctacttttatactgtctatat

SEQ ID NO: 10056 - DNA, 22 bp, Artificial Sequence
  chemically synthesized
ctacttttatactgtctatatg

SEQ ID NO: 10057 - DNA, 22 bp, Artificial Sequence
  chemically synthesized
cttttatactgtctatatgatt

SEQ ID NO: 10058 - DNA, 22 bp, Artificial Sequence
  chemically synthesized
ttatactgtctatatgattgat

SEQ ID NO: 10059 - DNA, 22 bp, Artificial Sequence
  chemically synthesized
tatactgtctatatgattgatt

SEQ ID NO: 10060 - DNA, 22 bp, Artificial Sequence
  chemically synthesized
atactgtctatatgattgattt

SEQ ID NO: 10061 - DNA, 22 bp, Artificial Sequence
  chemically synthesized
tactgtctatatgattgatttg

SEQ ID NO: 10062 - DNA, 22 bp, Artificial Sequence
  chemically synthesized
tctatatgattgatttgcacag

SEQ ID NO: 10063 - DNA, 22 bp, Artificial Sequence
  chemically synthesized
tatgattgatttgcacagctca

SEQ ID NO: 10064 - DNA, 22 bp, Artificial Sequence
  chemically synthesized
atttgcacagctcatctggcca

SEQ ID NO: 10065 - DNA, 22 bp, Artificial Sequence
  chemically synthesized
gcacagctcatctggccagaag

SEQ ID NO: 10066 - DNA, 22 bp, Artificial Sequence
  chemically synthesized
cacagctcatctggccagaaga

SEQ ID NO: 10067 - DNA, 22 bp, Artificial Sequence
  chemically synthesized
atctggccagaagagctgagac

SEQ ID NO: 10068 - DNA, 22 bp, Artificial Sequence
  chemically synthesized
gccagaagagctgagacatccg

SEQ ID NO: 10069 - DNA, 22 bp, Artificial Sequence
  chemically synthesized
agacatccgttcccctacaaga

SEQ ID NO: 10070 - DNA, 22 bp, Artificial Sequence
  chemically synthesized
cttgtaggggaacggatgtctc

SEQ ID NO: 10071 - DNA, 22 bp, Artificial Sequence
  chemically synthesized
ttgtaggggaacggatgtctca

SEQ ID NO: 10072 - DNA, 22 bp, Artificial Sequence
  chemically synthesized
gtaggggaacggatgtctcagc

SEQ ID NO: 10073 - DNA, 22 bp, Artificial Sequence
  chemically synthesized
taggggaacggatgtctcagct

SEQ ID NO: 10074 - DNA, 22 bp, Artificial Sequence
  chemically synthesized
agctcttctggccagatgagct

SEQ ID NO: 10075 - DNA, 22 bp, Artificial Sequence
  chemically synthesized
ttctggccagatgagctgtgca

SEQ ID NO: 10076 - DNA, 22 bp, Artificial Sequence
  chemically synthesized
ctggccagatgagctgtgcaaa

SEQ ID NO: 10077 - DNA, 22 bp, Artificial Sequence
  chemically synthesized
tggccagatgagctgtgcaaat

SEQ ID NO: 10078 - DNA, 22 bp, Artificial Sequence
  chemically synthesized
gccagatgagctgtgcaaatca

SEQ ID NO: 10079 - DNA, 22 bp, Artificial Sequence
  chemically synthesized
tgcaaatcaatcatatagacag

SEQ ID NO: 10080 - DNA, 22 bp, Artificial Sequence
  chemically synthesized
tttcttttgaaggagggtggag

SEQ ID NO: 10081 - DNA, 22 bp, Artificial Sequence
  chemically synthesized
cttttgaaggagggtggagtta

SEQ ID NO: 10082 - DNA, 22 bp, Artificial Sequence
  chemically synthesized
ttttgaaggagggtggagttaa

SEQ ID NO: 10083 - DNA, 22 bp, Artificial Sequence
  chemically synthesized
ttgaaggagggtggagttaaat

SEQ ID NO: 10084 - DNA, 22 bp, Artificial Sequence
  chemically synthesized
tgaaggagggtggagttaaatc

SEQ ID NO: 10085 - DNA, 22 bp, Artificial Sequence
  chemically synthesized
gaaggagggtggagttaaatca

SEQ ID NO: 10086 - DNA, 22 bp, Artificial Sequence
  chemically synthesized
aaggagggtggagttaaatcat

SEQ ID NO: 10087 - DNA, 22 bp, Artificial Sequence
  chemically synthesized
aatcattaagtgtattgaaggc

SEQ ID NO: 10088 - DNA, 22 bp, Artificial Sequence
  chemically synthesized
agtgtattgaaggcgaaaagaa

SEQ ID NO: 10089 - DNA, 22 bp, Artificial Sequence
  chemically synthesized
aaggcgaaaagaatcagagaac

SEQ ID NO: 10090 - DNA, 22 bp, Artificial Sequence
  chemically synthesized
ttctttttaagttgagcttaaa

SEQ ID NO: 10091 - DNA, 22 bp, Artificial Sequence
  chemically synthesized
ctttttaagttgagcttaaaat

SEQ ID NO: 10092 - DNA, 22 bp, Artificial Sequence
  chemically synthesized
tttttaagttgagcttaaaata

SEQ ID NO: 10093 - DNA, 22 bp, Artificial Sequence
  chemically synthesized
tttaagttgagcttaaaataag

SEQ ID NO: 10094 - DNA, 22 bp, Artificial Sequence
  chemically synthesized
ttaagttgagcttaaaataagc

SEQ ID NO: 10095 - DNA, 22 bp, Artificial Sequence
  chemically synthesized
taagttgagcttaaaataagct

SEQ ID NO: 10096 - DNA, 22 bp, Artificial Sequence
  chemically synthesized
aagttgagcttaaaataagcta

SEQ ID NO: 10097 - DNA, 22 bp, Artificial Sequence
  chemically synthesized
agttgagcttaaaataagctag

SEQ ID NO: 10098 - DNA, 22 bp, Artificial Sequence
  chemically synthesized
agcttaaaataagctagagaat

SEQ ID NO: 10099 - DNA, 22 bp, Artificial Sequence
  chemically synthesized
aaaataagctagagaatagatc

SEQ ID NO: 10100 - DNA, 22 bp, Artificial Sequence
  chemically synthesized
aaataagctagagaatagatct

SEQ ID NO: 10101 - DNA, 22 bp, Artificial Sequence
  chemically synthesized
gagaatagatctctggtctgaa

SEQ ID NO: 10102 - DNA, 22 bp, Artificial Sequence
  chemically synthesized
tggtctgaaggtttatttacgg

SEQ ID NO: 10103 - DNA, 22 bp, Artificial Sequence
  chemically synthesized
gtctgaaggtttatttacgggc

SEQ ID NO: 10104 - DNA, 22 bp, Artificial Sequence
  chemically synthesized
aaggtttatttacgggcttttc

SEQ ID NO: 10105 - DNA, 22 bp, Artificial Sequence
  chemically synthesized
atttacgggcttttctcactgg

SEQ ID NO: 10106 - DNA, 22 bp, Artificial Sequence
  chemically synthesized
tttacgggcttttctcactgga

SEQ ID NO: 10107 - DNA, 22 bp, Artificial Sequence
  chemically synthesized
acgggcttttctcactggatta

SEQ ID NO: 10108 - DNA, 22 bp, Artificial Sequence
  chemically synthesized
cgggcttttctcactggattat

SEQ ID NO: 10109 - DNA, 22 bp, Artificial Sequence
  chemically synthesized
ttctcactggattattttgttt

SEQ ID NO: 10110 - DNA, 22 bp, Artificial Sequence
  chemically synthesized
tctcactggattattttgtttt

SEQ ID NO: 10111 - DNA, 22 bp, Artificial Sequence
  chemically synthesized
ctcactggattattttgttttt

SEQ ID NO: 10112 - DNA, 22 bp, Artificial Sequence
  chemically synthesized
tcactggattattttgtttttg

SEQ ID NO: 10113 - DNA, 22 bp, Artificial Sequence
  chemically synthesized
actggattattttgtttttgtt

SEQ ID NO: 10114 - DNA, 22 bp, Artificial Sequence
  chemically synthesized
gattattttgtttttgttctct

SEQ ID NO: 10115 - DNA, 22 bp, Artificial Sequence
  chemically synthesized
ttttgtttttgttctctgctca

SEQ ID NO: 10116 - DNA, 22 bp, Artificial Sequence
  chemically synthesized
tgtttttgttctctgctcatcc

SEQ ID NO: 10117 - DNA, 22 bp, Artificial Sequence
  chemically synthesized
gtttttgttctctgctcatccc

SEQ ID NO: 10118 - DNA, 22 bp, Artificial Sequence
  chemically synthesized
tttttgttctctgctcatccca

SEQ ID NO: 10119 - DNA, 22 bp, Artificial Sequence
  chemically synthesized
ttgttctctgctcatcccacta

SEQ ID NO: 10120 - DNA, 22 bp, Artificial Sequence
  chemically synthesized
tgttctctgctcatcccactac

SEQ ID NO: 10121 - DNA, 22 bp, Artificial Sequence
  chemically synthesized
gttctctgctcatcccactaca

SEQ ID NO: 10122 - DNA, 22 bp, Artificial Sequence
  chemically synthesized
ttctctgctcatcccactacac

SEQ ID NO: 10123 - DNA, 22 bp, Artificial Sequence
  chemically synthesized
tctgctcatcccactacacaga

SEQ ID NO: 10124 - DNA, 22 bp, Artificial Sequence
  chemically synthesized
tgctcatcccactacacagaat

SEQ ID NO: 10125 - DNA, 22 bp, Artificial Sequence
  chemically synthesized
ctcatcccactacacagaatct

SEQ ID NO: 10126 - DNA, 22 bp, Artificial Sequence
  chemically synthesized
atcccactacacagaatctgtt

SEQ ID NO: 10127 - DNA, 22 bp, Artificial Sequence
  chemically synthesized
cacagaatctgttagaaaatat

SEQ ID NO: 10128 - DNA, 22 bp, Artificial Sequence
  chemically synthesized
ttagaaaatataaagaataaag

SEQ ID NO: 10129 - DNA, 22 bp, Artificial Sequence
  chemically synthesized
gaaaatataaagaataaaggat

SEQ ID NO: 10130 - DNA, 22 bp, Artificial Sequence
  chemically synthesized
gaagaacatttacattcatcta

SEQ ID NO: 10131 - DNA, 22 bp, Artificial Sequence
  chemically synthesized
acattcatctagtcaaaagccc

SEQ ID NO: 10132 - DNA, 22 bp, Artificial Sequence
  chemically synthesized
cattcatctagtcaaaagccca

SEQ ID NO: 10133 - DNA, 22 bp, Artificial Sequence
  chemically synthesized
atctagtcaaaagcccacattt

SEQ ID NO: 10134 - DNA, 22 bp, Artificial Sequence
  chemically synthesized
gtcaaaagcccacattttagta

SEQ ID NO: 10135 - DNA, 22 bp, Artificial Sequence
  chemically synthesized
tagtaaaagaaattactatcca

SEQ ID NO: 10136 - DNA, 22 bp, Artificial Sequence
  chemically synthesized
agtaaaagaaattactatccaa

SEQ ID NO: 10137 - DNA, 22 bp, Artificial Sequence
  chemically synthesized
gtaaaagaaattactatccaag

SEQ ID NO: 10138 - DNA, 22 bp, Artificial Sequence
  chemically synthesized
ctatccaagaagcaaatgattt

SEQ ID NO: 10139 - DNA, 22 bp, Artificial Sequence
  chemically synthesized
tccaagaagcaaatgatttgta

SEQ ID NO: 10140 - DNA, 22 bp, Artificial Sequence
  chemically synthesized
gtacaagatcacagggcttttc

SEQ ID NO: 10141 - DNA, 22 bp, Artificial Sequence
  chemically synthesized
tacaagatcacagggcttttca

SEQ ID NO: 10142 - DNA, 22 bp, Artificial Sequence
  chemically synthesized
ttcaacagtaaggctaaaaggt

SEQ ID NO: 10143 - DNA, 22 bp, Artificial Sequence
  chemically synthesized
tcaacagtaaggctaaaaggtt

SEQ ID NO: 10144 - DNA, 22 bp, Artificial Sequence
  chemically synthesized
caacagtaaggctaaaaggtta

SEQ ID NO: 10145 - DNA, 22 bp, Artificial Sequence
  chemically synthesized
aacagtaaggctaaaaggttaa

SEQ ID NO: 10146 - DNA, 22 bp, Artificial Sequence
  chemically synthesized
aaaggttaagaaaattctgatt

SEQ ID NO: 10147 - DNA, 22 bp, Artificial Sequence
  chemically synthesized
agaaaattctgattatcttaag

SEQ ID NO: 10148 - DNA, 22 bp, Artificial Sequence
  chemically synthesized
tgattatcttaagagttgctat

SEQ ID NO: 10149 - DNA, 22 bp, Artificial Sequence
  chemically synthesized
attatcttaagagttgctatta

SEQ ID NO: 10150 - DNA, 22 bp, Artificial Sequence
  chemically synthesized
tcttaagagttgctattaatta

SEQ ID NO: 10151 - DNA, 22 bp, Artificial Sequence
  chemically synthesized
aagagttgctattaattaaagc

SEQ ID NO: 10152 - DNA, 22 bp, Artificial Sequence
  chemically synthesized
agagttgctattaattaaagcc

SEQ ID NO: 10153 - DNA, 22 bp, Artificial Sequence
  chemically synthesized
ctattaattaaagccaacttaa

SEQ ID NO: 10154 - DNA, 22 bp, Artificial Sequence
  chemically synthesized
ttaattaaagccaacttaaacc

SEQ ID NO: 10155 - DNA, 22 bp, Artificial Sequence
  chemically synthesized
attaaagccaacttaaaccaac

SEQ ID NO: 10156 - DNA, 22 bp, Artificial Sequence
  chemically synthesized
aagccaacttaaaccaacttta

SEQ ID NO: 10157 - DNA, 22 bp, Artificial Sequence
  chemically synthesized
aaaccaactttaaatgtagagg

SEQ ID NO: 10158 - DNA, 22 bp, Artificial Sequence
  chemically synthesized
aaccaactttaaatgtagaggg

SEQ ID NO: 10159 - DNA, 22 bp, Artificial Sequence
  chemically synthesized
taaatgtagagggggatcctgg

SEQ ID NO: 10160 - DNA, 22 bp, Artificial Sequence
  chemically synthesized
aaatgtagagggggatcctgga

SEQ ID NO: 10161 - DNA, 22 bp, Artificial Sequence
  chemically synthesized
aatgtagagggggatcctggac

SEQ ID NO: 10162 - DNA, 22 bp, Artificial Sequence
  chemically synthesized
gacttcacattaaccctgtgtc

SEQ ID NO: 10163 - DNA, 22 bp, Artificial Sequence
  chemically synthesized
cacattaaccctgtgtcccctt

SEQ ID NO: 10164 - DNA, 22 bp, Artificial Sequence
  chemically synthesized
acattaaccctgtgtccccttt

SEQ ID NO: 10165 - DNA, 22 bp, Artificial Sequence
  chemically synthesized
accctgtgtcccctttttctcc

SEQ ID NO: 10166 - DNA, 22 bp, Artificial Sequence
  chemically synthesized
tgtcccctttttctccactctc

SEQ ID NO: 10167 - DNA, 22 bp, Artificial Sequence
  chemically synthesized
tttctccactctccccgtatcc

SEQ ID NO: 10168 - DNA, 22 bp, Artificial Sequence
  chemically synthesized
ttctccactctccccgtatccc

SEQ ID NO: 10169 - DNA, 22 bp, Artificial Sequence
  chemically synthesized
tctccactctccccgtatcccc

SEQ ID NO: 10170 - DNA, 22 bp, Artificial Sequence
  chemically synthesized
ctccactctccccgtatcccct

SEQ ID NO: 10171 - DNA, 22 bp, Artificial Sequence
  chemically synthesized
tccactctccccgtatccccta

SEQ ID NO: 10172 - DNA, 22 bp, Artificial Sequence
  chemically synthesized
cactctccccgtatcccctatc

SEQ ID NO: 10173 - DNA, 22 bp, Artificial Sequence
  chemically synthesized
tccccgtatcccctatcccacc

SEQ ID NO: 10174 - DNA, 22 bp, Artificial Sequence
  chemically synthesized
cccgtatcccctatcccacccc

SEQ ID NO: 10175 - DNA, 22 bp, Artificial Sequence
  chemically synthesized
tcccaccccaacccccacacag

SEQ ID NO: 10176 - DNA, 22 bp, Artificial Sequence
  chemically synthesized
accacccaatattattgttctc

SEQ ID NO: 10177 - DNA, 22 bp, Artificial Sequence
  chemically synthesized
ttgttctctgtaaacggaaaca

SEQ ID NO: 10178 - DNA, 22 bp, Artificial Sequence
  chemically synthesized
ttctctgtaaacggaaacaacc

SEQ ID NO: 10179 - DNA, 22 bp, Artificial Sequence
  chemically synthesized
tctgtaaacggaaacaacctgt

SEQ ID NO: 10180 - DNA, 22 bp, Artificial Sequence
  chemically synthesized
tgtaaacggaaacaacctgttg

SEQ ID NO: 10181 - DNA, 22 bp, Artificial Sequence
  chemically synthesized
taaacggaaacaacctgttgtc

SEQ ID NO: 10182 - DNA, 22 bp, Artificial Sequence
  chemically synthesized
ttgtctaaagagttttaactat

SEQ ID NO: 10183 - DNA, 22 bp, Artificial Sequence
  chemically synthesized
tctaaagagttttaactatggg

SEQ ID NO: 10184 - DNA, 22 bp, Artificial Sequence
  chemically synthesized
aagagttttaactatgggctca

SEQ ID NO: 10185 - DNA, 22 bp, Artificial Sequence
  chemically synthesized
taactatgggctcacgggtgag

SEQ ID NO: 10186 - DNA, 22 bp, Artificial Sequence
  chemically synthesized
aactatgggctcacgggtgagc

SEQ ID NO: 10187 - DNA, 22 bp, Artificial Sequence
  chemically synthesized
actatgggctcacgggtgagct

SEQ ID NO: 10188 - DNA, 22 bp, Artificial Sequence
  chemically synthesized
tgggctcacgggtgagctaaac

SEQ ID NO: 10189 - DNA, 22 bp, Artificial Sequence
  chemically synthesized
acgggtgagctaaacaggtttc

SEQ ID NO: 10190 - DNA, 22 bp, Artificial Sequence
  chemically synthesized
aacaggtttcccatctttttct

SEQ ID NO: 10191 - DNA, 22 bp, Artificial Sequence
  chemically synthesized
cccatctttttctggacccagg

SEQ ID NO: 10192 - DNA, 22 bp, Artificial Sequence
  chemically synthesized
ccatctttttctggacccagga

SEQ ID NO: 10193 - DNA, 22 bp, Artificial Sequence
  chemically synthesized
tttctggacccaggatcttagt

SEQ ID NO: 10194 - DNA, 22 bp, Artificial Sequence
  chemically synthesized
ttctggacccaggatcttagtg

SEQ ID NO: 10195 - DNA, 22 bp, Artificial Sequence
  chemically synthesized
tctggacccaggatcttagtgg

SEQ ID NO: 10196 - DNA, 22 bp, Artificial Sequence
  chemically synthesized
ctggacccaggatcttagtggg

SEQ ID NO: 10197 - DNA, 22 bp, Artificial Sequence
  chemically synthesized
tggacccaggatcttagtgggg

SEQ ID NO: 10198 - DNA, 22 bp, Artificial Sequence
  chemically synthesized
gacccaggatcttagtggggat

SEQ ID NO: 10199 - DNA, 22 bp, Artificial Sequence
  chemically synthesized
agtggggattttcactctgttc

SEQ ID NO: 10200 - DNA, 22 bp, Artificial Sequence
  chemically synthesized
gtggggattttcactctgttca

SEQ ID NO: 10201 - DNA, 22 bp, Artificial Sequence
  chemically synthesized
tcactctgttcactattttgtt

SEQ ID NO: 10202 - DNA, 22 bp, Artificial Sequence
  chemically synthesized
cactctgttcactattttgttg

SEQ ID NO: 10203 - DNA, 22 bp, Artificial Sequence
  chemically synthesized
actctgttcactattttgttgc

SEQ ID NO: 10204 - DNA, 22 bp, Artificial Sequence
  chemically synthesized
tgttcactattttgttgccctt

SEQ ID NO: 10205 - DNA, 22 bp, Artificial Sequence
  chemically synthesized
ttcactattttgttgcccttca

SEQ ID NO: 10206 - DNA, 22 bp, Artificial Sequence
  chemically synthesized
actattttgttgcccttcaaac

SEQ ID NO: 10207 - DNA, 22 bp, Artificial Sequence
  chemically synthesized
ttttgttgcccttcaaaccagt

SEQ ID NO: 10208 - DNA, 22 bp, Artificial Sequence
  chemically synthesized
tgttgcccttcaaaccagtaag

SEQ ID NO: 10209 - DNA, 22 bp, Artificial Sequence
  chemically synthesized
gttgcccttcaaaccagtaagc

SEQ ID NO: 10210 - DNA, 22 bp, Artificial Sequence
  chemically synthesized
ttgcccttcaaaccagtaagca

SEQ ID NO: 10211 - DNA, 22 bp, Artificial Sequence
  chemically synthesized
cccttcaaaccagtaagcattt

SEQ ID NO: 10212 - DNA, 22 bp, Artificial Sequence
  chemically synthesized
caaaccagtaagcatttatgag

SEQ ID NO: 10213 - DNA, 22 bp, Artificial Sequence
  chemically synthesized
aaaccagtaagcatttatgagg

SEQ ID NO: 10214 - DNA, 22 bp, Artificial Sequence
  chemically synthesized
atgaggactcacactatgccag

SEQ ID NO: 10215 - DNA, 22 bp, Artificial Sequence
  chemically synthesized
tgaggactcacactatgccaga

SEQ ID NO: 10216 - DNA, 22 bp, Artificial Sequence
  chemically synthesized
acactatgccagatacataggt

SEQ ID NO: 10217 - DNA, 22 bp, Artificial Sequence
  chemically synthesized
tgccagatacataggtggcagg

SEQ ID NO: 10218 - DNA, 22 bp, Artificial Sequence
  chemically synthesized
ttcactccagatataatctatc

SEQ ID NO: 10219 - DNA, 22 bp, Artificial Sequence
  chemically synthesized
cactccagatataatctatctg

SEQ ID NO: 10220 - DNA, 22 bp, Artificial Sequence
  chemically synthesized
actccagatataatctatctga

SEQ ID NO: 10221 - DNA, 20 bp, Artificial Sequence
  chemically synthesized
actttcacaatctgctagca

SEQ ID NO: 10222 - DNA, 20 bp, Artificial Sequence
  chemically synthesized
ctttcacaatctgctagcaa

SEQ ID NO: 10223 - DNA, 20 bp, Artificial Sequence
  chemically synthesized
atctgctagcaaaggttatg

SEQ ID NO: 10224 - DNA, 20 bp, Artificial Sequence
  chemically synthesized
gcagcgcgtgaacatgatca

SEQ ID NO: 10225 - DNA, 20 bp, Artificial Sequence
  chemically synthesized
gcgcgtgaacatgatcatgg

SEQ ID NO: 10226 - DNA, 20 bp, Artificial Sequence
  chemically synthesized
catgatcatggcagaatcac

SEQ ID NO: 10227 - DNA, 20 bp, Artificial Sequence
  chemically synthesized
atgatcatggcagaatcacc

SEQ ID NO: 10228 - DNA, 20 bp, Artificial Sequence
  chemically synthesized
cctcatcaccatctgccttt

SEQ ID NO: 10229 - DNA, 20 bp, Artificial Sequence
  chemically synthesized
ctcatcaccatctgcctttt

SEQ ID NO: 10230 - DNA, 20 bp, Artificial Sequence
  chemically synthesized
tgccttttaggatatctact

SEQ ID NO: 10231 - DNA, 20 bp, Artificial Sequence
  chemically synthesized
tctactcagtgctgaatgta

SEQ ID NO: 10232 - DNA, 20 bp, Artificial Sequence
  chemically synthesized
ctactcagtgctgaatgtac

SEQ ID NO: 10233 - DNA, 20 bp, Artificial Sequence
  chemically synthesized
ttccttttttaaaatacatt

SEQ ID NO: 10234 - DNA, 20 bp, Artificial Sequence
  chemically synthesized
cattgagtatgcttgccttt

SEQ ID NO: 10235 - DNA, 20 bp, Artificial Sequence
  chemically synthesized
gtatgcttgccttttagata

SEQ ID NO: 10236 - DNA, 20 bp, Artificial Sequence
  chemically synthesized
attttgattacatgatttga

SEQ ID NO: 10237 - DNA, 20 bp, Artificial Sequence
  chemically synthesized
atgatttgacagcaatattg

SEQ ID NO: 10238 - DNA, 20 bp, Artificial Sequence
  chemically synthesized
gatttgacagcaatattgaa

SEQ ID NO: 10239 - DNA, 20 bp, Artificial Sequence
  chemically synthesized
agcaatattgaagagtctaa

SEQ ID NO: 10240 - DNA, 20 bp, Artificial Sequence
  chemically synthesized
atattgaagagtctaacagc

SEQ ID NO: 10241 - DNA, 20 bp, Artificial Sequence
  chemically synthesized
agagtctaacagccagcacg

SEQ ID NO: 10242 - DNA, 20 bp, Artificial Sequence
  chemically synthesized
gagtctaacagccagcacgc

SEQ ID NO: 10243 - DNA, 20 bp, Artificial Sequence
  chemically synthesized
ctaacagccagcacgcaggt

SEQ ID NO: 10244 - DNA, 20 bp, Artificial Sequence
  chemically synthesized
cagccagcacgcaggttggt

SEQ ID NO: 10245 - DNA, 20 bp, Artificial Sequence
  chemically synthesized
gcacgcaggttggtaagtac

SEQ ID NO: 10246 - DNA, 20 bp, Artificial Sequence
  chemically synthesized
ggtaagtactggttctttgt

SEQ ID NO: 10247 - DNA, 20 bp, Artificial Sequence
  chemically synthesized
agtactggttctttgttagc

SEQ ID NO: 10248 - DNA, 20 bp, Artificial Sequence
  chemically synthesized
gtactggttctttgttagct

SEQ ID NO: 10249 - DNA, 20 bp, Artificial Sequence
  chemically synthesized
tcttcatttttaaaactaaa

SEQ ID NO: 10250 - DNA, 20 bp, Artificial Sequence
  chemically synthesized
tatgtttaataaacactgtt

SEQ ID NO: 10251 - DNA, 20 bp, Artificial Sequence
  chemically synthesized
acactgttcagttcatgatt

SEQ ID NO: 10252 - DNA, 20 bp, Artificial Sequence
  chemically synthesized
tttggtcatgtaattcctgt

SEQ ID NO: 10253 - DNA, 20 bp, Artificial Sequence
  chemically synthesized
ttagaaaacattcatctcct

SEQ ID NO: 10254 - DNA, 20 bp, Artificial Sequence
  chemically synthesized
ccttggtttaaaaaaattaa

SEQ ID NO: 10255 - DNA, 20 bp, Artificial Sequence
  chemically synthesized
tggtttaaaaaaattaaaag

SEQ ID NO: 10256 - DNA, 20 bp, Artificial Sequence
  chemically synthesized
ggtttaaaaaaattaaaagt

SEQ ID NO: 10257 - DNA, 20 bp, Artificial Sequence
  chemically synthesized
aaattaaaagtgggaaaaca

SEQ ID NO: 10258 - DNA, 20 bp, Artificial Sequence
  chemically synthesized
aaagtgggaaaacaaagaaa

SEQ ID NO: 10259 - DNA, 20 bp, Artificial Sequence
  chemically synthesized
gtgggaaaacaaagaaatag

SEQ ID NO: 10260 - DNA, 20 bp, Artificial Sequence
  chemically synthesized
aacaaagaaatagcagaata

SEQ ID NO: 10261 - DNA, 20 bp, Artificial Sequence
  chemically synthesized
ataaccacattatttttgtt

SEQ ID NO: 10262 - DNA, 20 bp, Artificial Sequence
  chemically synthesized
ttaccactttgaaatcaaaa

SEQ ID NO: 10263 - DNA, 20 bp, Artificial Sequence
  chemically synthesized
taccactttgaaatcaaaat

SEQ ID NO: 10264 - DNA, 20 bp, Artificial Sequence
  chemically synthesized
gaaatcaaaatgggaaacaa

SEQ ID NO: 10265 - DNA, 20 bp, Artificial Sequence
  chemically synthesized
ggaaacaaaagcacaaacaa

SEQ ID NO: 10266 - DNA, 20 bp, Artificial Sequence
  chemically synthesized
aatggccttatttacacaaa

SEQ ID NO: 10267 - DNA, 20 bp, Artificial Sequence
  chemically synthesized
tacacaaaaagtctgatttt

SEQ ID NO: 10268 - DNA, 20 bp, Artificial Sequence
  chemically synthesized
tttaagatatatgacatttc

SEQ ID NO: 10269 - DNA, 20 bp, Artificial Sequence
  chemically synthesized
ttaagatatatgacatttca

SEQ ID NO: 10270 - DNA, 20 bp, Artificial Sequence
  chemically synthesized
tatatgacatttcaaggttt

SEQ ID NO: 10271 - DNA, 20 bp, Artificial Sequence
  chemically synthesized
atgacatttcaaggtttcag

SEQ ID NO: 10272 - DNA, 20 bp, Artificial Sequence
  chemically synthesized
aggtttcagaagtatgtaat

SEQ ID NO: 10273 - DNA, 20 bp, Artificial Sequence
  chemically synthesized
ggtttcagaagtatgtaatg

SEQ ID NO: 10274 - DNA, 20 bp, Artificial Sequence
  chemically synthesized
aattatatatcttcaattta

SEQ ID NO: 10275 - DNA, 20 bp, Artificial Sequence
  chemically synthesized
atatcttcaatttaaagttt

SEQ ID NO: 10276 - DNA, 20 bp, Artificial Sequence
  chemically synthesized
aaagttttagttaaaacata

SEQ ID NO: 10277 - DNA, 20 bp, Artificial Sequence
  chemically synthesized
cataaagattaacctttcat

SEQ ID NO: 10278 - DNA, 20 bp, Artificial Sequence
  chemically synthesized
aagattaacctttcattagc

SEQ ID NO: 10279 - DNA, 20 bp, Artificial Sequence
  chemically synthesized
acctttcattagcaagctgt

SEQ ID NO: 10280 - DNA, 20 bp, Artificial Sequence
  chemically synthesized
caagctgttagttatcacca

SEQ ID NO: 10281 - DNA, 20 bp, Artificial Sequence
  chemically synthesized
gttatcaccaaagcttttca

SEQ ID NO: 10282 - DNA, 20 bp, Artificial Sequence
  chemically synthesized
caccaaagcttttcatggat

SEQ ID NO: 10283 - DNA, 20 bp, Artificial Sequence
  chemically synthesized
accaaagcttttcatggatt

SEQ ID NO: 10284 - DNA, 20 bp, Artificial Sequence
  chemically synthesized
tgtctctatgtcaaacatct

SEQ ID NO: 10285 - DNA, 20 bp, Artificial Sequence
  chemically synthesized
tctctatgtcaaacatcttg

SEQ ID NO: 10286 - DNA, 20 bp, Artificial Sequence
  chemically synthesized
aacatcttggagttgatatt

SEQ ID NO: 10287 - DNA, 20 bp, Artificial Sequence
  chemically synthesized
acatcttggagttgatattt

SEQ ID NO: 10288 - DNA, 20 bp, Artificial Sequence
  chemically synthesized
catcttggagttgatatttg

SEQ ID NO: 10289 - DNA, 20 bp, Artificial Sequence
  chemically synthesized
atttggggaaacacaatact

SEQ ID NO: 10290 - DNA, 20 bp, Artificial Sequence
  chemically synthesized
gggaaacacaatactcagtt

SEQ ID NO: 10291 - DNA, 20 bp, Artificial Sequence
  chemically synthesized
caatactcagttgagttccc

SEQ ID NO: 10292 - DNA, 20 bp, Artificial Sequence
  chemically synthesized
aatactcagttgagttccct

SEQ ID NO: 10293 - DNA, 20 bp, Artificial Sequence
  chemically synthesized
atactcagttgagttcccta

SEQ ID NO: 10294 - DNA, 20 bp, Artificial Sequence
  chemically synthesized
tactcagttgagttccctag

SEQ ID NO: 10295 - DNA, 20 bp, Artificial Sequence
  chemically synthesized
ctcagttgagttccctaggg

SEQ ID NO: 10296 - DNA, 20 bp, Artificial Sequence
  chemically synthesized
ttgagttccctaggggagaa

SEQ ID NO: 10297 - DNA, 20 bp, Artificial Sequence
  chemically synthesized
gttccctaggggagaaaagc

SEQ ID NO: 10298 - DNA, 20 bp, Artificial Sequence
  chemically synthesized
taggggagaaaagcaagctt

SEQ ID NO: 10299 - DNA, 20 bp, Artificial Sequence
  chemically synthesized
caagcttaagaattgacata

SEQ ID NO: 10300 - DNA, 20 bp, Artificial Sequence
  chemically synthesized
agcttaagaattgacataaa

SEQ ID NO: 10301 - DNA, 20 bp, Artificial Sequence
  chemically synthesized
ttaagaattgacataaagag

SEQ ID NO: 10302 - DNA, 20 bp, Artificial Sequence
  chemically synthesized
taagaattgacataaagagt

SEQ ID NO: 10303 - DNA, 20 bp, Artificial Sequence
  chemically synthesized
gaattgacataaagagtagg

SEQ ID NO: 10304 - DNA, 20 bp, Artificial Sequence
  chemically synthesized
tgacataaagagtaggaagt

SEQ ID NO: 10305 - DNA, 20 bp, Artificial Sequence
  chemically synthesized
actttgttttttcacaacta

SEQ ID NO: 10306 - DNA, 20 bp, Artificial Sequence
  chemically synthesized
cagtgactttatgtatttcc

SEQ ID NO: 10307 - DNA, 20 bp, Artificial Sequence
  chemically synthesized
gtgactttatgtatttccca

SEQ ID NO: 10308 - DNA, 20 bp, Artificial Sequence
  chemically synthesized
tgactttatgtatttcccag

SEQ ID NO: 10309 - DNA, 20 bp, Artificial Sequence
  chemically synthesized
ctttatgtatttcccagagg

SEQ ID NO: 10310 - DNA, 20 bp, Artificial Sequence
  chemically synthesized
tttatgtatttcccagagga

SEQ ID NO: 10311 - DNA, 20 bp, Artificial Sequence
  chemically synthesized
atttcccagaggaaggcata

SEQ ID NO: 10312 - DNA, 20 bp, Artificial Sequence
  chemically synthesized
tttcccagaggaaggcatac

SEQ ID NO: 10313 - DNA, 20 bp, Artificial Sequence
  chemically synthesized
ttcccagaggaaggcataca

SEQ ID NO: 10314 - DNA, 20 bp, Artificial Sequence
  chemically synthesized
ccagaggaaggcatacaggg

SEQ ID NO: 10315 - DNA, 20 bp, Artificial Sequence
  chemically synthesized
agggaagaaattatcccatt

SEQ ID NO: 10316 - DNA, 20 bp, Artificial Sequence
  chemically synthesized
aattatcccatttggacaaa

SEQ ID NO: 10317 - DNA, 20 bp, Artificial Sequence
  chemically synthesized
ggacaaacagcatgttctca

SEQ ID NO: 10318 - DNA, 20 bp, Artificial Sequence
  chemically synthesized
gacaaacagcatgttctcac

SEQ ID NO: 10319 - DNA, 20 bp, Artificial Sequence
  chemically synthesized
aaacagcatgttctcacagg

SEQ ID NO: 10320 - DNA, 20 bp, Artificial Sequence
  chemically synthesized
acacttacttgtcaactttc

SEQ ID NO: 10321 - DNA, 20 bp, Artificial Sequence
  chemically synthesized
caactttctagaatcaaatc

SEQ ID NO: 10322 - DNA, 20 bp, Artificial Sequence
  chemically synthesized
ctttctagaatcaaatctag

SEQ ID NO: 10323 - DNA, 20 bp, Artificial Sequence
  chemically synthesized
gaatcaaatctagtagctga

SEQ ID NO: 10324 - DNA, 20 bp, Artificial Sequence
  chemically synthesized
aatctagtagctgacagtac

SEQ ID NO: 10325 - DNA, 20 bp, Artificial Sequence
  chemically synthesized
atctagtagctgacagtacc

SEQ ID NO: 10326 - DNA, 20 bp, Artificial Sequence
  chemically synthesized
gtagctgacagtaccaggat

SEQ ID NO: 10327 - DNA, 20 bp, Artificial Sequence
  chemically synthesized
tagctgacagtaccaggatc

SEQ ID NO: 10328 - DNA, 20 bp, Artificial Sequence
  chemically synthesized
agctgacagtaccaggatca

SEQ ID NO: 10329 - DNA, 20 bp, Artificial Sequence
  chemically synthesized
gctgacagtaccaggatcag

SEQ ID NO: 10330 - DNA, 20 bp, Artificial Sequence
  chemically synthesized
ggatcaggggtgccaaccct

SEQ ID NO: 10331 - DNA, 20 bp, Artificial Sequence
  chemically synthesized
gtgccaaccctaagcacccc

SEQ ID NO: 10332 - DNA, 20 bp, Artificial Sequence
  chemically synthesized
caaccctaagcacccccaga

SEQ ID NO: 10333 - DNA, 20 bp, Artificial Sequence
  chemically synthesized
agcacccccagaaagctgac

SEQ ID NO: 10334 - DNA, 20 bp, Artificial Sequence
  chemically synthesized
cagaaagctgactggccctg

SEQ ID NO: 10335 - DNA, 20 bp, Artificial Sequence
  chemically synthesized
tggccctgtggttcccactc

SEQ ID NO: 10336 - DNA, 20 bp, Artificial Sequence
  chemically synthesized
tcccactccagacatgatgt

SEQ ID NO: 10337 - DNA, 20 bp, Artificial Sequence
  chemically synthesized
catgatgtcagctgtgaaat

SEQ ID NO: 10338 - DNA, 20 bp, Artificial Sequence
  chemically synthesized
aataacgataaaaaaaaata

SEQ ID NO: 10339 - DNA, 20 bp, Artificial Sequence
  chemically synthesized
taacgataaaaaaaaataca

SEQ ID NO: 10340 - DNA, 20 bp, Artificial Sequence
  chemically synthesized
aacgataaaaaaaaatacag

SEQ ID NO: 10341 - DNA, 20 bp, Artificial Sequence
  chemically synthesized
aaaaaatacagaggttaaac

SEQ ID NO: 10342 - DNA, 20 bp, Artificial Sequence
  chemically synthesized
atacagaggttaaactagca

SEQ ID NO: 10343 - DNA, 20 bp, Artificial Sequence
  chemically synthesized
agaggttaaactagcaaagt

SEQ ID NO: 10344 - DNA, 20 bp, Artificial Sequence
  chemically synthesized
ttaaactagcaaagtgagta

SEQ ID NO: 10345 - DNA, 20 bp, Artificial Sequence
  chemically synthesized
ctagcaaagtgagtaaagtc

SEQ ID NO: 10346 - DNA, 20 bp, Artificial Sequence
  chemically synthesized
tagcaaagtgagtaaagtca

SEQ ID NO: 10347 - DNA, 20 bp, Artificial Sequence
  chemically synthesized
agcaaagtgagtaaagtcaa

SEQ ID NO: 10348 - DNA, 20 bp, Artificial Sequence
  chemically synthesized
gtgagtaaagtcaagggata

SEQ ID NO: 10349 - DNA, 20 bp, Artificial Sequence
  chemically synthesized
aagggataaagaaaatttgt

SEQ ID NO: 10350 - DNA, 20 bp, Artificial Sequence
  chemically synthesized
aatttgttggaaaactcaca

SEQ ID NO: 10351 - DNA, 20 bp, Artificial Sequence
  chemically synthesized
ttgttggaaaactcacaaag

SEQ ID NO: 10352 - DNA, 20 bp, Artificial Sequence
  chemically synthesized
tgttggaaaactcacaaagc

SEQ ID NO: 10353 - DNA, 20 bp, Artificial Sequence
  chemically synthesized
aactcacaaagcaggacata

SEQ ID NO: 10354 - DNA, 20 bp, Artificial Sequence
  chemically synthesized
cacaaagcaggacataaagc

SEQ ID NO: 10355 - DNA, 20 bp, Artificial Sequence
  chemically synthesized
acaaagcaggacataaagca

SEQ ID NO: 10356 - DNA, 20 bp, Artificial Sequence
  chemically synthesized
aggacataaagcaaggccat

SEQ ID NO: 10357 - DNA, 20 bp, Artificial Sequence
  chemically synthesized
ggccattagatatatctcat

SEQ ID NO: 10358 - DNA, 20 bp, Artificial Sequence
  chemically synthesized
tatctcattagtgtgacatc

SEQ ID NO: 10359 - DNA, 20 bp, Artificial Sequence
  chemically synthesized
atctcattagtgtgacatct

SEQ ID NO: 10360 - DNA, 20 bp, Artificial Sequence
  chemically synthesized
ctcattagtgtgacatctgg

SEQ ID NO: 10361 - DNA, 20 bp, Artificial Sequence
  chemically synthesized
tcattagtgtgacatctggg

SEQ ID NO: 10362 - DNA, 20 bp, Artificial Sequence
  chemically synthesized
gtgtgacatctgggaggaca

SEQ ID NO: 10363 - DNA, 20 bp, Artificial Sequence
  chemically synthesized
ccaaaccctttcttctatat

SEQ ID NO: 10364 - DNA, 20 bp, Artificial Sequence
  chemically synthesized
aaccctttcttctatataag

SEQ ID NO: 10365 - DNA, 20 bp, Artificial Sequence
  chemically synthesized
ctttcttctatataagtggt

SEQ ID NO: 10366 - DNA, 20 bp, Artificial Sequence
  chemically synthesized
atataagtggtgagatgatg

SEQ ID NO: 10367 - DNA, 20 bp, Artificial Sequence
  chemically synthesized
tataagtggtgagatgatga

SEQ ID NO: 10368 - DNA, 20 bp, Artificial Sequence
  chemically synthesized
ggtgagatgatgaaggttgt

SEQ ID NO: 10369 - DNA, 20 bp, Artificial Sequence
  chemically synthesized
tgagatgatgaaggttgtaa

SEQ ID NO: 10370 - DNA, 20 bp, Artificial Sequence
  chemically synthesized
gagatgatgaaggttgtaag

SEQ ID NO: 10371 - DNA, 20 bp, Artificial Sequence
  chemically synthesized
agatgatgaaggttgtaaga

SEQ ID NO: 10372 - DNA, 20 bp, Artificial Sequence
  chemically synthesized
agagggcttctgcccccttg

SEQ ID NO: 10373 - DNA, 20 bp, Artificial Sequence
  chemically synthesized
ttctgcccccttgaagactt

SEQ ID NO: 10374 - DNA, 20 bp, Artificial Sequence
  chemically synthesized
cccttgaagacttcagatgc

SEQ ID NO: 10375 - DNA, 20 bp, Artificial Sequence
  chemically synthesized
ccttgaagacttcagatgct

SEQ ID NO: 10376 - DNA, 20 bp, Artificial Sequence
  chemically synthesized
cttgaagacttcagatgctg

SEQ ID NO: 10377 - DNA, 20 bp, Artificial Sequence
  chemically synthesized
aagacttcagatgctgggga

SEQ ID NO: 10378 - DNA, 20 bp, Artificial Sequence
  chemically synthesized
agacttcagatgctggggaa

SEQ ID NO: 10379 - DNA, 20 bp, Artificial Sequence
  chemically synthesized
ttcagatgctggggaaagga

SEQ ID NO: 10380 - DNA, 20 bp, Artificial Sequence
  chemically synthesized
atgctggggaaaggatagat

SEQ ID NO: 10381 - DNA, 20 bp, Artificial Sequence
  chemically synthesized
gggaaaggatagataagaat

SEQ ID NO: 10382 - DNA, 20 bp, Artificial Sequence
  chemically synthesized
ggaaaggatagataagaata

SEQ ID NO: 10383 - DNA, 20 bp, Artificial Sequence
  chemically synthesized
agataagaataaggatgaac

SEQ ID NO: 10384 - DNA, 20 bp, Artificial Sequence
  chemically synthesized
gataagaataaggatgaacc

SEQ ID NO: 10385 - DNA, 20 bp, Artificial Sequence
  chemically synthesized
ataaggatgaaccaggcttt

SEQ ID NO: 10386 - DNA, 20 bp, Artificial Sequence
  chemically synthesized
aaggatgaaccaggcttttg

SEQ ID NO: 10387 - DNA, 20 bp, Artificial Sequence
  chemically synthesized
tgaaccaggcttttggagcc

SEQ ID NO: 10388 - DNA, 20 bp, Artificial Sequence
  chemically synthesized
gaaccaggcttttggagcct

SEQ ID NO: 10389 - DNA, 20 bp, Artificial Sequence
  chemically synthesized
ggagcctgggaaataatgac

SEQ ID NO: 10390 - DNA, 20 bp, Artificial Sequence
  chemically synthesized
aatgactagcgataaacctg

SEQ ID NO: 10391 - DNA, 20 bp, Artificial Sequence
  chemically synthesized
atgactagcgataaacctga

SEQ ID NO: 10392 - DNA, 20 bp, Artificial Sequence
  chemically synthesized
tgactagcgataaacctgaa

SEQ ID NO: 10393 - DNA, 20 bp, Artificial Sequence
  chemically synthesized
ctagcgataaacctgaaggg

SEQ ID NO: 10394 - DNA, 20 bp, Artificial Sequence
  chemically synthesized
gataaacctgaagggaagtt

SEQ ID NO: 10395 - DNA, 20 bp, Artificial Sequence
  chemically synthesized
gaagttaagtatacgatccc

SEQ ID NO: 10396 - DNA, 20 bp, Artificial Sequence
  chemically synthesized
tacgatccccagataatact

SEQ ID NO: 10397 - DNA, 20 bp, Artificial Sequence
  chemically synthesized
acgatccccagataatacta

SEQ ID NO: 10398 - DNA, 20 bp, Artificial Sequence
  chemically synthesized
gatccccagataatactaag

SEQ ID NO: 10399 - DNA, 20 bp, Artificial Sequence
  chemically synthesized
cccagataatactaaggaga

SEQ ID NO: 10400 - DNA, 20 bp, Artificial Sequence
  chemically synthesized
ccagataatactaaggagaa

SEQ ID NO: 10401 - DNA, 20 bp, Artificial Sequence
  chemically synthesized
agaaaggcaatgtgattctg

SEQ ID NO: 10402 - DNA, 20 bp, Artificial Sequence
  chemically synthesized
atgtgattctgcagccattg

SEQ ID NO: 10403 - DNA, 20 bp, Artificial Sequence
  chemically synthesized
gattctgcagccattgtagc

SEQ ID NO: 10404 - DNA, 20 bp, Artificial Sequence
  chemically synthesized
ttctgcagccattgtagcca

SEQ ID NO: 10405 - DNA, 20 bp, Artificial Sequence
  chemically synthesized
ccattgtagccagagataat

SEQ ID NO: 10406 - DNA, 20 bp, Artificial Sequence
  chemically synthesized
gccagagataataagccctt

SEQ ID NO: 10407 - DNA, 20 bp, Artificial Sequence
  chemically synthesized
ccagagataataagcccttg

SEQ ID NO: 10408 - DNA, 20 bp, Artificial Sequence
  chemically synthesized
gagataataagcccttgagg

SEQ ID NO: 10409 - DNA, 20 bp, Artificial Sequence
  chemically synthesized
agataataagcccttgagga

SEQ ID NO: 10410 - DNA, 20 bp, Artificial Sequence
  chemically synthesized
gataataagcccttgaggaa

SEQ ID NO: 10411 - DNA, 20 bp, Artificial Sequence
  chemically synthesized
ataataagcccttgaggaag

SEQ ID NO: 10412 - DNA, 20 bp, Artificial Sequence
  chemically synthesized
taagcccttgaggaaggggc

SEQ ID NO: 10413 - DNA, 20 bp, Artificial Sequence
  chemically synthesized
aagcccttgaggaaggggcc

SEQ ID NO: 10414 - DNA, 20 bp, Artificial Sequence
  chemically synthesized
agcccttgaggaaggggcca

SEQ ID NO: 10415 - DNA, 20 bp, Artificial Sequence
  chemically synthesized
gcccttgaggaaggggccag

SEQ ID NO: 10416 - DNA, 20 bp, Artificial Sequence
  chemically synthesized
ggggccaggggaatttttct

SEQ ID NO: 10417 - DNA, 20 bp, Artificial Sequence
  chemically synthesized
gggccaggggaatttttcta

SEQ ID NO: 10418 - DNA, 20 bp, Artificial Sequence
  chemically synthesized
caggggaatttttctaagga

SEQ ID NO: 10419 - DNA, 20 bp, Artificial Sequence
  chemically synthesized
ggaatttttctaaggataga

SEQ ID NO: 10420 - DNA, 20 bp, Artificial Sequence
  chemically synthesized
aaggatagacagtattaatg

SEQ ID NO: 10421 - DNA, 20 bp, Artificial Sequence
  chemically synthesized
ttctgctattaaactctcat

SEQ ID NO: 10422 - DNA, 20 bp, Artificial Sequence
  chemically synthesized
aaactctcattggcttctaa

SEQ ID NO: 10423 - DNA, 20 bp, Artificial Sequence
  chemically synthesized
aactctcattggcttctaaa

SEQ ID NO: 10424 - DNA, 20 bp, Artificial Sequence
  chemically synthesized
ctctcattggcttctaaaag

SEQ ID NO: 10425 - DNA, 20 bp, Artificial Sequence
  chemically synthesized
ttggcttctaaaaggagttt

SEQ ID NO: 10426 - DNA, 20 bp, Artificial Sequence
  chemically synthesized
cttctaaaaggagtttcggt

SEQ ID NO: 10427 - DNA, 20 bp, Artificial Sequence
  chemically synthesized
gtttcggtgagtgatttgct

SEQ ID NO: 10428 - DNA, 20 bp, Artificial Sequence
  chemically synthesized
gctgagatgttgcattttca

SEQ ID NO: 10429 - DNA, 20 bp, Artificial Sequence
  chemically synthesized
attttcatggctgctgcctt

SEQ ID NO: 10430 - DNA, 20 bp, Artificial Sequence
  chemically synthesized
ttttcatggctgctgccttt

SEQ ID NO: 10431 - DNA, 20 bp, Artificial Sequence
  chemically synthesized
gcctttaggtattattgcaa

SEQ ID NO: 10432 - DNA, 20 bp, Artificial Sequence
  chemically synthesized
taggtattattgcaacagtt

SEQ ID NO: 10433 - DNA, 20 bp, Artificial Sequence
  chemically synthesized
ttggaattttgaaattaaaa

SEQ ID NO: 10434 - DNA, 20 bp, Artificial Sequence
  chemically synthesized
ttaaaacagttctgtaaaac

SEQ ID NO: 10435 - DNA, 20 bp, Artificial Sequence
  chemically synthesized
acagttctgtaaaaccagtt

SEQ ID NO: 10436 - DNA, 20 bp, Artificial Sequence
  chemically synthesized
aaaaccagtttagttttgta

SEQ ID NO: 10437 - DNA, 20 bp, Artificial Sequence
  chemically synthesized
tttgtaaagtgtatgcatca

SEQ ID NO: 10438 - DNA, 20 bp, Artificial Sequence
  chemically synthesized
catcaaagatgtccttcatt

SEQ ID NO: 10439 - DNA, 20 bp, Artificial Sequence
  chemically synthesized
tccttcattcagacattact

SEQ ID NO: 10440 - DNA, 20 bp, Artificial Sequence
  chemically synthesized
acattactgagttacaacta

SEQ ID NO: 10441 - DNA, 20 bp, Artificial Sequence
  chemically synthesized
ctgagttacaactatggtgc

SEQ ID NO: 10442 - DNA, 20 bp, Artificial Sequence
  chemically synthesized
tgagttacaactatggtgcc

SEQ ID NO: 10443 - DNA, 20 bp, Artificial Sequence
  chemically synthesized
tatggtgccaggtactgtgt

SEQ ID NO: 10444 - DNA, 20 bp, Artificial Sequence
  chemically synthesized
atggtgccaggtactgtgtc

SEQ ID NO: 10445 - DNA, 20 bp, Artificial Sequence
  chemically synthesized
tggtgccaggtactgtgtca

SEQ ID NO: 10446 - DNA, 20 bp, Artificial Sequence
  chemically synthesized
caggtactgtgtcagggtac

SEQ ID NO: 10447 - DNA, 20 bp, Artificial Sequence
  chemically synthesized
aggtactgtgtcagggtact

SEQ ID NO: 10448 - DNA, 20 bp, Artificial Sequence
  chemically synthesized
ggtactgtgtcagggtacta

SEQ ID NO: 10449 - DNA, 20 bp, Artificial Sequence
  chemically synthesized
gtactgtgtcagggtactag

SEQ ID NO: 10450 - DNA, 20 bp, Artificial Sequence
  chemically synthesized
gtgtcagggtactaggggta

SEQ ID NO: 10451 - DNA, 20 bp, Artificial Sequence
  chemically synthesized
tgtcagggtactaggggtat

SEQ ID NO: 10452 - DNA, 20 bp, Artificial Sequence
  chemically synthesized
gtcagggtactaggggtatg

SEQ ID NO: 10453 - DNA, 20 bp, Artificial Sequence
  chemically synthesized
ctaggggtatggggataaac

SEQ ID NO: 10454 - DNA, 20 bp, Artificial Sequence
  chemically synthesized
cagactccctctttgatcta

SEQ ID NO: 10455 - DNA, 20 bp, Artificial Sequence
  chemically synthesized
actccctctttgatctaaag

SEQ ID NO: 10456 - DNA, 20 bp, Artificial Sequence
  chemically synthesized
tctttgatctaaagcagcat

SEQ ID NO: 10457 - DNA, 20 bp, Artificial Sequence
  chemically synthesized
ctttgatctaaagcagcatg

SEQ ID NO: 10458 - DNA, 20 bp, Artificial Sequence
  chemically synthesized
gatctaaagcagcatgaggc

SEQ ID NO: 10459 - DNA, 20 bp, Artificial Sequence
  chemically synthesized
atctaaagcagcatgaggcc

SEQ ID NO: 10460 - DNA, 20 bp, Artificial Sequence
  chemically synthesized
aaagcagcatgaggccaggt

SEQ ID NO: 10461 - DNA, 20 bp, Artificial Sequence
  chemically synthesized
agcagcatgaggccaggtga

SEQ ID NO: 10462 - DNA, 20 bp, Artificial Sequence
  chemically synthesized
gcagcatgaggccaggtgag

SEQ ID NO: 10463 - DNA, 20 bp, Artificial Sequence
  chemically synthesized
taatgtgataaaatgtgcac

SEQ ID NO: 10464 - DNA, 20 bp, Artificial Sequence
  chemically synthesized
aatgtgataaaatgtgcact

SEQ ID NO: 10465 - DNA, 20 bp, Artificial Sequence
  chemically synthesized
taaaatgtgcactaggtact

SEQ ID NO: 10466 - DNA, 20 bp, Artificial Sequence
  chemically synthesized
aaaatgtgcactaggtacta

SEQ ID NO: 10467 - DNA, 20 bp, Artificial Sequence
  chemically synthesized
aaatgtgcactaggtactaa

SEQ ID NO: 10468 - DNA, 20 bp, Artificial Sequence
  chemically synthesized
cactaggtactaagggatca

SEQ ID NO: 10469 - DNA, 20 bp, Artificial Sequence
  chemically synthesized
ctaggtactaagggatcata

SEQ ID NO: 10470 - DNA, 20 bp, Artificial Sequence
  chemically synthesized
gtactaagggatcatagaga

SEQ ID NO: 10471 - DNA, 20 bp, Artificial Sequence
  chemically synthesized
tactaagggatcatagagaa

SEQ ID NO: 10472 - DNA, 20 bp, Artificial Sequence
  chemically synthesized
agagaaaggaacacattaaa

SEQ ID NO: 10473 - DNA, 20 bp, Artificial Sequence
  chemically synthesized
gagaaaggaacacattaaat

SEQ ID NO: 10474 - DNA, 20 bp, Artificial Sequence
  chemically synthesized
agaaaggaacacattaaatg

SEQ ID NO: 10475 - DNA, 20 bp, Artificial Sequence
  chemically synthesized
ttaaatggggaaacaattga

SEQ ID NO: 10476 - DNA, 20 bp, Artificial Sequence
  chemically synthesized
aaatggggaaacaattgata

SEQ ID NO: 10477 - DNA, 20 bp, Artificial Sequence
  chemically synthesized
atggggaaacaattgataga

SEQ ID NO: 10478 - DNA, 20 bp, Artificial Sequence
  chemically synthesized
ggggaaacaattgatagaga

SEQ ID NO: 10479 - DNA, 20 bp, Artificial Sequence
  chemically synthesized
agagagagaatattttcatc

SEQ ID NO: 10480 - DNA, 20 bp, Artificial Sequence
  chemically synthesized
gagagagaatattttcatct

SEQ ID NO: 10481 - DNA, 20 bp, Artificial Sequence
  chemically synthesized
tattttcatctgggtcttaa

SEQ ID NO: 10482 - DNA, 20 bp, Artificial Sequence
  chemically synthesized
tcatctgggtcttaaaagat

SEQ ID NO: 10483 - DNA, 20 bp, Artificial Sequence
  chemically synthesized
tctgggtcttaaaagatgag

SEQ ID NO: 10484 - DNA, 20 bp, Artificial Sequence
  chemically synthesized
ctgggtcttaaaagatgagt

SEQ ID NO: 10485 - DNA, 20 bp, Artificial Sequence
  chemically synthesized
tctctttaaatgtctgatat

SEQ ID NO: 10486 - DNA, 20 bp, Artificial Sequence
  chemically synthesized
ctctttaaatgtctgatata

SEQ ID NO: 10487 - DNA, 20 bp, Artificial Sequence
  chemically synthesized
tctttaaatgtctgatataa

SEQ ID NO: 10488 - DNA, 20 bp, Artificial Sequence
  chemically synthesized
atataagggcattttatgca

SEQ ID NO: 10489 - DNA, 20 bp, Artificial Sequence
  chemically synthesized
ataagggcattttatgcaaa

SEQ ID NO: 10490 - DNA, 20 bp, Artificial Sequence
  chemically synthesized
taagggcattttatgcaaag

SEQ ID NO: 10491 - DNA, 20 bp, Artificial Sequence
  chemically synthesized
caaagaggatcactcgtgca

SEQ ID NO: 10492 - DNA, 20 bp, Artificial Sequence
  chemically synthesized
ggatcactcgtgcaaagact

SEQ ID NO: 10493 - DNA, 20 bp, Artificial Sequence
  chemically synthesized
gtgcaaagactcagatttgc

SEQ ID NO: 10494 - DNA, 20 bp, Artificial Sequence
  chemically synthesized
actcagatttgcaagaacgt

SEQ ID NO: 10495 - DNA, 20 bp, Artificial Sequence
  chemically synthesized
ctcagatttgcaagaacgtg

SEQ ID NO: 10496 - DNA, 20 bp, Artificial Sequence
  chemically synthesized
tgcaagaacgtgaggtattt

SEQ ID NO: 10497 - DNA, 20 bp, Artificial Sequence
  chemically synthesized
gcaagaacgtgaggtatttc

SEQ ID NO: 10498 - DNA, 20 bp, Artificial Sequence
  chemically synthesized
aagaacgtgaggtatttcag

SEQ ID NO: 10499 - DNA, 20 bp, Artificial Sequence
  chemically synthesized
ggtatttcaggagttttgta

SEQ ID NO: 10500 - DNA, 20 bp, Artificial Sequence
  chemically synthesized
gagttttgtatggttccata

SEQ ID NO: 10501 - DNA, 20 bp, Artificial Sequence
  chemically synthesized
ggttccatatggactatgac

SEQ ID NO: 10502 - DNA, 20 bp, Artificial Sequence
  chemically synthesized
ccatatggactatgacaagt

SEQ ID NO: 10503 - DNA, 20 bp, Artificial Sequence
  chemically synthesized
atggactatgacaagtgaga

SEQ ID NO: 10504 - DNA, 20 bp, Artificial Sequence
  chemically synthesized
tggactatgacaagtgagac

SEQ ID NO: 10505 - DNA, 20 bp, Artificial Sequence
  chemically synthesized
gacaagtgagacaggtaaac

SEQ ID NO: 10506 - DNA, 20 bp, Artificial Sequence
  chemically synthesized
acaagtgagacaggtaaact

SEQ ID NO: 10507 - DNA, 20 bp, Artificial Sequence
  chemically synthesized
agtgagacaggtaaactagg

SEQ ID NO: 10508 - DNA, 20 bp, Artificial Sequence
  chemically synthesized
tgagacaggtaaactaggca

SEQ ID NO: 10509 - DNA, 20 bp, Artificial Sequence
  chemically synthesized
acaggtaaactaggcagagc

SEQ ID NO: 10510 - DNA, 20 bp, Artificial Sequence
  chemically synthesized
aactaggcagagctggtcat

SEQ ID NO: 10511 - DNA, 20 bp, Artificial Sequence
  chemically synthesized
gagctggtcatcagataatg

SEQ ID NO: 10512 - DNA, 20 bp, Artificial Sequence
  chemically synthesized
gataatgaagtcattaacct

SEQ ID NO: 10513 - DNA, 20 bp, Artificial Sequence
  chemically synthesized
ataatgaagtcattaaccta

SEQ ID NO: 10514 - DNA, 20 bp, Artificial Sequence
  chemically synthesized
aatgaagtcattaacctaag

SEQ ID NO: 10515 - DNA, 20 bp, Artificial Sequence
  chemically synthesized
agtcattaacctaaggagat

SEQ ID NO: 10516 - DNA, 20 bp, Artificial Sequence
  chemically synthesized
ttggacaataaaatgcaata

SEQ ID NO: 10517 - DNA, 20 bp, Artificial Sequence
  chemically synthesized
ggacaataaaatgcaatatg

SEQ ID NO: 10518 - DNA, 20 bp, Artificial Sequence
  chemically synthesized
gacaataaaatgcaatatgg

SEQ ID NO: 10519 - DNA, 20 bp, Artificial Sequence
  chemically synthesized
aatgcaatatggaggtatcg

SEQ ID NO: 10520 - DNA, 20 bp, Artificial Sequence
  chemically synthesized
aggtatcgaagtataaacat

SEQ ID NO: 10521 - DNA, 20 bp, Artificial Sequence
  chemically synthesized
ggtatcgaagtataaacata

SEQ ID NO: 10522 - DNA, 20 bp, Artificial Sequence
  chemically synthesized
tatcgaagtataaacataag

SEQ ID NO: 10523 - DNA, 20 bp, Artificial Sequence
  chemically synthesized
aacataaggagtaccactga

SEQ ID NO: 10524 - DNA, 20 bp, Artificial Sequence
  chemically synthesized
agtaccactgatggctgatt

SEQ ID NO: 10525 - DNA, 20 bp, Artificial Sequence
  chemically synthesized
gtaccactgatggctgattt

SEQ ID NO: 10526 - DNA, 20 bp, Artificial Sequence
  chemically synthesized
gatggctgatttaggatgcc

SEQ ID NO: 10527 - DNA, 20 bp, Artificial Sequence
  chemically synthesized
ctgatttaggatgcccagtc

SEQ ID NO: 10528 - DNA, 20 bp, Artificial Sequence
  chemically synthesized
gcaacacgctaatgaaatga

SEQ ID NO: 10529 - DNA, 20 bp, Artificial Sequence
  chemically synthesized
acacgctaatgaaatgatag

SEQ ID NO: 10530 - DNA, 20 bp, Artificial Sequence
  chemically synthesized
cacgctaatgaaatgatagt

SEQ ID NO: 10531 - DNA, 20 bp, Artificial Sequence
  chemically synthesized
acgctaatgaaatgatagtg

SEQ ID NO: 10532 - DNA, 20 bp, Artificial Sequence
  chemically synthesized
cgctaatgaaatgatagtgg

SEQ ID NO: 10533 - DNA, 20 bp, Artificial Sequence
  chemically synthesized
ctaatgaaatgatagtgggg

SEQ ID NO: 10534 - DNA, 20 bp, Artificial Sequence
  chemically synthesized
taatgaaatgatagtggggg

SEQ ID NO: 10535 - DNA, 20 bp, Artificial Sequence
  chemically synthesized
aatgaaatgatagtggggga

SEQ ID NO: 10536 - DNA, 20 bp, Artificial Sequence
  chemically synthesized
atgaaatgatagtgggggag

SEQ ID NO: 10537 - DNA, 20 bp, Artificial Sequence
  chemically synthesized
tgaaatgatagtgggggagg

SEQ ID NO: 10538 - DNA, 20 bp, Artificial Sequence
  chemically synthesized
gtgggggagggggccgtacc

SEQ ID NO: 10539 - DNA, 20 bp, Artificial Sequence
  chemically synthesized
ggagggggccgtaccaagac

SEQ ID NO: 10540 - DNA, 20 bp, Artificial Sequence
  chemically synthesized
gagggggccgtaccaagact

SEQ ID NO: 10541 - DNA, 20 bp, Artificial Sequence
  chemically synthesized
gggggccgtaccaagactag

SEQ ID NO: 10542 - DNA, 20 bp, Artificial Sequence
  chemically synthesized
gggccgtaccaagactagga

SEQ ID NO: 10543 - DNA, 20 bp, Artificial Sequence
  chemically synthesized
gccgtaccaagactaggaga

SEQ ID NO: 10544 - DNA, 20 bp, Artificial Sequence
  chemically synthesized
gtaccaagactaggagagag

SEQ ID NO: 10545 - DNA, 20 bp, Artificial Sequence
  chemically synthesized
gactaggagagagcagtcct

SEQ ID NO: 10546 - DNA, 20 bp, Artificial Sequence
  chemically synthesized
gagactattgcaattatctg

SEQ ID NO: 10547 - DNA, 20 bp, Artificial Sequence
  chemically synthesized
agactattgcaattatctgc

SEQ ID NO: 10548 - DNA, 20 bp, Artificial Sequence
  chemically synthesized
actattgcaattatctgcgg

SEQ ID NO: 10549 - DNA, 20 bp, Artificial Sequence
  chemically synthesized
aattatctgcgggagacata

SEQ ID NO: 10550 - DNA, 20 bp, Artificial Sequence
  chemically synthesized
attatctgcgggagacataa

SEQ ID NO: 10551 - DNA, 20 bp, Artificial Sequence
  chemically synthesized
tctgcgggagacataaaggc

SEQ ID NO: 10552 - DNA, 20 bp, Artificial Sequence
  chemically synthesized
cataaaggctagaacctgaa

SEQ ID NO: 10553 - DNA, 20 bp, Artificial Sequence
  chemically synthesized
aaaggctagaacctgaacag

SEQ ID NO: 10554 - DNA, 20 bp, Artificial Sequence
  chemically synthesized
ggctagaacctgaacagtag

SEQ ID NO: 10555 - DNA, 20 bp, Artificial Sequence
  chemically synthesized
gaacagtagcagtacaaaaa

SEQ ID NO: 10556 - DNA, 20 bp, Artificial Sequence
  chemically synthesized
acagtagcagtacaaaaaaa

SEQ ID NO: 10557 - DNA, 20 bp, Artificial Sequence
  chemically synthesized
cagtagcagtacaaaaaaag

SEQ ID NO: 10558 - DNA, 20 bp, Artificial Sequence
  chemically synthesized
agtagcagtacaaaaaaaga

SEQ ID NO: 10559 - DNA, 20 bp, Artificial Sequence
  chemically synthesized
gtagcagtacaaaaaaagag

SEQ ID NO: 10560 - DNA, 20 bp, Artificial Sequence
  chemically synthesized
agcagtacaaaaaaagaggg

SEQ ID NO: 10561 - DNA, 20 bp, Artificial Sequence
  chemically synthesized
aggggagttcaaatgatatt

SEQ ID NO: 10562 - DNA, 20 bp, Artificial Sequence
  chemically synthesized
ggggagttcaaatgatatta

SEQ ID NO: 10563 - DNA, 20 bp, Artificial Sequence
  chemically synthesized
gagttcaaatgatattaagg

SEQ ID NO: 10564 - DNA, 20 bp, Artificial Sequence
  chemically synthesized
ttcaaatgatattaaggaag

SEQ ID NO: 10565 - DNA, 20 bp, Artificial Sequence
  chemically synthesized
aaatgatattaaggaagtag

SEQ ID NO: 10566 - DNA, 20 bp, Artificial Sequence
  chemically synthesized
tgatattaaggaagtagaag

SEQ ID NO: 10567 - DNA, 20 bp, Artificial Sequence
  chemically synthesized
agtggtatgacttaaccatc

SEQ ID NO: 10568 - DNA, 20 bp, Artificial Sequence
  chemically synthesized
gtggtatgacttaaccatct

SEQ ID NO: 10569 - DNA, 20 bp, Artificial Sequence
  chemically synthesized
atgacttaaccatctgggta

SEQ ID NO: 10570 - DNA, 20 bp, Artificial Sequence
  chemically synthesized
acttaaccatctgggtatgg

SEQ ID NO: 10571 - DNA, 20 bp, Artificial Sequence
  chemically synthesized
cttaaccatctgggtatgga

SEQ ID NO: 10572 - DNA, 20 bp, Artificial Sequence
  chemically synthesized
ttaaccatctgggtatggaa

SEQ ID NO: 10573 - DNA, 20 bp, Artificial Sequence
  chemically synthesized
taaccatctgggtatggaag

SEQ ID NO: 10574 - DNA, 20 bp, Artificial Sequence
  chemically synthesized
tctgggtatggaaggggaaa

SEQ ID NO: 10575 - DNA, 20 bp, Artificial Sequence
  chemically synthesized
ggtatggaaggggaaatggc

SEQ ID NO: 10576 - DNA, 20 bp, Artificial Sequence
  chemically synthesized
tatggaaggggaaatggcta

SEQ ID NO: 10577 - DNA, 20 bp, Artificial Sequence
  chemically synthesized
aggggaaatggctagagtct

SEQ ID NO: 10578 - DNA, 20 bp, Artificial Sequence
  chemically synthesized
ggggaaatggctagagtctt

SEQ ID NO: 10579 - DNA, 20 bp, Artificial Sequence
  chemically synthesized
gggaaatggctagagtcttg

SEQ ID NO: 10580 - DNA, 20 bp, Artificial Sequence
  chemically synthesized
ctttgtgtttgatgtgatta

SEQ ID NO: 10581 - DNA, 20 bp, Artificial Sequence
  chemically synthesized
tttgatgtgattatggacca

SEQ ID NO: 10582 - DNA, 20 bp, Artificial Sequence
  chemically synthesized
tggaccacagaataatgtct

SEQ ID NO: 10583 - DNA, 20 bp, Artificial Sequence
  chemically synthesized
gaccacagaataatgtctaa

SEQ ID NO: 10584 - DNA, 20 bp, Artificial Sequence
  chemically synthesized
agaataatgtctaagagaac

SEQ ID NO: 10585 - DNA, 20 bp, Artificial Sequence
  chemically synthesized
gtctaagagaactggctctt

SEQ ID NO: 10586 - DNA, 20 bp, Artificial Sequence
  chemically synthesized
tggctctttagtctgactgc

SEQ ID NO: 10587 - DNA, 20 bp, Artificial Sequence
  chemically synthesized
gctctttagtctgactgcca

SEQ ID NO: 10588 - DNA, 20 bp, Artificial Sequence
  chemically synthesized
agtctgaatcctgaatgttt

SEQ ID NO: 10589 - DNA, 20 bp, Artificial Sequence
  chemically synthesized
aatgttttagtatgttacct

SEQ ID NO: 10590 - DNA, 20 bp, Artificial Sequence
  chemically synthesized
atgttttagtatgttacctt

SEQ ID NO: 10591 - DNA, 20 bp, Artificial Sequence
  chemically synthesized
ttagtatgttaccttgggca

SEQ ID NO: 10592 - DNA, 20 bp, Artificial Sequence
  chemically synthesized
gttaccttgggcaaagccct

SEQ ID NO: 10593 - DNA, 20 bp, Artificial Sequence
  chemically synthesized
tcttcctcattcataaaaat

SEQ ID NO: 10594 - DNA, 20 bp, Artificial Sequence
  chemically synthesized
cattcataaaaataagatga

SEQ ID NO: 10595 - DNA, 20 bp, Artificial Sequence
  chemically synthesized
agatgacagtgcctatctcg

SEQ ID NO: 10596 - DNA, 20 bp, Artificial Sequence
  chemically synthesized
gatgacagtgcctatctcgt

SEQ ID NO: 10597 - DNA, 20 bp, Artificial Sequence
  chemically synthesized
ctatctcgtgggacttttgt

SEQ ID NO: 10598 - DNA, 20 bp, Artificial Sequence
  chemically synthesized
tatctcgtgggacttttgtg

SEQ ID NO: 10599 - DNA, 20 bp, Artificial Sequence
  chemically synthesized
gtgggacttttgtgaggatg

SEQ ID NO: 10600 - DNA, 20 bp, Artificial Sequence
  chemically synthesized
gacttttgtgaggatgaagt

SEQ ID NO: 10601 - DNA, 20 bp, Artificial Sequence
  chemically synthesized
gtgaggatgaagtgagataa

SEQ ID NO: 10602 - DNA, 20 bp, Artificial Sequence
  chemically synthesized
gaagtgagataatggatgca

SEQ ID NO: 10603 - DNA, 20 bp, Artificial Sequence
  chemically synthesized
ataatggatgcaaagttact

SEQ ID NO: 10604 - DNA, 20 bp, Artificial Sequence
  chemically synthesized
ggatgcaaagttactgagca

SEQ ID NO: 10605 - DNA, 20 bp, Artificial Sequence
  chemically synthesized
actgagcacagtgtccaaca

SEQ ID NO: 10606 - DNA, 20 bp, Artificial Sequence
  chemically synthesized
gagcacagtgtccaacacag

SEQ ID NO: 10607 - DNA, 20 bp, Artificial Sequence
  chemically synthesized
cacagtgtccaacacagcag

SEQ ID NO: 10608 - DNA, 20 bp, Artificial Sequence
  chemically synthesized
cagaagcattacatatacat

SEQ ID NO: 10609 - DNA, 20 bp, Artificial Sequence
  chemically synthesized
acatatacattagctattac

SEQ ID NO: 10610 - DNA, 20 bp, Artificial Sequence
  chemically synthesized
actggctacattatgatata

SEQ ID NO: 10611 - DNA, 20 bp, Artificial Sequence
  chemically synthesized
gctacattatgatatacagt

SEQ ID NO: 10612 - DNA, 20 bp, Artificial Sequence
  chemically synthesized
ctacattatgatatacagtt

SEQ ID NO: 10613 - DNA, 20 bp, Artificial Sequence
  chemically synthesized
tacattatgatatacagtta

SEQ ID NO: 10614 - DNA, 20 bp, Artificial Sequence
  chemically synthesized
cattatgatatacagttagg

SEQ ID NO: 10615 - DNA, 20 bp, Artificial Sequence
  chemically synthesized
atgatatacagttagggagt

SEQ ID NO: 10616 - DNA, 20 bp, Artificial Sequence
  chemically synthesized
tatacagttagggagttgga

SEQ ID NO: 10617 - DNA, 20 bp, Artificial Sequence
  chemically synthesized
tggaaagataatctgaaatt

SEQ ID NO: 10618 - DNA, 20 bp, Artificial Sequence
  chemically synthesized
ggaaagataatctgaaattc

SEQ ID NO: 10619 - DNA, 20 bp, Artificial Sequence
  chemically synthesized
aaagataatctgaaattcag

SEQ ID NO: 10620 - DNA, 20 bp, Artificial Sequence
  chemically synthesized
tcaggagacgtatctgacta

SEQ ID NO: 10621 - DNA, 20 bp, Artificial Sequence
  chemically synthesized
caggagacgtatctgactat

SEQ ID NO: 10622 - DNA, 20 bp, Artificial Sequence
  chemically synthesized
agacgtatctgactataggt

SEQ ID NO: 10623 - DNA, 20 bp, Artificial Sequence
  chemically synthesized
tctgactataggtgagtatt

SEQ ID NO: 10624 - DNA, 20 bp, Artificial Sequence
  chemically synthesized
ggaactcattgttctgtaaa

SEQ ID NO: 10625 - DNA, 20 bp, Artificial Sequence
  chemically synthesized
actcattgttctgtaaacag

SEQ ID NO: 10626 - DNA, 20 bp, Artificial Sequence
  chemically synthesized
tgttctgtaaacagtagtta

SEQ ID NO: 10627 - DNA, 20 bp, Artificial Sequence
  chemically synthesized
agtagttacagccacgtgtg

SEQ ID NO: 10628 - DNA, 20 bp, Artificial Sequence
  chemically synthesized
gtagttacagccacgtgtgt

SEQ ID NO: 10629 - DNA, 20 bp, Artificial Sequence
  chemically synthesized
cagccacgtgtgtgggcatc

SEQ ID NO: 10630 - DNA, 20 bp, Artificial Sequence
  chemically synthesized
gccacgtgtgtgggcatctg

SEQ ID NO: 10631 - DNA, 20 bp, Artificial Sequence
  chemically synthesized
cacgtgtgtgggcatctgga

SEQ ID NO: 10632 - DNA, 20 bp, Artificial Sequence
  chemically synthesized
tgtgtgggcatctggagagt

SEQ ID NO: 10633 - DNA, 20 bp, Artificial Sequence
  chemically synthesized
gggcatctggagagtgagca

SEQ ID NO: 10634 - DNA, 20 bp, Artificial Sequence
  chemically synthesized
agcatggatattgtgatacc

SEQ ID NO: 10635 - DNA, 20 bp, Artificial Sequence
  chemically synthesized
ggatattgtgatacctagta

SEQ ID NO: 10636 - DNA, 20 bp, Artificial Sequence
  chemically synthesized
gtgatacctagtacagtgcc

SEQ ID NO: 10637 - DNA, 20 bp, Artificial Sequence
  chemically synthesized
atacctagtacagtgcctgg

SEQ ID NO: 10638 - DNA, 20 bp, Artificial Sequence
  chemically synthesized
cctagtacagtgcctggcag

SEQ ID NO: 10639 - DNA, 20 bp, Artificial Sequence
  chemically synthesized
agtacagtgcctggcagtag

SEQ ID NO: 10640 - DNA, 20 bp, Artificial Sequence
  chemically synthesized
ggcagtagtggttgtatgct

SEQ ID NO: 10641 - DNA, 20 bp, Artificial Sequence
  chemically synthesized
tgctcagtaaattttgttga

SEQ ID NO: 10642 - DNA, 20 bp, Artificial Sequence
  chemically synthesized
gctcagtaaattttgttgac

SEQ ID NO: 10643 - DNA, 20 bp, Artificial Sequence
  chemically synthesized
ctcagtaaattttgttgaca

SEQ ID NO: 10644 - DNA, 20 bp, Artificial Sequence
  chemically synthesized
gtaaattttgttgacagggt

SEQ ID NO: 10645 - DNA, 20 bp, Artificial Sequence
  chemically synthesized
taaattttgttgacagggtc

SEQ ID NO: 10646 - DNA, 20 bp, Artificial Sequence
  chemically synthesized
aaattttgttgacagggtca

SEQ ID NO: 10647 - DNA, 20 bp, Artificial Sequence
  chemically synthesized
tttgttgacagggtcagggc

SEQ ID NO: 10648 - DNA, 20 bp, Artificial Sequence
  chemically synthesized
tgacagggtcagggccggac

SEQ ID NO: 10649 - DNA, 20 bp, Artificial Sequence
  chemically synthesized
gtcagggccggactagactg

SEQ ID NO: 10650 - DNA, 20 bp, Artificial Sequence
  chemically synthesized
gggccggactagactgtggt

SEQ ID NO: 10651 - DNA, 20 bp, Artificial Sequence
  chemically synthesized
cggactagactgtggtaagc

SEQ ID NO: 10652 - DNA, 20 bp, Artificial Sequence
  chemically synthesized
ggactagactgtggtaagca

SEQ ID NO: 10653 - DNA, 20 bp, Artificial Sequence
  chemically synthesized
actgtggtaagcaaggcctg

SEQ ID NO: 10654 - DNA, 20 bp, Artificial Sequence
  chemically synthesized
ctgtggtaagcaaggcctgt

SEQ ID NO: 10655 - DNA, 20 bp, Artificial Sequence
  chemically synthesized
tgtggtaagcaaggcctgta

SEQ ID NO: 10656 - DNA, 20 bp, Artificial Sequence
  chemically synthesized
taaatatacttgtatgcccc

SEQ ID NO: 10657 - DNA, 20 bp, Artificial Sequence
  chemically synthesized
atatacttgtatgccccgag

SEQ ID NO: 10658 - DNA, 20 bp, Artificial Sequence
  chemically synthesized
acttgtatgccccgagaagt

SEQ ID NO: 10659 - DNA, 20 bp, Artificial Sequence
  chemically synthesized
cttgtatgccccgagaagtg

SEQ ID NO: 10660 - DNA, 20 bp, Artificial Sequence
  chemically synthesized
tgtgccctacatgccttgtt

SEQ ID NO: 10661 - DNA, 20 bp, Artificial Sequence
  chemically synthesized
tgtttggttcactcttgtcc

SEQ ID NO: 10662 - DNA, 20 bp, Artificial Sequence
  chemically synthesized
gttcactcttgtcccagccc

SEQ ID NO: 10663 - DNA, 20 bp, Artificial Sequence
  chemically synthesized
actcttgtcccagccctagc

SEQ ID NO: 10664 - DNA, 20 bp, Artificial Sequence
  chemically synthesized
cagccctagcaagtatatat

SEQ ID NO: 10665 - DNA, 20 bp, Artificial Sequence
  chemically synthesized
agccctagcaagtatatata

SEQ ID NO: 10666 - DNA, 20 bp, Artificial Sequence
  chemically synthesized
caagtatatataaggtgaaa

SEQ ID NO: 10667 - DNA, 20 bp, Artificial Sequence
  chemically synthesized
aagtatatataaggtgaaaa

SEQ ID NO: 10668 - DNA, 20 bp, Artificial Sequence
  chemically synthesized
atataaggtgaaaaaggaaa

SEQ ID NO: 10669 - DNA, 20 bp, Artificial Sequence
  chemically synthesized
aggtgaaaaaggaaaaagct

SEQ ID NO: 10670 - DNA, 20 bp, Artificial Sequence
  chemically synthesized
ggtgaaaaaggaaaaagctg

SEQ ID NO: 10671 - DNA, 20 bp, Artificial Sequence
  chemically synthesized
aaaaaggaaaaagctgaggc

SEQ ID NO: 10672 - DNA, 20 bp, Artificial Sequence
  chemically synthesized
aaaggaaaaagctgaggctg

SEQ ID NO: 10673 - DNA, 20 bp, Artificial Sequence
  chemically synthesized
aaaaagctgaggctggagcc

SEQ ID NO: 10674 - DNA, 20 bp, Artificial Sequence
  chemically synthesized
aaaagctgaggctggagcct

SEQ ID NO: 10675 - DNA, 20 bp, Artificial Sequence
  chemically synthesized
aagctgaggctggagcctgg

SEQ ID NO: 10676 - DNA, 20 bp, Artificial Sequence
  chemically synthesized
gctggagcctgggagaaccc

SEQ ID NO: 10677 - DNA, 20 bp, Artificial Sequence
  chemically synthesized
tgggagaaccctggacattt

SEQ ID NO: 10678 - DNA, 20 bp, Artificial Sequence
  chemically synthesized
gggagaaccctggacattta

SEQ ID NO: 10679 - DNA, 20 bp, Artificial Sequence
  chemically synthesized
ggagaaccctggacatttaa

SEQ ID NO: 10680 - DNA, 20 bp, Artificial Sequence
  chemically synthesized
ccctggacatttaagggcca

SEQ ID NO: 10681 - DNA, 20 bp, Artificial Sequence
  chemically synthesized
ctggacatttaagggccatg

SEQ ID NO: 10682 - DNA, 20 bp, Artificial Sequence
  chemically synthesized
ggacatttaagggccatgga

SEQ ID NO: 10683 - DNA, 20 bp, Artificial Sequence
  chemically synthesized
gacatttaagggccatggag

SEQ ID NO: 10684 - DNA, 20 bp, Artificial Sequence
  chemically synthesized
ttaagggccatggagaggaa

SEQ ID NO: 10685 - DNA, 20 bp, Artificial Sequence
  chemically synthesized
taagggccatggagaggaac

SEQ ID NO: 10686 - DNA, 20 bp, Artificial Sequence
  chemically synthesized
agggccatggagaggaacag

SEQ ID NO: 10687 - DNA, 20 bp, Artificial Sequence
  chemically synthesized
gaacaggagttaatcaattc

SEQ ID NO: 10688 - DNA, 20 bp, Artificial Sequence
  chemically synthesized
gagttaatcaattcaagtgc

SEQ ID NO: 10689 - DNA, 20 bp, Artificial Sequence
  chemically synthesized
taatcaattcaagtgctgga

SEQ ID NO: 10690 - DNA, 20 bp, Artificial Sequence
  chemically synthesized
ttcaagtgctggatggataa

SEQ ID NO: 10691 - DNA, 20 bp, Artificial Sequence
  chemically synthesized
tcaagtgctggatggataac

SEQ ID NO: 10692 - DNA, 20 bp, Artificial Sequence
  chemically synthesized
aagtgctggatggataacag

SEQ ID NO: 10693 - DNA, 20 bp, Artificial Sequence
  chemically synthesized
gctggatggataacaggagt

SEQ ID NO: 10694 - DNA, 20 bp, Artificial Sequence
  chemically synthesized
tggatggataacaggagtta

SEQ ID NO: 10695 - DNA, 20 bp, Artificial Sequence
  chemically synthesized
ggataacaggagttagagca

SEQ ID NO: 10696 - DNA, 20 bp, Artificial Sequence
  chemically synthesized
taacaggagttagagcaaag

SEQ ID NO: 10697 - DNA, 20 bp, Artificial Sequence
  chemically synthesized
aacaggagttagagcaaagc

SEQ ID NO: 10698 - DNA, 20 bp, Artificial Sequence
  chemically synthesized
acaggagttagagcaaagcg

SEQ ID NO: 10699 - DNA, 20 bp, Artificial Sequence
  chemically synthesized
gttagagcaaagcggggaac

SEQ ID NO: 10700 - DNA, 20 bp, Artificial Sequence
  chemically synthesized
agcaaagcggggaaccagaa

SEQ ID NO: 10701 - DNA, 20 bp, Artificial Sequence
  chemically synthesized
caaagcggggaaccagaata

SEQ ID NO: 10702 - DNA, 20 bp, Artificial Sequence
  chemically synthesized
aatagagtgattattataaa

SEQ ID NO: 10703 - DNA, 20 bp, Artificial Sequence
  chemically synthesized
tagagtgattattataaaaa

SEQ ID NO: 10704 - DNA, 20 bp, Artificial Sequence
  chemically synthesized
tataaaaagagtttcctaaa

SEQ ID NO: 10705 - DNA, 20 bp, Artificial Sequence
  chemically synthesized
ataaaaagagtttcctaaaa

SEQ ID NO: 10706 - DNA, 20 bp, Artificial Sequence
  chemically synthesized
taaaaagagtttcctaaaaa

SEQ ID NO: 10707 - DNA, 20 bp, Artificial Sequence
  chemically synthesized
aaaagagtttcctaaaaagg

SEQ ID NO: 10708 - DNA, 20 bp, Artificial Sequence
  chemically synthesized
aagagtttcctaaaaaggga

SEQ ID NO: 10709 - DNA, 20 bp, Artificial Sequence
  chemically synthesized
aaaagggagagatcaacaat

SEQ ID NO: 10710 - DNA, 20 bp, Artificial Sequence
  chemically synthesized
atcaacaattagaaattatt

SEQ ID NO: 10711 - DNA, 20 bp, Artificial Sequence
  chemically synthesized
caacaattagaaattattta

SEQ ID NO: 10712 - DNA, 20 bp, Artificial Sequence
  chemically synthesized
caattagaaattatttagag

SEQ ID NO: 10713 - DNA, 20 bp, Artificial Sequence
  chemically synthesized
tagaaattatttagagcagc

SEQ ID NO: 10714 - DNA, 20 bp, Artificial Sequence
  chemically synthesized
ataaactcaaaattattctt

SEQ ID NO: 10715 - DNA, 20 bp, Artificial Sequence
  chemically synthesized
taaactcaaaattattcttt

SEQ ID NO: 10716 - DNA, 20 bp, Artificial Sequence
  chemically synthesized
gtcattcctgattgtgacaa

SEQ ID NO: 10717 - DNA, 20 bp, Artificial Sequence
  chemically synthesized
ttcattatataaatgtgatt

SEQ ID NO: 10718 - DNA, 20 bp, Artificial Sequence
  chemically synthesized
tcattatataaatgtgatta

SEQ ID NO: 10719 - DNA, 20 bp, Artificial Sequence
  chemically synthesized
ttatataaatgtgattaagg

SEQ ID NO: 10720 - DNA, 20 bp, Artificial Sequence
  chemically synthesized
tatataaatgtgattaagga

SEQ ID NO: 10721 - DNA, 20 bp, Artificial Sequence
  chemically synthesized
aaatgtgattaaggaaggaa

SEQ ID NO: 10722 - DNA, 20 bp, Artificial Sequence
  chemically synthesized
atgtgattaaggaaggaaaa

SEQ ID NO: 10723 - DNA, 20 bp, Artificial Sequence
  chemically synthesized
aaggaaggaaaagagctaca

SEQ ID NO: 10724 - DNA, 20 bp, Artificial Sequence
  chemically synthesized
gaaggaaaagagctacacag

SEQ ID NO: 10725 - DNA, 20 bp, Artificial Sequence
  chemically synthesized
gagctacacagaagttatta

SEQ ID NO: 10726 - DNA, 20 bp, Artificial Sequence
  chemically synthesized
gctacacagaagttattaaa

SEQ ID NO: 10727 - DNA, 20 bp, Artificial Sequence
  chemically synthesized
cagaagttattaaagagcta

SEQ ID NO: 10728 - DNA, 20 bp, Artificial Sequence
  chemically synthesized
gaagttattaaagagctaaa

SEQ ID NO: 10729 - DNA, 20 bp, Artificial Sequence
  chemically synthesized
ttaaagagctaaagagaatt

SEQ ID NO: 10730 - DNA, 20 bp, Artificial Sequence
  chemically synthesized
gagaattgagaaatttaaaa

SEQ ID NO: 10731 - DNA, 20 bp, Artificial Sequence
  chemically synthesized
aattgagaaatttaaaacag

SEQ ID NO: 10732 - DNA, 20 bp, Artificial Sequence
  chemically synthesized
gagaaatttaaaacagaaga

SEQ ID NO: 10733 - DNA, 20 bp, Artificial Sequence
  chemically synthesized
aaatttaaaacagaagaaag

SEQ ID NO: 10734 - DNA, 20 bp, Artificial Sequence
  chemically synthesized
aatttaaaacagaagaaagt

SEQ ID NO: 10735 - DNA, 20 bp, Artificial Sequence
  chemically synthesized
atttaaaacagaagaaagta

SEQ ID NO: 10736 - DNA, 20 bp, Artificial Sequence
  chemically synthesized
agaaagtagggccaacatga

SEQ ID NO: 10737 - DNA, 20 bp, Artificial Sequence
  chemically synthesized
gaaagtagggccaacatgaa

SEQ ID NO: 10738 - DNA, 20 bp, Artificial Sequence
  chemically synthesized
aagtagggccaacatgaaag

SEQ ID NO: 10739 - DNA, 20 bp, Artificial Sequence
  chemically synthesized
tagggccaacatgaaaggag

SEQ ID NO: 10740 - DNA, 20 bp, Artificial Sequence
  chemically synthesized
agggccaacatgaaaggagt

SEQ ID NO: 10741 - DNA, 20 bp, Artificial Sequence
  chemically synthesized
gggccaacatgaaaggagta

SEQ ID NO: 10742 - DNA, 20 bp, Artificial Sequence
  chemically synthesized
gccaacatgaaaggagtagg

SEQ ID NO: 10743 - DNA, 20 bp, Artificial Sequence
  chemically synthesized
atgaaaggagtagggagaaa

SEQ ID NO: 10744 - DNA, 20 bp, Artificial Sequence
  chemically synthesized
gaaaggagtagggagaaaaa

SEQ ID NO: 10745 - DNA, 20 bp, Artificial Sequence
  chemically synthesized
tagggagaaaaagagataac

SEQ ID NO: 10746 - DNA, 20 bp, Artificial Sequence
  chemically synthesized
ctgatcctgccaacacctgt

SEQ ID NO: 10747 - DNA, 20 bp, Artificial Sequence
  chemically synthesized
tcctgccaacacctgtgaga

SEQ ID NO: 10748 - DNA, 20 bp, Artificial Sequence
  chemically synthesized
aacctaatttacatttgaca

SEQ ID NO: 10749 - DNA, 20 bp, Artificial Sequence
  chemically synthesized
aatttacatttgacaaagtt

SEQ ID NO: 10750 - DNA, 20 bp, Artificial Sequence
  chemically synthesized
atttacatttgacaaagtta

SEQ ID NO: 10751 - DNA, 20 bp, Artificial Sequence
  chemically synthesized
catttgacaaagttaaggtt

SEQ ID NO: 10752 - DNA, 20 bp, Artificial Sequence
  chemically synthesized
tttgacaaagttaaggttca

SEQ ID NO: 10753 - DNA, 20 bp, Artificial Sequence
  chemically synthesized
agagcttgtgtgacttgtcc

SEQ ID NO: 10754 - DNA, 20 bp, Artificial Sequence
  chemically synthesized
gagcttgtgtgacttgtcca

SEQ ID NO: 10755 - DNA, 20 bp, Artificial Sequence
  chemically synthesized
gtgtgacttgtccaaggtca

SEQ ID NO: 10756 - DNA, 20 bp, Artificial Sequence
  chemically synthesized
tgtgacttgtccaaggtcac

SEQ ID NO: 10757 - DNA, 20 bp, Artificial Sequence
  chemically synthesized
cttgtccaaggtcacaggtc

SEQ ID NO: 10758 - DNA, 20 bp, Artificial Sequence
  chemically synthesized
tgtccaaggtcacaggtcta

SEQ ID NO: 10759 - DNA, 20 bp, Artificial Sequence
  chemically synthesized
gtccaaggtcacaggtctag

SEQ ID NO: 10760 - DNA, 20 bp, Artificial Sequence
  chemically synthesized
ccaaggtcacaggtctagag

SEQ ID NO: 10761 - DNA, 20 bp, Artificial Sequence
  chemically synthesized
caaggtcacaggtctagagg

SEQ ID NO: 10762 - DNA, 20 bp, Artificial Sequence
  chemically synthesized
ggtcacaggtctagaggagg

SEQ ID NO: 10763 - DNA, 20 bp, Artificial Sequence
  chemically synthesized
ttctgtctgatctgattcta

SEQ ID NO: 10764 - DNA, 20 bp, Artificial Sequence
  chemically synthesized
tttcactcaaccacactgta

SEQ ID NO: 10765 - DNA, 20 bp, Artificial Sequence
  chemically synthesized
actcaaccacactgtacagt

SEQ ID NO: 10766 - DNA, 20 bp, Artificial Sequence
  chemically synthesized
gtacagtcagctctccttgt

SEQ ID NO: 10767 - DNA, 20 bp, Artificial Sequence
  chemically synthesized
agctctccttgtgagttcca

SEQ ID NO: 10768 - DNA, 20 bp, Artificial Sequence
  chemically synthesized
ccttgtgagttccacagcca

SEQ ID NO: 10769 - DNA, 20 bp, Artificial Sequence
  chemically synthesized
gccacagattcaattaactg

SEQ ID NO: 10770 - DNA, 20 bp, Artificial Sequence
  chemically synthesized
actgcagatcaaaaatattc

SEQ ID NO: 10771 - DNA, 20 bp, Artificial Sequence
  chemically synthesized
aaaaatattcaagaaaaaaa

SEQ ID NO: 10772 - DNA, 20 bp, Artificial Sequence
  chemically synthesized
atattcaagaaaaaaatgga

SEQ ID NO: 10773 - DNA, 20 bp, Artificial Sequence
  chemically synthesized
gcatctctactgaacatgta

SEQ ID NO: 10774 - DNA, 20 bp, Artificial Sequence
  chemically synthesized
tcattattccctaaacaata

SEQ ID NO: 10775 - DNA, 20 bp, Artificial Sequence
  chemically synthesized
cagcataacaactatttaca

SEQ ID NO: 10776 - DNA, 20 bp, Artificial Sequence
  chemically synthesized
acatagcatttacattgtat

SEQ ID NO: 10777 - DNA, 20 bp, Artificial Sequence
  chemically synthesized
tttacattgtattagctatt

SEQ ID NO: 10778 - DNA, 20 bp, Artificial Sequence
  chemically synthesized
tacattgtattagctattaa

SEQ ID NO: 10779 - DNA, 20 bp, Artificial Sequence
  chemically synthesized
attagctattaagagaaacc

SEQ ID NO: 10780 - DNA, 20 bp, Artificial Sequence
  chemically synthesized
tagctattaagagaaaccta

SEQ ID NO: 10781 - DNA, 20 bp, Artificial Sequence
  chemically synthesized
agaaacctagagatgattta

SEQ ID NO: 10782 - DNA, 20 bp, Artificial Sequence
  chemically synthesized
tagagatgatttaaagtaca

SEQ ID NO: 10783 - DNA, 20 bp, Artificial Sequence
  chemically synthesized
agagatgatttaaagtacaa

SEQ ID NO: 10784 - DNA, 20 bp, Artificial Sequence
  chemically synthesized
agatgatttaaagtacaaag

SEQ ID NO: 10785 - DNA, 20 bp, Artificial Sequence
  chemically synthesized
gatgatttaaagtacaaagg

SEQ ID NO: 10786 - DNA, 20 bp, Artificial Sequence
  chemically synthesized
agtacaaaggaggatgtgtt

SEQ ID NO: 10787 - DNA, 20 bp, Artificial Sequence
  chemically synthesized
gtacaaaggaggatgtgttt

SEQ ID NO: 10788 - DNA, 20 bp, Artificial Sequence
  chemically synthesized
gtgtttaggttatatgcaaa

SEQ ID NO: 10789 - DNA, 20 bp, Artificial Sequence
  chemically synthesized
ttaggttatatgcaaatagt

SEQ ID NO: 10790 - DNA, 20 bp, Artificial Sequence
  chemically synthesized
atagtaagccatttttatat

SEQ ID NO: 10791 - DNA, 20 bp, Artificial Sequence
  chemically synthesized
agtaagccatttttatatcg

SEQ ID NO: 10792 - DNA, 20 bp, Artificial Sequence
  chemically synthesized
catttttatatcggagactt

SEQ ID NO: 10793 - DNA, 20 bp, Artificial Sequence
  chemically synthesized
atcggagacttgagcatcca

SEQ ID NO: 10794 - DNA, 20 bp, Artificial Sequence
  chemically synthesized
tccacagatcttgatatttg

SEQ ID NO: 10795 - DNA, 20 bp, Artificial Sequence
  chemically synthesized
ccacagatcttgatatttgc

SEQ ID NO: 10796 - DNA, 20 bp, Artificial Sequence
  chemically synthesized
cacagatcttgatatttgca

SEQ ID NO: 10797 - DNA, 20 bp, Artificial Sequence
  chemically synthesized
acagatcttgatatttgcag

SEQ ID NO: 10798 - DNA, 20 bp, Artificial Sequence
  chemically synthesized
cagatcttgatatttgcagg

SEQ ID NO: 10799 - DNA, 20 bp, Artificial Sequence
  chemically synthesized
gtcttgccaccaattttcca

SEQ ID NO: 10800 - DNA, 20 bp, Artificial Sequence
  chemically synthesized
accaattttccatggatact

SEQ ID NO: 10801 - DNA, 20 bp, Artificial Sequence
  chemically synthesized
ccaattttccatggatactg

SEQ ID NO: 10802 - DNA, 20 bp, Artificial Sequence
  chemically synthesized
tactgaggaacgactgtaaa

SEQ ID NO: 10803 - DNA, 20 bp, Artificial Sequence
  chemically synthesized
ggaacgactgtaaatggatg

SEQ ID NO: 10804 - DNA, 20 bp, Artificial Sequence
  chemically synthesized
gaacgactgtaaatggatgc

SEQ ID NO: 10805 - DNA, 20 bp, Artificial Sequence
  chemically synthesized
actgtaaatggatgcaggca

SEQ ID NO: 10806 - DNA, 20 bp, Artificial Sequence
  chemically synthesized
atgcaggcatggatgctatt

SEQ ID NO: 10807 - DNA, 20 bp, Artificial Sequence
  chemically synthesized
tgcaggcatggatgctattt

SEQ ID NO: 10808 - DNA, 20 bp, Artificial Sequence
  chemically synthesized
caggcatggatgctatttag

SEQ ID NO: 10809 - DNA, 20 bp, Artificial Sequence
  chemically synthesized
ggatgctatttaggagtgtc

SEQ ID NO: 10810 - DNA, 20 bp, Artificial Sequence
  chemically synthesized
gatgctatttaggagtgtcc

SEQ ID NO: 10811 - DNA, 20 bp, Artificial Sequence
  chemically synthesized
atgctatttaggagtgtcca

SEQ ID NO: 10812 - DNA, 20 bp, Artificial Sequence
  chemically synthesized
atttaggagtgtccagggcc

SEQ ID NO: 10813 - DNA, 20 bp, Artificial Sequence
  chemically synthesized
gtgtccagggccaagtaaat

SEQ ID NO: 10814 - DNA, 20 bp, Artificial Sequence
  chemically synthesized
ggccaagtaaatgagttgct

SEQ ID NO: 10815 - DNA, 20 bp, Artificial Sequence
  chemically synthesized
caagtaaatgagttgctgag

SEQ ID NO: 10816 - DNA, 20 bp, Artificial Sequence
  chemically synthesized
agtaaatgagttgctgagca

SEQ ID NO: 10817 - DNA, 20 bp, Artificial Sequence
  chemically synthesized
taaatgagttgctgagcaga

SEQ ID NO: 10818 - DNA, 20 bp, Artificial Sequence
  chemically synthesized
aaatgagttgctgagcagag

SEQ ID NO: 10819 - DNA, 20 bp, Artificial Sequence
  chemically synthesized
tgagttgctgagcagagagg

SEQ ID NO: 10820 - DNA, 20 bp, Artificial Sequence
  chemically synthesized
gagttgctgagcagagaggt

SEQ ID NO: 10821 - DNA, 20 bp, Artificial Sequence
  chemically synthesized
ttgctgagcagagaggtggg

SEQ ID NO: 10822 - DNA, 20 bp, Artificial Sequence
  chemically synthesized
gctgagcagagaggtgggtg

SEQ ID NO: 10823 - DNA, 20 bp, Artificial Sequence
  chemically synthesized
ctgagcagagaggtgggtgg

SEQ ID NO: 10824 - DNA, 20 bp, Artificial Sequence
  chemically synthesized
gagaggtgggtggaggctgt

SEQ ID NO: 10825 - DNA, 20 bp, Artificial Sequence
  chemically synthesized
agaggtgggtggaggctgtg

SEQ ID NO: 10826 - DNA, 20 bp, Artificial Sequence
  chemically synthesized
ggctgtgaggcatcaatatg

SEQ ID NO: 10827 - DNA, 20 bp, Artificial Sequence
  chemically synthesized
tgtgaggcatcaatatgtgg

SEQ ID NO: 10828 - DNA, 20 bp, Artificial Sequence
  chemically synthesized
ggtggcatccatctgcattt

SEQ ID NO: 10829 - DNA, 20 bp, Artificial Sequence
  chemically synthesized
ttggtgatttttttccttca

SEQ ID NO: 10830 - DNA, 20 bp, Artificial Sequence
  chemically synthesized
tttttttccttcacagtcct

SEQ ID NO: 10831 - DNA, 20 bp, Artificial Sequence
  chemically synthesized
cttcacagtcctcggctgtc

SEQ ID NO: 10832 - DNA, 20 bp, Artificial Sequence
  chemically synthesized
ttcacagtcctcggctgtct

SEQ ID NO: 10833 - DNA, 20 bp, Artificial Sequence
  chemically synthesized
acagtcctcggctgtctggg

SEQ ID NO: 10834 - DNA, 20 bp, Artificial Sequence
  chemically synthesized
agtcctcggctgtctgggaa

SEQ ID NO: 10835 - DNA, 20 bp, Artificial Sequence
  chemically synthesized
cctcggctgtctgggaagag

SEQ ID NO: 10836 - DNA, 20 bp, Artificial Sequence
  chemically synthesized
ctcggctgtctgggaagaga

SEQ ID NO: 10837 - DNA, 20 bp, Artificial Sequence
  chemically synthesized
tgtctgggaagagaaggatg

SEQ ID NO: 10838 - DNA, 20 bp, Artificial Sequence
  chemically synthesized
gtctgggaagagaaggatga

SEQ ID NO: 10839 - DNA, 20 bp, Artificial Sequence
  chemically synthesized
tgggaagagaaggatgaagg

SEQ ID NO: 10840 - DNA, 20 bp, Artificial Sequence
  chemically synthesized
aagagaaggatgaaggcaga

SEQ ID NO: 10841 - DNA, 20 bp, Artificial Sequence
  chemically synthesized
ggcagatggctgctccaatt

SEQ ID NO: 10842 - DNA, 20 bp, Artificial Sequence
  chemically synthesized
gcagatggctgctccaattt

SEQ ID NO: 10843 - DNA, 20 bp, Artificial Sequence
  chemically synthesized
cagatggctgctccaattta

SEQ ID NO: 10844 - DNA, 20 bp, Artificial Sequence
  chemically synthesized
agatggctgctccaatttag

SEQ ID NO: 10845 - DNA, 20 bp, Artificial Sequence
  chemically synthesized
ggctgctccaatttaggggc

SEQ ID NO: 10846 - DNA, 20 bp, Artificial Sequence
  chemically synthesized
gctgctccaatttaggggct

SEQ ID NO: 10847 - DNA, 20 bp, Artificial Sequence
  chemically synthesized
caatttaggggctaggattg

SEQ ID NO: 10848 - DNA, 20 bp, Artificial Sequence
  chemically synthesized
aatttaggggctaggattgc

SEQ ID NO: 10849 - DNA, 20 bp, Artificial Sequence
  chemically synthesized
atttaggggctaggattgca

SEQ ID NO: 10850 - DNA, 20 bp, Artificial Sequence
  chemically synthesized
taggggctaggattgcaggg

SEQ ID NO: 10851 - DNA, 20 bp, Artificial Sequence
  chemically synthesized
aggggctaggattgcagggt

SEQ ID NO: 10852 - DNA, 20 bp, Artificial Sequence
  chemically synthesized
ctaggattgcagggtgggca

SEQ ID NO: 10853 - DNA, 20 bp, Artificial Sequence
  chemically synthesized
gtgggcacagcattgcaaac

SEQ ID NO: 10854 - DNA, 20 bp, Artificial Sequence
  chemically synthesized
cacagcattgcaaacgagtg

SEQ ID NO: 10855 - DNA, 20 bp, Artificial Sequence
  chemically synthesized
acagcattgcaaacgagtga

SEQ ID NO: 10856 - DNA, 20 bp, Artificial Sequence
  chemically synthesized
gcaaacgagtgaaggaaatt

SEQ ID NO: 10857 - DNA, 20 bp, Artificial Sequence
  chemically synthesized
gtgaaggaaattgagaaata

SEQ ID NO: 10858 - DNA, 20 bp, Artificial Sequence
  chemically synthesized
attgagaaatatggccaatg

SEQ ID NO: 10859 - DNA, 20 bp, Artificial Sequence
  chemically synthesized
tgagaaatatggccaatgaa

SEQ ID NO: 10860 - DNA, 20 bp, Artificial Sequence
  chemically synthesized
atatggccaatgaagagttg

SEQ ID NO: 10861 - DNA, 20 bp, Artificial Sequence
  chemically synthesized
atggccaatgaagagttgaa

SEQ ID NO: 10862 - DNA, 20 bp, Artificial Sequence
  chemically synthesized
ggccaatgaagagttgaaga

SEQ ID NO: 10863 - DNA, 20 bp, Artificial Sequence
  chemically synthesized
gccaatgaagagttgaagag

SEQ ID NO: 10864 - DNA, 20 bp, Artificial Sequence
  chemically synthesized
tgaagagttgaagagaggcc

SEQ ID NO: 10865 - DNA, 20 bp, Artificial Sequence
  chemically synthesized
agttgaagagaggcctggca

SEQ ID NO: 10866 - DNA, 20 bp, Artificial Sequence
  chemically synthesized
tgaagagaggcctggcatgg

SEQ ID NO: 10867 - DNA, 20 bp, Artificial Sequence
  chemically synthesized
gtggctcacacctataatcc

SEQ ID NO: 10868 - DNA, 20 bp, Artificial Sequence
  chemically synthesized
acctataatcccagcacttt

SEQ ID NO: 10869 - DNA, 20 bp, Artificial Sequence
  chemically synthesized
ctataatcccagcactttca

SEQ ID NO: 10870 - DNA, 20 bp, Artificial Sequence
  chemically synthesized
tataatcccagcactttcag

SEQ ID NO: 10871 - DNA, 20 bp, Artificial Sequence
  chemically synthesized
tcccagcactttcagaggcc

SEQ ID NO: 10872 - DNA, 20 bp, Artificial Sequence
  chemically synthesized
cccagcactttcagaggccc

SEQ ID NO: 10873 - DNA, 20 bp, Artificial Sequence
  chemically synthesized
agcactttcagaggcccagg

SEQ ID NO: 10874 - DNA, 20 bp, Artificial Sequence
  chemically synthesized
gcactttcagaggcccaggc

SEQ ID NO: 10875 - DNA, 20 bp, Artificial Sequence
  chemically synthesized
ctttcagaggcccaggcagg

SEQ ID NO: 10876 - DNA, 20 bp, Artificial Sequence
  chemically synthesized
cccaggcaggcagatcactt

SEQ ID NO: 10877 - DNA, 20 bp, Artificial Sequence
  chemically synthesized
ccaggcaggcagatcacttg

SEQ ID NO: 10878 - DNA, 20 bp, Artificial Sequence
  chemically synthesized
gcaggcagatcacttgaggt

SEQ ID NO: 10879 - DNA, 20 bp, Artificial Sequence
  chemically synthesized
caggcagatcacttgaggtc

SEQ ID NO: 10880 - DNA, 20 bp, Artificial Sequence
  chemically synthesized
ggcagatcacttgaggtcag

SEQ ID NO: 10881 - DNA, 20 bp, Artificial Sequence
  chemically synthesized
tgaggtcaggagttcgacac

SEQ ID NO: 10882 - DNA, 20 bp, Artificial Sequence
  chemically synthesized
tcaggagttcgacaccagcc

SEQ ID NO: 10883 - DNA, 20 bp, Artificial Sequence
  chemically synthesized
tcgacaccagcctggccaac

SEQ ID NO: 10884 - DNA, 20 bp, Artificial Sequence
  chemically synthesized
cgacaccagcctggccaaca

SEQ ID NO: 10885 - DNA, 20 bp, Artificial Sequence
  chemically synthesized
gcctggccaacaaggtgaaa

SEQ ID NO: 10886 - DNA, 20 bp, Artificial Sequence
  chemically synthesized
aaggtgaaatggtgaaaccc

SEQ ID NO: 10887 - DNA, 20 bp, Artificial Sequence
  chemically synthesized
tttactaaaaatacaaaaat

SEQ ID NO: 10888 - DNA, 20 bp, Artificial Sequence
  chemically synthesized
ctaaaaatacaaaaattagc

SEQ ID NO: 10889 - DNA, 20 bp, Artificial Sequence
  chemically synthesized
taaaaatacaaaaattagct

SEQ ID NO: 10890 - DNA, 20 bp, Artificial Sequence
  chemically synthesized
atacaaaaattagctgggca

SEQ ID NO: 10891 - DNA, 20 bp, Artificial Sequence
  chemically synthesized
caaaaattagctgggcatgg

SEQ ID NO: 10892 - DNA, 20 bp, Artificial Sequence
  chemically synthesized
aaattagctgggcatggtgg

SEQ ID NO: 10893 - DNA, 20 bp, Artificial Sequence
  chemically synthesized
aattagctgggcatggtggc

SEQ ID NO: 10894 - DNA, 20 bp, Artificial Sequence
  chemically synthesized
gtggcgggtgcctgtaatcc

SEQ ID NO: 10895 - DNA, 20 bp, Artificial Sequence
  chemically synthesized
tgcctgtaatcccagctact

SEQ ID NO: 10896 - DNA, 20 bp, Artificial Sequence
  chemically synthesized
gcctgtaatcccagctactt

SEQ ID NO: 10897 - DNA, 20 bp, Artificial Sequence
  chemically synthesized
ctgtaatcccagctacttgg

SEQ ID NO: 10898 - DNA, 20 bp, Artificial Sequence
  chemically synthesized
tgtaatcccagctacttggg

SEQ ID NO: 10899 - DNA, 20 bp, Artificial Sequence
  chemically synthesized
tcccagctacttgggaggct

SEQ ID NO: 10900 - DNA, 20 bp, Artificial Sequence
  chemically synthesized
cccagctacttgggaggctg

SEQ ID NO: 10901 - DNA, 20 bp, Artificial Sequence
  chemically synthesized
agctacttgggaggctgagg

SEQ ID NO: 10902 - DNA, 20 bp, Artificial Sequence
  chemically synthesized
gctacttgggaggctgaggc

SEQ ID NO: 10903 - DNA, 20 bp, Artificial Sequence
  chemically synthesized
tacttgggaggctgaggcag

SEQ ID NO: 10904 - DNA, 20 bp, Artificial Sequence
  chemically synthesized
gggaggctgaggcaggagaa

SEQ ID NO: 10905 - DNA, 20 bp, Artificial Sequence
  chemically synthesized
gcaggagaatagcttgaacc

SEQ ID NO: 10906 - DNA, 20 bp, Artificial Sequence
  chemically synthesized
caggagaatagcttgaacct

SEQ ID NO: 10907 - DNA, 20 bp, Artificial Sequence
  chemically synthesized
ggagaatagcttgaacctgg

SEQ ID NO: 10908 - DNA, 20 bp, Artificial Sequence
  chemically synthesized
aatagcttgaacctgggaga

SEQ ID NO: 10909 - DNA, 20 bp, Artificial Sequence
  chemically synthesized
tagcttgaacctgggagatg

SEQ ID NO: 10910 - DNA, 20 bp, Artificial Sequence
  chemically synthesized
agcttgaacctgggagatgg

SEQ ID NO: 10911 - DNA, 20 bp, Artificial Sequence
  chemically synthesized
aacctgggagatggaggttg

SEQ ID NO: 10912 - DNA, 20 bp, Artificial Sequence
  chemically synthesized
tgggagatggaggttgcagt

SEQ ID NO: 10913 - DNA, 20 bp, Artificial Sequence
  chemically synthesized
gatggaggttgcagtgagct

SEQ ID NO: 10914 - DNA, 20 bp, Artificial Sequence
  chemically synthesized
gagatcgcaccactgcactc

SEQ ID NO: 10915 - DNA, 20 bp, Artificial Sequence
  chemically synthesized
cgcaccactgcactccagcc

SEQ ID NO: 10916 - DNA, 20 bp, Artificial Sequence
  chemically synthesized
gcaccactgcactccagcct

SEQ ID NO: 10917 - DNA, 20 bp, Artificial Sequence
  chemically synthesized
ctgcactccagcctgggcga

SEQ ID NO: 10918 - DNA, 20 bp, Artificial Sequence
  chemically synthesized
gcactccagcctgggcgaca

SEQ ID NO: 10919 - DNA, 20 bp, Artificial Sequence
  chemically synthesized
tccagcctgggcgacagagc

SEQ ID NO: 10920 - DNA, 20 bp, Artificial Sequence
  chemically synthesized
caagactctgtcaaaaaaaa

SEQ ID NO: 10921 - DNA, 20 bp, Artificial Sequence
  chemically synthesized
agactctgtcaaaaaaaaaa

SEQ ID NO: 10922 - DNA, 20 bp, Artificial Sequence
  chemically synthesized
tgtcaaaaaaaaaagagttg

SEQ ID NO: 10923 - DNA, 20 bp, Artificial Sequence
  chemically synthesized
tcaaaaaaaaaagagttgaa

SEQ ID NO: 10924 - DNA, 20 bp, Artificial Sequence
  chemically synthesized
aaaaaagagttgaagagaaa

SEQ ID NO: 10925 - DNA, 20 bp, Artificial Sequence
  chemically synthesized
agagttgaagagaaaaagtc

SEQ ID NO: 10926 - DNA, 20 bp, Artificial Sequence
  chemically synthesized
gagttgaagagaaaaagtct

SEQ ID NO: 10927 - DNA, 20 bp, Artificial Sequence
  chemically synthesized
aaaagtctaggctaaattca

SEQ ID NO: 10928 - DNA, 20 bp, Artificial Sequence
  chemically synthesized
aggctaaattcaaagaaaaa

SEQ ID NO: 10929 - DNA, 20 bp, Artificial Sequence
  chemically synthesized
taaattcaaagaaaaaaagt

SEQ ID NO: 10930 - DNA, 20 bp, Artificial Sequence
  chemically synthesized
aagaaaaaaagtgagcccaa

SEQ ID NO: 10931 - DNA, 20 bp, Artificial Sequence
  chemically synthesized
agaaaaaaagtgagcccaaa

SEQ ID NO: 10932 - DNA, 20 bp, Artificial Sequence
  chemically synthesized
gtgagcccaaaaggaacttg

SEQ ID NO: 10933 - DNA, 20 bp, Artificial Sequence
  chemically synthesized
gagcccaaaaggaacttgca

SEQ ID NO: 10934 - DNA, 20 bp, Artificial Sequence
  chemically synthesized
ccaaaaggaacttgcagagc

SEQ ID NO: 10935 - DNA, 20 bp, Artificial Sequence
  chemically synthesized
caaaaggaacttgcagagca

SEQ ID NO: 10936 - DNA, 20 bp, Artificial Sequence
  chemically synthesized
aaaaggaacttgcagagcaa

SEQ ID NO: 10937 - DNA, 20 bp, Artificial Sequence
  chemically synthesized
gaacttgcagagcaagggaa

SEQ ID NO: 10938 - DNA, 20 bp, Artificial Sequence
  chemically synthesized
cttgcagagcaagggaaaag

SEQ ID NO: 10939 - DNA, 20 bp, Artificial Sequence
  chemically synthesized
ttgcagagcaagggaaaagc

SEQ ID NO: 10940 - DNA, 20 bp, Artificial Sequence
  chemically synthesized
tgcagagcaagggaaaagca

SEQ ID NO: 10941 - DNA, 20 bp, Artificial Sequence
  chemically synthesized
aagggaaaagcagggatgtc

SEQ ID NO: 10942 - DNA, 20 bp, Artificial Sequence
  chemically synthesized
agggaaaagcagggatgtca

SEQ ID NO: 10943 - DNA, 20 bp, Artificial Sequence
  chemically synthesized
gggaaaagcagggatgtcaa

SEQ ID NO: 10944 - DNA, 20 bp, Artificial Sequence
  chemically synthesized
aagcagggatgtcaagggac

SEQ ID NO: 10945 - DNA, 20 bp, Artificial Sequence
  chemically synthesized
agggactagaacactccata

SEQ ID NO: 10946 - DNA, 20 bp, Artificial Sequence
  chemically synthesized
agaacactccataaagtgaa

SEQ ID NO: 10947 - DNA, 20 bp, Artificial Sequence
  chemically synthesized
tgaacagctgcaatgaaaat

SEQ ID NO: 10948 - DNA, 20 bp, Artificial Sequence
  chemically synthesized
gaacagctgcaatgaaaata

SEQ ID NO: 10949 - DNA, 20 bp, Artificial Sequence
  chemically synthesized
aacagctgcaatgaaaataa

SEQ ID NO: 10950 - DNA, 20 bp, Artificial Sequence
  chemically synthesized
agctgcaatgaaaataaggg

SEQ ID NO: 10951 - DNA, 20 bp, Artificial Sequence
  chemically synthesized
gcaatgaaaataagggaaga

SEQ ID NO: 10952 - DNA, 20 bp, Artificial Sequence
  chemically synthesized
gaaaataagggaagaaagtt

SEQ ID NO: 10953 - DNA, 20 bp, Artificial Sequence
  chemically synthesized
ctttcctttctcttcctttt

SEQ ID NO: 10954 - DNA, 20 bp, Artificial Sequence
  chemically synthesized
ttcctttctcttcctttttg

SEQ ID NO: 10955 - DNA, 20 bp, Artificial Sequence
  chemically synthesized
tcttcctttttggagttaat

SEQ ID NO: 10956 - DNA, 20 bp, Artificial Sequence
  chemically synthesized
cttcctttttggagttaatc

SEQ ID NO: 10957 - DNA, 20 bp, Artificial Sequence
  chemically synthesized
cctttttggagttaatcagg

SEQ ID NO: 10958 - DNA, 20 bp, Artificial Sequence
  chemically synthesized
ttttggagttaatcaggaag

SEQ ID NO: 10959 - DNA, 20 bp, Artificial Sequence
  chemically synthesized
ggaagtagtcccaaataccc

SEQ ID NO: 10960 - DNA, 20 bp, Artificial Sequence
  chemically synthesized
gtagtcccaaataccccaga

SEQ ID NO: 10961 - DNA, 20 bp, Artificial Sequence
  chemically synthesized
ccccagaaagttcatcttat

SEQ ID NO: 10962 - DNA, 20 bp, Artificial Sequence
  chemically synthesized
aagttcatcttataagccct

SEQ ID NO: 10963 - DNA, 20 bp, Artificial Sequence
  chemically synthesized
tataagcccttggtcctctt

SEQ ID NO: 10964 - DNA, 20 bp, Artificial Sequence
  chemically synthesized
agcccttggtcctcttgaga

SEQ ID NO: 10965 - DNA, 20 bp, Artificial Sequence
  chemically synthesized
tggtcctcttgagatggtat

SEQ ID NO: 10966 - DNA, 20 bp, Artificial Sequence
  chemically synthesized
gatggtatcagatatattgc

SEQ ID NO: 10967 - DNA, 20 bp, Artificial Sequence
  chemically synthesized
gatatattgctagacccttg

SEQ ID NO: 10968 - DNA, 20 bp, Artificial Sequence
  chemically synthesized
tattgctagacccttgaaga

SEQ ID NO: 10969 - DNA, 20 bp, Artificial Sequence
  chemically synthesized
attgctagacccttgaagaa

SEQ ID NO: 10970 - DNA, 20 bp, Artificial Sequence
  chemically synthesized
cttgaagaaaggaacaactc

SEQ ID NO: 10971 - DNA, 20 bp, Artificial Sequence
  chemically synthesized
ttgaagaaaggaacaactcc

SEQ ID NO: 10972 - DNA, 20 bp, Artificial Sequence
  chemically synthesized
acaactccaggcaacttctt

SEQ ID NO: 10973 - DNA, 20 bp, Artificial Sequence
  chemically synthesized
caaacacatgtgtgtgtata

SEQ ID NO: 10974 - DNA, 20 bp, Artificial Sequence
  chemically synthesized
agccatgcattccttaacaa

SEQ ID NO: 10975 - DNA, 20 bp, Artificial Sequence
  chemically synthesized
gccatgcattccttaacaat

SEQ ID NO: 10976 - DNA, 20 bp, Artificial Sequence
  chemically synthesized
ccatgcattccttaacaatg

SEQ ID NO: 10977 - DNA, 20 bp, Artificial Sequence
  chemically synthesized
taacaatggggatatattct

SEQ ID NO: 10978 - DNA, 20 bp, Artificial Sequence
  chemically synthesized
attctgagaaatgtgtcatt

SEQ ID NO: 10979 - DNA, 20 bp, Artificial Sequence
  chemically synthesized
tcatcattgtgcgaacataa

SEQ ID NO: 10980 - DNA, 20 bp, Artificial Sequence
  chemically synthesized
atcattgtgcgaacataata

SEQ ID NO: 10981 - DNA, 20 bp, Artificial Sequence
  chemically synthesized
tgtacttacctaaacctaaa

SEQ ID NO: 10982 - DNA, 20 bp, Artificial Sequence
  chemically synthesized
ttacctaaacctaaatggta

SEQ ID NO: 10983 - DNA, 20 bp, Artificial Sequence
  chemically synthesized
ggtatagcttactacatacc

SEQ ID NO: 10984 - DNA, 20 bp, Artificial Sequence
  chemically synthesized
gtatagcttactacatacct

SEQ ID NO: 10985 - DNA, 20 bp, Artificial Sequence
  chemically synthesized
atacctaggttgtattgatg

SEQ ID NO: 10986 - DNA, 20 bp, Artificial Sequence
  chemically synthesized
ttgatgtggcctattgctcc

SEQ ID NO: 10987 - DNA, 20 bp, Artificial Sequence
  chemically synthesized
tgatgtggcctattgctcct

SEQ ID NO: 10988 - DNA, 20 bp, Artificial Sequence
  chemically synthesized
gcctattgctcctaggctcc

SEQ ID NO: 10989 - DNA, 20 bp, Artificial Sequence
  chemically synthesized
cctattgctcctaggctcct

SEQ ID NO: 10990 - DNA, 20 bp, Artificial Sequence
  chemically synthesized
tcctgggctgcaaacctgta

SEQ ID NO: 10991 - DNA, 20 bp, Artificial Sequence
  chemically synthesized
tgtgactgtactgaacactg

SEQ ID NO: 10992 - DNA, 20 bp, Artificial Sequence
  chemically synthesized
gtgactgtactgaacactgt

SEQ ID NO: 10993 - DNA, 20 bp, Artificial Sequence
  chemically synthesized
gtactgaacactgtaggcaa

SEQ ID NO: 10994 - DNA, 20 bp, Artificial Sequence
  chemically synthesized
aacactgtaggcaatggtaa

SEQ ID NO: 10995 - DNA, 20 bp, Artificial Sequence
  chemically synthesized
actgtaggcaatggtaacag

SEQ ID NO: 10996 - DNA, 20 bp, Artificial Sequence
  chemically synthesized
ggtatttgtgtatctaaaca

SEQ ID NO: 10997 - DNA, 20 bp, Artificial Sequence
  chemically synthesized
ttgtgtatctaaacatagaa

SEQ ID NO: 10998 - DNA, 20 bp, Artificial Sequence
  chemically synthesized
tgtgtatctaaacatagaaa

SEQ ID NO: 10999 - DNA, 20 bp, Artificial Sequence
  chemically synthesized
atctaaacatagaaaaggta

SEQ ID NO: 11000 - DNA, 20 bp, Artificial Sequence
  chemically synthesized
gaaaaggtacagtgaaaata

SEQ ID NO: 11001 - DNA, 20 bp, Artificial Sequence
  chemically synthesized
aatacagtattataacctta

SEQ ID NO: 11002 - DNA, 20 bp, Artificial Sequence
  chemically synthesized
atacagtattataaccttat

SEQ ID NO: 11003 - DNA, 20 bp, Artificial Sequence
  chemically synthesized
gggaccactgtcgtataatg

SEQ ID NO: 11004 - DNA, 20 bp, Artificial Sequence
  chemically synthesized
ttgaccaaaatgtcattgtg

SEQ ID NO: 11005 - DNA, 20 bp, Artificial Sequence
  chemically synthesized
tatatgtacacacacacaca

SEQ ID NO: 11006 - DNA, 20 bp, Artificial Sequence
  chemically synthesized
tatgtacacacacacacata

SEQ ID NO: 11007 - DNA, 20 bp, Artificial Sequence
  chemically synthesized
tgtacacacacacacataga

SEQ ID NO: 11008 - DNA, 20 bp, Artificial Sequence
  chemically synthesized
tacacacacacacatagaga

SEQ ID NO: 11009 - DNA, 20 bp, Artificial Sequence
  chemically synthesized
cacacacacacatagagaga

SEQ ID NO: 11010 - DNA, 20 bp, Artificial Sequence
  chemically synthesized
cacacacacatagagagaga

SEQ ID NO: 11011 - DNA, 20 bp, Artificial Sequence
  chemically synthesized
cacacacatagagagagaga

SEQ ID NO: 11012 - DNA, 20 bp, Artificial Sequence
  chemically synthesized
cacacatagagagagagaga

SEQ ID NO: 11013 - DNA, 20 bp, Artificial Sequence
  chemically synthesized
acacatagagagagagagag

SEQ ID NO: 11014 - DNA, 20 bp, Artificial Sequence
  chemically synthesized
acatagagagagagagagag

SEQ ID NO: 11015 - DNA, 20 bp, Artificial Sequence
  chemically synthesized
atagagagagagagagagga

SEQ ID NO: 11016 - DNA, 20 bp, Artificial Sequence
  chemically synthesized
tagagagagagagagaggag

SEQ ID NO: 11017 - DNA, 20 bp, Artificial Sequence
  chemically synthesized
gagagagagagagaggagag

SEQ ID NO: 11018 - DNA, 20 bp, Artificial Sequence
  chemically synthesized
gagagagagagaggagagga

SEQ ID NO: 11019 - DNA, 20 bp, Artificial Sequence
  chemically synthesized
agagagagagaggagaggag

SEQ ID NO: 11020 - DNA, 20 bp, Artificial Sequence
  chemically synthesized
gagagagaggagaggagagg

SEQ ID NO: 11021 - DNA, 20 bp, Artificial Sequence
  chemically synthesized
agagagaggagaggagagga

SEQ ID NO: 11022 - DNA, 20 bp, Artificial Sequence
  chemically synthesized
agagaggagaggagaggaag

SEQ ID NO: 11023 - DNA, 20 bp, Artificial Sequence
  chemically synthesized
gagaggagaggagaggaagg

SEQ ID NO: 11024 - DNA, 20 bp, Artificial Sequence
  chemically synthesized
agaggagaggagaggaagga

SEQ ID NO: 11025 - DNA, 20 bp, Artificial Sequence
  chemically synthesized
aggagaggagaggaaggagg

SEQ ID NO: 11026 - DNA, 20 bp, Artificial Sequence
  chemically synthesized
ggagaggagaggaaggaggg

SEQ ID NO: 11027 - DNA, 20 bp, Artificial Sequence
  chemically synthesized
gagaggagaggaaggaggga

SEQ ID NO: 11028 - DNA, 20 bp, Artificial Sequence
  chemically synthesized
aggagaggaaggagggaggg

SEQ ID NO: 11029 - DNA, 20 bp, Artificial Sequence
  chemically synthesized
ggagaggaaggagggaggga

SEQ ID NO: 11030 - DNA, 20 bp, Artificial Sequence
  chemically synthesized
agaggaaggagggagggaag

SEQ ID NO: 11031 - DNA, 20 bp, Artificial Sequence
  chemically synthesized
agggaaggagaaatatgatt

SEQ ID NO: 11032 - DNA, 20 bp, Artificial Sequence
  chemically synthesized
aaggagaaatatgattcaga

SEQ ID NO: 11033 - DNA, 20 bp, Artificial Sequence
  chemically synthesized
ggagaaatatgattcagata

SEQ ID NO: 11034 - DNA, 20 bp, Artificial Sequence
  chemically synthesized
agatagagacatctatcctc

SEQ ID NO: 11035 - DNA, 20 bp, Artificial Sequence
  chemically synthesized
atagagacatctatcctcca

SEQ ID NO: 11036 - DNA, 20 bp, Artificial Sequence
  chemically synthesized
gacatctatcctccagagtt

SEQ ID NO: 11037 - DNA, 20 bp, Artificial Sequence
  chemically synthesized
acatctatcctccagagttc

SEQ ID NO: 11038 - DNA, 20 bp, Artificial Sequence
  chemically synthesized
atctatcctccagagttcag

SEQ ID NO: 11039 - DNA, 20 bp, Artificial Sequence
  chemically synthesized
agagttcaggagtgtctctt

SEQ ID NO: 11040 - DNA, 20 bp, Artificial Sequence
  chemically synthesized
tcaggagtgtctcttcagac

SEQ ID NO: 11041 - DNA, 20 bp, Artificial Sequence
  chemically synthesized
caggagtgtctcttcagact

SEQ ID NO: 11042 - DNA, 20 bp, Artificial Sequence
  chemically synthesized
gagtgtctcttcagactagg

SEQ ID NO: 11043 - DNA, 20 bp, Artificial Sequence
  chemically synthesized
ctcttcagactaggtagatg

SEQ ID NO: 11044 - DNA, 20 bp, Artificial Sequence
  chemically synthesized
aaaaaacatatcctgaattc

SEQ ID NO: 11045 - DNA, 20 bp, Artificial Sequence
  chemically synthesized
aaaacatatcctgaattcta

SEQ ID NO: 11046 - DNA, 20 bp, Artificial Sequence
  chemically synthesized
aacatatcctgaattctaga

SEQ ID NO: 11047 - DNA, 20 bp, Artificial Sequence
  chemically synthesized
cctataacacttgccaacca

SEQ ID NO: 11048 - DNA, 20 bp, Artificial Sequence
  chemically synthesized
ctataacacttgccaaccaa

SEQ ID NO: 11049 - DNA, 20 bp, Artificial Sequence
  chemically synthesized
attgcttttttaaattaatg

SEQ ID NO: 11050 - DNA, 20 bp, Artificial Sequence
  chemically synthesized
agtgatttttctttaacatc

SEQ ID NO: 11051 - DNA, 20 bp, Artificial Sequence
  chemically synthesized
ttttctttaacatctagtga

SEQ ID NO: 11052 - DNA, 20 bp, Artificial Sequence
  chemically synthesized
taacatctagtgacagacac

SEQ ID NO: 11053 - DNA, 20 bp, Artificial Sequence
  chemically synthesized
aacatctagtgacagacact

SEQ ID NO: 11054 - DNA, 20 bp, Artificial Sequence
  chemically synthesized
acatctagtgacagacactg

SEQ ID NO: 11055 - DNA, 20 bp, Artificial Sequence
  chemically synthesized
agacactggggtcacatttg

SEQ ID NO: 11056 - DNA, 20 bp, Artificial Sequence
  chemically synthesized
actggggtcacatttgcagc

SEQ ID NO: 11057 - DNA, 20 bp, Artificial Sequence
  chemically synthesized
atttgcagctggaccataat

SEQ ID NO: 11058 - DNA, 20 bp, Artificial Sequence
  chemically synthesized
tttgcagctggaccataatt

SEQ ID NO: 11059 - DNA, 20 bp, Artificial Sequence
  chemically synthesized
ataattaggcttctgttctt

SEQ ID NO: 11060 - DNA, 20 bp, Artificial Sequence
  chemically synthesized
taattaggcttctgttcttc

SEQ ID NO: 11061 - DNA, 20 bp, Artificial Sequence
  chemically synthesized
attaggcttctgttcttcag

SEQ ID NO: 11062 - DNA, 20 bp, Artificial Sequence
  chemically synthesized
cttcaggagacatttgttca

SEQ ID NO: 11063 - DNA, 20 bp, Artificial Sequence
  chemically synthesized
gacatttgttcaaagtcatt

SEQ ID NO: 11064 - DNA, 20 bp, Artificial Sequence
  chemically synthesized
acatttgttcaaagtcattt

SEQ ID NO: 11065 - DNA, 20 bp, Artificial Sequence
  chemically synthesized
gggcaaccatattctgaaaa

SEQ ID NO: 11066 - DNA, 20 bp, Artificial Sequence
  chemically synthesized
accatattctgaaaacagcc

SEQ ID NO: 11067 - DNA, 20 bp, Artificial Sequence
  chemically synthesized
tattctgaaaacagcccagc

SEQ ID NO: 11068 - DNA, 20 bp, Artificial Sequence
  chemically synthesized
attctgaaaacagcccagcc

SEQ ID NO: 11069 - DNA, 20 bp, Artificial Sequence
  chemically synthesized
ttctgaaaacagcccagcca

SEQ ID NO: 11070 - DNA, 20 bp, Artificial Sequence
  chemically synthesized
aaacagcccagccagggtga

SEQ ID NO: 11071 - DNA, 20 bp, Artificial Sequence
  chemically synthesized
gggtgatggatcactttgca

SEQ ID NO: 11072 - DNA, 20 bp, Artificial Sequence
  chemically synthesized
actttgcaaagatcctcaat

SEQ ID NO: 11073 - DNA, 20 bp, Artificial Sequence
  chemically synthesized
atcctcaatgagctattttc

SEQ ID NO: 11074 - DNA, 20 bp, Artificial Sequence
  chemically synthesized
gctattttcaagtgatgaca

SEQ ID NO: 11075 - DNA, 20 bp, Artificial Sequence
  chemically synthesized
tcaagtgatgacaaagtgtg

SEQ ID NO: 11076 - DNA, 20 bp, Artificial Sequence
  chemically synthesized
gtgaagttaaccgctcattt

SEQ ID NO: 11077 - DNA, 20 bp, Artificial Sequence
  chemically synthesized
agaactttctttttcatcca

SEQ ID NO: 11078 - DNA, 20 bp, Artificial Sequence
  chemically synthesized
aaagtaaattcaaatatgat

SEQ ID NO: 11079 - DNA, 20 bp, Artificial Sequence
  chemically synthesized
gaaatctgaccttttattac

SEQ ID NO: 11080 - DNA, 20 bp, Artificial Sequence
  chemically synthesized
actggaattctcttgactaa

SEQ ID NO: 11081 - DNA, 20 bp, Artificial Sequence
  chemically synthesized
cctaaatctccatgtgtata

SEQ ID NO: 11082 - DNA, 20 bp, Artificial Sequence
  chemically synthesized
tccatgtgtatacagtactg

SEQ ID NO: 11083 - DNA, 20 bp, Artificial Sequence
  chemically synthesized
ccatgtgtatacagtactgt

SEQ ID NO: 11084 - DNA, 20 bp, Artificial Sequence
  chemically synthesized
acagtactgtgggaacatca

SEQ ID NO: 11085 - DNA, 20 bp, Artificial Sequence
  chemically synthesized
tgtgggaacatcacagattt

SEQ ID NO: 11086 - DNA, 20 bp, Artificial Sequence
  chemically synthesized
gattttggctccatgcccta

SEQ ID NO: 11087 - DNA, 20 bp, Artificial Sequence
  chemically synthesized
ttttggctccatgccctaaa

SEQ ID NO: 11088 - DNA, 20 bp, Artificial Sequence
  chemically synthesized
tccatgccctaaagagaaat

SEQ ID NO: 11089 - DNA, 20 bp, Artificial Sequence
  chemically synthesized
cctaaagagaaattggcttt

SEQ ID NO: 11090 - DNA, 20 bp, Artificial Sequence
  chemically synthesized
aaattggctttcagattatt

SEQ ID NO: 11091 - DNA, 20 bp, Artificial Sequence
  chemically synthesized
gattatttggattaaaaaca

SEQ ID NO: 11092 - DNA, 20 bp, Artificial Sequence
  chemically synthesized
ttaaaaacaaagactttctt

SEQ ID NO: 11093 - DNA, 20 bp, Artificial Sequence
  chemically synthesized
aaaaacaaagactttcttaa

SEQ ID NO: 11094 - DNA, 20 bp, Artificial Sequence
  chemically synthesized
tttcttttttgctaaaacta

SEQ ID NO: 11095 - DNA, 20 bp, Artificial Sequence
  chemically synthesized
agaattattcttttacattt

SEQ ID NO: 11096 - DNA, 20 bp, Artificial Sequence
  chemically synthesized
acgccaacaaaattctgaat

SEQ ID NO: 11097 - DNA, 20 bp, Artificial Sequence
  chemically synthesized
acaaaattctgaatcggcca

SEQ ID NO: 11098 - DNA, 20 bp, Artificial Sequence
  chemically synthesized
aaaattctgaatcggccaaa

SEQ ID NO: 11099 - DNA, 20 bp, Artificial Sequence
  chemically synthesized
aaattctgaatcggccaaag

SEQ ID NO: 11100 - DNA, 20 bp, Artificial Sequence
  chemically synthesized
tcggccaaagaggtataatt

SEQ ID NO: 11101 - DNA, 20 bp, Artificial Sequence
  chemically synthesized
cggccaaagaggtataattc

SEQ ID NO: 11102 - DNA, 20 bp, Artificial Sequence
  chemically synthesized
gaggtataattcaggtaaat

SEQ ID NO: 11103 - DNA, 20 bp, Artificial Sequence
  chemically synthesized
gtataattcaggtaaattgg

SEQ ID NO: 11104 - DNA, 20 bp, Artificial Sequence
  chemically synthesized
ataattcaggtaaattggaa

SEQ ID NO: 11105 - DNA, 20 bp, Artificial Sequence
  chemically synthesized
taaattggaagagtttgttc

SEQ ID NO: 11106 - DNA, 20 bp, Artificial Sequence
  chemically synthesized
aaattggaagagtttgttca

SEQ ID NO: 11107 - DNA, 20 bp, Artificial Sequence
  chemically synthesized
aattggaagagtttgttcaa

SEQ ID NO: 11108 - DNA, 20 bp, Artificial Sequence
  chemically synthesized
agtttgttcaagggaacctt

SEQ ID NO: 11109 - DNA, 20 bp, Artificial Sequence
  chemically synthesized
tttgttcaagggaaccttga

SEQ ID NO: 11110 - DNA, 20 bp, Artificial Sequence
  chemically synthesized
tgttcaagggaaccttgaga

SEQ ID NO: 11111 - DNA, 20 bp, Artificial Sequence
  chemically synthesized
gaaccttgagagagaatgta

SEQ ID NO: 11112 - DNA, 20 bp, Artificial Sequence
  chemically synthesized
ccttgagagagaatgtatgg

SEQ ID NO: 11113 - DNA, 20 bp, Artificial Sequence
  chemically synthesized
agagagaatgtatggaagaa

SEQ ID NO: 11114 - DNA, 20 bp, Artificial Sequence
  chemically synthesized
gaatgtatggaagaaaagtg

SEQ ID NO: 11115 - DNA, 20 bp, Artificial Sequence
  chemically synthesized
ggaagaaaagtgtagttttg

SEQ ID NO: 11116 - DNA, 20 bp, Artificial Sequence
  chemically synthesized
agaaaagtgtagttttgaag

SEQ ID NO: 11117 - DNA, 20 bp, Artificial Sequence
  chemically synthesized
gtgtagttttgaagaagcac

SEQ ID NO: 11118 - DNA, 20 bp, Artificial Sequence
  chemically synthesized
tagttttgaagaagcacgag

SEQ ID NO: 11119 - DNA, 20 bp, Artificial Sequence
  chemically synthesized
gaagtttttgaaaacactga

SEQ ID NO: 11120 - DNA, 20 bp, Artificial Sequence
  chemically synthesized
tcttccatacattctctctc

SEQ ID NO: 11121 - DNA, 20 bp, Artificial Sequence
  chemically synthesized
cttccatacattctctctca

SEQ ID NO: 11122 - DNA, 20 bp, Artificial Sequence
  chemically synthesized
ttacctgaattatacctctt

SEQ ID NO: 11123 - DNA, 20 bp, Artificial Sequence
  chemically synthesized
ttatacctctttggccgatt

SEQ ID NO: 11124 - DNA, 20 bp, Artificial Sequence
  chemically synthesized
tggccgattcagaattttgt

SEQ ID NO: 11125 - DNA, 20 bp, Artificial Sequence
  chemically synthesized
ttgttggcgttttcatgatc

SEQ ID NO: 11126 - DNA, 20 bp, Artificial Sequence
  chemically synthesized
caagaaaaactgaaatgtaa

SEQ ID NO: 11127 - DNA, 20 bp, Artificial Sequence
  chemically synthesized
aatgtaaaagaataattctt

SEQ ID NO: 11128 - DNA, 20 bp, Artificial Sequence
  chemically synthesized
aaagaataattctttagttt

SEQ ID NO: 11129 - DNA, 20 bp, Artificial Sequence
  chemically synthesized
attctttagttttagcaaaa

SEQ ID NO: 11130 - DNA, 20 bp, Artificial Sequence
  chemically synthesized
atgaaaattttacatctctt

SEQ ID NO: 11131 - DNA, 20 bp, Artificial Sequence
  chemically synthesized
aaattttacatctcttaaga

SEQ ID NO: 11132 - DNA, 20 bp, Artificial Sequence
  chemically synthesized
ttttaatccaaataatctga

SEQ ID NO: 11133 - DNA, 20 bp, Artificial Sequence
  chemically synthesized
tctgaaagccaatttctctt

SEQ ID NO: 11134 - DNA, 20 bp, Artificial Sequence
  chemically synthesized
ctgaaagccaatttctcttt

SEQ ID NO: 11135 - DNA, 20 bp, Artificial Sequence
  chemically synthesized
tgaaagccaatttctcttta

SEQ ID NO: 11136 - DNA, 20 bp, Artificial Sequence
  chemically synthesized
gccaatttctctttagggca

SEQ ID NO: 11137 - DNA, 20 bp, Artificial Sequence
  chemically synthesized
caatttctctttagggcatg

SEQ ID NO: 11138 - DNA, 20 bp, Artificial Sequence
  chemically synthesized
caaaatctgtgatgttccca

SEQ ID NO: 11139 - DNA, 20 bp, Artificial Sequence
  chemically synthesized
cccacagtactgtatacaca

SEQ ID NO: 11140 - DNA, 20 bp, Artificial Sequence
  chemically synthesized
cacagtactgtatacacatg

SEQ ID NO: 11141 - DNA, 20 bp, Artificial Sequence
  chemically synthesized
actgtatacacatggagatt

SEQ ID NO: 11142 - DNA, 20 bp, Artificial Sequence
  chemically synthesized
ctgtatacacatggagattt

SEQ ID NO: 11143 - DNA, 20 bp, Artificial Sequence
  chemically synthesized
ttaaaattcaattttacttt

SEQ ID NO: 11144 - DNA, 20 bp, Artificial Sequence
  chemically synthesized
attcaattttacttttagtc

SEQ ID NO: 11145 - DNA, 20 bp, Artificial Sequence
  chemically synthesized
tcaattttacttttagtcaa

SEQ ID NO: 11146 - DNA, 20 bp, Artificial Sequence
  chemically synthesized
acttttagtcaagagaattc

SEQ ID NO: 11147 - DNA, 20 bp, Artificial Sequence
  chemically synthesized
caagagaattccagtaataa

SEQ ID NO: 11148 - DNA, 20 bp, Artificial Sequence
  chemically synthesized
aagagaattccagtaataaa

SEQ ID NO: 11149 - DNA, 20 bp, Artificial Sequence
  chemically synthesized
gaattccagtaataaaaggt

SEQ ID NO: 11150 - DNA, 20 bp, Artificial Sequence
  chemically synthesized
aatcatatttgaatttactt

SEQ ID NO: 11151 - DNA, 20 bp, Artificial Sequence
  chemically synthesized
tgaatttactttggatgaaa

SEQ ID NO: 11152 - DNA, 20 bp, Artificial Sequence
  chemically synthesized
tttactttggatgaaaaaga

SEQ ID NO: 11153 - DNA, 20 bp, Artificial Sequence
  chemically synthesized
gaaaaagaaagttctcaaat

SEQ ID NO: 11154 - DNA, 20 bp, Artificial Sequence
  chemically synthesized
aaagaaagttctcaaatgag

SEQ ID NO: 11155 - DNA, 20 bp, Artificial Sequence
  chemically synthesized
actttgtcatcacttgaaaa

SEQ ID NO: 11156 - DNA, 20 bp, Artificial Sequence
  chemically synthesized
tcacttgaaaatagctcatt

SEQ ID NO: 11157 - DNA, 20 bp, Artificial Sequence
  chemically synthesized
cacttgaaaatagctcattg

SEQ ID NO: 11158 - DNA, 20 bp, Artificial Sequence
  chemically synthesized
gctcattgaggatctttgca

SEQ ID NO: 11159 - DNA, 20 bp, Artificial Sequence
  chemically synthesized
tgcaaagtgatccatcaccc

SEQ ID NO: 11160 - DNA, 20 bp, Artificial Sequence
  chemically synthesized
aagtgatccatcaccctggc

SEQ ID NO: 11161 - DNA, 20 bp, Artificial Sequence
  chemically synthesized
agtgatccatcaccctggct

SEQ ID NO: 11162 - DNA, 20 bp, Artificial Sequence
  chemically synthesized
caccctggctgggctgtttt

SEQ ID NO: 11163 - DNA, 20 bp, Artificial Sequence
  chemically synthesized
gctgggctgttttcagaata

SEQ ID NO: 11164 - DNA, 20 bp, Artificial Sequence
  chemically synthesized
ctttgaacaaatgtctcctg

SEQ ID NO: 11165 - DNA, 20 bp, Artificial Sequence
  chemically synthesized
aacaaatgtctcctgaagaa

SEQ ID NO: 11166 - DNA, 20 bp, Artificial Sequence
  chemically synthesized
aaatgtctcctgaagaacag

SEQ ID NO: 11167 - DNA, 20 bp, Artificial Sequence
  chemically synthesized
gaagaacagaagcctaatta

SEQ ID NO: 11168 - DNA, 20 bp, Artificial Sequence
  chemically synthesized
acagaagcctaattatggtc

SEQ ID NO: 11169 - DNA, 20 bp, Artificial Sequence
  chemically synthesized
tccagctgcaaatgtgaccc

SEQ ID NO: 11170 - DNA, 20 bp, Artificial Sequence
  chemically synthesized
gtgaccccagtgtctgtcac

SEQ ID NO: 11171 - DNA, 20 bp, Artificial Sequence
  chemically synthesized
gtgtctgtcactagatgtta

SEQ ID NO: 11172 - DNA, 20 bp, Artificial Sequence
  chemically synthesized
atcactgcattaatttaaaa

SEQ ID NO: 11173 - DNA, 20 bp, Artificial Sequence
  chemically synthesized
ttaatttaaaaaagcaattt

SEQ ID NO: 11174 - DNA, 20 bp, Artificial Sequence
  chemically synthesized
aaaaagcaatttcagatcaa

SEQ ID NO: 11175 - DNA, 20 bp, Artificial Sequence
  chemically synthesized
tttcagatcaacagcacctt

SEQ ID NO: 11176 - DNA, 20 bp, Artificial Sequence
  chemically synthesized
agatcaacagcacctttggt

SEQ ID NO: 11177 - DNA, 20 bp, Artificial Sequence
  chemically synthesized
caacagcacctttggttggc

SEQ ID NO: 11178 - DNA, 20 bp, Artificial Sequence
  chemically synthesized
cctttggttggcaagtgtta

SEQ ID NO: 11179 - DNA, 20 bp, Artificial Sequence
  chemically synthesized
ctttggttggcaagtgttat

SEQ ID NO: 11180 - DNA, 20 bp, Artificial Sequence
  chemically synthesized
ggcaagtgttataggaattg

SEQ ID NO: 11181 - DNA, 20 bp, Artificial Sequence
  chemically synthesized
tataggaattgcagtgattt

SEQ ID NO: 11182 - DNA, 20 bp, Artificial Sequence
  chemically synthesized
cagtgatttaagcatctctc

SEQ ID NO: 11183 - DNA, 20 bp, Artificial Sequence
  chemically synthesized
ttaagcatctctctagaatt

SEQ ID NO: 11184 - DNA, 20 bp, Artificial Sequence
  chemically synthesized
taagcatctctctagaattc

SEQ ID NO: 11185 - DNA, 20 bp, Artificial Sequence
  chemically synthesized
attcaggatatgtttttttt

SEQ ID NO: 11186 - DNA, 20 bp, Artificial Sequence
  chemically synthesized
ttttttaagctacatctacc

SEQ ID NO: 11187 - DNA, 20 bp, Artificial Sequence
  chemically synthesized
agctacatctacctagtctg

SEQ ID NO: 11188 - DNA, 20 bp, Artificial Sequence
  chemically synthesized
ctacatctacctagtctgaa

SEQ ID NO: 11189 - DNA, 20 bp, Artificial Sequence
  chemically synthesized
gaagagacactcctgaactc

SEQ ID NO: 11190 - DNA, 20 bp, Artificial Sequence
  chemically synthesized
agagacactcctgaactctg

SEQ ID NO: 11191 - DNA, 20 bp, Artificial Sequence
  chemically synthesized
gagacactcctgaactctgg

SEQ ID NO: 11192 - DNA, 20 bp, Artificial Sequence
  chemically synthesized
cactcctgaactctggagga

SEQ ID NO: 11193 - DNA, 20 bp, Artificial Sequence
  chemically synthesized
tatcatatatatatatatat

SEQ ID NO: 11194 - DNA, 20 bp, Artificial Sequence
  chemically synthesized
tttgctgcacaatgacattt

SEQ ID NO: 11195 - DNA, 20 bp, Artificial Sequence
  chemically synthesized
aatgacattttggtcaatga

SEQ ID NO: 11196 - DNA, 20 bp, Artificial Sequence
  chemically synthesized
tgatggaccacattatacga

SEQ ID NO: 11197 - DNA, 20 bp, Artificial Sequence
  chemically synthesized
tggaccacattatacgacag

SEQ ID NO: 11198 - DNA, 20 bp, Artificial Sequence
  chemically synthesized
ttatacgacagtggtcccat

SEQ ID NO: 11199 - DNA, 20 bp, Artificial Sequence
  chemically synthesized
tatacgacagtggtcccata

SEQ ID NO: 11200 - DNA, 20 bp, Artificial Sequence
  chemically synthesized
cactgtaccttttctatgtt

SEQ ID NO: 11201 - DNA, 20 bp, Artificial Sequence
  chemically synthesized
accactgttaccattgccta

SEQ ID NO: 11202 - DNA, 20 bp, Artificial Sequence
  chemically synthesized
ttaccattgcctacagtgtt

SEQ ID NO: 11203 - DNA, 20 bp, Artificial Sequence
  chemically synthesized
attgcctacagtgttcagta

SEQ ID NO: 11204 - DNA, 20 bp, Artificial Sequence
  chemically synthesized
cagtacagtcacatgctgta

SEQ ID NO: 11205 - DNA, 20 bp, Artificial Sequence
  chemically synthesized
agtacagtcacatgctgtac

SEQ ID NO: 11206 - DNA, 20 bp, Artificial Sequence
  chemically synthesized
tcacatgctgtacaggtttg

SEQ ID NO: 11207 - DNA, 20 bp, Artificial Sequence
  chemically synthesized
tgctgtacaggtttgcagcc

SEQ ID NO: 11208 - DNA, 20 bp, Artificial Sequence
  chemically synthesized
gctgtacaggtttgcagccc

SEQ ID NO: 11209 - DNA, 20 bp, Artificial Sequence
  chemically synthesized
tgtacaggtttgcagcccag

SEQ ID NO: 11210 - DNA, 20 bp, Artificial Sequence
  chemically synthesized
aggtttgcagcccaggagcc

SEQ ID NO: 11211 - DNA, 20 bp, Artificial Sequence
  chemically synthesized
ggtttgcagcccaggagcct

SEQ ID NO: 11212 - DNA, 20 bp, Artificial Sequence
  chemically synthesized
tttgcagcccaggagcctag

SEQ ID NO: 11213 - DNA, 20 bp, Artificial Sequence
  chemically synthesized
gcccaggagcctaggagcaa

SEQ ID NO: 11214 - DNA, 20 bp, Artificial Sequence
  chemically synthesized
cccaggagcctaggagcaat

SEQ ID NO: 11215 - DNA, 20 bp, Artificial Sequence
  chemically synthesized
taggccacatcaatacaacc

SEQ ID NO: 11216 - DNA, 20 bp, Artificial Sequence
  chemically synthesized
aggccacatcaatacaacct

SEQ ID NO: 11217 - DNA, 20 bp, Artificial Sequence
  chemically synthesized
atcaatacaacctaggtatg

SEQ ID NO: 11218 - DNA, 20 bp, Artificial Sequence
  chemically synthesized
atacaacctaggtatgtagt

SEQ ID NO: 11219 - DNA, 20 bp, Artificial Sequence
  chemically synthesized
atgtagtaagctataccatt

SEQ ID NO: 11220 - DNA, 20 bp, Artificial Sequence
  chemically synthesized
tgtagtaagctataccattt

SEQ ID NO: 11221 - DNA, 20 bp, Artificial Sequence
  chemically synthesized
taagctataccatttaggtt

SEQ ID NO: 11222 - DNA, 20 bp, Artificial Sequence
  chemically synthesized
aagctataccatttaggttt

SEQ ID NO: 11223 - DNA, 20 bp, Artificial Sequence
  chemically synthesized
tataccatttaggtttaggt

SEQ ID NO: 11224 - DNA, 20 bp, Artificial Sequence
  chemically synthesized
ttgcttaatgacacatttct

SEQ ID NO: 11225 - DNA, 20 bp, Artificial Sequence
  chemically synthesized
cagaatatatccccattgtt

SEQ ID NO: 11226 - DNA, 20 bp, Artificial Sequence
  chemically synthesized
agaatatatccccattgtta

SEQ ID NO: 11227 - DNA, 20 bp, Artificial Sequence
  chemically synthesized
ccccattgttaaggaatgca

SEQ ID NO: 11228 - DNA, 20 bp, Artificial Sequence
  chemically synthesized
tgtatgtataaaattaataa

SEQ ID NO: 11229 - DNA, 20 bp, Artificial Sequence
  chemically synthesized
gtatgtataaaattaataac

SEQ ID NO: 11230 - DNA, 20 bp, Artificial Sequence
  chemically synthesized
tatgtataaaattaataaca

SEQ ID NO: 11231 - DNA, 20 bp, Artificial Sequence
  chemically synthesized
aaaattaataacagggactc

SEQ ID NO: 11232 - DNA, 20 bp, Artificial Sequence
  chemically synthesized
attaataacagggactcaag

SEQ ID NO: 11233 - DNA, 20 bp, Artificial Sequence
  chemically synthesized
cagggactcaagaagttgcc

SEQ ID NO: 11234 - DNA, 20 bp, Artificial Sequence
  chemically synthesized
gggactcaagaagttgcctg

SEQ ID NO: 11235 - DNA, 20 bp, Artificial Sequence
  chemically synthesized
ctggagttgttcctttcttc

SEQ ID NO: 11236 - DNA, 20 bp, Artificial Sequence
  chemically synthesized
tggagttgttcctttcttca

SEQ ID NO: 11237 - DNA, 20 bp, Artificial Sequence
  chemically synthesized
ggagttgttcctttcttcaa

SEQ ID NO: 11238 - DNA, 20 bp, Artificial Sequence
  chemically synthesized
tgttcctttcttcaagggtc

SEQ ID NO: 11239 - DNA, 20 bp, Artificial Sequence
  chemically synthesized
aatatatctgataccatctc

SEQ ID NO: 11240 - DNA, 20 bp, Artificial Sequence
  chemically synthesized
tatatctgataccatctcaa

SEQ ID NO: 11241 - DNA, 20 bp, Artificial Sequence
  chemically synthesized
atatctgataccatctcaag

SEQ ID NO: 11242 - DNA, 20 bp, Artificial Sequence
  chemically synthesized
gataccatctcaagaggacc

SEQ ID NO: 11243 - DNA, 20 bp, Artificial Sequence
  chemically synthesized
ataccatctcaagaggacca

SEQ ID NO: 11244 - DNA, 20 bp, Artificial Sequence
  chemically synthesized
taccatctcaagaggaccaa

SEQ ID NO: 11245 - DNA, 20 bp, Artificial Sequence
  chemically synthesized
caagaggaccaagggcttat

SEQ ID NO: 11246 - DNA, 20 bp, Artificial Sequence
  chemically synthesized
ggcttataagatgaactttc

SEQ ID NO: 11247 - DNA, 20 bp, Artificial Sequence
  chemically synthesized
gcttataagatgaactttct

SEQ ID NO: 11248 - DNA, 20 bp, Artificial Sequence
  chemically synthesized
cttataagatgaactttctg

SEQ ID NO: 11249 - DNA, 20 bp, Artificial Sequence
  chemically synthesized
gatgaactttctggggtatt

SEQ ID NO: 11250 - DNA, 20 bp, Artificial Sequence
  chemically synthesized
atgaactttctggggtattt

SEQ ID NO: 11251 - DNA, 20 bp, Artificial Sequence
  chemically synthesized
acttcctgattaactccaaa

SEQ ID NO: 11252 - DNA, 20 bp, Artificial Sequence
  chemically synthesized
cttcctgattaactccaaaa

SEQ ID NO: 11253 - DNA, 20 bp, Artificial Sequence
  chemically synthesized
cctgattaactccaaaaagg

SEQ ID NO: 11254 - DNA, 20 bp, Artificial Sequence
  chemically synthesized
tgattaactccaaaaaggaa

SEQ ID NO: 11255 - DNA, 20 bp, Artificial Sequence
  chemically synthesized
taactccaaaaaggaagaga

SEQ ID NO: 11256 - DNA, 20 bp, Artificial Sequence
  chemically synthesized
aactccaaaaaggaagagaa

SEQ ID NO: 11257 - DNA, 20 bp, Artificial Sequence
  chemically synthesized
ccaaaaaggaagagaaagga

SEQ ID NO: 11258 - DNA, 20 bp, Artificial Sequence
  chemically synthesized
ggaagagaaaggaaagtaaa

SEQ ID NO: 11259 - DNA, 20 bp, Artificial Sequence
  chemically synthesized
gaagagaaaggaaagtaaaa

SEQ ID NO: 11260 - DNA, 20 bp, Artificial Sequence
  chemically synthesized
agaaaggaaagtaaaaagga

SEQ ID NO: 11261 - DNA, 20 bp, Artificial Sequence
  chemically synthesized
gaaaggaaagtaaaaaggaa

SEQ ID NO: 11262 - DNA, 20 bp, Artificial Sequence
  chemically synthesized
ggaaagtaaaaaggaaagga

SEQ ID NO: 11263 - DNA, 20 bp, Artificial Sequence
  chemically synthesized
taaaaaggaaaggaaagaaa

SEQ ID NO: 11264 - DNA, 20 bp, Artificial Sequence
  chemically synthesized
aaaaggaaaggaaagaaacg

SEQ ID NO: 11265 - DNA, 20 bp, Artificial Sequence
  chemically synthesized
ttcttcccttattttcattg

SEQ ID NO: 11266 - DNA, 20 bp, Artificial Sequence
  chemically synthesized
cattgcagctgttcacttta

SEQ ID NO: 11267 - DNA, 20 bp, Artificial Sequence
  chemically synthesized
ttgcagctgttcactttatg

SEQ ID NO: 11268 - DNA, 20 bp, Artificial Sequence
  chemically synthesized
gttcactttatggagtgttc

SEQ ID NO: 11269 - DNA, 20 bp, Artificial Sequence
  chemically synthesized
ctgcttttcccttgctctgc

SEQ ID NO: 11270 - DNA, 20 bp, Artificial Sequence
  chemically synthesized
cttgctctgcaagttccttt

SEQ ID NO: 11271 - DNA, 20 bp, Artificial Sequence
  chemically synthesized
ttgctctgcaagttcctttt

SEQ ID NO: 11272 - DNA, 20 bp, Artificial Sequence
  chemically synthesized
tcactttttttctttgaatt

SEQ ID NO: 11273 - DNA, 20 bp, Artificial Sequence
  chemically synthesized
ttttttctttgaatttagcc

SEQ ID NO: 11274 - DNA, 20 bp, Artificial Sequence
  chemically synthesized
ttcaactcttttttttttga

SEQ ID NO: 11275 - DNA, 20 bp, Artificial Sequence
  chemically synthesized
caactcttttttttttgaca

SEQ ID NO: 11276 - DNA, 20 bp, Artificial Sequence
  chemically synthesized
cagagtcttgctctgtcgcc

SEQ ID NO: 11277 - DNA, 20 bp, Artificial Sequence
  chemically synthesized
agagtcttgctctgtcgccc

SEQ ID NO: 11278 - DNA, 20 bp, Artificial Sequence
  chemically synthesized
tcttgctctgtcgcccaggc

SEQ ID NO: 11279 - DNA, 20 bp, Artificial Sequence
  chemically synthesized
ttgctctgtcgcccaggctg

SEQ ID NO: 11280 - DNA, 20 bp, Artificial Sequence
  chemically synthesized
ctgtcgcccaggctggagtg

SEQ ID NO: 11281 - DNA, 20 bp, Artificial Sequence
  chemically synthesized
tcgcccaggctggagtgcag

SEQ ID NO: 11282 - DNA, 20 bp, Artificial Sequence
  chemically synthesized
ggagtgcagtggtgcgatct

SEQ ID NO: 11283 - DNA, 20 bp, Artificial Sequence
  chemically synthesized
tcactgcaacctccatctcc

SEQ ID NO: 11284 - DNA, 20 bp, Artificial Sequence
  chemically synthesized
cactgcaacctccatctccc

SEQ ID NO: 11285 - DNA, 20 bp, Artificial Sequence
  chemically synthesized
aacctccatctcccaggttc

SEQ ID NO: 11286 - DNA, 20 bp, Artificial Sequence
  chemically synthesized
ttcaagctattctcctgcct

SEQ ID NO: 11287 - DNA, 20 bp, Artificial Sequence
  chemically synthesized
ttctcctgcctcagcctccc

SEQ ID NO: 11288 - DNA, 20 bp, Artificial Sequence
  chemically synthesized
tcctgcctcagcctcccaag

SEQ ID NO: 11289 - DNA, 20 bp, Artificial Sequence
  chemically synthesized
gcctcagcctcccaagtagc

SEQ ID NO: 11290 - DNA, 20 bp, Artificial Sequence
  chemically synthesized
cctcagcctcccaagtagct

SEQ ID NO: 11291 - DNA, 20 bp, Artificial Sequence
  chemically synthesized
ctcccaagtagctgggatta

SEQ ID NO: 11292 - DNA, 20 bp, Artificial Sequence
  chemically synthesized
tcccaagtagctgggattac

SEQ ID NO: 11293 - DNA, 20 bp, Artificial Sequence
  chemically synthesized
caggcacccgccaccatgcc

SEQ ID NO: 11294 - DNA, 20 bp, Artificial Sequence
  chemically synthesized
ccagctaatttttgtatttt

SEQ ID NO: 11295 - DNA, 20 bp, Artificial Sequence
  chemically synthesized
taatttttgtatttttagta

SEQ ID NO: 11296 - DNA, 20 bp, Artificial Sequence
  chemically synthesized
ttttgtatttttagtaaagc

SEQ ID NO: 11297 - DNA, 20 bp, Artificial Sequence
  chemically synthesized
tttgtatttttagtaaagcc

SEQ ID NO: 11298 - DNA, 20 bp, Artificial Sequence
  chemically synthesized
ttgtatttttagtaaagccg

SEQ ID NO: 11299 - DNA, 20 bp, Artificial Sequence
  chemically synthesized
gtttcaccatttcaccttgt

SEQ ID NO: 11300 - DNA, 20 bp, Artificial Sequence
  chemically synthesized
caccatttcaccttgttggc

SEQ ID NO: 11301 - DNA, 20 bp, Artificial Sequence
  chemically synthesized
accatttcaccttgttggcc

SEQ ID NO: 11302 - DNA, 20 bp, Artificial Sequence
  chemically synthesized
tttcaccttgttggccaggc

SEQ ID NO: 11303 - DNA, 20 bp, Artificial Sequence
  chemically synthesized
ggtgtcgaactcctgacctc

SEQ ID NO: 11304 - DNA, 20 bp, Artificial Sequence
  chemically synthesized
cctcaagtgatctgcctgcc

SEQ ID NO: 11305 - DNA, 20 bp, Artificial Sequence
  chemically synthesized
ctcaagtgatctgcctgcct

SEQ ID NO: 11306 - DNA, 20 bp, Artificial Sequence
  chemically synthesized
ctgcctgcctgggcctctga

SEQ ID NO: 11307 - DNA, 20 bp, Artificial Sequence
  chemically synthesized
gcctgggcctctgaaagtgc

SEQ ID NO: 11308 - DNA, 20 bp, Artificial Sequence
  chemically synthesized
cctgggcctctgaaagtgct

SEQ ID NO: 11309 - DNA, 20 bp, Artificial Sequence
  chemically synthesized
ctctgaaagtgctgggatta

SEQ ID NO: 11310 - DNA, 20 bp, Artificial Sequence
  chemically synthesized
tctgaaagtgctgggattat

SEQ ID NO: 11311 - DNA, 20 bp, Artificial Sequence
  chemically synthesized
agtgctgggattataggtgt

SEQ ID NO: 11312 - DNA, 20 bp, Artificial Sequence
  chemically synthesized
ataggtgtgagccaccatgc

SEQ ID NO: 11313 - DNA, 20 bp, Artificial Sequence
  chemically synthesized
taggtgtgagccaccatgcc

SEQ ID NO: 11314 - DNA, 20 bp, Artificial Sequence
  chemically synthesized
gcctctcttcaactcttcat

SEQ ID NO: 11315 - DNA, 20 bp, Artificial Sequence
  chemically synthesized
ctgtgcccaccctgcaatcc

SEQ ID NO: 11316 - DNA, 20 bp, Artificial Sequence
  chemically synthesized
tgcaatcctagcccctaaat

SEQ ID NO: 11317 - DNA, 20 bp, Artificial Sequence
  chemically synthesized
caatcctagcccctaaattg

SEQ ID NO: 11318 - DNA, 20 bp, Artificial Sequence
  chemically synthesized
tcctagcccctaaattggag

SEQ ID NO: 11319 - DNA, 20 bp, Artificial Sequence
  chemically synthesized
tgccttcatccttctcttcc

SEQ ID NO: 11320 - DNA, 20 bp, Artificial Sequence
  chemically synthesized
ttcatccttctcttcccaga

SEQ ID NO: 11321 - DNA, 20 bp, Artificial Sequence
  chemically synthesized
ccttctcttcccagacagcc

SEQ ID NO: 11322 - DNA, 20 bp, Artificial Sequence
  chemically synthesized
cttctcttcccagacagccg

SEQ ID NO: 11323 - DNA, 20 bp, Artificial Sequence
  chemically synthesized
ccagacagccgaggactgtg

SEQ ID NO: 11324 - DNA, 20 bp, Artificial Sequence
  chemically synthesized
cagacagccgaggactgtga

SEQ ID NO: 11325 - DNA, 20 bp, Artificial Sequence
  chemically synthesized
ggaaaaaaatcaccaaaatg

SEQ ID NO: 11326 - DNA, 20 bp, Artificial Sequence
  chemically synthesized
aaaaatcaccaaaatgcaga

SEQ ID NO: 11327 - DNA, 20 bp, Artificial Sequence
  chemically synthesized
caccacatattgatgcctca

SEQ ID NO: 11328 - DNA, 20 bp, Artificial Sequence
  chemically synthesized
cctccacccacctctctgct

SEQ ID NO: 11329 - DNA, 20 bp, Artificial Sequence
  chemically synthesized
tgctcagcaactcatttact

SEQ ID NO: 11330 - DNA, 20 bp, Artificial Sequence
  chemically synthesized
gcaactcatttacttggccc

SEQ ID NO: 11331 - DNA, 20 bp, Artificial Sequence
  chemically synthesized
tggccctggacactcctaaa

SEQ ID NO: 11332 - DNA, 20 bp, Artificial Sequence
  chemically synthesized
tccatgcctgcatccattta

SEQ ID NO: 11333 - DNA, 20 bp, Artificial Sequence
  chemically synthesized
atccatttacagtcgttcct

SEQ ID NO: 11334 - DNA, 20 bp, Artificial Sequence
  chemically synthesized
cagtcgttcctcagtatcca

SEQ ID NO: 11335 - DNA, 20 bp, Artificial Sequence
  chemically synthesized
cctcagtatccatggaaaat

SEQ ID NO: 11336 - DNA, 20 bp, Artificial Sequence
  chemically synthesized
cagtatccatggaaaattgg

SEQ ID NO: 11337 - DNA, 20 bp, Artificial Sequence
  chemically synthesized
atccatggaaaattggtggc

SEQ ID NO: 11338 - DNA, 20 bp, Artificial Sequence
  chemically synthesized
caagaccccctgcaaatatc

SEQ ID NO: 11339 - DNA, 20 bp, Artificial Sequence
  chemically synthesized
cctgcaaatatcaagatctg

SEQ ID NO: 11340 - DNA, 20 bp, Artificial Sequence
  chemically synthesized
atcaagatctgtggatgctc

SEQ ID NO: 11341 - DNA, 20 bp, Artificial Sequence
  chemically synthesized
tcaagtctccgatataaaaa

SEQ ID NO: 11342 - DNA, 20 bp, Artificial Sequence
  chemically synthesized
tttgtactttaaatcatctc

SEQ ID NO: 11343 - DNA, 20 bp, Artificial Sequence
  chemically synthesized
ttgtactttaaatcatctct

SEQ ID NO: 11344 - DNA, 20 bp, Artificial Sequence
  chemically synthesized
catctctaggtttctcttaa

SEQ ID NO: 11345 - DNA, 20 bp, Artificial Sequence
  chemically synthesized
caatgtaaatgctatgtaaa

SEQ ID NO: 11346 - DNA, 20 bp, Artificial Sequence
  chemically synthesized
agttgttatgctgtattgtt

SEQ ID NO: 11347 - DNA, 20 bp, Artificial Sequence
  chemically synthesized
gttgttatgctgtattgttt

SEQ ID NO: 11348 - DNA, 20 bp, Artificial Sequence
  chemically synthesized
ttgttatgctgtattgttta

SEQ ID NO: 11349 - DNA, 20 bp, Artificial Sequence
  chemically synthesized
tattgtttagggaataatga

SEQ ID NO: 11350 - DNA, 20 bp, Artificial Sequence
  chemically synthesized
tagggaataatgaaagataa

SEQ ID NO: 11351 - DNA, 20 bp, Artificial Sequence
  chemically synthesized
gggaataatgaaagataaaa

SEQ ID NO: 11352 - DNA, 20 bp, Artificial Sequence
  chemically synthesized
taaaagagtctgtacatgtt

SEQ ID NO: 11353 - DNA, 20 bp, Artificial Sequence
  chemically synthesized
aagagtctgtacatgttcag

SEQ ID NO: 11354 - DNA, 20 bp, Artificial Sequence
  chemically synthesized
gagtctgtacatgttcagta

SEQ ID NO: 11355 - DNA, 20 bp, Artificial Sequence
  chemically synthesized
tcttgaatatttttgatctg

SEQ ID NO: 11356 - DNA, 20 bp, Artificial Sequence
  chemically synthesized
tctgcagttaattgaatctg

SEQ ID NO: 11357 - DNA, 20 bp, Artificial Sequence
  chemically synthesized
gttaattgaatctgtggctg

SEQ ID NO: 11358 - DNA, 20 bp, Artificial Sequence
  chemically synthesized
tctgtggctgtggaactcac

SEQ ID NO: 11359 - DNA, 20 bp, Artificial Sequence
  chemically synthesized
ctgtggctgtggaactcaca

SEQ ID NO: 11360 - DNA, 20 bp, Artificial Sequence
  chemically synthesized
gtggctgtggaactcacaag

SEQ ID NO: 11361 - DNA, 20 bp, Artificial Sequence
  chemically synthesized
ggctgtggaactcacaagga

SEQ ID NO: 11362 - DNA, 20 bp, Artificial Sequence
  chemically synthesized
cacaaggagagctgactgta

SEQ ID NO: 11363 - DNA, 20 bp, Artificial Sequence
  chemically synthesized
ggagagctgactgtacagtg

SEQ ID NO: 11364 - DNA, 20 bp, Artificial Sequence
  chemically synthesized
gctgactgtacagtgtggtt

SEQ ID NO: 11365 - DNA, 20 bp, Artificial Sequence
  chemically synthesized
agtgtggttgagtgaaaaaa

SEQ ID NO: 11366 - DNA, 20 bp, Artificial Sequence
  chemically synthesized
ttgagtgaaaaaacagactt

SEQ ID NO: 11367 - DNA, 20 bp, Artificial Sequence
  chemically synthesized
gaaaaaacagactttagaat

SEQ ID NO: 11368 - DNA, 20 bp, Artificial Sequence
  chemically synthesized
aacagactttagaatcagat

SEQ ID NO: 11369 - DNA, 20 bp, Artificial Sequence
  chemically synthesized
gactttagaatcagatcaga

SEQ ID NO: 11370 - DNA, 20 bp, Artificial Sequence
  chemically synthesized
agaatcagatcagacagaaa

SEQ ID NO: 11371 - DNA, 20 bp, Artificial Sequence
  chemically synthesized
gaatcagatcagacagaaat

SEQ ID NO: 11372 - DNA, 20 bp, Artificial Sequence
  chemically synthesized
gacagaaataggtttgaatc

SEQ ID NO: 11373 - DNA, 20 bp, Artificial Sequence
  chemically synthesized
aatcaagtatctgcctcctc

SEQ ID NO: 11374 - DNA, 20 bp, Artificial Sequence
  chemically synthesized
ctcctctagacctgtgacct

SEQ ID NO: 11375 - DNA, 20 bp, Artificial Sequence
  chemically synthesized
ctagacctgtgaccttggac

SEQ ID NO: 11376 - DNA, 20 bp, Artificial Sequence
  chemically synthesized
tgaccttggacaagtcacac

SEQ ID NO: 11377 - DNA, 20 bp, Artificial Sequence
  chemically synthesized
taactttgtcaaatgtaaat

SEQ ID NO: 11378 - DNA, 20 bp, Artificial Sequence
  chemically synthesized
aactttgtcaaatgtaaatt

SEQ ID NO: 11379 - DNA, 20 bp, Artificial Sequence
  chemically synthesized
caaatgtaaattaggtttaa

SEQ ID NO: 11380 - DNA, 20 bp, Artificial Sequence
  chemically synthesized
atgtaaattaggtttaacag

SEQ ID NO: 11381 - DNA, 20 bp, Artificial Sequence
  chemically synthesized
aggtttaacagtagtataat

SEQ ID NO: 11382 - DNA, 20 bp, Artificial Sequence
  chemically synthesized
taataagaatatctatctca

SEQ ID NO: 11383 - DNA, 20 bp, Artificial Sequence
  chemically synthesized
aataagaatatctatctcac

SEQ ID NO: 11384 - DNA, 20 bp, Artificial Sequence
  chemically synthesized
aatatctatctcacaggtgt

SEQ ID NO: 11385 - DNA, 20 bp, Artificial Sequence
  chemically synthesized
atctatctcacaggtgttgg

SEQ ID NO: 11386 - DNA, 20 bp, Artificial Sequence
  chemically synthesized
tctatctcacaggtgttggc

SEQ ID NO: 11387 - DNA, 20 bp, Artificial Sequence
  chemically synthesized
ctcacaggtgttggcaggat

SEQ ID NO: 11388 - DNA, 20 bp, Artificial Sequence
  chemically synthesized
caggtgttggcaggatcagt

SEQ ID NO: 11389 - DNA, 20 bp, Artificial Sequence
  chemically synthesized
ggatcagtgagacaatatgc

SEQ ID NO: 11390 - DNA, 20 bp, Artificial Sequence
  chemically synthesized
tctccctactcctttcatgt

SEQ ID NO: 11391 - DNA, 20 bp, Artificial Sequence
  chemically synthesized
ttaaatttctcaattctctt

SEQ ID NO: 11392 - DNA, 20 bp, Artificial Sequence
  chemically synthesized
gctctttaataacttctgtg

SEQ ID NO: 11393 - DNA, 20 bp, Artificial Sequence
  chemically synthesized
gaaatgactattgtcacaat

SEQ ID NO: 11394 - DNA, 20 bp, Artificial Sequence
  chemically synthesized
aaatgactattgtcacaatc

SEQ ID NO: 11395 - DNA, 20 bp, Artificial Sequence
  chemically synthesized
tcacaatcaggaatgaccta

SEQ ID NO: 11396 - DNA, 20 bp, Artificial Sequence
  chemically synthesized
atgacctaaagaataatttt

SEQ ID NO: 11397 - DNA, 20 bp, Artificial Sequence
  chemically synthesized
ttttgagtttatgtatttac

SEQ ID NO: 11398 - DNA, 20 bp, Artificial Sequence
  chemically synthesized
attgttgatctctccctttt

SEQ ID NO: 11399 - DNA, 20 bp, Artificial Sequence
  chemically synthesized
ttgttgatctctcccttttt

SEQ ID NO: 11400 - DNA, 20 bp, Artificial Sequence
  chemically synthesized
ttataataatcactctattc

SEQ ID NO: 11401 - DNA, 20 bp, Artificial Sequence
  chemically synthesized
tctaactcctgttatccatc

SEQ ID NO: 11402 - DNA, 20 bp, Artificial Sequence
  chemically synthesized
ttaactcctgttcctctcca

SEQ ID NO: 11403 - DNA, 20 bp, Artificial Sequence
  chemically synthesized
ctccatggcccttaaatgtc

SEQ ID NO: 11404 - DNA, 20 bp, Artificial Sequence
  chemically synthesized
tccatggcccttaaatgtcc

SEQ ID NO: 11405 - DNA, 20 bp, Artificial Sequence
  chemically synthesized
ccatggcccttaaatgtcca

SEQ ID NO: 11406 - DNA, 20 bp, Artificial Sequence
  chemically synthesized
ttaaatgtccagggttctcc

SEQ ID NO: 11407 - DNA, 20 bp, Artificial Sequence
  chemically synthesized
taaatgtccagggttctccc

SEQ ID NO: 11408 - DNA, 20 bp, Artificial Sequence
  chemically synthesized
tccagggttctcccaggctc

SEQ ID NO: 11409 - DNA, 20 bp, Artificial Sequence
  chemically synthesized
gttctcccaggctccagcct

SEQ ID NO: 11410 - DNA, 20 bp, Artificial Sequence
  chemically synthesized
ttcaccttatatatacttgc

SEQ ID NO: 11411 - DNA, 20 bp, Artificial Sequence
  chemically synthesized
tcaccttatatatacttgct

SEQ ID NO: 11412 - DNA, 20 bp, Artificial Sequence
  chemically synthesized
caccttatatatacttgcta

SEQ ID NO: 11413 - DNA, 20 bp, Artificial Sequence
  chemically synthesized
ttatatatacttgctagggc

SEQ ID NO: 11414 - DNA, 20 bp, Artificial Sequence
  chemically synthesized
tatatatacttgctagggct

SEQ ID NO: 11415 - DNA, 20 bp, Artificial Sequence
  chemically synthesized
atacttgctagggctgggac

SEQ ID NO: 11416 - DNA, 20 bp, Artificial Sequence
  chemically synthesized
acttgctagggctgggacaa

SEQ ID NO: 11417 - DNA, 20 bp, Artificial Sequence
  chemically synthesized
gggacaagagtgaaccaaac

SEQ ID NO: 11418 - DNA, 20 bp, Artificial Sequence
  chemically synthesized
ggacaagagtgaaccaaaca

SEQ ID NO: 11419 - DNA, 20 bp, Artificial Sequence
  chemically synthesized
agtgaaccaaacaaggcatg

SEQ ID NO: 11420 - DNA, 20 bp, Artificial Sequence
  chemically synthesized
gtgaaccaaacaaggcatgt

SEQ ID NO: 11421 - DNA, 20 bp, Artificial Sequence
  chemically synthesized
tgaaccaaacaaggcatgta

SEQ ID NO: 11422 - DNA, 20 bp, Artificial Sequence
  chemically synthesized
gcatgtagggcacaatattt

SEQ ID NO: 11423 - DNA, 20 bp, Artificial Sequence
  chemically synthesized
atgtagggcacaatatttaa

SEQ ID NO: 11424 - DNA, 20 bp, Artificial Sequence
  chemically synthesized
tgtagggcacaatatttaag

SEQ ID NO: 11425 - DNA, 20 bp, Artificial Sequence
  chemically synthesized
tttaagaggtcctcacttct

SEQ ID NO: 11426 - DNA, 20 bp, Artificial Sequence
  chemically synthesized
ttaagaggtcctcacttctc

SEQ ID NO: 11427 - DNA, 20 bp, Artificial Sequence
  chemically synthesized
taagaggtcctcacttctcg

SEQ ID NO: 11428 - DNA, 20 bp, Artificial Sequence
  chemically synthesized
cctcacttctcggggcatac

SEQ ID NO: 11429 - DNA, 20 bp, Artificial Sequence
  chemically synthesized
acaagtatatttatgcccta

SEQ ID NO: 11430 - DNA, 20 bp, Artificial Sequence
  chemically synthesized
caagtatatttatgccctac

SEQ ID NO: 11431 - DNA, 20 bp, Artificial Sequence
  chemically synthesized
cctacaggccttgcttacca

SEQ ID NO: 11432 - DNA, 20 bp, Artificial Sequence
  chemically synthesized
aggccttgcttaccacagtc

SEQ ID NO: 11433 - DNA, 20 bp, Artificial Sequence
  chemically synthesized
ttgcttaccacagtctagtc

SEQ ID NO: 11434 - DNA, 20 bp, Artificial Sequence
  chemically synthesized
ccctgtcaacaaaatttact

SEQ ID NO: 11435 - DNA, 20 bp, Artificial Sequence
  chemically synthesized
gagcatacaaccactactgc

SEQ ID NO: 11436 - DNA, 20 bp, Artificial Sequence
  chemically synthesized
agcatacaaccactactgcc

SEQ ID NO: 11437 - DNA, 20 bp, Artificial Sequence
  chemically synthesized
actactgccaggcactgtac

SEQ ID NO: 11438 - DNA, 20 bp, Artificial Sequence
  chemically synthesized
ctactgccaggcactgtact

SEQ ID NO: 11439 - DNA, 20 bp, Artificial Sequence
  chemically synthesized
caatatccatgctcactctc

SEQ ID NO: 11440 - DNA, 20 bp, Artificial Sequence
  chemically synthesized
tctccagatgcccacacacg

SEQ ID NO: 11441 - DNA, 20 bp, Artificial Sequence
  chemically synthesized
gtggctgtaactactgttta

SEQ ID NO: 11442 - DNA, 20 bp, Artificial Sequence
  chemically synthesized
actactgtttacagaacaat

SEQ ID NO: 11443 - DNA, 20 bp, Artificial Sequence
  chemically synthesized
gagttccaaatactcaccta

SEQ ID NO: 11444 - DNA, 20 bp, Artificial Sequence
  chemically synthesized
tccaaatactcacctatagt

SEQ ID NO: 11445 - DNA, 20 bp, Artificial Sequence
  chemically synthesized
cagatacgtctcctgaattt

SEQ ID NO: 11446 - DNA, 20 bp, Artificial Sequence
  chemically synthesized
cctaactgtatatcataatg

SEQ ID NO: 11447 - DNA, 20 bp, Artificial Sequence
  chemically synthesized
actgtatatcataatgtagc

SEQ ID NO: 11448 - DNA, 20 bp, Artificial Sequence
  chemically synthesized
tatcataatgtagccagtaa

SEQ ID NO: 11449 - DNA, 20 bp, Artificial Sequence
  chemically synthesized
atgtaatgcttctgctgtgt

SEQ ID NO: 11450 - DNA, 20 bp, Artificial Sequence
  chemically synthesized
gctgtgttggacactgtgct

SEQ ID NO: 11451 - DNA, 20 bp, Artificial Sequence
  chemically synthesized
atctcacttcatcctcacaa

SEQ ID NO: 11452 - DNA, 20 bp, Artificial Sequence
  chemically synthesized
catcctcacaaaagtcccac

SEQ ID NO: 11453 - DNA, 20 bp, Artificial Sequence
  chemically synthesized
ctcacaaaagtcccacgaga

SEQ ID NO: 11454 - DNA, 20 bp, Artificial Sequence
  chemically synthesized
tcacaaaagtcccacgagat

SEQ ID NO: 11455 - DNA, 20 bp, Artificial Sequence
  chemically synthesized
gtcatcttatttttatgaat

SEQ ID NO: 11456 - DNA, 20 bp, Artificial Sequence
  chemically synthesized
tcatcttatttttatgaatg

SEQ ID NO: 11457 - DNA, 20 bp, Artificial Sequence
  chemically synthesized
tcttatttttatgaatgagg

SEQ ID NO: 11458 - DNA, 20 bp, Artificial Sequence
  chemically synthesized
atttttatgaatgaggaaga

SEQ ID NO: 11459 - DNA, 20 bp, Artificial Sequence
  chemically synthesized
gaatgaggaagatagattca

SEQ ID NO: 11460 - DNA, 20 bp, Artificial Sequence
  chemically synthesized
atgaggaagatagattcata

SEQ ID NO: 11461 - DNA, 20 bp, Artificial Sequence
  chemically synthesized
tgaggaagatagattcatag

SEQ ID NO: 11462 - DNA, 20 bp, Artificial Sequence
  chemically synthesized
aagatagattcatagaggct

SEQ ID NO: 11463 - DNA, 20 bp, Artificial Sequence
  chemically synthesized
agatagattcatagaggcta

SEQ ID NO: 11464 - DNA, 20 bp, Artificial Sequence
  chemically synthesized
gatagattcatagaggctaa

SEQ ID NO: 11465 - DNA, 20 bp, Artificial Sequence
  chemically synthesized
agaggctaagggctttgccc

SEQ ID NO: 11466 - DNA, 20 bp, Artificial Sequence
  chemically synthesized
gaggctaagggctttgccca

SEQ ID NO: 11467 - DNA, 20 bp, Artificial Sequence
  chemically synthesized
aggtaacatactaaaacatt

SEQ ID NO: 11468 - DNA, 20 bp, Artificial Sequence
  chemically synthesized
ggtaacatactaaaacattc

SEQ ID NO: 11469 - DNA, 20 bp, Artificial Sequence
  chemically synthesized
atactaaaacattcaggatt

SEQ ID NO: 11470 - DNA, 20 bp, Artificial Sequence
  chemically synthesized
aacattcaggattcagactc

SEQ ID NO: 11471 - DNA, 20 bp, Artificial Sequence
  chemically synthesized
attcaggattcagactctgg

SEQ ID NO: 11472 - DNA, 20 bp, Artificial Sequence
  chemically synthesized
aggattcagactctggcagt

SEQ ID NO: 11473 - DNA, 20 bp, Artificial Sequence
  chemically synthesized
agactctggcagtcagacta

SEQ ID NO: 11474 - DNA, 20 bp, Artificial Sequence
  chemically synthesized
actctggcagtcagactaaa

SEQ ID NO: 11475 - DNA, 20 bp, Artificial Sequence
  chemically synthesized
tggcagtcagactaaagagc

SEQ ID NO: 11476 - DNA, 20 bp, Artificial Sequence
  chemically synthesized
gactaaagagccagttctct

SEQ ID NO: 11477 - DNA, 20 bp, Artificial Sequence
  chemically synthesized
ttctcttagacattattctg

SEQ ID NO: 11478 - DNA, 20 bp, Artificial Sequence
  chemically synthesized
ccataatcacatcaaacaca

SEQ ID NO: 11479 - DNA, 20 bp, Artificial Sequence
  chemically synthesized
acatcaaacacaaagtcccc

SEQ ID NO: 11480 - DNA, 20 bp, Artificial Sequence
  chemically synthesized
acacaaagtccccaagactc

SEQ ID NO: 11481 - DNA, 20 bp, Artificial Sequence
  chemically synthesized
gccatttccccttccatacc

SEQ ID NO: 11482 - DNA, 20 bp, Artificial Sequence
  chemically synthesized
tttccccttccatacccaga

SEQ ID NO: 11483 - DNA, 20 bp, Artificial Sequence
  chemically synthesized
ccttccatacccagatggtt

SEQ ID NO: 11484 - DNA, 20 bp, Artificial Sequence
  chemically synthesized
ttttttgtactgctactgtt

SEQ ID NO: 11485 - DNA, 20 bp, Artificial Sequence
  chemically synthesized
tttttgtactgctactgttc

SEQ ID NO: 11486 - DNA, 20 bp, Artificial Sequence
  chemically synthesized
tactgctactgttcaggttc

SEQ ID NO: 11487 - DNA, 20 bp, Artificial Sequence
  chemically synthesized
tctagcctttatgtctcccg

SEQ ID NO: 11488 - DNA, 20 bp, Artificial Sequence
  chemically synthesized
tctcccgcagataattgcaa

SEQ ID NO: 11489 - DNA, 20 bp, Artificial Sequence
  chemically synthesized
gcagataattgcaatagtct

SEQ ID NO: 11490 - DNA, 20 bp, Artificial Sequence
  chemically synthesized
cagataattgcaatagtctc

SEQ ID NO: 11491 - DNA, 20 bp, Artificial Sequence
  chemically synthesized
gtctcaggactgctctctcc

SEQ ID NO: 11492 - DNA, 20 bp, Artificial Sequence
  chemically synthesized
ggactgctctctcctagtct

SEQ ID NO: 11493 - DNA, 20 bp, Artificial Sequence
  chemically synthesized
gctctctcctagtcttggta

SEQ ID NO: 11494 - DNA, 20 bp, Artificial Sequence
  chemically synthesized
ctcccccactatcatttcat

SEQ ID NO: 11495 - DNA, 20 bp, Artificial Sequence
  chemically synthesized
tcatttcattagcgtgttgc

SEQ ID NO: 11496 - DNA, 20 bp, Artificial Sequence
  chemically synthesized
tcattagcgtgttgccagac

SEQ ID NO: 11497 - DNA, 20 bp, Artificial Sequence
  chemically synthesized
cattagcgtgttgccagact

SEQ ID NO: 11498 - DNA, 20 bp, Artificial Sequence
  chemically synthesized
ccagactgggcatcctaaat

SEQ ID NO: 11499 - DNA, 20 bp, Artificial Sequence
  chemically synthesized
gggcatcctaaatcagccat

SEQ ID NO: 11500 - DNA, 20 bp, Artificial Sequence
  chemically synthesized
catcctaaatcagccatcag

SEQ ID NO: 11501 - DNA, 20 bp, Artificial Sequence
  chemically synthesized
attttattgtccaatctcct

SEQ ID NO: 11502 - DNA, 20 bp, Artificial Sequence
  chemically synthesized
ttttattgtccaatctcctt

SEQ ID NO: 11503 - DNA, 20 bp, Artificial Sequence
  chemically synthesized
tgacttcattatctgatgac

SEQ ID NO: 11504 - DNA, 20 bp, Artificial Sequence
  chemically synthesized
atctgatgaccagctctgcc

SEQ ID NO: 11505 - DNA, 20 bp, Artificial Sequence
  chemically synthesized
tttacctgtctcacttgtca

SEQ ID NO: 11506 - DNA, 20 bp, Artificial Sequence
  chemically synthesized
ctcacttgtcatagtccata

SEQ ID NO: 11507 - DNA, 20 bp, Artificial Sequence
  chemically synthesized
cctcacgttcttgcaaatct

SEQ ID NO: 11508 - DNA, 20 bp, Artificial Sequence
  chemically synthesized
gcaaatctgagtctttgcac

SEQ ID NO: 11509 - DNA, 20 bp, Artificial Sequence
  chemically synthesized
tgcataaaatgcccttatat

SEQ ID NO: 11510 - DNA, 20 bp, Artificial Sequence
  chemically synthesized
gcccttatatcagacattta

SEQ ID NO: 11511 - DNA, 20 bp, Artificial Sequence
  chemically synthesized
ccttatatcagacatttaaa

SEQ ID NO: 11512 - DNA, 20 bp, Artificial Sequence
  chemically synthesized
ttatatcagacatttaaaga

SEQ ID NO: 11513 - DNA, 20 bp, Artificial Sequence
  chemically synthesized
atatcagacatttaaagaga

SEQ ID NO: 11514 - DNA, 20 bp, Artificial Sequence
  chemically synthesized
agaacgcctactcatctttt

SEQ ID NO: 11515 - DNA, 20 bp, Artificial Sequence
  chemically synthesized
cctactcatcttttaagacc

SEQ ID NO: 11516 - DNA, 20 bp, Artificial Sequence
  chemically synthesized
ttcctttctctatgatccct

SEQ ID NO: 11517 - DNA, 20 bp, Artificial Sequence
  chemically synthesized
ctctatgatcccttagtacc

SEQ ID NO: 11518 - DNA, 20 bp, Artificial Sequence
  chemically synthesized
ttatattgaaacctctcacc

SEQ ID NO: 11519 - DNA, 20 bp, Artificial Sequence
  chemically synthesized
cacctggcctcatgctgctt

SEQ ID NO: 11520 - DNA, 20 bp, Artificial Sequence
  chemically synthesized
cctcatgctgctttagatca

SEQ ID NO: 11521 - DNA, 20 bp, Artificial Sequence
  chemically synthesized
tcatgctgctttagatcaaa

SEQ ID NO: 11522 - DNA, 20 bp, Artificial Sequence
  chemically synthesized
catgctgctttagatcaaag

SEQ ID NO: 11523 - DNA, 20 bp, Artificial Sequence
  chemically synthesized
atgctgctttagatcaaaga

SEQ ID NO: 11524 - DNA, 20 bp, Artificial Sequence
  chemically synthesized
gctgctttagatcaaagagg

SEQ ID NO: 11525 - DNA, 20 bp, Artificial Sequence
  chemically synthesized
tttagatcaaagagggagtc

SEQ ID NO: 11526 - DNA, 20 bp, Artificial Sequence
  chemically synthesized
ctggtttatccccatacccc

SEQ ID NO: 11527 - DNA, 20 bp, Artificial Sequence
  chemically synthesized
atacccctagtaccctgaca

SEQ ID NO: 11528 - DNA, 20 bp, Artificial Sequence
  chemically synthesized
tagtaccctgacacagtacc

SEQ ID NO: 11529 - DNA, 20 bp, Artificial Sequence
  chemically synthesized
tgacacagtacctggcacca

SEQ ID NO: 11530 - DNA, 20 bp, Artificial Sequence
  chemically synthesized
ctggcaccatagttgtaact

SEQ ID NO: 11531 - DNA, 20 bp, Artificial Sequence
  chemically synthesized
aactcagtaatgtctgaatg

SEQ ID NO: 11532 - DNA, 20 bp, Artificial Sequence
  chemically synthesized
actcagtaatgtctgaatga

SEQ ID NO: 11533 - DNA, 20 bp, Artificial Sequence
  chemically synthesized
tacactttacaaaactaaac

SEQ ID NO: 11534 - DNA, 20 bp, Artificial Sequence
  chemically synthesized
acaaaactaaactggtttta

SEQ ID NO: 11535 - DNA, 20 bp, Artificial Sequence
  chemically synthesized
aactgttgcaataataccta

SEQ ID NO: 11536 - DNA, 20 bp, Artificial Sequence
  chemically synthesized
actgttgcaataatacctaa

SEQ ID NO: 11537 - DNA, 20 bp, Artificial Sequence
  chemically synthesized
gttgcaataatacctaaagg

SEQ ID NO: 11538 - DNA, 20 bp, Artificial Sequence
  chemically synthesized
gcaataatacctaaaggcag

SEQ ID NO: 11539 - DNA, 20 bp, Artificial Sequence
  chemically synthesized
gccatgaaaatgcaacatct

SEQ ID NO: 11540 - DNA, 20 bp, Artificial Sequence
  chemically synthesized
tcactcaccgaaactccttt

SEQ ID NO: 11541 - DNA, 20 bp, Artificial Sequence
  chemically synthesized
ctcaccgaaactccttttag

SEQ ID NO: 11542 - DNA, 20 bp, Artificial Sequence
  chemically synthesized
aactccttttagaagccaat

SEQ ID NO: 11543 - DNA, 20 bp, Artificial Sequence
  chemically synthesized
ctccttttagaagccaatga

SEQ ID NO: 11544 - DNA, 20 bp, Artificial Sequence
  chemically synthesized
agaagccaatgagagtttaa

SEQ ID NO: 11545 - DNA, 20 bp, Artificial Sequence
  chemically synthesized
agccaatgagagtttaatag

SEQ ID NO: 11546 - DNA, 20 bp, Artificial Sequence
  chemically synthesized
caatgagagtttaatagcag

SEQ ID NO: 11547 - DNA, 20 bp, Artificial Sequence
  chemically synthesized
atgagagtttaatagcagaa

SEQ ID NO: 11548 - DNA, 20 bp, Artificial Sequence
  chemically synthesized
gagagtttaatagcagaaga

SEQ ID NO: 11549 - DNA, 20 bp, Artificial Sequence
  chemically synthesized
gcattaatactgtctatcct

SEQ ID NO: 11550 - DNA, 20 bp, Artificial Sequence
  chemically synthesized
tatccttagaaaaattcccc

SEQ ID NO: 11551 - DNA, 20 bp, Artificial Sequence
  chemically synthesized
attcccctggccccttcctc

SEQ ID NO: 11552 - DNA, 20 bp, Artificial Sequence
  chemically synthesized
ttcccctggccccttcctca

SEQ ID NO: 11553 - DNA, 20 bp, Artificial Sequence
  chemically synthesized
tcccctggccccttcctcaa

SEQ ID NO: 11554 - DNA, 20 bp, Artificial Sequence
  chemically synthesized
cctcaagggcttattatctc

SEQ ID NO: 11555 - DNA, 20 bp, Artificial Sequence
  chemically synthesized
cttattatctctggctacaa

SEQ ID NO: 11556 - DNA, 20 bp, Artificial Sequence
  chemically synthesized
atctctggctacaatggctg

SEQ ID NO: 11557 - DNA, 20 bp, Artificial Sequence
  chemically synthesized
aatcacattgcctttctcct

SEQ ID NO: 11558 - DNA, 20 bp, Artificial Sequence
  chemically synthesized
cctttctccttagtattatc

SEQ ID NO: 11559 - DNA, 20 bp, Artificial Sequence
  chemically synthesized
ctttctccttagtattatct

SEQ ID NO: 11560 - DNA, 20 bp, Artificial Sequence
  chemically synthesized
tttctccttagtattatctg

SEQ ID NO: 11561 - DNA, 20 bp, Artificial Sequence
  chemically synthesized
tcgtatacttaacttccctt

SEQ ID NO: 11562 - DNA, 20 bp, Artificial Sequence
  chemically synthesized
cgtatacttaacttcccttc

SEQ ID NO: 11563 - DNA, 20 bp, Artificial Sequence
  chemically synthesized
cttcccttcaggtttatcgc

SEQ ID NO: 11564 - DNA, 20 bp, Artificial Sequence
  chemically synthesized
tatcgctagtcattatttcc

SEQ ID NO: 11565 - DNA, 20 bp, Artificial Sequence
  chemically synthesized
atcgctagtcattatttccc

SEQ ID NO: 11566 - DNA, 20 bp, Artificial Sequence
  chemically synthesized
cattatttcccaggctccaa

SEQ ID NO: 11567 - DNA, 20 bp, Artificial Sequence
  chemically synthesized
tttcccaggctccaaaagcc

SEQ ID NO: 11568 - DNA, 20 bp, Artificial Sequence
  chemically synthesized
attcttatctatcctttccc

SEQ ID NO: 11569 - DNA, 20 bp, Artificial Sequence
  chemically synthesized
tatcctttccccagcatctg

SEQ ID NO: 11570 - DNA, 20 bp, Artificial Sequence
  chemically synthesized
ccccagcatctgaagtcttc

SEQ ID NO: 11571 - DNA, 20 bp, Artificial Sequence
  chemically synthesized
cccagcatctgaagtcttca

SEQ ID NO: 11572 - DNA, 20 bp, Artificial Sequence
  chemically synthesized
ccagcatctgaagtcttcaa

SEQ ID NO: 11573 - DNA, 20 bp, Artificial Sequence
  chemically synthesized
cagcatctgaagtcttcaag

SEQ ID NO: 11574 - DNA, 20 bp, Artificial Sequence
  chemically synthesized
agcatctgaagtcttcaagg

SEQ ID NO: 11575 - DNA, 20 bp, Artificial Sequence
  chemically synthesized
atctgaagtcttcaaggggg

SEQ ID NO: 11576 - DNA, 20 bp, Artificial Sequence
  chemically synthesized
tgaagtcttcaagggggcag

SEQ ID NO: 11577 - DNA, 20 bp, Artificial Sequence
  chemically synthesized
tcatcatctcaccacttata

SEQ ID NO: 11578 - DNA, 20 bp, Artificial Sequence
  chemically synthesized
tcatctcaccacttatatag

SEQ ID NO: 11579 - DNA, 20 bp, Artificial Sequence
  chemically synthesized
ctcaccacttatatagaaga

SEQ ID NO: 11580 - DNA, 20 bp, Artificial Sequence
  chemically synthesized
tcaccacttatatagaagaa

SEQ ID NO: 11581 - DNA, 20 bp, Artificial Sequence
  chemically synthesized
caccacttatatagaagaaa

SEQ ID NO: 11582 - DNA, 20 bp, Artificial Sequence
  chemically synthesized
cttatatagaagaaagggtt

SEQ ID NO: 11583 - DNA, 20 bp, Artificial Sequence
  chemically synthesized
gtttggatgctttgtcctcc

SEQ ID NO: 11584 - DNA, 20 bp, Artificial Sequence
  chemically synthesized
ctcccagatgtcacactaat

SEQ ID NO: 11585 - DNA, 20 bp, Artificial Sequence
  chemically synthesized
cactaatgagatatatctaa

SEQ ID NO: 11586 - DNA, 20 bp, Artificial Sequence
  chemically synthesized
tgctttatgtcctgctttgt

SEQ ID NO: 11587 - DNA, 20 bp, Artificial Sequence
  chemically synthesized
cttgactttactcactttgc

SEQ ID NO: 11588 - DNA, 20 bp, Artificial Sequence
  chemically synthesized
atttttttttatcgttattt

SEQ ID NO: 11589 - DNA, 20 bp, Artificial Sequence
  chemically synthesized
ttatcgttatttcagcattt

SEQ ID NO: 11590 - DNA, 20 bp, Artificial Sequence
  chemically synthesized
agcatttcagtctgatttca

SEQ ID NO: 11591 - DNA, 20 bp, Artificial Sequence
  chemically synthesized
ttcacagctgacatcatgtc

SEQ ID NO: 11592 - DNA, 20 bp, Artificial Sequence
  chemically synthesized
cacagctgacatcatgtctg

SEQ ID NO: 11593 - DNA, 20 bp, Artificial Sequence
  chemically synthesized
agctgacatcatgtctggag

SEQ ID NO: 11594 - DNA, 20 bp, Artificial Sequence
  chemically synthesized
gctgacatcatgtctggagt

SEQ ID NO: 11595 - DNA, 20 bp, Artificial Sequence
  chemically synthesized
catgtctggagtgggaacca

SEQ ID NO: 11596 - DNA, 20 bp, Artificial Sequence
  chemically synthesized
atgtctggagtgggaaccac

SEQ ID NO: 11597 - DNA, 20 bp, Artificial Sequence
  chemically synthesized
tgtctggagtgggaaccaca

SEQ ID NO: 11598 - DNA, 20 bp, Artificial Sequence
  chemically synthesized
tggagtgggaaccacagggc

SEQ ID NO: 11599 - DNA, 20 bp, Artificial Sequence
  chemically synthesized
gtgggaaccacagggccagt

SEQ ID NO: 11600 - DNA, 20 bp, Artificial Sequence
  chemically synthesized
cacagggccagtcagctttc

SEQ ID NO: 11601 - DNA, 20 bp, Artificial Sequence
  chemically synthesized
acagggccagtcagctttct

SEQ ID NO: 11602 - DNA, 20 bp, Artificial Sequence
  chemically synthesized
cagggccagtcagctttctg

SEQ ID NO: 11603 - DNA, 20 bp, Artificial Sequence
  chemically synthesized
agggccagtcagctttctgg

SEQ ID NO: 11604 - DNA, 20 bp, Artificial Sequence
  chemically synthesized
gtcagctttctgggggtgct

SEQ ID NO: 11605 - DNA, 20 bp, Artificial Sequence
  chemically synthesized
tcagctttctgggggtgctt

SEQ ID NO: 11606 - DNA, 20 bp, Artificial Sequence
  chemically synthesized
cagctttctgggggtgctta

SEQ ID NO: 11607 - DNA, 20 bp, Artificial Sequence
  chemically synthesized
tttctgggggtgcttagggt

SEQ ID NO: 11608 - DNA, 20 bp, Artificial Sequence
  chemically synthesized
agggttggcacccctgatcc

SEQ ID NO: 11609 - DNA, 20 bp, Artificial Sequence
  chemically synthesized
acccctgatcctggtactgt

SEQ ID NO: 11610 - DNA, 20 bp, Artificial Sequence
  chemically synthesized
atcctggtactgtcagctac

SEQ ID NO: 11611 - DNA, 20 bp, Artificial Sequence
  chemically synthesized
tcagctactagatttgattc

SEQ ID NO: 11612 - DNA, 20 bp, Artificial Sequence
  chemically synthesized
ctactagatttgattctaga

SEQ ID NO: 11613 - DNA, 20 bp, Artificial Sequence
  chemically synthesized
tttgattctagaaagttgac

SEQ ID NO: 11614 - DNA, 20 bp, Artificial Sequence
  chemically synthesized
attctagaaagttgacaagt

SEQ ID NO: 11615 - DNA, 20 bp, Artificial Sequence
  chemically synthesized
gtgtgataaatgcttcctgt

SEQ ID NO: 11616 - DNA, 20 bp, Artificial Sequence
  chemically synthesized
gaacatgctgtttgtccaaa

SEQ ID NO: 11617 - DNA, 20 bp, Artificial Sequence
  chemically synthesized
aacatgctgtttgtccaaat

SEQ ID NO: 11618 - DNA, 20 bp, Artificial Sequence
  chemically synthesized
cttccctgtatgccttcctc

SEQ ID NO: 11619 - DNA, 20 bp, Artificial Sequence
  chemically synthesized
ttccctgtatgccttcctct

SEQ ID NO: 11620 - DNA, 20 bp, Artificial Sequence
  chemically synthesized
cttcctctgggaaatacata

SEQ ID NO: 11621 - DNA, 20 bp, Artificial Sequence
  chemically synthesized
ggaaatacataaagtcactg

SEQ ID NO: 11622 - DNA, 20 bp, Artificial Sequence
  chemically synthesized
actgtagttgtgaaaaaaca

SEQ ID NO: 11623 - DNA, 20 bp, Artificial Sequence
  chemically synthesized
caaagtgatatatgttgcat

SEQ ID NO: 11624 - DNA, 20 bp, Artificial Sequence
  chemically synthesized
tactctttatgtcaattctt

SEQ ID NO: 11625 - DNA, 20 bp, Artificial Sequence
  chemically synthesized
ttaagcttgcttttctcccc

SEQ ID NO: 11626 - DNA, 20 bp, Artificial Sequence
  chemically synthesized
taagcttgcttttctcccct

SEQ ID NO: 11627 - DNA, 20 bp, Artificial Sequence
  chemically synthesized
aagcttgcttttctccccta

SEQ ID NO: 11628 - DNA, 20 bp, Artificial Sequence
  chemically synthesized
ctcccctagggaactcaact

SEQ ID NO: 11629 - DNA, 20 bp, Artificial Sequence
  chemically synthesized
tttccccaaatatcaactcc

SEQ ID NO: 11630 - DNA, 20 bp, Artificial Sequence
  chemically synthesized
caactccaagatgtttgaca

SEQ ID NO: 11631 - DNA, 20 bp, Artificial Sequence
  chemically synthesized
actccaagatgtttgacata

SEQ ID NO: 11632 - DNA, 20 bp, Artificial Sequence
  chemically synthesized
attttttcctaatccatgaa

SEQ ID NO: 11633 - DNA, 20 bp, Artificial Sequence
  chemically synthesized
tcctaatccatgaaaagctt

SEQ ID NO: 11634 - DNA, 20 bp, Artificial Sequence
  chemically synthesized
aaagctttggtgataactaa

SEQ ID NO: 11635 - DNA, 20 bp, Artificial Sequence
  chemically synthesized
aactaacagcttgctaatga

SEQ ID NO: 11636 - DNA, 20 bp, Artificial Sequence
  chemically synthesized
actaacagcttgctaatgaa

SEQ ID NO: 11637 - DNA, 20 bp, Artificial Sequence
  chemically synthesized
ttaactaaaactttaaattg

SEQ ID NO: 11638 - DNA, 20 bp, Artificial Sequence
  chemically synthesized
agatatataatttaaaaaat

SEQ ID NO: 11639 - DNA, 20 bp, Artificial Sequence
  chemically synthesized
atatataatttaaaaaatta

SEQ ID NO: 11640 - DNA, 20 bp, Artificial Sequence
  chemically synthesized
aatgtcatatatcttaaaat

SEQ ID NO: 11641 - DNA, 20 bp, Artificial Sequence
  chemically synthesized
atcagactttttgtgtaaat

SEQ ID NO: 11642 - DNA, 20 bp, Artificial Sequence
  chemically synthesized
tcagactttttgtgtaaata

SEQ ID NO: 11643 - DNA, 20 bp, Artificial Sequence
  chemically synthesized
tgtttcccattttgatttca

SEQ ID NO: 11644 - DNA, 20 bp, Artificial Sequence
  chemically synthesized
ttcccattttgatttcaaag

SEQ ID NO: 11645 - DNA, 20 bp, Artificial Sequence
  chemically synthesized
cattttgatttcaaagtggt

SEQ ID NO: 11646 - DNA, 20 bp, Artificial Sequence
  chemically synthesized
aagtccaaacaaaaataatg

SEQ ID NO: 11647 - DNA, 20 bp, Artificial Sequence
  chemically synthesized
acttttaatttttttaaacc

SEQ ID NO: 11648 - DNA, 20 bp, Artificial Sequence
  chemically synthesized
cttttaatttttttaaacca

SEQ ID NO: 11649 - DNA, 20 bp, Artificial Sequence
  chemically synthesized
tttaatttttttaaaccaag

SEQ ID NO: 11650 - DNA, 20 bp, Artificial Sequence
  chemically synthesized
aggagatgaatgttttctaa

SEQ ID NO: 11651 - DNA, 20 bp, Artificial Sequence
  chemically synthesized
ggagatgaatgttttctaac

SEQ ID NO: 11652 - DNA, 20 bp, Artificial Sequence
  chemically synthesized
tgaccaaatcatgaactgaa

SEQ ID NO: 11653 - DNA, 20 bp, Artificial Sequence
  chemically synthesized
attaaacataaatgcatcat

SEQ ID NO: 11654 - DNA, 20 bp, Artificial Sequence
  chemically synthesized
ataagcattgtcgatctatt

SEQ ID NO: 11655 - DNA, 20 bp, Artificial Sequence
  chemically synthesized
tctatttagttttaaaaatg

SEQ ID NO: 11656 - DNA, 20 bp, Artificial Sequence
  chemically synthesized
atttagttttaaaaatgaag

SEQ ID NO: 11657 - DNA, 20 bp, Artificial Sequence
  chemically synthesized
tagttttaaaaatgaagaag

SEQ ID NO: 11658 - DNA, 20 bp, Artificial Sequence
  chemically synthesized
aaatgaagaagaagaaaacc

SEQ ID NO: 11659 - DNA, 20 bp, Artificial Sequence
  chemically synthesized
agaagaaaacctagctaaca

SEQ ID NO: 11660 - DNA, 20 bp, Artificial Sequence
  chemically synthesized
aaacctagctaacaaagaac

SEQ ID NO: 11661 - DNA, 20 bp, Artificial Sequence
  chemically synthesized
gtacttaccaacctgcgtgc

SEQ ID NO: 11662 - DNA, 20 bp, Artificial Sequence
  chemically synthesized
ccaacctgcgtgctggctgt

SEQ ID NO: 11663 - DNA, 20 bp, Artificial Sequence
  chemically synthesized
caaatcatgtaatcaaaatt

SEQ ID NO: 11664 - DNA, 20 bp, Artificial Sequence
  chemically synthesized
catgtaatcaaaatttagtg

SEQ ID NO: 11665 - DNA, 20 bp, Artificial Sequence
  chemically synthesized
gtaatcaaaatttagtgaag

SEQ ID NO: 11666 - DNA, 20 bp, Artificial Sequence
  chemically synthesized
tcaaaatttagtgaagaaga

SEQ ID NO: 11667 - DNA, 20 bp, Artificial Sequence
  chemically synthesized
tttagtgaagaagacagcat

SEQ ID NO: 11668 - DNA, 20 bp, Artificial Sequence
  chemically synthesized
tcagatatttctatatctaa

SEQ ID NO: 11669 - DNA, 20 bp, Artificial Sequence
  chemically synthesized
cagatatttctatatctaaa

SEQ ID NO: 11670 - DNA, 20 bp, Artificial Sequence
  chemically synthesized
tatttctatatctaaaaggc

SEQ ID NO: 11671 - DNA, 20 bp, Artificial Sequence
  chemically synthesized
atactcaatgtattttaaaa

SEQ ID NO: 11672 - DNA, 20 bp, Artificial Sequence
  chemically synthesized
tactcaatgtattttaaaaa

SEQ ID NO: 11673 - DNA, 20 bp, Artificial Sequence
  chemically synthesized
aggaaacaaacctgtacatt

SEQ ID NO: 11674 - DNA, 20 bp, Artificial Sequence
  chemically synthesized
aaacctgtacattcagcact

SEQ ID NO: 11675 - DNA, 20 bp, Artificial Sequence
  chemically synthesized
cctgtacattcagcactgag

SEQ ID NO: 11676 - DNA, 20 bp, Artificial Sequence
  chemically synthesized
gcactgagtagatatcctaa

SEQ ID NO: 11677 - DNA, 20 bp, Artificial Sequence
  chemically synthesized
cactgagtagatatcctaaa

SEQ ID NO: 11678 - DNA, 20 bp, Artificial Sequence
  chemically synthesized
tgagtagatatcctaaaagg

SEQ ID NO: 11679 - DNA, 20 bp, Artificial Sequence
  chemically synthesized
tagatatcctaaaaggcaga

SEQ ID NO: 11680 - DNA, 20 bp, Artificial Sequence
  chemically synthesized
cctaaaaggcagatggtgat

SEQ ID NO: 11681 - DNA, 20 bp, Artificial Sequence
  chemically synthesized
ctaaaaggcagatggtgatg

SEQ ID NO: 11682 - DNA, 20 bp, Artificial Sequence
  chemically synthesized
aggcagatggtgatgaggcc

SEQ ID NO: 11683 - DNA, 20 bp, Artificial Sequence
  chemically synthesized
acgcgctgcataacctttgc

SEQ ID NO: 11684 - DNA, 20 bp, Artificial Sequence
  chemically synthesized
cgctgcataacctttgctag

SEQ ID NO: 11685 - DNA, 20 bp, Artificial Sequence
  chemically synthesized
cctttgctagcagattgtga

SEQ ID NO: 11686 - DNA, 20 bp, Artificial Sequence
  chemically synthesized
ttgctagcagattgtgaaag

SEQ ID NO: 11687 - DNA, 20 bp, Artificial Sequence
  chemically synthesized
gcgcgtgaacatgatcatgg

SEQ ID NO: 11688 - DNA, 20 bp, Artificial Sequence
  chemically synthesized
cctcatcaccatctgccttt

SEQ ID NO: 11689 - DNA, 20 bp, Artificial Sequence
  chemically synthesized
tttaggatatctactcagtg

SEQ ID NO: 11690 - DNA, 20 bp, Artificial Sequence
  chemically synthesized
gtttccttttttaaaataca

SEQ ID NO: 11691 - DNA, 20 bp, Artificial Sequence
  chemically synthesized
atgatttgacagcaatattg

SEQ ID NO: 11692 - DNA, 20 bp, Artificial Sequence
  chemically synthesized
gtgggaaaacaaagaaatag

SEQ ID NO: 11693 - DNA, 20 bp, Artificial Sequence
  chemically synthesized
agttatcaccaaagcttttc

SEQ ID NO: 11694 - DNA, 20 bp, Artificial Sequence
  chemically synthesized
tgtctctatgtcaaacatct

SEQ ID NO: 11695 - DNA, 20 bp, Artificial Sequence
  chemically synthesized
tggggaaacacaatactcag

SEQ ID NO: 11696 - DNA, 20 bp, Artificial Sequence
  chemically synthesized
taggggagaaaagcaagctt

SEQ ID NO: 11697 - DNA, 20 bp, Artificial Sequence
  chemically synthesized
caagcttaagaattgacata

SEQ ID NO: 11698 - DNA, 20 bp, Artificial Sequence
  chemically synthesized
acacttacttgtcaactttc

SEQ ID NO: 11699 - DNA, 20 bp, Artificial Sequence
  chemically synthesized
aatctagtagctgacagtac

SEQ ID NO: 11700 - DNA, 20 bp, Artificial Sequence
  chemically synthesized
tagctgacagtaccaggatc

SEQ ID NO: 11701 - DNA, 20 bp, Artificial Sequence
  chemically synthesized
acagaggttaaactagcaaa

SEQ ID NO: 11702 - DNA, 20 bp, Artificial Sequence
  chemically synthesized
tagcaaagtgagtaaagtca

SEQ ID NO: 11703 - DNA, 20 bp, Artificial Sequence
  chemically synthesized
aagacttcagatgctgggga

SEQ ID NO: 11704 - DNA, 20 bp, Artificial Sequence
  chemically synthesized
atgctggggaaaggatagat

SEQ ID NO: 11705 - DNA, 20 bp, Artificial Sequence
  chemically synthesized
gggaaaggatagataagaat

SEQ ID NO: 11706 - DNA, 20 bp, Artificial Sequence
  chemically synthesized
gcccttgaggaaggggccag

SEQ ID NO: 11707 - DNA, 20 bp, Artificial Sequence
  chemically synthesized
ggggccaggggaatttttct

SEQ ID NO: 11708 - DNA, 20 bp, Artificial Sequence
  chemically synthesized
aactctcattggcttctaaa

SEQ ID NO: 11709 - DNA, 20 bp, Artificial Sequence
  chemically synthesized
ggcttctaaaaggagtttcg

SEQ ID NO: 11710 - DNA, 20 bp, Artificial Sequence
  chemically synthesized
taggtattattgcaacagtt

SEQ ID NO: 11711 - DNA, 20 bp, Artificial Sequence
  chemically synthesized
tgtccttcattcagacatta

SEQ ID NO: 11712 - DNA, 20 bp, Artificial Sequence
  chemically synthesized
tatggtgccaggtactgtgt

SEQ ID NO: 11713 - DNA, 20 bp, Artificial Sequence
  chemically synthesized
aggtactgtgtcagggtact

SEQ ID NO: 11714 - DNA, 20 bp, Artificial Sequence
  chemically synthesized
tgtcagggtactaggggtat

SEQ ID NO: 11715 - DNA, 20 bp, Artificial Sequence
  chemically synthesized
aaaatgtgcactaggtacta

SEQ ID NO: 11716 - DNA, 20 bp, Artificial Sequence
  chemically synthesized
ggggaaacaattgatagaga

SEQ ID NO: 11717 - DNA, 20 bp, Artificial Sequence
  chemically synthesized
tagagagagaatattttcat

SEQ ID NO: 11718 - DNA, 20 bp, Artificial Sequence
  chemically synthesized
tttcatctgggtcttaaaag

SEQ ID NO: 11719 - DNA, 20 bp, Artificial Sequence
  chemically synthesized
ataagggcattttatgcaaa

SEQ ID NO: 11720 - DNA, 20 bp, Artificial Sequence
  chemically synthesized
gcaagaacgtgaggtatttc

SEQ ID NO: 11721 - DNA, 20 bp, Artificial Sequence
  chemically synthesized
ggtatcgaagtataaacata

SEQ ID NO: 11722 - DNA, 20 bp, Artificial Sequence
  chemically synthesized
agtaccactgatggctgatt

SEQ ID NO: 11723 - DNA, 20 bp, Artificial Sequence
  chemically synthesized
gtagcagtacaaaaaaagag

SEQ ID NO: 11724 - DNA, 20 bp, Artificial Sequence
  chemically synthesized
aagtggtatgacttaaccat

SEQ ID NO: 11725 - DNA, 20 bp, Artificial Sequence
  chemically synthesized
ggtatggaaggggaaatggc

SEQ ID NO: 11726 - DNA, 20 bp, Artificial Sequence
  chemically synthesized
tttgatgtgattatggacca

SEQ ID NO: 11727 - DNA, 20 bp, Artificial Sequence
  chemically synthesized
tggctctttagtctgactgc

SEQ ID NO: 11728 - DNA, 20 bp, Artificial Sequence
  chemically synthesized
tttagtctgactgccagagt

SEQ ID NO: 11729 - DNA, 20 bp, Artificial Sequence
  chemically synthesized
tgactgccagagtctgaatc

SEQ ID NO: 11730 - DNA, 20 bp, Artificial Sequence
  chemically synthesized
gggcaaagcccttagcctct

SEQ ID NO: 11731 - DNA, 20 bp, Artificial Sequence
  chemically synthesized
ctatctcgtgggacttttgt

SEQ ID NO: 11732 - DNA, 20 bp, Artificial Sequence
  chemically synthesized
tgtgaggatgaagtgagata

SEQ ID NO: 11733 - DNA, 20 bp, Artificial Sequence
  chemically synthesized
tacattatgatatacagtta

SEQ ID NO: 11734 - DNA, 20 bp, Artificial Sequence
  chemically synthesized
ggagacgtatctgactatag

SEQ ID NO: 11735 - DNA, 20 bp, Artificial Sequence
  chemically synthesized
gccacgtgtgtgggcatctg

SEQ ID NO: 11736 - DNA, 20 bp, Artificial Sequence
  chemically synthesized
tgggcatctggagagtgagc

SEQ ID NO: 11737 - DNA, 20 bp, Artificial Sequence
  chemically synthesized
tgctcagtaaattttgttga

SEQ ID NO: 11738 - DNA, 20 bp, Artificial Sequence
  chemically synthesized
taagggccatggagaggaac

SEQ ID NO: 11739 - DNA, 20 bp, Artificial Sequence
  chemically synthesized
ggagttaatcaattcaagtg

SEQ ID NO: 11740 - DNA, 20 bp, Artificial Sequence
  chemically synthesized
ttaatcaattcaagtgctgg

SEQ ID NO: 11741 - DNA, 20 bp, Artificial Sequence
  chemically synthesized
tcaagtgctggatggataac

SEQ ID NO: 11742 - DNA, 20 bp, Artificial Sequence
  chemically synthesized
gttagagcaaagcggggaac

SEQ ID NO: 11743 - DNA, 20 bp, Artificial Sequence
  chemically synthesized
agcaaagcggggaaccagaa

SEQ ID NO: 11744 - DNA, 20 bp, Artificial Sequence
  chemically synthesized
aatagagtgattattataaa

SEQ ID NO: 11745 - DNA, 20 bp, Artificial Sequence
  chemically synthesized
gaagttattaaagagctaaa

SEQ ID NO: 11746 - DNA, 20 bp, Artificial Sequence
  chemically synthesized
gaaagtagggccaacatgaa

SEQ ID NO: 11747 - DNA, 20 bp, Artificial Sequence
  chemically synthesized
ctgtacagtcagctctcctt

SEQ ID NO: 11748 - DNA, 20 bp, Artificial Sequence
  chemically synthesized
caaaaatattcaagaaaaaa

SEQ ID NO: 11749 - DNA, 20 bp, Artificial Sequence
  chemically synthesized
agatgatttaaagtacaaag

SEQ ID NO: 11750 - DNA, 20 bp, Artificial Sequence
  chemically synthesized
cacagatcttgatatttgca

SEQ ID NO: 11751 - DNA, 20 bp, Artificial Sequence
  chemically synthesized
ggtcttgccaccaattttcc

SEQ ID NO: 11752 - DNA, 20 bp, Artificial Sequence
  chemically synthesized
atactgaggaacgactgtaa

SEQ ID NO: 11753 - DNA, 20 bp, Artificial Sequence
  chemically synthesized
gactgtaaatggatgcaggc

SEQ ID NO: 11754 - DNA, 20 bp, Artificial Sequence
  chemically synthesized
tgcaggcatggatgctattt

SEQ ID NO: 11755 - DNA, 20 bp, Artificial Sequence
  chemically synthesized
gagtgtccagggccaagtaa

SEQ ID NO: 11756 - DNA, 20 bp, Artificial Sequence
  chemically synthesized
atgagttgctgagcagagag

SEQ ID NO: 11757 - DNA, 20 bp, Artificial Sequence
  chemically synthesized
cctcggctgtctgggaagag

SEQ ID NO: 11758 - DNA, 20 bp, Artificial Sequence
  chemically synthesized
ggctgctccaatttaggggc

SEQ ID NO: 11759 - DNA, 20 bp, Artificial Sequence
  chemically synthesized
caatttaggggctaggattg

SEQ ID NO: 11760 - DNA, 20 bp, Artificial Sequence
  chemically synthesized
gggtgggcacagcattgcaa

SEQ ID NO: 11761 - DNA, 20 bp, Artificial Sequence
  chemically synthesized
attgagaaatatggccaatg

SEQ ID NO: 11762 - DNA, 20 bp, Artificial Sequence
  chemically synthesized
caggcagatcacttgaggtc

SEQ ID NO: 11763 - DNA, 20 bp, Artificial Sequence
  chemically synthesized
aaaattagctgggcatggtg

SEQ ID NO: 11764 - DNA, 20 bp, Artificial Sequence
  chemically synthesized
tacttgggaggctgaggcag

SEQ ID NO: 11765 - DNA, 20 bp, Artificial Sequence
  chemically synthesized
caagactctgtcaaaaaaaa

SEQ ID NO: 11766 - DNA, 20 bp, Artificial Sequence
  chemically synthesized
ttgcagagcaagggaaaagc

SEQ ID NO: 11767 - DNA, 20 bp, Artificial Sequence
  chemically synthesized
ctttcctttctcttcctttt

SEQ ID NO: 11768 - DNA, 20 bp, Artificial Sequence
  chemically synthesized
gaacaactccaggcaacttc

SEQ ID NO: 11769 - DNA, 20 bp, Artificial Sequence
  chemically synthesized
gccatgcattccttaacaat

SEQ ID NO: 11770 - DNA, 20 bp, Artificial Sequence
  chemically synthesized
tcatcattgtgcgaacataa

SEQ ID NO: 11771 - DNA, 20 bp, Artificial Sequence
  chemically synthesized
agatagagacatctatcctc

SEQ ID NO: 11772 - DNA, 20 bp, Artificial Sequence
  chemically synthesized
acatctatcctccagagttc

SEQ ID NO: 11773 - DNA, 20 bp, Artificial Sequence
  chemically synthesized
tagcttaaaaaaaacatatc

SEQ ID NO: 11774 - DNA, 20 bp, Artificial Sequence
  chemically synthesized
taacatctagtgacagacac

SEQ ID NO: 11775 - DNA, 20 bp, Artificial Sequence
  chemically synthesized
tattctgaaaacagcccagc

SEQ ID NO: 11776 - DNA, 20 bp, Artificial Sequence
  chemically synthesized
aaaacagcccagccagggtg

SEQ ID NO: 11777 - DNA, 20 bp, Artificial Sequence
  chemically synthesized
gaaatctgaccttttattac

SEQ ID NO: 11778 - DNA, 20 bp, Artificial Sequence
  chemically synthesized
tctcttgactaaaagtaaaa

SEQ ID NO: 11779 - DNA, 20 bp, Artificial Sequence
  chemically synthesized
gaaattggctttcagattat

SEQ ID NO: 11780 - DNA, 20 bp, Artificial Sequence
  chemically synthesized
tttcttttttgctaaaacta

SEQ ID NO: 11781 - DNA, 20 bp, Artificial Sequence
  chemically synthesized
atgaaaacgccaacaaaatt

SEQ ID NO: 11782 - DNA, 20 bp, Artificial Sequence
  chemically synthesized
gtataattcaggtaaattgg

SEQ ID NO: 11783 - DNA, 20 bp, Artificial Sequence
  chemically synthesized
tgttcaagggaaccttgaga

SEQ ID NO: 11784 - DNA, 20 bp, Artificial Sequence
  chemically synthesized
aacaaactcttccaatttac

SEQ ID NO: 11785 - DNA, 20 bp, Artificial Sequence
  chemically synthesized
ttatacctctttggccgatt

SEQ ID NO: 11786 - DNA, 20 bp, Artificial Sequence
  chemically synthesized
caagaaaaactgaaatgtaa

SEQ ID NO: 11787 - DNA, 20 bp, Artificial Sequence
  chemically synthesized
ctgtatacacatggagattt

SEQ ID NO: 11788 - DNA, 20 bp, Artificial Sequence
  chemically synthesized
tcaattttacttttagtcaa

SEQ ID NO: 11789 - DNA, 20 bp, Artificial Sequence
  chemically synthesized
ggtcagatttctaatcatat

SEQ ID NO: 11790 - DNA, 20 bp, Artificial Sequence
  chemically synthesized
taatcatatttgaatttact

SEQ ID NO: 11791 - DNA, 20 bp, Artificial Sequence
  chemically synthesized
tcacttgaaaatagctcatt

SEQ ID NO: 11792 - DNA, 20 bp, Artificial Sequence
  chemically synthesized
caccctggctgggctgtttt

SEQ ID NO: 11793 - DNA, 20 bp, Artificial Sequence
  chemically synthesized
ctttggttggcaagtgttat

SEQ ID NO: 11794 - DNA, 20 bp, Artificial Sequence
  chemically synthesized
cagtgatttaagcatctctc

SEQ ID NO: 11795 - DNA, 20 bp, Artificial Sequence
  chemically synthesized
ttaagcatctctctagaatt

SEQ ID NO: 11796 - DNA, 20 bp, Artificial Sequence
  chemically synthesized
agagacactcctgaactctg

SEQ ID NO: 11797 - DNA, 20 bp, Artificial Sequence
  chemically synthesized
tggaggatagatgtctctat

SEQ ID NO: 11798 - DNA, 20 bp, Artificial Sequence
  chemically synthesized
ttgcttaatgacacatttct

SEQ ID NO: 11799 - DNA, 20 bp, Artificial Sequence
  chemically synthesized
agaatatatccccattgtta

SEQ ID NO: 11800 - DNA, 20 bp, Artificial Sequence
  chemically synthesized
cagggactcaagaagttgcc

SEQ ID NO: 11801 - DNA, 20 bp, Artificial Sequence
  chemically synthesized
ctggagttgttcctttcttc

SEQ ID NO: 11802 - DNA, 20 bp, Artificial Sequence
  chemically synthesized
ggcttataagatgaactttc

SEQ ID NO: 11803 - DNA, 20 bp, Artificial Sequence
  chemically synthesized
cattgcagctgttcacttta

SEQ ID NO: 11804 - DNA, 20 bp, Artificial Sequence
  chemically synthesized
tttgggctcactttttttct

SEQ ID NO: 11805 - DNA, 20 bp, Artificial Sequence
  chemically synthesized
ttcaactcttttttttttga

SEQ ID NO: 11806 - DNA, 20 bp, Artificial Sequence
  chemically synthesized
tcttgctctgtcgcccaggc

SEQ ID NO: 11807 - DNA, 20 bp, Artificial Sequence
  chemically synthesized
gcctcagcctcccaagtagc

SEQ ID NO: 11808 - DNA, 20 bp, Artificial Sequence
  chemically synthesized
ttttgtatttttagtaaagc

SEQ ID NO: 11809 - DNA, 20 bp, Artificial Sequence
  chemically synthesized
gcctgggcctctgaaagtgc

SEQ ID NO: 11810 - DNA, 20 bp, Artificial Sequence
  chemically synthesized
aaaaaatcaccaaaatgcag

SEQ ID NO: 11811 - DNA, 20 bp, Artificial Sequence
  chemically synthesized
ccctgcaaatatcaagatct

SEQ ID NO: 11812 - DNA, 20 bp, Artificial Sequence
  chemically synthesized
ttgttatgctgtattgttta

SEQ ID NO: 11813 - DNA, 20 bp, Artificial Sequence
  chemically synthesized
tagggaataatgaaagataa

SEQ ID NO: 11814 - DNA, 20 bp, Artificial Sequence
  chemically synthesized
tgcaaccatccatttttttc

SEQ ID NO: 11815 - DNA, 20 bp, Artificial Sequence
  chemically synthesized
tatttttgatctgcagttaa

SEQ ID NO: 11816 - DNA, 20 bp, Artificial Sequence
  chemically synthesized
gagctgactgtacagtgtgg

SEQ ID NO: 11817 - DNA, 20 bp, Artificial Sequence
  chemically synthesized
ttgagtgaaaaaacagactt

SEQ ID NO: 11818 - DNA, 20 bp, Artificial Sequence
  chemically synthesized
cagatcagacagaaataggt

SEQ ID NO: 11819 - DNA, 20 bp, Artificial Sequence
  chemically synthesized
aggtttaacagtagtataat

SEQ ID NO: 11820 - DNA, 20 bp, Artificial Sequence
  chemically synthesized
atctatctcacaggtgttgg

SEQ ID NO: 11821 - DNA, 20 bp, Artificial Sequence
  chemically synthesized
aaatgactattgtcacaatc

SEQ ID NO: 11822 - DNA, 20 bp, Artificial Sequence
  chemically synthesized
tcacaatcaggaatgaccta

SEQ ID NO: 11823 - DNA, 20 bp, Artificial Sequence
  chemically synthesized
gaatgacctaaagaataatt

SEQ ID NO: 11824 - DNA, 20 bp, Artificial Sequence
  chemically synthesized
tcctgttatccatccagcac

SEQ ID NO: 11825 - DNA, 20 bp, Artificial Sequence
  chemically synthesized
ctccatggcccttaaatgtc

SEQ ID NO: 11826 - DNA, 20 bp, Artificial Sequence
  chemically synthesized
atacttgctagggctgggac

SEQ ID NO: 11827 - DNA, 20 bp, Artificial Sequence
  chemically synthesized
taactactgtttacagaaca

SEQ ID NO: 11828 - DNA, 20 bp, Artificial Sequence
  chemically synthesized
cctatagtcagatacgtctc

SEQ ID NO: 11829 - DNA, 20 bp, Artificial Sequence
  chemically synthesized
ggcactgtcatcttattttt

SEQ ID NO: 11830 - DNA, 20 bp, Artificial Sequence
  chemically synthesized
aggtaacatactaaaacatt

SEQ ID NO: 11831 - DNA, 20 bp, Artificial Sequence
  chemically synthesized
tacctcacgttcttgcaaat

SEQ ID NO: 11832 - DNA, 20 bp, Artificial Sequence
  chemically synthesized
ttgcaaatctgagtctttgc

SEQ ID NO: 11833 - DNA, 20 bp, Artificial Sequence
  chemically synthesized
atgctgctttagatcaaaga

SEQ ID NO: 11834 - DNA, 20 bp, Artificial Sequence
  chemically synthesized
tagttgtaactcagtaatgt

SEQ ID NO: 11835 - DNA, 20 bp, Artificial Sequence
  chemically synthesized
aactccttttagaagccaat

SEQ ID NO: 11836 - DNA, 20 bp, Artificial Sequence
  chemically synthesized
atgagagtttaatagcagaa

SEQ ID NO: 11837 - DNA, 20 bp, Artificial Sequence
  chemically synthesized
atctctggctacaatggctg

SEQ ID NO: 11838 - DNA, 20 bp, Artificial Sequence
  chemically synthesized
ctttctccttagtattatct

SEQ ID NO: 11839 - DNA, 20 bp, Artificial Sequence
  chemically synthesized
ctcaccacttatatagaaga

SEQ ID NO: 11840 - DNA, 20 bp, Artificial Sequence
  chemically synthesized
acttatatagaagaaagggt

SEQ ID NO: 11841 - DNA, 20 bp, Artificial Sequence
  chemically synthesized
cttgctttatgtcctgcttt

SEQ ID NO: 11842 - DNA, 20 bp, Artificial Sequence
  chemically synthesized
ttcacagctgacatcatgtc

SEQ ID NO: 11843 - DNA, 20 bp, Artificial Sequence
  chemically synthesized
acagggccagtcagctttct

SEQ ID NO: 11844 - DNA, 20 bp, Artificial Sequence
  chemically synthesized
gtcagctttctgggggtgct

SEQ ID NO: 11845 - DNA, 20 bp, Artificial Sequence
  chemically synthesized
gaacatgctgtttgtccaaa

SEQ ID NO: 11846 - DNA, 20 bp, Artificial Sequence
  chemically synthesized
ttctcccctagggaactcaa

SEQ ID NO: 11847 - DNA, 20 bp, Artificial Sequence
  chemically synthesized
aatttttttaaaccaaggag

SEQ ID NO: 11848 - DNA, 20 bp, Artificial Sequence
  chemically synthesized
ggagatgaatgttttctaac

SEQ ID NO: 11849 - DNA, 20 bp, Artificial Sequence
  chemically synthesized
acaaacctgtacattcagca

SEQ ID NO: 11850 - DNA, 20 bp, Artificial Sequence
  chemically synthesized
agcgcgtgaacatgatcatg

SEQ ID NO: 11851 - DNA, 20 bp, Artificial Sequence
  chemically synthesized
agtatgcttgccttttagat

SEQ ID NO: 11852 - DNA, 20 bp, Artificial Sequence
  chemically synthesized
atttggtcatgtaattcctg

SEQ ID NO: 11853 - DNA, 20 bp, Artificial Sequence
  chemically synthesized
aaaattaaaagtgggaaaac

SEQ ID NO: 11854 - DNA, 20 bp, Artificial Sequence
  chemically synthesized
agtgggaaaacaaagaaata

SEQ ID NO: 11855 - DNA, 20 bp, Artificial Sequence
  chemically synthesized
actcagttgagttccctagg

SEQ ID NO: 11856 - DNA, 20 bp, Artificial Sequence
  chemically synthesized
ctaggggagaaaagcaagct

SEQ ID NO: 11857 - DNA, 20 bp, Artificial Sequence
  chemically synthesized
cccagaggaaggcatacagg

SEQ ID NO: 11858 - DNA, 20 bp, Artificial Sequence
  chemically synthesized
cacacttacttgtcaacttt

SEQ ID NO: 11859 - DNA, 20 bp, Artificial Sequence
  chemically synthesized
ggtgccaaccctaagcaccc

SEQ ID NO: 11860 - DNA, 20 bp, Artificial Sequence
  chemically synthesized
agtgagtaaagtcaagggat

SEQ ID NO: 11861 - DNA, 20 bp, Artificial Sequence
  chemically synthesized
gatgctggggaaaggataga

SEQ ID NO: 11862 - DNA, 20 bp, Artificial Sequence
  chemically synthesized
cgatccccagataatactaa

SEQ ID NO: 11863 - DNA, 20 bp, Artificial Sequence
  chemically synthesized
actaggtactaagggatcat

SEQ ID NO: 11864 - DNA, 20 bp, Artificial Sequence
  chemically synthesized
tggggaaacaattgatagag

SEQ ID NO: 11865 - DNA, 20 bp, Artificial Sequence
  chemically synthesized
gtttgatgtgattatggacc

SEQ ID NO: 11866 - DNA, 20 bp, Artificial Sequence
  chemically synthesized
agttagagcaaagcggggaa

SEQ ID NO: 11867 - DNA, 20 bp, Artificial Sequence
  chemically synthesized
aaaaagggagagatcaacaa

SEQ ID NO: 11868 - DNA, 20 bp, Artificial Sequence
  chemically synthesized
agaagttattaaagagctaa

SEQ ID NO: 11869 - DNA, 20 bp, Artificial Sequence
  chemically synthesized
attaaagagctaaagagaat

SEQ ID NO: 11870 - DNA, 20 bp, Artificial Sequence
  chemically synthesized
gaattgagaaatttaaaaca

SEQ ID NO: 11871 - DNA, 20 bp, Artificial Sequence
  chemically synthesized
ggccaacatgaaaggagtag

SEQ ID NO: 11872 - DNA, 20 bp, Artificial Sequence
  chemically synthesized
aactgcagatcaaaaatatt

SEQ ID NO: 11873 - DNA, 20 bp, Artificial Sequence
  chemically synthesized
ttacattgtattagctatta

SEQ ID NO: 11874 - DNA, 20 bp, Artificial Sequence
  chemically synthesized
tgcaaacgagtgaaggaaat

SEQ ID NO: 11875 - DNA, 20 bp, Artificial Sequence
  chemically synthesized
ctacttgggaggctgaggca

SEQ ID NO: 11876 - DNA, 20 bp, Artificial Sequence
  chemically synthesized
gtcaaaaaaaaaagagttga

SEQ ID NO: 11877 - DNA, 20 bp, Artificial Sequence
  chemically synthesized
aaaaagtctaggctaaattc

SEQ ID NO: 11878 - DNA, 20 bp, Artificial Sequence
  chemically synthesized
cagctgcaatgaaaataagg

SEQ ID NO: 11879 - DNA, 20 bp, Artificial Sequence
  chemically synthesized
aggaagtagtcccaaatacc

SEQ ID NO: 11880 - DNA, 20 bp, Artificial Sequence
  chemically synthesized
agatatattgctagaccctt

SEQ ID NO: 11881 - DNA, 20 bp, Artificial Sequence
  chemically synthesized
ttaacaatggggatatattc

SEQ ID NO: 11882 - DNA, 20 bp, Artificial Sequence
  chemically synthesized
tggtatttgtgtatctaaac

SEQ ID NO: 11883 - DNA, 20 bp, Artificial Sequence
  chemically synthesized
gagaggaaggagggagggaa

SEQ ID NO: 11884 - DNA, 20 bp, Artificial Sequence
  chemically synthesized
caaagtaaattcaaatatga

SEQ ID NO: 11885 - DNA, 20 bp, Artificial Sequence
  chemically synthesized
attttggctccatgccctaa

SEQ ID NO: 11886 - DNA, 20 bp, Artificial Sequence
  chemically synthesized
ttttcttttttgctaaaact

SEQ ID NO: 11887 - DNA, 20 bp, Artificial Sequence
  chemically synthesized
ttgttcaagggaaccttgag

SEQ ID NO: 11888 - DNA, 20 bp, Artificial Sequence
  chemically synthesized
accttgagagagaatgtatg

SEQ ID NO: 11889 - DNA, 20 bp, Artificial Sequence
  chemically synthesized
attatacctctttggccgat

SEQ ID NO: 11890 - DNA, 20 bp, Artificial Sequence
  chemically synthesized
tttgttggcgttttcatgat

SEQ ID NO: 11891 - DNA, 20 bp, Artificial Sequence
  chemically synthesized
tcaagaaaaactgaaatgta

SEQ ID NO: 11892 - DNA, 20 bp, Artificial Sequence
  chemically synthesized
aattctttagttttagcaaa

SEQ ID NO: 11893 - DNA, 20 bp, Artificial Sequence
  chemically synthesized
catgaaaattttacatctct

SEQ ID NO: 11894 - DNA, 20 bp, Artificial Sequence
  chemically synthesized
ttcaattttacttttagtca

SEQ ID NO: 11895 - DNA, 20 bp, Artificial Sequence
  chemically synthesized
ttgaatttactttggatgaa

SEQ ID NO: 11896 - DNA, 20 bp, Artificial Sequence
  chemically synthesized
tcaccctggctgggctgttt

SEQ ID NO: 11897 - DNA, 20 bp, Artificial Sequence
  chemically synthesized
agtgtctgtcactagatgtt

SEQ ID NO: 11898 - DNA, 20 bp, Artificial Sequence
  chemically synthesized
gcagtgatttaagcatctct

SEQ ID NO: 11899 - DNA, 20 bp, Artificial Sequence
  chemically synthesized
attgcttaatgacacatttc

SEQ ID NO: 11900 - DNA, 20 bp, Artificial Sequence
  chemically synthesized
ctgattaactccaaaaagga

SEQ ID NO: 11901 - DNA, 20 bp, Artificial Sequence
  chemically synthesized
aggaaagtaaaaaggaaagg

SEQ ID NO: 11902 - DNA, 20 bp, Artificial Sequence
  chemically synthesized
gttgagtgaaaaaacagact

SEQ ID NO: 11903 - DNA, 20 bp, Artificial Sequence
  chemically synthesized
agactttagaatcagatcag

SEQ ID NO: 11904 - DNA, 20 bp, Artificial Sequence
  chemically synthesized
taggtttaacagtagtataa

SEQ ID NO: 11905 - DNA, 20 bp, Artificial Sequence
  chemically synthesized
gtcacaatcaggaatgacct

SEQ ID NO: 11906 - DNA, 20 bp, Artificial Sequence
  chemically synthesized
tgcattaatactgtctatcc

SEQ ID NO: 11907 - DNA, 20 bp, Artificial Sequence
  chemically synthesized
tatctctggctacaatggct

SEQ ID NO: 11908 - DNA, 20 bp, Artificial Sequence
  chemically synthesized
atcatctcaccacttatata

SEQ ID NO: 11909 - DNA, 20 bp, Artificial Sequence
  chemically synthesized
gtcagctactagatttgatt

SEQ ID NO: 11910 - DNA, 20 bp, Artificial Sequence
  chemically synthesized
ttagttttaaaaatgaagaa

SEQ ID NO: 11911 - DNA, 20 bp, Artificial Sequence
  chemically synthesized
gttttcttcttcttcatttt

SEQ ID NO: 11912 - DNA, 20 bp, Artificial Sequence
  chemically synthesized
tggtcatgtaattcctgtta

SEQ ID NO: 11913 - DNA, 20 bp, Artificial Sequence
  chemically synthesized
tttaaaaaaattaaaagtgg

SEQ ID NO: 11914 - DNA, 20 bp, Artificial Sequence
  chemically synthesized
cttcaatttaaagttttagt

SEQ ID NO: 11915 - DNA, 20 bp, Artificial Sequence
  chemically synthesized
gggataaagaaaatttgttg

SEQ ID NO: 11916 - DNA, 20 bp, Artificial Sequence
  chemically synthesized
acagtttggaattttgaaat

SEQ ID NO: 11917 - DNA, 20 bp, Artificial Sequence
  chemically synthesized
ttgaaattaaaacagttctg

SEQ ID NO: 11918 - DNA, 20 bp, Artificial Sequence
  chemically synthesized
ctaaagagaattgagaaatt

SEQ ID NO: 11919 - DNA, 20 bp, Artificial Sequence
  chemically synthesized
acacatatatgtatatacat

SEQ ID NO: 11920 - DNA, 20 bp, Artificial Sequence
  chemically synthesized
ctaggtagatgtagcttaaa

SEQ ID NO: 11921 - DNA, 20 bp, Artificial Sequence
  chemically synthesized
catttgggcaaccatattct

SEQ ID NO: 11922 - DNA, 20 bp, Artificial Sequence
  chemically synthesized
gctttcagattatttggatt

SEQ ID NO: 11923 - DNA, 20 bp, Artificial Sequence
  chemically synthesized
catgatgttttcttttttgc

SEQ ID NO: 11924 - DNA, 20 bp, Artificial Sequence
  chemically synthesized
tttcagtttttcttgatcat

SEQ ID NO: 11925 - DNA, 20 bp, Artificial Sequence
  chemically synthesized
aagaagcacgagaagttttt

SEQ ID NO: 11926 - DNA, 20 bp, Artificial Sequence
  chemically synthesized
aaaaacttctcgtgcttctt

SEQ ID NO: 11927 - DNA, 20 bp, Artificial Sequence
  chemically synthesized
ttggcgttttcatgatcaag

SEQ ID NO: 11928 - DNA, 20 bp, Artificial Sequence
  chemically synthesized
tctttagttttagcaaaaaa

SEQ ID NO: 11929 - DNA, 20 bp, Artificial Sequence
  chemically synthesized
tgtacagtgtggttgagtga

SEQ ID NO: 11930 - DNA, 20 bp, Artificial Sequence
  chemically synthesized
ctttgcccaaggtaacatac

SEQ ID NO: 11931 - DNA, 20 bp, Artificial Sequence
  chemically synthesized
atagtccatatggaaccata

SEQ ID NO: 11932 - DNA, 20 bp, Artificial Sequence
  chemically synthesized
tctttgatgcatacacttta

SEQ ID NO: 11933 - DNA, 20 bp, Artificial Sequence
  chemically synthesized
taaagtcactgtagttgtga

SEQ ID NO: 11934 - DNA, 20 bp, Artificial Sequence
  chemically synthesized
gttaatctttatgttttaac

SEQ ID NO: 11935 - DNA, 20 bp, Artificial Sequence
  chemically synthesized
gttttaaaaatgaagaagaa

SEQ ID NO: 11936 - DNA, 20 bp, Artificial Sequence
  chemically synthesized
atctactcagtgctgaatgt

SEQ ID NO: 11937 - DNA, 20 bp, Artificial Sequence
  chemically synthesized
actcagtgctgaatgtacag

SEQ ID NO: 11938 - DNA, 20 bp, Artificial Sequence
  chemically synthesized
ccttttttaaaatacattga

SEQ ID NO: 11939 - DNA, 20 bp, Artificial Sequence
  chemically synthesized
atgctgtcttcttcactaaa

SEQ ID NO: 11940 - DNA, 20 bp, Artificial Sequence
  chemically synthesized
ttcttcactaaattttgatt

SEQ ID NO: 11941 - DNA, 20 bp, Artificial Sequence
  chemically synthesized
aagtactggttctttgttag

SEQ ID NO: 11942 - DNA, 20 bp, Artificial Sequence
  chemically synthesized
tttaaaactaaatagatcga

SEQ ID NO: 11943 - DNA, 20 bp, Artificial Sequence
  chemically synthesized
cgacaatgcttatgatgcat

SEQ ID NO: 11944 - DNA, 20 bp, Artificial Sequence
  chemically synthesized
tttaataaacactgttcagt

SEQ ID NO: 11945 - DNA, 20 bp, Artificial Sequence
  chemically synthesized
tgttagaaaacattcatctc

SEQ ID NO: 11946 - DNA, 20 bp, Artificial Sequence
  chemically synthesized
aaaaaaaataaccacattat

SEQ ID NO: 11947 - DNA, 20 bp, Artificial Sequence
  chemically synthesized
tggccttatttacacaaaaa

SEQ ID NO: 11948 - DNA, 20 bp, Artificial Sequence
  chemically synthesized
ttttaagatatatgacattt

SEQ ID NO: 11949 - DNA, 20 bp, Artificial Sequence
  chemically synthesized
taaattatatatcttcaatt

SEQ ID NO: 11950 - DNA, 20 bp, Artificial Sequence
  chemically synthesized
ttaaagttttagttaaaaca

SEQ ID NO: 11951 - DNA, 20 bp, Artificial Sequence
  chemically synthesized
agcaagctgttagttatcac

SEQ ID NO: 11952 - DNA, 20 bp, Artificial Sequence
  chemically synthesized
tagttatcaccaaagctttt

SEQ ID NO: 11953 - DNA, 20 bp, Artificial Sequence
  chemically synthesized
gagttccctaggggagaaaa

SEQ ID NO: 11954 - DNA, 20 bp, Artificial Sequence
  chemically synthesized
agctaatgcaacatatatca

SEQ ID NO: 11955 - DNA, 20 bp, Artificial Sequence
  chemically synthesized
tgagatgatgaaggttgtaa

SEQ ID NO: 11956 - DNA, 20 bp, Artificial Sequence
  chemically synthesized
tagataagaataaggatgaa

SEQ ID NO: 11957 - DNA, 20 bp, Artificial Sequence
  chemically synthesized
taatactaaggagaaaggca

SEQ ID NO: 11958 - DNA, 20 bp, Artificial Sequence
  chemically synthesized
tcttctgctattaaactctc

SEQ ID NO: 11959 - DNA, 20 bp, Artificial Sequence
  chemically synthesized
aactctcattggcttctaaa

SEQ ID NO: 11960 - DNA, 20 bp, Artificial Sequence
  chemically synthesized
cttctaaaaggagtttcggt

SEQ ID NO: 11961 - DNA, 20 bp, Artificial Sequence
  chemically synthesized
ctgcctttaggtattattgc

SEQ ID NO: 11962 - DNA, 20 bp, Artificial Sequence
  chemically synthesized
aattaaaacagttctgtaaa

SEQ ID NO: 11963 - DNA, 20 bp, Artificial Sequence
  chemically synthesized
aaacagttctgtaaaaccag

SEQ ID NO: 11964 - DNA, 20 bp, Artificial Sequence
  chemically synthesized
aagcagcatgaggccaggtg

SEQ ID NO: 11965 - DNA, 20 bp, Artificial Sequence
  chemically synthesized
gaggatcactcgtgcaaaga

SEQ ID NO: 11966 - DNA, 20 bp, Artificial Sequence
  chemically synthesized
gcaagaacgtgaggtatttc

SEQ ID NO: 11967 - DNA, 20 bp, Artificial Sequence
  chemically synthesized
ataatgaagtcattaaccta

SEQ ID NO: 11968 - DNA, 20 bp, Artificial Sequence
  chemically synthesized
acataaggagtaccactgat

SEQ ID NO: 11969 - DNA, 20 bp, Artificial Sequence
  chemically synthesized
tggctagagtcttggggact

SEQ ID NO: 11970 - DNA, 20 bp, Artificial Sequence
  chemically synthesized
tcttggggactttgtgtttg

SEQ ID NO: 11971 - DNA, 20 bp, Artificial Sequence
  chemically synthesized
actgccagagtctgaatcct

SEQ ID NO: 11972 - DNA, 20 bp, Artificial Sequence
  chemically synthesized
taaatattgtgccctacatg

SEQ ID NO: 11973 - DNA, 20 bp, Artificial Sequence
  chemically synthesized
caaagcggggaaccagaata

SEQ ID NO: 11974 - DNA, 20 bp, Artificial Sequence
  chemically synthesized
aatagagtgattattataaa

SEQ ID NO: 11975 - DNA, 20 bp, Artificial Sequence
  chemically synthesized
aaaattattctttaggtcat

SEQ ID NO: 11976 - DNA, 20 bp, Artificial Sequence
  chemically synthesized
atagtcatttcattatataa

SEQ ID NO: 11977 - DNA, 20 bp, Artificial Sequence
  chemically synthesized
catttgacaaagttaaggtt

SEQ ID NO: 11978 - DNA, 20 bp, Artificial Sequence
  chemically synthesized
caggtctagaggaggcagat

SEQ ID NO: 11979 - DNA, 20 bp, Artificial Sequence
  chemically synthesized
ttcaaacctatttctgtctg

SEQ ID NO: 11980 - DNA, 20 bp, Artificial Sequence
  chemically synthesized
ctgtctgatctgattctaaa

SEQ ID NO: 11981 - DNA, 20 bp, Artificial Sequence
  chemically synthesized
ctccttgtgagttccacagc

SEQ ID NO: 11982 - DNA, 20 bp, Artificial Sequence
  chemically synthesized
agctattaagagaaacctag

SEQ ID NO: 11983 - DNA, 20 bp, Artificial Sequence
  chemically synthesized
gatttaaagtacaaaggagg

SEQ ID NO: 11984 - DNA, 20 bp, Artificial Sequence
  chemically synthesized
ggtggcatccatctgcattt

SEQ ID NO: 11985 - DNA, 20 bp, Artificial Sequence
  chemically synthesized
tggctgctccaatttagggg

SEQ ID NO: 11986 - DNA, 20 bp, Artificial Sequence
  chemically synthesized
acaaggtgaaatggtgaaac

SEQ ID NO: 11987 - DNA, 20 bp, Artificial Sequence
  chemically synthesized
ttgggaggctgaggcaggag

SEQ ID NO: 11988 - DNA, 20 bp, Artificial Sequence
  chemically synthesized
ctgcaatgaaaataagggaa

SEQ ID NO: 11989 - DNA, 20 bp, Artificial Sequence
  chemically synthesized
gggaagaaagtttagttcat

SEQ ID NO: 11990 - DNA, 20 bp, Artificial Sequence
  chemically synthesized
acttacctaaacctaaatgg

SEQ ID NO: 11991 - DNA, 20 bp, Artificial Sequence
  chemically synthesized
ccaaaatgtcattgtgcagc

SEQ ID NO: 11992 - DNA, 20 bp, Artificial Sequence
  chemically synthesized
aaggagggagggaaggagaa

SEQ ID NO: 11993 - DNA, 20 bp, Artificial Sequence
  chemically synthesized
gtctcttcagactaggtaga

SEQ ID NO: 11994 - DNA, 20 bp, Artificial Sequence
  chemically synthesized
acatatcctgaattctagag

SEQ ID NO: 11995 - DNA, 20 bp, Artificial Sequence
  chemically synthesized
caaaggtgctgttgatctga

SEQ ID NO: 11996 - DNA, 20 bp, Artificial Sequence
  chemically synthesized
attgcttttttaaattaatg

SEQ ID NO: 11997 - DNA, 20 bp, Artificial Sequence
  chemically synthesized
catttgcagctggaccataa

SEQ ID NO: 11998 - DNA, 20 bp, Artificial Sequence
  chemically synthesized
ttcatccaaagtaaattcaa

SEQ ID NO: 11999 - DNA, 20 bp, Artificial Sequence
  chemically synthesized
atacagtactgtgggaacat

SEQ ID NO: 12000 - DNA, 20 bp, Artificial Sequence
  chemically synthesized
gctccatgccctaaagagaa

SEQ ID NO: 12001 - DNA, 20 bp, Artificial Sequence
  chemically synthesized
gccctaaagagaaattggct

SEQ ID NO: 12002 - DNA, 20 bp, Artificial Sequence
  chemically synthesized
agaaattggctttcagatta

SEQ ID NO: 12003 - DNA, 20 bp, Artificial Sequence
  chemically synthesized
taagagatgtaaaattttca

SEQ ID NO: 12004 - DNA, 20 bp, Artificial Sequence
  chemically synthesized
aaagaattattcttttacat

SEQ ID NO: 12005 - DNA, 20 bp, Artificial Sequence
  chemically synthesized
gtataattcaggtaaattgg

SEQ ID NO: 12006 - DNA, 20 bp, Artificial Sequence
  chemically synthesized
gagaatgtatggaagaaaag

SEQ ID NO: 12007 - DNA, 20 bp, Artificial Sequence
  chemically synthesized
tgtagttttgaagaagcacg

SEQ ID NO: 12008 - DNA, 20 bp, Artificial Sequence
  chemically synthesized
tcagtgttttcaaaaacttc

SEQ ID NO: 12009 - DNA, 20 bp, Artificial Sequence
  chemically synthesized
tacctgaattatacctcttt

SEQ ID NO: 12010 - DNA, 20 bp, Artificial Sequence
  chemically synthesized
tggccgattcagaattttgt

SEQ ID NO: 12011 - DNA, 20 bp, Artificial Sequence
  chemically synthesized
gaaatgtaaaagaataattc

SEQ ID NO: 12012 - DNA, 20 bp, Artificial Sequence
  chemically synthesized
tttacatctcttaagaaagt

SEQ ID NO: 12013 - DNA, 20 bp, Artificial Sequence
  chemically synthesized
cccacagtactgtatacaca

SEQ ID NO: 12014 - DNA, 20 bp, Artificial Sequence
  chemically synthesized
gagaattccagtaataaaag

SEQ ID NO: 12015 - DNA, 20 bp, Artificial Sequence
  chemically synthesized
gtgatccatcaccctggctg

SEQ ID NO: 12016 - DNA, 20 bp, Artificial Sequence
  chemically synthesized
ggcaagtgttataggaattg

SEQ ID NO: 12017 - DNA, 20 bp, Artificial Sequence
  chemically synthesized
gcatctctctagaattcagg

SEQ ID NO: 12018 - DNA, 20 bp, Artificial Sequence
  chemically synthesized
gtattttcactgtacctttt

SEQ ID NO: 12019 - DNA, 20 bp, Artificial Sequence
  chemically synthesized
tcagtacagtcacatgctgt

SEQ ID NO: 12020 - DNA, 20 bp, Artificial Sequence
  chemically synthesized
tatgtagtaagctataccat

SEQ ID NO: 12021 - DNA, 20 bp, Artificial Sequence
  chemically synthesized
ttatgttcgcacaatgatga

SEQ ID NO: 12022 - DNA, 20 bp, Artificial Sequence
  chemically synthesized
gcatggctgtatacacacac

SEQ ID NO: 12023 - DNA, 20 bp, Artificial Sequence
  chemically synthesized
gtatacacacacatgtgttt

SEQ ID NO: 12024 - DNA, 20 bp, Artificial Sequence
  chemically synthesized
gataccatctcaagaggacc

SEQ ID NO: 12025 - DNA, 20 bp, Artificial Sequence
  chemically synthesized
ctggggtatttgggactact

SEQ ID NO: 12026 - DNA, 20 bp, Artificial Sequence
  chemically synthesized
gtgttctagtcccttgacat

SEQ ID NO: 12027 - DNA, 20 bp, Artificial Sequence
  chemically synthesized
tgcctcagcctcccaagtag

SEQ ID NO: 12028 - DNA, 20 bp, Artificial Sequence
  chemically synthesized
ttttgtatttttagtaaagc

SEQ ID NO: 12029 - DNA, 20 bp, Artificial Sequence
  chemically synthesized
tgcctgggcctctgaaagtg

SEQ ID NO: 12030 - DNA, 20 bp, Artificial Sequence
  chemically synthesized
catatttctcaatttccttc

SEQ ID NO: 12031 - DNA, 20 bp, Artificial Sequence
  chemically synthesized
gctcaagtctccgatataaa

SEQ ID NO: 12032 - DNA, 20 bp, Artificial Sequence
  chemically synthesized
ctttgtactttaaatcatct

SEQ ID NO: 12033 - DNA, 20 bp, Artificial Sequence
  chemically synthesized
tgtaaatagttgttatgctg

SEQ ID NO: 12034 - DNA, 20 bp, Artificial Sequence
  chemically synthesized
tagaatcagatcagacagaa

SEQ ID NO: 12035 - DNA, 20 bp, Artificial Sequence
  chemically synthesized
ttaactttgtcaaatgtaaa

SEQ ID NO: 12036 - DNA, 20 bp, Artificial Sequence
  chemically synthesized
ttcatgttggccctactttc

SEQ ID NO: 12037 - DNA, 20 bp, Artificial Sequence
  chemically synthesized
gaatgacctaaagaataatt

SEQ ID NO: 12038 - DNA, 20 bp, Artificial Sequence
  chemically synthesized
ataatcactctattctggtt

SEQ ID NO: 12039 - DNA, 20 bp, Artificial Sequence
  chemically synthesized
tgttatccatccagcacttg

SEQ ID NO: 12040 - DNA, 20 bp, Artificial Sequence
  chemically synthesized
gggttctcccaggctccagc

SEQ ID NO: 12041 - DNA, 20 bp, Artificial Sequence
  chemically synthesized
gtatatttatgccctacagg

SEQ ID NO: 12042 - DNA, 20 bp, Artificial Sequence
  chemically synthesized
cccacacacgtggctgtaac

SEQ ID NO: 12043 - DNA, 20 bp, Artificial Sequence
  chemically synthesized
gtcagatacgtctcctgaat

SEQ ID NO: 12044 - DNA, 20 bp, Artificial Sequence
  chemically synthesized
agtaatagctaatgtatatg

SEQ ID NO: 12045 - DNA, 20 bp, Artificial Sequence
  chemically synthesized
ttatttttatgaatgaggaa

SEQ ID NO: 12046 - DNA, 20 bp, Artificial Sequence
  chemically synthesized
aagatagattcatagaggct

SEQ ID NO: 12047 - DNA, 20 bp, Artificial Sequence
  chemically synthesized
aaggtaacatactaaaacat

SEQ ID NO: 12048 - DNA, 20 bp, Artificial Sequence
  chemically synthesized
tcagccatcagtggtactcc

SEQ ID NO: 12049 - DNA, 20 bp, Artificial Sequence
  chemically synthesized
ttatctgatgaccagctctg

SEQ ID NO: 12050 - DNA, 20 bp, Artificial Sequence
  chemically synthesized
gaaaatattctctctctatc

SEQ ID NO: 12051 - DNA, 20 bp, Artificial Sequence
  chemically synthesized
aaacctctcacctggcctca

SEQ ID NO: 12052 - DNA, 20 bp, Artificial Sequence
  chemically synthesized
gctttagatcaaagagggag

SEQ ID NO: 12053 - DNA, 20 bp, Artificial Sequence
  chemically synthesized
catacactttacaaaactaa

SEQ ID NO: 12054 - DNA, 20 bp, Artificial Sequence
  chemically synthesized
aaactaaactggttttacag

SEQ ID NO: 12055 - DNA, 20 bp, Artificial Sequence
  chemically synthesized
aactccttttagaagccaat

SEQ ID NO: 12056 - DNA, 20 bp, Artificial Sequence
  chemically synthesized
attcccctggccccttcctc

SEQ ID NO: 12057 - DNA, 20 bp, Artificial Sequence
  chemically synthesized
atcgtatacttaacttccct

SEQ ID NO: 12058 - DNA, 20 bp, Artificial Sequence
  chemically synthesized
ctcaccacttatatagaaga

SEQ ID NO: 12059 - DNA, 20 bp, Artificial Sequence
  chemically synthesized
ttatatagaagaaagggttt

SEQ ID NO: 12060 - DNA, 20 bp, Artificial Sequence
  chemically synthesized
taatgagatatatctaatgg

SEQ ID NO: 12061 - DNA, 20 bp, Artificial Sequence
  chemically synthesized
tctaatggccttgctttatg

SEQ ID NO: 12062 - DNA, 20 bp, Artificial Sequence
  chemically synthesized
cttgctttatgtcctgcttt

SEQ ID NO: 12063 - DNA, 20 bp, Artificial Sequence
  chemically synthesized
cccttgactttactcacttt

SEQ ID NO: 12064 - DNA, 20 bp, Artificial Sequence
  chemically synthesized
atcgttatttcagcatttca

SEQ ID NO: 12065 - DNA, 20 bp, Artificial Sequence
  chemically synthesized
gagtgggaaccacagggcca

SEQ ID NO: 12066 - DNA, 20 bp, Artificial Sequence
  chemically synthesized
agggccagtcagctttctgg

SEQ ID NO: 12067 - DNA, 20 bp, Artificial Sequence
  chemically synthesized
tgatcctggtactgtcagct

SEQ ID NO: 12068 - DNA, 20 bp, Artificial Sequence
  chemically synthesized
ctggtactgtcagctactag

SEQ ID NO: 12069 - DNA, 20 bp, Artificial Sequence
  chemically synthesized
agttgacaagtaagtgtgat

SEQ ID NO: 12070 - DNA, 20 bp, Artificial Sequence
  chemically synthesized
aaatgcttcctgtgagaaca

SEQ ID NO: 12071 - DNA, 20 bp, Artificial Sequence
  chemically synthesized
cctactctttatgtcaattc

SEQ ID NO: 12072 - DNA, 20 bp, Artificial Sequence
  chemically synthesized
ctctttatgtcaattcttaa

SEQ ID NO: 12073 - DNA, 20 bp, Artificial Sequence
  chemically synthesized
ctagggaactcaactgagta

SEQ ID NO: 12074 - DNA, 20 bp, Artificial Sequence
  chemically synthesized
ttccccaaatatcaactcca

SEQ ID NO: 12075 - DNA, 20 bp, Artificial Sequence
  chemically synthesized
agatgtttgacatagagaca

SEQ ID NO: 12076 - DNA, 20 bp, Artificial Sequence
  chemically synthesized
tgattttttcctaatccatg

SEQ ID NO: 12077 - DNA, 20 bp, Artificial Sequence
  chemically synthesized
gaaaagctttggtgataact

SEQ ID NO: 12078 - DNA, 20 bp, Artificial Sequence
  chemically synthesized
tgctaatgaaaggttaatct

SEQ ID NO: 12079 - DNA, 20 bp, Artificial Sequence
  chemically synthesized
actttttgtgtaaataaggc

SEQ ID NO: 12080 - DNA, 20 bp, Artificial Sequence
  chemically synthesized
tgtgtaaataaggccattgt

SEQ ID NO: 12081 - DNA, 20 bp, Artificial Sequence
  chemically synthesized
aataaggccattgtttgtgc

SEQ ID NO: 12082 - DNA, 20 bp, Artificial Sequence
  chemically synthesized
gtttgtgcttttgtttccca

SEQ ID NO: 12083 - DNA, 20 bp, Artificial Sequence
  chemically synthesized
ttcactatattctgctattt

SEQ ID NO: 12084 - DNA, 20 bp, Artificial Sequence
  chemically synthesized
tttttttaaaccaaggagat

SEQ ID NO: 12085 - DNA, 20 bp, Artificial Sequence
  chemically synthesized
tgaccaaatcatgaactgaa

SEQ ID NO: 12086 - DNA, 20 bp, Artificial Sequence
  chemically synthesized
tcataagcattgtcgatcta

SEQ ID NO: 12087 - DNA, 20 bp, Artificial Sequence
  chemically synthesized
aggcagatggtgatgaggcc

SEQ ID NO: 12088 - DNA, 20 bp, Artificial Sequence
  chemically synthesized
cgcgctgcataacctttgct

SEQ ID NO: 12089 - DNA, 22 bp, Artificial Sequence
  chemically synthesized
tcacaatctgctagcaaaggtt

SEQ ID NO: 12090 - DNA, 22 bp, Artificial Sequence
  chemically synthesized
cacaatctgctagcaaaggtta

SEQ ID NO: 12091 - DNA, 22 bp, Artificial Sequence
  chemically synthesized
acaatctgctagcaaaggttat

SEQ ID NO: 12092 - DNA, 22 bp, Artificial Sequence
  chemically synthesized
ctagcaaaggttatgcagcgcg

SEQ ID NO: 12093 - DNA, 22 bp, Artificial Sequence
  chemically synthesized
gcaaaggttatgcagcgcgtga

SEQ ID NO: 12094 - DNA, 22 bp, Artificial Sequence
  chemically synthesized
tgcagcgcgtgaacatgatcat

SEQ ID NO: 12095 - DNA, 22 bp, Artificial Sequence
  chemically synthesized
atcaccatctgccttttaggat

SEQ ID NO: 12096 - DNA, 22 bp, Artificial Sequence
  chemically synthesized
ccttttaggatatctactcagt

SEQ ID NO: 12097 - DNA, 22 bp, Artificial Sequence
  chemically synthesized
ttaggatatctactcagtgctg

SEQ ID NO: 12098 - DNA, 22 bp, Artificial Sequence
  chemically synthesized
taggatatctactcagtgctga

SEQ ID NO: 12099 - DNA, 22 bp, Artificial Sequence
  chemically synthesized
aggatatctactcagtgctgaa

SEQ ID NO: 12100 - DNA, 22 bp, Artificial Sequence
  chemically synthesized
ggatatctactcagtgctgaat

SEQ ID NO: 12101 - DNA, 22 bp, Artificial Sequence
  chemically synthesized
ctcagtgctgaatgtacaggtt

SEQ ID NO: 12102 - DNA, 22 bp, Artificial Sequence
  chemically synthesized
agtgctgaatgtacaggtttgt

SEQ ID NO: 12103 - DNA, 22 bp, Artificial Sequence
  chemically synthesized
aatgtacaggtttgtttccttt

SEQ ID NO: 12104 - DNA, 22 bp, Artificial Sequence
  chemically synthesized
gtttccttttttaaaatacatt

SEQ ID NO: 12105 - DNA, 22 bp, Artificial Sequence
  chemically synthesized
tttccttttttaaaatacattg

SEQ ID NO: 12106 - DNA, 22 bp, Artificial Sequence
  chemically synthesized
ccttttttaaaatacattgagt

SEQ ID NO: 12107 - DNA, 22 bp, Artificial Sequence
  chemically synthesized
cttttttaaaatacattgagta

SEQ ID NO: 12108 - DNA, 22 bp, Artificial Sequence
  chemically synthesized
ttttaaaatacattgagtatgc

SEQ ID NO: 12109 - DNA, 22 bp, Artificial Sequence
  chemically synthesized
tttaaaatacattgagtatgct

SEQ ID NO: 12110 - DNA, 22 bp, Artificial Sequence
  chemically synthesized
ttaaaatacattgagtatgctt

SEQ ID NO: 12111 - DNA, 22 bp, Artificial Sequence
  chemically synthesized
taaaatacattgagtatgcttg

SEQ ID NO: 12112 - DNA, 22 bp, Artificial Sequence
  chemically synthesized
aaaatacattgagtatgcttgc

SEQ ID NO: 12113 - DNA, 22 bp, Artificial Sequence
  chemically synthesized
aaatacattgagtatgcttgcc

SEQ ID NO: 12114 - DNA, 22 bp, Artificial Sequence
  chemically synthesized
agtatgcttgccttttagatat

SEQ ID NO: 12115 - DNA, 22 bp, Artificial Sequence
  chemically synthesized
gccttttagatatagaaatatc

SEQ ID NO: 12116 - DNA, 22 bp, Artificial Sequence
  chemically synthesized
ccttttagatatagaaatatct

SEQ ID NO: 12117 - DNA, 22 bp, Artificial Sequence
  chemically synthesized
ttagatatagaaatatctgatg

SEQ ID NO: 12118 - DNA, 22 bp, Artificial Sequence
  chemically synthesized
tagatatagaaatatctgatgc

SEQ ID NO: 12119 - DNA, 22 bp, Artificial Sequence
  chemically synthesized
agatatagaaatatctgatgct

SEQ ID NO: 12120 - DNA, 22 bp, Artificial Sequence
  chemically synthesized
gatatagaaatatctgatgctg

SEQ ID NO: 12121 - DNA, 22 bp, Artificial Sequence
  chemically synthesized
atgctgtcttcttcactaaatt

SEQ ID NO: 12122 - DNA, 22 bp, Artificial Sequence
  chemically synthesized
tcttcttcactaaattttgatt

SEQ ID NO: 12123 - DNA, 22 bp, Artificial Sequence
  chemically synthesized
cttcactaaattttgattacat

SEQ ID NO: 12124 - DNA, 22 bp, Artificial Sequence
  chemically synthesized
ttcactaaattttgattacatg

SEQ ID NO: 12125 - DNA, 22 bp, Artificial Sequence
  chemically synthesized
cactaaattttgattacatgat

SEQ ID NO: 12126 - DNA, 22 bp, Artificial Sequence
  chemically synthesized
actaaattttgattacatgatt

SEQ ID NO: 12127 - DNA, 22 bp, Artificial Sequence
  chemically synthesized
aattttgattacatgatttgac

SEQ ID NO: 12128 - DNA, 22 bp, Artificial Sequence
  chemically synthesized
tgattacatgatttgacagcaa

SEQ ID NO: 12129 - DNA, 22 bp, Artificial Sequence
  chemically synthesized
gattacatgatttgacagcaat

SEQ ID NO: 12130 - DNA, 22 bp, Artificial Sequence
  chemically synthesized
attacatgatttgacagcaata

SEQ ID NO: 12131 - DNA, 22 bp, Artificial Sequence
  chemically synthesized
catgatttgacagcaatattga

SEQ ID NO: 12132 - DNA, 22 bp, Artificial Sequence
  chemically synthesized
gacagcaatattgaagagtcta

SEQ ID NO: 12133 - DNA, 22 bp, Artificial Sequence
  chemically synthesized
acagcaatattgaagagtctaa

SEQ ID NO: 12134 - DNA, 22 bp, Artificial Sequence
  chemically synthesized
aagagtctaacagccagcacgc

SEQ ID NO: 12135 - DNA, 22 bp, Artificial Sequence
  chemically synthesized
acagccagcacgcaggttggta

SEQ ID NO: 12136 - DNA, 22 bp, Artificial Sequence
  chemically synthesized
gtaagtactggttctttgttag

SEQ ID NO: 12137 - DNA, 22 bp, Artificial Sequence
  chemically synthesized
gttctttgttagctaggttttc

SEQ ID NO: 12138 - DNA, 22 bp, Artificial Sequence
  chemically synthesized
tttgttagctaggttttcttct

SEQ ID NO: 12139 - DNA, 22 bp, Artificial Sequence
  chemically synthesized
tgttagctaggttttcttcttc

SEQ ID NO: 12140 - DNA, 22 bp, Artificial Sequence
  chemically synthesized
gttagctaggttttcttcttct

SEQ ID NO: 12141 - DNA, 22 bp, Artificial Sequence
  chemically synthesized
ttagctaggttttcttcttctt

SEQ ID NO: 12142 - DNA, 22 bp, Artificial Sequence
  chemically synthesized
gctaggttttcttcttcttcat

SEQ ID NO: 12143 - DNA, 22 bp, Artificial Sequence
  chemically synthesized
ggttttcttcttcttcattttt

SEQ ID NO: 12144 - DNA, 22 bp, Artificial Sequence
  chemically synthesized
tcttcttcttcatttttaaaac

SEQ ID NO: 12145 - DNA, 22 bp, Artificial Sequence
  chemically synthesized
cttcttcttcatttttaaaact

SEQ ID NO: 12146 - DNA, 22 bp, Artificial Sequence
  chemically synthesized
ttcttcttcatttttaaaacta

SEQ ID NO: 12147 - DNA, 22 bp, Artificial Sequence
  chemically synthesized
cttcttcatttttaaaactaaa

SEQ ID NO: 12148 - DNA, 22 bp, Artificial Sequence
  chemically synthesized
ttcttcatttttaaaactaaat

SEQ ID NO: 12149 - DNA, 22 bp, Artificial Sequence
  chemically synthesized
cttcatttttaaaactaaatag

SEQ ID NO: 12150 - DNA, 22 bp, Artificial Sequence
  chemically synthesized
ttcatttttaaaactaaataga

SEQ ID NO: 12151 - DNA, 22 bp, Artificial Sequence
  chemically synthesized
catttttaaaactaaatagatc

SEQ ID NO: 12152 - DNA, 22 bp, Artificial Sequence
  chemically synthesized
atttttaaaactaaatagatcg

SEQ ID NO: 12153 - DNA, 22 bp, Artificial Sequence
  chemically synthesized
ttaaaactaaatagatcgacaa

SEQ ID NO: 12154 - DNA, 22 bp, Artificial Sequence
  chemically synthesized
taaaactaaatagatcgacaat

SEQ ID NO: 12155 - DNA, 22 bp, Artificial Sequence
  chemically synthesized
aaaactaaatagatcgacaatg

SEQ ID NO: 12156 - DNA, 22 bp, Artificial Sequence
  chemically synthesized
aaactaaatagatcgacaatgc

SEQ ID NO: 12157 - DNA, 22 bp, Artificial Sequence
  chemically synthesized
aatagatcgacaatgcttatga

SEQ ID NO: 12158 - DNA, 22 bp, Artificial Sequence
  chemically synthesized
atgatgcatttatgtttaataa

SEQ ID NO: 12159 - DNA, 22 bp, Artificial Sequence
  chemically synthesized
tgatgcatttatgtttaataaa

SEQ ID NO: 12160 - DNA, 22 bp, Artificial Sequence
  chemically synthesized
atgtttaataaacactgttcag

SEQ ID NO: 12161 - DNA, 22 bp, Artificial Sequence
  chemically synthesized
tgtttaataaacactgttcagt

SEQ ID NO: 12162 - DNA, 22 bp, Artificial Sequence
  chemically synthesized
aataaacactgttcagttcatg

SEQ ID NO: 12163 - DNA, 22 bp, Artificial Sequence
  chemically synthesized
ataaacactgttcagttcatga

SEQ ID NO: 12164 - DNA, 22 bp, Artificial Sequence
  chemically synthesized
ttcagttcatgatttggtcatg

SEQ ID NO: 12165 - DNA, 22 bp, Artificial Sequence
  chemically synthesized
agttcatgatttggtcatgtaa

SEQ ID NO: 12166 - DNA, 22 bp, Artificial Sequence
  chemically synthesized
atgatttggtcatgtaattcct

SEQ ID NO: 12167 - DNA, 22 bp, Artificial Sequence
  chemically synthesized
ggtcatgtaattcctgttagaa

SEQ ID NO: 12168 - DNA, 22 bp, Artificial Sequence
  chemically synthesized
gtcatgtaattcctgttagaaa

SEQ ID NO: 12169 - DNA, 22 bp, Artificial Sequence
  chemically synthesized
ctgttagaaaacattcatctcc

SEQ ID NO: 12170 - DNA, 22 bp, Artificial Sequence
  chemically synthesized
ttagaaaacattcatctccttg

SEQ ID NO: 12171 - DNA, 22 bp, Artificial Sequence
  chemically synthesized
gaaaacattcatctccttggtt

SEQ ID NO: 12172 - DNA, 22 bp, Artificial Sequence
  chemically synthesized
atctccttggtttaaaaaaatt

SEQ ID NO: 12173 - DNA, 22 bp, Artificial Sequence
  chemically synthesized
cttggtttaaaaaaattaaaag

SEQ ID NO: 12174 - DNA, 22 bp, Artificial Sequence
  chemically synthesized
ggtttaaaaaaattaaaagtgg

SEQ ID NO: 12175 - DNA, 22 bp, Artificial Sequence
  chemically synthesized
gtttaaaaaaattaaaagtggg

SEQ ID NO: 12176 - DNA, 22 bp, Artificial Sequence
  chemically synthesized
aaaaaaattaaaagtgggaaaa

SEQ ID NO: 12177 - DNA, 22 bp, Artificial Sequence
  chemically synthesized
aaaaaattaaaagtgggaaaac

SEQ ID NO: 12178 - DNA, 22 bp, Artificial Sequence
  chemically synthesized
aaagtgggaaaacaaagaaata

SEQ ID NO: 12179 - DNA, 22 bp, Artificial Sequence
  chemically synthesized
tttttgtttggacttaccactt

SEQ ID NO: 12180 - DNA, 22 bp, Artificial Sequence
  chemically synthesized
ttgtttggacttaccactttga

SEQ ID NO: 12181 - DNA, 22 bp, Artificial Sequence
  chemically synthesized
tgtttggacttaccactttgaa

SEQ ID NO: 12182 - DNA, 22 bp, Artificial Sequence
  chemically synthesized
gtttggacttaccactttgaaa

SEQ ID NO: 12183 - DNA, 22 bp, Artificial Sequence
  chemically synthesized
tttggacttaccactttgaaat

SEQ ID NO: 12184 - DNA, 22 bp, Artificial Sequence
  chemically synthesized
ggacttaccactttgaaatcaa

SEQ ID NO: 12185 - DNA, 22 bp, Artificial Sequence
  chemically synthesized
gacttaccactttgaaatcaaa

SEQ ID NO: 12186 - DNA, 22 bp, Artificial Sequence
  chemically synthesized
accactttgaaatcaaaatggg

SEQ ID NO: 12187 - DNA, 22 bp, Artificial Sequence
  chemically synthesized
ccactttgaaatcaaaatggga

SEQ ID NO: 12188 - DNA, 22 bp, Artificial Sequence
  chemically synthesized
tgaaatcaaaatgggaaacaaa

SEQ ID NO: 12189 - DNA, 22 bp, Artificial Sequence
  chemically synthesized
gaaatcaaaatgggaaacaaaa

SEQ ID NO: 12190 - DNA, 22 bp, Artificial Sequence
  chemically synthesized
aaatcaaaatgggaaacaaaag

SEQ ID NO: 12191 - DNA, 22 bp, Artificial Sequence
  chemically synthesized
atttacacaaaaagtctgattt

SEQ ID NO: 12192 - DNA, 22 bp, Artificial Sequence
  chemically synthesized
tttacacaaaaagtctgatttt

SEQ ID NO: 12193 - DNA, 22 bp, Artificial Sequence
  chemically synthesized
acacaaaaagtctgattttaag

SEQ ID NO: 12194 - DNA, 22 bp, Artificial Sequence
  chemically synthesized
cacaaaaagtctgattttaaga

SEQ ID NO: 12195 - DNA, 22 bp, Artificial Sequence
  chemically synthesized
attttaagatatatgacatttc

SEQ ID NO: 12196 - DNA, 22 bp, Artificial Sequence
  chemically synthesized
taagatatatgacatttcaagg

SEQ ID NO: 12197 - DNA, 22 bp, Artificial Sequence
  chemically synthesized
aagatatatgacatttcaaggt

SEQ ID NO: 12198 - DNA, 22 bp, Artificial Sequence
  chemically synthesized
agatatatgacatttcaaggtt

SEQ ID NO: 12199 - DNA, 22 bp, Artificial Sequence
  chemically synthesized
caaggtttcagaagtatgtaat

SEQ ID NO: 12200 - DNA, 22 bp, Artificial Sequence
  chemically synthesized
aaggtttcagaagtatgtaatg

SEQ ID NO: 12201 - DNA, 22 bp, Artificial Sequence
  chemically synthesized
cagaagtatgtaatgaggtgtg

SEQ ID NO: 12202 - DNA, 22 bp, Artificial Sequence
  chemically synthesized
agaagtatgtaatgaggtgtgt

SEQ ID NO: 12203 - DNA, 22 bp, Artificial Sequence
  chemically synthesized
taattttttaaattatatatct

SEQ ID NO: 12204 - DNA, 22 bp, Artificial Sequence
  chemically synthesized
attttttaaattatatatcttc

SEQ ID NO: 12205 - DNA, 22 bp, Artificial Sequence
  chemically synthesized
tttaaattatatatcttcaatt

SEQ ID NO: 12206 - DNA, 22 bp, Artificial Sequence
  chemically synthesized
ttaaattatatatcttcaattt

SEQ ID NO: 12207 - DNA, 22 bp, Artificial Sequence
  chemically synthesized
taaattatatatcttcaattta

SEQ ID NO: 12208 - DNA, 22 bp, Artificial Sequence
  chemically synthesized
aaattatatatcttcaatttaa

SEQ ID NO: 12209 - DNA, 22 bp, Artificial Sequence
  chemically synthesized
aattatatatcttcaatttaaa

SEQ ID NO: 12210 - DNA, 22 bp, Artificial Sequence
  chemically synthesized
tatatcttcaatttaaagtttt

SEQ ID NO: 12211 - DNA, 22 bp, Artificial Sequence
  chemically synthesized
caatttaaagttttagttaaaa

SEQ ID NO: 12212 - DNA, 22 bp, Artificial Sequence
  chemically synthesized
aatttaaagttttagttaaaac

SEQ ID NO: 12213 - DNA, 22 bp, Artificial Sequence
  chemically synthesized
aaagttttagttaaaacataaa

SEQ ID NO: 12214 - DNA, 22 bp, Artificial Sequence
  chemically synthesized
aagttttagttaaaacataaag

SEQ ID NO: 12215 - DNA, 22 bp, Artificial Sequence
  chemically synthesized
tagttaaaacataaagattaac

SEQ ID NO: 12216 - DNA, 22 bp, Artificial Sequence
  chemically synthesized
agttaaaacataaagattaacc

SEQ ID NO: 12217 - DNA, 22 bp, Artificial Sequence
  chemically synthesized
gttaaaacataaagattaacct

SEQ ID NO: 12218 - DNA, 22 bp, Artificial Sequence
  chemically synthesized
aaacataaagattaacctttca

SEQ ID NO: 12219 - DNA, 22 bp, Artificial Sequence
  chemically synthesized
acctttcattagcaagctgtta

SEQ ID NO: 12220 - DNA, 22 bp, Artificial Sequence
  chemically synthesized
tcattagcaagctgttagttat

SEQ ID NO: 12221 - DNA, 22 bp, Artificial Sequence
  chemically synthesized
cattagcaagctgttagttatc

SEQ ID NO: 12222 - DNA, 22 bp, Artificial Sequence
  chemically synthesized
attagcaagctgttagttatca

SEQ ID NO: 12223 - DNA, 22 bp, Artificial Sequence
  chemically synthesized
gcaagctgttagttatcaccaa

SEQ ID NO: 12224 - DNA, 22 bp, Artificial Sequence
  chemically synthesized
ttagttatcaccaaagcttttc

SEQ ID NO: 12225 - DNA, 22 bp, Artificial Sequence
  chemically synthesized
gttatcaccaaagcttttcatg

SEQ ID NO: 12226 - DNA, 22 bp, Artificial Sequence
  chemically synthesized
tcaccaaagcttttcatggatt

SEQ ID NO: 12227 - DNA, 22 bp, Artificial Sequence
  chemically synthesized
ttcatggattaggaaaaaatca

SEQ ID NO: 12228 - DNA, 22 bp, Artificial Sequence
  chemically synthesized
tcatggattaggaaaaaatcat

SEQ ID NO: 12229 - DNA, 22 bp, Artificial Sequence
  chemically synthesized
catggattaggaaaaaatcatt

SEQ ID NO: 12230 - DNA, 22 bp, Artificial Sequence
  chemically synthesized
atggattaggaaaaaatcattt

SEQ ID NO: 12231 - DNA, 22 bp, Artificial Sequence
  chemically synthesized
ggaaaaaatcattttgtctcta

SEQ ID NO: 12232 - DNA, 22 bp, Artificial Sequence
  chemically synthesized
tgtctctatgtcaaacatcttg

SEQ ID NO: 12233 - DNA, 22 bp, Artificial Sequence
  chemically synthesized
gtctctatgtcaaacatcttgg

SEQ ID NO: 12234 - DNA, 22 bp, Artificial Sequence
  chemically synthesized
tctctatgtcaaacatcttgga

SEQ ID NO: 12235 - DNA, 22 bp, Artificial Sequence
  chemically synthesized
tatgtcaaacatcttggagttg

SEQ ID NO: 12236 - DNA, 22 bp, Artificial Sequence
  chemically synthesized
tgtcaaacatcttggagttgat

SEQ ID NO: 12237 - DNA, 22 bp, Artificial Sequence
  chemically synthesized
ggagttgatatttggggaaaca

SEQ ID NO: 12238 - DNA, 22 bp, Artificial Sequence
  chemically synthesized
gagttgatatttggggaaacac

SEQ ID NO: 12239 - DNA, 22 bp, Artificial Sequence
  chemically synthesized
atatttggggaaacacaatact

SEQ ID NO: 12240 - DNA, 22 bp, Artificial Sequence
  chemically synthesized
ggggaaacacaatactcagttg

SEQ ID NO: 12241 - DNA, 22 bp, Artificial Sequence
  chemically synthesized
gggaaacacaatactcagttga

SEQ ID NO: 12242 - DNA, 22 bp, Artificial Sequence
  chemically synthesized
agttgagttccctaggggagaa

SEQ ID NO: 12243 - DNA, 22 bp, Artificial Sequence
  chemically synthesized
agttccctaggggagaaaagca

SEQ ID NO: 12244 - DNA, 22 bp, Artificial Sequence
  chemically synthesized
cctaggggagaaaagcaagctt

SEQ ID NO: 12245 - DNA, 22 bp, Artificial Sequence
  chemically synthesized
ggggagaaaagcaagcttaaga

SEQ ID NO: 12246 - DNA, 22 bp, Artificial Sequence
  chemically synthesized
aagaattgacataaagagtagg

SEQ ID NO: 12247 - DNA, 22 bp, Artificial Sequence
  chemically synthesized
agaattgacataaagagtagga

SEQ ID NO: 12248 - DNA, 22 bp, Artificial Sequence
  chemically synthesized
acataaagagtaggaagttagc

SEQ ID NO: 12249 - DNA, 22 bp, Artificial Sequence
  chemically synthesized
gctaatgcaacatatatcactt

SEQ ID NO: 12250 - DNA, 22 bp, Artificial Sequence
  chemically synthesized
atgcaacatatatcactttgtt

SEQ ID NO: 12251 - DNA, 22 bp, Artificial Sequence
  chemically synthesized
tgttttttcacaactacagtga

SEQ ID NO: 12252 - DNA, 22 bp, Artificial Sequence
  chemically synthesized
gttttttcacaactacagtgac

SEQ ID NO: 12253 - DNA, 22 bp, Artificial Sequence
  chemically synthesized
ttttttcacaactacagtgact

SEQ ID NO: 12254 - DNA, 22 bp, Artificial Sequence
  chemically synthesized
tttcacaactacagtgacttta

SEQ ID NO: 12255 - DNA, 22 bp, Artificial Sequence
  chemically synthesized
ttcacaactacagtgactttat

SEQ ID NO: 12256 - DNA, 22 bp, Artificial Sequence
  chemically synthesized
tcacaactacagtgactttatg

SEQ ID NO: 12257 - DNA, 22 bp, Artificial Sequence
  chemically synthesized
cacaactacagtgactttatgt

SEQ ID NO: 12258 - DNA, 22 bp, Artificial Sequence
  chemically synthesized
acaactacagtgactttatgta

SEQ ID NO: 12259 - DNA, 22 bp, Artificial Sequence
  chemically synthesized
cagtgactttatgtatttccca

SEQ ID NO: 12260 - DNA, 22 bp, Artificial Sequence
  chemically synthesized
tatgtatttcccagaggaaggc

SEQ ID NO: 12261 - DNA, 22 bp, Artificial Sequence
  chemically synthesized
atgtatttcccagaggaaggca

SEQ ID NO: 12262 - DNA, 22 bp, Artificial Sequence
  chemically synthesized
tgtatttcccagaggaaggcat

SEQ ID NO: 12263 - DNA, 22 bp, Artificial Sequence
  chemically synthesized
cccagaggaaggcatacaggga

SEQ ID NO: 12264 - DNA, 22 bp, Artificial Sequence
  chemically synthesized
ccagaggaaggcatacagggaa

SEQ ID NO: 12265 - DNA, 22 bp, Artificial Sequence
  chemically synthesized
tcccatttggacaaacagcatg

SEQ ID NO: 12266 - DNA, 22 bp, Artificial Sequence
  chemically synthesized
ggacaaacagcatgttctcaca

SEQ ID NO: 12267 - DNA, 22 bp, Artificial Sequence
  chemically synthesized
gacaaacagcatgttctcacag

SEQ ID NO: 12268 - DNA, 22 bp, Artificial Sequence
  chemically synthesized
tcacaggaagcatttatcacac

SEQ ID NO: 12269 - DNA, 22 bp, Artificial Sequence
  chemically synthesized
acaggaagcatttatcacactt

SEQ ID NO: 12270 - DNA, 22 bp, Artificial Sequence
  chemically synthesized
atcacacttacttgtcaacttt

SEQ ID NO: 12271 - DNA, 22 bp, Artificial Sequence
  chemically synthesized
tcacacttacttgtcaactttc

SEQ ID NO: 12272 - DNA, 22 bp, Artificial Sequence
  chemically synthesized
acttgtcaactttctagaatca

SEQ ID NO: 12273 - DNA, 22 bp, Artificial Sequence
  chemically synthesized
cttgtcaactttctagaatcaa

SEQ ID NO: 12274 - DNA, 22 bp, Artificial Sequence
  chemically synthesized
gtcaactttctagaatcaaatc

SEQ ID NO: 12275 - DNA, 22 bp, Artificial Sequence
  chemically synthesized
tcaactttctagaatcaaatct

SEQ ID NO: 12276 - DNA, 22 bp, Artificial Sequence
  chemically synthesized
tctagaatcaaatctagtagct

SEQ ID NO: 12277 - DNA, 22 bp, Artificial Sequence
  chemically synthesized
ctagaatcaaatctagtagctg

SEQ ID NO: 12278 - DNA, 22 bp, Artificial Sequence
  chemically synthesized
tagaatcaaatctagtagctga

SEQ ID NO: 12279 - DNA, 22 bp, Artificial Sequence
  chemically synthesized
gaatcaaatctagtagctgaca

SEQ ID NO: 12280 - DNA, 22 bp, Artificial Sequence
  chemically synthesized
gtagctgacagtaccaggatca

SEQ ID NO: 12281 - DNA, 22 bp, Artificial Sequence
  chemically synthesized
acagtaccaggatcaggggtgc

SEQ ID NO: 12282 - DNA, 22 bp, Artificial Sequence
  chemically synthesized
agcacccccagaaagctgactg

SEQ ID NO: 12283 - DNA, 22 bp, Artificial Sequence
  chemically synthesized
actggccctgtggttcccactc

SEQ ID NO: 12284 - DNA, 22 bp, Artificial Sequence
  chemically synthesized
gccctgtggttcccactccaga

SEQ ID NO: 12285 - DNA, 22 bp, Artificial Sequence
  chemically synthesized
tggttcccactccagacatgat

SEQ ID NO: 12286 - DNA, 22 bp, Artificial Sequence
  chemically synthesized
ccactccagacatgatgtcagc

SEQ ID NO: 12287 - DNA, 22 bp, Artificial Sequence
  chemically synthesized
cagacatgatgtcagctgtgaa

SEQ ID NO: 12288 - DNA, 22 bp, Artificial Sequence
  chemically synthesized
tgaaatcagactgaaatgctga

SEQ ID NO: 12289 - DNA, 22 bp, Artificial Sequence
  chemically synthesized
aaatgctgaaataacgataaaa

SEQ ID NO: 12290 - DNA, 22 bp, Artificial Sequence
  chemically synthesized
aaataacgataaaaaaaaatac

SEQ ID NO: 12291 - DNA, 22 bp, Artificial Sequence
  chemically synthesized
aactagcaaagtgagtaaagtc

SEQ ID NO: 12292 - DNA, 22 bp, Artificial Sequence
  chemically synthesized
gcaaagtgagtaaagtcaaggg

SEQ ID NO: 12293 - DNA, 22 bp, Artificial Sequence
  chemically synthesized
gttggaaaactcacaaagcagg

SEQ ID NO: 12294 - DNA, 22 bp, Artificial Sequence
  chemically synthesized
ttggaaaactcacaaagcagga

SEQ ID NO: 12295 - DNA, 22 bp, Artificial Sequence
  chemically synthesized
gaaaactcacaaagcaggacat

SEQ ID NO: 12296 - DNA, 22 bp, Artificial Sequence
  chemically synthesized
acaaagcaggacataaagcaag

SEQ ID NO: 12297 - DNA, 22 bp, Artificial Sequence
  chemically synthesized
gatatatctcattagtgtgaca

SEQ ID NO: 12298 - DNA, 22 bp, Artificial Sequence
  chemically synthesized
attagtgtgacatctgggagga

SEQ ID NO: 12299 - DNA, 22 bp, Artificial Sequence
  chemically synthesized
gtgtgacatctgggaggacaaa

SEQ ID NO: 12300 - DNA, 22 bp, Artificial Sequence
  chemically synthesized
ggaggacaaagcatccaaaccc

SEQ ID NO: 12301 - DNA, 22 bp, Artificial Sequence
  chemically synthesized
tcttctatataagtggtgagat

SEQ ID NO: 12302 - DNA, 22 bp, Artificial Sequence
  chemically synthesized
cttctatataagtggtgagatg

SEQ ID NO: 12303 - DNA, 22 bp, Artificial Sequence
  chemically synthesized
ttctatataagtggtgagatga

SEQ ID NO: 12304 - DNA, 22 bp, Artificial Sequence
  chemically synthesized
ctatataagtggtgagatgatg

SEQ ID NO: 12305 - DNA, 22 bp, Artificial Sequence
  chemically synthesized
tatataagtggtgagatgatga

SEQ ID NO: 12306 - DNA, 22 bp, Artificial Sequence
  chemically synthesized
tataagtggtgagatgatgaag

SEQ ID NO: 12307 - DNA, 22 bp, Artificial Sequence
  chemically synthesized
taagagggcttctgcccccttg

SEQ ID NO: 12308 - DNA, 22 bp, Artificial Sequence
  chemically synthesized
ctgcccccttgaagacttcaga

SEQ ID NO: 12309 - DNA, 22 bp, Artificial Sequence
  chemically synthesized
tgcccccttgaagacttcagat

SEQ ID NO: 12310 - DNA, 22 bp, Artificial Sequence
  chemically synthesized
cccccttgaagacttcagatgc

SEQ ID NO: 12311 - DNA, 22 bp, Artificial Sequence
  chemically synthesized
gaagacttcagatgctggggaa

SEQ ID NO: 12312 - DNA, 22 bp, Artificial Sequence
  chemically synthesized
aagacttcagatgctggggaaa

SEQ ID NO: 12313 - DNA, 22 bp, Artificial Sequence
  chemically synthesized
cagatgctggggaaaggataga

SEQ ID NO: 12314 - DNA, 22 bp, Artificial Sequence
  chemically synthesized
agatgctggggaaaggatagat

SEQ ID NO: 12315 - DNA, 22 bp, Artificial Sequence
  chemically synthesized
gggaaaggatagataagaataa

SEQ ID NO: 12316 - DNA, 22 bp, Artificial Sequence
  chemically synthesized
ttggagcctgggaaataatgac

SEQ ID NO: 12317 - DNA, 22 bp, Artificial Sequence
  chemically synthesized
tggagcctgggaaataatgact

SEQ ID NO: 12318 - DNA, 22 bp, Artificial Sequence
  chemically synthesized
ggagcctgggaaataatgacta

SEQ ID NO: 12319 - DNA, 22 bp, Artificial Sequence
  chemically synthesized
gagcctgggaaataatgactag

SEQ ID NO: 12320 - DNA, 22 bp, Artificial Sequence
  chemically synthesized
ggaaataatgactagcgataaa

SEQ ID NO: 12321 - DNA, 22 bp, Artificial Sequence
  chemically synthesized
gcgataaacctgaagggaagtt

SEQ ID NO: 12322 - DNA, 22 bp, Artificial Sequence
  chemically synthesized
aagggaagttaagtatacgatc

SEQ ID NO: 12323 - DNA, 22 bp, Artificial Sequence
  chemically synthesized
agtatacgatccccagataata

SEQ ID NO: 12324 - DNA, 22 bp, Artificial Sequence
  chemically synthesized
aggagaaaggcaatgtgattct

SEQ ID NO: 12325 - DNA, 22 bp, Artificial Sequence
  chemically synthesized
tgcagccattgtagccagagat

SEQ ID NO: 12326 - DNA, 22 bp, Artificial Sequence
  chemically synthesized
cagccattgtagccagagataa

SEQ ID NO: 12327 - DNA, 22 bp, Artificial Sequence
  chemically synthesized
tagccagagataataagccctt

SEQ ID NO: 12328 - DNA, 22 bp, Artificial Sequence
  chemically synthesized
gaggaaggggccaggggaattt

SEQ ID NO: 12329 - DNA, 22 bp, Artificial Sequence
  chemically synthesized
aggaaggggccaggggaatttt

SEQ ID NO: 12330 - DNA, 22 bp, Artificial Sequence
  chemically synthesized
ttctaaggatagacagtattaa

SEQ ID NO: 12331 - DNA, 22 bp, Artificial Sequence
  chemically synthesized
tctaaggatagacagtattaat

SEQ ID NO: 12332 - DNA, 22 bp, Artificial Sequence
  chemically synthesized
ctaaggatagacagtattaatg

SEQ ID NO: 12333 - DNA, 22 bp, Artificial Sequence
  chemically synthesized
taaggatagacagtattaatgc

SEQ ID NO: 12334 - DNA, 22 bp, Artificial Sequence
  chemically synthesized
aggatagacagtattaatgcag

SEQ ID NO: 12335 - DNA, 22 bp, Artificial Sequence
  chemically synthesized
atgcagcactctcttctgctat

SEQ ID NO: 12336 - DNA, 22 bp, Artificial Sequence
  chemically synthesized
tcttctgctattaaactctcat

SEQ ID NO: 12337 - DNA, 22 bp, Artificial Sequence
  chemically synthesized
ttctgctattaaactctcattg

SEQ ID NO: 12338 - DNA, 22 bp, Artificial Sequence
  chemically synthesized
ctgctattaaactctcattggc

SEQ ID NO: 12339 - DNA, 22 bp, Artificial Sequence
  chemically synthesized
tgctattaaactctcattggct

SEQ ID NO: 12340 - DNA, 22 bp, Artificial Sequence
  chemically synthesized
ctattaaactctcattggcttc

SEQ ID NO: 12341 - DNA, 22 bp, Artificial Sequence
  chemically synthesized
ttaaactctcattggcttctaa

SEQ ID NO: 12342 - DNA, 22 bp, Artificial Sequence
  chemically synthesized
aactctcattggcttctaaaag

SEQ ID NO: 12343 - DNA, 22 bp, Artificial Sequence
  chemically synthesized
tcattggcttctaaaaggagtt

SEQ ID NO: 12344 - DNA, 22 bp, Artificial Sequence
  chemically synthesized
attggcttctaaaaggagtttc

SEQ ID NO: 12345 - DNA, 22 bp, Artificial Sequence
  chemically synthesized
gcttctaaaaggagtttcggtg

SEQ ID NO: 12346 - DNA, 22 bp, Artificial Sequence
  chemically synthesized
ctaaaaggagtttcggtgagtg

SEQ ID NO: 12347 - DNA, 22 bp, Artificial Sequence
  chemically synthesized
taaaaggagtttcggtgagtga

SEQ ID NO: 12348 - DNA, 22 bp, Artificial Sequence
  chemically synthesized
aaaggagtttcggtgagtgatt

SEQ ID NO: 12349 - DNA, 22 bp, Artificial Sequence
  chemically synthesized
cggtgagtgatttgctgagatg

SEQ ID NO: 12350 - DNA, 22 bp, Artificial Sequence
  chemically synthesized
ggtgagtgatttgctgagatgt

SEQ ID NO: 12351 - DNA, 22 bp, Artificial Sequence
  chemically synthesized
gctgagatgttgcattttcatg

SEQ ID NO: 12352 - DNA, 22 bp, Artificial Sequence
  chemically synthesized
ctgagatgttgcattttcatgg

SEQ ID NO: 12353 - DNA, 22 bp, Artificial Sequence
  chemically synthesized
agatgttgcattttcatggctg

SEQ ID NO: 12354 - DNA, 22 bp, Artificial Sequence
  chemically synthesized
cattttcatggctgctgccttt

SEQ ID NO: 12355 - DNA, 22 bp, Artificial Sequence
  chemically synthesized
tcatggctgctgcctttaggta

SEQ ID NO: 12356 - DNA, 22 bp, Artificial Sequence
  chemically synthesized
catggctgctgcctttaggtat

SEQ ID NO: 12357 - DNA, 22 bp, Artificial Sequence
  chemically synthesized
atggctgctgcctttaggtatt

SEQ ID NO: 12358 - DNA, 22 bp, Artificial Sequence
  chemically synthesized
ctgcctttaggtattattgcaa

SEQ ID NO: 12359 - DNA, 22 bp, Artificial Sequence
  chemically synthesized
cctttaggtattattgcaacag

SEQ ID NO: 12360 - DNA, 22 bp, Artificial Sequence
  chemically synthesized
taggtattattgcaacagtttg

SEQ ID NO: 12361 - DNA, 22 bp, Artificial Sequence
  chemically synthesized
aggtattattgcaacagtttgg

SEQ ID NO: 12362 - DNA, 22 bp, Artificial Sequence
  chemically synthesized
ggtattattgcaacagtttgga

SEQ ID NO: 12363 - DNA, 22 bp, Artificial Sequence
  chemically synthesized
ttgcaacagtttggaattttga

SEQ ID NO: 12364 - DNA, 22 bp, Artificial Sequence
  chemically synthesized
caacagtttggaattttgaaat

SEQ ID NO: 12365 - DNA, 22 bp, Artificial Sequence
  chemically synthesized
ggaattttgaaattaaaacagt

SEQ ID NO: 12366 - DNA, 22 bp, Artificial Sequence
  chemically synthesized
gaattttgaaattaaaacagtt

SEQ ID NO: 12367 - DNA, 22 bp, Artificial Sequence
  chemically synthesized
tgaaattaaaacagttctgtaa

SEQ ID NO: 12368 - DNA, 22 bp, Artificial Sequence
  chemically synthesized
gaaattaaaacagttctgtaaa

SEQ ID NO: 12369 - DNA, 22 bp, Artificial Sequence
  chemically synthesized
aaattaaaacagttctgtaaaa

SEQ ID NO: 12370 - DNA, 22 bp, Artificial Sequence
  chemically synthesized
aaacagttctgtaaaaccagtt

SEQ ID NO: 12371 - DNA, 22 bp, Artificial Sequence
  chemically synthesized
tgtaaaaccagtttagttttgt

SEQ ID NO: 12372 - DNA, 22 bp, Artificial Sequence
  chemically synthesized
taaaaccagtttagttttgtaa

SEQ ID NO: 12373 - DNA, 22 bp, Artificial Sequence
  chemically synthesized
agttttgtaaagtgtatgcatc

SEQ ID NO: 12374 - DNA, 22 bp, Artificial Sequence
  chemically synthesized
gttttgtaaagtgtatgcatca

SEQ ID NO: 12375 - DNA, 22 bp, Artificial Sequence
  chemically synthesized
tgtaaagtgtatgcatcaaaga

SEQ ID NO: 12376 - DNA, 22 bp, Artificial Sequence
  chemically synthesized
gtaaagtgtatgcatcaaagat

SEQ ID NO: 12377 - DNA, 22 bp, Artificial Sequence
  chemically synthesized
taaagtgtatgcatcaaagatg

SEQ ID NO: 12378 - DNA, 22 bp, Artificial Sequence
  chemically synthesized
cattcagacattactgagttac

SEQ ID NO: 12379 - DNA, 22 bp, Artificial Sequence
  chemically synthesized
attcagacattactgagttaca

SEQ ID NO: 12380 - DNA, 22 bp, Artificial Sequence
  chemically synthesized
agacattactgagttacaacta

SEQ ID NO: 12381 - DNA, 22 bp, Artificial Sequence
  chemically synthesized
ctgagttacaactatggtgcca

SEQ ID NO: 12382 - DNA, 22 bp, Artificial Sequence
  chemically synthesized
agttacaactatggtgccaggt

SEQ ID NO: 12383 - DNA, 22 bp, Artificial Sequence
  chemically synthesized
caactatggtgccaggtactgt

SEQ ID NO: 12384 - DNA, 22 bp, Artificial Sequence
  chemically synthesized
tggtgccaggtactgtgtcagg

SEQ ID NO: 12385 - DNA, 22 bp, Artificial Sequence
  chemically synthesized
tgtcagggtactaggggtatgg

SEQ ID NO: 12386 - DNA, 22 bp, Artificial Sequence
  chemically synthesized
ggggtatggggataaaccagac

SEQ ID NO: 12387 - DNA, 22 bp, Artificial Sequence
  chemically synthesized
cctctttgatctaaagcagcat

SEQ ID NO: 12388 - DNA, 22 bp, Artificial Sequence
  chemically synthesized
tttgatctaaagcagcatgagg

SEQ ID NO: 12389 - DNA, 22 bp, Artificial Sequence
  chemically synthesized
tgatctaaagcagcatgaggcc

SEQ ID NO: 12390 - DNA, 22 bp, Artificial Sequence
  chemically synthesized
gatctaaagcagcatgaggcca

SEQ ID NO: 12391 - DNA, 22 bp, Artificial Sequence
  chemically synthesized
atctaaagcagcatgaggccag

SEQ ID NO: 12392 - DNA, 22 bp, Artificial Sequence
  chemically synthesized
aagcagcatgaggccaggtgag

SEQ ID NO: 12393 - DNA, 22 bp, Artificial Sequence
  chemically synthesized
caatataatgtgataaaatgtg

SEQ ID NO: 12394 - DNA, 22 bp, Artificial Sequence
  chemically synthesized
aatataatgtgataaaatgtgc

SEQ ID NO: 12395 - DNA, 22 bp, Artificial Sequence
  chemically synthesized
ggtactaagggatcatagagaa

SEQ ID NO: 12396 - DNA, 22 bp, Artificial Sequence
  chemically synthesized
agggatcatagagaaaggaaca

SEQ ID NO: 12397 - DNA, 22 bp, Artificial Sequence
  chemically synthesized
aatggggaaacaattgatagag

SEQ ID NO: 12398 - DNA, 22 bp, Artificial Sequence
  chemically synthesized
atagagagagaatattttcatc

SEQ ID NO: 12399 - DNA, 22 bp, Artificial Sequence
  chemically synthesized
tcatctgggtcttaaaagatga

SEQ ID NO: 12400 - DNA, 22 bp, Artificial Sequence
  chemically synthesized
catctgggtcttaaaagatgag

SEQ ID NO: 12401 - DNA, 22 bp, Artificial Sequence
  chemically synthesized
atctgggtcttaaaagatgagt

SEQ ID NO: 12402 - DNA, 22 bp, Artificial Sequence
  chemically synthesized
ggtcttaaaagatgagtaggcg

SEQ ID NO: 12403 - DNA, 22 bp, Artificial Sequence
  chemically synthesized
aaaagatgagtaggcgttctct

SEQ ID NO: 12404 - DNA, 22 bp, Artificial Sequence
  chemically synthesized
aaagatgagtaggcgttctctc

SEQ ID NO: 12405 - DNA, 22 bp, Artificial Sequence
  chemically synthesized
tctctctttaaatgtctgatat

SEQ ID NO: 12406 - DNA, 22 bp, Artificial Sequence
  chemically synthesized
tctctttaaatgtctgatataa

SEQ ID NO: 12407 - DNA, 22 bp, Artificial Sequence
  chemically synthesized
tctttaaatgtctgatataagg

SEQ ID NO: 12408 - DNA, 22 bp, Artificial Sequence
  chemically synthesized
tttaaatgtctgatataagggc

SEQ ID NO: 12409 - DNA, 22 bp, Artificial Sequence
  chemically synthesized
taaatgtctgatataagggcat

SEQ ID NO: 12410 - DNA, 22 bp, Artificial Sequence
  chemically synthesized
aaatgtctgatataagggcatt

SEQ ID NO: 12411 - DNA, 22 bp, Artificial Sequence
  chemically synthesized
aatgtctgatataagggcattt

SEQ ID NO: 12412 - DNA, 22 bp, Artificial Sequence
  chemically synthesized
atataagggcattttatgcaaa

SEQ ID NO: 12413 - DNA, 22 bp, Artificial Sequence
  chemically synthesized
tatgcaaagaggatcactcgtg

SEQ ID NO: 12414 - DNA, 22 bp, Artificial Sequence
  chemically synthesized
atgcaaagaggatcactcgtgc

SEQ ID NO: 12415 - DNA, 22 bp, Artificial Sequence
  chemically synthesized
tgcaaagaggatcactcgtgca

SEQ ID NO: 12416 - DNA, 22 bp, Artificial Sequence
  chemically synthesized
gtgcaaagactcagatttgcaa

SEQ ID NO: 12417 - DNA, 22 bp, Artificial Sequence
  chemically synthesized
agatttgcaagaacgtgaggta

SEQ ID NO: 12418 - DNA, 22 bp, Artificial Sequence
  chemically synthesized
gcaagaacgtgaggtatttcag

SEQ ID NO: 12419 - DNA, 22 bp, Artificial Sequence
  chemically synthesized
caagaacgtgaggtatttcagg

SEQ ID NO: 12420 - DNA, 22 bp, Artificial Sequence
  chemically synthesized
caggagttttgtatggttccat

SEQ ID NO: 12421 - DNA, 22 bp, Artificial Sequence
  chemically synthesized
aggagttttgtatggttccata

SEQ ID NO: 12422 - DNA, 22 bp, Artificial Sequence
  chemically synthesized
tgtatggttccatatggactat

SEQ ID NO: 12423 - DNA, 22 bp, Artificial Sequence
  chemically synthesized
gtatggttccatatggactatg

SEQ ID NO: 12424 - DNA, 22 bp, Artificial Sequence
  chemically synthesized
tatggttccatatggactatga

SEQ ID NO: 12425 - DNA, 22 bp, Artificial Sequence
  chemically synthesized
catatggactatgacaagtgag

SEQ ID NO: 12426 - DNA, 22 bp, Artificial Sequence
  chemically synthesized
tgacaagtgagacaggtaaact

SEQ ID NO: 12427 - DNA, 22 bp, Artificial Sequence
  chemically synthesized
ggcagagctggtcatcagataa

SEQ ID NO: 12428 - DNA, 22 bp, Artificial Sequence
  chemically synthesized
gtcatcagataatgaagtcatt

SEQ ID NO: 12429 - DNA, 22 bp, Artificial Sequence
  chemically synthesized
acctaaggagattggacaataa

SEQ ID NO: 12430 - DNA, 22 bp, Artificial Sequence
  chemically synthesized
aggagattggacaataaaatgc

SEQ ID NO: 12431 - DNA, 22 bp, Artificial Sequence
  chemically synthesized
gacaataaaatgcaatatggag

SEQ ID NO: 12432 - DNA, 22 bp, Artificial Sequence
  chemically synthesized
atggctgatttaggatgcccag

SEQ ID NO: 12433 - DNA, 22 bp, Artificial Sequence
  chemically synthesized
atttaggatgcccagtctggca

SEQ ID NO: 12434 - DNA, 22 bp, Artificial Sequence
  chemically synthesized
aggatgcccagtctggcaacac

SEQ ID NO: 12435 - DNA, 22 bp, Artificial Sequence
  chemically synthesized
ggatgcccagtctggcaacacg

SEQ ID NO: 12436 - DNA, 22 bp, Artificial Sequence
  chemically synthesized
gcaacacgctaatgaaatgata

SEQ ID NO: 12437 - DNA, 22 bp, Artificial Sequence
  chemically synthesized
atgaaatgatagtgggggaggg

SEQ ID NO: 12438 - DNA, 22 bp, Artificial Sequence
  chemically synthesized
ggagagagcagtcctgagacta

SEQ ID NO: 12439 - DNA, 22 bp, Artificial Sequence
  chemically synthesized
agactattgcaattatctgcgg

SEQ ID NO: 12440 - DNA, 22 bp, Artificial Sequence
  chemically synthesized
ttgcaattatctgcgggagaca

SEQ ID NO: 12441 - DNA, 22 bp, Artificial Sequence
  chemically synthesized
caattatctgcgggagacataa

SEQ ID NO: 12442 - DNA, 22 bp, Artificial Sequence
  chemically synthesized
tctgcgggagacataaaggcta

SEQ ID NO: 12443 - DNA, 22 bp, Artificial Sequence
  chemically synthesized
cgggagacataaaggctagaac

SEQ ID NO: 12444 - DNA, 22 bp, Artificial Sequence
  chemically synthesized
gaacctgaacagtagcagtaca

SEQ ID NO: 12445 - DNA, 22 bp, Artificial Sequence
  chemically synthesized
aacagtagcagtacaaaaaaag

SEQ ID NO: 12446 - DNA, 22 bp, Artificial Sequence
  chemically synthesized
aaatgatattaaggaagtagaa

SEQ ID NO: 12447 - DNA, 22 bp, Artificial Sequence
  chemically synthesized
aggaagtagaagtggtatgact

SEQ ID NO: 12448 - DNA, 22 bp, Artificial Sequence
  chemically synthesized
aaccatctgggtatggaagggg

SEQ ID NO: 12449 - DNA, 22 bp, Artificial Sequence
  chemically synthesized
accatctgggtatggaagggga

SEQ ID NO: 12450 - DNA, 22 bp, Artificial Sequence
  chemically synthesized
ggtatggaaggggaaatggcta

SEQ ID NO: 12451 - DNA, 22 bp, Artificial Sequence
  chemically synthesized
gagtcttggggactttgtgttt

SEQ ID NO: 12452 - DNA, 22 bp, Artificial Sequence
  chemically synthesized
ggggactttgtgtttgatgtga

SEQ ID NO: 12453 - DNA, 22 bp, Artificial Sequence
  chemically synthesized
gggactttgtgtttgatgtgat

SEQ ID NO: 12454 - DNA, 22 bp, Artificial Sequence
  chemically synthesized
tgtgtttgatgtgattatggac

SEQ ID NO: 12455 - DNA, 22 bp, Artificial Sequence
  chemically synthesized
gtgtttgatgtgattatggacc

SEQ ID NO: 12456 - DNA, 22 bp, Artificial Sequence
  chemically synthesized
tgtttgatgtgattatggacca

SEQ ID NO: 12457 - DNA, 22 bp, Artificial Sequence
  chemically synthesized
gatgtgattatggaccacagaa

SEQ ID NO: 12458 - DNA, 22 bp, Artificial Sequence
  chemically synthesized
atgtgattatggaccacagaat

SEQ ID NO: 12459 - DNA, 22 bp, Artificial Sequence
  chemically synthesized
tggaccacagaataatgtctaa

SEQ ID NO: 12460 - DNA, 22 bp, Artificial Sequence
  chemically synthesized
agagaactggctctttagtctg

SEQ ID NO: 12461 - DNA, 22 bp, Artificial Sequence
  chemically synthesized
gctctttagtctgactgccaga

SEQ ID NO: 12462 - DNA, 22 bp, Artificial Sequence
  chemically synthesized
tttagtctgactgccagagtct

SEQ ID NO: 12463 - DNA, 22 bp, Artificial Sequence
  chemically synthesized
tagtctgactgccagagtctga

SEQ ID NO: 12464 - DNA, 22 bp, Artificial Sequence
  chemically synthesized
agtctgactgccagagtctgaa

SEQ ID NO: 12465 - DNA, 22 bp, Artificial Sequence
  chemically synthesized
gtctgactgccagagtctgaat

SEQ ID NO: 12466 - DNA, 22 bp, Artificial Sequence
  chemically synthesized
actgccagagtctgaatcctga

SEQ ID NO: 12467 - DNA, 22 bp, Artificial Sequence
  chemically synthesized
ccagagtctgaatcctgaatgt

SEQ ID NO: 12468 - DNA, 22 bp, Artificial Sequence
  chemically synthesized
aatcctgaatgttttagtatgt

SEQ ID NO: 12469 - DNA, 22 bp, Artificial Sequence
  chemically synthesized
aatgttttagtatgttaccttg

SEQ ID NO: 12470 - DNA, 22 bp, Artificial Sequence
  chemically synthesized
tagtatgttaccttgggcaaag

SEQ ID NO: 12471 - DNA, 22 bp, Artificial Sequence
  chemically synthesized
agtatgttaccttgggcaaagc

SEQ ID NO: 12472 - DNA, 22 bp, Artificial Sequence
  chemically synthesized
gtatgttaccttgggcaaagcc

SEQ ID NO: 12473 - DNA, 22 bp, Artificial Sequence
  chemically synthesized
ccttgggcaaagcccttagcct

SEQ ID NO: 12474 - DNA, 22 bp, Artificial Sequence
  chemically synthesized
gggcaaagcccttagcctctat

SEQ ID NO: 12475 - DNA, 22 bp, Artificial Sequence
  chemically synthesized
ggcaaagcccttagcctctatg

SEQ ID NO: 12476 - DNA, 22 bp, Artificial Sequence
  chemically synthesized
agcctctatgaatctatcttcc

SEQ ID NO: 12477 - DNA, 22 bp, Artificial Sequence
  chemically synthesized
gcctctatgaatctatcttcct

SEQ ID NO: 12478 - DNA, 22 bp, Artificial Sequence
  chemically synthesized
tatgaatctatcttcctcattc

SEQ ID NO: 12479 - DNA, 22 bp, Artificial Sequence
  chemically synthesized
tgaatctatcttcctcattcat

SEQ ID NO: 12480 - DNA, 22 bp, Artificial Sequence
  chemically synthesized
tcttcctcattcataaaaataa

SEQ ID NO: 12481 - DNA, 22 bp, Artificial Sequence
  chemically synthesized
cctcattcataaaaataagatg

SEQ ID NO: 12482 - DNA, 22 bp, Artificial Sequence
  chemically synthesized
ctcattcataaaaataagatga

SEQ ID NO: 12483 - DNA, 22 bp, Artificial Sequence
  chemically synthesized
attcataaaaataagatgacag

SEQ ID NO: 12484 - DNA, 22 bp, Artificial Sequence
  chemically synthesized
ataaaaataagatgacagtgcc

SEQ ID NO: 12485 - DNA, 22 bp, Artificial Sequence
  chemically synthesized
tctcgtgggacttttgtgagga

SEQ ID NO: 12486 - DNA, 22 bp, Artificial Sequence
  chemically synthesized
gtgggacttttgtgaggatgaa

SEQ ID NO: 12487 - DNA, 22 bp, Artificial Sequence
  chemically synthesized
ttgtgaggatgaagtgagataa

SEQ ID NO: 12488 - DNA, 22 bp, Artificial Sequence
  chemically synthesized
tgtgaggatgaagtgagataat

SEQ ID NO: 12489 - DNA, 22 bp, Artificial Sequence
  chemically synthesized
gtgaggatgaagtgagataatg

SEQ ID NO: 12490 - DNA, 22 bp, Artificial Sequence
  chemically synthesized
tgaggatgaagtgagataatgg

SEQ ID NO: 12491 - DNA, 22 bp, Artificial Sequence
  chemically synthesized
ctgagcacagtgtccaacacag

SEQ ID NO: 12492 - DNA, 22 bp, Artificial Sequence
  chemically synthesized
agcacagtgtccaacacagcag

SEQ ID NO: 12493 - DNA, 22 bp, Artificial Sequence
  chemically synthesized
catatacattagctattactgg

SEQ ID NO: 12494 - DNA, 22 bp, Artificial Sequence
  chemically synthesized
gctattactggctacattatga

SEQ ID NO: 12495 - DNA, 22 bp, Artificial Sequence
  chemically synthesized
ttactggctacattatgatata

SEQ ID NO: 12496 - DNA, 22 bp, Artificial Sequence
  chemically synthesized
ctggctacattatgatatacag

SEQ ID NO: 12497 - DNA, 22 bp, Artificial Sequence
  chemically synthesized
gctacattatgatatacagtta

SEQ ID NO: 12498 - DNA, 22 bp, Artificial Sequence
  chemically synthesized
cattatgatatacagttaggga

SEQ ID NO: 12499 - DNA, 22 bp, Artificial Sequence
  chemically synthesized
tgatatacagttagggagttgg

SEQ ID NO: 12500 - DNA, 22 bp, Artificial Sequence
  chemically synthesized
gggagttggaaagataatctga

SEQ ID NO: 12501 - DNA, 22 bp, Artificial Sequence
  chemically synthesized
gaaagataatctgaaattcagg

SEQ ID NO: 12502 - DNA, 22 bp, Artificial Sequence
  chemically synthesized
aaattcaggagacgtatctgac

SEQ ID NO: 12503 - DNA, 22 bp, Artificial Sequence
  chemically synthesized
aggagacgtatctgactatagg

SEQ ID NO: 12504 - DNA, 22 bp, Artificial Sequence
  chemically synthesized
actataggtgagtatttggaac

SEQ ID NO: 12505 - DNA, 22 bp, Artificial Sequence
  chemically synthesized
taggtgagtatttggaactcat

SEQ ID NO: 12506 - DNA, 22 bp, Artificial Sequence
  chemically synthesized
ggaactcattgttctgtaaaca

SEQ ID NO: 12507 - DNA, 22 bp, Artificial Sequence
  chemically synthesized
gaactcattgttctgtaaacag

SEQ ID NO: 12508 - DNA, 22 bp, Artificial Sequence
  chemically synthesized
attgttctgtaaacagtagtta

SEQ ID NO: 12509 - DNA, 22 bp, Artificial Sequence
  chemically synthesized
ttctgtaaacagtagttacagc

SEQ ID NO: 12510 - DNA, 22 bp, Artificial Sequence
  chemically synthesized
tgtaaacagtagttacagccac

SEQ ID NO: 12511 - DNA, 22 bp, Artificial Sequence
  chemically synthesized
taaacagtagttacagccacgt

SEQ ID NO: 12512 - DNA, 22 bp, Artificial Sequence
  chemically synthesized
cagccacgtgtgtgggcatctg

SEQ ID NO: 12513 - DNA, 22 bp, Artificial Sequence
  chemically synthesized
gagagtgagcatggatattgtg

SEQ ID NO: 12514 - DNA, 22 bp, Artificial Sequence
  chemically synthesized
tgatacctagtacagtgcctgg

SEQ ID NO: 12515 - DNA, 22 bp, Artificial Sequence
  chemically synthesized
gtacagtgcctggcagtagtgg

SEQ ID NO: 12516 - DNA, 22 bp, Artificial Sequence
  chemically synthesized
gcagtagtggttgtatgctcag

SEQ ID NO: 12517 - DNA, 22 bp, Artificial Sequence
  chemically synthesized
tatgctcagtaaattttgttga

SEQ ID NO: 12518 - DNA, 22 bp, Artificial Sequence
  chemically synthesized
agtaaattttgttgacagggtc

SEQ ID NO: 12519 - DNA, 22 bp, Artificial Sequence
  chemically synthesized
tgttgacagggtcagggccgga

SEQ ID NO: 12520 - DNA, 22 bp, Artificial Sequence
  chemically synthesized
gttgacagggtcagggccggac

SEQ ID NO: 12521 - DNA, 22 bp, Artificial Sequence
  chemically synthesized
ttgacagggtcagggccggact

SEQ ID NO: 12522 - DNA, 22 bp, Artificial Sequence
  chemically synthesized
acagggtcagggccggactaga

SEQ ID NO: 12523 - DNA, 22 bp, Artificial Sequence
  chemically synthesized
gactgtggtaagcaaggcctgt

SEQ ID NO: 12524 - DNA, 22 bp, Artificial Sequence
  chemically synthesized
tggtaagcaaggcctgtagggc

SEQ ID NO: 12525 - DNA, 22 bp, Artificial Sequence
  chemically synthesized
tagggcataaatatacttgtat

SEQ ID NO: 12526 - DNA, 22 bp, Artificial Sequence
  chemically synthesized
gtatgccccgagaagtgaggac

SEQ ID NO: 12527 - DNA, 22 bp, Artificial Sequence
  chemically synthesized
tatgccccgagaagtgaggacc

SEQ ID NO: 12528 - DNA, 22 bp, Artificial Sequence
  chemically synthesized
ttaaatattgtgccctacatgc

SEQ ID NO: 12529 - DNA, 22 bp, Artificial Sequence
  chemically synthesized
aaatattgtgccctacatgcct

SEQ ID NO: 12530 - DNA, 22 bp, Artificial Sequence
  chemically synthesized
aatattgtgccctacatgcctt

SEQ ID NO: 12531 - DNA, 22 bp, Artificial Sequence
  chemically synthesized
tgccctacatgccttgtttggt

SEQ ID NO: 12532 - DNA, 22 bp, Artificial Sequence
  chemically synthesized
catgccttgtttggttcactct

SEQ ID NO: 12533 - DNA, 22 bp, Artificial Sequence
  chemically synthesized
gtttggttcactcttgtcccag

SEQ ID NO: 12534 - DNA, 22 bp, Artificial Sequence
  chemically synthesized
tttggttcactcttgtcccagc

SEQ ID NO: 12535 - DNA, 22 bp, Artificial Sequence
  chemically synthesized
ggttcactcttgtcccagccct

SEQ ID NO: 12536 - DNA, 22 bp, Artificial Sequence
  chemically synthesized
gttcactcttgtcccagcccta

SEQ ID NO: 12537 - DNA, 22 bp, Artificial Sequence
  chemically synthesized
actcttgtcccagccctagcaa

SEQ ID NO: 12538 - DNA, 22 bp, Artificial Sequence
  chemically synthesized
ttgtcccagccctagcaagtat

SEQ ID NO: 12539 - DNA, 22 bp, Artificial Sequence
  chemically synthesized
gtcccagccctagcaagtatat

SEQ ID NO: 12540 - DNA, 22 bp, Artificial Sequence
  chemically synthesized
tcccagccctagcaagtatata

SEQ ID NO: 12541 - DNA, 22 bp, Artificial Sequence
  chemically synthesized
gcaagtatatataaggtgaaaa

SEQ ID NO: 12542 - DNA, 22 bp, Artificial Sequence
  chemically synthesized
aggctggagcctgggagaaccc

SEQ ID NO: 12543 - DNA, 22 bp, Artificial Sequence
  chemically synthesized
gagcctgggagaaccctggaca

SEQ ID NO: 12544 - DNA, 22 bp, Artificial Sequence
  chemically synthesized
ggagaaccctggacatttaagg

SEQ ID NO: 12545 - DNA, 22 bp, Artificial Sequence
  chemically synthesized
gacatttaagggccatggagag

SEQ ID NO: 12546 - DNA, 22 bp, Artificial Sequence
  chemically synthesized
aagggccatggagaggaacagg

SEQ ID NO: 12547 - DNA, 22 bp, Artificial Sequence
  chemically synthesized
agggccatggagaggaacagga

SEQ ID NO: 12548 - DNA, 22 bp, Artificial Sequence
  chemically synthesized
atcaattcaagtgctggatgga

SEQ ID NO: 12549 - DNA, 22 bp, Artificial Sequence
  chemically synthesized
aagtgctggatggataacagga

SEQ ID NO: 12550 - DNA, 22 bp, Artificial Sequence
  chemically synthesized
gatggataacaggagttagagc

SEQ ID NO: 12551 - DNA, 22 bp, Artificial Sequence
  chemically synthesized
gagcaaagcggggaaccagaat

SEQ ID NO: 12552 - DNA, 22 bp, Artificial Sequence
  chemically synthesized
ttataaaaagagtttcctaaaa

SEQ ID NO: 12553 - DNA, 22 bp, Artificial Sequence
  chemically synthesized
taaaaagagtttcctaaaaagg

SEQ ID NO: 12554 - DNA, 22 bp, Artificial Sequence
  chemically synthesized
cctaaaaagggagagatcaaca

SEQ ID NO: 12555 - DNA, 22 bp, Artificial Sequence
  chemically synthesized
ctaaaaagggagagatcaacaa

SEQ ID NO: 12556 - DNA, 22 bp, Artificial Sequence
  chemically synthesized
aaaagggagagatcaacaatta

SEQ ID NO: 12557 - DNA, 22 bp, Artificial Sequence
  chemically synthesized
gaaattatttagagcagccagt

SEQ ID NO: 12558 - DNA, 22 bp, Artificial Sequence
  chemically synthesized
tttagagcagccagtaaataca

SEQ ID NO: 12559 - DNA, 22 bp, Artificial Sequence
  chemically synthesized
agagcagccagtaaatacataa

SEQ ID NO: 12560 - DNA, 22 bp, Artificial Sequence
  chemically synthesized
gagcagccagtaaatacataaa

SEQ ID NO: 12561 - DNA, 22 bp, Artificial Sequence
  chemically synthesized
aaaattattctttaggtcattc

SEQ ID NO: 12562 - DNA, 22 bp, Artificial Sequence
  chemically synthesized
ttctttaggtcattcctgattg

SEQ ID NO: 12563 - DNA, 22 bp, Artificial Sequence
  chemically synthesized
tttaggtcattcctgattgtga

SEQ ID NO: 12564 - DNA, 22 bp, Artificial Sequence
  chemically synthesized
taggtcattcctgattgtgaca

SEQ ID NO: 12565 - DNA, 22 bp, Artificial Sequence
  chemically synthesized
aggtcattcctgattgtgacaa

SEQ ID NO: 12566 - DNA, 22 bp, Artificial Sequence
  chemically synthesized
ggtcattcctgattgtgacaat

SEQ ID NO: 12567 - DNA, 22 bp, Artificial Sequence
  chemically synthesized
ctgattgtgacaatagtcattt

SEQ ID NO: 12568 - DNA, 22 bp, Artificial Sequence
  chemically synthesized
attgtgacaatagtcatttcat

SEQ ID NO: 12569 - DNA, 22 bp, Artificial Sequence
  chemically synthesized
tgacaatagtcatttcattata

SEQ ID NO: 12570 - DNA, 22 bp, Artificial Sequence
  chemically synthesized
cattatataaatgtgattaagg

SEQ ID NO: 12571 - DNA, 22 bp, Artificial Sequence
  chemically synthesized
attatataaatgtgattaagga

SEQ ID NO: 12572 - DNA, 22 bp, Artificial Sequence
  chemically synthesized
tataaatgtgattaaggaagga

SEQ ID NO: 12573 - DNA, 22 bp, Artificial Sequence
  chemically synthesized
aggaaggaaaagagctacacag

SEQ ID NO: 12574 - DNA, 22 bp, Artificial Sequence
  chemically synthesized
cacagaagttattaaagagcta

SEQ ID NO: 12575 - DNA, 22 bp, Artificial Sequence
  chemically synthesized
ttaaagagctaaagagaattga

SEQ ID NO: 12576 - DNA, 22 bp, Artificial Sequence
  chemically synthesized
aagagctaaagagaattgagaa

SEQ ID NO: 12577 - DNA, 22 bp, Artificial Sequence
  chemically synthesized
aagagaattgagaaatttaaaa

SEQ ID NO: 12578 - DNA, 22 bp, Artificial Sequence
  chemically synthesized
agaaatttaaaacagaagaaag

SEQ ID NO: 12579 - DNA, 22 bp, Artificial Sequence
  chemically synthesized
aaaacagaagaaagtagggcca

SEQ ID NO: 12580 - DNA, 22 bp, Artificial Sequence
  chemically synthesized
aaacagaagaaagtagggccaa

SEQ ID NO: 12581 - DNA, 22 bp, Artificial Sequence
  chemically synthesized
tctcactgatcctgccaacacc

SEQ ID NO: 12582 - DNA, 22 bp, Artificial Sequence
  chemically synthesized
actgatcctgccaacacctgtg

SEQ ID NO: 12583 - DNA, 22 bp, Artificial Sequence
  chemically synthesized
atcctgccaacacctgtgagat

SEQ ID NO: 12584 - DNA, 22 bp, Artificial Sequence
  chemically synthesized
ccaacacctgtgagatagatat

SEQ ID NO: 12585 - DNA, 22 bp, Artificial Sequence
  chemically synthesized
tgagatagatattcttattata

SEQ ID NO: 12586 - DNA, 22 bp, Artificial Sequence
  chemically synthesized
ttattatactactgttaaacct

SEQ ID NO: 12587 - DNA, 22 bp, Artificial Sequence
  chemically synthesized
attatactactgttaaacctaa

SEQ ID NO: 12588 - DNA, 22 bp, Artificial Sequence
  chemically synthesized
ttatactactgttaaacctaat

SEQ ID NO: 12589 - DNA, 22 bp, Artificial Sequence
  chemically synthesized
tactactgttaaacctaattta

SEQ ID NO: 12590 - DNA, 22 bp, Artificial Sequence
  chemically synthesized
ctgttaaacctaatttacattt

SEQ ID NO: 12591 - DNA, 22 bp, Artificial Sequence
  chemically synthesized
ttaaacctaatttacatttgac

SEQ ID NO: 12592 - DNA, 22 bp, Artificial Sequence
  chemically synthesized
aacctaatttacatttgacaaa

SEQ ID NO: 12593 - DNA, 22 bp, Artificial Sequence
  chemically synthesized
atttacatttgacaaagttaag

SEQ ID NO: 12594 - DNA, 22 bp, Artificial Sequence
  chemically synthesized
acatttgacaaagttaaggttc

SEQ ID NO: 12595 - DNA, 22 bp, Artificial Sequence
  chemically synthesized
catttgacaaagttaaggttca

SEQ ID NO: 12596 - DNA, 22 bp, Artificial Sequence
  chemically synthesized
gacaaagttaaggttcagagct

SEQ ID NO: 12597 - DNA, 22 bp, Artificial Sequence
  chemically synthesized
acaaagttaaggttcagagctt

SEQ ID NO: 12598 - DNA, 22 bp, Artificial Sequence
  chemically synthesized
aggttcagagcttgtgtgactt

SEQ ID NO: 12599 - DNA, 22 bp, Artificial Sequence
  chemically synthesized
agagcttgtgtgacttgtccaa

SEQ ID NO: 12600 - DNA, 22 bp, Artificial Sequence
  chemically synthesized
gtgtgacttgtccaaggtcaca

SEQ ID NO: 12601 - DNA, 22 bp, Artificial Sequence
  chemically synthesized
tgtgacttgtccaaggtcacag

SEQ ID NO: 12602 - DNA, 22 bp, Artificial Sequence
  chemically synthesized
gtccaaggtcacaggtctagag

SEQ ID NO: 12603 - DNA, 22 bp, Artificial Sequence
  chemically synthesized
tccaaggtcacaggtctagagg

SEQ ID NO: 12604 - DNA, 22 bp, Artificial Sequence
  chemically synthesized
gaggaggcagatacttgattca

SEQ ID NO: 12605 - DNA, 22 bp, Artificial Sequence
  chemically synthesized
gattcaaacctatttctgtctg

SEQ ID NO: 12606 - DNA, 22 bp, Artificial Sequence
  chemically synthesized
attcaaacctatttctgtctga

SEQ ID NO: 12607 - DNA, 22 bp, Artificial Sequence
  chemically synthesized
aaacctatttctgtctgatctg

SEQ ID NO: 12608 - DNA, 22 bp, Artificial Sequence
  chemically synthesized
tttctgtctgatctgattctaa

SEQ ID NO: 12609 - DNA, 22 bp, Artificial Sequence
  chemically synthesized
ctgtctgatctgattctaaagt

SEQ ID NO: 12610 - DNA, 22 bp, Artificial Sequence
  chemically synthesized
tgtctgatctgattctaaagtc

SEQ ID NO: 12611 - DNA, 22 bp, Artificial Sequence
  chemically synthesized
tctgatctgattctaaagtctg

SEQ ID NO: 12612 - DNA, 22 bp, Artificial Sequence
  chemically synthesized
atctgattctaaagtctgtttt

SEQ ID NO: 12613 - DNA, 22 bp, Artificial Sequence
  chemically synthesized
attctaaagtctgttttttcac

SEQ ID NO: 12614 - DNA, 22 bp, Artificial Sequence
  chemically synthesized
taaagtctgttttttcactcaa

SEQ ID NO: 12615 - DNA, 22 bp, Artificial Sequence
  chemically synthesized
aagtctgttttttcactcaacc

SEQ ID NO: 12616 - DNA, 22 bp, Artificial Sequence
  chemically synthesized
ttttttcactcaaccacactgt

SEQ ID NO: 12617 - DNA, 22 bp, Artificial Sequence
  chemically synthesized
tttcactcaaccacactgtaca

SEQ ID NO: 12618 - DNA, 22 bp, Artificial Sequence
  chemically synthesized
ttcactcaaccacactgtacag

SEQ ID NO: 12619 - DNA, 22 bp, Artificial Sequence
  chemically synthesized
tcactcaaccacactgtacagt

SEQ ID NO: 12620 - DNA, 22 bp, Artificial Sequence
  chemically synthesized
cactcaaccacactgtacagtc

SEQ ID NO: 12621 - DNA, 22 bp, Artificial Sequence
  chemically synthesized
actcaaccacactgtacagtca

SEQ ID NO: 12622 - DNA, 22 bp, Artificial Sequence
  chemically synthesized
aaccacactgtacagtcagctc

SEQ ID NO: 12623 - DNA, 22 bp, Artificial Sequence
  chemically synthesized
tacagtcagctctccttgtgag

SEQ ID NO: 12624 - DNA, 22 bp, Artificial Sequence
  chemically synthesized
tccttgtgagttccacagccac

SEQ ID NO: 12625 - DNA, 22 bp, Artificial Sequence
  chemically synthesized
cttgtgagttccacagccacag

SEQ ID NO: 12626 - DNA, 22 bp, Artificial Sequence
  chemically synthesized
gtgagttccacagccacagatt

SEQ ID NO: 12627 - DNA, 22 bp, Artificial Sequence
  chemically synthesized
tgagttccacagccacagattc

SEQ ID NO: 12628 - DNA, 22 bp, Artificial Sequence
  chemically synthesized
cacagccacagattcaattaac

SEQ ID NO: 12629 - DNA, 22 bp, Artificial Sequence
  chemically synthesized
aattaactgcagatcaaaaata

SEQ ID NO: 12630 - DNA, 22 bp, Artificial Sequence
  chemically synthesized
actgcagatcaaaaatattcaa

SEQ ID NO: 12631 - DNA, 22 bp, Artificial Sequence
  chemically synthesized
cagatcaaaaatattcaagaaa

SEQ ID NO: 12632 - DNA, 22 bp, Artificial Sequence
  chemically synthesized
aagaaaaaaatggatggttgca

SEQ ID NO: 12633 - DNA, 22 bp, Artificial Sequence
  chemically synthesized
catctctactgaacatgtacag

SEQ ID NO: 12634 - DNA, 22 bp, Artificial Sequence
  chemically synthesized
tactgaacatgtacagactctt

SEQ ID NO: 12635 - DNA, 22 bp, Artificial Sequence
  chemically synthesized
ctgaacatgtacagactctttt

SEQ ID NO: 12636 - DNA, 22 bp, Artificial Sequence
  chemically synthesized
aacatgtacagactcttttatc

SEQ ID NO: 12637 - DNA, 22 bp, Artificial Sequence
  chemically synthesized
ttttatctttcattattcccta

SEQ ID NO: 12638 - DNA, 22 bp, Artificial Sequence
  chemically synthesized
ttatctttcattattccctaaa

SEQ ID NO: 12639 - DNA, 22 bp, Artificial Sequence
  chemically synthesized
tatctttcattattccctaaac

SEQ ID NO: 12640 - DNA, 22 bp, Artificial Sequence
  chemically synthesized
atctttcattattccctaaaca

SEQ ID NO: 12641 - DNA, 22 bp, Artificial Sequence
  chemically synthesized
tctttcattattccctaaacaa

SEQ ID NO: 12642 - DNA, 22 bp, Artificial Sequence
  chemically synthesized
tcattattccctaaacaataca

SEQ ID NO: 12643 - DNA, 22 bp, Artificial Sequence
  chemically synthesized
cattattccctaaacaatacag

SEQ ID NO: 12644 - DNA, 22 bp, Artificial Sequence
  chemically synthesized
attattccctaaacaatacagc

SEQ ID NO: 12645 - DNA, 22 bp, Artificial Sequence
  chemically synthesized
ttccctaaacaatacagcataa

SEQ ID NO: 12646 - DNA, 22 bp, Artificial Sequence
  chemically synthesized
cctaaacaatacagcataacaa

SEQ ID NO: 12647 - DNA, 22 bp, Artificial Sequence
  chemically synthesized
aacaatacagcataacaactat

SEQ ID NO: 12648 - DNA, 22 bp, Artificial Sequence
  chemically synthesized
tttacatagcatttacattgta

SEQ ID NO: 12649 - DNA, 22 bp, Artificial Sequence
  chemically synthesized
acatagcatttacattgtatta

SEQ ID NO: 12650 - DNA, 22 bp, Artificial Sequence
  chemically synthesized
catagcatttacattgtattag

SEQ ID NO: 12651 - DNA, 22 bp, Artificial Sequence
  chemically synthesized
acattgtattagctattaagag

SEQ ID NO: 12652 - DNA, 22 bp, Artificial Sequence
  chemically synthesized
cattgtattagctattaagaga

SEQ ID NO: 12653 - DNA, 22 bp, Artificial Sequence
  chemically synthesized
tattagctattaagagaaacct

SEQ ID NO: 12654 - DNA, 22 bp, Artificial Sequence
  chemically synthesized
gctattaagagaaacctagaga

SEQ ID NO: 12655 - DNA, 22 bp, Artificial Sequence
  chemically synthesized
ttaagagaaacctagagatgat

SEQ ID NO: 12656 - DNA, 22 bp, Artificial Sequence
  chemically synthesized
agagaaacctagagatgattta

SEQ ID NO: 12657 - DNA, 22 bp, Artificial Sequence
  chemically synthesized
gagatgatttaaagtacaaagg

SEQ ID NO: 12658 - DNA, 22 bp, Artificial Sequence
  chemically synthesized
aaagtacaaaggaggatgtgtt

SEQ ID NO: 12659 - DNA, 22 bp, Artificial Sequence
  chemically synthesized
aagtacaaaggaggatgtgttt

SEQ ID NO: 12660 - DNA, 22 bp, Artificial Sequence
  chemically synthesized
aggttatatgcaaatagtaagc

SEQ ID NO: 12661 - DNA, 22 bp, Artificial Sequence
  chemically synthesized
ggttatatgcaaatagtaagcc

SEQ ID NO: 12662 - DNA, 22 bp, Artificial Sequence
  chemically synthesized
tatgcaaatagtaagccatttt

SEQ ID NO: 12663 - DNA, 22 bp, Artificial Sequence
  chemically synthesized
ttatatcggagacttgagcatc

SEQ ID NO: 12664 - DNA, 22 bp, Artificial Sequence
  chemically synthesized
tatatcggagacttgagcatcc

SEQ ID NO: 12665 - DNA, 22 bp, Artificial Sequence
  chemically synthesized
atatcggagacttgagcatcca

SEQ ID NO: 12666 - DNA, 22 bp, Artificial Sequence
  chemically synthesized
tatcggagacttgagcatccac

SEQ ID NO: 12667 - DNA, 22 bp, Artificial Sequence
  chemically synthesized
gagcatccacagatcttgatat

SEQ ID NO: 12668 - DNA, 22 bp, Artificial Sequence
  chemically synthesized
agcatccacagatcttgatatt

SEQ ID NO: 12669 - DNA, 22 bp, Artificial Sequence
  chemically synthesized
gatatttgcagggggtcttgcc

SEQ ID NO: 12670 - DNA, 22 bp, Artificial Sequence
  chemically synthesized
atatttgcagggggtcttgcca

SEQ ID NO: 12671 - DNA, 22 bp, Artificial Sequence
  chemically synthesized
gcagggggtcttgccaccaatt

SEQ ID NO: 12672 - DNA, 22 bp, Artificial Sequence
  chemically synthesized
cagggggtcttgccaccaattt

SEQ ID NO: 12673 - DNA, 22 bp, Artificial Sequence
  chemically synthesized
gccaccaattttccatggatac

SEQ ID NO: 12674 - DNA, 22 bp, Artificial Sequence
  chemically synthesized
ccaccaattttccatggatact

SEQ ID NO: 12675 - DNA, 22 bp, Artificial Sequence
  chemically synthesized
tccatggatactgaggaacgac

SEQ ID NO: 12676 - DNA, 22 bp, Artificial Sequence
  chemically synthesized
ccatggatactgaggaacgact

SEQ ID NO: 12677 - DNA, 22 bp, Artificial Sequence
  chemically synthesized
catggatactgaggaacgactg

SEQ ID NO: 12678 - DNA, 22 bp, Artificial Sequence
  chemically synthesized
aggaacgactgtaaatggatgc

SEQ ID NO: 12679 - DNA, 22 bp, Artificial Sequence
  chemically synthesized
taaatggatgcaggcatggatg

SEQ ID NO: 12680 - DNA, 22 bp, Artificial Sequence
  chemically synthesized
tttaggagtgtccagggccaag

SEQ ID NO: 12681 - DNA, 22 bp, Artificial Sequence
  chemically synthesized
aggagtgtccagggccaagtaa

SEQ ID NO: 12682 - DNA, 22 bp, Artificial Sequence
  chemically synthesized
ggagtgtccagggccaagtaaa

SEQ ID NO: 12683 - DNA, 22 bp, Artificial Sequence
  chemically synthesized
ctgagcagagaggtgggtggag

SEQ ID NO: 12684 - DNA, 22 bp, Artificial Sequence
  chemically synthesized
agcagagaggtgggtggaggct

SEQ ID NO: 12685 - DNA, 22 bp, Artificial Sequence
  chemically synthesized
tgaggcatcaatatgtggtggc

SEQ ID NO: 12686 - DNA, 22 bp, Artificial Sequence
  chemically synthesized
cattttggtgatttttttcctt

SEQ ID NO: 12687 - DNA, 22 bp, Artificial Sequence
  chemically synthesized
tggtgatttttttccttcacag

SEQ ID NO: 12688 - DNA, 22 bp, Artificial Sequence
  chemically synthesized
ggtgatttttttccttcacagt

SEQ ID NO: 12689 - DNA, 22 bp, Artificial Sequence
  chemically synthesized
gtgatttttttccttcacagtc

SEQ ID NO: 12690 - DNA, 22 bp, Artificial Sequence
  chemically synthesized
ttttccttcacagtcctcggct

SEQ ID NO: 12691 - DNA, 22 bp, Artificial Sequence
  chemically synthesized
tttccttcacagtcctcggctg

SEQ ID NO: 12692 - DNA, 22 bp, Artificial Sequence
  chemically synthesized
ttccttcacagtcctcggctgt

SEQ ID NO: 12693 - DNA, 22 bp, Artificial Sequence
  chemically synthesized
tccttcacagtcctcggctgtc

SEQ ID NO: 12694 - DNA, 22 bp, Artificial Sequence
  chemically synthesized
ccttcacagtcctcggctgtct

SEQ ID NO: 12695 - DNA, 22 bp, Artificial Sequence
  chemically synthesized
cttcacagtcctcggctgtctg

SEQ ID NO: 12696 - DNA, 22 bp, Artificial Sequence
  chemically synthesized
cacagtcctcggctgtctggga

SEQ ID NO: 12697 - DNA, 22 bp, Artificial Sequence
  chemically synthesized
acagtcctcggctgtctgggaa

SEQ ID NO: 12698 - DNA, 22 bp, Artificial Sequence
  chemically synthesized
ggctgtctgggaagagaaggat

SEQ ID NO: 12699 - DNA, 22 bp, Artificial Sequence
  chemically synthesized
tctgggaagagaaggatgaagg

SEQ ID NO: 12700 - DNA, 22 bp, Artificial Sequence
  chemically synthesized
ggaagagaaggatgaaggcaga

SEQ ID NO: 12701 - DNA, 22 bp, Artificial Sequence
  chemically synthesized
ctccaatttaggggctaggatt

SEQ ID NO: 12702 - DNA, 22 bp, Artificial Sequence
  chemically synthesized
caatttaggggctaggattgca

SEQ ID NO: 12703 - DNA, 22 bp, Artificial Sequence
  chemically synthesized
aggggctaggattgcagggtgg

SEQ ID NO: 12704 - DNA, 22 bp, Artificial Sequence
  chemically synthesized
ggggctaggattgcagggtggg

SEQ ID NO: 12705 - DNA, 22 bp, Artificial Sequence
  chemically synthesized
ggattgcagggtgggcacagca

SEQ ID NO: 12706 - DNA, 22 bp, Artificial Sequence
  chemically synthesized
cagggtgggcacagcattgcaa

SEQ ID NO: 12707 - DNA, 22 bp, Artificial Sequence
  chemically synthesized
caaacgagtgaaggaaattgag

SEQ ID NO: 12708 - DNA, 22 bp, Artificial Sequence
  chemically synthesized
agaaatatggccaatgaagagt

SEQ ID NO: 12709 - DNA, 22 bp, Artificial Sequence
  chemically synthesized
aagagaggcctggcatggtggc

SEQ ID NO: 12710 - DNA, 22 bp, Artificial Sequence
  chemically synthesized
gcatggtggctcacacctataa

SEQ ID NO: 12711 - DNA, 22 bp, Artificial Sequence
  chemically synthesized
acacctataatcccagcacttt

SEQ ID NO: 12712 - DNA, 22 bp, Artificial Sequence
  chemically synthesized
taatcccagcactttcagaggc

SEQ ID NO: 12713 - DNA, 22 bp, Artificial Sequence
  chemically synthesized
tcagaggcccaggcaggcagat

SEQ ID NO: 12714 - DNA, 22 bp, Artificial Sequence
  chemically synthesized
cagaggcccaggcaggcagatc

SEQ ID NO: 12715 - DNA, 22 bp, Artificial Sequence
  chemically synthesized
agaggcccaggcaggcagatca

SEQ ID NO: 12716 - DNA, 22 bp, Artificial Sequence
  chemically synthesized
gaggtcaggagttcgacaccag

SEQ ID NO: 12717 - DNA, 22 bp, Artificial Sequence
  chemically synthesized
aggtcaggagttcgacaccagc

SEQ ID NO: 12718 - DNA, 22 bp, Artificial Sequence
  chemically synthesized
gacaccagcctggccaacaagg

SEQ ID NO: 12719 - DNA, 22 bp, Artificial Sequence
  chemically synthesized
gccaacaaggtgaaatggtgaa

SEQ ID NO: 12720 - DNA, 22 bp, Artificial Sequence
  chemically synthesized
tactaaaaatacaaaaattagc

SEQ ID NO: 12721 - DNA, 22 bp, Artificial Sequence
  chemically synthesized
actaaaaatacaaaaattagct

SEQ ID NO: 12722 - DNA, 22 bp, Artificial Sequence
  chemically synthesized
ctaaaaatacaaaaattagctg

SEQ ID NO: 12723 - DNA, 22 bp, Artificial Sequence
  chemically synthesized
aaaatacaaaaattagctgggc

SEQ ID NO: 12724 - DNA, 22 bp, Artificial Sequence
  chemically synthesized
gctgggcatggtggcgggtgcc

SEQ ID NO: 12725 - DNA, 22 bp, Artificial Sequence
  chemically synthesized
ggcatggtggcgggtgcctgta

SEQ ID NO: 12726 - DNA, 22 bp, Artificial Sequence
  chemically synthesized
taatcccagctacttgggaggc

SEQ ID NO: 12727 - DNA, 22 bp, Artificial Sequence
  chemically synthesized
cttgggaggctgaggcaggaga

SEQ ID NO: 12728 - DNA, 22 bp, Artificial Sequence
  chemically synthesized
gggaggctgaggcaggagaata

SEQ ID NO: 12729 - DNA, 22 bp, Artificial Sequence
  chemically synthesized
ggaggctgaggcaggagaatag

SEQ ID NO: 12730 - DNA, 22 bp, Artificial Sequence
  chemically synthesized
aggcaggagaatagcttgaacc

SEQ ID NO: 12731 - DNA, 22 bp, Artificial Sequence
  chemically synthesized
gaacctgggagatggaggttgc

SEQ ID NO: 12732 - DNA, 22 bp, Artificial Sequence
  chemically synthesized
aacctgggagatggaggttgca

SEQ ID NO: 12733 - DNA, 22 bp, Artificial Sequence
  chemically synthesized
ggagatggaggttgcagtgagc

SEQ ID NO: 12734 - DNA, 22 bp, Artificial Sequence
  chemically synthesized
cagtgagctgagatcgcaccac

SEQ ID NO: 12735 - DNA, 22 bp, Artificial Sequence
  chemically synthesized
agatcgcaccactgcactccag

SEQ ID NO: 12736 - DNA, 22 bp, Artificial Sequence
  chemically synthesized
cactccagcctgggcgacagag

SEQ ID NO: 12737 - DNA, 22 bp, Artificial Sequence
  chemically synthesized
cagcctgggcgacagagcaaga

SEQ ID NO: 12738 - DNA, 22 bp, Artificial Sequence
  chemically synthesized
ggcgacagagcaagactctgtc

SEQ ID NO: 12739 - DNA, 22 bp, Artificial Sequence
  chemically synthesized
tgtcaaaaaaaaaagagttgaa

SEQ ID NO: 12740 - DNA, 22 bp, Artificial Sequence
  chemically synthesized
tcaaaaaaaaaagagttgaaga

SEQ ID NO: 12741 - DNA, 22 bp, Artificial Sequence
  chemically synthesized
aagagaaaaagtctaggctaaa

SEQ ID NO: 12742 - DNA, 22 bp, Artificial Sequence
  chemically synthesized
ggctaaattcaaagaaaaaaag

SEQ ID NO: 12743 - DNA, 22 bp, Artificial Sequence
  chemically synthesized
aattcaaagaaaaaaagtgagc

SEQ ID NO: 12744 - DNA, 22 bp, Artificial Sequence
  chemically synthesized
aaagaaaaaaagtgagcccaaa

SEQ ID NO: 12745 - DNA, 22 bp, Artificial Sequence
  chemically synthesized
gcagagcaagggaaaagcaggg

SEQ ID NO: 12746 - DNA, 22 bp, Artificial Sequence
  chemically synthesized
cagagcaagggaaaagcaggga

SEQ ID NO: 12747 - DNA, 22 bp, Artificial Sequence
  chemically synthesized
gaacactccataaagtgaacag

SEQ ID NO: 12748 - DNA, 22 bp, Artificial Sequence
  chemically synthesized
cataaagtgaacagctgcaatg

SEQ ID NO: 12749 - DNA, 22 bp, Artificial Sequence
  chemically synthesized
caatgaaaataagggaagaaag

SEQ ID NO: 12750 - DNA, 22 bp, Artificial Sequence
  chemically synthesized
agttcatctccgtttctttcct

SEQ ID NO: 12751 - DNA, 22 bp, Artificial Sequence
  chemically synthesized
gttcatctccgtttctttcctt

SEQ ID NO: 12752 - DNA, 22 bp, Artificial Sequence
  chemically synthesized
atctccgtttctttcctttcct

SEQ ID NO: 12753 - DNA, 22 bp, Artificial Sequence
  chemically synthesized
cgtttctttcctttccttttta

SEQ ID NO: 12754 - DNA, 22 bp, Artificial Sequence
  chemically synthesized
ctttcctttcctttttactttc

SEQ ID NO: 12755 - DNA, 22 bp, Artificial Sequence
  chemically synthesized
tttcctttcctttttactttcc

SEQ ID NO: 12756 - DNA, 22 bp, Artificial Sequence
  chemically synthesized
tcctttcctttttactttcctt

SEQ ID NO: 12757 - DNA, 22 bp, Artificial Sequence
  chemically synthesized
cctttcctttttactttccttt

SEQ ID NO: 12758 - DNA, 22 bp, Artificial Sequence
  chemically synthesized
ctttcctttttactttcctttc

SEQ ID NO: 12759 - DNA, 22 bp, Artificial Sequence
  chemically synthesized
tcctttttactttcctttctct

SEQ ID NO: 12760 - DNA, 22 bp, Artificial Sequence
  chemically synthesized
cctttttactttcctttctctt

SEQ ID NO: 12761 - DNA, 22 bp, Artificial Sequence
  chemically synthesized
ctttttactttcctttctcttc

SEQ ID NO: 12762 - DNA, 22 bp, Artificial Sequence
  chemically synthesized
tttactttcctttctcttcctt

SEQ ID NO: 12763 - DNA, 22 bp, Artificial Sequence
  chemically synthesized
ttactttcctttctcttccttt

SEQ ID NO: 12764 - DNA, 22 bp, Artificial Sequence
  chemically synthesized
tactttcctttctcttcctttt

SEQ ID NO: 12765 - DNA, 22 bp, Artificial Sequence
  chemically synthesized
actttcctttctcttccttttt

SEQ ID NO: 12766 - DNA, 22 bp, Artificial Sequence
  chemically synthesized
ctttcctttctcttcctttttg

SEQ ID NO: 12767 - DNA, 22 bp, Artificial Sequence
  chemically synthesized
tcctttctcttcctttttggag

SEQ ID NO: 12768 - DNA, 22 bp, Artificial Sequence
  chemically synthesized
cctttctcttcctttttggagt

SEQ ID NO: 12769 - DNA, 22 bp, Artificial Sequence
  chemically synthesized
ctttctcttcctttttggagtt

SEQ ID NO: 12770 - DNA, 22 bp, Artificial Sequence
  chemically synthesized
tctcttcctttttggagttaat

SEQ ID NO: 12771 - DNA, 22 bp, Artificial Sequence
  chemically synthesized
ctcttcctttttggagttaatc

SEQ ID NO: 12772 - DNA, 22 bp, Artificial Sequence
  chemically synthesized
tcttcctttttggagttaatca

SEQ ID NO: 12773 - DNA, 22 bp, Artificial Sequence
  chemically synthesized
ttcctttttggagttaatcagg

SEQ ID NO: 12774 - DNA, 22 bp, Artificial Sequence
  chemically synthesized
cctttttggagttaatcaggaa

SEQ ID NO: 12775 - DNA, 22 bp, Artificial Sequence
  chemically synthesized
ctttttggagttaatcaggaag

SEQ ID NO: 12776 - DNA, 22 bp, Artificial Sequence
  chemically synthesized
tttggagttaatcaggaagtag

SEQ ID NO: 12777 - DNA, 22 bp, Artificial Sequence
  chemically synthesized
ttggagttaatcaggaagtagt

SEQ ID NO: 12778 - DNA, 22 bp, Artificial Sequence
  chemically synthesized
tggagttaatcaggaagtagtc

SEQ ID NO: 12779 - DNA, 22 bp, Artificial Sequence
  chemically synthesized
ggagttaatcaggaagtagtcc

SEQ ID NO: 12780 - DNA, 22 bp, Artificial Sequence
  chemically synthesized
gagttaatcaggaagtagtccc

SEQ ID NO: 12781 - DNA, 22 bp, Artificial Sequence
  chemically synthesized
atcaggaagtagtcccaaatac

SEQ ID NO: 12782 - DNA, 22 bp, Artificial Sequence
  chemically synthesized
atcttataagcccttggtcctc

SEQ ID NO: 12783 - DNA, 22 bp, Artificial Sequence
  chemically synthesized
ataagcccttggtcctcttgag

SEQ ID NO: 12784 - DNA, 22 bp, Artificial Sequence
  chemically synthesized
taagcccttggtcctcttgaga

SEQ ID NO: 12785 - DNA, 22 bp, Artificial Sequence
  chemically synthesized
ggtcctcttgagatggtatcag

SEQ ID NO: 12786 - DNA, 22 bp, Artificial Sequence
  chemically synthesized
gtcctcttgagatggtatcaga

SEQ ID NO: 12787 - DNA, 22 bp, Artificial Sequence
  chemically synthesized
ttgagatggtatcagatatatt

SEQ ID NO: 12788 - DNA, 22 bp, Artificial Sequence
  chemically synthesized
gagatggtatcagatatattgc

SEQ ID NO: 12789 - DNA, 22 bp, Artificial Sequence
  chemically synthesized
agatggtatcagatatattgct

SEQ ID NO: 12790 - DNA, 22 bp, Artificial Sequence
  chemically synthesized
ctagacccttgaagaaaggaac

SEQ ID NO: 12791 - DNA, 22 bp, Artificial Sequence
  chemically synthesized
gacccttgaagaaaggaacaac

SEQ ID NO: 12792 - DNA, 22 bp, Artificial Sequence
  chemically synthesized
gaagaaaggaacaactccaggc

SEQ ID NO: 12793 - DNA, 22 bp, Artificial Sequence
  chemically synthesized
aagaaaggaacaactccaggca

SEQ ID NO: 12794 - DNA, 22 bp, Artificial Sequence
  chemically synthesized
caggcaacttcttgagtccctg

SEQ ID NO: 12795 - DNA, 22 bp, Artificial Sequence
  chemically synthesized
cttgagtccctgttattaattt

SEQ ID NO: 12796 - DNA, 22 bp, Artificial Sequence
  chemically synthesized
ttgagtccctgttattaatttt

SEQ ID NO: 12797 - DNA, 22 bp, Artificial Sequence
  chemically synthesized
gagtccctgttattaattttat

SEQ ID NO: 12798 - DNA, 22 bp, Artificial Sequence
  chemically synthesized
agtccctgttattaattttata

SEQ ID NO: 12799 - DNA, 22 bp, Artificial Sequence
  chemically synthesized
ttattaattttatacatacaca

SEQ ID NO: 12800 - DNA, 22 bp, Artificial Sequence
  chemically synthesized
ttaattttatacatacacacac

SEQ ID NO: 12801 - DNA, 22 bp, Artificial Sequence
  chemically synthesized
attttatacatacacacacata

SEQ ID NO: 12802 - DNA, 22 bp, Artificial Sequence
  chemically synthesized
tatacatacacacacatatatg

SEQ ID NO: 12803 - DNA, 22 bp, Artificial Sequence
  chemically synthesized
atacatacacacacatatatgt

SEQ ID NO: 12804 - DNA, 22 bp, Artificial Sequence
  chemically synthesized
tacatacacacacatatatgta

SEQ ID NO: 12805 - DNA, 22 bp, Artificial Sequence
  chemically synthesized
cttaacaatggggatatattct

SEQ ID NO: 12806 - DNA, 22 bp, Artificial Sequence
  chemically synthesized
aacaatggggatatattctgag

SEQ ID NO: 12807 - DNA, 22 bp, Artificial Sequence
  chemically synthesized
acaatggggatatattctgaga

SEQ ID NO: 12808 - DNA, 22 bp, Artificial Sequence
  chemically synthesized
tgagaaatgtgtcattaagcaa

SEQ ID NO: 12809 - DNA, 22 bp, Artificial Sequence
  chemically synthesized
agaaatgtgtcattaagcaatt

SEQ ID NO: 12810 - DNA, 22 bp, Artificial Sequence
  chemically synthesized
agcaatttcatcattgtgcgaa

SEQ ID NO: 12811 - DNA, 22 bp, Artificial Sequence
  chemically synthesized
catcattgtgcgaacataatag

SEQ ID NO: 12812 - DNA, 22 bp, Artificial Sequence
  chemically synthesized
atcattgtgcgaacataataga

SEQ ID NO: 12813 - DNA, 22 bp, Artificial Sequence
  chemically synthesized
tgcgaacataatagagtgtact

SEQ ID NO: 12814 - DNA, 22 bp, Artificial Sequence
  chemically synthesized
acctaaacctaaatggtatagc

SEQ ID NO: 12815 - DNA, 22 bp, Artificial Sequence
  chemically synthesized
cctaaacctaaatggtatagct

SEQ ID NO: 12816 - DNA, 22 bp, Artificial Sequence
  chemically synthesized
aacctaaatggtatagcttact

SEQ ID NO: 12817 - DNA, 22 bp, Artificial Sequence
  chemically synthesized
aatggtatagcttactacatac

SEQ ID NO: 12818 - DNA, 22 bp, Artificial Sequence
  chemically synthesized
actacatacctaggttgtattg

SEQ ID NO: 12819 - DNA, 22 bp, Artificial Sequence
  chemically synthesized
ctacatacctaggttgtattga

SEQ ID NO: 12820 - DNA, 22 bp, Artificial Sequence
  chemically synthesized
catacctaggttgtattgatgt

SEQ ID NO: 12821 - DNA, 22 bp, Artificial Sequence
  chemically synthesized
ggttgtattgatgtggcctatt

SEQ ID NO: 12822 - DNA, 22 bp, Artificial Sequence
  chemically synthesized
tattgatgtggcctattgctcc

SEQ ID NO: 12823 - DNA, 22 bp, Artificial Sequence
  chemically synthesized
atgtggcctattgctcctaggc

SEQ ID NO: 12824 - DNA, 22 bp, Artificial Sequence
  chemically synthesized
ttgctcctaggctcctgggctg

SEQ ID NO: 12825 - DNA, 22 bp, Artificial Sequence
  chemically synthesized
ctcctaggctcctgggctgcaa

SEQ ID NO: 12826 - DNA, 22 bp, Artificial Sequence
  chemically synthesized
ctaggctcctgggctgcaaacc

SEQ ID NO: 12827 - DNA, 22 bp, Artificial Sequence
  chemically synthesized
ggctcctgggctgcaaacctgt

SEQ ID NO: 12828 - DNA, 22 bp, Artificial Sequence
  chemically synthesized
ctgggctgcaaacctgtacagc

SEQ ID NO: 12829 - DNA, 22 bp, Artificial Sequence
  chemically synthesized
ggctgcaaacctgtacagcatg

SEQ ID NO: 12830 - DNA, 22 bp, Artificial Sequence
  chemically synthesized
caaacctgtacagcatgtgact

SEQ ID NO: 12831 - DNA, 22 bp, Artificial Sequence
  chemically synthesized
tacagcatgtgactgtactgaa

SEQ ID NO: 12832 - DNA, 22 bp, Artificial Sequence
  chemically synthesized
tactgaacactgtaggcaatgg

SEQ ID NO: 12833 - DNA, 22 bp, Artificial Sequence
  chemically synthesized
aacactgtaggcaatggtaaca

SEQ ID NO: 12834 - DNA, 22 bp, Artificial Sequence
  chemically synthesized
taggcaatggtaacagtggtat

SEQ ID NO: 12835 - DNA, 22 bp, Artificial Sequence
  chemically synthesized
gtgtatctaaacatagaaaagg

SEQ ID NO: 12836 - DNA, 22 bp, Artificial Sequence
  chemically synthesized
tgtatctaaacatagaaaaggt

SEQ ID NO: 12837 - DNA, 22 bp, Artificial Sequence
  chemically synthesized
aacatagaaaaggtacagtgaa

SEQ ID NO: 12838 - DNA, 22 bp, Artificial Sequence
  chemically synthesized
taaccttatgggaccactgtcg

SEQ ID NO: 12839 - DNA, 22 bp, Artificial Sequence
  chemically synthesized
atgggaccactgtcgtataatg

SEQ ID NO: 12840 - DNA, 22 bp, Artificial Sequence
  chemically synthesized
tgggaccactgtcgtataatgt

SEQ ID NO: 12841 - DNA, 22 bp, Artificial Sequence
  chemically synthesized
tcgtataatgtggtccatcatt

SEQ ID NO: 12842 - DNA, 22 bp, Artificial Sequence
  chemically synthesized
accaaaatgtcattgtgcagca

SEQ ID NO: 12843 - DNA, 22 bp, Artificial Sequence
  chemically synthesized
tgcagcaaatgattatctcata

SEQ ID NO: 12844 - DNA, 22 bp, Artificial Sequence
  chemically synthesized
tctcatatatatatatatatga

SEQ ID NO: 12845 - DNA, 22 bp, Artificial Sequence
  chemically synthesized
atatatatatatatatgatatg

SEQ ID NO: 12846 - DNA, 22 bp, Artificial Sequence
  chemically synthesized
agatagagacatctatcctcca

SEQ ID NO: 12847 - DNA, 22 bp, Artificial Sequence
  chemically synthesized
tcctccagagttcaggagtgtc

SEQ ID NO: 12848 - DNA, 22 bp, Artificial Sequence
  chemically synthesized
cagagttcaggagtgtctcttc

SEQ ID NO: 12849 - DNA, 22 bp, Artificial Sequence
  chemically synthesized
aggagtgtctcttcagactagg

SEQ ID NO: 12850 - DNA, 22 bp, Artificial Sequence
  chemically synthesized
ttcagactaggtagatgtagct

SEQ ID NO: 12851 - DNA, 22 bp, Artificial Sequence
  chemically synthesized
cagactaggtagatgtagctta

SEQ ID NO: 12852 - DNA, 22 bp, Artificial Sequence
  chemically synthesized
agactaggtagatgtagcttaa

SEQ ID NO: 12853 - DNA, 22 bp, Artificial Sequence
  chemically synthesized
ggtagatgtagcttaaaaaaaa

SEQ ID NO: 12854 - DNA, 22 bp, Artificial Sequence
  chemically synthesized
aaaaaaaacatatcctgaattc

SEQ ID NO: 12855 - DNA, 22 bp, Artificial Sequence
  chemically synthesized
aaaaaaacatatcctgaattct

SEQ ID NO: 12856 - DNA, 22 bp, Artificial Sequence
  chemically synthesized
aattctagagagatgcttaaat

SEQ ID NO: 12857 - DNA, 22 bp, Artificial Sequence
  chemically synthesized
tagagagatgcttaaatcactg

SEQ ID NO: 12858 - DNA, 22 bp, Artificial Sequence
  chemically synthesized
gagagatgcttaaatcactgca

SEQ ID NO: 12859 - DNA, 22 bp, Artificial Sequence
  chemically synthesized
aaatcactgcaattcctataac

SEQ ID NO: 12860 - DNA, 22 bp, Artificial Sequence
  chemically synthesized
aatcactgcaattcctataaca

SEQ ID NO: 12861 - DNA, 22 bp, Artificial Sequence
  chemically synthesized
caattcctataacacttgccaa

SEQ ID NO: 12862 - DNA, 22 bp, Artificial Sequence
  chemically synthesized
ctataacacttgccaaccaaag

SEQ ID NO: 12863 - DNA, 22 bp, Artificial Sequence
  chemically synthesized
taacacttgccaaccaaaggtg

SEQ ID NO: 12864 - DNA, 22 bp, Artificial Sequence
  chemically synthesized
gccaaccaaaggtgctgttgat

SEQ ID NO: 12865 - DNA, 22 bp, Artificial Sequence
  chemically synthesized
ccaaccaaaggtgctgttgatc

SEQ ID NO: 12866 - DNA, 22 bp, Artificial Sequence
  chemically synthesized
ttgatctgaaattgctttttta

SEQ ID NO: 12867 - DNA, 22 bp, Artificial Sequence
  chemically synthesized
atctgaaattgcttttttaaat

SEQ ID NO: 12868 - DNA, 22 bp, Artificial Sequence
  chemically synthesized
aaattgcttttttaaattaatg

SEQ ID NO: 12869 - DNA, 22 bp, Artificial Sequence
  chemically synthesized
cttttttaaattaatgcagtga

SEQ ID NO: 12870 - DNA, 22 bp, Artificial Sequence
  chemically synthesized
ttttaaattaatgcagtgattt

SEQ ID NO: 12871 - DNA, 22 bp, Artificial Sequence
  chemically synthesized
tttaaattaatgcagtgatttt

SEQ ID NO: 12872 - DNA, 22 bp, Artificial Sequence
  chemically synthesized
ttaaattaatgcagtgattttt

SEQ ID NO: 12873 - DNA, 22 bp, Artificial Sequence
  chemically synthesized
taaattaatgcagtgatttttc

SEQ ID NO: 12874 - DNA, 22 bp, Artificial Sequence
  chemically synthesized
aaattaatgcagtgatttttct

SEQ ID NO: 12875 - DNA, 22 bp, Artificial Sequence
  chemically synthesized
aattaatgcagtgatttttctt

SEQ ID NO: 12876 - DNA, 22 bp, Artificial Sequence
  chemically synthesized
atgcagtgatttttctttaaca

SEQ ID NO: 12877 - DNA, 22 bp, Artificial Sequence
  chemically synthesized
ttctttaacatctagtgacaga

SEQ ID NO: 12878 - DNA, 22 bp, Artificial Sequence
  chemically synthesized
tctttaacatctagtgacagac

SEQ ID NO: 12879 - DNA, 22 bp, Artificial Sequence
  chemically synthesized
ctttaacatctagtgacagaca

SEQ ID NO: 12880 - DNA, 22 bp, Artificial Sequence
  chemically synthesized
tttaacatctagtgacagacac

SEQ ID NO: 12881 - DNA, 22 bp, Artificial Sequence
  chemically synthesized
taacatctagtgacagacactg

SEQ ID NO: 12882 - DNA, 22 bp, Artificial Sequence
  chemically synthesized
aacatctagtgacagacactgg

SEQ ID NO: 12883 - DNA, 22 bp, Artificial Sequence
  chemically synthesized
acatctagtgacagacactggg

SEQ ID NO: 12884 - DNA, 22 bp, Artificial Sequence
  chemically synthesized
gtgacagacactggggtcacat

SEQ ID NO: 12885 - DNA, 22 bp, Artificial Sequence
  chemically synthesized
gggtcacatttgcagctggacc

SEQ ID NO: 12886 - DNA, 22 bp, Artificial Sequence
  chemically synthesized
gcagctggaccataattaggct

SEQ ID NO: 12887 - DNA, 22 bp, Artificial Sequence
  chemically synthesized
cagctggaccataattaggctt

SEQ ID NO: 12888 - DNA, 22 bp, Artificial Sequence
  chemically synthesized
gaccataattaggcttctgttc

SEQ ID NO: 12889 - DNA, 22 bp, Artificial Sequence
  chemically synthesized
ggcttctgttcttcaggagaca

SEQ ID NO: 12890 - DNA, 22 bp, Artificial Sequence
  chemically synthesized
ctgttcttcaggagacatttgt

SEQ ID NO: 12891 - DNA, 22 bp, Artificial Sequence
  chemically synthesized
tgttcttcaggagacatttgtt

SEQ ID NO: 12892 - DNA, 22 bp, Artificial Sequence
  chemically synthesized
ttcttcaggagacatttgttca

SEQ ID NO: 12893 - DNA, 22 bp, Artificial Sequence
  chemically synthesized
ttcaggagacatttgttcaaag

SEQ ID NO: 12894 - DNA, 22 bp, Artificial Sequence
  chemically synthesized
caggagacatttgttcaaagtc

SEQ ID NO: 12895 - DNA, 22 bp, Artificial Sequence
  chemically synthesized
aggagacatttgttcaaagtca

SEQ ID NO: 12896 - DNA, 22 bp, Artificial Sequence
  chemically synthesized
gttcaaagtcatttgggcaacc

SEQ ID NO: 12897 - DNA, 22 bp, Artificial Sequence
  chemically synthesized
ttcaaagtcatttgggcaacca

SEQ ID NO: 12898 - DNA, 22 bp, Artificial Sequence
  chemically synthesized
aaagtcatttgggcaaccatat

SEQ ID NO: 12899 - DNA, 22 bp, Artificial Sequence
  chemically synthesized
gggcaaccatattctgaaaaca

SEQ ID NO: 12900 - DNA, 22 bp, Artificial Sequence
  chemically synthesized
ggcaaccatattctgaaaacag

SEQ ID NO: 12901 - DNA, 22 bp, Artificial Sequence
  chemically synthesized
tgaaaacagcccagccagggtg

SEQ ID NO: 12902 - DNA, 22 bp, Artificial Sequence
  chemically synthesized
aaaacagcccagccagggtgat

SEQ ID NO: 12903 - DNA, 22 bp, Artificial Sequence
  chemically synthesized
tgcaaagatcctcaatgagcta

SEQ ID NO: 12904 - DNA, 22 bp, Artificial Sequence
  chemically synthesized
gcaaagatcctcaatgagctat

SEQ ID NO: 12905 - DNA, 22 bp, Artificial Sequence
  chemically synthesized
caaagatcctcaatgagctatt

SEQ ID NO: 12906 - DNA, 22 bp, Artificial Sequence
  chemically synthesized
aatgagctattttcaagtgatg

SEQ ID NO: 12907 - DNA, 22 bp, Artificial Sequence
  chemically synthesized
ttttcaagtgatgacaaagtgt

SEQ ID NO: 12908 - DNA, 22 bp, Artificial Sequence
  chemically synthesized
tcaagtgatgacaaagtgtgaa

SEQ ID NO: 12909 - DNA, 22 bp, Artificial Sequence
  chemically synthesized
caagtgatgacaaagtgtgaag

SEQ ID NO: 12910 - DNA, 22 bp, Artificial Sequence
  chemically synthesized
aagtgatgacaaagtgtgaagt

SEQ ID NO: 12911 - DNA, 22 bp, Artificial Sequence
  chemically synthesized
accgctcatttgagaactttct

SEQ ID NO: 12912 - DNA, 22 bp, Artificial Sequence
  chemically synthesized
atttgagaactttctttttcat

SEQ ID NO: 12913 - DNA, 22 bp, Artificial Sequence
  chemically synthesized
gagaactttctttttcatccaa

SEQ ID NO: 12914 - DNA, 22 bp, Artificial Sequence
  chemically synthesized
agaactttctttttcatccaaa

SEQ ID NO: 12915 - DNA, 22 bp, Artificial Sequence
  chemically synthesized
tctttttcatccaaagtaaatt

SEQ ID NO: 12916 - DNA, 22 bp, Artificial Sequence
  chemically synthesized
ctttttcatccaaagtaaattc

SEQ ID NO: 12917 - DNA, 22 bp, Artificial Sequence
  chemically synthesized
tttttcatccaaagtaaattca

SEQ ID NO: 12918 - DNA, 22 bp, Artificial Sequence
  chemically synthesized
tttcatccaaagtaaattcaaa

SEQ ID NO: 12919 - DNA, 22 bp, Artificial Sequence
  chemically synthesized
ttcatccaaagtaaattcaaat

SEQ ID NO: 12920 - DNA, 22 bp, Artificial Sequence
  chemically synthesized
tcatccaaagtaaattcaaata

SEQ ID NO: 12921 - DNA, 22 bp, Artificial Sequence
  chemically synthesized
catccaaagtaaattcaaatat

SEQ ID NO: 12922 - DNA, 22 bp, Artificial Sequence
  chemically synthesized
atccaaagtaaattcaaatatg

SEQ ID NO: 12923 - DNA, 22 bp, Artificial Sequence
  chemically synthesized
aaatatgattagaaatctgacc

SEQ ID NO: 12924 - DNA, 22 bp, Artificial Sequence
  chemically synthesized
gaaatctgaccttttattactg

SEQ ID NO: 12925 - DNA, 22 bp, Artificial Sequence
  chemically synthesized
accttttattactggaattctc

SEQ ID NO: 12926 - DNA, 22 bp, Artificial Sequence
  chemically synthesized
ttattactggaattctcttgac

SEQ ID NO: 12927 - DNA, 22 bp, Artificial Sequence
  chemically synthesized
tattactggaattctcttgact

SEQ ID NO: 12928 - DNA, 22 bp, Artificial Sequence
  chemically synthesized
attactggaattctcttgacta

SEQ ID NO: 12929 - DNA, 22 bp, Artificial Sequence
  chemically synthesized
ttactggaattctcttgactaa

SEQ ID NO: 12930 - DNA, 22 bp, Artificial Sequence
  chemically synthesized
ctggaattctcttgactaaaag

SEQ ID NO: 12931 - DNA, 22 bp, Artificial Sequence
  chemically synthesized
gaattctcttgactaaaagtaa

SEQ ID NO: 12932 - DNA, 22 bp, Artificial Sequence
  chemically synthesized
tcttgactaaaagtaaaattga

SEQ ID NO: 12933 - DNA, 22 bp, Artificial Sequence
  chemically synthesized
ttgactaaaagtaaaattgaat

SEQ ID NO: 12934 - DNA, 22 bp, Artificial Sequence
  chemically synthesized
gactaaaagtaaaattgaattt

SEQ ID NO: 12935 - DNA, 22 bp, Artificial Sequence
  chemically synthesized
actaaaagtaaaattgaatttt

SEQ ID NO: 12936 - DNA, 22 bp, Artificial Sequence
  chemically synthesized
aaagtaaaattgaattttaatt

SEQ ID NO: 12937 - DNA, 22 bp, Artificial Sequence
  chemically synthesized
aattttaattcctaaatctcca

SEQ ID NO: 12938 - DNA, 22 bp, Artificial Sequence
  chemically synthesized
taattcctaaatctccatgtgt

SEQ ID NO: 12939 - DNA, 22 bp, Artificial Sequence
  chemically synthesized
aattcctaaatctccatgtgta

SEQ ID NO: 12940 - DNA, 22 bp, Artificial Sequence
  chemically synthesized
attcctaaatctccatgtgtat

SEQ ID NO: 12941 - DNA, 22 bp, Artificial Sequence
  chemically synthesized
ctaaatctccatgtgtatacag

SEQ ID NO: 12942 - DNA, 22 bp, Artificial Sequence
  chemically synthesized
aatctccatgtgtatacagtac

SEQ ID NO: 12943 - DNA, 22 bp, Artificial Sequence
  chemically synthesized
catgtgtatacagtactgtggg

SEQ ID NO: 12944 - DNA, 22 bp, Artificial Sequence
  chemically synthesized
tgggaacatcacagattttggc

SEQ ID NO: 12945 - DNA, 22 bp, Artificial Sequence
  chemically synthesized
tggctccatgccctaaagagaa

SEQ ID NO: 12946 - DNA, 22 bp, Artificial Sequence
  chemically synthesized
ggctccatgccctaaagagaaa

SEQ ID NO: 12947 - DNA, 22 bp, Artificial Sequence
  chemically synthesized
gctccatgccctaaagagaaat

SEQ ID NO: 12948 - DNA, 22 bp, Artificial Sequence
  chemically synthesized
catgccctaaagagaaattggc

SEQ ID NO: 12949 - DNA, 22 bp, Artificial Sequence
  chemically synthesized
aagagaaattggctttcagatt

SEQ ID NO: 12950 - DNA, 22 bp, Artificial Sequence
  chemically synthesized
gctttcagattatttggattaa

SEQ ID NO: 12951 - DNA, 22 bp, Artificial Sequence
  chemically synthesized
tcagattatttggattaaaaac

SEQ ID NO: 12952 - DNA, 22 bp, Artificial Sequence
  chemically synthesized
cagattatttggattaaaaaca

SEQ ID NO: 12953 - DNA, 22 bp, Artificial Sequence
  chemically synthesized
agattatttggattaaaaacaa

SEQ ID NO: 12954 - DNA, 22 bp, Artificial Sequence
  chemically synthesized
tttggattaaaaacaaagactt

SEQ ID NO: 12955 - DNA, 22 bp, Artificial Sequence
  chemically synthesized
ggattaaaaacaaagactttct

SEQ ID NO: 12956 - DNA, 22 bp, Artificial Sequence
  chemically synthesized
gattaaaaacaaagactttctt

SEQ ID NO: 12957 - DNA, 22 bp, Artificial Sequence
  chemically synthesized
aaaacaaagactttcttaagag

SEQ ID NO: 12958 - DNA, 22 bp, Artificial Sequence
  chemically synthesized
tcttaagagatgtaaaattttc

SEQ ID NO: 12959 - DNA, 22 bp, Artificial Sequence
  chemically synthesized
cttaagagatgtaaaattttca

SEQ ID NO: 12960 - DNA, 22 bp, Artificial Sequence
  chemically synthesized
ttaagagatgtaaaattttcat

SEQ ID NO: 12961 - DNA, 22 bp, Artificial Sequence
  chemically synthesized
aagagatgtaaaattttcatga

SEQ ID NO: 12962 - DNA, 22 bp, Artificial Sequence
  chemically synthesized
agagatgtaaaattttcatgat

SEQ ID NO: 12963 - DNA, 22 bp, Artificial Sequence
  chemically synthesized
tcatgatgttttcttttttgct

SEQ ID NO: 12964 - DNA, 22 bp, Artificial Sequence
  chemically synthesized
catgatgttttcttttttgcta

SEQ ID NO: 12965 - DNA, 22 bp, Artificial Sequence
  chemically synthesized
atgatgttttcttttttgctaa

SEQ ID NO: 12966 - DNA, 22 bp, Artificial Sequence
  chemically synthesized
tcttttttgctaaaactaaaga

SEQ ID NO: 12967 - DNA, 22 bp, Artificial Sequence
  chemically synthesized
cttttttgctaaaactaaagaa

SEQ ID NO: 12968 - DNA, 22 bp, Artificial Sequence
  chemically synthesized
ttttttgctaaaactaaagaat

SEQ ID NO: 12969 - DNA, 22 bp, Artificial Sequence
  chemically synthesized
ttttgctaaaactaaagaatta

SEQ ID NO: 12970 - DNA, 22 bp, Artificial Sequence
  chemically synthesized
tttgctaaaactaaagaattat

SEQ ID NO: 12971 - DNA, 22 bp, Artificial Sequence
  chemically synthesized
ttgctaaaactaaagaattatt

SEQ ID NO: 12972 - DNA, 22 bp, Artificial Sequence
  chemically synthesized
tgctaaaactaaagaattattc

SEQ ID NO: 12973 - DNA, 22 bp, Artificial Sequence
  chemically synthesized
gctaaaactaaagaattattct

SEQ ID NO: 12974 - DNA, 22 bp, Artificial Sequence
  chemically synthesized
ctaaaactaaagaattattctt

SEQ ID NO: 12975 - DNA, 22 bp, Artificial Sequence
  chemically synthesized
aaactaaagaattattctttta

SEQ ID NO: 12976 - DNA, 22 bp, Artificial Sequence
  chemically synthesized
aagaattattcttttacatttc

SEQ ID NO: 12977 - DNA, 22 bp, Artificial Sequence
  chemically synthesized
ttcttttacatttcagtttttc

SEQ ID NO: 12978 - DNA, 22 bp, Artificial Sequence
  chemically synthesized
ttttacatttcagtttttcttg

SEQ ID NO: 12979 - DNA, 22 bp, Artificial Sequence
  chemically synthesized
ttacatttcagtttttcttgat

SEQ ID NO: 12980 - DNA, 22 bp, Artificial Sequence
  chemically synthesized
tacatttcagtttttcttgatc

SEQ ID NO: 12981 - DNA, 22 bp, Artificial Sequence
  chemically synthesized
acatttcagtttttcttgatca

SEQ ID NO: 12982 - DNA, 22 bp, Artificial Sequence
  chemically synthesized
catttcagtttttcttgatcat

SEQ ID NO: 12983 - DNA, 22 bp, Artificial Sequence
  chemically synthesized
cagtttttcttgatcatgaaaa

SEQ ID NO: 12984 - DNA, 22 bp, Artificial Sequence
  chemically synthesized
agtttttcttgatcatgaaaac

SEQ ID NO: 12985 - DNA, 22 bp, Artificial Sequence
  chemically synthesized
ttcttgatcatgaaaacgccaa

SEQ ID NO: 12986 - DNA, 22 bp, Artificial Sequence
  chemically synthesized
tcttgatcatgaaaacgccaac

SEQ ID NO: 12987 - DNA, 22 bp, Artificial Sequence
  chemically synthesized
cttgatcatgaaaacgccaaca

SEQ ID NO: 12988 - DNA, 22 bp, Artificial Sequence
  chemically synthesized
ttgatcatgaaaacgccaacaa

SEQ ID NO: 12989 - DNA, 22 bp, Artificial Sequence
  chemically synthesized
gatcatgaaaacgccaacaaaa

SEQ ID NO: 12990 - DNA, 22 bp, Artificial Sequence
  chemically synthesized
atcatgaaaacgccaacaaaat

SEQ ID NO: 12991 - DNA, 22 bp, Artificial Sequence
  chemically synthesized
tgaatcggccaaagaggtataa

SEQ ID NO: 12992 - DNA, 22 bp, Artificial Sequence
  chemically synthesized
aatcggccaaagaggtataatt

SEQ ID NO: 12993 - DNA, 22 bp, Artificial Sequence
  chemically synthesized
aggtaaattggaagagtttgtt

SEQ ID NO: 12994 - DNA, 22 bp, Artificial Sequence
  chemically synthesized
gaagagtttgttcaagggaacc

SEQ ID NO: 12995 - DNA, 22 bp, Artificial Sequence
  chemically synthesized
gttcaagggaaccttgagagag

SEQ ID NO: 12996 - DNA, 22 bp, Artificial Sequence
  chemically synthesized
ttcaagggaaccttgagagaga

SEQ ID NO: 12997 - DNA, 22 bp, Artificial Sequence
  chemically synthesized
aagggaaccttgagagagaatg

SEQ ID NO: 12998 - DNA, 22 bp, Artificial Sequence
  chemically synthesized
gagagagaatgtatggaagaaa

SEQ ID NO: 12999 - DNA, 22 bp, Artificial Sequence
  chemically synthesized
agagagaatgtatggaagaaaa

SEQ ID NO: 13000 - DNA, 22 bp, Artificial Sequence
  chemically synthesized
tgaagaagcacgagaagttttt

SEQ ID NO: 13001 - DNA, 22 bp, Artificial Sequence
  chemically synthesized
gaagaagcacgagaagtttttg

SEQ ID NO: 13002 - DNA, 22 bp, Artificial Sequence
  chemically synthesized
aagaagcacgagaagtttttga

SEQ ID NO: 13003 - DNA, 22 bp, Artificial Sequence
  chemically synthesized
tttcagtgttttcaaaaacttc

SEQ ID NO: 13004 - DNA, 22 bp, Artificial Sequence
  chemically synthesized
tcagtgttttcaaaaacttctc

SEQ ID NO: 13005 - DNA, 22 bp, Artificial Sequence
  chemically synthesized
cagtgttttcaaaaacttctcg

SEQ ID NO: 13006 - DNA, 22 bp, Artificial Sequence
  chemically synthesized
agtgttttcaaaaacttctcgt

SEQ ID NO: 13007 - DNA, 22 bp, Artificial Sequence
  chemically synthesized
tcaaaaacttctcgtgcttctt

SEQ ID NO: 13008 - DNA, 22 bp, Artificial Sequence
  chemically synthesized
caaaaacttctcgtgcttcttc

SEQ ID NO: 13009 - DNA, 22 bp, Artificial Sequence
  chemically synthesized
aaaaacttctcgtgcttcttca

SEQ ID NO: 13010 - DNA, 22 bp, Artificial Sequence
  chemically synthesized
ctcgtgcttcttcaaaactaca

SEQ ID NO: 13011 - DNA, 22 bp, Artificial Sequence
  chemically synthesized
tcgtgcttcttcaaaactacac

SEQ ID NO: 13012 - DNA, 22 bp, Artificial Sequence
  chemically synthesized
gtgcttcttcaaaactacactt

SEQ ID NO: 13013 - DNA, 22 bp, Artificial Sequence
  chemically synthesized
cttcaaaactacacttttcttc

SEQ ID NO: 13014 - DNA, 22 bp, Artificial Sequence
  chemically synthesized
ttcaaaactacacttttcttcc

SEQ ID NO: 13015 - DNA, 22 bp, Artificial Sequence
  chemically synthesized
caaaactacacttttcttccat

SEQ ID NO: 13016 - DNA, 22 bp, Artificial Sequence
  chemically synthesized
aaaactacacttttcttccata

SEQ ID NO: 13017 - DNA, 22 bp, Artificial Sequence
  chemically synthesized
cacttttcttccatacattctc

SEQ ID NO: 13018 - DNA, 22 bp, Artificial Sequence
  chemically synthesized
ttcttccatacattctctctca

SEQ ID NO: 13019 - DNA, 22 bp, Artificial Sequence
  chemically synthesized
tcttccatacattctctctcaa

SEQ ID NO: 13020 - DNA, 22 bp, Artificial Sequence
  chemically synthesized
cttccatacattctctctcaag

SEQ ID NO: 13021 - DNA, 22 bp, Artificial Sequence
  chemically synthesized
ttccatacattctctctcaagg

SEQ ID NO: 13022 - DNA, 22 bp, Artificial Sequence
  chemically synthesized
ccatacattctctctcaaggtt

SEQ ID NO: 13023 - DNA, 22 bp, Artificial Sequence
  chemically synthesized
catacattctctctcaaggttc

SEQ ID NO: 13024 - DNA, 22 bp, Artificial Sequence
  chemically synthesized
tctctcaaggttcccttgaaca

SEQ ID NO: 13025 - DNA, 22 bp, Artificial Sequence
  chemically synthesized
tctcaaggttcccttgaacaaa

SEQ ID NO: 13026 - DNA, 22 bp, Artificial Sequence
  chemically synthesized
tcaaggttcccttgaacaaact

SEQ ID NO: 13027 - DNA, 22 bp, Artificial Sequence
  chemically synthesized
aaggttcccttgaacaaactct

SEQ ID NO: 13028 - DNA, 22 bp, Artificial Sequence
  chemically synthesized
ccttgaacaaactcttccaatt

SEQ ID NO: 13029 - DNA, 22 bp, Artificial Sequence
  chemically synthesized
gaacaaactcttccaatttacc

SEQ ID NO: 13030 - DNA, 22 bp, Artificial Sequence
  chemically synthesized
aacaaactcttccaatttacct

SEQ ID NO: 13031 - DNA, 22 bp, Artificial Sequence
  chemically synthesized
ttccaatttacctgaattatac

SEQ ID NO: 13032 - DNA, 22 bp, Artificial Sequence
  chemically synthesized
ccaatttacctgaattatacct

SEQ ID NO: 13033 - DNA, 22 bp, Artificial Sequence
  chemically synthesized
caatttacctgaattatacctc

SEQ ID NO: 13034 - DNA, 22 bp, Artificial Sequence
  chemically synthesized
acctgaattatacctctttggc

SEQ ID NO: 13035 - DNA, 22 bp, Artificial Sequence
  chemically synthesized
cctgaattatacctctttggcc

SEQ ID NO: 13036 - DNA, 22 bp, Artificial Sequence
  chemically synthesized
aattatacctctttggccgatt

SEQ ID NO: 13037 - DNA, 22 bp, Artificial Sequence
  chemically synthesized
tacctctttggccgattcagaa

SEQ ID NO: 13038 - DNA, 22 bp, Artificial Sequence
  chemically synthesized
tttggccgattcagaattttgt

SEQ ID NO: 13039 - DNA, 22 bp, Artificial Sequence
  chemically synthesized
tggccgattcagaattttgttg

SEQ ID NO: 13040 - DNA, 22 bp, Artificial Sequence
  chemically synthesized
ggccgattcagaattttgttgg

SEQ ID NO: 13041 - DNA, 22 bp, Artificial Sequence
  chemically synthesized
gccgattcagaattttgttggc

SEQ ID NO: 13042 - DNA, 22 bp, Artificial Sequence
  chemically synthesized
agaattttgttggcgttttcat

SEQ ID NO: 13043 - DNA, 22 bp, Artificial Sequence
  chemically synthesized
tgttggcgttttcatgatcaag

SEQ ID NO: 13044 - DNA, 22 bp, Artificial Sequence
  chemically synthesized
gttggcgttttcatgatcaaga

SEQ ID NO: 13045 - DNA, 22 bp, Artificial Sequence
  chemically synthesized
ttggcgttttcatgatcaagaa

SEQ ID NO: 13046 - DNA, 22 bp, Artificial Sequence
  chemically synthesized
gcgttttcatgatcaagaaaaa

SEQ ID NO: 13047 - DNA, 22 bp, Artificial Sequence
  chemically synthesized
tcatgatcaagaaaaactgaaa

SEQ ID NO: 13048 - DNA, 22 bp, Artificial Sequence
  chemically synthesized
catgatcaagaaaaactgaaat

SEQ ID NO: 13049 - DNA, 22 bp, Artificial Sequence
  chemically synthesized
atgatcaagaaaaactgaaatg

SEQ ID NO: 13050 - DNA, 22 bp, Artificial Sequence
  chemically synthesized
aaatgtaaaagaataattcttt

SEQ ID NO: 13051 - DNA, 22 bp, Artificial Sequence
  chemically synthesized
tttagttttagcaaaaaagaaa

SEQ ID NO: 13052 - DNA, 22 bp, Artificial Sequence
  chemically synthesized
tagttttagcaaaaaagaaaac

SEQ ID NO: 13053 - DNA, 22 bp, Artificial Sequence
  chemically synthesized
agttttagcaaaaaagaaaaca

SEQ ID NO: 13054 - DNA, 22 bp, Artificial Sequence
  chemically synthesized
gttttagcaaaaaagaaaacat

SEQ ID NO: 13055 - DNA, 22 bp, Artificial Sequence
  chemically synthesized
tagcaaaaaagaaaacatcatg

SEQ ID NO: 13056 - DNA, 22 bp, Artificial Sequence
  chemically synthesized
agcaaaaaagaaaacatcatga

SEQ ID NO: 13057 - DNA, 22 bp, Artificial Sequence
  chemically synthesized
gcaaaaaagaaaacatcatgaa

SEQ ID NO: 13058 - DNA, 22 bp, Artificial Sequence
  chemically synthesized
tacatctcttaagaaagtcttt

SEQ ID NO: 13059 - DNA, 22 bp, Artificial Sequence
  chemically synthesized
acatctcttaagaaagtctttg

SEQ ID NO: 13060 - DNA, 22 bp, Artificial Sequence
  chemically synthesized
catctcttaagaaagtctttgt

SEQ ID NO: 13061 - DNA, 22 bp, Artificial Sequence
  chemically synthesized
ttaagaaagtctttgtttttaa

SEQ ID NO: 13062 - DNA, 22 bp, Artificial Sequence
  chemically synthesized
aagaaagtctttgtttttaatc

SEQ ID NO: 13063 - DNA, 22 bp, Artificial Sequence
  chemically synthesized
agaaagtctttgtttttaatcc

SEQ ID NO: 13064 - DNA, 22 bp, Artificial Sequence
  chemically synthesized
tgtttttaatccaaataatctg

SEQ ID NO: 13065 - DNA, 22 bp, Artificial Sequence
  chemically synthesized
gtttttaatccaaataatctga

SEQ ID NO: 13066 - DNA, 22 bp, Artificial Sequence
  chemically synthesized
tttttaatccaaataatctgaa

SEQ ID NO: 13067 - DNA, 22 bp, Artificial Sequence
  chemically synthesized
ttaatccaaataatctgaaagc

SEQ ID NO: 13068 - DNA, 22 bp, Artificial Sequence
  chemically synthesized
taatccaaataatctgaaagcc

SEQ ID NO: 13069 - DNA, 22 bp, Artificial Sequence
  chemically synthesized
aatccaaataatctgaaagcca

SEQ ID NO: 13070 - DNA, 22 bp, Artificial Sequence
  chemically synthesized
atccaaataatctgaaagccaa

SEQ ID NO: 13071 - DNA, 22 bp, Artificial Sequence
  chemically synthesized
aaagccaatttctctttagggc

SEQ ID NO: 13072 - DNA, 22 bp, Artificial Sequence
  chemically synthesized
ctctttagggcatggagccaaa

SEQ ID NO: 13073 - DNA, 22 bp, Artificial Sequence
  chemically synthesized
tctttagggcatggagccaaaa

SEQ ID NO: 13074 - DNA, 22 bp, Artificial Sequence
  chemically synthesized
tttagggcatggagccaaaatc

SEQ ID NO: 13075 - DNA, 22 bp, Artificial Sequence
  chemically synthesized
tagggcatggagccaaaatctg

SEQ ID NO: 13076 - DNA, 22 bp, Artificial Sequence
  chemically synthesized
agggcatggagccaaaatctgt

SEQ ID NO: 13077 - DNA, 22 bp, Artificial Sequence
  chemically synthesized
gggcatggagccaaaatctgtg

SEQ ID NO: 13078 - DNA, 22 bp, Artificial Sequence
  chemically synthesized
tgatgttcccacagtactgtat

SEQ ID NO: 13079 - DNA, 22 bp, Artificial Sequence
  chemically synthesized
ccacagtactgtatacacatgg

SEQ ID NO: 13080 - DNA, 22 bp, Artificial Sequence
  chemically synthesized
tatacacatggagatttaggaa

SEQ ID NO: 13081 - DNA, 22 bp, Artificial Sequence
  chemically synthesized
aggaattaaaattcaattttac

SEQ ID NO: 13082 - DNA, 22 bp, Artificial Sequence
  chemically synthesized
ggaattaaaattcaattttact

SEQ ID NO: 13083 - DNA, 22 bp, Artificial Sequence
  chemically synthesized
aaattcaattttacttttagtc

SEQ ID NO: 13084 - DNA, 22 bp, Artificial Sequence
  chemically synthesized
aattttacttttagtcaagaga

SEQ ID NO: 13085 - DNA, 22 bp, Artificial Sequence
  chemically synthesized
tacttttagtcaagagaattcc

SEQ ID NO: 13086 - DNA, 22 bp, Artificial Sequence
  chemically synthesized
acttttagtcaagagaattcca

SEQ ID NO: 13087 - DNA, 22 bp, Artificial Sequence
  chemically synthesized
cttttagtcaagagaattccag

SEQ ID NO: 13088 - DNA, 22 bp, Artificial Sequence
  chemically synthesized
ttagtcaagagaattccagtaa

SEQ ID NO: 13089 - DNA, 22 bp, Artificial Sequence
  chemically synthesized
tagtcaagagaattccagtaat

SEQ ID NO: 13090 - DNA, 22 bp, Artificial Sequence
  chemically synthesized
agtcaagagaattccagtaata

SEQ ID NO: 13091 - DNA, 22 bp, Artificial Sequence
  chemically synthesized
gtcaagagaattccagtaataa

SEQ ID NO: 13092 - DNA, 22 bp, Artificial Sequence
  chemically synthesized
cagtaataaaaggtcagatttc

SEQ ID NO: 13093 - DNA, 22 bp, Artificial Sequence
  chemically synthesized
ctaatcatatttgaatttactt

SEQ ID NO: 13094 - DNA, 22 bp, Artificial Sequence
  chemically synthesized
taatcatatttgaatttacttt

SEQ ID NO: 13095 - DNA, 22 bp, Artificial Sequence
  chemically synthesized
atcatatttgaatttactttgg

SEQ ID NO: 13096 - DNA, 22 bp, Artificial Sequence
  chemically synthesized
gaatttactttggatgaaaaag

SEQ ID NO: 13097 - DNA, 22 bp, Artificial Sequence
  chemically synthesized
aatttactttggatgaaaaaga

SEQ ID NO: 13098 - DNA, 22 bp, Artificial Sequence
  chemically synthesized
actttggatgaaaaagaaagtt

SEQ ID NO: 13099 - DNA, 22 bp, Artificial Sequence
  chemically synthesized
ctttggatgaaaaagaaagttc

SEQ ID NO: 13100 - DNA, 22 bp, Artificial Sequence
  chemically synthesized
tggatgaaaaagaaagttctca

SEQ ID NO: 13101 - DNA, 22 bp, Artificial Sequence
  chemically synthesized
ggatgaaaaagaaagttctcaa

SEQ ID NO: 13102 - DNA, 22 bp, Artificial Sequence
  chemically synthesized
gatgaaaaagaaagttctcaaa

SEQ ID NO: 13103 - DNA, 22 bp, Artificial Sequence
  chemically synthesized
tcaaatgagcggttaacttcac

SEQ ID NO: 13104 - DNA, 22 bp, Artificial Sequence
  chemically synthesized
aaatgagcggttaacttcacac

SEQ ID NO: 13105 - DNA, 22 bp, Artificial Sequence
  chemically synthesized
acttcacactttgtcatcactt

SEQ ID NO: 13106 - DNA, 22 bp, Artificial Sequence
  chemically synthesized
cacactttgtcatcacttgaaa

SEQ ID NO: 13107 - DNA, 22 bp, Artificial Sequence
  chemically synthesized
acactttgtcatcacttgaaaa

SEQ ID NO: 13108 - DNA, 22 bp, Artificial Sequence
  chemically synthesized
tgtcatcacttgaaaatagctc

SEQ ID NO: 13109 - DNA, 22 bp, Artificial Sequence
  chemically synthesized
gtcatcacttgaaaatagctca

SEQ ID NO: 13110 - DNA, 22 bp, Artificial Sequence
  chemically synthesized
tcatcacttgaaaatagctcat

SEQ ID NO: 13111 - DNA, 22 bp, Artificial Sequence
  chemically synthesized
gaaaatagctcattgaggatct

SEQ ID NO: 13112 - DNA, 22 bp, Artificial Sequence
  chemically synthesized
aaaatagctcattgaggatctt

SEQ ID NO: 13113 - DNA, 22 bp, Artificial Sequence
  chemically synthesized
attgaggatctttgcaaagtga

SEQ ID NO: 13114 - DNA, 22 bp, Artificial Sequence
  chemically synthesized
aggatctttgcaaagtgatcca

SEQ ID NO: 13115 - DNA, 22 bp, Artificial Sequence
  chemically synthesized
tgcaaagtgatccatcaccctg

SEQ ID NO: 13116 - DNA, 22 bp, Artificial Sequence
  chemically synthesized
gcaaagtgatccatcaccctgg

SEQ ID NO: 13117 - DNA, 22 bp, Artificial Sequence
  chemically synthesized
caaagtgatccatcaccctggc

SEQ ID NO: 13118 - DNA, 22 bp, Artificial Sequence
  chemically synthesized
gctgggctgttttcagaatatg

SEQ ID NO: 13119 - DNA, 22 bp, Artificial Sequence
  chemically synthesized
ggctgttttcagaatatggttg

SEQ ID NO: 13120 - DNA, 22 bp, Artificial Sequence
  chemically synthesized
ttttcagaatatggttgcccaa

SEQ ID NO: 13121 - DNA, 22 bp, Artificial Sequence
  chemically synthesized
tcagaatatggttgcccaaatg

SEQ ID NO: 13122 - DNA, 22 bp, Artificial Sequence
  chemically synthesized
cagaatatggttgcccaaatga

SEQ ID NO: 13123 - DNA, 22 bp, Artificial Sequence
  chemically synthesized
agaatatggttgcccaaatgac

SEQ ID NO: 13124 - DNA, 22 bp, Artificial Sequence
  chemically synthesized
cccaaatgactttgaacaaatg

SEQ ID NO: 13125 - DNA, 22 bp, Artificial Sequence
  chemically synthesized
tgaacaaatgtctcctgaagaa

SEQ ID NO: 13126 - DNA, 22 bp, Artificial Sequence
  chemically synthesized
gaacaaatgtctcctgaagaac

SEQ ID NO: 13127 - DNA, 22 bp, Artificial Sequence
  chemically synthesized
aacaaatgtctcctgaagaaca

SEQ ID NO: 13128 - DNA, 22 bp, Artificial Sequence
  chemically synthesized
ctgaagaacagaagcctaatta

SEQ ID NO: 13129 - DNA, 22 bp, Artificial Sequence
  chemically synthesized
aagaacagaagcctaattatgg

SEQ ID NO: 13130 - DNA, 22 bp, Artificial Sequence
  chemically synthesized
attatggtccagctgcaaatgt

SEQ ID NO: 13131 - DNA, 22 bp, Artificial Sequence
  chemically synthesized
tggtccagctgcaaatgtgacc

SEQ ID NO: 13132 - DNA, 22 bp, Artificial Sequence
  chemically synthesized
caaatgtgaccccagtgtctgt

SEQ ID NO: 13133 - DNA, 22 bp, Artificial Sequence
  chemically synthesized
tcactagatgttaaagaaaaat

SEQ ID NO: 13134 - DNA, 22 bp, Artificial Sequence
  chemically synthesized
gatgttaaagaaaaatcactgc

SEQ ID NO: 13135 - DNA, 22 bp, Artificial Sequence
  chemically synthesized
aagaaaaatcactgcattaatt

SEQ ID NO: 13136 - DNA, 22 bp, Artificial Sequence
  chemically synthesized
cattaatttaaaaaagcaattt

SEQ ID NO: 13137 - DNA, 22 bp, Artificial Sequence
  chemically synthesized
atttaaaaaagcaatttcagat

SEQ ID NO: 13138 - DNA, 22 bp, Artificial Sequence
  chemically synthesized
aaaaaagcaatttcagatcaac

SEQ ID NO: 13139 - DNA, 22 bp, Artificial Sequence
  chemically synthesized
aaaaagcaatttcagatcaaca

SEQ ID NO: 13140 - DNA, 22 bp, Artificial Sequence
  chemically synthesized
cagatcaacagcacctttggtt

SEQ ID NO: 13141 - DNA, 22 bp, Artificial Sequence
  chemically synthesized
agatcaacagcacctttggttg

SEQ ID NO: 13142 - DNA, 22 bp, Artificial Sequence
  chemically synthesized
tggttggcaagtgttataggaa

SEQ ID NO: 13143 - DNA, 22 bp, Artificial Sequence
  chemically synthesized
ggttggcaagtgttataggaat

SEQ ID NO: 13144 - DNA, 22 bp, Artificial Sequence
  chemically synthesized
gttggcaagtgttataggaatt

SEQ ID NO: 13145 - DNA, 22 bp, Artificial Sequence
  chemically synthesized
gcaagtgttataggaattgcag

SEQ ID NO: 13146 - DNA, 22 bp, Artificial Sequence
  chemically synthesized
taggaattgcagtgatttaagc

SEQ ID NO: 13147 - DNA, 22 bp, Artificial Sequence
  chemically synthesized
cagtgatttaagcatctctcta

SEQ ID NO: 13148 - DNA, 22 bp, Artificial Sequence
  chemically synthesized
aagcatctctctagaattcagg

SEQ ID NO: 13149 - DNA, 22 bp, Artificial Sequence
  chemically synthesized
agcatctctctagaattcagga

SEQ ID NO: 13150 - DNA, 22 bp, Artificial Sequence
  chemically synthesized
tctagaattcaggatatgtttt

SEQ ID NO: 13151 - DNA, 22 bp, Artificial Sequence
  chemically synthesized
tagaattcaggatatgtttttt

SEQ ID NO: 13152 - DNA, 22 bp, Artificial Sequence
  chemically synthesized
gaattcaggatatgtttttttt

SEQ ID NO: 13153 - DNA, 22 bp, Artificial Sequence
  chemically synthesized
aggatatgttttttttaagcta

SEQ ID NO: 13154 - DNA, 22 bp, Artificial Sequence
  chemically synthesized
tttttaagctacatctacctag

SEQ ID NO: 13155 - DNA, 22 bp, Artificial Sequence
  chemically synthesized
ttttaagctacatctacctagt

SEQ ID NO: 13156 - DNA, 22 bp, Artificial Sequence
  chemically synthesized
tttaagctacatctacctagtc

SEQ ID NO: 13157 - DNA, 22 bp, Artificial Sequence
  chemically synthesized
ttaagctacatctacctagtct

SEQ ID NO: 13158 - DNA, 22 bp, Artificial Sequence
  chemically synthesized
taagctacatctacctagtctg

SEQ ID NO: 13159 - DNA, 22 bp, Artificial Sequence
  chemically synthesized
aagctacatctacctagtctga

SEQ ID NO: 13160 - DNA, 22 bp, Artificial Sequence
  chemically synthesized
agctacatctacctagtctgaa

SEQ ID NO: 13161 - DNA, 22 bp, Artificial Sequence
  chemically synthesized
catctacctagtctgaagagac

SEQ ID NO: 13162 - DNA, 22 bp, Artificial Sequence
  chemically synthesized
cctagtctgaagagacactcct

SEQ ID NO: 13163 - DNA, 22 bp, Artificial Sequence
  chemically synthesized
gtctgaagagacactcctgaac

SEQ ID NO: 13164 - DNA, 22 bp, Artificial Sequence
  chemically synthesized
aagagacactcctgaactctgg

SEQ ID NO: 13165 - DNA, 22 bp, Artificial Sequence
  chemically synthesized
ctgaactctggaggatagatgt

SEQ ID NO: 13166 - DNA, 22 bp, Artificial Sequence
  chemically synthesized
aactctggaggatagatgtctc

SEQ ID NO: 13167 - DNA, 22 bp, Artificial Sequence
  chemically synthesized
tggaggatagatgtctctatct

SEQ ID NO: 13168 - DNA, 22 bp, Artificial Sequence
  chemically synthesized
gaggatagatgtctctatctga

SEQ ID NO: 13169 - DNA, 22 bp, Artificial Sequence
  chemically synthesized
tatctgaatcatatttctcctt

SEQ ID NO: 13170 - DNA, 22 bp, Artificial Sequence
  chemically synthesized
tctgaatcatatttctccttcc

SEQ ID NO: 13171 - DNA, 22 bp, Artificial Sequence
  chemically synthesized
aatcatatttctccttccctcc

SEQ ID NO: 13172 - DNA, 22 bp, Artificial Sequence
  chemically synthesized
ctccttccctccctccttcctc

SEQ ID NO: 13173 - DNA, 22 bp, Artificial Sequence
  chemically synthesized
tccttccctccctccttcctct

SEQ ID NO: 13174 - DNA, 22 bp, Artificial Sequence
  chemically synthesized
cttccctccctccttcctctcc

SEQ ID NO: 13175 - DNA, 22 bp, Artificial Sequence
  chemically synthesized
ccctccctccttcctctcctct

SEQ ID NO: 13176 - DNA, 22 bp, Artificial Sequence
  chemically synthesized
cctccctccttcctctcctctc

SEQ ID NO: 13177 - DNA, 22 bp, Artificial Sequence
  chemically synthesized
cctccttcctctcctctcctct

SEQ ID NO: 13178 - DNA, 22 bp, Artificial Sequence
  chemically synthesized
cttcctctcctctcctctctct

SEQ ID NO: 13179 - DNA, 22 bp, Artificial Sequence
  chemically synthesized
cctctcctctcctctctctctc

SEQ ID NO: 13180 - DNA, 22 bp, Artificial Sequence
  chemically synthesized
ctctcctctcctctctctctct

SEQ ID NO: 13181 - DNA, 22 bp, Artificial Sequence
  chemically synthesized
tcctctcctctctctctctctc

SEQ ID NO: 13182 - DNA, 22 bp, Artificial Sequence
  chemically synthesized
ctctcctctctctctctctcta

SEQ ID NO: 13183 - DNA, 22 bp, Artificial Sequence
  chemically synthesized
tcctctctctctctctctatgt

SEQ ID NO: 13184 - DNA, 22 bp, Artificial Sequence
  chemically synthesized
ctctctctctctctctatgtgt

SEQ ID NO: 13185 - DNA, 22 bp, Artificial Sequence
  chemically synthesized
tctctctctctctatgtgtgtg

SEQ ID NO: 13186 - DNA, 22 bp, Artificial Sequence
  chemically synthesized
tctctctctctatgtgtgtgtg

SEQ ID NO: 13187 - DNA, 22 bp, Artificial Sequence
  chemically synthesized
tctctctctatgtgtgtgtgtg

SEQ ID NO: 13188 - DNA, 22 bp, Artificial Sequence
  chemically synthesized
tctctctatgtgtgtgtgtgta

SEQ ID NO: 13189 - DNA, 22 bp, Artificial Sequence
  chemically synthesized
tctctatgtgtgtgtgtgtaca

SEQ ID NO: 13190 - DNA, 22 bp, Artificial Sequence
  chemically synthesized
tctatgtgtgtgtgtgtacata

SEQ ID NO: 13191 - DNA, 22 bp, Artificial Sequence
  chemically synthesized
tatgtgtgtgtgtgtacatata

SEQ ID NO: 13192 - DNA, 22 bp, Artificial Sequence
  chemically synthesized
tgtgtgtgtgtgtacatatata

SEQ ID NO: 13193 - DNA, 22 bp, Artificial Sequence
  chemically synthesized
gctgcacaatgacattttggtc

SEQ ID NO: 13194 - DNA, 22 bp, Artificial Sequence
  chemically synthesized
ctgcacaatgacattttggtca

SEQ ID NO: 13195 - DNA, 22 bp, Artificial Sequence
  chemically synthesized
cacaatgacattttggtcaatg

SEQ ID NO: 13196 - DNA, 22 bp, Artificial Sequence
  chemically synthesized
tggtcaatgatggaccacatta

SEQ ID NO: 13197 - DNA, 22 bp, Artificial Sequence
  chemically synthesized
ggtcaatgatggaccacattat

SEQ ID NO: 13198 - DNA, 22 bp, Artificial Sequence
  chemically synthesized
gtcaatgatggaccacattata

SEQ ID NO: 13199 - DNA, 22 bp, Artificial Sequence
  chemically synthesized
tacgacagtggtcccataaggt

SEQ ID NO: 13200 - DNA, 22 bp, Artificial Sequence
  chemically synthesized
taatactgtattttcactgtac

SEQ ID NO: 13201 - DNA, 22 bp, Artificial Sequence
  chemically synthesized
tattttcactgtaccttttcta

SEQ ID NO: 13202 - DNA, 22 bp, Artificial Sequence
  chemically synthesized
tcactgtaccttttctatgttt

SEQ ID NO: 13203 - DNA, 22 bp, Artificial Sequence
  chemically synthesized
cactgtaccttttctatgttta

SEQ ID NO: 13204 - DNA, 22 bp, Artificial Sequence
  chemically synthesized
actgtaccttttctatgtttag

SEQ ID NO: 13205 - DNA, 22 bp, Artificial Sequence
  chemically synthesized
taccttttctatgtttagatac

SEQ ID NO: 13206 - DNA, 22 bp, Artificial Sequence
  chemically synthesized
ttctatgtttagatacacaaat

SEQ ID NO: 13207 - DNA, 22 bp, Artificial Sequence
  chemically synthesized
tctatgtttagatacacaaata

SEQ ID NO: 13208 - DNA, 22 bp, Artificial Sequence
  chemically synthesized
ctatgtttagatacacaaatac

SEQ ID NO: 13209 - DNA, 22 bp, Artificial Sequence
  chemically synthesized
tatgtttagatacacaaatacc

SEQ ID NO: 13210 - DNA, 22 bp, Artificial Sequence
  chemically synthesized
tgtttagatacacaaataccac

SEQ ID NO: 13211 - DNA, 22 bp, Artificial Sequence
  chemically synthesized
agatacacaaataccactgtta

SEQ ID NO: 13212 - DNA, 22 bp, Artificial Sequence
  chemically synthesized
gatacacaaataccactgttac

SEQ ID NO: 13213 - DNA, 22 bp, Artificial Sequence
  chemically synthesized
ttaccattgcctacagtgttca

SEQ ID NO: 13214 - DNA, 22 bp, Artificial Sequence
  chemically synthesized
ccattgcctacagtgttcagta

SEQ ID NO: 13215 - DNA, 22 bp, Artificial Sequence
  chemically synthesized
cctacagtgttcagtacagtca

SEQ ID NO: 13216 - DNA, 22 bp, Artificial Sequence
  chemically synthesized
cagtgttcagtacagtcacatg

SEQ ID NO: 13217 - DNA, 22 bp, Artificial Sequence
  chemically synthesized
agtacagtcacatgctgtacag

SEQ ID NO: 13218 - DNA, 22 bp, Artificial Sequence
  chemically synthesized
tacaggtttgcagcccaggagc

SEQ ID NO: 13219 - DNA, 22 bp, Artificial Sequence
  chemically synthesized
gcagcccaggagcctaggagca

SEQ ID NO: 13220 - DNA, 22 bp, Artificial Sequence
  chemically synthesized
cagcccaggagcctaggagcaa

SEQ ID NO: 13221 - DNA, 22 bp, Artificial Sequence
  chemically synthesized
ggagcaataggccacatcaata

SEQ ID NO: 13222 - DNA, 22 bp, Artificial Sequence
  chemically synthesized
ggtatgtagtaagctataccat

SEQ ID NO: 13223 - DNA, 22 bp, Artificial Sequence
  chemically synthesized
taccatttaggtttaggtaagt

SEQ ID NO: 13224 - DNA, 22 bp, Artificial Sequence
  chemically synthesized
aggtttaggtaagtacactcta

SEQ ID NO: 13225 - DNA, 22 bp, Artificial Sequence
  chemically synthesized
ggtttaggtaagtacactctat

SEQ ID NO: 13226 - DNA, 22 bp, Artificial Sequence
  chemically synthesized
aggtaagtacactctattatgt

SEQ ID NO: 13227 - DNA, 22 bp, Artificial Sequence
  chemically synthesized
ggtaagtacactctattatgtt

SEQ ID NO: 13228 - DNA, 22 bp, Artificial Sequence
  chemically synthesized
tattatgttcgcacaatgatga

SEQ ID NO: 13229 - DNA, 22 bp, Artificial Sequence
  chemically synthesized
ttatgttcgcacaatgatgaaa

SEQ ID NO: 13230 - DNA, 22 bp, Artificial Sequence
  chemically synthesized
tgttcgcacaatgatgaaattg

SEQ ID NO: 13231 - DNA, 22 bp, Artificial Sequence
  chemically synthesized
gcacaatgatgaaattgcttaa

SEQ ID NO: 13232 - DNA, 22 bp, Artificial Sequence
  chemically synthesized
cttaatgacacatttctcagaa

SEQ ID NO: 13233 - DNA, 22 bp, Artificial Sequence
  chemically synthesized
aatgacacatttctcagaatat

SEQ ID NO: 13234 - DNA, 22 bp, Artificial Sequence
  chemically synthesized
atgacacatttctcagaatata

SEQ ID NO: 13235 - DNA, 22 bp, Artificial Sequence
  chemically synthesized
ctcagaatatatccccattgtt

SEQ ID NO: 13236 - DNA, 22 bp, Artificial Sequence
  chemically synthesized
tcagaatatatccccattgtta

SEQ ID NO: 13237 - DNA, 22 bp, Artificial Sequence
  chemically synthesized
agaatatatccccattgttaag

SEQ ID NO: 13238 - DNA, 22 bp, Artificial Sequence
  chemically synthesized
ttaaggaatgcatggctgtata

SEQ ID NO: 13239 - DNA, 22 bp, Artificial Sequence
  chemically synthesized
aggaatgcatggctgtatacac

SEQ ID NO: 13240 - DNA, 22 bp, Artificial Sequence
  chemically synthesized
tatacacacacatgtgtttgtg

SEQ ID NO: 13241 - DNA, 22 bp, Artificial Sequence
  chemically synthesized
gtgtgttttcatgtatatacat

SEQ ID NO: 13242 - DNA, 22 bp, Artificial Sequence
  chemically synthesized
tgtgttttcatgtatatacata

SEQ ID NO: 13243 - DNA, 22 bp, Artificial Sequence
  chemically synthesized
tcatgtatatacatatatgtgt

SEQ ID NO: 13244 - DNA, 22 bp, Artificial Sequence
  chemically synthesized
catgtatatacatatatgtgtg

SEQ ID NO: 13245 - DNA, 22 bp, Artificial Sequence
  chemically synthesized
atgtatatacatatatgtgtgt

SEQ ID NO: 13246 - DNA, 22 bp, Artificial Sequence
  chemically synthesized
ataacagggactcaagaagttg

SEQ ID NO: 13247 - DNA, 22 bp, Artificial Sequence
  chemically synthesized
aagaagttgcctggagttgttc

SEQ ID NO: 13248 - DNA, 22 bp, Artificial Sequence
  chemically synthesized
cctggagttgttcctttcttca

SEQ ID NO: 13249 - DNA, 22 bp, Artificial Sequence
  chemically synthesized
gagttgttcctttcttcaaggg

SEQ ID NO: 13250 - DNA, 22 bp, Artificial Sequence
  chemically synthesized
ttcctttcttcaagggtctagc

SEQ ID NO: 13251 - DNA, 22 bp, Artificial Sequence
  chemically synthesized
ctttcttcaagggtctagcaat

SEQ ID NO: 13252 - DNA, 22 bp, Artificial Sequence
  chemically synthesized
tcttcaagggtctagcaatata

SEQ ID NO: 13253 - DNA, 22 bp, Artificial Sequence
  chemically synthesized
cttcaagggtctagcaatatat

SEQ ID NO: 13254 - DNA, 22 bp, Artificial Sequence
  chemically synthesized
ttcaagggtctagcaatatatc

SEQ ID NO: 13255 - DNA, 22 bp, Artificial Sequence
  chemically synthesized
caagggtctagcaatatatctg

SEQ ID NO: 13256 - DNA, 22 bp, Artificial Sequence
  chemically synthesized
aagggtctagcaatatatctga

SEQ ID NO: 13257 - DNA, 22 bp, Artificial Sequence
  chemically synthesized
gcaatatatctgataccatctc

SEQ ID NO: 13258 - DNA, 22 bp, Artificial Sequence
  chemically synthesized
ataccatctcaagaggaccaag

SEQ ID NO: 13259 - DNA, 22 bp, Artificial Sequence
  chemically synthesized
aagaggaccaagggcttataag

SEQ ID NO: 13260 - DNA, 22 bp, Artificial Sequence
  chemically synthesized
ataagatgaactttctggggta

SEQ ID NO: 13261 - DNA, 22 bp, Artificial Sequence
  chemically synthesized
taagatgaactttctggggtat

SEQ ID NO: 13262 - DNA, 22 bp, Artificial Sequence
  chemically synthesized
tctggggtatttgggactactt

SEQ ID NO: 13263 - DNA, 22 bp, Artificial Sequence
  chemically synthesized
ctggggtatttgggactacttc

SEQ ID NO: 13264 - DNA, 22 bp, Artificial Sequence
  chemically synthesized
tggggtatttgggactacttcc

SEQ ID NO: 13265 - DNA, 22 bp, Artificial Sequence
  chemically synthesized
gggtatttgggactacttcctg

SEQ ID NO: 13266 - DNA, 22 bp, Artificial Sequence
  chemically synthesized
gggactacttcctgattaactc

SEQ ID NO: 13267 - DNA, 22 bp, Artificial Sequence
  chemically synthesized
ggactacttcctgattaactcc

SEQ ID NO: 13268 - DNA, 22 bp, Artificial Sequence
  chemically synthesized
cttcctgattaactccaaaaag

SEQ ID NO: 13269 - DNA, 22 bp, Artificial Sequence
  chemically synthesized
cctgattaactccaaaaaggaa

SEQ ID NO: 13270 - DNA, 22 bp, Artificial Sequence
  chemically synthesized
ctgattaactccaaaaaggaag

SEQ ID NO: 13271 - DNA, 22 bp, Artificial Sequence
  chemically synthesized
attaactccaaaaaggaagaga

SEQ ID NO: 13272 - DNA, 22 bp, Artificial Sequence
  chemically synthesized
actccaaaaaggaagagaaagg

SEQ ID NO: 13273 - DNA, 22 bp, Artificial Sequence
  chemically synthesized
caaaaaggaagagaaaggaaag

SEQ ID NO: 13274 - DNA, 22 bp, Artificial Sequence
  chemically synthesized
aactttcttcccttattttcat

SEQ ID NO: 13275 - DNA, 22 bp, Artificial Sequence
  chemically synthesized
tcttcccttattttcattgcag

SEQ ID NO: 13276 - DNA, 22 bp, Artificial Sequence
  chemically synthesized
cttcccttattttcattgcagc

SEQ ID NO: 13277 - DNA, 22 bp, Artificial Sequence
  chemically synthesized
ttcccttattttcattgcagct

SEQ ID NO: 13278 - DNA, 22 bp, Artificial Sequence
  chemically synthesized
cccttattttcattgcagctgt

SEQ ID NO: 13279 - DNA, 22 bp, Artificial Sequence
  chemically synthesized
ccttattttcattgcagctgtt

SEQ ID NO: 13280 - DNA, 22 bp, Artificial Sequence
  chemically synthesized
attttcattgcagctgttcact

SEQ ID NO: 13281 - DNA, 22 bp, Artificial Sequence
  chemically synthesized
ttttcattgcagctgttcactt

SEQ ID NO: 13282 - DNA, 22 bp, Artificial Sequence
  chemically synthesized
tcattgcagctgttcactttat

SEQ ID NO: 13283 - DNA, 22 bp, Artificial Sequence
  chemically synthesized
cattgcagctgttcactttatg

SEQ ID NO: 13284 - DNA, 22 bp, Artificial Sequence
  chemically synthesized
attgcagctgttcactttatgg

SEQ ID NO: 13285 - DNA, 22 bp, Artificial Sequence
  chemically synthesized
cagctgttcactttatggagtg

SEQ ID NO: 13286 - DNA, 22 bp, Artificial Sequence
  chemically synthesized
ttcactttatggagtgttctag

SEQ ID NO: 13287 - DNA, 22 bp, Artificial Sequence
  chemically synthesized
actttatggagtgttctagtcc

SEQ ID NO: 13288 - DNA, 22 bp, Artificial Sequence
  chemically synthesized
tatggagtgttctagtcccttg

SEQ ID NO: 13289 - DNA, 22 bp, Artificial Sequence
  chemically synthesized
atggagtgttctagtcccttga

SEQ ID NO: 13290 - DNA, 22 bp, Artificial Sequence
  chemically synthesized
tggagtgttctagtcccttgac

SEQ ID NO: 13291 - DNA, 22 bp, Artificial Sequence
  chemically synthesized
tagtcccttgacatccctgctt

SEQ ID NO: 13292 - DNA, 22 bp, Artificial Sequence
  chemically synthesized
gtcccttgacatccctgctttt

SEQ ID NO: 13293 - DNA, 22 bp, Artificial Sequence
  chemically synthesized
gacatccctgcttttcccttgc

SEQ ID NO: 13294 - DNA, 22 bp, Artificial Sequence
  chemically synthesized
acatccctgcttttcccttgct

SEQ ID NO: 13295 - DNA, 22 bp, Artificial Sequence
  chemically synthesized
cttttcccttgctctgcaagtt

SEQ ID NO: 13296 - DNA, 22 bp, Artificial Sequence
  chemically synthesized
ttcccttgctctgcaagttcct

SEQ ID NO: 13297 - DNA, 22 bp, Artificial Sequence
  chemically synthesized
tcccttgctctgcaagttcctt

SEQ ID NO: 13298 - DNA, 22 bp, Artificial Sequence
  chemically synthesized
cccttgctctgcaagttccttt

SEQ ID NO: 13299 - DNA, 22 bp, Artificial Sequence
  chemically synthesized
ccttgctctgcaagttcctttt

SEQ ID NO: 13300 - DNA, 22 bp, Artificial Sequence
  chemically synthesized
gctctgcaagttccttttgggc

SEQ ID NO: 13301 - DNA, 22 bp, Artificial Sequence
  chemically synthesized
ctctgcaagttccttttgggct

SEQ ID NO: 13302 - DNA, 22 bp, Artificial Sequence
  chemically synthesized
tgcaagttccttttgggctcac

SEQ ID NO: 13303 - DNA, 22 bp, Artificial Sequence
  chemically synthesized
caagttccttttgggctcactt

SEQ ID NO: 13304 - DNA, 22 bp, Artificial Sequence
  chemically synthesized
cttttgggctcactttttttct

SEQ ID NO: 13305 - DNA, 22 bp, Artificial Sequence
  chemically synthesized
ttgggctcactttttttctttg

SEQ ID NO: 13306 - DNA, 22 bp, Artificial Sequence
  chemically synthesized
tgggctcactttttttctttga

SEQ ID NO: 13307 - DNA, 22 bp, Artificial Sequence
  chemically synthesized
gggctcactttttttctttgaa

SEQ ID NO: 13308 - DNA, 22 bp, Artificial Sequence
  chemically synthesized
ggctcactttttttctttgaat

SEQ ID NO: 13309 - DNA, 22 bp, Artificial Sequence
  chemically synthesized
actttttttctttgaatttagc

SEQ ID NO: 13310 - DNA, 22 bp, Artificial Sequence
  chemically synthesized
tttttctttgaatttagcctag

SEQ ID NO: 13311 - DNA, 22 bp, Artificial Sequence
  chemically synthesized
ttttctttgaatttagcctaga

SEQ ID NO: 13312 - DNA, 22 bp, Artificial Sequence
  chemically synthesized
tttctttgaatttagcctagac

SEQ ID NO: 13313 - DNA, 22 bp, Artificial Sequence
  chemically synthesized
ttctttgaatttagcctagact

SEQ ID NO: 13314 - DNA, 22 bp, Artificial Sequence
  chemically synthesized
tctttgaatttagcctagactt

SEQ ID NO: 13315 - DNA, 22 bp, Artificial Sequence
  chemically synthesized
ctttgaatttagcctagacttt

SEQ ID NO: 13316 - DNA, 22 bp, Artificial Sequence
  chemically synthesized
tttgaatttagcctagactttt

SEQ ID NO: 13317 - DNA, 22 bp, Artificial Sequence
  chemically synthesized
tgaatttagcctagactttttc

SEQ ID NO: 13318 - DNA, 22 bp, Artificial Sequence
  chemically synthesized
gaatttagcctagactttttct

SEQ ID NO: 13319 - DNA, 22 bp, Artificial Sequence
  chemically synthesized
aatttagcctagactttttctc

SEQ ID NO: 13320 - DNA, 22 bp, Artificial Sequence
  chemically synthesized
agcctagactttttctcttcaa

SEQ ID NO: 13321 - DNA, 22 bp, Artificial Sequence
  chemically synthesized
gcctagactttttctcttcaac

SEQ ID NO: 13322 - DNA, 22 bp, Artificial Sequence
  chemically synthesized
gactttttctcttcaactcttt

SEQ ID NO: 13323 - DNA, 22 bp, Artificial Sequence
  chemically synthesized
tttctcttcaactctttttttt

SEQ ID NO: 13324 - DNA, 22 bp, Artificial Sequence
  chemically synthesized
ttctcttcaactcttttttttt

SEQ ID NO: 13325 - DNA, 22 bp, Artificial Sequence
  chemically synthesized
tctcttcaactctttttttttt

SEQ ID NO: 13326 - DNA, 22 bp, Artificial Sequence
  chemically synthesized
ctcttcaactcttttttttttg

SEQ ID NO: 13327 - DNA, 22 bp, Artificial Sequence
  chemically synthesized
tcttcaactcttttttttttga

SEQ ID NO: 13328 - DNA, 22 bp, Artificial Sequence
  chemically synthesized
ttcaactcttttttttttgaca

SEQ ID NO: 13329 - DNA, 22 bp, Artificial Sequence
  chemically synthesized
caactcttttttttttgacaga

SEQ ID NO: 13330 - DNA, 22 bp, Artificial Sequence
  chemically synthesized
aactcttttttttttgacagag

SEQ ID NO: 13331 - DNA, 22 bp, Artificial Sequence
  chemically synthesized
ttttttttttgacagagtcttg

SEQ ID NO: 13332 - DNA, 22 bp, Artificial Sequence
  chemically synthesized
ttttttttgacagagtcttgct

SEQ ID NO: 13333 - DNA, 22 bp, Artificial Sequence
  chemically synthesized
tttttttgacagagtcttgctc

SEQ ID NO: 13334 - DNA, 22 bp, Artificial Sequence
  chemically synthesized
ttttttgacagagtcttgctct

SEQ ID NO: 13335 - DNA, 22 bp, Artificial Sequence
  chemically synthesized
tttttgacagagtcttgctctg

SEQ ID NO: 13336 - DNA, 22 bp, Artificial Sequence
  chemically synthesized
ttttgacagagtcttgctctgt

SEQ ID NO: 13337 - DNA, 22 bp, Artificial Sequence
  chemically synthesized
tttgacagagtcttgctctgtc

SEQ ID NO: 13338 - DNA, 22 bp, Artificial Sequence
  chemically synthesized
ttgacagagtcttgctctgtcg

SEQ ID NO: 13339 - DNA, 22 bp, Artificial Sequence
  chemically synthesized
tgacagagtcttgctctgtcgc

SEQ ID NO: 13340 - DNA, 22 bp, Artificial Sequence
  chemically synthesized
gacagagtcttgctctgtcgcc

SEQ ID NO: 13341 - DNA, 22 bp, Artificial Sequence
  chemically synthesized
acagagtcttgctctgtcgccc

SEQ ID NO: 13342 - DNA, 22 bp, Artificial Sequence
  chemically synthesized
gctctgtcgcccaggctggagt

SEQ ID NO: 13343 - DNA, 22 bp, Artificial Sequence
  chemically synthesized
ctctgtcgcccaggctggagtg

SEQ ID NO: 13344 - DNA, 22 bp, Artificial Sequence
  chemically synthesized
tgtcgcccaggctggagtgcag

SEQ ID NO: 13345 - DNA, 22 bp, Artificial Sequence
  chemically synthesized
tcgcccaggctggagtgcagtg

SEQ ID NO: 13346 - DNA, 22 bp, Artificial Sequence
  chemically synthesized
gagtgcagtggtgcgatctcag

SEQ ID NO: 13347 - DNA, 22 bp, Artificial Sequence
  chemically synthesized
agctcactgcaacctccatctc

SEQ ID NO: 13348 - DNA, 22 bp, Artificial Sequence
  chemically synthesized
actgcaacctccatctcccagg

SEQ ID NO: 13349 - DNA, 22 bp, Artificial Sequence
  chemically synthesized
caacctccatctcccaggttca

SEQ ID NO: 13350 - DNA, 22 bp, Artificial Sequence
  chemically synthesized
catctcccaggttcaagctatt

SEQ ID NO: 13351 - DNA, 22 bp, Artificial Sequence
  chemically synthesized
ccaggttcaagctattctcctg

SEQ ID NO: 13352 - DNA, 22 bp, Artificial Sequence
  chemically synthesized
aagctattctcctgcctcagcc

SEQ ID NO: 13353 - DNA, 22 bp, Artificial Sequence
  chemically synthesized
ttctcctgcctcagcctcccaa

SEQ ID NO: 13354 - DNA, 22 bp, Artificial Sequence
  chemically synthesized
tcctgcctcagcctcccaagta

SEQ ID NO: 13355 - DNA, 22 bp, Artificial Sequence
  chemically synthesized
ctgcctcagcctcccaagtagc

SEQ ID NO: 13356 - DNA, 22 bp, Artificial Sequence
  chemically synthesized
cctcagcctcccaagtagctgg

SEQ ID NO: 13357 - DNA, 22 bp, Artificial Sequence
  chemically synthesized
agcctcccaagtagctgggatt

SEQ ID NO: 13358 - DNA, 22 bp, Artificial Sequence
  chemically synthesized
ccaagtagctgggattacaggc

SEQ ID NO: 13359 - DNA, 22 bp, Artificial Sequence
  chemically synthesized
ggattacaggcacccgccacca

SEQ ID NO: 13360 - DNA, 22 bp, Artificial Sequence
  chemically synthesized
caggcacccgccaccatgccca

SEQ ID NO: 13361 - DNA, 22 bp, Artificial Sequence
  chemically synthesized
atttttgtatttttagtaaagc

SEQ ID NO: 13362 - DNA, 22 bp, Artificial Sequence
  chemically synthesized
ttgtatttttagtaaagccggg

SEQ ID NO: 13363 - DNA, 22 bp, Artificial Sequence
  chemically synthesized
tgtatttttagtaaagccgggg

SEQ ID NO: 13364 - DNA, 22 bp, Artificial Sequence
  chemically synthesized
gtatttttagtaaagccggggt

SEQ ID NO: 13365 - DNA, 22 bp, Artificial Sequence
  chemically synthesized
tatttttagtaaagccggggtt

SEQ ID NO: 13366 - DNA, 22 bp, Artificial Sequence
  chemically synthesized
ttagtaaagccggggtttcacc

SEQ ID NO: 13367 - DNA, 22 bp, Artificial Sequence
  chemically synthesized
tagtaaagccggggtttcacca

SEQ ID NO: 13368 - DNA, 22 bp, Artificial Sequence
  chemically synthesized
agtaaagccggggtttcaccat

SEQ ID NO: 13369 - DNA, 22 bp, Artificial Sequence
  chemically synthesized
gtaaagccggggtttcaccatt

SEQ ID NO: 13370 - DNA, 22 bp, Artificial Sequence
  chemically synthesized
caccatttcaccttgttggcca

SEQ ID NO: 13371 - DNA, 22 bp, Artificial Sequence
  chemically synthesized
accatttcaccttgttggccag

SEQ ID NO: 13372 - DNA, 22 bp, Artificial Sequence
  chemically synthesized
caccttgttggccaggctggtg

SEQ ID NO: 13373 - DNA, 22 bp, Artificial Sequence
  chemically synthesized
accttgttggccaggctggtgt

SEQ ID NO: 13374 - DNA, 22 bp, Artificial Sequence
  chemically synthesized
gttggccaggctggtgtcgaac

SEQ ID NO: 13375 - DNA, 22 bp, Artificial Sequence
  chemically synthesized
ttggccaggctggtgtcgaact

SEQ ID NO: 13376 - DNA, 22 bp, Artificial Sequence
  chemically synthesized
gccaggctggtgtcgaactcct

SEQ ID NO: 13377 - DNA, 22 bp, Artificial Sequence
  chemically synthesized
gtgtcgaactcctgacctcaag

SEQ ID NO: 13378 - DNA, 22 bp, Artificial Sequence
  chemically synthesized
ctgacctcaagtgatctgcctg

SEQ ID NO: 13379 - DNA, 22 bp, Artificial Sequence
  chemically synthesized
acctcaagtgatctgcctgcct

SEQ ID NO: 13380 - DNA, 22 bp, Artificial Sequence
  chemically synthesized
aagtgatctgcctgcctgggcc

SEQ ID NO: 13381 - DNA, 22 bp, Artificial Sequence
  chemically synthesized
cctgcctgggcctctgaaagtg

SEQ ID NO: 13382 - DNA, 22 bp, Artificial Sequence
  chemically synthesized
cctgggcctctgaaagtgctgg

SEQ ID NO: 13383 - DNA, 22 bp, Artificial Sequence
  chemically synthesized
ggcctctgaaagtgctgggatt

SEQ ID NO: 13384 - DNA, 22 bp, Artificial Sequence
  chemically synthesized
tgaaagtgctgggattataggt

SEQ ID NO: 13385 - DNA, 22 bp, Artificial Sequence
  chemically synthesized
aaagtgctgggattataggtgt

SEQ ID NO: 13386 - DNA, 22 bp, Artificial Sequence
  chemically synthesized
ggattataggtgtgagccacca

SEQ ID NO: 13387 - DNA, 22 bp, Artificial Sequence
  chemically synthesized
taggtgtgagccaccatgccag

SEQ ID NO: 13388 - DNA, 22 bp, Artificial Sequence
  chemically synthesized
tcttcaactcttcattggccat

SEQ ID NO: 13389 - DNA, 22 bp, Artificial Sequence
  chemically synthesized
ttcaactcttcattggccatat

SEQ ID NO: 13390 - DNA, 22 bp, Artificial Sequence
  chemically synthesized
caactcttcattggccatattt

SEQ ID NO: 13391 - DNA, 22 bp, Artificial Sequence
  chemically synthesized
aactcttcattggccatatttc

SEQ ID NO: 13392 - DNA, 22 bp, Artificial Sequence
  chemically synthesized
ttcattggccatatttctcaat

SEQ ID NO: 13393 - DNA, 22 bp, Artificial Sequence
  chemically synthesized
cattggccatatttctcaattt

SEQ ID NO: 13394 - DNA, 22 bp, Artificial Sequence
  chemically synthesized
attggccatatttctcaatttc

SEQ ID NO: 13395 - DNA, 22 bp, Artificial Sequence
  chemically synthesized
gccatatttctcaatttccttc

SEQ ID NO: 13396 - DNA, 22 bp, Artificial Sequence
  chemically synthesized
ctcaatttccttcactcgtttg

SEQ ID NO: 13397 - DNA, 22 bp, Artificial Sequence
  chemically synthesized
tcaatttccttcactcgtttgc

SEQ ID NO: 13398 - DNA, 22 bp, Artificial Sequence
  chemically synthesized
aatttccttcactcgtttgcaa

SEQ ID NO: 13399 - DNA, 22 bp, Artificial Sequence
  chemically synthesized
ccttcactcgtttgcaatgctg

SEQ ID NO: 13400 - DNA, 22 bp, Artificial Sequence
  chemically synthesized
cttcactcgtttgcaatgctgt

SEQ ID NO: 13401 - DNA, 22 bp, Artificial Sequence
  chemically synthesized
cactcgtttgcaatgctgtgcc

SEQ ID NO: 13402 - DNA, 22 bp, Artificial Sequence
  chemically synthesized
actcgtttgcaatgctgtgccc

SEQ ID NO: 13403 - DNA, 22 bp, Artificial Sequence
  chemically synthesized
gtttgcaatgctgtgcccaccc

SEQ ID NO: 13404 - DNA, 22 bp, Artificial Sequence
  chemically synthesized
gcaatgctgtgcccaccctgca

SEQ ID NO: 13405 - DNA, 22 bp, Artificial Sequence
  chemically synthesized
caatgctgtgcccaccctgcaa

SEQ ID NO: 13406 - DNA, 22 bp, Artificial Sequence
  chemically synthesized
tgcccaccctgcaatcctagcc

SEQ ID NO: 13407 - DNA, 22 bp, Artificial Sequence
  chemically synthesized
caatcctagcccctaaattgga

SEQ ID NO: 13408 - DNA, 22 bp, Artificial Sequence
  chemically synthesized
gcccctaaattggagcagccat

SEQ ID NO: 13409 - DNA, 22 bp, Artificial Sequence
  chemically synthesized
aattggagcagccatctgcctt

SEQ ID NO: 13410 - DNA, 22 bp, Artificial Sequence
  chemically synthesized
gagcagccatctgccttcatcc

SEQ ID NO: 13411 - DNA, 22 bp, Artificial Sequence
  chemically synthesized
ccttcatccttctcttcccaga

SEQ ID NO: 13412 - DNA, 22 bp, Artificial Sequence
  chemically synthesized
catccttctcttcccagacagc

SEQ ID NO: 13413 - DNA, 22 bp, Artificial Sequence
  chemically synthesized
atccttctcttcccagacagcc

SEQ ID NO: 13414 - DNA, 22 bp, Artificial Sequence
  chemically synthesized
ctcttcccagacagccgaggac

SEQ ID NO: 13415 - DNA, 22 bp, Artificial Sequence
  chemically synthesized
tcttcccagacagccgaggact

SEQ ID NO: 13416 - DNA, 22 bp, Artificial Sequence
  chemically synthesized
ttcccagacagccgaggactgt

SEQ ID NO: 13417 - DNA, 22 bp, Artificial Sequence
  chemically synthesized
cccagacagccgaggactgtga

SEQ ID NO: 13418 - DNA, 22 bp, Artificial Sequence
  chemically synthesized
ccagacagccgaggactgtgaa

SEQ ID NO: 13419 - DNA, 22 bp, Artificial Sequence
  chemically synthesized
tgaaggaaaaaaatcaccaaaa

SEQ ID NO: 13420 - DNA, 22 bp, Artificial Sequence
  chemically synthesized
atgcctcacagcctccacccac

SEQ ID NO: 13421 - DNA, 22 bp, Artificial Sequence
  chemically synthesized
acagcctccacccacctctctg

SEQ ID NO: 13422 - DNA, 22 bp, Artificial Sequence
  chemically synthesized
cacccacctctctgctcagcaa

SEQ ID NO: 13423 - DNA, 22 bp, Artificial Sequence
  chemically synthesized
tctgctcagcaactcatttact

SEQ ID NO: 13424 - DNA, 22 bp, Artificial Sequence
  chemically synthesized
tgctcagcaactcatttacttg

SEQ ID NO: 13425 - DNA, 22 bp, Artificial Sequence
  chemically synthesized
ctcagcaactcatttacttggc

SEQ ID NO: 13426 - DNA, 22 bp, Artificial Sequence
  chemically synthesized
agcaactcatttacttggccct

SEQ ID NO: 13427 - DNA, 22 bp, Artificial Sequence
  chemically synthesized
atttacttggccctggacactc

SEQ ID NO: 13428 - DNA, 22 bp, Artificial Sequence
  chemically synthesized
acttggccctggacactcctaa

SEQ ID NO: 13429 - DNA, 22 bp, Artificial Sequence
  chemically synthesized
cttggccctggacactcctaaa

SEQ ID NO: 13430 - DNA, 22 bp, Artificial Sequence
  chemically synthesized
ggccctggacactcctaaatag

SEQ ID NO: 13431 - DNA, 22 bp, Artificial Sequence
  chemically synthesized
gccctggacactcctaaatagc

SEQ ID NO: 13432 - DNA, 22 bp, Artificial Sequence
  chemically synthesized
gacactcctaaatagcatccat

SEQ ID NO: 13433 - DNA, 22 bp, Artificial Sequence
  chemically synthesized
ctaaatagcatccatgcctgca

SEQ ID NO: 13434 - DNA, 22 bp, Artificial Sequence
  chemically synthesized
aatagcatccatgcctgcatcc

SEQ ID NO: 13435 - DNA, 22 bp, Artificial Sequence
  chemically synthesized
catccatttacagtcgttcctc

SEQ ID NO: 13436 - DNA, 22 bp, Artificial Sequence
  chemically synthesized
acagtcgttcctcagtatccat

SEQ ID NO: 13437 - DNA, 22 bp, Artificial Sequence
  chemically synthesized
cagtcgttcctcagtatccatg

SEQ ID NO: 13438 - DNA, 22 bp, Artificial Sequence
  chemically synthesized
ctcagtatccatggaaaattgg

SEQ ID NO: 13439 - DNA, 22 bp, Artificial Sequence
  chemically synthesized
agtatccatggaaaattggtgg

SEQ ID NO: 13440 - DNA, 22 bp, Artificial Sequence
  chemically synthesized
gtggcaagaccccctgcaaata

SEQ ID NO: 13441 - DNA, 22 bp, Artificial Sequence
  chemically synthesized
caaatatcaagatctgtggatg

SEQ ID NO: 13442 - DNA, 22 bp, Artificial Sequence
  chemically synthesized
tggatgctcaagtctccgatat

SEQ ID NO: 13443 - DNA, 22 bp, Artificial Sequence
  chemically synthesized
aagtctccgatataaaaatggc

SEQ ID NO: 13444 - DNA, 22 bp, Artificial Sequence
  chemically synthesized
cgatataaaaatggcttactat

SEQ ID NO: 13445 - DNA, 22 bp, Artificial Sequence
  chemically synthesized
actatttgcatataacctaaac

SEQ ID NO: 13446 - DNA, 22 bp, Artificial Sequence
  chemically synthesized
ctatttgcatataacctaaaca

SEQ ID NO: 13447 - DNA, 22 bp, Artificial Sequence
  chemically synthesized
tttgcatataacctaaacacat

SEQ ID NO: 13448 - DNA, 22 bp, Artificial Sequence
  chemically synthesized
gcatataacctaaacacatcct

SEQ ID NO: 13449 - DNA, 22 bp, Artificial Sequence
  chemically synthesized
catataacctaaacacatcctc

SEQ ID NO: 13450 - DNA, 22 bp, Artificial Sequence
  chemically synthesized
aacacatcctcctttgtacttt

SEQ ID NO: 13451 - DNA, 22 bp, Artificial Sequence
  chemically synthesized
ctttgtactttaaatcatctct

SEQ ID NO: 13452 - DNA, 22 bp, Artificial Sequence
  chemically synthesized
tgtactttaaatcatctctagg

SEQ ID NO: 13453 - DNA, 22 bp, Artificial Sequence
  chemically synthesized
gtactttaaatcatctctaggt

SEQ ID NO: 13454 - DNA, 22 bp, Artificial Sequence
  chemically synthesized
tactttaaatcatctctaggtt

SEQ ID NO: 13455 - DNA, 22 bp, Artificial Sequence
  chemically synthesized
taaatcatctctaggtttctct

SEQ ID NO: 13456 - DNA, 22 bp, Artificial Sequence
  chemically synthesized
aaatcatctctaggtttctctt

SEQ ID NO: 13457 - DNA, 22 bp, Artificial Sequence
  chemically synthesized
aatcatctctaggtttctctta

SEQ ID NO: 13458 - DNA, 22 bp, Artificial Sequence
  chemically synthesized
taggtttctcttaatagctaat

SEQ ID NO: 13459 - DNA, 22 bp, Artificial Sequence
  chemically synthesized
ggtttctcttaatagctaatac

SEQ ID NO: 13460 - DNA, 22 bp, Artificial Sequence
  chemically synthesized
ctcttaatagctaatacaatgt

SEQ ID NO: 13461 - DNA, 22 bp, Artificial Sequence
  chemically synthesized
tcttaatagctaatacaatgta

SEQ ID NO: 13462 - DNA, 22 bp, Artificial Sequence
  chemically synthesized
ttaatagctaatacaatgtaaa

SEQ ID NO: 13463 - DNA, 22 bp, Artificial Sequence
  chemically synthesized
aatagctaatacaatgtaaatg

SEQ ID NO: 13464 - DNA, 22 bp, Artificial Sequence
  chemically synthesized
atagctaatacaatgtaaatgc

SEQ ID NO: 13465 - DNA, 22 bp, Artificial Sequence
  chemically synthesized
atacaatgtaaatgctatgtaa

SEQ ID NO: 13466 - DNA, 22 bp, Artificial Sequence
  chemically synthesized
tgtaaatagttgttatgctgta

SEQ ID NO: 13467 - DNA, 22 bp, Artificial Sequence
  chemically synthesized
ttatgctgtattgtttagggaa

SEQ ID NO: 13468 - DNA, 22 bp, Artificial Sequence
  chemically synthesized
tgctgtattgtttagggaataa

SEQ ID NO: 13469 - DNA, 22 bp, Artificial Sequence
  chemically synthesized
tattgtttagggaataatgaaa

SEQ ID NO: 13470 - DNA, 22 bp, Artificial Sequence
  chemically synthesized
tttagggaataatgaaagataa

SEQ ID NO: 13471 - DNA, 22 bp, Artificial Sequence
  chemically synthesized
agggaataatgaaagataaaag

SEQ ID NO: 13472 - DNA, 22 bp, Artificial Sequence
  chemically synthesized
gggaataatgaaagataaaaga

SEQ ID NO: 13473 - DNA, 22 bp, Artificial Sequence
  chemically synthesized
tacatgttcagtagagatgcaa

SEQ ID NO: 13474 - DNA, 22 bp, Artificial Sequence
  chemically synthesized
agtagagatgcaaccatccatt

SEQ ID NO: 13475 - DNA, 22 bp, Artificial Sequence
  chemically synthesized
ttttcttgaatatttttgatct

SEQ ID NO: 13476 - DNA, 22 bp, Artificial Sequence
  chemically synthesized
tttcttgaatatttttgatctg

SEQ ID NO: 13477 - DNA, 22 bp, Artificial Sequence
  chemically synthesized
ttcttgaatatttttgatctgc

SEQ ID NO: 13478 - DNA, 22 bp, Artificial Sequence
  chemically synthesized
tcttgaatatttttgatctgca

SEQ ID NO: 13479 - DNA, 22 bp, Artificial Sequence
  chemically synthesized
cttgaatatttttgatctgcag

SEQ ID NO: 13480 - DNA, 22 bp, Artificial Sequence
  chemically synthesized
ttgaatatttttgatctgcagt

SEQ ID NO: 13481 - DNA, 22 bp, Artificial Sequence
  chemically synthesized
gaatatttttgatctgcagtta

SEQ ID NO: 13482 - DNA, 22 bp, Artificial Sequence
  chemically synthesized
aatatttttgatctgcagttaa

SEQ ID NO: 13483 - DNA, 22 bp, Artificial Sequence
  chemically synthesized
ttgatctgcagttaattgaatc

SEQ ID NO: 13484 - DNA, 22 bp, Artificial Sequence
  chemically synthesized
tgatctgcagttaattgaatct

SEQ ID NO: 13485 - DNA, 22 bp, Artificial Sequence
  chemically synthesized
gatctgcagttaattgaatctg

SEQ ID NO: 13486 - DNA, 22 bp, Artificial Sequence
  chemically synthesized
atctgcagttaattgaatctgt

SEQ ID NO: 13487 - DNA, 22 bp, Artificial Sequence
  chemically synthesized
cagttaattgaatctgtggctg

SEQ ID NO: 13488 - DNA, 22 bp, Artificial Sequence
  chemically synthesized
attgaatctgtggctgtggaac

SEQ ID NO: 13489 - DNA, 22 bp, Artificial Sequence
  chemically synthesized
aatctgtggctgtggaactcac

SEQ ID NO: 13490 - DNA, 22 bp, Artificial Sequence
  chemically synthesized
tggctgtggaactcacaaggag

SEQ ID NO: 13491 - DNA, 22 bp, Artificial Sequence
  chemically synthesized
tggaactcacaaggagagctga

SEQ ID NO: 13492 - DNA, 22 bp, Artificial Sequence
  chemically synthesized
acaaggagagctgactgtacag

SEQ ID NO: 13493 - DNA, 22 bp, Artificial Sequence
  chemically synthesized
actgtacagtgtggttgagtga

SEQ ID NO: 13494 - DNA, 22 bp, Artificial Sequence
  chemically synthesized
tacagtgtggttgagtgaaaaa

SEQ ID NO: 13495 - DNA, 22 bp, Artificial Sequence
  chemically synthesized
agtgaaaaaacagactttagaa

SEQ ID NO: 13496 - DNA, 22 bp, Artificial Sequence
  chemically synthesized
tagaatcagatcagacagaaat

SEQ ID NO: 13497 - DNA, 22 bp, Artificial Sequence
  chemically synthesized
agaatcagatcagacagaaata

SEQ ID NO: 13498 - DNA, 22 bp, Artificial Sequence
  chemically synthesized
gaatcagatcagacagaaatag

SEQ ID NO: 13499 - DNA, 22 bp, Artificial Sequence
  chemically synthesized
gaatcaagtatctgcctcctct

SEQ ID NO: 13500 - DNA, 22 bp, Artificial Sequence
  chemically synthesized
aatcaagtatctgcctcctcta

SEQ ID NO: 13501 - DNA, 22 bp, Artificial Sequence
  chemically synthesized
cctcctctagacctgtgacctt

SEQ ID NO: 13502 - DNA, 22 bp, Artificial Sequence
  chemically synthesized
ctctagacctgtgaccttggac

SEQ ID NO: 13503 - DNA, 22 bp, Artificial Sequence
  chemically synthesized
tagacctgtgaccttggacaag

SEQ ID NO: 13504 - DNA, 22 bp, Artificial Sequence
  chemically synthesized
gacctgtgaccttggacaagtc

SEQ ID NO: 13505 - DNA, 22 bp, Artificial Sequence
  chemically synthesized
tgaccttggacaagtcacacaa

SEQ ID NO: 13506 - DNA, 22 bp, Artificial Sequence
  chemically synthesized
ggacaagtcacacaagctctga

SEQ ID NO: 13507 - DNA, 22 bp, Artificial Sequence
  chemically synthesized
gacaagtcacacaagctctgaa

SEQ ID NO: 13508 - DNA, 22 bp, Artificial Sequence
  chemically synthesized
tgaaccttaactttgtcaaatg

SEQ ID NO: 13509 - DNA, 22 bp, Artificial Sequence
  chemically synthesized
aaccttaactttgtcaaatgta

SEQ ID NO: 13510 - DNA, 22 bp, Artificial Sequence
  chemically synthesized
aactttgtcaaatgtaaattag

SEQ ID NO: 13511 - DNA, 22 bp, Artificial Sequence
  chemically synthesized
actttgtcaaatgtaaattagg

SEQ ID NO: 13512 - DNA, 22 bp, Artificial Sequence
  chemically synthesized
tgtcaaatgtaaattaggttta

SEQ ID NO: 13513 - DNA, 22 bp, Artificial Sequence
  chemically synthesized
gtcaaatgtaaattaggtttaa

SEQ ID NO: 13514 - DNA, 22 bp, Artificial Sequence
  chemically synthesized
tcaaatgtaaattaggtttaac

SEQ ID NO: 13515 - DNA, 22 bp, Artificial Sequence
  chemically synthesized
ggtttaacagtagtataataag

SEQ ID NO: 13516 - DNA, 22 bp, Artificial Sequence
  chemically synthesized
aacagtagtataataagaatat

SEQ ID NO: 13517 - DNA, 22 bp, Artificial Sequence
  chemically synthesized
acagtagtataataagaatatc

SEQ ID NO: 13518 - DNA, 22 bp, Artificial Sequence
  chemically synthesized
tctcacaggtgttggcaggatc

SEQ ID NO: 13519 - DNA, 22 bp, Artificial Sequence
  chemically synthesized
acaggtgttggcaggatcagtg

SEQ ID NO: 13520 - DNA, 22 bp, Artificial Sequence
  chemically synthesized
gcaggatcagtgagacaatatg

SEQ ID NO: 13521 - DNA, 22 bp, Artificial Sequence
  chemically synthesized
gttatctctttttctccctact

SEQ ID NO: 13522 - DNA, 22 bp, Artificial Sequence
  chemically synthesized
tctctttttctccctactcctt

SEQ ID NO: 13523 - DNA, 22 bp, Artificial Sequence
  chemically synthesized
tttttctccctactcctttcat

SEQ ID NO: 13524 - DNA, 22 bp, Artificial Sequence
  chemically synthesized
tttctccctactcctttcatgt

SEQ ID NO: 13525 - DNA, 22 bp, Artificial Sequence
  chemically synthesized
ttctccctactcctttcatgtt

SEQ ID NO: 13526 - DNA, 22 bp, Artificial Sequence
  chemically synthesized
tctccctactcctttcatgttg

SEQ ID NO: 13527 - DNA, 22 bp, Artificial Sequence
  chemically synthesized
ctccctactcctttcatgttgg

SEQ ID NO: 13528 - DNA, 22 bp, Artificial Sequence
  chemically synthesized
tccctactcctttcatgttggc

SEQ ID NO: 13529 - DNA, 22 bp, Artificial Sequence
  chemically synthesized
cctactcctttcatgttggccc

SEQ ID NO: 13530 - DNA, 22 bp, Artificial Sequence
  chemically synthesized
ctcctttcatgttggccctact

SEQ ID NO: 13531 - DNA, 22 bp, Artificial Sequence
  chemically synthesized
ctttcatgttggccctactttc

SEQ ID NO: 13532 - DNA, 22 bp, Artificial Sequence
  chemically synthesized
tcatgttggccctactttcttc

SEQ ID NO: 13533 - DNA, 22 bp, Artificial Sequence
  chemically synthesized
catgttggccctactttcttct

SEQ ID NO: 13534 - DNA, 22 bp, Artificial Sequence
  chemically synthesized
atgttggccctactttcttctg

SEQ ID NO: 13535 - DNA, 22 bp, Artificial Sequence
  chemically synthesized
gccctactttcttctgttttaa

SEQ ID NO: 13536 - DNA, 22 bp, Artificial Sequence
  chemically synthesized
ctttcttctgttttaaatttct

SEQ ID NO: 13537 - DNA, 22 bp, Artificial Sequence
  chemically synthesized
tcttctgttttaaatttctcaa

SEQ ID NO: 13538 - DNA, 22 bp, Artificial Sequence
  chemically synthesized
cttctgttttaaatttctcaat

SEQ ID NO: 13539 - DNA, 22 bp, Artificial Sequence
  chemically synthesized
ttctgttttaaatttctcaatt

SEQ ID NO: 13540 - DNA, 22 bp, Artificial Sequence
  chemically synthesized
ctgttttaaatttctcaattct

SEQ ID NO: 13541 - DNA, 22 bp, Artificial Sequence
  chemically synthesized
tgttttaaatttctcaattctc

SEQ ID NO: 13542 - DNA, 22 bp, Artificial Sequence
  chemically synthesized
ttttaaatttctcaattctctt

SEQ ID NO: 13543 - DNA, 22 bp, Artificial Sequence
  chemically synthesized
taaatttctcaattctctttag

SEQ ID NO: 13544 - DNA, 22 bp, Artificial Sequence
  chemically synthesized
aaatttctcaattctctttagc

SEQ ID NO: 13545 - DNA, 22 bp, Artificial Sequence
  chemically synthesized
aatttctcaattctctttagct

SEQ ID NO: 13546 - DNA, 22 bp, Artificial Sequence
  chemically synthesized
ctcaattctctttagctcttta

SEQ ID NO: 13547 - DNA, 22 bp, Artificial Sequence
  chemically synthesized
tcaattctctttagctctttaa

SEQ ID NO: 13548 - DNA, 22 bp, Artificial Sequence
  chemically synthesized
aattctctttagctctttaata

SEQ ID NO: 13549 - DNA, 22 bp, Artificial Sequence
  chemically synthesized
tctttagctctttaataacttc

SEQ ID NO: 13550 - DNA, 22 bp, Artificial Sequence
  chemically synthesized
tttagctctttaataacttctg

SEQ ID NO: 13551 - DNA, 22 bp, Artificial Sequence
  chemically synthesized
tagctctttaataacttctgtg

SEQ ID NO: 13552 - DNA, 22 bp, Artificial Sequence
  chemically synthesized
agctctttaataacttctgtgt

SEQ ID NO: 13553 - DNA, 22 bp, Artificial Sequence
  chemically synthesized
gctctttaataacttctgtgta

SEQ ID NO: 13554 - DNA, 22 bp, Artificial Sequence
  chemically synthesized
tttaataacttctgtgtagctc

SEQ ID NO: 13555 - DNA, 22 bp, Artificial Sequence
  chemically synthesized
taataacttctgtgtagctctt

SEQ ID NO: 13556 - DNA, 22 bp, Artificial Sequence
  chemically synthesized
aataacttctgtgtagctcttt

SEQ ID NO: 13557 - DNA, 22 bp, Artificial Sequence
  chemically synthesized
ataacttctgtgtagctctttt

SEQ ID NO: 13558 - DNA, 22 bp, Artificial Sequence
  chemically synthesized
ctgtgtagctcttttccttcct

SEQ ID NO: 13559 - DNA, 22 bp, Artificial Sequence
  chemically synthesized
tgtgtagctcttttccttcctt

SEQ ID NO: 13560 - DNA, 22 bp, Artificial Sequence
  chemically synthesized
tgtagctcttttccttccttaa

SEQ ID NO: 13561 - DNA, 22 bp, Artificial Sequence
  chemically synthesized
ttttccttccttaatcacattt

SEQ ID NO: 13562 - DNA, 22 bp, Artificial Sequence
  chemically synthesized
ttccttccttaatcacatttat

SEQ ID NO: 13563 - DNA, 22 bp, Artificial Sequence
  chemically synthesized
tccttccttaatcacatttata

SEQ ID NO: 13564 - DNA, 22 bp, Artificial Sequence
  chemically synthesized
ccttccttaatcacatttatat

SEQ ID NO: 13565 - DNA, 22 bp, Artificial Sequence
  chemically synthesized
cttccttaatcacatttatata

SEQ ID NO: 13566 - DNA, 22 bp, Artificial Sequence
  chemically synthesized
ccttaatcacatttatataatg

SEQ ID NO: 13567 - DNA, 22 bp, Artificial Sequence
  chemically synthesized
cttaatcacatttatataatga

SEQ ID NO: 13568 - DNA, 22 bp, Artificial Sequence
  chemically synthesized
aatcacatttatataatgaaat

SEQ ID NO: 13569 - DNA, 22 bp, Artificial Sequence
  chemically synthesized
atcacatttatataatgaaatg

SEQ ID NO: 13570 - DNA, 22 bp, Artificial Sequence
  chemically synthesized
atataatgaaatgactattgtc

SEQ ID NO: 13571 - DNA, 22 bp, Artificial Sequence
  chemically synthesized
tataatgaaatgactattgtca

SEQ ID NO: 13572 - DNA, 22 bp, Artificial Sequence
  chemically synthesized
ttgtcacaatcaggaatgacct

SEQ ID NO: 13573 - DNA, 22 bp, Artificial Sequence
  chemically synthesized
tcacaatcaggaatgacctaaa

SEQ ID NO: 13574 - DNA, 22 bp, Artificial Sequence
  chemically synthesized
aagaataattttgagtttatgt

SEQ ID NO: 13575 - DNA, 22 bp, Artificial Sequence
  chemically synthesized
tgagtttatgtatttactggct

SEQ ID NO: 13576 - DNA, 22 bp, Artificial Sequence
  chemically synthesized
gagtttatgtatttactggctg

SEQ ID NO: 13577 - DNA, 22 bp, Artificial Sequence
  chemically synthesized
agtttatgtatttactggctgc

SEQ ID NO: 13578 - DNA, 22 bp, Artificial Sequence
  chemically synthesized
atgtatttactggctgctctaa

SEQ ID NO: 13579 - DNA, 22 bp, Artificial Sequence
  chemically synthesized
tgtatttactggctgctctaaa

SEQ ID NO: 13580 - DNA, 22 bp, Artificial Sequence
  chemically synthesized
actggctgctctaaataatttc

SEQ ID NO: 13581 - DNA, 22 bp, Artificial Sequence
  chemically synthesized
ctggctgctctaaataatttct

SEQ ID NO: 13582 - DNA, 22 bp, Artificial Sequence
  chemically synthesized
gctgctctaaataatttctaat

SEQ ID NO: 13583 - DNA, 22 bp, Artificial Sequence
  chemically synthesized
ctctaaataatttctaattgtt

SEQ ID NO: 13584 - DNA, 22 bp, Artificial Sequence
  chemically synthesized
taaataatttctaattgttgat

SEQ ID NO: 13585 - DNA, 22 bp, Artificial Sequence
  chemically synthesized
aataatttctaattgttgatct

SEQ ID NO: 13586 - DNA, 22 bp, Artificial Sequence
  chemically synthesized
ctaattgttgatctctcccttt

SEQ ID NO: 13587 - DNA, 22 bp, Artificial Sequence
  chemically synthesized
taattgttgatctctccctttt

SEQ ID NO: 13588 - DNA, 22 bp, Artificial Sequence
  chemically synthesized
attgttgatctctcccttttta

SEQ ID NO: 13589 - DNA, 22 bp, Artificial Sequence
  chemically synthesized
ttgatctctccctttttaggaa

SEQ ID NO: 13590 - DNA, 22 bp, Artificial Sequence
  chemically synthesized
atctctccctttttaggaaact

SEQ ID NO: 13591 - DNA, 22 bp, Artificial Sequence
  chemically synthesized
tccctttttaggaaactctttt

SEQ ID NO: 13592 - DNA, 22 bp, Artificial Sequence
  chemically synthesized
cctttttaggaaactcttttta

SEQ ID NO: 13593 - DNA, 22 bp, Artificial Sequence
  chemically synthesized
tttaggaaactctttttataat

SEQ ID NO: 13594 - DNA, 22 bp, Artificial Sequence
  chemically synthesized
ttaggaaactctttttataata

SEQ ID NO: 13595 - DNA, 22 bp, Artificial Sequence
  chemically synthesized
taggaaactctttttataataa

SEQ ID NO: 13596 - DNA, 22 bp, Artificial Sequence
  chemically synthesized
aggaaactctttttataataat

SEQ ID NO: 13597 - DNA, 22 bp, Artificial Sequence
  chemically synthesized
ggaaactctttttataataatc

SEQ ID NO: 13598 - DNA, 22 bp, Artificial Sequence
  chemically synthesized
tttttataataatcactctatt

SEQ ID NO: 13599 - DNA, 22 bp, Artificial Sequence
  chemically synthesized
tttataataatcactctattct

SEQ ID NO: 13600 - DNA, 22 bp, Artificial Sequence
  chemically synthesized
ttataataatcactctattctg

SEQ ID NO: 13601 - DNA, 22 bp, Artificial Sequence
  chemically synthesized
tataataatcactctattctgg

SEQ ID NO: 13602 - DNA, 22 bp, Artificial Sequence
  chemically synthesized
ataataatcactctattctggt

SEQ ID NO: 13603 - DNA, 22 bp, Artificial Sequence
  chemically synthesized
taataatcactctattctggtt

SEQ ID NO: 13604 - DNA, 22 bp, Artificial Sequence
  chemically synthesized
tattctggttccccgctttgct

SEQ ID NO: 13605 - DNA, 22 bp, Artificial Sequence
  chemically synthesized
ttctggttccccgctttgctct

SEQ ID NO: 13606 - DNA, 22 bp, Artificial Sequence
  chemically synthesized
tggttccccgctttgctctaac

SEQ ID NO: 13607 - DNA, 22 bp, Artificial Sequence
  chemically synthesized
gttccccgctttgctctaactc

SEQ ID NO: 13608 - DNA, 22 bp, Artificial Sequence
  chemically synthesized
cccgctttgctctaactcctgt

SEQ ID NO: 13609 - DNA, 22 bp, Artificial Sequence
  chemically synthesized
tgctctaactcctgttatccat

SEQ ID NO: 13610 - DNA, 22 bp, Artificial Sequence
  chemically synthesized
gctctaactcctgttatccatc

SEQ ID NO: 13611 - DNA, 22 bp, Artificial Sequence
  chemically synthesized
ctctaactcctgttatccatcc

SEQ ID NO: 13612 - DNA, 22 bp, Artificial Sequence
  chemically synthesized
taactcctgttatccatccagc

SEQ ID NO: 13613 - DNA, 22 bp, Artificial Sequence
  chemically synthesized
actcctgttatccatccagcac

SEQ ID NO: 13614 - DNA, 22 bp, Artificial Sequence
  chemically synthesized
ctgttatccatccagcacttga

SEQ ID NO: 13615 - DNA, 22 bp, Artificial Sequence
  chemically synthesized
ttatccatccagcacttgaatt

SEQ ID NO: 13616 - DNA, 22 bp, Artificial Sequence
  chemically synthesized
tccatccagcacttgaattgat

SEQ ID NO: 13617 - DNA, 22 bp, Artificial Sequence
  chemically synthesized
gaattgattaactcctgttcct

SEQ ID NO: 13618 - DNA, 22 bp, Artificial Sequence
  chemically synthesized
aattgattaactcctgttcctc

SEQ ID NO: 13619 - DNA, 22 bp, Artificial Sequence
  chemically synthesized
attaactcctgttcctctccat

SEQ ID NO: 13620 - DNA, 22 bp, Artificial Sequence
  chemically synthesized
actcctgttcctctccatggcc

SEQ ID NO: 13621 - DNA, 22 bp, Artificial Sequence
  chemically synthesized
ctgttcctctccatggccctta

SEQ ID NO: 13622 - DNA, 22 bp, Artificial Sequence
  chemically synthesized
ttcctctccatggcccttaaat

SEQ ID NO: 13623 - DNA, 22 bp, Artificial Sequence
  chemically synthesized
ctctccatggcccttaaatgtc

SEQ ID NO: 13624 - DNA, 22 bp, Artificial Sequence
  chemically synthesized
tccatggcccttaaatgtccag

SEQ ID NO: 13625 - DNA, 22 bp, Artificial Sequence
  chemically synthesized
catggcccttaaatgtccaggg

SEQ ID NO: 13626 - DNA, 22 bp, Artificial Sequence
  chemically synthesized
aaatgtccagggttctcccagg

SEQ ID NO: 13627 - DNA, 22 bp, Artificial Sequence
  chemically synthesized
aatgtccagggttctcccaggc

SEQ ID NO: 13628 - DNA, 22 bp, Artificial Sequence
  chemically synthesized
tcccaggctccagcctcagctt

SEQ ID NO: 13629 - DNA, 22 bp, Artificial Sequence
  chemically synthesized
ccaggctccagcctcagctttt

SEQ ID NO: 13630 - DNA, 22 bp, Artificial Sequence
  chemically synthesized
cagcctcagctttttccttttt

SEQ ID NO: 13631 - DNA, 22 bp, Artificial Sequence
  chemically synthesized
agctttttcctttttcacctta

SEQ ID NO: 13632 - DNA, 22 bp, Artificial Sequence
  chemically synthesized
tttcctttttcaccttatatat

SEQ ID NO: 13633 - DNA, 22 bp, Artificial Sequence
  chemically synthesized
ttcctttttcaccttatatata

SEQ ID NO: 13634 - DNA, 22 bp, Artificial Sequence
  chemically synthesized
tcctttttcaccttatatatac

SEQ ID NO: 13635 - DNA, 22 bp, Artificial Sequence
  chemically synthesized
cctttttcaccttatatatact

SEQ ID NO: 13636 - DNA, 22 bp, Artificial Sequence
  chemically synthesized
ctttttcaccttatatatactt

SEQ ID NO: 13637 - DNA, 22 bp, Artificial Sequence
  chemically synthesized
tttcaccttatatatacttgct

SEQ ID NO: 13638 - DNA, 22 bp, Artificial Sequence
  chemically synthesized
ttcaccttatatatacttgcta

SEQ ID NO: 13639 - DNA, 22 bp, Artificial Sequence
  chemically synthesized
tcaccttatatatacttgctag

SEQ ID NO: 13640 - DNA, 22 bp, Artificial Sequence
  chemically synthesized
caccttatatatacttgctagg

SEQ ID NO: 13641 - DNA, 22 bp, Artificial Sequence
  chemically synthesized
accttatatatacttgctaggg

SEQ ID NO: 13642 - DNA, 22 bp, Artificial Sequence
  chemically synthesized
atatatacttgctagggctggg

SEQ ID NO: 13643 - DNA, 22 bp, Artificial Sequence
  chemically synthesized
tatatacttgctagggctggga

SEQ ID NO: 13644 - DNA, 22 bp, Artificial Sequence
  chemically synthesized
gctagggctgggacaagagtga

SEQ ID NO: 13645 - DNA, 22 bp, Artificial Sequence
  chemically synthesized
ctagggctgggacaagagtgaa

SEQ ID NO: 13646 - DNA, 22 bp, Artificial Sequence
  chemically synthesized
gggctgggacaagagtgaacca

SEQ ID NO: 13647 - DNA, 22 bp, Artificial Sequence
  chemically synthesized
ggacaagagtgaaccaaacaag

SEQ ID NO: 13648 - DNA, 22 bp, Artificial Sequence
  chemically synthesized
aagaggtcctcacttctcgggg

SEQ ID NO: 13649 - DNA, 22 bp, Artificial Sequence
  chemically synthesized
agaggtcctcacttctcggggc

SEQ ID NO: 13650 - DNA, 22 bp, Artificial Sequence
  chemically synthesized
acttctcggggcatacaagtat

SEQ ID NO: 13651 - DNA, 22 bp, Artificial Sequence
  chemically synthesized
ctcggggcatacaagtatattt

SEQ ID NO: 13652 - DNA, 22 bp, Artificial Sequence
  chemically synthesized
tcggggcatacaagtatattta

SEQ ID NO: 13653 - DNA, 22 bp, Artificial Sequence
  chemically synthesized
ggggcatacaagtatatttatg

SEQ ID NO: 13654 - DNA, 22 bp, Artificial Sequence
  chemically synthesized
atgccctacaggccttgcttac

SEQ ID NO: 13655 - DNA, 22 bp, Artificial Sequence
  chemically synthesized
tgccctacaggccttgcttacc

SEQ ID NO: 13656 - DNA, 22 bp, Artificial Sequence
  chemically synthesized
caggccttgcttaccacagtct

SEQ ID NO: 13657 - DNA, 22 bp, Artificial Sequence
  chemically synthesized
gcttaccacagtctagtccggc

SEQ ID NO: 13658 - DNA, 22 bp, Artificial Sequence
  chemically synthesized
cttaccacagtctagtccggcc

SEQ ID NO: 13659 - DNA, 22 bp, Artificial Sequence
  chemically synthesized
accacagtctagtccggccctg

SEQ ID NO: 13660 - DNA, 22 bp, Artificial Sequence
  chemically synthesized
ccacagtctagtccggccctga

SEQ ID NO: 13661 - DNA, 22 bp, Artificial Sequence
  chemically synthesized
gtccggccctgaccctgtcaac

SEQ ID NO: 13662 - DNA, 22 bp, Artificial Sequence
  chemically synthesized
accctgtcaacaaaatttactg

SEQ ID NO: 13663 - DNA, 22 bp, Artificial Sequence
  chemically synthesized
tcaacaaaatttactgagcata

SEQ ID NO: 13664 - DNA, 22 bp, Artificial Sequence
  chemically synthesized
actgagcatacaaccactactg

SEQ ID NO: 13665 - DNA, 22 bp, Artificial Sequence
  chemically synthesized
ctgagcatacaaccactactgc

SEQ ID NO: 13666 - DNA, 22 bp, Artificial Sequence
  chemically synthesized
agcatacaaccactactgccag

SEQ ID NO: 13667 - DNA, 22 bp, Artificial Sequence
  chemically synthesized
ctgccaggcactgtactaggta

SEQ ID NO: 13668 - DNA, 22 bp, Artificial Sequence
  chemically synthesized
ccaggcactgtactaggtatca

SEQ ID NO: 13669 - DNA, 22 bp, Artificial Sequence
  chemically synthesized
tactaggtatcacaatatccat

SEQ ID NO: 13670 - DNA, 22 bp, Artificial Sequence
  chemically synthesized
ggtatcacaatatccatgctca

SEQ ID NO: 13671 - DNA, 22 bp, Artificial Sequence
  chemically synthesized
actctccagatgcccacacacg

SEQ ID NO: 13672 - DNA, 22 bp, Artificial Sequence
  chemically synthesized
tccagatgcccacacacgtggc

SEQ ID NO: 13673 - DNA, 22 bp, Artificial Sequence
  chemically synthesized
cagatgcccacacacgtggctg

SEQ ID NO: 13674 - DNA, 22 bp, Artificial Sequence
  chemically synthesized
taactactgtttacagaacaat

SEQ ID NO: 13675 - DNA, 22 bp, Artificial Sequence
  chemically synthesized
ctgtttacagaacaatgagttc

SEQ ID NO: 13676 - DNA, 22 bp, Artificial Sequence
  chemically synthesized
tttacagaacaatgagttccaa

SEQ ID NO: 13677 - DNA, 22 bp, Artificial Sequence
  chemically synthesized
acagaacaatgagttccaaata

SEQ ID NO: 13678 - DNA, 22 bp, Artificial Sequence
  chemically synthesized
cagaacaatgagttccaaatac

SEQ ID NO: 13679 - DNA, 22 bp, Artificial Sequence
  chemically synthesized
caaatactcacctatagtcaga

SEQ ID NO: 13680 - DNA, 22 bp, Artificial Sequence
  chemically synthesized
acctatagtcagatacgtctcc

SEQ ID NO: 13681 - DNA, 22 bp, Artificial Sequence
  chemically synthesized
tagtcagatacgtctcctgaat

SEQ ID NO: 13682 - DNA, 22 bp, Artificial Sequence
  chemically synthesized
ctgaatttcagattatctttcc

SEQ ID NO: 13683 - DNA, 22 bp, Artificial Sequence
  chemically synthesized
aatttcagattatctttccaac

SEQ ID NO: 13684 - DNA, 22 bp, Artificial Sequence
  chemically synthesized
cagattatctttccaactccct

SEQ ID NO: 13685 - DNA, 22 bp, Artificial Sequence
  chemically synthesized
agattatctttccaactcccta

SEQ ID NO: 13686 - DNA, 22 bp, Artificial Sequence
  chemically synthesized
tctttccaactccctaactgta

SEQ ID NO: 13687 - DNA, 22 bp, Artificial Sequence
  chemically synthesized
tccaactccctaactgtatatc

SEQ ID NO: 13688 - DNA, 22 bp, Artificial Sequence
  chemically synthesized
ccaactccctaactgtatatca

SEQ ID NO: 13689 - DNA, 22 bp, Artificial Sequence
  chemically synthesized
caactccctaactgtatatcat

SEQ ID NO: 13690 - DNA, 22 bp, Artificial Sequence
  chemically synthesized
cctaactgtatatcataatgta

SEQ ID NO: 13691 - DNA, 22 bp, Artificial Sequence
  chemically synthesized
actgtatatcataatgtagcca

SEQ ID NO: 13692 - DNA, 22 bp, Artificial Sequence
  chemically synthesized
tatatcataatgtagccagtaa

SEQ ID NO: 13693 - DNA, 22 bp, Artificial Sequence
  chemically synthesized
atgtatatgtaatgcttctgct

SEQ ID NO: 13694 - DNA, 22 bp, Artificial Sequence
  chemically synthesized
ctgctgtgttggacactgtgct

SEQ ID NO: 13695 - DNA, 22 bp, Artificial Sequence
  chemically synthesized
tgctgtgttggacactgtgctc

SEQ ID NO: 13696 - DNA, 22 bp, Artificial Sequence
  chemically synthesized
ctgtgttggacactgtgctcag

SEQ ID NO: 13697 - DNA, 22 bp, Artificial Sequence
  chemically synthesized
tgttggacactgtgctcagtaa

SEQ ID NO: 13698 - DNA, 22 bp, Artificial Sequence
  chemically synthesized
gacactgtgctcagtaactttg

SEQ ID NO: 13699 - DNA, 22 bp, Artificial Sequence
  chemically synthesized
tgctcagtaactttgcatccat

SEQ ID NO: 13700 - DNA, 22 bp, Artificial Sequence
  chemically synthesized
agtaactttgcatccattatct

SEQ ID NO: 13701 - DNA, 22 bp, Artificial Sequence
  chemically synthesized
tgcatccattatctcacttcat

SEQ ID NO: 13702 - DNA, 22 bp, Artificial Sequence
  chemically synthesized
gcatccattatctcacttcatc

SEQ ID NO: 13703 - DNA, 22 bp, Artificial Sequence
  chemically synthesized
catccattatctcacttcatcc

SEQ ID NO: 13704 - DNA, 22 bp, Artificial Sequence
  chemically synthesized
tctcacttcatcctcacaaaag

SEQ ID NO: 13705 - DNA, 22 bp, Artificial Sequence
  chemically synthesized
acttcatcctcacaaaagtccc

SEQ ID NO: 13706 - DNA, 22 bp, Artificial Sequence
  chemically synthesized
catcctcacaaaagtcccacga

SEQ ID NO: 13707 - DNA, 22 bp, Artificial Sequence
  chemically synthesized
atcctcacaaaagtcccacgag

SEQ ID NO: 13708 - DNA, 22 bp, Artificial Sequence
  chemically synthesized
acaaaagtcccacgagataggc

SEQ ID NO: 13709 - DNA, 22 bp, Artificial Sequence
  chemically synthesized
tcatcttatttttatgaatgag

SEQ ID NO: 13710 - DNA, 22 bp, Artificial Sequence
  chemically synthesized
atttttatgaatgaggaagata

SEQ ID NO: 13711 - DNA, 22 bp, Artificial Sequence
  chemically synthesized
tttttatgaatgaggaagatag

SEQ ID NO: 13712 - DNA, 22 bp, Artificial Sequence
  chemically synthesized
ttatgaatgaggaagatagatt

SEQ ID NO: 13713 - DNA, 22 bp, Artificial Sequence
  chemically synthesized
tatgaatgaggaagatagattc

SEQ ID NO: 13714 - DNA, 22 bp, Artificial Sequence
  chemically synthesized
atgaatgaggaagatagattca

SEQ ID NO: 13715 - DNA, 22 bp, Artificial Sequence
  chemically synthesized
tgaatgaggaagatagattcat

SEQ ID NO: 13716 - DNA, 22 bp, Artificial Sequence
  chemically synthesized
atagaggctaagggctttgccc

SEQ ID NO: 13717 - DNA, 22 bp, Artificial Sequence
  chemically synthesized
agggctttgcccaaggtaacat

SEQ ID NO: 13718 - DNA, 22 bp, Artificial Sequence
  chemically synthesized
tgcccaaggtaacatactaaaa

SEQ ID NO: 13719 - DNA, 22 bp, Artificial Sequence
  chemically synthesized
gcccaaggtaacatactaaaac

SEQ ID NO: 13720 - DNA, 22 bp, Artificial Sequence
  chemically synthesized
cccaaggtaacatactaaaaca

SEQ ID NO: 13721 - DNA, 22 bp, Artificial Sequence
  chemically synthesized
aaacattcaggattcagactct

SEQ ID NO: 13722 - DNA, 22 bp, Artificial Sequence
  chemically synthesized
aggattcagactctggcagtca

SEQ ID NO: 13723 - DNA, 22 bp, Artificial Sequence
  chemically synthesized
agactctggcagtcagactaaa

SEQ ID NO: 13724 - DNA, 22 bp, Artificial Sequence
  chemically synthesized
tggcagtcagactaaagagcca

SEQ ID NO: 13725 - DNA, 22 bp, Artificial Sequence
  chemically synthesized
gcagtcagactaaagagccagt

SEQ ID NO: 13726 - DNA, 22 bp, Artificial Sequence
  chemically synthesized
aagagccagttctcttagacat

SEQ ID NO: 13727 - DNA, 22 bp, Artificial Sequence
  chemically synthesized
tcttagacattattctgtggtc

SEQ ID NO: 13728 - DNA, 22 bp, Artificial Sequence
  chemically synthesized
ttagacattattctgtggtcca

SEQ ID NO: 13729 - DNA, 22 bp, Artificial Sequence
  chemically synthesized
agacattattctgtggtccata

SEQ ID NO: 13730 - DNA, 22 bp, Artificial Sequence
  chemically synthesized
gacattattctgtggtccataa

SEQ ID NO: 13731 - DNA, 22 bp, Artificial Sequence
  chemically synthesized
ttctgtggtccataatcacatc

SEQ ID NO: 13732 - DNA, 22 bp, Artificial Sequence
  chemically synthesized
tgtggtccataatcacatcaaa

SEQ ID NO: 13733 - DNA, 22 bp, Artificial Sequence
  chemically synthesized
tggtccataatcacatcaaaca

SEQ ID NO: 13734 - DNA, 22 bp, Artificial Sequence
  chemically synthesized
tagccatttccccttccatacc

SEQ ID NO: 13735 - DNA, 22 bp, Artificial Sequence
  chemically synthesized
gccatttccccttccataccca

SEQ ID NO: 13736 - DNA, 22 bp, Artificial Sequence
  chemically synthesized
ccccttccatacccagatggtt

SEQ ID NO: 13737 - DNA, 22 bp, Artificial Sequence
  chemically synthesized
cccttccatacccagatggtta

SEQ ID NO: 13738 - DNA, 22 bp, Artificial Sequence
  chemically synthesized
ccatacccagatggttaagtca

SEQ ID NO: 13739 - DNA, 22 bp, Artificial Sequence
  chemically synthesized
catacccagatggttaagtcat

SEQ ID NO: 13740 - DNA, 22 bp, Artificial Sequence
  chemically synthesized
agtcataccacttctacttcct

SEQ ID NO: 13741 - DNA, 22 bp, Artificial Sequence
  chemically synthesized
ctacttccttaatatcatttga

SEQ ID NO: 13742 - DNA, 22 bp, Artificial Sequence
  chemically synthesized
tacttccttaatatcatttgaa

SEQ ID NO: 13743 - DNA, 22 bp, Artificial Sequence
  chemically synthesized
cttccttaatatcatttgaact

SEQ ID NO: 13744 - DNA, 22 bp, Artificial Sequence
  chemically synthesized
ccttaatatcatttgaactccc

SEQ ID NO: 13745 - DNA, 22 bp, Artificial Sequence
  chemically synthesized
cttaatatcatttgaactcccc

SEQ ID NO: 13746 - DNA, 22 bp, Artificial Sequence
  chemically synthesized
aatatcatttgaactcccctct

SEQ ID NO: 13747 - DNA, 22 bp, Artificial Sequence
  chemically synthesized
atatcatttgaactcccctctt

SEQ ID NO: 13748 - DNA, 22 bp, Artificial Sequence
  chemically synthesized
gaactcccctctttttttgtac

SEQ ID NO: 13749 - DNA, 22 bp, Artificial Sequence
  chemically synthesized
aactcccctctttttttgtact

SEQ ID NO: 13750 - DNA, 22 bp, Artificial Sequence
  chemically synthesized
ccctctttttttgtactgctac

SEQ ID NO: 13751 - DNA, 22 bp, Artificial Sequence
  chemically synthesized
tttttttgtactgctactgttc

SEQ ID NO: 13752 - DNA, 22 bp, Artificial Sequence
  chemically synthesized
tttttgtactgctactgttcag

SEQ ID NO: 13753 - DNA, 22 bp, Artificial Sequence
  chemically synthesized
ttttgtactgctactgttcagg

SEQ ID NO: 13754 - DNA, 22 bp, Artificial Sequence
  chemically synthesized
tttgtactgctactgttcaggt

SEQ ID NO: 13755 - DNA, 22 bp, Artificial Sequence
  chemically synthesized
ttgtactgctactgttcaggtt

SEQ ID NO: 13756 - DNA, 22 bp, Artificial Sequence
  chemically synthesized
tgtactgctactgttcaggttc

SEQ ID NO: 13757 - DNA, 22 bp, Artificial Sequence
  chemically synthesized
gtactgctactgttcaggttct

SEQ ID NO: 13758 - DNA, 22 bp, Artificial Sequence
  chemically synthesized
tactgctactgttcaggttcta

SEQ ID NO: 13759 - DNA, 22 bp, Artificial Sequence
  chemically synthesized
ctactgttcaggttctagcctt

SEQ ID NO: 13760 - DNA, 22 bp, Artificial Sequence
  chemically synthesized
ctgttcaggttctagcctttat

SEQ ID NO: 13761 - DNA, 22 bp, Artificial Sequence
  chemically synthesized
ttcaggttctagcctttatgtc

SEQ ID NO: 13762 - DNA, 22 bp, Artificial Sequence
  chemically synthesized
aggttctagcctttatgtctcc

SEQ ID NO: 13763 - DNA, 22 bp, Artificial Sequence
  chemically synthesized
tagcctttatgtctcccgcaga

SEQ ID NO: 13764 - DNA, 22 bp, Artificial Sequence
  chemically synthesized
gcctttatgtctcccgcagata

SEQ ID NO: 13765 - DNA, 22 bp, Artificial Sequence
  chemically synthesized
tatgtctcccgcagataattgc

SEQ ID NO: 13766 - DNA, 22 bp, Artificial Sequence
  chemically synthesized
atgtctcccgcagataattgca

SEQ ID NO: 13767 - DNA, 22 bp, Artificial Sequence
  chemically synthesized
tgtctcccgcagataattgcaa

SEQ ID NO: 13768 - DNA, 22 bp, Artificial Sequence
  chemically synthesized
ccgcagataattgcaatagtct

SEQ ID NO: 13769 - DNA, 22 bp, Artificial Sequence
  chemically synthesized
caatagtctcaggactgctctc

SEQ ID NO: 13770 - DNA, 22 bp, Artificial Sequence
  chemically synthesized
aggactgctctctcctagtctt

SEQ ID NO: 13771 - DNA, 22 bp, Artificial Sequence
  chemically synthesized
ctctctcctagtcttggtacgg

SEQ ID NO: 13772 - DNA, 22 bp, Artificial Sequence
  chemically synthesized
tctcctagtcttggtacggccc

SEQ ID NO: 13773 - DNA, 22 bp, Artificial Sequence
  chemically synthesized
tcctagtcttggtacggccccc

SEQ ID NO: 13774 - DNA, 22 bp, Artificial Sequence
  chemically synthesized
ctagtcttggtacggccccctc

SEQ ID NO: 13775 - DNA, 22 bp, Artificial Sequence
  chemically synthesized
gtcttggtacggccccctcccc

SEQ ID NO: 13776 - DNA, 22 bp, Artificial Sequence
  chemically synthesized
ggtacggccccctcccccacta

SEQ ID NO: 13777 - DNA, 22 bp, Artificial Sequence
  chemically synthesized
gtacggccccctcccccactat

SEQ ID NO: 13778 - DNA, 22 bp, Artificial Sequence
  chemically synthesized
ccccactatcatttcattagcg

SEQ ID NO: 13779 - DNA, 22 bp, Artificial Sequence
  chemically synthesized
tcatttcattagcgtgttgcca

SEQ ID NO: 13780 - DNA, 22 bp, Artificial Sequence
  chemically synthesized
cattagcgtgttgccagactgg

SEQ ID NO: 13781 - DNA, 22 bp, Artificial Sequence
  chemically synthesized
attagcgtgttgccagactggg

SEQ ID NO: 13782 - DNA, 22 bp, Artificial Sequence
  chemically synthesized
gcgtgttgccagactgggcatc

SEQ ID NO: 13783 - DNA, 22 bp, Artificial Sequence
  chemically synthesized
ccagactgggcatcctaaatca

SEQ ID NO: 13784 - DNA, 22 bp, Artificial Sequence
  chemically synthesized
ggcatcctaaatcagccatcag

SEQ ID NO: 13785 - DNA, 22 bp, Artificial Sequence
  chemically synthesized
aatcagccatcagtggtactcc

SEQ ID NO: 13786 - DNA, 22 bp, Artificial Sequence
  chemically synthesized
cttatgtttatacttcgatacc

SEQ ID NO: 13787 - DNA, 22 bp, Artificial Sequence
  chemically synthesized
atgtttatacttcgatacctcc

SEQ ID NO: 13788 - DNA, 22 bp, Artificial Sequence
  chemically synthesized
tgtttatacttcgatacctcca

SEQ ID NO: 13789 - DNA, 22 bp, Artificial Sequence
  chemically synthesized
atacttcgatacctccatattg

SEQ ID NO: 13790 - DNA, 22 bp, Artificial Sequence
  chemically synthesized
tacttcgatacctccatattgc

SEQ ID NO: 13791 - DNA, 22 bp, Artificial Sequence
  chemically synthesized
cgatacctccatattgcatttt

SEQ ID NO: 13792 - DNA, 22 bp, Artificial Sequence
  chemically synthesized
gatacctccatattgcatttta

SEQ ID NO: 13793 - DNA, 22 bp, Artificial Sequence
  chemically synthesized
catattgcattttattgtccaa

SEQ ID NO: 13794 - DNA, 22 bp, Artificial Sequence
  chemically synthesized
cattttattgtccaatctcctt

SEQ ID NO: 13795 - DNA, 22 bp, Artificial Sequence
  chemically synthesized
tattgtccaatctccttaggtt

SEQ ID NO: 13796 - DNA, 22 bp, Artificial Sequence
  chemically synthesized
attgtccaatctccttaggtta

SEQ ID NO: 13797 - DNA, 22 bp, Artificial Sequence
  chemically synthesized
ttgtccaatctccttaggttaa

SEQ ID NO: 13798 - DNA, 22 bp, Artificial Sequence
  chemically synthesized
tccaatctccttaggttaatga

SEQ ID NO: 13799 - DNA, 22 bp, Artificial Sequence
  chemically synthesized
cttaggttaatgacttcattat

SEQ ID NO: 13800 - DNA, 22 bp, Artificial Sequence
  chemically synthesized
aggttaatgacttcattatctg

SEQ ID NO: 13801 - DNA, 22 bp, Artificial Sequence
  chemically synthesized
ggttaatgacttcattatctga

SEQ ID NO: 13802 - DNA, 22 bp, Artificial Sequence
  chemically synthesized
atgacttcattatctgatgacc

SEQ ID NO: 13803 - DNA, 22 bp, Artificial Sequence
  chemically synthesized
cattatctgatgaccagctctg

SEQ ID NO: 13804 - DNA, 22 bp, Artificial Sequence
  chemically synthesized
attatctgatgaccagctctgc

SEQ ID NO: 13805 - DNA, 22 bp, Artificial Sequence
  chemically synthesized
tctgatgaccagctctgcctag

SEQ ID NO: 13806 - DNA, 22 bp, Artificial Sequence
  chemically synthesized
atgaccagctctgcctagttta

SEQ ID NO: 13807 - DNA, 22 bp, Artificial Sequence
  chemically synthesized
tgcctagtttacctgtctcact

SEQ ID NO: 13808 - DNA, 22 bp, Artificial Sequence
  chemically synthesized
cctagtttacctgtctcacttg

SEQ ID NO: 13809 - DNA, 22 bp, Artificial Sequence
  chemically synthesized
gtttacctgtctcacttgtcat

SEQ ID NO: 13810 - DNA, 22 bp, Artificial Sequence
  chemically synthesized
acctgtctcacttgtcatagtc

SEQ ID NO: 13811 - DNA, 22 bp, Artificial Sequence
  chemically synthesized
cctgtctcacttgtcatagtcc

SEQ ID NO: 13812 - DNA, 22 bp, Artificial Sequence
  chemically synthesized
tctcacttgtcatagtccatat

SEQ ID NO: 13813 - DNA, 22 bp, Artificial Sequence
  chemically synthesized
acttgtcatagtccatatggaa

SEQ ID NO: 13814 - DNA, 22 bp, Artificial Sequence
  chemically synthesized
gtcatagtccatatggaaccat

SEQ ID NO: 13815 - DNA, 22 bp, Artificial Sequence
  chemically synthesized
tcatagtccatatggaaccata

SEQ ID NO: 13816 - DNA, 22 bp, Artificial Sequence
  chemically synthesized
ctgaaatacctcacgttcttgc

SEQ ID NO: 13817 - DNA, 22 bp, Artificial Sequence
  chemically synthesized
aaatacctcacgttcttgcaaa

SEQ ID NO: 13818 - DNA, 22 bp, Artificial Sequence
  chemically synthesized
acgttcttgcaaatctgagtct

SEQ ID NO: 13819 - DNA, 22 bp, Artificial Sequence
  chemically synthesized
ttgcaaatctgagtctttgcac

SEQ ID NO: 13820 - DNA, 22 bp, Artificial Sequence
  chemically synthesized
gcaaatctgagtctttgcacga

SEQ ID NO: 13821 - DNA, 22 bp, Artificial Sequence
  chemically synthesized
caaatctgagtctttgcacgag

SEQ ID NO: 13822 - DNA, 22 bp, Artificial Sequence
  chemically synthesized
agtctttgcacgagtgatcctc

SEQ ID NO: 13823 - DNA, 22 bp, Artificial Sequence
  chemically synthesized
tgcacgagtgatcctctttgca

SEQ ID NO: 13824 - DNA, 22 bp, Artificial Sequence
  chemically synthesized
gcacgagtgatcctctttgcat

SEQ ID NO: 13825 - DNA, 22 bp, Artificial Sequence
  chemically synthesized
cacgagtgatcctctttgcata

SEQ ID NO: 13826 - DNA, 22 bp, Artificial Sequence
  chemically synthesized
tttgcataaaatgcccttatat

SEQ ID NO: 13827 - DNA, 22 bp, Artificial Sequence
  chemically synthesized
tgcataaaatgcccttatatca

SEQ ID NO: 13828 - DNA, 22 bp, Artificial Sequence
  chemically synthesized
gcataaaatgcccttatatcag

SEQ ID NO: 13829 - DNA, 22 bp, Artificial Sequence
  chemically synthesized
cataaaatgcccttatatcaga

SEQ ID NO: 13830 - DNA, 22 bp, Artificial Sequence
  chemically synthesized
atatcagacatttaaagagaga

SEQ ID NO: 13831 - DNA, 22 bp, Artificial Sequence
  chemically synthesized
tatcagacatttaaagagagag

SEQ ID NO: 13832 - DNA, 22 bp, Artificial Sequence
  chemically synthesized
aaagagagagaacgcctactca

SEQ ID NO: 13833 - DNA, 22 bp, Artificial Sequence
  chemically synthesized
aagagagagaacgcctactcat

SEQ ID NO: 13834 - DNA, 22 bp, Artificial Sequence
  chemically synthesized
ctcatcttttaagacccagatg

SEQ ID NO: 13835 - DNA, 22 bp, Artificial Sequence
  chemically synthesized
atcttttaagacccagatgaaa

SEQ ID NO: 13836 - DNA, 22 bp, Artificial Sequence
  chemically synthesized
ttaagacccagatgaaaatatt

SEQ ID NO: 13837 - DNA, 22 bp, Artificial Sequence
  chemically synthesized
taagacccagatgaaaatattc

SEQ ID NO: 13838 - DNA, 22 bp, Artificial Sequence
  chemically synthesized
aagacccagatgaaaatattct

SEQ ID NO: 13839 - DNA, 22 bp, Artificial Sequence
  chemically synthesized
agacccagatgaaaatattctc

SEQ ID NO: 13840 - DNA, 22 bp, Artificial Sequence
  chemically synthesized
tctctctatcaattgtttcccc

SEQ ID NO: 13841 - DNA, 22 bp, Artificial Sequence
  chemically synthesized
tctctatcaattgtttccccat

SEQ ID NO: 13842 - DNA, 22 bp, Artificial Sequence
  chemically synthesized
tctatcaattgtttccccattt

SEQ ID NO: 13843 - DNA, 22 bp, Artificial Sequence
  chemically synthesized
tatcaattgtttccccatttaa

SEQ ID NO: 13844 - DNA, 22 bp, Artificial Sequence
  chemically synthesized
tcaattgtttccccatttaatg

SEQ ID NO: 13845 - DNA, 22 bp, Artificial Sequence
  chemically synthesized
tttccccatttaatgtgttcct

SEQ ID NO: 13846 - DNA, 22 bp, Artificial Sequence
  chemically synthesized
ccccatttaatgtgttcctttc

SEQ ID NO: 13847 - DNA, 22 bp, Artificial Sequence
  chemically synthesized
cccatttaatgtgttcctttct

SEQ ID NO: 13848 - DNA, 22 bp, Artificial Sequence
  chemically synthesized
aatgtgttcctttctctatgat

SEQ ID NO: 13849 - DNA, 22 bp, Artificial Sequence
  chemically synthesized
atgtgttcctttctctatgatc

SEQ ID NO: 13850 - DNA, 22 bp, Artificial Sequence
  chemically synthesized
ctttctctatgatcccttagta

SEQ ID NO: 13851 - DNA, 22 bp, Artificial Sequence
  chemically synthesized
tctctatgatcccttagtacct

SEQ ID NO: 13852 - DNA, 22 bp, Artificial Sequence
  chemically synthesized
ctctatgatcccttagtaccta

SEQ ID NO: 13853 - DNA, 22 bp, Artificial Sequence
  chemically synthesized
tctatgatcccttagtacctag

SEQ ID NO: 13854 - DNA, 22 bp, Artificial Sequence
  chemically synthesized
tatgatcccttagtacctagtg

SEQ ID NO: 13855 - DNA, 22 bp, Artificial Sequence
  chemically synthesized
tgatcccttagtacctagtgca

SEQ ID NO: 13856 - DNA, 22 bp, Artificial Sequence
  chemically synthesized
agtacctagtgcacattttatc

SEQ ID NO: 13857 - DNA, 22 bp, Artificial Sequence
  chemically synthesized
gtacctagtgcacattttatca

SEQ ID NO: 13858 - DNA, 22 bp, Artificial Sequence
  chemically synthesized
gtgcacattttatcacattata

SEQ ID NO: 13859 - DNA, 22 bp, Artificial Sequence
  chemically synthesized
tatcacattatattgaaacctc

SEQ ID NO: 13860 - DNA, 22 bp, Artificial Sequence
  chemically synthesized
atcacattatattgaaacctct

SEQ ID NO: 13861 - DNA, 22 bp, Artificial Sequence
  chemically synthesized
tcacattatattgaaacctctc

SEQ ID NO: 13862 - DNA, 22 bp, Artificial Sequence
  chemically synthesized
tattgaaacctctcacctggcc

SEQ ID NO: 13863 - DNA, 22 bp, Artificial Sequence
  chemically synthesized
aaacctctcacctggcctcatg

SEQ ID NO: 13864 - DNA, 22 bp, Artificial Sequence
  chemically synthesized
tcacctggcctcatgctgcttt

SEQ ID NO: 13865 - DNA, 22 bp, Artificial Sequence
  chemically synthesized
acctggcctcatgctgctttag

SEQ ID NO: 13866 - DNA, 22 bp, Artificial Sequence
  chemically synthesized
gcctcatgctgctttagatcaa

SEQ ID NO: 13867 - DNA, 22 bp, Artificial Sequence
  chemically synthesized
atgctgctttagatcaaagagg

SEQ ID NO: 13868 - DNA, 22 bp, Artificial Sequence
  chemically synthesized
ctttagatcaaagagggagtct

SEQ ID NO: 13869 - DNA, 22 bp, Artificial Sequence
  chemically synthesized
tagatcaaagagggagtctggt

SEQ ID NO: 13870 - DNA, 22 bp, Artificial Sequence
  chemically synthesized
agatcaaagagggagtctggtt

SEQ ID NO: 13871 - DNA, 22 bp, Artificial Sequence
  chemically synthesized
gatcaaagagggagtctggttt

SEQ ID NO: 13872 - DNA, 22 bp, Artificial Sequence
  chemically synthesized
gtttatccccatacccctagta

SEQ ID NO: 13873 - DNA, 22 bp, Artificial Sequence
  chemically synthesized
atccccatacccctagtaccct

SEQ ID NO: 13874 - DNA, 22 bp, Artificial Sequence
  chemically synthesized
tccccatacccctagtaccctg

SEQ ID NO: 13875 - DNA, 22 bp, Artificial Sequence
  chemically synthesized
gtaccctgacacagtacctggc

SEQ ID NO: 13876 - DNA, 22 bp, Artificial Sequence
  chemically synthesized
acacagtacctggcaccatagt

SEQ ID NO: 13877 - DNA, 22 bp, Artificial Sequence
  chemically synthesized
gcaccatagttgtaactcagta

SEQ ID NO: 13878 - DNA, 22 bp, Artificial Sequence
  chemically synthesized
taactcagtaatgtctgaatga

SEQ ID NO: 13879 - DNA, 22 bp, Artificial Sequence
  chemically synthesized
agtaatgtctgaatgaaggaca

SEQ ID NO: 13880 - DNA, 22 bp, Artificial Sequence
  chemically synthesized
aatgaaggacatctttgatgca

SEQ ID NO: 13881 - DNA, 22 bp, Artificial Sequence
  chemically synthesized
tgatgcatacactttacaaaac

SEQ ID NO: 13882 - DNA, 22 bp, Artificial Sequence
  chemically synthesized
gatgcatacactttacaaaact

SEQ ID NO: 13883 - DNA, 22 bp, Artificial Sequence
  chemically synthesized
atgcatacactttacaaaacta

SEQ ID NO: 13884 - DNA, 22 bp, Artificial Sequence
  chemically synthesized
tacaaaactaaactggttttac

SEQ ID NO: 13885 - DNA, 22 bp, Artificial Sequence
  chemically synthesized
acaaaactaaactggttttaca

SEQ ID NO: 13886 - DNA, 22 bp, Artificial Sequence
  chemically synthesized
caaaactaaactggttttacag

SEQ ID NO: 13887 - DNA, 22 bp, Artificial Sequence
  chemically synthesized
aactggttttacagaactgttt

SEQ ID NO: 13888 - DNA, 22 bp, Artificial Sequence
  chemically synthesized
gttttacagaactgttttaatt

SEQ ID NO: 13889 - DNA, 22 bp, Artificial Sequence
  chemically synthesized
tacagaactgttttaatttcaa

SEQ ID NO: 13890 - DNA, 22 bp, Artificial Sequence
  chemically synthesized
acagaactgttttaatttcaaa

SEQ ID NO: 13891 - DNA, 22 bp, Artificial Sequence
  chemically synthesized
cagaactgttttaatttcaaaa

SEQ ID NO: 13892 - DNA, 22 bp, Artificial Sequence
  chemically synthesized
ttttaatttcaaaattccaaac

SEQ ID NO: 13893 - DNA, 22 bp, Artificial Sequence
  chemically synthesized
taatttcaaaattccaaactgt

SEQ ID NO: 13894 - DNA, 22 bp, Artificial Sequence
  chemically synthesized
aatttcaaaattccaaactgtt

SEQ ID NO: 13895 - DNA, 22 bp, Artificial Sequence
  chemically synthesized
atttcaaaattccaaactgttg

SEQ ID NO: 13896 - DNA, 22 bp, Artificial Sequence
  chemically synthesized
caaaattccaaactgttgcaat

SEQ ID NO: 13897 - DNA, 22 bp, Artificial Sequence
  chemically synthesized
aaaattccaaactgttgcaata

SEQ ID NO: 13898 - DNA, 22 bp, Artificial Sequence
  chemically synthesized
caaactgttgcaataataccta

SEQ ID NO: 13899 - DNA, 22 bp, Artificial Sequence
  chemically synthesized
ttgcaataatacctaaaggcag

SEQ ID NO: 13900 - DNA, 22 bp, Artificial Sequence
  chemically synthesized
caataatacctaaaggcagcag

SEQ ID NO: 13901 - DNA, 22 bp, Artificial Sequence
  chemically synthesized
aaggcagcagccatgaaaatgc

SEQ ID NO: 13902 - DNA, 22 bp, Artificial Sequence
  chemically synthesized
agcaaatcactcaccgaaactc

SEQ ID NO: 13903 - DNA, 22 bp, Artificial Sequence
  chemically synthesized
accgaaactccttttagaagcc

SEQ ID NO: 13904 - DNA, 22 bp, Artificial Sequence
  chemically synthesized
cttttagaagccaatgagagtt

SEQ ID NO: 13905 - DNA, 22 bp, Artificial Sequence
  chemically synthesized
ttagaagccaatgagagtttaa

SEQ ID NO: 13906 - DNA, 22 bp, Artificial Sequence
  chemically synthesized
tagaagccaatgagagtttaat

SEQ ID NO: 13907 - DNA, 22 bp, Artificial Sequence
  chemically synthesized
agaagccaatgagagtttaata

SEQ ID NO: 13908 - DNA, 22 bp, Artificial Sequence
  chemically synthesized
gaagccaatgagagtttaatag

SEQ ID NO: 13909 - DNA, 22 bp, Artificial Sequence
  chemically synthesized
aatagcagaagagagtgctgca

SEQ ID NO: 13910 - DNA, 22 bp, Artificial Sequence
  chemically synthesized
atagcagaagagagtgctgcat

SEQ ID NO: 13911 - DNA, 22 bp, Artificial Sequence
  chemically synthesized
cattaatactgtctatccttag

SEQ ID NO: 13912 - DNA, 22 bp, Artificial Sequence
  chemically synthesized
atactgtctatccttagaaaaa

SEQ ID NO: 13913 - DNA, 22 bp, Artificial Sequence
  chemically synthesized
tctatccttagaaaaattcccc

SEQ ID NO: 13914 - DNA, 22 bp, Artificial Sequence
  chemically synthesized
tccttagaaaaattcccctggc

SEQ ID NO: 13915 - DNA, 22 bp, Artificial Sequence
  chemically synthesized
agaaaaattcccctggcccctt

SEQ ID NO: 13916 - DNA, 22 bp, Artificial Sequence
  chemically synthesized
gaaaaattcccctggccccttc

SEQ ID NO: 13917 - DNA, 22 bp, Artificial Sequence
  chemically synthesized
ccctggccccttcctcaagggc

SEQ ID NO: 13918 - DNA, 22 bp, Artificial Sequence
  chemically synthesized
gccccttcctcaagggcttatt

SEQ ID NO: 13919 - DNA, 22 bp, Artificial Sequence
  chemically synthesized
cctcaagggcttattatctctg

SEQ ID NO: 13920 - DNA, 22 bp, Artificial Sequence
  chemically synthesized
ctcaagggcttattatctctgg

SEQ ID NO: 13921 - DNA, 22 bp, Artificial Sequence
  chemically synthesized
aagggcttattatctctggcta

SEQ ID NO: 13922 - DNA, 22 bp, Artificial Sequence
  chemically synthesized
attatctctggctacaatggct

SEQ ID NO: 13923 - DNA, 22 bp, Artificial Sequence
  chemically synthesized
ttatctctggctacaatggctg

SEQ ID NO: 13924 - DNA, 22 bp, Artificial Sequence
  chemically synthesized
tctctggctacaatggctgcag

SEQ ID NO: 13925 - DNA, 22 bp, Artificial Sequence
  chemically synthesized
tggctacaatggctgcagaatc

SEQ ID NO: 13926 - DNA, 22 bp, Artificial Sequence
  chemically synthesized
gctacaatggctgcagaatcac

SEQ ID NO: 13927 - DNA, 22 bp, Artificial Sequence
  chemically synthesized
caatggctgcagaatcacattg

SEQ ID NO: 13928 - DNA, 22 bp, Artificial Sequence
  chemically synthesized
cagaatcacattgcctttctcc

SEQ ID NO: 13929 - DNA, 22 bp, Artificial Sequence
  chemically synthesized
cctttctccttagtattatctg

SEQ ID NO: 13930 - DNA, 22 bp, Artificial Sequence
  chemically synthesized
tctccttagtattatctgggga

SEQ ID NO: 13931 - DNA, 22 bp, Artificial Sequence
  chemically synthesized
ctccttagtattatctggggat

SEQ ID NO: 13932 - DNA, 22 bp, Artificial Sequence
  chemically synthesized
tccttagtattatctggggatc

SEQ ID NO: 13933 - DNA, 22 bp, Artificial Sequence
  chemically synthesized
cttagtattatctggggatcgt

SEQ ID NO: 13934 - DNA, 22 bp, Artificial Sequence
  chemically synthesized
agtattatctggggatcgtata

SEQ ID NO: 13935 - DNA, 22 bp, Artificial Sequence
  chemically synthesized
gtattatctggggatcgtatac

SEQ ID NO: 13936 - DNA, 22 bp, Artificial Sequence
  chemically synthesized
tctggggatcgtatacttaact

SEQ ID NO: 13937 - DNA, 22 bp, Artificial Sequence
  chemically synthesized
gggatcgtatacttaacttccc

SEQ ID NO: 13938 - DNA, 22 bp, Artificial Sequence
  chemically synthesized
aacttcccttcaggtttatcgc

SEQ ID NO: 13939 - DNA, 22 bp, Artificial Sequence
  chemically synthesized
acttcccttcaggtttatcgct

SEQ ID NO: 13940 - DNA, 22 bp, Artificial Sequence
  chemically synthesized
cccttcaggtttatcgctagtc

SEQ ID NO: 13941 - DNA, 22 bp, Artificial Sequence
  chemically synthesized
ccttcaggtttatcgctagtca

SEQ ID NO: 13942 - DNA, 22 bp, Artificial Sequence
  chemically synthesized
caggtttatcgctagtcattat

SEQ ID NO: 13943 - DNA, 22 bp, Artificial Sequence
  chemically synthesized
aggtttatcgctagtcattatt

SEQ ID NO: 13944 - DNA, 22 bp, Artificial Sequence
  chemically synthesized
atcgctagtcattatttcccag

SEQ ID NO: 13945 - DNA, 22 bp, Artificial Sequence
  chemically synthesized
tcgctagtcattatttcccagg

SEQ ID NO: 13946 - DNA, 22 bp, Artificial Sequence
  chemically synthesized
gtcattatttcccaggctccaa

SEQ ID NO: 13947 - DNA, 22 bp, Artificial Sequence
  chemically synthesized
tttcccaggctccaaaagcctg

SEQ ID NO: 13948 - DNA, 22 bp, Artificial Sequence
  chemically synthesized
cccaggctccaaaagcctggtt

SEQ ID NO: 13949 - DNA, 22 bp, Artificial Sequence
  chemically synthesized
ccaggctccaaaagcctggttc

SEQ ID NO: 13950 - DNA, 22 bp, Artificial Sequence
  chemically synthesized
caaaagcctggttcatccttat

SEQ ID NO: 13951 - DNA, 22 bp, Artificial Sequence
  chemically synthesized
gttcatccttattcttatctat

SEQ ID NO: 13952 - DNA, 22 bp, Artificial Sequence
  chemically synthesized
atccttattcttatctatcctt

SEQ ID NO: 13953 - DNA, 22 bp, Artificial Sequence
  chemically synthesized
attcttatctatcctttcccca

SEQ ID NO: 13954 - DNA, 22 bp, Artificial Sequence
  chemically synthesized
ttcttatctatcctttccccag

SEQ ID NO: 13955 - DNA, 22 bp, Artificial Sequence
  chemically synthesized
ttatctatcctttccccagcat

SEQ ID NO: 13956 - DNA, 22 bp, Artificial Sequence
  chemically synthesized
atctatcctttccccagcatct

SEQ ID NO: 13957 - DNA, 22 bp, Artificial Sequence
  chemically synthesized
tctatcctttccccagcatctg

SEQ ID NO: 13958 - DNA, 22 bp, Artificial Sequence
  chemically synthesized
tcctttccccagcatctgaagt

SEQ ID NO: 13959 - DNA, 22 bp, Artificial Sequence
  chemically synthesized
tccccagcatctgaagtcttca

SEQ ID NO: 13960 - DNA, 22 bp, Artificial Sequence
  chemically synthesized
ccccagcatctgaagtcttcaa

SEQ ID NO: 13961 - DNA, 22 bp, Artificial Sequence
  chemically synthesized
cccagcatctgaagtcttcaag

SEQ ID NO: 13962 - DNA, 22 bp, Artificial Sequence
  chemically synthesized
aagtcttcaagggggcagaagc

SEQ ID NO: 13963 - DNA, 22 bp, Artificial Sequence
  chemically synthesized
caagggggcagaagccctctta

SEQ ID NO: 13964 - DNA, 22 bp, Artificial Sequence
  chemically synthesized
aagggggcagaagccctcttac

SEQ ID NO: 13965 - DNA, 22 bp, Artificial Sequence
  chemically synthesized
ttacaaccttcatcatctcacc

SEQ ID NO: 13966 - DNA, 22 bp, Artificial Sequence
  chemically synthesized
acaaccttcatcatctcaccac

SEQ ID NO: 13967 - DNA, 22 bp, Artificial Sequence
  chemically synthesized
caaccttcatcatctcaccact

SEQ ID NO: 13968 - DNA, 22 bp, Artificial Sequence
  chemically synthesized
catcatctcaccacttatatag

SEQ ID NO: 13969 - DNA, 22 bp, Artificial Sequence
  chemically synthesized
atcatctcaccacttatataga

SEQ ID NO: 13970 - DNA, 22 bp, Artificial Sequence
  chemically synthesized
accacttatatagaagaaaggg

SEQ ID NO: 13971 - DNA, 22 bp, Artificial Sequence
  chemically synthesized
atatagaagaaagggtttggat

SEQ ID NO: 13972 - DNA, 22 bp, Artificial Sequence
  chemically synthesized
tatagaagaaagggtttggatg

SEQ ID NO: 13973 - DNA, 22 bp, Artificial Sequence
  chemically synthesized
ggatgctttgtcctcccagatg

SEQ ID NO: 13974 - DNA, 22 bp, Artificial Sequence
  chemically synthesized
gatgctttgtcctcccagatgt

SEQ ID NO: 13975 - DNA, 22 bp, Artificial Sequence
  chemically synthesized
tgtcctcccagatgtcacacta

SEQ ID NO: 13976 - DNA, 22 bp, Artificial Sequence
  chemically synthesized
gtcctcccagatgtcacactaa

SEQ ID NO: 13977 - DNA, 22 bp, Artificial Sequence
  chemically synthesized
tcctcccagatgtcacactaat

SEQ ID NO: 13978 - DNA, 22 bp, Artificial Sequence
  chemically synthesized
ccagatgtcacactaatgagat

SEQ ID NO: 13979 - DNA, 22 bp, Artificial Sequence
  chemically synthesized
atgagatatatctaatggcctt

SEQ ID NO: 13980 - DNA, 22 bp, Artificial Sequence
  chemically synthesized
atggccttgctttatgtcctgc

SEQ ID NO: 13981 - DNA, 22 bp, Artificial Sequence
  chemically synthesized
gctttatgtcctgctttgtgag

SEQ ID NO: 13982 - DNA, 22 bp, Artificial Sequence
  chemically synthesized
ctttatgtcctgctttgtgagt

SEQ ID NO: 13983 - DNA, 22 bp, Artificial Sequence
  chemically synthesized
tatgtcctgctttgtgagtttt

SEQ ID NO: 13984 - DNA, 22 bp, Artificial Sequence
  chemically synthesized
atgtcctgctttgtgagttttc

SEQ ID NO: 13985 - DNA, 22 bp, Artificial Sequence
  chemically synthesized
tgtcctgctttgtgagttttcc

SEQ ID NO: 13986 - DNA, 22 bp, Artificial Sequence
  chemically synthesized
ctttgtgagttttccaacaaat

SEQ ID NO: 13987 - DNA, 22 bp, Artificial Sequence
  chemically synthesized
tgtgagttttccaacaaatttt

SEQ ID NO: 13988 - DNA, 22 bp, Artificial Sequence
  chemically synthesized
gtgagttttccaacaaattttc

SEQ ID NO: 13989 - DNA, 22 bp, Artificial Sequence
  chemically synthesized
tgagttttccaacaaattttct

SEQ ID NO: 13990 - DNA, 22 bp, Artificial Sequence
  chemically synthesized
tccaacaaattttctttatccc

SEQ ID NO: 13991 - DNA, 22 bp, Artificial Sequence
  chemically synthesized
ccaacaaattttctttatccct

SEQ ID NO: 13992 - DNA, 22 bp, Artificial Sequence
  chemically synthesized
caacaaattttctttatccctt

SEQ ID NO: 13993 - DNA, 22 bp, Artificial Sequence
  chemically synthesized
tctttatcccttgactttactc

SEQ ID NO: 13994 - DNA, 22 bp, Artificial Sequence
  chemically synthesized
ctttatcccttgactttactca

SEQ ID NO: 13995 - DNA, 22 bp, Artificial Sequence
  chemically synthesized
tttatcccttgactttactcac

SEQ ID NO: 13996 - DNA, 22 bp, Artificial Sequence
  chemically synthesized
tatcccttgactttactcactt

SEQ ID NO: 13997 - DNA, 22 bp, Artificial Sequence
  chemically synthesized
atcccttgactttactcacttt

SEQ ID NO: 13998 - DNA, 22 bp, Artificial Sequence
  chemically synthesized
tcccttgactttactcactttg

SEQ ID NO: 13999 - DNA, 22 bp, Artificial Sequence
  chemically synthesized
gactttactcactttgctagtt

SEQ ID NO: 14000 - DNA, 22 bp, Artificial Sequence
  chemically synthesized
actttactcactttgctagttt

SEQ ID NO: 14001 - DNA, 22 bp, Artificial Sequence
  chemically synthesized
tactcactttgctagtttaacc

SEQ ID NO: 14002 - DNA, 22 bp, Artificial Sequence
  chemically synthesized
actcactttgctagtttaacct

SEQ ID NO: 14003 - DNA, 22 bp, Artificial Sequence
  chemically synthesized
ctcactttgctagtttaacctc

SEQ ID NO: 14004 - DNA, 22 bp, Artificial Sequence
  chemically synthesized
actttgctagtttaacctctgt

SEQ ID NO: 14005 - DNA, 22 bp, Artificial Sequence
  chemically synthesized
tgctagtttaacctctgtattt

SEQ ID NO: 14006 - DNA, 22 bp, Artificial Sequence
  chemically synthesized
gctagtttaacctctgtatttt

SEQ ID NO: 14007 - DNA, 22 bp, Artificial Sequence
  chemically synthesized
ctagtttaacctctgtattttt

SEQ ID NO: 14008 - DNA, 22 bp, Artificial Sequence
  chemically synthesized
gtttaacctctgtatttttttt

SEQ ID NO: 14009 - DNA, 22 bp, Artificial Sequence
  chemically synthesized
aacctctgtatttttttttatc

SEQ ID NO: 14010 - DNA, 22 bp, Artificial Sequence
  chemically synthesized
acctctgtatttttttttatcg

SEQ ID NO: 14011 - DNA, 22 bp, Artificial Sequence
  chemically synthesized
tgtatttttttttatcgttatt

SEQ ID NO: 14012 - DNA, 22 bp, Artificial Sequence
  chemically synthesized
tatttttttttatcgttatttc

SEQ ID NO: 14013 - DNA, 22 bp, Artificial Sequence
  chemically synthesized
ttttttatcgttatttcagcat

SEQ ID NO: 14014 - DNA, 22 bp, Artificial Sequence
  chemically synthesized
tttttatcgttatttcagcatt

SEQ ID NO: 14015 - DNA, 22 bp, Artificial Sequence
  chemically synthesized
ttttatcgttatttcagcattt

SEQ ID NO: 14016 - DNA, 22 bp, Artificial Sequence
  chemically synthesized
tttatcgttatttcagcatttc

SEQ ID NO: 14017 - DNA, 22 bp, Artificial Sequence
  chemically synthesized
ttatcgttatttcagcatttca

SEQ ID NO: 14018 - DNA, 22 bp, Artificial Sequence
  chemically synthesized
tatcgttatttcagcatttcag

SEQ ID NO: 14019 - DNA, 22 bp, Artificial Sequence
  chemically synthesized
atcgttatttcagcatttcagt

SEQ ID NO: 14020 - DNA, 22 bp, Artificial Sequence
  chemically synthesized
tcgttatttcagcatttcagtc

SEQ ID NO: 14021 - DNA, 22 bp, Artificial Sequence
  chemically synthesized
tttcagcatttcagtctgattt

SEQ ID NO: 14022 - DNA, 22 bp, Artificial Sequence
  chemically synthesized
cagcatttcagtctgatttcac

SEQ ID NO: 14023 - DNA, 22 bp, Artificial Sequence
  chemically synthesized
agcatttcagtctgatttcaca

SEQ ID NO: 14024 - DNA, 22 bp, Artificial Sequence
  chemically synthesized
cagtctgatttcacagctgaca

SEQ ID NO: 14025 - DNA, 22 bp, Artificial Sequence
  chemically synthesized
agtctgatttcacagctgacat

SEQ ID NO: 14026 - DNA, 22 bp, Artificial Sequence
  chemically synthesized
atttcacagctgacatcatgtc

SEQ ID NO: 14027 - DNA, 22 bp, Artificial Sequence
  chemically synthesized
cacagctgacatcatgtctgga

SEQ ID NO: 14028 - DNA, 22 bp, Artificial Sequence
  chemically synthesized
acagctgacatcatgtctggag

SEQ ID NO: 14029 - DNA, 22 bp, Artificial Sequence
  chemically synthesized
acatcatgtctggagtgggaac

SEQ ID NO: 14030 - DNA, 22 bp, Artificial Sequence
  chemically synthesized
gagtgggaaccacagggccagt

SEQ ID NO: 14031 - DNA, 22 bp, Artificial Sequence
  chemically synthesized
tctgggggtgcttagggttggc

SEQ ID NO: 14032 - DNA, 22 bp, Artificial Sequence
  chemically synthesized
ctgggggtgcttagggttggca

SEQ ID NO: 14033 - DNA, 22 bp, Artificial Sequence
  chemically synthesized
tgggggtgcttagggttggcac

SEQ ID NO: 14034 - DNA, 22 bp, Artificial Sequence
  chemically synthesized
ggggtgcttagggttggcaccc

SEQ ID NO: 14035 - DNA, 22 bp, Artificial Sequence
  chemically synthesized
agggttggcacccctgatcctg

SEQ ID NO: 14036 - DNA, 22 bp, Artificial Sequence
  chemically synthesized
gggttggcacccctgatcctgg

SEQ ID NO: 14037 - DNA, 22 bp, Artificial Sequence
  chemically synthesized
gcacccctgatcctggtactgt

SEQ ID NO: 14038 - DNA, 22 bp, Artificial Sequence
  chemically synthesized
atcctggtactgtcagctacta

SEQ ID NO: 14039 - DNA, 22 bp, Artificial Sequence
  chemically synthesized
gtactgtcagctactagatttg

SEQ ID NO: 14040 - DNA, 22 bp, Artificial Sequence
  chemically synthesized
tcagctactagatttgattcta

SEQ ID NO: 14041 - DNA, 22 bp, Artificial Sequence
  chemically synthesized
ctagatttgattctagaaagtt

SEQ ID NO: 14042 - DNA, 22 bp, Artificial Sequence
  chemically synthesized
gatttgattctagaaagttgac

SEQ ID NO: 14043 - DNA, 22 bp, Artificial Sequence
  chemically synthesized
gattctagaaagttgacaagta

SEQ ID NO: 14044 - DNA, 22 bp, Artificial Sequence
  chemically synthesized
attctagaaagttgacaagtaa

SEQ ID NO: 14045 - DNA, 22 bp, Artificial Sequence
  chemically synthesized
tagaaagttgacaagtaagtgt

SEQ ID NO: 14046 - DNA, 22 bp, Artificial Sequence
  chemically synthesized
gaaagttgacaagtaagtgtga

SEQ ID NO: 14047 - DNA, 22 bp, Artificial Sequence
  chemically synthesized
acaagtaagtgtgataaatgct

SEQ ID NO: 14048 - DNA, 22 bp, Artificial Sequence
  chemically synthesized
cctgtgagaacatgctgtttgt

SEQ ID NO: 14049 - DNA, 22 bp, Artificial Sequence
  chemically synthesized
ctgtgagaacatgctgtttgtc

SEQ ID NO: 14050 - DNA, 22 bp, Artificial Sequence
  chemically synthesized
tgagaacatgctgtttgtccaa

SEQ ID NO: 14051 - DNA, 22 bp, Artificial Sequence
  chemically synthesized
tttgtccaaatgggataatttc

SEQ ID NO: 14052 - DNA, 22 bp, Artificial Sequence
  chemically synthesized
gtccaaatgggataatttcttc

SEQ ID NO: 14053 - DNA, 22 bp, Artificial Sequence
  chemically synthesized
tccaaatgggataatttcttcc

SEQ ID NO: 14054 - DNA, 22 bp, Artificial Sequence
  chemically synthesized
cttccctgtatgccttcctctg

SEQ ID NO: 14055 - DNA, 22 bp, Artificial Sequence
  chemically synthesized
ttccctgtatgccttcctctgg

SEQ ID NO: 14056 - DNA, 22 bp, Artificial Sequence
  chemically synthesized
ccctgtatgccttcctctggga

SEQ ID NO: 14057 - DNA, 22 bp, Artificial Sequence
  chemically synthesized
cctgtatgccttcctctgggaa

SEQ ID NO: 14058 - DNA, 22 bp, Artificial Sequence
  chemically synthesized
tatgccttcctctgggaaatac

SEQ ID NO: 14059 - DNA, 22 bp, Artificial Sequence
  chemically synthesized
cctctgggaaatacataaagtc

SEQ ID NO: 14060 - DNA, 22 bp, Artificial Sequence
  chemically synthesized
ctctgggaaatacataaagtca

SEQ ID NO: 14061 - DNA, 22 bp, Artificial Sequence
  chemically synthesized
tgggaaatacataaagtcactg

SEQ ID NO: 14062 - DNA, 22 bp, Artificial Sequence
  chemically synthesized
ggaaatacataaagtcactgta

SEQ ID NO: 14063 - DNA, 22 bp, Artificial Sequence
  chemically synthesized
tagttgtgaaaaaacaaagtga

SEQ ID NO: 14064 - DNA, 22 bp, Artificial Sequence
  chemically synthesized
tgaaaaaacaaagtgatatatg

SEQ ID NO: 14065 - DNA, 22 bp, Artificial Sequence
  chemically synthesized
cattagctaacttcctactctt

SEQ ID NO: 14066 - DNA, 22 bp, Artificial Sequence
  chemically synthesized
gctaacttcctactctttatgt

SEQ ID NO: 14067 - DNA, 22 bp, Artificial Sequence
  chemically synthesized
acttcctactctttatgtcaat

SEQ ID NO: 14068 - DNA, 22 bp, Artificial Sequence
  chemically synthesized
cctactctttatgtcaattctt

SEQ ID NO: 14069 - DNA, 22 bp, Artificial Sequence
  chemically synthesized
ctactctttatgtcaattctta

SEQ ID NO: 14070 - DNA, 22 bp, Artificial Sequence
  chemically synthesized
ctctttatgtcaattcttaagc

SEQ ID NO: 14071 - DNA, 22 bp, Artificial Sequence
  chemically synthesized
tttatgtcaattcttaagcttg

SEQ ID NO: 14072 - DNA, 22 bp, Artificial Sequence
  chemically synthesized
tatgtcaattcttaagcttgct

SEQ ID NO: 14073 - DNA, 22 bp, Artificial Sequence
  chemically synthesized
atgtcaattcttaagcttgctt

SEQ ID NO: 14074 - DNA, 22 bp, Artificial Sequence
  chemically synthesized
tgtcaattcttaagcttgcttt

SEQ ID NO: 14075 - DNA, 22 bp, Artificial Sequence
  chemically synthesized
ttaagcttgcttttctccccta

SEQ ID NO: 14076 - DNA, 22 bp, Artificial Sequence
  chemically synthesized
aagcttgcttttctcccctagg

SEQ ID NO: 14077 - DNA, 22 bp, Artificial Sequence
  chemically synthesized
agcttgcttttctcccctaggg

SEQ ID NO: 14078 - DNA, 22 bp, Artificial Sequence
  chemically synthesized
gcttttctcccctagggaactc

SEQ ID NO: 14079 - DNA, 22 bp, Artificial Sequence
  chemically synthesized
cttttctcccctagggaactca

SEQ ID NO: 14080 - DNA, 22 bp, Artificial Sequence
  chemically synthesized
ttctcccctagggaactcaact

SEQ ID NO: 14081 - DNA, 22 bp, Artificial Sequence
  chemically synthesized
tctcccctagggaactcaactg

SEQ ID NO: 14082 - DNA, 22 bp, Artificial Sequence
  chemically synthesized
ctcccctagggaactcaactga

SEQ ID NO: 14083 - DNA, 22 bp, Artificial Sequence
  chemically synthesized
tcccctagggaactcaactgag

SEQ ID NO: 14084 - DNA, 22 bp, Artificial Sequence
  chemically synthesized
ccctagggaactcaactgagta

SEQ ID NO: 14085 - DNA, 22 bp, Artificial Sequence
  chemically synthesized
gggaactcaactgagtattgtg

SEQ ID NO: 14086 - DNA, 22 bp, Artificial Sequence
  chemically synthesized
aactgagtattgtgtttcccca

SEQ ID NO: 14087 - DNA, 22 bp, Artificial Sequence
  chemically synthesized
agtattgtgtttccccaaatat

SEQ ID NO: 14088 - DNA, 22 bp, Artificial Sequence
  chemically synthesized
tgtttccccaaatatcaactcc

SEQ ID NO: 14089 - DNA, 22 bp, Artificial Sequence
  chemically synthesized
ccccaaatatcaactccaagat

SEQ ID NO: 14090 - DNA, 22 bp, Artificial Sequence
  chemically synthesized
cccaaatatcaactccaagatg

SEQ ID NO: 14091 - DNA, 22 bp, Artificial Sequence
  chemically synthesized
caagatgtttgacatagagaca

SEQ ID NO: 14092 - DNA, 22 bp, Artificial Sequence
  chemically synthesized
gacatagagacaaaatgatttt

SEQ ID NO: 14093 - DNA, 22 bp, Artificial Sequence
  chemically synthesized
acatagagacaaaatgattttt

SEQ ID NO: 14094 - DNA, 22 bp, Artificial Sequence
  chemically synthesized
tttcctaatccatgaaaagctt

SEQ ID NO: 14095 - DNA, 22 bp, Artificial Sequence
  chemically synthesized
ttcctaatccatgaaaagcttt

SEQ ID NO: 14096 - DNA, 22 bp, Artificial Sequence
  chemically synthesized
tcctaatccatgaaaagctttg

SEQ ID NO: 14097 - DNA, 22 bp, Artificial Sequence
  chemically synthesized
cctaatccatgaaaagctttgg

SEQ ID NO: 14098 - DNA, 22 bp, Artificial Sequence
  chemically synthesized
ctaatccatgaaaagctttggt

SEQ ID NO: 14099 - DNA, 22 bp, Artificial Sequence
  chemically synthesized
atccatgaaaagctttggtgat

SEQ ID NO: 14100 - DNA, 22 bp, Artificial Sequence
  chemically synthesized
tggtgataactaacagcttgct

SEQ ID NO: 14101 - DNA, 22 bp, Artificial Sequence
  chemically synthesized
ggtgataactaacagcttgcta

SEQ ID NO: 14102 - DNA, 22 bp, Artificial Sequence
  chemically synthesized
gtgataactaacagcttgctaa

SEQ ID NO: 14103 - DNA, 22 bp, Artificial Sequence
  chemically synthesized
acagcttgctaatgaaaggtta

SEQ ID NO: 14104 - DNA, 22 bp, Artificial Sequence
  chemically synthesized
gctaatgaaaggttaatcttta

SEQ ID NO: 14105 - DNA, 22 bp, Artificial Sequence
  chemically synthesized
ctaatgaaaggttaatctttat

SEQ ID NO: 14106 - DNA, 22 bp, Artificial Sequence
  chemically synthesized
atgaaaggttaatctttatgtt

SEQ ID NO: 14107 - DNA, 22 bp, Artificial Sequence
  chemically synthesized
atctttatgttttaactaaaac

SEQ ID NO: 14108 - DNA, 22 bp, Artificial Sequence
  chemically synthesized
tatgttttaactaaaactttaa

SEQ ID NO: 14109 - DNA, 22 bp, Artificial Sequence
  chemically synthesized
atgttttaactaaaactttaaa

SEQ ID NO: 14110 - DNA, 22 bp, Artificial Sequence
  chemically synthesized
tgttttaactaaaactttaaat

SEQ ID NO: 14111 - DNA, 22 bp, Artificial Sequence
  chemically synthesized
taactaaaactttaaattgaag

SEQ ID NO: 14112 - DNA, 22 bp, Artificial Sequence
  chemically synthesized
aactaaaactttaaattgaaga

SEQ ID NO: 14113 - DNA, 22 bp, Artificial Sequence
  chemically synthesized
actaaaactttaaattgaagat

SEQ ID NO: 14114 - DNA, 22 bp, Artificial Sequence
  chemically synthesized
aaactttaaattgaagatatat

SEQ ID NO: 14115 - DNA, 22 bp, Artificial Sequence
  chemically synthesized
taaattgaagatatataattta

SEQ ID NO: 14116 - DNA, 22 bp, Artificial Sequence
  chemically synthesized
aaattgaagatatataatttaa

SEQ ID NO: 14117 - DNA, 22 bp, Artificial Sequence
  chemically synthesized
aattgaagatatataatttaaa

SEQ ID NO: 14118 - DNA, 22 bp, Artificial Sequence
  chemically synthesized
aagatatataatttaaaaaatt

SEQ ID NO: 14119 - DNA, 22 bp, Artificial Sequence
  chemically synthesized
aaaaaattagagacacacctca

SEQ ID NO: 14120 - DNA, 22 bp, Artificial Sequence
  chemically synthesized
aaaaattagagacacacctcat

SEQ ID NO: 14121 - DNA, 22 bp, Artificial Sequence
  chemically synthesized
gagacacacctcattacatact

SEQ ID NO: 14122 - DNA, 22 bp, Artificial Sequence
  chemically synthesized
attacatacttctgaaaccttg

SEQ ID NO: 14123 - DNA, 22 bp, Artificial Sequence
  chemically synthesized
catacttctgaaaccttgaaat

SEQ ID NO: 14124 - DNA, 22 bp, Artificial Sequence
  chemically synthesized
ctgaaaccttgaaatgtcatat

SEQ ID NO: 14125 - DNA, 22 bp, Artificial Sequence
  chemically synthesized
tgaaaccttgaaatgtcatata

SEQ ID NO: 14126 - DNA, 22 bp, Artificial Sequence
  chemically synthesized
aaaccttgaaatgtcatatatc

SEQ ID NO: 14127 - DNA, 22 bp, Artificial Sequence
  chemically synthesized
gaaatgtcatatatcttaaaat

SEQ ID NO: 14128 - DNA, 22 bp, Artificial Sequence
  chemically synthesized
aaatgtcatatatcttaaaatc

SEQ ID NO: 14129 - DNA, 22 bp, Artificial Sequence
  chemically synthesized
aaaatcagactttttgtgtaaa

SEQ ID NO: 14130 - DNA, 22 bp, Artificial Sequence
  chemically synthesized
aaatcagactttttgtgtaaat

SEQ ID NO: 14131 - DNA, 22 bp, Artificial Sequence
  chemically synthesized
tttgtgtaaataaggccattgt

SEQ ID NO: 14132 - DNA, 22 bp, Artificial Sequence
  chemically synthesized
ttgtgtaaataaggccattgtt

SEQ ID NO: 14133 - DNA, 22 bp, Artificial Sequence
  chemically synthesized
tgtgtaaataaggccattgttt

SEQ ID NO: 14134 - DNA, 22 bp, Artificial Sequence
  chemically synthesized
gtgtaaataaggccattgtttg

SEQ ID NO: 14135 - DNA, 22 bp, Artificial Sequence
  chemically synthesized
tgtaaataaggccattgtttgt

SEQ ID NO: 14136 - DNA, 22 bp, Artificial Sequence
  chemically synthesized
tttgtgcttttgtttcccattt

SEQ ID NO: 14137 - DNA, 22 bp, Artificial Sequence
  chemically synthesized
gtgcttttgtttcccattttga

SEQ ID NO: 14138 - DNA, 22 bp, Artificial Sequence
  chemically synthesized
tgcttttgtttcccattttgat

SEQ ID NO: 14139 - DNA, 22 bp, Artificial Sequence
  chemically synthesized
ttgtttcccattttgatttcaa

SEQ ID NO: 14140 - DNA, 22 bp, Artificial Sequence
  chemically synthesized
tgtttcccattttgatttcaaa

SEQ ID NO: 14141 - DNA, 22 bp, Artificial Sequence
  chemically synthesized
gtttcccattttgatttcaaag

SEQ ID NO: 14142 - DNA, 22 bp, Artificial Sequence
  chemically synthesized
tttcccattttgatttcaaagt

SEQ ID NO: 14143 - DNA, 22 bp, Artificial Sequence
  chemically synthesized
cccattttgatttcaaagtggt

SEQ ID NO: 14144 - DNA, 22 bp, Artificial Sequence
  chemically synthesized
ccattttgatttcaaagtggta

SEQ ID NO: 14145 - DNA, 22 bp, Artificial Sequence
  chemically synthesized
tgatttcaaagtggtaagtcca

SEQ ID NO: 14146 - DNA, 22 bp, Artificial Sequence
  chemically synthesized
gatttcaaagtggtaagtccaa

SEQ ID NO: 14147 - DNA, 22 bp, Artificial Sequence
  chemically synthesized
atttcaaagtggtaagtccaaa

SEQ ID NO: 14148 - DNA, 22 bp, Artificial Sequence
  chemically synthesized
caaagtggtaagtccaaacaaa

SEQ ID NO: 14149 - DNA, 22 bp, Artificial Sequence
  chemically synthesized
aaagtggtaagtccaaacaaaa

SEQ ID NO: 14150 - DNA, 22 bp, Artificial Sequence
  chemically synthesized
ttttttttcactatattctgct

SEQ ID NO: 14151 - DNA, 22 bp, Artificial Sequence
  chemically synthesized
tttttcactatattctgctatt

SEQ ID NO: 14152 - DNA, 22 bp, Artificial Sequence
  chemically synthesized
ttttcactatattctgctattt

SEQ ID NO: 14153 - DNA, 22 bp, Artificial Sequence
  chemically synthesized
tttcactatattctgctatttc

SEQ ID NO: 14154 - DNA, 22 bp, Artificial Sequence
  chemically synthesized
ttcactatattctgctatttct

SEQ ID NO: 14155 - DNA, 22 bp, Artificial Sequence
  chemically synthesized
tcactatattctgctatttctt

SEQ ID NO: 14156 - DNA, 22 bp, Artificial Sequence
  chemically synthesized
cactatattctgctatttcttt

SEQ ID NO: 14157 - DNA, 22 bp, Artificial Sequence
  chemically synthesized
actatattctgctatttctttg

SEQ ID NO: 14158 - DNA, 22 bp, Artificial Sequence
  chemically synthesized
tattctgctatttctttgtttt

SEQ ID NO: 14159 - DNA, 22 bp, Artificial Sequence
  chemically synthesized
tgctatttctttgttttcccac

SEQ ID NO: 14160 - DNA, 22 bp, Artificial Sequence
  chemically synthesized
ctatttctttgttttcccactt

SEQ ID NO: 14161 - DNA, 22 bp, Artificial Sequence
  chemically synthesized
tttctttgttttcccactttta

SEQ ID NO: 14162 - DNA, 22 bp, Artificial Sequence
  chemically synthesized
ctttgttttcccacttttaatt

SEQ ID NO: 14163 - DNA, 22 bp, Artificial Sequence
  chemically synthesized
tttgttttcccacttttaattt

SEQ ID NO: 14164 - DNA, 22 bp, Artificial Sequence
  chemically synthesized
tgttttcccacttttaattttt

SEQ ID NO: 14165 - DNA, 22 bp, Artificial Sequence
  chemically synthesized
gttttcccacttttaatttttt

SEQ ID NO: 14166 - DNA, 22 bp, Artificial Sequence
  chemically synthesized
ttttcccacttttaattttttt

SEQ ID NO: 14167 - DNA, 22 bp, Artificial Sequence
  chemically synthesized
tcccacttttaatttttttaaa

SEQ ID NO: 14168 - DNA, 22 bp, Artificial Sequence
  chemically synthesized
cccacttttaatttttttaaac

SEQ ID NO: 14169 - DNA, 22 bp, Artificial Sequence
  chemically synthesized
ccacttttaatttttttaaacc

SEQ ID NO: 14170 - DNA, 22 bp, Artificial Sequence
  chemically synthesized
ttaatttttttaaaccaaggag

SEQ ID NO: 14171 - DNA, 22 bp, Artificial Sequence
  chemically synthesized
taatttttttaaaccaaggaga

SEQ ID NO: 14172 - DNA, 22 bp, Artificial Sequence
  chemically synthesized
aatttttttaaaccaaggagat

SEQ ID NO: 14173 - DNA, 22 bp, Artificial Sequence
  chemically synthesized
atttttttaaaccaaggagatg

SEQ ID NO: 14174 - DNA, 22 bp, Artificial Sequence
  chemically synthesized
ttttaaaccaaggagatgaatg

SEQ ID NO: 14175 - DNA, 22 bp, Artificial Sequence
  chemically synthesized
tttaaaccaaggagatgaatgt

SEQ ID NO: 14176 - DNA, 22 bp, Artificial Sequence
  chemically synthesized
ttaaaccaaggagatgaatgtt

SEQ ID NO: 14177 - DNA, 22 bp, Artificial Sequence
  chemically synthesized
taaaccaaggagatgaatgttt

SEQ ID NO: 14178 - DNA, 22 bp, Artificial Sequence
  chemically synthesized
aaaccaaggagatgaatgtttt

SEQ ID NO: 14179 - DNA, 22 bp, Artificial Sequence
  chemically synthesized
aaccaaggagatgaatgttttc

SEQ ID NO: 14180 - DNA, 22 bp, Artificial Sequence
  chemically synthesized
tctaacaggaattacatgacca

SEQ ID NO: 14181 - DNA, 22 bp, Artificial Sequence
  chemically synthesized
ctaacaggaattacatgaccaa

SEQ ID NO: 14182 - DNA, 22 bp, Artificial Sequence
  chemically synthesized
taacaggaattacatgaccaaa

SEQ ID NO: 14183 - DNA, 22 bp, Artificial Sequence
  chemically synthesized
acaggaattacatgaccaaatc

SEQ ID NO: 14184 - DNA, 22 bp, Artificial Sequence
  chemically synthesized
catgaccaaatcatgaactgaa

SEQ ID NO: 14185 - DNA, 22 bp, Artificial Sequence
  chemically synthesized
aacagtgtttattaaacataaa

SEQ ID NO: 14186 - DNA, 22 bp, Artificial Sequence
  chemically synthesized
attaaacataaatgcatcataa

SEQ ID NO: 14187 - DNA, 22 bp, Artificial Sequence
  chemically synthesized
ttaaacataaatgcatcataag

SEQ ID NO: 14188 - DNA, 22 bp, Artificial Sequence
  chemically synthesized
aacataaatgcatcataagcat

SEQ ID NO: 14189 - DNA, 22 bp, Artificial Sequence
  chemically synthesized
tcgatctatttagttttaaaaa

SEQ ID NO: 14190 - DNA, 22 bp, Artificial Sequence
  chemically synthesized
tttagttttaaaaatgaagaag

SEQ ID NO: 14191 - DNA, 22 bp, Artificial Sequence
  chemically synthesized
agttttaaaaatgaagaagaag

SEQ ID NO: 14192 - DNA, 22 bp, Artificial Sequence
  chemically synthesized
gttttaaaaatgaagaagaaga

SEQ ID NO: 14193 - DNA, 22 bp, Artificial Sequence
  chemically synthesized
taaaaatgaagaagaagaaaac

SEQ ID NO: 14194 - DNA, 22 bp, Artificial Sequence
  chemically synthesized
aaaaatgaagaagaagaaaacc

SEQ ID NO: 14195 - DNA, 22 bp, Artificial Sequence
  chemically synthesized
aaaatgaagaagaagaaaacct

SEQ ID NO: 14196 - DNA, 22 bp, Artificial Sequence
  chemically synthesized
gctaacaaagaaccagtactta

SEQ ID NO: 14197 - DNA, 22 bp, Artificial Sequence
  chemically synthesized
acaaagaaccagtacttaccaa

SEQ ID NO: 14198 - DNA, 22 bp, Artificial Sequence
  chemically synthesized
accaacctgcgtgctggctgtt

SEQ ID NO: 14199 - DNA, 22 bp, Artificial Sequence
  chemically synthesized
ccaacctgcgtgctggctgtta

SEQ ID NO: 14200 - DNA, 22 bp, Artificial Sequence
  chemically synthesized
cgtgctggctgttagactcttc

SEQ ID NO: 14201 - DNA, 22 bp, Artificial Sequence
  chemically synthesized
gctgttagactcttcaatattg

SEQ ID NO: 14202 - DNA, 22 bp, Artificial Sequence
  chemically synthesized
ttagactcttcaatattgctgt

SEQ ID NO: 14203 - DNA, 22 bp, Artificial Sequence
  chemically synthesized
gactcttcaatattgctgtcaa

SEQ ID NO: 14204 - DNA, 22 bp, Artificial Sequence
  chemically synthesized
ttcaatattgctgtcaaatcat

SEQ ID NO: 14205 - DNA, 22 bp, Artificial Sequence
  chemically synthesized
caatattgctgtcaaatcatgt

SEQ ID NO: 14206 - DNA, 22 bp, Artificial Sequence
  chemically synthesized
aatattgctgtcaaatcatgta

SEQ ID NO: 14207 - DNA, 22 bp, Artificial Sequence
  chemically synthesized
ctgtcaaatcatgtaatcaaaa

SEQ ID NO: 14208 - DNA, 22 bp, Artificial Sequence
  chemically synthesized
tcaaatcatgtaatcaaaattt

SEQ ID NO: 14209 - DNA, 22 bp, Artificial Sequence
  chemically synthesized
agtgaagaagacagcatcagat

SEQ ID NO: 14210 - DNA, 22 bp, Artificial Sequence
  chemically synthesized
gtgaagaagacagcatcagata

SEQ ID NO: 14211 - DNA, 22 bp, Artificial Sequence
  chemically synthesized
ctatatctaaaaggcaagcata

SEQ ID NO: 14212 - DNA, 22 bp, Artificial Sequence
  chemically synthesized
tatatctaaaaggcaagcatac

SEQ ID NO: 14213 - DNA, 22 bp, Artificial Sequence
  chemically synthesized
tatctaaaaggcaagcatactc

SEQ ID NO: 14214 - DNA, 22 bp, Artificial Sequence
  chemically synthesized
aaaggcaagcatactcaatgta

SEQ ID NO: 14215 - DNA, 22 bp, Artificial Sequence
  chemically synthesized
aatgtattttaaaaaaggaaac

SEQ ID NO: 14216 - DNA, 22 bp, Artificial Sequence
  chemically synthesized
taaaaaaggaaacaaacctgta

SEQ ID NO: 14217 - DNA, 22 bp, Artificial Sequence
  chemically synthesized
aaaaaaggaaacaaacctgtac

SEQ ID NO: 14218 - DNA, 22 bp, Artificial Sequence
  chemically synthesized
aaaaaggaaacaaacctgtaca

SEQ ID NO: 14219 - DNA, 22 bp, Artificial Sequence
  chemically synthesized
tacattcagcactgagtagata

SEQ ID NO: 14220 - DNA, 22 bp, Artificial Sequence
  chemically synthesized
agcactgagtagatatcctaaa

SEQ ID NO: 14221 - DNA, 22 bp, Artificial Sequence
  chemically synthesized
agtagatatcctaaaaggcaga

SEQ ID NO: 14222 - DNA, 22 bp, Artificial Sequence
  chemically synthesized
aaaggcagatggtgatgaggcc

SEQ ID NO: 14223 - DNA, 22 bp, Artificial Sequence
  chemically synthesized
gtgattctgccatgatcatgtt

SEQ ID NO: 14224 - DNA, 22 bp, Artificial Sequence
  chemically synthesized
tgccatgatcatgttcacgcgc

SEQ ID NO: 14225 - DNA, 22 bp, Artificial Sequence
  chemically synthesized
ccatgatcatgttcacgcgctg

SEQ ID NO: 14226 - DNA, 22 bp, Artificial Sequence
  chemically synthesized
acgcgctgcataacctttgcta

SEQ ID NO: 14227 - DNA, 22 bp, Artificial Sequence
  chemically synthesized
cataacctttgctagcagattg

SEQ ID NO: 14228 - DNA, 22 bp, Artificial Sequence
  chemically synthesized
tgctagcagattgtgaaagtgg

SEQ ID NO: 14229 - DNA, 22 bp, Artificial Sequence
  chemically synthesized
gctagcagattgtgaaagtggt

SEQ ID NO: 14230 - DNA, 20 bp, Artificial Sequence
  chemically synthesized
tttagacaaacgtggttttt

SEQ ID NO: 14231 - DNA, 20 bp, Artificial Sequence
  chemically synthesized
aaacgtggtttttgagtcca

SEQ ID NO: 14232 - DNA, 20 bp, Artificial Sequence
  chemically synthesized
tggtttttgagtccaaagat

SEQ ID NO: 14233 - DNA, 20 bp, Artificial Sequence
  chemically synthesized
ggtttttgagtccaaagatc

SEQ ID NO: 14234 - DNA, 20 bp, Artificial Sequence
  chemically synthesized
gtttttgagtccaaagatca

SEQ ID NO: 14235 - DNA, 20 bp, Artificial Sequence
  chemically synthesized
ttgagtccaaagatcagggc

SEQ ID NO: 14236 - DNA, 20 bp, Artificial Sequence
  chemically synthesized
tgagtccaaagatcagggct

SEQ ID NO: 14237 - DNA, 20 bp, Artificial Sequence
  chemically synthesized
ggctgggttgacctgaatac

SEQ ID NO: 14238 - DNA, 20 bp, Artificial Sequence
  chemically synthesized
gttgacctgaatactggata

SEQ ID NO: 14239 - DNA, 20 bp, Artificial Sequence
  chemically synthesized
ttgacctgaatactggatac

SEQ ID NO: 14240 - DNA, 20 bp, Artificial Sequence
  chemically synthesized
tgacctgaatactggataca

SEQ ID NO: 14241 - DNA, 20 bp, Artificial Sequence
  chemically synthesized
tggatacagggcatataaaa

SEQ ID NO: 14242 - DNA, 20 bp, Artificial Sequence
  chemically synthesized
ggatacagggcatataaaac

SEQ ID NO: 14243 - DNA, 20 bp, Artificial Sequence
  chemically synthesized
gatacagggcatataaaaca

SEQ ID NO: 14244 - DNA, 20 bp, Artificial Sequence
  chemically synthesized
atacagggcatataaaacag

SEQ ID NO: 14245 - DNA, 20 bp, Artificial Sequence
  chemically synthesized
agggcatataaaacaggggc

SEQ ID NO: 14246 - DNA, 20 bp, Artificial Sequence
  chemically synthesized
gggcatataaaacaggggca

SEQ ID NO: 14247 - DNA, 20 bp, Artificial Sequence
  chemically synthesized
tataaaacaggggcaaggca

SEQ ID NO: 14248 - DNA, 20 bp, Artificial Sequence
  chemically synthesized
aggggcaaggcacagactca

SEQ ID NO: 14249 - DNA, 20 bp, Artificial Sequence
  chemically synthesized
ggcaaggcacagactcatag

SEQ ID NO: 14250 - DNA, 20 bp, Artificial Sequence
  chemically synthesized
caaggcacagactcatagca

SEQ ID NO: 14251 - DNA, 20 bp, Artificial Sequence
  chemically synthesized
atagcagagcaatcaccacc

SEQ ID NO: 14252 - DNA, 20 bp, Artificial Sequence
  chemically synthesized
agagcaatcaccaccaagcc

SEQ ID NO: 14253 - DNA, 20 bp, Artificial Sequence
  chemically synthesized
accaagcctggaataactgc

SEQ ID NO: 14254 - DNA, 20 bp, Artificial Sequence
  chemically synthesized
ccaagcctggaataactgca

SEQ ID NO: 14255 - DNA, 20 bp, Artificial Sequence
  chemically synthesized
caagcctggaataactgcaa

SEQ ID NO: 14256 - DNA, 20 bp, Artificial Sequence
  chemically synthesized
ggctctgctgacatcttcct

SEQ ID NO: 14257 - DNA, 20 bp, Artificial Sequence
  chemically synthesized
gctctgctgacatcttcctg

SEQ ID NO: 14258 - DNA, 20 bp, Artificial Sequence
  chemically synthesized
tgacatcttcctgaggtgcc

SEQ ID NO: 14259 - DNA, 20 bp, Artificial Sequence
  chemically synthesized
gacatcttcctgaggtgcca

SEQ ID NO: 14260 - DNA, 20 bp, Artificial Sequence
  chemically synthesized
tcctgaggtgccaaggaaat

SEQ ID NO: 14261 - DNA, 20 bp, Artificial Sequence
  chemically synthesized
cctgaggtgccaaggaaatg

SEQ ID NO: 14262 - DNA, 20 bp, Artificial Sequence
  chemically synthesized
aggtgccaaggaaatgagga

SEQ ID NO: 14263 - DNA, 20 bp, Artificial Sequence
  chemically synthesized
gtgccaaggaaatgaggatg

SEQ ID NO: 14264 - DNA, 20 bp, Artificial Sequence
  chemically synthesized
tgccaaggaaatgaggatgg

SEQ ID NO: 14265 - DNA, 20 bp, Artificial Sequence
  chemically synthesized
caaggaaatgaggatggagg

SEQ ID NO: 14266 - DNA, 20 bp, Artificial Sequence
  chemically synthesized
aaggaaatgaggatggagga

SEQ ID NO: 14267 - DNA, 20 bp, Artificial Sequence
  chemically synthesized
atgaatgttctccatgactt

SEQ ID NO: 14268 - DNA, 20 bp, Artificial Sequence
  chemically synthesized
tgaatgttctccatgacttt

SEQ ID NO: 14269 - DNA, 20 bp, Artificial Sequence
  chemically synthesized
ttctccatgactttgggatc

SEQ ID NO: 14270 - DNA, 20 bp, Artificial Sequence
  chemically synthesized
tccagtcaacacattacctc

SEQ ID NO: 14271 - DNA, 20 bp, Artificial Sequence
  chemically synthesized
ccagtcaacacattacctcc

SEQ ID NO: 14272 - DNA, 20 bp, Artificial Sequence
  chemically synthesized
ttacctccaggtgaattacc

SEQ ID NO: 14273 - DNA, 20 bp, Artificial Sequence
  chemically synthesized
aggtgaattaccaagactcc

SEQ ID NO: 14274 - DNA, 20 bp, Artificial Sequence
  chemically synthesized
ggtgaattaccaagactccc

SEQ ID NO: 14275 - DNA, 20 bp, Artificial Sequence
  chemically synthesized
attaccaagactcccaggac

SEQ ID NO: 14276 - DNA, 20 bp, Artificial Sequence
  chemically synthesized
ctcccaggactggttcatct

SEQ ID NO: 14277 - DNA, 20 bp, Artificial Sequence
  chemically synthesized
catcttggtgtccgtgatcg

SEQ ID NO: 14278 - DNA, 20 bp, Artificial Sequence
  chemically synthesized
gtgtccgtgatcgcagacct

SEQ ID NO: 14279 - DNA, 20 bp, Artificial Sequence
  chemically synthesized
tgtccgtgatcgcagacctc

SEQ ID NO: 14280 - DNA, 20 bp, Artificial Sequence
  chemically synthesized
tctacgtcctcttccccatc

SEQ ID NO: 14281 - DNA, 20 bp, Artificial Sequence
  chemically synthesized
tccccatctggttccatctt

SEQ ID NO: 14282 - DNA, 20 bp, Artificial Sequence
  chemically synthesized
ccccatctggttccatcttc

SEQ ID NO: 14283 - DNA, 20 bp, Artificial Sequence
  chemically synthesized
catctggttccatcttcagg

SEQ ID NO: 14284 - DNA, 20 bp, Artificial Sequence
  chemically synthesized
gttccatcttcaggaagctg

SEQ ID NO: 14285 - DNA, 20 bp, Artificial Sequence
  chemically synthesized
ttccatcttcaggaagctgt

SEQ ID NO: 14286 - DNA, 20 bp, Artificial Sequence
  chemically synthesized
ctgtgggcattaaactcctt

SEQ ID NO: 14287 - DNA, 20 bp, Artificial Sequence
  chemically synthesized
tgtgggcattaaactccttt

SEQ ID NO: 14288 - DNA, 20 bp, Artificial Sequence
  chemically synthesized
gggcattaaactcctttggg

SEQ ID NO: 14289 - DNA, 20 bp, Artificial Sequence
  chemically synthesized
ctcctttgggtagctgtgat

SEQ ID NO: 14290 - DNA, 20 bp, Artificial Sequence
  chemically synthesized
cctttgggtagctgtgattg

SEQ ID NO: 14291 - DNA, 20 bp, Artificial Sequence
  chemically synthesized
gggtagctgtgattggagac

SEQ ID NO: 14292 - DNA, 20 bp, Artificial Sequence
  chemically synthesized
actggctcaacctcgtcttt

SEQ ID NO: 14293 - DNA, 20 bp, Artificial Sequence
  chemically synthesized
ggctcaacctcgtctttaag

SEQ ID NO: 14294 - DNA, 20 bp, Artificial Sequence
  chemically synthesized
caacctcgtctttaagtggt

SEQ ID NO: 14295 - DNA, 20 bp, Artificial Sequence
  chemically synthesized
tttaagtggtaagaaccata

SEQ ID NO: 14296 - DNA, 20 bp, Artificial Sequence
  chemically synthesized
taagtggtaagaaccatata

SEQ ID NO: 14297 - DNA, 20 bp, Artificial Sequence
  chemically synthesized
agtggtaagaaccatataga

SEQ ID NO: 14298 - DNA, 20 bp, Artificial Sequence
  chemically synthesized
gtggtaagaaccatatagag

SEQ ID NO: 14299 - DNA, 20 bp, Artificial Sequence
  chemically synthesized
ggtaagaaccatatagagag

SEQ ID NO: 14300 - DNA, 20 bp, Artificial Sequence
  chemically synthesized
gaaccatatagagaggagat

SEQ ID NO: 14301 - DNA, 20 bp, Artificial Sequence
  chemically synthesized
catatagagaggagatcagc

SEQ ID NO: 14302 - DNA, 20 bp, Artificial Sequence
  chemically synthesized
agagaggagatcagcaagaa

SEQ ID NO: 14303 - DNA, 20 bp, Artificial Sequence
  chemically synthesized
agaggagatcagcaagaaaa

SEQ ID NO: 14304 - DNA, 20 bp, Artificial Sequence
  chemically synthesized
gaggagatcagcaagaaaag

SEQ ID NO: 14305 - DNA, 20 bp, Artificial Sequence
  chemically synthesized
agatcagcaagaaaagaggc

SEQ ID NO: 14306 - DNA, 20 bp, Artificial Sequence
  chemically synthesized
ctctcgcaatgtctgtccat

SEQ ID NO: 14307 - DNA, 20 bp, Artificial Sequence
  chemically synthesized
tcgcaatgtctgtccatcag

SEQ ID NO: 14308 - DNA, 20 bp, Artificial Sequence
  chemically synthesized
ccatcagaagttgctttccc

SEQ ID NO: 14309 - DNA, 20 bp, Artificial Sequence
  chemically synthesized
catcagaagttgctttcccc

SEQ ID NO: 14310 - DNA, 20 bp, Artificial Sequence
  chemically synthesized
gttgctttccccaggctatt

SEQ ID NO: 14311 - DNA, 20 bp, Artificial Sequence
  chemically synthesized
ttgctttccccaggctattc

SEQ ID NO: 14312 - DNA, 20 bp, Artificial Sequence
  chemically synthesized
ctttccccaggctattcagg

SEQ ID NO: 14313 - DNA, 20 bp, Artificial Sequence
  chemically synthesized
ccaggctattcaggaagcca

SEQ ID NO: 14314 - DNA, 20 bp, Artificial Sequence
  chemically synthesized
caggctattcaggaagccac

SEQ ID NO: 14315 - DNA, 20 bp, Artificial Sequence
  chemically synthesized
ccaacccctctctctgactt

SEQ ID NO: 14316 - DNA, 20 bp, Artificial Sequence
  chemically synthesized
gactttggatcatctacata

SEQ ID NO: 14317 - DNA, 20 bp, Artificial Sequence
  chemically synthesized
actttggatcatctacataa

SEQ ID NO: 14318 - DNA, 20 bp, Artificial Sequence
  chemically synthesized
ctttggatcatctacataaa

SEQ ID NO: 14319 - DNA, 20 bp, Artificial Sequence
  chemically synthesized
tttggatcatctacataaag

SEQ ID NO: 14320 - DNA, 20 bp, Artificial Sequence
  chemically synthesized
ttggatcatctacataaagg

SEQ ID NO: 14321 - DNA, 20 bp, Artificial Sequence
  chemically synthesized
gatcatctacataaaggggg

SEQ ID NO: 14322 - DNA, 20 bp, Artificial Sequence
  chemically synthesized
atctacataaagggggaaga

SEQ ID NO: 14323 - DNA, 20 bp, Artificial Sequence
  chemically synthesized
gaagacagaaaaaatcctac

SEQ ID NO: 14324 - DNA, 20 bp, Artificial Sequence
  chemically synthesized
acagaaaaaatcctaccagt

SEQ ID NO: 14325 - DNA, 20 bp, Artificial Sequence
  chemically synthesized
ctaccagtgagttgaaaata

SEQ ID NO: 14326 - DNA, 20 bp, Artificial Sequence
  chemically synthesized
taccagtgagttgaaaatac

SEQ ID NO: 14327 - DNA, 20 bp, Artificial Sequence
  chemically synthesized
agtgagttgaaaatacagga

SEQ ID NO: 14328 - DNA, 20 bp, Artificial Sequence
  chemically synthesized
acaggaaagcctatttcata

SEQ ID NO: 14329 - DNA, 20 bp, Artificial Sequence
  chemically synthesized
caggaaagcctatttcatat

SEQ ID NO: 14330 - DNA, 20 bp, Artificial Sequence
  chemically synthesized
agcctatttcatatgggtta

SEQ ID NO: 14331 - DNA, 20 bp, Artificial Sequence
  chemically synthesized
gcctatttcatatgggttaa

SEQ ID NO: 14332 - DNA, 20 bp, Artificial Sequence
  chemically synthesized
cctatttcatatgggttaaa

SEQ ID NO: 14333 - DNA, 20 bp, Artificial Sequence
  chemically synthesized
atttcatatgggttaaaggg

SEQ ID NO: 14334 - DNA, 20 bp, Artificial Sequence
  chemically synthesized
tttcatatgggttaaagggt

SEQ ID NO: 14335 - DNA, 20 bp, Artificial Sequence
  chemically synthesized
atatgggttaaagggtagga

SEQ ID NO: 14336 - DNA, 20 bp, Artificial Sequence
  chemically synthesized
ggacagttgaatttcgtgaa

SEQ ID NO: 14337 - DNA, 20 bp, Artificial Sequence
  chemically synthesized
ttgaatttcgtgaaaagtct

SEQ ID NO: 14338 - DNA, 20 bp, Artificial Sequence
  chemically synthesized
cgtgaaaagtctgagttata

SEQ ID NO: 14339 - DNA, 20 bp, Artificial Sequence
  chemically synthesized
gtgaaaagtctgagttatat

SEQ ID NO: 14340 - DNA, 20 bp, Artificial Sequence
  chemically synthesized
gtctgagttatataggcttt

SEQ ID NO: 14341 - DNA, 20 bp, Artificial Sequence
  chemically synthesized
agttatataggctttgagca

SEQ ID NO: 14342 - DNA, 20 bp, Artificial Sequence
  chemically synthesized
ttatataggctttgagcaaa

SEQ ID NO: 14343 - DNA, 20 bp, Artificial Sequence
  chemically synthesized
ctttgagcaaagagttttat

SEQ ID NO: 14344 - DNA, 20 bp, Artificial Sequence
  chemically synthesized
caaagagttttattagtatg

SEQ ID NO: 14345 - DNA, 20 bp, Artificial Sequence
  chemically synthesized
agagttttattagtatgaag

SEQ ID NO: 14346 - DNA, 20 bp, Artificial Sequence
  chemically synthesized
gttttattagtatgaagcag

SEQ ID NO: 14347 - DNA, 20 bp, Artificial Sequence
  chemically synthesized
tttattagtatgaagcagaa

SEQ ID NO: 14348 - DNA, 20 bp, Artificial Sequence
  chemically synthesized
ttattagtatgaagcagaag

SEQ ID NO: 14349 - DNA, 20 bp, Artificial Sequence
  chemically synthesized
gaagcagaagaggtaacata

SEQ ID NO: 14350 - DNA, 20 bp, Artificial Sequence
  chemically synthesized
cagaagaggtaacataaaga

SEQ ID NO: 14351 - DNA, 20 bp, Artificial Sequence
  chemically synthesized
gtaacataaagaaagatgta

SEQ ID NO: 14352 - DNA, 20 bp, Artificial Sequence
  chemically synthesized
taacataaagaaagatgtat

SEQ ID NO: 14353 - DNA, 20 bp, Artificial Sequence
  chemically synthesized
aacataaagaaagatgtatg

SEQ ID NO: 14354 - DNA, 20 bp, Artificial Sequence
  chemically synthesized
taaagaaagatgtatggggc

SEQ ID NO: 14355 - DNA, 20 bp, Artificial Sequence
  chemically synthesized
aaagaaagatgtatggggcc

SEQ ID NO: 14356 - DNA, 20 bp, Artificial Sequence
  chemically synthesized
aagatgtatggggccaggca

SEQ ID NO: 14357 - DNA, 20 bp, Artificial Sequence
  chemically synthesized
atgtatggggccaggcatgg

SEQ ID NO: 14358 - DNA, 20 bp, Artificial Sequence
  chemically synthesized
gtggctcacacctgtaatcc

SEQ ID NO: 14359 - DNA, 20 bp, Artificial Sequence
  chemically synthesized
cacctgtaatcccagcactt

SEQ ID NO: 14360 - DNA, 20 bp, Artificial Sequence
  chemically synthesized
acctgtaatcccagcacttt

SEQ ID NO: 14361 - DNA, 20 bp, Artificial Sequence
  chemically synthesized
ctgtaatcccagcactttgg

SEQ ID NO: 14362 - DNA, 20 bp, Artificial Sequence
  chemically synthesized
tgtaatcccagcactttggg

SEQ ID NO: 14363 - DNA, 20 bp, Artificial Sequence
  chemically synthesized
tcccagcactttgggaggcc

SEQ ID NO: 14364 - DNA, 20 bp, Artificial Sequence
  chemically synthesized
cccagcactttgggaggccg

SEQ ID NO: 14365 - DNA, 20 bp, Artificial Sequence
  chemically synthesized
agcactttgggaggccgagg

SEQ ID NO: 14366 - DNA, 20 bp, Artificial Sequence
  chemically synthesized
gcactttgggaggccgaggt

SEQ ID NO: 14367 - DNA, 20 bp, Artificial Sequence
  chemically synthesized
cgaggtgggcgaatcactcc

SEQ ID NO: 14368 - DNA, 20 bp, Artificial Sequence
  chemically synthesized
gaggtgggcgaatcactcct

SEQ ID NO: 14369 - DNA, 20 bp, Artificial Sequence
  chemically synthesized
gaatcactcctgggtgaact

SEQ ID NO: 14370 - DNA, 20 bp, Artificial Sequence
  chemically synthesized
aatcactcctgggtgaactc

SEQ ID NO: 14371 - DNA, 20 bp, Artificial Sequence
  chemically synthesized
tcactcctgggtgaactcag

SEQ ID NO: 14372 - DNA, 20 bp, Artificial Sequence
  chemically synthesized
ctgggtgaactcaggagttc

SEQ ID NO: 14373 - DNA, 20 bp, Artificial Sequence
  chemically synthesized
tgaactcaggagttcaagac

SEQ ID NO: 14374 - DNA, 20 bp, Artificial Sequence
  chemically synthesized
tcaggagttcaagaccagcc

SEQ ID NO: 14375 - DNA, 20 bp, Artificial Sequence
  chemically synthesized
caggagttcaagaccagcct

SEQ ID NO: 14376 - DNA, 20 bp, Artificial Sequence
  chemically synthesized
caagaccagcctgggcaaca

SEQ ID NO: 14377 - DNA, 20 bp, Artificial Sequence
  chemically synthesized
tacaaaaacattacgaaaat

SEQ ID NO: 14378 - DNA, 20 bp, Artificial Sequence
  chemically synthesized
aaaacattacgaaaattagc

SEQ ID NO: 14379 - DNA, 20 bp, Artificial Sequence
  chemically synthesized
aaacattacgaaaattagct

SEQ ID NO: 14380 - DNA, 20 bp, Artificial Sequence
  chemically synthesized
cgaaaattagctgggcgtgt

SEQ ID NO: 14381 - DNA, 20 bp, Artificial Sequence
  chemically synthesized
agctgggcgtgttggtgctg

SEQ ID NO: 14382 - DNA, 20 bp, Artificial Sequence
  chemically synthesized
gcgtgttggtgctgtagtcc

SEQ ID NO: 14383 - DNA, 20 bp, Artificial Sequence
  chemically synthesized
gtgctgtagtcccagctact

SEQ ID NO: 14384 - DNA, 20 bp, Artificial Sequence
  chemically synthesized
tgctgtagtcccagctactc

SEQ ID NO: 14385 - DNA, 20 bp, Artificial Sequence
  chemically synthesized
ctgtagtcccagctactcag

SEQ ID NO: 14386 - DNA, 20 bp, Artificial Sequence
  chemically synthesized
tgtagtcccagctactcagg

SEQ ID NO: 14387 - DNA, 20 bp, Artificial Sequence
  chemically synthesized
tcccagctactcaggaggct

SEQ ID NO: 14388 - DNA, 20 bp, Artificial Sequence
  chemically synthesized
cccagctactcaggaggctg

SEQ ID NO: 14389 - DNA, 20 bp, Artificial Sequence
  chemically synthesized
gctactcaggaggctgaggt

SEQ ID NO: 14390 - DNA, 20 bp, Artificial Sequence
  chemically synthesized
tactcaggaggctgaggtga

SEQ ID NO: 14391 - DNA, 20 bp, Artificial Sequence
  chemically synthesized
actcaggaggctgaggtgag

SEQ ID NO: 14392 - DNA, 20 bp, Artificial Sequence
  chemically synthesized
caggaggctgaggtgagagg

SEQ ID NO: 14393 - DNA, 20 bp, Artificial Sequence
  chemically synthesized
ggaggctgaggtgagaggcg

SEQ ID NO: 14394 - DNA, 20 bp, Artificial Sequence
  chemically synthesized
gaggctgaggtgagaggcgg

SEQ ID NO: 14395 - DNA, 20 bp, Artificial Sequence
  chemically synthesized
ggctgaggtgagaggcggag

SEQ ID NO: 14396 - DNA, 20 bp, Artificial Sequence
  chemically synthesized
gctgaggtgagaggcggagg

SEQ ID NO: 14397 - DNA, 20 bp, Artificial Sequence
  chemically synthesized
gtgagaggcggaggaggttg

SEQ ID NO: 14398 - DNA, 20 bp, Artificial Sequence
  chemically synthesized
gaggcggaggaggttgcagt

SEQ ID NO: 14399 - DNA, 20 bp, Artificial Sequence
  chemically synthesized
ggaggaggttgcagtgagtc

SEQ ID NO: 14400 - DNA, 20 bp, Artificial Sequence
  chemically synthesized
aagatcatgccactgcactc

SEQ ID NO: 14401 - DNA, 20 bp, Artificial Sequence
  chemically synthesized
catgccactgcactccagcc

SEQ ID NO: 14402 - DNA, 20 bp, Artificial Sequence
  chemically synthesized
atgccactgcactccagcct

SEQ ID NO: 14403 - DNA, 20 bp, Artificial Sequence
  chemically synthesized
ctgcactccagcctgggcaa

SEQ ID NO: 14404 - DNA, 20 bp, Artificial Sequence
  chemically synthesized
gcactccagcctgggcaaca

SEQ ID NO: 14405 - DNA, 20 bp, Artificial Sequence
  chemically synthesized
tccagcctgggcaacagagt

SEQ ID NO: 14406 - DNA, 20 bp, Artificial Sequence
  chemically synthesized
cctgtctcaaaaaaaaaaaa

SEQ ID NO: 14407 - DNA, 20 bp, Artificial Sequence
  chemically synthesized
tctcaaaaaaaaaaaaaaga

SEQ ID NO: 14408 - DNA, 20 bp, Artificial Sequence
  chemically synthesized
tgatgtatgctgtatgaaaa

SEQ ID NO: 14409 - DNA, 20 bp, Artificial Sequence
  chemically synthesized
gatgtatgctgtatgaaaaa

SEQ ID NO: 14410 - DNA, 20 bp, Artificial Sequence
  chemically synthesized
gtatgaaaaaaggaaacaca

SEQ ID NO: 14411 - DNA, 20 bp, Artificial Sequence
  chemically synthesized
gaaacacacagatgattcaa

SEQ ID NO: 14412 - DNA, 20 bp, Artificial Sequence
  chemically synthesized
tgattcaacagcctgttttg

SEQ ID NO: 14413 - DNA, 20 bp, Artificial Sequence
  chemically synthesized
gattcaacagcctgttttgt

SEQ ID NO: 14414 - DNA, 20 bp, Artificial Sequence
  chemically synthesized
attcaacagcctgttttgtg

SEQ ID NO: 14415 - DNA, 20 bp, Artificial Sequence
  chemically synthesized
ctgttttgtggggtaatgaa

SEQ ID NO: 14416 - DNA, 20 bp, Artificial Sequence
  chemically synthesized
ggggtaatgaaaagtcaccc

SEQ ID NO: 14417 - DNA, 20 bp, Artificial Sequence
  chemically synthesized
gggtaatgaaaagtcaccct

SEQ ID NO: 14418 - DNA, 20 bp, Artificial Sequence
  chemically synthesized
tgaaaagtcaccctgggaac

SEQ ID NO: 14419 - DNA, 20 bp, Artificial Sequence
  chemically synthesized
gaaaagtcaccctgggaact

SEQ ID NO: 14420 - DNA, 20 bp, Artificial Sequence
  chemically synthesized
tcaccctgggaactgggctc

SEQ ID NO: 14421 - DNA, 20 bp, Artificial Sequence
  chemically synthesized
acccaccaactacatgtcct

SEQ ID NO: 14422 - DNA, 20 bp, Artificial Sequence
  chemically synthesized
accaactacatgtccttggc

SEQ ID NO: 14423 - DNA, 20 bp, Artificial Sequence
  chemically synthesized
gcaagtcatatcaattatct

SEQ ID NO: 14424 - DNA, 20 bp, Artificial Sequence
  chemically synthesized
tctgttttataatctacaaa

SEQ ID NO: 14425 - DNA, 20 bp, Artificial Sequence
  chemically synthesized
ctgttttataatctacaaat

SEQ ID NO: 14426 - DNA, 20 bp, Artificial Sequence
  chemically synthesized
atctacaaataggttatctc

SEQ ID NO: 14427 - DNA, 20 bp, Artificial Sequence
  chemically synthesized
tacaaataggttatctctgg

SEQ ID NO: 14428 - DNA, 20 bp, Artificial Sequence
  chemically synthesized
tctggcagcttaataataat

SEQ ID NO: 14429 - DNA, 20 bp, Artificial Sequence
  chemically synthesized
ctggcagcttaataataatc

SEQ ID NO: 14430 - DNA, 20 bp, Artificial Sequence
  chemically synthesized
tggcagcttaataataatca

SEQ ID NO: 14431 - DNA, 20 bp, Artificial Sequence
  chemically synthesized
cagggttaacatttattaaa

SEQ ID NO: 14432 - DNA, 20 bp, Artificial Sequence
  chemically synthesized
atttattaaacagtgtgtgc

SEQ ID NO: 14433 - DNA, 20 bp, Artificial Sequence
  chemically synthesized
tgtgctatgtgcttttctgt

SEQ ID NO: 14434 - DNA, 20 bp, Artificial Sequence
  chemically synthesized
gtgctatgtgcttttctgtg

SEQ ID NO: 14435 - DNA, 20 bp, Artificial Sequence
  chemically synthesized
ctatgtgcttttctgtgagg

SEQ ID NO: 14436 - DNA, 20 bp, Artificial Sequence
  chemically synthesized
gaggtagttactgctattta

SEQ ID NO: 14437 - DNA, 20 bp, Artificial Sequence
  chemically synthesized
gttactgctatttacagaaa

SEQ ID NO: 14438 - DNA, 20 bp, Artificial Sequence
  chemically synthesized
actgctatttacagaaacag

SEQ ID NO: 14439 - DNA, 20 bp, Artificial Sequence
  chemically synthesized
atttacagaaacagtagatg

SEQ ID NO: 14440 - DNA, 20 bp, Artificial Sequence
  chemically synthesized
ttacagaaacagtagatgca

SEQ ID NO: 14441 - DNA, 20 bp, Artificial Sequence
  chemically synthesized
aaacagtagatgcagagacc

SEQ ID NO: 14442 - DNA, 20 bp, Artificial Sequence
  chemically synthesized
aacagtagatgcagagacca

SEQ ID NO: 14443 - DNA, 20 bp, Artificial Sequence
  chemically synthesized
gatgcagagaccaaggtgct

SEQ ID NO: 14444 - DNA, 20 bp, Artificial Sequence
  chemically synthesized
aaggtgctgagttaaatgat

SEQ ID NO: 14445 - DNA, 20 bp, Artificial Sequence
  chemically synthesized
aggtgctgagttaaatgatt

SEQ ID NO: 14446 - DNA, 20 bp, Artificial Sequence
  chemically synthesized
agttaaatgattaggccaac

SEQ ID NO: 14447 - DNA, 20 bp, Artificial Sequence
  chemically synthesized
gttaaatgattaggccaaca

SEQ ID NO: 14448 - DNA, 20 bp, Artificial Sequence
  chemically synthesized
aatgattaggccaacaaggt

SEQ ID NO: 14449 - DNA, 20 bp, Artificial Sequence
  chemically synthesized
caacaaggttagtacatgcc

SEQ ID NO: 14450 - DNA, 20 bp, Artificial Sequence
  chemically synthesized
aaggttagtacatgccgagc

SEQ ID NO: 14451 - DNA, 20 bp, Artificial Sequence
  chemically synthesized
aggttagtacatgccgagcc

SEQ ID NO: 14452 - DNA, 20 bp, Artificial Sequence
  chemically synthesized
tagtacatgccgagccagga

SEQ ID NO: 14453 - DNA, 20 bp, Artificial Sequence
  chemically synthesized
tacatgccgagccaggatgg

SEQ ID NO: 14454 - DNA, 20 bp, Artificial Sequence
  chemically synthesized
gccgagccaggatggaagcc

SEQ ID NO: 14455 - DNA, 20 bp, Artificial Sequence
  chemically synthesized
ccgagccaggatggaagccc

SEQ ID NO: 14456 - DNA, 20 bp, Artificial Sequence
  chemically synthesized
agccaggatggaagcccagg

SEQ ID NO: 14457 - DNA, 20 bp, Artificial Sequence
  chemically synthesized
gccaggatggaagcccaggt

SEQ ID NO: 14458 - DNA, 20 bp, Artificial Sequence
  chemically synthesized
aggatggaagcccaggtagg

SEQ ID NO: 14459 - DNA, 20 bp, Artificial Sequence
  chemically synthesized
ggatggaagcccaggtaggc

SEQ ID NO: 14460 - DNA, 20 bp, Artificial Sequence
  chemically synthesized
ggaagcccaggtaggcaggc

SEQ ID NO: 14461 - DNA, 20 bp, Artificial Sequence
  chemically synthesized
ggtaggcaggctggcttccg

SEQ ID NO: 14462 - DNA, 20 bp, Artificial Sequence
  chemically synthesized
cttatgaactatgttacgtc

SEQ ID NO: 14463 - DNA, 20 bp, Artificial Sequence
  chemically synthesized
gtgctgataaactgactctc

SEQ ID NO: 14464 - DNA, 20 bp, Artificial Sequence
  chemically synthesized
tgctgataaactgactctct

SEQ ID NO: 14465 - DNA, 20 bp, Artificial Sequence
  chemically synthesized
gctgataaactgactctctg

SEQ ID NO: 14466 - DNA, 20 bp, Artificial Sequence
  chemically synthesized
tgataaactgactctctggg

SEQ ID NO: 14467 - DNA, 20 bp, Artificial Sequence
  chemically synthesized
taaactgactctctggggag

SEQ ID NO: 14468 - DNA, 20 bp, Artificial Sequence
  chemically synthesized
aaactgactctctggggagc

SEQ ID NO: 14469 - DNA, 20 bp, Artificial Sequence
  chemically synthesized
aactgactctctggggagca

SEQ ID NO: 14470 - DNA, 20 bp, Artificial Sequence
  chemically synthesized
actgactctctggggagcag

SEQ ID NO: 14471 - DNA, 20 bp, Artificial Sequence
  chemically synthesized
actctctggggagcagggga

SEQ ID NO: 14472 - DNA, 20 bp, Artificial Sequence
  chemically synthesized
ggggagcaggggaaagccct

SEQ ID NO: 14473 - DNA, 20 bp, Artificial Sequence
  chemically synthesized
gcaggggaaagccctgagtt

SEQ ID NO: 14474 - DNA, 20 bp, Artificial Sequence
  chemically synthesized
tcacgtaaacattcccattc

SEQ ID NO: 14475 - DNA, 20 bp, Artificial Sequence
  chemically synthesized
tttcttttgtttgtttgttt

SEQ ID NO: 14476 - DNA, 20 bp, Artificial Sequence
  chemically synthesized
ttttgtttgtttgtttgaga

SEQ ID NO: 14477 - DNA, 20 bp, Artificial Sequence
  chemically synthesized
ttgtttgtttgtttgagatg

SEQ ID NO: 14478 - DNA, 20 bp, Artificial Sequence
  chemically synthesized
tggagtctcgcactgttgcc

SEQ ID NO: 14479 - DNA, 20 bp, Artificial Sequence
  chemically synthesized
gtctcgcactgttgcctggc

SEQ ID NO: 14480 - DNA, 20 bp, Artificial Sequence
  chemically synthesized
ctcgcactgttgcctggctg

SEQ ID NO: 14481 - DNA, 20 bp, Artificial Sequence
  chemically synthesized
gttgcctggctggagtgcaa

SEQ ID NO: 14482 - DNA, 20 bp, Artificial Sequence
  chemically synthesized
ggagtgcaatggtgcaatct

SEQ ID NO: 14483 - DNA, 20 bp, Artificial Sequence
  chemically synthesized
cactgcaacctctgcctctc

SEQ ID NO: 14484 - DNA, 20 bp, Artificial Sequence
  chemically synthesized
aacctctgcctctccggttc

SEQ ID NO: 14485 - DNA, 20 bp, Artificial Sequence
  chemically synthesized
ttcaagtgattctcctgcct

SEQ ID NO: 14486 - DNA, 20 bp, Artificial Sequence
  chemically synthesized
ttctcctgcctcagcctccc

SEQ ID NO: 14487 - DNA, 20 bp, Artificial Sequence
  chemically synthesized
tcctgcctcagcctcccaag

SEQ ID NO: 14488 - DNA, 20 bp, Artificial Sequence
  chemically synthesized
gcctcagcctcccaagtagc

SEQ ID NO: 14489 - DNA, 20 bp, Artificial Sequence
  chemically synthesized
cctcagcctcccaagtagct

SEQ ID NO: 14490 - DNA, 20 bp, Artificial Sequence
  chemically synthesized
ctcccaagtagctgggatta

SEQ ID NO: 14491 - DNA, 20 bp, Artificial Sequence
  chemically synthesized
tcccaagtagctgggattac

SEQ ID NO: 14492 - DNA, 20 bp, Artificial Sequence
  chemically synthesized
caggtgcccgccaccatgcc

SEQ ID NO: 14493 - DNA, 20 bp, Artificial Sequence
  chemically synthesized
gctaattttttttgtatttt

SEQ ID NO: 14494 - DNA, 20 bp, Artificial Sequence
  chemically synthesized
aattttttttgtatttttag

SEQ ID NO: 14495 - DNA, 20 bp, Artificial Sequence
  chemically synthesized
ttttttttgtatttttagta

SEQ ID NO: 14496 - DNA, 20 bp, Artificial Sequence
  chemically synthesized
ttgtatttttagtagagaca

SEQ ID NO: 14497 - DNA, 20 bp, Artificial Sequence
  chemically synthesized
catggtttcactatgttgac

SEQ ID NO: 14498 - DNA, 20 bp, Artificial Sequence
  chemically synthesized
atggtttcactatgttgact

SEQ ID NO: 14499 - DNA, 20 bp, Artificial Sequence
  chemically synthesized
tttcactatgttgactaggc

SEQ ID NO: 14500 - DNA, 20 bp, Artificial Sequence
  chemically synthesized
acctcatgatctgcctgcct

SEQ ID NO: 14501 - DNA, 20 bp, Artificial Sequence
  chemically synthesized
ctgcctgccttggcctccct

SEQ ID NO: 14502 - DNA, 20 bp, Artificial Sequence
  chemically synthesized
gccttggcctccctaagtgc

SEQ ID NO: 14503 - DNA, 20 bp, Artificial Sequence
  chemically synthesized
ccttggcctccctaagtgct

SEQ ID NO: 14504 - DNA, 20 bp, Artificial Sequence
  chemically synthesized
ctccctaagtgctaggatta

SEQ ID NO: 14505 - DNA, 20 bp, Artificial Sequence
  chemically synthesized
tccctaagtgctaggattac

SEQ ID NO: 14506 - DNA, 20 bp, Artificial Sequence
  chemically synthesized
agtgctaggattacaggcgt

SEQ ID NO: 14507 - DNA, 20 bp, Artificial Sequence
  chemically synthesized
caggcgtgagccactacacc

SEQ ID NO: 14508 - DNA, 20 bp, Artificial Sequence
  chemically synthesized
gcatgattctaaaaaataaa

SEQ ID NO: 14509 - DNA, 20 bp, Artificial Sequence
  chemically synthesized
ttctaaaaaataaaaagatg

SEQ ID NO: 14510 - DNA, 20 bp, Artificial Sequence
  chemically synthesized
caaacatctgatctccattg

SEQ ID NO: 14511 - DNA, 20 bp, Artificial Sequence
  chemically synthesized
gaagaaccatgcaatctctc

SEQ ID NO: 14512 - DNA, 20 bp, Artificial Sequence
  chemically synthesized
aagaaccatgcaatctctct

SEQ ID NO: 14513 - DNA, 20 bp, Artificial Sequence
  chemically synthesized
atgcaatctctctgggttga

SEQ ID NO: 14514 - DNA, 20 bp, Artificial Sequence
  chemically synthesized
gcaatctctctgggttgata

SEQ ID NO: 14515 - DNA, 20 bp, Artificial Sequence
  chemically synthesized
caatctctctgggttgatag

SEQ ID NO: 14516 - DNA, 20 bp, Artificial Sequence
  chemically synthesized
ctctctgggttgatagaggc

SEQ ID NO: 14517 - DNA, 20 bp, Artificial Sequence
  chemically synthesized
ctctgggttgatagaggcca

SEQ ID NO: 14518 - DNA, 20 bp, Artificial Sequence
  chemically synthesized
gggttgatagaggccagagt

SEQ ID NO: 14519 - DNA, 20 bp, Artificial Sequence
  chemically synthesized
ttgatagaggccagagttag

SEQ ID NO: 14520 - DNA, 20 bp, Artificial Sequence
  chemically synthesized
ttagtggctctccctgattt

SEQ ID NO: 14521 - DNA, 20 bp, Artificial Sequence
  chemically synthesized
tggctctccctgatttcggt

SEQ ID NO: 14522 - DNA, 20 bp, Artificial Sequence
  chemically synthesized
aaatcactattccaccatca

SEQ ID NO: 14523 - DNA, 20 bp, Artificial Sequence
  chemically synthesized
aatcactattccaccatcac

SEQ ID NO: 14524 - DNA, 20 bp, Artificial Sequence
  chemically synthesized
attccaccatcacgggataa

SEQ ID NO: 14525 - DNA, 20 bp, Artificial Sequence
  chemically synthesized
ttccaccatcacgggataaa

SEQ ID NO: 14526 - DNA, 20 bp, Artificial Sequence
  chemically synthesized
gggataaaaggcatcctgac

SEQ ID NO: 14527 - DNA, 20 bp, Artificial Sequence
  chemically synthesized
ataaaaggcatcctgactgg

SEQ ID NO: 14528 - DNA, 20 bp, Artificial Sequence
  chemically synthesized
gcggttgacacctatttcca

SEQ ID NO: 14529 - DNA, 20 bp, Artificial Sequence
  chemically synthesized
gacacctatttccacagtga

SEQ ID NO: 14530 - DNA, 20 bp, Artificial Sequence
  chemically synthesized
tccacagtgaaagatatatc

SEQ ID NO: 14531 - DNA, 20 bp, Artificial Sequence
  chemically synthesized
agatatatctagtactttta

SEQ ID NO: 14532 - DNA, 20 bp, Artificial Sequence
  chemically synthesized
gatatatctagtacttttaa

SEQ ID NO: 14533 - DNA, 20 bp, Artificial Sequence
  chemically synthesized
atatatctagtacttttaaa

SEQ ID NO: 14534 - DNA, 20 bp, Artificial Sequence
  chemically synthesized
tatatctagtacttttaaag

SEQ ID NO: 14535 - DNA, 20 bp, Artificial Sequence
  chemically synthesized
atctagtacttttaaagggg

SEQ ID NO: 14536 - DNA, 20 bp, Artificial Sequence
  chemically synthesized
tagtacttttaaaggggaag

SEQ ID NO: 14537 - DNA, 20 bp, Artificial Sequence
  chemically synthesized
aaaggggaagtggtttgtct

SEQ ID NO: 14538 - DNA, 20 bp, Artificial Sequence
  chemically synthesized
gtctgagatactctgtttca

SEQ ID NO: 14539 - DNA, 20 bp, Artificial Sequence
  chemically synthesized
tgagatactctgtttcaaag

SEQ ID NO: 14540 - DNA, 20 bp, Artificial Sequence
  chemically synthesized
agatactctgtttcaaagta

SEQ ID NO: 14541 - DNA, 20 bp, Artificial Sequence
  chemically synthesized
atactctgtttcaaagtaga

SEQ ID NO: 14542 - DNA, 20 bp, Artificial Sequence
  chemically synthesized
tactctgtttcaaagtagag

SEQ ID NO: 14543 - DNA, 20 bp, Artificial Sequence
  chemically synthesized
gtttcaaagtagagaggata

SEQ ID NO: 14544 - DNA, 20 bp, Artificial Sequence
  chemically synthesized
aagtagagaggatacagaac

SEQ ID NO: 14545 - DNA, 20 bp, Artificial Sequence
  chemically synthesized
ggatacagaacaagcatctg

SEQ ID NO: 14546 - DNA, 20 bp, Artificial Sequence
  chemically synthesized
tgaagctatatacatcctta

SEQ ID NO: 14547 - DNA, 20 bp, Artificial Sequence
  chemically synthesized
aagctatatacatccttaca

SEQ ID NO: 14548 - DNA, 20 bp, Artificial Sequence
  chemically synthesized
gctatatacatccttacaga

SEQ ID NO: 14549 - DNA, 20 bp, Artificial Sequence
  chemically synthesized
cttacagagagcaattctga

SEQ ID NO: 14550 - DNA, 20 bp, Artificial Sequence
  chemically synthesized
gagcaattctgatggaaatg

SEQ ID NO: 14551 - DNA, 20 bp, Artificial Sequence
  chemically synthesized
agcaattctgatggaaatgc

SEQ ID NO: 14552 - DNA, 20 bp, Artificial Sequence
  chemically synthesized
aaatgcaggccatgtttccc

SEQ ID NO: 14553 - DNA, 20 bp, Artificial Sequence
  chemically synthesized
aatgcaggccatgtttccct

SEQ ID NO: 14554 - DNA, 20 bp, Artificial Sequence
  chemically synthesized
atgcaggccatgtttccctg

SEQ ID NO: 14555 - DNA, 20 bp, Artificial Sequence
  chemically synthesized
tgcaggccatgtttccctgg

SEQ ID NO: 14556 - DNA, 20 bp, Artificial Sequence
  chemically synthesized
gcaggccatgtttccctggg

SEQ ID NO: 14557 - DNA, 20 bp, Artificial Sequence
  chemically synthesized
caggccatgtttccctgggg

SEQ ID NO: 14558 - DNA, 20 bp, Artificial Sequence
  chemically synthesized
aggccatgtttccctggggg

SEQ ID NO: 14559 - DNA, 20 bp, Artificial Sequence
  chemically synthesized
tccctggggggggctcgtcc

SEQ ID NO: 14560 - DNA, 20 bp, Artificial Sequence
  chemically synthesized
ccctggggggggctcgtcct

SEQ ID NO: 14561 - DNA, 20 bp, Artificial Sequence
  chemically synthesized
cctggggggggctcgtccta

SEQ ID NO: 14562 - DNA, 20 bp, Artificial Sequence
  chemically synthesized
ctggggggggctcgtcctag

SEQ ID NO: 14563 - DNA, 20 bp, Artificial Sequence
  chemically synthesized
ggggggctcgtcctaggggc

SEQ ID NO: 14564 - DNA, 20 bp, Artificial Sequence
  chemically synthesized
ggggctcgtcctaggggctg

SEQ ID NO: 14565 - DNA, 20 bp, Artificial Sequence
  chemically synthesized
tggagtgcattctctgatgt

SEQ ID NO: 14566 - DNA, 20 bp, Artificial Sequence
  chemically synthesized
gagtgcattctctgatgtca

SEQ ID NO: 14567 - DNA, 20 bp, Artificial Sequence
  chemically synthesized
agtgcattctctgatgtcag

SEQ ID NO: 14568 - DNA, 20 bp, Artificial Sequence
  chemically synthesized
tctgatgtcagaggaaatgc

SEQ ID NO: 14569 - DNA, 20 bp, Artificial Sequence
  chemically synthesized
gaggaaatgcaagattccct

SEQ ID NO: 14570 - DNA, 20 bp, Artificial Sequence
  chemically synthesized
aggaaatgcaagattccctg

SEQ ID NO: 14571 - DNA, 20 bp, Artificial Sequence
  chemically synthesized
tgcaagattccctgaggcct

SEQ ID NO: 14572 - DNA, 20 bp, Artificial Sequence
  chemically synthesized
gcaagattccctgaggcctg

SEQ ID NO: 14573 - DNA, 20 bp, Artificial Sequence
  chemically synthesized
caagattccctgaggcctga

SEQ ID NO: 14574 - DNA, 20 bp, Artificial Sequence
  chemically synthesized
ctgaggcctgagggaaccca

SEQ ID NO: 14575 - DNA, 20 bp, Artificial Sequence
  chemically synthesized
agggaacccatggtatatgc

SEQ ID NO: 14576 - DNA, 20 bp, Artificial Sequence
  chemically synthesized
cccatggtatatgcaagtcc

SEQ ID NO: 14577 - DNA, 20 bp, Artificial Sequence
  chemically synthesized
caagtccaagtttcaaactg

SEQ ID NO: 14578 - DNA, 20 bp, Artificial Sequence
  chemically synthesized
tagttccatatgcattcttc

SEQ ID NO: 14579 - DNA, 20 bp, Artificial Sequence
  chemically synthesized
agttccatatgcattcttcc

SEQ ID NO: 14580 - DNA, 20 bp, Artificial Sequence
  chemically synthesized
ttccaggacaaatacttctt

SEQ ID NO: 14581 - DNA, 20 bp, Artificial Sequence
  chemically synthesized
tccaggacaaatacttcttg

SEQ ID NO: 14582 - DNA, 20 bp, Artificial Sequence
  chemically synthesized
ttcttgaggttaaaaaaaaa

SEQ ID NO: 14583 - DNA, 20 bp, Artificial Sequence
  chemically synthesized
gttaaaaaaaaaaagtcaca

SEQ ID NO: 14584 - DNA, 20 bp, Artificial Sequence
  chemically synthesized
gtcacatagctgccatttta

SEQ ID NO: 14585 - DNA, 20 bp, Artificial Sequence
  chemically synthesized
agctgccattttatggattt

SEQ ID NO: 14586 - DNA, 20 bp, Artificial Sequence
  chemically synthesized
gctgccattttatggatttc

SEQ ID NO: 14587 - DNA, 20 bp, Artificial Sequence
  chemically synthesized
attttttttttttttttttt

SEQ ID NO: 14588 - DNA, 20 bp, Artificial Sequence
  chemically synthesized
ttttttttttttttttgaga

SEQ ID NO: 14589 - DNA, 20 bp, Artificial Sequence
  chemically synthesized
ttttttttttttttgagatg

SEQ ID NO: 14590 - DNA, 20 bp, Artificial Sequence
  chemically synthesized
tggagtcttgctctgtcacc

SEQ ID NO: 14591 - DNA, 20 bp, Artificial Sequence
  chemically synthesized
ttgctctgtcacccagcctg

SEQ ID NO: 14592 - DNA, 20 bp, Artificial Sequence
  chemically synthesized
ctgtcacccagcctgtagtg

SEQ ID NO: 14593 - DNA, 20 bp, Artificial Sequence
  chemically synthesized
tcacccagcctgtagtgcag

SEQ ID NO: 14594 - DNA, 20 bp, Artificial Sequence
  chemically synthesized
gtagtgcagtggcataatct

SEQ ID NO: 14595 - DNA, 20 bp, Artificial Sequence
  chemically synthesized
agtggcataatctcggctca

SEQ ID NO: 14596 - DNA, 20 bp, Artificial Sequence
  chemically synthesized
tcacggcaacctccgcctcc

SEQ ID NO: 14597 - DNA, 20 bp, Artificial Sequence
  chemically synthesized
cacggcaacctccgcctccc

SEQ ID NO: 14598 - DNA, 20 bp, Artificial Sequence
  chemically synthesized
aacctccgcctcccaggttc

SEQ ID NO: 14599 - DNA, 20 bp, Artificial Sequence
  chemically synthesized
ttcaagcgattctcttgcct

SEQ ID NO: 14600 - DNA, 20 bp, Artificial Sequence
  chemically synthesized
ttctcttgccttagcctccc

SEQ ID NO: 14601 - DNA, 20 bp, Artificial Sequence
  chemically synthesized
tcttgccttagcctcccgag

SEQ ID NO: 14602 - DNA, 20 bp, Artificial Sequence
  chemically synthesized
gccttagcctcccgagtagc

SEQ ID NO: 14603 - DNA, 20 bp, Artificial Sequence
  chemically synthesized
ccttagcctcccgagtagct

SEQ ID NO: 14604 - DNA, 20 bp, Artificial Sequence
  chemically synthesized
ctcccgagtagctgggatta

SEQ ID NO: 14605 - DNA, 20 bp, Artificial Sequence
  chemically synthesized
cagtcacgcaccaccacatc

SEQ ID NO: 14606 - DNA, 20 bp, Artificial Sequence
  chemically synthesized
ggctaattctttatattttt

SEQ ID NO: 14607 - DNA, 20 bp, Artificial Sequence
  chemically synthesized
taattctttatattttttgg

SEQ ID NO: 14608 - DNA, 20 bp, Artificial Sequence
  chemically synthesized
tttatattttttggtagaaa

SEQ ID NO: 14609 - DNA, 20 bp, Artificial Sequence
  chemically synthesized
gaaacggtgtttcaccatgt

SEQ ID NO: 14610 - DNA, 20 bp, Artificial Sequence
  chemically synthesized
cggtgtttcaccatgttggc

SEQ ID NO: 14611 - DNA, 20 bp, Artificial Sequence
  chemically synthesized
ggtgtttcaccatgttggcc

SEQ ID NO: 14612 - DNA, 20 bp, Artificial Sequence
  chemically synthesized
tttcaccatgttggccaggc

SEQ ID NO: 14613 - DNA, 20 bp, Artificial Sequence
  chemically synthesized
ctcatgtgatctgcctgcct

SEQ ID NO: 14614 - DNA, 20 bp, Artificial Sequence
  chemically synthesized
ctgcctgccttggcctccca

SEQ ID NO: 14615 - DNA, 20 bp, Artificial Sequence
  chemically synthesized
ccttggcctcccaaagtgct

SEQ ID NO: 14616 - DNA, 20 bp, Artificial Sequence
  chemically synthesized
ctcccaaagtgctgagatta

SEQ ID NO: 14617 - DNA, 20 bp, Artificial Sequence
  chemically synthesized
tcccaaagtgctgagattac

SEQ ID NO: 14618 - DNA, 20 bp, Artificial Sequence
  chemically synthesized
agtgctgagattacaggtgt

SEQ ID NO: 14619 - DNA, 20 bp, Artificial Sequence
  chemically synthesized
tgtgagccaccgcgcctgcc

SEQ ID NO: 14620 - DNA, 20 bp, Artificial Sequence
  chemically synthesized
tgagccaccgcgcctgcctg

SEQ ID NO: 14621 - DNA, 20 bp, Artificial Sequence
  chemically synthesized
caccgcgcctgcctggagtt

SEQ ID NO: 14622 - DNA, 20 bp, Artificial Sequence
  chemically synthesized
ctgcctggagttcagaatct

SEQ ID NO: 14623 - DNA, 20 bp, Artificial Sequence
  chemically synthesized
tgcctggagttcagaatctt

SEQ ID NO: 14624 - DNA, 20 bp, Artificial Sequence
  chemically synthesized
cttcattatttgtgtttaaa

SEQ ID NO: 14625 - DNA, 20 bp, Artificial Sequence
  chemically synthesized
ttgtgtttaaatagatcata

SEQ ID NO: 14626 - DNA, 20 bp, Artificial Sequence
  chemically synthesized
gtttaaatagatcatacagt

SEQ ID NO: 14627 - DNA, 20 bp, Artificial Sequence
  chemically synthesized
tttaaatagatcatacagtc

SEQ ID NO: 14628 - DNA, 20 bp, Artificial Sequence
  chemically synthesized
atagatcatacagtcaggca

SEQ ID NO: 14629 - DNA, 20 bp, Artificial Sequence
  chemically synthesized
gatcatacagtcaggcacgg

SEQ ID NO: 14630 - DNA, 20 bp, Artificial Sequence
  chemically synthesized
gtggctcatgcctgtaatcc

SEQ ID NO: 14631 - DNA, 20 bp, Artificial Sequence
  chemically synthesized
tgcctgtaatcccagcactt

SEQ ID NO: 14632 - DNA, 20 bp, Artificial Sequence
  chemically synthesized
gcctgtaatcccagcacttt

SEQ ID NO: 14633 - DNA, 20 bp, Artificial Sequence
  chemically synthesized
ctgtaatcccagcactttgg

SEQ ID NO: 14634 - DNA, 20 bp, Artificial Sequence
  chemically synthesized
tgtaatcccagcactttggg

SEQ ID NO: 14635 - DNA, 20 bp, Artificial Sequence
  chemically synthesized
tcccagcactttgggaggct

SEQ ID NO: 14636 - DNA, 20 bp, Artificial Sequence
  chemically synthesized
cccagcactttgggaggctg

SEQ ID NO: 14637 - DNA, 20 bp, Artificial Sequence
  chemically synthesized
agcactttgggaggctgagg

SEQ ID NO: 14638 - DNA, 20 bp, Artificial Sequence
  chemically synthesized
gcactttgggaggctgaggt

SEQ ID NO: 14639 - DNA, 20 bp, Artificial Sequence
  chemically synthesized
actttgggaggctgaggtgg

SEQ ID NO: 14640 - DNA, 20 bp, Artificial Sequence
  chemically synthesized
ctttgggaggctgaggtggg

SEQ ID NO: 14641 - DNA, 20 bp, Artificial Sequence
  chemically synthesized
ctgaggtgggaggattgcct

SEQ ID NO: 14642 - DNA, 20 bp, Artificial Sequence
  chemically synthesized
gtgggaggattgcctgagtt

SEQ ID NO: 14643 - DNA, 20 bp, Artificial Sequence
  chemically synthesized
tgggaggattgcctgagttc

SEQ ID NO: 14644 - DNA, 20 bp, Artificial Sequence
  chemically synthesized
ggaggattgcctgagttcag

SEQ ID NO: 14645 - DNA, 20 bp, Artificial Sequence
  chemically synthesized
gattgcctgagttcaggaga

SEQ ID NO: 14646 - DNA, 20 bp, Artificial Sequence
  chemically synthesized
ttgcctgagttcaggagatg

SEQ ID NO: 14647 - DNA, 20 bp, Artificial Sequence
  chemically synthesized
tgagttcaggagatggagac

SEQ ID NO: 14648 - DNA, 20 bp, Artificial Sequence
  chemically synthesized
tcaggagatggagaccagcc

SEQ ID NO: 14649 - DNA, 20 bp, Artificial Sequence
  chemically synthesized
caggagatggagaccagcct

SEQ ID NO: 14650 - DNA, 20 bp, Artificial Sequence
  chemically synthesized
ggagaccagcctgggcaaca

SEQ ID NO: 14651 - DNA, 20 bp, Artificial Sequence
  chemically synthesized
tctactaaaaatacaaaaac

SEQ ID NO: 14652 - DNA, 20 bp, Artificial Sequence
  chemically synthesized
ctaaaaatacaaaaactagc

SEQ ID NO: 14653 - DNA, 20 bp, Artificial Sequence
  chemically synthesized
atacaaaaactagctggatg

SEQ ID NO: 14654 - DNA, 20 bp, Artificial Sequence
  chemically synthesized
caaaaactagctggatgtgg

SEQ ID NO: 14655 - DNA, 20 bp, Artificial Sequence
  chemically synthesized
gatgtggtggcacacacctg

SEQ ID NO: 14656 - DNA, 20 bp, Artificial Sequence
  chemically synthesized
gtggcacacacctgtagtcc

SEQ ID NO: 14657 - DNA, 20 bp, Artificial Sequence
  chemically synthesized
cacctgtagtcccagctatt

SEQ ID NO: 14658 - DNA, 20 bp, Artificial Sequence
  chemically synthesized
acctgtagtcccagctattc

SEQ ID NO: 14659 - DNA, 20 bp, Artificial Sequence
  chemically synthesized
ctgtagtcccagctattcag

SEQ ID NO: 14660 - DNA, 20 bp, Artificial Sequence
  chemically synthesized
tgtagtcccagctattcagg

SEQ ID NO: 14661 - DNA, 20 bp, Artificial Sequence
  chemically synthesized
tcccagctattcaggaggct

SEQ ID NO: 14662 - DNA, 20 bp, Artificial Sequence
  chemically synthesized
cccagctattcaggaggctg

SEQ ID NO: 14663 - DNA, 20 bp, Artificial Sequence
  chemically synthesized
agctattcaggaggctgagg

SEQ ID NO: 14664 - DNA, 20 bp, Artificial Sequence
  chemically synthesized
gctattcaggaggctgaggt

SEQ ID NO: 14665 - DNA, 20 bp, Artificial Sequence
  chemically synthesized
tattcaggaggctgaggtgg

SEQ ID NO: 14666 - DNA, 20 bp, Artificial Sequence
  chemically synthesized
attcaggaggctgaggtggg

SEQ ID NO: 14667 - DNA, 20 bp, Artificial Sequence
  chemically synthesized
aggctgaggtgggaggatcc

SEQ ID NO: 14668 - DNA, 20 bp, Artificial Sequence
  chemically synthesized
ggctgaggtgggaggatccc

SEQ ID NO: 14669 - DNA, 20 bp, Artificial Sequence
  chemically synthesized
ctgaggtgggaggatcccag

SEQ ID NO: 14670 - DNA, 20 bp, Artificial Sequence
  chemically synthesized
tgaggtgggaggatcccagg

SEQ ID NO: 14671 - DNA, 20 bp, Artificial Sequence
  chemically synthesized
ggtgggaggatcccaggagg

SEQ ID NO: 14672 - DNA, 20 bp, Artificial Sequence
  chemically synthesized
tgggaggatcccaggaggta

SEQ ID NO: 14673 - DNA, 20 bp, Artificial Sequence
  chemically synthesized
gggaggatcccaggaggtag

SEQ ID NO: 14674 - DNA, 20 bp, Artificial Sequence
  chemically synthesized
caggaggtagaggtcacaat

SEQ ID NO: 14675 - DNA, 20 bp, Artificial Sequence
  chemically synthesized
ggtagaggtcacaatgagcc

SEQ ID NO: 14676 - DNA, 20 bp, Artificial Sequence
  chemically synthesized
gagattgcgccactgcactc

SEQ ID NO: 14677 - DNA, 20 bp, Artificial Sequence
  chemically synthesized
agattgcgccactgcactcc

SEQ ID NO: 14678 - DNA, 20 bp, Artificial Sequence
  chemically synthesized
tgcgccactgcactccaggc

SEQ ID NO: 14679 - DNA, 20 bp, Artificial Sequence
  chemically synthesized
gcgccactgcactccaggct

SEQ ID NO: 14680 - DNA, 20 bp, Artificial Sequence
  chemically synthesized
gcactccaggctgggttact

SEQ ID NO: 14681 - DNA, 20 bp, Artificial Sequence
  chemically synthesized
tccaggctgggttactgagc

SEQ ID NO: 14682 - DNA, 20 bp, Artificial Sequence
  chemically synthesized
atcctgtctcaaaaaaaaaa

SEQ ID NO: 14683 - DNA, 20 bp, Artificial Sequence
  chemically synthesized
aaaaagataatacattcaaa

SEQ ID NO: 14684 - DNA, 20 bp, Artificial Sequence
  chemically synthesized
tcaaacagttcaaaatgcaa

SEQ ID NO: 14685 - DNA, 20 bp, Artificial Sequence
  chemically synthesized
aatgcaaaagttacatacat

SEQ ID NO: 14686 - DNA, 20 bp, Artificial Sequence
  chemically synthesized
atgcaaaagttacatacata

SEQ ID NO: 14687 - DNA, 20 bp, Artificial Sequence
  chemically synthesized
caaaagttacatacataagg

SEQ ID NO: 14688 - DNA, 20 bp, Artificial Sequence
  chemically synthesized
ctccctctcacacttctccc

SEQ ID NO: 14689 - DNA, 20 bp, Artificial Sequence
  chemically synthesized
cacacttctccccagccacc

SEQ ID NO: 14690 - DNA, 20 bp, Artificial Sequence
  chemically synthesized
agccacccagttctcccttc

SEQ ID NO: 14691 - DNA, 20 bp, Artificial Sequence
  chemically synthesized
ccacccagttctcccttcta

SEQ ID NO: 14692 - DNA, 20 bp, Artificial Sequence
  chemically synthesized
cacccagttctcccttctag

SEQ ID NO: 14693 - DNA, 20 bp, Artificial Sequence
  chemically synthesized
gcaacatgtgaaatccttct

SEQ ID NO: 14694 - DNA, 20 bp, Artificial Sequence
  chemically synthesized
caacatgtgaaatccttctc

SEQ ID NO: 14695 - DNA, 20 bp, Artificial Sequence
  chemically synthesized
ctcaggctacactcttcttg

SEQ ID NO: 14696 - DNA, 20 bp, Artificial Sequence
  chemically synthesized
tcaggctacactcttcttga

SEQ ID NO: 14697 - DNA, 20 bp, Artificial Sequence
  chemically synthesized
ctacactcttcttgaaggtg

SEQ ID NO: 14698 - DNA, 20 bp, Artificial Sequence
  chemically synthesized
tacactcttcttgaaggtgt

SEQ ID NO: 14699 - DNA, 20 bp, Artificial Sequence
  chemically synthesized
cttcttgaaggtgtaggctt

SEQ ID NO: 14700 - DNA, 20 bp, Artificial Sequence
  chemically synthesized
ttcttgaaggtgtaggcttt

SEQ ID NO: 14701 - DNA, 20 bp, Artificial Sequence
  chemically synthesized
aaggtgtaggctttgggcaa

SEQ ID NO: 14702 - DNA, 20 bp, Artificial Sequence
  chemically synthesized
tttgggcaaaagcattcatt

SEQ ID NO: 14703 - DNA, 20 bp, Artificial Sequence
  chemically synthesized
aagcattcattcagtaaccc

SEQ ID NO: 14704 - DNA, 20 bp, Artificial Sequence
  chemically synthesized
aaacttgttctgtttttcca

SEQ ID NO: 14705 - DNA, 20 bp, Artificial Sequence
  chemically synthesized
aacttgttctgtttttccat

SEQ ID NO: 14706 - DNA, 20 bp, Artificial Sequence
  chemically synthesized
tttttccataggattctctt

SEQ ID NO: 14707 - DNA, 20 bp, Artificial Sequence
  chemically synthesized
tccataggattctctttgga

SEQ ID NO: 14708 - DNA, 20 bp, Artificial Sequence
  chemically synthesized
tctttggacagcgtccatac

SEQ ID NO: 14709 - DNA, 20 bp, Artificial Sequence
  chemically synthesized
ttggacagcgtccatactgg

SEQ ID NO: 14710 - DNA, 20 bp, Artificial Sequence
  chemically synthesized
tggacagcgtccatactggt

SEQ ID NO: 14711 - DNA, 20 bp, Artificial Sequence
  chemically synthesized
gcgtccatactggtgggttt

SEQ ID NO: 14712 - DNA, 20 bp, Artificial Sequence
  chemically synthesized
gttttggatactgactacta

SEQ ID NO: 14713 - DNA, 20 bp, Artificial Sequence
  chemically synthesized
acacttccgtgcccctgata

SEQ ID NO: 14714 - DNA, 20 bp, Artificial Sequence
  chemically synthesized
cttccgtgcccctgataaag

SEQ ID NO: 14715 - DNA, 20 bp, Artificial Sequence
  chemically synthesized
agcagttccctgtaacctgt

SEQ ID NO: 14716 - DNA, 20 bp, Artificial Sequence
  chemically synthesized
ttccctgtaacctgtgagac

SEQ ID NO: 14717 - DNA, 20 bp, Artificial Sequence
  chemically synthesized
tgtaacctgtgagactggac

SEQ ID NO: 14718 - DNA, 20 bp, Artificial Sequence
  chemically synthesized
gtaacctgtgagactggacc

SEQ ID NO: 14719 - DNA, 20 bp, Artificial Sequence
  chemically synthesized
cctgtgagactggaccaggt

SEQ ID NO: 14720 - DNA, 20 bp, Artificial Sequence
  chemically synthesized
actggaccaggtaagcgtcc

SEQ ID NO: 14721 - DNA, 20 bp, Artificial Sequence
  chemically synthesized
ggtaagcgtcccagcccctg

SEQ ID NO: 14722 - DNA, 20 bp, Artificial Sequence
  chemically synthesized
agcgtcccagcccctgcaga

SEQ ID NO: 14723 - DNA, 20 bp, Artificial Sequence
  chemically synthesized
gtcccagcccctgcagacag

SEQ ID NO: 14724 - DNA, 20 bp, Artificial Sequence
  chemically synthesized
agcccctgcagacagaagct

SEQ ID NO: 14725 - DNA, 20 bp, Artificial Sequence
  chemically synthesized
ccctgcagacagaagctgag

SEQ ID NO: 14726 - DNA, 20 bp, Artificial Sequence
  chemically synthesized
tggacctcgtttacctgtta

SEQ ID NO: 14727 - DNA, 20 bp, Artificial Sequence
  chemically synthesized
ttatggatgaaactgacctt

SEQ ID NO: 14728 - DNA, 20 bp, Artificial Sequence
  chemically synthesized
tatggatgaaactgaccttg

SEQ ID NO: 14729 - DNA, 20 bp, Artificial Sequence
  chemically synthesized
atggatgaaactgaccttga

SEQ ID NO: 14730 - DNA, 20 bp, Artificial Sequence
  chemically synthesized
tggatgaaactgaccttgag

SEQ ID NO: 14731 - DNA, 20 bp, Artificial Sequence
  chemically synthesized
aactgaccttgaggggacat

SEQ ID NO: 14732 - DNA, 20 bp, Artificial Sequence
  chemically synthesized
actgaccttgaggggacatg

SEQ ID NO: 14733 - DNA, 20 bp, Artificial Sequence
  chemically synthesized
tgaccttgaggggacatgag

SEQ ID NO: 14734 - DNA, 20 bp, Artificial Sequence
  chemically synthesized
accttgaggggacatgagga

SEQ ID NO: 14735 - DNA, 20 bp, Artificial Sequence
  chemically synthesized
cttttgtcatgctcttcaat

SEQ ID NO: 14736 - DNA, 20 bp, Artificial Sequence
  chemically synthesized
ttctgcaatactttcctgaa

SEQ ID NO: 14737 - DNA, 20 bp, Artificial Sequence
  chemically synthesized
caatactttcctgaatagca

SEQ ID NO: 14738 - DNA, 20 bp, Artificial Sequence
  chemically synthesized
tactttcctgaatagcacag

SEQ ID NO: 14739 - DNA, 20 bp, Artificial Sequence
  chemically synthesized
cctgaatagcacagtagtat

SEQ ID NO: 14740 - DNA, 20 bp, Artificial Sequence
  chemically synthesized
tattggaaatctgcctatta

SEQ ID NO: 14741 - DNA, 20 bp, Artificial Sequence
  chemically synthesized
aatctgcctattacagaacc

SEQ ID NO: 14742 - DNA, 20 bp, Artificial Sequence
  chemically synthesized
tgcctattacagaacctgga

SEQ ID NO: 14743 - DNA, 20 bp, Artificial Sequence
  chemically synthesized
cctattacagaacctggatg

SEQ ID NO: 14744 - DNA, 20 bp, Artificial Sequence
  chemically synthesized
tacagaacctggatggagtc

SEQ ID NO: 14745 - DNA, 20 bp, Artificial Sequence
  chemically synthesized
cagaacctggatggagtcca

SEQ ID NO: 14746 - DNA, 20 bp, Artificial Sequence
  chemically synthesized
gaacctggatggagtccaga

SEQ ID NO: 14747 - DNA, 20 bp, Artificial Sequence
  chemically synthesized
aacctggatggagtccagag

SEQ ID NO: 14748 - DNA, 20 bp, Artificial Sequence
  chemically synthesized
ggatggagtccagagaggca

SEQ ID NO: 14749 - DNA, 20 bp, Artificial Sequence
  chemically synthesized
gatggagtccagagaggcac

SEQ ID NO: 14750 - DNA, 20 bp, Artificial Sequence
  chemically synthesized
cagagaggcacgggcatcca

SEQ ID NO: 14751 - DNA, 20 bp, Artificial Sequence
  chemically synthesized
agagaggcacgggcatccat

SEQ ID NO: 14752 - DNA, 20 bp, Artificial Sequence
  chemically synthesized
ggcacgggcatccatgggca

SEQ ID NO: 14753 - DNA, 20 bp, Artificial Sequence
  chemically synthesized
gcacgggcatccatgggcaa

SEQ ID NO: 14754 - DNA, 20 bp, Artificial Sequence
  chemically synthesized
cacgggcatccatgggcaaa

SEQ ID NO: 14755 - DNA, 20 bp, Artificial Sequence
  chemically synthesized
tccatgggcaaagggctcgt

SEQ ID NO: 14756 - DNA, 20 bp, Artificial Sequence
  chemically synthesized
catgggcaaagggctcgtga

SEQ ID NO: 14757 - DNA, 20 bp, Artificial Sequence
  chemically synthesized
tcgtgagagtcaccgccctg

SEQ ID NO: 14758 - DNA, 20 bp, Artificial Sequence
  chemically synthesized
tgcagggcggtgactctcac

SEQ ID NO: 14759 - DNA, 20 bp, Artificial Sequence
  chemically synthesized
tctcacgagccctttgccca

SEQ ID NO: 14760 - DNA, 20 bp, Artificial Sequence
  chemically synthesized
catggatgcccgtgcctctc

SEQ ID NO: 14761 - DNA, 20 bp, Artificial Sequence
  chemically synthesized
gtgcctctctggactccatc

SEQ ID NO: 14762 - DNA, 20 bp, Artificial Sequence
  chemically synthesized
tgcctctctggactccatcc

SEQ ID NO: 14763 - DNA, 20 bp, Artificial Sequence
  chemically synthesized
actccatccaggttctgtaa

SEQ ID NO: 14764 - DNA, 20 bp, Artificial Sequence
  chemically synthesized
ctccatccaggttctgtaat

SEQ ID NO: 14765 - DNA, 20 bp, Artificial Sequence
  chemically synthesized
catccaggttctgtaatagg

SEQ ID NO: 14766 - DNA, 20 bp, Artificial Sequence
  chemically synthesized
tccaatactactgtgctatt

SEQ ID NO: 14767 - DNA, 20 bp, Artificial Sequence
  chemically synthesized
ccaatactactgtgctattc

SEQ ID NO: 14768 - DNA, 20 bp, Artificial Sequence
  chemically synthesized
tactactgtgctattcagga

SEQ ID NO: 14769 - DNA, 20 bp, Artificial Sequence
  chemically synthesized
tgctattcaggaaagtattg

SEQ ID NO: 14770 - DNA, 20 bp, Artificial Sequence
  chemically synthesized
tattcaggaaagtattgcag

SEQ ID NO: 14771 - DNA, 20 bp, Artificial Sequence
  chemically synthesized
gaattaatttgtgccaattg

SEQ ID NO: 14772 - DNA, 20 bp, Artificial Sequence
  chemically synthesized
attaatttgtgccaattgaa

SEQ ID NO: 14773 - DNA, 20 bp, Artificial Sequence
  chemically synthesized
ccaattgaagagcatgacaa

SEQ ID NO: 14774 - DNA, 20 bp, Artificial Sequence
  chemically synthesized
aagagcatgacaaaagtaca

SEQ ID NO: 14775 - DNA, 20 bp, Artificial Sequence
  chemically synthesized
agagcatgacaaaagtacaa

SEQ ID NO: 14776 - DNA, 20 bp, Artificial Sequence
  chemically synthesized
atgacaaaagtacaaaggaa

SEQ ID NO: 14777 - DNA, 20 bp, Artificial Sequence
  chemically synthesized
ggctctcctcatgtcccctc

SEQ ID NO: 14778 - DNA, 20 bp, Artificial Sequence
  chemically synthesized
gctctcctcatgtcccctca

SEQ ID NO: 14779 - DNA, 20 bp, Artificial Sequence
  chemically synthesized
tcctcatgtcccctcaaggt

SEQ ID NO: 14780 - DNA, 20 bp, Artificial Sequence
  chemically synthesized
aaggtcagtttcatccataa

SEQ ID NO: 14781 - DNA, 20 bp, Artificial Sequence
  chemically synthesized
aggtcagtttcatccataac

SEQ ID NO: 14782 - DNA, 20 bp, Artificial Sequence
  chemically synthesized
ttcatccataacaggtaaac

SEQ ID NO: 14783 - DNA, 20 bp, Artificial Sequence
  chemically synthesized
tcatccataacaggtaaacg

SEQ ID NO: 14784 - DNA, 20 bp, Artificial Sequence
  chemically synthesized
acaggtaaacgaggtccact

SEQ ID NO: 14785 - DNA, 20 bp, Artificial Sequence
  chemically synthesized
gtccactcagcttctgtctg

SEQ ID NO: 14786 - DNA, 20 bp, Artificial Sequence
  chemically synthesized
tccactcagcttctgtctgc

SEQ ID NO: 14787 - DNA, 20 bp, Artificial Sequence
  chemically synthesized
ccactcagcttctgtctgca

SEQ ID NO: 14788 - DNA, 20 bp, Artificial Sequence
  chemically synthesized
cactcagcttctgtctgcag

SEQ ID NO: 14789 - DNA, 20 bp, Artificial Sequence
  chemically synthesized
cagcttctgtctgcaggggc

SEQ ID NO: 14790 - DNA, 20 bp, Artificial Sequence
  chemically synthesized
agcttctgtctgcaggggct

SEQ ID NO: 14791 - DNA, 20 bp, Artificial Sequence
  chemically synthesized
caggggctgggacgcttacc

SEQ ID NO: 14792 - DNA, 20 bp, Artificial Sequence
  chemically synthesized
gctgggacgcttacctggtc

SEQ ID NO: 14793 - DNA, 20 bp, Artificial Sequence
  chemically synthesized
gcttacctggtccagtctca

SEQ ID NO: 14794 - DNA, 20 bp, Artificial Sequence
  chemically synthesized
cttacctggtccagtctcac

SEQ ID NO: 14795 - DNA, 20 bp, Artificial Sequence
  chemically synthesized
tggtccagtctcacaggtta

SEQ ID NO: 14796 - DNA, 20 bp, Artificial Sequence
  chemically synthesized
ggtccagtctcacaggttac

SEQ ID NO: 14797 - DNA, 20 bp, Artificial Sequence
  chemically synthesized
gtccagtctcacaggttaca

SEQ ID NO: 14798 - DNA, 20 bp, Artificial Sequence
  chemically synthesized
gttacagggaactgctttat

SEQ ID NO: 14799 - DNA, 20 bp, Artificial Sequence
  chemically synthesized
ttacagggaactgctttatc

SEQ ID NO: 14800 - DNA, 20 bp, Artificial Sequence
  chemically synthesized
tacagggaactgctttatca

SEQ ID NO: 14801 - DNA, 20 bp, Artificial Sequence
  chemically synthesized
acagggaactgctttatcag

SEQ ID NO: 14802 - DNA, 20 bp, Artificial Sequence
  chemically synthesized
gaactgctttatcaggggca

SEQ ID NO: 14803 - DNA, 20 bp, Artificial Sequence
  chemically synthesized
ctgctttatcaggggcacgg

SEQ ID NO: 14804 - DNA, 20 bp, Artificial Sequence
  chemically synthesized
ggggcacggaagtgttgctg

SEQ ID NO: 14805 - DNA, 20 bp, Artificial Sequence
  chemically synthesized
gcacggaagtgttgctgtag

SEQ ID NO: 14806 - DNA, 20 bp, Artificial Sequence
  chemically synthesized
ggaagtgttgctgtagtagt

SEQ ID NO: 14807 - DNA, 20 bp, Artificial Sequence
  chemically synthesized
agtcagtatccaaaacccac

SEQ ID NO: 14808 - DNA, 20 bp, Artificial Sequence
  chemically synthesized
gtatccaaaacccaccagta

SEQ ID NO: 14809 - DNA, 20 bp, Artificial Sequence
  chemically synthesized
accagtatggacgctgtcca

SEQ ID NO: 14810 - DNA, 20 bp, Artificial Sequence
  chemically synthesized
cagtatggacgctgtccaaa

SEQ ID NO: 14811 - DNA, 20 bp, Artificial Sequence
  chemically synthesized
gctgtccaaagagaatccta

SEQ ID NO: 14812 - DNA, 20 bp, Artificial Sequence
  chemically synthesized
aagagaatcctatggaaaaa

SEQ ID NO: 14813 - DNA, 20 bp, Artificial Sequence
  chemically synthesized
atcctatggaaaaacagaac

SEQ ID NO: 14814 - DNA, 20 bp, Artificial Sequence
  chemically synthesized
ggaaaaacagaacaagtttc

SEQ ID NO: 14815 - DNA, 20 bp, Artificial Sequence
  chemically synthesized
gaaaaacagaacaagtttct

SEQ ID NO: 14816 - DNA, 20 bp, Artificial Sequence
  chemically synthesized
aaaaacagaacaagtttctg

SEQ ID NO: 14817 - DNA, 20 bp, Artificial Sequence
  chemically synthesized
tgaatgaatgcttttgccca

SEQ ID NO: 14818 - DNA, 20 bp, Artificial Sequence
  chemically synthesized
tgcccaaagcctacaccttc

SEQ ID NO: 14819 - DNA, 20 bp, Artificial Sequence
  chemically synthesized
ccaaagcctacaccttcaag

SEQ ID NO: 14820 - DNA, 20 bp, Artificial Sequence
  chemically synthesized
aaagcctacaccttcaagaa

SEQ ID NO: 14821 - DNA, 20 bp, Artificial Sequence
  chemically synthesized
ctacaccttcaagaagagtg

SEQ ID NO: 14822 - DNA, 20 bp, Artificial Sequence
  chemically synthesized
cttcaagaagagtgtagcct

SEQ ID NO: 14823 - DNA, 20 bp, Artificial Sequence
  chemically synthesized
caagaagagtgtagcctgag

SEQ ID NO: 14824 - DNA, 20 bp, Artificial Sequence
  chemically synthesized
aagaagagtgtagcctgaga

SEQ ID NO: 14825 - DNA, 20 bp, Artificial Sequence
  chemically synthesized
aggatttcacatgttgcctc

SEQ ID NO: 14826 - DNA, 20 bp, Artificial Sequence
  chemically synthesized
atttcacatgttgcctctag

SEQ ID NO: 14827 - DNA, 20 bp, Artificial Sequence
  chemically synthesized
tttcacatgttgcctctaga

SEQ ID NO: 14828 - DNA, 20 bp, Artificial Sequence
  chemically synthesized
ttcacatgttgcctctagaa

SEQ ID NO: 14829 - DNA, 20 bp, Artificial Sequence
  chemically synthesized
cacatgttgcctctagaagg

SEQ ID NO: 14830 - DNA, 20 bp, Artificial Sequence
  chemically synthesized
ttgcctctagaagggagaac

SEQ ID NO: 14831 - DNA, 20 bp, Artificial Sequence
  chemically synthesized
tgcctctagaagggagaact

SEQ ID NO: 14832 - DNA, 20 bp, Artificial Sequence
  chemically synthesized
ctctagaagggagaactggg

SEQ ID NO: 14833 - DNA, 20 bp, Artificial Sequence
  chemically synthesized
agaagggagaactgggtggc

SEQ ID NO: 14834 - DNA, 20 bp, Artificial Sequence
  chemically synthesized
gaagggagaactgggtggct

SEQ ID NO: 14835 - DNA, 20 bp, Artificial Sequence
  chemically synthesized
aagggagaactgggtggctg

SEQ ID NO: 14836 - DNA, 20 bp, Artificial Sequence
  chemically synthesized
gggagaactgggtggctggg

SEQ ID NO: 14837 - DNA, 20 bp, Artificial Sequence
  chemically synthesized
agaactgggtggctggggag

SEQ ID NO: 14838 - DNA, 20 bp, Artificial Sequence
  chemically synthesized
gggtggctggggagaagtgt

SEQ ID NO: 14839 - DNA, 20 bp, Artificial Sequence
  chemically synthesized
gtggctggggagaagtgtga

SEQ ID NO: 14840 - DNA, 20 bp, Artificial Sequence
  chemically synthesized
tggctggggagaagtgtgag

SEQ ID NO: 14841 - DNA, 20 bp, Artificial Sequence
  chemically synthesized
ggctggggagaagtgtgaga

SEQ ID NO: 14842 - DNA, 20 bp, Artificial Sequence
  chemically synthesized
ctggggagaagtgtgagagg

SEQ ID NO: 14843 - DNA, 20 bp, Artificial Sequence
  chemically synthesized
gtattatctttttttttttt

SEQ ID NO: 14844 - DNA, 20 bp, Artificial Sequence
  chemically synthesized
tatcttttttttttttgaga

SEQ ID NO: 14845 - DNA, 20 bp, Artificial Sequence
  chemically synthesized
atcttttttttttttgagac

SEQ ID NO: 14846 - DNA, 20 bp, Artificial Sequence
  chemically synthesized
tttttttttgagacaggatc

SEQ ID NO: 14847 - DNA, 20 bp, Artificial Sequence
  chemically synthesized
ttttgagacaggatctggct

SEQ ID NO: 14848 - DNA, 20 bp, Artificial Sequence
  chemically synthesized
caggatctggctcagtaacc

SEQ ID NO: 14849 - DNA, 20 bp, Artificial Sequence
  chemically synthesized
tctggctcagtaacccagcc

SEQ ID NO: 14850 - DNA, 20 bp, Artificial Sequence
  chemically synthesized
tggctcagtaacccagcctg

SEQ ID NO: 14851 - DNA, 20 bp, Artificial Sequence
  chemically synthesized
cagtaacccagcctggagtg

SEQ ID NO: 14852 - DNA, 20 bp, Artificial Sequence
  chemically synthesized
taacccagcctggagtgcag

SEQ ID NO: 14853 - DNA, 20 bp, Artificial Sequence
  chemically synthesized
ggagtgcagtggcgcaatct

SEQ ID NO: 14854 - DNA, 20 bp, Artificial Sequence
  chemically synthesized
tcattgtgacctctacctcc

SEQ ID NO: 14855 - DNA, 20 bp, Artificial Sequence
  chemically synthesized
cattgtgacctctacctcct

SEQ ID NO: 14856 - DNA, 20 bp, Artificial Sequence
  chemically synthesized
ctcctgggatcctcccacct

SEQ ID NO: 14857 - DNA, 20 bp, Artificial Sequence
  chemically synthesized
tcccacctcagcctcctgaa

SEQ ID NO: 14858 - DNA, 20 bp, Artificial Sequence
  chemically synthesized
acctcagcctcctgaatagc

SEQ ID NO: 14859 - DNA, 20 bp, Artificial Sequence
  chemically synthesized
cctcagcctcctgaatagct

SEQ ID NO: 14860 - DNA, 20 bp, Artificial Sequence
  chemically synthesized
ctcctgaatagctgggacta

SEQ ID NO: 14861 - DNA, 20 bp, Artificial Sequence
  chemically synthesized
tcctgaatagctgggactac

SEQ ID NO: 14862 - DNA, 20 bp, Artificial Sequence
  chemically synthesized
caggtgtgtgccaccacatc

SEQ ID NO: 14863 - DNA, 20 bp, Artificial Sequence
  chemically synthesized
tgtgtgccaccacatccagc

SEQ ID NO: 14864 - DNA, 20 bp, Artificial Sequence
  chemically synthesized
ccagctagtttttgtatttt

SEQ ID NO: 14865 - DNA, 20 bp, Artificial Sequence
  chemically synthesized
gctagtttttgtatttttag

SEQ ID NO: 14866 - DNA, 20 bp, Artificial Sequence
  chemically synthesized
tagtttttgtatttttagta

SEQ ID NO: 14867 - DNA, 20 bp, Artificial Sequence
  chemically synthesized
ttttgtatttttagtagaga

SEQ ID NO: 14868 - DNA, 20 bp, Artificial Sequence
  chemically synthesized
tttgtatttttagtagagac

SEQ ID NO: 14869 - DNA, 20 bp, Artificial Sequence
  chemically synthesized
ttgtatttttagtagagacg

SEQ ID NO: 14870 - DNA, 20 bp, Artificial Sequence
  chemically synthesized
cggggtttcaccatgttgcc

SEQ ID NO: 14871 - DNA, 20 bp, Artificial Sequence
  chemically synthesized
ggggtttcaccatgttgccc

SEQ ID NO: 14872 - DNA, 20 bp, Artificial Sequence
  chemically synthesized
tttcaccatgttgcccaggc

SEQ ID NO: 14873 - DNA, 20 bp, Artificial Sequence
  chemically synthesized
tggtctccatctcctgaact

SEQ ID NO: 14874 - DNA, 20 bp, Artificial Sequence
  chemically synthesized
ggtctccatctcctgaactc

SEQ ID NO: 14875 - DNA, 20 bp, Artificial Sequence
  chemically synthesized
ctcaggcaatcctcccacct

SEQ ID NO: 14876 - DNA, 20 bp, Artificial Sequence
  chemically synthesized
cctcccacctcagcctccca

SEQ ID NO: 14877 - DNA, 20 bp, Artificial Sequence
  chemically synthesized
acctcagcctcccaaagtgc

SEQ ID NO: 14878 - DNA, 20 bp, Artificial Sequence
  chemically synthesized
cctcagcctcccaaagtgct

SEQ ID NO: 14879 - DNA, 20 bp, Artificial Sequence
  chemically synthesized
ctcccaaagtgctgggatta

SEQ ID NO: 14880 - DNA, 20 bp, Artificial Sequence
  chemically synthesized
tcccaaagtgctgggattac

SEQ ID NO: 14881 - DNA, 20 bp, Artificial Sequence
  chemically synthesized
agtgctgggattacaggcat

SEQ ID NO: 14882 - DNA, 20 bp, Artificial Sequence
  chemically synthesized
ctatttaaacacaaataatg

SEQ ID NO: 14883 - DNA, 20 bp, Artificial Sequence
  chemically synthesized
aaacacaaataatgaagccc

SEQ ID NO: 14884 - DNA, 20 bp, Artificial Sequence
  chemically synthesized
aagcccaagattctgaactc

SEQ ID NO: 14885 - DNA, 20 bp, Artificial Sequence
  chemically synthesized
agcccaagattctgaactcc

SEQ ID NO: 14886 - DNA, 20 bp, Artificial Sequence
  chemically synthesized
ccaagattctgaactccagg

SEQ ID NO: 14887 - DNA, 20 bp, Artificial Sequence
  chemically synthesized
caagattctgaactccaggc

SEQ ID NO: 14888 - DNA, 20 bp, Artificial Sequence
  chemically synthesized
ttctgaactccaggcaggcg

SEQ ID NO: 14889 - DNA, 20 bp, Artificial Sequence
  chemically synthesized
tgaactccaggcaggcgcgg

SEQ ID NO: 14890 - DNA, 20 bp, Artificial Sequence
  chemically synthesized
gtggctcacacctgtaatct

SEQ ID NO: 14891 - DNA, 20 bp, Artificial Sequence
  chemically synthesized
cacctgtaatctcagcactt

SEQ ID NO: 14892 - DNA, 20 bp, Artificial Sequence
  chemically synthesized
acctgtaatctcagcacttt

SEQ ID NO: 14893 - DNA, 20 bp, Artificial Sequence
  chemically synthesized
ctgtaatctcagcactttgg

SEQ ID NO: 14894 - DNA, 20 bp, Artificial Sequence
  chemically synthesized
tgtaatctcagcactttggg

SEQ ID NO: 14895 - DNA, 20 bp, Artificial Sequence
  chemically synthesized
tctcagcactttgggaggcc

SEQ ID NO: 14896 - DNA, 20 bp, Artificial Sequence
  chemically synthesized
ctcagcactttgggaggcca

SEQ ID NO: 14897 - DNA, 20 bp, Artificial Sequence
  chemically synthesized
agcactttgggaggccaagg

SEQ ID NO: 14898 - DNA, 20 bp, Artificial Sequence
  chemically synthesized
gcactttgggaggccaaggc

SEQ ID NO: 14899 - DNA, 20 bp, Artificial Sequence
  chemically synthesized
ctttgggaggccaaggcagg

SEQ ID NO: 14900 - DNA, 20 bp, Artificial Sequence
  chemically synthesized
ccaaggcaggcagatcacat

SEQ ID NO: 14901 - DNA, 20 bp, Artificial Sequence
  chemically synthesized
caaggcaggcagatcacatg

SEQ ID NO: 14902 - DNA, 20 bp, Artificial Sequence
  chemically synthesized
gcaggcagatcacatgaggt

SEQ ID NO: 14903 - DNA, 20 bp, Artificial Sequence
  chemically synthesized
caggcagatcacatgaggtc

SEQ ID NO: 14904 - DNA, 20 bp, Artificial Sequence
  chemically synthesized
ggcagatcacatgaggtcag

SEQ ID NO: 14905 - DNA, 20 bp, Artificial Sequence
  chemically synthesized
tcacatgaggtcaggagttt

SEQ ID NO: 14906 - DNA, 20 bp, Artificial Sequence
  chemically synthesized
tgaggtcaggagtttgagac

SEQ ID NO: 14907 - DNA, 20 bp, Artificial Sequence
  chemically synthesized
tcaggagtttgagaccagcc

SEQ ID NO: 14908 - DNA, 20 bp, Artificial Sequence
  chemically synthesized
tgagaccagcctggccaaca

SEQ ID NO: 14909 - DNA, 20 bp, Artificial Sequence
  chemically synthesized
cgtttctaccaaaaaatata

SEQ ID NO: 14910 - DNA, 20 bp, Artificial Sequence
  chemically synthesized
taccaaaaaatataaagaat

SEQ ID NO: 14911 - DNA, 20 bp, Artificial Sequence
  chemically synthesized
aaaaaatataaagaattagc

SEQ ID NO: 14912 - DNA, 20 bp, Artificial Sequence
  chemically synthesized
tataaagaattagccagatg

SEQ ID NO: 14913 - DNA, 20 bp, Artificial Sequence
  chemically synthesized
aaagaattagccagatgtgg

SEQ ID NO: 14914 - DNA, 20 bp, Artificial Sequence
  chemically synthesized
gtggtgcgtgactgtaatcc

SEQ ID NO: 14915 - DNA, 20 bp, Artificial Sequence
  chemically synthesized
tgactgtaatcccagctact

SEQ ID NO: 14916 - DNA, 20 bp, Artificial Sequence
  chemically synthesized
gactgtaatcccagctactc

SEQ ID NO: 14917 - DNA, 20 bp, Artificial Sequence
  chemically synthesized
ctgtaatcccagctactcgg

SEQ ID NO: 14918 - DNA, 20 bp, Artificial Sequence
  chemically synthesized
tgtaatcccagctactcggg

SEQ ID NO: 14919 - DNA, 20 bp, Artificial Sequence
  chemically synthesized
tcccagctactcgggaggct

SEQ ID NO: 14920 - DNA, 20 bp, Artificial Sequence
  chemically synthesized
cccagctactcgggaggcta

SEQ ID NO: 14921 - DNA, 20 bp, Artificial Sequence
  chemically synthesized
gctactcgggaggctaaggc

SEQ ID NO: 14922 - DNA, 20 bp, Artificial Sequence
  chemically synthesized
tactcgggaggctaaggcaa

SEQ ID NO: 14923 - DNA, 20 bp, Artificial Sequence
  chemically synthesized
gcaagagaatcgcttgaacc

SEQ ID NO: 14924 - DNA, 20 bp, Artificial Sequence
  chemically synthesized
caagagaatcgcttgaacct

SEQ ID NO: 14925 - DNA, 20 bp, Artificial Sequence
  chemically synthesized
agagaatcgcttgaacctgg

SEQ ID NO: 14926 - DNA, 20 bp, Artificial Sequence
  chemically synthesized
gagaatcgcttgaacctggg

SEQ ID NO: 14927 - DNA, 20 bp, Artificial Sequence
  chemically synthesized
aatcgcttgaacctgggagg

SEQ ID NO: 14928 - DNA, 20 bp, Artificial Sequence
  chemically synthesized
tcgcttgaacctgggaggcg

SEQ ID NO: 14929 - DNA, 20 bp, Artificial Sequence
  chemically synthesized
cgcttgaacctgggaggcgg

SEQ ID NO: 14930 - DNA, 20 bp, Artificial Sequence
  chemically synthesized
tgggaggcggaggttgccgt

SEQ ID NO: 14931 - DNA, 20 bp, Artificial Sequence
  chemically synthesized
ggcggaggttgccgtgagcc

SEQ ID NO: 14932 - DNA, 20 bp, Artificial Sequence
  chemically synthesized
gagattatgccactgcacta

SEQ ID NO: 14933 - DNA, 20 bp, Artificial Sequence
  chemically synthesized
agattatgccactgcactac

SEQ ID NO: 14934 - DNA, 20 bp, Artificial Sequence
  chemically synthesized
tatgccactgcactacaggc

SEQ ID NO: 14935 - DNA, 20 bp, Artificial Sequence
  chemically synthesized
atgccactgcactacaggct

SEQ ID NO: 14936 - DNA, 20 bp, Artificial Sequence
  chemically synthesized
ctgcactacaggctgggtga

SEQ ID NO: 14937 - DNA, 20 bp, Artificial Sequence
  chemically synthesized
gcactacaggctgggtgaca

SEQ ID NO: 14938 - DNA, 20 bp, Artificial Sequence
  chemically synthesized
tacaggctgggtgacagagc

SEQ ID NO: 14939 - DNA, 20 bp, Artificial Sequence
  chemically synthesized
aaatcctgaaatccataaaa

SEQ ID NO: 14940 - DNA, 20 bp, Artificial Sequence
  chemically synthesized
tcctgaaatccataaaatgg

SEQ ID NO: 14941 - DNA, 20 bp, Artificial Sequence
  chemically synthesized
gactttttttttttaacctc

SEQ ID NO: 14942 - DNA, 20 bp, Artificial Sequence
  chemically synthesized
tttttttttttaacctcaag

SEQ ID NO: 14943 - DNA, 20 bp, Artificial Sequence
  chemically synthesized
acctcaagaagtatttgtcc

SEQ ID NO: 14944 - DNA, 20 bp, Artificial Sequence
  chemically synthesized
tcaagaagtatttgtcctgg

SEQ ID NO: 14945 - DNA, 20 bp, Artificial Sequence
  chemically synthesized
ttgtcctggaagaatgcata

SEQ ID NO: 14946 - DNA, 20 bp, Artificial Sequence
  chemically synthesized
gaagaatgcatatggaacta

SEQ ID NO: 14947 - DNA, 20 bp, Artificial Sequence
  chemically synthesized
tggaactacagtttgaaact

SEQ ID NO: 14948 - DNA, 20 bp, Artificial Sequence
  chemically synthesized
acttggacttgcatatacca

SEQ ID NO: 14949 - DNA, 20 bp, Artificial Sequence
  chemically synthesized
cttggacttgcatataccat

SEQ ID NO: 14950 - DNA, 20 bp, Artificial Sequence
  chemically synthesized
gcatataccatgggttccct

SEQ ID NO: 14951 - DNA, 20 bp, Artificial Sequence
  chemically synthesized
catataccatgggttccctc

SEQ ID NO: 14952 - DNA, 20 bp, Artificial Sequence
  chemically synthesized
ccatgggttccctcaggcct

SEQ ID NO: 14953 - DNA, 20 bp, Artificial Sequence
  chemically synthesized
catgggttccctcaggcctc

SEQ ID NO: 14954 - DNA, 20 bp, Artificial Sequence
  chemically synthesized
atgggttccctcaggcctca

SEQ ID NO: 14955 - DNA, 20 bp, Artificial Sequence
  chemically synthesized
tcttgcatttcctctgacat

SEQ ID NO: 14956 - DNA, 20 bp, Artificial Sequence
  chemically synthesized
ttgcatttcctctgacatca

SEQ ID NO: 14957 - DNA, 20 bp, Artificial Sequence
  chemically synthesized
tgacatcagagaatgcactc

SEQ ID NO: 14958 - DNA, 20 bp, Artificial Sequence
  chemically synthesized
agagaatgcactccagcccc

SEQ ID NO: 14959 - DNA, 20 bp, Artificial Sequence
  chemically synthesized
gagaatgcactccagcccct

SEQ ID NO: 14960 - DNA, 20 bp, Artificial Sequence
  chemically synthesized
tgcactccagcccctaggac

SEQ ID NO: 14961 - DNA, 20 bp, Artificial Sequence
  chemically synthesized
cccctaggacgagccccccc

SEQ ID NO: 14962 - DNA, 20 bp, Artificial Sequence
  chemically synthesized
ccctaggacgagcccccccc

SEQ ID NO: 14963 - DNA, 20 bp, Artificial Sequence
  chemically synthesized
cctaggacgagcccccccca

SEQ ID NO: 14964 - DNA, 20 bp, Artificial Sequence
  chemically synthesized
gagccccccccagggaaaca

SEQ ID NO: 14965 - DNA, 20 bp, Artificial Sequence
  chemically synthesized
aacatggcctgcatttccat

SEQ ID NO: 14966 - DNA, 20 bp, Artificial Sequence
  chemically synthesized
ccatcagaattgctctctgt

SEQ ID NO: 14967 - DNA, 20 bp, Artificial Sequence
  chemically synthesized
catcagaattgctctctgta

SEQ ID NO: 14968 - DNA, 20 bp, Artificial Sequence
  chemically synthesized
gctctctgtaaggatgtata

SEQ ID NO: 14969 - DNA, 20 bp, Artificial Sequence
  chemically synthesized
tgtaaggatgtatatagctt

SEQ ID NO: 14970 - DNA, 20 bp, Artificial Sequence
  chemically synthesized
gtatcctctctactttgaaa

SEQ ID NO: 14971 - DNA, 20 bp, Artificial Sequence
  chemically synthesized
atcctctctactttgaaaca

SEQ ID NO: 14972 - DNA, 20 bp, Artificial Sequence
  chemically synthesized
tactttgaaacagagtatct

SEQ ID NO: 14973 - DNA, 20 bp, Artificial Sequence
  chemically synthesized
acaaaccacttcccctttaa

SEQ ID NO: 14974 - DNA, 20 bp, Artificial Sequence
  chemically synthesized
cacttcccctttaaaagtac

SEQ ID NO: 14975 - DNA, 20 bp, Artificial Sequence
  chemically synthesized
actagatatatctttcactg

SEQ ID NO: 14976 - DNA, 20 bp, Artificial Sequence
  chemically synthesized
tatatctttcactgtggaaa

SEQ ID NO: 14977 - DNA, 20 bp, Artificial Sequence
  chemically synthesized
atatctttcactgtggaaat

SEQ ID NO: 14978 - DNA, 20 bp, Artificial Sequence
  chemically synthesized
tggaaataggtgtcaaccgc

SEQ ID NO: 14979 - DNA, 20 bp, Artificial Sequence
  chemically synthesized
aataggtgtcaaccgccagt

SEQ ID NO: 14980 - DNA, 20 bp, Artificial Sequence
  chemically synthesized
ataggtgtcaaccgccagtc

SEQ ID NO: 14981 - DNA, 20 bp, Artificial Sequence
  chemically synthesized
ggatgccttttatcccgtga

SEQ ID NO: 14982 - DNA, 20 bp, Artificial Sequence
  chemically synthesized
tgccttttatcccgtgatgg

SEQ ID NO: 14983 - DNA, 20 bp, Artificial Sequence
  chemically synthesized
tttatcccgtgatggtggaa

SEQ ID NO: 14984 - DNA, 20 bp, Artificial Sequence
  chemically synthesized
tagtgatttctcaccgaaat

SEQ ID NO: 14985 - DNA, 20 bp, Artificial Sequence
  chemically synthesized
agtgatttctcaccgaaatc

SEQ ID NO: 14986 - DNA, 20 bp, Artificial Sequence
  chemically synthesized
gtgatttctcaccgaaatca

SEQ ID NO: 14987 - DNA, 20 bp, Artificial Sequence
  chemically synthesized
gatttctcaccgaaatcagg

SEQ ID NO: 14988 - DNA, 20 bp, Artificial Sequence
  chemically synthesized
tttctcaccgaaatcaggga

SEQ ID NO: 14989 - DNA, 20 bp, Artificial Sequence
  chemically synthesized
tcagggagagccactaactc

SEQ ID NO: 14990 - DNA, 20 bp, Artificial Sequence
  chemically synthesized
aactctggcctctatcaacc

SEQ ID NO: 14991 - DNA, 20 bp, Artificial Sequence
  chemically synthesized
ctctggcctctatcaaccca

SEQ ID NO: 14992 - DNA, 20 bp, Artificial Sequence
  chemically synthesized
ctggcctctatcaacccaga

SEQ ID NO: 14993 - DNA, 20 bp, Artificial Sequence
  chemically synthesized
atcaacccagagagattgca

SEQ ID NO: 14994 - DNA, 20 bp, Artificial Sequence
  chemically synthesized
gagattgcatggttcttcaa

SEQ ID NO: 14995 - DNA, 20 bp, Artificial Sequence
  chemically synthesized
gattgcatggttcttcaatg

SEQ ID NO: 14996 - DNA, 20 bp, Artificial Sequence
  chemically synthesized
catggttcttcaatggagat

SEQ ID NO: 14997 - DNA, 20 bp, Artificial Sequence
  chemically synthesized
ttcaatggagatcagatgtt

SEQ ID NO: 14998 - DNA, 20 bp, Artificial Sequence
  chemically synthesized
cacttcatctttttattttt

SEQ ID NO: 14999 - DNA, 20 bp, Artificial Sequence
  chemically synthesized
ttttattttttagaatcatg

SEQ ID NO: 15000 - DNA, 20 bp, Artificial Sequence
  chemically synthesized
attttttagaatcatgcggc

SEQ ID NO: 15001 - DNA, 20 bp, Artificial Sequence
  chemically synthesized
ttttttagaatcatgcggct

SEQ ID NO: 15002 - DNA, 20 bp, Artificial Sequence
  chemically synthesized
tagaatcatgcggctgggtg

SEQ ID NO: 15003 - DNA, 20 bp, Artificial Sequence
  chemically synthesized
aatcatgcggctgggtgtag

SEQ ID NO: 15004 - DNA, 20 bp, Artificial Sequence
  chemically synthesized
gtggctcacgcctgtaatcc

SEQ ID NO: 15005 - DNA, 20 bp, Artificial Sequence
  chemically synthesized
acgcctgtaatcctagcact

SEQ ID NO: 15006 - DNA, 20 bp, Artificial Sequence
  chemically synthesized
cgcctgtaatcctagcactt

SEQ ID NO: 15007 - DNA, 20 bp, Artificial Sequence
  chemically synthesized
gcctgtaatcctagcactta

SEQ ID NO: 15008 - DNA, 20 bp, Artificial Sequence
  chemically synthesized
ctgtaatcctagcacttagg

SEQ ID NO: 15009 - DNA, 20 bp, Artificial Sequence
  chemically synthesized
tgtaatcctagcacttaggg

SEQ ID NO: 15010 - DNA, 20 bp, Artificial Sequence
  chemically synthesized
tcctagcacttagggaggcc

SEQ ID NO: 15011 - DNA, 20 bp, Artificial Sequence
  chemically synthesized
cctagcacttagggaggcca

SEQ ID NO: 15012 - DNA, 20 bp, Artificial Sequence
  chemically synthesized
agcacttagggaggccaagg

SEQ ID NO: 15013 - DNA, 20 bp, Artificial Sequence
  chemically synthesized
gcacttagggaggccaaggc

SEQ ID NO: 15014 - DNA, 20 bp, Artificial Sequence
  chemically synthesized
cttagggaggccaaggcagg

SEQ ID NO: 15015 - DNA, 20 bp, Artificial Sequence
  chemically synthesized
ggccaaggcaggcagatcat

SEQ ID NO: 15016 - DNA, 20 bp, Artificial Sequence
  chemically synthesized
gccaaggcaggcagatcatg

SEQ ID NO: 15017 - DNA, 20 bp, Artificial Sequence
  chemically synthesized
aggcaggcagatcatgaggt

SEQ ID NO: 15018 - DNA, 20 bp, Artificial Sequence
  chemically synthesized
ggcaggcagatcatgaggtc

SEQ ID NO: 15019 - DNA, 20 bp, Artificial Sequence
  chemically synthesized
caggcagatcatgaggtcag

SEQ ID NO: 15020 - DNA, 20 bp, Artificial Sequence
  chemically synthesized
gatcatgaggtcaggagttc

SEQ ID NO: 15021 - DNA, 20 bp, Artificial Sequence
  chemically synthesized
tgaggtcaggagttcgagac

SEQ ID NO: 15022 - DNA, 20 bp, Artificial Sequence
  chemically synthesized
tcaggagttcgagaccagcc

SEQ ID NO: 15023 - DNA, 20 bp, Artificial Sequence
  chemically synthesized
cgagaccagcctagtcaaca

SEQ ID NO: 15024 - DNA, 20 bp, Artificial Sequence
  chemically synthesized
actaaaaatacaaaaaaaat

SEQ ID NO: 15025 - DNA, 20 bp, Artificial Sequence
  chemically synthesized
aaaatacaaaaaaaattagc

SEQ ID NO: 15026 - DNA, 20 bp, Artificial Sequence
  chemically synthesized
aaatacaaaaaaaattagct

SEQ ID NO: 15027 - DNA, 20 bp, Artificial Sequence
  chemically synthesized
caaaaaaaattagctgggca

SEQ ID NO: 15028 - DNA, 20 bp, Artificial Sequence
  chemically synthesized
aaaaaattagctgggcatgg

SEQ ID NO: 15029 - DNA, 20 bp, Artificial Sequence
  chemically synthesized
aaattagctgggcatggtgg

SEQ ID NO: 15030 - DNA, 20 bp, Artificial Sequence
  chemically synthesized
aattagctgggcatggtggc

SEQ ID NO: 15031 - DNA, 20 bp, Artificial Sequence
  chemically synthesized
gtggcgggcacctgtaatcc

SEQ ID NO: 15032 - DNA, 20 bp, Artificial Sequence
  chemically synthesized
cacctgtaatcccagctact

SEQ ID NO: 15033 - DNA, 20 bp, Artificial Sequence
  chemically synthesized
acctgtaatcccagctactt

SEQ ID NO: 15034 - DNA, 20 bp, Artificial Sequence
  chemically synthesized
ctgtaatcccagctacttgg

SEQ ID NO: 15035 - DNA, 20 bp, Artificial Sequence
  chemically synthesized
tgtaatcccagctacttggg

SEQ ID NO: 15036 - DNA, 20 bp, Artificial Sequence
  chemically synthesized
tcccagctacttgggaggct

SEQ ID NO: 15037 - DNA, 20 bp, Artificial Sequence
  chemically synthesized
cccagctacttgggaggctg

SEQ ID NO: 15038 - DNA, 20 bp, Artificial Sequence
  chemically synthesized
agctacttgggaggctgagg

SEQ ID NO: 15039 - DNA, 20 bp, Artificial Sequence
  chemically synthesized
gctacttgggaggctgaggc

SEQ ID NO: 15040 - DNA, 20 bp, Artificial Sequence
  chemically synthesized
tacttgggaggctgaggcag

SEQ ID NO: 15041 - DNA, 20 bp, Artificial Sequence
  chemically synthesized
ggcaggagaatcacttgaac

SEQ ID NO: 15042 - DNA, 20 bp, Artificial Sequence
  chemically synthesized
caggagaatcacttgaaccg

SEQ ID NO: 15043 - DNA, 20 bp, Artificial Sequence
  chemically synthesized
ggagaatcacttgaaccgga

SEQ ID NO: 15044 - DNA, 20 bp, Artificial Sequence
  chemically synthesized
gagaatcacttgaaccggag

SEQ ID NO: 15045 - DNA, 20 bp, Artificial Sequence
  chemically synthesized
aatcacttgaaccggagagg

SEQ ID NO: 15046 - DNA, 20 bp, Artificial Sequence
  chemically synthesized
tcacttgaaccggagaggca

SEQ ID NO: 15047 - DNA, 20 bp, Artificial Sequence
  chemically synthesized
cacttgaaccggagaggcag

SEQ ID NO: 15048 - DNA, 20 bp, Artificial Sequence
  chemically synthesized
aaccggagaggcagaggttg

SEQ ID NO: 15049 - DNA, 20 bp, Artificial Sequence
  chemically synthesized
ggagaggcagaggttgcagt

SEQ ID NO: 15050 - DNA, 20 bp, Artificial Sequence
  chemically synthesized
ggcagaggttgcagtgagct

SEQ ID NO: 15051 - DNA, 20 bp, Artificial Sequence
  chemically synthesized
gagattgcaccattgcactc

SEQ ID NO: 15052 - DNA, 20 bp, Artificial Sequence
  chemically synthesized
ttgcaccattgcactccagc

SEQ ID NO: 15053 - DNA, 20 bp, Artificial Sequence
  chemically synthesized
tgcaccattgcactccagcc

SEQ ID NO: 15054 - DNA, 20 bp, Artificial Sequence
  chemically synthesized
attgcactccagccaggcaa

SEQ ID NO: 15055 - DNA, 20 bp, Artificial Sequence
  chemically synthesized
ctccagccaggcaacagtgc

SEQ ID NO: 15056 - DNA, 20 bp, Artificial Sequence
  chemically synthesized
catctcaaacaaacaaacaa

SEQ ID NO: 15057 - DNA, 20 bp, Artificial Sequence
  chemically synthesized
tcaaacaaacaaacaaaaga

SEQ ID NO: 15058 - DNA, 20 bp, Artificial Sequence
  chemically synthesized
acaaacaaacaaaagaaaga

SEQ ID NO: 15059 - DNA, 20 bp, Artificial Sequence
  chemically synthesized
acaaacaaaagaaagaaaga

SEQ ID NO: 15060 - DNA, 20 bp, Artificial Sequence
  chemically synthesized
acaaaagaaagaaagaaaga

SEQ ID NO: 15061 - DNA, 20 bp, Artificial Sequence
  chemically synthesized
aaagaaagaaagaaagaaag

SEQ ID NO: 15062 - DNA, 20 bp, Artificial Sequence
  chemically synthesized
aaagaaagaaagaaagtggc

SEQ ID NO: 15063 - DNA, 20 bp, Artificial Sequence
  chemically synthesized
aagaaagaaagtggccagaa

SEQ ID NO: 15064 - DNA, 20 bp, Artificial Sequence
  chemically synthesized
agaaagaaagtggccagaat

SEQ ID NO: 15065 - DNA, 20 bp, Artificial Sequence
  chemically synthesized
gaatgggaatgtttacgtga

SEQ ID NO: 15066 - DNA, 20 bp, Artificial Sequence
  chemically synthesized
aatgtttacgtgatagaaat

SEQ ID NO: 15067 - DNA, 20 bp, Artificial Sequence
  chemically synthesized
aaattggcaaatgctaaact

SEQ ID NO: 15068 - DNA, 20 bp, Artificial Sequence
  chemically synthesized
aattggcaaatgctaaactc

SEQ ID NO: 15069 - DNA, 20 bp, Artificial Sequence
  chemically synthesized
attggcaaatgctaaactca

SEQ ID NO: 15070 - DNA, 20 bp, Artificial Sequence
  chemically synthesized
cagggctttcccctgctccc

SEQ ID NO: 15071 - DNA, 20 bp, Artificial Sequence
  chemically synthesized
gggctttcccctgctcccca

SEQ ID NO: 15072 - DNA, 20 bp, Artificial Sequence
  chemically synthesized
gctttcccctgctccccaga

SEQ ID NO: 15073 - DNA, 20 bp, Artificial Sequence
  chemically synthesized
tcccctgctccccagagagt

SEQ ID NO: 15074 - DNA, 20 bp, Artificial Sequence
  chemically synthesized
tccccagagagtcagtttat

SEQ ID NO: 15075 - DNA, 20 bp, Artificial Sequence
  chemically synthesized
gagagtcagtttatcagcac

SEQ ID NO: 15076 - DNA, 20 bp, Artificial Sequence
  chemically synthesized
tatcagcactggacgtaaca

SEQ ID NO: 15077 - DNA, 20 bp, Artificial Sequence
  chemically synthesized
ctggacgtaacatagttcat

SEQ ID NO: 15078 - DNA, 20 bp, Artificial Sequence
  chemically synthesized
ggacgtaacatagttcataa

SEQ ID NO: 15079 - DNA, 20 bp, Artificial Sequence
  chemically synthesized
agttcataagagcattgccg

SEQ ID NO: 15080 - DNA, 20 bp, Artificial Sequence
  chemically synthesized
tcataagagcattgccgcgg

SEQ ID NO: 15081 - DNA, 20 bp, Artificial Sequence
  chemically synthesized
aagagcattgccgcggaagc

SEQ ID NO: 15082 - DNA, 20 bp, Artificial Sequence
  chemically synthesized
cggaagccagcctgcctacc

SEQ ID NO: 15083 - DNA, 20 bp, Artificial Sequence
  chemically synthesized
ggaagccagcctgcctacct

SEQ ID NO: 15084 - DNA, 20 bp, Artificial Sequence
  chemically synthesized
gcctacctgggcttccatcc

SEQ ID NO: 15085 - DNA, 20 bp, Artificial Sequence
  chemically synthesized
cctgggcttccatcctggct

SEQ ID NO: 15086 - DNA, 20 bp, Artificial Sequence
  chemically synthesized
tcggcatgtactaaccttgt

SEQ ID NO: 15087 - DNA, 20 bp, Artificial Sequence
  chemically synthesized
gttggcctaatcatttaact

SEQ ID NO: 15088 - DNA, 20 bp, Artificial Sequence
  chemically synthesized
aatcatttaactcagcacct

SEQ ID NO: 15089 - DNA, 20 bp, Artificial Sequence
  chemically synthesized
gcatctactgtttctgtaaa

SEQ ID NO: 15090 - DNA, 20 bp, Artificial Sequence
  chemically synthesized
tctactgtttctgtaaatag

SEQ ID NO: 15091 - DNA, 20 bp, Artificial Sequence
  chemically synthesized
aaatagcagtaactacctca

SEQ ID NO: 15092 - DNA, 20 bp, Artificial Sequence
  chemically synthesized
gcagtaactacctcacagaa

SEQ ID NO: 15093 - DNA, 20 bp, Artificial Sequence
  chemically synthesized
ctacctcacagaaaagcaca

SEQ ID NO: 15094 - DNA, 20 bp, Artificial Sequence
  chemically synthesized
acagaaaagcacatagcaca

SEQ ID NO: 15095 - DNA, 20 bp, Artificial Sequence
  chemically synthesized
aaagcacatagcacatggac

SEQ ID NO: 15096 - DNA, 20 bp, Artificial Sequence
  chemically synthesized
tgttaaccctgattattatt

SEQ ID NO: 15097 - DNA, 20 bp, Artificial Sequence
  chemically synthesized
cctgattattattaagctgc

SEQ ID NO: 15098 - DNA, 20 bp, Artificial Sequence
  chemically synthesized
tgattattattaagctgcca

SEQ ID NO: 15099 - DNA, 20 bp, Artificial Sequence
  chemically synthesized
tgccagagataacctatttg

SEQ ID NO: 15100 - DNA, 20 bp, Artificial Sequence
  chemically synthesized
cctatttgtagattataaaa

SEQ ID NO: 15101 - DNA, 20 bp, Artificial Sequence
  chemically synthesized
tagattataaaacagaaact

SEQ ID NO: 15102 - DNA, 20 bp, Artificial Sequence
  chemically synthesized
gataattgatatgacttgcc

SEQ ID NO: 15103 - DNA, 20 bp, Artificial Sequence
  chemically synthesized
ataattgatatgacttgcca

SEQ ID NO: 15104 - DNA, 20 bp, Artificial Sequence
  chemically synthesized
tatgacttgccaaggacatg

SEQ ID NO: 15105 - DNA, 20 bp, Artificial Sequence
  chemically synthesized
acttgccaaggacatgtagt

SEQ ID NO: 15106 - DNA, 20 bp, Artificial Sequence
  chemically synthesized
tgccaaggacatgtagttgg

SEQ ID NO: 15107 - DNA, 20 bp, Artificial Sequence
  chemically synthesized
gccaaggacatgtagttggt

SEQ ID NO: 15108 - DNA, 20 bp, Artificial Sequence
  chemically synthesized
aaggacatgtagttggtggg

SEQ ID NO: 15109 - DNA, 20 bp, Artificial Sequence
  chemically synthesized
gacatgtagttggtgggtgg

SEQ ID NO: 15110 - DNA, 20 bp, Artificial Sequence
  chemically synthesized
tagttggtgggtggcagaac

SEQ ID NO: 15111 - DNA, 20 bp, Artificial Sequence
  chemically synthesized
agttggtgggtggcagaacg

SEQ ID NO: 15112 - DNA, 20 bp, Artificial Sequence
  chemically synthesized
gttggtgggtggcagaacga

SEQ ID NO: 15113 - DNA, 20 bp, Artificial Sequence
  chemically synthesized
gtgggtggcagaacgagggc

SEQ ID NO: 15114 - DNA, 20 bp, Artificial Sequence
  chemically synthesized
gggtggcagaacgagggctg

SEQ ID NO: 15115 - DNA, 20 bp, Artificial Sequence
  chemically synthesized
gcagaacgagggctggagcc

SEQ ID NO: 15116 - DNA, 20 bp, Artificial Sequence
  chemically synthesized
gagggctggagcccagttcc

SEQ ID NO: 15117 - DNA, 20 bp, Artificial Sequence
  chemically synthesized
agggctggagcccagttccc

SEQ ID NO: 15118 - DNA, 20 bp, Artificial Sequence
  chemically synthesized
gggctggagcccagttccca

SEQ ID NO: 15119 - DNA, 20 bp, Artificial Sequence
  chemically synthesized
cttttcattaccccacaaaa

SEQ ID NO: 15120 - DNA, 20 bp, Artificial Sequence
  chemically synthesized
ttttcattaccccacaaaac

SEQ ID NO: 15121 - DNA, 20 bp, Artificial Sequence
  chemically synthesized
gtgtgtttccttttttcata

SEQ ID NO: 15122 - DNA, 20 bp, Artificial Sequence
  chemically synthesized
tctatctttttttttttttt

SEQ ID NO: 15123 - DNA, 20 bp, Artificial Sequence
  chemically synthesized
tcttttttttttttttgaga

SEQ ID NO: 15124 - DNA, 20 bp, Artificial Sequence
  chemically synthesized
cttttttttttttttgagac

SEQ ID NO: 15125 - DNA, 20 bp, Artificial Sequence
  chemically synthesized
ttttttttttttttgagaca

SEQ ID NO: 15126 - DNA, 20 bp, Artificial Sequence
  chemically synthesized
cagggtcttactctgttgcc

SEQ ID NO: 15127 - DNA, 20 bp, Artificial Sequence
  chemically synthesized
agggtcttactctgttgccc

SEQ ID NO: 15128 - DNA, 20 bp, Artificial Sequence
  chemically synthesized
tcttactctgttgcccaggc

SEQ ID NO: 15129 - DNA, 20 bp, Artificial Sequence
  chemically synthesized
ttactctgttgcccaggctg

SEQ ID NO: 15130 - DNA, 20 bp, Artificial Sequence
  chemically synthesized
ctgttgcccaggctggagtg

SEQ ID NO: 15131 - DNA, 20 bp, Artificial Sequence
  chemically synthesized
ttgcccaggctggagtgcag

SEQ ID NO: 15132 - DNA, 20 bp, Artificial Sequence
  chemically synthesized
acctcctccgcctctcacct

SEQ ID NO: 15133 - DNA, 20 bp, Artificial Sequence
  chemically synthesized
gcctctcacctcagcctcct

SEQ ID NO: 15134 - DNA, 20 bp, Artificial Sequence
  chemically synthesized
tctcacctcagcctcctgag

SEQ ID NO: 15135 - DNA, 20 bp, Artificial Sequence
  chemically synthesized
acctcagcctcctgagtagc

SEQ ID NO: 15136 - DNA, 20 bp, Artificial Sequence
  chemically synthesized
cctcagcctcctgagtagct

SEQ ID NO: 15137 - DNA, 20 bp, Artificial Sequence
  chemically synthesized
ctcctgagtagctgggacta

SEQ ID NO: 15138 - DNA, 20 bp, Artificial Sequence
  chemically synthesized
gactacagcaccaacacgcc

SEQ ID NO: 15139 - DNA, 20 bp, Artificial Sequence
  chemically synthesized
taattttcgtaatgtttttg

SEQ ID NO: 15140 - DNA, 20 bp, Artificial Sequence
  chemically synthesized
attttcgtaatgtttttgta

SEQ ID NO: 15141 - DNA, 20 bp, Artificial Sequence
  chemically synthesized
tcgtaatgtttttgtagaga

SEQ ID NO: 15142 - DNA, 20 bp, Artificial Sequence
  chemically synthesized
gtaatgtttttgtagagatg

SEQ ID NO: 15143 - DNA, 20 bp, Artificial Sequence
  chemically synthesized
tggagtttcgccatgttgcc

SEQ ID NO: 15144 - DNA, 20 bp, Artificial Sequence
  chemically synthesized
ggagtttcgccatgttgccc

SEQ ID NO: 15145 - DNA, 20 bp, Artificial Sequence
  chemically synthesized
tttcgccatgttgcccaggc

SEQ ID NO: 15146 - DNA, 20 bp, Artificial Sequence
  chemically synthesized
caggctggtcttgaactcct

SEQ ID NO: 15147 - DNA, 20 bp, Artificial Sequence
  chemically synthesized
cttgaactcctgagttcacc

SEQ ID NO: 15148 - DNA, 20 bp, Artificial Sequence
  chemically synthesized
ttgaactcctgagttcaccc

SEQ ID NO: 15149 - DNA, 20 bp, Artificial Sequence
  chemically synthesized
gaactcctgagttcacccag

SEQ ID NO: 15150 - DNA, 20 bp, Artificial Sequence
  chemically synthesized
caggagtgattcgcccacct

SEQ ID NO: 15151 - DNA, 20 bp, Artificial Sequence
  chemically synthesized
tcgcccacctcggcctccca

SEQ ID NO: 15152 - DNA, 20 bp, Artificial Sequence
  chemically synthesized
acctcggcctcccaaagtgc

SEQ ID NO: 15153 - DNA, 20 bp, Artificial Sequence
  chemically synthesized
cctcggcctcccaaagtgct

SEQ ID NO: 15154 - DNA, 20 bp, Artificial Sequence
  chemically synthesized
ctcccaaagtgctgggatta

SEQ ID NO: 15155 - DNA, 20 bp, Artificial Sequence
  chemically synthesized
tcccaaagtgctgggattac

SEQ ID NO: 15156 - DNA, 20 bp, Artificial Sequence
  chemically synthesized
agtgctgggattacaggtgt

SEQ ID NO: 15157 - DNA, 20 bp, Artificial Sequence
  chemically synthesized
caggtgtgagccaccatgcc

SEQ ID NO: 15158 - DNA, 20 bp, Artificial Sequence
  chemically synthesized
ctaataaaactctttgctca

SEQ ID NO: 15159 - DNA, 20 bp, Artificial Sequence
  chemically synthesized
tgctcaaagcctatataact

SEQ ID NO: 15160 - DNA, 20 bp, Artificial Sequence
  chemically synthesized
accctttaacccatatgaaa

SEQ ID NO: 15161 - DNA, 20 bp, Artificial Sequence
  chemically synthesized
ccctttaacccatatgaaat

SEQ ID NO: 15162 - DNA, 20 bp, Artificial Sequence
  chemically synthesized
ttcctgtattttcaactcac

SEQ ID NO: 15163 - DNA, 20 bp, Artificial Sequence
  chemically synthesized
ctgtattttcaactcactgg

SEQ ID NO: 15164 - DNA, 20 bp, Artificial Sequence
  chemically synthesized
tgtattttcaactcactggt

SEQ ID NO: 15165 - DNA, 20 bp, Artificial Sequence
  chemically synthesized
ttctgtcttccccctttatg

SEQ ID NO: 15166 - DNA, 20 bp, Artificial Sequence
  chemically synthesized
ccctttatgtagatgatcca

SEQ ID NO: 15167 - DNA, 20 bp, Artificial Sequence
  chemically synthesized
ttatgtagatgatccaaagt

SEQ ID NO: 15168 - DNA, 20 bp, Artificial Sequence
  chemically synthesized
atgtagatgatccaaagtca

SEQ ID NO: 15169 - DNA, 20 bp, Artificial Sequence
  chemically synthesized
gtagatgatccaaagtcaga

SEQ ID NO: 15170 - DNA, 20 bp, Artificial Sequence
  chemically synthesized
agatgatccaaagtcagaga

SEQ ID NO: 15171 - DNA, 20 bp, Artificial Sequence
  chemically synthesized
gatgatccaaagtcagagag

SEQ ID NO: 15172 - DNA, 20 bp, Artificial Sequence
  chemically synthesized
atgatccaaagtcagagaga

SEQ ID NO: 15173 - DNA, 20 bp, Artificial Sequence
  chemically synthesized
tgatccaaagtcagagagag

SEQ ID NO: 15174 - DNA, 20 bp, Artificial Sequence
  chemically synthesized
ccaaagtcagagagaggggt

SEQ ID NO: 15175 - DNA, 20 bp, Artificial Sequence
  chemically synthesized
aagtcagagagaggggttgg

SEQ ID NO: 15176 - DNA, 20 bp, Artificial Sequence
  chemically synthesized
gagagaggggttggaagcat

SEQ ID NO: 15177 - DNA, 20 bp, Artificial Sequence
  chemically synthesized
agaggggttggaagcatgag

SEQ ID NO: 15178 - DNA, 20 bp, Artificial Sequence
  chemically synthesized
ttggaagcatgagtagcccg

SEQ ID NO: 15179 - DNA, 20 bp, Artificial Sequence
  chemically synthesized
gtagcccgtggcttcctgaa

SEQ ID NO: 15180 - DNA, 20 bp, Artificial Sequence
  chemically synthesized
ccgtggcttcctgaatagcc

SEQ ID NO: 15181 - DNA, 20 bp, Artificial Sequence
  chemically synthesized
cgtggcttcctgaatagcct

SEQ ID NO: 15182 - DNA, 20 bp, Artificial Sequence
  chemically synthesized
gtggcttcctgaatagcctg

SEQ ID NO: 15183 - DNA, 20 bp, Artificial Sequence
  chemically synthesized
cttcctgaatagcctgggga

SEQ ID NO: 15184 - DNA, 20 bp, Artificial Sequence
  chemically synthesized
ctggggaaagcaacttctga

SEQ ID NO: 15185 - DNA, 20 bp, Artificial Sequence
  chemically synthesized
ggaaagcaacttctgatgga

SEQ ID NO: 15186 - DNA, 20 bp, Artificial Sequence
  chemically synthesized
ttctgatggacagacattgc

SEQ ID NO: 15187 - DNA, 20 bp, Artificial Sequence
  chemically synthesized
ctgatggacagacattgcga

SEQ ID NO: 15188 - DNA, 20 bp, Artificial Sequence
  chemically synthesized
gacattgcgagagcgaatgc

SEQ ID NO: 15189 - DNA, 20 bp, Artificial Sequence
  chemically synthesized
ttgctgatctcctctctata

SEQ ID NO: 15190 - DNA, 20 bp, Artificial Sequence
  chemically synthesized
tatatggttcttaccactta

SEQ ID NO: 15191 - DNA, 20 bp, Artificial Sequence
  chemically synthesized
ggttcttaccacttaaagac

SEQ ID NO: 15192 - DNA, 20 bp, Artificial Sequence
  chemically synthesized
gttcttaccacttaaagacg

SEQ ID NO: 15193 - DNA, 20 bp, Artificial Sequence
  chemically synthesized
taccacttaaagacgaggtt

SEQ ID NO: 15194 - DNA, 20 bp, Artificial Sequence
  chemically synthesized
acttaaagacgaggttgagc

SEQ ID NO: 15195 - DNA, 20 bp, Artificial Sequence
  chemically synthesized
gttgagccagtctccaatca

SEQ ID NO: 15196 - DNA, 20 bp, Artificial Sequence
  chemically synthesized
tctccaatcacagctaccca

SEQ ID NO: 15197 - DNA, 20 bp, Artificial Sequence
  chemically synthesized
ctccaatcacagctacccaa

SEQ ID NO: 15198 - DNA, 20 bp, Artificial Sequence
  chemically synthesized
ccaatcacagctacccaaag

SEQ ID NO: 15199 - DNA, 20 bp, Artificial Sequence
  chemically synthesized
ccaaaggagtttaatgccca

SEQ ID NO: 15200 - DNA, 20 bp, Artificial Sequence
  chemically synthesized
ttaatgcccacagcttcctg

SEQ ID NO: 15201 - DNA, 20 bp, Artificial Sequence
  chemically synthesized
tgcccacagcttcctgaaga

SEQ ID NO: 15202 - DNA, 20 bp, Artificial Sequence
  chemically synthesized
cagcttcctgaagatggaac

SEQ ID NO: 15203 - DNA, 20 bp, Artificial Sequence
  chemically synthesized
ttcctgaagatggaaccaga

SEQ ID NO: 15204 - DNA, 20 bp, Artificial Sequence
  chemically synthesized
tcctgaagatggaaccagat

SEQ ID NO: 15205 - DNA, 20 bp, Artificial Sequence
  chemically synthesized
cctgaagatggaaccagatg

SEQ ID NO: 15206 - DNA, 20 bp, Artificial Sequence
  chemically synthesized
gaagatggaaccagatgggg

SEQ ID NO: 15207 - DNA, 20 bp, Artificial Sequence
  chemically synthesized
agatggaaccagatggggaa

SEQ ID NO: 15208 - DNA, 20 bp, Artificial Sequence
  chemically synthesized
gatggaaccagatggggaag

SEQ ID NO: 15209 - DNA, 20 bp, Artificial Sequence
  chemically synthesized
accagatggggaagaggacg

SEQ ID NO: 15210 - DNA, 20 bp, Artificial Sequence
  chemically synthesized
agatggggaagaggacgtag

SEQ ID NO: 15211 - DNA, 20 bp, Artificial Sequence
  chemically synthesized
gatggggaagaggacgtaga

SEQ ID NO: 15212 - DNA, 20 bp, Artificial Sequence
  chemically synthesized
aggacgtagaaggcattcct

SEQ ID NO: 15213 - DNA, 20 bp, Artificial Sequence
  chemically synthesized
ggacgtagaaggcattcctg

SEQ ID NO: 15214 - DNA, 20 bp, Artificial Sequence
  chemically synthesized
attcctgaggtctgcgatca

SEQ ID NO: 15215 - DNA, 20 bp, Artificial Sequence
  chemically synthesized
ggtctgcgatcacggacacc

SEQ ID NO: 15216 - DNA, 20 bp, Artificial Sequence
  chemically synthesized
tcacggacaccaagatgaac

SEQ ID NO: 15217 - DNA, 20 bp, Artificial Sequence
  chemically synthesized
acaccaagatgaaccagtcc

SEQ ID NO: 15218 - DNA, 20 bp, Artificial Sequence
  chemically synthesized
caccaagatgaaccagtcct

SEQ ID NO: 15219 - DNA, 20 bp, Artificial Sequence
  chemically synthesized
ccaagatgaaccagtcctgg

SEQ ID NO: 15220 - DNA, 20 bp, Artificial Sequence
  chemically synthesized
tgaaccagtcctgggagtct

SEQ ID NO: 15221 - DNA, 20 bp, Artificial Sequence
  chemically synthesized
gggagtcttggtaattcacc

SEQ ID NO: 15222 - DNA, 20 bp, Artificial Sequence
  chemically synthesized
gagtcttggtaattcacctg

SEQ ID NO: 15223 - DNA, 20 bp, Artificial Sequence
  chemically synthesized
agtcttggtaattcacctgg

SEQ ID NO: 15224 - DNA, 20 bp, Artificial Sequence
  chemically synthesized
cctggaggtaatgtgttgac

SEQ ID NO: 15225 - DNA, 20 bp, Artificial Sequence
  chemically synthesized
aatgtgttgactggatccca

SEQ ID NO: 15226 - DNA, 20 bp, Artificial Sequence
  chemically synthesized
ttgactggatcccaaagtca

SEQ ID NO: 15227 - DNA, 20 bp, Artificial Sequence
  chemically synthesized
gactggatcccaaagtcatg

SEQ ID NO: 15228 - DNA, 20 bp, Artificial Sequence
  chemically synthesized
ttcctccatcctcatttcct

SEQ ID NO: 15229 - DNA, 20 bp, Artificial Sequence
  chemically synthesized
tcctcatttccttggcacct

SEQ ID NO: 15230 - DNA, 20 bp, Artificial Sequence
  chemically synthesized
cctcatttccttggcacctc

SEQ ID NO: 15231 - DNA, 20 bp, Artificial Sequence
  chemically synthesized
catttccttggcacctcagg

SEQ ID NO: 15232 - DNA, 20 bp, Artificial Sequence
  chemically synthesized
ttggcacctcaggaagatgt

SEQ ID NO: 15233 - DNA, 20 bp, Artificial Sequence
  chemically synthesized
gcacctcaggaagatgtcag

SEQ ID NO: 15234 - DNA, 20 bp, Artificial Sequence
  chemically synthesized
acctcaggaagatgtcagca

SEQ ID NO: 15235 - DNA, 20 bp, Artificial Sequence
  chemically synthesized
agatgtcagcagagcccttg

SEQ ID NO: 15236 - DNA, 20 bp, Artificial Sequence
  chemically synthesized
cagagcccttgcagttattc

SEQ ID NO: 15237 - DNA, 20 bp, Artificial Sequence
  chemically synthesized
agagcccttgcagttattcc

SEQ ID NO: 15238 - DNA, 20 bp, Artificial Sequence
  chemically synthesized
ccttgcagttattccaggct

SEQ ID NO: 15239 - DNA, 20 bp, Artificial Sequence
  chemically synthesized
tgcagttattccaggcttgg

SEQ ID NO: 15240 - DNA, 20 bp, Artificial Sequence
  chemically synthesized
ggtggtgattgctctgctat

SEQ ID NO: 15241 - DNA, 20 bp, Artificial Sequence
  chemically synthesized
tgttttatatgccctgtatc

SEQ ID NO: 15242 - DNA, 20 bp, Artificial Sequence
  chemically synthesized
tatgccctgtatccagtatt

SEQ ID NO: 15243 - DNA, 20 bp, Artificial Sequence
  chemically synthesized
atgccctgtatccagtattc

SEQ ID NO: 15244 - DNA, 20 bp, Artificial Sequence
  chemically synthesized
atccagtattcaggtcaacc

SEQ ID NO: 15245 - DNA, 20 bp, Artificial Sequence
  chemically synthesized
gtcaacccagccctgatctt

SEQ ID NO: 15246 - DNA, 20 bp, Artificial Sequence
  chemically synthesized
attttagacaaacgtggttt

SEQ ID NO: 15247 - DNA, 20 bp, Artificial Sequence
  chemically synthesized
tttgagtccaaagatcaggg

SEQ ID NO: 15248 - DNA, 20 bp, Artificial Sequence
  chemically synthesized
aagatcagggctgggttgac

SEQ ID NO: 15249 - DNA, 20 bp, Artificial Sequence
  chemically synthesized
gggctgggttgacctgaata

SEQ ID NO: 15250 - DNA, 20 bp, Artificial Sequence
  chemically synthesized
agagcaatcaccaccaagcc

SEQ ID NO: 15251 - DNA, 20 bp, Artificial Sequence
  chemically synthesized
tcctgaggtgccaaggaaat

SEQ ID NO: 15252 - DNA, 20 bp, Artificial Sequence
  chemically synthesized
aaggaaatgaggatggagga

SEQ ID NO: 15253 - DNA, 20 bp, Artificial Sequence
  chemically synthesized
aaatgaggatggaggaagga

SEQ ID NO: 15254 - DNA, 20 bp, Artificial Sequence
  chemically synthesized
atgaatgttctccatgactt

SEQ ID NO: 15255 - DNA, 20 bp, Artificial Sequence
  chemically synthesized
agtcaacacattacctccag

SEQ ID NO: 15256 - DNA, 20 bp, Artificial Sequence
  chemically synthesized
tgtccgtgatcgcagacctc

SEQ ID NO: 15257 - DNA, 20 bp, Artificial Sequence
  chemically synthesized
gctgtgggcattaaactcct

SEQ ID NO: 15258 - DNA, 20 bp, Artificial Sequence
  chemically synthesized
tccaacccctctctctgact

SEQ ID NO: 15259 - DNA, 20 bp, Artificial Sequence
  chemically synthesized
agacagaaaaaatcctacca

SEQ ID NO: 15260 - DNA, 20 bp, Artificial Sequence
  chemically synthesized
tacaggaaagcctatttcat

SEQ ID NO: 15261 - DNA, 20 bp, Artificial Sequence
  chemically synthesized
agcctatttcatatgggtta

SEQ ID NO: 15262 - DNA, 20 bp, Artificial Sequence
  chemically synthesized
tgggttaaagggtaggacag

SEQ ID NO: 15263 - DNA, 20 bp, Artificial Sequence
  chemically synthesized
agttgaatttcgtgaaaagt

SEQ ID NO: 15264 - DNA, 20 bp, Artificial Sequence
  chemically synthesized
agttatataggctttgagca

SEQ ID NO: 15265 - DNA, 20 bp, Artificial Sequence
  chemically synthesized
actttgggaggccgaggtgg

SEQ ID NO: 15266 - DNA, 20 bp, Artificial Sequence
  chemically synthesized
ccgaggtgggcgaatcactc

SEQ ID NO: 15267 - DNA, 20 bp, Artificial Sequence
  chemically synthesized
aatcactcctgggtgaactc

SEQ ID NO: 15268 - DNA, 20 bp, Artificial Sequence
  chemically synthesized
gagaggcggaggaggttgca

SEQ ID NO: 15269 - DNA, 20 bp, Artificial Sequence
  chemically synthesized
ctgcactccagcctgggcaa

SEQ ID NO: 15270 - DNA, 20 bp, Artificial Sequence
  chemically synthesized
tgattcaacagcctgttttg

SEQ ID NO: 15271 - DNA, 20 bp, Artificial Sequence
  chemically synthesized
tggcaagtcatatcaattat

SEQ ID NO: 15272 - DNA, 20 bp, Artificial Sequence
  chemically synthesized
tctggcagcttaataataat

SEQ ID NO: 15273 - DNA, 20 bp, Artificial Sequence
  chemically synthesized
tagatgcagagaccaaggtg

SEQ ID NO: 15274 - DNA, 20 bp, Artificial Sequence
  chemically synthesized
aaggttagtacatgccgagc

SEQ ID NO: 15275 - DNA, 20 bp, Artificial Sequence
  chemically synthesized
ctggggagcaggggaaagcc

SEQ ID NO: 15276 - DNA, 20 bp, Artificial Sequence
  chemically synthesized
ttttgtttgtttgtttgaga

SEQ ID NO: 15277 - DNA, 20 bp, Artificial Sequence
  chemically synthesized
gtctcgcactgttgcctggc

SEQ ID NO: 15278 - DNA, 20 bp, Artificial Sequence
  chemically synthesized
gcctcagcctcccaagtagc

SEQ ID NO: 15279 - DNA, 20 bp, Artificial Sequence
  chemically synthesized
gccttggcctccctaagtgc

SEQ ID NO: 15280 - DNA, 20 bp, Artificial Sequence
  chemically synthesized
tgaagaaccatgcaatctct

SEQ ID NO: 15281 - DNA, 20 bp, Artificial Sequence
  chemically synthesized
ctctctgggttgatagaggc

SEQ ID NO: 15282 - DNA, 20 bp, Artificial Sequence
  chemically synthesized
aaatcactattccaccatca

SEQ ID NO: 15283 - DNA, 20 bp, Artificial Sequence
  chemically synthesized
atactctgtttcaaagtaga

SEQ ID NO: 15284 - DNA, 20 bp, Artificial Sequence
  chemically synthesized
ggggggctcgtcctaggggc

SEQ ID NO: 15285 - DNA, 20 bp, Artificial Sequence
  chemically synthesized
agtcacatagctgccatttt

SEQ ID NO: 15286 - DNA, 20 bp, Artificial Sequence
  chemically synthesized
agctgccattttatggattt

SEQ ID NO: 15287 - DNA, 20 bp, Artificial Sequence
  chemically synthesized
ttttttttttttttttgaga

SEQ ID NO: 15288 - DNA, 20 bp, Artificial Sequence
  chemically synthesized
gattctcttgccttagcctc

SEQ ID NO: 15289 - DNA, 20 bp, Artificial Sequence
  chemically synthesized
gccttagcctcccgagtagc

SEQ ID NO: 15290 - DNA, 20 bp, Artificial Sequence
  chemically synthesized
tgtgagccaccgcgcctgcc

SEQ ID NO: 15291 - DNA, 20 bp, Artificial Sequence
  chemically synthesized
caccgcgcctgcctggagtt

SEQ ID NO: 15292 - DNA, 20 bp, Artificial Sequence
  chemically synthesized
actttgggaggctgaggtgg

SEQ ID NO: 15293 - DNA, 20 bp, Artificial Sequence
  chemically synthesized
ggctgaggtgggaggattgc

SEQ ID NO: 15294 - DNA, 20 bp, Artificial Sequence
  chemically synthesized
actaaaaatacaaaaactag

SEQ ID NO: 15295 - DNA, 20 bp, Artificial Sequence
  chemically synthesized
tattcaggaggctgaggtgg

SEQ ID NO: 15296 - DNA, 20 bp, Artificial Sequence
  chemically synthesized
ttgcgccactgcactccagg

SEQ ID NO: 15297 - DNA, 20 bp, Artificial Sequence
  chemically synthesized
aaacttgttctgtttttcca

SEQ ID NO: 15298 - DNA, 20 bp, Artificial Sequence
  chemically synthesized
tttggacagcgtccatactg

SEQ ID NO: 15299 - DNA, 20 bp, Artificial Sequence
  chemically synthesized
agcgtccatactggtgggtt

SEQ ID NO: 15300 - DNA, 20 bp, Artificial Sequence
  chemically synthesized
ccagcccctgcagacagaag

SEQ ID NO: 15301 - DNA, 20 bp, Artificial Sequence
  chemically synthesized
gtggacctcgtttacctgtt

SEQ ID NO: 15302 - DNA, 20 bp, Artificial Sequence
  chemically synthesized
ttcacttctgcaatactttc

SEQ ID NO: 15303 - DNA, 20 bp, Artificial Sequence
  chemically synthesized
aaatctgcctattacagaac

SEQ ID NO: 15304 - DNA, 20 bp, Artificial Sequence
  chemically synthesized
tgcctattacagaacctgga

SEQ ID NO: 15305 - DNA, 20 bp, Artificial Sequence
  chemically synthesized
tccatgggcaaagggctcgt

SEQ ID NO: 15306 - DNA, 20 bp, Artificial Sequence
  chemically synthesized
ctctcacgagccctttgccc

SEQ ID NO: 15307 - DNA, 20 bp, Artificial Sequence
  chemically synthesized
ttcaggaaagtattgcagaa

SEQ ID NO: 15308 - DNA, 20 bp, Artificial Sequence
  chemically synthesized
agagcatgacaaaagtacaa

SEQ ID NO: 15309 - DNA, 20 bp, Artificial Sequence
  chemically synthesized
cagtatggacgctgtccaaa

SEQ ID NO: 15310 - DNA, 20 bp, Artificial Sequence
  chemically synthesized
ggaaaaacagaacaagtttc

SEQ ID NO: 15311 - DNA, 20 bp, Artificial Sequence
  chemically synthesized
agaacaagtttctggggtta

SEQ ID NO: 15312 - DNA, 20 bp, Artificial Sequence
  chemically synthesized
caagtttctggggttactga

SEQ ID NO: 15313 - DNA, 20 bp, Artificial Sequence
  chemically synthesized
ccaaagcctacaccttcaag

SEQ ID NO: 15314 - DNA, 20 bp, Artificial Sequence
  chemically synthesized
caagaagagtgtagcctgag

SEQ ID NO: 15315 - DNA, 20 bp, Artificial Sequence
  chemically synthesized
gttgcctctagaagggagaa

SEQ ID NO: 15316 - DNA, 20 bp, Artificial Sequence
  chemically synthesized
acttttgcattttgaactgt

SEQ ID NO: 15317 - DNA, 20 bp, Artificial Sequence
  chemically synthesized
tatcttttttttttttgaga

SEQ ID NO: 15318 - DNA, 20 bp, Artificial Sequence
  chemically synthesized
tctggctcagtaacccagcc

SEQ ID NO: 15319 - DNA, 20 bp, Artificial Sequence
  chemically synthesized
tcattgtgacctctacctcc

SEQ ID NO: 15320 - DNA, 20 bp, Artificial Sequence
  chemically synthesized
gatcctcccacctcagcctc

SEQ ID NO: 15321 - DNA, 20 bp, Artificial Sequence
  chemically synthesized
ttttgtatttttagtagaga

SEQ ID NO: 15322 - DNA, 20 bp, Artificial Sequence
  chemically synthesized
acctcagcctcccaaagtgc

SEQ ID NO: 15323 - DNA, 20 bp, Artificial Sequence
  chemically synthesized
caggcagatcacatgaggtc

SEQ ID NO: 15324 - DNA, 20 bp, Artificial Sequence
  chemically synthesized
cgtttctaccaaaaaatata

SEQ ID NO: 15325 - DNA, 20 bp, Artificial Sequence
  chemically synthesized
tactcgggaggctaaggcaa

SEQ ID NO: 15326 - DNA, 20 bp, Artificial Sequence
  chemically synthesized
ttatgccactgcactacagg

SEQ ID NO: 15327 - DNA, 20 bp, Artificial Sequence
  chemically synthesized
tcaagaagtatttgtcctgg

SEQ ID NO: 15328 - DNA, 20 bp, Artificial Sequence
  chemically synthesized
aacttggacttgcatatacc

SEQ ID NO: 15329 - DNA, 20 bp, Artificial Sequence
  chemically synthesized
atgggttccctcaggcctca

SEQ ID NO: 15330 - DNA, 20 bp, Artificial Sequence
  chemically synthesized
ttgcatttcctctgacatca

SEQ ID NO: 15331 - DNA, 20 bp, Artificial Sequence
  chemically synthesized
aacatggcctgcatttccat

SEQ ID NO: 15332 - DNA, 20 bp, Artificial Sequence
  chemically synthesized
ccatcagaattgctctctgt

SEQ ID NO: 15333 - DNA, 20 bp, Artificial Sequence
  chemically synthesized
gtatcctctctactttgaaa

SEQ ID NO: 15334 - DNA, 20 bp, Artificial Sequence
  chemically synthesized
aataggtgtcaaccgccagt

SEQ ID NO: 15335 - DNA, 20 bp, Artificial Sequence
  chemically synthesized
tgccttttatcccgtgatgg

SEQ ID NO: 15336 - DNA, 20 bp, Artificial Sequence
  chemically synthesized
ttcaatggagatcagatgtt

SEQ ID NO: 15337 - DNA, 20 bp, Artificial Sequence
  chemically synthesized
cacttcatctttttattttt

SEQ ID NO: 15338 - DNA, 20 bp, Artificial Sequence
  chemically synthesized
tattttttagaatcatgcgg

SEQ ID NO: 15339 - DNA, 20 bp, Artificial Sequence
  chemically synthesized
ggcaggcagatcatgaggtc

SEQ ID NO: 15340 - DNA, 20 bp, Artificial Sequence
  chemically synthesized
tacttgggaggctgaggcag

SEQ ID NO: 15341 - DNA, 20 bp, Artificial Sequence
  chemically synthesized
aaagaaagaaagaaagtggc

SEQ ID NO: 15342 - DNA, 20 bp, Artificial Sequence
  chemically synthesized
agaaagaaagtggccagaat

SEQ ID NO: 15343 - DNA, 20 bp, Artificial Sequence
  chemically synthesized
gggctttcccctgctcccca

SEQ ID NO: 15344 - DNA, 20 bp, Artificial Sequence
  chemically synthesized
ttgccaaggacatgtagttg

SEQ ID NO: 15345 - DNA, 20 bp, Artificial Sequence
  chemically synthesized
gagggctggagcccagttcc

SEQ ID NO: 15346 - DNA, 20 bp, Artificial Sequence
  chemically synthesized
ttaccccacaaaacaggctg

SEQ ID NO: 15347 - DNA, 20 bp, Artificial Sequence
  chemically synthesized
tcttttttttttttttgaga

SEQ ID NO: 15348 - DNA, 20 bp, Artificial Sequence
  chemically synthesized
tcttactctgttgcccaggc

SEQ ID NO: 15349 - DNA, 20 bp, Artificial Sequence
  chemically synthesized
ccgcctctcacctcagcctc

SEQ ID NO: 15350 - DNA, 20 bp, Artificial Sequence
  chemically synthesized
tcgtaatgtttttgtagaga

SEQ ID NO: 15351 - DNA, 20 bp, Artificial Sequence
  chemically synthesized
cccaggctggtcttgaactc

SEQ ID NO: 15352 - DNA, 20 bp, Artificial Sequence
  chemically synthesized
ttgaactcctgagttcaccc

SEQ ID NO: 15353 - DNA, 20 bp, Artificial Sequence
  chemically synthesized
acctcggcctcccaaagtgc

SEQ ID NO: 15354 - DNA, 20 bp, Artificial Sequence
  chemically synthesized
ctgtattttcaactcactgg

SEQ ID NO: 15355 - DNA, 20 bp, Artificial Sequence
  chemically synthesized
gatgatccaaagtcagagag

SEQ ID NO: 15356 - DNA, 20 bp, Artificial Sequence
  chemically synthesized
cagagagaggggttggaagc

SEQ ID NO: 15357 - DNA, 20 bp, Artificial Sequence
  chemically synthesized
catgagtagcccgtggcttc

SEQ ID NO: 15358 - DNA, 20 bp, Artificial Sequence
  chemically synthesized
gatggacagacattgcgaga

SEQ ID NO: 15359 - DNA, 20 bp, Artificial Sequence
  chemically synthesized
ctccaatcacagctacccaa

SEQ ID NO: 15360 - DNA, 20 bp, Artificial Sequence
  chemically synthesized
caccaagatgaaccagtcct

SEQ ID NO: 15361 - DNA, 20 bp, Artificial Sequence
  chemically synthesized
acctggaggtaatgtgttga

SEQ ID NO: 15362 - DNA, 20 bp, Artificial Sequence
  chemically synthesized
ttggtggtgattgctctgct

SEQ ID NO: 15363 - DNA, 20 bp, Artificial Sequence
  chemically synthesized
ccatatagagaggagatcag

SEQ ID NO: 15364 - DNA, 20 bp, Artificial Sequence
  chemically synthesized
catctacataaagggggaag

SEQ ID NO: 15365 - DNA, 20 bp, Artificial Sequence
  chemically synthesized
tgaagcagaagaggtaacat

SEQ ID NO: 15366 - DNA, 20 bp, Artificial Sequence
  chemically synthesized
tgaggtagttactgctattt

SEQ ID NO: 15367 - DNA, 20 bp, Artificial Sequence
  chemically synthesized
gtggctctccctgatttcgg

SEQ ID NO: 15368 - DNA, 20 bp, Artificial Sequence
  chemically synthesized
ctaattctttatattttttg

SEQ ID NO: 15369 - DNA, 20 bp, Artificial Sequence
  chemically synthesized
ccaccgcgcctgcctggagt

SEQ ID NO: 15370 - DNA, 20 bp, Artificial Sequence
  chemically synthesized
aaagcattcattcagtaacc

SEQ ID NO: 15371 - DNA, 20 bp, Artificial Sequence
  chemically synthesized
ccagtatggacgctgtccaa

SEQ ID NO: 15372 - DNA, 20 bp, Artificial Sequence
  chemically synthesized
ccgtttctaccaaaaaatat

SEQ ID NO: 15373 - DNA, 20 bp, Artificial Sequence
  chemically synthesized
ctactcgggaggctaaggca

SEQ ID NO: 15374 - DNA, 20 bp, Artificial Sequence
  chemically synthesized
ctcaagaagtatttgtcctg

SEQ ID NO: 15375 - DNA, 20 bp, Artificial Sequence
  chemically synthesized
cttgcatttcctctgacatc

SEQ ID NO: 15376 - DNA, 20 bp, Artificial Sequence
  chemically synthesized
aaacatggcctgcatttcca

SEQ ID NO: 15377 - DNA, 20 bp, Artificial Sequence
  chemically synthesized
acacttcatctttttatttt

SEQ ID NO: 15378 - DNA, 20 bp, Artificial Sequence
  chemically synthesized
ctacttgggaggctgaggca

SEQ ID NO: 15379 - DNA, 20 bp, Artificial Sequence
  chemically synthesized
ccatctcaaacaaacaaaca

SEQ ID NO: 15380 - DNA, 20 bp, Artificial Sequence
  chemically synthesized
ctcaaacaaacaaacaaaag

SEQ ID NO: 15381 - DNA, 20 bp, Artificial Sequence
  chemically synthesized
aacaaacaaacaaaagaaag

SEQ ID NO: 15382 - DNA, 20 bp, Artificial Sequence
  chemically synthesized
aacaaacaaaagaaagaaag

SEQ ID NO: 15383 - DNA, 20 bp, Artificial Sequence
  chemically synthesized
gaaagaaagaaagaaagtgg

SEQ ID NO: 15384 - DNA, 20 bp, Artificial Sequence
  chemically synthesized
agaatgggaatgtttacgtg

SEQ ID NO: 15385 - DNA, 20 bp, Artificial Sequence
  chemically synthesized
taaatagcagtaactacctc

SEQ ID NO: 15386 - DNA, 20 bp, Artificial Sequence
  chemically synthesized
acctatttgtagattataaa

SEQ ID NO: 15387 - DNA, 20 bp, Artificial Sequence
  chemically synthesized
aatactggatacagggcata

SEQ ID NO: 15388 - DNA, 20 bp, Artificial Sequence
  chemically synthesized
tggcgaaactccatctctac

SEQ ID NO: 15389 - DNA, 20 bp, Artificial Sequence
  chemically synthesized
cccgtctctactaaaaatac

SEQ ID NO: 15390 - DNA, 20 bp, Artificial Sequence
  chemically synthesized
ttgctgtagtagtcagtatc

SEQ ID NO: 15391 - DNA, 20 bp, Artificial Sequence
  chemically synthesized
gtccaaagagaatcctatgg

SEQ ID NO: 15392 - DNA, 20 bp, Artificial Sequence
  chemically synthesized
gataacctatttgtagatta

SEQ ID NO: 15393 - DNA, 20 bp, Artificial Sequence
  chemically synthesized
ggtgacttttcattacccca

SEQ ID NO: 15394 - DNA, 20 bp, Artificial Sequence
  chemically synthesized
cctcttctgcttcatactaa

SEQ ID NO: 15395 - DNA, 20 bp, Artificial Sequence
  chemically synthesized
cagccctgatctttggactc

SEQ ID NO: 15396 - DNA, 20 bp, Artificial Sequence
  chemically synthesized
cattaaactcctttgggtag

SEQ ID NO: 15397 - DNA, 20 bp, Artificial Sequence
  chemically synthesized
cgcaatgtctgtccatcaga

SEQ ID NO: 15398 - DNA, 20 bp, Artificial Sequence
  chemically synthesized
ttcaggaagccacgggctac

SEQ ID NO: 15399 - DNA, 20 bp, Artificial Sequence
  chemically synthesized
tcgtgaaaagtctgagttat

SEQ ID NO: 15400 - DNA, 20 bp, Artificial Sequence
  chemically synthesized
agttatataggctttgagca

SEQ ID NO: 15401 - DNA, 20 bp, Artificial Sequence
  chemically synthesized
tatgaaaaaaggaaacacac

SEQ ID NO: 15402 - DNA, 20 bp, Artificial Sequence
  chemically synthesized
aacacacagatgattcaaca

SEQ ID NO: 15403 - DNA, 20 bp, Artificial Sequence
  chemically synthesized
tggcaagtcatatcaattat

SEQ ID NO: 15404 - DNA, 20 bp, Artificial Sequence
  chemically synthesized
gtcatatcaattatctgagt

SEQ ID NO: 15405 - DNA, 20 bp, Artificial Sequence
  chemically synthesized
tctacaaataggttatctct

SEQ ID NO: 15406 - DNA, 20 bp, Artificial Sequence
  chemically synthesized
tgtgtgccagtccatgtgct

SEQ ID NO: 15407 - DNA, 20 bp, Artificial Sequence
  chemically synthesized
agagaccaaggtgctgagtt

SEQ ID NO: 15408 - DNA, 20 bp, Artificial Sequence
  chemically synthesized
atggaagcccaggtaggcag

SEQ ID NO: 15409 - DNA, 20 bp, Artificial Sequence
  chemically synthesized
ctggggagcaggggaaagcc

SEQ ID NO: 15410 - DNA, 20 bp, Artificial Sequence
  chemically synthesized
ccactttctttctttctttc

SEQ ID NO: 15411 - DNA, 20 bp, Artificial Sequence
  chemically synthesized
tttctttctttctttctttt

SEQ ID NO: 15412 - DNA, 20 bp, Artificial Sequence
  chemically synthesized
tttctttctttcttttgttt

SEQ ID NO: 15413 - DNA, 20 bp, Artificial Sequence
  chemically synthesized
aacctctgcctctccggttc

SEQ ID NO: 15414 - DNA, 20 bp, Artificial Sequence
  chemically synthesized
tgcctcagcctcccaagtag

SEQ ID NO: 15415 - DNA, 20 bp, Artificial Sequence
  chemically synthesized
ttttgtatttttagtagaga

SEQ ID NO: 15416 - DNA, 20 bp, Artificial Sequence
  chemically synthesized
tgccttggcctccctaagtg

SEQ ID NO: 15417 - DNA, 20 bp, Artificial Sequence
  chemically synthesized
gtgagccactacacccagcc

SEQ ID NO: 15418 - DNA, 20 bp, Artificial Sequence
  chemically synthesized
aggccagagttagtggctct

SEQ ID NO: 15419 - DNA, 20 bp, Artificial Sequence
  chemically synthesized
tctagtacttttaaagggga

SEQ ID NO: 15420 - DNA, 20 bp, Artificial Sequence
  chemically synthesized
gaagtggtttgtctgagata

SEQ ID NO: 15421 - DNA, 20 bp, Artificial Sequence
  chemically synthesized
aattctgatggaaatgcagg

SEQ ID NO: 15422 - DNA, 20 bp, Artificial Sequence
  chemically synthesized
tctctgatgtcagaggaaat

SEQ ID NO: 15423 - DNA, 20 bp, Artificial Sequence
  chemically synthesized
aacccatggtatatgcaagt

SEQ ID NO: 15424 - DNA, 20 bp, Artificial Sequence
  chemically synthesized
aagtcacatagctgccattt

SEQ ID NO: 15425 - DNA, 20 bp, Artificial Sequence
  chemically synthesized
tagctgccattttatggatt

SEQ ID NO: 15426 - DNA, 20 bp, Artificial Sequence
  chemically synthesized
aacctccgcctcccaggttc

SEQ ID NO: 15427 - DNA, 20 bp, Artificial Sequence
  chemically synthesized
tgccttagcctcccgagtag

SEQ ID NO: 15428 - DNA, 20 bp, Artificial Sequence
  chemically synthesized
tttatattttttggtagaaa

SEQ ID NO: 15429 - DNA, 20 bp, Artificial Sequence
  chemically synthesized
tgccttggcctcccaaagtg

SEQ ID NO: 15430 - DNA, 20 bp, Artificial Sequence
  chemically synthesized
cctgcctggagttcagaatc

SEQ ID NO: 15431 - DNA, 20 bp, Artificial Sequence
  chemically synthesized
agaatcttgggcttcattat

SEQ ID NO: 15432 - DNA, 20 bp, Artificial Sequence
  chemically synthesized
cactttgggaggctgaggtg

SEQ ID NO: 15433 - DNA, 20 bp, Artificial Sequence
  chemically synthesized
gaggtagaggtcacaatgag

SEQ ID NO: 15434 - DNA, 20 bp, Artificial Sequence
  chemically synthesized
gctacactcttcttgaaggt

SEQ ID NO: 15435 - DNA, 20 bp, Artificial Sequence
  chemically synthesized
tcagtaaccccagaaacttg

SEQ ID NO: 15436 - DNA, 20 bp, Artificial Sequence
  chemically synthesized
gaaacttgttctgtttttcc

SEQ ID NO: 15437 - DNA, 20 bp, Artificial Sequence
  chemically synthesized
tttggacagcgtccatactg

SEQ ID NO: 15438 - DNA, 20 bp, Artificial Sequence
  chemically synthesized
gcagacagaagctgagtgga

SEQ ID NO: 15439 - DNA, 20 bp, Artificial Sequence
  chemically synthesized
tccatccaggttctgtaata

SEQ ID NO: 15440 - DNA, 20 bp, Artificial Sequence
  chemically synthesized
tctcctcatgtcccctcaag

SEQ ID NO: 15441 - DNA, 20 bp, Artificial Sequence
  chemically synthesized
taacaggtaaacgaggtcca

SEQ ID NO: 15442 - DNA, 20 bp, Artificial Sequence
  chemically synthesized
gcttctgtctgcaggggctg

SEQ ID NO: 15443 - DNA, 20 bp, Artificial Sequence
  chemically synthesized
cagtctcacaggttacaggg

SEQ ID NO: 15444 - DNA, 20 bp, Artificial Sequence
  chemically synthesized
gaatcctatggaaaaacaga

SEQ ID NO: 15445 - DNA, 20 bp, Artificial Sequence
  chemically synthesized
agtttctggggttactgaat

SEQ ID NO: 15446 - DNA, 20 bp, Artificial Sequence
  chemically synthesized
tcaagaagagtgtagcctga

SEQ ID NO: 15447 - DNA, 20 bp, Artificial Sequence
  chemically synthesized
tatgtaacttttgcattttg

SEQ ID NO: 15448 - DNA, 20 bp, Artificial Sequence
  chemically synthesized
ggtgtgtgccaccacatcca

SEQ ID NO: 15449 - DNA, 20 bp, Artificial Sequence
  chemically synthesized
ttttgtatttttagtagaga

SEQ ID NO: 15450 - DNA, 20 bp, Artificial Sequence
  chemically synthesized
cacctcagcctcccaaagtg

SEQ ID NO: 15451 - DNA, 20 bp, Artificial Sequence
  chemically synthesized
ttaaacacaaataatgaagc

SEQ ID NO: 15452 - DNA, 20 bp, Artificial Sequence
  chemically synthesized
caggcagatcacatgaggtc

SEQ ID NO: 15453 - DNA, 20 bp, Artificial Sequence
  chemically synthesized
gcctggccaacatggtgaaa

SEQ ID NO: 15454 - DNA, 20 bp, Artificial Sequence
  chemically synthesized
tcgggaggctaaggcaagag

SEQ ID NO: 15455 - DNA, 20 bp, Artificial Sequence
  chemically synthesized
gaggcggaggttgccgtgag

SEQ ID NO: 15456 - DNA, 20 bp, Artificial Sequence
  chemically synthesized
tggaagaatgcatatggaac

SEQ ID NO: 15457 - DNA, 20 bp, Artificial Sequence
  chemically synthesized
ttgctctctgtaaggatgta

SEQ ID NO: 15458 - DNA, 20 bp, Artificial Sequence
  chemically synthesized
gtaaggatgtatatagcttc

SEQ ID NO: 15459 - DNA, 20 bp, Artificial Sequence
  chemically synthesized
tttatcccgtgatggtggaa

SEQ ID NO: 15460 - DNA, 20 bp, Artificial Sequence
  chemically synthesized
ctctggcctctatcaaccca

SEQ ID NO: 15461 - DNA, 20 bp, Artificial Sequence
  chemically synthesized
atggttcttcaatggagatc

SEQ ID NO: 15462 - DNA, 20 bp, Artificial Sequence
  chemically synthesized
gaggcagaggttgcagtgag

SEQ ID NO: 15463 - DNA, 20 bp, Artificial Sequence
  chemically synthesized
aaagaaagtggccagaatgg

SEQ ID NO: 15464 - DNA, 20 bp, Artificial Sequence
  chemically synthesized
aaattggcaaatgctaaact

SEQ ID NO: 15465 - DNA, 20 bp, Artificial Sequence
  chemically synthesized
tttcccctgctccccagaga

SEQ ID NO: 15466 - DNA, 20 bp, Artificial Sequence
  chemically synthesized
gcggaagccagcctgcctac

SEQ ID NO: 15467 - DNA, 20 bp, Artificial Sequence
  chemically synthesized
agcaccttggtctctgcatc

SEQ ID NO: 15468 - DNA, 20 bp, Artificial Sequence
  chemically synthesized
atagcacatggactggcaca

SEQ ID NO: 15469 - DNA, 20 bp, Artificial Sequence
  chemically synthesized
cactgtttaataaatgttaa

SEQ ID NO: 15470 - DNA, 20 bp, Artificial Sequence
  chemically synthesized
gctgccagagataacctatt

SEQ ID NO: 15471 - DNA, 20 bp, Artificial Sequence
  chemically synthesized
aacaggctgttgaatcatct

SEQ ID NO: 15472 - DNA, 20 bp, Artificial Sequence
  chemically synthesized
acacgcccagctaattttcg

SEQ ID NO: 15473 - DNA, 20 bp, Artificial Sequence
  chemically synthesized
tcgtaatgtttttgtagaga

SEQ ID NO: 15474 - DNA, 20 bp, Artificial Sequence
  chemically synthesized
gaactcctgagttcacccag

SEQ ID NO: 15475 - DNA, 20 bp, Artificial Sequence
  chemically synthesized
cacctcggcctcccaaagtg

SEQ ID NO: 15476 - DNA, 20 bp, Artificial Sequence
  chemically synthesized
atctttctttatgttacctc

SEQ ID NO: 15477 - DNA, 20 bp, Artificial Sequence
  chemically synthesized
taccctttaacccatatgaa

SEQ ID NO: 15478 - DNA, 20 bp, Artificial Sequence
  chemically synthesized
cctgtattttcaactcactg

SEQ ID NO: 15479 - DNA, 20 bp, Artificial Sequence
  chemically synthesized
ggttggaagcatgagtagcc

SEQ ID NO: 15480 - DNA, 20 bp, Artificial Sequence
  chemically synthesized
ctccaatcacagctacccaa

SEQ ID NO: 15481 - DNA, 20 bp, Artificial Sequence
  chemically synthesized
acccaaaggagtttaatgcc

SEQ ID NO: 15482 - DNA, 20 bp, Artificial Sequence
  chemically synthesized
gcagagcccttgcagttatt

SEQ ID NO: 15483 - DNA, 20 bp, Artificial Sequence
  chemically synthesized
tgcagttattccaggcttgg

SEQ ID NO: 15484 - DNA, 20 bp, Artificial Sequence
  chemically synthesized
gctatgagtctgtgccttgc

SEQ ID NO: 15485 - DNA, 20 bp, Artificial Sequence
  chemically synthesized
ctgatctttggactcaaaaa

SEQ ID NO: 15486 - DNA, 22 bp, Artificial Sequence
  chemically synthesized
tagacaaacgtggtttttgagt

SEQ ID NO: 15487 - DNA, 22 bp, Artificial Sequence
  chemically synthesized
agacaaacgtggtttttgagtc

SEQ ID NO: 15488 - DNA, 22 bp, Artificial Sequence
  chemically synthesized
gacaaacgtggtttttgagtcc

SEQ ID NO: 15489 - DNA, 22 bp, Artificial Sequence
  chemically synthesized
ttgagtccaaagatcagggctg

SEQ ID NO: 15490 - DNA, 22 bp, Artificial Sequence
  chemically synthesized
tgagtccaaagatcagggctgg

SEQ ID NO: 15491 - DNA, 22 bp, Artificial Sequence
  chemically synthesized
gagtccaaagatcagggctggg

SEQ ID NO: 15492 - DNA, 22 bp, Artificial Sequence
  chemically synthesized
agtccaaagatcagggctgggt

SEQ ID NO: 15493 - DNA, 22 bp, Artificial Sequence
  chemically synthesized
ggttgacctgaatactggatac

SEQ ID NO: 15494 - DNA, 22 bp, Artificial Sequence
  chemically synthesized
acctgaatactggatacagggc

SEQ ID NO: 15495 - DNA, 22 bp, Artificial Sequence
  chemically synthesized
aatactggatacagggcatata

SEQ ID NO: 15496 - DNA, 22 bp, Artificial Sequence
  chemically synthesized
gatacagggcatataaaacagg

SEQ ID NO: 15497 - DNA, 22 bp, Artificial Sequence
  chemically synthesized
atagcagagcaatcaccaccaa

SEQ ID NO: 15498 - DNA, 22 bp, Artificial Sequence
  chemically synthesized
gaataactgcaagggctctgct

SEQ ID NO: 15499 - DNA, 22 bp, Artificial Sequence
  chemically synthesized
caagggctctgctgacatcttc

SEQ ID NO: 15500 - DNA, 22 bp, Artificial Sequence
  chemically synthesized
tgctgacatcttcctgaggtgc

SEQ ID NO: 15501 - DNA, 22 bp, Artificial Sequence
  chemically synthesized
ctgacatcttcctgaggtgcca

SEQ ID NO: 15502 - DNA, 22 bp, Artificial Sequence
  chemically synthesized
acatcttcctgaggtgccaagg

SEQ ID NO: 15503 - DNA, 22 bp, Artificial Sequence
  chemically synthesized
cctgaggtgccaaggaaatgag

SEQ ID NO: 15504 - DNA, 22 bp, Artificial Sequence
  chemically synthesized
ctgaggtgccaaggaaatgagg

SEQ ID NO: 15505 - DNA, 22 bp, Artificial Sequence
  chemically synthesized
aggtgccaaggaaatgaggatg

SEQ ID NO: 15506 - DNA, 22 bp, Artificial Sequence
  chemically synthesized
tccatgactttgggatccagtc

SEQ ID NO: 15507 - DNA, 22 bp, Artificial Sequence
  chemically synthesized
catgactttgggatccagtcaa

SEQ ID NO: 15508 - DNA, 22 bp, Artificial Sequence
  chemically synthesized
tgggatccagtcaacacattac

SEQ ID NO: 15509 - DNA, 22 bp, Artificial Sequence
  chemically synthesized
gggatccagtcaacacattacc

SEQ ID NO: 15510 - DNA, 22 bp, Artificial Sequence
  chemically synthesized
ggatccagtcaacacattacct

SEQ ID NO: 15511 - DNA, 22 bp, Artificial Sequence
  chemically synthesized
cctccaggtgaattaccaagac

SEQ ID NO: 15512 - DNA, 22 bp, Artificial Sequence
  chemically synthesized
caggtgaattaccaagactccc

SEQ ID NO: 15513 - DNA, 22 bp, Artificial Sequence
  chemically synthesized
ccaagactcccaggactggttc

SEQ ID NO: 15514 - DNA, 22 bp, Artificial Sequence
  chemically synthesized
ccaggactggttcatcttggtg

SEQ ID NO: 15515 - DNA, 22 bp, Artificial Sequence
  chemically synthesized
gttcatcttggtgtccgtgatc

SEQ ID NO: 15516 - DNA, 22 bp, Artificial Sequence
  chemically synthesized
atcttggtgtccgtgatcgcag

SEQ ID NO: 15517 - DNA, 22 bp, Artificial Sequence
  chemically synthesized
ggtgtccgtgatcgcagacctc

SEQ ID NO: 15518 - DNA, 22 bp, Artificial Sequence
  chemically synthesized
gtgtccgtgatcgcagacctca

SEQ ID NO: 15519 - DNA, 22 bp, Artificial Sequence
  chemically synthesized
aggaatgccttctacgtcctct

SEQ ID NO: 15520 - DNA, 22 bp, Artificial Sequence
  chemically synthesized
ctacgtcctcttccccatctgg

SEQ ID NO: 15521 - DNA, 22 bp, Artificial Sequence
  chemically synthesized
tacgtcctcttccccatctggt

SEQ ID NO: 15522 - DNA, 22 bp, Artificial Sequence
  chemically synthesized
cgtcctcttccccatctggttc

SEQ ID NO: 15523 - DNA, 22 bp, Artificial Sequence
  chemically synthesized
ttccccatctggttccatcttc

SEQ ID NO: 15524 - DNA, 22 bp, Artificial Sequence
  chemically synthesized
ccccatctggttccatcttcag

SEQ ID NO: 15525 - DNA, 22 bp, Artificial Sequence
  chemically synthesized
cccatctggttccatcttcagg

SEQ ID NO: 15526 - DNA, 22 bp, Artificial Sequence
  chemically synthesized
gttccatcttcaggaagctgtg

SEQ ID NO: 15527 - DNA, 22 bp, Artificial Sequence
  chemically synthesized
catcttcaggaagctgtgggca

SEQ ID NO: 15528 - DNA, 22 bp, Artificial Sequence
  chemically synthesized
caggaagctgtgggcattaaac

SEQ ID NO: 15529 - DNA, 22 bp, Artificial Sequence
  chemically synthesized
aggaagctgtgggcattaaact

SEQ ID NO: 15530 - DNA, 22 bp, Artificial Sequence
  chemically synthesized
tgggcattaaactcctttgggt

SEQ ID NO: 15531 - DNA, 22 bp, Artificial Sequence
  chemically synthesized
aactcctttgggtagctgtgat

SEQ ID NO: 15532 - DNA, 22 bp, Artificial Sequence
  chemically synthesized
ctttgggtagctgtgattggag

SEQ ID NO: 15533 - DNA, 22 bp, Artificial Sequence
  chemically synthesized
tgggtagctgtgattggagact

SEQ ID NO: 15534 - DNA, 22 bp, Artificial Sequence
  chemically synthesized
gggtagctgtgattggagactg

SEQ ID NO: 15535 - DNA, 22 bp, Artificial Sequence
  chemically synthesized
ggtagctgtgattggagactgg

SEQ ID NO: 15536 - DNA, 22 bp, Artificial Sequence
  chemically synthesized
tgattggagactggctcaacct

SEQ ID NO: 15537 - DNA, 22 bp, Artificial Sequence
  chemically synthesized
gagactggctcaacctcgtctt

SEQ ID NO: 15538 - DNA, 22 bp, Artificial Sequence
  chemically synthesized
gctcaacctcgtctttaagtgg

SEQ ID NO: 15539 - DNA, 22 bp, Artificial Sequence
  chemically synthesized
aacctcgtctttaagtggtaag

SEQ ID NO: 15540 - DNA, 22 bp, Artificial Sequence
  chemically synthesized
gtctttaagtggtaagaaccat

SEQ ID NO: 15541 - DNA, 22 bp, Artificial Sequence
  chemically synthesized
taagtggtaagaaccatataga

SEQ ID NO: 15542 - DNA, 22 bp, Artificial Sequence
  chemically synthesized
aagtggtaagaaccatatagag

SEQ ID NO: 15543 - DNA, 22 bp, Artificial Sequence
  chemically synthesized
agtggtaagaaccatatagaga

SEQ ID NO: 15544 - DNA, 22 bp, Artificial Sequence
  chemically synthesized
gcattcgctctcgcaatgtctg

SEQ ID NO: 15545 - DNA, 22 bp, Artificial Sequence
  chemically synthesized
gctctcgcaatgtctgtccatc

SEQ ID NO: 15546 - DNA, 22 bp, Artificial Sequence
  chemically synthesized
tcgcaatgtctgtccatcagaa

SEQ ID NO: 15547 - DNA, 22 bp, Artificial Sequence
  chemically synthesized
gcaatgtctgtccatcagaagt

SEQ ID NO: 15548 - DNA, 22 bp, Artificial Sequence
  chemically synthesized
tccatcagaagttgctttcccc

SEQ ID NO: 15549 - DNA, 22 bp, Artificial Sequence
  chemically synthesized
ctttccccaggctattcaggaa

SEQ ID NO: 15550 - DNA, 22 bp, Artificial Sequence
  chemically synthesized
tccccaggctattcaggaagcc

SEQ ID NO: 15551 - DNA, 22 bp, Artificial Sequence
  chemically synthesized
ccccaggctattcaggaagcca

SEQ ID NO: 15552 - DNA, 22 bp, Artificial Sequence
  chemically synthesized
cccaggctattcaggaagccac

SEQ ID NO: 15553 - DNA, 22 bp, Artificial Sequence
  chemically synthesized
ttcaggaagccacgggctactc

SEQ ID NO: 15554 - DNA, 22 bp, Artificial Sequence
  chemically synthesized
aggaagccacgggctactcatg

SEQ ID NO: 15555 - DNA, 22 bp, Artificial Sequence
  chemically synthesized
ctcatgcttccaacccctctct

SEQ ID NO: 15556 - DNA, 22 bp, Artificial Sequence
  chemically synthesized
atgcttccaacccctctctctg

SEQ ID NO: 15557 - DNA, 22 bp, Artificial Sequence
  chemically synthesized
ccaacccctctctctgactttg

SEQ ID NO: 15558 - DNA, 22 bp, Artificial Sequence
  chemically synthesized
caacccctctctctgactttgg

SEQ ID NO: 15559 - DNA, 22 bp, Artificial Sequence
  chemically synthesized
tctctgactttggatcatctac

SEQ ID NO: 15560 - DNA, 22 bp, Artificial Sequence
  chemically synthesized
tctgactttggatcatctacat

SEQ ID NO: 15561 - DNA, 22 bp, Artificial Sequence
  chemically synthesized
tgactttggatcatctacataa

SEQ ID NO: 15562 - DNA, 22 bp, Artificial Sequence
  chemically synthesized
actttggatcatctacataaag

SEQ ID NO: 15563 - DNA, 22 bp, Artificial Sequence
  chemically synthesized
tggatcatctacataaaggggg

SEQ ID NO: 15564 - DNA, 22 bp, Artificial Sequence
  chemically synthesized
ggatcatctacataaaggggga

SEQ ID NO: 15565 - DNA, 22 bp, Artificial Sequence
  chemically synthesized
gatcatctacataaagggggaa

SEQ ID NO: 15566 - DNA, 22 bp, Artificial Sequence
  chemically synthesized
cataaagggggaagacagaaaa

SEQ ID NO: 15567 - DNA, 22 bp, Artificial Sequence
  chemically synthesized
ccagtgagttgaaaatacagga

SEQ ID NO: 15568 - DNA, 22 bp, Artificial Sequence
  chemically synthesized
aaaatacaggaaagcctatttc

SEQ ID NO: 15569 - DNA, 22 bp, Artificial Sequence
  chemically synthesized
tttcatatgggttaaagggtag

SEQ ID NO: 15570 - DNA, 22 bp, Artificial Sequence
  chemically synthesized
catatgggttaaagggtaggac

SEQ ID NO: 15571 - DNA, 22 bp, Artificial Sequence
  chemically synthesized
atatgggttaaagggtaggaca

SEQ ID NO: 15572 - DNA, 22 bp, Artificial Sequence
  chemically synthesized
aagggtaggacagttgaatttc

SEQ ID NO: 15573 - DNA, 22 bp, Artificial Sequence
  chemically synthesized
aatttcgtgaaaagtctgagtt

SEQ ID NO: 15574 - DNA, 22 bp, Artificial Sequence
  chemically synthesized
cgtgaaaagtctgagttatata

SEQ ID NO: 15575 - DNA, 22 bp, Artificial Sequence
  chemically synthesized
gtgaaaagtctgagttatatag

SEQ ID NO: 15576 - DNA, 22 bp, Artificial Sequence
  chemically synthesized
agttatataggctttgagcaaa

SEQ ID NO: 15577 - DNA, 22 bp, Artificial Sequence
  chemically synthesized
tataggctttgagcaaagagtt

SEQ ID NO: 15578 - DNA, 22 bp, Artificial Sequence
  chemically synthesized
tgagcaaagagttttattagta

SEQ ID NO: 15579 - DNA, 22 bp, Artificial Sequence
  chemically synthesized
gagcaaagagttttattagtat

SEQ ID NO: 15580 - DNA, 22 bp, Artificial Sequence
  chemically synthesized
agcaaagagttttattagtatg

SEQ ID NO: 15581 - DNA, 22 bp, Artificial Sequence
  chemically synthesized
tattagtatgaagcagaagagg

SEQ ID NO: 15582 - DNA, 22 bp, Artificial Sequence
  chemically synthesized
attagtatgaagcagaagaggt

SEQ ID NO: 15583 - DNA, 22 bp, Artificial Sequence
  chemically synthesized
ttagtatgaagcagaagaggta

SEQ ID NO: 15584 - DNA, 22 bp, Artificial Sequence
  chemically synthesized
gtatgaagcagaagaggtaaca

SEQ ID NO: 15585 - DNA, 22 bp, Artificial Sequence
  chemically synthesized
acacctgtaatcccagcacttt

SEQ ID NO: 15586 - DNA, 22 bp, Artificial Sequence
  chemically synthesized
taatcccagcactttgggaggc

SEQ ID NO: 15587 - DNA, 22 bp, Artificial Sequence
  chemically synthesized
tgggaggccgaggtgggcgaat

SEQ ID NO: 15588 - DNA, 22 bp, Artificial Sequence
  chemically synthesized
gggaggccgaggtgggcgaatc

SEQ ID NO: 15589 - DNA, 22 bp, Artificial Sequence
  chemically synthesized
ggaggccgaggtgggcgaatca

SEQ ID NO: 15590 - DNA, 22 bp, Artificial Sequence
  chemically synthesized
ctgggtgaactcaggagttcaa

SEQ ID NO: 15591 - DNA, 22 bp, Artificial Sequence
  chemically synthesized
ggtgaactcaggagttcaagac

SEQ ID NO: 15592 - DNA, 22 bp, Artificial Sequence
  chemically synthesized
aggagttcaagaccagcctggg

SEQ ID NO: 15593 - DNA, 22 bp, Artificial Sequence
  chemically synthesized
aagaccagcctgggcaacatgg

SEQ ID NO: 15594 - DNA, 22 bp, Artificial Sequence
  chemically synthesized
ggcaacatggcgaaactccatc

SEQ ID NO: 15595 - DNA, 22 bp, Artificial Sequence
  chemically synthesized
catctctacaaaaacattacga

SEQ ID NO: 15596 - DNA, 22 bp, Artificial Sequence
  chemically synthesized
tacaaaaacattacgaaaatta

SEQ ID NO: 15597 - DNA, 22 bp, Artificial Sequence
  chemically synthesized
caaaaacattacgaaaattagc

SEQ ID NO: 15598 - DNA, 22 bp, Artificial Sequence
  chemically synthesized
cgaaaattagctgggcgtgttg

SEQ ID NO: 15599 - DNA, 22 bp, Artificial Sequence
  chemically synthesized
gctgggcgtgttggtgctgtag

SEQ ID NO: 15600 - DNA, 22 bp, Artificial Sequence
  chemically synthesized
ggcgtgttggtgctgtagtccc

SEQ ID NO: 15601 - DNA, 22 bp, Artificial Sequence
  chemically synthesized
gtgctgtagtcccagctactca

SEQ ID NO: 15602 - DNA, 22 bp, Artificial Sequence
  chemically synthesized
tagtcccagctactcaggaggc

SEQ ID NO: 15603 - DNA, 22 bp, Artificial Sequence
  chemically synthesized
ctcaggaggctgaggtgagagg

SEQ ID NO: 15604 - DNA, 22 bp, Artificial Sequence
  chemically synthesized
aggaggctgaggtgagaggcgg

SEQ ID NO: 15605 - DNA, 22 bp, Artificial Sequence
  chemically synthesized
aggtgagaggcggaggaggttg

SEQ ID NO: 15606 - DNA, 22 bp, Artificial Sequence
  chemically synthesized
cagtgagtcaagatcatgccac

SEQ ID NO: 15607 - DNA, 22 bp, Artificial Sequence
  chemically synthesized
cactccagcctgggcaacagag

SEQ ID NO: 15608 - DNA, 22 bp, Artificial Sequence
  chemically synthesized
cagcctgggcaacagagtaaga

SEQ ID NO: 15609 - DNA, 22 bp, Artificial Sequence
  chemically synthesized
ggcaacagagtaagaccctgtc

SEQ ID NO: 15610 - DNA, 22 bp, Artificial Sequence
  chemically synthesized
tctcaaaaaaaaaaaaaagata

SEQ ID NO: 15611 - DNA, 22 bp, Artificial Sequence
  chemically synthesized
aaaaaaaaaaaaaagatagatg

SEQ ID NO: 15612 - DNA, 22 bp, Artificial Sequence
  chemically synthesized
tatgaaaaaaggaaacacacag

SEQ ID NO: 15613 - DNA, 22 bp, Artificial Sequence
  chemically synthesized
aacagcctgttttgtggggtaa

SEQ ID NO: 15614 - DNA, 22 bp, Artificial Sequence
  chemically synthesized
ttttgtggggtaatgaaaagtc

SEQ ID NO: 15615 - DNA, 22 bp, Artificial Sequence
  chemically synthesized
tgtggggtaatgaaaagtcacc

SEQ ID NO: 15616 - DNA, 22 bp, Artificial Sequence
  chemically synthesized
gtggggtaatgaaaagtcaccc

SEQ ID NO: 15617 - DNA, 22 bp, Artificial Sequence
  chemically synthesized
tggggtaatgaaaagtcaccct

SEQ ID NO: 15618 - DNA, 22 bp, Artificial Sequence
  chemically synthesized
ggaactgggctccagccctcgt

SEQ ID NO: 15619 - DNA, 22 bp, Artificial Sequence
  chemically synthesized
ggctccagccctcgttctgcca

SEQ ID NO: 15620 - DNA, 22 bp, Artificial Sequence
  chemically synthesized
cagccctcgttctgccacccac

SEQ ID NO: 15621 - DNA, 22 bp, Artificial Sequence
  chemically synthesized
gttctgccacccaccaactaca

SEQ ID NO: 15622 - DNA, 22 bp, Artificial Sequence
  chemically synthesized
tgccacccaccaactacatgtc

SEQ ID NO: 15623 - DNA, 22 bp, Artificial Sequence
  chemically synthesized
ccacccaccaactacatgtcct

SEQ ID NO: 15624 - DNA, 22 bp, Artificial Sequence
  chemically synthesized
catgtccttggcaagtcatatc

SEQ ID NO: 15625 - DNA, 22 bp, Artificial Sequence
  chemically synthesized
ggcaagtcatatcaattatctg

SEQ ID NO: 15626 - DNA, 22 bp, Artificial Sequence
  chemically synthesized
gcaagtcatatcaattatctga

SEQ ID NO: 15627 - DNA, 22 bp, Artificial Sequence
  chemically synthesized
tctgagtttctgttttataatc

SEQ ID NO: 15628 - DNA, 22 bp, Artificial Sequence
  chemically synthesized
agtttctgttttataatctaca

SEQ ID NO: 15629 - DNA, 22 bp, Artificial Sequence
  chemically synthesized
ctgttttataatctacaaatag

SEQ ID NO: 15630 - DNA, 22 bp, Artificial Sequence
  chemically synthesized
tgttttataatctacaaatagg

SEQ ID NO: 15631 - DNA, 22 bp, Artificial Sequence
  chemically synthesized
ttttataatctacaaataggtt

SEQ ID NO: 15632 - DNA, 22 bp, Artificial Sequence
  chemically synthesized
tataatctacaaataggttatc

SEQ ID NO: 15633 - DNA, 22 bp, Artificial Sequence
  chemically synthesized
ataatctacaaataggttatct

SEQ ID NO: 15634 - DNA, 22 bp, Artificial Sequence
  chemically synthesized
taatctacaaataggttatctc

SEQ ID NO: 15635 - DNA, 22 bp, Artificial Sequence
  chemically synthesized
caaataggttatctctggcagc

SEQ ID NO: 15636 - DNA, 22 bp, Artificial Sequence
  chemically synthesized
tctctggcagcttaataataat

SEQ ID NO: 15637 - DNA, 22 bp, Artificial Sequence
  chemically synthesized
tggcagcttaataataatcagg

SEQ ID NO: 15638 - DNA, 22 bp, Artificial Sequence
  chemically synthesized
gcagcttaataataatcagggt

SEQ ID NO: 15639 - DNA, 22 bp, Artificial Sequence
  chemically synthesized
aataataatcagggttaacatt

SEQ ID NO: 15640 - DNA, 22 bp, Artificial Sequence
  chemically synthesized
ataataatcagggttaacattt

SEQ ID NO: 15641 - DNA, 22 bp, Artificial Sequence
  chemically synthesized
acatttattaaacagtgtgtgc

SEQ ID NO: 15642 - DNA, 22 bp, Artificial Sequence
  chemically synthesized
attaaacagtgtgtgccagtcc

SEQ ID NO: 15643 - DNA, 22 bp, Artificial Sequence
  chemically synthesized
ttaaacagtgtgtgccagtcca

SEQ ID NO: 15644 - DNA, 22 bp, Artificial Sequence
  chemically synthesized
aacagtgtgtgccagtccatgt

SEQ ID NO: 15645 - DNA, 22 bp, Artificial Sequence
  chemically synthesized
tgtgcttttctgtgaggtagtt

SEQ ID NO: 15646 - DNA, 22 bp, Artificial Sequence
  chemically synthesized
ttctgtgaggtagttactgcta

SEQ ID NO: 15647 - DNA, 22 bp, Artificial Sequence
  chemically synthesized
tctgtgaggtagttactgctat

SEQ ID NO: 15648 - DNA, 22 bp, Artificial Sequence
  chemically synthesized
ctgtgaggtagttactgctatt

SEQ ID NO: 15649 - DNA, 22 bp, Artificial Sequence
  chemically synthesized
tgtgaggtagttactgctattt

SEQ ID NO: 15650 - DNA, 22 bp, Artificial Sequence
  chemically synthesized
tgaggtagttactgctatttac

SEQ ID NO: 15651 - DNA, 22 bp, Artificial Sequence
  chemically synthesized
ctgctatttacagaaacagtag

SEQ ID NO: 15652 - DNA, 22 bp, Artificial Sequence
  chemically synthesized
ctatttacagaaacagtagatg

SEQ ID NO: 15653 - DNA, 22 bp, Artificial Sequence
  chemically synthesized
tttacagaaacagtagatgcag

SEQ ID NO: 15654 - DNA, 22 bp, Artificial Sequence
  chemically synthesized
acagaaacagtagatgcagaga

SEQ ID NO: 15655 - DNA, 22 bp, Artificial Sequence
  chemically synthesized
cagaaacagtagatgcagagac

SEQ ID NO: 15656 - DNA, 22 bp, Artificial Sequence
  chemically synthesized
agttaaatgattaggccaacaa

SEQ ID NO: 15657 - DNA, 22 bp, Artificial Sequence
  chemically synthesized
aatgattaggccaacaaggtta

SEQ ID NO: 15658 - DNA, 22 bp, Artificial Sequence
  chemically synthesized
ggccaacaaggttagtacatgc

SEQ ID NO: 15659 - DNA, 22 bp, Artificial Sequence
  chemically synthesized
gtacatgccgagccaggatgga

SEQ ID NO: 15660 - DNA, 22 bp, Artificial Sequence
  chemically synthesized
gcttccgcggcaatgctcttat

SEQ ID NO: 15661 - DNA, 22 bp, Artificial Sequence
  chemically synthesized
ccgcggcaatgctcttatgaac

SEQ ID NO: 15662 - DNA, 22 bp, Artificial Sequence
  chemically synthesized
cgcggcaatgctcttatgaact

SEQ ID NO: 15663 - DNA, 22 bp, Artificial Sequence
  chemically synthesized
ttatgaactatgttacgtccag

SEQ ID NO: 15664 - DNA, 22 bp, Artificial Sequence
  chemically synthesized
atgaactatgttacgtccagtg

SEQ ID NO: 15665 - DNA, 22 bp, Artificial Sequence
  chemically synthesized
tgaactatgttacgtccagtgc

SEQ ID NO: 15666 - DNA, 22 bp, Artificial Sequence
  chemically synthesized
tgttacgtccagtgctgataaa

SEQ ID NO: 15667 - DNA, 22 bp, Artificial Sequence
  chemically synthesized
cgtccagtgctgataaactgac

SEQ ID NO: 15668 - DNA, 22 bp, Artificial Sequence
  chemically synthesized
ataaactgactctctggggagc

SEQ ID NO: 15669 - DNA, 22 bp, Artificial Sequence
  chemically synthesized
actctctggggagcaggggaaa

SEQ ID NO: 15670 - DNA, 22 bp, Artificial Sequence
  chemically synthesized
tctggggagcaggggaaagccc

SEQ ID NO: 15671 - DNA, 22 bp, Artificial Sequence
  chemically synthesized
tggggagcaggggaaagccctg

SEQ ID NO: 15672 - DNA, 22 bp, Artificial Sequence
  chemically synthesized
gggagcaggggaaagccctgag

SEQ ID NO: 15673 - DNA, 22 bp, Artificial Sequence
  chemically synthesized
agtttagcatttgccaatttct

SEQ ID NO: 15674 - DNA, 22 bp, Artificial Sequence
  chemically synthesized
agcatttgccaatttctatcac

SEQ ID NO: 15675 - DNA, 22 bp, Artificial Sequence
  chemically synthesized
gcatttgccaatttctatcacg

SEQ ID NO: 15676 - DNA, 22 bp, Artificial Sequence
  chemically synthesized
gccaatttctatcacgtaaaca

SEQ ID NO: 15677 - DNA, 22 bp, Artificial Sequence
  chemically synthesized
ccaatttctatcacgtaaacat

SEQ ID NO: 15678 - DNA, 22 bp, Artificial Sequence
  chemically synthesized
ctatcacgtaaacattcccatt

SEQ ID NO: 15679 - DNA, 22 bp, Artificial Sequence
  chemically synthesized
tatcacgtaaacattcccattc

SEQ ID NO: 15680 - DNA, 22 bp, Artificial Sequence
  chemically synthesized
tcacgtaaacattcccattctg

SEQ ID NO: 15681 - DNA, 22 bp, Artificial Sequence
  chemically synthesized
ccattctggccactttctttct

SEQ ID NO: 15682 - DNA, 22 bp, Artificial Sequence
  chemically synthesized
tggccactttctttctttcttt

SEQ ID NO: 15683 - DNA, 22 bp, Artificial Sequence
  chemically synthesized
gccactttctttctttctttct

SEQ ID NO: 15684 - DNA, 22 bp, Artificial Sequence
  chemically synthesized
tctttctttctttcttttgttt

SEQ ID NO: 15685 - DNA, 22 bp, Artificial Sequence
  chemically synthesized
ctttctttctttcttttgtttg

SEQ ID NO: 15686 - DNA, 22 bp, Artificial Sequence
  chemically synthesized
tttctttctttcttttgtttgt

SEQ ID NO: 15687 - DNA, 22 bp, Artificial Sequence
  chemically synthesized
tctttctttcttttgtttgttt

SEQ ID NO: 15688 - DNA, 22 bp, Artificial Sequence
  chemically synthesized
ctttctttcttttgtttgtttg

SEQ ID NO: 15689 - DNA, 22 bp, Artificial Sequence
  chemically synthesized
tttctttcttttgtttgtttgt

SEQ ID NO: 15690 - DNA, 22 bp, Artificial Sequence
  chemically synthesized
tctttcttttgtttgtttgttt

SEQ ID NO: 15691 - DNA, 22 bp, Artificial Sequence
  chemically synthesized
ctttcttttgtttgtttgtttg

SEQ ID NO: 15692 - DNA, 22 bp, Artificial Sequence
  chemically synthesized
tttcttttgtttgtttgtttga

SEQ ID NO: 15693 - DNA, 22 bp, Artificial Sequence
  chemically synthesized
tcttttgtttgtttgtttgaga

SEQ ID NO: 15694 - DNA, 22 bp, Artificial Sequence
  chemically synthesized
cttttgtttgtttgtttgagat

SEQ ID NO: 15695 - DNA, 22 bp, Artificial Sequence
  chemically synthesized
ttttgtttgtttgtttgagatg

SEQ ID NO: 15696 - DNA, 22 bp, Artificial Sequence
  chemically synthesized
ttgtttgtttgtttgagatgga

SEQ ID NO: 15697 - DNA, 22 bp, Artificial Sequence
  chemically synthesized
tgtttgtttgtttgagatggag

SEQ ID NO: 15698 - DNA, 22 bp, Artificial Sequence
  chemically synthesized
gtttgtttgtttgagatggagt

SEQ ID NO: 15699 - DNA, 22 bp, Artificial Sequence
  chemically synthesized
tttgtttgtttgagatggagtc

SEQ ID NO: 15700 - DNA, 22 bp, Artificial Sequence
  chemically synthesized
gtttgtttgagatggagtctcg

SEQ ID NO: 15701 - DNA, 22 bp, Artificial Sequence
  chemically synthesized
tttgtttgagatggagtctcgc

SEQ ID NO: 15702 - DNA, 22 bp, Artificial Sequence
  chemically synthesized
gtttgagatggagtctcgcact

SEQ ID NO: 15703 - DNA, 22 bp, Artificial Sequence
  chemically synthesized
tttgagatggagtctcgcactg

SEQ ID NO: 15704 - DNA, 22 bp, Artificial Sequence
  chemically synthesized
gagatggagtctcgcactgttg

SEQ ID NO: 15705 - DNA, 22 bp, Artificial Sequence
  chemically synthesized
agatggagtctcgcactgttgc

SEQ ID NO: 15706 - DNA, 22 bp, Artificial Sequence
  chemically synthesized
gcactgttgcctggctggagtg

SEQ ID NO: 15707 - DNA, 22 bp, Artificial Sequence
  chemically synthesized
ttgcctggctggagtgcaatgg

SEQ ID NO: 15708 - DNA, 22 bp, Artificial Sequence
  chemically synthesized
cctggctggagtgcaatggtgc

SEQ ID NO: 15709 - DNA, 22 bp, Artificial Sequence
  chemically synthesized
gctggagtgcaatggtgcaatc

SEQ ID NO: 15710 - DNA, 22 bp, Artificial Sequence
  chemically synthesized
gagtgcaatggtgcaatctcag

SEQ ID NO: 15711 - DNA, 22 bp, Artificial Sequence
  chemically synthesized
agctcactgcaacctctgcctc

SEQ ID NO: 15712 - DNA, 22 bp, Artificial Sequence
  chemically synthesized
actgcaacctctgcctctccgg

SEQ ID NO: 15713 - DNA, 22 bp, Artificial Sequence
  chemically synthesized
caacctctgcctctccggttca

SEQ ID NO: 15714 - DNA, 22 bp, Artificial Sequence
  chemically synthesized
tgcctctccggttcaagtgatt

SEQ ID NO: 15715 - DNA, 22 bp, Artificial Sequence
  chemically synthesized
cctctccggttcaagtgattct

SEQ ID NO: 15716 - DNA, 22 bp, Artificial Sequence
  chemically synthesized
tccggttcaagtgattctcctg

SEQ ID NO: 15717 - DNA, 22 bp, Artificial Sequence
  chemically synthesized
cggttcaagtgattctcctgcc

SEQ ID NO: 15718 - DNA, 22 bp, Artificial Sequence
  chemically synthesized
aagtgattctcctgcctcagcc

SEQ ID NO: 15719 - DNA, 22 bp, Artificial Sequence
  chemically synthesized
tcctgcctcagcctcccaagta

SEQ ID NO: 15720 - DNA, 22 bp, Artificial Sequence
  chemically synthesized
ctgcctcagcctcccaagtagc

SEQ ID NO: 15721 - DNA, 22 bp, Artificial Sequence
  chemically synthesized
cctcagcctcccaagtagctgg

SEQ ID NO: 15722 - DNA, 22 bp, Artificial Sequence
  chemically synthesized
agcctcccaagtagctgggatt

SEQ ID NO: 15723 - DNA, 22 bp, Artificial Sequence
  chemically synthesized
ccaagtagctgggattacaggt

SEQ ID NO: 15724 - DNA, 22 bp, Artificial Sequence
  chemically synthesized
ggattacaggtgcccgccacca

SEQ ID NO: 15725 - DNA, 22 bp, Artificial Sequence
  chemically synthesized
caggtgcccgccaccatgccca

SEQ ID NO: 15726 - DNA, 22 bp, Artificial Sequence
  chemically synthesized
attttttttgtatttttagtag

SEQ ID NO: 15727 - DNA, 22 bp, Artificial Sequence
  chemically synthesized
tttttgtatttttagtagagac

SEQ ID NO: 15728 - DNA, 22 bp, Artificial Sequence
  chemically synthesized
ttttgtatttttagtagagaca

SEQ ID NO: 15729 - DNA, 22 bp, Artificial Sequence
  chemically synthesized
tttgtatttttagtagagacat

SEQ ID NO: 15730 - DNA, 22 bp, Artificial Sequence
  chemically synthesized
ttgtatttttagtagagacatg

SEQ ID NO: 15731 - DNA, 22 bp, Artificial Sequence
  chemically synthesized
tgtatttttagtagagacatgg

SEQ ID NO: 15732 - DNA, 22 bp, Artificial Sequence
  chemically synthesized
gtatttttagtagagacatggt

SEQ ID NO: 15733 - DNA, 22 bp, Artificial Sequence
  chemically synthesized
tatttttagtagagacatggtt

SEQ ID NO: 15734 - DNA, 22 bp, Artificial Sequence
  chemically synthesized
ttagtagagacatggtttcact

SEQ ID NO: 15735 - DNA, 22 bp, Artificial Sequence
  chemically synthesized
tagtagagacatggtttcacta

SEQ ID NO: 15736 - DNA, 22 bp, Artificial Sequence
  chemically synthesized
agtagagacatggtttcactat

SEQ ID NO: 15737 - DNA, 22 bp, Artificial Sequence
  chemically synthesized
gtagagacatggtttcactatg

SEQ ID NO: 15738 - DNA, 22 bp, Artificial Sequence
  chemically synthesized
cactatgttgactaggctggtc

SEQ ID NO: 15739 - DNA, 22 bp, Artificial Sequence
  chemically synthesized
actatgttgactaggctggtct

SEQ ID NO: 15740 - DNA, 22 bp, Artificial Sequence
  chemically synthesized
tgttgactaggctggtctcgaa

SEQ ID NO: 15741 - DNA, 22 bp, Artificial Sequence
  chemically synthesized
actaggctggtctcgaactcct

SEQ ID NO: 15742 - DNA, 22 bp, Artificial Sequence
  chemically synthesized
ggctggtctcgaactcctgacc

SEQ ID NO: 15743 - DNA, 22 bp, Artificial Sequence
  chemically synthesized
gtctcgaactcctgacctcatg

SEQ ID NO: 15744 - DNA, 22 bp, Artificial Sequence
  chemically synthesized
gaactcctgacctcatgatctg

SEQ ID NO: 15745 - DNA, 22 bp, Artificial Sequence
  chemically synthesized
ctgacctcatgatctgcctgcc

SEQ ID NO: 15746 - DNA, 22 bp, Artificial Sequence
  chemically synthesized
acctcatgatctgcctgccttg

SEQ ID NO: 15747 - DNA, 22 bp, Artificial Sequence
  chemically synthesized
atgatctgcctgccttggcctc

SEQ ID NO: 15748 - DNA, 22 bp, Artificial Sequence
  chemically synthesized
cctgccttggcctccctaagtg

SEQ ID NO: 15749 - DNA, 22 bp, Artificial Sequence
  chemically synthesized
ccttggcctccctaagtgctag

SEQ ID NO: 15750 - DNA, 22 bp, Artificial Sequence
  chemically synthesized
ggcctccctaagtgctaggatt

SEQ ID NO: 15751 - DNA, 22 bp, Artificial Sequence
  chemically synthesized
gcctccctaagtgctaggatta

SEQ ID NO: 15752 - DNA, 22 bp, Artificial Sequence
  chemically synthesized
cctaagtgctaggattacaggc

SEQ ID NO: 15753 - DNA, 22 bp, Artificial Sequence
  chemically synthesized
agtgctaggattacaggcgtga

SEQ ID NO: 15754 - DNA, 22 bp, Artificial Sequence
  chemically synthesized
ggattacaggcgtgagccacta

SEQ ID NO: 15755 - DNA, 22 bp, Artificial Sequence
  chemically synthesized
caggcgtgagccactacaccca

SEQ ID NO: 15756 - DNA, 22 bp, Artificial Sequence
  chemically synthesized
cacccagccgcatgattctaaa

SEQ ID NO: 15757 - DNA, 22 bp, Artificial Sequence
  chemically synthesized
taaaaaataaaaagatgaagtg

SEQ ID NO: 15758 - DNA, 22 bp, Artificial Sequence
  chemically synthesized
aaaaataaaaagatgaagtgtt

SEQ ID NO: 15759 - DNA, 22 bp, Artificial Sequence
  chemically synthesized
ttccaaacatctgatctccatt

SEQ ID NO: 15760 - DNA, 22 bp, Artificial Sequence
  chemically synthesized
caaacatctgatctccattgaa

SEQ ID NO: 15761 - DNA, 22 bp, Artificial Sequence
  chemically synthesized
atctccattgaagaaccatgca

SEQ ID NO: 15762 - DNA, 22 bp, Artificial Sequence
  chemically synthesized
cattgaagaaccatgcaatctc

SEQ ID NO: 15763 - DNA, 22 bp, Artificial Sequence
  chemically synthesized
aagaaccatgcaatctctctgg

SEQ ID NO: 15764 - DNA, 22 bp, Artificial Sequence
  chemically synthesized
tctgggttgatagaggccagag

SEQ ID NO: 15765 - DNA, 22 bp, Artificial Sequence
  chemically synthesized
tgggttgatagaggccagagtt

SEQ ID NO: 15766 - DNA, 22 bp, Artificial Sequence
  chemically synthesized
ggttgatagaggccagagttag

SEQ ID NO: 15767 - DNA, 22 bp, Artificial Sequence
  chemically synthesized
atagaggccagagttagtggct

SEQ ID NO: 15768 - DNA, 22 bp, Artificial Sequence
  chemically synthesized
gtggctctccctgatttcggtg

SEQ ID NO: 15769 - DNA, 22 bp, Artificial Sequence
  chemically synthesized
tccctgatttcggtgagaaatc

SEQ ID NO: 15770 - DNA, 22 bp, Artificial Sequence
  chemically synthesized
cctgatttcggtgagaaatcac

SEQ ID NO: 15771 - DNA, 22 bp, Artificial Sequence
  chemically synthesized
atttcggtgagaaatcactatt

SEQ ID NO: 15772 - DNA, 22 bp, Artificial Sequence
  chemically synthesized
cggtgagaaatcactattccac

SEQ ID NO: 15773 - DNA, 22 bp, Artificial Sequence
  chemically synthesized
ggtgagaaatcactattccacc

SEQ ID NO: 15774 - DNA, 22 bp, Artificial Sequence
  chemically synthesized
ttccaccatcacgggataaaag

SEQ ID NO: 15775 - DNA, 22 bp, Artificial Sequence
  chemically synthesized
caccatcacgggataaaaggca

SEQ ID NO: 15776 - DNA, 22 bp, Artificial Sequence
  chemically synthesized
actggcggttgacacctatttc

SEQ ID NO: 15777 - DNA, 22 bp, Artificial Sequence
  chemically synthesized
gcggttgacacctatttccaca

SEQ ID NO: 15778 - DNA, 22 bp, Artificial Sequence
  chemically synthesized
acacctatttccacagtgaaag

SEQ ID NO: 15779 - DNA, 22 bp, Artificial Sequence
  chemically synthesized
tttccacagtgaaagatatatc

SEQ ID NO: 15780 - DNA, 22 bp, Artificial Sequence
  chemically synthesized
ccacagtgaaagatatatctag

SEQ ID NO: 15781 - DNA, 22 bp, Artificial Sequence
  chemically synthesized
cacagtgaaagatatatctagt

SEQ ID NO: 15782 - DNA, 22 bp, Artificial Sequence
  chemically synthesized
gtacttttaaaggggaagtggt

SEQ ID NO: 15783 - DNA, 22 bp, Artificial Sequence
  chemically synthesized
ttaaaggggaagtggtttgtct

SEQ ID NO: 15784 - DNA, 22 bp, Artificial Sequence
  chemically synthesized
taaaggggaagtggtttgtctg

SEQ ID NO: 15785 - DNA, 22 bp, Artificial Sequence
  chemically synthesized
aaaggggaagtggtttgtctga

SEQ ID NO: 15786 - DNA, 22 bp, Artificial Sequence
  chemically synthesized
aaggggaagtggtttgtctgag

SEQ ID NO: 15787 - DNA, 22 bp, Artificial Sequence
  chemically synthesized
gtctgagatactctgtttcaaa

SEQ ID NO: 15788 - DNA, 22 bp, Artificial Sequence
  chemically synthesized
tctgagatactctgtttcaaag

SEQ ID NO: 15789 - DNA, 22 bp, Artificial Sequence
  chemically synthesized
agatactctgtttcaaagtaga

SEQ ID NO: 15790 - DNA, 22 bp, Artificial Sequence
  chemically synthesized
tgtttcaaagtagagaggatac

SEQ ID NO: 15791 - DNA, 22 bp, Artificial Sequence
  chemically synthesized
tttcaaagtagagaggatacag

SEQ ID NO: 15792 - DNA, 22 bp, Artificial Sequence
  chemically synthesized
caaagtagagaggatacagaac

SEQ ID NO: 15793 - DNA, 22 bp, Artificial Sequence
  chemically synthesized
aaagtagagaggatacagaaca

SEQ ID NO: 15794 - DNA, 22 bp, Artificial Sequence
  chemically synthesized
aagctatatacatccttacaga

SEQ ID NO: 15795 - DNA, 22 bp, Artificial Sequence
  chemically synthesized
tatacatccttacagagagcaa

SEQ ID NO: 15796 - DNA, 22 bp, Artificial Sequence
  chemically synthesized
acagagagcaattctgatggaa

SEQ ID NO: 15797 - DNA, 22 bp, Artificial Sequence
  chemically synthesized
cagagagcaattctgatggaaa

SEQ ID NO: 15798 - DNA, 22 bp, Artificial Sequence
  chemically synthesized
tgatggaaatgcaggccatgtt

SEQ ID NO: 15799 - DNA, 22 bp, Artificial Sequence
  chemically synthesized
atggaaatgcaggccatgtttc

SEQ ID NO: 15800 - DNA, 22 bp, Artificial Sequence
  chemically synthesized
ccctggggggggctcgtcctag

SEQ ID NO: 15801 - DNA, 22 bp, Artificial Sequence
  chemically synthesized
cctggggggggctcgtcctagg

SEQ ID NO: 15802 - DNA, 22 bp, Artificial Sequence
  chemically synthesized
gggggggctcgtcctaggggct

SEQ ID NO: 15803 - DNA, 22 bp, Artificial Sequence
  chemically synthesized
gtcctaggggctggagtgcatt

SEQ ID NO: 15804 - DNA, 22 bp, Artificial Sequence
  chemically synthesized
ggggctggagtgcattctctga

SEQ ID NO: 15805 - DNA, 22 bp, Artificial Sequence
  chemically synthesized
gagtgcattctctgatgtcaga

SEQ ID NO: 15806 - DNA, 22 bp, Artificial Sequence
  chemically synthesized
tctgatgtcagaggaaatgcaa

SEQ ID NO: 15807 - DNA, 22 bp, Artificial Sequence
  chemically synthesized
tgatgtcagaggaaatgcaaga

SEQ ID NO: 15808 - DNA, 22 bp, Artificial Sequence
  chemically synthesized
atgtcagaggaaatgcaagatt

SEQ ID NO: 15809 - DNA, 22 bp, Artificial Sequence
  chemically synthesized
cctgaggcctgagggaacccat

SEQ ID NO: 15810 - DNA, 22 bp, Artificial Sequence
  chemically synthesized
aggcctgagggaacccatggta

SEQ ID NO: 15811 - DNA, 22 bp, Artificial Sequence
  chemically synthesized
agggaacccatggtatatgcaa

SEQ ID NO: 15812 - DNA, 22 bp, Artificial Sequence
  chemically synthesized
caaactgtagttccatatgcat

SEQ ID NO: 15813 - DNA, 22 bp, Artificial Sequence
  chemically synthesized
aaactgtagttccatatgcatt

SEQ ID NO: 15814 - DNA, 22 bp, Artificial Sequence
  chemically synthesized
tagttccatatgcattcttcca

SEQ ID NO: 15815 - DNA, 22 bp, Artificial Sequence
  chemically synthesized
catatgcattcttccaggacaa

SEQ ID NO: 15816 - DNA, 22 bp, Artificial Sequence
  chemically synthesized
ttccaggacaaatacttcttga

SEQ ID NO: 15817 - DNA, 22 bp, Artificial Sequence
  chemically synthesized
ccaggacaaatacttcttgagg

SEQ ID NO: 15818 - DNA, 22 bp, Artificial Sequence
  chemically synthesized
caggacaaatacttcttgaggt

SEQ ID NO: 15819 - DNA, 22 bp, Artificial Sequence
  chemically synthesized
cttgaggttaaaaaaaaaaagt

SEQ ID NO: 15820 - DNA, 22 bp, Artificial Sequence
  chemically synthesized
ttgaggttaaaaaaaaaaagtc

SEQ ID NO: 15821 - DNA, 22 bp, Artificial Sequence
  chemically synthesized
gaggttaaaaaaaaaaagtcac

SEQ ID NO: 15822 - DNA, 22 bp, Artificial Sequence
  chemically synthesized
aggttaaaaaaaaaaagtcaca

SEQ ID NO: 15823 - DNA, 22 bp, Artificial Sequence
  chemically synthesized
aaaaaaaaaagtcacatagctg

SEQ ID NO: 15824 - DNA, 22 bp, Artificial Sequence
  chemically synthesized
ccattttatggatttcaggatt

SEQ ID NO: 15825 - DNA, 22 bp, Artificial Sequence
  chemically synthesized
tatggatttcaggatttttttt

SEQ ID NO: 15826 - DNA, 22 bp, Artificial Sequence
  chemically synthesized
atggatttcaggattttttttt

SEQ ID NO: 15827 - DNA, 22 bp, Artificial Sequence
  chemically synthesized
tggatttcaggatttttttttt

SEQ ID NO: 15828 - DNA, 22 bp, Artificial Sequence
  chemically synthesized
caggattttttttttttttttt

SEQ ID NO: 15829 - DNA, 22 bp, Artificial Sequence
  chemically synthesized
aggatttttttttttttttttt

SEQ ID NO: 15830 - DNA, 22 bp, Artificial Sequence
  chemically synthesized
ttttttttttttttttgagatg

SEQ ID NO: 15831 - DNA, 22 bp, Artificial Sequence
  chemically synthesized
tttttttttttttttgagatgg

SEQ ID NO: 15832 - DNA, 22 bp, Artificial Sequence
  chemically synthesized
ttttttttttttttgagatgga

SEQ ID NO: 15833 - DNA, 22 bp, Artificial Sequence
  chemically synthesized
tttttttttttttgagatggag

SEQ ID NO: 15834 - DNA, 22 bp, Artificial Sequence
  chemically synthesized
ttttttttttttgagatggagt

SEQ ID NO: 15835 - DNA, 22 bp, Artificial Sequence
  chemically synthesized
tttttttttttgagatggagtc

SEQ ID NO: 15836 - DNA, 22 bp, Artificial Sequence
  chemically synthesized
ttttttttttgagatggagtct

SEQ ID NO: 15837 - DNA, 22 bp, Artificial Sequence
  chemically synthesized
tttttttttgagatggagtctt

SEQ ID NO: 15838 - DNA, 22 bp, Artificial Sequence
  chemically synthesized
ttttttttgagatggagtcttg

SEQ ID NO: 15839 - DNA, 22 bp, Artificial Sequence
  chemically synthesized
tttttttgagatggagtcttgc

SEQ ID NO: 15840 - DNA, 22 bp, Artificial Sequence
  chemically synthesized
ttttttgagatggagtcttgct

SEQ ID NO: 15841 - DNA, 22 bp, Artificial Sequence
  chemically synthesized
tttttgagatggagtcttgctc

SEQ ID NO: 15842 - DNA, 22 bp, Artificial Sequence
  chemically synthesized
ttttgagatggagtcttgctct

SEQ ID NO: 15843 - DNA, 22 bp, Artificial Sequence
  chemically synthesized
tttgagatggagtcttgctctg

SEQ ID NO: 15844 - DNA, 22 bp, Artificial Sequence
  chemically synthesized
ttgagatggagtcttgctctgt

SEQ ID NO: 15845 - DNA, 22 bp, Artificial Sequence
  chemically synthesized
tgagatggagtcttgctctgtc

SEQ ID NO: 15846 - DNA, 22 bp, Artificial Sequence
  chemically synthesized
gagatggagtcttgctctgtca

SEQ ID NO: 15847 - DNA, 22 bp, Artificial Sequence
  chemically synthesized
agatggagtcttgctctgtcac

SEQ ID NO: 15848 - DNA, 22 bp, Artificial Sequence
  chemically synthesized
gctctgtcacccagcctgtagt

SEQ ID NO: 15849 - DNA, 22 bp, Artificial Sequence
  chemically synthesized
ctctgtcacccagcctgtagtg

SEQ ID NO: 15850 - DNA, 22 bp, Artificial Sequence
  chemically synthesized
tgtcacccagcctgtagtgcag

SEQ ID NO: 15851 - DNA, 22 bp, Artificial Sequence
  chemically synthesized
tcacccagcctgtagtgcagtg

SEQ ID NO: 15852 - DNA, 22 bp, Artificial Sequence
  chemically synthesized
tagtgcagtggcataatctcgg

SEQ ID NO: 15853 - DNA, 22 bp, Artificial Sequence
  chemically synthesized
ggctcacggcaacctccgcctc

SEQ ID NO: 15854 - DNA, 22 bp, Artificial Sequence
  chemically synthesized
acggcaacctccgcctcccagg

SEQ ID NO: 15855 - DNA, 22 bp, Artificial Sequence
  chemically synthesized
cgcctcccaggttcaagcgatt

SEQ ID NO: 15856 - DNA, 22 bp, Artificial Sequence
  chemically synthesized
ccaggttcaagcgattctcttg

SEQ ID NO: 15857 - DNA, 22 bp, Artificial Sequence
  chemically synthesized
aagcgattctcttgccttagcc

SEQ ID NO: 15858 - DNA, 22 bp, Artificial Sequence
  chemically synthesized
tcttgccttagcctcccgagta

SEQ ID NO: 15859 - DNA, 22 bp, Artificial Sequence
  chemically synthesized
ttgccttagcctcccgagtagc

SEQ ID NO: 15860 - DNA, 22 bp, Artificial Sequence
  chemically synthesized
gccttagcctcccgagtagctg

SEQ ID NO: 15861 - DNA, 22 bp, Artificial Sequence
  chemically synthesized
ccttagcctcccgagtagctgg

SEQ ID NO: 15862 - DNA, 22 bp, Artificial Sequence
  chemically synthesized
agcctcccgagtagctgggatt

SEQ ID NO: 15863 - DNA, 22 bp, Artificial Sequence
  chemically synthesized
gcctcccgagtagctgggatta

SEQ ID NO: 15864 - DNA, 22 bp, Artificial Sequence
  chemically synthesized
ccgagtagctgggattacagtc

SEQ ID NO: 15865 - DNA, 22 bp, Artificial Sequence
  chemically synthesized
ggattacagtcacgcaccacca

SEQ ID NO: 15866 - DNA, 22 bp, Artificial Sequence
  chemically synthesized
cagtcacgcaccaccacatctg

SEQ ID NO: 15867 - DNA, 22 bp, Artificial Sequence
  chemically synthesized
gctaattctttatattttttgg

SEQ ID NO: 15868 - DNA, 22 bp, Artificial Sequence
  chemically synthesized
attctttatattttttggtaga

SEQ ID NO: 15869 - DNA, 22 bp, Artificial Sequence
  chemically synthesized
tttatattttttggtagaaacg

SEQ ID NO: 15870 - DNA, 22 bp, Artificial Sequence
  chemically synthesized
tatattttttggtagaaacggt

SEQ ID NO: 15871 - DNA, 22 bp, Artificial Sequence
  chemically synthesized
atattttttggtagaaacggtg

SEQ ID NO: 15872 - DNA, 22 bp, Artificial Sequence
  chemically synthesized
tattttttggtagaaacggtgt

SEQ ID NO: 15873 - DNA, 22 bp, Artificial Sequence
  chemically synthesized
tttggtagaaacggtgtttcac

SEQ ID NO: 15874 - DNA, 22 bp, Artificial Sequence
  chemically synthesized
ttggtagaaacggtgtttcacc

SEQ ID NO: 15875 - DNA, 22 bp, Artificial Sequence
  chemically synthesized
tggtagaaacggtgtttcacca

SEQ ID NO: 15876 - DNA, 22 bp, Artificial Sequence
  chemically synthesized
ggtagaaacggtgtttcaccat

SEQ ID NO: 15877 - DNA, 22 bp, Artificial Sequence
  chemically synthesized
gtagaaacggtgtttcaccatg

SEQ ID NO: 15878 - DNA, 22 bp, Artificial Sequence
  chemically synthesized
caccatgttggccaggctggtc

SEQ ID NO: 15879 - DNA, 22 bp, Artificial Sequence
  chemically synthesized
accatgttggccaggctggtct

SEQ ID NO: 15880 - DNA, 22 bp, Artificial Sequence
  chemically synthesized
gccaggctggtctcaaactcct

SEQ ID NO: 15881 - DNA, 22 bp, Artificial Sequence
  chemically synthesized
gtctcaaactcctgacctcatg

SEQ ID NO: 15882 - DNA, 22 bp, Artificial Sequence
  chemically synthesized
aaactcctgacctcatgtgatc

SEQ ID NO: 15883 - DNA, 22 bp, Artificial Sequence
  chemically synthesized
ctgacctcatgtgatctgcctg

SEQ ID NO: 15884 - DNA, 22 bp, Artificial Sequence
  chemically synthesized
acctcatgtgatctgcctgcct

SEQ ID NO: 15885 - DNA, 22 bp, Artificial Sequence
  chemically synthesized
atgtgatctgcctgccttggcc

SEQ ID NO: 15886 - DNA, 22 bp, Artificial Sequence
  chemically synthesized
cctgccttggcctcccaaagtg

SEQ ID NO: 15887 - DNA, 22 bp, Artificial Sequence
  chemically synthesized
ccttggcctcccaaagtgctga

SEQ ID NO: 15888 - DNA, 22 bp, Artificial Sequence
  chemically synthesized
ggcctcccaaagtgctgagatt

SEQ ID NO: 15889 - DNA, 22 bp, Artificial Sequence
  chemically synthesized
gcctcccaaagtgctgagatta

SEQ ID NO: 15890 - DNA, 22 bp, Artificial Sequence
  chemically synthesized
ccaaagtgctgagattacaggt

SEQ ID NO: 15891 - DNA, 22 bp, Artificial Sequence
  chemically synthesized
agattacaggtgtgagccaccg

SEQ ID NO: 15892 - DNA, 22 bp, Artificial Sequence
  chemically synthesized
caggtgtgagccaccgcgcctg

SEQ ID NO: 15893 - DNA, 22 bp, Artificial Sequence
  chemically synthesized
cctggagttcagaatcttgggc

SEQ ID NO: 15894 - DNA, 22 bp, Artificial Sequence
  chemically synthesized
gagttcagaatcttgggcttca

SEQ ID NO: 15895 - DNA, 22 bp, Artificial Sequence
  chemically synthesized
agaatcttgggcttcattattt

SEQ ID NO: 15896 - DNA, 22 bp, Artificial Sequence
  chemically synthesized
gggcttcattatttgtgtttaa

SEQ ID NO: 15897 - DNA, 22 bp, Artificial Sequence
  chemically synthesized
ggcttcattatttgtgtttaaa

SEQ ID NO: 15898 - DNA, 22 bp, Artificial Sequence
  chemically synthesized
cattatttgtgtttaaatagat

SEQ ID NO: 15899 - DNA, 22 bp, Artificial Sequence
  chemically synthesized
attatttgtgtttaaatagatc

SEQ ID NO: 15900 - DNA, 22 bp, Artificial Sequence
  chemically synthesized
tttgtgtttaaatagatcatac

SEQ ID NO: 15901 - DNA, 22 bp, Artificial Sequence
  chemically synthesized
gtgtttaaatagatcatacagt

SEQ ID NO: 15902 - DNA, 22 bp, Artificial Sequence
  chemically synthesized
tgtttaaatagatcatacagtc

SEQ ID NO: 15903 - DNA, 22 bp, Artificial Sequence
  chemically synthesized
aaatagatcatacagtcaggca

SEQ ID NO: 15904 - DNA, 22 bp, Artificial Sequence
  chemically synthesized
aatagatcatacagtcaggcac

SEQ ID NO: 15905 - DNA, 22 bp, Artificial Sequence
  chemically synthesized
atgcctgtaatcccagcacttt

SEQ ID NO: 15906 - DNA, 22 bp, Artificial Sequence
  chemically synthesized
taatcccagcactttgggaggc

SEQ ID NO: 15907 - DNA, 22 bp, Artificial Sequence
  chemically synthesized
tgggaggctgaggtgggaggat

SEQ ID NO: 15908 - DNA, 22 bp, Artificial Sequence
  chemically synthesized
gggaggctgaggtgggaggatt

SEQ ID NO: 15909 - DNA, 22 bp, Artificial Sequence
  chemically synthesized
ggaggctgaggtgggaggattg

SEQ ID NO: 15910 - DNA, 22 bp, Artificial Sequence
  chemically synthesized
aggtgggaggattgcctgagtt

SEQ ID NO: 15911 - DNA, 22 bp, Artificial Sequence
  chemically synthesized
cctgagttcaggagatggagac

SEQ ID NO: 15912 - DNA, 22 bp, Artificial Sequence
  chemically synthesized
agttcaggagatggagaccagc

SEQ ID NO: 15913 - DNA, 22 bp, Artificial Sequence
  chemically synthesized
aggagatggagaccagcctggg

SEQ ID NO: 15914 - DNA, 22 bp, Artificial Sequence
  chemically synthesized
ggcaacatggtgaaaccccgtc

SEQ ID NO: 15915 - DNA, 22 bp, Artificial Sequence
  chemically synthesized
tactaaaaatacaaaaactagc

SEQ ID NO: 15916 - DNA, 22 bp, Artificial Sequence
  chemically synthesized
ctaaaaatacaaaaactagctg

SEQ ID NO: 15917 - DNA, 22 bp, Artificial Sequence
  chemically synthesized
aaaatacaaaaactagctggat

SEQ ID NO: 15918 - DNA, 22 bp, Artificial Sequence
  chemically synthesized
gctggatgtggtggcacacacc

SEQ ID NO: 15919 - DNA, 22 bp, Artificial Sequence
  chemically synthesized
gatgtggtggcacacacctgta

SEQ ID NO: 15920 - DNA, 22 bp, Artificial Sequence
  chemically synthesized
tagtcccagctattcaggaggc

SEQ ID NO: 15921 - DNA, 22 bp, Artificial Sequence
  chemically synthesized
ttcaggaggctgaggtgggagg

SEQ ID NO: 15922 - DNA, 22 bp, Artificial Sequence
  chemically synthesized
aggaggctgaggtgggaggatc

SEQ ID NO: 15923 - DNA, 22 bp, Artificial Sequence
  chemically synthesized
aggtgggaggatcccaggaggt

SEQ ID NO: 15924 - DNA, 22 bp, Artificial Sequence
  chemically synthesized
cgccactgcactccaggctggg

SEQ ID NO: 15925 - DNA, 22 bp, Artificial Sequence
  chemically synthesized
cactccaggctgggttactgag

SEQ ID NO: 15926 - DNA, 22 bp, Artificial Sequence
  chemically synthesized
caggctgggttactgagccaga

SEQ ID NO: 15927 - DNA, 22 bp, Artificial Sequence
  chemically synthesized
ggttactgagccagatcctgtc

SEQ ID NO: 15928 - DNA, 22 bp, Artificial Sequence
  chemically synthesized
ctgagccagatcctgtctcaaa

SEQ ID NO: 15929 - DNA, 22 bp, Artificial Sequence
  chemically synthesized
agccagatcctgtctcaaaaaa

SEQ ID NO: 15930 - DNA, 22 bp, Artificial Sequence
  chemically synthesized
tctcaaaaaaaaaaaagataat

SEQ ID NO: 15931 - DNA, 22 bp, Artificial Sequence
  chemically synthesized
aaaaaaaaaaaagataatacat

SEQ ID NO: 15932 - DNA, 22 bp, Artificial Sequence
  chemically synthesized
aaacagttcaaaatgcaaaagt

SEQ ID NO: 15933 - DNA, 22 bp, Artificial Sequence
  chemically synthesized
aaaatgcaaaagttacatacat

SEQ ID NO: 15934 - DNA, 22 bp, Artificial Sequence
  chemically synthesized
catacataaggaagtgtcatga

SEQ ID NO: 15935 - DNA, 22 bp, Artificial Sequence
  chemically synthesized
cctctcacacttctccccagcc

SEQ ID NO: 15936 - DNA, 22 bp, Artificial Sequence
  chemically synthesized
tcacacttctccccagccaccc

SEQ ID NO: 15937 - DNA, 22 bp, Artificial Sequence
  chemically synthesized
acacttctccccagccacccag

SEQ ID NO: 15938 - DNA, 22 bp, Artificial Sequence
  chemically synthesized
ctccccagccacccagttctcc

SEQ ID NO: 15939 - DNA, 22 bp, Artificial Sequence
  chemically synthesized
tccccagccacccagttctccc

SEQ ID NO: 15940 - DNA, 22 bp, Artificial Sequence
  chemically synthesized
cccagccacccagttctccctt

SEQ ID NO: 15941 - DNA, 22 bp, Artificial Sequence
  chemically synthesized
tcccttctagaggcaacatgtg

SEQ ID NO: 15942 - DNA, 22 bp, Artificial Sequence
  chemically synthesized
ccttctagaggcaacatgtgaa

SEQ ID NO: 15943 - DNA, 22 bp, Artificial Sequence
  chemically synthesized
ctagaggcaacatgtgaaatcc

SEQ ID NO: 15944 - DNA, 22 bp, Artificial Sequence
  chemically synthesized
tagaggcaacatgtgaaatcct

SEQ ID NO: 15945 - DNA, 22 bp, Artificial Sequence
  chemically synthesized
gaggcaacatgtgaaatccttc

SEQ ID NO: 15946 - DNA, 22 bp, Artificial Sequence
  chemically synthesized
ctcaggctacactcttcttgaa

SEQ ID NO: 15947 - DNA, 22 bp, Artificial Sequence
  chemically synthesized
tcaggctacactcttcttgaag

SEQ ID NO: 15948 - DNA, 22 bp, Artificial Sequence
  chemically synthesized
aggctacactcttcttgaaggt

SEQ ID NO: 15949 - DNA, 22 bp, Artificial Sequence
  chemically synthesized
cactcttcttgaaggtgtaggc

SEQ ID NO: 15950 - DNA, 22 bp, Artificial Sequence
  chemically synthesized
ttcttgaaggtgtaggctttgg

SEQ ID NO: 15951 - DNA, 22 bp, Artificial Sequence
  chemically synthesized
cttgaaggtgtaggctttgggc

SEQ ID NO: 15952 - DNA, 22 bp, Artificial Sequence
  chemically synthesized
ttgaaggtgtaggctttgggca

SEQ ID NO: 15953 - DNA, 22 bp, Artificial Sequence
  chemically synthesized
gaaggtgtaggctttgggcaaa

SEQ ID NO: 15954 - DNA, 22 bp, Artificial Sequence
  chemically synthesized
aaggtgtaggctttgggcaaaa

SEQ ID NO: 15955 - DNA, 22 bp, Artificial Sequence
  chemically synthesized
tgggcaaaagcattcattcagt

SEQ ID NO: 15956 - DNA, 22 bp, Artificial Sequence
  chemically synthesized
gggcaaaagcattcattcagta

SEQ ID NO: 15957 - DNA, 22 bp, Artificial Sequence
  chemically synthesized
ggcaaaagcattcattcagtaa

SEQ ID NO: 15958 - DNA, 22 bp, Artificial Sequence
  chemically synthesized
attcagtaaccccagaaacttg

SEQ ID NO: 15959 - DNA, 22 bp, Artificial Sequence
  chemically synthesized
agtaaccccagaaacttgttct

SEQ ID NO: 15960 - DNA, 22 bp, Artificial Sequence
  chemically synthesized
gttctgtttttccataggattc

SEQ ID NO: 15961 - DNA, 22 bp, Artificial Sequence
  chemically synthesized
ttctgtttttccataggattct

SEQ ID NO: 15962 - DNA, 22 bp, Artificial Sequence
  chemically synthesized
tgtttttccataggattctctt

SEQ ID NO: 15963 - DNA, 22 bp, Artificial Sequence
  chemically synthesized
tttttccataggattctctttg

SEQ ID NO: 15964 - DNA, 22 bp, Artificial Sequence
  chemically synthesized
ttccataggattctctttggac

SEQ ID NO: 15965 - DNA, 22 bp, Artificial Sequence
  chemically synthesized
tccataggattctctttggaca

SEQ ID NO: 15966 - DNA, 22 bp, Artificial Sequence
  chemically synthesized
ccataggattctctttggacag

SEQ ID NO: 15967 - DNA, 22 bp, Artificial Sequence
  chemically synthesized
cataggattctctttggacagc

SEQ ID NO: 15968 - DNA, 22 bp, Artificial Sequence
  chemically synthesized
tctttggacagcgtccatactg

SEQ ID NO: 15969 - DNA, 22 bp, Artificial Sequence
  chemically synthesized
tttggacagcgtccatactggt

SEQ ID NO: 15970 - DNA, 22 bp, Artificial Sequence
  chemically synthesized
tggacagcgtccatactggtgg

SEQ ID NO: 15971 - DNA, 22 bp, Artificial Sequence
  chemically synthesized
ggacagcgtccatactggtggg

SEQ ID NO: 15972 - DNA, 22 bp, Artificial Sequence
  chemically synthesized
gacagcgtccatactggtgggt

SEQ ID NO: 15973 - DNA, 22 bp, Artificial Sequence
  chemically synthesized
gtgggttttggatactgactac

SEQ ID NO: 15974 - DNA, 22 bp, Artificial Sequence
  chemically synthesized
tggatactgactactacagcaa

SEQ ID NO: 15975 - DNA, 22 bp, Artificial Sequence
  chemically synthesized
ggatactgactactacagcaac

SEQ ID NO: 15976 - DNA, 22 bp, Artificial Sequence
  chemically synthesized
gatactgactactacagcaaca

SEQ ID NO: 15977 - DNA, 22 bp, Artificial Sequence
  chemically synthesized
actactacagcaacacttccgt

SEQ ID NO: 15978 - DNA, 22 bp, Artificial Sequence
  chemically synthesized
ctacagcaacacttccgtgccc

SEQ ID NO: 15979 - DNA, 22 bp, Artificial Sequence
  chemically synthesized
cagcaacacttccgtgcccctg

SEQ ID NO: 15980 - DNA, 22 bp, Artificial Sequence
  chemically synthesized
ccgtgcccctgataaagcagtt

SEQ ID NO: 15981 - DNA, 22 bp, Artificial Sequence
  chemically synthesized
cgtgcccctgataaagcagttc

SEQ ID NO: 15982 - DNA, 22 bp, Artificial Sequence
  chemically synthesized
ataaagcagttccctgtaacct

SEQ ID NO: 15983 - DNA, 22 bp, Artificial Sequence
  chemically synthesized
cctgtaacctgtgagactggac

SEQ ID NO: 15984 - DNA, 22 bp, Artificial Sequence
  chemically synthesized
taacctgtgagactggaccagg

SEQ ID NO: 15985 - DNA, 22 bp, Artificial Sequence
  chemically synthesized
tgagactggaccaggtaagcgt

SEQ ID NO: 15986 - DNA, 22 bp, Artificial Sequence
  chemically synthesized
gaccaggtaagcgtcccagccc

SEQ ID NO: 15987 - DNA, 22 bp, Artificial Sequence
  chemically synthesized
cagacagaagctgagtggacct

SEQ ID NO: 15988 - DNA, 22 bp, Artificial Sequence
  chemically synthesized
agtggacctcgtttacctgtta

SEQ ID NO: 15989 - DNA, 22 bp, Artificial Sequence
  chemically synthesized
gtttacctgttatggatgaaac

SEQ ID NO: 15990 - DNA, 22 bp, Artificial Sequence
  chemically synthesized
acctgttatggatgaaactgac

SEQ ID NO: 15991 - DNA, 22 bp, Artificial Sequence
  chemically synthesized
cctgttatggatgaaactgacc

SEQ ID NO: 15992 - DNA, 22 bp, Artificial Sequence
  chemically synthesized
ttatggatgaaactgaccttga

SEQ ID NO: 15993 - DNA, 22 bp, Artificial Sequence
  chemically synthesized
tggatgaaactgaccttgaggg

SEQ ID NO: 15994 - DNA, 22 bp, Artificial Sequence
  chemically synthesized
accttgaggggacatgaggaga

SEQ ID NO: 15995 - DNA, 22 bp, Artificial Sequence
  chemically synthesized
gaggggacatgaggagagccat

SEQ ID NO: 15996 - DNA, 22 bp, Artificial Sequence
  chemically synthesized
aggggacatgaggagagccatt

SEQ ID NO: 15997 - DNA, 22 bp, Artificial Sequence
  chemically synthesized
ctttgtacttttgtcatgctct

SEQ ID NO: 15998 - DNA, 22 bp, Artificial Sequence
  chemically synthesized
tgtacttttgtcatgctcttca

SEQ ID NO: 15999 - DNA, 22 bp, Artificial Sequence
  chemically synthesized
gtacttttgtcatgctcttcaa

SEQ ID NO: 16000 - DNA, 22 bp, Artificial Sequence
  chemically synthesized
tacttttgtcatgctcttcaat

SEQ ID NO: 16001 - DNA, 22 bp, Artificial Sequence
  chemically synthesized
ttgtcatgctcttcaattggca

SEQ ID NO: 16002 - DNA, 22 bp, Artificial Sequence
  chemically synthesized
tgtcatgctcttcaattggcac

SEQ ID NO: 16003 - DNA, 22 bp, Artificial Sequence
  chemically synthesized
gtcatgctcttcaattggcaca

SEQ ID NO: 16004 - DNA, 22 bp, Artificial Sequence
  chemically synthesized
tcatgctcttcaattggcacaa

SEQ ID NO: 16005 - DNA, 22 bp, Artificial Sequence
  chemically synthesized
ttcaattggcacaaattaattc

SEQ ID NO: 16006 - DNA, 22 bp, Artificial Sequence
  chemically synthesized
caattggcacaaattaattcac

SEQ ID NO: 16007 - DNA, 22 bp, Artificial Sequence
  chemically synthesized
aattggcacaaattaattcact

SEQ ID NO: 16008 - DNA, 22 bp, Artificial Sequence
  chemically synthesized
gcacaaattaattcacttctgc

SEQ ID NO: 16009 - DNA, 22 bp, Artificial Sequence
  chemically synthesized
attcacttctgcaatactttcc

SEQ ID NO: 16010 - DNA, 22 bp, Artificial Sequence
  chemically synthesized
acttctgcaatactttcctgaa

SEQ ID NO: 16011 - DNA, 22 bp, Artificial Sequence
  chemically synthesized
ctgcaatactttcctgaatagc

SEQ ID NO: 16012 - DNA, 22 bp, Artificial Sequence
  chemically synthesized
tgcaatactttcctgaatagca

SEQ ID NO: 16013 - DNA, 22 bp, Artificial Sequence
  chemically synthesized
caatactttcctgaatagcaca

SEQ ID NO: 16014 - DNA, 22 bp, Artificial Sequence
  chemically synthesized
tcctgaatagcacagtagtatt

SEQ ID NO: 16015 - DNA, 22 bp, Artificial Sequence
  chemically synthesized
cctgaatagcacagtagtattg

SEQ ID NO: 16016 - DNA, 22 bp, Artificial Sequence
  chemically synthesized
ctgaatagcacagtagtattgg

SEQ ID NO: 16017 - DNA, 22 bp, Artificial Sequence
  chemically synthesized
aatagcacagtagtattggaaa

SEQ ID NO: 16018 - DNA, 22 bp, Artificial Sequence
  chemically synthesized
gaaatctgcctattacagaacc

SEQ ID NO: 16019 - DNA, 22 bp, Artificial Sequence
  chemically synthesized
cctattacagaacctggatgga

SEQ ID NO: 16020 - DNA, 22 bp, Artificial Sequence
  chemically synthesized
ttacagaacctggatggagtcc

SEQ ID NO: 16021 - DNA, 22 bp, Artificial Sequence
  chemically synthesized
cagaacctggatggagtccaga

SEQ ID NO: 16022 - DNA, 22 bp, Artificial Sequence
  chemically synthesized
gatggagtccagagaggcacgg

SEQ ID NO: 16023 - DNA, 22 bp, Artificial Sequence
  chemically synthesized
gtgagagtcaccgccctgcagc

SEQ ID NO: 16024 - DNA, 22 bp, Artificial Sequence
  chemically synthesized
cagggcggtgactctcacgagc

SEQ ID NO: 16025 - DNA, 22 bp, Artificial Sequence
  chemically synthesized
tcacgagccctttgcccatgga

SEQ ID NO: 16026 - DNA, 22 bp, Artificial Sequence
  chemically synthesized
acgagccctttgcccatggatg

SEQ ID NO: 16027 - DNA, 22 bp, Artificial Sequence
  chemically synthesized
tgcccatggatgcccgtgcctc

SEQ ID NO: 16028 - DNA, 22 bp, Artificial Sequence
  chemically synthesized
gcccatggatgcccgtgcctct

SEQ ID NO: 16029 - DNA, 22 bp, Artificial Sequence
  chemically synthesized
cccatggatgcccgtgcctctc

SEQ ID NO: 16030 - DNA, 22 bp, Artificial Sequence
  chemically synthesized
tctggactccatccaggttctg

SEQ ID NO: 16031 - DNA, 22 bp, Artificial Sequence
  chemically synthesized
tggactccatccaggttctgta

SEQ ID NO: 16032 - DNA, 22 bp, Artificial Sequence
  chemically synthesized
gactccatccaggttctgtaat

SEQ ID NO: 16033 - DNA, 22 bp, Artificial Sequence
  chemically synthesized
catccaggttctgtaataggca

SEQ ID NO: 16034 - DNA, 22 bp, Artificial Sequence
  chemically synthesized
tgtaataggcagatttccaata

SEQ ID NO: 16035 - DNA, 22 bp, Artificial Sequence
  chemically synthesized
taataggcagatttccaatact

SEQ ID NO: 16036 - DNA, 22 bp, Artificial Sequence
  chemically synthesized
ccaatactactgtgctattcag

SEQ ID NO: 16037 - DNA, 22 bp, Artificial Sequence
  chemically synthesized
caatactactgtgctattcagg

SEQ ID NO: 16038 - DNA, 22 bp, Artificial Sequence
  chemically synthesized
ctgtgctattcaggaaagtatt

SEQ ID NO: 16039 - DNA, 22 bp, Artificial Sequence
  chemically synthesized
tgctattcaggaaagtattgca

SEQ ID NO: 16040 - DNA, 22 bp, Artificial Sequence
  chemically synthesized
ttcaggaaagtattgcagaagt

SEQ ID NO: 16041 - DNA, 22 bp, Artificial Sequence
  chemically synthesized
aggaaagtattgcagaagtgaa

SEQ ID NO: 16042 - DNA, 22 bp, Artificial Sequence
  chemically synthesized
cagaagtgaattaatttgtgcc

SEQ ID NO: 16043 - DNA, 22 bp, Artificial Sequence
  chemically synthesized
atttgtgccaattgaagagcat

SEQ ID NO: 16044 - DNA, 22 bp, Artificial Sequence
  chemically synthesized
gtgccaattgaagagcatgaca

SEQ ID NO: 16045 - DNA, 22 bp, Artificial Sequence
  chemically synthesized
tgccaattgaagagcatgacaa

SEQ ID NO: 16046 - DNA, 22 bp, Artificial Sequence
  chemically synthesized
aagagcatgacaaaagtacaaa

SEQ ID NO: 16047 - DNA, 22 bp, Artificial Sequence
  chemically synthesized
tcctcatgtcccctcaaggtca

SEQ ID NO: 16048 - DNA, 22 bp, Artificial Sequence
  chemically synthesized
ctcatgtcccctcaaggtcagt

SEQ ID NO: 16049 - DNA, 22 bp, Artificial Sequence
  chemically synthesized
atgtcccctcaaggtcagtttc

SEQ ID NO: 16050 - DNA, 22 bp, Artificial Sequence
  chemically synthesized
aaggtcagtttcatccataaca

SEQ ID NO: 16051 - DNA, 22 bp, Artificial Sequence
  chemically synthesized
catccataacaggtaaacgagg

SEQ ID NO: 16052 - DNA, 22 bp, Artificial Sequence
  chemically synthesized
atccataacaggtaaacgaggt

SEQ ID NO: 16053 - DNA, 22 bp, Artificial Sequence
  chemically synthesized
agcttctgtctgcaggggctgg

SEQ ID NO: 16054 - DNA, 22 bp, Artificial Sequence
  chemically synthesized
ctgtctgcaggggctgggacgc

SEQ ID NO: 16055 - DNA, 22 bp, Artificial Sequence
  chemically synthesized
tgtctgcaggggctgggacgct

SEQ ID NO: 16056 - DNA, 22 bp, Artificial Sequence
  chemically synthesized
tctgcaggggctgggacgctta

SEQ ID NO: 16057 - DNA, 22 bp, Artificial Sequence
  chemically synthesized
caggggctgggacgcttacctg

SEQ ID NO: 16058 - DNA, 22 bp, Artificial Sequence
  chemically synthesized
ggacgcttacctggtccagtct

SEQ ID NO: 16059 - DNA, 22 bp, Artificial Sequence
  chemically synthesized
acctggtccagtctcacaggtt

SEQ ID NO: 16060 - DNA, 22 bp, Artificial Sequence
  chemically synthesized
cctggtccagtctcacaggtta

SEQ ID NO: 16061 - DNA, 22 bp, Artificial Sequence
  chemically synthesized
gtccagtctcacaggttacagg

SEQ ID NO: 16062 - DNA, 22 bp, Artificial Sequence
  chemically synthesized
acaggttacagggaactgcttt

SEQ ID NO: 16063 - DNA, 22 bp, Artificial Sequence
  chemically synthesized
cagggaactgctttatcagggg

SEQ ID NO: 16064 - DNA, 22 bp, Artificial Sequence
  chemically synthesized
ctttatcaggggcacggaagtg

SEQ ID NO: 16065 - DNA, 22 bp, Artificial Sequence
  chemically synthesized
tatcaggggcacggaagtgttg

SEQ ID NO: 16066 - DNA, 22 bp, Artificial Sequence
  chemically synthesized
atcaggggcacggaagtgttgc

SEQ ID NO: 16067 - DNA, 22 bp, Artificial Sequence
  chemically synthesized
tcaggggcacggaagtgttgct

SEQ ID NO: 16068 - DNA, 22 bp, Artificial Sequence
  chemically synthesized
ctgtagtagtcagtatccaaaa

SEQ ID NO: 16069 - DNA, 22 bp, Artificial Sequence
  chemically synthesized
tagtagtcagtatccaaaaccc

SEQ ID NO: 16070 - DNA, 22 bp, Artificial Sequence
  chemically synthesized
tccaaagagaatcctatggaaa

SEQ ID NO: 16071 - DNA, 22 bp, Artificial Sequence
  chemically synthesized
tggaaaaacagaacaagtttct

SEQ ID NO: 16072 - DNA, 22 bp, Artificial Sequence
  chemically synthesized
ctggggttactgaatgaatgct

SEQ ID NO: 16073 - DNA, 22 bp, Artificial Sequence
  chemically synthesized
tggggttactgaatgaatgctt

SEQ ID NO: 16074 - DNA, 22 bp, Artificial Sequence
  chemically synthesized
gggttactgaatgaatgctttt

SEQ ID NO: 16075 - DNA, 22 bp, Artificial Sequence
  chemically synthesized
ctgaatgaatgcttttgcccaa

SEQ ID NO: 16076 - DNA, 22 bp, Artificial Sequence
  chemically synthesized
aatgaatgcttttgcccaaagc

SEQ ID NO: 16077 - DNA, 22 bp, Artificial Sequence
  chemically synthesized
ttgcccaaagcctacaccttca

SEQ ID NO: 16078 - DNA, 22 bp, Artificial Sequence
  chemically synthesized
tgcccaaagcctacaccttcaa

SEQ ID NO: 16079 - DNA, 22 bp, Artificial Sequence
  chemically synthesized
gcccaaagcctacaccttcaag

SEQ ID NO: 16080 - DNA, 22 bp, Artificial Sequence
  chemically synthesized
cccaaagcctacaccttcaaga

SEQ ID NO: 16081 - DNA, 22 bp, Artificial Sequence
  chemically synthesized
caccttcaagaagagtgtagcc

SEQ ID NO: 16082 - DNA, 22 bp, Artificial Sequence
  chemically synthesized
caagaagagtgtagcctgagaa

SEQ ID NO: 16083 - DNA, 22 bp, Artificial Sequence
  chemically synthesized
aagaagagtgtagcctgagaag

SEQ ID NO: 16084 - DNA, 22 bp, Artificial Sequence
  chemically synthesized
agaaggatttcacatgttgcct

SEQ ID NO: 16085 - DNA, 22 bp, Artificial Sequence
  chemically synthesized
cacatgttgcctctagaaggga

SEQ ID NO: 16086 - DNA, 22 bp, Artificial Sequence
  chemically synthesized
acatgttgcctctagaagggag

SEQ ID NO: 16087 - DNA, 22 bp, Artificial Sequence
  chemically synthesized
cctctagaagggagaactgggt

SEQ ID NO: 16088 - DNA, 22 bp, Artificial Sequence
  chemically synthesized
tagaagggagaactgggtggct

SEQ ID NO: 16089 - DNA, 22 bp, Artificial Sequence
  chemically synthesized
gaagggagaactgggtggctgg

SEQ ID NO: 16090 - DNA, 22 bp, Artificial Sequence
  chemically synthesized
ggtggctggggagaagtgtgag

SEQ ID NO: 16091 - DNA, 22 bp, Artificial Sequence
  chemically synthesized
gggagaagtgtgagagggagat

SEQ ID NO: 16092 - DNA, 22 bp, Artificial Sequence
  chemically synthesized
catgacacttccttatgtatgt

SEQ ID NO: 16093 - DNA, 22 bp, Artificial Sequence
  chemically synthesized
atgacacttccttatgtatgta

SEQ ID NO: 16094 - DNA, 22 bp, Artificial Sequence
  chemically synthesized
ccttatgtatgtaacttttgca

SEQ ID NO: 16095 - DNA, 22 bp, Artificial Sequence
  chemically synthesized
cttatgtatgtaacttttgcat

SEQ ID NO: 16096 - DNA, 22 bp, Artificial Sequence
  chemically synthesized
atgtatgtaacttttgcatttt

SEQ ID NO: 16097 - DNA, 22 bp, Artificial Sequence
  chemically synthesized
tgtatgtaacttttgcattttg

SEQ ID NO: 16098 - DNA, 22 bp, Artificial Sequence
  chemically synthesized
ttgcattttgaactgtttgaat

SEQ ID NO: 16099 - DNA, 22 bp, Artificial Sequence
  chemically synthesized
tgcattttgaactgtttgaatg

SEQ ID NO: 16100 - DNA, 22 bp, Artificial Sequence
  chemically synthesized
gcattttgaactgtttgaatgt

SEQ ID NO: 16101 - DNA, 22 bp, Artificial Sequence
  chemically synthesized
cattttgaactgtttgaatgta

SEQ ID NO: 16102 - DNA, 22 bp, Artificial Sequence
  chemically synthesized
tgaactgtttgaatgtattatc

SEQ ID NO: 16103 - DNA, 22 bp, Artificial Sequence
  chemically synthesized
gaactgtttgaatgtattatct

SEQ ID NO: 16104 - DNA, 22 bp, Artificial Sequence
  chemically synthesized
aactgtttgaatgtattatctt

SEQ ID NO: 16105 - DNA, 22 bp, Artificial Sequence
  chemically synthesized
tttgaatgtattatcttttttt

SEQ ID NO: 16106 - DNA, 22 bp, Artificial Sequence
  chemically synthesized
gaatgtattatctttttttttt

SEQ ID NO: 16107 - DNA, 22 bp, Artificial Sequence
  chemically synthesized
aatgtattatcttttttttttt

SEQ ID NO: 16108 - DNA, 22 bp, Artificial Sequence
  chemically synthesized
tcttttttttttttgagacagg

SEQ ID NO: 16109 - DNA, 22 bp, Artificial Sequence
  chemically synthesized
ttttttttttgagacaggatct

SEQ ID NO: 16110 - DNA, 22 bp, Artificial Sequence
  chemically synthesized
tttttttttgagacaggatctg

SEQ ID NO: 16111 - DNA, 22 bp, Artificial Sequence
  chemically synthesized
ttttttttgagacaggatctgg

SEQ ID NO: 16112 - DNA, 22 bp, Artificial Sequence
  chemically synthesized
tttttttgagacaggatctggc

SEQ ID NO: 16113 - DNA, 22 bp, Artificial Sequence
  chemically synthesized
ttttttgagacaggatctggct

SEQ ID NO: 16114 - DNA, 22 bp, Artificial Sequence
  chemically synthesized
tttttgagacaggatctggctc

SEQ ID NO: 16115 - DNA, 22 bp, Artificial Sequence
  chemically synthesized
ttttgagacaggatctggctca

SEQ ID NO: 16116 - DNA, 22 bp, Artificial Sequence
  chemically synthesized
tttgagacaggatctggctcag

SEQ ID NO: 16117 - DNA, 22 bp, Artificial Sequence
  chemically synthesized
ttgagacaggatctggctcagt

SEQ ID NO: 16118 - DNA, 22 bp, Artificial Sequence
  chemically synthesized
tgagacaggatctggctcagta

SEQ ID NO: 16119 - DNA, 22 bp, Artificial Sequence
  chemically synthesized
gagacaggatctggctcagtaa

SEQ ID NO: 16120 - DNA, 22 bp, Artificial Sequence
  chemically synthesized
agacaggatctggctcagtaac

SEQ ID NO: 16121 - DNA, 22 bp, Artificial Sequence
  chemically synthesized
gctcagtaacccagcctggagt

SEQ ID NO: 16122 - DNA, 22 bp, Artificial Sequence
  chemically synthesized
agtaacccagcctggagtgcag

SEQ ID NO: 16123 - DNA, 22 bp, Artificial Sequence
  chemically synthesized
gagtgcagtggcgcaatctcgg

SEQ ID NO: 16124 - DNA, 22 bp, Artificial Sequence
  chemically synthesized
ggctcattgtgacctctacctc

SEQ ID NO: 16125 - DNA, 22 bp, Artificial Sequence
  chemically synthesized
attgtgacctctacctcctggg

SEQ ID NO: 16126 - DNA, 22 bp, Artificial Sequence
  chemically synthesized
tgacctctacctcctgggatcc

SEQ ID NO: 16127 - DNA, 22 bp, Artificial Sequence
  chemically synthesized
tacctcctgggatcctcccacc

SEQ ID NO: 16128 - DNA, 22 bp, Artificial Sequence
  chemically synthesized
cctcctgggatcctcccacctc

SEQ ID NO: 16129 - DNA, 22 bp, Artificial Sequence
  chemically synthesized
ctgggatcctcccacctcagcc

SEQ ID NO: 16130 - DNA, 22 bp, Artificial Sequence
  chemically synthesized
ggatcctcccacctcagcctcc

SEQ ID NO: 16131 - DNA, 22 bp, Artificial Sequence
  chemically synthesized
ccacctcagcctcctgaatagc

SEQ ID NO: 16132 - DNA, 22 bp, Artificial Sequence
  chemically synthesized
agcctcctgaatagctgggact

SEQ ID NO: 16133 - DNA, 22 bp, Artificial Sequence
  chemically synthesized
ctgaatagctgggactacaggt

SEQ ID NO: 16134 - DNA, 22 bp, Artificial Sequence
  chemically synthesized
aatagctgggactacaggtgtg

SEQ ID NO: 16135 - DNA, 22 bp, Artificial Sequence
  chemically synthesized
ggactacaggtgtgtgccacca

SEQ ID NO: 16136 - DNA, 22 bp, Artificial Sequence
  chemically synthesized
caggtgtgtgccaccacatcca

SEQ ID NO: 16137 - DNA, 22 bp, Artificial Sequence
  chemically synthesized
gtttttgtatttttagtagaga

SEQ ID NO: 16138 - DNA, 22 bp, Artificial Sequence
  chemically synthesized
ttgtatttttagtagagacggg

SEQ ID NO: 16139 - DNA, 22 bp, Artificial Sequence
  chemically synthesized
tgtatttttagtagagacgggg

SEQ ID NO: 16140 - DNA, 22 bp, Artificial Sequence
  chemically synthesized
gtatttttagtagagacggggt

SEQ ID NO: 16141 - DNA, 22 bp, Artificial Sequence
  chemically synthesized
tatttttagtagagacggggtt

SEQ ID NO: 16142 - DNA, 22 bp, Artificial Sequence
  chemically synthesized
ttagtagagacggggtttcacc

SEQ ID NO: 16143 - DNA, 22 bp, Artificial Sequence
  chemically synthesized
tagtagagacggggtttcacca

SEQ ID NO: 16144 - DNA, 22 bp, Artificial Sequence
  chemically synthesized
agtagagacggggtttcaccat

SEQ ID NO: 16145 - DNA, 22 bp, Artificial Sequence
  chemically synthesized
gtagagacggggtttcaccatg

SEQ ID NO: 16146 - DNA, 22 bp, Artificial Sequence
  chemically synthesized
caccatgttgcccaggctggtc

SEQ ID NO: 16147 - DNA, 22 bp, Artificial Sequence
  chemically synthesized
accatgttgcccaggctggtct

SEQ ID NO: 16148 - DNA, 22 bp, Artificial Sequence
  chemically synthesized
cccaggctggtctccatctcct

SEQ ID NO: 16149 - DNA, 22 bp, Artificial Sequence
  chemically synthesized
gtctccatctcctgaactcagg

SEQ ID NO: 16150 - DNA, 22 bp, Artificial Sequence
  chemically synthesized
catctcctgaactcaggcaatc

SEQ ID NO: 16151 - DNA, 22 bp, Artificial Sequence
  chemically synthesized
ctgaactcaggcaatcctccca

SEQ ID NO: 16152 - DNA, 22 bp, Artificial Sequence
  chemically synthesized
aactcaggcaatcctcccacct

SEQ ID NO: 16153 - DNA, 22 bp, Artificial Sequence
  chemically synthesized
aggcaatcctcccacctcagcc

SEQ ID NO: 16154 - DNA, 22 bp, Artificial Sequence
  chemically synthesized
ccacctcagcctcccaaagtgc

SEQ ID NO: 16155 - DNA, 22 bp, Artificial Sequence
  chemically synthesized
agcctcccaaagtgctgggatt

SEQ ID NO: 16156 - DNA, 22 bp, Artificial Sequence
  chemically synthesized
ccaaagtgctgggattacaggc

SEQ ID NO: 16157 - DNA, 22 bp, Artificial Sequence
  chemically synthesized
ggattacaggcatgagccaccg

SEQ ID NO: 16158 - DNA, 22 bp, Artificial Sequence
  chemically synthesized
caggcatgagccaccgtgcctg

SEQ ID NO: 16159 - DNA, 22 bp, Artificial Sequence
  chemically synthesized
actgtatgatctatttaaacac

SEQ ID NO: 16160 - DNA, 22 bp, Artificial Sequence
  chemically synthesized
tatgatctatttaaacacaaat

SEQ ID NO: 16161 - DNA, 22 bp, Artificial Sequence
  chemically synthesized
tttaaacacaaataatgaagcc

SEQ ID NO: 16162 - DNA, 22 bp, Artificial Sequence
  chemically synthesized
aaacacaaataatgaagcccaa

SEQ ID NO: 16163 - DNA, 22 bp, Artificial Sequence
  chemically synthesized
aacacaaataatgaagcccaag

SEQ ID NO: 16164 - DNA, 22 bp, Artificial Sequence
  chemically synthesized
tgaactccaggcaggcgcggtg

SEQ ID NO: 16165 - DNA, 22 bp, Artificial Sequence
  chemically synthesized
aactccaggcaggcgcggtggc

SEQ ID NO: 16166 - DNA, 22 bp, Artificial Sequence
  chemically synthesized
caggcaggcgcggtggctcaca

SEQ ID NO: 16167 - DNA, 22 bp, Artificial Sequence
  chemically synthesized
acacctgtaatctcagcacttt

SEQ ID NO: 16168 - DNA, 22 bp, Artificial Sequence
  chemically synthesized
taatctcagcactttgggaggc

SEQ ID NO: 16169 - DNA, 22 bp, Artificial Sequence
  chemically synthesized
agcactttgggaggccaaggca

SEQ ID NO: 16170 - DNA, 22 bp, Artificial Sequence
  chemically synthesized
tgggaggccaaggcaggcagat

SEQ ID NO: 16171 - DNA, 22 bp, Artificial Sequence
  chemically synthesized
gggaggccaaggcaggcagatc

SEQ ID NO: 16172 - DNA, 22 bp, Artificial Sequence
  chemically synthesized
ggaggccaaggcaggcagatca

SEQ ID NO: 16173 - DNA, 22 bp, Artificial Sequence
  chemically synthesized
gagaccagcctggccaacatgg

SEQ ID NO: 16174 - DNA, 22 bp, Artificial Sequence
  chemically synthesized
agaccagcctggccaacatggt

SEQ ID NO: 16175 - DNA, 22 bp, Artificial Sequence
  chemically synthesized
gccaacatggtgaaacaccgtt

SEQ ID NO: 16176 - DNA, 22 bp, Artificial Sequence
  chemically synthesized
ctaccaaaaaatataaagaatt

SEQ ID NO: 16177 - DNA, 22 bp, Artificial Sequence
  chemically synthesized
taccaaaaaatataaagaatta

SEQ ID NO: 16178 - DNA, 22 bp, Artificial Sequence
  chemically synthesized
ccaaaaaatataaagaattagc

SEQ ID NO: 16179 - DNA, 22 bp, Artificial Sequence
  chemically synthesized
gccagatgtggtggtgcgtgac

SEQ ID NO: 16180 - DNA, 22 bp, Artificial Sequence
  chemically synthesized
taatcccagctactcgggaggc

SEQ ID NO: 16181 - DNA, 22 bp, Artificial Sequence
  chemically synthesized
ctcgggaggctaaggcaagaga

SEQ ID NO: 16182 - DNA, 22 bp, Artificial Sequence
  chemically synthesized
gggaggctaaggcaagagaatc

SEQ ID NO: 16183 - DNA, 22 bp, Artificial Sequence
  chemically synthesized
aggcaagagaatcgcttgaacc

SEQ ID NO: 16184 - DNA, 22 bp, Artificial Sequence
  chemically synthesized
gaacctgggaggcggaggttgc

SEQ ID NO: 16185 - DNA, 22 bp, Artificial Sequence
  chemically synthesized
aacctgggaggcggaggttgcc

SEQ ID NO: 16186 - DNA, 22 bp, Artificial Sequence
  chemically synthesized
ggaggcggaggttgccgtgagc

SEQ ID NO: 16187 - DNA, 22 bp, Artificial Sequence
  chemically synthesized
ccgtgagccgagattatgccac

SEQ ID NO: 16188 - DNA, 22 bp, Artificial Sequence
  chemically synthesized
tgccactgcactacaggctggg

SEQ ID NO: 16189 - DNA, 22 bp, Artificial Sequence
  chemically synthesized
cactacaggctgggtgacagag

SEQ ID NO: 16190 - DNA, 22 bp, Artificial Sequence
  chemically synthesized
caggctgggtgacagagcaaga

SEQ ID NO: 16191 - DNA, 22 bp, Artificial Sequence
  chemically synthesized
ggtgacagagcaagactccatc

SEQ ID NO: 16192 - DNA, 22 bp, Artificial Sequence
  chemically synthesized
catctcaaaaaaaaaaaaaaaa

SEQ ID NO: 16193 - DNA, 22 bp, Artificial Sequence
  chemically synthesized
aaaaaaaaaaaaaaaaaaatcc

SEQ ID NO: 16194 - DNA, 22 bp, Artificial Sequence
  chemically synthesized
aaatccataaaatggcagctat

SEQ ID NO: 16195 - DNA, 22 bp, Artificial Sequence
  chemically synthesized
tgtgactttttttttttaacct

SEQ ID NO: 16196 - DNA, 22 bp, Artificial Sequence
  chemically synthesized
tttttttttaacctcaagaagt

SEQ ID NO: 16197 - DNA, 22 bp, Artificial Sequence
  chemically synthesized
ttttttttaacctcaagaagta

SEQ ID NO: 16198 - DNA, 22 bp, Artificial Sequence
  chemically synthesized
tttttttaacctcaagaagtat

SEQ ID NO: 16199 - DNA, 22 bp, Artificial Sequence
  chemically synthesized
ttttttaacctcaagaagtatt

SEQ ID NO: 16200 - DNA, 22 bp, Artificial Sequence
  chemically synthesized
tttttaacctcaagaagtattt

SEQ ID NO: 16201 - DNA, 22 bp, Artificial Sequence
  chemically synthesized
ttttaacctcaagaagtatttg

SEQ ID NO: 16202 - DNA, 22 bp, Artificial Sequence
  chemically synthesized
tttaacctcaagaagtatttgt

SEQ ID NO: 16203 - DNA, 22 bp, Artificial Sequence
  chemically synthesized
ttaacctcaagaagtatttgtc

SEQ ID NO: 16204 - DNA, 22 bp, Artificial Sequence
  chemically synthesized
taacctcaagaagtatttgtcc

SEQ ID NO: 16205 - DNA, 22 bp, Artificial Sequence
  chemically synthesized
aacctcaagaagtatttgtcct

SEQ ID NO: 16206 - DNA, 22 bp, Artificial Sequence
  chemically synthesized
acctcaagaagtatttgtcctg

SEQ ID NO: 16207 - DNA, 22 bp, Artificial Sequence
  chemically synthesized
aagaagtatttgtcctggaaga

SEQ ID NO: 16208 - DNA, 22 bp, Artificial Sequence
  chemically synthesized
gtcctggaagaatgcatatgga

SEQ ID NO: 16209 - DNA, 22 bp, Artificial Sequence
  chemically synthesized
tcctggaagaatgcatatggaa

SEQ ID NO: 16210 - DNA, 22 bp, Artificial Sequence
  chemically synthesized
gaagaatgcatatggaactaca

SEQ ID NO: 16211 - DNA, 22 bp, Artificial Sequence
  chemically synthesized
cagtttgaaacttggacttgca

SEQ ID NO: 16212 - DNA, 22 bp, Artificial Sequence
  chemically synthesized
gaaacttggacttgcatatacc

SEQ ID NO: 16213 - DNA, 22 bp, Artificial Sequence
  chemically synthesized
aaacttggacttgcatatacca

SEQ ID NO: 16214 - DNA, 22 bp, Artificial Sequence
  chemically synthesized
ggacttgcatataccatgggtt

SEQ ID NO: 16215 - DNA, 22 bp, Artificial Sequence
  chemically synthesized
gacttgcatataccatgggttc

SEQ ID NO: 16216 - DNA, 22 bp, Artificial Sequence
  chemically synthesized
gcatataccatgggttccctca

SEQ ID NO: 16217 - DNA, 22 bp, Artificial Sequence
  chemically synthesized
catataccatgggttccctcag

SEQ ID NO: 16218 - DNA, 22 bp, Artificial Sequence
  chemically synthesized
cctcaggcctcagggaatcttg

SEQ ID NO: 16219 - DNA, 22 bp, Artificial Sequence
  chemically synthesized
aggcctcagggaatcttgcatt

SEQ ID NO: 16220 - DNA, 22 bp, Artificial Sequence
  chemically synthesized
agggaatcttgcatttcctctg

SEQ ID NO: 16221 - DNA, 22 bp, Artificial Sequence
  chemically synthesized
gcatttcctctgacatcagaga

SEQ ID NO: 16222 - DNA, 22 bp, Artificial Sequence
  chemically synthesized
catttcctctgacatcagagaa

SEQ ID NO: 16223 - DNA, 22 bp, Artificial Sequence
  chemically synthesized
cctctgacatcagagaatgcac

SEQ ID NO: 16224 - DNA, 22 bp, Artificial Sequence
  chemically synthesized
ctctgacatcagagaatgcact

SEQ ID NO: 16225 - DNA, 22 bp, Artificial Sequence
  chemically synthesized
tgacatcagagaatgcactcca

SEQ ID NO: 16226 - DNA, 22 bp, Artificial Sequence
  chemically synthesized
acatcagagaatgcactccagc

SEQ ID NO: 16227 - DNA, 22 bp, Artificial Sequence
  chemically synthesized
cagcccctaggacgagcccccc

SEQ ID NO: 16228 - DNA, 22 bp, Artificial Sequence
  chemically synthesized
ggacgagccccccccagggaaa

SEQ ID NO: 16229 - DNA, 22 bp, Artificial Sequence
  chemically synthesized
catttccatcagaattgctctc

SEQ ID NO: 16230 - DNA, 22 bp, Artificial Sequence
  chemically synthesized
ccatcagaattgctctctgtaa

SEQ ID NO: 16231 - DNA, 22 bp, Artificial Sequence
  chemically synthesized
catcagaattgctctctgtaag

SEQ ID NO: 16232 - DNA, 22 bp, Artificial Sequence
  chemically synthesized
ctctctgtaaggatgtatatag

SEQ ID NO: 16233 - DNA, 22 bp, Artificial Sequence
  chemically synthesized
tctgtaaggatgtatatagctt

SEQ ID NO: 16234 - DNA, 22 bp, Artificial Sequence
  chemically synthesized
tgtaaggatgtatatagcttca

SEQ ID NO: 16235 - DNA, 22 bp, Artificial Sequence
  chemically synthesized
taaggatgtatatagcttcaga

SEQ ID NO: 16236 - DNA, 22 bp, Artificial Sequence
  chemically synthesized
cagatgcttgttctgtatcctc

SEQ ID NO: 16237 - DNA, 22 bp, Artificial Sequence
  chemically synthesized
agatgcttgttctgtatcctct

SEQ ID NO: 16238 - DNA, 22 bp, Artificial Sequence
  chemically synthesized
gttctgtatcctctctactttg

SEQ ID NO: 16239 - DNA, 22 bp, Artificial Sequence
  chemically synthesized
ttctgtatcctctctactttga

SEQ ID NO: 16240 - DNA, 22 bp, Artificial Sequence
  chemically synthesized
tgtatcctctctactttgaaac

SEQ ID NO: 16241 - DNA, 22 bp, Artificial Sequence
  chemically synthesized
tatcctctctactttgaaacag

SEQ ID NO: 16242 - DNA, 22 bp, Artificial Sequence
  chemically synthesized
tctactttgaaacagagtatct

SEQ ID NO: 16243 - DNA, 22 bp, Artificial Sequence
  chemically synthesized
tactttgaaacagagtatctca

SEQ ID NO: 16244 - DNA, 22 bp, Artificial Sequence
  chemically synthesized
ctttgaaacagagtatctcaga

SEQ ID NO: 16245 - DNA, 22 bp, Artificial Sequence
  chemically synthesized
tgaaacagagtatctcagacaa

SEQ ID NO: 16246 - DNA, 22 bp, Artificial Sequence
  chemically synthesized
gaaacagagtatctcagacaaa

SEQ ID NO: 16247 - DNA, 22 bp, Artificial Sequence
  chemically synthesized
aaacagagtatctcagacaaac

SEQ ID NO: 16248 - DNA, 22 bp, Artificial Sequence
  chemically synthesized
agacaaaccacttcccctttaa

SEQ ID NO: 16249 - DNA, 22 bp, Artificial Sequence
  chemically synthesized
cccctttaaaagtactagatat

SEQ ID NO: 16250 - DNA, 22 bp, Artificial Sequence
  chemically synthesized
ccctttaaaagtactagatata

SEQ ID NO: 16251 - DNA, 22 bp, Artificial Sequence
  chemically synthesized
taaaagtactagatatatcttt

SEQ ID NO: 16252 - DNA, 22 bp, Artificial Sequence
  chemically synthesized
aaaagtactagatatatctttc

SEQ ID NO: 16253 - DNA, 22 bp, Artificial Sequence
  chemically synthesized
aaagtactagatatatctttca

SEQ ID NO: 16254 - DNA, 22 bp, Artificial Sequence
  chemically synthesized
gatatatctttcactgtggaaa

SEQ ID NO: 16255 - DNA, 22 bp, Artificial Sequence
  chemically synthesized
tcactgtggaaataggtgtcaa

SEQ ID NO: 16256 - DNA, 22 bp, Artificial Sequence
  chemically synthesized
cactgtggaaataggtgtcaac

SEQ ID NO: 16257 - DNA, 22 bp, Artificial Sequence
  chemically synthesized
actgtggaaataggtgtcaacc

SEQ ID NO: 16258 - DNA, 22 bp, Artificial Sequence
  chemically synthesized
tggaaataggtgtcaaccgcca

SEQ ID NO: 16259 - DNA, 22 bp, Artificial Sequence
  chemically synthesized
ttatcccgtgatggtggaatag

SEQ ID NO: 16260 - DNA, 22 bp, Artificial Sequence
  chemically synthesized
tatcccgtgatggtggaatagt

SEQ ID NO: 16261 - DNA, 22 bp, Artificial Sequence
  chemically synthesized
atcccgtgatggtggaatagtg

SEQ ID NO: 16262 - DNA, 22 bp, Artificial Sequence
  chemically synthesized
tcccgtgatggtggaatagtga

SEQ ID NO: 16263 - DNA, 22 bp, Artificial Sequence
  chemically synthesized
ctcaccgaaatcagggagagcc

SEQ ID NO: 16264 - DNA, 22 bp, Artificial Sequence
  chemically synthesized
tcaccgaaatcagggagagcca

SEQ ID NO: 16265 - DNA, 22 bp, Artificial Sequence
  chemically synthesized
accgaaatcagggagagccact

SEQ ID NO: 16266 - DNA, 22 bp, Artificial Sequence
  chemically synthesized
actctggcctctatcaacccag

SEQ ID NO: 16267 - DNA, 22 bp, Artificial Sequence
  chemically synthesized
tggcctctatcaacccagagag

SEQ ID NO: 16268 - DNA, 22 bp, Artificial Sequence
  chemically synthesized
gcctctatcaacccagagagat

SEQ ID NO: 16269 - DNA, 22 bp, Artificial Sequence
  chemically synthesized
tatcaacccagagagattgcat

SEQ ID NO: 16270 - DNA, 22 bp, Artificial Sequence
  chemically synthesized
tcaacccagagagattgcatgg

SEQ ID NO: 16271 - DNA, 22 bp, Artificial Sequence
  chemically synthesized
catggttcttcaatggagatca

SEQ ID NO: 16272 - DNA, 22 bp, Artificial Sequence
  chemically synthesized
ttcaatggagatcagatgtttg

SEQ ID NO: 16273 - DNA, 22 bp, Artificial Sequence
  chemically synthesized
caatggagatcagatgtttgga

SEQ ID NO: 16274 - DNA, 22 bp, Artificial Sequence
  chemically synthesized
aatggagatcagatgtttggaa

SEQ ID NO: 16275 - DNA, 22 bp, Artificial Sequence
  chemically synthesized
ggaataacacttcatcttttta

SEQ ID NO: 16276 - DNA, 22 bp, Artificial Sequence
  chemically synthesized
gaataacacttcatctttttat

SEQ ID NO: 16277 - DNA, 22 bp, Artificial Sequence
  chemically synthesized
catctttttattttttagaatc

SEQ ID NO: 16278 - DNA, 22 bp, Artificial Sequence
  chemically synthesized
atctttttattttttagaatca

SEQ ID NO: 16279 - DNA, 22 bp, Artificial Sequence
  chemically synthesized
tttattttttagaatcatgcgg

SEQ ID NO: 16280 - DNA, 22 bp, Artificial Sequence
  chemically synthesized
ttattttttagaatcatgcggc

SEQ ID NO: 16281 - DNA, 22 bp, Artificial Sequence
  chemically synthesized
tattttttagaatcatgcggct

SEQ ID NO: 16282 - DNA, 22 bp, Artificial Sequence
  chemically synthesized
attttttagaatcatgcggctg

SEQ ID NO: 16283 - DNA, 22 bp, Artificial Sequence
  chemically synthesized
ttttttagaatcatgcggctgg

SEQ ID NO: 16284 - DNA, 22 bp, Artificial Sequence
  chemically synthesized
tttagaatcatgcggctgggtg

SEQ ID NO: 16285 - DNA, 22 bp, Artificial Sequence
  chemically synthesized
ttagaatcatgcggctgggtgt

SEQ ID NO: 16286 - DNA, 22 bp, Artificial Sequence
  chemically synthesized
tagaatcatgcggctgggtgta

SEQ ID NO: 16287 - DNA, 22 bp, Artificial Sequence
  chemically synthesized
agaatcatgcggctgggtgtag

SEQ ID NO: 16288 - DNA, 22 bp, Artificial Sequence
  chemically synthesized
gaatcatgcggctgggtgtagt

SEQ ID NO: 16289 - DNA, 22 bp, Artificial Sequence
  chemically synthesized
ggtgtagtggctcacgcctgta

SEQ ID NO: 16290 - DNA, 22 bp, Artificial Sequence
  chemically synthesized
acgcctgtaatcctagcactta

SEQ ID NO: 16291 - DNA, 22 bp, Artificial Sequence
  chemically synthesized
taatcctagcacttagggaggc

SEQ ID NO: 16292 - DNA, 22 bp, Artificial Sequence
  chemically synthesized
gcacttagggaggccaaggcag

SEQ ID NO: 16293 - DNA, 22 bp, Artificial Sequence
  chemically synthesized
agggaggccaaggcaggcagat

SEQ ID NO: 16294 - DNA, 22 bp, Artificial Sequence
  chemically synthesized
gggaggccaaggcaggcagatc

SEQ ID NO: 16295 - DNA, 22 bp, Artificial Sequence
  chemically synthesized
gagaccagcctagtcaacatag

SEQ ID NO: 16296 - DNA, 22 bp, Artificial Sequence
  chemically synthesized
gtcaacatagtgaaaccatgtc

SEQ ID NO: 16297 - DNA, 22 bp, Artificial Sequence
  chemically synthesized
tactaaaaatacaaaaaaaatt

SEQ ID NO: 16298 - DNA, 22 bp, Artificial Sequence
  chemically synthesized
ctaaaaatacaaaaaaaattag

SEQ ID NO: 16299 - DNA, 22 bp, Artificial Sequence
  chemically synthesized
aaaatacaaaaaaaattagctg

SEQ ID NO: 16300 - DNA, 22 bp, Artificial Sequence
  chemically synthesized
gctgggcatggtggcgggcacc

SEQ ID NO: 16301 - DNA, 22 bp, Artificial Sequence
  chemically synthesized
ggcatggtggcgggcacctgta

SEQ ID NO: 16302 - DNA, 22 bp, Artificial Sequence
  chemically synthesized
taatcccagctacttgggaggc

SEQ ID NO: 16303 - DNA, 22 bp, Artificial Sequence
  chemically synthesized
cttgggaggctgaggcaggaga

SEQ ID NO: 16304 - DNA, 22 bp, Artificial Sequence
  chemically synthesized
gggaggctgaggcaggagaatc

SEQ ID NO: 16305 - DNA, 22 bp, Artificial Sequence
  chemically synthesized
ggaggctgaggcaggagaatca

SEQ ID NO: 16306 - DNA, 22 bp, Artificial Sequence
  chemically synthesized
aggcaggagaatcacttgaacc

SEQ ID NO: 16307 - DNA, 22 bp, Artificial Sequence
  chemically synthesized
gaaccggagaggcagaggttgc

SEQ ID NO: 16308 - DNA, 22 bp, Artificial Sequence
  chemically synthesized
aaccggagaggcagaggttgca

SEQ ID NO: 16309 - DNA, 22 bp, Artificial Sequence
  chemically synthesized
cagtgagctgagattgcaccat

SEQ ID NO: 16310 - DNA, 22 bp, Artificial Sequence
  chemically synthesized
agattgcaccattgcactccag

SEQ ID NO: 16311 - DNA, 22 bp, Artificial Sequence
  chemically synthesized
caccattgcactccagccaggc

SEQ ID NO: 16312 - DNA, 22 bp, Artificial Sequence
  chemically synthesized
cactccagccaggcaacagtgc

SEQ ID NO: 16313 - DNA, 22 bp, Artificial Sequence
  chemically synthesized
cagccaggcaacagtgcgagac

SEQ ID NO: 16314 - DNA, 22 bp, Artificial Sequence
  chemically synthesized
catctcaaacaaacaaacaaaa

SEQ ID NO: 16315 - DNA, 22 bp, Artificial Sequence
  chemically synthesized
aaacaaacaaacaaaagaaaga

SEQ ID NO: 16316 - DNA, 22 bp, Artificial Sequence
  chemically synthesized
acgtgatagaaattggcaaatg

SEQ ID NO: 16317 - DNA, 22 bp, Artificial Sequence
  chemically synthesized
cgtgatagaaattggcaaatgc

SEQ ID NO: 16318 - DNA, 22 bp, Artificial Sequence
  chemically synthesized
gcaaatgctaaactcagggctt

SEQ ID NO: 16319 - DNA, 22 bp, Artificial Sequence
  chemically synthesized
aactcagggctttcccctgctc

SEQ ID NO: 16320 - DNA, 22 bp, Artificial Sequence
  chemically synthesized
agggctttcccctgctccccag

SEQ ID NO: 16321 - DNA, 22 bp, Artificial Sequence
  chemically synthesized
tcccctgctccccagagagtca

SEQ ID NO: 16322 - DNA, 22 bp, Artificial Sequence
  chemically synthesized
cccctgctccccagagagtcag

SEQ ID NO: 16323 - DNA, 22 bp, Artificial Sequence
  chemically synthesized
ccctgctccccagagagtcagt

SEQ ID NO: 16324 - DNA, 22 bp, Artificial Sequence
  chemically synthesized
ctccccagagagtcagtttatc

SEQ ID NO: 16325 - DNA, 22 bp, Artificial Sequence
  chemically synthesized
cccagagagtcagtttatcagc

SEQ ID NO: 16326 - DNA, 22 bp, Artificial Sequence
  chemically synthesized
atcagcactggacgtaacatag

SEQ ID NO: 16327 - DNA, 22 bp, Artificial Sequence
  chemically synthesized
tcagcactggacgtaacatagt

SEQ ID NO: 16328 - DNA, 22 bp, Artificial Sequence
  chemically synthesized
gacgtaacatagttcataagag

SEQ ID NO: 16329 - DNA, 22 bp, Artificial Sequence
  chemically synthesized
ataagagcattgccgcggaagc

SEQ ID NO: 16330 - DNA, 22 bp, Artificial Sequence
  chemically synthesized
ccgcggaagccagcctgcctac

SEQ ID NO: 16331 - DNA, 22 bp, Artificial Sequence
  chemically synthesized
cctacctgggcttccatcctgg

SEQ ID NO: 16332 - DNA, 22 bp, Artificial Sequence
  chemically synthesized
cctgggcttccatcctggctcg

SEQ ID NO: 16333 - DNA, 22 bp, Artificial Sequence
  chemically synthesized
ggcttccatcctggctcggcat

SEQ ID NO: 16334 - DNA, 22 bp, Artificial Sequence
  chemically synthesized
ccatcctggctcggcatgtact

SEQ ID NO: 16335 - DNA, 22 bp, Artificial Sequence
  chemically synthesized
catcctggctcggcatgtacta

SEQ ID NO: 16336 - DNA, 22 bp, Artificial Sequence
  chemically synthesized
gctcggcatgtactaaccttgt

SEQ ID NO: 16337 - DNA, 22 bp, Artificial Sequence
  chemically synthesized
ggcatgtactaaccttgttggc

SEQ ID NO: 16338 - DNA, 22 bp, Artificial Sequence
  chemically synthesized
accttgttggcctaatcattta

SEQ ID NO: 16339 - DNA, 22 bp, Artificial Sequence
  chemically synthesized
gttggcctaatcatttaactca

SEQ ID NO: 16340 - DNA, 22 bp, Artificial Sequence
  chemically synthesized
ttggcctaatcatttaactcag

SEQ ID NO: 16341 - DNA, 22 bp, Artificial Sequence
  chemically synthesized
gcctaatcatttaactcagcac

SEQ ID NO: 16342 - DNA, 22 bp, Artificial Sequence
  chemically synthesized
atcatttaactcagcaccttgg

SEQ ID NO: 16343 - DNA, 22 bp, Artificial Sequence
  chemically synthesized
aactcagcaccttggtctctgc

SEQ ID NO: 16344 - DNA, 22 bp, Artificial Sequence
  chemically synthesized
actcagcaccttggtctctgca

SEQ ID NO: 16345 - DNA, 22 bp, Artificial Sequence
  chemically synthesized
agcaccttggtctctgcatcta

SEQ ID NO: 16346 - DNA, 22 bp, Artificial Sequence
  chemically synthesized
ggtctctgcatctactgtttct

SEQ ID NO: 16347 - DNA, 22 bp, Artificial Sequence
  chemically synthesized
gtctctgcatctactgtttctg

SEQ ID NO: 16348 - DNA, 22 bp, Artificial Sequence
  chemically synthesized
tgcatctactgtttctgtaaat

SEQ ID NO: 16349 - DNA, 22 bp, Artificial Sequence
  chemically synthesized
catctactgtttctgtaaatag

SEQ ID NO: 16350 - DNA, 22 bp, Artificial Sequence
  chemically synthesized
ctgtttctgtaaatagcagtaa

SEQ ID NO: 16351 - DNA, 22 bp, Artificial Sequence
  chemically synthesized
tttctgtaaatagcagtaacta

SEQ ID NO: 16352 - DNA, 22 bp, Artificial Sequence
  chemically synthesized
ctgtaaatagcagtaactacct

SEQ ID NO: 16353 - DNA, 22 bp, Artificial Sequence
  chemically synthesized
tgtaaatagcagtaactacctc

SEQ ID NO: 16354 - DNA, 22 bp, Artificial Sequence
  chemically synthesized
taaatagcagtaactacctcac

SEQ ID NO: 16355 - DNA, 22 bp, Artificial Sequence
  chemically synthesized
cctcacagaaaagcacatagca

SEQ ID NO: 16356 - DNA, 22 bp, Artificial Sequence
  chemically synthesized
acagaaaagcacatagcacatg

SEQ ID NO: 16357 - DNA, 22 bp, Artificial Sequence
  chemically synthesized
gcacacactgtttaataaatgt

SEQ ID NO: 16358 - DNA, 22 bp, Artificial Sequence
  chemically synthesized
tttaataaatgttaaccctgat

SEQ ID NO: 16359 - DNA, 22 bp, Artificial Sequence
  chemically synthesized
aataaatgttaaccctgattat

SEQ ID NO: 16360 - DNA, 22 bp, Artificial Sequence
  chemically synthesized
ataaatgttaaccctgattatt

SEQ ID NO: 16361 - DNA, 22 bp, Artificial Sequence
  chemically synthesized
accctgattattattaagctgc

SEQ ID NO: 16362 - DNA, 22 bp, Artificial Sequence
  chemically synthesized
attattattaagctgccagaga

SEQ ID NO: 16363 - DNA, 22 bp, Artificial Sequence
  chemically synthesized
ttattaagctgccagagataac

SEQ ID NO: 16364 - DNA, 22 bp, Artificial Sequence
  chemically synthesized
ttaagctgccagagataaccta

SEQ ID NO: 16365 - DNA, 22 bp, Artificial Sequence
  chemically synthesized
agctgccagagataacctattt

SEQ ID NO: 16366 - DNA, 22 bp, Artificial Sequence
  chemically synthesized
ccagagataacctatttgtaga

SEQ ID NO: 16367 - DNA, 22 bp, Artificial Sequence
  chemically synthesized
tttgtagattataaaacagaaa

SEQ ID NO: 16368 - DNA, 22 bp, Artificial Sequence
  chemically synthesized
gtagattataaaacagaaactc

SEQ ID NO: 16369 - DNA, 22 bp, Artificial Sequence
  chemically synthesized
tagattataaaacagaaactca

SEQ ID NO: 16370 - DNA, 22 bp, Artificial Sequence
  chemically synthesized
taaaacagaaactcagataatt

SEQ ID NO: 16371 - DNA, 22 bp, Artificial Sequence
  chemically synthesized
agataattgatatgacttgcca

SEQ ID NO: 16372 - DNA, 22 bp, Artificial Sequence
  chemically synthesized
atatgacttgccaaggacatgt

SEQ ID NO: 16373 - DNA, 22 bp, Artificial Sequence
  chemically synthesized
gccaaggacatgtagttggtgg

SEQ ID NO: 16374 - DNA, 22 bp, Artificial Sequence
  chemically synthesized
ccaaggacatgtagttggtggg

SEQ ID NO: 16375 - DNA, 22 bp, Artificial Sequence
  chemically synthesized
gtgggtggcagaacgagggctg

SEQ ID NO: 16376 - DNA, 22 bp, Artificial Sequence
  chemically synthesized
gagcccagttcccagggtgact

SEQ ID NO: 16377 - DNA, 22 bp, Artificial Sequence
  chemically synthesized
ccagggtgacttttcattaccc

SEQ ID NO: 16378 - DNA, 22 bp, Artificial Sequence
  chemically synthesized
ttcattaccccacaaaacaggc

SEQ ID NO: 16379 - DNA, 22 bp, Artificial Sequence
  chemically synthesized
tcattaccccacaaaacaggct

SEQ ID NO: 16380 - DNA, 22 bp, Artificial Sequence
  chemically synthesized
cattaccccacaaaacaggctg

SEQ ID NO: 16381 - DNA, 22 bp, Artificial Sequence
  chemically synthesized
attaccccacaaaacaggctgt

SEQ ID NO: 16382 - DNA, 22 bp, Artificial Sequence
  chemically synthesized
ccccacaaaacaggctgttgaa

SEQ ID NO: 16383 - DNA, 22 bp, Artificial Sequence
  chemically synthesized
ttgaatcatctgtgtgtttcct

SEQ ID NO: 16384 - DNA, 22 bp, Artificial Sequence
  chemically synthesized
aatcatctgtgtgtttcctttt

SEQ ID NO: 16385 - DNA, 22 bp, Artificial Sequence
  chemically synthesized
tgtgtttccttttttcatacag

SEQ ID NO: 16386 - DNA, 22 bp, Artificial Sequence
  chemically synthesized
ccttttttcatacagcatacat

SEQ ID NO: 16387 - DNA, 22 bp, Artificial Sequence
  chemically synthesized
cttttttcatacagcatacatc

SEQ ID NO: 16388 - DNA, 22 bp, Artificial Sequence
  chemically synthesized
ttttcatacagcatacatcatc

SEQ ID NO: 16389 - DNA, 22 bp, Artificial Sequence
  chemically synthesized
tttcatacagcatacatcatct

SEQ ID NO: 16390 - DNA, 22 bp, Artificial Sequence
  chemically synthesized
ttcatacagcatacatcatcta

SEQ ID NO: 16391 - DNA, 22 bp, Artificial Sequence
  chemically synthesized
tcatacagcatacatcatctat

SEQ ID NO: 16392 - DNA, 22 bp, Artificial Sequence
  chemically synthesized
catacagcatacatcatctatc

SEQ ID NO: 16393 - DNA, 22 bp, Artificial Sequence
  chemically synthesized
atacagcatacatcatctatct

SEQ ID NO: 16394 - DNA, 22 bp, Artificial Sequence
  chemically synthesized
tcttttttttttttttgagaca

SEQ ID NO: 16395 - DNA, 22 bp, Artificial Sequence
  chemically synthesized
ttttttttttttgagacagggt

SEQ ID NO: 16396 - DNA, 22 bp, Artificial Sequence
  chemically synthesized
tttttttttttgagacagggtc

SEQ ID NO: 16397 - DNA, 22 bp, Artificial Sequence
  chemically synthesized
ttttttttttgagacagggtct

SEQ ID NO: 16398 - DNA, 22 bp, Artificial Sequence
  chemically synthesized
tttttttttgagacagggtctt

SEQ ID NO: 16399 - DNA, 22 bp, Artificial Sequence
  chemically synthesized
ttttttttgagacagggtctta

SEQ ID NO: 16400 - DNA, 22 bp, Artificial Sequence
  chemically synthesized
tttttttgagacagggtcttac

SEQ ID NO: 16401 - DNA, 22 bp, Artificial Sequence
  chemically synthesized
ttttttgagacagggtcttact

SEQ ID NO: 16402 - DNA, 22 bp, Artificial Sequence
  chemically synthesized
tttttgagacagggtcttactc

SEQ ID NO: 16403 - DNA, 22 bp, Artificial Sequence
  chemically synthesized
ttttgagacagggtcttactct

SEQ ID NO: 16404 - DNA, 22 bp, Artificial Sequence
  chemically synthesized
tttgagacagggtcttactctg

SEQ ID NO: 16405 - DNA, 22 bp, Artificial Sequence
  chemically synthesized
ttgagacagggtcttactctgt

SEQ ID NO: 16406 - DNA, 22 bp, Artificial Sequence
  chemically synthesized
tgagacagggtcttactctgtt

SEQ ID NO: 16407 - DNA, 22 bp, Artificial Sequence
  chemically synthesized
gagacagggtcttactctgttg

SEQ ID NO: 16408 - DNA, 22 bp, Artificial Sequence
  chemically synthesized
agacagggtcttactctgttgc

SEQ ID NO: 16409 - DNA, 22 bp, Artificial Sequence
  chemically synthesized
actctgttgcccaggctggagt

SEQ ID NO: 16410 - DNA, 22 bp, Artificial Sequence
  chemically synthesized
ctctgttgcccaggctggagtg

SEQ ID NO: 16411 - DNA, 22 bp, Artificial Sequence
  chemically synthesized
tgttgcccaggctggagtgcag

SEQ ID NO: 16412 - DNA, 22 bp, Artificial Sequence
  chemically synthesized
ttgcccaggctggagtgcagtg

SEQ ID NO: 16413 - DNA, 22 bp, Artificial Sequence
  chemically synthesized
cccaggctggagtgcagtggca

SEQ ID NO: 16414 - DNA, 22 bp, Artificial Sequence
  chemically synthesized
gagtgcagtggcatgatcttga

SEQ ID NO: 16415 - DNA, 22 bp, Artificial Sequence
  chemically synthesized
gactcactgcaacctcctccgc

SEQ ID NO: 16416 - DNA, 22 bp, Artificial Sequence
  chemically synthesized
actcactgcaacctcctccgcc

SEQ ID NO: 16417 - DNA, 22 bp, Artificial Sequence
  chemically synthesized
actgcaacctcctccgcctctc

SEQ ID NO: 16418 - DNA, 22 bp, Artificial Sequence
  chemically synthesized
caacctcctccgcctctcacct

SEQ ID NO: 16419 - DNA, 22 bp, Artificial Sequence
  chemically synthesized
ctccgcctctcacctcagcctc

SEQ ID NO: 16420 - DNA, 22 bp, Artificial Sequence
  chemically synthesized
cgcctctcacctcagcctcctg

SEQ ID NO: 16421 - DNA, 22 bp, Artificial Sequence
  chemically synthesized
tcacctcagcctcctgagtagc

SEQ ID NO: 16422 - DNA, 22 bp, Artificial Sequence
  chemically synthesized
acctcagcctcctgagtagctg

SEQ ID NO: 16423 - DNA, 22 bp, Artificial Sequence
  chemically synthesized
agcctcctgagtagctgggact

SEQ ID NO: 16424 - DNA, 22 bp, Artificial Sequence
  chemically synthesized
ctgagtagctgggactacagca

SEQ ID NO: 16425 - DNA, 22 bp, Artificial Sequence
  chemically synthesized
agtagctgggactacagcacca

SEQ ID NO: 16426 - DNA, 22 bp, Artificial Sequence
  chemically synthesized
ggactacagcaccaacacgccc

SEQ ID NO: 16427 - DNA, 22 bp, Artificial Sequence
  chemically synthesized
cagcaccaacacgcccagctaa

SEQ ID NO: 16428 - DNA, 22 bp, Artificial Sequence
  chemically synthesized
attttcgtaatgtttttgtaga

SEQ ID NO: 16429 - DNA, 22 bp, Artificial Sequence
  chemically synthesized
tcgtaatgtttttgtagagatg

SEQ ID NO: 16430 - DNA, 22 bp, Artificial Sequence
  chemically synthesized
cgtaatgtttttgtagagatgg

SEQ ID NO: 16431 - DNA, 22 bp, Artificial Sequence
  chemically synthesized
gtaatgtttttgtagagatgga

SEQ ID NO: 16432 - DNA, 22 bp, Artificial Sequence
  chemically synthesized
ttgtagagatggagtttcgcca

SEQ ID NO: 16433 - DNA, 22 bp, Artificial Sequence
  chemically synthesized
tgtagagatggagtttcgccat

SEQ ID NO: 16434 - DNA, 22 bp, Artificial Sequence
  chemically synthesized
gtagagatggagtttcgccatg

SEQ ID NO: 16435 - DNA, 22 bp, Artificial Sequence
  chemically synthesized
tagagatggagtttcgccatgt

SEQ ID NO: 16436 - DNA, 22 bp, Artificial Sequence
  chemically synthesized
cgccatgttgcccaggctggtc

SEQ ID NO: 16437 - DNA, 22 bp, Artificial Sequence
  chemically synthesized
gccatgttgcccaggctggtct

SEQ ID NO: 16438 - DNA, 22 bp, Artificial Sequence
  chemically synthesized
cccaggctggtcttgaactcct

SEQ ID NO: 16439 - DNA, 22 bp, Artificial Sequence
  chemically synthesized
gtcttgaactcctgagttcacc

SEQ ID NO: 16440 - DNA, 22 bp, Artificial Sequence
  chemically synthesized
gaactcctgagttcacccagga

SEQ ID NO: 16441 - DNA, 22 bp, Artificial Sequence
  chemically synthesized
aactcctgagttcacccaggag

SEQ ID NO: 16442 - DNA, 22 bp, Artificial Sequence
  chemically synthesized
ctgagttcacccaggagtgatt

SEQ ID NO: 16443 - DNA, 22 bp, Artificial Sequence
  chemically synthesized
agttcacccaggagtgattcgc

SEQ ID NO: 16444 - DNA, 22 bp, Artificial Sequence
  chemically synthesized
acccaggagtgattcgcccacc

SEQ ID NO: 16445 - DNA, 22 bp, Artificial Sequence
  chemically synthesized
gcccacctcggcctcccaaagt

SEQ ID NO: 16446 - DNA, 22 bp, Artificial Sequence
  chemically synthesized
ggcctcccaaagtgctgggatt

SEQ ID NO: 16447 - DNA, 22 bp, Artificial Sequence
  chemically synthesized
ccaaagtgctgggattacaggt

SEQ ID NO: 16448 - DNA, 22 bp, Artificial Sequence
  chemically synthesized
ggattacaggtgtgagccacca

SEQ ID NO: 16449 - DNA, 22 bp, Artificial Sequence
  chemically synthesized
caggtgtgagccaccatgcctg

SEQ ID NO: 16450 - DNA, 22 bp, Artificial Sequence
  chemically synthesized
gccccatacatctttctttatg

SEQ ID NO: 16451 - DNA, 22 bp, Artificial Sequence
  chemically synthesized
tctttatgttacctcttctgct

SEQ ID NO: 16452 - DNA, 22 bp, Artificial Sequence
  chemically synthesized
ctttatgttacctcttctgctt

SEQ ID NO: 16453 - DNA, 22 bp, Artificial Sequence
  chemically synthesized
tttatgttacctcttctgcttc

SEQ ID NO: 16454 - DNA, 22 bp, Artificial Sequence
  chemically synthesized
tatgttacctcttctgcttcat

SEQ ID NO: 16455 - DNA, 22 bp, Artificial Sequence
  chemically synthesized
atgttacctcttctgcttcata

SEQ ID NO: 16456 - DNA, 22 bp, Artificial Sequence
  chemically synthesized
tgttacctcttctgcttcatac

SEQ ID NO: 16457 - DNA, 22 bp, Artificial Sequence
  chemically synthesized
cctcttctgcttcatactaata

SEQ ID NO: 16458 - DNA, 22 bp, Artificial Sequence
  chemically synthesized
ttctgcttcatactaataaaac

SEQ ID NO: 16459 - DNA, 22 bp, Artificial Sequence
  chemically synthesized
ctgcttcatactaataaaactc

SEQ ID NO: 16460 - DNA, 22 bp, Artificial Sequence
  chemically synthesized
tgcttcatactaataaaactct

SEQ ID NO: 16461 - DNA, 22 bp, Artificial Sequence
  chemically synthesized
cttcatactaataaaactcttt

SEQ ID NO: 16462 - DNA, 22 bp, Artificial Sequence
  chemically synthesized
catactaataaaactctttgct

SEQ ID NO: 16463 - DNA, 22 bp, Artificial Sequence
  chemically synthesized
atactaataaaactctttgctc

SEQ ID NO: 16464 - DNA, 22 bp, Artificial Sequence
  chemically synthesized
ataaaactctttgctcaaagcc

SEQ ID NO: 16465 - DNA, 22 bp, Artificial Sequence
  chemically synthesized
tttgctcaaagcctatataact

SEQ ID NO: 16466 - DNA, 22 bp, Artificial Sequence
  chemically synthesized
tgctcaaagcctatataactca

SEQ ID NO: 16467 - DNA, 22 bp, Artificial Sequence
  chemically synthesized
gctcaaagcctatataactcag

SEQ ID NO: 16468 - DNA, 22 bp, Artificial Sequence
  chemically synthesized
ctcaaagcctatataactcaga

SEQ ID NO: 16469 - DNA, 22 bp, Artificial Sequence
  chemically synthesized
aaagcctatataactcagactt

SEQ ID NO: 16470 - DNA, 22 bp, Artificial Sequence
  chemically synthesized
tataactcagacttttcacgaa

SEQ ID NO: 16471 - DNA, 22 bp, Artificial Sequence
  chemically synthesized
agacttttcacgaaattcaact

SEQ ID NO: 16472 - DNA, 22 bp, Artificial Sequence
  chemically synthesized
ttcacgaaattcaactgtccta

SEQ ID NO: 16473 - DNA, 22 bp, Artificial Sequence
  chemically synthesized
tcacgaaattcaactgtcctac

SEQ ID NO: 16474 - DNA, 22 bp, Artificial Sequence
  chemically synthesized
cacgaaattcaactgtcctacc

SEQ ID NO: 16475 - DNA, 22 bp, Artificial Sequence
  chemically synthesized
acgaaattcaactgtcctaccc

SEQ ID NO: 16476 - DNA, 22 bp, Artificial Sequence
  chemically synthesized
aactgtcctaccctttaaccca

SEQ ID NO: 16477 - DNA, 22 bp, Artificial Sequence
  chemically synthesized
tcctaccctttaacccatatga

SEQ ID NO: 16478 - DNA, 22 bp, Artificial Sequence
  chemically synthesized
ccctttaacccatatgaaatag

SEQ ID NO: 16479 - DNA, 22 bp, Artificial Sequence
  chemically synthesized
taacccatatgaaataggcttt

SEQ ID NO: 16480 - DNA, 22 bp, Artificial Sequence
  chemically synthesized
aacccatatgaaataggctttc

SEQ ID NO: 16481 - DNA, 22 bp, Artificial Sequence
  chemically synthesized
acccatatgaaataggctttcc

SEQ ID NO: 16482 - DNA, 22 bp, Artificial Sequence
  chemically synthesized
tcctgtattttcaactcactgg

SEQ ID NO: 16483 - DNA, 22 bp, Artificial Sequence
  chemically synthesized
cctgtattttcaactcactggt

SEQ ID NO: 16484 - DNA, 22 bp, Artificial Sequence
  chemically synthesized
ctgtattttcaactcactggta

SEQ ID NO: 16485 - DNA, 22 bp, Artificial Sequence
  chemically synthesized
tattttcaactcactggtagga

SEQ ID NO: 16486 - DNA, 22 bp, Artificial Sequence
  chemically synthesized
tcaactcactggtaggattttt

SEQ ID NO: 16487 - DNA, 22 bp, Artificial Sequence
  chemically synthesized
caactcactggtaggatttttt

SEQ ID NO: 16488 - DNA, 22 bp, Artificial Sequence
  chemically synthesized
aactcactggtaggattttttc

SEQ ID NO: 16489 - DNA, 22 bp, Artificial Sequence
  chemically synthesized
actggtaggattttttctgtct

SEQ ID NO: 16490 - DNA, 22 bp, Artificial Sequence
  chemically synthesized
gtaggattttttctgtcttccc

SEQ ID NO: 16491 - DNA, 22 bp, Artificial Sequence
  chemically synthesized
tttctgtcttccccctttatgt

SEQ ID NO: 16492 - DNA, 22 bp, Artificial Sequence
  chemically synthesized
ttctgtcttccccctttatgta

SEQ ID NO: 16493 - DNA, 22 bp, Artificial Sequence
  chemically synthesized
tctgtcttccccctttatgtag

SEQ ID NO: 16494 - DNA, 22 bp, Artificial Sequence
  chemically synthesized
ctgtcttccccctttatgtaga

SEQ ID NO: 16495 - DNA, 22 bp, Artificial Sequence
  chemically synthesized
tgtcttccccctttatgtagat

SEQ ID NO: 16496 - DNA, 22 bp, Artificial Sequence
  chemically synthesized
tcttccccctttatgtagatga

SEQ ID NO: 16497 - DNA, 22 bp, Artificial Sequence
  chemically synthesized
ccccctttatgtagatgatcca

SEQ ID NO: 16498 - DNA, 22 bp, Artificial Sequence
  chemically synthesized
cccctttatgtagatgatccaa

SEQ ID NO: 16499 - DNA, 22 bp, Artificial Sequence
  chemically synthesized
tatgtagatgatccaaagtcag

SEQ ID NO: 16500 - DNA, 22 bp, Artificial Sequence
  chemically synthesized
atgtagatgatccaaagtcaga

SEQ ID NO: 16501 - DNA, 22 bp, Artificial Sequence
  chemically synthesized
tgtagatgatccaaagtcagag

SEQ ID NO: 16502 - DNA, 22 bp, Artificial Sequence
  chemically synthesized
gaagcatgagtagcccgtggct

SEQ ID NO: 16503 - DNA, 22 bp, Artificial Sequence
  chemically synthesized
cctgaatagcctggggaaagca

SEQ ID NO: 16504 - DNA, 22 bp, Artificial Sequence
  chemically synthesized
ctgaatagcctggggaaagcaa

SEQ ID NO: 16505 - DNA, 22 bp, Artificial Sequence
  chemically synthesized
aatagcctggggaaagcaactt

SEQ ID NO: 16506 - DNA, 22 bp, Artificial Sequence
  chemically synthesized
gggaaagcaacttctgatggac

SEQ ID NO: 16507 - DNA, 22 bp, Artificial Sequence
  chemically synthesized
ctgatggacagacattgcgaga

SEQ ID NO: 16508 - DNA, 22 bp, Artificial Sequence
  chemically synthesized
tgatggacagacattgcgagag

SEQ ID NO: 16509 - DNA, 22 bp, Artificial Sequence
  chemically synthesized
atggacagacattgcgagagcg

SEQ ID NO: 16510 - DNA, 22 bp, Artificial Sequence
  chemically synthesized
cgagagcgaatgccagcctctt

SEQ ID NO: 16511 - DNA, 22 bp, Artificial Sequence
  chemically synthesized
ttttcttgctgatctcctctct

SEQ ID NO: 16512 - DNA, 22 bp, Artificial Sequence
  chemically synthesized
ttcttgctgatctcctctctat

SEQ ID NO: 16513 - DNA, 22 bp, Artificial Sequence
  chemically synthesized
tcttgctgatctcctctctata

SEQ ID NO: 16514 - DNA, 22 bp, Artificial Sequence
  chemically synthesized
cttgctgatctcctctctatat

SEQ ID NO: 16515 - DNA, 22 bp, Artificial Sequence
  chemically synthesized
ttgctgatctcctctctatatg

SEQ ID NO: 16516 - DNA, 22 bp, Artificial Sequence
  chemically synthesized
gctgatctcctctctatatggt

SEQ ID NO: 16517 - DNA, 22 bp, Artificial Sequence
  chemically synthesized
ctgatctcctctctatatggtt

SEQ ID NO: 16518 - DNA, 22 bp, Artificial Sequence
  chemically synthesized
atctcctctctatatggttctt

SEQ ID NO: 16519 - DNA, 22 bp, Artificial Sequence
  chemically synthesized
ctctctatatggttcttaccac

SEQ ID NO: 16520 - DNA, 22 bp, Artificial Sequence
  chemically synthesized
tctatatggttcttaccactta

SEQ ID NO: 16521 - DNA, 22 bp, Artificial Sequence
  chemically synthesized
tatatggttcttaccacttaaa

SEQ ID NO: 16522 - DNA, 22 bp, Artificial Sequence
  chemically synthesized
tatggttcttaccacttaaaga

SEQ ID NO: 16523 - DNA, 22 bp, Artificial Sequence
  chemically synthesized
ttaccacttaaagacgaggttg

SEQ ID NO: 16524 - DNA, 22 bp, Artificial Sequence
  chemically synthesized
accacttaaagacgaggttgag

SEQ ID NO: 16525 - DNA, 22 bp, Artificial Sequence
  chemically synthesized
ccacttaaagacgaggttgagc

SEQ ID NO: 16526 - DNA, 22 bp, Artificial Sequence
  chemically synthesized
aaagacgaggttgagccagtct

SEQ ID NO: 16527 - DNA, 22 bp, Artificial Sequence
  chemically synthesized
aagacgaggttgagccagtctc

SEQ ID NO: 16528 - DNA, 22 bp, Artificial Sequence
  chemically synthesized
agccagtctccaatcacagcta

SEQ ID NO: 16529 - DNA, 22 bp, Artificial Sequence
  chemically synthesized
caatcacagctacccaaaggag

SEQ ID NO: 16530 - DNA, 22 bp, Artificial Sequence
  chemically synthesized
cccaaaggagtttaatgcccac

SEQ ID NO: 16531 - DNA, 22 bp, Artificial Sequence
  chemically synthesized
aatgcccacagcttcctgaaga

SEQ ID NO: 16532 - DNA, 22 bp, Artificial Sequence
  chemically synthesized
atgcccacagcttcctgaagat

SEQ ID NO: 16533 - DNA, 22 bp, Artificial Sequence
  chemically synthesized
cctgaagatggaaccagatggg

SEQ ID NO: 16534 - DNA, 22 bp, Artificial Sequence
  chemically synthesized
ctgaagatggaaccagatgggg

SEQ ID NO: 16535 - DNA, 22 bp, Artificial Sequence
  chemically synthesized
aagatggaaccagatggggaag

SEQ ID NO: 16536 - DNA, 22 bp, Artificial Sequence
  chemically synthesized
ctgaggtctgcgatcacggaca

SEQ ID NO: 16537 - DNA, 22 bp, Artificial Sequence
  chemically synthesized
aggtctgcgatcacggacacca

SEQ ID NO: 16538 - DNA, 22 bp, Artificial Sequence
  chemically synthesized
cgatcacggacaccaagatgaa

SEQ ID NO: 16539 - DNA, 22 bp, Artificial Sequence
  chemically synthesized
ggagtcttggtaattcacctgg

SEQ ID NO: 16540 - DNA, 22 bp, Artificial Sequence
  chemically synthesized
ggtaattcacctggaggtaatg

SEQ ID NO: 16541 - DNA, 22 bp, Artificial Sequence
  chemically synthesized
gtaattcacctggaggtaatgt

SEQ ID NO: 16542 - DNA, 22 bp, Artificial Sequence
  chemically synthesized
acctggaggtaatgtgttgact

SEQ ID NO: 16543 - DNA, 22 bp, Artificial Sequence
  chemically synthesized
gaggtaatgtgttgactggatc

SEQ ID NO: 16544 - DNA, 22 bp, Artificial Sequence
  chemically synthesized
actggatcccaaagtcatggag

SEQ ID NO: 16545 - DNA, 22 bp, Artificial Sequence
  chemically synthesized
gatcccaaagtcatggagaaca

SEQ ID NO: 16546 - DNA, 22 bp, Artificial Sequence
  chemically synthesized
attccttcctccatcctcattt

SEQ ID NO: 16547 - DNA, 22 bp, Artificial Sequence
  chemically synthesized
cttcctccatcctcatttcctt

SEQ ID NO: 16548 - DNA, 22 bp, Artificial Sequence
  chemically synthesized
cctccatcctcatttccttggc

SEQ ID NO: 16549 - DNA, 22 bp, Artificial Sequence
  chemically synthesized
ctccatcctcatttccttggca

SEQ ID NO: 16550 - DNA, 22 bp, Artificial Sequence
  chemically synthesized
catcctcatttccttggcacct

SEQ ID NO: 16551 - DNA, 22 bp, Artificial Sequence
  chemically synthesized
atttccttggcacctcaggaag

SEQ ID NO: 16552 - DNA, 22 bp, Artificial Sequence
  chemically synthesized
ccttggcacctcaggaagatgt

SEQ ID NO: 16553 - DNA, 22 bp, Artificial Sequence
  chemically synthesized
cttggcacctcaggaagatgtc

SEQ ID NO: 16554 - DNA, 22 bp, Artificial Sequence
  chemically synthesized
ggcacctcaggaagatgtcagc

SEQ ID NO: 16555 - DNA, 22 bp, Artificial Sequence
  chemically synthesized
gcacctcaggaagatgtcagca

SEQ ID NO: 16556 - DNA, 22 bp, Artificial Sequence
  chemically synthesized
aggaagatgtcagcagagccct

SEQ ID NO: 16557 - DNA, 22 bp, Artificial Sequence
  chemically synthesized
gcagttattccaggcttggtgg

SEQ ID NO: 16558 - DNA, 22 bp, Artificial Sequence
  chemically synthesized
cagttattccaggcttggtggt

SEQ ID NO: 16559 - DNA, 22 bp, Artificial Sequence
  chemically synthesized
ttccaggcttggtggtgattgc

SEQ ID NO: 16560 - DNA, 22 bp, Artificial Sequence
  chemically synthesized
caggcttggtggtgattgctct

SEQ ID NO: 16561 - DNA, 22 bp, Artificial Sequence
  chemically synthesized
ggtggtgattgctctgctatga

SEQ ID NO: 16562 - DNA, 22 bp, Artificial Sequence
  chemically synthesized
gtggtgattgctctgctatgag

SEQ ID NO: 16563 - DNA, 22 bp, Artificial Sequence
  chemically synthesized
ctctgctatgagtctgtgcctt

SEQ ID NO: 16564 - DNA, 22 bp, Artificial Sequence
  chemically synthesized
tgctatgagtctgtgccttgcc

SEQ ID NO: 16565 - DNA, 22 bp, Artificial Sequence
  chemically synthesized
ctatgagtctgtgccttgcccc

SEQ ID NO: 16566 - DNA, 22 bp, Artificial Sequence
  chemically synthesized
tgagtctgtgccttgcccctgt

SEQ ID NO: 16567 - DNA, 22 bp, Artificial Sequence
  chemically synthesized
tgccttgcccctgttttatatg

SEQ ID NO: 16568 - DNA, 22 bp, Artificial Sequence
  chemically synthesized
gcccctgttttatatgccctgt

SEQ ID NO: 16569 - DNA, 22 bp, Artificial Sequence
  chemically synthesized
cccctgttttatatgccctgta

SEQ ID NO: 16570 - DNA, 22 bp, Artificial Sequence
  chemically synthesized
ttttatatgccctgtatccagt

SEQ ID NO: 16571 - DNA, 22 bp, Artificial Sequence
  chemically synthesized
tatatgccctgtatccagtatt

SEQ ID NO: 16572 - DNA, 22 bp, Artificial Sequence
  chemically synthesized
atatgccctgtatccagtattc

SEQ ID NO: 16573 - DNA, 22 bp, Artificial Sequence
  chemically synthesized
tatgccctgtatccagtattca

SEQ ID NO: 16574 - DNA, 22 bp, Artificial Sequence
  chemically synthesized
tatccagtattcaggtcaaccc

SEQ ID NO: 16575 - DNA, 22 bp, Artificial Sequence
  chemically synthesized
aggtcaacccagccctgatctt

SEQ ID NO: 16576 - DNA, 22 bp, Artificial Sequence
  chemically synthesized
atctttggactcaaaaaccacg

SEQ ID NO: 16577 - DNA, 22 bp, Artificial Sequence
  chemically synthesized
tggactcaaaaaccacgtttgt

SEQ ID NO: 16578 - DNA, 22 bp, Artificial Sequence
  chemically synthesized
ggactcaaaaaccacgtttgtc

SEQ ID NO: 16579 - DNA, 22 bp, Artificial Sequence
  chemically synthesized
gactcaaaaaccacgtttgtct

SEQ ID NO: 16580 - DNA, 22 bp, Artificial Sequence
  chemically synthesized
aaaaaccacgtttgtctaaaat

SEQ ID NO: 16581 - DNA, 20 bp, Artificial Sequence
  chemically synthesized
tgcgtccactgctcttctga

SEQ ID NO: 16582 - DNA, 20 bp, Artificial Sequence
  chemically synthesized
tcttctgacagcatcattta

SEQ ID NO: 16583 - DNA, 20 bp, Artificial Sequence
  chemically synthesized
cttctgacagcatcatttac

SEQ ID NO: 16584 - DNA, 20 bp, Artificial Sequence
  chemically synthesized
aggttcacactgttccacct

SEQ ID NO: 16585 - DNA, 20 bp, Artificial Sequence
  chemically synthesized
ttcatattatgctcaaaata

SEQ ID NO: 16586 - DNA, 20 bp, Artificial Sequence
  chemically synthesized
tgctcaaaatatggacctat

SEQ ID NO: 16587 - DNA, 20 bp, Artificial Sequence
  chemically synthesized
aatatggacctatcagaaaa

SEQ ID NO: 16588 - DNA, 20 bp, Artificial Sequence
  chemically synthesized
ccattcatctgctgttgttt

SEQ ID NO: 16589 - DNA, 20 bp, Artificial Sequence
  chemically synthesized
tttggcctttgtctgaatca

SEQ ID NO: 16590 - DNA, 20 bp, Artificial Sequence
  chemically synthesized
cctttgtctgaatcacagta

SEQ ID NO: 16591 - DNA, 20 bp, Artificial Sequence
  chemically synthesized
tagatgcctccaactgttaa

SEQ ID NO: 16592 - DNA, 20 bp, Artificial Sequence
  chemically synthesized
agatgcctccaactgttaaa

SEQ ID NO: 16593 - DNA, 20 bp, Artificial Sequence
  chemically synthesized
tccaactgttaaaaggaaaa

SEQ ID NO: 16594 - DNA, 20 bp, Artificial Sequence
  chemically synthesized
aaaaagtttctattatcatt

SEQ ID NO: 16595 - DNA, 20 bp, Artificial Sequence
  chemically synthesized
aaaagtttctattatcattc

SEQ ID NO: 16596 - DNA, 20 bp, Artificial Sequence
  chemically synthesized
gtttctattatcattcaggt

SEQ ID NO: 16597 - DNA, 20 bp, Artificial Sequence
  chemically synthesized
tcaggttagcaatttgttta

SEQ ID NO: 16598 - DNA, 20 bp, Artificial Sequence
  chemically synthesized
agcaatttgtttaaagtaat

SEQ ID NO: 16599 - DNA, 20 bp, Artificial Sequence
  chemically synthesized
gcaatttgtttaaagtaata

SEQ ID NO: 16600 - DNA, 20 bp, Artificial Sequence
  chemically synthesized
caatttgtttaaagtaataa

SEQ ID NO: 16601 - DNA, 20 bp, Artificial Sequence
  chemically synthesized
ttgtttaaagtaataaggga

SEQ ID NO: 16602 - DNA, 20 bp, Artificial Sequence
  chemically synthesized
aagtaataagggatggaaat

SEQ ID NO: 16603 - DNA, 20 bp, Artificial Sequence
  chemically synthesized
ataagggatggaaatgagtt

SEQ ID NO: 16604 - DNA, 20 bp, Artificial Sequence
  chemically synthesized
atgagttcagatttttaaat

SEQ ID NO: 16605 - DNA, 20 bp, Artificial Sequence
  chemically synthesized
cagatttttaaattagcatt

SEQ ID NO: 16606 - DNA, 20 bp, Artificial Sequence
  chemically synthesized
agatttttaaattagcattt

SEQ ID NO: 16607 - DNA, 20 bp, Artificial Sequence
  chemically synthesized
attagcatttaggatccact

SEQ ID NO: 16608 - DNA, 20 bp, Artificial Sequence
  chemically synthesized
atttaggatccactaagccc

SEQ ID NO: 16609 - DNA, 20 bp, Artificial Sequence
  chemically synthesized
tttaggatccactaagccca

SEQ ID NO: 16610 - DNA, 20 bp, Artificial Sequence
  chemically synthesized
tatttacctttcaaaaataa

SEQ ID NO: 16611 - DNA, 20 bp, Artificial Sequence
  chemically synthesized
atagtatttgacatattgtt

SEQ ID NO: 16612 - DNA, 20 bp, Artificial Sequence
  chemically synthesized
tagtatttgacatattgtta

SEQ ID NO: 16613 - DNA, 20 bp, Artificial Sequence
  chemically synthesized
agtatttgacatattgttaa

SEQ ID NO: 16614 - DNA, 20 bp, Artificial Sequence
  chemically synthesized
tgttaagggacaccaacgaa

SEQ ID NO: 16615 - DNA, 20 bp, Artificial Sequence
  chemically synthesized
tcaattctgtgcatgtttta

SEQ ID NO: 16616 - DNA, 20 bp, Artificial Sequence
  chemically synthesized
gcatgttttaaagtcccttc

SEQ ID NO: 16617 - DNA, 20 bp, Artificial Sequence
  chemically synthesized
catgttttaaagtcccttct

SEQ ID NO: 16618 - DNA, 20 bp, Artificial Sequence
  chemically synthesized
ccttctaggtgcatgtgaaa

SEQ ID NO: 16619 - DNA, 20 bp, Artificial Sequence
  chemically synthesized
tctaggtgcatgtgaaatag

SEQ ID NO: 16620 - DNA, 20 bp, Artificial Sequence
  chemically synthesized
aggtgcatgtgaaatagcag

SEQ ID NO: 16621 - DNA, 20 bp, Artificial Sequence
  chemically synthesized
ggtgcatgtgaaatagcagc

SEQ ID NO: 16622 - DNA, 20 bp, Artificial Sequence
  chemically synthesized
agcagcaggctgatgccgca

SEQ ID NO: 16623 - DNA, 20 bp, Artificial Sequence
  chemically synthesized
cagcaggctgatgccgcaaa

SEQ ID NO: 16624 - DNA, 20 bp, Artificial Sequence
  chemically synthesized
agcaggctgatgccgcaaag

SEQ ID NO: 16625 - DNA, 20 bp, Artificial Sequence
  chemically synthesized
aagaggtcaaatacctcaaa

SEQ ID NO: 16626 - DNA, 20 bp, Artificial Sequence
  chemically synthesized
ggtcaaatacctcaaaaaga

SEQ ID NO: 16627 - DNA, 20 bp, Artificial Sequence
  chemically synthesized
tcaaatacctcaaaaagaaa

SEQ ID NO: 16628 - DNA, 20 bp, Artificial Sequence
  chemically synthesized
tcaaaaagaaagagtctgaa

SEQ ID NO: 16629 - DNA, 20 bp, Artificial Sequence
  chemically synthesized
aaagagtctgaaaagacaat

SEQ ID NO: 16630 - DNA, 20 bp, Artificial Sequence
  chemically synthesized
agagtctgaaaagacaattg

SEQ ID NO: 16631 - DNA, 20 bp, Artificial Sequence
  chemically synthesized
ttggagtaactacttgccta

SEQ ID NO: 16632 - DNA, 20 bp, Artificial Sequence
  chemically synthesized
taactacttgcctaaagctc

SEQ ID NO: 16633 - DNA, 20 bp, Artificial Sequence
  chemically synthesized
ctaaagctccagtcactttg

SEQ ID NO: 16634 - DNA, 20 bp, Artificial Sequence
  chemically synthesized
ccagtcactttgtagtgtca

SEQ ID NO: 16635 - DNA, 20 bp, Artificial Sequence
  chemically synthesized
tcactttgtagtgtcaaagt

SEQ ID NO: 16636 - DNA, 20 bp, Artificial Sequence
  chemically synthesized
cactttgtagtgtcaaagtt

SEQ ID NO: 16637 - DNA, 20 bp, Artificial Sequence
  chemically synthesized
attgtcatcatacatgccct

SEQ ID NO: 16638 - DNA, 20 bp, Artificial Sequence
  chemically synthesized
gtcatcatacatgccctcag

SEQ ID NO: 16639 - DNA, 20 bp, Artificial Sequence
  chemically synthesized
atcatacatgccctcagcag

SEQ ID NO: 16640 - DNA, 20 bp, Artificial Sequence
  chemically synthesized
ctctcttcctccttctccta

SEQ ID NO: 16641 - DNA, 20 bp, Artificial Sequence
  chemically synthesized
tcttcctccttctcctacag

SEQ ID NO: 16642 - DNA, 20 bp, Artificial Sequence
  chemically synthesized
ctccttctcctacagtggtc

SEQ ID NO: 16643 - DNA, 20 bp, Artificial Sequence
  chemically synthesized
cttctcctacagtggtccag

SEQ ID NO: 16644 - DNA, 20 bp, Artificial Sequence
  chemically synthesized
ttctcctacagtggtccaga

SEQ ID NO: 16645 - DNA, 20 bp, Artificial Sequence
  chemically synthesized
tctcctacagtggtccagaa

SEQ ID NO: 16646 - DNA, 20 bp, Artificial Sequence
  chemically synthesized
ctcctacagtggtccagaag

SEQ ID NO: 16647 - DNA, 20 bp, Artificial Sequence
  chemically synthesized
acagtggtccagaaggggct

SEQ ID NO: 16648 - DNA, 20 bp, Artificial Sequence
  chemically synthesized
cagtggtccagaaggggctc

SEQ ID NO: 16649 - DNA, 20 bp, Artificial Sequence
  chemically synthesized
gctcaggtatgttcaaataa

SEQ ID NO: 16650 - DNA, 20 bp, Artificial Sequence
  chemically synthesized
tgttcaaataacagctgctg

SEQ ID NO: 16651 - DNA, 20 bp, Artificial Sequence
  chemically synthesized
tgctgtggttttcaattatg

SEQ ID NO: 16652 - DNA, 20 bp, Artificial Sequence
  chemically synthesized
caattatgaagaaatctcct

SEQ ID NO: 16653 - DNA, 20 bp, Artificial Sequence
  chemically synthesized
aagaaatctcctaagctaca

SEQ ID NO: 16654 - DNA, 20 bp, Artificial Sequence
  chemically synthesized
acatagtcatttatctttta

SEQ ID NO: 16655 - DNA, 20 bp, Artificial Sequence
  chemically synthesized
catttatcttttaaagcacc

SEQ ID NO: 16656 - DNA, 20 bp, Artificial Sequence
  chemically synthesized
atcttttaaagcaccaagca

SEQ ID NO: 16657 - DNA, 20 bp, Artificial Sequence
  chemically synthesized
caagcaaagtaccttttgat

SEQ ID NO: 16658 - DNA, 20 bp, Artificial Sequence
  chemically synthesized
aagcaaagtaccttttgata

SEQ ID NO: 16659 - DNA, 20 bp, Artificial Sequence
  chemically synthesized
gcaaagtaccttttgataag

SEQ ID NO: 16660 - DNA, 20 bp, Artificial Sequence
  chemically synthesized
tgataaggagaacgtgctta

SEQ ID NO: 16661 - DNA, 20 bp, Artificial Sequence
  chemically synthesized
aacgtgcttatagatgttca

SEQ ID NO: 16662 - DNA, 20 bp, Artificial Sequence
  chemically synthesized
gtgcttatagatgttcatag

SEQ ID NO: 16663 - DNA, 20 bp, Artificial Sequence
  chemically synthesized
agatgttcatagaagatgct

SEQ ID NO: 16664 - DNA, 20 bp, Artificial Sequence
  chemically synthesized
atacgtatttcattctcaca

SEQ ID NO: 16665 - DNA, 20 bp, Artificial Sequence
  chemically synthesized
acatggtatttctctcttcc

SEQ ID NO: 16666 - DNA, 20 bp, Artificial Sequence
  chemically synthesized
ggtatttctctcttcctagt

SEQ ID NO: 16667 - DNA, 20 bp, Artificial Sequence
  chemically synthesized
gtatttctctcttcctagta

SEQ ID NO: 16668 - DNA, 20 bp, Artificial Sequence
  chemically synthesized
tatttctctcttcctagtaa

SEQ ID NO: 16669 - DNA, 20 bp, Artificial Sequence
  chemically synthesized
tttctctcttcctagtaagg

SEQ ID NO: 16670 - DNA, 20 bp, Artificial Sequence
  chemically synthesized
ttctctcttcctagtaaggg

SEQ ID NO: 16671 - DNA, 20 bp, Artificial Sequence
  chemically synthesized
ctctcttcctagtaagggag

SEQ ID NO: 16672 - DNA, 20 bp, Artificial Sequence
  chemically synthesized
atgcccaatttctgcctcca

SEQ ID NO: 16673 - DNA, 20 bp, Artificial Sequence
  chemically synthesized
ccaatttctgcctccaaaga

SEQ ID NO: 16674 - DNA, 20 bp, Artificial Sequence
  chemically synthesized
atttctgcctccaaagaaag

SEQ ID NO: 16675 - DNA, 20 bp, Artificial Sequence
  chemically synthesized
tctgcctccaaagaaagaag

SEQ ID NO: 16676 - DNA, 20 bp, Artificial Sequence
  chemically synthesized
aaagaagaagtaaaaactaa

SEQ ID NO: 16677 - DNA, 20 bp, Artificial Sequence
  chemically synthesized
aagaagaagtaaaaactaaa

SEQ ID NO: 16678 - DNA, 20 bp, Artificial Sequence
  chemically synthesized
aagaagtaaaaactaaaagg

SEQ ID NO: 16679 - DNA, 20 bp, Artificial Sequence
  chemically synthesized
aaaggcagaaatgaaatcca

SEQ ID NO: 16680 - DNA, 20 bp, Artificial Sequence
  chemically synthesized
aaggcagaaatgaaatccac

SEQ ID NO: 16681 - DNA, 20 bp, Artificial Sequence
  chemically synthesized
aaatgaaatccacaggcaaa

SEQ ID NO: 16682 - DNA, 20 bp, Artificial Sequence
  chemically synthesized
aatccacaggcaaacagcct

SEQ ID NO: 16683 - DNA, 20 bp, Artificial Sequence
  chemically synthesized
aacagcctgagaccacatcc

SEQ ID NO: 16684 - DNA, 20 bp, Artificial Sequence
  chemically synthesized
acagcctgagaccacatcct

SEQ ID NO: 16685 - DNA, 20 bp, Artificial Sequence
  chemically synthesized
ctgagaccacatcctgggcc

SEQ ID NO: 16686 - DNA, 20 bp, Artificial Sequence
  chemically synthesized
ccacatcctgggcctggtta

SEQ ID NO: 16687 - DNA, 20 bp, Artificial Sequence
  chemically synthesized
atcctgggcctggttaaaga

SEQ ID NO: 16688 - DNA, 20 bp, Artificial Sequence
  chemically synthesized
ttaaagatagacccctgacc

SEQ ID NO: 16689 - DNA, 20 bp, Artificial Sequence
  chemically synthesized
agatagacccctgacctggc

SEQ ID NO: 16690 - DNA, 20 bp, Artificial Sequence
  chemically synthesized
ctggccagttatgttatcta

SEQ ID NO: 16691 - DNA, 20 bp, Artificial Sequence
  chemically synthesized
gttatgttatctatagattc

SEQ ID NO: 16692 - DNA, 20 bp, Artificial Sequence
  chemically synthesized
tatagattccagacactgta

SEQ ID NO: 16693 - DNA, 20 bp, Artificial Sequence
  chemically synthesized
attccagacactgtatggaa

SEQ ID NO: 16694 - DNA, 20 bp, Artificial Sequence
  chemically synthesized
ccagacactgtatggaaaag

SEQ ID NO: 16695 - DNA, 20 bp, Artificial Sequence
  chemically synthesized
ttctgttccattctgatgac

SEQ ID NO: 16696 - DNA, 20 bp, Artificial Sequence
  chemically synthesized
attctgatgaccagtgcatg

SEQ ID NO: 16697 - DNA, 20 bp, Artificial Sequence
  chemically synthesized
tgaccagtgcatgcagcccc

SEQ ID NO: 16698 - DNA, 20 bp, Artificial Sequence
  chemically synthesized
cccccagtcatgtaccccct

SEQ ID NO: 16699 - DNA, 20 bp, Artificial Sequence
  chemically synthesized
cccagtcatgtaccccctta

SEQ ID NO: 16700 - DNA, 20 bp, Artificial Sequence
  chemically synthesized
atgtacccccttagagttgt

SEQ ID NO: 16701 - DNA, 20 bp, Artificial Sequence
  chemically synthesized
ttagagttgtaagcccttaa

SEQ ID NO: 16702 - DNA, 20 bp, Artificial Sequence
  chemically synthesized
tagagttgtaagcccttaaa

SEQ ID NO: 16703 - DNA, 20 bp, Artificial Sequence
  chemically synthesized
agagttgtaagcccttaaaa

SEQ ID NO: 16704 - DNA, 20 bp, Artificial Sequence
  chemically synthesized
ttgtaagcccttaaaaggga

SEQ ID NO: 16705 - DNA, 20 bp, Artificial Sequence
  chemically synthesized
tgtaagcccttaaaagggac

SEQ ID NO: 16706 - DNA, 20 bp, Artificial Sequence
  chemically synthesized
ggacaggaattgctcactct

SEQ ID NO: 16707 - DNA, 20 bp, Artificial Sequence
  chemically synthesized
acaggaattgctcactctga

SEQ ID NO: 16708 - DNA, 20 bp, Artificial Sequence
  chemically synthesized
aattgctcactctgagagct

SEQ ID NO: 16709 - DNA, 20 bp, Artificial Sequence
  chemically synthesized
cactctgagagcttggttgt

SEQ ID NO: 16710 - DNA, 20 bp, Artificial Sequence
  chemically synthesized
ctctgagagcttggttgttg

SEQ ID NO: 16711 - DNA, 20 bp, Artificial Sequence
  chemically synthesized
agcttggttgttggagatgt

SEQ ID NO: 16712 - DNA, 20 bp, Artificial Sequence
  chemically synthesized
tggagatgtgagtcttgccc

SEQ ID NO: 16713 - DNA, 20 bp, Artificial Sequence
  chemically synthesized
gtgagtcttgcccaagctcc

SEQ ID NO: 16714 - DNA, 20 bp, Artificial Sequence
  chemically synthesized
cccaagctcccagccgaata

SEQ ID NO: 16715 - DNA, 20 bp, Artificial Sequence
  chemically synthesized
aagcccttccttctttaact

SEQ ID NO: 16716 - DNA, 20 bp, Artificial Sequence
  chemically synthesized
ccttctttaactcggtgtct

SEQ ID NO: 16717 - DNA, 20 bp, Artificial Sequence
  chemically synthesized
cttctttaactcggtgtctg

SEQ ID NO: 16718 - DNA, 20 bp, Artificial Sequence
  chemically synthesized
ttctttaactcggtgtctga

SEQ ID NO: 16719 - DNA, 20 bp, Artificial Sequence
  chemically synthesized
tctttaactcggtgtctgag

SEQ ID NO: 16720 - DNA, 20 bp, Artificial Sequence
  chemically synthesized
tgtctgaggggttttgtatg

SEQ ID NO: 16721 - DNA, 20 bp, Artificial Sequence
  chemically synthesized
tgcagcttgtcctgctacac

SEQ ID NO: 16722 - DNA, 20 bp, Artificial Sequence
  chemically synthesized
gctacctctattaaaacaca

SEQ ID NO: 16723 - DNA, 20 bp, Artificial Sequence
  chemically synthesized
aaacacaaagccacaatata

SEQ ID NO: 16724 - DNA, 20 bp, Artificial Sequence
  chemically synthesized
ccacaatatatggatacatt

SEQ ID NO: 16725 - DNA, 20 bp, Artificial Sequence
  chemically synthesized
tttggaaaatatgcacactt

SEQ ID NO: 16726 - DNA, 20 bp, Artificial Sequence
  chemically synthesized
aaatatgcacactttggatc

SEQ ID NO: 16727 - DNA, 20 bp, Artificial Sequence
  chemically synthesized
atgcacactttggatccagc

SEQ ID NO: 16728 - DNA, 20 bp, Artificial Sequence
  chemically synthesized
ggatccagcaagtccacatc

SEQ ID NO: 16729 - DNA, 20 bp, Artificial Sequence
  chemically synthesized
ccacatctagaaaaccatcc

SEQ ID NO: 16730 - DNA, 20 bp, Artificial Sequence
  chemically synthesized
cacatctagaaaaccatcct

SEQ ID NO: 16731 - DNA, 20 bp, Artificial Sequence
  chemically synthesized
acatctagaaaaccatcctg

SEQ ID NO: 16732 - DNA, 20 bp, Artificial Sequence
  chemically synthesized
catctagaaaaccatcctgg

SEQ ID NO: 16733 - DNA, 20 bp, Artificial Sequence
  chemically synthesized
aaccatcctgggggaaaatt

SEQ ID NO: 16734 - DNA, 20 bp, Artificial Sequence
  chemically synthesized
accatcctgggggaaaatta

SEQ ID NO: 16735 - DNA, 20 bp, Artificial Sequence
  chemically synthesized
catcctgggggaaaattaag

SEQ ID NO: 16736 - DNA, 20 bp, Artificial Sequence
  chemically synthesized
tcctgggggaaaattaagga

SEQ ID NO: 16737 - DNA, 20 bp, Artificial Sequence
  chemically synthesized
aaaattaaggagagtatgaa

SEQ ID NO: 16738 - DNA, 20 bp, Artificial Sequence
  chemically synthesized
aaattaaggagagtatgaaa

SEQ ID NO: 16739 - DNA, 20 bp, Artificial Sequence
  chemically synthesized
tatgaaaaggatgtttacta

SEQ ID NO: 16740 - DNA, 20 bp, Artificial Sequence
  chemically synthesized
tgtttactaaagcattatga

SEQ ID NO: 16741 - DNA, 20 bp, Artificial Sequence
  chemically synthesized
gcattatgatggcaaaaaat

SEQ ID NO: 16742 - DNA, 20 bp, Artificial Sequence
  chemically synthesized
agaaacaacttacactgaac

SEQ ID NO: 16743 - DNA, 20 bp, Artificial Sequence
  chemically synthesized
gaactagtcaacttacttaa

SEQ ID NO: 16744 - DNA, 20 bp, Artificial Sequence
  chemically synthesized
tagtcaacttacttaacaga

SEQ ID NO: 16745 - DNA, 20 bp, Artificial Sequence
  chemically synthesized
tcaacttacttaacagacag

SEQ ID NO: 16746 - DNA, 20 bp, Artificial Sequence
  chemically synthesized
caacttacttaacagacaga

SEQ ID NO: 16747 - DNA, 20 bp, Artificial Sequence
  chemically synthesized
taacagacagaaggctcaat

SEQ ID NO: 16748 - DNA, 20 bp, Artificial Sequence
  chemically synthesized
caattagctcatgtgtcaaa

SEQ ID NO: 16749 - DNA, 20 bp, Artificial Sequence
  chemically synthesized
aattagctcatgtgtcaaat

SEQ ID NO: 16750 - DNA, 20 bp, Artificial Sequence
  chemically synthesized
attagctcatgtgtcaaatg

SEQ ID NO: 16751 - DNA, 20 bp, Artificial Sequence
  chemically synthesized
ttagctcatgtgtcaaatgg

SEQ ID NO: 16752 - DNA, 20 bp, Artificial Sequence
  chemically synthesized
aatgggggtaaaataatatt

SEQ ID NO: 16753 - DNA, 20 bp, Artificial Sequence
  chemically synthesized
gggtaaaataatatttagtt

SEQ ID NO: 16754 - DNA, 20 bp, Artificial Sequence
  chemically synthesized
gtaaaataatatttagtttg

SEQ ID NO: 16755 - DNA, 20 bp, Artificial Sequence
  chemically synthesized
taaaataatatttagtttgg

SEQ ID NO: 16756 - DNA, 20 bp, Artificial Sequence
  chemically synthesized
aaaataatatttagtttgga

SEQ ID NO: 16757 - DNA, 20 bp, Artificial Sequence
  chemically synthesized
taatatttagtttggaggga

SEQ ID NO: 16758 - DNA, 20 bp, Artificial Sequence
  chemically synthesized
atttagtttggagggaaaga

SEQ ID NO: 16759 - DNA, 20 bp, Artificial Sequence
  chemically synthesized
tttagtttggagggaaagac

SEQ ID NO: 16760 - DNA, 20 bp, Artificial Sequence
  chemically synthesized
gagggaaagacaggctctaa

SEQ ID NO: 16761 - DNA, 20 bp, Artificial Sequence
  chemically synthesized
gggaaagacaggctctaaaa

SEQ ID NO: 16762 - DNA, 20 bp, Artificial Sequence
  chemically synthesized
ggaaagacaggctctaaaag

SEQ ID NO: 16763 - DNA, 20 bp, Artificial Sequence
  chemically synthesized
tctaaaagaggattaaaaat

SEQ ID NO: 16764 - DNA, 20 bp, Artificial Sequence
  chemically synthesized
agaggattaaaaattagatg

SEQ ID NO: 16765 - DNA, 20 bp, Artificial Sequence
  chemically synthesized
attaaaaattagatgtggcc

SEQ ID NO: 16766 - DNA, 20 bp, Artificial Sequence
  chemically synthesized
ttaaaaattagatgtggcct

SEQ ID NO: 16767 - DNA, 20 bp, Artificial Sequence
  chemically synthesized
aattagatgtggcctaggca

SEQ ID NO: 16768 - DNA, 20 bp, Artificial Sequence
  chemically synthesized
taggcaaagaatttatgacc

SEQ ID NO: 16769 - DNA, 20 bp, Artificial Sequence
  chemically synthesized
aaacacaacaaaaacaaaaa

SEQ ID NO: 16770 - DNA, 20 bp, Artificial Sequence
  chemically synthesized
caaaaacaaaaacagacaaa

SEQ ID NO: 16771 - DNA, 20 bp, Artificial Sequence
  chemically synthesized
aaaaacaaaaacagacaaat

SEQ ID NO: 16772 - DNA, 20 bp, Artificial Sequence
  chemically synthesized
aaaatgcttctgcaccgcaa

SEQ ID NO: 16773 - DNA, 20 bp, Artificial Sequence
  chemically synthesized
accgcaaaagaccgaatcaa

SEQ ID NO: 16774 - DNA, 20 bp, Artificial Sequence
  chemically synthesized
cgcaaaagaccgaatcaaca

SEQ ID NO: 16775 - DNA, 20 bp, Artificial Sequence
  chemically synthesized
gaccgaatcaacagagtaaa

SEQ ID NO: 16776 - DNA, 20 bp, Artificial Sequence
  chemically synthesized
cagagtaaacggataaccta

SEQ ID NO: 16777 - DNA, 20 bp, Artificial Sequence
  chemically synthesized
aaacggataacctacagaat

SEQ ID NO: 16778 - DNA, 20 bp, Artificial Sequence
  chemically synthesized
gcaaactatgaatgcaacaa

SEQ ID NO: 16779 - DNA, 20 bp, Artificial Sequence
  chemically synthesized
caaactatgaatgcaacaaa

SEQ ID NO: 16780 - DNA, 20 bp, Artificial Sequence
  chemically synthesized
tgcaacaaaaggctaatata

SEQ ID NO: 16781 - DNA, 20 bp, Artificial Sequence
  chemically synthesized
ggctaatatacagaatctac

SEQ ID NO: 16782 - DNA, 20 bp, Artificial Sequence
  chemically synthesized
gctaatatacagaatctaca

SEQ ID NO: 16783 - DNA, 20 bp, Artificial Sequence
  chemically synthesized
aacaaaaaaaccaacctcat

SEQ ID NO: 16784 - DNA, 20 bp, Artificial Sequence
  chemically synthesized
aaaaaaccaacctcattaga

SEQ ID NO: 16785 - DNA, 20 bp, Artificial Sequence
  chemically synthesized
tcattagaaagtgactgtga

SEQ ID NO: 16786 - DNA, 20 bp, Artificial Sequence
  chemically synthesized
tgactgtgatggttaatact

SEQ ID NO: 16787 - DNA, 20 bp, Artificial Sequence
  chemically synthesized
atactgagtgtcaacttgat

SEQ ID NO: 16788 - DNA, 20 bp, Artificial Sequence
  chemically synthesized
gtgtcaacttgattggactg

SEQ ID NO: 16789 - DNA, 20 bp, Artificial Sequence
  chemically synthesized
tgtcaacttgattggactga

SEQ ID NO: 16790 - DNA, 20 bp, Artificial Sequence
  chemically synthesized
tgattggactgaaggatgca

SEQ ID NO: 16791 - DNA, 20 bp, Artificial Sequence
  chemically synthesized
aggatgcaaagtaatgatct

SEQ ID NO: 16792 - DNA, 20 bp, Artificial Sequence
  chemically synthesized
ggatgcaaagtaatgatctt

SEQ ID NO: 16793 - DNA, 20 bp, Artificial Sequence
  chemically synthesized
atgatcttgggtgtgtctgt

SEQ ID NO: 16794 - DNA, 20 bp, Artificial Sequence
  chemically synthesized
tgatcttgggtgtgtctgtg

SEQ ID NO: 16795 - DNA, 20 bp, Artificial Sequence
  chemically synthesized
gatcttgggtgtgtctgtga

SEQ ID NO: 16796 - DNA, 20 bp, Artificial Sequence
  chemically synthesized
tgtctgtgagggtgttacca

SEQ ID NO: 16797 - DNA, 20 bp, Artificial Sequence
  chemically synthesized
gtctgtgagggtgttaccaa

SEQ ID NO: 16798 - DNA, 20 bp, Artificial Sequence
  chemically synthesized
ctgtgagggtgttaccaaag

SEQ ID NO: 16799 - DNA, 20 bp, Artificial Sequence
  chemically synthesized
accaaaggagattaatattt

SEQ ID NO: 16800 - DNA, 20 bp, Artificial Sequence
  chemically synthesized
aaggagattaatatttcagt

SEQ ID NO: 16801 - DNA, 20 bp, Artificial Sequence
  chemically synthesized
gagattaatatttcagtcag

SEQ ID NO: 16802 - DNA, 20 bp, Artificial Sequence
  chemically synthesized
agattaatatttcagtcagt

SEQ ID NO: 16803 - DNA, 20 bp, Artificial Sequence
  chemically synthesized
taatatttcagtcagtgggc

SEQ ID NO: 16804 - DNA, 20 bp, Artificial Sequence
  chemically synthesized
aatatttcagtcagtgggct

SEQ ID NO: 16805 - DNA, 20 bp, Artificial Sequence
  chemically synthesized
atatttcagtcagtgggctg

SEQ ID NO: 16806 - DNA, 20 bp, Artificial Sequence
  chemically synthesized
tttcagtcagtgggctgggg

SEQ ID NO: 16807 - DNA, 20 bp, Artificial Sequence
  chemically synthesized
ttcagtcagtgggctgggga

SEQ ID NO: 16808 - DNA, 20 bp, Artificial Sequence
  chemically synthesized
agtcagtgggctggggaagg

SEQ ID NO: 16809 - DNA, 20 bp, Artificial Sequence
  chemically synthesized
aggcagacccacccttaatc

SEQ ID NO: 16810 - DNA, 20 bp, Artificial Sequence
  chemically synthesized
ggcagacccacccttaatct

SEQ ID NO: 16811 - DNA, 20 bp, Artificial Sequence
  chemically synthesized
agacccacccttaatctggg

SEQ ID NO: 16812 - DNA, 20 bp, Artificial Sequence
  chemically synthesized
gacccacccttaatctgggt

SEQ ID NO: 16813 - DNA, 20 bp, Artificial Sequence
  chemically synthesized
ctgggtgggcaccatctaat

SEQ ID NO: 16814 - DNA, 20 bp, Artificial Sequence
  chemically synthesized
ggcaccatctaatcagttgc

SEQ ID NO: 16815 - DNA, 20 bp, Artificial Sequence
  chemically synthesized
catctaatcagttgccagca

SEQ ID NO: 16816 - DNA, 20 bp, Artificial Sequence
  chemically synthesized
taatcagttgccagcacagc

SEQ ID NO: 16817 - DNA, 20 bp, Artificial Sequence
  chemically synthesized
aatcagttgccagcacagcc

SEQ ID NO: 16818 - DNA, 20 bp, Artificial Sequence
  chemically synthesized
gccagcacagccaggatata

SEQ ID NO: 16819 - DNA, 20 bp, Artificial Sequence
  chemically synthesized
agcacagccaggatataaag

SEQ ID NO: 16820 - DNA, 20 bp, Artificial Sequence
  chemically synthesized
gcacagccaggatataaagc

SEQ ID NO: 16821 - DNA, 20 bp, Artificial Sequence
  chemically synthesized
cagccaggatataaagcagg

SEQ ID NO: 16822 - DNA, 20 bp, Artificial Sequence
  chemically synthesized
agcaggcagaaaaatgtgaa

SEQ ID NO: 16823 - DNA, 20 bp, Artificial Sequence
  chemically synthesized
gcaggcagaaaaatgtgaaa

SEQ ID NO: 16824 - DNA, 20 bp, Artificial Sequence
  chemically synthesized
gcagaaaaatgtgaaaaggc

SEQ ID NO: 16825 - DNA, 20 bp, Artificial Sequence
  chemically synthesized
aaaatgtgaaaaggctagat

SEQ ID NO: 16826 - DNA, 20 bp, Artificial Sequence
  chemically synthesized
gtgaaaaggctagattggct

SEQ ID NO: 16827 - DNA, 20 bp, Artificial Sequence
  chemically synthesized
gctagattggcttggcatcc

SEQ ID NO: 16828 - DNA, 20 bp, Artificial Sequence
  chemically synthesized
cctacatttttctcccatgc

SEQ ID NO: 16829 - DNA, 20 bp, Artificial Sequence
  chemically synthesized
atgctggattcttcctgccc

SEQ ID NO: 16830 - DNA, 20 bp, Artificial Sequence
  chemically synthesized
tgccctggaacattgaactc

SEQ ID NO: 16831 - DNA, 20 bp, Artificial Sequence
  chemically synthesized
gccctggaacattgaactcc

SEQ ID NO: 16832 - DNA, 20 bp, Artificial Sequence
  chemically synthesized
acattgaactccaggttctt

SEQ ID NO: 16833 - DNA, 20 bp, Artificial Sequence
  chemically synthesized
aactccaggttcttcagctt

SEQ ID NO: 16834 - DNA, 20 bp, Artificial Sequence
  chemically synthesized
actccaggttcttcagcttt

SEQ ID NO: 16835 - DNA, 20 bp, Artificial Sequence
  chemically synthesized
ttcagctttgggactccgac

SEQ ID NO: 16836 - DNA, 20 bp, Artificial Sequence
  chemically synthesized
cgactagcttccttgttcct

SEQ ID NO: 16837 - DNA, 20 bp, Artificial Sequence
  chemically synthesized
tagcttccttgttcctcagc

SEQ ID NO: 16838 - DNA, 20 bp, Artificial Sequence
  chemically synthesized
cttccttgttcctcagctgg

SEQ ID NO: 16839 - DNA, 20 bp, Artificial Sequence
  chemically synthesized
cttgttcctcagctggcaga

SEQ ID NO: 16840 - DNA, 20 bp, Artificial Sequence
  chemically synthesized
agctggcagatggcctgttt

SEQ ID NO: 16841 - DNA, 20 bp, Artificial Sequence
  chemically synthesized
gctggcagatggcctgtttt

SEQ ID NO: 16842 - DNA, 20 bp, Artificial Sequence
  chemically synthesized
ttgggaccttgtgaacatgt

SEQ ID NO: 16843 - DNA, 20 bp, Artificial Sequence
  chemically synthesized
ctacataataaactctcata

SEQ ID NO: 16844 - DNA, 20 bp, Artificial Sequence
  chemically synthesized
aataaactctcatatagata

SEQ ID NO: 16845 - DNA, 20 bp, Artificial Sequence
  chemically synthesized
ctctcatatagatatagata

SEQ ID NO: 16846 - DNA, 20 bp, Artificial Sequence
  chemically synthesized
ctcatatagatatagatata

SEQ ID NO: 16847 - DNA, 20 bp, Artificial Sequence
  chemically synthesized
tatagatatagatatagaga

SEQ ID NO: 16848 - DNA, 20 bp, Artificial Sequence
  chemically synthesized
tatagatatagagatagata

SEQ ID NO: 16849 - DNA, 20 bp, Artificial Sequence
  chemically synthesized
tagatatagagatagatata

SEQ ID NO: 16850 - DNA, 20 bp, Artificial Sequence
  chemically synthesized
tatagagatagatatagaga

SEQ ID NO: 16851 - DNA, 20 bp, Artificial Sequence
  chemically synthesized
gatagatatagagatagata

SEQ ID NO: 16852 - DNA, 20 bp, Artificial Sequence
  chemically synthesized
tatagagatagatatagata

SEQ ID NO: 16853 - DNA, 20 bp, Artificial Sequence
  chemically synthesized
gatagatatagatatagata

SEQ ID NO: 16854 - DNA, 20 bp, Artificial Sequence
  chemically synthesized
tatagatatagatatagata

SEQ ID NO: 16855 - DNA, 20 bp, Artificial Sequence
  chemically synthesized
tatagatatagatatagata

SEQ ID NO: 16856 - DNA, 20 bp, Artificial Sequence
  chemically synthesized
tatagatatagatatagata

SEQ ID NO: 16857 - DNA, 20 bp, Artificial Sequence
  chemically synthesized
ctattaattctgtttctctg

SEQ ID NO: 16858 - DNA, 20 bp, Artificial Sequence
  chemically synthesized
ttctctgtagaaccctaata

SEQ ID NO: 16859 - DNA, 20 bp, Artificial Sequence
  chemically synthesized
tagaaccctaatacagattt

SEQ ID NO: 16860 - DNA, 20 bp, Artificial Sequence
  chemically synthesized
cctaatacagattttggtac

SEQ ID NO: 16861 - DNA, 20 bp, Artificial Sequence
  chemically synthesized
ctaatacagattttggtacc

SEQ ID NO: 16862 - DNA, 20 bp, Artificial Sequence
  chemically synthesized
aatacagattttggtaccag

SEQ ID NO: 16863 - DNA, 20 bp, Artificial Sequence
  chemically synthesized
acagattttggtaccaggag

SEQ ID NO: 16864 - DNA, 20 bp, Artificial Sequence
  chemically synthesized
tttggtaccaggagtggttc

SEQ ID NO: 16865 - DNA, 20 bp, Artificial Sequence
  chemically synthesized
tggtaccaggagtggttcta

SEQ ID NO: 16866 - DNA, 20 bp, Artificial Sequence
  chemically synthesized
ggtaccaggagtggttctag

SEQ ID NO: 16867 - DNA, 20 bp, Artificial Sequence
  chemically synthesized
caggagtggttctagaggaa

SEQ ID NO: 16868 - DNA, 20 bp, Artificial Sequence
  chemically synthesized
ttctagaggaacagaatatt

SEQ ID NO: 16869 - DNA, 20 bp, Artificial Sequence
  chemically synthesized
tctagaggaacagaatatta

SEQ ID NO: 16870 - DNA, 20 bp, Artificial Sequence
  chemically synthesized
gaggaacagaatattaagga

SEQ ID NO: 16871 - DNA, 20 bp, Artificial Sequence
  chemically synthesized
ggaacagaatattaaggatg

SEQ ID NO: 16872 - DNA, 20 bp, Artificial Sequence
  chemically synthesized
taaggatggagttctttcat

SEQ ID NO: 16873 - DNA, 20 bp, Artificial Sequence
  chemically synthesized
tggagttctttcattggttt

SEQ ID NO: 16874 - DNA, 20 bp, Artificial Sequence
  chemically synthesized
ggagttctttcattggtttt

SEQ ID NO: 16875 - DNA, 20 bp, Artificial Sequence
  chemically synthesized
gagttctttcattggttttg

SEQ ID NO: 16876 - DNA, 20 bp, Artificial Sequence
  chemically synthesized
ttcattggttttggggtttc

SEQ ID NO: 16877 - DNA, 20 bp, Artificial Sequence
  chemically synthesized
cattggttttggggtttctg

SEQ ID NO: 16878 - DNA, 20 bp, Artificial Sequence
  chemically synthesized
ggttttggggtttctggagt

SEQ ID NO: 16879 - DNA, 20 bp, Artificial Sequence
  chemically synthesized
agttggctgcttaatatgat

SEQ ID NO: 16880 - DNA, 20 bp, Artificial Sequence
  chemically synthesized
tgattagacccaaatatgct

SEQ ID NO: 16881 - DNA, 20 bp, Artificial Sequence
  chemically synthesized
gattagacccaaatatgcta

SEQ ID NO: 16882 - DNA, 20 bp, Artificial Sequence
  chemically synthesized
gctaaggactcttcttctaa

SEQ ID NO: 16883 - DNA, 20 bp, Artificial Sequence
  chemically synthesized
ggactcttcttctaatggta

SEQ ID NO: 16884 - DNA, 20 bp, Artificial Sequence
  chemically synthesized
actcttcttctaatggtatg

SEQ ID NO: 16885 - DNA, 20 bp, Artificial Sequence
  chemically synthesized
tggagaacactgataatcct

SEQ ID NO: 16886 - DNA, 20 bp, Artificial Sequence
  chemically synthesized
aatccttggcatcaattgtt

SEQ ID NO: 16887 - DNA, 20 bp, Artificial Sequence
  chemically synthesized
tccttggcatcaattgttta

SEQ ID NO: 16888 - DNA, 20 bp, Artificial Sequence
  chemically synthesized
cttggcatcaattgtttaga

SEQ ID NO: 16889 - DNA, 20 bp, Artificial Sequence
  chemically synthesized
actcttgattcaacgcttgt

SEQ ID NO: 16890 - DNA, 20 bp, Artificial Sequence
  chemically synthesized
tcttgattcaacgcttgtga

SEQ ID NO: 16891 - DNA, 20 bp, Artificial Sequence
  chemically synthesized
cttgattcaacgcttgtgag

SEQ ID NO: 16892 - DNA, 20 bp, Artificial Sequence
  chemically synthesized
attcaacgcttgtgagaggc

SEQ ID NO: 16893 - DNA, 20 bp, Artificial Sequence
  chemically synthesized
ttcaacgcttgtgagaggca

SEQ ID NO: 16894 - DNA, 20 bp, Artificial Sequence
  chemically synthesized
cttgtgagaggcaaggaatt

SEQ ID NO: 16895 - DNA, 20 bp, Artificial Sequence
  chemically synthesized
ataatacttttgactatatg

SEQ ID NO: 16896 - DNA, 20 bp, Artificial Sequence
  chemically synthesized
aatacttttgactatatgtg

SEQ ID NO: 16897 - DNA, 20 bp, Artificial Sequence
  chemically synthesized
ttgactatatgtggagaatc

SEQ ID NO: 16898 - DNA, 20 bp, Artificial Sequence
  chemically synthesized
tgactatatgtggagaatca

SEQ ID NO: 16899 - DNA, 20 bp, Artificial Sequence
  chemically synthesized
atgtggagaatcaaggaaca

SEQ ID NO: 16900 - DNA, 20 bp, Artificial Sequence
  chemically synthesized
gagaatcaaggaacatagtg

SEQ ID NO: 16901 - DNA, 20 bp, Artificial Sequence
  chemically synthesized
atcaaggaacatagtgaagt

SEQ ID NO: 16902 - DNA, 20 bp, Artificial Sequence
  chemically synthesized
aggaacatagtgaagttggt

SEQ ID NO: 16903 - DNA, 20 bp, Artificial Sequence
  chemically synthesized
gaagttggttggttgcttgt

SEQ ID NO: 16904 - DNA, 20 bp, Artificial Sequence
  chemically synthesized
ttggttgcttgtaagttcgc

SEQ ID NO: 16905 - DNA, 20 bp, Artificial Sequence
  chemically synthesized
gcttgtaagttcgctggaca

SEQ ID NO: 16906 - DNA, 20 bp, Artificial Sequence
  chemically synthesized
ttcgctggacaaagtgatga

SEQ ID NO: 16907 - DNA, 20 bp, Artificial Sequence
  chemically synthesized
atgaaagaaaatgatgaact

SEQ ID NO: 16908 - DNA, 20 bp, Artificial Sequence
  chemically synthesized
tgaaagaaaatgatgaactc

SEQ ID NO: 16909 - DNA, 20 bp, Artificial Sequence
  chemically synthesized
aaagaaaatgatgaactcag

SEQ ID NO: 16910 - DNA, 20 bp, Artificial Sequence
  chemically synthesized
tcaggagtatatcaactctc

SEQ ID NO: 16911 - DNA, 20 bp, Artificial Sequence
  chemically synthesized
ctttgtgccataatcttatt

SEQ ID NO: 16912 - DNA, 20 bp, Artificial Sequence
  chemically synthesized
ttgtgccataatcttatttg

SEQ ID NO: 16913 - DNA, 20 bp, Artificial Sequence
  chemically synthesized
gtgccataatcttatttgga

SEQ ID NO: 16914 - DNA, 20 bp, Artificial Sequence
  chemically synthesized
tgctcacctttcacttccac

SEQ ID NO: 16915 - DNA, 20 bp, Artificial Sequence
  chemically synthesized
ttcacttccacaagatatca

SEQ ID NO: 16916 - DNA, 20 bp, Artificial Sequence
  chemically synthesized
acttccacaagatatcacag

SEQ ID NO: 16917 - DNA, 20 bp, Artificial Sequence
  chemically synthesized
tacattgatgacatgctgac

SEQ ID NO: 16918 - DNA, 20 bp, Artificial Sequence
  chemically synthesized
gatgacatgctgactggaac

SEQ ID NO: 16919 - DNA, 20 bp, Artificial Sequence
  chemically synthesized
acatgctgactggaactagt

SEQ ID NO: 16920 - DNA, 20 bp, Artificial Sequence
  chemically synthesized
gctgactggaactagtgagc

SEQ ID NO: 16921 - DNA, 20 bp, Artificial Sequence
  chemically synthesized
gactggaactagtgagcaag

SEQ ID NO: 16922 - DNA, 20 bp, Artificial Sequence
  chemically synthesized
tggaactagtgagcaagaag

SEQ ID NO: 16923 - DNA, 20 bp, Artificial Sequence
  chemically synthesized
gcaagaagtagcaaacacac

SEQ ID NO: 16924 - DNA, 20 bp, Artificial Sequence
  chemically synthesized
aacacactggatttattgat

SEQ ID NO: 16925 - DNA, 20 bp, Artificial Sequence
  chemically synthesized
atttattgatgagacatttg

SEQ ID NO: 16926 - DNA, 20 bp, Artificial Sequence
  chemically synthesized
tttattgatgagacatttgt

SEQ ID NO: 16927 - DNA, 20 bp, Artificial Sequence
  chemically synthesized
ttgatgagacatttgtggga

SEQ ID NO: 16928 - DNA, 20 bp, Artificial Sequence
  chemically synthesized
gatgagacatttgtgggaca

SEQ ID NO: 16929 - DNA, 20 bp, Artificial Sequence
  chemically synthesized
atgagacatttgtgggacag

SEQ ID NO: 16930 - DNA, 20 bp, Artificial Sequence
  chemically synthesized
gacatttgtgggacagagga

SEQ ID NO: 16931 - DNA, 20 bp, Artificial Sequence
  chemically synthesized
acatttgtgggacagaggat

SEQ ID NO: 16932 - DNA, 20 bp, Artificial Sequence
  chemically synthesized
gaaataaatctgattaaatt

SEQ ID NO: 16933 - DNA, 20 bp, Artificial Sequence
  chemically synthesized
aaataaatctgattaaattc

SEQ ID NO: 16934 - DNA, 20 bp, Artificial Sequence
  chemically synthesized
aataaatctgattaaattca

SEQ ID NO: 16935 - DNA, 20 bp, Artificial Sequence
  chemically synthesized
aattcagggaccttctacct

SEQ ID NO: 16936 - DNA, 20 bp, Artificial Sequence
  chemically synthesized
ttctacctcagtaaaattta

SEQ ID NO: 16937 - DNA, 20 bp, Artificial Sequence
  chemically synthesized
tctacctcagtaaaatttat

SEQ ID NO: 16938 - DNA, 20 bp, Artificial Sequence
  chemically synthesized
ctacctcagtaaaatttata

SEQ ID NO: 16939 - DNA, 20 bp, Artificial Sequence
  chemically synthesized
tacctcagtaaaatttatag

SEQ ID NO: 16940 - DNA, 20 bp, Artificial Sequence
  chemically synthesized
taaaatttataggggtccaa

SEQ ID NO: 16941 - DNA, 20 bp, Artificial Sequence
  chemically synthesized
tttataggggtccaatggtt

SEQ ID NO: 16942 - DNA, 20 bp, Artificial Sequence
  chemically synthesized
ttataggggtccaatggttt

SEQ ID NO: 16943 - DNA, 20 bp, Artificial Sequence
  chemically synthesized
tataggggtccaatggtttg

SEQ ID NO: 16944 - DNA, 20 bp, Artificial Sequence
  chemically synthesized
ccaatggtttggggctcttt

SEQ ID NO: 16945 - DNA, 20 bp, Artificial Sequence
  chemically synthesized
tctttgagatattccttcta

SEQ ID NO: 16946 - DNA, 20 bp, Artificial Sequence
  chemically synthesized
gagatattccttctaaagtg

SEQ ID NO: 16947 - DNA, 20 bp, Artificial Sequence
  chemically synthesized
agatattccttctaaagtga

SEQ ID NO: 16948 - DNA, 20 bp, Artificial Sequence
  chemically synthesized
gaaggataatttgctgcatt

SEQ ID NO: 16949 - DNA, 20 bp, Artificial Sequence
  chemically synthesized
atttggccactcttacaacc

SEQ ID NO: 16950 - DNA, 20 bp, Artificial Sequence
  chemically synthesized
ccactcttacaaccaagaaa

SEQ ID NO: 16951 - DNA, 20 bp, Artificial Sequence
  chemically synthesized
cactcttacaaccaagaaat

SEQ ID NO: 16952 - DNA, 20 bp, Artificial Sequence
  chemically synthesized
caagaaataggcacaacgcc

SEQ ID NO: 16953 - DNA, 20 bp, Artificial Sequence
  chemically synthesized
gaaataggcacaacgcctag

SEQ ID NO: 16954 - DNA, 20 bp, Artificial Sequence
  chemically synthesized
aaataggcacaacgcctagt

SEQ ID NO: 16955 - DNA, 20 bp, Artificial Sequence
  chemically synthesized
caacgcctagtgggcctatt

SEQ ID NO: 16956 - DNA, 20 bp, Artificial Sequence
  chemically synthesized
tagtgggcctatttggattt

SEQ ID NO: 16957 - DNA, 20 bp, Artificial Sequence
  chemically synthesized
gtgggcctatttggattttg

SEQ ID NO: 16958 - DNA, 20 bp, Artificial Sequence
  chemically synthesized
tgggcctatttggattttgg

SEQ ID NO: 16959 - DNA, 20 bp, Artificial Sequence
  chemically synthesized
gaggcaacatattcctgatt

SEQ ID NO: 16960 - DNA, 20 bp, Artificial Sequence
  chemically synthesized
aggcaacatattcctgattt

SEQ ID NO: 16961 - DNA, 20 bp, Artificial Sequence
  chemically synthesized
ctgatttgggtgtgttactc

SEQ ID NO: 16962 - DNA, 20 bp, Artificial Sequence
  chemically synthesized
gttactctggcccatttatc

SEQ ID NO: 16963 - DNA, 20 bp, Artificial Sequence
  chemically synthesized
ccatttatcgagtgatccaa

SEQ ID NO: 16964 - DNA, 20 bp, Artificial Sequence
  chemically synthesized
catttatcgagtgatccaaa

SEQ ID NO: 16965 - DNA, 20 bp, Artificial Sequence
  chemically synthesized
cgagtgatccaaaaggctgc

SEQ ID NO: 16966 - DNA, 20 bp, Artificial Sequence
  chemically synthesized
tccaaaaggctgccagtttt

SEQ ID NO: 16967 - DNA, 20 bp, Artificial Sequence
  chemically synthesized
aaaaggctgccagttttgag

SEQ ID NO: 16968 - DNA, 20 bp, Artificial Sequence
  chemically synthesized
aaggctgccagttttgagtg

SEQ ID NO: 16969 - DNA, 20 bp, Artificial Sequence
  chemically synthesized
tgccagttttgagtggagtc

SEQ ID NO: 16970 - DNA, 20 bp, Artificial Sequence
  chemically synthesized
gttttgagtggagtccagaa

SEQ ID NO: 16971 - DNA, 20 bp, Artificial Sequence
  chemically synthesized
ttgagtggagtccagaacag

SEQ ID NO: 16972 - DNA, 20 bp, Artificial Sequence
  chemically synthesized
tgagtggagtccagaacaga

SEQ ID NO: 16973 - DNA, 20 bp, Artificial Sequence
  chemically synthesized
cagaacagaaggctctgcca

SEQ ID NO: 16974 - DNA, 20 bp, Artificial Sequence
  chemically synthesized
agaacagaaggctctgccac

SEQ ID NO: 16975 - DNA, 20 bp, Artificial Sequence
  chemically synthesized
agaaggctctgccacaggtc

SEQ ID NO: 16976 - DNA, 20 bp, Artificial Sequence
  chemically synthesized
gaaggctctgccacaggtcc

SEQ ID NO: 16977 - DNA, 20 bp, Artificial Sequence
  chemically synthesized
acaggtccaggctgctgtgc

SEQ ID NO: 16978 - DNA, 20 bp, Artificial Sequence
  chemically synthesized
gtgcaagctgctatgccact

SEQ ID NO: 16979 - DNA, 20 bp, Artificial Sequence
  chemically synthesized
tgcaagctgctatgccactt

SEQ ID NO: 16980 - DNA, 20 bp, Artificial Sequence
  chemically synthesized
gccacttgggccatatgacc

SEQ ID NO: 16981 - DNA, 20 bp, Artificial Sequence
  chemically synthesized
acttgggccatatgacctag

SEQ ID NO: 16982 - DNA, 20 bp, Artificial Sequence
  chemically synthesized
tagcagatccaatgatgctt

SEQ ID NO: 16983 - DNA, 20 bp, Artificial Sequence
  chemically synthesized
agcagatccaatgatgcttg

SEQ ID NO: 16984 - DNA, 20 bp, Artificial Sequence
  chemically synthesized
tccaatgatgcttgaggtgt

SEQ ID NO: 16985 - DNA, 20 bp, Artificial Sequence
  chemically synthesized
gatgcttgaggtgtcagtgc

SEQ ID NO: 16986 - DNA, 20 bp, Artificial Sequence
  chemically synthesized
cttgaggtgtcagtgccaga

SEQ ID NO: 16987 - DNA, 20 bp, Artificial Sequence
  chemically synthesized
ttgaggtgtcagtgccagat

SEQ ID NO: 16988 - DNA, 20 bp, Artificial Sequence
  chemically synthesized
tgaggtgtcagtgccagata

SEQ ID NO: 16989 - DNA, 20 bp, Artificial Sequence
  chemically synthesized
tgccagatagggatgctgtt

SEQ ID NO: 16990 - DNA, 20 bp, Artificial Sequence
  chemically synthesized
ccagatagggatgctgtttg

SEQ ID NO: 16991 - DNA, 20 bp, Artificial Sequence
  chemically synthesized
gggatgctgtttggagcatt

SEQ ID NO: 16992 - DNA, 20 bp, Artificial Sequence
  chemically synthesized
atgctgtttggagcatttgg

SEQ ID NO: 16993 - DNA, 20 bp, Artificial Sequence
  chemically synthesized
tgctgtttggagcatttggc

SEQ ID NO: 16994 - DNA, 20 bp, Artificial Sequence
  chemically synthesized
gcatttggcaggctgaatca

SEQ ID NO: 16995 - DNA, 20 bp, Artificial Sequence
  chemically synthesized
tttggcaggctgaatcacag

SEQ ID NO: 16996 - DNA, 20 bp, Artificial Sequence
  chemically synthesized
tggcaggctgaatcacagcg

SEQ ID NO: 16997 - DNA, 20 bp, Artificial Sequence
  chemically synthesized
ggcaggctgaatcacagcgg

SEQ ID NO: 16998 - DNA, 20 bp, Artificial Sequence
  chemically synthesized
tgaatcacagcggaggcctc

SEQ ID NO: 16999 - DNA, 20 bp, Artificial Sequence
  chemically synthesized
gaatcacagcggaggcctct

SEQ ID NO: 17000 - DNA, 20 bp, Artificial Sequence
  chemically synthesized
agcggaggcctctaggattt

SEQ ID NO: 17001 - DNA, 20 bp, Artificial Sequence
  chemically synthesized
cggaggcctctaggattttg

SEQ ID NO: 17002 - DNA, 20 bp, Artificial Sequence
  chemically synthesized
ggcctctaggattttggagc

SEQ ID NO: 17003 - DNA, 20 bp, Artificial Sequence
  chemically synthesized
gcctctaggattttggagca

SEQ ID NO: 17004 - DNA, 20 bp, Artificial Sequence
  chemically synthesized
caaggccctgccatcttctg

SEQ ID NO: 17005 - DNA, 20 bp, Artificial Sequence
  chemically synthesized
tgcagataactactctcttt

SEQ ID NO: 17006 - DNA, 20 bp, Artificial Sequence
  chemically synthesized
gcagataactactctctttt

SEQ ID NO: 17007 - DNA, 20 bp, Artificial Sequence
  chemically synthesized
cagataactactctctttta

SEQ ID NO: 17008 - DNA, 20 bp, Artificial Sequence
  chemically synthesized
gataactactctcttttagg

SEQ ID NO: 17009 - DNA, 20 bp, Artificial Sequence
  chemically synthesized
actactctcttttagggaga

SEQ ID NO: 17010 - DNA, 20 bp, Artificial Sequence
  chemically synthesized
tcttttagggagaaagctct

SEQ ID NO: 17011 - DNA, 20 bp, Artificial Sequence
  chemically synthesized
gaaagctcttggcctgttac

SEQ ID NO: 17012 - DNA, 20 bp, Artificial Sequence
  chemically synthesized
aaagctcttggcctgttact

SEQ ID NO: 17013 - DNA, 20 bp, Artificial Sequence
  chemically synthesized
cttggcctgttactgggctt

SEQ ID NO: 17014 - DNA, 20 bp, Artificial Sequence
  chemically synthesized
ggcctgttactgggctttgg

SEQ ID NO: 17015 - DNA, 20 bp, Artificial Sequence
  chemically synthesized
gaaacgaaatatttgactat

SEQ ID NO: 17016 - DNA, 20 bp, Artificial Sequence
  chemically synthesized
atatttgactatgagtcatc

SEQ ID NO: 17017 - DNA, 20 bp, Artificial Sequence
  chemically synthesized
ctgaactgcctatcatgaac

SEQ ID NO: 17018 - DNA, 20 bp, Artificial Sequence
  chemically synthesized
tgaactgcctatcatgaact

SEQ ID NO: 17019 - DNA, 20 bp, Artificial Sequence
  chemically synthesized
tgggtgctttctgatccatc

SEQ ID NO: 17020 - DNA, 20 bp, Artificial Sequence
  chemically synthesized
ttctgatccatctagccata

SEQ ID NO: 17021 - DNA, 20 bp, Artificial Sequence
  chemically synthesized
tgatccatctagccataaag

SEQ ID NO: 17022 - DNA, 20 bp, Artificial Sequence
  chemically synthesized
gatccatctagccataaagt

SEQ ID NO: 17023 - DNA, 20 bp, Artificial Sequence
  chemically synthesized
gccataaagtgggctgtgca

SEQ ID NO: 17024 - DNA, 20 bp, Artificial Sequence
  chemically synthesized
ataaagtgggctgtgcacag

SEQ ID NO: 17025 - DNA, 20 bp, Artificial Sequence
  chemically synthesized
tgtgcacagcagcattgcat

SEQ ID NO: 17026 - DNA, 20 bp, Artificial Sequence
  chemically synthesized
agcagcattgcatcagcaaa

SEQ ID NO: 17027 - DNA, 20 bp, Artificial Sequence
  chemically synthesized
agcattgcatcagcaaatgg

SEQ ID NO: 17028 - DNA, 20 bp, Artificial Sequence
  chemically synthesized
attgcatcagcaaatggaag

SEQ ID NO: 17029 - DNA, 20 bp, Artificial Sequence
  chemically synthesized
ggaagtggtatatatgcgat

SEQ ID NO: 17030 - DNA, 20 bp, Artificial Sequence
  chemically synthesized
gaagtggtatatatgcgatt

SEQ ID NO: 17031 - DNA, 20 bp, Artificial Sequence
  chemically synthesized
gtatatatgcgattgggctt

SEQ ID NO: 17032 - DNA, 20 bp, Artificial Sequence
  chemically synthesized
tatatgcgattgggcttgag

SEQ ID NO: 17033 - DNA, 20 bp, Artificial Sequence
  chemically synthesized
ttgggcttgagcagatcctg

SEQ ID NO: 17034 - DNA, 20 bp, Artificial Sequence
  chemically synthesized
tgggcttgagcagatcctga

SEQ ID NO: 17035 - DNA, 20 bp, Artificial Sequence
  chemically synthesized
tgagcagatcctgaaggcac

SEQ ID NO: 17036 - DNA, 20 bp, Artificial Sequence
  chemically synthesized
cagatcctgaaggcactagt

SEQ ID NO: 17037 - DNA, 20 bp, Artificial Sequence
  chemically synthesized
aaggcactagtaagttacat

SEQ ID NO: 17038 - DNA, 20 bp, Artificial Sequence
  chemically synthesized
cactagtaagttacatgaga

SEQ ID NO: 17039 - DNA, 20 bp, Artificial Sequence
  chemically synthesized
actagtaagttacatgagaa

SEQ ID NO: 17040 - DNA, 20 bp, Artificial Sequence
  chemically synthesized
ctagtaagttacatgagaaa

SEQ ID NO: 17041 - DNA, 20 bp, Artificial Sequence
  chemically synthesized
tagtaagttacatgagaaag

SEQ ID NO: 17042 - DNA, 20 bp, Artificial Sequence
  chemically synthesized
gaaaggggctcaaatgccca

SEQ ID NO: 17043 - DNA, 20 bp, Artificial Sequence
  chemically synthesized
acacactgctttctctccct

SEQ ID NO: 17044 - DNA, 20 bp, Artificial Sequence
  chemically synthesized
tctccctgagactgcaccga

SEQ ID NO: 17045 - DNA, 20 bp, Artificial Sequence
  chemically synthesized
agactgcaccgatggtctca

SEQ ID NO: 17046 - DNA, 20 bp, Artificial Sequence
  chemically synthesized
gactgcaccgatggtctcat

SEQ ID NO: 17047 - DNA, 20 bp, Artificial Sequence
  chemically synthesized
actgcaccgatggtctcatg

SEQ ID NO: 17048 - DNA, 20 bp, Artificial Sequence
  chemically synthesized
tgcaccgatggtctcatggg

SEQ ID NO: 17049 - DNA, 20 bp, Artificial Sequence
  chemically synthesized
catggggagttccctatgat

SEQ ID NO: 17050 - DNA, 20 bp, Artificial Sequence
  chemically synthesized
agttccctatgatcagctga

SEQ ID NO: 17051 - DNA, 20 bp, Artificial Sequence
  chemically synthesized
ttccctatgatcagctgaca

SEQ ID NO: 17052 - DNA, 20 bp, Artificial Sequence
  chemically synthesized
tccctatgatcagctgacag

SEQ ID NO: 17053 - DNA, 20 bp, Artificial Sequence
  chemically synthesized
ctatgatcagctgacagagg

SEQ ID NO: 17054 - DNA, 20 bp, Artificial Sequence
  chemically synthesized
atgatcagctgacagaggaa

SEQ ID NO: 17055 - DNA, 20 bp, Artificial Sequence
  chemically synthesized
atcagctgacagaggaagag

SEQ ID NO: 17056 - DNA, 20 bp, Artificial Sequence
  chemically synthesized
ctgacagaggaagagaagac

SEQ ID NO: 17057 - DNA, 20 bp, Artificial Sequence
  chemically synthesized
tgacagaggaagagaagact

SEQ ID NO: 17058 - DNA, 20 bp, Artificial Sequence
  chemically synthesized
aggaagagaagactaggtcc

SEQ ID NO: 17059 - DNA, 20 bp, Artificial Sequence
  chemically synthesized
gaagactaggtcctggttca

SEQ ID NO: 17060 - DNA, 20 bp, Artificial Sequence
  chemically synthesized
actaggtcctggttcacaga

SEQ ID NO: 17061 - DNA, 20 bp, Artificial Sequence
  chemically synthesized
agatagttctgcacgatatg

SEQ ID NO: 17062 - DNA, 20 bp, Artificial Sequence
  chemically synthesized
gatagttctgcacgatatgc

SEQ ID NO: 17063 - DNA, 20 bp, Artificial Sequence
  chemically synthesized
gatatgcaggcaccacccaa

SEQ ID NO: 17064 - DNA, 20 bp, Artificial Sequence
  chemically synthesized
atgcaggcaccacccaaaag

SEQ ID NO: 17065 - DNA, 20 bp, Artificial Sequence
  chemically synthesized
aggcaccacccaaaagtgga

SEQ ID NO: 17066 - DNA, 20 bp, Artificial Sequence
  chemically synthesized
cacccaaaagtggacagccg

SEQ ID NO: 17067 - DNA, 20 bp, Artificial Sequence
  chemically synthesized
agtggacagccgcagcacta

SEQ ID NO: 17068 - DNA, 20 bp, Artificial Sequence
  chemically synthesized
gcagcactacagcccctttc

SEQ ID NO: 17069 - DNA, 20 bp, Artificial Sequence
  chemically synthesized
cagcactacagcccctttct

SEQ ID NO: 17070 - DNA, 20 bp, Artificial Sequence
  chemically synthesized
ccctttctaggacatccctg

SEQ ID NO: 17071 - DNA, 20 bp, Artificial Sequence
  chemically synthesized
cctttctaggacatccctga

SEQ ID NO: 17072 - DNA, 20 bp, Artificial Sequence
  chemically synthesized
aggacatccctgaaggacaa

SEQ ID NO: 17073 - DNA, 20 bp, Artificial Sequence
  chemically synthesized
atccctgaaggacaacggtg

SEQ ID NO: 17074 - DNA, 20 bp, Artificial Sequence
  chemically synthesized
tccctgaaggacaacggtga

SEQ ID NO: 17075 - DNA, 20 bp, Artificial Sequence
  chemically synthesized
ccctgaaggacaacggtgaa

SEQ ID NO: 17076 - DNA, 20 bp, Artificial Sequence
  chemically synthesized
acggtgaagggaaatcttcc

SEQ ID NO: 17077 - DNA, 20 bp, Artificial Sequence
  chemically synthesized
tgaagggaaatcttcctagt

SEQ ID NO: 17078 - DNA, 20 bp, Artificial Sequence
  chemically synthesized
agggaaatcttcctagttgg

SEQ ID NO: 17079 - DNA, 20 bp, Artificial Sequence
  chemically synthesized
ttcctagttggcagaacttt

SEQ ID NO: 17080 - DNA, 20 bp, Artificial Sequence
  chemically synthesized
ctagttggcagaactttgag

SEQ ID NO: 17081 - DNA, 20 bp, Artificial Sequence
  chemically synthesized
agaactttgagcagtgtgcc

SEQ ID NO: 17082 - DNA, 20 bp, Artificial Sequence
  chemically synthesized
gcctggttgtgcactttgca

SEQ ID NO: 17083 - DNA, 20 bp, Artificial Sequence
  chemically synthesized
tggttgtgcactttgcacag

SEQ ID NO: 17084 - DNA, 20 bp, Artificial Sequence
  chemically synthesized
ggttgtgcactttgcacaga

SEQ ID NO: 17085 - DNA, 20 bp, Artificial Sequence
  chemically synthesized
ttgtgcactttgcacagaag

SEQ ID NO: 17086 - DNA, 20 bp, Artificial Sequence
  chemically synthesized
actttgcacagaaggagaaa

SEQ ID NO: 17087 - DNA, 20 bp, Artificial Sequence
  chemically synthesized
tgcacagaaggagaaatggc

SEQ ID NO: 17088 - DNA, 20 bp, Artificial Sequence
  chemically synthesized
tgcgattatatacttattca

SEQ ID NO: 17089 - DNA, 20 bp, Artificial Sequence
  chemically synthesized
gcgattatatacttattcat

SEQ ID NO: 17090 - DNA, 20 bp, Artificial Sequence
  chemically synthesized
atatacttattcatgggctg

SEQ ID NO: 17091 - DNA, 20 bp, Artificial Sequence
  chemically synthesized
ttattcatgggctgtagcca

SEQ ID NO: 17092 - DNA, 20 bp, Artificial Sequence
  chemically synthesized
tattcatgggctgtagccaa

SEQ ID NO: 17093 - DNA, 20 bp, Artificial Sequence
  chemically synthesized
atgggctgtagccaaaggtt

SEQ ID NO: 17094 - DNA, 20 bp, Artificial Sequence
  chemically synthesized
gctgtagccaaaggtttggc

SEQ ID NO: 17095 - DNA, 20 bp, Artificial Sequence
  chemically synthesized
tagccaaaggtttggctaga

SEQ ID NO: 17096 - DNA, 20 bp, Artificial Sequence
  chemically synthesized
caaaggtttggctagatggt

SEQ ID NO: 17097 - DNA, 20 bp, Artificial Sequence
  chemically synthesized
aaaggtttggctagatggtc

SEQ ID NO: 17098 - DNA, 20 bp, Artificial Sequence
  chemically synthesized
aaggtttggctagatggtca

SEQ ID NO: 17099 - DNA, 20 bp, Artificial Sequence
  chemically synthesized
tggctagatggtcagggact

SEQ ID NO: 17100 - DNA, 20 bp, Artificial Sequence
  chemically synthesized
gatggtcagggacttggaaa

SEQ ID NO: 17101 - DNA, 20 bp, Artificial Sequence
  chemically synthesized
ggacttggaaaaagcatgac

SEQ ID NO: 17102 - DNA, 20 bp, Artificial Sequence
  chemically synthesized
tgactggaaaattgatgaca

SEQ ID NO: 17103 - DNA, 20 bp, Artificial Sequence
  chemically synthesized
aaattgatgacaaagaaatt

SEQ ID NO: 17104 - DNA, 20 bp, Artificial Sequence
  chemically synthesized
aattgatgacaaagaaattt

SEQ ID NO: 17105 - DNA, 20 bp, Artificial Sequence
  chemically synthesized
attgatgacaaagaaatttg

SEQ ID NO: 17106 - DNA, 20 bp, Artificial Sequence
  chemically synthesized
gatgacaaagaaatttgggg

SEQ ID NO: 17107 - DNA, 20 bp, Artificial Sequence
  chemically synthesized
tgacaaagaaatttggggaa

SEQ ID NO: 17108 - DNA, 20 bp, Artificial Sequence
  chemically synthesized
gacaaagaaatttggggaag

SEQ ID NO: 17109 - DNA, 20 bp, Artificial Sequence
  chemically synthesized
aaatttggggaagaggtatg

SEQ ID NO: 17110 - DNA, 20 bp, Artificial Sequence
  chemically synthesized
ttggggaagaggtatgtgga

SEQ ID NO: 17111 - DNA, 20 bp, Artificial Sequence
  chemically synthesized
tgtggatggacctctatgat

SEQ ID NO: 17112 - DNA, 20 bp, Artificial Sequence
  chemically synthesized
atgattagtcaaaaactaca

SEQ ID NO: 17113 - DNA, 20 bp, Artificial Sequence
  chemically synthesized
aagatattttcatcccatgt

SEQ ID NO: 17114 - DNA, 20 bp, Artificial Sequence
  chemically synthesized
cccatgtgagtgctcaccaa

SEQ ID NO: 17115 - DNA, 20 bp, Artificial Sequence
  chemically synthesized
ccatgtgagtgctcaccaat

SEQ ID NO: 17116 - DNA, 20 bp, Artificial Sequence
  chemically synthesized
tgctcaccaatgggtgacct

SEQ ID NO: 17117 - DNA, 20 bp, Artificial Sequence
  chemically synthesized
tcaccaatgggtgacctcag

SEQ ID NO: 17118 - DNA, 20 bp, Artificial Sequence
  chemically synthesized
ccaatgggtgacctcagcag

SEQ ID NO: 17119 - DNA, 20 bp, Artificial Sequence
  chemically synthesized
aatgggtgacctcagcagaa

SEQ ID NO: 17120 - DNA, 20 bp, Artificial Sequence
  chemically synthesized
atgggtgacctcagcagaag

SEQ ID NO: 17121 - DNA, 20 bp, Artificial Sequence
  chemically synthesized
agaagaggattttaataatc

SEQ ID NO: 17122 - DNA, 20 bp, Artificial Sequence
  chemically synthesized
agaggattttaataatcaag

SEQ ID NO: 17123 - DNA, 20 bp, Artificial Sequence
  chemically synthesized
gattttaataatcaagtgga

SEQ ID NO: 17124 - DNA, 20 bp, Artificial Sequence
  chemically synthesized
attttaataatcaagtggat

SEQ ID NO: 17125 - DNA, 20 bp, Artificial Sequence
  chemically synthesized
ggataggatgatcaattctg

SEQ ID NO: 17126 - DNA, 20 bp, Artificial Sequence
  chemically synthesized
tcaattctgtggacaccact

SEQ ID NO: 17127 - DNA, 20 bp, Artificial Sequence
  chemically synthesized
gacaccactcagccttttcc

SEQ ID NO: 17128 - DNA, 20 bp, Artificial Sequence
  chemically synthesized
acaccactcagccttttccc

SEQ ID NO: 17129 - DNA, 20 bp, Artificial Sequence
  chemically synthesized
ccactcatgtcatcgtccaa

SEQ ID NO: 17130 - DNA, 20 bp, Artificial Sequence
  chemically synthesized
gtccaatggacccatgaaca

SEQ ID NO: 17131 - DNA, 20 bp, Artificial Sequence
  chemically synthesized
caatggacccatgaacaaag

SEQ ID NO: 17132 - DNA, 20 bp, Artificial Sequence
  chemically synthesized
acccatgaacaaagtggcca

SEQ ID NO: 17133 - DNA, 20 bp, Artificial Sequence
  chemically synthesized
gaacaaagtggccacagttg

SEQ ID NO: 17134 - DNA, 20 bp, Artificial Sequence
  chemically synthesized
aacaaagtggccacagttgc

SEQ ID NO: 17135 - DNA, 20 bp, Artificial Sequence
  chemically synthesized
acaaagtggccacagttgca

SEQ ID NO: 17136 - DNA, 20 bp, Artificial Sequence
  chemically synthesized
agtggccacagttgcaggga

SEQ ID NO: 17137 - DNA, 20 bp, Artificial Sequence
  chemically synthesized
ggccacagttgcagggatgg

SEQ ID NO: 17138 - DNA, 20 bp, Artificial Sequence
  chemically synthesized
gcagggatggaagttatgct

SEQ ID NO: 17139 - DNA, 20 bp, Artificial Sequence
  chemically synthesized
cagggatggaagttatgctt

SEQ ID NO: 17140 - DNA, 20 bp, Artificial Sequence
  chemically synthesized
atggaagttatgcttgggct

SEQ ID NO: 17141 - DNA, 20 bp, Artificial Sequence
  chemically synthesized
tatgcttgggctcagcaaca

SEQ ID NO: 17142 - DNA, 20 bp, Artificial Sequence
  chemically synthesized
acatggacttccactcacca

SEQ ID NO: 17143 - DNA, 20 bp, Artificial Sequence
  chemically synthesized
tccactcaccaaagctgacc

SEQ ID NO: 17144 - DNA, 20 bp, Artificial Sequence
  chemically synthesized
caccaaagctgacctggcca

SEQ ID NO: 17145 - DNA, 20 bp, Artificial Sequence
  chemically synthesized
tggccacagccactgcttgc

SEQ ID NO: 17146 - DNA, 20 bp, Artificial Sequence
  chemically synthesized
cagccactgcttgccagcat

SEQ ID NO: 17147 - DNA, 20 bp, Artificial Sequence
  chemically synthesized
gccactgcttgccagcatca

SEQ ID NO: 17148 - DNA, 20 bp, Artificial Sequence
  chemically synthesized
cagcatcagagaccaacact

SEQ ID NO: 17149 - DNA, 20 bp, Artificial Sequence
  chemically synthesized
ccaacactaagcccttgata

SEQ ID NO: 17150 - DNA, 20 bp, Artificial Sequence
  chemically synthesized
cttgatatggcaccattcct

SEQ ID NO: 17151 - DNA, 20 bp, Artificial Sequence
  chemically synthesized
ttgatatggcaccattcctc

SEQ ID NO: 17152 - DNA, 20 bp, Artificial Sequence
  chemically synthesized
tgatatggcaccattcctcg

SEQ ID NO: 17153 - DNA, 20 bp, Artificial Sequence
  chemically synthesized
gcaccattcctcggggtgat

SEQ ID NO: 17154 - DNA, 20 bp, Artificial Sequence
  chemically synthesized
cattcctcggggtgatcagc

SEQ ID NO: 17155 - DNA, 20 bp, Artificial Sequence
  chemically synthesized
ggggtgatcagccagctacc

SEQ ID NO: 17156 - DNA, 20 bp, Artificial Sequence
  chemically synthesized
gtgatcagccagctacctgg

SEQ ID NO: 17157 - DNA, 20 bp, Artificial Sequence
  chemically synthesized
atcagccagctacctggtgg

SEQ ID NO: 17158 - DNA, 20 bp, Artificial Sequence
  chemically synthesized
tcagccagctacctggtggc

SEQ ID NO: 17159 - DNA, 20 bp, Artificial Sequence
  chemically synthesized
tggtggcaggttgattatat

SEQ ID NO: 17160 - DNA, 20 bp, Artificial Sequence
  chemically synthesized
atattggacctcttccatca

SEQ ID NO: 17161 - DNA, 20 bp, Artificial Sequence
  chemically synthesized
tggacctcttccatcatgga

SEQ ID NO: 17162 - DNA, 20 bp, Artificial Sequence
  chemically synthesized
ggacctcttccatcatggaa

SEQ ID NO: 17163 - DNA, 20 bp, Artificial Sequence
  chemically synthesized
gacctcttccatcatggaaa

SEQ ID NO: 17164 - DNA, 20 bp, Artificial Sequence
  chemically synthesized
ctcttccatcatggaaaggg

SEQ ID NO: 17165 - DNA, 20 bp, Artificial Sequence
  chemically synthesized
cttccatcatggaaagggca

SEQ ID NO: 17166 - DNA, 20 bp, Artificial Sequence
  chemically synthesized
ttccatcatggaaagggcag

SEQ ID NO: 17167 - DNA, 20 bp, Artificial Sequence
  chemically synthesized
gggcagaggcttgtcctcac

SEQ ID NO: 17168 - DNA, 20 bp, Artificial Sequence
  chemically synthesized
gaggcttgtcctcactggaa

SEQ ID NO: 17169 - DNA, 20 bp, Artificial Sequence
  chemically synthesized
actggaatagacacttactc

SEQ ID NO: 17170 - DNA, 20 bp, Artificial Sequence
  chemically synthesized
atagacacttactctggata

SEQ ID NO: 17171 - DNA, 20 bp, Artificial Sequence
  chemically synthesized
tagacacttactctggatat

SEQ ID NO: 17172 - DNA, 20 bp, Artificial Sequence
  chemically synthesized
ctgaactcaatgcttatgcc

SEQ ID NO: 17173 - DNA, 20 bp, Artificial Sequence
  chemically synthesized
tatgccaagactaccatcca

SEQ ID NO: 17174 - DNA, 20 bp, Artificial Sequence
  chemically synthesized
gactaccatccatggaatca

SEQ ID NO: 17175 - DNA, 20 bp, Artificial Sequence
  chemically synthesized
gaatgccgtatccactgtca

SEQ ID NO: 17176 - DNA, 20 bp, Artificial Sequence
  chemically synthesized
cactgtcatggtattccaca

SEQ ID NO: 17177 - DNA, 20 bp, Artificial Sequence
  chemically synthesized
acacagcattgcttctgacc

SEQ ID NO: 17178 - DNA, 20 bp, Artificial Sequence
  chemically synthesized
tgaccaagccactcacttta

SEQ ID NO: 17179 - DNA, 20 bp, Artificial Sequence
  chemically synthesized
agccactcactttatggcta

SEQ ID NO: 17180 - DNA, 20 bp, Artificial Sequence
  chemically synthesized
cactcactttatggctaaag

SEQ ID NO: 17181 - DNA, 20 bp, Artificial Sequence
  chemically synthesized
ttatggctaaagaagtgtga

SEQ ID NO: 17182 - DNA, 20 bp, Artificial Sequence
  chemically synthesized
tggctaaagaagtgtgacag

SEQ ID NO: 17183 - DNA, 20 bp, Artificial Sequence
  chemically synthesized
ggctaaagaagtgtgacagt

SEQ ID NO: 17184 - DNA, 20 bp, Artificial Sequence
  chemically synthesized
tgacagtgggctcatgctca

SEQ ID NO: 17185 - DNA, 20 bp, Artificial Sequence
  chemically synthesized
ctcatgctcatggaatttac

SEQ ID NO: 17186 - DNA, 20 bp, Artificial Sequence
  chemically synthesized
ccatgatccctatcatcctg

SEQ ID NO: 17187 - DNA, 20 bp, Artificial Sequence
  chemically synthesized
tgatccctatcatcctgaag

SEQ ID NO: 17188 - DNA, 20 bp, Artificial Sequence
  chemically synthesized
atcctgaagcagcttttgaa

SEQ ID NO: 17189 - DNA, 20 bp, Artificial Sequence
  chemically synthesized
agcttttgaatggccttttg

SEQ ID NO: 17190 - DNA, 20 bp, Artificial Sequence
  chemically synthesized
gtcacgattacaatgccaac

SEQ ID NO: 17191 - DNA, 20 bp, Artificial Sequence
  chemically synthesized
tcacgattacaatgccaact

SEQ ID NO: 17192 - DNA, 20 bp, Artificial Sequence
  chemically synthesized
aactaggtgacaatactttg

SEQ ID NO: 17193 - DNA, 20 bp, Artificial Sequence
  chemically synthesized
actaggtgacaatactttgc

SEQ ID NO: 17194 - DNA, 20 bp, Artificial Sequence
  chemically synthesized
gtgacaatactttgcaggcc

SEQ ID NO: 17195 - DNA, 20 bp, Artificial Sequence
  chemically synthesized
tgacaatactttgcaggcct

SEQ ID NO: 17196 - DNA, 20 bp, Artificial Sequence
  chemically synthesized
gacaatactttgcaggcctg

SEQ ID NO: 17197 - DNA, 20 bp, Artificial Sequence
  chemically synthesized
tactttgcaggcctggggca

SEQ ID NO: 17198 - DNA, 20 bp, Artificial Sequence
  chemically synthesized
aggcctggggcaaagttctc

SEQ ID NO: 17199 - DNA, 20 bp, Artificial Sequence
  chemically synthesized
cctggggcaaagttctccag

SEQ ID NO: 17200 - DNA, 20 bp, Artificial Sequence
  chemically synthesized
ctggggcaaagttctccaga

SEQ ID NO: 17201 - DNA, 20 bp, Artificial Sequence
  chemically synthesized
aggctgtgtatgctctgaat

SEQ ID NO: 17202 - DNA, 20 bp, Artificial Sequence
  chemically synthesized
ctgaatcagtgtccaatata

SEQ ID NO: 17203 - DNA, 20 bp, Artificial Sequence
  chemically synthesized
atatggtactgtttctccca

SEQ ID NO: 17204 - DNA, 20 bp, Artificial Sequence
  chemically synthesized
ggtactgtttctcccataga

SEQ ID NO: 17205 - DNA, 20 bp, Artificial Sequence
  chemically synthesized
gtactgtttctcccatagac

SEQ ID NO: 17206 - DNA, 20 bp, Artificial Sequence
  chemically synthesized
tctcccatagacaggattca

SEQ ID NO: 17207 - DNA, 20 bp, Artificial Sequence
  chemically synthesized
ctcccatagacaggattcac

SEQ ID NO: 17208 - DNA, 20 bp, Artificial Sequence
  chemically synthesized
atagacaggattcacgggtc

SEQ ID NO: 17209 - DNA, 20 bp, Artificial Sequence
  chemically synthesized
tagacaggattcacgggtcc

SEQ ID NO: 17210 - DNA, 20 bp, Artificial Sequence
  chemically synthesized
attcacgggtccaggaatca

SEQ ID NO: 17211 - DNA, 20 bp, Artificial Sequence
  chemically synthesized
ttcacgggtccaggaatcaa

SEQ ID NO: 17212 - DNA, 20 bp, Artificial Sequence
  chemically synthesized
tcacgggtccaggaatcaaa

SEQ ID NO: 17213 - DNA, 20 bp, Artificial Sequence
  chemically synthesized
cgggtccaggaatcaaaggg

SEQ ID NO: 17214 - DNA, 20 bp, Artificial Sequence
  chemically synthesized
gtccaggaatcaaagggtgg

SEQ ID NO: 17215 - DNA, 20 bp, Artificial Sequence
  chemically synthesized
caggaatcaaagggtggaag

SEQ ID NO: 17216 - DNA, 20 bp, Artificial Sequence
  chemically synthesized
gaatcaaagggtggaagtgg

SEQ ID NO: 17217 - DNA, 20 bp, Artificial Sequence
  chemically synthesized
tcaaagggtggaagtggaag

SEQ ID NO: 17218 - DNA, 20 bp, Artificial Sequence
  chemically synthesized
aagggtggaagtggaagtgg

SEQ ID NO: 17219 - DNA, 20 bp, Artificial Sequence
  chemically synthesized
ggtggaagtggaagtggaag

SEQ ID NO: 17220 - DNA, 20 bp, Artificial Sequence
  chemically synthesized
gcaccactcaccatcacccc

SEQ ID NO: 17221 - DNA, 20 bp, Artificial Sequence
  chemically synthesized
catcacccctagtgttccac

SEQ ID NO: 17222 - DNA, 20 bp, Artificial Sequence
  chemically synthesized
atttttgcttcctgttccca

SEQ ID NO: 17223 - DNA, 20 bp, Artificial Sequence
  chemically synthesized
cccatggcattatgttctgc

SEQ ID NO: 17224 - DNA, 20 bp, Artificial Sequence
  chemically synthesized
ggcattatgttctgctggct

SEQ ID NO: 17225 - DNA, 20 bp, Artificial Sequence
  chemically synthesized
cattatgttctgctggctta

SEQ ID NO: 17226 - DNA, 20 bp, Artificial Sequence
  chemically synthesized
attatgttctgctggcttag

SEQ ID NO: 17227 - DNA, 20 bp, Artificial Sequence
  chemically synthesized
ttctgctggcttagaggtct

SEQ ID NO: 17228 - DNA, 20 bp, Artificial Sequence
  chemically synthesized
tggcttagaggtcttagttc

SEQ ID NO: 17229 - DNA, 20 bp, Artificial Sequence
  chemically synthesized
gcttagaggtcttagttcca

SEQ ID NO: 17230 - DNA, 20 bp, Artificial Sequence
  chemically synthesized
cttagaggtcttagttccag

SEQ ID NO: 17231 - DNA, 20 bp, Artificial Sequence
  chemically synthesized
ttagaggtcttagttccaga

SEQ ID NO: 17232 - DNA, 20 bp, Artificial Sequence
  chemically synthesized
agaggtcttagttccagagg

SEQ ID NO: 17233 - DNA, 20 bp, Artificial Sequence
  chemically synthesized
gaggtcttagttccagaggg

SEQ ID NO: 17234 - DNA, 20 bp, Artificial Sequence
  chemically synthesized
agagggaggaacactgccgc

SEQ ID NO: 17235 - DNA, 20 bp, Artificial Sequence
  chemically synthesized
gagggaggaacactgccgcc

SEQ ID NO: 17236 - DNA, 20 bp, Artificial Sequence
  chemically synthesized
attccattaaactgcaaatt

SEQ ID NO: 17237 - DNA, 20 bp, Artificial Sequence
  chemically synthesized
tgcaaattaagattgccacc

SEQ ID NO: 17238 - DNA, 20 bp, Artificial Sequence
  chemically synthesized
agattgccacctggacactt

SEQ ID NO: 17239 - DNA, 20 bp, Artificial Sequence
  chemically synthesized
gattgccacctggacacttt

SEQ ID NO: 17240 - DNA, 20 bp, Artificial Sequence
  chemically synthesized
tttgggctcctcccaccttt

SEQ ID NO: 17241 - DNA, 20 bp, Artificial Sequence
  chemically synthesized
tcctcccacctttaagtcaa

SEQ ID NO: 17242 - DNA, 20 bp, Artificial Sequence
  chemically synthesized
cctcccacctttaagtcaac

SEQ ID NO: 17243 - DNA, 20 bp, Artificial Sequence
  chemically synthesized
cacctttaagtcaacaggct

SEQ ID NO: 17244 - DNA, 20 bp, Artificial Sequence
  chemically synthesized
ctttaagtcaacaggctaag

SEQ ID NO: 17245 - DNA, 20 bp, Artificial Sequence
  chemically synthesized
ttaagtcaacaggctaagaa

SEQ ID NO: 17246 - DNA, 20 bp, Artificial Sequence
  chemically synthesized
aagtcaacaggctaagaaga

SEQ ID NO: 17247 - DNA, 20 bp, Artificial Sequence
  chemically synthesized
acaggctaagaagagagtta

SEQ ID NO: 17248 - DNA, 20 bp, Artificial Sequence
  chemically synthesized
taagaagagagttacagtgt

SEQ ID NO: 17249 - DNA, 20 bp, Artificial Sequence
  chemically synthesized
gagagttacagtgttggctg

SEQ ID NO: 17250 - DNA, 20 bp, Artificial Sequence
  chemically synthesized
gttggctgcggtgattaacc

SEQ ID NO: 17251 - DNA, 20 bp, Artificial Sequence
  chemically synthesized
ggtgattaacccagactatc

SEQ ID NO: 17252 - DNA, 20 bp, Artificial Sequence
  chemically synthesized
ccagactatcaagatgaaat

SEQ ID NO: 17253 - DNA, 20 bp, Artificial Sequence
  chemically synthesized
atcagtctacaactccacaa

SEQ ID NO: 17254 - DNA, 20 bp, Artificial Sequence
  chemically synthesized
cagtctacaactccacaatg

SEQ ID NO: 17255 - DNA, 20 bp, Artificial Sequence
  chemically synthesized
agtctacaactccacaatgg

SEQ ID NO: 17256 - DNA, 20 bp, Artificial Sequence
  chemically synthesized
tacaactccacaatggaggt

SEQ ID NO: 17257 - DNA, 20 bp, Artificial Sequence
  chemically synthesized
acaactccacaatggaggta

SEQ ID NO: 17258 - DNA, 20 bp, Artificial Sequence
  chemically synthesized
actccacaatggaggtaagg

SEQ ID NO: 17259 - DNA, 20 bp, Artificial Sequence
  chemically synthesized
gaggtaaggaagcgtatgca

SEQ ID NO: 17260 - DNA, 20 bp, Artificial Sequence
  chemically synthesized
ggaagcgtatgcatggaata

SEQ ID NO: 17261 - DNA, 20 bp, Artificial Sequence
  chemically synthesized
gaagcgtatgcatggaatat

SEQ ID NO: 17262 - DNA, 20 bp, Artificial Sequence
  chemically synthesized
agcgtatgcatggaatatag

SEQ ID NO: 17263 - DNA, 20 bp, Artificial Sequence
  chemically synthesized
atggaatataggagatccat

SEQ ID NO: 17264 - DNA, 20 bp, Artificial Sequence
  chemically synthesized
tggaatataggagatccatt

SEQ ID NO: 17265 - DNA, 20 bp, Artificial Sequence
  chemically synthesized
ggaatataggagatccatta

SEQ ID NO: 17266 - DNA, 20 bp, Artificial Sequence
  chemically synthesized
agatccattagggtgtctct

SEQ ID NO: 17267 - DNA, 20 bp, Artificial Sequence
  chemically synthesized
ctcttagttttaccatgtcc

SEQ ID NO: 17268 - DNA, 20 bp, Artificial Sequence
  chemically synthesized
ttttaccatgtcctggaatt

SEQ ID NO: 17269 - DNA, 20 bp, Artificial Sequence
  chemically synthesized
tttaccatgtcctggaatta

SEQ ID NO: 17270 - DNA, 20 bp, Artificial Sequence
  chemically synthesized
ccatgtcctggaattaaggt

SEQ ID NO: 17271 - DNA, 20 bp, Artificial Sequence
  chemically synthesized
tgtcctggaattaaggtcag

SEQ ID NO: 17272 - DNA, 20 bp, Artificial Sequence
  chemically synthesized
gtcctggaattaaggtcagt

SEQ ID NO: 17273 - DNA, 20 bp, Artificial Sequence
  chemically synthesized
aggtcagtgggaaactacta

SEQ ID NO: 17274 - DNA, 20 bp, Artificial Sequence
  chemically synthesized
ggtcagtgggaaactactac

SEQ ID NO: 17275 - DNA, 20 bp, Artificial Sequence
  chemically synthesized
gaaactactacaggccattc

SEQ ID NO: 17276 - DNA, 20 bp, Artificial Sequence
  chemically synthesized
aaactactacaggccattcc

SEQ ID NO: 17277 - DNA, 20 bp, Artificial Sequence
  chemically synthesized
ctactacaggccattccagg

SEQ ID NO: 17278 - DNA, 20 bp, Artificial Sequence
  chemically synthesized
tactacaggccattccaggc

SEQ ID NO: 17279 - DNA, 20 bp, Artificial Sequence
  chemically synthesized
tccaggcaggactacaaata

SEQ ID NO: 17280 - DNA, 20 bp, Artificial Sequence
  chemically synthesized
ccaggcaggactacaaataa

SEQ ID NO: 17281 - DNA, 20 bp, Artificial Sequence
  chemically synthesized
caggactacaaataaaggtt

SEQ ID NO: 17282 - DNA, 20 bp, Artificial Sequence
  chemically synthesized
aggactacaaataaaggttt

SEQ ID NO: 17283 - DNA, 20 bp, Artificial Sequence
  chemically synthesized
aaaggtttgggtcactccac

SEQ ID NO: 17284 - DNA, 20 bp, Artificial Sequence
  chemically synthesized
aaggtttgggtcactccacc

SEQ ID NO: 17285 - DNA, 20 bp, Artificial Sequence
  chemically synthesized
caggaaaaaaaaaaaaaaaa

SEQ ID NO: 17286 - DNA, 20 bp, Artificial Sequence
  chemically synthesized
aaaaaaaaaaaaaaaaagac

SEQ ID NO: 17287 - DNA, 20 bp, Artificial Sequence
  chemically synthesized
aaaaaaagacaagacctgct

SEQ ID NO: 17288 - DNA, 20 bp, Artificial Sequence
  chemically synthesized
aaaaaagacaagacctgctg

SEQ ID NO: 17289 - DNA, 20 bp, Artificial Sequence
  chemically synthesized
gacctgctgaggtgcttgct

SEQ ID NO: 17290 - DNA, 20 bp, Artificial Sequence
  chemically synthesized
acctgctgaggtgcttgctg

SEQ ID NO: 17291 - DNA, 20 bp, Artificial Sequence
  chemically synthesized
cctgctgaggtgcttgctga

SEQ ID NO: 17292 - DNA, 20 bp, Artificial Sequence
  chemically synthesized
tgaggtgcttgctgagggca

SEQ ID NO: 17293 - DNA, 20 bp, Artificial Sequence
  chemically synthesized
gaggtgcttgctgagggcaa

SEQ ID NO: 17294 - DNA, 20 bp, Artificial Sequence
  chemically synthesized
aggtgcttgctgagggcaaa

SEQ ID NO: 17295 - DNA, 20 bp, Artificial Sequence
  chemically synthesized
tgctgagggcaaagggaata

SEQ ID NO: 17296 - DNA, 20 bp, Artificial Sequence
  chemically synthesized
caaagggaatacagaatatg

SEQ ID NO: 17297 - DNA, 20 bp, Artificial Sequence
  chemically synthesized
agggaatacagaatatgtag

SEQ ID NO: 17298 - DNA, 20 bp, Artificial Sequence
  chemically synthesized
gaatacagaatatgtagcag

SEQ ID NO: 17299 - DNA, 20 bp, Artificial Sequence
  chemically synthesized
tacagaatatgtagcagaag

SEQ ID NO: 17300 - DNA, 20 bp, Artificial Sequence
  chemically synthesized
acagaatatgtagcagaaga

SEQ ID NO: 17301 - DNA, 20 bp, Artificial Sequence
  chemically synthesized
gaatatgtagcagaagaagg

SEQ ID NO: 17302 - DNA, 20 bp, Artificial Sequence
  chemically synthesized
aagaaggtagtcatcaatac

SEQ ID NO: 17303 - DNA, 20 bp, Artificial Sequence
  chemically synthesized
tacgatcacgtgaccaattg

SEQ ID NO: 17304 - DNA, 20 bp, Artificial Sequence
  chemically synthesized
acgtgaccaattgcagatac

SEQ ID NO: 17305 - DNA, 20 bp, Artificial Sequence
  chemically synthesized
cgtgaccaattgcagataca

SEQ ID NO: 17306 - DNA, 20 bp, Artificial Sequence
  chemically synthesized
acaaggactgtaattgtcat

SEQ ID NO: 17307 - DNA, 20 bp, Artificial Sequence
  chemically synthesized
tgtctgtatacacttgtact

SEQ ID NO: 17308 - DNA, 20 bp, Artificial Sequence
  chemically synthesized
tttcctttatcatgtgacat

SEQ ID NO: 17309 - DNA, 20 bp, Artificial Sequence
  chemically synthesized
aagatttattgacttcatat

SEQ ID NO: 17310 - DNA, 20 bp, Artificial Sequence
  chemically synthesized
ttgacttcatatcagcattt

SEQ ID NO: 17311 - DNA, 20 bp, Artificial Sequence
  chemically synthesized
atcagcatttaagtattgtt

SEQ ID NO: 17312 - DNA, 20 bp, Artificial Sequence
  chemically synthesized
gtattgttaagtttatgtaa

SEQ ID NO: 17313 - DNA, 20 bp, Artificial Sequence
  chemically synthesized
ttatgtaatagcatttgcaa

SEQ ID NO: 17314 - DNA, 20 bp, Artificial Sequence
  chemically synthesized
tatgtaatagcatttgcaat

SEQ ID NO: 17315 - DNA, 20 bp, Artificial Sequence
  chemically synthesized
atgtaatagcatttgcaatg

SEQ ID NO: 17316 - DNA, 20 bp, Artificial Sequence
  chemically synthesized
atagcatttgcaatggggat

SEQ ID NO: 17317 - DNA, 20 bp, Artificial Sequence
  chemically synthesized
ggtgcattttcaattgcacg

SEQ ID NO: 17318 - DNA, 20 bp, Artificial Sequence
  chemically synthesized
gtgcattttcaattgcacga

SEQ ID NO: 17319 - DNA, 20 bp, Artificial Sequence
  chemically synthesized
attttcaattgcacgaagga

SEQ ID NO: 17320 - DNA, 20 bp, Artificial Sequence
  chemically synthesized
aattgcacgaaggatagttt

SEQ ID NO: 17321 - DNA, 20 bp, Artificial Sequence
  chemically synthesized
gaaggatagttttagtatgt

SEQ ID NO: 17322 - DNA, 20 bp, Artificial Sequence
  chemically synthesized
aaggatagttttagtatgtt

SEQ ID NO: 17323 - DNA, 20 bp, Artificial Sequence
  chemically synthesized
cttattgttgtctttatttg

SEQ ID NO: 17324 - DNA, 20 bp, Artificial Sequence
  chemically synthesized
ttgaagataatgtatgacct

SEQ ID NO: 17325 - DNA, 20 bp, Artificial Sequence
  chemically synthesized
tgaagataatgtatgacctc

SEQ ID NO: 17326 - DNA, 20 bp, Artificial Sequence
  chemically synthesized
gaagataatgtatgacctca

SEQ ID NO: 17327 - DNA, 20 bp, Artificial Sequence
  chemically synthesized
aagataatgtatgacctcag

SEQ ID NO: 17328 - DNA, 20 bp, Artificial Sequence
  chemically synthesized
atgacctcaggggatgtgta

SEQ ID NO: 17329 - DNA, 20 bp, Artificial Sequence
  chemically synthesized
tgacctcaggggatgtgtat

SEQ ID NO: 17330 - DNA, 20 bp, Artificial Sequence
  chemically synthesized
caggggatgtgtataggctc

SEQ ID NO: 17331 - DNA, 20 bp, Artificial Sequence
  chemically synthesized
gtgtataggctcaagttgac

SEQ ID NO: 17332 - DNA, 20 bp, Artificial Sequence
  chemically synthesized
aggctcaagttgacaagcga

SEQ ID NO: 17333 - DNA, 20 bp, Artificial Sequence
  chemically synthesized
gacaagcgatggacttgtga

SEQ ID NO: 17334 - DNA, 20 bp, Artificial Sequence
  chemically synthesized
gacttgtgatggttaatact

SEQ ID NO: 17335 - DNA, 20 bp, Artificial Sequence
  chemically synthesized
atactgagtgtcaacttgat

SEQ ID NO: 17336 - DNA, 20 bp, Artificial Sequence
  chemically synthesized
gtgtcaacttgattggattg

SEQ ID NO: 17337 - DNA, 20 bp, Artificial Sequence
  chemically synthesized
tgattggattgaagtgtgca

SEQ ID NO: 17338 - DNA, 20 bp, Artificial Sequence
  chemically synthesized
gtgtgcaaagtattgatcct

SEQ ID NO: 17339 - DNA, 20 bp, Artificial Sequence
  chemically synthesized
ttgatcctgagtgtgtctgt

SEQ ID NO: 17340 - DNA, 20 bp, Artificial Sequence
  chemically synthesized
tgatcctgagtgtgtctgtg

SEQ ID NO: 17341 - DNA, 20 bp, Artificial Sequence
  chemically synthesized
gatcctgagtgtgtctgtga

SEQ ID NO: 17342 - DNA, 20 bp, Artificial Sequence
  chemically synthesized
tgtctgtgagggtattgcca

SEQ ID NO: 17343 - DNA, 20 bp, Artificial Sequence
  chemically synthesized
gtctgtgagggtattgccaa

SEQ ID NO: 17344 - DNA, 20 bp, Artificial Sequence
  chemically synthesized
ctgtgagggtattgccaaag

SEQ ID NO: 17345 - DNA, 20 bp, Artificial Sequence
  chemically synthesized
gccaaaggagattaacattt

SEQ ID NO: 17346 - DNA, 20 bp, Artificial Sequence
  chemically synthesized
aaggagattaacattttagt

SEQ ID NO: 17347 - DNA, 20 bp, Artificial Sequence
  chemically synthesized
gagattaacattttagtcag

SEQ ID NO: 17348 - DNA, 20 bp, Artificial Sequence
  chemically synthesized
agattaacattttagtcagt

SEQ ID NO: 17349 - DNA, 20 bp, Artificial Sequence
  chemically synthesized
taacattttagtcagtgggc

SEQ ID NO: 17350 - DNA, 20 bp, Artificial Sequence
  chemically synthesized
aacattttagtcagtgggct

SEQ ID NO: 17351 - DNA, 20 bp, Artificial Sequence
  chemically synthesized
ttttagtcagtgggctggga

SEQ ID NO: 17352 - DNA, 20 bp, Artificial Sequence
  chemically synthesized
tttagtcagtgggctgggaa

SEQ ID NO: 17353 - DNA, 20 bp, Artificial Sequence
  chemically synthesized
agtcagtgggctgggaaagg

SEQ ID NO: 17354 - DNA, 20 bp, Artificial Sequence
  chemically synthesized
aggcagacccacccttaatc

SEQ ID NO: 17355 - DNA, 20 bp, Artificial Sequence
  chemically synthesized
ggcagacccacccttaatct

SEQ ID NO: 17356 - DNA, 20 bp, Artificial Sequence
  chemically synthesized
agacccacccttaatctggg

SEQ ID NO: 17357 - DNA, 20 bp, Artificial Sequence
  chemically synthesized
gacccacccttaatctgggt

SEQ ID NO: 17358 - DNA, 20 bp, Artificial Sequence
  chemically synthesized
ctgggtgggcaccatctaat

SEQ ID NO: 17359 - DNA, 20 bp, Artificial Sequence
  chemically synthesized
ggcaccatctaatcagttgc

SEQ ID NO: 17360 - DNA, 20 bp, Artificial Sequence
  chemically synthesized
catctaatcagttgccagtg

SEQ ID NO: 17361 - DNA, 20 bp, Artificial Sequence
  chemically synthesized
taatcagttgccagtgtggc

SEQ ID NO: 17362 - DNA, 20 bp, Artificial Sequence
  chemically synthesized
aatcagttgccagtgtggcc

SEQ ID NO: 17363 - DNA, 20 bp, Artificial Sequence
  chemically synthesized
gccagtgtggccaggatata

SEQ ID NO: 17364 - DNA, 20 bp, Artificial Sequence
  chemically synthesized
agtgtggccaggatataaag

SEQ ID NO: 17365 - DNA, 20 bp, Artificial Sequence
  chemically synthesized
gtgtggccaggatataaagc

SEQ ID NO: 17366 - DNA, 20 bp, Artificial Sequence
  chemically synthesized
tggccaggatataaagcagg

SEQ ID NO: 17367 - DNA, 20 bp, Artificial Sequence
  chemically synthesized
aaaaaaacatgtgaaaatcc

SEQ ID NO: 17368 - DNA, 20 bp, Artificial Sequence
  chemically synthesized
aacatgtgaaaatcctggac

SEQ ID NO: 17369 - DNA, 20 bp, Artificial Sequence
  chemically synthesized
gtgaaaatcctggactggct

SEQ ID NO: 17370 - DNA, 20 bp, Artificial Sequence
  chemically synthesized
cctggactggcttagcctcc

SEQ ID NO: 17371 - DNA, 20 bp, Artificial Sequence
  chemically synthesized
cctacatctttctcccatgc

SEQ ID NO: 17372 - DNA, 20 bp, Artificial Sequence
  chemically synthesized
tgcttcctgccctcaaacat

SEQ ID NO: 17373 - DNA, 20 bp, Artificial Sequence
  chemically synthesized
gccctcaaacattggactcc

SEQ ID NO: 17374 - DNA, 20 bp, Artificial Sequence
  chemically synthesized
acattggactccaagtcctt

SEQ ID NO: 17375 - DNA, 20 bp, Artificial Sequence
  chemically synthesized
gactccaagtccttcagctt

SEQ ID NO: 17376 - DNA, 20 bp, Artificial Sequence
  chemically synthesized
actccaagtccttcagcttt

SEQ ID NO: 17377 - DNA, 20 bp, Artificial Sequence
  chemically synthesized
agtccttcagctttgggact

SEQ ID NO: 17378 - DNA, 20 bp, Artificial Sequence
  chemically synthesized
ttcagctttgggacttggac

SEQ ID NO: 17379 - DNA, 20 bp, Artificial Sequence
  chemically synthesized
cttccttgctcctctgcttg

SEQ ID NO: 17380 - DNA, 20 bp, Artificial Sequence
  chemically synthesized
cttgctcctctgcttgcaga

SEQ ID NO: 17381 - DNA, 20 bp, Artificial Sequence
  chemically synthesized
tgcttgcagatggcctattg

SEQ ID NO: 17382 - DNA, 20 bp, Artificial Sequence
  chemically synthesized
gcttgcagatggcctattgt

SEQ ID NO: 17383 - DNA, 20 bp, Artificial Sequence
  chemically synthesized
gtgggaccttgtgattgtgt

SEQ ID NO: 17384 - DNA, 20 bp, Artificial Sequence
  chemically synthesized
tctatctatctatctcctat

SEQ ID NO: 17385 - DNA, 20 bp, Artificial Sequence
  chemically synthesized
tcctattagttctgtctctc

SEQ ID NO: 17386 - DNA, 20 bp, Artificial Sequence
  chemically synthesized
cctattagttctgtctctct

SEQ ID NO: 17387 - DNA, 20 bp, Artificial Sequence
  chemically synthesized
ctattagttctgtctctcta

SEQ ID NO: 17388 - DNA, 20 bp, Artificial Sequence
  chemically synthesized
ctagggaaccctgacaaata

SEQ ID NO: 17389 - DNA, 20 bp, Artificial Sequence
  chemically synthesized
ggaaccctgacaaatacagt

SEQ ID NO: 17390 - DNA, 20 bp, Artificial Sequence
  chemically synthesized
cctgacaaatacagtgagct

SEQ ID NO: 17391 - DNA, 20 bp, Artificial Sequence
  chemically synthesized
ctgacaaatacagtgagctc

SEQ ID NO: 17392 - DNA, 20 bp, Artificial Sequence
  chemically synthesized
atacagtgagctcaggtcct

SEQ ID NO: 17393 - DNA, 20 bp, Artificial Sequence
  chemically synthesized
cagtgagctcaggtcctgag

SEQ ID NO: 17394 - DNA, 20 bp, Artificial Sequence
  chemically synthesized
cctgagcagacattttccaa

SEQ ID NO: 17395 - DNA, 20 bp, Artificial Sequence
  chemically synthesized
gagcagacattttccaaaag

SEQ ID NO: 17396 - DNA, 20 bp, Artificial Sequence
  chemically synthesized
ttttccaaaagaagacatac

SEQ ID NO: 17397 - DNA, 20 bp, Artificial Sequence
  chemically synthesized
tccaaaagaagacatacaag

SEQ ID NO: 17398 - DNA, 20 bp, Artificial Sequence
  chemically synthesized
ggccaataaacgtcaaaaaa

SEQ ID NO: 17399 - DNA, 20 bp, Artificial Sequence
  chemically synthesized
agttcaacatcactaataat

SEQ ID NO: 17400 - DNA, 20 bp, Artificial Sequence
  chemically synthesized
ttcaacatcactaataatca

SEQ ID NO: 17401 - DNA, 20 bp, Artificial Sequence
  chemically synthesized
catatgatacctccttatgc

SEQ ID NO: 17402 - DNA, 20 bp, Artificial Sequence
  chemically synthesized
tgatacctccttatgccagt

SEQ ID NO: 17403 - DNA, 20 bp, Artificial Sequence
  chemically synthesized
cctccttatgccagtcagaa

SEQ ID NO: 17404 - DNA, 20 bp, Artificial Sequence
  chemically synthesized
tcagaatggctatcattata

SEQ ID NO: 17405 - DNA, 20 bp, Artificial Sequence
  chemically synthesized
atcattataaagttcaaaaa

SEQ ID NO: 17406 - DNA, 20 bp, Artificial Sequence
  chemically synthesized
attataaagttcaaaaacag

SEQ ID NO: 17407 - DNA, 20 bp, Artificial Sequence
  chemically synthesized
agttcaaaaacagcagatgt

SEQ ID NO: 17408 - DNA, 20 bp, Artificial Sequence
  chemically synthesized
caaaaacagcagatgttggt

SEQ ID NO: 17409 - DNA, 20 bp, Artificial Sequence
  chemically synthesized
aaaaacagcagatgttggtg

SEQ ID NO: 17410 - DNA, 20 bp, Artificial Sequence
  chemically synthesized
agcagatgttggtgaggatg

SEQ ID NO: 17411 - DNA, 20 bp, Artificial Sequence
  chemically synthesized
cagatgttggtgaggatgtg

SEQ ID NO: 17412 - DNA, 20 bp, Artificial Sequence
  chemically synthesized
gttggtgaggatgtggagac

SEQ ID NO: 17413 - DNA, 20 bp, Artificial Sequence
  chemically synthesized
agaaaatgcttatacactgt

SEQ ID NO: 17414 - DNA, 20 bp, Artificial Sequence
  chemically synthesized
aatgcttatacactgttggt

SEQ ID NO: 17415 - DNA, 20 bp, Artificial Sequence
  chemically synthesized
ctgttggtaagaatgtaaat

SEQ ID NO: 17416 - DNA, 20 bp, Artificial Sequence
  chemically synthesized
gtaaattagtacaaacttta

SEQ ID NO: 17417 - DNA, 20 bp, Artificial Sequence
  chemically synthesized
aattagtacaaactttatgg

SEQ ID NO: 17418 - DNA, 20 bp, Artificial Sequence
  chemically synthesized
agtacaaactttatggaaga

SEQ ID NO: 17419 - DNA, 20 bp, Artificial Sequence
  chemically synthesized
actttatggaagacagcatg

SEQ ID NO: 17420 - DNA, 20 bp, Artificial Sequence
  chemically synthesized
gacagcatgaagatttctta

SEQ ID NO: 17421 - DNA, 20 bp, Artificial Sequence
  chemically synthesized
atgaagatttcttaaagaac

SEQ ID NO: 17422 - DNA, 20 bp, Artificial Sequence
  chemically synthesized
atttcttaaagaactagaaa

SEQ ID NO: 17423 - DNA, 20 bp, Artificial Sequence
  chemically synthesized
caatcctgcaatcccactac

SEQ ID NO: 17424 - DNA, 20 bp, Artificial Sequence
  chemically synthesized
aatcctgcaatcccactact

SEQ ID NO: 17425 - DNA, 20 bp, Artificial Sequence
  chemically synthesized
tgcaatcccactactgggta

SEQ ID NO: 17426 - DNA, 20 bp, Artificial Sequence
  chemically synthesized
cactactgggtatggaccca

SEQ ID NO: 17427 - DNA, 20 bp, Artificial Sequence
  chemically synthesized
tgggtatggacccaaagtga

SEQ ID NO: 17428 - DNA, 20 bp, Artificial Sequence
  chemically synthesized
ggtatggacccaaagtgaaa

SEQ ID NO: 17429 - DNA, 20 bp, Artificial Sequence
  chemically synthesized
tgaaagagatcatattaaaa

SEQ ID NO: 17430 - DNA, 20 bp, Artificial Sequence
  chemically synthesized
attaaaaaagatatctgcat

SEQ ID NO: 17431 - DNA, 20 bp, Artificial Sequence
  chemically synthesized
tatctgcattagtatgttca

SEQ ID NO: 17432 - DNA, 20 bp, Artificial Sequence
  chemically synthesized
ctgcattagtatgttcaaag

SEQ ID NO: 17433 - DNA, 20 bp, Artificial Sequence
  chemically synthesized
caaagtagcactgttcccaa

SEQ ID NO: 17434 - DNA, 20 bp, Artificial Sequence
  chemically synthesized
tagcactgttcccaatagca

SEQ ID NO: 17435 - DNA, 20 bp, Artificial Sequence
  chemically synthesized
tgttcccaatagcaaagata

SEQ ID NO: 17436 - DNA, 20 bp, Artificial Sequence
  chemically synthesized
tcaacctaaatgtctaccaa

SEQ ID NO: 17437 - DNA, 20 bp, Artificial Sequence
  chemically synthesized
aatgtctaccaatggacgat

SEQ ID NO: 17438 - DNA, 20 bp, Artificial Sequence
  chemically synthesized
taccaatggacgattggata

SEQ ID NO: 17439 - DNA, 20 bp, Artificial Sequence
  chemically synthesized
acgattggataaagaaaatg

SEQ ID NO: 17440 - DNA, 20 bp, Artificial Sequence
  chemically synthesized
ttatatacatatatattact

SEQ ID NO: 17441 - DNA, 20 bp, Artificial Sequence
  chemically synthesized
tatattactcagccataaaa

SEQ ID NO: 17442 - DNA, 20 bp, Artificial Sequence
  chemically synthesized
gaatgaaatcatgtcttctc

SEQ ID NO: 17443 - DNA, 20 bp, Artificial Sequence
  chemically synthesized
tcatgtcttctctagaaaca

SEQ ID NO: 17444 - DNA, 20 bp, Artificial Sequence
  chemically synthesized
gtcttctctagaaacatggt

SEQ ID NO: 17445 - DNA, 20 bp, Artificial Sequence
  chemically synthesized
tctagaaacatggttagaac

SEQ ID NO: 17446 - DNA, 20 bp, Artificial Sequence
  chemically synthesized
tagaaacatggttagaactg

SEQ ID NO: 17447 - DNA, 20 bp, Artificial Sequence
  chemically synthesized
agaaacatggttagaactgg

SEQ ID NO: 17448 - DNA, 20 bp, Artificial Sequence
  chemically synthesized
gaactggaggacattatcct

SEQ ID NO: 17449 - DNA, 20 bp, Artificial Sequence
  chemically synthesized
ttatcctcagtgaaataact

SEQ ID NO: 17450 - DNA, 20 bp, Artificial Sequence
  chemically synthesized
tcagtgaaataactcagaaa

SEQ ID NO: 17451 - DNA, 20 bp, Artificial Sequence
  chemically synthesized
tgaaataactcagaaacaga

SEQ ID NO: 17452 - DNA, 20 bp, Artificial Sequence
  chemically synthesized
cagaaacagaaagtcaaaca

SEQ ID NO: 17453 - DNA, 20 bp, Artificial Sequence
  chemically synthesized
aaacacagtatgttctcatt

SEQ ID NO: 17454 - DNA, 20 bp, Artificial Sequence
  chemically synthesized
acagtatgttctcatttagt

SEQ ID NO: 17455 - DNA, 20 bp, Artificial Sequence
  chemically synthesized
agtatgttctcatttagtga

SEQ ID NO: 17456 - DNA, 20 bp, Artificial Sequence
  chemically synthesized
gttctcatttagtgagagcc

SEQ ID NO: 17457 - DNA, 20 bp, Artificial Sequence
  chemically synthesized
ctcatttagtgagagccaag

SEQ ID NO: 17458 - DNA, 20 bp, Artificial Sequence
  chemically synthesized
tcatttagtgagagccaagt

SEQ ID NO: 17459 - DNA, 20 bp, Artificial Sequence
  chemically synthesized
atttagtgagagccaagtgg

SEQ ID NO: 17460 - DNA, 20 bp, Artificial Sequence
  chemically synthesized
ccaagtgggagctaaacgat

SEQ ID NO: 17461 - DNA, 20 bp, Artificial Sequence
  chemically synthesized
gtgggagctaaacgatgagt

SEQ ID NO: 17462 - DNA, 20 bp, Artificial Sequence
  chemically synthesized
agctaaacgatgagtaagca

SEQ ID NO: 17463 - DNA, 20 bp, Artificial Sequence
  chemically synthesized
gatgagtaagcatagacata

SEQ ID NO: 17464 - DNA, 20 bp, Artificial Sequence
  chemically synthesized
agacatatagaatgaaataa

SEQ ID NO: 17465 - DNA, 20 bp, Artificial Sequence
  chemically synthesized
gaatgaaataatagacactt

SEQ ID NO: 17466 - DNA, 20 bp, Artificial Sequence
  chemically synthesized
aaataatagacacttgagac

SEQ ID NO: 17467 - DNA, 20 bp, Artificial Sequence
  chemically synthesized
ataatagacacttgagacta

SEQ ID NO: 17468 - DNA, 20 bp, Artificial Sequence
  chemically synthesized
tagacacttgagactagaga

SEQ ID NO: 17469 - DNA, 20 bp, Artificial Sequence
  chemically synthesized
agacacttgagactagagaa

SEQ ID NO: 17470 - DNA, 20 bp, Artificial Sequence
  chemically synthesized
cacttgagactagagaaagg

SEQ ID NO: 17471 - DNA, 20 bp, Artificial Sequence
  chemically synthesized
acttgagactagagaaaggt

SEQ ID NO: 17472 - DNA, 20 bp, Artificial Sequence
  chemically synthesized
ttgagactagagaaaggtgg

SEQ ID NO: 17473 - DNA, 20 bp, Artificial Sequence
  chemically synthesized
tgagactagagaaaggtggg

SEQ ID NO: 17474 - DNA, 20 bp, Artificial Sequence
  chemically synthesized
actagagaaaggtgggagga

SEQ ID NO: 17475 - DNA, 20 bp, Artificial Sequence
  chemically synthesized
ctagagaaaggtgggaggat

SEQ ID NO: 17476 - DNA, 20 bp, Artificial Sequence
  chemically synthesized
agagaaaggtgggaggatag

SEQ ID NO: 17477 - DNA, 20 bp, Artificial Sequence
  chemically synthesized
aaggtgggaggataggagta

SEQ ID NO: 17478 - DNA, 20 bp, Artificial Sequence
  chemically synthesized
tgggaggataggagtatggt

SEQ ID NO: 17479 - DNA, 20 bp, Artificial Sequence
  chemically synthesized
gggaggataggagtatggtg

SEQ ID NO: 17480 - DNA, 20 bp, Artificial Sequence
  chemically synthesized
tggtgaggactgaaaaacta

SEQ ID NO: 17481 - DNA, 20 bp, Artificial Sequence
  chemically synthesized
aggactgaaaaactacggat

SEQ ID NO: 17482 - DNA, 20 bp, Artificial Sequence
  chemically synthesized
tggatacaacattcactttt

SEQ ID NO: 17483 - DNA, 20 bp, Artificial Sequence
  chemically synthesized
ggatacaacattcacttttc

SEQ ID NO: 17484 - DNA, 20 bp, Artificial Sequence
  chemically synthesized
aacattcacttttcaggtga

SEQ ID NO: 17485 - DNA, 20 bp, Artificial Sequence
  chemically synthesized
ttcaggtgatggtccactaa

SEQ ID NO: 17486 - DNA, 20 bp, Artificial Sequence
  chemically synthesized
gtgatggtccactaaaagct

SEQ ID NO: 17487 - DNA, 20 bp, Artificial Sequence
  chemically synthesized
actatgcaacatacatatgt

SEQ ID NO: 17488 - DNA, 20 bp, Artificial Sequence
  chemically synthesized
ctatgcaacatacatatgta

SEQ ID NO: 17489 - DNA, 20 bp, Artificial Sequence
  chemically synthesized
catacatatgtaaggaaccc

SEQ ID NO: 17490 - DNA, 20 bp, Artificial Sequence
  chemically synthesized
cccgagcttgtaccctgata

SEQ ID NO: 17491 - DNA, 20 bp, Artificial Sequence
  chemically synthesized
ccaaatctcatcttgaattg

SEQ ID NO: 17492 - DNA, 20 bp, Artificial Sequence
  chemically synthesized
cccataatcctcacgtgttg

SEQ ID NO: 17493 - DNA, 20 bp, Artificial Sequence
  chemically synthesized
ccataatcctcacgtgttgt

SEQ ID NO: 17494 - DNA, 20 bp, Artificial Sequence
  chemically synthesized
ataatcctcacgtgttgtgg

SEQ ID NO: 17495 - DNA, 20 bp, Artificial Sequence
  chemically synthesized
taatcctcacgtgttgtggg

SEQ ID NO: 17496 - DNA, 20 bp, Artificial Sequence
  chemically synthesized
aatcctcacgtgttgtggga

SEQ ID NO: 17497 - DNA, 20 bp, Artificial Sequence
  chemically synthesized
cacgtgttgtgggagggatt

SEQ ID NO: 17498 - DNA, 20 bp, Artificial Sequence
  chemically synthesized
cgtgttgtgggagggatttg

SEQ ID NO: 17499 - DNA, 20 bp, Artificial Sequence
  chemically synthesized
gtgttgtgggagggatttgg

SEQ ID NO: 17500 - DNA, 20 bp, Artificial Sequence
  chemically synthesized
tgttgtgggagggatttgga

SEQ ID NO: 17501 - DNA, 20 bp, Artificial Sequence
  chemically synthesized
ttgtgggagggatttggagg

SEQ ID NO: 17502 - DNA, 20 bp, Artificial Sequence
  chemically synthesized
tgtgggagggatttggaggg

SEQ ID NO: 17503 - DNA, 20 bp, Artificial Sequence
  chemically synthesized
ggagggaggtaattgaatca

SEQ ID NO: 17504 - DNA, 20 bp, Artificial Sequence
  chemically synthesized
agggaggtaattgaatcata

SEQ ID NO: 17505 - DNA, 20 bp, Artificial Sequence
  chemically synthesized
gggaggtaattgaatcatag

SEQ ID NO: 17506 - DNA, 20 bp, Artificial Sequence
  chemically synthesized
gaggtaattgaatcatagag

SEQ ID NO: 17507 - DNA, 20 bp, Artificial Sequence
  chemically synthesized
aggtaattgaatcatagagg

SEQ ID NO: 17508 - DNA, 20 bp, Artificial Sequence
  chemically synthesized
ctctcatgctcttctcgtga

SEQ ID NO: 17509 - DNA, 20 bp, Artificial Sequence
  chemically synthesized
catgctcttctcgtgatagt

SEQ ID NO: 17510 - DNA, 20 bp, Artificial Sequence
  chemically synthesized
tcgtgatagtgagttcttac

SEQ ID NO: 17511 - DNA, 20 bp, Artificial Sequence
  chemically synthesized
tgagttcttacaagatctga

SEQ ID NO: 17512 - DNA, 20 bp, Artificial Sequence
  chemically synthesized
acaagatctgatggttttat

SEQ ID NO: 17513 - DNA, 20 bp, Artificial Sequence
  chemically synthesized
agatctgatggttttataag

SEQ ID NO: 17514 - DNA, 20 bp, Artificial Sequence
  chemically synthesized
cggcttttcccccttttgct

SEQ ID NO: 17515 - DNA, 20 bp, Artificial Sequence
  chemically synthesized
ctacttgctgctgccatgtg

SEQ ID NO: 17516 - DNA, 20 bp, Artificial Sequence
  chemically synthesized
cttgctgctgccatgtgaag

SEQ ID NO: 17517 - DNA, 20 bp, Artificial Sequence
  chemically synthesized
ttgctgctgccatgtgaaga

SEQ ID NO: 17518 - DNA, 20 bp, Artificial Sequence
  chemically synthesized
tcttcttctgccatgattgt

SEQ ID NO: 17519 - DNA, 20 bp, Artificial Sequence
  chemically synthesized
gccatgattgtaagtttccc

SEQ ID NO: 17520 - DNA, 20 bp, Artificial Sequence
  chemically synthesized
ccatgattgtaagtttcccg

SEQ ID NO: 17521 - DNA, 20 bp, Artificial Sequence
  chemically synthesized
taagtttcccgaggcctccc

SEQ ID NO: 17522 - DNA, 20 bp, Artificial Sequence
  chemically synthesized
ccgaggcctccccagccctg

SEQ ID NO: 17523 - DNA, 20 bp, Artificial Sequence
  chemically synthesized
ccccagccctgtggaactgt

SEQ ID NO: 17524 - DNA, 20 bp, Artificial Sequence
  chemically synthesized
ttttttccttataaattacc

SEQ ID NO: 17525 - DNA, 20 bp, Artificial Sequence
  chemically synthesized
ccttataaattacccagtct

SEQ ID NO: 17526 - DNA, 20 bp, Artificial Sequence
  chemically synthesized
cttataaattacccagtctc

SEQ ID NO: 17527 - DNA, 20 bp, Artificial Sequence
  chemically synthesized
agtctcaggtatgtctttat

SEQ ID NO: 17528 - DNA, 20 bp, Artificial Sequence
  chemically synthesized
ctcaggtatgtctttataag

SEQ ID NO: 17529 - DNA, 20 bp, Artificial Sequence
  chemically synthesized
taagcagcatgataacgaac

SEQ ID NO: 17530 - DNA, 20 bp, Artificial Sequence
  chemically synthesized
tttaaaaatataaaataaat

SEQ ID NO: 17531 - DNA, 20 bp, Artificial Sequence
  chemically synthesized
ataaattagatctgattgaa

SEQ ID NO: 17532 - DNA, 20 bp, Artificial Sequence
  chemically synthesized
taaattagatctgattgaaa

SEQ ID NO: 17533 - DNA, 20 bp, Artificial Sequence
  chemically synthesized
tgattgaaaaggcaaaaatt

SEQ ID NO: 17534 - DNA, 20 bp, Artificial Sequence
  chemically synthesized
tgaaaaggcaaaaattgagc

SEQ ID NO: 17535 - DNA, 20 bp, Artificial Sequence
  chemically synthesized
gcaagcaaaatatcacttaa

SEQ ID NO: 17536 - DNA, 20 bp, Artificial Sequence
  chemically synthesized
caagcaaaatatcacttaat

SEQ ID NO: 17537 - DNA, 20 bp, Artificial Sequence
  chemically synthesized
aagcaaaatatcacttaatg

SEQ ID NO: 17538 - DNA, 20 bp, Artificial Sequence
  chemically synthesized
tcacttaatggggtaattaa

SEQ ID NO: 17539 - DNA, 20 bp, Artificial Sequence
  chemically synthesized
cacttaatggggtaattaaa

SEQ ID NO: 17540 - DNA, 20 bp, Artificial Sequence
  chemically synthesized
acttaatggggtaattaaaa

SEQ ID NO: 17541 - DNA, 20 bp, Artificial Sequence
  chemically synthesized
atggggtaattaaaagggtg

SEQ ID NO: 17542 - DNA, 20 bp, Artificial Sequence
  chemically synthesized
aattaaaagggtgaagaaat

SEQ ID NO: 17543 - DNA, 20 bp, Artificial Sequence
  chemically synthesized
attaaaagggtgaagaaatt

SEQ ID NO: 17544 - DNA, 20 bp, Artificial Sequence
  chemically synthesized
gggtgaagaaattgggcaaa

SEQ ID NO: 17545 - DNA, 20 bp, Artificial Sequence
  chemically synthesized
attgggcaaatggatgtcat

SEQ ID NO: 17546 - DNA, 20 bp, Artificial Sequence
  chemically synthesized
ttgggcaaatggatgtcatg

SEQ ID NO: 17547 - DNA, 20 bp, Artificial Sequence
  chemically synthesized
gggcaaatggatgtcatgag

SEQ ID NO: 17548 - DNA, 20 bp, Artificial Sequence
  chemically synthesized
ggcaaatggatgtcatgagg

SEQ ID NO: 17549 - DNA, 20 bp, Artificial Sequence
  chemically synthesized
atgtcatgaggaggaatttt

SEQ ID NO: 17550 - DNA, 20 bp, Artificial Sequence
  chemically synthesized
tgtcatgaggaggaattttt

SEQ ID NO: 17551 - DNA, 20 bp, Artificial Sequence
  chemically synthesized
catgaggaggaatttttagg

SEQ ID NO: 17552 - DNA, 20 bp, Artificial Sequence
  chemically synthesized
tgaggaggaatttttaggca

SEQ ID NO: 17553 - DNA, 20 bp, Artificial Sequence
  chemically synthesized
gaggaggaatttttaggcag

SEQ ID NO: 17554 - DNA, 20 bp, Artificial Sequence
  chemically synthesized
gaatttttaggcagaggtaa

SEQ ID NO: 17555 - DNA, 20 bp, Artificial Sequence
  chemically synthesized
ttttaggcagaggtaatggt

SEQ ID NO: 17556 - DNA, 20 bp, Artificial Sequence
  chemically synthesized
ttaggcagaggtaatggtca

SEQ ID NO: 17557 - DNA, 20 bp, Artificial Sequence
  chemically synthesized
cagaggtaatggtcagagcc

SEQ ID NO: 17558 - DNA, 20 bp, Artificial Sequence
  chemically synthesized
agaggtaatggtcagagccc

SEQ ID NO: 17559 - DNA, 20 bp, Artificial Sequence
  chemically synthesized
atggtcagagcccaggccct

SEQ ID NO: 17560 - DNA, 20 bp, Artificial Sequence
  chemically synthesized
tcagagcccaggccctaagc

SEQ ID NO: 17561 - DNA, 20 bp, Artificial Sequence
  chemically synthesized
agagcccaggccctaagctg

SEQ ID NO: 17562 - DNA, 20 bp, Artificial Sequence
  chemically synthesized
gcccaggccctaagctggag

SEQ ID NO: 17563 - DNA, 20 bp, Artificial Sequence
  chemically synthesized
ccaggccctaagctggagta

SEQ ID NO: 17564 - DNA, 20 bp, Artificial Sequence
  chemically synthesized
taagctggagtagagtgtgc

SEQ ID NO: 17565 - DNA, 20 bp, Artificial Sequence
  chemically synthesized
aagctggagtagagtgtgca

SEQ ID NO: 17566 - DNA, 20 bp, Artificial Sequence
  chemically synthesized
tggagtagagtgtgcaagga

SEQ ID NO: 17567 - DNA, 20 bp, Artificial Sequence
  chemically synthesized
gagtagagtgtgcaaggaaa

SEQ ID NO: 17568 - DNA, 20 bp, Artificial Sequence
  chemically synthesized
agtgtgcaaggaaagagtaa

SEQ ID NO: 17569 - DNA, 20 bp, Artificial Sequence
  chemically synthesized
gtgtgcaaggaaagagtaat

SEQ ID NO: 17570 - DNA, 20 bp, Artificial Sequence
  chemically synthesized
gaaagagtaataggattgaa

SEQ ID NO: 17571 - DNA, 20 bp, Artificial Sequence
  chemically synthesized
aaagagtaataggattgaaa

SEQ ID NO: 17572 - DNA, 20 bp, Artificial Sequence
  chemically synthesized
ataggattgaaaaggataac

SEQ ID NO: 17573 - DNA, 20 bp, Artificial Sequence
  chemically synthesized
taggattgaaaaggataacc

SEQ ID NO: 17574 - DNA, 20 bp, Artificial Sequence
  chemically synthesized
gattgaaaaggataaccagg

SEQ ID NO: 17575 - DNA, 20 bp, Artificial Sequence
  chemically synthesized
attgaaaaggataaccaggt

SEQ ID NO: 17576 - DNA, 20 bp, Artificial Sequence
  chemically synthesized
tgaaaaggataaccaggtag

SEQ ID NO: 17577 - DNA, 20 bp, Artificial Sequence
  chemically synthesized
gaaaaggataaccaggtagg

SEQ ID NO: 17578 - DNA, 20 bp, Artificial Sequence
  chemically synthesized
gataaccaggtaggaggaca

SEQ ID NO: 17579 - DNA, 20 bp, Artificial Sequence
  chemically synthesized
ataaccaggtaggaggacat

SEQ ID NO: 17580 - DNA, 20 bp, Artificial Sequence
  chemically synthesized
taaccaggtaggaggacata

SEQ ID NO: 17581 - DNA, 20 bp, Artificial Sequence
  chemically synthesized
accaggtaggaggacatagg

SEQ ID NO: 17582 - DNA, 20 bp, Artificial Sequence
  chemically synthesized
ccaggtaggaggacataggg

SEQ ID NO: 17583 - DNA, 20 bp, Artificial Sequence
  chemically synthesized
caggtaggaggacataggga

SEQ ID NO: 17584 - DNA, 20 bp, Artificial Sequence
  chemically synthesized
aggtaggaggacatagggag

SEQ ID NO: 17585 - DNA, 20 bp, Artificial Sequence
  chemically synthesized
aggaggacatagggaggggt

SEQ ID NO: 17586 - DNA, 20 bp, Artificial Sequence
  chemically synthesized
ggaggacatagggaggggta

SEQ ID NO: 17587 - DNA, 20 bp, Artificial Sequence
  chemically synthesized
gaggacatagggaggggtaa

SEQ ID NO: 17588 - DNA, 20 bp, Artificial Sequence
  chemically synthesized
aggacatagggaggggtaag

SEQ ID NO: 17589 - DNA, 20 bp, Artificial Sequence
  chemically synthesized
gacatagggaggggtaaggg

SEQ ID NO: 17590 - DNA, 20 bp, Artificial Sequence
  chemically synthesized
acatagggaggggtaagggg

SEQ ID NO: 17591 - DNA, 20 bp, Artificial Sequence
  chemically synthesized
tagggaggggtaaggggagg

SEQ ID NO: 17592 - DNA, 20 bp, Artificial Sequence
  chemically synthesized
ggtaaggggaggaagacctc

SEQ ID NO: 17593 - DNA, 20 bp, Artificial Sequence
  chemically synthesized
aggaagacctccagtaaact

SEQ ID NO: 17594 - DNA, 20 bp, Artificial Sequence
  chemically synthesized
ggaagacctccagtaaactt

SEQ ID NO: 17595 - DNA, 20 bp, Artificial Sequence
  chemically synthesized
agacctccagtaaacttagg

SEQ ID NO: 17596 - DNA, 20 bp, Artificial Sequence
  chemically synthesized
gacctccagtaaacttaggc

SEQ ID NO: 17597 - DNA, 20 bp, Artificial Sequence
  chemically synthesized
aggcaggatatttcccgtga

SEQ ID NO: 17598 - DNA, 20 bp, Artificial Sequence
  chemically synthesized
actaaataataatcacatgt

SEQ ID NO: 17599 - DNA, 20 bp, Artificial Sequence
  chemically synthesized
aaataatctgtcgattactt

SEQ ID NO: 17600 - DNA, 20 bp, Artificial Sequence
  chemically synthesized
ttgagcaatactttgttcat

SEQ ID NO: 17601 - DNA, 20 bp, Artificial Sequence
  chemically synthesized
gcaatactttgttcatgagc

SEQ ID NO: 17602 - DNA, 20 bp, Artificial Sequence
  chemically synthesized
aatactttgttcatgagcta

SEQ ID NO: 17603 - DNA, 20 bp, Artificial Sequence
  chemically synthesized
ctttgttcatgagctagagc

SEQ ID NO: 17604 - DNA, 20 bp, Artificial Sequence
  chemically synthesized
tttgttcatgagctagagca

SEQ ID NO: 17605 - DNA, 20 bp, Artificial Sequence
  chemically synthesized
ttgttcatgagctagagcaa

SEQ ID NO: 17606 - DNA, 20 bp, Artificial Sequence
  chemically synthesized
tgttcatgagctagagcaag

SEQ ID NO: 17607 - DNA, 20 bp, Artificial Sequence
  chemically synthesized
ctagagcaaggggatgactc

SEQ ID NO: 17608 - DNA, 20 bp, Artificial Sequence
  chemically synthesized
agaaatcctttgtgaaatcc

SEQ ID NO: 17609 - DNA, 20 bp, Artificial Sequence
  chemically synthesized
aaatcctttgtgaaatcctg

SEQ ID NO: 17610 - DNA, 20 bp, Artificial Sequence
  chemically synthesized
aatcctttgtgaaatcctgg

SEQ ID NO: 17611 - DNA, 20 bp, Artificial Sequence
  chemically synthesized
tgtgaaatcctggaggtaat

SEQ ID NO: 17612 - DNA, 20 bp, Artificial Sequence
  chemically synthesized
tcctggaggtaataagatcc

SEQ ID NO: 17613 - DNA, 20 bp, Artificial Sequence
  chemically synthesized
atcttcaactcaattgcaaa

SEQ ID NO: 17614 - DNA, 20 bp, Artificial Sequence
  chemically synthesized
caaaacatattccatttcat

SEQ ID NO: 17615 - DNA, 20 bp, Artificial Sequence
  chemically synthesized
tattccatttcatcagacta

SEQ ID NO: 17616 - DNA, 20 bp, Artificial Sequence
  chemically synthesized
attccatttcatcagactac

SEQ ID NO: 17617 - DNA, 20 bp, Artificial Sequence
  chemically synthesized
catcagactacaggttttaa

SEQ ID NO: 17618 - DNA, 20 bp, Artificial Sequence
  chemically synthesized
atttcttaaatgtattattc

SEQ ID NO: 17619 - DNA, 20 bp, Artificial Sequence
  chemically synthesized
ccagtaacttatactttaca

SEQ ID NO: 17620 - DNA, 20 bp, Artificial Sequence
  chemically synthesized
tacatagtaaatcttatcaa

SEQ ID NO: 17621 - DNA, 20 bp, Artificial Sequence
  chemically synthesized
ttatcaatagtcacaatcaa

SEQ ID NO: 17622 - DNA, 20 bp, Artificial Sequence
  chemically synthesized
agtcacaatcaatggtcaca

SEQ ID NO: 17623 - DNA, 20 bp, Artificial Sequence
  chemically synthesized
cacaatcaatggtcacaaag

SEQ ID NO: 17624 - DNA, 20 bp, Artificial Sequence
  chemically synthesized
tcacaaagtagaacttcatc

SEQ ID NO: 17625 - DNA, 20 bp, Artificial Sequence
  chemically synthesized
acaaagtagaacttcatctg

SEQ ID NO: 17626 - DNA, 20 bp, Artificial Sequence
  chemically synthesized
tcatctggagacattacttt

SEQ ID NO: 17627 - DNA, 20 bp, Artificial Sequence
  chemically synthesized
ggagacattacttttagcct

SEQ ID NO: 17628 - DNA, 20 bp, Artificial Sequence
  chemically synthesized
gccatgcaaaatatactttt

SEQ ID NO: 17629 - DNA, 20 bp, Artificial Sequence
  chemically synthesized
tttggaaaattgccctttga

SEQ ID NO: 17630 - DNA, 20 bp, Artificial Sequence
  chemically synthesized
ttggaaaattgccctttgaa

SEQ ID NO: 17631 - DNA, 20 bp, Artificial Sequence
  chemically synthesized
aaaattgccctttgaaaggc

SEQ ID NO: 17632 - DNA, 20 bp, Artificial Sequence
  chemically synthesized
ctttgaaaggcgagacacaa

SEQ ID NO: 17633 - DNA, 20 bp, Artificial Sequence
  chemically synthesized
tttgaaaggcgagacacaaa

SEQ ID NO: 17634 - DNA, 20 bp, Artificial Sequence
  chemically synthesized
caaatgttgatgctattata

SEQ ID NO: 17635 - DNA, 20 bp, Artificial Sequence
  chemically synthesized
atgctattatatggtaccaa

SEQ ID NO: 17636 - DNA, 20 bp, Artificial Sequence
  chemically synthesized
tgctattatatggtaccaat

SEQ ID NO: 17637 - DNA, 20 bp, Artificial Sequence
  chemically synthesized
ataggattcattaatttata

SEQ ID NO: 17638 - DNA, 20 bp, Artificial Sequence
  chemically synthesized
taggattcattaatttataa

SEQ ID NO: 17639 - DNA, 20 bp, Artificial Sequence
  chemically synthesized
ggattcattaatttataaag

SEQ ID NO: 17640 - DNA, 20 bp, Artificial Sequence
  chemically synthesized
ttcattaatttataaaggag

SEQ ID NO: 17641 - DNA, 20 bp, Artificial Sequence
  chemically synthesized
cattaatttataaaggagaa

SEQ ID NO: 17642 - DNA, 20 bp, Artificial Sequence
  chemically synthesized
ctaatgtaactccaaaatgc

SEQ ID NO: 17643 - DNA, 20 bp, Artificial Sequence
  chemically synthesized
aatgcaagcaattttcatat

SEQ ID NO: 17644 - DNA, 20 bp, Artificial Sequence
  chemically synthesized
attttcatatgagtctacac

SEQ ID NO: 17645 - DNA, 20 bp, Artificial Sequence
  chemically synthesized
tacacaagctaattgtcctt

SEQ ID NO: 17646 - DNA, 20 bp, Artificial Sequence
  chemically synthesized
tccttaagaatttcatcttt

SEQ ID NO: 17647 - DNA, 20 bp, Artificial Sequence
  chemically synthesized
ccttaagaatttcatcttta

SEQ ID NO: 17648 - DNA, 20 bp, Artificial Sequence
  chemically synthesized
agaatttcatctttaaggaa

SEQ ID NO: 17649 - DNA, 20 bp, Artificial Sequence
  chemically synthesized
aagttttttactgtatcaaa

SEQ ID NO: 17650 - DNA, 20 bp, Artificial Sequence
  chemically synthesized
ttttttactgtatcaaaaag

SEQ ID NO: 17651 - DNA, 20 bp, Artificial Sequence
  chemically synthesized
aagaagtttaaactgtcatt

SEQ ID NO: 17652 - DNA, 20 bp, Artificial Sequence
  chemically synthesized
aagtttaaactgtcattgag

SEQ ID NO: 17653 - DNA, 20 bp, Artificial Sequence
  chemically synthesized
gtttaaactgtcattgagca

SEQ ID NO: 17654 - DNA, 20 bp, Artificial Sequence
  chemically synthesized
attgagcagagtctgataat

SEQ ID NO: 17655 - DNA, 20 bp, Artificial Sequence
  chemically synthesized
ttgagcagagtctgataata

SEQ ID NO: 17656 - DNA, 20 bp, Artificial Sequence
  chemically synthesized
ataaggacactgtcaaatca

SEQ ID NO: 17657 - DNA, 20 bp, Artificial Sequence
  chemically synthesized
gacactgtcaaatcacagtt

SEQ ID NO: 17658 - DNA, 20 bp, Artificial Sequence
  chemically synthesized
cagttcagatgttatgtgat

SEQ ID NO: 17659 - DNA, 20 bp, Artificial Sequence
  chemically synthesized
agttcagatgttatgtgatg

SEQ ID NO: 17660 - DNA, 20 bp, Artificial Sequence
  chemically synthesized
cagatgttatgtgatgagga

SEQ ID NO: 17661 - DNA, 20 bp, Artificial Sequence
  chemically synthesized
gttatgtgatgaggacagaa

SEQ ID NO: 17662 - DNA, 20 bp, Artificial Sequence
  chemically synthesized
gaggacagaatagaacacat

SEQ ID NO: 17663 - DNA, 20 bp, Artificial Sequence
  chemically synthesized
aggacagaatagaacacatg

SEQ ID NO: 17664 - DNA, 20 bp, Artificial Sequence
  chemically synthesized
gacagaatagaacacatgag

SEQ ID NO: 17665 - DNA, 20 bp, Artificial Sequence
  chemically synthesized
acagaatagaacacatgagg

SEQ ID NO: 17666 - DNA, 20 bp, Artificial Sequence
  chemically synthesized
gaatagaacacatgaggagg

SEQ ID NO: 17667 - DNA, 20 bp, Artificial Sequence
  chemically synthesized
tagaacacatgaggaggaag

SEQ ID NO: 17668 - DNA, 20 bp, Artificial Sequence
  chemically synthesized
gaggaggaagcagaaacttc

SEQ ID NO: 17669 - DNA, 20 bp, Artificial Sequence
  chemically synthesized
ggaagcagaaacttctagac

SEQ ID NO: 17670 - DNA, 20 bp, Artificial Sequence
  chemically synthesized
cagaaacttctagactggac

SEQ ID NO: 17671 - DNA, 20 bp, Artificial Sequence
  chemically synthesized
acttctagactggacaagaa

SEQ ID NO: 17672 - DNA, 20 bp, Artificial Sequence
  chemically synthesized
aaccatccaacaataaatct

SEQ ID NO: 17673 - DNA, 20 bp, Artificial Sequence
  chemically synthesized
tgatgtcatctactacatct

SEQ ID NO: 17674 - DNA, 20 bp, Artificial Sequence
  chemically synthesized
ctaagtatttcctcaaattc

SEQ ID NO: 17675 - DNA, 20 bp, Artificial Sequence
  chemically synthesized
cctcaaattctggacaattt

SEQ ID NO: 17676 - DNA, 20 bp, Artificial Sequence
  chemically synthesized
aaccatcaaaattatttgtt

SEQ ID NO: 17677 - DNA, 20 bp, Artificial Sequence
  chemically synthesized
accatcaaaattatttgttg

SEQ ID NO: 17678 - DNA, 20 bp, Artificial Sequence
  chemically synthesized
ttgttgaggaaaaataaact

SEQ ID NO: 17679 - DNA, 20 bp, Artificial Sequence
  chemically synthesized
aataaacttagccaatttgc

SEQ ID NO: 17680 - DNA, 20 bp, Artificial Sequence
  chemically synthesized
ataaacttagccaatttgca

SEQ ID NO: 17681 - DNA, 20 bp, Artificial Sequence
  chemically synthesized
taaacttagccaatttgcaa

SEQ ID NO: 17682 - DNA, 20 bp, Artificial Sequence
  chemically synthesized
ttgcaagggcaactaaaatg

SEQ ID NO: 17683 - DNA, 20 bp, Artificial Sequence
  chemically synthesized
aaatgaagaacttttcttta

SEQ ID NO: 17684 - DNA, 20 bp, Artificial Sequence
  chemically synthesized
aagaacttttctttaaagtg

SEQ ID NO: 17685 - DNA, 20 bp, Artificial Sequence
  chemically synthesized
agaacttttctttaaagtgt

SEQ ID NO: 17686 - DNA, 20 bp, Artificial Sequence
  chemically synthesized
aacttttctttaaagtgtgg

SEQ ID NO: 17687 - DNA, 20 bp, Artificial Sequence
  chemically synthesized
aaagtgtgggagtcacatct

SEQ ID NO: 17688 - DNA, 20 bp, Artificial Sequence
  chemically synthesized
caacatatttaaatatatct

SEQ ID NO: 17689 - DNA, 20 bp, Artificial Sequence
  chemically synthesized
acaaaaatgcaaaatttcca

SEQ ID NO: 17690 - DNA, 20 bp, Artificial Sequence
  chemically synthesized
aaagaatttctcctcttctg

SEQ ID NO: 17691 - DNA, 20 bp, Artificial Sequence
  chemically synthesized
ttcttcatcttcatcttttc

SEQ ID NO: 17692 - DNA, 20 bp, Artificial Sequence
  chemically synthesized
tcttcatcttcatcttttcc

SEQ ID NO: 17693 - DNA, 20 bp, Artificial Sequence
  chemically synthesized
ttcatcttcatcttttccag

SEQ ID NO: 17694 - DNA, 20 bp, Artificial Sequence
  chemically synthesized
tttccaggagaatataccat

SEQ ID NO: 17695 - DNA, 20 bp, Artificial Sequence
  chemically synthesized
aatataccataagtttctga

SEQ ID NO: 17696 - DNA, 20 bp, Artificial Sequence
  chemically synthesized
ttctgatggtacacatttat

SEQ ID NO: 17697 - DNA, 20 bp, Artificial Sequence
  chemically synthesized
ttgcaactatgcatcttact

SEQ ID NO: 17698 - DNA, 20 bp, Artificial Sequence
  chemically synthesized
gcaactatgcatcttactca

SEQ ID NO: 17699 - DNA, 20 bp, Artificial Sequence
  chemically synthesized
cttaaaacatccttgtttgt

SEQ ID NO: 17700 - DNA, 20 bp, Artificial Sequence
  chemically synthesized
tttcaaattcatatacactt

SEQ ID NO: 17701 - DNA, 20 bp, Artificial Sequence
  chemically synthesized
caaattcatatacactttgg

SEQ ID NO: 17702 - DNA, 20 bp, Artificial Sequence
  chemically synthesized
gcaaacatttttatttgctg

SEQ ID NO: 17703 - DNA, 20 bp, Artificial Sequence
  chemically synthesized
ttttatttgctgaagaacat

SEQ ID NO: 17704 - DNA, 20 bp, Artificial Sequence
  chemically synthesized
tttatttgctgaagaacata

SEQ ID NO: 17705 - DNA, 20 bp, Artificial Sequence
  chemically synthesized
ttatttgctgaagaacataa

SEQ ID NO: 17706 - DNA, 20 bp, Artificial Sequence
  chemically synthesized
tatttgctgaagaacataag

SEQ ID NO: 17707 - DNA, 20 bp, Artificial Sequence
  chemically synthesized
atttgctgaagaacataagg

SEQ ID NO: 17708 - DNA, 20 bp, Artificial Sequence
  chemically synthesized
tgaagaacataagggggaaa

SEQ ID NO: 17709 - DNA, 20 bp, Artificial Sequence
  chemically synthesized
aagaacataagggggaaata

SEQ ID NO: 17710 - DNA, 20 bp, Artificial Sequence
  chemically synthesized
aaatagagattctttatttg

SEQ ID NO: 17711 - DNA, 20 bp, Artificial Sequence
  chemically synthesized
aagaaacaaatgatttgatt

SEQ ID NO: 17712 - DNA, 20 bp, Artificial Sequence
  chemically synthesized
agaaacaaatgatttgattt

SEQ ID NO: 17713 - DNA, 20 bp, Artificial Sequence
  chemically synthesized
gatttgggaaatgaaatgaa

SEQ ID NO: 17714 - DNA, 20 bp, Artificial Sequence
  chemically synthesized
atgaaatgaaaagaaaaaca

SEQ ID NO: 17715 - DNA, 20 bp, Artificial Sequence
  chemically synthesized
gctacttcttttactcatct

SEQ ID NO: 17716 - DNA, 20 bp, Artificial Sequence
  chemically synthesized
ctacttcttttactcatctg

SEQ ID NO: 17717 - DNA, 20 bp, Artificial Sequence
  chemically synthesized
ttttactcatctgaggcctt

SEQ ID NO: 17718 - DNA, 20 bp, Artificial Sequence
  chemically synthesized
actcatctgaggccttcaga

SEQ ID NO: 17719 - DNA, 20 bp, Artificial Sequence
  chemically synthesized
ccttcagatagtcccccata

SEQ ID NO: 17720 - DNA, 20 bp, Artificial Sequence
  chemically synthesized
gatagtcccccatatagcct

SEQ ID NO: 17721 - DNA, 20 bp, Artificial Sequence
  chemically synthesized
tagtcccccatatagcctta

SEQ ID NO: 17722 - DNA, 20 bp, Artificial Sequence
  chemically synthesized
aaaatatgattatgctcttt

SEQ ID NO: 17723 - DNA, 20 bp, Artificial Sequence
  chemically synthesized
attatgctctttcagtctat

SEQ ID NO: 17724 - DNA, 20 bp, Artificial Sequence
  chemically synthesized
ctattagaaataaaaacata

SEQ ID NO: 17725 - DNA, 20 bp, Artificial Sequence
  chemically synthesized
cataaagcttaaaaaatttc

SEQ ID NO: 17726 - DNA, 20 bp, Artificial Sequence
  chemically synthesized
ataaagcttaaaaaatttca

SEQ ID NO: 17727 - DNA, 20 bp, Artificial Sequence
  chemically synthesized
taaagcttaaaaaatttcaa

SEQ ID NO: 17728 - DNA, 20 bp, Artificial Sequence
  chemically synthesized
agcttaaaaaatttcaaggg

SEQ ID NO: 17729 - DNA, 20 bp, Artificial Sequence
  chemically synthesized
gcttaaaaaatttcaaggga

SEQ ID NO: 17730 - DNA, 20 bp, Artificial Sequence
  chemically synthesized
cttaaaaaatttcaagggaa

SEQ ID NO: 17731 - DNA, 20 bp, Artificial Sequence
  chemically synthesized
ttaaaaaatttcaagggaag

SEQ ID NO: 17732 - DNA, 20 bp, Artificial Sequence
  chemically synthesized
atttcaagggaaggggcttg

SEQ ID NO: 17733 - DNA, 20 bp, Artificial Sequence
  chemically synthesized
gggcttgaagattactgact

SEQ ID NO: 17734 - DNA, 20 bp, Artificial Sequence
  chemically synthesized
ggcttgaagattactgacta

SEQ ID NO: 17735 - DNA, 20 bp, Artificial Sequence
  chemically synthesized
gcttgaagattactgactaa

SEQ ID NO: 17736 - DNA, 20 bp, Artificial Sequence
  chemically synthesized
tgaagattactgactaaggg

SEQ ID NO: 17737 - DNA, 20 bp, Artificial Sequence
  chemically synthesized
tgacactcacctcctccaca

SEQ ID NO: 17738 - DNA, 20 bp, Artificial Sequence
  chemically synthesized
tcctccacaaagaaccaaaa

SEQ ID NO: 17739 - DNA, 20 bp, Artificial Sequence
  chemically synthesized
ccacaaagaaccaaaatagt

SEQ ID NO: 17740 - DNA, 20 bp, Artificial Sequence
  chemically synthesized
caaagaaccaaaatagtaag

SEQ ID NO: 17741 - DNA, 20 bp, Artificial Sequence
  chemically synthesized
gtaagtagaaaatcccacat

SEQ ID NO: 17742 - DNA, 20 bp, Artificial Sequence
  chemically synthesized
aagtagaaaatcccacataa

SEQ ID NO: 17743 - DNA, 20 bp, Artificial Sequence
  chemically synthesized
gtagaaaatcccacataaga

SEQ ID NO: 17744 - DNA, 20 bp, Artificial Sequence
  chemically synthesized
tcccacataagagagaattc

SEQ ID NO: 17745 - DNA, 20 bp, Artificial Sequence
  chemically synthesized
gagagaattctggaattcaa

SEQ ID NO: 17746 - DNA, 20 bp, Artificial Sequence
  chemically synthesized
gagaattctggaattcaaca

SEQ ID NO: 17747 - DNA, 20 bp, Artificial Sequence
  chemically synthesized
aattctggaattcaacagag

SEQ ID NO: 17748 - DNA, 20 bp, Artificial Sequence
  chemically synthesized
ggaattcaacagagaagtga

SEQ ID NO: 17749 - DNA, 20 bp, Artificial Sequence
  chemically synthesized
gaattcaacagagaagtgac

SEQ ID NO: 17750 - DNA, 20 bp, Artificial Sequence
  chemically synthesized
ttcaacagagaagtgacagg

SEQ ID NO: 17751 - DNA, 20 bp, Artificial Sequence
  chemically synthesized
agaagtgacaggaagcatct

SEQ ID NO: 17752 - DNA, 20 bp, Artificial Sequence
  chemically synthesized
gaagtgacaggaagcatcta

SEQ ID NO: 17753 - DNA, 20 bp, Artificial Sequence
  chemically synthesized
aggaagcatctaaggcaatg

SEQ ID NO: 17754 - DNA, 20 bp, Artificial Sequence
  chemically synthesized
ggaagcatctaaggcaatga

SEQ ID NO: 17755 - DNA, 20 bp, Artificial Sequence
  chemically synthesized
gaagcatctaaggcaatgaa

SEQ ID NO: 17756 - DNA, 20 bp, Artificial Sequence
  chemically synthesized
aagcatctaaggcaatgaag

SEQ ID NO: 17757 - DNA, 20 bp, Artificial Sequence
  chemically synthesized
gcatctaaggcaatgaaggg

SEQ ID NO: 17758 - DNA, 20 bp, Artificial Sequence
  chemically synthesized
catctaaggcaatgaagggg

SEQ ID NO: 17759 - DNA, 20 bp, Artificial Sequence
  chemically synthesized
atctaaggcaatgaagggga

SEQ ID NO: 17760 - DNA, 20 bp, Artificial Sequence
  chemically synthesized
taaggcaatgaaggggaggg

SEQ ID NO: 17761 - DNA, 20 bp, Artificial Sequence
  chemically synthesized
gcaatgaaggggagggaagc

SEQ ID NO: 17762 - DNA, 20 bp, Artificial Sequence
  chemically synthesized
caatgaaggggagggaagca

SEQ ID NO: 17763 - DNA, 20 bp, Artificial Sequence
  chemically synthesized
tgaaggggagggaagcaagg

SEQ ID NO: 17764 - DNA, 20 bp, Artificial Sequence
  chemically synthesized
gggaagcaaggaagcctacc

SEQ ID NO: 17765 - DNA, 20 bp, Artificial Sequence
  chemically synthesized
aagcaaggaagcctacccag

SEQ ID NO: 17766 - DNA, 20 bp, Artificial Sequence
  chemically synthesized
agcaaggaagcctacccagt

SEQ ID NO: 17767 - DNA, 20 bp, Artificial Sequence
  chemically synthesized
gcaaggaagcctacccagta

SEQ ID NO: 17768 - DNA, 20 bp, Artificial Sequence
  chemically synthesized
acccagtagggatcctctgt

SEQ ID NO: 17769 - DNA, 20 bp, Artificial Sequence
  chemically synthesized
cccagtagggatcctctgtg

SEQ ID NO: 17770 - DNA, 20 bp, Artificial Sequence
  chemically synthesized
gtagggatcctctgtgaggc

SEQ ID NO: 17771 - DNA, 20 bp, Artificial Sequence
  chemically synthesized
agggatcctctgtgaggcca

SEQ ID NO: 17772 - DNA, 20 bp, Artificial Sequence
  chemically synthesized
ggatcctctgtgaggccaga

SEQ ID NO: 17773 - DNA, 20 bp, Artificial Sequence
  chemically synthesized
gatcctctgtgaggccagag

SEQ ID NO: 17774 - DNA, 20 bp, Artificial Sequence
  chemically synthesized
gtgaggccagagaggctccc

SEQ ID NO: 17775 - DNA, 20 bp, Artificial Sequence
  chemically synthesized
gaggctccccagtgcatcga

SEQ ID NO: 17776 - DNA, 20 bp, Artificial Sequence
  chemically synthesized
tccccagtgcatcgaaagtt

SEQ ID NO: 17777 - DNA, 20 bp, Artificial Sequence
  chemically synthesized
aaagttaagtgactgactcc

SEQ ID NO: 17778 - DNA, 20 bp, Artificial Sequence
  chemically synthesized
gttaagtgactgactcccag

SEQ ID NO: 17779 - DNA, 20 bp, Artificial Sequence
  chemically synthesized
agtggtccacatctgcatta

SEQ ID NO: 17780 - DNA, 20 bp, Artificial Sequence
  chemically synthesized
cacatctgcattatggactc

SEQ ID NO: 17781 - DNA, 20 bp, Artificial Sequence
  chemically synthesized
acatctgcattatggactcc

SEQ ID NO: 17782 - DNA, 20 bp, Artificial Sequence
  chemically synthesized
attatggactccaggaatcc

SEQ ID NO: 17783 - DNA, 20 bp, Artificial Sequence
  chemically synthesized
gactccaggaatcctagcca

SEQ ID NO: 17784 - DNA, 20 bp, Artificial Sequence
  chemically synthesized
actccaggaatcctagccac

SEQ ID NO: 17785 - DNA, 20 bp, Artificial Sequence
  chemically synthesized
tccaggaatcctagccacag

SEQ ID NO: 17786 - DNA, 20 bp, Artificial Sequence
  chemically synthesized
caggaatcctagccacagga

SEQ ID NO: 17787 - DNA, 20 bp, Artificial Sequence
  chemically synthesized
aggagagtcccttgaccatg

SEQ ID NO: 17788 - DNA, 20 bp, Artificial Sequence
  chemically synthesized
ggagagtcccttgaccatgc

SEQ ID NO: 17789 - DNA, 20 bp, Artificial Sequence
  chemically synthesized
cccttgaccatgcaggcctt

SEQ ID NO: 17790 - DNA, 20 bp, Artificial Sequence
  chemically synthesized
gcaggccttgagactatcat

SEQ ID NO: 17791 - DNA, 20 bp, Artificial Sequence
  chemically synthesized
caggccttgagactatcata

SEQ ID NO: 17792 - DNA, 20 bp, Artificial Sequence
  chemically synthesized
gactatcataaggaactgcc

SEQ ID NO: 17793 - DNA, 20 bp, Artificial Sequence
  chemically synthesized
aactgcccagcaatcgcaca

SEQ ID NO: 17794 - DNA, 20 bp, Artificial Sequence
  chemically synthesized
actgcccagcaatcgcacaa

SEQ ID NO: 17795 - DNA, 20 bp, Artificial Sequence
  chemically synthesized
atcgcacaaaggcattgctc

SEQ ID NO: 17796 - DNA, 20 bp, Artificial Sequence
  chemically synthesized
cgcacaaaggcattgctcca

SEQ ID NO: 17797 - DNA, 20 bp, Artificial Sequence
  chemically synthesized
acaaaggcattgctccagag

SEQ ID NO: 17798 - DNA, 20 bp, Artificial Sequence
  chemically synthesized
caaaggcattgctccagaga

SEQ ID NO: 17799 - DNA, 20 bp, Artificial Sequence
  chemically synthesized
aaggcattgctccagagaag

SEQ ID NO: 17800 - DNA, 20 bp, Artificial Sequence
  chemically synthesized
tccagagaaggagctctcac

SEQ ID NO: 17801 - DNA, 20 bp, Artificial Sequence
  chemically synthesized
ccagagaaggagctctcact

SEQ ID NO: 17802 - DNA, 20 bp, Artificial Sequence
  chemically synthesized
cccctgccatccccattact

SEQ ID NO: 17803 - DNA, 20 bp, Artificial Sequence
  chemically synthesized
ctgccatccccattactgag

SEQ ID NO: 17804 - DNA, 20 bp, Artificial Sequence
  chemically synthesized
catccccattactgagcagc

SEQ ID NO: 17805 - DNA, 20 bp, Artificial Sequence
  chemically synthesized
atccccattactgagcagca

SEQ ID NO: 17806 - DNA, 20 bp, Artificial Sequence
  chemically synthesized
gagcagcaaggtgccatttt

SEQ ID NO: 17807 - DNA, 20 bp, Artificial Sequence
  chemically synthesized
gcagcaaggtgccattttga

SEQ ID NO: 17808 - DNA, 20 bp, Artificial Sequence
  chemically synthesized
tttgagagcccaacacccac

SEQ ID NO: 17809 - DNA, 20 bp, Artificial Sequence
  chemically synthesized
caccagatgacatcgttcct

SEQ ID NO: 17810 - DNA, 20 bp, Artificial Sequence
  chemically synthesized
tctgcatctctacatccctg

SEQ ID NO: 17811 - DNA, 20 bp, Artificial Sequence
  chemically synthesized
ctgctgacatcccccaccca

SEQ ID NO: 17812 - DNA, 20 bp, Artificial Sequence
  chemically synthesized
gacatcccccacccacagct

SEQ ID NO: 17813 - DNA, 20 bp, Artificial Sequence
  chemically synthesized
ccacagctgagtgctactgc

SEQ ID NO: 17814 - DNA, 20 bp, Artificial Sequence
  chemically synthesized
ctactgctggctgctgtcac

SEQ ID NO: 17815 - DNA, 20 bp, Artificial Sequence
  chemically synthesized
tactgctggctgctgtcacc

SEQ ID NO: 17816 - DNA, 20 bp, Artificial Sequence
  chemically synthesized
actgctggctgctgtcacca

SEQ ID NO: 17817 - DNA, 20 bp, Artificial Sequence
  chemically synthesized
ggctgctgtcaccagggata

SEQ ID NO: 17818 - DNA, 20 bp, Artificial Sequence
  chemically synthesized
ccagggataaagtgtgtcat

SEQ ID NO: 17819 - DNA, 20 bp, Artificial Sequence
  chemically synthesized
gggataaagtgtgtcattag

SEQ ID NO: 17820 - DNA, 20 bp, Artificial Sequence
  chemically synthesized
ataaagtgtgtcattagaag

SEQ ID NO: 17821 - DNA, 20 bp, Artificial Sequence
  chemically synthesized
gaagtggactcccccacccc

SEQ ID NO: 17822 - DNA, 20 bp, Artificial Sequence
  chemically synthesized
gtggactcccccacccccag

SEQ ID NO: 17823 - DNA, 20 bp, Artificial Sequence
  chemically synthesized
gactcccccacccccagtag

SEQ ID NO: 17824 - DNA, 20 bp, Artificial Sequence
  chemically synthesized
actcccccacccccagtagc

SEQ ID NO: 17825 - DNA, 20 bp, Artificial Sequence
  chemically synthesized
ctcccccacccccagtagca

SEQ ID NO: 17826 - DNA, 20 bp, Artificial Sequence
  chemically synthesized
cagggctgctacacatttat

SEQ ID NO: 17827 - DNA, 20 bp, Artificial Sequence
  chemically synthesized
tacacatttataagctccct

SEQ ID NO: 17828 - DNA, 20 bp, Artificial Sequence
  chemically synthesized
agaaaatgctaccccacttg

SEQ ID NO: 17829 - DNA, 20 bp, Artificial Sequence
  chemically synthesized
ccccacttgcagccaccatc

SEQ ID NO: 17830 - DNA, 20 bp, Artificial Sequence
  chemically synthesized
cccacttgcagccaccatct

SEQ ID NO: 17831 - DNA, 20 bp, Artificial Sequence
  chemically synthesized
ccacttgcagccaccatctg

SEQ ID NO: 17832 - DNA, 20 bp, Artificial Sequence
  chemically synthesized
gggctgaaacacatgcccac

SEQ ID NO: 17833 - DNA, 20 bp, Artificial Sequence
  chemically synthesized
gcccaccagcaacccattta

SEQ ID NO: 17834 - DNA, 20 bp, Artificial Sequence
  chemically synthesized
tttatagctgctgccactga

SEQ ID NO: 17835 - DNA, 20 bp, Artificial Sequence
  chemically synthesized
aacacaccccgcaccccttc

SEQ ID NO: 17836 - DNA, 20 bp, Artificial Sequence
  chemically synthesized
cacaccccgcaccccttcaa

SEQ ID NO: 17837 - DNA, 20 bp, Artificial Sequence
  chemically synthesized
accccgcaccccttcaagag

SEQ ID NO: 17838 - DNA, 20 bp, Artificial Sequence
  chemically synthesized
ccccgcaccccttcaagagc

SEQ ID NO: 17839 - DNA, 20 bp, Artificial Sequence
  chemically synthesized
cccgcaccccttcaagagca

SEQ ID NO: 17840 - DNA, 20 bp, Artificial Sequence
  chemically synthesized
tcaagagcagggcaacaatg

SEQ ID NO: 17841 - DNA, 20 bp, Artificial Sequence
  chemically synthesized
agagcagggcaacaatgcag

SEQ ID NO: 17842 - DNA, 20 bp, Artificial Sequence
  chemically synthesized
gcagtagctgctaattcact

SEQ ID NO: 17843 - DNA, 20 bp, Artificial Sequence
  chemically synthesized
cagtagctgctaattcactc

SEQ ID NO: 17844 - DNA, 20 bp, Artificial Sequence
  chemically synthesized
aattcactcaggcattctgc

SEQ ID NO: 17845 - DNA, 20 bp, Artificial Sequence
  chemically synthesized
attcactcaggcattctgct

SEQ ID NO: 17846 - DNA, 20 bp, Artificial Sequence
  chemically synthesized
ttcactcaggcattctgctg

SEQ ID NO: 17847 - DNA, 20 bp, Artificial Sequence
  chemically synthesized
tcactcaggcattctgctgg

SEQ ID NO: 17848 - DNA, 20 bp, Artificial Sequence
  chemically synthesized
aggcattctgctgggggcct

SEQ ID NO: 17849 - DNA, 20 bp, Artificial Sequence
  chemically synthesized
ggcattctgctgggggcctg

SEQ ID NO: 17850 - DNA, 20 bp, Artificial Sequence
  chemically synthesized
gcctgaggatcactccactc

SEQ ID NO: 17851 - DNA, 20 bp, Artificial Sequence
  chemically synthesized
cactccactccagcctatga

SEQ ID NO: 17852 - DNA, 20 bp, Artificial Sequence
  chemically synthesized
ccactccagcctatgatagc

SEQ ID NO: 17853 - DNA, 20 bp, Artificial Sequence
  chemically synthesized
cggtgtccacacacaccact

SEQ ID NO: 17854 - DNA, 20 bp, Artificial Sequence
  chemically synthesized
tgtccacacacaccactgag

SEQ ID NO: 17855 - DNA, 20 bp, Artificial Sequence
  chemically synthesized
cacacaccactgagtggcct

SEQ ID NO: 17856 - DNA, 20 bp, Artificial Sequence
  chemically synthesized
acacaccactgagtggcctg

SEQ ID NO: 17857 - DNA, 20 bp, Artificial Sequence
  chemically synthesized
accactgagtggcctgaggt

SEQ ID NO: 17858 - DNA, 20 bp, Artificial Sequence
  chemically synthesized
ccactgagtggcctgaggtc

SEQ ID NO: 17859 - DNA, 20 bp, Artificial Sequence
  chemically synthesized
ggcctgaggtcaggaacacc

SEQ ID NO: 17860 - DNA, 20 bp, Artificial Sequence
  chemically synthesized
gaggtcaggaacacccagcc

SEQ ID NO: 17861 - DNA, 20 bp, Artificial Sequence
  chemically synthesized
ctttgccttcctcaatgcct

SEQ ID NO: 17862 - DNA, 20 bp, Artificial Sequence
  chemically synthesized
gccttcctcaatgcctaagc

SEQ ID NO: 17863 - DNA, 20 bp, Artificial Sequence
  chemically synthesized
caatgcctaagcaagttgtc

SEQ ID NO: 17864 - DNA, 20 bp, Artificial Sequence
  chemically synthesized
aatgcctaagcaagttgtct

SEQ ID NO: 17865 - DNA, 20 bp, Artificial Sequence
  chemically synthesized
aagcaagttgtctgggaacc

SEQ ID NO: 17866 - DNA, 20 bp, Artificial Sequence
  chemically synthesized
gcaagttgtctgggaaccca

SEQ ID NO: 17867 - DNA, 20 bp, Artificial Sequence
  chemically synthesized
gttgtctgggaacccagaga

SEQ ID NO: 17868 - DNA, 20 bp, Artificial Sequence
  chemically synthesized
cttgtgccatccaccatgac

SEQ ID NO: 17869 - DNA, 20 bp, Artificial Sequence
  chemically synthesized
atccaccatgactggtacct

SEQ ID NO: 17870 - DNA, 20 bp, Artificial Sequence
  chemically synthesized
tggtacctaagcaaccctcc

SEQ ID NO: 17871 - DNA, 20 bp, Artificial Sequence
  chemically synthesized
tacctaagcaaccctcccag

SEQ ID NO: 17872 - DNA, 20 bp, Artificial Sequence
  chemically synthesized
ccctcccagaagcctgatga

SEQ ID NO: 17873 - DNA, 20 bp, Artificial Sequence
  chemically synthesized
cctcccagaagcctgatgat

SEQ ID NO: 17874 - DNA, 20 bp, Artificial Sequence
  chemically synthesized
tctgccactgccatcacaac

SEQ ID NO: 17875 - DNA, 20 bp, Artificial Sequence
  chemically synthesized
cctcctgcatgtgccacctg

SEQ ID NO: 17876 - DNA, 20 bp, Artificial Sequence
  chemically synthesized
ctcctgcatgtgccacctgt

SEQ ID NO: 17877 - DNA, 20 bp, Artificial Sequence
  chemically synthesized
atgtgccacctgtgggtctg

SEQ ID NO: 17878 - DNA, 20 bp, Artificial Sequence
  chemically synthesized
ccacctgtgggtctgaagac

SEQ ID NO: 17879 - DNA, 20 bp, Artificial Sequence
  chemically synthesized
ggtctgaagactggctcatt

SEQ ID NO: 17880 - DNA, 20 bp, Artificial Sequence
  chemically synthesized
actggctcattcagcccttg

SEQ ID NO: 17881 - DNA, 20 bp, Artificial Sequence
  chemically synthesized
cttgcagccaccaccaacac

SEQ ID NO: 17882 - DNA, 20 bp, Artificial Sequence
  chemically synthesized
agccaccaccaacaccagtg

SEQ ID NO: 17883 - DNA, 20 bp, Artificial Sequence
  chemically synthesized
caacaccagtgcagactgct

SEQ ID NO: 17884 - DNA, 20 bp, Artificial Sequence
  chemically synthesized
aacaccagtgcagactgctt

SEQ ID NO: 17885 - DNA, 20 bp, Artificial Sequence
  chemically synthesized
caccagtgcagactgcttgg

SEQ ID NO: 17886 - DNA, 20 bp, Artificial Sequence
  chemically synthesized
agtgcagactgcttgggagc

SEQ ID NO: 17887 - DNA, 20 bp, Artificial Sequence
  chemically synthesized
tgcagactgcttgggagcca

SEQ ID NO: 17888 - DNA, 20 bp, Artificial Sequence
  chemically synthesized
gcagactgcttgggagccag

SEQ ID NO: 17889 - DNA, 20 bp, Artificial Sequence
  chemically synthesized
cagactgcttgggagccaga

SEQ ID NO: 17890 - DNA, 20 bp, Artificial Sequence
  chemically synthesized
ggagccagagggttgtcctg

SEQ ID NO: 17891 - DNA, 20 bp, Artificial Sequence
  chemically synthesized
gggttgtcctgcagttgcta

SEQ ID NO: 17892 - DNA, 20 bp, Artificial Sequence
  chemically synthesized
cccacaccacacccactgtc

SEQ ID NO: 17893 - DNA, 20 bp, Artificial Sequence
  chemically synthesized
acaccacacccactgtccag

SEQ ID NO: 17894 - DNA, 20 bp, Artificial Sequence
  chemically synthesized
cacccactgtccagaagcct

SEQ ID NO: 17895 - DNA, 20 bp, Artificial Sequence
  chemically synthesized
acccactgtccagaagcctg

SEQ ID NO: 17896 - DNA, 20 bp, Artificial Sequence
  chemically synthesized
aagcctgaggacccacacac

SEQ ID NO: 17897 - DNA, 20 bp, Artificial Sequence
  chemically synthesized
tgaggacccacacaccagcc

SEQ ID NO: 17898 - DNA, 20 bp, Artificial Sequence
  chemically synthesized
cacaccagcccagtctacta

SEQ ID NO: 17899 - DNA, 20 bp, Artificial Sequence
  chemically synthesized
tatggccactactgacaccc

SEQ ID NO: 17900 - DNA, 20 bp, Artificial Sequence
  chemically synthesized
acacccaagcaaactgcctg

SEQ ID NO: 17901 - DNA, 20 bp, Artificial Sequence
  chemically synthesized
cacccaagcaaactgcctga

SEQ ID NO: 17902 - DNA, 20 bp, Artificial Sequence
  chemically synthesized
agcaaactgcctgaaggcca

SEQ ID NO: 17903 - DNA, 20 bp, Artificial Sequence
  chemically synthesized
ggccaaagaatcaacccaac

SEQ ID NO: 17904 - DNA, 20 bp, Artificial Sequence
  chemically synthesized
ccaactagactcattaccat

SEQ ID NO: 17905 - DNA, 20 bp, Artificial Sequence
  chemically synthesized
accatcagtgccaatgtaca

SEQ ID NO: 17906 - DNA, 20 bp, Artificial Sequence
  chemically synthesized
agtgccaatgtacacagcca

SEQ ID NO: 17907 - DNA, 20 bp, Artificial Sequence
  chemically synthesized
gtgccaatgtacacagccat

SEQ ID NO: 17908 - DNA, 20 bp, Artificial Sequence
  chemically synthesized
tgccaatgtacacagccatg

SEQ ID NO: 17909 - DNA, 20 bp, Artificial Sequence
  chemically synthesized
tgtacacagccatggggccc

SEQ ID NO: 17910 - DNA, 20 bp, Artificial Sequence
  chemically synthesized
gtacacagccatggggccca

SEQ ID NO: 17911 - DNA, 20 bp, Artificial Sequence
  chemically synthesized
acagccatggggcccaagga

SEQ ID NO: 17912 - DNA, 20 bp, Artificial Sequence
  chemically synthesized
cagccatggggcccaaggac

SEQ ID NO: 17913 - DNA, 20 bp, Artificial Sequence
  chemically synthesized
gggcccaaggacaggaatgc

SEQ ID NO: 17914 - DNA, 20 bp, Artificial Sequence
  chemically synthesized
ggcccaaggacaggaatgct

SEQ ID NO: 17915 - DNA, 20 bp, Artificial Sequence
  chemically synthesized
gctaggcccaccaccaccac

SEQ ID NO: 17916 - DNA, 20 bp, Artificial Sequence
  chemically synthesized
ctaggcccaccaccaccact

SEQ ID NO: 17917 - DNA, 20 bp, Artificial Sequence
  chemically synthesized
taggcccaccaccaccactg

SEQ ID NO: 17918 - DNA, 20 bp, Artificial Sequence
  chemically synthesized
ccaccaccaccactggggcc

SEQ ID NO: 17919 - DNA, 20 bp, Artificial Sequence
  chemically synthesized
caccaccaccactggggcca

SEQ ID NO: 17920 - DNA, 20 bp, Artificial Sequence
  chemically synthesized
ccaccactggggccaaggac

SEQ ID NO: 17921 - DNA, 20 bp, Artificial Sequence
  chemically synthesized
ccacttgatattcttgtctc

SEQ ID NO: 17922 - DNA, 20 bp, Artificial Sequence
  chemically synthesized
ttcactaacaaatgcaccct

SEQ ID NO: 17923 - DNA, 20 bp, Artificial Sequence
  chemically synthesized
ctaagccactgaaaaaatca

SEQ ID NO: 17924 - DNA, 20 bp, Artificial Sequence
  chemically synthesized
acagacactgatgatactgt

SEQ ID NO: 17925 - DNA, 20 bp, Artificial Sequence
  chemically synthesized
gacactgatgatactgttgg

SEQ ID NO: 17926 - DNA, 20 bp, Artificial Sequence
  chemically synthesized
agctgaaaaaaaataatatg

SEQ ID NO: 17927 - DNA, 20 bp, Artificial Sequence
  chemically synthesized
actatgctgctgtatgcacc

SEQ ID NO: 17928 - DNA, 20 bp, Artificial Sequence
  chemically synthesized
gcacctagaaatcaaaatca

SEQ ID NO: 17929 - DNA, 20 bp, Artificial Sequence
  chemically synthesized
tgccctactcaatcaacacc

SEQ ID NO: 17930 - DNA, 20 bp, Artificial Sequence
  chemically synthesized
tcaacaccaagatacatctt

SEQ ID NO: 17931 - DNA, 20 bp, Artificial Sequence
  chemically synthesized
caagatacatcttcagaaaa

SEQ ID NO: 17932 - DNA, 20 bp, Artificial Sequence
  chemically synthesized
caaaaacaaatttacaaaac

SEQ ID NO: 17933 - DNA, 20 bp, Artificial Sequence
  chemically synthesized
aaacaaatttacaaaactgg

SEQ ID NO: 17934 - DNA, 20 bp, Artificial Sequence
  chemically synthesized
caaatttacaaaactggaag

SEQ ID NO: 17935 - DNA, 20 bp, Artificial Sequence
  chemically synthesized
ggaagcagcaatcattacac

SEQ ID NO: 17936 - DNA, 20 bp, Artificial Sequence
  chemically synthesized
agcaatcattacaccagatg

SEQ ID NO: 17937 - DNA, 20 bp, Artificial Sequence
  chemically synthesized
caatcattacaccagatgca

SEQ ID NO: 17938 - DNA, 20 bp, Artificial Sequence
  chemically synthesized
agatgcagagatatcaatgc

SEQ ID NO: 17939 - DNA, 20 bp, Artificial Sequence
  chemically synthesized
aagaacaaaataaacataaa

SEQ ID NO: 17940 - DNA, 20 bp, Artificial Sequence
  chemically synthesized
agaacaaaataaacataaaa

SEQ ID NO: 17941 - DNA, 20 bp, Artificial Sequence
  chemically synthesized
aaaataaacataaaaaggtg

SEQ ID NO: 17942 - DNA, 20 bp, Artificial Sequence
  chemically synthesized
gaagaaatatgacacttcca

SEQ ID NO: 17943 - DNA, 20 bp, Artificial Sequence
  chemically synthesized
aagaaatatgacacttccaa

SEQ ID NO: 17944 - DNA, 20 bp, Artificial Sequence
  chemically synthesized
aaaggaatttaataattctt

SEQ ID NO: 17945 - DNA, 20 bp, Artificial Sequence
  chemically synthesized
taataattcttcagcaacat

SEQ ID NO: 17946 - DNA, 20 bp, Artificial Sequence
  chemically synthesized
aattcttcagcaacataagc

SEQ ID NO: 17947 - DNA, 20 bp, Artificial Sequence
  chemically synthesized
tcttcagcaacataagccag

SEQ ID NO: 17948 - DNA, 20 bp, Artificial Sequence
  chemically synthesized
acataagccagtggaaaaaa

SEQ ID NO: 17949 - DNA, 20 bp, Artificial Sequence
  chemically synthesized
aaaagacatttataaaattc

SEQ ID NO: 17950 - DNA, 20 bp, Artificial Sequence
  chemically synthesized
atttataaaattctggaaaa

SEQ ID NO: 17951 - DNA, 20 bp, Artificial Sequence
  chemically synthesized
gaatccaaaatgttgatatt

SEQ ID NO: 17952 - DNA, 20 bp, Artificial Sequence
  chemically synthesized
aatccaaaatgttgatatta

SEQ ID NO: 17953 - DNA, 20 bp, Artificial Sequence
  chemically synthesized
ccaaaatgttgatattaagg

SEQ ID NO: 17954 - DNA, 20 bp, Artificial Sequence
  chemically synthesized
atgttgatattaaggaagct

SEQ ID NO: 17955 - DNA, 20 bp, Artificial Sequence
  chemically synthesized
tgatattaaggaagctcagt

SEQ ID NO: 17956 - DNA, 20 bp, Artificial Sequence
  chemically synthesized
aaggaagctcagtgagacac

SEQ ID NO: 17957 - DNA, 20 bp, Artificial Sequence
  chemically synthesized
ggaagctcagtgagacacaa

SEQ ID NO: 17958 - DNA, 20 bp, Artificial Sequence
  chemically synthesized
cagtgagacacaagagaact

SEQ ID NO: 17959 - DNA, 20 bp, Artificial Sequence
  chemically synthesized
gaactcagataaacaataaa

SEQ ID NO: 17960 - DNA, 20 bp, Artificial Sequence
  chemically synthesized
gataaacaataaaaagaaat

SEQ ID NO: 17961 - DNA, 20 bp, Artificial Sequence
  chemically synthesized
aagaaatcagaaaaacaatt

SEQ ID NO: 17962 - DNA, 20 bp, Artificial Sequence
  chemically synthesized
agaaatcagaaaaacaattc

SEQ ID NO: 17963 - DNA, 20 bp, Artificial Sequence
  chemically synthesized
aaacaattcaggatatgaat

SEQ ID NO: 17964 - DNA, 20 bp, Artificial Sequence
  chemically synthesized
tatgaatgagaaatttaccc

SEQ ID NO: 17965 - DNA, 20 bp, Artificial Sequence
  chemically synthesized
tgaatgagaaatttacccaa

SEQ ID NO: 17966 - DNA, 20 bp, Artificial Sequence
  chemically synthesized
tgagaaatttacccaagaga

SEQ ID NO: 17967 - DNA, 20 bp, Artificial Sequence
  chemically synthesized
acccaagagatagatacaac

SEQ ID NO: 17968 - DNA, 20 bp, Artificial Sequence
  chemically synthesized
tacaacaagaatgaaccaaa

SEQ ID NO: 17969 - DNA, 20 bp, Artificial Sequence
  chemically synthesized
aaacagaaattctgtaactg

SEQ ID NO: 17970 - DNA, 20 bp, Artificial Sequence
  chemically synthesized
acagaaattctgtaactgaa

SEQ ID NO: 17971 - DNA, 20 bp, Artificial Sequence
  chemically synthesized
gtaactgaagagtttattga

SEQ ID NO: 17972 - DNA, 20 bp, Artificial Sequence
  chemically synthesized
acattcaaaaacttcaacaa

SEQ ID NO: 17973 - DNA, 20 bp, Artificial Sequence
  chemically synthesized
caaaaacttcaacaatagat

SEQ ID NO: 17974 - DNA, 20 bp, Artificial Sequence
  chemically synthesized
cttcaacaatagatcagatc

SEQ ID NO: 17975 - DNA, 20 bp, Artificial Sequence
  chemically synthesized
caacaatagatcagatcaag

SEQ ID NO: 17976 - DNA, 20 bp, Artificial Sequence
  chemically synthesized
caatagatcagatcaagcag

SEQ ID NO: 17977 - DNA, 20 bp, Artificial Sequence
  chemically synthesized
atcaagcagaagaaaaattt

SEQ ID NO: 17978 - DNA, 20 bp, Artificial Sequence
  chemically synthesized
aagaaaaatttcagaacttg

SEQ ID NO: 17979 - DNA, 20 bp, Artificial Sequence
  chemically synthesized
aaaatttcagaacttgaaga

SEQ ID NO: 17980 - DNA, 20 bp, Artificial Sequence
  chemically synthesized
aaatttcagaacttgaagac

SEQ ID NO: 17981 - DNA, 20 bp, Artificial Sequence
  chemically synthesized
gaagacaggtcttttaaaat

SEQ ID NO: 17982 - DNA, 20 bp, Artificial Sequence
  chemically synthesized
acaggtcttttaaaattagc

SEQ ID NO: 17983 - DNA, 20 bp, Artificial Sequence
  chemically synthesized
aaaattagctggtcaaatga

SEQ ID NO: 17984 - DNA, 20 bp, Artificial Sequence
  chemically synthesized
ttagctggtcaaatgataga

SEQ ID NO: 17985 - DNA, 20 bp, Artificial Sequence
  chemically synthesized
tagctggtcaaatgatagaa

SEQ ID NO: 17986 - DNA, 20 bp, Artificial Sequence
  chemically synthesized
aatgatagaaaggaaaaaaa

SEQ ID NO: 17987 - DNA, 20 bp, Artificial Sequence
  chemically synthesized
ggaaaaaaaaagaatgaaca

SEQ ID NO: 17988 - DNA, 20 bp, Artificial Sequence
  chemically synthesized
acaaagtgtatgtgacatat

SEQ ID NO: 17989 - DNA, 20 bp, Artificial Sequence
  chemically synthesized
caaagtgtatgtgacatatg

SEQ ID NO: 17990 - DNA, 20 bp, Artificial Sequence
  chemically synthesized
gtgacatatgaggcactata

SEQ ID NO: 17991 - DNA, 20 bp, Artificial Sequence
  chemically synthesized
tgaacaaatattcaaatttg

SEQ ID NO: 17992 - DNA, 20 bp, Artificial Sequence
  chemically synthesized
tattcaaatttgcagtttcc

SEQ ID NO: 17993 - DNA, 20 bp, Artificial Sequence
  chemically synthesized
tcaaatttgcagtttcccag

SEQ ID NO: 17994 - DNA, 20 bp, Artificial Sequence
  chemically synthesized
caaatttgcagtttcccaga

SEQ ID NO: 17995 - DNA, 20 bp, Artificial Sequence
  chemically synthesized
ttgcagtttcccagaaggta

SEQ ID NO: 17996 - DNA, 20 bp, Artificial Sequence
  chemically synthesized
gcagtttcccagaaggtaaa

SEQ ID NO: 17997 - DNA, 20 bp, Artificial Sequence
  chemically synthesized
agaaggtaaagagaacatga

SEQ ID NO: 17998 - DNA, 20 bp, Artificial Sequence
  chemically synthesized
gaaggtaaagagaacatgaa

SEQ ID NO: 17999 - DNA, 20 bp, Artificial Sequence
  chemically synthesized
taaagagaacatgaaaggtg

SEQ ID NO: 18000 - DNA, 20 bp, Artificial Sequence
  chemically synthesized
aaagagaacatgaaaggtgt

SEQ ID NO: 18001 - DNA, 20 bp, Artificial Sequence
  chemically synthesized
aaacctacgtaacaacacaa

SEQ ID NO: 18002 - DNA, 20 bp, Artificial Sequence
  chemically synthesized
acaatagctgaaaacttgtc

SEQ ID NO: 18003 - DNA, 20 bp, Artificial Sequence
  chemically synthesized
agctgaaaacttgtcaagtc

SEQ ID NO: 18004 - DNA, 20 bp, Artificial Sequence
  chemically synthesized
gaaaacttgtcaagtctagc

SEQ ID NO: 18005 - DNA, 20 bp, Artificial Sequence
  chemically synthesized
gtcaagtctagcaagaaatg

SEQ ID NO: 18006 - DNA, 20 bp, Artificial Sequence
  chemically synthesized
tagcaagaaatgtagacatc

SEQ ID NO: 18007 - DNA, 20 bp, Artificial Sequence
  chemically synthesized
acatccagacaaatgaaaat

SEQ ID NO: 18008 - DNA, 20 bp, Artificial Sequence
  chemically synthesized
cccaaataatataatgcaaa

SEQ ID NO: 18009 - DNA, 20 bp, Artificial Sequence
  chemically synthesized
atgcaaaaagctcttctcca

SEQ ID NO: 18010 - DNA, 20 bp, Artificial Sequence
  chemically synthesized
ctcttctccacagcacatta

SEQ ID NO: 18011 - DNA, 20 bp, Artificial Sequence
  chemically synthesized
cattatagtcaaactgtcaa

SEQ ID NO: 18012 - DNA, 20 bp, Artificial Sequence
  chemically synthesized
agtcaaactgtcaaaagcca

SEQ ID NO: 18013 - DNA, 20 bp, Artificial Sequence
  chemically synthesized
tcaaactgtcaaaagccaaa

SEQ ID NO: 18014 - DNA, 20 bp, Artificial Sequence
  chemically synthesized
actgtcaaaagccaaagagt

SEQ ID NO: 18015 - DNA, 20 bp, Artificial Sequence
  chemically synthesized
aaagagtaagaactctaaaa

SEQ ID NO: 18016 - DNA, 20 bp, Artificial Sequence
  chemically synthesized
agtaagaactctaaaacagc

SEQ ID NO: 18017 - DNA, 20 bp, Artificial Sequence
  chemically synthesized
aaaacagcaagcaaaatgtc

SEQ ID NO: 18018 - DNA, 20 bp, Artificial Sequence
  chemically synthesized
caaaatgtctagtcacttat

SEQ ID NO: 18019 - DNA, 20 bp, Artificial Sequence
  chemically synthesized
aaaatgtctagtcacttata

SEQ ID NO: 18020 - DNA, 20 bp, Artificial Sequence
  chemically synthesized
aaatgtctagtcacttataa

SEQ ID NO: 18021 - DNA, 20 bp, Artificial Sequence
  chemically synthesized
acttataagggaacttccac

SEQ ID NO: 18022 - DNA, 20 bp, Artificial Sequence
  chemically synthesized
gggaacttccacaagattaa

SEQ ID NO: 18023 - DNA, 20 bp, Artificial Sequence
  chemically synthesized
ccacaagattaacagattaa

SEQ ID NO: 18024 - DNA, 20 bp, Artificial Sequence
  chemically synthesized
caagattaacagattaacag

SEQ ID NO: 18025 - DNA, 20 bp, Artificial Sequence
  chemically synthesized
cagattaacagcagatttct

SEQ ID NO: 18026 - DNA, 20 bp, Artificial Sequence
  chemically synthesized
attaacagcagatttctcag

SEQ ID NO: 18027 - DNA, 20 bp, Artificial Sequence
  chemically synthesized
atttctcagcagaaacctca

SEQ ID NO: 18028 - DNA, 20 bp, Artificial Sequence
  chemically synthesized
tttctcagcagaaacctcac

SEQ ID NO: 18029 - DNA, 20 bp, Artificial Sequence
  chemically synthesized
tcagcagaaacctcacaggc

SEQ ID NO: 18030 - DNA, 20 bp, Artificial Sequence
  chemically synthesized
cagcagaaacctcacaggcc

SEQ ID NO: 18031 - DNA, 20 bp, Artificial Sequence
  chemically synthesized
gcagaaacctcacaggccag

SEQ ID NO: 18032 - DNA, 20 bp, Artificial Sequence
  chemically synthesized
gaaacctcacaggccaggag

SEQ ID NO: 18033 - DNA, 20 bp, Artificial Sequence
  chemically synthesized
cctcacaggccaggagaaga

SEQ ID NO: 18034 - DNA, 20 bp, Artificial Sequence
  chemically synthesized
ctcacaggccaggagaagat

SEQ ID NO: 18035 - DNA, 20 bp, Artificial Sequence
  chemically synthesized
atgggatgatatattcaaaa

SEQ ID NO: 18036 - DNA, 20 bp, Artificial Sequence
  chemically synthesized
tgatatattcaaaatagtga

SEQ ID NO: 18037 - DNA, 20 bp, Artificial Sequence
  chemically synthesized
tgaaagaaaaaaatgacacc

SEQ ID NO: 18038 - DNA, 20 bp, Artificial Sequence
  chemically synthesized
gaaagaaaaaaatgacacca

SEQ ID NO: 18039 - DNA, 20 bp, Artificial Sequence
  chemically synthesized
gacaccaaggatgttatacc

SEQ ID NO: 18040 - DNA, 20 bp, Artificial Sequence
  chemically synthesized
aacattgttcttcaaaaatg

SEQ ID NO: 18041 - DNA, 20 bp, Artificial Sequence
  chemically synthesized
acattgttcttcaaaaatga

SEQ ID NO: 18042 - DNA, 20 bp, Artificial Sequence
  chemically synthesized
aggataaataaaatcttttc

SEQ ID NO: 18043 - DNA, 20 bp, Artificial Sequence
  chemically synthesized
ggataaataaaatcttttct

SEQ ID NO: 18044 - DNA, 20 bp, Artificial Sequence
  chemically synthesized
aaataaaatcttttctgggc

SEQ ID NO: 18045 - DNA, 20 bp, Artificial Sequence
  chemically synthesized
ttctgggcaagaaaaatttg

SEQ ID NO: 18046 - DNA, 20 bp, Artificial Sequence
  chemically synthesized
tctgggcaagaaaaatttga

SEQ ID NO: 18047 - DNA, 20 bp, Artificial Sequence
  chemically synthesized
ttgaaggaattcactatcac

SEQ ID NO: 18048 - DNA, 20 bp, Artificial Sequence
  chemically synthesized
ggaattcactatcactagac

SEQ ID NO: 18049 - DNA, 20 bp, Artificial Sequence
  chemically synthesized
tatcactagactggctttac

SEQ ID NO: 18050 - DNA, 20 bp, Artificial Sequence
  chemically synthesized
tggctttacaagaaatattt

SEQ ID NO: 18051 - DNA, 20 bp, Artificial Sequence
  chemically synthesized
ggctttacaagaaatattta

SEQ ID NO: 18052 - DNA, 20 bp, Artificial Sequence
  chemically synthesized
gctttacaagaaatatttaa

SEQ ID NO: 18053 - DNA, 20 bp, Artificial Sequence
  chemically synthesized
tttacaagaaatatttaagg

SEQ ID NO: 18054 - DNA, 20 bp, Artificial Sequence
  chemically synthesized
taagggagtcctacacatga

SEQ ID NO: 18055 - DNA, 20 bp, Artificial Sequence
  chemically synthesized
agtcctacacatgaaagtga

SEQ ID NO: 18056 - DNA, 20 bp, Artificial Sequence
  chemically synthesized
gtcctacacatgaaagtgac

SEQ ID NO: 18057 - DNA, 20 bp, Artificial Sequence
  chemically synthesized
gacaggacactgccattatg

SEQ ID NO: 18058 - DNA, 20 bp, Artificial Sequence
  chemically synthesized
tgccattatgaagacacaca

SEQ ID NO: 18059 - DNA, 20 bp, Artificial Sequence
  chemically synthesized
gccattatgaagacacacaa

SEQ ID NO: 18060 - DNA, 20 bp, Artificial Sequence
  chemically synthesized
cacaaaggtatacaactaac

SEQ ID NO: 18061 - DNA, 20 bp, Artificial Sequence
  chemically synthesized
aaaggtatacaactaactgg

SEQ ID NO: 18062 - DNA, 20 bp, Artificial Sequence
  chemically synthesized
aggtatacaactaactggta

SEQ ID NO: 18063 - DNA, 20 bp, Artificial Sequence
  chemically synthesized
ggtagagcaaaacacaaata

SEQ ID NO: 18064 - DNA, 20 bp, Artificial Sequence
  chemically synthesized
agagcaaaacacaaataaag

SEQ ID NO: 18065 - DNA, 20 bp, Artificial Sequence
  chemically synthesized
agcaaaacacaaataaagaa

SEQ ID NO: 18066 - DNA, 20 bp, Artificial Sequence
  chemically synthesized
aaacacaaataaagaagaga

SEQ ID NO: 18067 - DNA, 20 bp, Artificial Sequence
  chemically synthesized
gaactcaaacgttaccacta

SEQ ID NO: 18068 - DNA, 20 bp, Artificial Sequence
  chemically synthesized
aaaccacaatcataaataat

SEQ ID NO: 18069 - DNA, 20 bp, Artificial Sequence
  chemically synthesized
cacaatcataaataataaga

SEQ ID NO: 18070 - DNA, 20 bp, Artificial Sequence
  chemically synthesized
atcataaataataagaaaga

SEQ ID NO: 18071 - DNA, 20 bp, Artificial Sequence
  chemically synthesized
taaataataagaaagaaaga

SEQ ID NO: 18072 - DNA, 20 bp, Artificial Sequence
  chemically synthesized
taataagaaagaaagaaaga

SEQ ID NO: 18073 - DNA, 20 bp, Artificial Sequence
  chemically synthesized
aagaaagaaagaaagaaaga

SEQ ID NO: 18074 - DNA, 20 bp, Artificial Sequence
  chemically synthesized
gaaagaaagaaagaaagaaa

SEQ ID NO: 18075 - DNA, 20 bp, Artificial Sequence
  chemically synthesized
aagaaagaaagaaagaaaga

SEQ ID NO: 18076 - DNA, 20 bp, Artificial Sequence
  chemically synthesized
gaaagaaagaaagaaagaga

SEQ ID NO: 18077 - DNA, 20 bp, Artificial Sequence
  chemically synthesized
aagaaagaaagaaagagaga

SEQ ID NO: 18078 - DNA, 20 bp, Artificial Sequence
  chemically synthesized
gaaagaaagaaagagagaga

SEQ ID NO: 18079 - DNA, 20 bp, Artificial Sequence
  chemically synthesized
aagaaagaaagagagagaga

SEQ ID NO: 18080 - DNA, 20 bp, Artificial Sequence
  chemically synthesized
gaaagaaagagagagagaga

SEQ ID NO: 18081 - DNA, 20 bp, Artificial Sequence
  chemically synthesized
gagagagagagagagaatga

SEQ ID NO: 18082 - DNA, 20 bp, Artificial Sequence
  chemically synthesized
gagagagagagaatgaaaga

SEQ ID NO: 18083 - DNA, 20 bp, Artificial Sequence
  chemically synthesized
agagagaatgaaagaaagaa

SEQ ID NO: 18084 - DNA, 20 bp, Artificial Sequence
  chemically synthesized
gagagaatgaaagaaagaaa

SEQ ID NO: 18085 - DNA, 20 bp, Artificial Sequence
  chemically synthesized
agaatgaaagaaagaaaagg

SEQ ID NO: 18086 - DNA, 20 bp, Artificial Sequence
  chemically synthesized
gaatgaaagaaagaaaagga

SEQ ID NO: 18087 - DNA, 20 bp, Artificial Sequence
  chemically synthesized
tgaaagaaagaaaaggaagg

SEQ ID NO: 18088 - DNA, 20 bp, Artificial Sequence
  chemically synthesized
gaaagaaagaaaaggaagga

SEQ ID NO: 18089 - DNA, 20 bp, Artificial Sequence
  chemically synthesized
agaaagaaaaggaaggaagg

SEQ ID NO: 18090 - DNA, 20 bp, Artificial Sequence
  chemically synthesized
taaaaaaaaaacaaaacaac

SEQ ID NO: 18091 - DNA, 20 bp, Artificial Sequence
  chemically synthesized
aaaaaaaaaacaaaacaacc

SEQ ID NO: 18092 - DNA, 20 bp, Artificial Sequence
  chemically synthesized
ccaggaatcaattaacaaaa

SEQ ID NO: 18093 - DNA, 20 bp, Artificial Sequence
  chemically synthesized
ggaatcaattaacaaaatgg

SEQ ID NO: 18094 - DNA, 20 bp, Artificial Sequence
  chemically synthesized
gaatcaattaacaaaatggc

SEQ ID NO: 18095 - DNA, 20 bp, Artificial Sequence
  chemically synthesized
attaacaaaatggcaggaat

SEQ ID NO: 18096 - DNA, 20 bp, Artificial Sequence
  chemically synthesized
aagctctcacatgtcaataa

SEQ ID NO: 18097 - DNA, 20 bp, Artificial Sequence
  chemically synthesized
ataatagccttgcatgtaaa

SEQ ID NO: 18098 - DNA, 20 bp, Artificial Sequence
  chemically synthesized
tggattaaattgttacttga

SEQ ID NO: 18099 - DNA, 20 bp, Artificial Sequence
  chemically synthesized
aaattgttacttgaaagata

SEQ ID NO: 18100 - DNA, 20 bp, Artificial Sequence
  chemically synthesized
gttacttgaaagatatagac

SEQ ID NO: 18101 - DNA, 20 bp, Artificial Sequence
  chemically synthesized
aaagatatagactggctaaa

SEQ ID NO: 18102 - DNA, 20 bp, Artificial Sequence
  chemically synthesized
tttaaaacaaaaatatgacc

SEQ ID NO: 18103 - DNA, 20 bp, Artificial Sequence
  chemically synthesized
caaaaatatgacccagttgt

SEQ ID NO: 18104 - DNA, 20 bp, Artificial Sequence
  chemically synthesized
cccagttgtaagctgcctat

SEQ ID NO: 18105 - DNA, 20 bp, Artificial Sequence
  chemically synthesized
agaaacttatctcacttgta

SEQ ID NO: 18106 - DNA, 20 bp, Artificial Sequence
  chemically synthesized
ctcacttgtaaagataaata

SEQ ID NO: 18107 - DNA, 20 bp, Artificial Sequence
  chemically synthesized
taaagataaatatagactga

SEQ ID NO: 18108 - DNA, 20 bp, Artificial Sequence
  chemically synthesized
aaatatagactgaaagtaaa

SEQ ID NO: 18109 - DNA, 20 bp, Artificial Sequence
  chemically synthesized
gactgaaagtaaaaagatga

SEQ ID NO: 18110 - DNA, 20 bp, Artificial Sequence
  chemically synthesized
gatgaaagatcttccataca

SEQ ID NO: 18111 - DNA, 20 bp, Artificial Sequence
  chemically synthesized
tgaaagatcttccatacaaa

SEQ ID NO: 18112 - DNA, 20 bp, Artificial Sequence
  chemically synthesized
tacaaagagaaaccaaaaat

SEQ ID NO: 18113 - DNA, 20 bp, Artificial Sequence
  chemically synthesized
gagaaaccaaaaatgagcaa

SEQ ID NO: 18114 - DNA, 20 bp, Artificial Sequence
  chemically synthesized
aaaccaaaaatgagcaaaag

SEQ ID NO: 18115 - DNA, 20 bp, Artificial Sequence
  chemically synthesized
aaaagtagttatacctataa

SEQ ID NO: 18116 - DNA, 20 bp, Artificial Sequence
  chemically synthesized
gactttaaataaaaaacact

SEQ ID NO: 18117 - DNA, 20 bp, Artificial Sequence
  chemically synthesized
ctttaaataaaaaacactaa

SEQ ID NO: 18118 - DNA, 20 bp, Artificial Sequence
  chemically synthesized
taaaaaacactaagagacaa

SEQ ID NO: 18119 - DNA, 20 bp, Artificial Sequence
  chemically synthesized
aagtcattacataatgataa

SEQ ID NO: 18120 - DNA, 20 bp, Artificial Sequence
  chemically synthesized
agtcattacataatgataaa

SEQ ID NO: 18121 - DNA, 20 bp, Artificial Sequence
  chemically synthesized
taatgataaaaggaacaatt

SEQ ID NO: 18122 - DNA, 20 bp, Artificial Sequence
  chemically synthesized
gataaaaggaacaattcagc

SEQ ID NO: 18123 - DNA, 20 bp, Artificial Sequence
  chemically synthesized
taaaaggaacaattcagcaa

SEQ ID NO: 18124 - DNA, 20 bp, Artificial Sequence
  chemically synthesized
taaacattcacactcaacac

SEQ ID NO: 18125 - DNA, 20 bp, Artificial Sequence
  chemically synthesized
aacattcacactcaacacca

SEQ ID NO: 18126 - DNA, 20 bp, Artificial Sequence
  chemically synthesized
acactcaacaccagagcatc

SEQ ID NO: 18127 - DNA, 20 bp, Artificial Sequence
  chemically synthesized
ccagagcatccagatatgta

SEQ ID NO: 18128 - DNA, 20 bp, Artificial Sequence
  chemically synthesized
atatgtaaagcaaatgttat

SEQ ID NO: 18129 - DNA, 20 bp, Artificial Sequence
  chemically synthesized
agcaaatgttattagatata

SEQ ID NO: 18130 - DNA, 20 bp, Artificial Sequence
  chemically synthesized
gcaaatgttattagatataa

SEQ ID NO: 18131 - DNA, 20 bp, Artificial Sequence
  chemically synthesized
caaatgttattagatataaa

SEQ ID NO: 18132 - DNA, 20 bp, Artificial Sequence
  chemically synthesized
attagatataaagggtgaaa

SEQ ID NO: 18133 - DNA, 20 bp, Artificial Sequence
  chemically synthesized
aatagaatccaatacaataa

SEQ ID NO: 18134 - DNA, 20 bp, Artificial Sequence
  chemically synthesized
gaatccaatacaataatagt

SEQ ID NO: 18135 - DNA, 20 bp, Artificial Sequence
  chemically synthesized
aatccaatacaataatagtt

SEQ ID NO: 18136 - DNA, 20 bp, Artificial Sequence
  chemically synthesized
atccaatacaataatagttg

SEQ ID NO: 18137 - DNA, 20 bp, Artificial Sequence
  chemically synthesized
ggatttcaacattctaatct

SEQ ID NO: 18138 - DNA, 20 bp, Artificial Sequence
  chemically synthesized
caacattctaatctcagcat

SEQ ID NO: 18139 - DNA, 20 bp, Artificial Sequence
  chemically synthesized
attctaatctcagcatcaga

SEQ ID NO: 18140 - DNA, 20 bp, Artificial Sequence
  chemically synthesized
tcagcatcagatagatcatc

SEQ ID NO: 18141 - DNA, 20 bp, Artificial Sequence
  chemically synthesized
catcagatagatcatctaga

SEQ ID NO: 18142 - DNA, 20 bp, Artificial Sequence
  chemically synthesized
atctagacagaaaattaaca

SEQ ID NO: 18143 - DNA, 20 bp, Artificial Sequence
  chemically synthesized
gaaaattaacaaagaaacat

SEQ ID NO: 18144 - DNA, 20 bp, Artificial Sequence
  chemically synthesized
attggatttaaacttgactt

SEQ ID NO: 18145 - DNA, 20 bp, Artificial Sequence
  chemically synthesized
aaacttgactttagaccaaa

SEQ ID NO: 18146 - DNA, 20 bp, Artificial Sequence
  chemically synthesized
ttacacaatatttcatccaa

SEQ ID NO: 18147 - DNA, 20 bp, Artificial Sequence
  chemically synthesized
aatatttcatccaacagcta

SEQ ID NO: 18148 - DNA, 20 bp, Artificial Sequence
  chemically synthesized
acagaatatatttatctcat

SEQ ID NO: 18149 - DNA, 20 bp, Artificial Sequence
  chemically synthesized
tcagcacatgacgcattccc

SEQ ID NO: 18150 - DNA, 20 bp, Artificial Sequence
  chemically synthesized
cagcacatgacgcattcccc

SEQ ID NO: 18151 - DNA, 20 bp, Artificial Sequence
  chemically synthesized
ccccaggatacaccatatgt

SEQ ID NO: 18152 - DNA, 20 bp, Artificial Sequence
  chemically synthesized
caccatatgttagaacacaa

SEQ ID NO: 18153 - DNA, 20 bp, Artificial Sequence
  chemically synthesized
catatgttagaacacaaaag

SEQ ID NO: 18154 - DNA, 20 bp, Artificial Sequence
  chemically synthesized
gaaatatttgaaatcatatt

SEQ ID NO: 18155 - DNA, 20 bp, Artificial Sequence
  chemically synthesized
aatcatattaagcatcttct

SEQ ID NO: 18156 - DNA, 20 bp, Artificial Sequence
  chemically synthesized
agcatcttctcagaccacaa

SEQ ID NO: 18157 - DNA, 20 bp, Artificial Sequence
  chemically synthesized
agaccacaatggaataaaac

SEQ ID NO: 18158 - DNA, 20 bp, Artificial Sequence
  chemically synthesized
taaaactagaaatcaataac

SEQ ID NO: 18159 - DNA, 20 bp, Artificial Sequence
  chemically synthesized
ttaaaacctatacaaataca

SEQ ID NO: 18160 - DNA, 20 bp, Artificial Sequence
  chemically synthesized
tcctgaatgaacgttatgtc

SEQ ID NO: 18161 - DNA, 20 bp, Artificial Sequence
  chemically synthesized
tgaatgaacgttatgtcaag

SEQ ID NO: 18162 - DNA, 20 bp, Artificial Sequence
  chemically synthesized
gttatgtcaagaagaaaatt

SEQ ID NO: 18163 - DNA, 20 bp, Artificial Sequence
  chemically synthesized
atgtcaagaagaaaattaag

SEQ ID NO: 18164 - DNA, 20 bp, Artificial Sequence
  chemically synthesized
tgtcaagaagaaaattaaga

SEQ ID NO: 18165 - DNA, 20 bp, Artificial Sequence
  chemically synthesized
atgaaaattgaaatacaaca

SEQ ID NO: 18166 - DNA, 20 bp, Artificial Sequence
  chemically synthesized
tgaaaattgaaatacaacat

SEQ ID NO: 18167 - DNA, 20 bp, Artificial Sequence
  chemically synthesized
attgaaatacaacataggaa

SEQ ID NO: 18168 - DNA, 20 bp, Artificial Sequence
  chemically synthesized
atacaacataggaaaagcca

SEQ ID NO: 18169 - DNA, 20 bp, Artificial Sequence
  chemically synthesized
tacaacataggaaaagccat

SEQ ID NO: 18170 - DNA, 20 bp, Artificial Sequence
  chemically synthesized
ataggaaaagccatgggata

SEQ ID NO: 18171 - DNA, 20 bp, Artificial Sequence
  chemically synthesized
aaagccatgggatacagcaa

SEQ ID NO: 18172 - DNA, 20 bp, Artificial Sequence
  chemically synthesized
gccatgggatacagcaaaag

SEQ ID NO: 18173 - DNA, 20 bp, Artificial Sequence
  chemically synthesized
gatacagcaaaagcagtgct

SEQ ID NO: 18174 - DNA, 20 bp, Artificial Sequence
  chemically synthesized
tacagcaaaagcagtgctaa

SEQ ID NO: 18175 - DNA, 20 bp, Artificial Sequence
  chemically synthesized
cagcaaaagcagtgctaaga

SEQ ID NO: 18176 - DNA, 20 bp, Artificial Sequence
  chemically synthesized
caaaagcagtgctaagagag

SEQ ID NO: 18177 - DNA, 20 bp, Artificial Sequence
  chemically synthesized
aaacacttaaattaaaaaca

SEQ ID NO: 18178 - DNA, 20 bp, Artificial Sequence
  chemically synthesized
acttaaattaaaaacataga

SEQ ID NO: 18179 - DNA, 20 bp, Artificial Sequence
  chemically synthesized
atctaatcatgtacctcaac

SEQ ID NO: 18180 - DNA, 20 bp, Artificial Sequence
  chemically synthesized
aatcatgtacctcaacaagc

SEQ ID NO: 18181 - DNA, 20 bp, Artificial Sequence
  chemically synthesized
tgtacctcaacaagctagaa

SEQ ID NO: 18182 - DNA, 20 bp, Artificial Sequence
  chemically synthesized
cctcaacaagctagaaaagc

SEQ ID NO: 18183 - DNA, 20 bp, Artificial Sequence
  chemically synthesized
gcaagaacaaaacccaaaac

SEQ ID NO: 18184 - DNA, 20 bp, Artificial Sequence
  chemically synthesized
agaacaaaacccaaaactag

SEQ ID NO: 18185 - DNA, 20 bp, Artificial Sequence
  chemically synthesized
acaaaacccaaaactagcag

SEQ ID NO: 18186 - DNA, 20 bp, Artificial Sequence
  chemically synthesized
caaaacccaaaactagcaga

SEQ ID NO: 18187 - DNA, 20 bp, Artificial Sequence
  chemically synthesized
acccaaaactagcagaagga

SEQ ID NO: 18188 - DNA, 20 bp, Artificial Sequence
  chemically synthesized
gcagaaggaaagaaaaaatg

SEQ ID NO: 18189 - DNA, 20 bp, Artificial Sequence
  chemically synthesized
aggaaagaaaaaatgaagaa

SEQ ID NO: 18190 - DNA, 20 bp, Artificial Sequence
  chemically synthesized
aaagaaaaaatgaagaacag

SEQ ID NO: 18191 - DNA, 20 bp, Artificial Sequence
  chemically synthesized
aacagaagaacttaatgaaa

SEQ ID NO: 18192 - DNA, 20 bp, Artificial Sequence
  chemically synthesized
cagaagaacttaatgaaata

SEQ ID NO: 18193 - DNA, 20 bp, Artificial Sequence
  chemically synthesized
aaatagagaaaaacaacaac

SEQ ID NO: 18194 - DNA, 20 bp, Artificial Sequence
  chemically synthesized
aatagagaaaaacaacaaca

SEQ ID NO: 18195 - DNA, 20 bp, Artificial Sequence
  chemically synthesized
atagagaaaaacaacaacaa

SEQ ID NO: 18196 - DNA, 20 bp, Artificial Sequence
  chemically synthesized
gaaaaacaacaacaagggat

SEQ ID NO: 18197 - DNA, 20 bp, Artificial Sequence
  chemically synthesized
caagggattagcaaaatgaa

SEQ ID NO: 18198 - DNA, 20 bp, Artificial Sequence
  chemically synthesized
tgaaaagttgttatttaaaa

SEQ ID NO: 18199 - DNA, 20 bp, Artificial Sequence
  chemically synthesized
gttatttaaaaaagataaaa

SEQ ID NO: 18200 - DNA, 20 bp, Artificial Sequence
  chemically synthesized
taaaaaagataaaatggata

SEQ ID NO: 18201 - DNA, 20 bp, Artificial Sequence
  chemically synthesized
agataaaatggatatagctc

SEQ ID NO: 18202 - DNA, 20 bp, Artificial Sequence
  chemically synthesized
aaaatggatatagctctagc

SEQ ID NO: 18203 - DNA, 20 bp, Artificial Sequence
  chemically synthesized
tagctctagctagactaacc

SEQ ID NO: 18204 - DNA, 20 bp, Artificial Sequence
  chemically synthesized
tagctagactaaccaagaaa

SEQ ID NO: 18205 - DNA, 20 bp, Artificial Sequence
  chemically synthesized
gctagactaaccaagaaaaa

SEQ ID NO: 18206 - DNA, 20 bp, Artificial Sequence
  chemically synthesized
agactaaccaagaaaaagag

SEQ ID NO: 18207 - DNA, 20 bp, Artificial Sequence
  chemically synthesized
actaaccaagaaaaagagaa

SEQ ID NO: 18208 - DNA, 20 bp, Artificial Sequence
  chemically synthesized
aaagagaagagactgaaata

SEQ ID NO: 18209 - DNA, 20 bp, Artificial Sequence
  chemically synthesized
gagactgaaataaagaaaat

SEQ ID NO: 18210 - DNA, 20 bp, Artificial Sequence
  chemically synthesized
aaagaaaatcagaaataaaa

SEQ ID NO: 18211 - DNA, 20 bp, Artificial Sequence
  chemically synthesized
atatattacaaccgatacca

SEQ ID NO: 18212 - DNA, 20 bp, Artificial Sequence
  chemically synthesized
tacaaccgataccacagaaa

SEQ ID NO: 18213 - DNA, 20 bp, Artificial Sequence
  chemically synthesized
ccgataccacagaaatagaa

SEQ ID NO: 18214 - DNA, 20 bp, Artificial Sequence
  chemically synthesized
acagaaatagaaaagattat

SEQ ID NO: 18215 - DNA, 20 bp, Artificial Sequence
  chemically synthesized
agaaatagaaaagattatca

SEQ ID NO: 18216 - DNA, 20 bp, Artificial Sequence
  chemically synthesized
cactaaaaaactgaaaaatc

SEQ ID NO: 18217 - DNA, 20 bp, Artificial Sequence
  chemically synthesized
ctaaaaaactgaaaaatcta

SEQ ID NO: 18218 - DNA, 20 bp, Artificial Sequence
  chemically synthesized
taaaaaactgaaaaatctag

SEQ ID NO: 18219 - DNA, 20 bp, Artificial Sequence
  chemically synthesized
agaggaaattaataaatttc

SEQ ID NO: 18220 - DNA, 20 bp, Artificial Sequence
  chemically synthesized
ctggacacataccacctacc

SEQ ID NO: 18221 - DNA, 20 bp, Artificial Sequence
  chemically synthesized
ccacctaccaagattgaatt

SEQ ID NO: 18222 - DNA, 20 bp, Artificial Sequence
  chemically synthesized
ctaccaagattgaattaaga

SEQ ID NO: 18223 - DNA, 20 bp, Artificial Sequence
  chemically synthesized
aagattgaattaagaaagaa

SEQ ID NO: 18224 - DNA, 20 bp, Artificial Sequence
  chemically synthesized
gaaagaatagaaaacctgaa

SEQ ID NO: 18225 - DNA, 20 bp, Artificial Sequence
  chemically synthesized
aatagaaaacctgaacagac

SEQ ID NO: 18226 - DNA, 20 bp, Artificial Sequence
  chemically synthesized
aatgaataatgaaattgaat

SEQ ID NO: 18227 - DNA, 20 bp, Artificial Sequence
  chemically synthesized
gaataatgaaattgaatcag

SEQ ID NO: 18228 - DNA, 20 bp, Artificial Sequence
  chemically synthesized
gaaattgaatcagtagtaaa

SEQ ID NO: 18229 - DNA, 20 bp, Artificial Sequence
  chemically synthesized
tagtaaaaagtctcccaaaa

SEQ ID NO: 18230 - DNA, 20 bp, Artificial Sequence
  chemically synthesized
ctcccaaaaaagaaaatttc

SEQ ID NO: 18231 - DNA, 20 bp, Artificial Sequence
  chemically synthesized
aaaaaagaaaatttcaagac

SEQ ID NO: 18232 - DNA, 20 bp, Artificial Sequence
  chemically synthesized
aagaaaatttcaagaccaga

SEQ ID NO: 18233 - DNA, 20 bp, Artificial Sequence
  chemically synthesized
caaattttaccaaactttca

SEQ ID NO: 18234 - DNA, 20 bp, Artificial Sequence
  chemically synthesized
aactttcaaagaaaactaac

SEQ ID NO: 18235 - DNA, 20 bp, Artificial Sequence
  chemically synthesized
aaattcttttaaaaattaaa

SEQ ID NO: 18236 - DNA, 20 bp, Artificial Sequence
  chemically synthesized
aattcttttaaaaattaaac

SEQ ID NO: 18237 - DNA, 20 bp, Artificial Sequence
  chemically synthesized
tcttttaaaaattaaacagg

SEQ ID NO: 18238 - DNA, 20 bp, Artificial Sequence
  chemically synthesized
cttttaaaaattaaacagga

SEQ ID NO: 18239 - DNA, 20 bp, Artificial Sequence
  chemically synthesized
ttctccctaactcattctct

SEQ ID NO: 18240 - DNA, 20 bp, Artificial Sequence
  chemically synthesized
tctccctaactcattctctg

SEQ ID NO: 18241 - DNA, 20 bp, Artificial Sequence
  chemically synthesized
cctaactcattctctgaggc

SEQ ID NO: 18242 - DNA, 20 bp, Artificial Sequence
  chemically synthesized
tattatcctgattccataac

SEQ ID NO: 18243 - DNA, 20 bp, Artificial Sequence
  chemically synthesized
tcctgattccataaccagac

SEQ ID NO: 18244 - DNA, 20 bp, Artificial Sequence
  chemically synthesized
cctgattccataaccagaca

SEQ ID NO: 18245 - DNA, 20 bp, Artificial Sequence
  chemically synthesized
ccataaccagacaaggatgc

SEQ ID NO: 18246 - DNA, 20 bp, Artificial Sequence
  chemically synthesized
tgcaagtaaaaataaaactg

SEQ ID NO: 18247 - DNA, 20 bp, Artificial Sequence
  chemically synthesized
gcaagtaaaaataaaactgc

SEQ ID NO: 18248 - DNA, 20 bp, Artificial Sequence
  chemically synthesized
ctgcaggtcaatatccctga

SEQ ID NO: 18249 - DNA, 20 bp, Artificial Sequence
  chemically synthesized
tcaatatccctgatggaaca

SEQ ID NO: 18250 - DNA, 20 bp, Artificial Sequence
  chemically synthesized
caatatccctgatggaacat

SEQ ID NO: 18251 - DNA, 20 bp, Artificial Sequence
  chemically synthesized
gaaaatcctcaacaaaatac

SEQ ID NO: 18252 - DNA, 20 bp, Artificial Sequence
  chemically synthesized
tactagcaaactgaatccaa

SEQ ID NO: 18253 - DNA, 20 bp, Artificial Sequence
  chemically synthesized
gaatccaacagtacatccaa

SEQ ID NO: 18254 - DNA, 20 bp, Artificial Sequence
  chemically synthesized
aaagataatacaccatgatc

SEQ ID NO: 18255 - DNA, 20 bp, Artificial Sequence
  chemically synthesized
gataatacaccatgatcaag

SEQ ID NO: 18256 - DNA, 20 bp, Artificial Sequence
  chemically synthesized
ataatacaccatgatcaagt

SEQ ID NO: 18257 - DNA, 20 bp, Artificial Sequence
  chemically synthesized
tgatcaagtgggatttatac

SEQ ID NO: 18258 - DNA, 20 bp, Artificial Sequence
  chemically synthesized
gatcaagtgggatttatact

SEQ ID NO: 18259 - DNA, 20 bp, Artificial Sequence
  chemically synthesized
atcaagtgggatttatacta

SEQ ID NO: 18260 - DNA, 20 bp, Artificial Sequence
  chemically synthesized
gggatttatactagggttgc

SEQ ID NO: 18261 - DNA, 20 bp, Artificial Sequence
  chemically synthesized
ttatactagggttgcaagaa

SEQ ID NO: 18262 - DNA, 20 bp, Artificial Sequence
  chemically synthesized
tgatacatcacatcaacaaa

SEQ ID NO: 18263 - DNA, 20 bp, Artificial Sequence
  chemically synthesized
aaaccatatgatcatctcaa

SEQ ID NO: 18264 - DNA, 20 bp, Artificial Sequence
  chemically synthesized
tatgatcatctcaatagata

SEQ ID NO: 18265 - DNA, 20 bp, Artificial Sequence
  chemically synthesized
catctcaatagatacagaaa

SEQ ID NO: 18266 - DNA, 20 bp, Artificial Sequence
  chemically synthesized
ttcatgataaaaactatctg

SEQ ID NO: 18267 - DNA, 20 bp, Artificial Sequence
  chemically synthesized
aaactatctgcagccaatca

SEQ ID NO: 18268 - DNA, 20 bp, Artificial Sequence
  chemically synthesized
ctatctgcagccaatcatag

SEQ ID NO: 18269 - DNA, 20 bp, Artificial Sequence
  chemically synthesized
tatctgcagccaatcataga

SEQ ID NO: 18270 - DNA, 20 bp, Artificial Sequence
  chemically synthesized
aacatatctcaatataataa

SEQ ID NO: 18271 - DNA, 20 bp, Artificial Sequence
  chemically synthesized
agtcatatatgacaaaccca

SEQ ID NO: 18272 - DNA, 20 bp, Artificial Sequence
  chemically synthesized
cagctaacatcatactgaat

SEQ ID NO: 18273 - DNA, 20 bp, Artificial Sequence
  chemically synthesized
agctaacatcatactgaatt

SEQ ID NO: 18274 - DNA, 20 bp, Artificial Sequence
  chemically synthesized
acatcatactgaattgggaa

SEQ ID NO: 18275 - DNA, 20 bp, Artificial Sequence
  chemically synthesized
catactgaattgggaaaagc

SEQ ID NO: 18276 - DNA, 20 bp, Artificial Sequence
  chemically synthesized
actgaattgggaaaagctgg

SEQ ID NO: 18277 - DNA, 20 bp, Artificial Sequence
  chemically synthesized
aagctggaagcctttcctct

SEQ ID NO: 18278 - DNA, 20 bp, Artificial Sequence
  chemically synthesized
tctaagaactgaaacaaaat

SEQ ID NO: 18279 - DNA, 20 bp, Artificial Sequence
  chemically synthesized
ctaagaactgaaacaaaata

SEQ ID NO: 18280 - DNA, 20 bp, Artificial Sequence
  chemically synthesized
actcctattcaatataatac

SEQ ID NO: 18281 - DNA, 20 bp, Artificial Sequence
  chemically synthesized
cctattcaatataatactgg

SEQ ID NO: 18282 - DNA, 20 bp, Artificial Sequence
  chemically synthesized
caatataatactggaagtcc

SEQ ID NO: 18283 - DNA, 20 bp, Artificial Sequence
  chemically synthesized
aatactggaagtcctagcca

SEQ ID NO: 18284 - DNA, 20 bp, Artificial Sequence
  chemically synthesized
gaagtcctagccacagcttt

SEQ ID NO: 18285 - DNA, 20 bp, Artificial Sequence
  chemically synthesized
aagtcctagccacagctttc

SEQ ID NO: 18286 - DNA, 20 bp, Artificial Sequence
  chemically synthesized
cctagccacagctttcaggt

SEQ ID NO: 18287 - DNA, 20 bp, Artificial Sequence
  chemically synthesized
tagccacagctttcaggtca

SEQ ID NO: 18288 - DNA, 20 bp, Artificial Sequence
  chemically synthesized
cacagctttcaggtcagaga

SEQ ID NO: 18289 - DNA, 20 bp, Artificial Sequence
  chemically synthesized
gctttcaggtcagagaaaga

SEQ ID NO: 18290 - DNA, 20 bp, Artificial Sequence
  chemically synthesized
tcaggtcagagaaagaaaga

SEQ ID NO: 18291 - DNA, 20 bp, Artificial Sequence
  chemically synthesized
tcagagaaagaaagaaagaa

SEQ ID NO: 18292 - DNA, 20 bp, Artificial Sequence
  chemically synthesized
cagagaaagaaagaaagaaa

SEQ ID NO: 18293 - DNA, 20 bp, Artificial Sequence
  chemically synthesized
agaaagaaaaggcatgcaaa

SEQ ID NO: 18294 - DNA, 20 bp, Artificial Sequence
  chemically synthesized
gaaagaaaaggcatgcaaat

SEQ ID NO: 18295 - DNA, 20 bp, Artificial Sequence
  chemically synthesized
aaaaggcatgcaaataggaa

SEQ ID NO: 18296 - DNA, 20 bp, Artificial Sequence
  chemically synthesized
catgcaaataggaaaagatg

SEQ ID NO: 18297 - DNA, 20 bp, Artificial Sequence
  chemically synthesized
agtcaaactgtccatctttc

SEQ ID NO: 18298 - DNA, 20 bp, Artificial Sequence
  chemically synthesized
agatgacatgattttatacc

SEQ ID NO: 18299 - DNA, 20 bp, Artificial Sequence
  chemically synthesized
attttatacctagaaaaacc

SEQ ID NO: 18300 - DNA, 20 bp, Artificial Sequence
  chemically synthesized
gaaaaaccaagactccacca

SEQ ID NO: 18301 - DNA, 20 bp, Artificial Sequence
  chemically synthesized
agactccaccaaagcactct

SEQ ID NO: 18302 - DNA, 20 bp, Artificial Sequence
  chemically synthesized
ttagcgctgaaaaataaatt

SEQ ID NO: 18303 - DNA, 20 bp, Artificial Sequence
  chemically synthesized
gctgaaaaataaattcagta

SEQ ID NO: 18304 - DNA, 20 bp, Artificial Sequence
  chemically synthesized
aaataaattcagtaaagtta

SEQ ID NO: 18305 - DNA, 20 bp, Artificial Sequence
  chemically synthesized
aataaattcagtaaagttac

SEQ ID NO: 18306 - DNA, 20 bp, Artificial Sequence
  chemically synthesized
taaattcagtaaagttacag

SEQ ID NO: 18307 - DNA, 20 bp, Artificial Sequence
  chemically synthesized
aaagttacaggagacaaaat

SEQ ID NO: 18308 - DNA, 20 bp, Artificial Sequence
  chemically synthesized
acaaaatcagcatatgaaac

SEQ ID NO: 18309 - DNA, 20 bp, Artificial Sequence
  chemically synthesized
tctacacaccaataataaac

SEQ ID NO: 18310 - DNA, 20 bp, Artificial Sequence
  chemically synthesized
acaccaataataaactagct

SEQ ID NO: 18311 - DNA, 20 bp, Artificial Sequence
  chemically synthesized
ccaataataaactagctgag

SEQ ID NO: 18312 - DNA, 20 bp, Artificial Sequence
  chemically synthesized
caataataaactagctgaga

SEQ ID NO: 18313 - DNA, 20 bp, Artificial Sequence
  chemically synthesized
aactagctgagaaggaaatt

SEQ ID NO: 18314 - DNA, 20 bp, Artificial Sequence
  chemically synthesized
tagctgagaaggaaattaag

SEQ ID NO: 18315 - DNA, 20 bp, Artificial Sequence
  chemically synthesized
agctgagaaggaaattaaga

SEQ ID NO: 18316 - DNA, 20 bp, Artificial Sequence
  chemically synthesized
gaaggcaatcccatttacaa

SEQ ID NO: 18317 - DNA, 20 bp, Artificial Sequence
  chemically synthesized
tagctaaaaaataaaatatt

SEQ ID NO: 18318 - DNA, 20 bp, Artificial Sequence
  chemically synthesized
agctaaaaaataaaatattt

SEQ ID NO: 18319 - DNA, 20 bp, Artificial Sequence
  chemically synthesized
gctaaaaaataaaatattta

SEQ ID NO: 18320 - DNA, 20 bp, Artificial Sequence
  chemically synthesized
atttagggataaatttaacc

SEQ ID NO: 18321 - DNA, 20 bp, Artificial Sequence
  chemically synthesized
tttagggataaatttaacca

SEQ ID NO: 18322 - DNA, 20 bp, Artificial Sequence
  chemically synthesized
ggaaccgaaaaacctctatt

SEQ ID NO: 18323 - DNA, 20 bp, Artificial Sequence
  chemically synthesized
aaactacaaaacactgataa

SEQ ID NO: 18324 - DNA, 20 bp, Artificial Sequence
  chemically synthesized
acactgataaaagaattgaa

SEQ ID NO: 18325 - DNA, 20 bp, Artificial Sequence
  chemically synthesized
cactgataaaagaattgaaa

SEQ ID NO: 18326 - DNA, 20 bp, Artificial Sequence
  chemically synthesized
gataaaagaattgaaaagga

SEQ ID NO: 18327 - DNA, 20 bp, Artificial Sequence
  chemically synthesized
ttgaaaaggacagaaacaaa

SEQ ID NO: 18328 - DNA, 20 bp, Artificial Sequence
  chemically synthesized
gaaaaggacagaaacaaatg

SEQ ID NO: 18329 - DNA, 20 bp, Artificial Sequence
  chemically synthesized
aaaggacagaaacaaatgga

SEQ ID NO: 18330 - DNA, 20 bp, Artificial Sequence
  chemically synthesized
ggagagatatcctatgttca

SEQ ID NO: 18331 - DNA, 20 bp, Artificial Sequence
  chemically synthesized
gatatcctatgttcatggat

SEQ ID NO: 18332 - DNA, 20 bp, Artificial Sequence
  chemically synthesized
aaaaattaatattgttaaaa

SEQ ID NO: 18333 - DNA, 20 bp, Artificial Sequence
  chemically synthesized
taaaatggccatactaccca

SEQ ID NO: 18334 - DNA, 20 bp, Artificial Sequence
  chemically synthesized
atactacccaaagcaatcta

SEQ ID NO: 18335 - DNA, 20 bp, Artificial Sequence
  chemically synthesized
ctatatgaccgctatcaaaa

SEQ ID NO: 18336 - DNA, 20 bp, Artificial Sequence
  chemically synthesized
aatagcaatgtcatttttca

SEQ ID NO: 18337 - DNA, 20 bp, Artificial Sequence
  chemically synthesized
aatgtcatttttcacagaaa

SEQ ID NO: 18338 - DNA, 20 bp, Artificial Sequence
  chemically synthesized
atttgtatgaaattaaaaaa

SEQ ID NO: 18339 - DNA, 20 bp, Artificial Sequence
  chemically synthesized
atgaaattaaaaaatagctc

SEQ ID NO: 18340 - DNA, 20 bp, Artificial Sequence
  chemically synthesized
aaattaaaaaatagctccag

SEQ ID NO: 18341 - DNA, 20 bp, Artificial Sequence
  chemically synthesized
aaaaatagctccagtagcca

SEQ ID NO: 18342 - DNA, 20 bp, Artificial Sequence
  chemically synthesized
ccaaagtcatcctgtgaaaa

SEQ ID NO: 18343 - DNA, 20 bp, Artificial Sequence
  chemically synthesized
ctgtgaaaaaagaacaatgc

SEQ ID NO: 18344 - DNA, 20 bp, Artificial Sequence
  chemically synthesized
gtgaaaaaagaacaatgcta

SEQ ID NO: 18345 - DNA, 20 bp, Artificial Sequence
  chemically synthesized
tgaaaaaagaacaatgctag

SEQ ID NO: 18346 - DNA, 20 bp, Artificial Sequence
  chemically synthesized
tatcatactacctgatttca

SEQ ID NO: 18347 - DNA, 20 bp, Artificial Sequence
  chemically synthesized
gatttcaaagtatattacaa

SEQ ID NO: 18348 - DNA, 20 bp, Artificial Sequence
  chemically synthesized
caaagtatattacaaaagta

SEQ ID NO: 18349 - DNA, 20 bp, Artificial Sequence
  chemically synthesized
aaagtatattacaaaagtat

SEQ ID NO: 18350 - DNA, 20 bp, Artificial Sequence
  chemically synthesized
caaaagtataggaacctaaa

SEQ ID NO: 18351 - DNA, 20 bp, Artificial Sequence
  chemically synthesized
aaacagcatgatactgacat

SEQ ID NO: 18352 - DNA, 20 bp, Artificial Sequence
  chemically synthesized
gcatgatactgacattagaa

SEQ ID NO: 18353 - DNA, 20 bp, Artificial Sequence
  chemically synthesized
ctgacattagaacagacact

SEQ ID NO: 18354 - DNA, 20 bp, Artificial Sequence
  chemically synthesized
agaacagacacttagaccaa

SEQ ID NO: 18355 - DNA, 20 bp, Artificial Sequence
  chemically synthesized
acagacacttagaccaatgg

SEQ ID NO: 18356 - DNA, 20 bp, Artificial Sequence
  chemically synthesized
agacacttagaccaatggaa

SEQ ID NO: 18357 - DNA, 20 bp, Artificial Sequence
  chemically synthesized
cttagaccaatggaagagaa

SEQ ID NO: 18358 - DNA, 20 bp, Artificial Sequence
  chemically synthesized
tagaccaatggaagagaata

SEQ ID NO: 18359 - DNA, 20 bp, Artificial Sequence
  chemically synthesized
atggaagagaatagagaacc

SEQ ID NO: 18360 - DNA, 20 bp, Artificial Sequence
  chemically synthesized
gaaatgcatccacatattta

SEQ ID NO: 18361 - DNA, 20 bp, Artificial Sequence
  chemically synthesized
atccacatatttatagccaa

SEQ ID NO: 18362 - DNA, 20 bp, Artificial Sequence
  chemically synthesized
tagccaacagattttcaaca

SEQ ID NO: 18363 - DNA, 20 bp, Artificial Sequence
  chemically synthesized
agccaacagattttcaacaa

SEQ ID NO: 18364 - DNA, 20 bp, Artificial Sequence
  chemically synthesized
agattttcaacaaaggtgac

SEQ ID NO: 18365 - DNA, 20 bp, Artificial Sequence
  chemically synthesized
aggtgacaagaatatacatt

SEQ ID NO: 18366 - DNA, 20 bp, Artificial Sequence
  chemically synthesized
ggtgacaagaatatacattg

SEQ ID NO: 18367 - DNA, 20 bp, Artificial Sequence
  chemically synthesized
acaagaatatacattgagga

SEQ ID NO: 18368 - DNA, 20 bp, Artificial Sequence
  chemically synthesized
caagaatatacattgaggaa

SEQ ID NO: 18369 - DNA, 20 bp, Artificial Sequence
  chemically synthesized
tatacattgaggaaaggaca

SEQ ID NO: 18370 - DNA, 20 bp, Artificial Sequence
  chemically synthesized
gaggaaaggacacagtgttc

SEQ ID NO: 18371 - DNA, 20 bp, Artificial Sequence
  chemically synthesized
aggacacagtgttcaagaaa

SEQ ID NO: 18372 - DNA, 20 bp, Artificial Sequence
  chemically synthesized
agaaatggtgctgaaaaaat

SEQ ID NO: 18373 - DNA, 20 bp, Artificial Sequence
  chemically synthesized
tgaaaaaattggatatccat

SEQ ID NO: 18374 - DNA, 20 bp, Artificial Sequence
  chemically synthesized
cattggatatccatgtgcaa

SEQ ID NO: 18375 - DNA, 20 bp, Artificial Sequence
  chemically synthesized
catgtgcaaaagaataaaac

SEQ ID NO: 18376 - DNA, 20 bp, Artificial Sequence
  chemically synthesized
ataaaactggactgctgata

SEQ ID NO: 18377 - DNA, 20 bp, Artificial Sequence
  chemically synthesized
actggactgctgatatggtt

SEQ ID NO: 18378 - DNA, 20 bp, Artificial Sequence
  chemically synthesized
aaatataatccccaacttct

SEQ ID NO: 18379 - DNA, 20 bp, Artificial Sequence
  chemically synthesized
aatataatccccaacttctc

SEQ ID NO: 18380 - DNA, 20 bp, Artificial Sequence
  chemically synthesized
tccccaacttctcaggatct

SEQ ID NO: 18381 - DNA, 20 bp, Artificial Sequence
  chemically synthesized
ccaacttctcaggatcttgg

SEQ ID NO: 18382 - DNA, 20 bp, Artificial Sequence
  chemically synthesized
cttctcaggatcttggcgga

SEQ ID NO: 18383 - DNA, 20 bp, Artificial Sequence
  chemically synthesized
ttctcaggatcttggcggat

SEQ ID NO: 18384 - DNA, 20 bp, Artificial Sequence
  chemically synthesized
ctcaggatcttggcggatgg

SEQ ID NO: 18385 - DNA, 20 bp, Artificial Sequence
  chemically synthesized
tcaggatcttggcggatggg

SEQ ID NO: 18386 - DNA, 20 bp, Artificial Sequence
  chemically synthesized
ggatcttggcggatgggagg

SEQ ID NO: 18387 - DNA, 20 bp, Artificial Sequence
  chemically synthesized
gatcttggcggatgggaggt

SEQ ID NO: 18388 - DNA, 20 bp, Artificial Sequence
  chemically synthesized
tggcggatgggaggtaggcc

SEQ ID NO: 18389 - DNA, 20 bp, Artificial Sequence
  chemically synthesized
tgggaggtaggcctagattg

SEQ ID NO: 18390 - DNA, 20 bp, Artificial Sequence
  chemically synthesized
cctagattgcagctccaact

SEQ ID NO: 18391 - DNA, 20 bp, Artificial Sequence
  chemically synthesized
gattgcagctccaactcaga

SEQ ID NO: 18392 - DNA, 20 bp, Artificial Sequence
  chemically synthesized
gcagctccaactcagatgga

SEQ ID NO: 18393 - DNA, 20 bp, Artificial Sequence
  chemically synthesized
agctccaactcagatggaca

SEQ ID NO: 18394 - DNA, 20 bp, Artificial Sequence
  chemically synthesized
tccaactcagatggacagag

SEQ ID NO: 18395 - DNA, 20 bp, Artificial Sequence
  chemically synthesized
cagatggacagagcagcatg

SEQ ID NO: 18396 - DNA, 20 bp, Artificial Sequence
  chemically synthesized
gatggacagagcagcatgtg

SEQ ID NO: 18397 - DNA, 20 bp, Artificial Sequence
  chemically synthesized
atggacagagcagcatgtgg

SEQ ID NO: 18398 - DNA, 20 bp, Artificial Sequence
  chemically synthesized
gaggctcgcattgtgaattt

SEQ ID NO: 18399 - DNA, 20 bp, Artificial Sequence
  chemically synthesized
cgcattgtgaattttagctg

SEQ ID NO: 18400 - DNA, 20 bp, Artificial Sequence
  chemically synthesized
ttgtgaattttagctgcaga

SEQ ID NO: 18401 - DNA, 20 bp, Artificial Sequence
  chemically synthesized
tttagctgcagatagactgc

SEQ ID NO: 18402 - DNA, 20 bp, Artificial Sequence
  chemically synthesized
gatagactgcaagaacaaac

SEQ ID NO: 18403 - DNA, 20 bp, Artificial Sequence
  chemically synthesized
aagaacaaaccagcaatcct

SEQ ID NO: 18404 - DNA, 20 bp, Artificial Sequence
  chemically synthesized
gaacaaaccagcaatcctga

SEQ ID NO: 18405 - DNA, 20 bp, Artificial Sequence
  chemically synthesized
aacaaaccagcaatcctgag

SEQ ID NO: 18406 - DNA, 20 bp, Artificial Sequence
  chemically synthesized
agcaatcctgagaggaccca

SEQ ID NO: 18407 - DNA, 20 bp, Artificial Sequence
  chemically synthesized
gaggacccacagaccctctg

SEQ ID NO: 18408 - DNA, 20 bp, Artificial Sequence
  chemically synthesized
aggacccacagaccctctga

SEQ ID NO: 18409 - DNA, 20 bp, Artificial Sequence
  chemically synthesized
acccacagaccctctgaagg

SEQ ID NO: 18410 - DNA, 20 bp, Artificial Sequence
  chemically synthesized
cacagaccctctgaaggaag

SEQ ID NO: 18411 - DNA, 20 bp, Artificial Sequence
  chemically synthesized
aaggaagtagattgctcctg

SEQ ID NO: 18412 - DNA, 20 bp, Artificial Sequence
  chemically synthesized
aggaagtagattgctcctgc

SEQ ID NO: 18413 - DNA, 20 bp, Artificial Sequence
  chemically synthesized
tagattgctcctgcaggacc

SEQ ID NO: 18414 - DNA, 20 bp, Artificial Sequence
  chemically synthesized
agattgctcctgcaggaccc

SEQ ID NO: 18415 - DNA, 20 bp, Artificial Sequence
  chemically synthesized
attgctcctgcaggacccag

SEQ ID NO: 18416 - DNA, 20 bp, Artificial Sequence
  chemically synthesized
ggagacaccccaaatactgt

SEQ ID NO: 18417 - DNA, 20 bp, Artificial Sequence
  chemically synthesized
tactgtgagtgccccaactg

SEQ ID NO: 18418 - DNA, 20 bp, Artificial Sequence
  chemically synthesized
tgtgagtgccccaactgcgg

SEQ ID NO: 18419 - DNA, 20 bp, Artificial Sequence
  chemically synthesized
gagtgccccaactgcggaag

SEQ ID NO: 18420 - DNA, 20 bp, Artificial Sequence
  chemically synthesized
agtgccccaactgcggaagt

SEQ ID NO: 18421 - DNA, 20 bp, Artificial Sequence
  chemically synthesized
ccccaactgcggaagtggga

SEQ ID NO: 18422 - DNA, 20 bp, Artificial Sequence
  chemically synthesized
cccaactgcggaagtgggaa

SEQ ID NO: 18423 - DNA, 20 bp, Artificial Sequence
  chemically synthesized
ccaactgcggaagtgggaaa

SEQ ID NO: 18424 - DNA, 20 bp, Artificial Sequence
  chemically synthesized
aactgcggaagtgggaaagg

SEQ ID NO: 18425 - DNA, 20 bp, Artificial Sequence
  chemically synthesized
tcctaaacacacactcccac

SEQ ID NO: 18426 - DNA, 20 bp, Artificial Sequence
  chemically synthesized
ctaaacacacactcccactg

SEQ ID NO: 18427 - DNA, 20 bp, Artificial Sequence
  chemically synthesized
cactcccactggagaaactg

SEQ ID NO: 18428 - DNA, 20 bp, Artificial Sequence
  chemically synthesized
actcccactggagaaactga

SEQ ID NO: 18429 - DNA, 20 bp, Artificial Sequence
  chemically synthesized
agaaactgaaggtctgtttg

SEQ ID NO: 18430 - DNA, 20 bp, Artificial Sequence
  chemically synthesized
gaaactgaaggtctgtttgt

SEQ ID NO: 18431 - DNA, 20 bp, Artificial Sequence
  chemically synthesized
aactgaaggtctgtttgtgg

SEQ ID NO: 18432 - DNA, 20 bp, Artificial Sequence
  chemically synthesized
tgaaggtctgtttgtgggag

SEQ ID NO: 18433 - DNA, 20 bp, Artificial Sequence
  chemically synthesized
gagaagtttctgaccttacc

SEQ ID NO: 18434 - DNA, 20 bp, Artificial Sequence
  chemically synthesized
gaagtttctgaccttacctg

SEQ ID NO: 18435 - DNA, 20 bp, Artificial Sequence
  chemically synthesized
ttctgaccttacctggagtt

SEQ ID NO: 18436 - DNA, 20 bp, Artificial Sequence
  chemically synthesized
tacctggagttgagttaact

SEQ ID NO: 18437 - DNA, 20 bp, Artificial Sequence
  chemically synthesized
cctggagttgagttaactta

SEQ ID NO: 18438 - DNA, 20 bp, Artificial Sequence
  chemically synthesized
tggagttgagttaacttaga

SEQ ID NO: 18439 - DNA, 20 bp, Artificial Sequence
  chemically synthesized
ttgagttaacttagagagct

SEQ ID NO: 18440 - DNA, 20 bp, Artificial Sequence
  chemically synthesized
ttagagagctgagcaaaata

SEQ ID NO: 18441 - DNA, 20 bp, Artificial Sequence
  chemically synthesized
tagagagctgagcaaaatac

SEQ ID NO: 18442 - DNA, 20 bp, Artificial Sequence
  chemically synthesized
agctgagcaaaatacaggtg

SEQ ID NO: 18443 - DNA, 20 bp, Artificial Sequence
  chemically synthesized
ctgagcaaaatacaggtgta

SEQ ID NO: 18444 - DNA, 20 bp, Artificial Sequence
  chemically synthesized
tgagcaaaatacaggtgtag

SEQ ID NO: 18445 - DNA, 20 bp, Artificial Sequence
  chemically synthesized
gcaaaatacaggtgtagagg

SEQ ID NO: 18446 - DNA, 20 bp, Artificial Sequence
  chemically synthesized
aaatacaggtgtagaggaag

SEQ ID NO: 18447 - DNA, 20 bp, Artificial Sequence
  chemically synthesized
acaggtgtagaggaagcagt

SEQ ID NO: 18448 - DNA, 20 bp, Artificial Sequence
  chemically synthesized
gtgtagaggaagcagtgaga

SEQ ID NO: 18449 - DNA, 20 bp, Artificial Sequence
  chemically synthesized
tgtagaggaagcagtgagaa

SEQ ID NO: 18450 - DNA, 20 bp, Artificial Sequence
  chemically synthesized
ggaagcagtgagaaaggccc

SEQ ID NO: 18451 - DNA, 20 bp, Artificial Sequence
  chemically synthesized
gaagcagtgagaaaggccct

SEQ ID NO: 18452 - DNA, 20 bp, Artificial Sequence
  chemically synthesized
agcagtgagaaaggccctgg

SEQ ID NO: 18453 - DNA, 20 bp, Artificial Sequence
  chemically synthesized
gaaaggccctgggagctcac

SEQ ID NO: 18454 - DNA, 20 bp, Artificial Sequence
  chemically synthesized
aaaggccctgggagctcact

SEQ ID NO: 18455 - DNA, 20 bp, Artificial Sequence
  chemically synthesized
tgggagctcactgggtccct

SEQ ID NO: 18456 - DNA, 20 bp, Artificial Sequence
  chemically synthesized
gagctcactgggtccctgag

SEQ ID NO: 18457 - DNA, 20 bp, Artificial Sequence
  chemically synthesized
agctcactgggtccctgagc

SEQ ID NO: 18458 - DNA, 20 bp, Artificial Sequence
  chemically synthesized
ctgagcaggccattcctgcc

SEQ ID NO: 18459 - DNA, 20 bp, Artificial Sequence
  chemically synthesized
caggccattcctgcctggca

SEQ ID NO: 18460 - DNA, 20 bp, Artificial Sequence
  chemically synthesized
ccattcctgcctggcatagc

SEQ ID NO: 18461 - DNA, 20 bp, Artificial Sequence
  chemically synthesized
cattcctgcctggcatagcc

SEQ ID NO: 18462 - DNA, 20 bp, Artificial Sequence
  chemically synthesized
ttactaacattgaatgtaaa

SEQ ID NO: 18463 - DNA, 20 bp, Artificial Sequence
  chemically synthesized
ggcctaaatgctccacttaa

SEQ ID NO: 18464 - DNA, 20 bp, Artificial Sequence
  chemically synthesized
gcctaaatgctccacttaaa

SEQ ID NO: 18465 - DNA, 20 bp, Artificial Sequence
  chemically synthesized
cctaaatgctccacttaaaa

SEQ ID NO: 18466 - DNA, 20 bp, Artificial Sequence
  chemically synthesized
ctccacttaaaagggtgaaa

SEQ ID NO: 18467 - DNA, 20 bp, Artificial Sequence
  chemically synthesized
tccacttaaaagggtgaaaa

SEQ ID NO: 18468 - DNA, 20 bp, Artificial Sequence
  chemically synthesized
aaaaaggtatttcatgcaaa

SEQ ID NO: 18469 - DNA, 20 bp, Artificial Sequence
  chemically synthesized
ttcatgcaaatggccaccaa

SEQ ID NO: 18470 - DNA, 20 bp, Artificial Sequence
  chemically synthesized
tgcaaatggccaccaaaagt

SEQ ID NO: 18471 - DNA, 20 bp, Artificial Sequence
  chemically synthesized
aaatggccaccaaaagtgag

SEQ ID NO: 18472 - DNA, 20 bp, Artificial Sequence
  chemically synthesized
aatggccaccaaaagtgagt

SEQ ID NO: 18473 - DNA, 20 bp, Artificial Sequence
  chemically synthesized
agtaggcaaaacaaacttta

SEQ ID NO: 18474 - DNA, 20 bp, Artificial Sequence
  chemically synthesized
caaaacaaactttaaagcaa

SEQ ID NO: 18475 - DNA, 20 bp, Artificial Sequence
  chemically synthesized
aacaaactttaaagcaacag

SEQ ID NO: 18476 - DNA, 20 bp, Artificial Sequence
  chemically synthesized
tttaaagcaacagcagttaa

SEQ ID NO: 18477 - DNA, 20 bp, Artificial Sequence
  chemically synthesized
taaagcaacagcagttaaaa

SEQ ID NO: 18478 - DNA, 20 bp, Artificial Sequence
  chemically synthesized
aacagcagttaaaagagaca

SEQ ID NO: 18479 - DNA, 20 bp, Artificial Sequence
  chemically synthesized
cagcagttaaaagagacaaa

SEQ ID NO: 18480 - DNA, 20 bp, Artificial Sequence
  chemically synthesized
agcagttaaaagagacaaag

SEQ ID NO: 18481 - DNA, 20 bp, Artificial Sequence
  chemically synthesized
gcagttaaaagagacaaaga

SEQ ID NO: 18482 - DNA, 20 bp, Artificial Sequence
  chemically synthesized
caaagagggacattatataa

SEQ ID NO: 18483 - DNA, 20 bp, Artificial Sequence
  chemically synthesized
gggacattatataatggtaa

SEQ ID NO: 18484 - DNA, 20 bp, Artificial Sequence
  chemically synthesized
ggacattatataatggtaaa

SEQ ID NO: 18485 - DNA, 20 bp, Artificial Sequence
  chemically synthesized
tggtaaaaggccttgtccaa

SEQ ID NO: 18486 - DNA, 20 bp, Artificial Sequence
  chemically synthesized
ggtaaaaggccttgtccaac

SEQ ID NO: 18487 - DNA, 20 bp, Artificial Sequence
  chemically synthesized
aacatatatgcacctaacac

SEQ ID NO: 18488 - DNA, 20 bp, Artificial Sequence
  chemically synthesized
catatatgcacctaacactg

SEQ ID NO: 18489 - DNA, 20 bp, Artificial Sequence
  chemically synthesized
cactggagctcccaaattta

SEQ ID NO: 18490 - DNA, 20 bp, Artificial Sequence
  chemically synthesized
atttatagaacaattactaa

SEQ ID NO: 18491 - DNA, 20 bp, Artificial Sequence
  chemically synthesized
gaacaattactaatagacct

SEQ ID NO: 18492 - DNA, 20 bp, Artificial Sequence
  chemically synthesized
tactaatagacctaagaaat

SEQ ID NO: 18493 - DNA, 20 bp, Artificial Sequence
  chemically synthesized
aatagacctaagaaatgaga

SEQ ID NO: 18494 - DNA, 20 bp, Artificial Sequence
  chemically synthesized
gacctaagaaatgagataga

SEQ ID NO: 18495 - DNA, 20 bp, Artificial Sequence
  chemically synthesized
gatagacagcaacacaataa

SEQ ID NO: 18496 - DNA, 20 bp, Artificial Sequence
  chemically synthesized
agacagcaacacaataatag

SEQ ID NO: 18497 - DNA, 20 bp, Artificial Sequence
  chemically synthesized
gacagcaacacaataatagt

SEQ ID NO: 18498 - DNA, 20 bp, Artificial Sequence
  chemically synthesized
acagcaacacaataatagtg

SEQ ID NO: 18499 - DNA, 20 bp, Artificial Sequence
  chemically synthesized
cagcaacacaataatagtgg

SEQ ID NO: 18500 - DNA, 20 bp, Artificial Sequence
  chemically synthesized
ggacttcaatacttcattga

SEQ ID NO: 18501 - DNA, 20 bp, Artificial Sequence
  chemically synthesized
caatacttcattgacagcac

SEQ ID NO: 18502 - DNA, 20 bp, Artificial Sequence
  chemically synthesized
acttcattgacagcactaga

SEQ ID NO: 18503 - DNA, 20 bp, Artificial Sequence
  chemically synthesized
acagcactagacagttcatc

SEQ ID NO: 18504 - DNA, 20 bp, Artificial Sequence
  chemically synthesized
cactagacagttcatcaaga

SEQ ID NO: 18505 - DNA, 20 bp, Artificial Sequence
  chemically synthesized
agacagttcatcaagacaga

SEQ ID NO: 18506 - DNA, 20 bp, Artificial Sequence
  chemically synthesized
gaaagtcaacaaaaaaataa

SEQ ID NO: 18507 - DNA, 20 bp, Artificial Sequence
  chemically synthesized
aatggatttaaattatacct

SEQ ID NO: 18508 - DNA, 20 bp, Artificial Sequence
  chemically synthesized
aaattataccttagaacaaa

SEQ ID NO: 18509 - DNA, 20 bp, Artificial Sequence
  chemically synthesized
cttagaacaaatggacttaa

SEQ ID NO: 18510 - DNA, 20 bp, Artificial Sequence
  chemically synthesized
atggacttaacagttatata

SEQ ID NO: 18511 - DNA, 20 bp, Artificial Sequence
  chemically synthesized
aacatttcatccaataacca

SEQ ID NO: 18512 - DNA, 20 bp, Artificial Sequence
  chemically synthesized
agaacacacattctattcaa

SEQ ID NO: 18513 - DNA, 20 bp, Artificial Sequence
  chemically synthesized
acattctattcaacagcgcg

SEQ ID NO: 18514 - DNA, 20 bp, Artificial Sequence
  chemically synthesized
cagcgcgtggaaatttctcc

SEQ ID NO: 18515 - DNA, 20 bp, Artificial Sequence
  chemically synthesized
agcgcgtggaaatttctcca

SEQ ID NO: 18516 - DNA, 20 bp, Artificial Sequence
  chemically synthesized
gcgtggaaatttctccaagg

SEQ ID NO: 18517 - DNA, 20 bp, Artificial Sequence
  chemically synthesized
ctccaaggtagaccatatga

SEQ ID NO: 18518 - DNA, 20 bp, Artificial Sequence
  chemically synthesized
tccaaggtagaccatatgat

SEQ ID NO: 18519 - DNA, 20 bp, Artificial Sequence
  chemically synthesized
catatgataggccatgaaat

SEQ ID NO: 18520 - DNA, 20 bp, Artificial Sequence
  chemically synthesized
agcctcaataaatttactaa

SEQ ID NO: 18521 - DNA, 20 bp, Artificial Sequence
  chemically synthesized
tttactaacagaccaataac

SEQ ID NO: 18522 - DNA, 20 bp, Artificial Sequence
  chemically synthesized
actaacagaccaataacaag

SEQ ID NO: 18523 - DNA, 20 bp, Artificial Sequence
  chemically synthesized
acagaccaataacaagcagt

SEQ ID NO: 18524 - DNA, 20 bp, Artificial Sequence
  chemically synthesized
aacaagcagtgagatttaat

SEQ ID NO: 18525 - DNA, 20 bp, Artificial Sequence
  chemically synthesized
aaaaattaccaaccaaaaaa

SEQ ID NO: 18526 - DNA, 20 bp, Artificial Sequence
  chemically synthesized
ttaccaaccaaaaaaaagtt

SEQ ID NO: 18527 - DNA, 20 bp, Artificial Sequence
  chemically synthesized
taccaaccaaaaaaaagttc

SEQ ID NO: 18528 - DNA, 20 bp, Artificial Sequence
  chemically synthesized
accaaaaaaaagttcaggac

SEQ ID NO: 18529 - DNA, 20 bp, Artificial Sequence
  chemically synthesized
aaaaaaagttcaggaccaga

SEQ ID NO: 18530 - DNA, 20 bp, Artificial Sequence
  chemically synthesized
aggaccagatggattcacaa

SEQ ID NO: 18531 - DNA, 20 bp, Artificial Sequence
  chemically synthesized
gattcacaacagaattctac

SEQ ID NO: 18532 - DNA, 20 bp, Artificial Sequence
  chemically synthesized
agaattctactagacattca

SEQ ID NO: 18533 - DNA, 20 bp, Artificial Sequence
  chemically synthesized
aattctactagacattcaaa

SEQ ID NO: 18534 - DNA, 20 bp, Artificial Sequence
  chemically synthesized
attctactagacattcaaag

SEQ ID NO: 18535 - DNA, 20 bp, Artificial Sequence
  chemically synthesized
ctagacattcaaagaggaat

SEQ ID NO: 18536 - DNA, 20 bp, Artificial Sequence
  chemically synthesized
tctttttgacactattctac

SEQ ID NO: 18537 - DNA, 20 bp, Artificial Sequence
  chemically synthesized
tttgacactattctacaaga

SEQ ID NO: 18538 - DNA, 20 bp, Artificial Sequence
  chemically synthesized
actattctacaagacagata

SEQ ID NO: 18539 - DNA, 20 bp, Artificial Sequence
  chemically synthesized
attctacaagacagataaag

SEQ ID NO: 18540 - DNA, 20 bp, Artificial Sequence
  chemically synthesized
ttctacaagacagataaaga

SEQ ID NO: 18541 - DNA, 20 bp, Artificial Sequence
  chemically synthesized
ctgccctaattcattctatg

SEQ ID NO: 18542 - DNA, 20 bp, Artificial Sequence
  chemically synthesized
cctaattcattctatgaagc

SEQ ID NO: 18543 - DNA, 20 bp, Artificial Sequence
  chemically synthesized
agccagcatcacaccaaaac

SEQ ID NO: 18544 - DNA, 20 bp, Artificial Sequence
  chemically synthesized
gccagcatcacaccaaaacc

SEQ ID NO: 18545 - DNA, 20 bp, Artificial Sequence
  chemically synthesized
ccagcatcacaccaaaacca

SEQ ID NO: 18546 - DNA, 20 bp, Artificial Sequence
  chemically synthesized
gcatcacaccaaaaccaggg

SEQ ID NO: 18547 - DNA, 20 bp, Artificial Sequence
  chemically synthesized
catcacaccaaaaccaggga

SEQ ID NO: 18548 - DNA, 20 bp, Artificial Sequence
  chemically synthesized
agggaaggacataaccaaaa

SEQ ID NO: 18549 - DNA, 20 bp, Artificial Sequence
  chemically synthesized
ataaccaaaaaagaaaacta

SEQ ID NO: 18550 - DNA, 20 bp, Artificial Sequence
  chemically synthesized
aaaagaaaactacagactga

SEQ ID NO: 18551 - DNA, 20 bp, Artificial Sequence
  chemically synthesized
actgatagccttgatgaaca

SEQ ID NO: 18552 - DNA, 20 bp, Artificial Sequence
  chemically synthesized
taaaatccttaacaaaatac

SEQ ID NO: 18553 - DNA, 20 bp, Artificial Sequence
  chemically synthesized
aaattcaacaacataacaaa

SEQ ID NO: 18554 - DNA, 20 bp, Artificial Sequence
  chemically synthesized
aaagataatccaccatgatc

SEQ ID NO: 18555 - DNA, 20 bp, Artificial Sequence
  chemically synthesized
gataatccaccatgatcaag

SEQ ID NO: 18556 - DNA, 20 bp, Artificial Sequence
  chemically synthesized
ataatccaccatgatcaagc

SEQ ID NO: 18557 - DNA, 20 bp, Artificial Sequence
  chemically synthesized
tgatcaagcaggttccatgc

SEQ ID NO: 18558 - DNA, 20 bp, Artificial Sequence
  chemically synthesized
gatcaagcaggttccatgcc

SEQ ID NO: 18559 - DNA, 20 bp, Artificial Sequence
  chemically synthesized
atcaagcaggttccatgcca

SEQ ID NO: 18560 - DNA, 20 bp, Artificial Sequence
  chemically synthesized
caggttccatgccagggatg

SEQ ID NO: 18561 - DNA, 20 bp, Artificial Sequence
  chemically synthesized
aggttccatgccagggatgc

SEQ ID NO: 18562 - DNA, 20 bp, Artificial Sequence
  chemically synthesized
ggttccatgccagggatgca

SEQ ID NO: 18563 - DNA, 20 bp, Artificial Sequence
  chemically synthesized
ccatgccagggatgcagggt

SEQ ID NO: 18564 - DNA, 20 bp, Artificial Sequence
  chemically synthesized
agggttggtttgacatctgc

SEQ ID NO: 18565 - DNA, 20 bp, Artificial Sequence
  chemically synthesized
tttgacatctgcaagtcaat

SEQ ID NO: 18566 - DNA, 20 bp, Artificial Sequence
  chemically synthesized
agtgtgatacaccacataaa

SEQ ID NO: 18567 - DNA, 20 bp, Artificial Sequence
  chemically synthesized
aaattacatgatcatctcaa

SEQ ID NO: 18568 - DNA, 20 bp, Artificial Sequence
  chemically synthesized
catgatcatctcaatagatg

SEQ ID NO: 18569 - DNA, 20 bp, Artificial Sequence
  chemically synthesized
catctcaatagatgcagaaa

SEQ ID NO: 18570 - DNA, 20 bp, Artificial Sequence
  chemically synthesized
aaaaagcattcaacaaaatc

SEQ ID NO: 18571 - DNA, 20 bp, Artificial Sequence
  chemically synthesized
acatttatgattaaaatgct

SEQ ID NO: 18572 - DNA, 20 bp, Artificial Sequence
  chemically synthesized
attaaaatgctcagcaaaat

SEQ ID NO: 18573 - DNA, 20 bp, Artificial Sequence
  chemically synthesized
gctcagcaaaatcagcatac

SEQ ID NO: 18574 - DNA, 20 bp, Artificial Sequence
  chemically synthesized
tcagcaaaatcagcatacaa

SEQ ID NO: 18575 - DNA, 20 bp, Artificial Sequence
  chemically synthesized
agcatacaagagacatacct

SEQ ID NO: 18576 - DNA, 20 bp, Artificial Sequence
  chemically synthesized
gacatacctcagtgtaataa

SEQ ID NO: 18577 - DNA, 20 bp, Artificial Sequence
  chemically synthesized
agccatctgtgacaaaccca

SEQ ID NO: 18578 - DNA, 20 bp, Artificial Sequence
  chemically synthesized
acagccaacataatattgaa

SEQ ID NO: 18579 - DNA, 20 bp, Artificial Sequence
  chemically synthesized
cagccaacataatattgaat

SEQ ID NO: 18580 - DNA, 20 bp, Artificial Sequence
  chemically synthesized
agccaacataatattgaatg

SEQ ID NO: 18581 - DNA, 20 bp, Artificial Sequence
  chemically synthesized
acataatattgaatggggaa

SEQ ID NO: 18582 - DNA, 20 bp, Artificial Sequence
  chemically synthesized
attgaatggggaaaagttga

SEQ ID NO: 18583 - DNA, 20 bp, Artificial Sequence
  chemically synthesized
aagttgaaagcattccctct

SEQ ID NO: 18584 - DNA, 20 bp, Artificial Sequence
  chemically synthesized
aaagcattccctctgagaac

SEQ ID NO: 18585 - DNA, 20 bp, Artificial Sequence
  chemically synthesized
ttccctctgagaactggaac

SEQ ID NO: 18586 - DNA, 20 bp, Artificial Sequence
  chemically synthesized
tctgagaactggaacaagac

SEQ ID NO: 18587 - DNA, 20 bp, Artificial Sequence
  chemically synthesized
ctgagaactggaacaagaca

SEQ ID NO: 18588 - DNA, 20 bp, Artificial Sequence
  chemically synthesized
ctcaccactcctcttcaaca

SEQ ID NO: 18589 - DNA, 20 bp, Artificial Sequence
  chemically synthesized
actcctcttcaacatagtac

SEQ ID NO: 18590 - DNA, 20 bp, Artificial Sequence
  chemically synthesized
cctcttcaacatagtactgg

SEQ ID NO: 18591 - DNA, 20 bp, Artificial Sequence
  chemically synthesized
caacatagtactggaagtcc

SEQ ID NO: 18592 - DNA, 20 bp, Artificial Sequence
  chemically synthesized
atagtactggaagtcctagc

SEQ ID NO: 18593 - DNA, 20 bp, Artificial Sequence
  chemically synthesized
tagtactggaagtcctagcc

SEQ ID NO: 18594 - DNA, 20 bp, Artificial Sequence
  chemically synthesized
agtactggaagtcctagcca

SEQ ID NO: 18595 - DNA, 20 bp, Artificial Sequence
  chemically synthesized
gaagtcctagccagggcaat

SEQ ID NO: 18596 - DNA, 20 bp, Artificial Sequence
  chemically synthesized
cagggcaatcagacaaaaca

SEQ ID NO: 18597 - DNA, 20 bp, Artificial Sequence
  chemically synthesized
tcagacaaaacaaagaaata

SEQ ID NO: 18598 - DNA, 20 bp, Artificial Sequence
  chemically synthesized
cagacaaaacaaagaaataa

SEQ ID NO: 18599 - DNA, 20 bp, Artificial Sequence
  chemically synthesized
agacaaaacaaagaaataaa

SEQ ID NO: 18600 - DNA, 20 bp, Artificial Sequence
  chemically synthesized
gaaataaagggcattcaaat

SEQ ID NO: 18601 - DNA, 20 bp, Artificial Sequence
  chemically synthesized
aaagggcattcaaatcagta

SEQ ID NO: 18602 - DNA, 20 bp, Artificial Sequence
  chemically synthesized
agggcattcaaatcagtaaa

SEQ ID NO: 18603 - DNA, 20 bp, Artificial Sequence
  chemically synthesized
gggcattcaaatcagtaaag

SEQ ID NO: 18604 - DNA, 20 bp, Artificial Sequence
  chemically synthesized
cattcaaatcagtaaagagg

SEQ ID NO: 18605 - DNA, 20 bp, Artificial Sequence
  chemically synthesized
catttacctttaaaacccta

SEQ ID NO: 18606 - DNA, 20 bp, Artificial Sequence
  chemically synthesized
taaaaccctaaagactcctc

SEQ ID NO: 18607 - DNA, 20 bp, Artificial Sequence
  chemically synthesized
accctaaagactcctccaga

SEQ ID NO: 18608 - DNA, 20 bp, Artificial Sequence
  chemically synthesized
agactcctccagaaagctcc

SEQ ID NO: 18609 - DNA, 20 bp, Artificial Sequence
  chemically synthesized
ctagaactgataaaataatt

SEQ ID NO: 18610 - DNA, 20 bp, Artificial Sequence
  chemically synthesized
actgataaaataattcagca

SEQ ID NO: 18611 - DNA, 20 bp, Artificial Sequence
  chemically synthesized
aaataattcagcaaagtttc

SEQ ID NO: 18612 - DNA, 20 bp, Artificial Sequence
  chemically synthesized
tcagcaaagtttccagatac

SEQ ID NO: 18613 - DNA, 20 bp, Artificial Sequence
  chemically synthesized
caagatgaatgcacacaaat

SEQ ID NO: 18614 - DNA, 20 bp, Artificial Sequence
  chemically synthesized
gtaactcttctatacaccaa

SEQ ID NO: 18615 - DNA, 20 bp, Artificial Sequence
  chemically synthesized
atacaccaacagcaaccaaa

SEQ ID NO: 18616 - DNA, 20 bp, Artificial Sequence
  chemically synthesized
acaccaacagcaaccaaatg

SEQ ID NO: 18617 - DNA, 20 bp, Artificial Sequence
  chemically synthesized
accaaatggagaatcaaatc

SEQ ID NO: 18618 - DNA, 20 bp, Artificial Sequence
  chemically synthesized
gaactcaaccccttgtacaa

SEQ ID NO: 18619 - DNA, 20 bp, Artificial Sequence
  chemically synthesized
ttgtacaatagatgcaaaaa

SEQ ID NO: 18620 - DNA, 20 bp, Artificial Sequence
  chemically synthesized
gccatataaaacgtactctc

SEQ ID NO: 18621 - DNA, 20 bp, Artificial Sequence
  chemically synthesized
tataaaacgtactctcaaga

SEQ ID NO: 18622 - DNA, 20 bp, Artificial Sequence
  chemically synthesized
cgtactctcaagatggatta

SEQ ID NO: 18623 - DNA, 20 bp, Artificial Sequence
  chemically synthesized
taaaactataaaactactaa

SEQ ID NO: 18624 - DNA, 20 bp, Artificial Sequence
  chemically synthesized
aaactactaaaagaaaacat

SEQ ID NO: 18625 - DNA, 20 bp, Artificial Sequence
  chemically synthesized
aactactaaaagaaaacata

SEQ ID NO: 18626 - DNA, 20 bp, Artificial Sequence
  chemically synthesized
actactaaaagaaaacataa

SEQ ID NO: 18627 - DNA, 20 bp, Artificial Sequence
  chemically synthesized
tactaaaagaaaacataagg

SEQ ID NO: 18628 - DNA, 20 bp, Artificial Sequence
  chemically synthesized
aaacataagggagacacttc

SEQ ID NO: 18629 - DNA, 20 bp, Artificial Sequence
  chemically synthesized
aagggagacacttcaagaca

SEQ ID NO: 18630 - DNA, 20 bp, Artificial Sequence
  chemically synthesized
gacacttcaagacatggctt

SEQ ID NO: 18631 - DNA, 20 bp, Artificial Sequence
  chemically synthesized
acacttcaagacatggcttt

SEQ ID NO: 18632 - DNA, 20 bp, Artificial Sequence
  chemically synthesized
tcaagacatggctttgggca

SEQ ID NO: 18633 - DNA, 20 bp, Artificial Sequence
  chemically synthesized
ggctttgggcaaagatttta

SEQ ID NO: 18634 - DNA, 20 bp, Artificial Sequence
  chemically synthesized
tgggcaaagattttatggcc

SEQ ID NO: 18635 - DNA, 20 bp, Artificial Sequence
  chemically synthesized
ttttatggccaagacctcaa

SEQ ID NO: 18636 - DNA, 20 bp, Artificial Sequence
  chemically synthesized
tggccaagacctcaaaagca

SEQ ID NO: 18637 - DNA, 20 bp, Artificial Sequence
  chemically synthesized
ggccaagacctcaaaagcac

SEQ ID NO: 18638 - DNA, 20 bp, Artificial Sequence
  chemically synthesized
ctcaaaagcacaggcaacaa

SEQ ID NO: 18639 - DNA, 20 bp, Artificial Sequence
  chemically synthesized
acaggcaacaaaagcaaaaa

SEQ ID NO: 18640 - DNA, 20 bp, Artificial Sequence
  chemically synthesized
caaaagcaaaaatagacaaa

SEQ ID NO: 18641 - DNA, 20 bp, Artificial Sequence
  chemically synthesized
aaaagcaaaaatagacaaat

SEQ ID NO: 18642 - DNA, 20 bp, Artificial Sequence
  chemically synthesized
tagacaaatgggactatatt

SEQ ID NO: 18643 - DNA, 20 bp, Artificial Sequence
  chemically synthesized
taagctaaaatacatctgca

SEQ ID NO: 18644 - DNA, 20 bp, Artificial Sequence
  chemically synthesized
taaaatacatctgcacagta

SEQ ID NO: 18645 - DNA, 20 bp, Artificial Sequence
  chemically synthesized
aaaatacatctgcacagtaa

SEQ ID NO: 18646 - DNA, 20 bp, Artificial Sequence
  chemically synthesized
agtaaaggaaacaatcaaca

SEQ ID NO: 18647 - DNA, 20 bp, Artificial Sequence
  chemically synthesized
aggaaacaatcaacacagtg

SEQ ID NO: 18648 - DNA, 20 bp, Artificial Sequence
  chemically synthesized
gaaacaatcaacacagtgaa

SEQ ID NO: 18649 - DNA, 20 bp, Artificial Sequence
  chemically synthesized
aatcaacacagtgaagagac

SEQ ID NO: 18650 - DNA, 20 bp, Artificial Sequence
  chemically synthesized
agagacaagctgttgaatgc

SEQ ID NO: 18651 - DNA, 20 bp, Artificial Sequence
  chemically synthesized
aatatttgcatacatttgac

SEQ ID NO: 18652 - DNA, 20 bp, Artificial Sequence
  chemically synthesized
atatttgcatacatttgaca

SEQ ID NO: 18653 - DNA, 20 bp, Artificial Sequence
  chemically synthesized
tttgacaaggaattaatctc

SEQ ID NO: 18654 - DNA, 20 bp, Artificial Sequence
  chemically synthesized
aattaatctccagaatatat

SEQ ID NO: 18655 - DNA, 20 bp, Artificial Sequence
  chemically synthesized
aagaaactcaaacaactcaa

SEQ ID NO: 18656 - DNA, 20 bp, Artificial Sequence
  chemically synthesized
aaactcaaacaactcaacag

SEQ ID NO: 18657 - DNA, 20 bp, Artificial Sequence
  chemically synthesized
aaataatctcattaaaaaat

SEQ ID NO: 18658 - DNA, 20 bp, Artificial Sequence
  chemically synthesized
atctcattaaaaaattggca

SEQ ID NO: 18659 - DNA, 20 bp, Artificial Sequence
  chemically synthesized
tctcattaaaaaattggcaa

SEQ ID NO: 18660 - DNA, 20 bp, Artificial Sequence
  chemically synthesized
tggcaaaggatatttttcaa

SEQ ID NO: 18661 - DNA, 20 bp, Artificial Sequence
  chemically synthesized
caaaggatatttttcaaaag

SEQ ID NO: 18662 - DNA, 20 bp, Artificial Sequence
  chemically synthesized
gaagacatacaaatgcacaa

SEQ ID NO: 18663 - DNA, 20 bp, Artificial Sequence
  chemically synthesized
aagacatacaaatgcacaat

SEQ ID NO: 18664 - DNA, 20 bp, Artificial Sequence
  chemically synthesized
atacaaatgcacaatgggta

SEQ ID NO: 18665 - DNA, 20 bp, Artificial Sequence
  chemically synthesized
tacaaatgcacaatgggtat

SEQ ID NO: 18666 - DNA, 20 bp, Artificial Sequence
  chemically synthesized
acaaatgcacaatgggtatg

SEQ ID NO: 18667 - DNA, 20 bp, Artificial Sequence
  chemically synthesized
tgctcaacattactaatcat

SEQ ID NO: 18668 - DNA, 20 bp, Artificial Sequence
  chemically synthesized
ctcaacattactaatcatca

SEQ ID NO: 18669 - DNA, 20 bp, Artificial Sequence
  chemically synthesized
atgcaaatcaaaaccacaat

SEQ ID NO: 18670 - DNA, 20 bp, Artificial Sequence
  chemically synthesized
aatgagatatcatcttatgc

SEQ ID NO: 18671 - DNA, 20 bp, Artificial Sequence
  chemically synthesized
agatatcatcttatgccagt

SEQ ID NO: 18672 - DNA, 20 bp, Artificial Sequence
  chemically synthesized
aataaataaataacacatgc

SEQ ID NO: 18673 - DNA, 20 bp, Artificial Sequence
  chemically synthesized
aataaataacacatgctggc

SEQ ID NO: 18674 - DNA, 20 bp, Artificial Sequence
  chemically synthesized
ataaataacacatgctggca

SEQ ID NO: 18675 - DNA, 20 bp, Artificial Sequence
  chemically synthesized
cacatgctggcaaggatgtg

SEQ ID NO: 18676 - DNA, 20 bp, Artificial Sequence
  chemically synthesized
acatgctggcaaggatgtga

SEQ ID NO: 18677 - DNA, 20 bp, Artificial Sequence
  chemically synthesized
ctggcaaggatgtgaaggaa

SEQ ID NO: 18678 - DNA, 20 bp, Artificial Sequence
  chemically synthesized
tggcaaggatgtgaaggaaa

SEQ ID NO: 18679 - DNA, 20 bp, Artificial Sequence
  chemically synthesized
tgtgaaggaaaaggcactcg

SEQ ID NO: 18680 - DNA, 20 bp, Artificial Sequence
  chemically synthesized
gtgaaggaaaaggcactcgt

SEQ ID NO: 18681 - DNA, 20 bp, Artificial Sequence
  chemically synthesized
aaggcactcgtaggcactat

SEQ ID NO: 18682 - DNA, 20 bp, Artificial Sequence
  chemically synthesized
cactcgtaggcactattggt

SEQ ID NO: 18683 - DNA, 20 bp, Artificial Sequence
  chemically synthesized
ctattggtaagcatgcaaat

SEQ ID NO: 18684 - DNA, 20 bp, Artificial Sequence
  chemically synthesized
ggtaagcatgcaaattagta

SEQ ID NO: 18685 - DNA, 20 bp, Artificial Sequence
  chemically synthesized
gcaaattagtatagccacta

SEQ ID NO: 18686 - DNA, 20 bp, Artificial Sequence
  chemically synthesized
ccactatggaaaacaatatg

SEQ ID NO: 18687 - DNA, 20 bp, Artificial Sequence
  chemically synthesized
caatatgtagatttaccaaa

SEQ ID NO: 18688 - DNA, 20 bp, Artificial Sequence
  chemically synthesized
gctaaaaattgaactatcat

SEQ ID NO: 18689 - DNA, 20 bp, Artificial Sequence
  chemically synthesized
aattgaactatcataagatc

SEQ ID NO: 18690 - DNA, 20 bp, Artificial Sequence
  chemically synthesized
agatccagcaatcttattac

SEQ ID NO: 18691 - DNA, 20 bp, Artificial Sequence
  chemically synthesized
gatccagcaatcttattact

SEQ ID NO: 18692 - DNA, 20 bp, Artificial Sequence
  chemically synthesized
tattactgggtatttatcca

SEQ ID NO: 18693 - DNA, 20 bp, Artificial Sequence
  chemically synthesized
attactgggtatttatccaa

SEQ ID NO: 18694 - DNA, 20 bp, Artificial Sequence
  chemically synthesized
tgggtatttatccaaaggaa

SEQ ID NO: 18695 - DNA, 20 bp, Artificial Sequence
  chemically synthesized
ttatccaaaggaaaagaatt

SEQ ID NO: 18696 - DNA, 20 bp, Artificial Sequence
  chemically synthesized
aaagaattcagaataataaa

SEQ ID NO: 18697 - DNA, 20 bp, Artificial Sequence
  chemically synthesized
tcagaataataaacagatac

SEQ ID NO: 18698 - DNA, 20 bp, Artificial Sequence
  chemically synthesized
tggtaccacactgtttattg

SEQ ID NO: 18699 - DNA, 20 bp, Artificial Sequence
  chemically synthesized
tattgcagcacgattcacat

SEQ ID NO: 18700 - DNA, 20 bp, Artificial Sequence
  chemically synthesized
cagcacgattcacattagca

SEQ ID NO: 18701 - DNA, 20 bp, Artificial Sequence
  chemically synthesized
gattcacattagcaaagata

SEQ ID NO: 18702 - DNA, 20 bp, Artificial Sequence
  chemically synthesized
caaagatatggaatcaacct

SEQ ID NO: 18703 - DNA, 20 bp, Artificial Sequence
  chemically synthesized
tcaacctaagtgtccatcaa

SEQ ID NO: 18704 - DNA, 20 bp, Artificial Sequence
  chemically synthesized
tgtccatcaatggatgaatg

SEQ ID NO: 18705 - DNA, 20 bp, Artificial Sequence
  chemically synthesized
atggatgaatgaagaaaatg

SEQ ID NO: 18706 - DNA, 20 bp, Artificial Sequence
  chemically synthesized
atataaaatcatttcatttg

SEQ ID NO: 18707 - DNA, 20 bp, Artificial Sequence
  chemically synthesized
tcatttcatttgcagcaaca

SEQ ID NO: 18708 - DNA, 20 bp, Artificial Sequence
  chemically synthesized
tgcagcaacatggatgaaac

SEQ ID NO: 18709 - DNA, 20 bp, Artificial Sequence
  chemically synthesized
agcaacatggatgaaactgg

SEQ ID NO: 18710 - DNA, 20 bp, Artificial Sequence
  chemically synthesized
gtcattatgttaaacgaaat

SEQ ID NO: 18711 - DNA, 20 bp, Artificial Sequence
  chemically synthesized
ttatgttaaacgaaataagc

SEQ ID NO: 18712 - DNA, 20 bp, Artificial Sequence
  chemically synthesized
tatgttaaacgaaataagcc

SEQ ID NO: 18713 - DNA, 20 bp, Artificial Sequence
  chemically synthesized
taaacgaaataagccaggca

SEQ ID NO: 18714 - DNA, 20 bp, Artificial Sequence
  chemically synthesized
cgaaataagccaggcataga

SEQ ID NO: 18715 - DNA, 20 bp, Artificial Sequence
  chemically synthesized
tgcatgttctcactgatatg

SEQ ID NO: 18716 - DNA, 20 bp, Artificial Sequence
  chemically synthesized
gcatgttctcactgatatgt

SEQ ID NO: 18717 - DNA, 20 bp, Artificial Sequence
  chemically synthesized
atgttctcactgatatgtgg

SEQ ID NO: 18718 - DNA, 20 bp, Artificial Sequence
  chemically synthesized
ctgatatgtgggagctaaaa

SEQ ID NO: 18719 - DNA, 20 bp, Artificial Sequence
  chemically synthesized
ctaaaaaagttaatatcatg

SEQ ID NO: 18720 - DNA, 20 bp, Artificial Sequence
  chemically synthesized
taaaaaagttaatatcatgt

SEQ ID NO: 18721 - DNA, 20 bp, Artificial Sequence
  chemically synthesized
aaaagttaatatcatgtagg

SEQ ID NO: 18722 - DNA, 20 bp, Artificial Sequence
  chemically synthesized
aagttaatatcatgtaggta

SEQ ID NO: 18723 - DNA, 20 bp, Artificial Sequence
  chemically synthesized
gttaatatcatgtaggtaga

SEQ ID NO: 18724 - DNA, 20 bp, Artificial Sequence
  chemically synthesized
aatatcatgtaggtagagag

SEQ ID NO: 18725 - DNA, 20 bp, Artificial Sequence
  chemically synthesized
gtaggtagagagtagaatga

SEQ ID NO: 18726 - DNA, 20 bp, Artificial Sequence
  chemically synthesized
gagagtagaatgacagaaac

SEQ ID NO: 18727 - DNA, 20 bp, Artificial Sequence
  chemically synthesized
gagtagaatgacagaaacca

SEQ ID NO: 18728 - DNA, 20 bp, Artificial Sequence
  chemically synthesized
agtagaatgacagaaaccag

SEQ ID NO: 18729 - DNA, 20 bp, Artificial Sequence
  chemically synthesized
agaatgacagaaaccagagg

SEQ ID NO: 18730 - DNA, 20 bp, Artificial Sequence
  chemically synthesized
aatgacagaaaccagaggta

SEQ ID NO: 18731 - DNA, 20 bp, Artificial Sequence
  chemically synthesized
acagaaaccagaggtagaga

SEQ ID NO: 18732 - DNA, 20 bp, Artificial Sequence
  chemically synthesized
cagaaaccagaggtagagaa

SEQ ID NO: 18733 - DNA, 20 bp, Artificial Sequence
  chemically synthesized
agagaaaggtgtgtacgtta

SEQ ID NO: 18734 - DNA, 20 bp, Artificial Sequence
  chemically synthesized
gagaaaggtgtgtacgttat

SEQ ID NO: 18735 - DNA, 20 bp, Artificial Sequence
  chemically synthesized
gaaaggtgtgtacgttatgg

SEQ ID NO: 18736 - DNA, 20 bp, Artificial Sequence
  chemically synthesized
aaaggtgtgtacgttatggg

SEQ ID NO: 18737 - DNA, 20 bp, Artificial Sequence
  chemically synthesized
ggtgtgtacgttatgggagg

SEQ ID NO: 18738 - DNA, 20 bp, Artificial Sequence
  chemically synthesized
gtgtgtacgttatgggagga

SEQ ID NO: 18739 - DNA, 20 bp, Artificial Sequence
  chemically synthesized
tgtgtacgttatgggaggaa

SEQ ID NO: 18740 - DNA, 20 bp, Artificial Sequence
  chemically synthesized
tgtacgttatgggaggaagg

SEQ ID NO: 18741 - DNA, 20 bp, Artificial Sequence
  chemically synthesized
ttatgggaggaagggagacg

SEQ ID NO: 18742 - DNA, 20 bp, Artificial Sequence
  chemically synthesized
atgggaggaagggagacgaa

SEQ ID NO: 18743 - DNA, 20 bp, Artificial Sequence
  chemically synthesized
ggaggaagggagacgaagag

SEQ ID NO: 18744 - DNA, 20 bp, Artificial Sequence
  chemically synthesized
gaagggagacgaagagaagt

SEQ ID NO: 18745 - DNA, 20 bp, Artificial Sequence
  chemically synthesized
gacgaagagaagttggttaa

SEQ ID NO: 18746 - DNA, 20 bp, Artificial Sequence
  chemically synthesized
gagaagttggttaatggaaa

SEQ ID NO: 18747 - DNA, 20 bp, Artificial Sequence
  chemically synthesized
agaagttggttaatggaaac

SEQ ID NO: 18748 - DNA, 20 bp, Artificial Sequence
  chemically synthesized
agttggttaatggaaacagg

SEQ ID NO: 18749 - DNA, 20 bp, Artificial Sequence
  chemically synthesized
ggttaatggaaacaggcagt

SEQ ID NO: 18750 - DNA, 20 bp, Artificial Sequence
  chemically synthesized
aatggaaacaggcagttaga

SEQ ID NO: 18751 - DNA, 20 bp, Artificial Sequence
  chemically synthesized
ggaaacaggcagttagatag

SEQ ID NO: 18752 - DNA, 20 bp, Artificial Sequence
  chemically synthesized
gaaacaggcagttagataga

SEQ ID NO: 18753 - DNA, 20 bp, Artificial Sequence
  chemically synthesized
gaatatgttctgatgttcaa

SEQ ID NO: 18754 - DNA, 20 bp, Artificial Sequence
  chemically synthesized
tgttctgatgttcaatagca

SEQ ID NO: 18755 - DNA, 20 bp, Artificial Sequence
  chemically synthesized
tctgatgttcaatagcaaag

SEQ ID NO: 18756 - DNA, 20 bp, Artificial Sequence
  chemically synthesized
ctgatgttcaatagcaaagt

SEQ ID NO: 18757 - DNA, 20 bp, Artificial Sequence
  chemically synthesized
tgatgttcaatagcaaagta

SEQ ID NO: 18758 - DNA, 20 bp, Artificial Sequence
  chemically synthesized
atagcaaagtagggtgatta

SEQ ID NO: 18759 - DNA, 20 bp, Artificial Sequence
  chemically synthesized
atatattgtatatttcaaaa

SEQ ID NO: 18760 - DNA, 20 bp, Artificial Sequence
  chemically synthesized
tattgtatatttcaaaatag

SEQ ID NO: 18761 - DNA, 20 bp, Artificial Sequence
  chemically synthesized
tgtatatttcaaaatagtag

SEQ ID NO: 18762 - DNA, 20 bp, Artificial Sequence
  chemically synthesized
tatttcaaaatagtagaaga

SEQ ID NO: 18763 - DNA, 20 bp, Artificial Sequence
  chemically synthesized
atttcaaaatagtagaagaa

SEQ ID NO: 18764 - DNA, 20 bp, Artificial Sequence
  chemically synthesized
cttgaaatgttcctaacaca

SEQ ID NO: 18765 - DNA, 20 bp, Artificial Sequence
  chemically synthesized
catagaaacgataaatactt

SEQ ID NO: 18766 - DNA, 20 bp, Artificial Sequence
  chemically synthesized
atagaaacgataaatacttg

SEQ ID NO: 18767 - DNA, 20 bp, Artificial Sequence
  chemically synthesized
aacacgtcatatatcaataa

SEQ ID NO: 18768 - DNA, 20 bp, Artificial Sequence
  chemically synthesized
cgtcatatatcaataaaaga

SEQ ID NO: 18769 - DNA, 20 bp, Artificial Sequence
  chemically synthesized
aaagaaagtcgatctcatat

SEQ ID NO: 18770 - DNA, 20 bp, Artificial Sequence
  chemically synthesized
aagtcgatctcatattggtt

SEQ ID NO: 18771 - DNA, 20 bp, Artificial Sequence
  chemically synthesized
agtcgatctcatattggttg

SEQ ID NO: 18772 - DNA, 20 bp, Artificial Sequence
  chemically synthesized
attggttgaggcctgattgt

SEQ ID NO: 18773 - DNA, 20 bp, Artificial Sequence
  chemically synthesized
taagtaaatctttgtccctc

SEQ ID NO: 18774 - DNA, 20 bp, Artificial Sequence
  chemically synthesized
tccctgtactgtcttgctgt

SEQ ID NO: 18775 - DNA, 20 bp, Artificial Sequence
  chemically synthesized
ccctgtactgtcttgctgtg

SEQ ID NO: 18776 - DNA, 20 bp, Artificial Sequence
  chemically synthesized
ctgtactgtcttgctgtgag

SEQ ID NO: 18777 - DNA, 20 bp, Artificial Sequence
  chemically synthesized
cttatattccaacaccattt

SEQ ID NO: 18778 - DNA, 20 bp, Artificial Sequence
  chemically synthesized
tcctccccatatttttacct

SEQ ID NO: 18779 - DNA, 20 bp, Artificial Sequence
  chemically synthesized
ctcggtttttactgtttata

SEQ ID NO: 18780 - DNA, 20 bp, Artificial Sequence
  chemically synthesized
atatagcacactttgtgcta

SEQ ID NO: 18781 - DNA, 20 bp, Artificial Sequence
  chemically synthesized
ctttgtgctatagtttacct

SEQ ID NO: 18782 - DNA, 20 bp, Artificial Sequence
  chemically synthesized
ctcagtttttactatttata

SEQ ID NO: 18783 - DNA, 20 bp, Artificial Sequence
  chemically synthesized
ccccaaacttctctcttaac

SEQ ID NO: 18784 - DNA, 20 bp, Artificial Sequence
  chemically synthesized
aaacttctctcttaacaagc

SEQ ID NO: 18785 - DNA, 20 bp, Artificial Sequence
  chemically synthesized
ctcttaacaagctagaatat

SEQ ID NO: 18786 - DNA, 20 bp, Artificial Sequence
  chemically synthesized
gctagaatataagtgaatgc

SEQ ID NO: 18787 - DNA, 20 bp, Artificial Sequence
  chemically synthesized
tagaatataagtgaatgcaa

SEQ ID NO: 18788 - DNA, 20 bp, Artificial Sequence
  chemically synthesized
tataagtgaatgcaagagca

SEQ ID NO: 18789 - DNA, 20 bp, Artificial Sequence
  chemically synthesized
taagtgaatgcaagagcata

SEQ ID NO: 18790 - DNA, 20 bp, Artificial Sequence
  chemically synthesized
tgaatgcaagagcatagaga

SEQ ID NO: 18791 - DNA, 20 bp, Artificial Sequence
  chemically synthesized
gaatgcaagagcatagagac

SEQ ID NO: 18792 - DNA, 20 bp, Artificial Sequence
  chemically synthesized
aatgcaagagcatagagaca

SEQ ID NO: 18793 - DNA, 20 bp, Artificial Sequence
  chemically synthesized
tcattcctattttcatattt

SEQ ID NO: 18794 - DNA, 20 bp, Artificial Sequence
  chemically synthesized
cattcctattttcatatttg

SEQ ID NO: 18795 - DNA, 20 bp, Artificial Sequence
  chemically synthesized
tcatatttgaggtataaacc

SEQ ID NO: 18796 - DNA, 20 bp, Artificial Sequence
  chemically synthesized
catatttgaggtataaacca

SEQ ID NO: 18797 - DNA, 20 bp, Artificial Sequence
  chemically synthesized
tatttgaggtataaaccaag

SEQ ID NO: 18798 - DNA, 20 bp, Artificial Sequence
  chemically synthesized
tttttaaatctgcaaataaa

SEQ ID NO: 18799 - DNA, 20 bp, Artificial Sequence
  chemically synthesized
gttttattctgacattaaaa

SEQ ID NO: 18800 - DNA, 20 bp, Artificial Sequence
  chemically synthesized
aatgaatgatcgttttacca

SEQ ID NO: 18801 - DNA, 20 bp, Artificial Sequence
  chemically synthesized
atgatcgttttaccacagcg

SEQ ID NO: 18802 - DNA, 20 bp, Artificial Sequence
  chemically synthesized
tgatcgttttaccacagcgt

SEQ ID NO: 18803 - DNA, 20 bp, Artificial Sequence
  chemically synthesized
cttaaccttcactttcaaac

SEQ ID NO: 18804 - DNA, 20 bp, Artificial Sequence
  chemically synthesized
tttattgatctctattttcc

SEQ ID NO: 18805 - DNA, 20 bp, Artificial Sequence
  chemically synthesized
tctattttcctggaacaaca

SEQ ID NO: 18806 - DNA, 20 bp, Artificial Sequence
  chemically synthesized
ctattttcctggaacaacat

SEQ ID NO: 18807 - DNA, 20 bp, Artificial Sequence
  chemically synthesized
tattttcctggaacaacatg

SEQ ID NO: 18808 - DNA, 20 bp, Artificial Sequence
  chemically synthesized
attttcctggaacaacatgg

SEQ ID NO: 18809 - DNA, 20 bp, Artificial Sequence
  chemically synthesized
aacaacatgggggctatgtt

SEQ ID NO: 18810 - DNA, 20 bp, Artificial Sequence
  chemically synthesized
atgggggctatgtttagcgt

SEQ ID NO: 18811 - DNA, 20 bp, Artificial Sequence
  chemically synthesized
tgggggctatgtttagcgtg

SEQ ID NO: 18812 - DNA, 20 bp, Artificial Sequence
  chemically synthesized
ctatgtttagcgtgaggaca

SEQ ID NO: 18813 - DNA, 20 bp, Artificial Sequence
  chemically synthesized
gtatcacaactttcacctga

SEQ ID NO: 18814 - DNA, 20 bp, Artificial Sequence
  chemically synthesized
acaactttcacctgaaagaa

SEQ ID NO: 18815 - DNA, 20 bp, Artificial Sequence
  chemically synthesized
tttcacctgaaagaaaagat

SEQ ID NO: 18816 - DNA, 20 bp, Artificial Sequence
  chemically synthesized
aaagaaaagatgagctacca

SEQ ID NO: 18817 - DNA, 20 bp, Artificial Sequence
  chemically synthesized
accatggtacatataacaat

SEQ ID NO: 18818 - DNA, 20 bp, Artificial Sequence
  chemically synthesized
ccatggtacatataacaatg

SEQ ID NO: 18819 - DNA, 20 bp, Artificial Sequence
  chemically synthesized
tggtacatataacaatgagg

SEQ ID NO: 18820 - DNA, 20 bp, Artificial Sequence
  chemically synthesized
aatgaggtggttaaaactct

SEQ ID NO: 18821 - DNA, 20 bp, Artificial Sequence
  chemically synthesized
taaaactctaagtcgtcatc

SEQ ID NO: 18822 - DNA, 20 bp, Artificial Sequence
  chemically synthesized
tactaaaaatcactatttca

SEQ ID NO: 18823 - DNA, 20 bp, Artificial Sequence
  chemically synthesized
taaaaatcactatttcaaag

SEQ ID NO: 18824 - DNA, 20 bp, Artificial Sequence
  chemically synthesized
atcactatttcaaagaagta

SEQ ID NO: 18825 - DNA, 20 bp, Artificial Sequence
  chemically synthesized
tatttcaaagaagtatagaa

SEQ ID NO: 18826 - DNA, 20 bp, Artificial Sequence
  chemically synthesized
aagaagtatagaatagatat

SEQ ID NO: 18827 - DNA, 20 bp, Artificial Sequence
  chemically synthesized
gaatagatatcagccaaaat

SEQ ID NO: 18828 - DNA, 20 bp, Artificial Sequence
  chemically synthesized
aatagatatcagccaaaata

SEQ ID NO: 18829 - DNA, 20 bp, Artificial Sequence
  chemically synthesized
atatacatattatacacata

SEQ ID NO: 18830 - DNA, 20 bp, Artificial Sequence
  chemically synthesized
atacatattatacacatatg

SEQ ID NO: 18831 - DNA, 20 bp, Artificial Sequence
  chemically synthesized
ttgtatatgcttaaaaatta

SEQ ID NO: 18832 - DNA, 20 bp, Artificial Sequence
  chemically synthesized
tgcttaaaaattacagactt

SEQ ID NO: 18833 - DNA, 20 bp, Artificial Sequence
  chemically synthesized
ttaaaaattacagactttgg

SEQ ID NO: 18834 - DNA, 20 bp, Artificial Sequence
  chemically synthesized
tggaagtcatatgactattt

SEQ ID NO: 18835 - DNA, 20 bp, Artificial Sequence
  chemically synthesized
tatgactatttcagtgtgtg

SEQ ID NO: 18836 - DNA, 20 bp, Artificial Sequence
  chemically synthesized
caccctcctgttccaaaaca

SEQ ID NO: 18837 - DNA, 20 bp, Artificial Sequence
  chemically synthesized
cctgttccaaaacacagttg

SEQ ID NO: 18838 - DNA, 20 bp, Artificial Sequence
  chemically synthesized
gttccaaaacacagttgcag

SEQ ID NO: 18839 - DNA, 20 bp, Artificial Sequence
  chemically synthesized
ccaaaacacagttgcagaag

SEQ ID NO: 18840 - DNA, 20 bp, Artificial Sequence
  chemically synthesized
aaaacacagttgcagaagca

SEQ ID NO: 18841 - DNA, 20 bp, Artificial Sequence
  chemically synthesized
aaacacagttgcagaagcag

SEQ ID NO: 18842 - DNA, 20 bp, Artificial Sequence
  chemically synthesized
cacagttgcagaagcagagg

SEQ ID NO: 18843 - DNA, 20 bp, Artificial Sequence
  chemically synthesized
agaggaagtcattatacact

SEQ ID NO: 18844 - DNA, 20 bp, Artificial Sequence
  chemically synthesized
cacttagaacatcattttat

SEQ ID NO: 18845 - DNA, 20 bp, Artificial Sequence
  chemically synthesized
acttagaacatcattttata

SEQ ID NO: 18846 - DNA, 20 bp, Artificial Sequence
  chemically synthesized
tagaacatcattttataagg

SEQ ID NO: 18847 - DNA, 20 bp, Artificial Sequence
  chemically synthesized
aacatcattttataaggcag

SEQ ID NO: 18848 - DNA, 20 bp, Artificial Sequence
  chemically synthesized
acatcattttataaggcagc

SEQ ID NO: 18849 - DNA, 20 bp, Artificial Sequence
  chemically synthesized
attttataaggcagcaggtc

SEQ ID NO: 18850 - DNA, 20 bp, Artificial Sequence
  chemically synthesized
ttataaggcagcaggtctgg

SEQ ID NO: 18851 - DNA, 20 bp, Artificial Sequence
  chemically synthesized
tataaggcagcaggtctggt

SEQ ID NO: 18852 - DNA, 20 bp, Artificial Sequence
  chemically synthesized
aaggcagcaggtctggtagg

SEQ ID NO: 18853 - DNA, 20 bp, Artificial Sequence
  chemically synthesized
aggcagcaggtctggtagga

SEQ ID NO: 18854 - DNA, 20 bp, Artificial Sequence
  chemically synthesized
gcagcaggtctggtaggaag

SEQ ID NO: 18855 - DNA, 20 bp, Artificial Sequence
  chemically synthesized
aggtctggtaggaaggagat

SEQ ID NO: 18856 - DNA, 20 bp, Artificial Sequence
  chemically synthesized
ggtctggtaggaaggagatt

SEQ ID NO: 18857 - DNA, 20 bp, Artificial Sequence
  chemically synthesized
attaggtgctacttgtgaca

SEQ ID NO: 18858 - DNA, 20 bp, Artificial Sequence
  chemically synthesized
ttaggtgctacttgtgacaa

SEQ ID NO: 18859 - DNA, 20 bp, Artificial Sequence
  chemically synthesized
gtgctacttgtgacaaaggt

SEQ ID NO: 18860 - DNA, 20 bp, Artificial Sequence
  chemically synthesized
tcagcaaatatttgtgttcc

SEQ ID NO: 18861 - DNA, 20 bp, Artificial Sequence
  chemically synthesized
ttgtgttcccagcacttttc

SEQ ID NO: 18862 - DNA, 20 bp, Artificial Sequence
  chemically synthesized
ccagcacttttctagatcct

SEQ ID NO: 18863 - DNA, 20 bp, Artificial Sequence
  chemically synthesized
tagatcctcagttaaaatca

SEQ ID NO: 18864 - DNA, 20 bp, Artificial Sequence
  chemically synthesized
atcctcagttaaaatcaaag

SEQ ID NO: 18865 - DNA, 20 bp, Artificial Sequence
  chemically synthesized
agttaaaatcaaagcagctg

SEQ ID NO: 18866 - DNA, 20 bp, Artificial Sequence
  chemically synthesized
aatcaaagcagctgcagtct

SEQ ID NO: 18867 - DNA, 20 bp, Artificial Sequence
  chemically synthesized
caaagcagctgcagtcttgg

SEQ ID NO: 18868 - DNA, 20 bp, Artificial Sequence
  chemically synthesized
agcagctgcagtcttggcag

SEQ ID NO: 18869 - DNA, 20 bp, Artificial Sequence
  chemically synthesized
gcagctgcagtcttggcagt

SEQ ID NO: 18870 - DNA, 20 bp, Artificial Sequence
  chemically synthesized
agctgcagtcttggcagtgg

SEQ ID NO: 18871 - DNA, 20 bp, Artificial Sequence
  chemically synthesized
gctgcagtcttggcagtggg

SEQ ID NO: 18872 - DNA, 20 bp, Artificial Sequence
  chemically synthesized
gtgatactcacactttgaac

SEQ ID NO: 18873 - DNA, 20 bp, Artificial Sequence
  chemically synthesized
accacctgcactacctacaa

SEQ ID NO: 18874 - DNA, 20 bp, Artificial Sequence
  chemically synthesized
acctgcactacctacaatgg

SEQ ID NO: 18875 - DNA, 20 bp, Artificial Sequence
  chemically synthesized
gctccaaatattttatatga

SEQ ID NO: 18876 - DNA, 20 bp, Artificial Sequence
  chemically synthesized
ctccaaatattttatatgaa

SEQ ID NO: 18877 - DNA, 20 bp, Artificial Sequence
  chemically synthesized
tccaaatattttatatgaaa

SEQ ID NO: 18878 - DNA, 20 bp, Artificial Sequence
  chemically synthesized
ccaaatattttatatgaaag

SEQ ID NO: 18879 - DNA, 20 bp, Artificial Sequence
  chemically synthesized
tattttatatgaaaggggcc

SEQ ID NO: 18880 - DNA, 20 bp, Artificial Sequence
  chemically synthesized
atatgaaaggggcctagaca

SEQ ID NO: 18881 - DNA, 20 bp, Artificial Sequence
  chemically synthesized
gacatagcatgctgaatgaa

SEQ ID NO: 18882 - DNA, 20 bp, Artificial Sequence
  chemically synthesized
acatagcatgctgaatgaaa

SEQ ID NO: 18883 - DNA, 20 bp, Artificial Sequence
  chemically synthesized
tagcatgctgaatgaaaagg

SEQ ID NO: 18884 - DNA, 20 bp, Artificial Sequence
  chemically synthesized
atgctgaatgaaaaggaagt

SEQ ID NO: 18885 - DNA, 20 bp, Artificial Sequence
  chemically synthesized
ctgaatgaaaaggaagtgag

SEQ ID NO: 18886 - DNA, 20 bp, Artificial Sequence
  chemically synthesized
tgaaaaggaagtgagtagac

SEQ ID NO: 18887 - DNA, 20 bp, Artificial Sequence
  chemically synthesized
gtagactagtgctttccttg

SEQ ID NO: 18888 - DNA, 20 bp, Artificial Sequence
  chemically synthesized
ttccttgaagctgtgcaacc

SEQ ID NO: 18889 - DNA, 20 bp, Artificial Sequence
  chemically synthesized
tgaagctgtgcaaccaagca

SEQ ID NO: 18890 - DNA, 20 bp, Artificial Sequence
  chemically synthesized
aaccaagcatagtttttaca

SEQ ID NO: 18891 - DNA, 20 bp, Artificial Sequence
  chemically synthesized
catagatcgtgtgtttcaca

SEQ ID NO: 18892 - DNA, 20 bp, Artificial Sequence
  chemically synthesized
tgtttcacatggtgtgataa

SEQ ID NO: 18893 - DNA, 20 bp, Artificial Sequence
  chemically synthesized
acatggtgtgataacagctt

SEQ ID NO: 18894 - DNA, 20 bp, Artificial Sequence
  chemically synthesized
agcttgagatgccattgaca

SEQ ID NO: 18895 - DNA, 20 bp, Artificial Sequence
  chemically synthesized
atgccattgacatggcccac

SEQ ID NO: 18896 - DNA, 20 bp, Artificial Sequence
  chemically synthesized
gcccaccggcttatccacat

SEQ ID NO: 18897 - DNA, 20 bp, Artificial Sequence
  chemically synthesized
ggcttatccacatcagtaat

SEQ ID NO: 18898 - DNA, 20 bp, Artificial Sequence
  chemically synthesized
gcttatccacatcagtaatt

SEQ ID NO: 18899 - DNA, 20 bp, Artificial Sequence
  chemically synthesized
cttatccacatcagtaatta

SEQ ID NO: 18900 - DNA, 20 bp, Artificial Sequence
  chemically synthesized
ccacatcagtaattagggca

SEQ ID NO: 18901 - DNA, 20 bp, Artificial Sequence
  chemically synthesized
tactatgcatcccgtgattg

SEQ ID NO: 18902 - DNA, 20 bp, Artificial Sequence
  chemically synthesized
tgtgtttaaaaatgcaatta

SEQ ID NO: 18903 - DNA, 20 bp, Artificial Sequence
  chemically synthesized
tgcaattatggactcattca

SEQ ID NO: 18904 - DNA, 20 bp, Artificial Sequence
  chemically synthesized
tatggactcattcaaagtga

SEQ ID NO: 18905 - DNA, 20 bp, Artificial Sequence
  chemically synthesized
gactcattcaaagtgaaagc

SEQ ID NO: 18906 - DNA, 20 bp, Artificial Sequence
  chemically synthesized
aagctggtatgacaatacat

SEQ ID NO: 18907 - DNA, 20 bp, Artificial Sequence
  chemically synthesized
ttttatgaataaattttata

SEQ ID NO: 18908 - DNA, 20 bp, Artificial Sequence
  chemically synthesized
aataaattttataaagaaat

SEQ ID NO: 18909 - DNA, 20 bp, Artificial Sequence
  chemically synthesized
aagaaataagctaataccta

SEQ ID NO: 18910 - DNA, 20 bp, Artificial Sequence
  chemically synthesized
gaaataagctaatacctaca

SEQ ID NO: 18911 - DNA, 20 bp, Artificial Sequence
  chemically synthesized
acagagtgtttattaaatgc

SEQ ID NO: 18912 - DNA, 20 bp, Artificial Sequence
  chemically synthesized
cagagtgtttattaaatgct

SEQ ID NO: 18913 - DNA, 20 bp, Artificial Sequence
  chemically synthesized
tgtttattaaatgctaggca

SEQ ID NO: 18914 - DNA, 20 bp, Artificial Sequence
  chemically synthesized
taaatgctaggcacagttct

SEQ ID NO: 18915 - DNA, 20 bp, Artificial Sequence
  chemically synthesized
agttctgagtgatttacaac

SEQ ID NO: 18916 - DNA, 20 bp, Artificial Sequence
  chemically synthesized
taattttcacaacattatta

SEQ ID NO: 18917 - DNA, 20 bp, Artificial Sequence
  chemically synthesized
aattttcacaacattattac

SEQ ID NO: 18918 - DNA, 20 bp, Artificial Sequence
  chemically synthesized
tttcacaacattattacagg

SEQ ID NO: 18919 - DNA, 20 bp, Artificial Sequence
  chemically synthesized
ttacaggtagattttatata

SEQ ID NO: 18920 - DNA, 20 bp, Artificial Sequence
  chemically synthesized
acaggtagattttatatatg

SEQ ID NO: 18921 - DNA, 20 bp, Artificial Sequence
  chemically synthesized
attttatatatggagaaact

SEQ ID NO: 18922 - DNA, 20 bp, Artificial Sequence
  chemically synthesized
ttttatatatggagaaactg

SEQ ID NO: 18923 - DNA, 20 bp, Artificial Sequence
  chemically synthesized
tatatggagaaactgaggca

SEQ ID NO: 18924 - DNA, 20 bp, Artificial Sequence
  chemically synthesized
tatggagaaactgaggcaca

SEQ ID NO: 18925 - DNA, 20 bp, Artificial Sequence
  chemically synthesized
taataaatctcaacattacc

SEQ ID NO: 18926 - DNA, 20 bp, Artificial Sequence
  chemically synthesized
aataaatctcaacattaccc

SEQ ID NO: 18927 - DNA, 20 bp, Artificial Sequence
  chemically synthesized
tctcaacattacccaggtga

SEQ ID NO: 18928 - DNA, 20 bp, Artificial Sequence
  chemically synthesized
caacattacccaggtgatgg

SEQ ID NO: 18929 - DNA, 20 bp, Artificial Sequence
  chemically synthesized
acattacccaggtgatggtg

SEQ ID NO: 18930 - DNA, 20 bp, Artificial Sequence
  chemically synthesized
tacccaggtgatggtggagt

SEQ ID NO: 18931 - DNA, 20 bp, Artificial Sequence
  chemically synthesized
agttggaattccaaatcatg

SEQ ID NO: 18932 - DNA, 20 bp, Artificial Sequence
  chemically synthesized
caaatcatgcagtctgactt

SEQ ID NO: 18933 - DNA, 20 bp, Artificial Sequence
  chemically synthesized
atgcagtctgactttagctg

SEQ ID NO: 18934 - DNA, 20 bp, Artificial Sequence
  chemically synthesized
agtctgactttagctgtaga

SEQ ID NO: 18935 - DNA, 20 bp, Artificial Sequence
  chemically synthesized
tgactttagctgtagacagc

SEQ ID NO: 18936 - DNA, 20 bp, Artificial Sequence
  chemically synthesized
tttagctgtagacagcaaga

SEQ ID NO: 18937 - DNA, 20 bp, Artificial Sequence
  chemically synthesized
gctgtagacagcaagatagt

SEQ ID NO: 18938 - DNA, 20 bp, Artificial Sequence
  chemically synthesized
agacagcaagatagtaagta

SEQ ID NO: 18939 - DNA, 20 bp, Artificial Sequence
  chemically synthesized
gacagcaagatagtaagtaa

SEQ ID NO: 18940 - DNA, 20 bp, Artificial Sequence
  chemically synthesized
caagatagtaagtaaaggaa

SEQ ID NO: 18941 - DNA, 20 bp, Artificial Sequence
  chemically synthesized
agatagtaagtaaaggaatg

SEQ ID NO: 18942 - DNA, 20 bp, Artificial Sequence
  chemically synthesized
ggaatggagcaacaaattga

SEQ ID NO: 18943 - DNA, 20 bp, Artificial Sequence
  chemically synthesized
ttttgcttgtttgtttgaaa

SEQ ID NO: 18944 - DNA, 20 bp, Artificial Sequence
  chemically synthesized
tttgcttgtttgtttgaaac

SEQ ID NO: 18945 - DNA, 20 bp, Artificial Sequence
  chemically synthesized
ttgcttgtttgtttgaaaca

SEQ ID NO: 18946 - DNA, 20 bp, Artificial Sequence
  chemically synthesized
agggtctcactctgtcaccc

SEQ ID NO: 18947 - DNA, 20 bp, Artificial Sequence
  chemically synthesized
tctcactctgtcaccccggc

SEQ ID NO: 18948 - DNA, 20 bp, Artificial Sequence
  chemically synthesized
tcactctgtcaccccggctg

SEQ ID NO: 18949 - DNA, 20 bp, Artificial Sequence
  chemically synthesized
tcaccccggctggagtgcaa

SEQ ID NO: 18950 - DNA, 20 bp, Artificial Sequence
  chemically synthesized
tggtgcaatcttgctcactg

SEQ ID NO: 18951 - DNA, 20 bp, Artificial Sequence
  chemically synthesized
cttgctcactgaagcctcac

SEQ ID NO: 18952 - DNA, 20 bp, Artificial Sequence
  chemically synthesized
tgaagcctcactagaacgcc

SEQ ID NO: 18953 - DNA, 20 bp, Artificial Sequence
  chemically synthesized
ttcaattgatcctcctgctt

SEQ ID NO: 18954 - DNA, 20 bp, Artificial Sequence
  chemically synthesized
atcctcctgctttagcctct

SEQ ID NO: 18955 - DNA, 20 bp, Artificial Sequence
  chemically synthesized
tcctcctgctttagcctctc

SEQ ID NO: 18956 - DNA, 20 bp, Artificial Sequence
  chemically synthesized
tcctgctttagcctctcagg

SEQ ID NO: 18957 - DNA, 20 bp, Artificial Sequence
  chemically synthesized
gctttagcctctcaggtagc

SEQ ID NO: 18958 - DNA, 20 bp, Artificial Sequence
  chemically synthesized
ctttagcctctcaggtagct

SEQ ID NO: 18959 - DNA, 20 bp, Artificial Sequence
  chemically synthesized
ctctcaggtagctaggacta

SEQ ID NO: 18960 - DNA, 20 bp, Artificial Sequence
  chemically synthesized
tctcaggtagctaggactac

SEQ ID NO: 18961 - DNA, 20 bp, Artificial Sequence
  chemically synthesized
gtagctaggactacaggtgt

SEQ ID NO: 18962 - DNA, 20 bp, Artificial Sequence
  chemically synthesized
actacaggtgtgagcctcca

SEQ ID NO: 18963 - DNA, 20 bp, Artificial Sequence
  chemically synthesized
caggtgtgagcctccatggc

SEQ ID NO: 18964 - DNA, 20 bp, Artificial Sequence
  chemically synthesized
tgtgagcctccatggccagc

SEQ ID NO: 18965 - DNA, 20 bp, Artificial Sequence
  chemically synthesized
tgagcctccatggccagcta

SEQ ID NO: 18966 - DNA, 20 bp, Artificial Sequence
  chemically synthesized
agaaattttttaaatttctg

SEQ ID NO: 18967 - DNA, 20 bp, Artificial Sequence
  chemically synthesized
tttttaaatttctgtagaaa

SEQ ID NO: 18968 - DNA, 20 bp, Artificial Sequence
  chemically synthesized
ttttaaatttctgtagaaac

SEQ ID NO: 18969 - DNA, 20 bp, Artificial Sequence
  chemically synthesized
tttaaatttctgtagaaaca

SEQ ID NO: 18970 - DNA, 20 bp, Artificial Sequence
  chemically synthesized
cagggtctccctatgttccc

SEQ ID NO: 18971 - DNA, 20 bp, Artificial Sequence
  chemically synthesized
agggtctccctatgttcccc

SEQ ID NO: 18972 - DNA, 20 bp, Artificial Sequence
  chemically synthesized
tctccctatgttccccaggc

SEQ ID NO: 18973 - DNA, 20 bp, Artificial Sequence
  chemically synthesized
ccaggctggtatccaactct

SEQ ID NO: 18974 - DNA, 20 bp, Artificial Sequence
  chemically synthesized
ctcaaacaattctcccacct

SEQ ID NO: 18975 - DNA, 20 bp, Artificial Sequence
  chemically synthesized
tctcccacctcagccttgaa

SEQ ID NO: 18976 - DNA, 20 bp, Artificial Sequence
  chemically synthesized
cctcagccttgaaaagtgtt

SEQ ID NO: 18977 - DNA, 20 bp, Artificial Sequence
  chemically synthesized
cttgaaaagtgttgagatta

SEQ ID NO: 18978 - DNA, 20 bp, Artificial Sequence
  chemically synthesized
ttgaaaagtgttgagattac

SEQ ID NO: 18979 - DNA, 20 bp, Artificial Sequence
  chemically synthesized
acaggtgtgaatcaccatgc

SEQ ID NO: 18980 - DNA, 20 bp, Artificial Sequence
  chemically synthesized
caggtgtgaatcaccatgct

SEQ ID NO: 18981 - DNA, 20 bp, Artificial Sequence
  chemically synthesized
atcaccatgctgggccttga

SEQ ID NO: 18982 - DNA, 20 bp, Artificial Sequence
  chemically synthesized
gggccttgatggatctttaa

SEQ ID NO: 18983 - DNA, 20 bp, Artificial Sequence
  chemically synthesized
ccttgatggatctttaaaag

SEQ ID NO: 18984 - DNA, 20 bp, Artificial Sequence
  chemically synthesized
tgatggatctttaaaagtgg

SEQ ID NO: 18985 - DNA, 20 bp, Artificial Sequence
  chemically synthesized
gatggatctttaaaagtggt

SEQ ID NO: 18986 - DNA, 20 bp, Artificial Sequence
  chemically synthesized
atggatctttaaaagtggtg

SEQ ID NO: 18987 - DNA, 20 bp, Artificial Sequence
  chemically synthesized
tggatctttaaaagtggtgg

SEQ ID NO: 18988 - DNA, 20 bp, Artificial Sequence
  chemically synthesized
ggatctttaaaagtggtggg

SEQ ID NO: 18989 - DNA, 20 bp, Artificial Sequence
  chemically synthesized
tctttaaaagtggtgggggg

SEQ ID NO: 18990 - DNA, 20 bp, Artificial Sequence
  chemically synthesized
ctttaaaagtggtggggggt

SEQ ID NO: 18991 - DNA, 20 bp, Artificial Sequence
  chemically synthesized
ttaaaagtggtggggggtag

SEQ ID NO: 18992 - DNA, 20 bp, Artificial Sequence
  chemically synthesized
gtggtggggggtaggagaaa

SEQ ID NO: 18993 - DNA, 20 bp, Artificial Sequence
  chemically synthesized
ggtggggggtaggagaaaaa

SEQ ID NO: 18994 - DNA, 20 bp, Artificial Sequence
  chemically synthesized
gtggggggtaggagaaaaag

SEQ ID NO: 18995 - DNA, 20 bp, Artificial Sequence
  chemically synthesized
gggggtaggagaaaaagagg

SEQ ID NO: 18996 - DNA, 20 bp, Artificial Sequence
  chemically synthesized
aaaaagaggaagaacaaaaa

SEQ ID NO: 18997 - DNA, 20 bp, Artificial Sequence
  chemically synthesized
gaacaaaaacagtatcacga

SEQ ID NO: 18998 - DNA, 20 bp, Artificial Sequence
  chemically synthesized
tcacgaaagataaacatcgt

SEQ ID NO: 18999 - DNA, 20 bp, Artificial Sequence
  chemically synthesized
cacgaaagataaacatcgtt

SEQ ID NO: 19000 - DNA, 20 bp, Artificial Sequence
  chemically synthesized
agataaacatcgttaggtct

SEQ ID NO: 19001 - DNA, 20 bp, Artificial Sequence
  chemically synthesized
gataaacatcgttaggtctc

SEQ ID NO: 19002 - DNA, 20 bp, Artificial Sequence
  chemically synthesized
aaacatcgttaggtctcggg

SEQ ID NO: 19003 - DNA, 20 bp, Artificial Sequence
  chemically synthesized
aacatcgttaggtctcggga

SEQ ID NO: 19004 - DNA, 20 bp, Artificial Sequence
  chemically synthesized
tcgttaggtctcgggaagga

SEQ ID NO: 19005 - DNA, 20 bp, Artificial Sequence
  chemically synthesized
cgttaggtctcgggaaggat

SEQ ID NO: 19006 - DNA, 20 bp, Artificial Sequence
  chemically synthesized
ggatccttttcattttgctc

SEQ ID NO: 19007 - DNA, 20 bp, Artificial Sequence
  chemically synthesized
atccttttcattttgctcta

SEQ ID NO: 19008 - DNA, 20 bp, Artificial Sequence
  chemically synthesized
tttcattttgctctagagaa

SEQ ID NO: 19009 - DNA, 20 bp, Artificial Sequence
  chemically synthesized
tgctctagagaaaagccatt

SEQ ID NO: 19010 - DNA, 20 bp, Artificial Sequence
  chemically synthesized
acttctgtgttaacaaaaaa

SEQ ID NO: 19011 - DNA, 20 bp, Artificial Sequence
  chemically synthesized
tgtgttaacaaaaaacagcc

SEQ ID NO: 19012 - DNA, 20 bp, Artificial Sequence
  chemically synthesized
gttaacaaaaaacagccgag

SEQ ID NO: 19013 - DNA, 20 bp, Artificial Sequence
  chemically synthesized
caaaaaacagccgagtagcc

SEQ ID NO: 19014 - DNA, 20 bp, Artificial Sequence
  chemically synthesized
agtagcctagtattaaactt

SEQ ID NO: 19015 - DNA, 20 bp, Artificial Sequence
  chemically synthesized
tagcctagtattaaacttta

SEQ ID NO: 19016 - DNA, 20 bp, Artificial Sequence
  chemically synthesized
cctagtattaaactttagag

SEQ ID NO: 19017 - DNA, 20 bp, Artificial Sequence
  chemically synthesized
tttagagcagttgttcttta

SEQ ID NO: 19018 - DNA, 20 bp, Artificial Sequence
  chemically synthesized
gttgttctttacggcaatta

SEQ ID NO: 19019 - DNA, 20 bp, Artificial Sequence
  chemically synthesized
ttgttctttacggcaattac

SEQ ID NO: 19020 - DNA, 20 bp, Artificial Sequence
  chemically synthesized
tgttctttacggcaattaca

SEQ ID NO: 19021 - DNA, 20 bp, Artificial Sequence
  chemically synthesized
gttctttacggcaattacag

SEQ ID NO: 19022 - DNA, 20 bp, Artificial Sequence
  chemically synthesized
acggcaattacaggggcctt

SEQ ID NO: 19023 - DNA, 20 bp, Artificial Sequence
  chemically synthesized
cggcaattacaggggccttc

SEQ ID NO: 19024 - DNA, 20 bp, Artificial Sequence
  chemically synthesized
caattacaggggccttcagg

SEQ ID NO: 19025 - DNA, 20 bp, Artificial Sequence
  chemically synthesized
aggggccttcaggaagctga

SEQ ID NO: 19026 - DNA, 20 bp, Artificial Sequence
  chemically synthesized
ggccttcaggaagctgatgg

SEQ ID NO: 19027 - DNA, 20 bp, Artificial Sequence
  chemically synthesized
aggaagctgatggaagtgtg

SEQ ID NO: 19028 - DNA, 20 bp, Artificial Sequence
  chemically synthesized
gaagtgtgaagtcctcttct

SEQ ID NO: 19029 - DNA, 20 bp, Artificial Sequence
  chemically synthesized
agtgtgaagtcctcttctca

SEQ ID NO: 19030 - DNA, 20 bp, Artificial Sequence
  chemically synthesized
gaagtcctcttctcagagaa

SEQ ID NO: 19031 - DNA, 20 bp, Artificial Sequence
  chemically synthesized
atatacgtgcacctaatttt

SEQ ID NO: 19032 - DNA, 20 bp, Artificial Sequence
  chemically synthesized
atttttagatataatttctg

SEQ ID NO: 19033 - DNA, 20 bp, Artificial Sequence
  chemically synthesized
tttttagatataatttctga

SEQ ID NO: 19034 - DNA, 20 bp, Artificial Sequence
  chemically synthesized
agatataatttctgaaggtt

SEQ ID NO: 19035 - DNA, 20 bp, Artificial Sequence
  chemically synthesized
tgaaggtttagaaactcctt

SEQ ID NO: 19036 - DNA, 20 bp, Artificial Sequence
  chemically synthesized
ccttgagttcacttatatca

SEQ ID NO: 19037 - DNA, 20 bp, Artificial Sequence
  chemically synthesized
tatatcaaagtcctcacctt

SEQ ID NO: 19038 - DNA, 20 bp, Artificial Sequence
  chemically synthesized
cacctttagaactcctgtcc

SEQ ID NO: 19039 - DNA, 20 bp, Artificial Sequence
  chemically synthesized
ctttagaactcctgtcctag

SEQ ID NO: 19040 - DNA, 20 bp, Artificial Sequence
  chemically synthesized
ttagaactcctgtcctagaa

SEQ ID NO: 19041 - DNA, 20 bp, Artificial Sequence
  chemically synthesized
gaactcctgtcctagaagag

SEQ ID NO: 19042 - DNA, 20 bp, Artificial Sequence
  chemically synthesized
ttccataaccactttgactc

SEQ ID NO: 19043 - DNA, 20 bp, Artificial Sequence
  chemically synthesized
gccacttgtaccatgtaatt

SEQ ID NO: 19044 - DNA, 20 bp, Artificial Sequence
  chemically synthesized
cacttgtaccatgtaattca

SEQ ID NO: 19045 - DNA, 20 bp, Artificial Sequence
  chemically synthesized
acttgtaccatgtaattcag

SEQ ID NO: 19046 - DNA, 20 bp, Artificial Sequence
  chemically synthesized
taccatgtaattcagaggtg

SEQ ID NO: 19047 - DNA, 20 bp, Artificial Sequence
  chemically synthesized
taattcagaggtgtagtgtc

SEQ ID NO: 19048 - DNA, 20 bp, Artificial Sequence
  chemically synthesized
agaggtgtagtgtcaagact

SEQ ID NO: 19049 - DNA, 20 bp, Artificial Sequence
  chemically synthesized
gaggtgtagtgtcaagactg

SEQ ID NO: 19050 - DNA, 20 bp, Artificial Sequence
  chemically synthesized
ggtgtagtgtcaagactgag

SEQ ID NO: 19051 - DNA, 20 bp, Artificial Sequence
  chemically synthesized
gtgtagtgtcaagactgagg

SEQ ID NO: 19052 - DNA, 20 bp, Artificial Sequence
  chemically synthesized
tagtgtcaagactgaggagg

SEQ ID NO: 19053 - DNA, 20 bp, Artificial Sequence
  chemically synthesized
tgtcaagactgaggaggaag

SEQ ID NO: 19054 - DNA, 20 bp, Artificial Sequence
  chemically synthesized
gtcaagactgaggaggaagc

SEQ ID NO: 19055 - DNA, 20 bp, Artificial Sequence
  chemically synthesized
ggaagcaggtaaattatgtc

SEQ ID NO: 19056 - DNA, 20 bp, Artificial Sequence
  chemically synthesized
aattatgtccagcaatacgt

SEQ ID NO: 19057 - DNA, 20 bp, Artificial Sequence
  chemically synthesized
tgtccagcaatacgttggct

SEQ ID NO: 19058 - DNA, 20 bp, Artificial Sequence
  chemically synthesized
gtccagcaatacgttggctt

SEQ ID NO: 19059 - DNA, 20 bp, Artificial Sequence
  chemically synthesized
aggcaaaaacaaattgtttc

SEQ ID NO: 19060 - DNA, 20 bp, Artificial Sequence
  chemically synthesized
aattgtttctagtccatttt

SEQ ID NO: 19061 - DNA, 20 bp, Artificial Sequence
  chemically synthesized
ttgtttctagtccattttaa

SEQ ID NO: 19062 - DNA, 20 bp, Artificial Sequence
  chemically synthesized
tgtttctagtccattttaag

SEQ ID NO: 19063 - DNA, 20 bp, Artificial Sequence
  chemically synthesized
gtttctagtccattttaaga

SEQ ID NO: 19064 - DNA, 20 bp, Artificial Sequence
  chemically synthesized
tctagtccattttaagaggg

SEQ ID NO: 19065 - DNA, 20 bp, Artificial Sequence
  chemically synthesized
ttaagagggaagcatttatt

SEQ ID NO: 19066 - DNA, 20 bp, Artificial Sequence
  chemically synthesized
taagagggaagcatttattt

SEQ ID NO: 19067 - DNA, 20 bp, Artificial Sequence
  chemically synthesized
aagagggaagcatttattta

SEQ ID NO: 19068 - DNA, 20 bp, Artificial Sequence
  chemically synthesized
atttagggactacatcgctc

SEQ ID NO: 19069 - DNA, 20 bp, Artificial Sequence
  chemically synthesized
ccttaacatgttaatttctc

SEQ ID NO: 19070 - DNA, 20 bp, Artificial Sequence
  chemically synthesized
ttaacatgttaatttctcca

SEQ ID NO: 19071 - DNA, 20 bp, Artificial Sequence
  chemically synthesized
tccagagtttgtaatgttct

SEQ ID NO: 19072 - DNA, 20 bp, Artificial Sequence
  chemically synthesized
gagtttgtaatgttctgagc

SEQ ID NO: 19073 - DNA, 20 bp, Artificial Sequence
  chemically synthesized
atgttctgagcaagtgtgtg

SEQ ID NO: 19074 - DNA, 20 bp, Artificial Sequence
  chemically synthesized
ttctgagcaagtgtgtgcag

SEQ ID NO: 19075 - DNA, 20 bp, Artificial Sequence
  chemically synthesized
gtgtgcagaagaaatgattg

SEQ ID NO: 19076 - DNA, 20 bp, Artificial Sequence
  chemically synthesized
gcagaagaaatgattgtagt

SEQ ID NO: 19077 - DNA, 20 bp, Artificial Sequence
  chemically synthesized
gaaatgattgtagtaagacc

SEQ ID NO: 19078 - DNA, 20 bp, Artificial Sequence
  chemically synthesized
aaatgattgtagtaagacct

SEQ ID NO: 19079 - DNA, 20 bp, Artificial Sequence
  chemically synthesized
attgtagtaagacctgggca

SEQ ID NO: 19080 - DNA, 20 bp, Artificial Sequence
  chemically synthesized
ttgtagtaagacctgggcaa

SEQ ID NO: 19081 - DNA, 20 bp, Artificial Sequence
  chemically synthesized
gtagtaagacctgggcaaag

SEQ ID NO: 19082 - DNA, 20 bp, Artificial Sequence
  chemically synthesized
agtaagacctgggcaaagga

SEQ ID NO: 19083 - DNA, 20 bp, Artificial Sequence
  chemically synthesized
taagacctgggcaaaggaga

SEQ ID NO: 19084 - DNA, 20 bp, Artificial Sequence
  chemically synthesized
aaacatttttcccccacatt

SEQ ID NO: 19085 - DNA, 20 bp, Artificial Sequence
  chemically synthesized
aacatttttcccccacattt

SEQ ID NO: 19086 - DNA, 20 bp, Artificial Sequence
  chemically synthesized
ttgggcaaaactttccatcc

SEQ ID NO: 19087 - DNA, 20 bp, Artificial Sequence
  chemically synthesized
tgggcaaaactttccatcct

SEQ ID NO: 19088 - DNA, 20 bp, Artificial Sequence
  chemically synthesized
ttccatcctgggtcacacca

SEQ ID NO: 19089 - DNA, 20 bp, Artificial Sequence
  chemically synthesized
ctcctctcctctccctcaac

SEQ ID NO: 19090 - DNA, 20 bp, Artificial Sequence
  chemically synthesized
tcctctccctcaactggtaa

SEQ ID NO: 19091 - DNA, 20 bp, Artificial Sequence
  chemically synthesized
ccaaaacatacctgactact

SEQ ID NO: 19092 - DNA, 20 bp, Artificial Sequence
  chemically synthesized
cttagtacttcccactactg

SEQ ID NO: 19093 - DNA, 20 bp, Artificial Sequence
  chemically synthesized
gtacttcccactactgtgga

SEQ ID NO: 19094 - DNA, 20 bp, Artificial Sequence
  chemically synthesized
cactactgtggatagaattt

SEQ ID NO: 19095 - DNA, 20 bp, Artificial Sequence
  chemically synthesized
ctcattcattgttcataccc

SEQ ID NO: 19096 - DNA, 20 bp, Artificial Sequence
  chemically synthesized
cattcattgttcataccctg

SEQ ID NO: 19097 - DNA, 20 bp, Artificial Sequence
  chemically synthesized
ccctggagacaaaactcctt

SEQ ID NO: 19098 - DNA, 20 bp, Artificial Sequence
  chemically synthesized
cctggagacaaaactcctta

SEQ ID NO: 19099 - DNA, 20 bp, Artificial Sequence
  chemically synthesized
taaggctattaactccccct

SEQ ID NO: 19100 - DNA, 20 bp, Artificial Sequence
  chemically synthesized
tccccctgagcttcacaatc

SEQ ID NO: 19101 - DNA, 20 bp, Artificial Sequence
  chemically synthesized
gcttcacaatctagtccctg

SEQ ID NO: 19102 - DNA, 20 bp, Artificial Sequence
  chemically synthesized
cttcacaatctagtccctgc

SEQ ID NO: 19103 - DNA, 20 bp, Artificial Sequence
  chemically synthesized
tcctctccttttccctctct

SEQ ID NO: 19104 - DNA, 20 bp, Artificial Sequence
  chemically synthesized
ttccctctctgagccccgct

SEQ ID NO: 19105 - DNA, 20 bp, Artificial Sequence
  chemically synthesized
gccccgctcagatcttcgaa

SEQ ID NO: 19106 - DNA, 20 bp, Artificial Sequence
  chemically synthesized
cccgctcagatcttcgaaca

SEQ ID NO: 19107 - DNA, 20 bp, Artificial Sequence
  chemically synthesized
cagagaacacttctgcatct

SEQ ID NO: 19108 - DNA, 20 bp, Artificial Sequence
  chemically synthesized
cttctgcatcttggcatata

SEQ ID NO: 19109 - DNA, 20 bp, Artificial Sequence
  chemically synthesized
gcatatatagttctctcaca

SEQ ID NO: 19110 - DNA, 20 bp, Artificial Sequence
  chemically synthesized
atagaacgctttctcccctt

SEQ ID NO: 19111 - DNA, 20 bp, Artificial Sequence
  chemically synthesized
cctttagctatttatccttc

SEQ ID NO: 19112 - DNA, 20 bp, Artificial Sequence
  chemically synthesized
gctatttatccttcaagtgt

SEQ ID NO: 19113 - DNA, 20 bp, Artificial Sequence
  chemically synthesized
cagctcaaacatctcatcat

SEQ ID NO: 19114 - DNA, 20 bp, Artificial Sequence
  chemically synthesized
gctcaaacatctcatcatta

SEQ ID NO: 19115 - DNA, 20 bp, Artificial Sequence
  chemically synthesized
tcaaacatctcatcattaga

SEQ ID NO: 19116 - DNA, 20 bp, Artificial Sequence
  chemically synthesized
caaacatctcatcattagag

SEQ ID NO: 19117 - DNA, 20 bp, Artificial Sequence
  chemically synthesized
agaggtttttcccaaacctc

SEQ ID NO: 19118 - DNA, 20 bp, Artificial Sequence
  chemically synthesized
gaggtttttcccaaacctct

SEQ ID NO: 19119 - DNA, 20 bp, Artificial Sequence
  chemically synthesized
ttcccaaacctctaggtaac

SEQ ID NO: 19120 - DNA, 20 bp, Artificial Sequence
  chemically synthesized
tcccaaacctctaggtaact

SEQ ID NO: 19121 - DNA, 20 bp, Artificial Sequence
  chemically synthesized
aaacctctaggtaactaggt

SEQ ID NO: 19122 - DNA, 20 bp, Artificial Sequence
  chemically synthesized
agaaaccactccccattcca

SEQ ID NO: 19123 - DNA, 20 bp, Artificial Sequence
  chemically synthesized
ccattccacggtacactgta

SEQ ID NO: 19124 - DNA, 20 bp, Artificial Sequence
  chemically synthesized
cacggtacactgtatagtct

SEQ ID NO: 19125 - DNA, 20 bp, Artificial Sequence
  chemically synthesized
acggtacactgtatagtctt

SEQ ID NO: 19126 - DNA, 20 bp, Artificial Sequence
  chemically synthesized
ctgtatagtcttaggacacc

SEQ ID NO: 19127 - DNA, 20 bp, Artificial Sequence
  chemically synthesized
cttaggacacctggttccct

SEQ ID NO: 19128 - DNA, 20 bp, Artificial Sequence
  chemically synthesized
tacaaatttgtcaattcttg

SEQ ID NO: 19129 - DNA, 20 bp, Artificial Sequence
  chemically synthesized
tttgtcaattcttgaagatt

SEQ ID NO: 19130 - DNA, 20 bp, Artificial Sequence
  chemically synthesized
aattcttgaagattaagaat

SEQ ID NO: 19131 - DNA, 20 bp, Artificial Sequence
  chemically synthesized
actctatctccctcgcctct

SEQ ID NO: 19132 - DNA, 20 bp, Artificial Sequence
  chemically synthesized
tctcagtgcctgatacctaa

SEQ ID NO: 19133 - DNA, 20 bp, Artificial Sequence
  chemically synthesized
atccttactgaataataaaa

SEQ ID NO: 19134 - DNA, 20 bp, Artificial Sequence
  chemically synthesized
taaaatggattaatgaataa

SEQ ID NO: 19135 - DNA, 20 bp, Artificial Sequence
  chemically synthesized
gaataaaagcaataaatttc

SEQ ID NO: 19136 - DNA, 20 bp, Artificial Sequence
  chemically synthesized
aataaaagcaataaatttca

SEQ ID NO: 19137 - DNA, 20 bp, Artificial Sequence
  chemically synthesized
gttaatattaataaattaaa

SEQ ID NO: 19138 - DNA, 20 bp, Artificial Sequence
  chemically synthesized
ttaatattaataaattaaaa

SEQ ID NO: 19139 - DNA, 20 bp, Artificial Sequence
  chemically synthesized
aaattaaaaaggttattttg

SEQ ID NO: 19140 - DNA, 20 bp, Artificial Sequence
  chemically synthesized
aaaaggttattttgaagtct

SEQ ID NO: 19141 - DNA, 20 bp, Artificial Sequence
  chemically synthesized
ttattttgaagtctgagaat

SEQ ID NO: 19142 - DNA, 20 bp, Artificial Sequence
  chemically synthesized
tttcacgtttccattgttca

SEQ ID NO: 19143 - DNA, 20 bp, Artificial Sequence
  chemically synthesized
ttcacgtttccattgttcat

SEQ ID NO: 19144 - DNA, 20 bp, Artificial Sequence
  chemically synthesized
attgttcatgggcaaaattc

SEQ ID NO: 19145 - DNA, 20 bp, Artificial Sequence
  chemically synthesized
gttcatgggcaaaattctgg

SEQ ID NO: 19146 - DNA, 20 bp, Artificial Sequence
  chemically synthesized
atgggcaaaattctggcagc

SEQ ID NO: 19147 - DNA, 20 bp, Artificial Sequence
  chemically synthesized
tgggcaaaattctggcagca

SEQ ID NO: 19148 - DNA, 20 bp, Artificial Sequence
  chemically synthesized
gggcaaaattctggcagcaa

SEQ ID NO: 19149 - DNA, 20 bp, Artificial Sequence
  chemically synthesized
cagcaagggattcttctcct

SEQ ID NO: 19150 - DNA, 20 bp, Artificial Sequence
  chemically synthesized
taagaaaccttttgttttct

SEQ ID NO: 19151 - DNA, 20 bp, Artificial Sequence
  chemically synthesized
gaatacatttccttgtttgc

SEQ ID NO: 19152 - DNA, 20 bp, Artificial Sequence
  chemically synthesized
tccttgtttgccagaaaaca

SEQ ID NO: 19153 - DNA, 20 bp, Artificial Sequence
  chemically synthesized
tgtttgccagaaaacatggt

SEQ ID NO: 19154 - DNA, 20 bp, Artificial Sequence
  chemically synthesized
agaaaacatggtaagataac

SEQ ID NO: 19155 - DNA, 20 bp, Artificial Sequence
  chemically synthesized
aaaacatggtaagataactg

SEQ ID NO: 19156 - DNA, 20 bp, Artificial Sequence
  chemically synthesized
aacatggtaagataactgga

SEQ ID NO: 19157 - DNA, 20 bp, Artificial Sequence
  chemically synthesized
taacattcattttattcatg

SEQ ID NO: 19158 - DNA, 20 bp, Artificial Sequence
  chemically synthesized
ttcatgaagaaactgttatt

SEQ ID NO: 19159 - DNA, 20 bp, Artificial Sequence
  chemically synthesized
aagaaactgttattcagttt

SEQ ID NO: 19160 - DNA, 20 bp, Artificial Sequence
  chemically synthesized
agaaactgttattcagttta

SEQ ID NO: 19161 - DNA, 20 bp, Artificial Sequence
  chemically synthesized
gaaactgttattcagtttaa

SEQ ID NO: 19162 - DNA, 20 bp, Artificial Sequence
  chemically synthesized
aaactgttattcagtttaag

SEQ ID NO: 19163 - DNA, 20 bp, Artificial Sequence
  chemically synthesized
cagtttaaggggttcttttt

SEQ ID NO: 19164 - DNA, 20 bp, Artificial Sequence
  chemically synthesized
ttaaggggttctttttcaga

SEQ ID NO: 19165 - DNA, 20 bp, Artificial Sequence
  chemically synthesized
ggttctttttcagaaagttt

SEQ ID NO: 19166 - DNA, 20 bp, Artificial Sequence
  chemically synthesized
tcagaaagtttcagaaatcc

SEQ ID NO: 19167 - DNA, 20 bp, Artificial Sequence
  chemically synthesized
aatccaagacctttgactgc

SEQ ID NO: 19168 - DNA, 20 bp, Artificial Sequence
  chemically synthesized
gtactgtgttctttcatcta

SEQ ID NO: 19169 - DNA, 20 bp, Artificial Sequence
  chemically synthesized
tactgtgttctttcatctat

SEQ ID NO: 19170 - DNA, 20 bp, Artificial Sequence
  chemically synthesized
ggacatttcctttgaaaact

SEQ ID NO: 19171 - DNA, 20 bp, Artificial Sequence
  chemically synthesized
gacatttcctttgaaaactg

SEQ ID NO: 19172 - DNA, 20 bp, Artificial Sequence
  chemically synthesized
aatatttaattcttacataa

SEQ ID NO: 19173 - DNA, 20 bp, Artificial Sequence
  chemically synthesized
attcttacataatagtaaaa

SEQ ID NO: 19174 - DNA, 20 bp, Artificial Sequence
  chemically synthesized
ataatagtaaaaaagtgaat

SEQ ID NO: 19175 - DNA, 20 bp, Artificial Sequence
  chemically synthesized
gtaaaaaagtgaattggcct

SEQ ID NO: 19176 - DNA, 20 bp, Artificial Sequence
  chemically synthesized
aaagtgaattggccttggaa

SEQ ID NO: 19177 - DNA, 20 bp, Artificial Sequence
  chemically synthesized
cttggaaaagacctaaatcc

SEQ ID NO: 19178 - DNA, 20 bp, Artificial Sequence
  chemically synthesized
aatcaatttgctctatgaac

SEQ ID NO: 19179 - DNA, 20 bp, Artificial Sequence
  chemically synthesized
tcaatttgctctatgaactg

SEQ ID NO: 19180 - DNA, 20 bp, Artificial Sequence
  chemically synthesized
caatttgctctatgaactgg

SEQ ID NO: 19181 - DNA, 20 bp, Artificial Sequence
  chemically synthesized
atttgctctatgaactggag

SEQ ID NO: 19182 - DNA, 20 bp, Artificial Sequence
  chemically synthesized
tgctctatgaactggaggag

SEQ ID NO: 19183 - DNA, 20 bp, Artificial Sequence
  chemically synthesized
gctctatgaactggaggagt

SEQ ID NO: 19184 - DNA, 20 bp, Artificial Sequence
  chemically synthesized
gagtgggattcatgatctct

SEQ ID NO: 19185 - DNA, 20 bp, Artificial Sequence
  chemically synthesized
catatcactactatgaaatg

SEQ ID NO: 19186 - DNA, 20 bp, Artificial Sequence
  chemically synthesized
atatcactactatgaaatgc

SEQ ID NO: 19187 - DNA, 20 bp, Artificial Sequence
  chemically synthesized
tatcactactatgaaatgca

SEQ ID NO: 19188 - DNA, 20 bp, Artificial Sequence
  chemically synthesized
cactactatgaaatgcaggg

SEQ ID NO: 19189 - DNA, 20 bp, Artificial Sequence
  chemically synthesized
aattcaaatcattaaattta

SEQ ID NO: 19190 - DNA, 20 bp, Artificial Sequence
  chemically synthesized
cattaaatttaaagaaacta

SEQ ID NO: 19191 - DNA, 20 bp, Artificial Sequence
  chemically synthesized
taaatttaaagaaactatag

SEQ ID NO: 19192 - DNA, 20 bp, Artificial Sequence
  chemically synthesized
ctatagtggcaatgtattat

SEQ ID NO: 19193 - DNA, 20 bp, Artificial Sequence
  chemically synthesized
tatagtggcaatgtattatt

SEQ ID NO: 19194 - DNA, 20 bp, Artificial Sequence
  chemically synthesized
atgaaaatctcaaaccatac

SEQ ID NO: 19195 - DNA, 20 bp, Artificial Sequence
  chemically synthesized
tgaaaatctcaaaccatacc

SEQ ID NO: 19196 - DNA, 20 bp, Artificial Sequence
  chemically synthesized
gctatgataatattaaaata

SEQ ID NO: 19197 - DNA, 20 bp, Artificial Sequence
  chemically synthesized
attaaaataaagatacattg

SEQ ID NO: 19198 - DNA, 20 bp, Artificial Sequence
  chemically synthesized
aacttgtgtaaatcacattg

SEQ ID NO: 19199 - DNA, 20 bp, Artificial Sequence
  chemically synthesized
acttgtgtaaatcacattgt

SEQ ID NO: 19200 - DNA, 20 bp, Artificial Sequence
  chemically synthesized
cttgtgtaaatcacattgtg

SEQ ID NO: 19201 - DNA, 20 bp, Artificial Sequence
  chemically synthesized
aacacttcccttccccttga

SEQ ID NO: 19202 - DNA, 20 bp, Artificial Sequence
  chemically synthesized
acacttcccttccccttgaa

SEQ ID NO: 19203 - DNA, 20 bp, Artificial Sequence
  chemically synthesized
cacttcccttccccttgaaa

SEQ ID NO: 19204 - DNA, 20 bp, Artificial Sequence
  chemically synthesized
tccccttgaaagggaaatga

SEQ ID NO: 19205 - DNA, 20 bp, Artificial Sequence
  chemically synthesized
aaagggaaatgatagaaaat

SEQ ID NO: 19206 - DNA, 20 bp, Artificial Sequence
  chemically synthesized
atgatagaaaataagtatta

SEQ ID NO: 19207 - DNA, 20 bp, Artificial Sequence
  chemically synthesized
tgatagaaaataagtattaa

SEQ ID NO: 19208 - DNA, 20 bp, Artificial Sequence
  chemically synthesized
tagaaaataagtattaaagg

SEQ ID NO: 19209 - DNA, 20 bp, Artificial Sequence
  chemically synthesized
aataagtattaaaggcagct

SEQ ID NO: 19210 - DNA, 20 bp, Artificial Sequence
  chemically synthesized
ataagtattaaaggcagctt

SEQ ID NO: 19211 - DNA, 20 bp, Artificial Sequence
  chemically synthesized
taagtattaaaggcagctta

SEQ ID NO: 19212 - DNA, 20 bp, Artificial Sequence
  chemically synthesized
aagtattaaaggcagcttag

SEQ ID NO: 19213 - DNA, 20 bp, Artificial Sequence
  chemically synthesized
ttttcaaaaaaaaatccatt

SEQ ID NO: 19214 - DNA, 20 bp, Artificial Sequence
  chemically synthesized
attgagcattttctatgtac

SEQ ID NO: 19215 - DNA, 20 bp, Artificial Sequence
  chemically synthesized
ttgagcattttctatgtacc

SEQ ID NO: 19216 - DNA, 20 bp, Artificial Sequence
  chemically synthesized
ctatgtaccaggcactgttc

SEQ ID NO: 19217 - DNA, 20 bp, Artificial Sequence
  chemically synthesized
caggcactgttctagaccct

SEQ ID NO: 19218 - DNA, 20 bp, Artificial Sequence
  chemically synthesized
acacacatgctactgattat

SEQ ID NO: 19219 - DNA, 20 bp, Artificial Sequence
  chemically synthesized
ataagatccataaaataact

SEQ ID NO: 19220 - DNA, 20 bp, Artificial Sequence
  chemically synthesized
ataaaataacttagtttcac

SEQ ID NO: 19221 - DNA, 20 bp, Artificial Sequence
  chemically synthesized
tagtttcactggcgtgttcc

SEQ ID NO: 19222 - DNA, 20 bp, Artificial Sequence
  chemically synthesized
actggcgtgttcccagtgcc

SEQ ID NO: 19223 - DNA, 20 bp, Artificial Sequence
  chemically synthesized
ctggcgtgttcccagtgccc

SEQ ID NO: 19224 - DNA, 20 bp, Artificial Sequence
  chemically synthesized
tgttcccagtgcccaggtaa

SEQ ID NO: 19225 - DNA, 20 bp, Artificial Sequence
  chemically synthesized
attaatgtttgttaaatgat

SEQ ID NO: 19226 - DNA, 20 bp, Artificial Sequence
  chemically synthesized
tgtttgttaaatgatgagaa

SEQ ID NO: 19227 - DNA, 20 bp, Artificial Sequence
  chemically synthesized
tttgttaaatgatgagaaaa

SEQ ID NO: 19228 - DNA, 20 bp, Artificial Sequence
  chemically synthesized
ttgttaaatgatgagaaaag

SEQ ID NO: 19229 - DNA, 20 bp, Artificial Sequence
  chemically synthesized
taaatgatgagaaaagagga

SEQ ID NO: 19230 - DNA, 20 bp, Artificial Sequence
  chemically synthesized
atgatgagaaaagaggaaag

SEQ ID NO: 19231 - DNA, 20 bp, Artificial Sequence
  chemically synthesized
atgagaaaagaggaaagcag

SEQ ID NO: 19232 - DNA, 20 bp, Artificial Sequence
  chemically synthesized
tgagaaaagaggaaagcaga

SEQ ID NO: 19233 - DNA, 20 bp, Artificial Sequence
  chemically synthesized
gagaaaagaggaaagcagaa

SEQ ID NO: 19234 - DNA, 20 bp, Artificial Sequence
  chemically synthesized
agaaaagaggaaagcagaag

SEQ ID NO: 19235 - DNA, 20 bp, Artificial Sequence
  chemically synthesized
aaagcagaaggggctctgct

SEQ ID NO: 19236 - DNA, 20 bp, Artificial Sequence
  chemically synthesized
aagcagaaggggctctgctc

SEQ ID NO: 19237 - DNA, 20 bp, Artificial Sequence
  chemically synthesized
gaaggggctctgctcaggtg

SEQ ID NO: 19238 - DNA, 20 bp, Artificial Sequence
  chemically synthesized
aaggggctctgctcaggtgc

SEQ ID NO: 19239 - DNA, 20 bp, Artificial Sequence
  chemically synthesized
ctcaggtgcaggaacttgtg

SEQ ID NO: 19240 - DNA, 20 bp, Artificial Sequence
  chemically synthesized
caggtgcaggaacttgtgca

SEQ ID NO: 19241 - DNA, 20 bp, Artificial Sequence
  chemically synthesized
gaacttgtgcagagatcttc

SEQ ID NO: 19242 - DNA, 20 bp, Artificial Sequence
  chemically synthesized
agatcttctggactgattcc

SEQ ID NO: 19243 - DNA, 20 bp, Artificial Sequence
  chemically synthesized
gactgattcccagtgctaac

SEQ ID NO: 19244 - DNA, 20 bp, Artificial Sequence
  chemically synthesized
cagtgctaacaagtcccttc

SEQ ID NO: 19245 - DNA, 20 bp, Artificial Sequence
  chemically synthesized
ttccagttttatccaccaat

SEQ ID NO: 19246 - DNA, 20 bp, Artificial Sequence
  chemically synthesized
caccaataagctatgtcctt

SEQ ID NO: 19247 - DNA, 20 bp, Artificial Sequence
  chemically synthesized
ttgagctcctgcccactctc

SEQ ID NO: 19248 - DNA, 20 bp, Artificial Sequence
  chemically synthesized
gagctcctgcccactctcta

SEQ ID NO: 19249 - DNA, 20 bp, Artificial Sequence
  chemically synthesized
ctagagaaaacttttatttc

SEQ ID NO: 19250 - DNA, 20 bp, Artificial Sequence
  chemically synthesized
tagagaaaacttttatttca

SEQ ID NO: 19251 - DNA, 20 bp, Artificial Sequence
  chemically synthesized
ttttatttcaaggcatactc

SEQ ID NO: 19252 - DNA, 20 bp, Artificial Sequence
  chemically synthesized
tttatttcaaggcatactcc

SEQ ID NO: 19253 - DNA, 20 bp, Artificial Sequence
  chemically synthesized
actccgggattcacatgtga

SEQ ID NO: 19254 - DNA, 20 bp, Artificial Sequence
  chemically synthesized
tccgggattcacatgtgata

SEQ ID NO: 19255 - DNA, 20 bp, Artificial Sequence
  chemically synthesized
ggattcacatgtgatagaga

SEQ ID NO: 19256 - DNA, 20 bp, Artificial Sequence
  chemically synthesized
gatagagatggttctgttcc

SEQ ID NO: 19257 - DNA, 20 bp, Artificial Sequence
  chemically synthesized
atagagatggttctgttccc

SEQ ID NO: 19258 - DNA, 20 bp, Artificial Sequence
  chemically synthesized
ggttctgttcccaggaactt

SEQ ID NO: 19259 - DNA, 20 bp, Artificial Sequence
  chemically synthesized
gttctgttcccaggaacttt

SEQ ID NO: 19260 - DNA, 20 bp, Artificial Sequence
  chemically synthesized
ctttgggcatatttaaaaac

SEQ ID NO: 19261 - DNA, 20 bp, Artificial Sequence
  chemically synthesized
ggcatatttaaaaactggac

SEQ ID NO: 19262 - DNA, 20 bp, Artificial Sequence
  chemically synthesized
ggactggaaaaatttgtgac

SEQ ID NO: 19263 - DNA, 20 bp, Artificial Sequence
  chemically synthesized
gaaaaatttgtgactagaaa

SEQ ID NO: 19264 - DNA, 20 bp, Artificial Sequence
  chemically synthesized
aaaaatttgtgactagaaaa

SEQ ID NO: 19265 - DNA, 20 bp, Artificial Sequence
  chemically synthesized
ttaaaaacacatgctcattt

SEQ ID NO: 19266 - DNA, 20 bp, Artificial Sequence
  chemically synthesized
taaaaacacatgctcatttc

SEQ ID NO: 19267 - DNA, 20 bp, Artificial Sequence
  chemically synthesized
cacatgctcatttcaggata

SEQ ID NO: 19268 - DNA, 20 bp, Artificial Sequence
  chemically synthesized
atttcaggataaagatctct

SEQ ID NO: 19269 - DNA, 20 bp, Artificial Sequence
  chemically synthesized
tttcaggataaagatctctg

SEQ ID NO: 19270 - DNA, 20 bp, Artificial Sequence
  chemically synthesized
ggataaagatctctgaggaa

SEQ ID NO: 19271 - DNA, 20 bp, Artificial Sequence
  chemically synthesized
agaatacaaaataatttaaa

SEQ ID NO: 19272 - DNA, 20 bp, Artificial Sequence
  chemically synthesized
aataatttaaaaagaaacaa

SEQ ID NO: 19273 - DNA, 20 bp, Artificial Sequence
  chemically synthesized
ttaaaaagaaacaacagaaa

SEQ ID NO: 19274 - DNA, 20 bp, Artificial Sequence
  chemically synthesized
taaaaagaaacaacagaaac

SEQ ID NO: 19275 - DNA, 20 bp, Artificial Sequence
  chemically synthesized
atacttcacttctctgtaat

SEQ ID NO: 19276 - DNA, 20 bp, Artificial Sequence
  chemically synthesized
tacttcacttctctgtaata

SEQ ID NO: 19277 - DNA, 20 bp, Artificial Sequence
  chemically synthesized
taataaggtttctgtcctcc

SEQ ID NO: 19278 - DNA, 20 bp, Artificial Sequence
  chemically synthesized
gattctttctcactaaacta

SEQ ID NO: 19279 - DNA, 20 bp, Artificial Sequence
  chemically synthesized
ttctttctcactaaactaca

SEQ ID NO: 19280 - DNA, 20 bp, Artificial Sequence
  chemically synthesized
ctcactaaactacagagaat

SEQ ID NO: 19281 - DNA, 20 bp, Artificial Sequence
  chemically synthesized
gcattctgtccacttctaca

SEQ ID NO: 19282 - DNA, 20 bp, Artificial Sequence
  chemically synthesized
cattctgtccacttctacat

SEQ ID NO: 19283 - DNA, 20 bp, Artificial Sequence
  chemically synthesized
ttttatgaatgcatacacac

SEQ ID NO: 19284 - DNA, 20 bp, Artificial Sequence
  chemically synthesized
atacacacgagaactttgaa

SEQ ID NO: 19285 - DNA, 20 bp, Artificial Sequence
  chemically synthesized
acacgagaactttgaacagt

SEQ ID NO: 19286 - DNA, 20 bp, Artificial Sequence
  chemically synthesized
gaactttgaacagttagtat

SEQ ID NO: 19287 - DNA, 20 bp, Artificial Sequence
  chemically synthesized
aactttgaacagttagtata

SEQ ID NO: 19288 - DNA, 20 bp, Artificial Sequence
  chemically synthesized
taaggtgaattctgattttt

SEQ ID NO: 19289 - DNA, 20 bp, Artificial Sequence
  chemically synthesized
tatataatgcatttaatttt

SEQ ID NO: 19290 - DNA, 20 bp, Artificial Sequence
  chemically synthesized
atttaattttgagattatgc

SEQ ID NO: 19291 - DNA, 20 bp, Artificial Sequence
  chemically synthesized
gagattatgctggctctgat

SEQ ID NO: 19292 - DNA, 20 bp, Artificial Sequence
  chemically synthesized
tgctggctctgattagccaa

SEQ ID NO: 19293 - DNA, 20 bp, Artificial Sequence
  chemically synthesized
tggctctgattagccaaaag

SEQ ID NO: 19294 - DNA, 20 bp, Artificial Sequence
  chemically synthesized
ggctctgattagccaaaaga

SEQ ID NO: 19295 - DNA, 20 bp, Artificial Sequence
  chemically synthesized
tctgattagccaaaagaagg

SEQ ID NO: 19296 - DNA, 20 bp, Artificial Sequence
  chemically synthesized
ggaagtaatatatcacattc

SEQ ID NO: 19297 - DNA, 20 bp, Artificial Sequence
  chemically synthesized
tcacattctggttattattt

SEQ ID NO: 19298 - DNA, 20 bp, Artificial Sequence
  chemically synthesized
ggttattatttcagatcctt

SEQ ID NO: 19299 - DNA, 20 bp, Artificial Sequence
  chemically synthesized
gatcctttagattactgtaa

SEQ ID NO: 19300 - DNA, 20 bp, Artificial Sequence
  chemically synthesized
ttactgtaatagacatgaaa

SEQ ID NO: 19301 - DNA, 20 bp, Artificial Sequence
  chemically synthesized
cacaacacatgacataattt

SEQ ID NO: 19302 - DNA, 20 bp, Artificial Sequence
  chemically synthesized
tcagatcgtttaaatcacac

SEQ ID NO: 19303 - DNA, 20 bp, Artificial Sequence
  chemically synthesized
agtcatcactgccatttacc

SEQ ID NO: 19304 - DNA, 20 bp, Artificial Sequence
  chemically synthesized
actgccatttacccagcaat

SEQ ID NO: 19305 - DNA, 20 bp, Artificial Sequence
  chemically synthesized
ccatttacccagcaatcagt

SEQ ID NO: 19306 - DNA, 20 bp, Artificial Sequence
  chemically synthesized
atcagttggcttgattcttc

SEQ ID NO: 19307 - DNA, 20 bp, Artificial Sequence
  chemically synthesized
gcttgattcttcaagatctt

SEQ ID NO: 19308 - DNA, 20 bp, Artificial Sequence
  chemically synthesized
cttgattcttcaagatcttg

SEQ ID NO: 19309 - DNA, 20 bp, Artificial Sequence
  chemically synthesized
cttcaagatcttgaggaact

SEQ ID NO: 19310 - DNA, 20 bp, Artificial Sequence
  chemically synthesized
ctttgctaatgttccttcaa

SEQ ID NO: 19311 - DNA, 20 bp, Artificial Sequence
  chemically synthesized
tagtcttgacacttttaaac

SEQ ID NO: 19312 - DNA, 20 bp, Artificial Sequence
  chemically synthesized
gtcttgacacttttaaacta

SEQ ID NO: 19313 - DNA, 20 bp, Artificial Sequence
  chemically synthesized
cttgacacttttaaactaga

SEQ ID NO: 19314 - DNA, 20 bp, Artificial Sequence
  chemically synthesized
actagagagtataaacccac

SEQ ID NO: 19315 - DNA, 20 bp, Artificial Sequence
  chemically synthesized
ctagagagtataaacccaca

SEQ ID NO: 19316 - DNA, 20 bp, Artificial Sequence
  chemically synthesized
ggaattgttttataatttta

SEQ ID NO: 19317 - DNA, 20 bp, Artificial Sequence
  chemically synthesized
tttcaaaatcatttacattg

SEQ ID NO: 19318 - DNA, 20 bp, Artificial Sequence
  chemically synthesized
ctaccttgccttctcttacc

SEQ ID NO: 19319 - DNA, 20 bp, Artificial Sequence
  chemically synthesized
ttgccttctcttacccagca

SEQ ID NO: 19320 - DNA, 20 bp, Artificial Sequence
  chemically synthesized
ttctcttacccagcacagat

SEQ ID NO: 19321 - DNA, 20 bp, Artificial Sequence
  chemically synthesized
tctcttacccagcacagatg

SEQ ID NO: 19322 - DNA, 20 bp, Artificial Sequence
  chemically synthesized
ttattttataattcctacat

SEQ ID NO: 19323 - DNA, 20 bp, Artificial Sequence
  chemically synthesized
ttataattcctacataagca

SEQ ID NO: 19324 - DNA, 20 bp, Artificial Sequence
  chemically synthesized
cctacataagcatagcattg

SEQ ID NO: 19325 - DNA, 20 bp, Artificial Sequence
  chemically synthesized
aaaaattactttcattctga

SEQ ID NO: 19326 - DNA, 20 bp, Artificial Sequence
  chemically synthesized
aaaattactttcattctgaa

SEQ ID NO: 19327 - DNA, 20 bp, Artificial Sequence
  chemically synthesized
aattactttcattctgaaag

SEQ ID NO: 19328 - DNA, 20 bp, Artificial Sequence
  chemically synthesized
ctttcattctgaaaggagca

SEQ ID NO: 19329 - DNA, 20 bp, Artificial Sequence
  chemically synthesized
agcacagtattttgcctttt

SEQ ID NO: 19330 - DNA, 20 bp, Artificial Sequence
  chemically synthesized
acagtattttgccttttgag

SEQ ID NO: 19331 - DNA, 20 bp, Artificial Sequence
  chemically synthesized
tgaattaaaacattaattcc

SEQ ID NO: 19332 - DNA, 20 bp, Artificial Sequence
  chemically synthesized
tgtgaatatgaaacattctt

SEQ ID NO: 19333 - DNA, 20 bp, Artificial Sequence
  chemically synthesized
gcatttcatataattactaa

SEQ ID NO: 19334 - DNA, 20 bp, Artificial Sequence
  chemically synthesized
atataattactaacagaatg

SEQ ID NO: 19335 - DNA, 20 bp, Artificial Sequence
  chemically synthesized
ataattactaacagaatgta

SEQ ID NO: 19336 - DNA, 20 bp, Artificial Sequence
  chemically synthesized
tactaacagaatgtagagtt

SEQ ID NO: 19337 - DNA, 20 bp, Artificial Sequence
  chemically synthesized
actaacagaatgtagagttg

SEQ ID NO: 19338 - DNA, 20 bp, Artificial Sequence
  chemically synthesized
gtagagttgaggtttccaac

SEQ ID NO: 19339 - DNA, 20 bp, Artificial Sequence
  chemically synthesized
tttaattatactattttgct

SEQ ID NO: 19340 - DNA, 20 bp, Artificial Sequence
  chemically synthesized
atttctatgttgtcataata

SEQ ID NO: 19341 - DNA, 20 bp, Artificial Sequence
  chemically synthesized
taatttaaatgcacattcca

SEQ ID NO: 19342 - DNA, 20 bp, Artificial Sequence
  chemically synthesized
aaatgcacattccatggcaa

SEQ ID NO: 19343 - DNA, 20 bp, Artificial Sequence
  chemically synthesized
tccctcttcaacacatacac

SEQ ID NO: 19344 - DNA, 20 bp, Artificial Sequence
  chemically synthesized
catacacaagtctgtattca

SEQ ID NO: 19345 - DNA, 20 bp, Artificial Sequence
  chemically synthesized
gtattcatagcctgttgtaa

SEQ ID NO: 19346 - DNA, 20 bp, Artificial Sequence
  chemically synthesized
catagcctgttgtaatagac

SEQ ID NO: 19347 - DNA, 20 bp, Artificial Sequence
  chemically synthesized
atagcctgttgtaatagaca

SEQ ID NO: 19348 - DNA, 20 bp, Artificial Sequence
  chemically synthesized
gtaatagacaaggttaaatg

SEQ ID NO: 19349 - DNA, 20 bp, Artificial Sequence
  chemically synthesized
taaatgctttcctcactcac

SEQ ID NO: 19350 - DNA, 20 bp, Artificial Sequence
  chemically synthesized
tttcctcactcactagcaat

SEQ ID NO: 19351 - DNA, 20 bp, Artificial Sequence
  chemically synthesized
cactagcaattggttatcac

SEQ ID NO: 19352 - DNA, 20 bp, Artificial Sequence
  chemically synthesized
ctagcaattggttatcacta

SEQ ID NO: 19353 - DNA, 20 bp, Artificial Sequence
  chemically synthesized
agcaattggttatcactaga

SEQ ID NO: 19354 - DNA, 20 bp, Artificial Sequence
  chemically synthesized
aaatcttactctacattcct

SEQ ID NO: 19355 - DNA, 20 bp, Artificial Sequence
  chemically synthesized
ctctacattcctcagtcacc

SEQ ID NO: 19356 - DNA, 20 bp, Artificial Sequence
  chemically synthesized
cattcctcagtcacctagtg

SEQ ID NO: 19357 - DNA, 20 bp, Artificial Sequence
  chemically synthesized
attcctcagtcacctagtga

SEQ ID NO: 19358 - DNA, 20 bp, Artificial Sequence
  chemically synthesized
aaggtgtactgatccacctt

SEQ ID NO: 19359 - DNA, 20 bp, Artificial Sequence
  chemically synthesized
aggtgtactgatccaccttc

SEQ ID NO: 19360 - DNA, 20 bp, Artificial Sequence
  chemically synthesized
gtgtactgatccaccttcag

SEQ ID NO: 19361 - DNA, 20 bp, Artificial Sequence
  chemically synthesized
tactgatccaccttcaggag

SEQ ID NO: 19362 - DNA, 20 bp, Artificial Sequence
  chemically synthesized
ggagcagtacaaacctttat

SEQ ID NO: 19363 - DNA, 20 bp, Artificial Sequence
  chemically synthesized
acctttattggtcacttccc

SEQ ID NO: 19364 - DNA, 20 bp, Artificial Sequence
  chemically synthesized
tcacttcccaagcaacttca

SEQ ID NO: 19365 - DNA, 20 bp, Artificial Sequence
  chemically synthesized
acttcccaagcaacttcaaa

SEQ ID NO: 19366 - DNA, 20 bp, Artificial Sequence
  chemically synthesized
tcccaagcaacttcaaagag

SEQ ID NO: 19367 - DNA, 20 bp, Artificial Sequence
  chemically synthesized
aaagagcagtaactcctcca

SEQ ID NO: 19368 - DNA, 20 bp, Artificial Sequence
  chemically synthesized
aagagcagtaactcctccac

SEQ ID NO: 19369 - DNA, 20 bp, Artificial Sequence
  chemically synthesized
agcagtaactcctccacagg

SEQ ID NO: 19370 - DNA, 20 bp, Artificial Sequence
  chemically synthesized
gaagttcttcgacttcccac

SEQ ID NO: 19371 - DNA, 20 bp, Artificial Sequence
  chemically synthesized
aagttcttcgacttcccact

SEQ ID NO: 19372 - DNA, 20 bp, Artificial Sequence
  chemically synthesized
agttcttcgacttcccactg

SEQ ID NO: 19373 - DNA, 20 bp, Artificial Sequence
  chemically synthesized
tcttcgacttcccactgggg

SEQ ID NO: 19374 - DNA, 20 bp, Artificial Sequence
  chemically synthesized
tcccactggggaagcccacc

SEQ ID NO: 19375 - DNA, 20 bp, Artificial Sequence
  chemically synthesized
cccactggggaagcccaccc

SEQ ID NO: 19376 - DNA, 20 bp, Artificial Sequence
  chemically synthesized
ccactggggaagcccaccca

SEQ ID NO: 19377 - DNA, 20 bp, Artificial Sequence
  chemically synthesized
aagcccacccagggatgtta

SEQ ID NO: 19378 - DNA, 20 bp, Artificial Sequence
  chemically synthesized
gcccacccagggatgttaca

SEQ ID NO: 19379 - DNA, 20 bp, Artificial Sequence
  chemically synthesized
ccacccagggatgttacaga

SEQ ID NO: 19380 - DNA, 20 bp, Artificial Sequence
  chemically synthesized
cacccagggatgttacagag

SEQ ID NO: 19381 - DNA, 20 bp, Artificial Sequence
  chemically synthesized
acccagggatgttacagaga

SEQ ID NO: 19382 - DNA, 20 bp, Artificial Sequence
  chemically synthesized
gggatgttacagagagggat

SEQ ID NO: 19383 - DNA, 20 bp, Artificial Sequence
  chemically synthesized
acagagagggatcggcctcg

SEQ ID NO: 19384 - DNA, 20 bp, Artificial Sequence
  chemically synthesized
gcctcgaagcattcttctta

SEQ ID NO: 19385 - DNA, 20 bp, Artificial Sequence
  chemically synthesized
cattcttcttacagtcctcc

SEQ ID NO: 19386 - DNA, 20 bp, Artificial Sequence
  chemically synthesized
ctttgaattcctgtttcaat

SEQ ID NO: 19387 - DNA, 20 bp, Artificial Sequence
  chemically synthesized
gtttcaattagttgtaatcc

SEQ ID NO: 19388 - DNA, 20 bp, Artificial Sequence
  chemically synthesized
tttcaattagttgtaatccc

SEQ ID NO: 19389 - DNA, 20 bp, Artificial Sequence
  chemically synthesized
tcaattagttgtaatcccag

SEQ ID NO: 19390 - DNA, 20 bp, Artificial Sequence
  chemically synthesized
attagttgtaatcccaggag

SEQ ID NO: 19391 - DNA, 20 bp, Artificial Sequence
  chemically synthesized
tagttgtaatcccaggagaa

SEQ ID NO: 19392 - DNA, 20 bp, Artificial Sequence
  chemically synthesized
tcccaggagaagagaactta

SEQ ID NO: 19393 - DNA, 20 bp, Artificial Sequence
  chemically synthesized
cccaggagaagagaacttac

SEQ ID NO: 19394 - DNA, 20 bp, Artificial Sequence
  chemically synthesized
aagagaacttacaggcacaa

SEQ ID NO: 19395 - DNA, 20 bp, Artificial Sequence
  chemically synthesized
gaacttacaggcacaaaagt

SEQ ID NO: 19396 - DNA, 20 bp, Artificial Sequence
  chemically synthesized
acttacaggcacaaaagtta

SEQ ID NO: 19397 - DNA, 20 bp, Artificial Sequence
  chemically synthesized
acaggcacaaaagttagagt

SEQ ID NO: 19398 - DNA, 20 bp, Artificial Sequence
  chemically synthesized
ggcacaaaagttagagttgg

SEQ ID NO: 19399 - DNA, 20 bp, Artificial Sequence
  chemically synthesized
cacaaaagttagagttggta

SEQ ID NO: 19400 - DNA, 20 bp, Artificial Sequence
  chemically synthesized
gttagagttggtagagttac

SEQ ID NO: 19401 - DNA, 20 bp, Artificial Sequence
  chemically synthesized
ttagagttggtagagttacc

SEQ ID NO: 19402 - DNA, 20 bp, Artificial Sequence
  chemically synthesized
ttggtagagttaccaggctt

SEQ ID NO: 19403 - DNA, 20 bp, Artificial Sequence
  chemically synthesized
gtagagttaccaggctttgg

SEQ ID NO: 19404 - DNA, 20 bp, Artificial Sequence
  chemically synthesized
caggctttggtagcttctct

SEQ ID NO: 19405 - DNA, 20 bp, Artificial Sequence
  chemically synthesized
aggctttggtagcttctctt

SEQ ID NO: 19406 - DNA, 20 bp, Artificial Sequence
  chemically synthesized
agcttctcttgggaataaac

SEQ ID NO: 19407 - DNA, 20 bp, Artificial Sequence
  chemically synthesized
ttctcttgggaataaactag

SEQ ID NO: 19408 - DNA, 20 bp, Artificial Sequence
  chemically synthesized
gaaatcttatgtgcttccca

SEQ ID NO: 19409 - DNA, 20 bp, Artificial Sequence
  chemically synthesized
tgtgcttcccacagaattcc

SEQ ID NO: 19410 - DNA, 20 bp, Artificial Sequence
  chemically synthesized
gcttcccacagaattcctgg

SEQ ID NO: 19411 - DNA, 20 bp, Artificial Sequence
  chemically synthesized
tcccacagaattcctggtgg

SEQ ID NO: 19412 - DNA, 20 bp, Artificial Sequence
  chemically synthesized
cccacagaattcctggtgga

SEQ ID NO: 19413 - DNA, 20 bp, Artificial Sequence
  chemically synthesized
cacagaattcctggtggaag

SEQ ID NO: 19414 - DNA, 20 bp, Artificial Sequence
  chemically synthesized
acagaattcctggtggaagg

SEQ ID NO: 19415 - DNA, 20 bp, Artificial Sequence
  chemically synthesized
cctcctctttctcgtctttc

SEQ ID NO: 19416 - DNA, 20 bp, Artificial Sequence
  chemically synthesized
ctcctctttctcgtctttct

SEQ ID NO: 19417 - DNA, 20 bp, Artificial Sequence
  chemically synthesized
ctctttctcgtctttctggg

SEQ ID NO: 19418 - DNA, 20 bp, Artificial Sequence
  chemically synthesized
tctttctcgtctttctgggc

SEQ ID NO: 19419 - DNA, 20 bp, Artificial Sequence
  chemically synthesized
tctttctgggcaggtattgt

SEQ ID NO: 19420 - DNA, 20 bp, Artificial Sequence
  chemically synthesized
ctttctgggcaggtattgtg

SEQ ID NO: 19421 - DNA, 20 bp, Artificial Sequence
  chemically synthesized
ctgggcaggtattgtgagga

SEQ ID NO: 19422 - DNA, 20 bp, Artificial Sequence
  chemically synthesized
gaggacggtatctgccctgt

SEQ ID NO: 19423 - DNA, 20 bp, Artificial Sequence
  chemically synthesized
ccgtcctcacaatacctgcc

SEQ ID NO: 19424 - DNA, 20 bp, Artificial Sequence
  chemically synthesized
cctcacaatacctgcccaga

SEQ ID NO: 19425 - DNA, 20 bp, Artificial Sequence
  chemically synthesized
caatacctgcccagaaagac

SEQ ID NO: 19426 - DNA, 20 bp, Artificial Sequence
  chemically synthesized
acctgcccagaaagacgaga

SEQ ID NO: 19427 - DNA, 20 bp, Artificial Sequence
  chemically synthesized
ctgcccagaaagacgagaaa

SEQ ID NO: 19428 - DNA, 20 bp, Artificial Sequence
  chemically synthesized
tgcccagaaagacgagaaag

SEQ ID NO: 19429 - DNA, 20 bp, Artificial Sequence
  chemically synthesized
cccagaaagacgagaaagag

SEQ ID NO: 19430 - DNA, 20 bp, Artificial Sequence
  chemically synthesized
ccagaaagacgagaaagagg

SEQ ID NO: 19431 - DNA, 20 bp, Artificial Sequence
  chemically synthesized
gaaagacgagaaagaggagg

SEQ ID NO: 19432 - DNA, 20 bp, Artificial Sequence
  chemically synthesized
ggaagaattcctccttccac

SEQ ID NO: 19433 - DNA, 20 bp, Artificial Sequence
  chemically synthesized
gaagaattcctccttccacc

SEQ ID NO: 19434 - DNA, 20 bp, Artificial Sequence
  chemically synthesized
tccttccaccaggaattctg

SEQ ID NO: 19435 - DNA, 20 bp, Artificial Sequence
  chemically synthesized
ccttccaccaggaattctgt

SEQ ID NO: 19436 - DNA, 20 bp, Artificial Sequence
  chemically synthesized
tccaccaggaattctgtggg

SEQ ID NO: 19437 - DNA, 20 bp, Artificial Sequence
  chemically synthesized
gaattctgtgggaagcacat

SEQ ID NO: 19438 - DNA, 20 bp, Artificial Sequence
  chemically synthesized
cacataagatttcatgctac

SEQ ID NO: 19439 - DNA, 20 bp, Artificial Sequence
  chemically synthesized
catgctactagtttattccc

SEQ ID NO: 19440 - DNA, 20 bp, Artificial Sequence
  chemically synthesized
tgctactagtttattcccaa

SEQ ID NO: 19441 - DNA, 20 bp, Artificial Sequence
  chemically synthesized
tactagtttattcccaagag

SEQ ID NO: 19442 - DNA, 20 bp, Artificial Sequence
  chemically synthesized
attcccaagagaagctacca

SEQ ID NO: 19443 - DNA, 20 bp, Artificial Sequence
  chemically synthesized
caagagaagctaccaaagcc

SEQ ID NO: 19444 - DNA, 20 bp, Artificial Sequence
  chemically synthesized
actctaacttttgtgcctgt

SEQ ID NO: 19445 - DNA, 20 bp, Artificial Sequence
  chemically synthesized
gcctgtaagttctcttctcc

SEQ ID NO: 19446 - DNA, 20 bp, Artificial Sequence
  chemically synthesized
cctgtaagttctcttctcct

SEQ ID NO: 19447 - DNA, 20 bp, Artificial Sequence
  chemically synthesized
gggattacaactaattgaaa

SEQ ID NO: 19448 - DNA, 20 bp, Artificial Sequence
  chemically synthesized
ggattacaactaattgaaac

SEQ ID NO: 19449 - DNA, 20 bp, Artificial Sequence
  chemically synthesized
ctaattgaaacaggaattca

SEQ ID NO: 19450 - DNA, 20 bp, Artificial Sequence
  chemically synthesized
taattgaaacaggaattcaa

SEQ ID NO: 19451 - DNA, 20 bp, Artificial Sequence
  chemically synthesized
attgaaacaggaattcaaag

SEQ ID NO: 19452 - DNA, 20 bp, Artificial Sequence
  chemically synthesized
acaggaattcaaaggagtct

SEQ ID NO: 19453 - DNA, 20 bp, Artificial Sequence
  chemically synthesized
aggaattcaaaggagtctcg

SEQ ID NO: 19454 - DNA, 20 bp, Artificial Sequence
  chemically synthesized
ggaattcaaaggagtctcgg

SEQ ID NO: 19455 - DNA, 20 bp, Artificial Sequence
  chemically synthesized
aaggagtctcggaggactgt

SEQ ID NO: 19456 - DNA, 20 bp, Artificial Sequence
  chemically synthesized
gagtctcggaggactgtaag

SEQ ID NO: 19457 - DNA, 20 bp, Artificial Sequence
  chemically synthesized
gactgtaagaagaatgcttc

SEQ ID NO: 19458 - DNA, 20 bp, Artificial Sequence
  chemically synthesized
actgtaagaagaatgcttcg

SEQ ID NO: 19459 - DNA, 20 bp, Artificial Sequence
  chemically synthesized
atccctctctgtaacatccc

SEQ ID NO: 19460 - DNA, 20 bp, Artificial Sequence
  chemically synthesized
tccctctctgtaacatccct

SEQ ID NO: 19461 - DNA, 20 bp, Artificial Sequence
  chemically synthesized
ctctctgtaacatccctggg

SEQ ID NO: 19462 - DNA, 20 bp, Artificial Sequence
  chemically synthesized
tctctgtaacatccctgggt

SEQ ID NO: 19463 - DNA, 20 bp, Artificial Sequence
  chemically synthesized
catccctgggtgggcttccc

SEQ ID NO: 19464 - DNA, 20 bp, Artificial Sequence
  chemically synthesized
ccctgggtgggcttccccag

SEQ ID NO: 19465 - DNA, 20 bp, Artificial Sequence
  chemically synthesized
cctgggtgggcttccccagt

SEQ ID NO: 19466 - DNA, 20 bp, Artificial Sequence
  chemically synthesized
gggtgggcttccccagtggg

SEQ ID NO: 19467 - DNA, 20 bp, Artificial Sequence
  chemically synthesized
gcttccccagtgggaagtcg

SEQ ID NO: 19468 - DNA, 20 bp, Artificial Sequence
  chemically synthesized
ggaagtcgaagaacttcctg

SEQ ID NO: 19469 - DNA, 20 bp, Artificial Sequence
  chemically synthesized
aagtcgaagaacttcctgtg

SEQ ID NO: 19470 - DNA, 20 bp, Artificial Sequence
  chemically synthesized
agtcgaagaacttcctgtgg

SEQ ID NO: 19471 - DNA, 20 bp, Artificial Sequence
  chemically synthesized
tcgaagaacttcctgtggag

SEQ ID NO: 19472 - DNA, 20 bp, Artificial Sequence
  chemically synthesized
ggaggagttactgctctttg

SEQ ID NO: 19473 - DNA, 20 bp, Artificial Sequence
  chemically synthesized
tactgctctttgaagttgct

SEQ ID NO: 19474 - DNA, 20 bp, Artificial Sequence
  chemically synthesized
actgctctttgaagttgctt

SEQ ID NO: 19475 - DNA, 20 bp, Artificial Sequence
  chemically synthesized
gctctttgaagttgcttggg

SEQ ID NO: 19476 - DNA, 20 bp, Artificial Sequence
  chemically synthesized
tgcttgggaagtgaccaata

SEQ ID NO: 19477 - DNA, 20 bp, Artificial Sequence
  chemically synthesized
gcttgggaagtgaccaataa

SEQ ID NO: 19478 - DNA, 20 bp, Artificial Sequence
  chemically synthesized
aaaggtttgtactgctcctg

SEQ ID NO: 19479 - DNA, 20 bp, Artificial Sequence
  chemically synthesized
aaggtttgtactgctcctga

SEQ ID NO: 19480 - DNA, 20 bp, Artificial Sequence
  chemically synthesized
gtttgtactgctcctgaagg

SEQ ID NO: 19481 - DNA, 20 bp, Artificial Sequence
  chemically synthesized
tactgctcctgaaggtggat

SEQ ID NO: 19482 - DNA, 20 bp, Artificial Sequence
  chemically synthesized
gtggatcagtacaccttcac

SEQ ID NO: 19483 - DNA, 20 bp, Artificial Sequence
  chemically synthesized
tggatcagtacaccttcact

SEQ ID NO: 19484 - DNA, 20 bp, Artificial Sequence
  chemically synthesized
tacaccttcactaggtgact

SEQ ID NO: 19485 - DNA, 20 bp, Artificial Sequence
  chemically synthesized
acaccttcactaggtgactg

SEQ ID NO: 19486 - DNA, 20 bp, Artificial Sequence
  chemically synthesized
cactaggtgactgaggaatg

SEQ ID NO: 19487 - DNA, 20 bp, Artificial Sequence
  chemically synthesized
ctaggtgactgaggaatgta

SEQ ID NO: 19488 - DNA, 20 bp, Artificial Sequence
  chemically synthesized
gtgactgaggaatgtagagt

SEQ ID NO: 19489 - DNA, 20 bp, Artificial Sequence
  chemically synthesized
gaatgtagagtaagatttca

SEQ ID NO: 19490 - DNA, 20 bp, Artificial Sequence
  chemically synthesized
agatttcacagataactctc

SEQ ID NO: 19491 - DNA, 20 bp, Artificial Sequence
  chemically synthesized
ctctagtgataaccaattgc

SEQ ID NO: 19492 - DNA, 20 bp, Artificial Sequence
  chemically synthesized
agtgataaccaattgctagt

SEQ ID NO: 19493 - DNA, 20 bp, Artificial Sequence
  chemically synthesized
ataaccaattgctagtgagt

SEQ ID NO: 19494 - DNA, 20 bp, Artificial Sequence
  chemically synthesized
taaccaattgctagtgagtg

SEQ ID NO: 19495 - DNA, 20 bp, Artificial Sequence
  chemically synthesized
caattgctagtgagtgagga

SEQ ID NO: 19496 - DNA, 20 bp, Artificial Sequence
  chemically synthesized
gagtgaggaaagcatttaaa

SEQ ID NO: 19497 - DNA, 20 bp, Artificial Sequence
  chemically synthesized
atttaaacggaatatatatt

SEQ ID NO: 19498 - DNA, 20 bp, Artificial Sequence
  chemically synthesized
tttaaacggaatatatattt

SEQ ID NO: 19499 - DNA, 20 bp, Artificial Sequence
  chemically synthesized
tttaaccttgtctattacaa

SEQ ID NO: 19500 - DNA, 20 bp, Artificial Sequence
  chemically synthesized
ttaaccttgtctattacaac

SEQ ID NO: 19501 - DNA, 20 bp, Artificial Sequence
  chemically synthesized
attacaacaggctatgaata

SEQ ID NO: 19502 - DNA, 20 bp, Artificial Sequence
  chemically synthesized
acagacttgtgtatgtgttg

SEQ ID NO: 19503 - DNA, 20 bp, Artificial Sequence
  chemically synthesized
agacttgtgtatgtgttgaa

SEQ ID NO: 19504 - DNA, 20 bp, Artificial Sequence
  chemically synthesized
gacttgtgtatgtgttgaag

SEQ ID NO: 19505 - DNA, 20 bp, Artificial Sequence
  chemically synthesized
acttgtgtatgtgttgaaga

SEQ ID NO: 19506 - DNA, 20 bp, Artificial Sequence
  chemically synthesized
ttgtgtatgtgttgaagagg

SEQ ID NO: 19507 - DNA, 20 bp, Artificial Sequence
  chemically synthesized
gtatgtgttgaagagggaga

SEQ ID NO: 19508 - DNA, 20 bp, Artificial Sequence
  chemically synthesized
agggagaaagttgaaaatat

SEQ ID NO: 19509 - DNA, 20 bp, Artificial Sequence
  chemically synthesized
gaaaatattagccattgcca

SEQ ID NO: 19510 - DNA, 20 bp, Artificial Sequence
  chemically synthesized
aaatccatattatgacaaca

SEQ ID NO: 19511 - DNA, 20 bp, Artificial Sequence
  chemically synthesized
tatgacaacatagaaataaa

SEQ ID NO: 19512 - DNA, 20 bp, Artificial Sequence
  chemically synthesized
ttttgttttaaaatttttct

SEQ ID NO: 19513 - DNA, 20 bp, Artificial Sequence
  chemically synthesized
taaaatttttctcagcaaaa

SEQ ID NO: 19514 - DNA, 20 bp, Artificial Sequence
  chemically synthesized
tataattaaacattttattt

SEQ ID NO: 19515 - DNA, 20 bp, Artificial Sequence
  chemically synthesized
ataattaaacattttatttt

SEQ ID NO: 19516 - DNA, 20 bp, Artificial Sequence
  chemically synthesized
attaaacattttattttagg

SEQ ID NO: 19517 - DNA, 20 bp, Artificial Sequence
  chemically synthesized
taggaagatgtatatgtgat

SEQ ID NO: 19518 - DNA, 20 bp, Artificial Sequence
  chemically synthesized
gatgtatatgtgattagaac

SEQ ID NO: 19519 - DNA, 20 bp, Artificial Sequence
  chemically synthesized
tatatgtgattagaaccagt

SEQ ID NO: 19520 - DNA, 20 bp, Artificial Sequence
  chemically synthesized
acctcaactctacattctgt

SEQ ID NO: 19521 - DNA, 20 bp, Artificial Sequence
  chemically synthesized
agtaattatatgaaatgctt

SEQ ID NO: 19522 - DNA, 20 bp, Artificial Sequence
  chemically synthesized
gaatgtttcatattcacaat

SEQ ID NO: 19523 - DNA, 20 bp, Artificial Sequence
  chemically synthesized
tttcatattcacaattagct

SEQ ID NO: 19524 - DNA, 20 bp, Artificial Sequence
  chemically synthesized
ttggaattaatgttttaatt

SEQ ID NO: 19525 - DNA, 20 bp, Artificial Sequence
  chemically synthesized
tggaattaatgttttaattc

SEQ ID NO: 19526 - DNA, 20 bp, Artificial Sequence
  chemically synthesized
gaattaatgttttaattcag

SEQ ID NO: 19527 - DNA, 20 bp, Artificial Sequence
  chemically synthesized
ttaattcaggagcttctcaa

SEQ ID NO: 19528 - DNA, 20 bp, Artificial Sequence
  chemically synthesized
taattcaggagcttctcaaa

SEQ ID NO: 19529 - DNA, 20 bp, Artificial Sequence
  chemically synthesized
gcaaaatactgtgctccttt

SEQ ID NO: 19530 - DNA, 20 bp, Artificial Sequence
  chemically synthesized
ctgtgctcctttcagaatga

SEQ ID NO: 19531 - DNA, 20 bp, Artificial Sequence
  chemically synthesized
tcttcaatgctatgcttatg

SEQ ID NO: 19532 - DNA, 20 bp, Artificial Sequence
  chemically synthesized
cttcaatgctatgcttatgt

SEQ ID NO: 19533 - DNA, 20 bp, Artificial Sequence
  chemically synthesized
tatgtaggaattataaaata

SEQ ID NO: 19534 - DNA, 20 bp, Artificial Sequence
  chemically synthesized
aaattgataaaacaatttgc

SEQ ID NO: 19535 - DNA, 20 bp, Artificial Sequence
  chemically synthesized
tgataaaacaatttgcgagt

SEQ ID NO: 19536 - DNA, 20 bp, Artificial Sequence
  chemically synthesized
gataaaacaatttgcgagtg

SEQ ID NO: 19537 - DNA, 20 bp, Artificial Sequence
  chemically synthesized
aggtataacctcatctgtgc

SEQ ID NO: 19538 - DNA, 20 bp, Artificial Sequence
  chemically synthesized
ggtataacctcatctgtgct

SEQ ID NO: 19539 - DNA, 20 bp, Artificial Sequence
  chemically synthesized
taacctcatctgtgctgggt

SEQ ID NO: 19540 - DNA, 20 bp, Artificial Sequence
  chemically synthesized
acctcatctgtgctgggtaa

SEQ ID NO: 19541 - DNA, 20 bp, Artificial Sequence
  chemically synthesized
tcatctgtgctgggtaagag

SEQ ID NO: 19542 - DNA, 20 bp, Artificial Sequence
  chemically synthesized
catctgtgctgggtaagaga

SEQ ID NO: 19543 - DNA, 20 bp, Artificial Sequence
  chemically synthesized
tgtgctgggtaagagaaggc

SEQ ID NO: 19544 - DNA, 20 bp, Artificial Sequence
  chemically synthesized
gtgctgggtaagagaaggca

SEQ ID NO: 19545 - DNA, 20 bp, Artificial Sequence
  chemically synthesized
ctgggtaagagaaggcaagg

SEQ ID NO: 19546 - DNA, 20 bp, Artificial Sequence
  chemically synthesized
gggtaagagaaggcaaggta

SEQ ID NO: 19547 - DNA, 20 bp, Artificial Sequence
  chemically synthesized
tgtaaatgattttgaaaata

SEQ ID NO: 19548 - DNA, 20 bp, Artificial Sequence
  chemically synthesized
aattataaaacaattccttg

SEQ ID NO: 19549 - DNA, 20 bp, Artificial Sequence
  chemically synthesized
attataaaacaattccttgt

SEQ ID NO: 19550 - DNA, 20 bp, Artificial Sequence
  chemically synthesized
ccttgtgggtttatactctc

SEQ ID NO: 19551 - DNA, 20 bp, Artificial Sequence
  chemically synthesized
gtttatactctctagtttaa

SEQ ID NO: 19552 - DNA, 20 bp, Artificial Sequence
  chemically synthesized
ctctctagtttaaaagtgtc

SEQ ID NO: 19553 - DNA, 20 bp, Artificial Sequence
  chemically synthesized
taaaagtgtcaagactattg

SEQ ID NO: 19554 - DNA, 20 bp, Artificial Sequence
  chemically synthesized
aaaagtgtcaagactattga

SEQ ID NO: 19555 - DNA, 20 bp, Artificial Sequence
  chemically synthesized
caagactattgaaggaacat

SEQ ID NO: 19556 - DNA, 20 bp, Artificial Sequence
  chemically synthesized
ctattgaaggaacattagca

SEQ ID NO: 19557 - DNA, 20 bp, Artificial Sequence
  chemically synthesized
aaggaacattagcaaagaaa

SEQ ID NO: 19558 - DNA, 20 bp, Artificial Sequence
  chemically synthesized
cattagcaaagaaaaagtca

SEQ ID NO: 19559 - DNA, 20 bp, Artificial Sequence
  chemically synthesized
aagaaaaagtcatggttttg

SEQ ID NO: 19560 - DNA, 20 bp, Artificial Sequence
  chemically synthesized
agaaaaagtcatggttttga

SEQ ID NO: 19561 - DNA, 20 bp, Artificial Sequence
  chemically synthesized
aagtcatggttttgaaggct

SEQ ID NO: 19562 - DNA, 20 bp, Artificial Sequence
  chemically synthesized
ttttgaaggctgagttcctc

SEQ ID NO: 19563 - DNA, 20 bp, Artificial Sequence
  chemically synthesized
ctgagttcctcaagatcttg

SEQ ID NO: 19564 - DNA, 20 bp, Artificial Sequence
  chemically synthesized
cctcaagatcttgaagaatc

SEQ ID NO: 19565 - DNA, 20 bp, Artificial Sequence
  chemically synthesized
gaatcaagccaactgattgc

SEQ ID NO: 19566 - DNA, 20 bp, Artificial Sequence
  chemically synthesized
aatcaagccaactgattgct

SEQ ID NO: 19567 - DNA, 20 bp, Artificial Sequence
  chemically synthesized
ccaactgattgctgggtaaa

SEQ ID NO: 19568 - DNA, 20 bp, Artificial Sequence
  chemically synthesized
actgattgctgggtaaatgg

SEQ ID NO: 19569 - DNA, 20 bp, Artificial Sequence
  chemically synthesized
ttactatttcatgtctatta

SEQ ID NO: 19570 - DNA, 20 bp, Artificial Sequence
  chemically synthesized
atgtctattacagtaatcta

SEQ ID NO: 19571 - DNA, 20 bp, Artificial Sequence
  chemically synthesized
tgtctattacagtaatctaa

SEQ ID NO: 19572 - DNA, 20 bp, Artificial Sequence
  chemically synthesized
aaaggatctgaaataataac

SEQ ID NO: 19573 - DNA, 20 bp, Artificial Sequence
  chemically synthesized
gatatattacttccttcttt

SEQ ID NO: 19574 - DNA, 20 bp, Artificial Sequence
  chemically synthesized
acttccttcttttggctaat

SEQ ID NO: 19575 - DNA, 20 bp, Artificial Sequence
  chemically synthesized
ttccttcttttggctaatca

SEQ ID NO: 19576 - DNA, 20 bp, Artificial Sequence
  chemically synthesized
ttcttttggctaatcagagc

SEQ ID NO: 19577 - DNA, 20 bp, Artificial Sequence
  chemically synthesized
aaaattaaatgcattatata

SEQ ID NO: 19578 - DNA, 20 bp, Artificial Sequence
  chemically synthesized
tggcatgcattctgaaaaat

SEQ ID NO: 19579 - DNA, 20 bp, Artificial Sequence
  chemically synthesized
caccttatactaactgttca

SEQ ID NO: 19580 - DNA, 20 bp, Artificial Sequence
  chemically synthesized
attcataaaatcaaaattaa

SEQ ID NO: 19581 - DNA, 20 bp, Artificial Sequence
  chemically synthesized
aaaagtcaattttgcctatg

SEQ ID NO: 19582 - DNA, 20 bp, Artificial Sequence
  chemically synthesized
agtcaattttgcctatgtag

SEQ ID NO: 19583 - DNA, 20 bp, Artificial Sequence
  chemically synthesized
caattttgcctatgtagaag

SEQ ID NO: 19584 - DNA, 20 bp, Artificial Sequence
  chemically synthesized
tttgcctatgtagaagtgga

SEQ ID NO: 19585 - DNA, 20 bp, Artificial Sequence
  chemically synthesized
gaagtggacagaatgcatat

SEQ ID NO: 19586 - DNA, 20 bp, Artificial Sequence
  chemically synthesized
agtggacagaatgcatataa

SEQ ID NO: 19587 - DNA, 20 bp, Artificial Sequence
  chemically synthesized
agaatgcatataagagaaca

SEQ ID NO: 19588 - DNA, 20 bp, Artificial Sequence
  chemically synthesized
gcatataagagaacaaagca

SEQ ID NO: 19589 - DNA, 20 bp, Artificial Sequence
  chemically synthesized
aagcacggtcttattctctg

SEQ ID NO: 19590 - DNA, 20 bp, Artificial Sequence
  chemically synthesized
cggtcttattctctgtagtt

SEQ ID NO: 19591 - DNA, 20 bp, Artificial Sequence
  chemically synthesized
cttattctctgtagtttagt

SEQ ID NO: 19592 - DNA, 20 bp, Artificial Sequence
  chemically synthesized
ttctctgtagtttagtgaga

SEQ ID NO: 19593 - DNA, 20 bp, Artificial Sequence
  chemically synthesized
tagtttagtgagaaagaatc

SEQ ID NO: 19594 - DNA, 20 bp, Artificial Sequence
  chemically synthesized
agtttagtgagaaagaatct

SEQ ID NO: 19595 - DNA, 20 bp, Artificial Sequence
  chemically synthesized
tttagtgagaaagaatctag

SEQ ID NO: 19596 - DNA, 20 bp, Artificial Sequence
  chemically synthesized
ttagtgagaaagaatctagg

SEQ ID NO: 19597 - DNA, 20 bp, Artificial Sequence
  chemically synthesized
tgagaaagaatctaggagga

SEQ ID NO: 19598 - DNA, 20 bp, Artificial Sequence
  chemically synthesized
ggaggacagaaaccttatta

SEQ ID NO: 19599 - DNA, 20 bp, Artificial Sequence
  chemically synthesized
aggacagaaaccttattaca

SEQ ID NO: 19600 - DNA, 20 bp, Artificial Sequence
  chemically synthesized
acagaaaccttattacagag

SEQ ID NO: 19601 - DNA, 20 bp, Artificial Sequence
  chemically synthesized
aaccttattacagagaagtg

SEQ ID NO: 19602 - DNA, 20 bp, Artificial Sequence
  chemically synthesized
ttattttgtattcttttcct

SEQ ID NO: 19603 - DNA, 20 bp, Artificial Sequence
  chemically synthesized
attttgtattcttttcctca

SEQ ID NO: 19604 - DNA, 20 bp, Artificial Sequence
  chemically synthesized
agagatctttatcctgaaat

SEQ ID NO: 19605 - DNA, 20 bp, Artificial Sequence
  chemically synthesized
tgtttttaatgtcctttttc

SEQ ID NO: 19606 - DNA, 20 bp, Artificial Sequence
  chemically synthesized
tttctagtcacaaatttttc

SEQ ID NO: 19607 - DNA, 20 bp, Artificial Sequence
  chemically synthesized
agtcacaaatttttccagtc

SEQ ID NO: 19608 - DNA, 20 bp, Artificial Sequence
  chemically synthesized
ccagtttttaaatatgccca

SEQ ID NO: 19609 - DNA, 20 bp, Artificial Sequence
  chemically synthesized
ttaaatatgcccaaagttcc

SEQ ID NO: 19610 - DNA, 20 bp, Artificial Sequence
  chemically synthesized
taaatatgcccaaagttcct

SEQ ID NO: 19611 - DNA, 20 bp, Artificial Sequence
  chemically synthesized
atgcccaaagttcctgggaa

SEQ ID NO: 19612 - DNA, 20 bp, Artificial Sequence
  chemically synthesized
tctctatcacatgtgaatcc

SEQ ID NO: 19613 - DNA, 20 bp, Artificial Sequence
  chemically synthesized
tctatcacatgtgaatcccg

SEQ ID NO: 19614 - DNA, 20 bp, Artificial Sequence
  chemically synthesized
cggagtatgccttgaaataa

SEQ ID NO: 19615 - DNA, 20 bp, Artificial Sequence
  chemically synthesized
cttgaaataaaagttttctc

SEQ ID NO: 19616 - DNA, 20 bp, Artificial Sequence
  chemically synthesized
tgaaataaaagttttctcta

SEQ ID NO: 19617 - DNA, 20 bp, Artificial Sequence
  chemically synthesized
aaataaaagttttctctaga

SEQ ID NO: 19618 - DNA, 20 bp, Artificial Sequence
  chemically synthesized
taaaagttttctctagagag

SEQ ID NO: 19619 - DNA, 20 bp, Artificial Sequence
  chemically synthesized
aaaagttttctctagagagt

SEQ ID NO: 19620 - DNA, 20 bp, Artificial Sequence
  chemically synthesized
agttttctctagagagtggg

SEQ ID NO: 19621 - DNA, 20 bp, Artificial Sequence
  chemically synthesized
gttttctctagagagtgggc

SEQ ID NO: 19622 - DNA, 20 bp, Artificial Sequence
  chemically synthesized
tttctctagagagtgggcag

SEQ ID NO: 19623 - DNA, 20 bp, Artificial Sequence
  chemically synthesized
tagagagtgggcaggagctc

SEQ ID NO: 19624 - DNA, 20 bp, Artificial Sequence
  chemically synthesized
agagagtgggcaggagctca

SEQ ID NO: 19625 - DNA, 20 bp, Artificial Sequence
  chemically synthesized
tgggcaggagctcaaggaca

SEQ ID NO: 19626 - DNA, 20 bp, Artificial Sequence
  chemically synthesized
agctcaaggacatagcttat

SEQ ID NO: 19627 - DNA, 20 bp, Artificial Sequence
  chemically synthesized
tcaaggacatagcttattgg

SEQ ID NO: 19628 - DNA, 20 bp, Artificial Sequence
  chemically synthesized
agcttattggtggataaaac

SEQ ID NO: 19629 - DNA, 20 bp, Artificial Sequence
  chemically synthesized
ttattggtggataaaactgg

SEQ ID NO: 19630 - DNA, 20 bp, Artificial Sequence
  chemically synthesized
tattggtggataaaactgga

SEQ ID NO: 19631 - DNA, 20 bp, Artificial Sequence
  chemically synthesized
attggtggataaaactggaa

SEQ ID NO: 19632 - DNA, 20 bp, Artificial Sequence
  chemically synthesized
taaaactggaagggacttgt

SEQ ID NO: 19633 - DNA, 20 bp, Artificial Sequence
  chemically synthesized
tggaagggacttgttagcac

SEQ ID NO: 19634 - DNA, 20 bp, Artificial Sequence
  chemically synthesized
ggaagggacttgttagcact

SEQ ID NO: 19635 - DNA, 20 bp, Artificial Sequence
  chemically synthesized
gacttgttagcactgggaat

SEQ ID NO: 19636 - DNA, 20 bp, Artificial Sequence
  chemically synthesized
gttagcactgggaatcagtc

SEQ ID NO: 19637 - DNA, 20 bp, Artificial Sequence
  chemically synthesized
agcactgggaatcagtccag

SEQ ID NO: 19638 - DNA, 20 bp, Artificial Sequence
  chemically synthesized
agtccagaagatctctgcac

SEQ ID NO: 19639 - DNA, 20 bp, Artificial Sequence
  chemically synthesized
ctgcacaagttcctgcacct

SEQ ID NO: 19640 - DNA, 20 bp, Artificial Sequence
  chemically synthesized
cacaagttcctgcacctgag

SEQ ID NO: 19641 - DNA, 20 bp, Artificial Sequence
  chemically synthesized
caagttcctgcacctgagca

SEQ ID NO: 19642 - DNA, 20 bp, Artificial Sequence
  chemically synthesized
catcatttaacaaacattaa

SEQ ID NO: 19643 - DNA, 20 bp, Artificial Sequence
  chemically synthesized
tcatttaacaaacattaatg

SEQ ID NO: 19644 - DNA, 20 bp, Artificial Sequence
  chemically synthesized
attaatggagcactgttacc

SEQ ID NO: 19645 - DNA, 20 bp, Artificial Sequence
  chemically synthesized
ttaatggagcactgttacct

SEQ ID NO: 19646 - DNA, 20 bp, Artificial Sequence
  chemically synthesized
gagcactgttacctgggcac

SEQ ID NO: 19647 - DNA, 20 bp, Artificial Sequence
  chemically synthesized
agcactgttacctgggcact

SEQ ID NO: 19648 - DNA, 20 bp, Artificial Sequence
  chemically synthesized
cctgggcactgggaacacgc

SEQ ID NO: 19649 - DNA, 20 bp, Artificial Sequence
  chemically synthesized
gggaacacgccagtgaaact

SEQ ID NO: 19650 - DNA, 20 bp, Artificial Sequence
  chemically synthesized
agtgaaactaagttatttta

SEQ ID NO: 19651 - DNA, 20 bp, Artificial Sequence
  chemically synthesized
tattttatggatcttataat

SEQ ID NO: 19652 - DNA, 20 bp, Artificial Sequence
  chemically synthesized
tttatggatcttataatcag

SEQ ID NO: 19653 - DNA, 20 bp, Artificial Sequence
  chemically synthesized
agtagcatgtgtgttgatct

SEQ ID NO: 19654 - DNA, 20 bp, Artificial Sequence
  chemically synthesized
gtagcatgtgtgttgatctc

SEQ ID NO: 19655 - DNA, 20 bp, Artificial Sequence
  chemically synthesized
tagcatgtgtgttgatctca

SEQ ID NO: 19656 - DNA, 20 bp, Artificial Sequence
  chemically synthesized
tgtgtgttgatctcagggtc

SEQ ID NO: 19657 - DNA, 20 bp, Artificial Sequence
  chemically synthesized
gttgatctcagggtctagaa

SEQ ID NO: 19658 - DNA, 20 bp, Artificial Sequence
  chemically synthesized
tcagggtctagaacagtgcc

SEQ ID NO: 19659 - DNA, 20 bp, Artificial Sequence
  chemically synthesized
ctagaacagtgcctggtaca

SEQ ID NO: 19660 - DNA, 20 bp, Artificial Sequence
  chemically synthesized
ggtacatagaaaatgctcaa

SEQ ID NO: 19661 - DNA, 20 bp, Artificial Sequence
  chemically synthesized
aaatttgtttttcaacccct

SEQ ID NO: 19662 - DNA, 20 bp, Artificial Sequence
  chemically synthesized
ttttctatcatttccctttc

SEQ ID NO: 19663 - DNA, 20 bp, Artificial Sequence
  chemically synthesized
tttctatcatttccctttca

SEQ ID NO: 19664 - DNA, 20 bp, Artificial Sequence
  chemically synthesized
ttctatcatttccctttcaa

SEQ ID NO: 19665 - DNA, 20 bp, Artificial Sequence
  chemically synthesized
tctatcatttccctttcaag

SEQ ID NO: 19666 - DNA, 20 bp, Artificial Sequence
  chemically synthesized
atcatttccctttcaagggg

SEQ ID NO: 19667 - DNA, 20 bp, Artificial Sequence
  chemically synthesized
tcatttccctttcaagggga

SEQ ID NO: 19668 - DNA, 20 bp, Artificial Sequence
  chemically synthesized
catttccctttcaaggggaa

SEQ ID NO: 19669 - DNA, 20 bp, Artificial Sequence
  chemically synthesized
ttccctttcaaggggaaggg

SEQ ID NO: 19670 - DNA, 20 bp, Artificial Sequence
  chemically synthesized
ggggaagggaagtgtttttg

SEQ ID NO: 19671 - DNA, 20 bp, Artificial Sequence
  chemically synthesized
ggaagggaagtgtttttgtg

SEQ ID NO: 19672 - DNA, 20 bp, Artificial Sequence
  chemically synthesized
aagggaagtgtttttgtgga

SEQ ID NO: 19673 - DNA, 20 bp, Artificial Sequence
  chemically synthesized
agggaagtgtttttgtggag

SEQ ID NO: 19674 - DNA, 20 bp, Artificial Sequence
  chemically synthesized
ccccacaatgtgatttacac

SEQ ID NO: 19675 - DNA, 20 bp, Artificial Sequence
  chemically synthesized
tctttattttaatattatca

SEQ ID NO: 19676 - DNA, 20 bp, Artificial Sequence
  chemically synthesized
attttaatattatcatagcc

SEQ ID NO: 19677 - DNA, 20 bp, Artificial Sequence
  chemically synthesized
aatattatcatagcctggta

SEQ ID NO: 19678 - DNA, 20 bp, Artificial Sequence
  chemically synthesized
atcatagcctggtatggttt

SEQ ID NO: 19679 - DNA, 20 bp, Artificial Sequence
  chemically synthesized
tatggtttgagattttcata

SEQ ID NO: 19680 - DNA, 20 bp, Artificial Sequence
  chemically synthesized
gtttgagattttcatataga

SEQ ID NO: 19681 - DNA, 20 bp, Artificial Sequence
  chemically synthesized
ctaataatacattgccacta

SEQ ID NO: 19682 - DNA, 20 bp, Artificial Sequence
  chemically synthesized
ttttacttccctgcatttca

SEQ ID NO: 19683 - DNA, 20 bp, Artificial Sequence
  chemically synthesized
tacttccctgcatttcatag

SEQ ID NO: 19684 - DNA, 20 bp, Artificial Sequence
  chemically synthesized
gcatttcatagtagtgatat

SEQ ID NO: 19685 - DNA, 20 bp, Artificial Sequence
  chemically synthesized
catttcatagtagtgatatg

SEQ ID NO: 19686 - DNA, 20 bp, Artificial Sequence
  chemically synthesized
agtagtgatatgaggtatct

SEQ ID NO: 19687 - DNA, 20 bp, Artificial Sequence
  chemically synthesized
tagtgatatgaggtatctta

SEQ ID NO: 19688 - DNA, 20 bp, Artificial Sequence
  chemically synthesized
gatcatgaatcccactcctc

SEQ ID NO: 19689 - DNA, 20 bp, Artificial Sequence
  chemically synthesized
aatcccactcctccagttca

SEQ ID NO: 19690 - DNA, 20 bp, Artificial Sequence
  chemically synthesized
tcccactcctccagttcata

SEQ ID NO: 19691 - DNA, 20 bp, Artificial Sequence
  chemically synthesized
tcatagagcaaattgattcg

SEQ ID NO: 19692 - DNA, 20 bp, Artificial Sequence
  chemically synthesized
atagagcaaattgattcgta

SEQ ID NO: 19693 - DNA, 20 bp, Artificial Sequence
  chemically synthesized
tagagcaaattgattcgtag

SEQ ID NO: 19694 - DNA, 20 bp, Artificial Sequence
  chemically synthesized
cgtagaggtatttaatgatc

SEQ ID NO: 19695 - DNA, 20 bp, Artificial Sequence
  chemically synthesized
gtatttaatgatcaagcaaa

SEQ ID NO: 19696 - DNA, 20 bp, Artificial Sequence
  chemically synthesized
tttaatgatcaagcaaatgg

SEQ ID NO: 19697 - DNA, 20 bp, Artificial Sequence
  chemically synthesized
taatgatcaagcaaatggca

SEQ ID NO: 19698 - DNA, 20 bp, Artificial Sequence
  chemically synthesized
gatcaagcaaatggcagagt

SEQ ID NO: 19699 - DNA, 20 bp, Artificial Sequence
  chemically synthesized
atcaagcaaatggcagagtt

SEQ ID NO: 19700 - DNA, 20 bp, Artificial Sequence
  chemically synthesized
gcaaatggcagagttaggac

SEQ ID NO: 19701 - DNA, 20 bp, Artificial Sequence
  chemically synthesized
caaatggcagagttaggacc

SEQ ID NO: 19702 - DNA, 20 bp, Artificial Sequence
  chemically synthesized
gcagagttaggaccaggatt

SEQ ID NO: 19703 - DNA, 20 bp, Artificial Sequence
  chemically synthesized
cagagttaggaccaggattt

SEQ ID NO: 19704 - DNA, 20 bp, Artificial Sequence
  chemically synthesized
ccaggatttaggtcttttcc

SEQ ID NO: 19705 - DNA, 20 bp, Artificial Sequence
  chemically synthesized
caggatttaggtcttttcca

SEQ ID NO: 19706 - DNA, 20 bp, Artificial Sequence
  chemically synthesized
tcacttttttactattatgt

SEQ ID NO: 19707 - DNA, 20 bp, Artificial Sequence
  chemically synthesized
agaattaaatattaaaacct

SEQ ID NO: 19708 - DNA, 20 bp, Artificial Sequence
  chemically synthesized
tattaaaacctcagttttca

SEQ ID NO: 19709 - DNA, 20 bp, Artificial Sequence
  chemically synthesized
attaaaacctcagttttcaa

SEQ ID NO: 19710 - DNA, 20 bp, Artificial Sequence
  chemically synthesized
ttttcaaaggaaatgtccta

SEQ ID NO: 19711 - DNA, 20 bp, Artificial Sequence
  chemically synthesized
aggaaatgtcctatagatga

SEQ ID NO: 19712 - DNA, 20 bp, Artificial Sequence
  chemically synthesized
gtcctatagatgaaagaaca

SEQ ID NO: 19713 - DNA, 20 bp, Artificial Sequence
  chemically synthesized
atgaaagaacacagtacttg

SEQ ID NO: 19714 - DNA, 20 bp, Artificial Sequence
  chemically synthesized
gaacacagtacttgcagtca

SEQ ID NO: 19715 - DNA, 20 bp, Artificial Sequence
  chemically synthesized
aacacagtacttgcagtcaa

SEQ ID NO: 19716 - DNA, 20 bp, Artificial Sequence
  chemically synthesized
gtacttgcagtcaaaggtct

SEQ ID NO: 19717 - DNA, 20 bp, Artificial Sequence
  chemically synthesized
atttctgaaactttctgaaa

SEQ ID NO: 19718 - DNA, 20 bp, Artificial Sequence
  chemically synthesized
gaaccccttaaactgaataa

SEQ ID NO: 19719 - DNA, 20 bp, Artificial Sequence
  chemically synthesized
aaaatgaatgttatactctc

SEQ ID NO: 19720 - DNA, 20 bp, Artificial Sequence
  chemically synthesized
agttatcttaccatgttttc

SEQ ID NO: 19721 - DNA, 20 bp, Artificial Sequence
  chemically synthesized
taccatgttttctggcaaac

SEQ ID NO: 19722 - DNA, 20 bp, Artificial Sequence
  chemically synthesized
accatgttttctggcaaaca

SEQ ID NO: 19723 - DNA, 20 bp, Artificial Sequence
  chemically synthesized
aaggaaatgtattcacatcc

SEQ ID NO: 19724 - DNA, 20 bp, Artificial Sequence
  chemically synthesized
attcacatccaagaaaacaa

SEQ ID NO: 19725 - DNA, 20 bp, Artificial Sequence
  chemically synthesized
ttcacatccaagaaaacaaa

SEQ ID NO: 19726 - DNA, 20 bp, Artificial Sequence
  chemically synthesized
caagaaaacaaaaggtttct

SEQ ID NO: 19727 - DNA, 20 bp, Artificial Sequence
  chemically synthesized
aagaaaacaaaaggtttctt

SEQ ID NO: 19728 - DNA, 20 bp, Artificial Sequence
  chemically synthesized
gaaaacaaaaggtttcttag

SEQ ID NO: 19729 - DNA, 20 bp, Artificial Sequence
  chemically synthesized
aacaaaaggtttcttaggag

SEQ ID NO: 19730 - DNA, 20 bp, Artificial Sequence
  chemically synthesized
ggagaagaatcccttgctgc

SEQ ID NO: 19731 - DNA, 20 bp, Artificial Sequence
  chemically synthesized
agaattttgcccatgaacaa

SEQ ID NO: 19732 - DNA, 20 bp, Artificial Sequence
  chemically synthesized
tggaaacgtgaaaaacataa

SEQ ID NO: 19733 - DNA, 20 bp, Artificial Sequence
  chemically synthesized
acgtgaaaaacataacagat

SEQ ID NO: 19734 - DNA, 20 bp, Artificial Sequence
  chemically synthesized
gtgaaaaacataacagatga

SEQ ID NO: 19735 - DNA, 20 bp, Artificial Sequence
  chemically synthesized
gaaaaacataacagatgaga

SEQ ID NO: 19736 - DNA, 20 bp, Artificial Sequence
  chemically synthesized
cataacagatgagagagtca

SEQ ID NO: 19737 - DNA, 20 bp, Artificial Sequence
  chemically synthesized
acagatgagagagtcacagt

SEQ ID NO: 19738 - DNA, 20 bp, Artificial Sequence
  chemically synthesized
gagagagtcacagttagttt

SEQ ID NO: 19739 - DNA, 20 bp, Artificial Sequence
  chemically synthesized
agagagtcacagttagtttt

SEQ ID NO: 19740 - DNA, 20 bp, Artificial Sequence
  chemically synthesized
tagttttgggtactaattct

SEQ ID NO: 19741 - DNA, 20 bp, Artificial Sequence
  chemically synthesized
cattaatccattttattatt

SEQ ID NO: 19742 - DNA, 20 bp, Artificial Sequence
  chemically synthesized
aatccattttattattcagt

SEQ ID NO: 19743 - DNA, 20 bp, Artificial Sequence
  chemically synthesized
atccattttattattcagta

SEQ ID NO: 19744 - DNA, 20 bp, Artificial Sequence
  chemically synthesized
ttattcagtaaggattcatc

SEQ ID NO: 19745 - DNA, 20 bp, Artificial Sequence
  chemically synthesized
aggattcatcaagtgtctat

SEQ ID NO: 19746 - DNA, 20 bp, Artificial Sequence
  chemically synthesized
ggattcatcaagtgtctatt

SEQ ID NO: 19747 - DNA, 20 bp, Artificial Sequence
  chemically synthesized
atcaagtgtctattaggtat

SEQ ID NO: 19748 - DNA, 20 bp, Artificial Sequence
  chemically synthesized
tcaagtgtctattaggtatc

SEQ ID NO: 19749 - DNA, 20 bp, Artificial Sequence
  chemically synthesized
tctattaggtatcaggcact

SEQ ID NO: 19750 - DNA, 20 bp, Artificial Sequence
  chemically synthesized
tattaggtatcaggcactga

SEQ ID NO: 19751 - DNA, 20 bp, Artificial Sequence
  chemically synthesized
attaggtatcaggcactgag

SEQ ID NO: 19752 - DNA, 20 bp, Artificial Sequence
  chemically synthesized
ggtatcaggcactgagaggc

SEQ ID NO: 19753 - DNA, 20 bp, Artificial Sequence
  chemically synthesized
gtatcaggcactgagaggcg

SEQ ID NO: 19754 - DNA, 20 bp, Artificial Sequence
  chemically synthesized
tatcaggcactgagaggcga

SEQ ID NO: 19755 - DNA, 20 bp, Artificial Sequence
  chemically synthesized
tcaggcactgagaggcgagg

SEQ ID NO: 19756 - DNA, 20 bp, Artificial Sequence
  chemically synthesized
gcactgagaggcgagggaga

SEQ ID NO: 19757 - DNA, 20 bp, Artificial Sequence
  chemically synthesized
actgagaggcgagggagata

SEQ ID NO: 19758 - DNA, 20 bp, Artificial Sequence
  chemically synthesized
gaggcgagggagatagagtt

SEQ ID NO: 19759 - DNA, 20 bp, Artificial Sequence
  chemically synthesized
gggagatagagttaagaata

SEQ ID NO: 19760 - DNA, 20 bp, Artificial Sequence
  chemically synthesized
agaactgattcttaatcttc

SEQ ID NO: 19761 - DNA, 20 bp, Artificial Sequence
  chemically synthesized
ttcaagaattgacaaatttg

SEQ ID NO: 19762 - DNA, 20 bp, Artificial Sequence
  chemically synthesized
aagaattgacaaatttgtag

SEQ ID NO: 19763 - DNA, 20 bp, Artificial Sequence
  chemically synthesized
agaattgacaaatttgtaga

SEQ ID NO: 19764 - DNA, 20 bp, Artificial Sequence
  chemically synthesized
attgacaaatttgtagaagg

SEQ ID NO: 19765 - DNA, 20 bp, Artificial Sequence
  chemically synthesized
tagacattgaacatacaata

SEQ ID NO: 19766 - DNA, 20 bp, Artificial Sequence
  chemically synthesized
acaatacagtcaaatgtgat

SEQ ID NO: 19767 - DNA, 20 bp, Artificial Sequence
  chemically synthesized
cagtcaaatgtgatgagtgt

SEQ ID NO: 19768 - DNA, 20 bp, Artificial Sequence
  chemically synthesized
aatgtgatgagtgtgagact

SEQ ID NO: 19769 - DNA, 20 bp, Artificial Sequence
  chemically synthesized
atgtgatgagtgtgagacta

SEQ ID NO: 19770 - DNA, 20 bp, Artificial Sequence
  chemically synthesized
tgtgatgagtgtgagactaa

SEQ ID NO: 19771 - DNA, 20 bp, Artificial Sequence
  chemically synthesized
gagtgtgagactaagggaac

SEQ ID NO: 19772 - DNA, 20 bp, Artificial Sequence
  chemically synthesized
agtgtgagactaagggaacc

SEQ ID NO: 19773 - DNA, 20 bp, Artificial Sequence
  chemically synthesized
ctaagggaaccaggtgtcct

SEQ ID NO: 19774 - DNA, 20 bp, Artificial Sequence
  chemically synthesized
ccaggtgtcctaagactata

SEQ ID NO: 19775 - DNA, 20 bp, Artificial Sequence
  chemically synthesized
taagactatacagtgtaccg

SEQ ID NO: 19776 - DNA, 20 bp, Artificial Sequence
  chemically synthesized
ctatacagtgtaccgtggaa

SEQ ID NO: 19777 - DNA, 20 bp, Artificial Sequence
  chemically synthesized
tatacagtgtaccgtggaat

SEQ ID NO: 19778 - DNA, 20 bp, Artificial Sequence
  chemically synthesized
atacagtgtaccgtggaatg

SEQ ID NO: 19779 - DNA, 20 bp, Artificial Sequence
  chemically synthesized
acagtgtaccgtggaatggg

SEQ ID NO: 19780 - DNA, 20 bp, Artificial Sequence
  chemically synthesized
gtgtaccgtggaatggggag

SEQ ID NO: 19781 - DNA, 20 bp, Artificial Sequence
  chemically synthesized
atggggagtggtttctaacc

SEQ ID NO: 19782 - DNA, 20 bp, Artificial Sequence
  chemically synthesized
tggtttctaacctagttacc

SEQ ID NO: 19783 - DNA, 20 bp, Artificial Sequence
  chemically synthesized
gtttctaacctagttaccta

SEQ ID NO: 19784 - DNA, 20 bp, Artificial Sequence
  chemically synthesized
tttctaacctagttacctag

SEQ ID NO: 19785 - DNA, 20 bp, Artificial Sequence
  chemically synthesized
aacctagttacctagaggtt

SEQ ID NO: 19786 - DNA, 20 bp, Artificial Sequence
  chemically synthesized
acctagttacctagaggttt

SEQ ID NO: 19787 - DNA, 20 bp, Artificial Sequence
  chemically synthesized
ggaaaaacctctctaatgat

SEQ ID NO: 19788 - DNA, 20 bp, Artificial Sequence
  chemically synthesized
tctctaatgatgagatgttt

SEQ ID NO: 19789 - DNA, 20 bp, Artificial Sequence
  chemically synthesized
gatgtttgagctgacacttg

SEQ ID NO: 19790 - DNA, 20 bp, Artificial Sequence
  chemically synthesized
atgtttgagctgacacttga

SEQ ID NO: 19791 - DNA, 20 bp, Artificial Sequence
  chemically synthesized
gctgacacttgaaggataaa

SEQ ID NO: 19792 - DNA, 20 bp, Artificial Sequence
  chemically synthesized
acttgaaggataaatagcta

SEQ ID NO: 19793 - DNA, 20 bp, Artificial Sequence
  chemically synthesized
cttgaaggataaatagctaa

SEQ ID NO: 19794 - DNA, 20 bp, Artificial Sequence
  chemically synthesized
ttgaaggataaatagctaaa

SEQ ID NO: 19795 - DNA, 20 bp, Artificial Sequence
  chemically synthesized
tgaaggataaatagctaaag

SEQ ID NO: 19796 - DNA, 20 bp, Artificial Sequence
  chemically synthesized
aaggataaatagctaaaggg

SEQ ID NO: 19797 - DNA, 20 bp, Artificial Sequence
  chemically synthesized
ataaatagctaaaggggaga

SEQ ID NO: 19798 - DNA, 20 bp, Artificial Sequence
  chemically synthesized
ggggagaaagcgttctatgt

SEQ ID NO: 19799 - DNA, 20 bp, Artificial Sequence
  chemically synthesized
ggagaaagcgttctatgtga

SEQ ID NO: 19800 - DNA, 20 bp, Artificial Sequence
  chemically synthesized
gtgagagaactatatatgcc

SEQ ID NO: 19801 - DNA, 20 bp, Artificial Sequence
  chemically synthesized
gaactatatatgccaagatg

SEQ ID NO: 19802 - DNA, 20 bp, Artificial Sequence
  chemically synthesized
ctatatatgccaagatgcag

SEQ ID NO: 19803 - DNA, 20 bp, Artificial Sequence
  chemically synthesized
gcagaagtgttctctgttcg

SEQ ID NO: 19804 - DNA, 20 bp, Artificial Sequence
  chemically synthesized
tgttctctgttcgaagatct

SEQ ID NO: 19805 - DNA, 20 bp, Artificial Sequence
  chemically synthesized
tctctgttcgaagatctgag

SEQ ID NO: 19806 - DNA, 20 bp, Artificial Sequence
  chemically synthesized
ctctgttcgaagatctgagc

SEQ ID NO: 19807 - DNA, 20 bp, Artificial Sequence
  chemically synthesized
tctgttcgaagatctgagcg

SEQ ID NO: 19808 - DNA, 20 bp, Artificial Sequence
  chemically synthesized
tcgaagatctgagcggggct

SEQ ID NO: 19809 - DNA, 20 bp, Artificial Sequence
  chemically synthesized
gaagatctgagcggggctca

SEQ ID NO: 19810 - DNA, 20 bp, Artificial Sequence
  chemically synthesized
agatctgagcggggctcaga

SEQ ID NO: 19811 - DNA, 20 bp, Artificial Sequence
  chemically synthesized
gatctgagcggggctcagag

SEQ ID NO: 19812 - DNA, 20 bp, Artificial Sequence
  chemically synthesized
atctgagcggggctcagaga

SEQ ID NO: 19813 - DNA, 20 bp, Artificial Sequence
  chemically synthesized
agcggggctcagagagggaa

SEQ ID NO: 19814 - DNA, 20 bp, Artificial Sequence
  chemically synthesized
gcggggctcagagagggaaa

SEQ ID NO: 19815 - DNA, 20 bp, Artificial Sequence
  chemically synthesized
ggggctcagagagggaaaag

SEQ ID NO: 19816 - DNA, 20 bp, Artificial Sequence
  chemically synthesized
ggctcagagagggaaaagga

SEQ ID NO: 19817 - DNA, 20 bp, Artificial Sequence
  chemically synthesized
gctcagagagggaaaaggag

SEQ ID NO: 19818 - DNA, 20 bp, Artificial Sequence
  chemically synthesized
tcagagagggaaaaggagag

SEQ ID NO: 19819 - DNA, 20 bp, Artificial Sequence
  chemically synthesized
agggaaaaggagaggagtat

SEQ ID NO: 19820 - DNA, 20 bp, Artificial Sequence
  chemically synthesized
ggaaaaggagaggagtatga

SEQ ID NO: 19821 - DNA, 20 bp, Artificial Sequence
  chemically synthesized
aaaggagaggagtatgagag

SEQ ID NO: 19822 - DNA, 20 bp, Artificial Sequence
  chemically synthesized
gagaggagtatgagagaaga

SEQ ID NO: 19823 - DNA, 20 bp, Artificial Sequence
  chemically synthesized
agaggagtatgagagaagat

SEQ ID NO: 19824 - DNA, 20 bp, Artificial Sequence
  chemically synthesized
aggagtatgagagaagatgg

SEQ ID NO: 19825 - DNA, 20 bp, Artificial Sequence
  chemically synthesized
gagtatgagagaagatggga

SEQ ID NO: 19826 - DNA, 20 bp, Artificial Sequence
  chemically synthesized
gagaagatgggagagacctg

SEQ ID NO: 19827 - DNA, 20 bp, Artificial Sequence
  chemically synthesized
agaagatgggagagacctgc

SEQ ID NO: 19828 - DNA, 20 bp, Artificial Sequence
  chemically synthesized
gaagatgggagagacctgca

SEQ ID NO: 19829 - DNA, 20 bp, Artificial Sequence
  chemically synthesized
tgggagagacctgcagggac

SEQ ID NO: 19830 - DNA, 20 bp, Artificial Sequence
  chemically synthesized
cctgcagggactagattgtg

SEQ ID NO: 19831 - DNA, 20 bp, Artificial Sequence
  chemically synthesized
agggactagattgtgaagct

SEQ ID NO: 19832 - DNA, 20 bp, Artificial Sequence
  chemically synthesized
gggactagattgtgaagctc

SEQ ID NO: 19833 - DNA, 20 bp, Artificial Sequence
  chemically synthesized
ggactagattgtgaagctca

SEQ ID NO: 19834 - DNA, 20 bp, Artificial Sequence
  chemically synthesized
gactagattgtgaagctcag

SEQ ID NO: 19835 - DNA, 20 bp, Artificial Sequence
  chemically synthesized
actagattgtgaagctcagg

SEQ ID NO: 19836 - DNA, 20 bp, Artificial Sequence
  chemically synthesized
tagattgtgaagctcagggg

SEQ ID NO: 19837 - DNA, 20 bp, Artificial Sequence
  chemically synthesized
tgaagctcagggggagttaa

SEQ ID NO: 19838 - DNA, 20 bp, Artificial Sequence
  chemically synthesized
cagggggagttaatagcctt

SEQ ID NO: 19839 - DNA, 20 bp, Artificial Sequence
  chemically synthesized
agggggagttaatagcctta

SEQ ID NO: 19840 - DNA, 20 bp, Artificial Sequence
  chemically synthesized
ggggagttaatagccttaag

SEQ ID NO: 19841 - DNA, 20 bp, Artificial Sequence
  chemically synthesized
gccttaaggagttttgtctc

SEQ ID NO: 19842 - DNA, 20 bp, Artificial Sequence
  chemically synthesized
ccttaaggagttttgtctcc

SEQ ID NO: 19843 - DNA, 20 bp, Artificial Sequence
  chemically synthesized
cttaaggagttttgtctcca

SEQ ID NO: 19844 - DNA, 20 bp, Artificial Sequence
  chemically synthesized
ccagggtatgaacaatgaat

SEQ ID NO: 19845 - DNA, 20 bp, Artificial Sequence
  chemically synthesized
cagggtatgaacaatgaatg

SEQ ID NO: 19846 - DNA, 20 bp, Artificial Sequence
  chemically synthesized
gggtatgaacaatgaatgag

SEQ ID NO: 19847 - DNA, 20 bp, Artificial Sequence
  chemically synthesized
agtcactgaaattctatcca

SEQ ID NO: 19848 - DNA, 20 bp, Artificial Sequence
  chemically synthesized
cactgaaattctatccacag

SEQ ID NO: 19849 - DNA, 20 bp, Artificial Sequence
  chemically synthesized
tgaaattctatccacagtag

SEQ ID NO: 19850 - DNA, 20 bp, Artificial Sequence
  chemically synthesized
gaaattctatccacagtagt

SEQ ID NO: 19851 - DNA, 20 bp, Artificial Sequence
  chemically synthesized
attctatccacagtagtggg

SEQ ID NO: 19852 - DNA, 20 bp, Artificial Sequence
  chemically synthesized
ccacagtagtgggaagtact

SEQ ID NO: 19853 - DNA, 20 bp, Artificial Sequence
  chemically synthesized
cagtagtgggaagtactaag

SEQ ID NO: 19854 - DNA, 20 bp, Artificial Sequence
  chemically synthesized
agtgggaagtactaagtagt

SEQ ID NO: 19855 - DNA, 20 bp, Artificial Sequence
  chemically synthesized
gtgggaagtactaagtagtc

SEQ ID NO: 19856 - DNA, 20 bp, Artificial Sequence
  chemically synthesized
ctaagtagtcaggtatgttt

SEQ ID NO: 19857 - DNA, 20 bp, Artificial Sequence
  chemically synthesized
agtagtcaggtatgttttgg

SEQ ID NO: 19858 - DNA, 20 bp, Artificial Sequence
  chemically synthesized
agtcaggtatgttttggaag

SEQ ID NO: 19859 - DNA, 20 bp, Artificial Sequence
  chemically synthesized
tttggaagaagcactgttac

SEQ ID NO: 19860 - DNA, 20 bp, Artificial Sequence
  chemically synthesized
aagaagcactgttaccagtt

SEQ ID NO: 19861 - DNA, 20 bp, Artificial Sequence
  chemically synthesized
agaagcactgttaccagttg

SEQ ID NO: 19862 - DNA, 20 bp, Artificial Sequence
  chemically synthesized
gaagcactgttaccagttga

SEQ ID NO: 19863 - DNA, 20 bp, Artificial Sequence
  chemically synthesized
agcactgttaccagttgagg

SEQ ID NO: 19864 - DNA, 20 bp, Artificial Sequence
  chemically synthesized
cactgttaccagttgaggga

SEQ ID NO: 19865 - DNA, 20 bp, Artificial Sequence
  chemically synthesized
actgttaccagttgagggag

SEQ ID NO: 19866 - DNA, 20 bp, Artificial Sequence
  chemically synthesized
tgttaccagttgagggagag

SEQ ID NO: 19867 - DNA, 20 bp, Artificial Sequence
  chemically synthesized
ttaccagttgagggagagga

SEQ ID NO: 19868 - DNA, 20 bp, Artificial Sequence
  chemically synthesized
taccagttgagggagaggag

SEQ ID NO: 19869 - DNA, 20 bp, Artificial Sequence
  chemically synthesized
ccagttgagggagaggagag

SEQ ID NO: 19870 - DNA, 20 bp, Artificial Sequence
  chemically synthesized
cagttgagggagaggagagg

SEQ ID NO: 19871 - DNA, 20 bp, Artificial Sequence
  chemically synthesized
agttgagggagaggagagga

SEQ ID NO: 19872 - DNA, 20 bp, Artificial Sequence
  chemically synthesized
ggagaggagaggagggaaat

SEQ ID NO: 19873 - DNA, 20 bp, Artificial Sequence
  chemically synthesized
agaggagggaaattagactg

SEQ ID NO: 19874 - DNA, 20 bp, Artificial Sequence
  chemically synthesized
aattagactgtggtgtgacc

SEQ ID NO: 19875 - DNA, 20 bp, Artificial Sequence
  chemically synthesized
attagactgtggtgtgaccc

SEQ ID NO: 19876 - DNA, 20 bp, Artificial Sequence
  chemically synthesized
gactgtggtgtgacccagga

SEQ ID NO: 19877 - DNA, 20 bp, Artificial Sequence
  chemically synthesized
gtggtgtgacccaggatgga

SEQ ID NO: 19878 - DNA, 20 bp, Artificial Sequence
  chemically synthesized
tggaaagttttgcccaaatg

SEQ ID NO: 19879 - DNA, 20 bp, Artificial Sequence
  chemically synthesized
ggaaagttttgcccaaatgt

SEQ ID NO: 19880 - DNA, 20 bp, Artificial Sequence
  chemically synthesized
gaaagttttgcccaaatgtg

SEQ ID NO: 19881 - DNA, 20 bp, Artificial Sequence
  chemically synthesized
aaagttttgcccaaatgtgg

SEQ ID NO: 19882 - DNA, 20 bp, Artificial Sequence
  chemically synthesized
tgtttactctctcctttgcc

SEQ ID NO: 19883 - DNA, 20 bp, Artificial Sequence
  chemically synthesized
gtttactctctcctttgccc

SEQ ID NO: 19884 - DNA, 20 bp, Artificial Sequence
  chemically synthesized
ttcttctgcacacacttgct

SEQ ID NO: 19885 - DNA, 20 bp, Artificial Sequence
  chemically synthesized
gctcagaacattacaaactc

SEQ ID NO: 19886 - DNA, 20 bp, Artificial Sequence
  chemically synthesized
tcagaacattacaaactctg

SEQ ID NO: 19887 - DNA, 20 bp, Artificial Sequence
  chemically synthesized
tctggagaaattaacatgtt

SEQ ID NO: 19888 - DNA, 20 bp, Artificial Sequence
  chemically synthesized
ctggagaaattaacatgtta

SEQ ID NO: 19889 - DNA, 20 bp, Artificial Sequence
  chemically synthesized
attaacatgttaaggatatt

SEQ ID NO: 19890 - DNA, 20 bp, Artificial Sequence
  chemically synthesized
ttaacatgttaaggatattt

SEQ ID NO: 19891 - DNA, 20 bp, Artificial Sequence
  chemically synthesized
gatatttaggatcattaaaa

SEQ ID NO: 19892 - DNA, 20 bp, Artificial Sequence
  chemically synthesized
aatgttgtcacacataatga

SEQ ID NO: 19893 - DNA, 20 bp, Artificial Sequence
  chemically synthesized
cacataatgaaagttaattt

SEQ ID NO: 19894 - DNA, 20 bp, Artificial Sequence
  chemically synthesized
aagttaatttaagaattgta

SEQ ID NO: 19895 - DNA, 20 bp, Artificial Sequence
  chemically synthesized
tttaagaattgtaaagactt

SEQ ID NO: 19896 - DNA, 20 bp, Artificial Sequence
  chemically synthesized
ttgtaaagacttgagcgatg

SEQ ID NO: 19897 - DNA, 20 bp, Artificial Sequence
  chemically synthesized
taaatgcttccctcttaaaa

SEQ ID NO: 19898 - DNA, 20 bp, Artificial Sequence
  chemically synthesized
gcttccctcttaaaatggac

SEQ ID NO: 19899 - DNA, 20 bp, Artificial Sequence
  chemically synthesized
gaaacaatttgtttttgcct

SEQ ID NO: 19900 - DNA, 20 bp, Artificial Sequence
  chemically synthesized
tgcctaagccaacgtattgc

SEQ ID NO: 19901 - DNA, 20 bp, Artificial Sequence
  chemically synthesized
taatttacctgcttcctcct

SEQ ID NO: 19902 - DNA, 20 bp, Artificial Sequence
  chemically synthesized
cactacacctctgaattaca

SEQ ID NO: 19903 - DNA, 20 bp, Artificial Sequence
  chemically synthesized
acctctgaattacatggtac

SEQ ID NO: 19904 - DNA, 20 bp, Artificial Sequence
  chemically synthesized
tctgaattacatggtacaag

SEQ ID NO: 19905 - DNA, 20 bp, Artificial Sequence
  chemically synthesized
attacatggtacaagtggca

SEQ ID NO: 19906 - DNA, 20 bp, Artificial Sequence
  chemically synthesized
ttacatggtacaagtggcac

SEQ ID NO: 19907 - DNA, 20 bp, Artificial Sequence
  chemically synthesized
tacatggtacaagtggcaca

SEQ ID NO: 19908 - DNA, 20 bp, Artificial Sequence
  chemically synthesized
atggtacaagtggcacaggg

SEQ ID NO: 19909 - DNA, 20 bp, Artificial Sequence
  chemically synthesized
aagtggcacagggaagaatt

SEQ ID NO: 19910 - DNA, 20 bp, Artificial Sequence
  chemically synthesized
cagggaagaattcagaaaac

SEQ ID NO: 19911 - DNA, 20 bp, Artificial Sequence
  chemically synthesized
gggaagaattcagaaaacta

SEQ ID NO: 19912 - DNA, 20 bp, Artificial Sequence
  chemically synthesized
aattcagaaaactagagtca

SEQ ID NO: 19913 - DNA, 20 bp, Artificial Sequence
  chemically synthesized
tcagaaaactagagtcaaag

SEQ ID NO: 19914 - DNA, 20 bp, Artificial Sequence
  chemically synthesized
aactagagtcaaagtggtta

SEQ ID NO: 19915 - DNA, 20 bp, Artificial Sequence
  chemically synthesized
tagagtcaaagtggttatgg

SEQ ID NO: 19916 - DNA, 20 bp, Artificial Sequence
  chemically synthesized
atggaagaaattataataat

SEQ ID NO: 19917 - DNA, 20 bp, Artificial Sequence
  chemically synthesized
taataatgagtccactcttc

SEQ ID NO: 19918 - DNA, 20 bp, Artificial Sequence
  chemically synthesized
aataatgagtccactcttct

SEQ ID NO: 19919 - DNA, 20 bp, Artificial Sequence
  chemically synthesized
atgagtccactcttctagga

SEQ ID NO: 19920 - DNA, 20 bp, Artificial Sequence
  chemically synthesized
tgagtccactcttctaggac

SEQ ID NO: 19921 - DNA, 20 bp, Artificial Sequence
  chemically synthesized
agtccactcttctaggacag

SEQ ID NO: 19922 - DNA, 20 bp, Artificial Sequence
  chemically synthesized
cttctaggacaggagttcta

SEQ ID NO: 19923 - DNA, 20 bp, Artificial Sequence
  chemically synthesized
ttctaggacaggagttctaa

SEQ ID NO: 19924 - DNA, 20 bp, Artificial Sequence
  chemically synthesized
aggacaggagttctaaaggt

SEQ ID NO: 19925 - DNA, 20 bp, Artificial Sequence
  chemically synthesized
ggacaggagttctaaaggtg

SEQ ID NO: 19926 - DNA, 20 bp, Artificial Sequence
  chemically synthesized
aaaggtgaggactttgatat

SEQ ID NO: 19927 - DNA, 20 bp, Artificial Sequence
  chemically synthesized
actttgatataagtgaactc

SEQ ID NO: 19928 - DNA, 20 bp, Artificial Sequence
  chemically synthesized
ctttgatataagtgaactca

SEQ ID NO: 19929 - DNA, 20 bp, Artificial Sequence
  chemically synthesized
ttgatataagtgaactcaag

SEQ ID NO: 19930 - DNA, 20 bp, Artificial Sequence
  chemically synthesized
tcaaggagtttctaaacctt

SEQ ID NO: 19931 - DNA, 20 bp, Artificial Sequence
  chemically synthesized
cagaaattatatctaaaaat

SEQ ID NO: 19932 - DNA, 20 bp, Artificial Sequence
  chemically synthesized
agaaattatatctaaaaatt

SEQ ID NO: 19933 - DNA, 20 bp, Artificial Sequence
  chemically synthesized
aaaaattaggtgcacgtata

SEQ ID NO: 19934 - DNA, 20 bp, Artificial Sequence
  chemically synthesized
aattaggtgcacgtatatag

SEQ ID NO: 19935 - DNA, 20 bp, Artificial Sequence
  chemically synthesized
atatagaagtacttttctct

SEQ ID NO: 19936 - DNA, 20 bp, Artificial Sequence
  chemically synthesized
tagaagtacttttctctgag

SEQ ID NO: 19937 - DNA, 20 bp, Artificial Sequence
  chemically synthesized
gaagtacttttctctgagaa

SEQ ID NO: 19938 - DNA, 20 bp, Artificial Sequence
  chemically synthesized
aagtacttttctctgagaag

SEQ ID NO: 19939 - DNA, 20 bp, Artificial Sequence
  chemically synthesized
agaggacttcacacttccat

SEQ ID NO: 19940 - DNA, 20 bp, Artificial Sequence
  chemically synthesized
acacttccatcagcttcctg

SEQ ID NO: 19941 - DNA, 20 bp, Artificial Sequence
  chemically synthesized
cacttccatcagcttcctga

SEQ ID NO: 19942 - DNA, 20 bp, Artificial Sequence
  chemically synthesized
aggcccctgtaattgccgta

SEQ ID NO: 19943 - DNA, 20 bp, Artificial Sequence
  chemically synthesized
cgtaaagaacaactgctcta

SEQ ID NO: 19944 - DNA, 20 bp, Artificial Sequence
  chemically synthesized
actgctctaaagtttaatac

SEQ ID NO: 19945 - DNA, 20 bp, Artificial Sequence
  chemically synthesized
ctgctctaaagtttaatact

SEQ ID NO: 19946 - DNA, 20 bp, Artificial Sequence
  chemically synthesized
aagtttaatactaggctact

SEQ ID NO: 19947 - DNA, 20 bp, Artificial Sequence
  chemically synthesized
tcggctgttttttgttaaca

SEQ ID NO: 19948 - DNA, 20 bp, Artificial Sequence
  chemically synthesized
gctgttttttgttaacacag

SEQ ID NO: 19949 - DNA, 20 bp, Artificial Sequence
  chemically synthesized
taacacagaagttttccaaa

SEQ ID NO: 19950 - DNA, 20 bp, Artificial Sequence
  chemically synthesized
ttttccaaatggcttttctc

SEQ ID NO: 19951 - DNA, 20 bp, Artificial Sequence
  chemically synthesized
ttccaaatggcttttctcta

SEQ ID NO: 19952 - DNA, 20 bp, Artificial Sequence
  chemically synthesized
tttctctagagcaaaatgaa

SEQ ID NO: 19953 - DNA, 20 bp, Artificial Sequence
  chemically synthesized
ttctctagagcaaaatgaaa

SEQ ID NO: 19954 - DNA, 20 bp, Artificial Sequence
  chemically synthesized
aaaaggatcccatccttccc

SEQ ID NO: 19955 - DNA, 20 bp, Artificial Sequence
  chemically synthesized
cctaccccccaccactttta

SEQ ID NO: 19956 - DNA, 20 bp, Artificial Sequence
  chemically synthesized
accacttttaaagatccatc

SEQ ID NO: 19957 - DNA, 20 bp, Artificial Sequence
  chemically synthesized
ccacttttaaagatccatca

SEQ ID NO: 19958 - DNA, 20 bp, Artificial Sequence
  chemically synthesized
tttaaagatccatcaaggcc

SEQ ID NO: 19959 - DNA, 20 bp, Artificial Sequence
  chemically synthesized
agatccatcaaggcccagca

SEQ ID NO: 19960 - DNA, 20 bp, Artificial Sequence
  chemically synthesized
ctgtaatctcaacacttttc

SEQ ID NO: 19961 - DNA, 20 bp, Artificial Sequence
  chemically synthesized
tgtaatctcaacacttttca

SEQ ID NO: 19962 - DNA, 20 bp, Artificial Sequence
  chemically synthesized
tctcaacacttttcaaggct

SEQ ID NO: 19963 - DNA, 20 bp, Artificial Sequence
  chemically synthesized
ctcaacacttttcaaggctg

SEQ ID NO: 19964 - DNA, 20 bp, Artificial Sequence
  chemically synthesized
aacacttttcaaggctgagg

SEQ ID NO: 19965 - DNA, 20 bp, Artificial Sequence
  chemically synthesized
acacttttcaaggctgaggt

SEQ ID NO: 19966 - DNA, 20 bp, Artificial Sequence
  chemically synthesized
acttttcaaggctgaggtgg

SEQ ID NO: 19967 - DNA, 20 bp, Artificial Sequence
  chemically synthesized
ctgaggtgggagaattgttt

SEQ ID NO: 19968 - DNA, 20 bp, Artificial Sequence
  chemically synthesized
tgggagaattgtttgagacc

SEQ ID NO: 19969 - DNA, 20 bp, Artificial Sequence
  chemically synthesized
ggagaattgtttgagaccaa

SEQ ID NO: 19970 - DNA, 20 bp, Artificial Sequence
  chemically synthesized
aattgtttgagaccaagagt

SEQ ID NO: 19971 - DNA, 20 bp, Artificial Sequence
  chemically synthesized
tgagaccaagagttggatac

SEQ ID NO: 19972 - DNA, 20 bp, Artificial Sequence
  chemically synthesized
ccaagagttggataccagcc

SEQ ID NO: 19973 - DNA, 20 bp, Artificial Sequence
  chemically synthesized
caagagttggataccagcct

SEQ ID NO: 19974 - DNA, 20 bp, Artificial Sequence
  chemically synthesized
aagagttggataccagcctg

SEQ ID NO: 19975 - DNA, 20 bp, Artificial Sequence
  chemically synthesized
ggataccagcctggggaaca

SEQ ID NO: 19976 - DNA, 20 bp, Artificial Sequence
  chemically synthesized
gataccagcctggggaacat

SEQ ID NO: 19977 - DNA, 20 bp, Artificial Sequence
  chemically synthesized
ataccagcctggggaacata

SEQ ID NO: 19978 - DNA, 20 bp, Artificial Sequence
  chemically synthesized
accagcctggggaacatagg

SEQ ID NO: 19979 - DNA, 20 bp, Artificial Sequence
  chemically synthesized
atagggagaccctgtttcta

SEQ ID NO: 19980 - DNA, 20 bp, Artificial Sequence
  chemically synthesized
agaaatttaaaaaatttctc

SEQ ID NO: 19981 - DNA, 20 bp, Artificial Sequence
  chemically synthesized
atttaaaaaatttctctagc

SEQ ID NO: 19982 - DNA, 20 bp, Artificial Sequence
  chemically synthesized
aaaatttctctagctggcca

SEQ ID NO: 19983 - DNA, 20 bp, Artificial Sequence
  chemically synthesized
aatttctctagctggccatg

SEQ ID NO: 19984 - DNA, 20 bp, Artificial Sequence
  chemically synthesized
atttctctagctggccatgg

SEQ ID NO: 19985 - DNA, 20 bp, Artificial Sequence
  chemically synthesized
gccatggaggctcacacctg

SEQ ID NO: 19986 - DNA, 20 bp, Artificial Sequence
  chemically synthesized
gaggctcacacctgtagtcc

SEQ ID NO: 19987 - DNA, 20 bp, Artificial Sequence
  chemically synthesized
acctgtagtcctagctacct

SEQ ID NO: 19988 - DNA, 20 bp, Artificial Sequence
  chemically synthesized
ctgtagtcctagctacctga

SEQ ID NO: 19989 - DNA, 20 bp, Artificial Sequence
  chemically synthesized
tgtagtcctagctacctgag

SEQ ID NO: 19990 - DNA, 20 bp, Artificial Sequence
  chemically synthesized
cctagctacctgagaggcta

SEQ ID NO: 19991 - DNA, 20 bp, Artificial Sequence
  chemically synthesized
agctacctgagaggctaaag

SEQ ID NO: 19992 - DNA, 20 bp, Artificial Sequence
  chemically synthesized
gctacctgagaggctaaagc

SEQ ID NO: 19993 - DNA, 20 bp, Artificial Sequence
  chemically synthesized
tacctgagaggctaaagcag

SEQ ID NO: 19994 - DNA, 20 bp, Artificial Sequence
  chemically synthesized
acctgagaggctaaagcagg

SEQ ID NO: 19995 - DNA, 20 bp, Artificial Sequence
  chemically synthesized
gcaggaggatcaattgaatc

SEQ ID NO: 19996 - DNA, 20 bp, Artificial Sequence
  chemically synthesized
caggaggatcaattgaatcc

SEQ ID NO: 19997 - DNA, 20 bp, Artificial Sequence
  chemically synthesized
tcaattgaatccaggcgttc

SEQ ID NO: 19998 - DNA, 20 bp, Artificial Sequence
  chemically synthesized
ttgaatccaggcgttctagt

SEQ ID NO: 19999 - DNA, 20 bp, Artificial Sequence
  chemically synthesized
tgaatccaggcgttctagtg

SEQ ID NO: 20000 - DNA, 20 bp, Artificial Sequence
  chemically synthesized
caggcgttctagtgaggctt

SEQ ID NO: 20001 - DNA, 20 bp, Artificial Sequence
  chemically synthesized
cgttctagtgaggcttcagt

SEQ ID NO: 20002 - DNA, 20 bp, Artificial Sequence
  chemically synthesized
ctagtgaggcttcagtgagc

SEQ ID NO: 20003 - DNA, 20 bp, Artificial Sequence
  chemically synthesized
aagattgcaccattgcactc

SEQ ID NO: 20004 - DNA, 20 bp, Artificial Sequence
  chemically synthesized
ttgcaccattgcactccagc

SEQ ID NO: 20005 - DNA, 20 bp, Artificial Sequence
  chemically synthesized
tgcaccattgcactccagcc

SEQ ID NO: 20006 - DNA, 20 bp, Artificial Sequence
  chemically synthesized
gcaccattgcactccagccg

SEQ ID NO: 20007 - DNA, 20 bp, Artificial Sequence
  chemically synthesized
ttgcactccagccggggtga

SEQ ID NO: 20008 - DNA, 20 bp, Artificial Sequence
  chemically synthesized
gcactccagccggggtgaca

SEQ ID NO: 20009 - DNA, 20 bp, Artificial Sequence
  chemically synthesized
tccagccggggtgacagagt

SEQ ID NO: 20010 - DNA, 20 bp, Artificial Sequence
  chemically synthesized
agaccctgtttcaaacaaac

SEQ ID NO: 20011 - DNA, 20 bp, Artificial Sequence
  chemically synthesized
tgtttcaaacaaacaagcaa

SEQ ID NO: 20012 - DNA, 20 bp, Artificial Sequence
  chemically synthesized
aacaaacaagcaaaagcaaa

SEQ ID NO: 20013 - DNA, 20 bp, Artificial Sequence
  chemically synthesized
acttactatcttgctgtcta

SEQ ID NO: 20014 - DNA, 20 bp, Artificial Sequence
  chemically synthesized
tatcttgctgtctacagcta

SEQ ID NO: 20015 - DNA, 20 bp, Artificial Sequence
  chemically synthesized
ttgctgtctacagctaaagt

SEQ ID NO: 20016 - DNA, 20 bp, Artificial Sequence
  chemically synthesized
taaagtcagactgcatgatt

SEQ ID NO: 20017 - DNA, 20 bp, Artificial Sequence
  chemically synthesized
attccaactccaccatcacc

SEQ ID NO: 20018 - DNA, 20 bp, Artificial Sequence
  chemically synthesized
ttccaactccaccatcacct

SEQ ID NO: 20019 - DNA, 20 bp, Artificial Sequence
  chemically synthesized
accatcacctgggtaatgtt

SEQ ID NO: 20020 - DNA, 20 bp, Artificial Sequence
  chemically synthesized
taatgttgagatttattaca

SEQ ID NO: 20021 - DNA, 20 bp, Artificial Sequence
  chemically synthesized
tacatagcatctctgtgcct

SEQ ID NO: 20022 - DNA, 20 bp, Artificial Sequence
  chemically synthesized
aataatgttgtgaaaattaa

SEQ ID NO: 20023 - DNA, 20 bp, Artificial Sequence
  chemically synthesized
gtgaaaattaaaagaaatac

SEQ ID NO: 20024 - DNA, 20 bp, Artificial Sequence
  chemically synthesized
aataccagttgtaaatcact

SEQ ID NO: 20025 - DNA, 20 bp, Artificial Sequence
  chemically synthesized
aaatcactcagaactgtgcc

SEQ ID NO: 20026 - DNA, 20 bp, Artificial Sequence
  chemically synthesized
agcatttaataaacactctg

SEQ ID NO: 20027 - DNA, 20 bp, Artificial Sequence
  chemically synthesized
gcatttaataaacactctgt

SEQ ID NO: 20028 - DNA, 20 bp, Artificial Sequence
  chemically synthesized
aataaacactctgtaggtat

SEQ ID NO: 20029 - DNA, 20 bp, Artificial Sequence
  chemically synthesized
ataaaatttattcataaaat

SEQ ID NO: 20030 - DNA, 20 bp, Artificial Sequence
  chemically synthesized
taaaatttattcataaaatg

SEQ ID NO: 20031 - DNA, 20 bp, Artificial Sequence
  chemically synthesized
aatttattcataaaatgagg

SEQ ID NO: 20032 - DNA, 20 bp, Artificial Sequence
  chemically synthesized
tattcataaaatgaggaagt

SEQ ID NO: 20033 - DNA, 20 bp, Artificial Sequence
  chemically synthesized
tagctcatgtattgtcatac

SEQ ID NO: 20034 - DNA, 20 bp, Artificial Sequence
  chemically synthesized
taccagctttcactttgaat

SEQ ID NO: 20035 - DNA, 20 bp, Artificial Sequence
  chemically synthesized
attgcatttttaaacacaaa

SEQ ID NO: 20036 - DNA, 20 bp, Artificial Sequence
  chemically synthesized
tgcatttttaaacacaaaaa

SEQ ID NO: 20037 - DNA, 20 bp, Artificial Sequence
  chemically synthesized
aaacacaaaaagagaaataa

SEQ ID NO: 20038 - DNA, 20 bp, Artificial Sequence
  chemically synthesized
aacacaaaaagagaaataat

SEQ ID NO: 20039 - DNA, 20 bp, Artificial Sequence
  chemically synthesized
catcaatgttacttcaatca

SEQ ID NO: 20040 - DNA, 20 bp, Artificial Sequence
  chemically synthesized
atcaatgttacttcaatcac

SEQ ID NO: 20041 - DNA, 20 bp, Artificial Sequence
  chemically synthesized
tacttcaatcacgggatgca

SEQ ID NO: 20042 - DNA, 20 bp, Artificial Sequence
  chemically synthesized
atcacgggatgcatagtaat

SEQ ID NO: 20043 - DNA, 20 bp, Artificial Sequence
  chemically synthesized
tcacgggatgcatagtaatt

SEQ ID NO: 20044 - DNA, 20 bp, Artificial Sequence
  chemically synthesized
ctttgccctaattactgatg

SEQ ID NO: 20045 - DNA, 20 bp, Artificial Sequence
  chemically synthesized
ccctaattactgatgtggat

SEQ ID NO: 20046 - DNA, 20 bp, Artificial Sequence
  chemically synthesized
aattactgatgtggataagc

SEQ ID NO: 20047 - DNA, 20 bp, Artificial Sequence
  chemically synthesized
tactgatgtggataagccgg

SEQ ID NO: 20048 - DNA, 20 bp, Artificial Sequence
  chemically synthesized
actgatgtggataagccggt

SEQ ID NO: 20049 - DNA, 20 bp, Artificial Sequence
  chemically synthesized
aagccggtgggccatgtcaa

SEQ ID NO: 20050 - DNA, 20 bp, Artificial Sequence
  chemically synthesized
ggccatgtcaatggcatctc

SEQ ID NO: 20051 - DNA, 20 bp, Artificial Sequence
  chemically synthesized
atctatgtaaaaactatgct

SEQ ID NO: 20052 - DNA, 20 bp, Artificial Sequence
  chemically synthesized
aaaaactatgcttggttgca

SEQ ID NO: 20053 - DNA, 20 bp, Artificial Sequence
  chemically synthesized
atgcttggttgcacagcttc

SEQ ID NO: 20054 - DNA, 20 bp, Artificial Sequence
  chemically synthesized
tgcttggttgcacagcttca

SEQ ID NO: 20055 - DNA, 20 bp, Artificial Sequence
  chemically synthesized
tggttgcacagcttcaagga

SEQ ID NO: 20056 - DNA, 20 bp, Artificial Sequence
  chemically synthesized
cacagcttcaaggaaagcac

SEQ ID NO: 20057 - DNA, 20 bp, Artificial Sequence
  chemically synthesized
ctactcacttccttttcatt

SEQ ID NO: 20058 - DNA, 20 bp, Artificial Sequence
  chemically synthesized
ttcattcagcatgctatgtc

SEQ ID NO: 20059 - DNA, 20 bp, Artificial Sequence
  chemically synthesized
tcattcagcatgctatgtct

SEQ ID NO: 20060 - DNA, 20 bp, Artificial Sequence
  chemically synthesized
cccctttcatataaaatatt

SEQ ID NO: 20061 - DNA, 20 bp, Artificial Sequence
  chemically synthesized
cctttcatataaaatatttg

SEQ ID NO: 20062 - DNA, 20 bp, Artificial Sequence
  chemically synthesized
aatatttggagctgccattg

SEQ ID NO: 20063 - DNA, 20 bp, Artificial Sequence
  chemically synthesized
atatttggagctgccattgt

SEQ ID NO: 20064 - DNA, 20 bp, Artificial Sequence
  chemically synthesized
tttggagctgccattgtagg

SEQ ID NO: 20065 - DNA, 20 bp, Artificial Sequence
  chemically synthesized
agctgccattgtaggtagtg

SEQ ID NO: 20066 - DNA, 20 bp, Artificial Sequence
  chemically synthesized
gctgccattgtaggtagtgc

SEQ ID NO: 20067 - DNA, 20 bp, Artificial Sequence
  chemically synthesized
gccattgtaggtagtgcagg

SEQ ID NO: 20068 - DNA, 20 bp, Artificial Sequence
  chemically synthesized
agtgcaggtggtcttgttca

SEQ ID NO: 20069 - DNA, 20 bp, Artificial Sequence
  chemically synthesized
ggtggtcttgttcaaagtgt

SEQ ID NO: 20070 - DNA, 20 bp, Artificial Sequence
  chemically synthesized
gagtatcacctcccactgcc

SEQ ID NO: 20071 - DNA, 20 bp, Artificial Sequence
  chemically synthesized
acctcccactgccaagactg

SEQ ID NO: 20072 - DNA, 20 bp, Artificial Sequence
  chemically synthesized
cagctgctttgattttaact

SEQ ID NO: 20073 - DNA, 20 bp, Artificial Sequence
  chemically synthesized
agctgctttgattttaactg

SEQ ID NO: 20074 - DNA, 20 bp, Artificial Sequence
  chemically synthesized
tttgattttaactgaggatc

SEQ ID NO: 20075 - DNA, 20 bp, Artificial Sequence
  chemically synthesized
ttttaactgaggatctagaa

SEQ ID NO: 20076 - DNA, 20 bp, Artificial Sequence
  chemically synthesized
ctgaggatctagaaaagtgc

SEQ ID NO: 20077 - DNA, 20 bp, Artificial Sequence
  chemically synthesized
tgaggatctagaaaagtgct

SEQ ID NO: 20078 - DNA, 20 bp, Artificial Sequence
  chemically synthesized
tatttgctgacctttgtcac

SEQ ID NO: 20079 - DNA, 20 bp, Artificial Sequence
  chemically synthesized
ttgctgacctttgtcacaag

SEQ ID NO: 20080 - DNA, 20 bp, Artificial Sequence
  chemically synthesized
gcacctaatctccttcctac

SEQ ID NO: 20081 - DNA, 20 bp, Artificial Sequence
  chemically synthesized
gccttataaaatgatgttct

SEQ ID NO: 20082 - DNA, 20 bp, Artificial Sequence
  chemically synthesized
ctgcttctgcaactgtgttt

SEQ ID NO: 20083 - DNA, 20 bp, Artificial Sequence
  chemically synthesized
tctgcaactgtgttttggaa

SEQ ID NO: 20084 - DNA, 20 bp, Artificial Sequence
  chemically synthesized
ctgcaactgtgttttggaac

SEQ ID NO: 20085 - DNA, 20 bp, Artificial Sequence
  chemically synthesized
gcaactgtgttttggaacag

SEQ ID NO: 20086 - DNA, 20 bp, Artificial Sequence
  chemically synthesized
caactgtgttttggaacagg

SEQ ID NO: 20087 - DNA, 20 bp, Artificial Sequence
  chemically synthesized
aactgtgttttggaacagga

SEQ ID NO: 20088 - DNA, 20 bp, Artificial Sequence
  chemically synthesized
gtgttttggaacaggagggt

SEQ ID NO: 20089 - DNA, 20 bp, Artificial Sequence
  chemically synthesized
ttggaacaggagggtgagat

SEQ ID NO: 20090 - DNA, 20 bp, Artificial Sequence
  chemically synthesized
gaacaggagggtgagattag

SEQ ID NO: 20091 - DNA, 20 bp, Artificial Sequence
  chemically synthesized
agtagccacacacactgaaa

SEQ ID NO: 20092 - DNA, 20 bp, Artificial Sequence
  chemically synthesized
aaatagtcatatgacttcca

SEQ ID NO: 20093 - DNA, 20 bp, Artificial Sequence
  chemically synthesized
ttccaaagtctgtaattttt

SEQ ID NO: 20094 - DNA, 20 bp, Artificial Sequence
  chemically synthesized
atttttaagcatatacaaaa

SEQ ID NO: 20095 - DNA, 20 bp, Artificial Sequence
  chemically synthesized
tatgtgtgtatacatatata

SEQ ID NO: 20096 - DNA, 20 bp, Artificial Sequence
  chemically synthesized
tgtgtgtatacatatatata

SEQ ID NO: 20097 - DNA, 20 bp, Artificial Sequence
  chemically synthesized
tgtgtatacatatatataga

SEQ ID NO: 20098 - DNA, 20 bp, Artificial Sequence
  chemically synthesized
tgtatacatatatatagaga

SEQ ID NO: 20099 - DNA, 20 bp, Artificial Sequence
  chemically synthesized
tatacatatatatagagaga

SEQ ID NO: 20100 - DNA, 20 bp, Artificial Sequence
  chemically synthesized
catatatatagagagagaga

SEQ ID NO: 20101 - DNA, 20 bp, Artificial Sequence
  chemically synthesized
tatatatagagagagagaca

SEQ ID NO: 20102 - DNA, 20 bp, Artificial Sequence
  chemically synthesized
tatatagagagagagacaga

SEQ ID NO: 20103 - DNA, 20 bp, Artificial Sequence
  chemically synthesized
tatagagagagagacagaga

SEQ ID NO: 20104 - DNA, 20 bp, Artificial Sequence
  chemically synthesized
gagagagagacagagagaga

SEQ ID NO: 20105 - DNA, 20 bp, Artificial Sequence
  chemically synthesized
agagagagacagagagagat

SEQ ID NO: 20106 - DNA, 20 bp, Artificial Sequence
  chemically synthesized
gagagagacagagagagatg

SEQ ID NO: 20107 - DNA, 20 bp, Artificial Sequence
  chemically synthesized
agagagacagagagagatgg

SEQ ID NO: 20108 - DNA, 20 bp, Artificial Sequence
  chemically synthesized
agagacagagagagatgggg

SEQ ID NO: 20109 - DNA, 20 bp, Artificial Sequence
  chemically synthesized
agacagagagagatggggga

SEQ ID NO: 20110 - DNA, 20 bp, Artificial Sequence
  chemically synthesized
acagagagagatgggggaga

SEQ ID NO: 20111 - DNA, 20 bp, Artificial Sequence
  chemically synthesized
agagagagatgggggagaga

SEQ ID NO: 20112 - DNA, 20 bp, Artificial Sequence
  chemically synthesized
agagagatgggggagagaga

SEQ ID NO: 20113 - DNA, 20 bp, Artificial Sequence
  chemically synthesized
agagatgggggagagagaga

SEQ ID NO: 20114 - DNA, 20 bp, Artificial Sequence
  chemically synthesized
agatgggggagagagagaga

SEQ ID NO: 20115 - DNA, 20 bp, Artificial Sequence
  chemically synthesized
atgggggagagagagagaga

SEQ ID NO: 20116 - DNA, 20 bp, Artificial Sequence
  chemically synthesized
gggagagagagagagagagc

SEQ ID NO: 20117 - DNA, 20 bp, Artificial Sequence
  chemically synthesized
gagagagagagagagagcga

SEQ ID NO: 20118 - DNA, 20 bp, Artificial Sequence
  chemically synthesized
gagagagagagagagcgaga

SEQ ID NO: 20119 - DNA, 20 bp, Artificial Sequence
  chemically synthesized
gagagagagagagcgagaga

SEQ ID NO: 20120 - DNA, 20 bp, Artificial Sequence
  chemically synthesized
agagagagagagcgagagag

SEQ ID NO: 20121 - DNA, 20 bp, Artificial Sequence
  chemically synthesized
gagagagagcgagagagagg

SEQ ID NO: 20122 - DNA, 20 bp, Artificial Sequence
  chemically synthesized
gagagagcgagagagaggca

SEQ ID NO: 20123 - DNA, 20 bp, Artificial Sequence
  chemically synthesized
gagcgagagagaggcagaga

SEQ ID NO: 20124 - DNA, 20 bp, Artificial Sequence
  chemically synthesized
gcgagagagaggcagagaaa

SEQ ID NO: 20125 - DNA, 20 bp, Artificial Sequence
  chemically synthesized
agagaaagagatccttattt

SEQ ID NO: 20126 - DNA, 20 bp, Artificial Sequence
  chemically synthesized
tattctatacttctttgaaa

SEQ ID NO: 20127 - DNA, 20 bp, Artificial Sequence
  chemically synthesized
ttctttgaaatagtgatttt

SEQ ID NO: 20128 - DNA, 20 bp, Artificial Sequence
  chemically synthesized
aatagtgatttttagtaaat

SEQ ID NO: 20129 - DNA, 20 bp, Artificial Sequence
  chemically synthesized
agtgatttttagtaaattgg

SEQ ID NO: 20130 - DNA, 20 bp, Artificial Sequence
  chemically synthesized
tagtaaattggcagtgttgc

SEQ ID NO: 20131 - DNA, 20 bp, Artificial Sequence
  chemically synthesized
agtgttgccagatgacgact

SEQ ID NO: 20132 - DNA, 20 bp, Artificial Sequence
  chemically synthesized
tgttgccagatgacgactta

SEQ ID NO: 20133 - DNA, 20 bp, Artificial Sequence
  chemically synthesized
cctcattgttatatgtacca

SEQ ID NO: 20134 - DNA, 20 bp, Artificial Sequence
  chemically synthesized
cattgttatatgtaccatgg

SEQ ID NO: 20135 - DNA, 20 bp, Artificial Sequence
  chemically synthesized
tggtagctcatcttttcttt

SEQ ID NO: 20136 - DNA, 20 bp, Artificial Sequence
  chemically synthesized
ggtagctcatcttttctttc

SEQ ID NO: 20137 - DNA, 20 bp, Artificial Sequence
  chemically synthesized
tcatcttttctttcaggtga

SEQ ID NO: 20138 - DNA, 20 bp, Artificial Sequence
  chemically synthesized
ctttgtcctcacgctaaaca

SEQ ID NO: 20139 - DNA, 20 bp, Artificial Sequence
  chemically synthesized
acatagcccccatgttgttc

SEQ ID NO: 20140 - DNA, 20 bp, Artificial Sequence
  chemically synthesized
catagcccccatgttgttcc

SEQ ID NO: 20141 - DNA, 20 bp, Artificial Sequence
  chemically synthesized
cccatgttgttccaggaaaa

SEQ ID NO: 20142 - DNA, 20 bp, Artificial Sequence
  chemically synthesized
catgttgttccaggaaaata

SEQ ID NO: 20143 - DNA, 20 bp, Artificial Sequence
  chemically synthesized
atagagatcaataaaataca

SEQ ID NO: 20144 - DNA, 20 bp, Artificial Sequence
  chemically synthesized
aatacaaagtacttgtttga

SEQ ID NO: 20145 - DNA, 20 bp, Artificial Sequence
  chemically synthesized
aaagtacttgtttgaaagtg

SEQ ID NO: 20146 - DNA, 20 bp, Artificial Sequence
  chemically synthesized
aagtacttgtttgaaagtga

SEQ ID NO: 20147 - DNA, 20 bp, Artificial Sequence
  chemically synthesized
cttgtttgaaagtgaaggtt

SEQ ID NO: 20148 - DNA, 20 bp, Artificial Sequence
  chemically synthesized
aaattcaatgacctacgctg

SEQ ID NO: 20149 - DNA, 20 bp, Artificial Sequence
  chemically synthesized
gatcattcattaatgatatt

SEQ ID NO: 20150 - DNA, 20 bp, Artificial Sequence
  chemically synthesized
agtattttcttttttaatgt

SEQ ID NO: 20151 - DNA, 20 bp, Artificial Sequence
  chemically synthesized
agaataaaaccatttatttg

SEQ ID NO: 20152 - DNA, 20 bp, Artificial Sequence
  chemically synthesized
tatgtgtatgtaaatctcct

SEQ ID NO: 20153 - DNA, 20 bp, Artificial Sequence
  chemically synthesized
ttatacctcaaatatgaaaa

SEQ ID NO: 20154 - DNA, 20 bp, Artificial Sequence
  chemically synthesized
tatacctcaaatatgaaaat

SEQ ID NO: 20155 - DNA, 20 bp, Artificial Sequence
  chemically synthesized
tcttgcattcacttatattc

SEQ ID NO: 20156 - DNA, 20 bp, Artificial Sequence
  chemically synthesized
cacttatattctagcttgtt

SEQ ID NO: 20157 - DNA, 20 bp, Artificial Sequence
  chemically synthesized
cttatattctagcttgttaa

SEQ ID NO: 20158 - DNA, 20 bp, Artificial Sequence
  chemically synthesized
tatattctagcttgttaaga

SEQ ID NO: 20159 - DNA, 20 bp, Artificial Sequence
  chemically synthesized
attctagcttgttaagagag

SEQ ID NO: 20160 - DNA, 20 bp, Artificial Sequence
  chemically synthesized
agcttgttaagagagaagtt

SEQ ID NO: 20161 - DNA, 20 bp, Artificial Sequence
  chemically synthesized
gcttgttaagagagaagttt

SEQ ID NO: 20162 - DNA, 20 bp, Artificial Sequence
  chemically synthesized
cttgttaagagagaagtttg

SEQ ID NO: 20163 - DNA, 20 bp, Artificial Sequence
  chemically synthesized
ggcaaaatgtgctttataaa

SEQ ID NO: 20164 - DNA, 20 bp, Artificial Sequence
  chemically synthesized
ctttataaatagtaaaaact

SEQ ID NO: 20165 - DNA, 20 bp, Artificial Sequence
  chemically synthesized
tttataaatagtaaaaactg

SEQ ID NO: 20166 - DNA, 20 bp, Artificial Sequence
  chemically synthesized
gtaaaaactgaggtaaacta

SEQ ID NO: 20167 - DNA, 20 bp, Artificial Sequence
  chemically synthesized
ctgaggtaaactatagcaca

SEQ ID NO: 20168 - DNA, 20 bp, Artificial Sequence
  chemically synthesized
cacaaagtgtgctatataaa

SEQ ID NO: 20169 - DNA, 20 bp, Artificial Sequence
  chemically synthesized
ctatataaacagtaaaaacc

SEQ ID NO: 20170 - DNA, 20 bp, Artificial Sequence
  chemically synthesized
tatataaacagtaaaaaccg

SEQ ID NO: 20171 - DNA, 20 bp, Artificial Sequence
  chemically synthesized
taaaaaccgaggtaaaaata

SEQ ID NO: 20172 - DNA, 20 bp, Artificial Sequence
  chemically synthesized
aaaaaccgaggtaaaaatat

SEQ ID NO: 20173 - DNA, 20 bp, Artificial Sequence
  chemically synthesized
aaaaccgaggtaaaaatatg

SEQ ID NO: 20174 - DNA, 20 bp, Artificial Sequence
  chemically synthesized
aaccgaggtaaaaatatggg

SEQ ID NO: 20175 - DNA, 20 bp, Artificial Sequence
  chemically synthesized
accgaggtaaaaatatgggg

SEQ ID NO: 20176 - DNA, 20 bp, Artificial Sequence
  chemically synthesized
aaaatatggggaggacaaaa

SEQ ID NO: 20177 - DNA, 20 bp, Artificial Sequence
  chemically synthesized
aaatatggggaggacaaaaa

SEQ ID NO: 20178 - DNA, 20 bp, Artificial Sequence
  chemically synthesized
aatatggggaggacaaaaaa

SEQ ID NO: 20179 - DNA, 20 bp, Artificial Sequence
  chemically synthesized
aggacaaaaaagggctaaaa

SEQ ID NO: 20180 - DNA, 20 bp, Artificial Sequence
  chemically synthesized
aaaaagggctaaaatggtgt

SEQ ID NO: 20181 - DNA, 20 bp, Artificial Sequence
  chemically synthesized
ctaaaatggtgttggaatat

SEQ ID NO: 20182 - DNA, 20 bp, Artificial Sequence
  chemically synthesized
tggtgttggaatataagaaa

SEQ ID NO: 20183 - DNA, 20 bp, Artificial Sequence
  chemically synthesized
tgttggaatataagaaatag

SEQ ID NO: 20184 - DNA, 20 bp, Artificial Sequence
  chemically synthesized
aatataagaaatagcagtaa

SEQ ID NO: 20185 - DNA, 20 bp, Artificial Sequence
  chemically synthesized
ataagaaatagcagtaaaag

SEQ ID NO: 20186 - DNA, 20 bp, Artificial Sequence
  chemically synthesized
gcagtaaaagaagctcctca

SEQ ID NO: 20187 - DNA, 20 bp, Artificial Sequence
  chemically synthesized
taaaagaagctcctcacagc

SEQ ID NO: 20188 - DNA, 20 bp, Artificial Sequence
  chemically synthesized
agaagctcctcacagcaaga

SEQ ID NO: 20189 - DNA, 20 bp, Artificial Sequence
  chemically synthesized
ctcctcacagcaagacagta

SEQ ID NO: 20190 - DNA, 20 bp, Artificial Sequence
  chemically synthesized
tcctcacagcaagacagtac

SEQ ID NO: 20191 - DNA, 20 bp, Artificial Sequence
  chemically synthesized
cctcacagcaagacagtaca

SEQ ID NO: 20192 - DNA, 20 bp, Artificial Sequence
  chemically synthesized
agacagtacagggaaatgtc

SEQ ID NO: 20193 - DNA, 20 bp, Artificial Sequence
  chemically synthesized
acagtacagggaaatgtctg

SEQ ID NO: 20194 - DNA, 20 bp, Artificial Sequence
  chemically synthesized
cagtacagggaaatgtctgg

SEQ ID NO: 20195 - DNA, 20 bp, Artificial Sequence
  chemically synthesized
agtacagggaaatgtctgga

SEQ ID NO: 20196 - DNA, 20 bp, Artificial Sequence
  chemically synthesized
gggaaatgtctggagggaca

SEQ ID NO: 20197 - DNA, 20 bp, Artificial Sequence
  chemically synthesized
gacaaagatttacttacaat

SEQ ID NO: 20198 - DNA, 20 bp, Artificial Sequence
  chemically synthesized
acaaagatttacttacaatc

SEQ ID NO: 20199 - DNA, 20 bp, Artificial Sequence
  chemically synthesized
aatcaggcctcaaccaatat

SEQ ID NO: 20200 - DNA, 20 bp, Artificial Sequence
  chemically synthesized
tatgacgtgtttatatgtat

SEQ ID NO: 20201 - DNA, 20 bp, Artificial Sequence
  chemically synthesized
atgacgtgtttatatgtatc

SEQ ID NO: 20202 - DNA, 20 bp, Artificial Sequence
  chemically synthesized
gcatataatgtataatgatc

SEQ ID NO: 20203 - DNA, 20 bp, Artificial Sequence
  chemically synthesized
ataatgtataatgatcaagt

SEQ ID NO: 20204 - DNA, 20 bp, Artificial Sequence
  chemically synthesized
taatgtataatgatcaagtc

SEQ ID NO: 20205 - DNA, 20 bp, Artificial Sequence
  chemically synthesized
taatgatcaagtcaggtatt

SEQ ID NO: 20206 - DNA, 20 bp, Artificial Sequence
  chemically synthesized
aatgatcaagtcaggtattt

SEQ ID NO: 20207 - DNA, 20 bp, Artificial Sequence
  chemically synthesized
atgatcaagtcaggtatttg

SEQ ID NO: 20208 - DNA, 20 bp, Artificial Sequence
  chemically synthesized
tttggggtattcatcacctc

SEQ ID NO: 20209 - DNA, 20 bp, Artificial Sequence
  chemically synthesized
tatttatcgtttctatgtgt

SEQ ID NO: 20210 - DNA, 20 bp, Artificial Sequence
  chemically synthesized
atttatcgtttctatgtgtt

SEQ ID NO: 20211 - DNA, 20 bp, Artificial Sequence
  chemically synthesized
ctatgtgttaggaacatttc

SEQ ID NO: 20212 - DNA, 20 bp, Artificial Sequence
  chemically synthesized
cctactttgctattgaacat

SEQ ID NO: 20213 - DNA, 20 bp, Artificial Sequence
  chemically synthesized
tacacacctttctctacctc

SEQ ID NO: 20214 - DNA, 20 bp, Artificial Sequence
  chemically synthesized
ctacatgatattaacttttt

SEQ ID NO: 20215 - DNA, 20 bp, Artificial Sequence
  chemically synthesized
cttttttagctcccacatat

SEQ ID NO: 20216 - DNA, 20 bp, Artificial Sequence
  chemically synthesized
tttagctcccacatatcagt

SEQ ID NO: 20217 - DNA, 20 bp, Artificial Sequence
  chemically synthesized
aaaatttgtctttctatgcc

SEQ ID NO: 20218 - DNA, 20 bp, Artificial Sequence
  chemically synthesized
tcgtttaacataatgacttc

SEQ ID NO: 20219 - DNA, 20 bp, Artificial Sequence
  chemically synthesized
gaaatgattttatatttgta

SEQ ID NO: 20220 - DNA, 20 bp, Artificial Sequence
  chemically synthesized
tttcttcattcatccattga

SEQ ID NO: 20221 - DNA, 20 bp, Artificial Sequence
  chemically synthesized
ttcatccattgatggacact

SEQ ID NO: 20222 - DNA, 20 bp, Artificial Sequence
  chemically synthesized
tcatccattgatggacactt

SEQ ID NO: 20223 - DNA, 20 bp, Artificial Sequence
  chemically synthesized
gtgaatcgtgctgcaataaa

SEQ ID NO: 20224 - DNA, 20 bp, Artificial Sequence
  chemically synthesized
tcgtgctgcaataaacagtg

SEQ ID NO: 20225 - DNA, 20 bp, Artificial Sequence
  chemically synthesized
tgcaataaacagtgtggtac

SEQ ID NO: 20226 - DNA, 20 bp, Artificial Sequence
  chemically synthesized
tattctgaattcttttcctt

SEQ ID NO: 20227 - DNA, 20 bp, Artificial Sequence
  chemically synthesized
ttttcctttggataaatacc

SEQ ID NO: 20228 - DNA, 20 bp, Artificial Sequence
  chemically synthesized
ttggataaatacccagtaat

SEQ ID NO: 20229 - DNA, 20 bp, Artificial Sequence
  chemically synthesized
atacccagtaataagattgc

SEQ ID NO: 20230 - DNA, 20 bp, Artificial Sequence
  chemically synthesized
aagattgctggatcttatga

SEQ ID NO: 20231 - DNA, 20 bp, Artificial Sequence
  chemically synthesized
tcttatgatagttcaatttt

SEQ ID NO: 20232 - DNA, 20 bp, Artificial Sequence
  chemically synthesized
tagttcaatttttagctttt

SEQ ID NO: 20233 - DNA, 20 bp, Artificial Sequence
  chemically synthesized
aatctacatattgttttcca

SEQ ID NO: 20234 - DNA, 20 bp, Artificial Sequence
  chemically synthesized
ctacatattgttttccatag

SEQ ID NO: 20235 - DNA, 20 bp, Artificial Sequence
  chemically synthesized
ctaatttgcatgcttaccaa

SEQ ID NO: 20236 - DNA, 20 bp, Artificial Sequence
  chemically synthesized
tgcttaccaatagtgcctac

SEQ ID NO: 20237 - DNA, 20 bp, Artificial Sequence
  chemically synthesized
cttttccttcacatccttgc

SEQ ID NO: 20238 - DNA, 20 bp, Artificial Sequence
  chemically synthesized
taaatcatgatgattctaac

SEQ ID NO: 20239 - DNA, 20 bp, Artificial Sequence
  chemically synthesized
atgatgattctaactggcat

SEQ ID NO: 20240 - DNA, 20 bp, Artificial Sequence
  chemically synthesized
cataagatgatatctcattg

SEQ ID NO: 20241 - DNA, 20 bp, Artificial Sequence
  chemically synthesized
atttgcatttctctgatgat

SEQ ID NO: 20242 - DNA, 20 bp, Artificial Sequence
  chemically synthesized
ctctgatgattagtaatgtt

SEQ ID NO: 20243 - DNA, 20 bp, Artificial Sequence
  chemically synthesized
tcctttgccaattttttaat

SEQ ID NO: 20244 - DNA, 20 bp, Artificial Sequence
  chemically synthesized
ttatttgtttttccactgtt

SEQ ID NO: 20245 - DNA, 20 bp, Artificial Sequence
  chemically synthesized
tttccactgttgagttgttt

SEQ ID NO: 20246 - DNA, 20 bp, Artificial Sequence
  chemically synthesized
tttgagtttcttatatattc

SEQ ID NO: 20247 - DNA, 20 bp, Artificial Sequence
  chemically synthesized
tgagtttcttatatattctg

SEQ ID NO: 20248 - DNA, 20 bp, Artificial Sequence
  chemically synthesized
aaatattttctcgcattcaa

SEQ ID NO: 20249 - DNA, 20 bp, Artificial Sequence
  chemically synthesized
tgattgtttcctttactgtg

SEQ ID NO: 20250 - DNA, 20 bp, Artificial Sequence
  chemically synthesized
tttactgtgcagatgtattt

SEQ ID NO: 20251 - DNA, 20 bp, Artificial Sequence
  chemically synthesized
agatgtattttagcttaata

SEQ ID NO: 20252 - DNA, 20 bp, Artificial Sequence
  chemically synthesized
cttttgttgcctgtgctttt

SEQ ID NO: 20253 - DNA, 20 bp, Artificial Sequence
  chemically synthesized
ttttgttgcctgtgcttttg

SEQ ID NO: 20254 - DNA, 20 bp, Artificial Sequence
  chemically synthesized
tgcctgtgcttttgaggtct

SEQ ID NO: 20255 - DNA, 20 bp, Artificial Sequence
  chemically synthesized
ggccataaaatctttgccca

SEQ ID NO: 20256 - DNA, 20 bp, Artificial Sequence
  chemically synthesized
ttgcccaaagccatgtcttg

SEQ ID NO: 20257 - DNA, 20 bp, Artificial Sequence
  chemically synthesized
gtctcccttatgttttcttt

SEQ ID NO: 20258 - DNA, 20 bp, Artificial Sequence
  chemically synthesized
tcccttatgttttcttttag

SEQ ID NO: 20259 - DNA, 20 bp, Artificial Sequence
  chemically synthesized
gttttcttttagtagtttta

SEQ ID NO: 20260 - DNA, 20 bp, Artificial Sequence
  chemically synthesized
tttagtagttttatagtttt

SEQ ID NO: 20261 - DNA, 20 bp, Artificial Sequence
  chemically synthesized
tagttttaagttttatattt

SEQ ID NO: 20262 - DNA, 20 bp, Artificial Sequence
  chemically synthesized
ttaagtctttaatccatctt

SEQ ID NO: 20263 - DNA, 20 bp, Artificial Sequence
  chemically synthesized
aagtctttaatccatcttga

SEQ ID NO: 20264 - DNA, 20 bp, Artificial Sequence
  chemically synthesized
tcttgagagtacgttttata

SEQ ID NO: 20265 - DNA, 20 bp, Artificial Sequence
  chemically synthesized
acgttttatatggcaataaa

SEQ ID NO: 20266 - DNA, 20 bp, Artificial Sequence
  chemically synthesized
cgttttatatggcaataaat

SEQ ID NO: 20267 - DNA, 20 bp, Artificial Sequence
  chemically synthesized
gttttatatggcaataaata

SEQ ID NO: 20268 - DNA, 20 bp, Artificial Sequence
  chemically synthesized
ttttatatggcaataaatag

SEQ ID NO: 20269 - DNA, 20 bp, Artificial Sequence
  chemically synthesized
gcaataaataggggttgtat

SEQ ID NO: 20270 - DNA, 20 bp, Artificial Sequence
  chemically synthesized
caataaataggggttgtatt

SEQ ID NO: 20271 - DNA, 20 bp, Artificial Sequence
  chemically synthesized
catttttgcatctattgtac

SEQ ID NO: 20272 - DNA, 20 bp, Artificial Sequence
  chemically synthesized
atttttgcatctattgtaca

SEQ ID NO: 20273 - DNA, 20 bp, Artificial Sequence
  chemically synthesized
tttttgcatctattgtacaa

SEQ ID NO: 20274 - DNA, 20 bp, Artificial Sequence
  chemically synthesized
ttttgcatctattgtacaag

SEQ ID NO: 20275 - DNA, 20 bp, Artificial Sequence
  chemically synthesized
catctattgtacaaggggtt

SEQ ID NO: 20276 - DNA, 20 bp, Artificial Sequence
  chemically synthesized
tcttgatttgattctccatt

SEQ ID NO: 20277 - DNA, 20 bp, Artificial Sequence
  chemically synthesized
attctccatttggttgctgt

SEQ ID NO: 20278 - DNA, 20 bp, Artificial Sequence
  chemically synthesized
atttggttgctgttggtgta

SEQ ID NO: 20279 - DNA, 20 bp, Artificial Sequence
  chemically synthesized
tggttgctgttggtgtatag

SEQ ID NO: 20280 - DNA, 20 bp, Artificial Sequence
  chemically synthesized
gttgctgttggtgtatagaa

SEQ ID NO: 20281 - DNA, 20 bp, Artificial Sequence
  chemically synthesized
gtgtgcattcatcttgtatc

SEQ ID NO: 20282 - DNA, 20 bp, Artificial Sequence
  chemically synthesized
actttgctgaattattttat

SEQ ID NO: 20283 - DNA, 20 bp, Artificial Sequence
  chemically synthesized
ctgaattattttatcagttc

SEQ ID NO: 20284 - DNA, 20 bp, Artificial Sequence
  chemically synthesized
tgaattattttatcagttct

SEQ ID NO: 20285 - DNA, 20 bp, Artificial Sequence
  chemically synthesized
aattattttatcagttctag

SEQ ID NO: 20286 - DNA, 20 bp, Artificial Sequence
  chemically synthesized
tatcagttctaggagctttc

SEQ ID NO: 20287 - DNA, 20 bp, Artificial Sequence
  chemically synthesized
tcagttctaggagctttctg

SEQ ID NO: 20288 - DNA, 20 bp, Artificial Sequence
  chemically synthesized
cagttctaggagctttctgg

SEQ ID NO: 20289 - DNA, 20 bp, Artificial Sequence
  chemically synthesized
gttctaggagctttctggag

SEQ ID NO: 20290 - DNA, 20 bp, Artificial Sequence
  chemically synthesized
gagctttctggaggagtctt

SEQ ID NO: 20291 - DNA, 20 bp, Artificial Sequence
  chemically synthesized
agctttctggaggagtcttt

SEQ ID NO: 20292 - DNA, 20 bp, Artificial Sequence
  chemically synthesized
gctttctggaggagtcttta

SEQ ID NO: 20293 - DNA, 20 bp, Artificial Sequence
  chemically synthesized
gaggagtctttagggtttta

SEQ ID NO: 20294 - DNA, 20 bp, Artificial Sequence
  chemically synthesized
aggagtctttagggttttaa

SEQ ID NO: 20295 - DNA, 20 bp, Artificial Sequence
  chemically synthesized
aaggtaaatgatcatatcat

SEQ ID NO: 20296 - DNA, 20 bp, Artificial Sequence
  chemically synthesized
atgatcatatcatcagcaaa

SEQ ID NO: 20297 - DNA, 20 bp, Artificial Sequence
  chemically synthesized
atatcatcagcaaacagtga

SEQ ID NO: 20298 - DNA, 20 bp, Artificial Sequence
  chemically synthesized
tttgttttgtctgattgccc

SEQ ID NO: 20299 - DNA, 20 bp, Artificial Sequence
  chemically synthesized
ttttgtctgattgccctggc

SEQ ID NO: 20300 - DNA, 20 bp, Artificial Sequence
  chemically synthesized
tttgtctgattgccctggct

SEQ ID NO: 20301 - DNA, 20 bp, Artificial Sequence
  chemically synthesized
attgccctggctaggacttc

SEQ ID NO: 20302 - DNA, 20 bp, Artificial Sequence
  chemically synthesized
ggacttccagtactatgttg

SEQ ID NO: 20303 - DNA, 20 bp, Artificial Sequence
  chemically synthesized
acttccagtactatgttgaa

SEQ ID NO: 20304 - DNA, 20 bp, Artificial Sequence
  chemically synthesized
cttccagtactatgttgaag

SEQ ID NO: 20305 - DNA, 20 bp, Artificial Sequence
  chemically synthesized
tccagtactatgttgaagag

SEQ ID NO: 20306 - DNA, 20 bp, Artificial Sequence
  chemically synthesized
agtactatgttgaagaggag

SEQ ID NO: 20307 - DNA, 20 bp, Artificial Sequence
  chemically synthesized
ctatgttgaagaggagtggt

SEQ ID NO: 20308 - DNA, 20 bp, Artificial Sequence
  chemically synthesized
atgttgaagaggagtggtga

SEQ ID NO: 20309 - DNA, 20 bp, Artificial Sequence
  chemically synthesized
ttgaagaggagtggtgagag

SEQ ID NO: 20310 - DNA, 20 bp, Artificial Sequence
  chemically synthesized
tgaagaggagtggtgagagt

SEQ ID NO: 20311 - DNA, 20 bp, Artificial Sequence
  chemically synthesized
tgggcatccttgtcttgttc

SEQ ID NO: 20312 - DNA, 20 bp, Artificial Sequence
  chemically synthesized
ccttgtcttgttccagttct

SEQ ID NO: 20313 - DNA, 20 bp, Artificial Sequence
  chemically synthesized
ttgtcttgttccagttctca

SEQ ID NO: 20314 - DNA, 20 bp, Artificial Sequence
  chemically synthesized
tgtcttgttccagttctcag

SEQ ID NO: 20315 - DNA, 20 bp, Artificial Sequence
  chemically synthesized
gtcttgttccagttctcaga

SEQ ID NO: 20316 - DNA, 20 bp, Artificial Sequence
  chemically synthesized
ttccccattcaatattatgt

SEQ ID NO: 20317 - DNA, 20 bp, Artificial Sequence
  chemically synthesized
attcaatattatgttggctg

SEQ ID NO: 20318 - DNA, 20 bp, Artificial Sequence
  chemically synthesized
ttcaatattatgttggctgt

SEQ ID NO: 20319 - DNA, 20 bp, Artificial Sequence
  chemically synthesized
tgttggctgtgggtttgtca

SEQ ID NO: 20320 - DNA, 20 bp, Artificial Sequence
  chemically synthesized
ggctgtgggtttgtcacaga

SEQ ID NO: 20321 - DNA, 20 bp, Artificial Sequence
  chemically synthesized
cagatggcttttattacact

SEQ ID NO: 20322 - DNA, 20 bp, Artificial Sequence
  chemically synthesized
agatggcttttattacactg

SEQ ID NO: 20323 - DNA, 20 bp, Artificial Sequence
  chemically synthesized
tcttgtatgctgattttgct

SEQ ID NO: 20324 - DNA, 20 bp, Artificial Sequence
  chemically synthesized
ttttaatcataaatgtatgc

SEQ ID NO: 20325 - DNA, 20 bp, Artificial Sequence
  chemically synthesized
atgctttttctgcatctatt

SEQ ID NO: 20326 - DNA, 20 bp, Artificial Sequence
  chemically synthesized
tgtttttaaatctgtttatg

SEQ ID NO: 20327 - DNA, 20 bp, Artificial Sequence
  chemically synthesized
gtatcacacttattgacttg

SEQ ID NO: 20328 - DNA, 20 bp, Artificial Sequence
  chemically synthesized
tcaaaccaaccctgcatccc

SEQ ID NO: 20329 - DNA, 20 bp, Artificial Sequence
  chemically synthesized
ccaaccctgcatccctggca

SEQ ID NO: 20330 - DNA, 20 bp, Artificial Sequence
  chemically synthesized
gcatggaacctgcttgatca

SEQ ID NO: 20331 - DNA, 20 bp, Artificial Sequence
  chemically synthesized
tggaacctgcttgatcatgg

SEQ ID NO: 20332 - DNA, 20 bp, Artificial Sequence
  chemically synthesized
ttttgttatgttgttgaatt

SEQ ID NO: 20333 - DNA, 20 bp, Artificial Sequence
  chemically synthesized
tgttgttgaatttggttatc

SEQ ID NO: 20334 - DNA, 20 bp, Artificial Sequence
  chemically synthesized
tggttatctagtattttgtt

SEQ ID NO: 20335 - DNA, 20 bp, Artificial Sequence
  chemically synthesized
ggttatctagtattttgtta

SEQ ID NO: 20336 - DNA, 20 bp, Artificial Sequence
  chemically synthesized
tagtattttgttaaggattt

SEQ ID NO: 20337 - DNA, 20 bp, Artificial Sequence
  chemically synthesized
ttttagcatctatgttcatc

SEQ ID NO: 20338 - DNA, 20 bp, Artificial Sequence
  chemically synthesized
tttagcatctatgttcatca

SEQ ID NO: 20339 - DNA, 20 bp, Artificial Sequence
  chemically synthesized
tctatgttcatcaaggctat

SEQ ID NO: 20340 - DNA, 20 bp, Artificial Sequence
  chemically synthesized
tcatcaaggctatcagtctg

SEQ ID NO: 20341 - DNA, 20 bp, Artificial Sequence
  chemically synthesized
cagtctgtagttttcttttt

SEQ ID NO: 20342 - DNA, 20 bp, Artificial Sequence
  chemically synthesized
tttttggttatgtccttccc

SEQ ID NO: 20343 - DNA, 20 bp, Artificial Sequence
  chemically synthesized
gttatgtccttccctggttt

SEQ ID NO: 20344 - DNA, 20 bp, Artificial Sequence
  chemically synthesized
ccctggttttggtgtgatgc

SEQ ID NO: 20345 - DNA, 20 bp, Artificial Sequence
  chemically synthesized
ttggtgtgatgctggcttca

SEQ ID NO: 20346 - DNA, 20 bp, Artificial Sequence
  chemically synthesized
gctggcttcatagaatgaat

SEQ ID NO: 20347 - DNA, 20 bp, Artificial Sequence
  chemically synthesized
ctggcttcatagaatgaatt

SEQ ID NO: 20348 - DNA, 20 bp, Artificial Sequence
  chemically synthesized
tggcttcatagaatgaatta

SEQ ID NO: 20349 - DNA, 20 bp, Artificial Sequence
  chemically synthesized
cttcatagaatgaattaggg

SEQ ID NO: 20350 - DNA, 20 bp, Artificial Sequence
  chemically synthesized
ttcatagaatgaattagggc

SEQ ID NO: 20351 - DNA, 20 bp, Artificial Sequence
  chemically synthesized
ttccttctttatctgtcttg

SEQ ID NO: 20352 - DNA, 20 bp, Artificial Sequence
  chemically synthesized
tctttatctgtcttgtagaa

SEQ ID NO: 20353 - DNA, 20 bp, Artificial Sequence
  chemically synthesized
tcttgtagaatagtgtcaaa

SEQ ID NO: 20354 - DNA, 20 bp, Artificial Sequence
  chemically synthesized
gtagaatagtgtcaaaaaga

SEQ ID NO: 20355 - DNA, 20 bp, Artificial Sequence
  chemically synthesized
tagaatagtgtcaaaaagat

SEQ ID NO: 20356 - DNA, 20 bp, Artificial Sequence
  chemically synthesized
agaatagtgtcaaaaagatg

SEQ ID NO: 20357 - DNA, 20 bp, Artificial Sequence
  chemically synthesized
ccaattcctctttgaatgtc

SEQ ID NO: 20358 - DNA, 20 bp, Artificial Sequence
  chemically synthesized
attcctctttgaatgtctag

SEQ ID NO: 20359 - DNA, 20 bp, Artificial Sequence
  chemically synthesized
aattctgttgtgaatccatc

SEQ ID NO: 20360 - DNA, 20 bp, Artificial Sequence
  chemically synthesized
tctggtcctgaacttttttt

SEQ ID NO: 20361 - DNA, 20 bp, Artificial Sequence
  chemically synthesized
gtcctgaacttttttttggt

SEQ ID NO: 20362 - DNA, 20 bp, Artificial Sequence
  chemically synthesized
taaatctcactgcttgttat

SEQ ID NO: 20363 - DNA, 20 bp, Artificial Sequence
  chemically synthesized
actgcttgttattggtctgt

SEQ ID NO: 20364 - DNA, 20 bp, Artificial Sequence
  chemically synthesized
ggtctgttagtaaatttatt

SEQ ID NO: 20365 - DNA, 20 bp, Artificial Sequence
  chemically synthesized
gtctgttagtaaatttattg

SEQ ID NO: 20366 - DNA, 20 bp, Artificial Sequence
  chemically synthesized
atttattgaggctcatttca

SEQ ID NO: 20367 - DNA, 20 bp, Artificial Sequence
  chemically synthesized
tcatttcatggcctatcata

SEQ ID NO: 20368 - DNA, 20 bp, Artificial Sequence
  chemically synthesized
gcctatcatatggtctacct

SEQ ID NO: 20369 - DNA, 20 bp, Artificial Sequence
  chemically synthesized
ctatcatatggtctaccttg

SEQ ID NO: 20370 - DNA, 20 bp, Artificial Sequence
  chemically synthesized
aatttccacgcgctgttgaa

SEQ ID NO: 20371 - DNA, 20 bp, Artificial Sequence
  chemically synthesized
tgaatagaatgtgtgttctg

SEQ ID NO: 20372 - DNA, 20 bp, Artificial Sequence
  chemically synthesized
aatgtgtgttctgtggttat

SEQ ID NO: 20373 - DNA, 20 bp, Artificial Sequence
  chemically synthesized
atgttctgtatataactgtt

SEQ ID NO: 20374 - DNA, 20 bp, Artificial Sequence
  chemically synthesized
ctgttaagtccatttgttct

SEQ ID NO: 20375 - DNA, 20 bp, Artificial Sequence
  chemically synthesized
tgttaagtccatttgttcta

SEQ ID NO: 20376 - DNA, 20 bp, Artificial Sequence
  chemically synthesized
ttctgtcttgatgaactgtc

SEQ ID NO: 20377 - DNA, 20 bp, Artificial Sequence
  chemically synthesized
actgtctagtgctgtcaatg

SEQ ID NO: 20378 - DNA, 20 bp, Artificial Sequence
  chemically synthesized
gtgctgtcaatgaagtattg

SEQ ID NO: 20379 - DNA, 20 bp, Artificial Sequence
  chemically synthesized
ttgctgtctatctcatttct

SEQ ID NO: 20380 - DNA, 20 bp, Artificial Sequence
  chemically synthesized
tgctgtctatctcatttctt

SEQ ID NO: 20381 - DNA, 20 bp, Artificial Sequence
  chemically synthesized
atctcatttcttaggtctat

SEQ ID NO: 20382 - DNA, 20 bp, Artificial Sequence
  chemically synthesized
tagtaattgttctataaatt

SEQ ID NO: 20383 - DNA, 20 bp, Artificial Sequence
  chemically synthesized
agtaattgttctataaattt

SEQ ID NO: 20384 - DNA, 20 bp, Artificial Sequence
  chemically synthesized
taattgttctataaatttgg

SEQ ID NO: 20385 - DNA, 20 bp, Artificial Sequence
  chemically synthesized
ttctataaatttgggagctc

SEQ ID NO: 20386 - DNA, 20 bp, Artificial Sequence
  chemically synthesized
aaatttgggagctccagtgt

SEQ ID NO: 20387 - DNA, 20 bp, Artificial Sequence
  chemically synthesized
aatttgggagctccagtgtt

SEQ ID NO: 20388 - DNA, 20 bp, Artificial Sequence
  chemically synthesized
tgttaggtgcatatatgttt

SEQ ID NO: 20389 - DNA, 20 bp, Artificial Sequence
  chemically synthesized
agattgtgatattttcctgt

SEQ ID NO: 20390 - DNA, 20 bp, Artificial Sequence
  chemically synthesized
gtgatattttcctgttggac

SEQ ID NO: 20391 - DNA, 20 bp, Artificial Sequence
  chemically synthesized
tgatattttcctgttggaca

SEQ ID NO: 20392 - DNA, 20 bp, Artificial Sequence
  chemically synthesized
ttttaactgctgttgcttta

SEQ ID NO: 20393 - DNA, 20 bp, Artificial Sequence
  chemically synthesized
ttgttttgcctactcacttt

SEQ ID NO: 20394 - DNA, 20 bp, Artificial Sequence
  chemically synthesized
ttttgcctactcacttttgg

SEQ ID NO: 20395 - DNA, 20 bp, Artificial Sequence
  chemically synthesized
aatacctttttcaccctttt

SEQ ID NO: 20396 - DNA, 20 bp, Artificial Sequence
  chemically synthesized
acctttttcacccttttaag

SEQ ID NO: 20397 - DNA, 20 bp, Artificial Sequence
  chemically synthesized
ctttttcacccttttaagtg

SEQ ID NO: 20398 - DNA, 20 bp, Artificial Sequence
  chemically synthesized
acccttttaagtggagcatt

SEQ ID NO: 20399 - DNA, 20 bp, Artificial Sequence
  chemically synthesized
cccttttaagtggagcattt

SEQ ID NO: 20400 - DNA, 20 bp, Artificial Sequence
  chemically synthesized
aggccatttacattcaatgt

SEQ ID NO: 20401 - DNA, 20 bp, Artificial Sequence
  chemically synthesized
atgttagtaatgtaaatgcc

SEQ ID NO: 20402 - DNA, 20 bp, Artificial Sequence
  chemically synthesized
atgtaaatgcctggctatgc

SEQ ID NO: 20403 - DNA, 20 bp, Artificial Sequence
  chemically synthesized
tgtaaatgcctggctatgcc

SEQ ID NO: 20404 - DNA, 20 bp, Artificial Sequence
  chemically synthesized
aaatgcctggctatgccagg

SEQ ID NO: 20405 - DNA, 20 bp, Artificial Sequence
  chemically synthesized
aatgcctggctatgccaggc

SEQ ID NO: 20406 - DNA, 20 bp, Artificial Sequence
  chemically synthesized
ctggctatgccaggcaggaa

SEQ ID NO: 20407 - DNA, 20 bp, Artificial Sequence
  chemically synthesized
ccaggcaggaatggcctgct

SEQ ID NO: 20408 - DNA, 20 bp, Artificial Sequence
  chemically synthesized
caggcaggaatggcctgctc

SEQ ID NO: 20409 - DNA, 20 bp, Artificial Sequence
  chemically synthesized
aggcaggaatggcctgctca

SEQ ID NO: 20410 - DNA, 20 bp, Artificial Sequence
  chemically synthesized
gaatggcctgctcagggacc

SEQ ID NO: 20411 - DNA, 20 bp, Artificial Sequence
  chemically synthesized
ggcctgctcagggacccagt

SEQ ID NO: 20412 - DNA, 20 bp, Artificial Sequence
  chemically synthesized
tcagggacccagtgagctcc

SEQ ID NO: 20413 - DNA, 20 bp, Artificial Sequence
  chemically synthesized
cagggacccagtgagctccc

SEQ ID NO: 20414 - DNA, 20 bp, Artificial Sequence
  chemically synthesized
agggacccagtgagctccca

SEQ ID NO: 20415 - DNA, 20 bp, Artificial Sequence
  chemically synthesized
ctctacacctgtattttgct

SEQ ID NO: 20416 - DNA, 20 bp, Artificial Sequence
  chemically synthesized
tgtattttgctcagctctct

SEQ ID NO: 20417 - DNA, 20 bp, Artificial Sequence
  chemically synthesized
tctctaagttaactcaactc

SEQ ID NO: 20418 - DNA, 20 bp, Artificial Sequence
  chemically synthesized
ctctaagttaactcaactcc

SEQ ID NO: 20419 - DNA, 20 bp, Artificial Sequence
  chemically synthesized
aagttaactcaactccaggt

SEQ ID NO: 20420 - DNA, 20 bp, Artificial Sequence
  chemically synthesized
agttaactcaactccaggta

SEQ ID NO: 20421 - DNA, 20 bp, Artificial Sequence
  chemically synthesized
aactcaactccaggtaaggt

SEQ ID NO: 20422 - DNA, 20 bp, Artificial Sequence
  chemically synthesized
tcagaaacttctcccacaaa

SEQ ID NO: 20423 - DNA, 20 bp, Artificial Sequence
  chemically synthesized
ttctcccacaaacagacctt

SEQ ID NO: 20424 - DNA, 20 bp, Artificial Sequence
  chemically synthesized
aaacagaccttcagtttctc

SEQ ID NO: 20425 - DNA, 20 bp, Artificial Sequence
  chemically synthesized
cagaccttcagtttctccag

SEQ ID NO: 20426 - DNA, 20 bp, Artificial Sequence
  chemically synthesized
agaccttcagtttctccagt

SEQ ID NO: 20427 - DNA, 20 bp, Artificial Sequence
  chemically synthesized
accttcagtttctccagtgg

SEQ ID NO: 20428 - DNA, 20 bp, Artificial Sequence
  chemically synthesized
ctccagtgggagtgtgtgtt

SEQ ID NO: 20429 - DNA, 20 bp, Artificial Sequence
  chemically synthesized
tccagtgggagtgtgtgttt

SEQ ID NO: 20430 - DNA, 20 bp, Artificial Sequence
  chemically synthesized
cagtgggagtgtgtgtttag

SEQ ID NO: 20431 - DNA, 20 bp, Artificial Sequence
  chemically synthesized
gtgggagtgtgtgtttagga

SEQ ID NO: 20432 - DNA, 20 bp, Artificial Sequence
  chemically synthesized
tgggagtgtgtgtttaggag

SEQ ID NO: 20433 - DNA, 20 bp, Artificial Sequence
  chemically synthesized
ggagtgtgtgtttaggagag

SEQ ID NO: 20434 - DNA, 20 bp, Artificial Sequence
  chemically synthesized
gagtgtgtgtttaggagagg

SEQ ID NO: 20435 - DNA, 20 bp, Artificial Sequence
  chemically synthesized
atctccctttcccacttccg

SEQ ID NO: 20436 - DNA, 20 bp, Artificial Sequence
  chemically synthesized
ccctttcccacttccgcagt

SEQ ID NO: 20437 - DNA, 20 bp, Artificial Sequence
  chemically synthesized
cctttcccacttccgcagtt

SEQ ID NO: 20438 - DNA, 20 bp, Artificial Sequence
  chemically synthesized
ctttcccacttccgcagttg

SEQ ID NO: 20439 - DNA, 20 bp, Artificial Sequence
  chemically synthesized
ttccgcagttggggcactca

SEQ ID NO: 20440 - DNA, 20 bp, Artificial Sequence
  chemically synthesized
gttggggcactcacagtatt

SEQ ID NO: 20441 - DNA, 20 bp, Artificial Sequence
  chemically synthesized
ttggggcactcacagtattt

SEQ ID NO: 20442 - DNA, 20 bp, Artificial Sequence
  chemically synthesized
tggggcactcacagtatttg

SEQ ID NO: 20443 - DNA, 20 bp, Artificial Sequence
  chemically synthesized
acagtatttggggtgtctcc

SEQ ID NO: 20444 - DNA, 20 bp, Artificial Sequence
  chemically synthesized
cagtatttggggtgtctcct

SEQ ID NO: 20445 - DNA, 20 bp, Artificial Sequence
  chemically synthesized
ggggtgtctcctgggtcctg

SEQ ID NO: 20446 - DNA, 20 bp, Artificial Sequence
  chemically synthesized
gggtgtctcctgggtcctgc

SEQ ID NO: 20447 - DNA, 20 bp, Artificial Sequence
  chemically synthesized
gtgtctcctgggtcctgcag

SEQ ID NO: 20448 - DNA, 20 bp, Artificial Sequence
  chemically synthesized
caggagcaatctacttcctt

SEQ ID NO: 20449 - DNA, 20 bp, Artificial Sequence
  chemically synthesized
ggagcaatctacttccttca

SEQ ID NO: 20450 - DNA, 20 bp, Artificial Sequence
  chemically synthesized
gagcaatctacttccttcag

SEQ ID NO: 20451 - DNA, 20 bp, Artificial Sequence
  chemically synthesized
agcaatctacttccttcaga

SEQ ID NO: 20452 - DNA, 20 bp, Artificial Sequence
  chemically synthesized
tacttccttcagagggtctg

SEQ ID NO: 20453 - DNA, 20 bp, Artificial Sequence
  chemically synthesized
acttccttcagagggtctgt

SEQ ID NO: 20454 - DNA, 20 bp, Artificial Sequence
  chemically synthesized
agagggtctgtgggtcctct

SEQ ID NO: 20455 - DNA, 20 bp, Artificial Sequence
  chemically synthesized
gagggtctgtgggtcctctc

SEQ ID NO: 20456 - DNA, 20 bp, Artificial Sequence
  chemically synthesized
gtgggtcctctcaggattgc

SEQ ID NO: 20457 - DNA, 20 bp, Artificial Sequence
  chemically synthesized
ggattgctggtttgttcttg

SEQ ID NO: 20458 - DNA, 20 bp, Artificial Sequence
  chemically synthesized
ttgttcttgcagtctatctg

SEQ ID NO: 20459 - DNA, 20 bp, Artificial Sequence
  chemically synthesized
gcagctaaaattcacaatgc

SEQ ID NO: 20460 - DNA, 20 bp, Artificial Sequence
  chemically synthesized
acatgctgctctgtccatct

SEQ ID NO: 20461 - DNA, 20 bp, Artificial Sequence
  chemically synthesized
gctgctctgtccatctgagt

SEQ ID NO: 20462 - DNA, 20 bp, Artificial Sequence
  chemically synthesized
tgctctgtccatctgagttg

SEQ ID NO: 20463 - DNA, 20 bp, Artificial Sequence
  chemically synthesized
tctgagttggagctgcaatc

SEQ ID NO: 20464 - DNA, 20 bp, Artificial Sequence
  chemically synthesized
ctgagttggagctgcaatct

SEQ ID NO: 20465 - DNA, 20 bp, Artificial Sequence
  chemically synthesized
aggcctacctcccatccgcc

SEQ ID NO: 20466 - DNA, 20 bp, Artificial Sequence
  chemically synthesized
ctcccatccgccaagatcct

SEQ ID NO: 20467 - DNA, 20 bp, Artificial Sequence
  chemically synthesized
ccatccgccaagatcctgag

SEQ ID NO: 20468 - DNA, 20 bp, Artificial Sequence
  chemically synthesized
ccgccaagatcctgagaagt

SEQ ID NO: 20469 - DNA, 20 bp, Artificial Sequence
  chemically synthesized
cgccaagatcctgagaagtt

SEQ ID NO: 20470 - DNA, 20 bp, Artificial Sequence
  chemically synthesized
gccaagatcctgagaagttg

SEQ ID NO: 20471 - DNA, 20 bp, Artificial Sequence
  chemically synthesized
tggggattatatttcaacat

SEQ ID NO: 20472 - DNA, 20 bp, Artificial Sequence
  chemically synthesized
ttatatttcaacatgagatt

SEQ ID NO: 20473 - DNA, 20 bp, Artificial Sequence
  chemically synthesized
atatttcaacatgagatttg

SEQ ID NO: 20474 - DNA, 20 bp, Artificial Sequence
  chemically synthesized
tatttcaacatgagatttgg

SEQ ID NO: 20475 - DNA, 20 bp, Artificial Sequence
  chemically synthesized
atttcaacatgagatttgga

SEQ ID NO: 20476 - DNA, 20 bp, Artificial Sequence
  chemically synthesized
aacaaacatccaaaccatat

SEQ ID NO: 20477 - DNA, 20 bp, Artificial Sequence
  chemically synthesized
aaacatccaaaccatatcag

SEQ ID NO: 20478 - DNA, 20 bp, Artificial Sequence
  chemically synthesized
tccaaaccatatcagcagtc

SEQ ID NO: 20479 - DNA, 20 bp, Artificial Sequence
  chemically synthesized
cagttttattcttttgcaca

SEQ ID NO: 20480 - DNA, 20 bp, Artificial Sequence
  chemically synthesized
ttttgcacatggatatccaa

SEQ ID NO: 20481 - DNA, 20 bp, Artificial Sequence
  chemically synthesized
caatggatatccaatttttt

SEQ ID NO: 20482 - DNA, 20 bp, Artificial Sequence
  chemically synthesized
cacctttgttgaaaatctgt

SEQ ID NO: 20483 - DNA, 20 bp, Artificial Sequence
  chemically synthesized
atctgttggctataaatatg

SEQ ID NO: 20484 - DNA, 20 bp, Artificial Sequence
  chemically synthesized
taaatatgtggatgcatttc

SEQ ID NO: 20485 - DNA, 20 bp, Artificial Sequence
  chemically synthesized
aaatatgtggatgcatttct

SEQ ID NO: 20486 - DNA, 20 bp, Artificial Sequence
  chemically synthesized
ggttctctattctcttccat

SEQ ID NO: 20487 - DNA, 20 bp, Artificial Sequence
  chemically synthesized
ctattctcttccattggtct

SEQ ID NO: 20488 - DNA, 20 bp, Artificial Sequence
  chemically synthesized
ctaagtgtctgttctaatgt

SEQ ID NO: 20489 - DNA, 20 bp, Artificial Sequence
  chemically synthesized
aatgtcagtatcatgctgtt

SEQ ID NO: 20490 - DNA, 20 bp, Artificial Sequence
  chemically synthesized
atgtcagtatcatgctgttt

SEQ ID NO: 20491 - DNA, 20 bp, Artificial Sequence
  chemically synthesized
tttgtaatatactttgaaat

SEQ ID NO: 20492 - DNA, 20 bp, Artificial Sequence
  chemically synthesized
ttgtaatatactttgaaatc

SEQ ID NO: 20493 - DNA, 20 bp, Artificial Sequence
  chemically synthesized
taatatactttgaaatcagg

SEQ ID NO: 20494 - DNA, 20 bp, Artificial Sequence
  chemically synthesized
atcaggtagtatgatacctc

SEQ ID NO: 20495 - DNA, 20 bp, Artificial Sequence
  chemically synthesized
ctagcattgttcttttttca

SEQ ID NO: 20496 - DNA, 20 bp, Artificial Sequence
  chemically synthesized
tagcattgttcttttttcac

SEQ ID NO: 20497 - DNA, 20 bp, Artificial Sequence
  chemically synthesized
cttttttcacaggatgactt

SEQ ID NO: 20498 - DNA, 20 bp, Artificial Sequence
  chemically synthesized
cacaggatgactttggctac

SEQ ID NO: 20499 - DNA, 20 bp, Artificial Sequence
  chemically synthesized
caggatgactttggctactg

SEQ ID NO: 20500 - DNA, 20 bp, Artificial Sequence
  chemically synthesized
ttttaatttcatacaaattt

SEQ ID NO: 20501 - DNA, 20 bp, Artificial Sequence
  chemically synthesized
atttcatacaaattttagat

SEQ ID NO: 20502 - DNA, 20 bp, Artificial Sequence
  chemically synthesized
aaatgacattgctattttga

SEQ ID NO: 20503 - DNA, 20 bp, Artificial Sequence
  chemically synthesized
tgacattgctattttgatag

SEQ ID NO: 20504 - DNA, 20 bp, Artificial Sequence
  chemically synthesized
ctattttgatagcggtcata

SEQ ID NO: 20505 - DNA, 20 bp, Artificial Sequence
  chemically synthesized
tagcggtcatatagaatctg

SEQ ID NO: 20506 - DNA, 20 bp, Artificial Sequence
  chemically synthesized
atagaatctgtagattgctt

SEQ ID NO: 20507 - DNA, 20 bp, Artificial Sequence
  chemically synthesized
tagaatctgtagattgcttt

SEQ ID NO: 20508 - DNA, 20 bp, Artificial Sequence
  chemically synthesized
aatctgtagattgctttggg

SEQ ID NO: 20509 - DNA, 20 bp, Artificial Sequence
  chemically synthesized
gtagattgctttgggtagta

SEQ ID NO: 20510 - DNA, 20 bp, Artificial Sequence
  chemically synthesized
atttttctgatccatgaaca

SEQ ID NO: 20511 - DNA, 20 bp, Artificial Sequence
  chemically synthesized
tttttctgatccatgaacat

SEQ ID NO: 20512 - DNA, 20 bp, Artificial Sequence
  chemically synthesized
gtccttttcaattcttttat

SEQ ID NO: 20513 - DNA, 20 bp, Artificial Sequence
  chemically synthesized
attcttttatcagtgttttg

SEQ ID NO: 20514 - DNA, 20 bp, Artificial Sequence
  chemically synthesized
gtgttttgtagttttccgaa

SEQ ID NO: 20515 - DNA, 20 bp, Artificial Sequence
  chemically synthesized
gttttgtagttttccgaata

SEQ ID NO: 20516 - DNA, 20 bp, Artificial Sequence
  chemically synthesized
ttttgtagttttccgaatag

SEQ ID NO: 20517 - DNA, 20 bp, Artificial Sequence
  chemically synthesized
ttttccgaatagaggttttt

SEQ ID NO: 20518 - DNA, 20 bp, Artificial Sequence
  chemically synthesized
atagaggtttttcggttcct

SEQ ID NO: 20519 - DNA, 20 bp, Artificial Sequence
  chemically synthesized
tccctaaatattttattttt

SEQ ID NO: 20520 - DNA, 20 bp, Artificial Sequence
  chemically synthesized
tattttttagctattgtaaa

SEQ ID NO: 20521 - DNA, 20 bp, Artificial Sequence
  chemically synthesized
attttttagctattgtaaat

SEQ ID NO: 20522 - DNA, 20 bp, Artificial Sequence
  chemically synthesized
tgccttcttaatttccttct

SEQ ID NO: 20523 - DNA, 20 bp, Artificial Sequence
  chemically synthesized
ttcttaatttccttctcagc

SEQ ID NO: 20524 - DNA, 20 bp, Artificial Sequence
  chemically synthesized
cttctcagctagtttattat

SEQ ID NO: 20525 - DNA, 20 bp, Artificial Sequence
  chemically synthesized
gctagtttattattggtgtg

SEQ ID NO: 20526 - DNA, 20 bp, Artificial Sequence
  chemically synthesized
actttactgaatttattttt

SEQ ID NO: 20527 - DNA, 20 bp, Artificial Sequence
  chemically synthesized
tgaatttatttttcagcgct

SEQ ID NO: 20528 - DNA, 20 bp, Artificial Sequence
  chemically synthesized
aatttatttttcagcgctaa

SEQ ID NO: 20529 - DNA, 20 bp, Artificial Sequence
  chemically synthesized
tttcagcgctaagagtgctt

SEQ ID NO: 20530 - DNA, 20 bp, Artificial Sequence
  chemically synthesized
cagcgctaagagtgctttgg

SEQ ID NO: 20531 - DNA, 20 bp, Artificial Sequence
  chemically synthesized
gcgctaagagtgctttggtg

SEQ ID NO: 20532 - DNA, 20 bp, Artificial Sequence
  chemically synthesized
agagtgctttggtggagtct

SEQ ID NO: 20533 - DNA, 20 bp, Artificial Sequence
  chemically synthesized
tggtggagtcttggtttttc

SEQ ID NO: 20534 - DNA, 20 bp, Artificial Sequence
  chemically synthesized
ggtggagtcttggtttttct

SEQ ID NO: 20535 - DNA, 20 bp, Artificial Sequence
  chemically synthesized
aggtataaaatcatgtcatc

SEQ ID NO: 20536 - DNA, 20 bp, Artificial Sequence
  chemically synthesized
ataaaatcatgtcatctgga

SEQ ID NO: 20537 - DNA, 20 bp, Artificial Sequence
  chemically synthesized
aatcatgtcatctggaaaga

SEQ ID NO: 20538 - DNA, 20 bp, Artificial Sequence
  chemically synthesized
atgtcatctggaaagatgga

SEQ ID NO: 20539 - DNA, 20 bp, Artificial Sequence
  chemically synthesized
tctttctttctctgacctga

SEQ ID NO: 20540 - DNA, 20 bp, Artificial Sequence
  chemically synthesized
tttctctgacctgaaagctg

SEQ ID NO: 20541 - DNA, 20 bp, Artificial Sequence
  chemically synthesized
tctgacctgaaagctgtggc

SEQ ID NO: 20542 - DNA, 20 bp, Artificial Sequence
  chemically synthesized
ctgacctgaaagctgtggct

SEQ ID NO: 20543 - DNA, 20 bp, Artificial Sequence
  chemically synthesized
aaagctgtggctaggacttc

SEQ ID NO: 20544 - DNA, 20 bp, Artificial Sequence
  chemically synthesized
acttccagtattatattgaa

SEQ ID NO: 20545 - DNA, 20 bp, Artificial Sequence
  chemically synthesized
cttccagtattatattgaat

SEQ ID NO: 20546 - DNA, 20 bp, Artificial Sequence
  chemically synthesized
tccagtattatattgaatag

SEQ ID NO: 20547 - DNA, 20 bp, Artificial Sequence
  chemically synthesized
attatattgaataggagtga

SEQ ID NO: 20548 - DNA, 20 bp, Artificial Sequence
  chemically synthesized
atattgaataggagtgatgg

SEQ ID NO: 20549 - DNA, 20 bp, Artificial Sequence
  chemically synthesized
ttgaataggagtgatggaag

SEQ ID NO: 20550 - DNA, 20 bp, Artificial Sequence
  chemically synthesized
tgaataggagtgatggaagt

SEQ ID NO: 20551 - DNA, 20 bp, Artificial Sequence
  chemically synthesized
tgggcatccttattttgttt

SEQ ID NO: 20552 - DNA, 20 bp, Artificial Sequence
  chemically synthesized
ccttattttgtttcagttct

SEQ ID NO: 20553 - DNA, 20 bp, Artificial Sequence
  chemically synthesized
ttattttgtttcagttctta

SEQ ID NO: 20554 - DNA, 20 bp, Artificial Sequence
  chemically synthesized
tattttgtttcagttcttag

SEQ ID NO: 20555 - DNA, 20 bp, Artificial Sequence
  chemically synthesized
ttgtttcagttcttagagga

SEQ ID NO: 20556 - DNA, 20 bp, Artificial Sequence
  chemically synthesized
tgtttcagttcttagaggaa

SEQ ID NO: 20557 - DNA, 20 bp, Artificial Sequence
  chemically synthesized
gttcttagaggaaaggcttc

SEQ ID NO: 20558 - DNA, 20 bp, Artificial Sequence
  chemically synthesized
gcttccagcttttcccaatt

SEQ ID NO: 20559 - DNA, 20 bp, Artificial Sequence
  chemically synthesized
ttcccaattcagtatgatgt

SEQ ID NO: 20560 - DNA, 20 bp, Artificial Sequence
  chemically synthesized
attcagtatgatgttagctg

SEQ ID NO: 20561 - DNA, 20 bp, Artificial Sequence
  chemically synthesized
ttcagtatgatgttagctgt

SEQ ID NO: 20562 - DNA, 20 bp, Artificial Sequence
  chemically synthesized
tatatgacttttattatatt

SEQ ID NO: 20563 - DNA, 20 bp, Artificial Sequence
  chemically synthesized
agatatgttccttctatgat

SEQ ID NO: 20564 - DNA, 20 bp, Artificial Sequence
  chemically synthesized
gttccttctatgattggctg

SEQ ID NO: 20565 - DNA, 20 bp, Artificial Sequence
  chemically synthesized
cttctatgattggctgcaga

SEQ ID NO: 20566 - DNA, 20 bp, Artificial Sequence
  chemically synthesized
tgcagatagtttttatcatg

SEQ ID NO: 20567 - DNA, 20 bp, Artificial Sequence
  chemically synthesized
gcagatagtttttatcatga

SEQ ID NO: 20568 - DNA, 20 bp, Artificial Sequence
  chemically synthesized
atactttttctgtatctatt

SEQ ID NO: 20569 - DNA, 20 bp, Artificial Sequence
  chemically synthesized
tatctattgagatgatcata

SEQ ID NO: 20570 - DNA, 20 bp, Artificial Sequence
  chemically synthesized
ttgaactgttcttgcaaccc

SEQ ID NO: 20571 - DNA, 20 bp, Artificial Sequence
  chemically synthesized
gtataaatcccacttgatca

SEQ ID NO: 20572 - DNA, 20 bp, Artificial Sequence
  chemically synthesized
gatcatggtgtattatcttt

SEQ ID NO: 20573 - DNA, 20 bp, Artificial Sequence
  chemically synthesized
ttatcttttggatgtactgt

SEQ ID NO: 20574 - DNA, 20 bp, Artificial Sequence
  chemically synthesized
tttggatgtactgttggatt

SEQ ID NO: 20575 - DNA, 20 bp, Artificial Sequence
  chemically synthesized
tactgttggattcagtttgc

SEQ ID NO: 20576 - DNA, 20 bp, Artificial Sequence
  chemically synthesized
cagtttgctagtattttgtt

SEQ ID NO: 20577 - DNA, 20 bp, Artificial Sequence
  chemically synthesized
agtttgctagtattttgttg

SEQ ID NO: 20578 - DNA, 20 bp, Artificial Sequence
  chemically synthesized
ttttcacacctatgttccat

SEQ ID NO: 20579 - DNA, 20 bp, Artificial Sequence
  chemically synthesized
tttcacacctatgttccatc

SEQ ID NO: 20580 - DNA, 20 bp, Artificial Sequence
  chemically synthesized
ttcacacctatgttccatca

SEQ ID NO: 20581 - DNA, 20 bp, Artificial Sequence
  chemically synthesized
ccatcagggatattgacctg

SEQ ID NO: 20582 - DNA, 20 bp, Artificial Sequence
  chemically synthesized
tttttacttgcatccttgtc

SEQ ID NO: 20583 - DNA, 20 bp, Artificial Sequence
  chemically synthesized
cttgcatccttgtctggtta

SEQ ID NO: 20584 - DNA, 20 bp, Artificial Sequence
  chemically synthesized
tccttgtctggttatggaat

SEQ ID NO: 20585 - DNA, 20 bp, Artificial Sequence
  chemically synthesized
ccttgtctggttatggaatc

SEQ ID NO: 20586 - DNA, 20 bp, Artificial Sequence
  chemically synthesized
ttatggaatcaggataatac

SEQ ID NO: 20587 - DNA, 20 bp, Artificial Sequence
  chemically synthesized
aatcaggataatactggcct

SEQ ID NO: 20588 - DNA, 20 bp, Artificial Sequence
  chemically synthesized
tcaggataatactggcctca

SEQ ID NO: 20589 - DNA, 20 bp, Artificial Sequence
  chemically synthesized
taatactggcctcagagaat

SEQ ID NO: 20590 - DNA, 20 bp, Artificial Sequence
  chemically synthesized
actggcctcagagaatgagt

SEQ ID NO: 20591 - DNA, 20 bp, Artificial Sequence
  chemically synthesized
ctggcctcagagaatgagtt

SEQ ID NO: 20592 - DNA, 20 bp, Artificial Sequence
  chemically synthesized
tggcctcagagaatgagtta

SEQ ID NO: 20593 - DNA, 20 bp, Artificial Sequence
  chemically synthesized
gcctcagagaatgagttagg

SEQ ID NO: 20594 - DNA, 20 bp, Artificial Sequence
  chemically synthesized
ccttcctgtttaatttttaa

SEQ ID NO: 20595 - DNA, 20 bp, Artificial Sequence
  chemically synthesized
tttaatttttaaaagaattt

SEQ ID NO: 20596 - DNA, 20 bp, Artificial Sequence
  chemically synthesized
ttaatttttaaaagaattta

SEQ ID NO: 20597 - DNA, 20 bp, Artificial Sequence
  chemically synthesized
aatttttaaaagaatttaag

SEQ ID NO: 20598 - DNA, 20 bp, Artificial Sequence
  chemically synthesized
aagaatttaaggagacttgt

SEQ ID NO: 20599 - DNA, 20 bp, Artificial Sequence
  chemically synthesized
gacttgttagttttctttga

SEQ ID NO: 20600 - DNA, 20 bp, Artificial Sequence
  chemically synthesized
gttagttttctttgaaagtt

SEQ ID NO: 20601 - DNA, 20 bp, Artificial Sequence
  chemically synthesized
gaaagtttggtaaaatttga

SEQ ID NO: 20602 - DNA, 20 bp, Artificial Sequence
  chemically synthesized
tttggtaaaatttgacagta

SEQ ID NO: 20603 - DNA, 20 bp, Artificial Sequence
  chemically synthesized
aatttgacagtaaagccatc

SEQ ID NO: 20604 - DNA, 20 bp, Artificial Sequence
  chemically synthesized
ggtcttgaaattttcttttt

SEQ ID NO: 20605 - DNA, 20 bp, Artificial Sequence
  chemically synthesized
gtcttgaaattttctttttt

SEQ ID NO: 20606 - DNA, 20 bp, Artificial Sequence
  chemically synthesized
cttgaaattttcttttttgg

SEQ ID NO: 20607 - DNA, 20 bp, Artificial Sequence
  chemically synthesized
tcaatttcattattcattac

SEQ ID NO: 20608 - DNA, 20 bp, Artificial Sequence
  chemically synthesized
ttattcattactggtctgtt

SEQ ID NO: 20609 - DNA, 20 bp, Artificial Sequence
  chemically synthesized
tattcattactggtctgttc

SEQ ID NO: 20610 - DNA, 20 bp, Artificial Sequence
  chemically synthesized
attctttcttaattcaatct

SEQ ID NO: 20611 - DNA, 20 bp, Artificial Sequence
  chemically synthesized
ctttcttaattcaatcttgg

SEQ ID NO: 20612 - DNA, 20 bp, Artificial Sequence
  chemically synthesized
tttcttaattcaatcttggt

SEQ ID NO: 20613 - DNA, 20 bp, Artificial Sequence
  chemically synthesized
cttaattcaatcttggtagg

SEQ ID NO: 20614 - DNA, 20 bp, Artificial Sequence
  chemically synthesized
cttggtaggtggtatgtgtc

SEQ ID NO: 20615 - DNA, 20 bp, Artificial Sequence
  chemically synthesized
agaaatttattaatttcctc

SEQ ID NO: 20616 - DNA, 20 bp, Artificial Sequence
  chemically synthesized
ttaatttcctctagattttt

SEQ ID NO: 20617 - DNA, 20 bp, Artificial Sequence
  chemically synthesized
ctctagatttttcagttttt

SEQ ID NO: 20618 - DNA, 20 bp, Artificial Sequence
  chemically synthesized
tttttcagttttttagtgta

SEQ ID NO: 20619 - DNA, 20 bp, Artificial Sequence
  chemically synthesized
tagtgtatggttgttcataa

SEQ ID NO: 20620 - DNA, 20 bp, Artificial Sequence
  chemically synthesized
gataatcttttctatttctg

SEQ ID NO: 20621 - DNA, 20 bp, Artificial Sequence
  chemically synthesized
cttttctatttctgtggtat

SEQ ID NO: 20622 - DNA, 20 bp, Artificial Sequence
  chemically synthesized
atttctgattttctttattt

SEQ ID NO: 20623 - DNA, 20 bp, Artificial Sequence
  chemically synthesized
tcagtctcttctctttttct

SEQ ID NO: 20624 - DNA, 20 bp, Artificial Sequence
  chemically synthesized
tctcttctctttttcttggt

SEQ ID NO: 20625 - DNA, 20 bp, Artificial Sequence
  chemically synthesized
tctctttttcttggttagtc

SEQ ID NO: 20626 - DNA, 20 bp, Artificial Sequence
  chemically synthesized
tttttcttggttagtctagc

SEQ ID NO: 20627 - DNA, 20 bp, Artificial Sequence
  chemically synthesized
tttcttggttagtctagcta

SEQ ID NO: 20628 - DNA, 20 bp, Artificial Sequence
  chemically synthesized
ttgtttttctctatttcatt

SEQ ID NO: 20629 - DNA, 20 bp, Artificial Sequence
  chemically synthesized
cattttttctttccttctgc

SEQ ID NO: 20630 - DNA, 20 bp, Artificial Sequence
  chemically synthesized
ttctttccttctgctagttt

SEQ ID NO: 20631 - DNA, 20 bp, Artificial Sequence
  chemically synthesized
tctttccttctgctagtttt

SEQ ID NO: 20632 - DNA, 20 bp, Artificial Sequence
  chemically synthesized
gggttttgttcttgcttttc

SEQ ID NO: 20633 - DNA, 20 bp, Artificial Sequence
  chemically synthesized
tcttgcttttctagcttgtt

SEQ ID NO: 20634 - DNA, 20 bp, Artificial Sequence
  chemically synthesized
cttgcttttctagcttgttg

SEQ ID NO: 20635 - DNA, 20 bp, Artificial Sequence
  chemically synthesized
agcttgttgaggtacatgat

SEQ ID NO: 20636 - DNA, 20 bp, Artificial Sequence
  chemically synthesized
tctttctatgtttttaattt

SEQ ID NO: 20637 - DNA, 20 bp, Artificial Sequence
  chemically synthesized
taatttaagtgtttattgat

SEQ ID NO: 20638 - DNA, 20 bp, Artificial Sequence
  chemically synthesized
ttattgataagcttctctct

SEQ ID NO: 20639 - DNA, 20 bp, Artificial Sequence
  chemically synthesized
actgcttttgctgtatccca

SEQ ID NO: 20640 - DNA, 20 bp, Artificial Sequence
  chemically synthesized
ttcttgacataacgttcatt

SEQ ID NO: 20641 - DNA, 20 bp, Artificial Sequence
  chemically synthesized
tcttgacataacgttcattc

SEQ ID NO: 20642 - DNA, 20 bp, Artificial Sequence
  chemically synthesized
ttgacataacgttcattcag

SEQ ID NO: 20643 - DNA, 20 bp, Artificial Sequence
  chemically synthesized
ttaatttccatgtatttgta

SEQ ID NO: 20644 - DNA, 20 bp, Artificial Sequence
  chemically synthesized
taatttccatgtatttgtat

SEQ ID NO: 20645 - DNA, 20 bp, Artificial Sequence
  chemically synthesized
atgtatttgtataggtttta

SEQ ID NO: 20646 - DNA, 20 bp, Artificial Sequence
  chemically synthesized
tttttcttgttattgatttc

SEQ ID NO: 20647 - DNA, 20 bp, Artificial Sequence
  chemically synthesized
tttctagttttattccattg

SEQ ID NO: 20648 - DNA, 20 bp, Artificial Sequence
  chemically synthesized
gttttattccattgtggtct

SEQ ID NO: 20649 - DNA, 20 bp, Artificial Sequence
  chemically synthesized
ttattccattgtggtctgag

SEQ ID NO: 20650 - DNA, 20 bp, Artificial Sequence
  chemically synthesized
tgatttcaaatatttcaaat

SEQ ID NO: 20651 - DNA, 20 bp, Artificial Sequence
  chemically synthesized
tcaaatatttcaaattagtt

SEQ ID NO: 20652 - DNA, 20 bp, Artificial Sequence
  chemically synthesized
ttcttttgtgttctaacata

SEQ ID NO: 20653 - DNA, 20 bp, Artificial Sequence
  chemically synthesized
ttctaacatatggtgtatcc

SEQ ID NO: 20654 - DNA, 20 bp, Artificial Sequence
  chemically synthesized
tctaacatatggtgtatcct

SEQ ID NO: 20655 - DNA, 20 bp, Artificial Sequence
  chemically synthesized
ctaacatatggtgtatcctg

SEQ ID NO: 20656 - DNA, 20 bp, Artificial Sequence
  chemically synthesized
ggaatgcgtcatgtgctgat

SEQ ID NO: 20657 - DNA, 20 bp, Artificial Sequence
  chemically synthesized
gatgagataaatatattctg

SEQ ID NO: 20658 - DNA, 20 bp, Artificial Sequence
  chemically synthesized
taaatatattctgtagctgt

SEQ ID NO: 20659 - DNA, 20 bp, Artificial Sequence
  chemically synthesized
atgaaatattgtgtaaatgt

SEQ ID NO: 20660 - DNA, 20 bp, Artificial Sequence
  chemically synthesized
gtgtaaatgttagatccatt

SEQ ID NO: 20661 - DNA, 20 bp, Artificial Sequence
  chemically synthesized
tgttagatccatttggtcta

SEQ ID NO: 20662 - DNA, 20 bp, Artificial Sequence
  chemically synthesized
gatccatttggtctaaagtc

SEQ ID NO: 20663 - DNA, 20 bp, Artificial Sequence
  chemically synthesized
ttctttgttaattttctgtc

SEQ ID NO: 20664 - DNA, 20 bp, Artificial Sequence
  chemically synthesized
tagatgatctatctgatgct

SEQ ID NO: 20665 - DNA, 20 bp, Artificial Sequence
  chemically synthesized
gatctatctgatgctgagat

SEQ ID NO: 20666 - DNA, 20 bp, Artificial Sequence
  chemically synthesized
atccccaactattattgtat

SEQ ID NO: 20667 - DNA, 20 bp, Artificial Sequence
  chemically synthesized
taacatttgctttacatatc

SEQ ID NO: 20668 - DNA, 20 bp, Artificial Sequence
  chemically synthesized
ctttacatatctggatgctc

SEQ ID NO: 20669 - DNA, 20 bp, Artificial Sequence
  chemically synthesized
tatctggatgctctggtgtt

SEQ ID NO: 20670 - DNA, 20 bp, Artificial Sequence
  chemically synthesized
tggtgttgagtgtgaatgtt

SEQ ID NO: 20671 - DNA, 20 bp, Artificial Sequence
  chemically synthesized
atgtaatgacttttgtctct

SEQ ID NO: 20672 - DNA, 20 bp, Artificial Sequence
  chemically synthesized
ctcttagtgttttttattta

SEQ ID NO: 20673 - DNA, 20 bp, Artificial Sequence
  chemically synthesized
aaagtcaattttatctgtta

SEQ ID NO: 20674 - DNA, 20 bp, Artificial Sequence
  chemically synthesized
aagtcaattttatctgttat

SEQ ID NO: 20675 - DNA, 20 bp, Artificial Sequence
  chemically synthesized
taactacttttgctcatttt

SEQ ID NO: 20676 - DNA, 20 bp, Artificial Sequence
  chemically synthesized
atttttggtttctctttgta

SEQ ID NO: 20677 - DNA, 20 bp, Artificial Sequence
  chemically synthesized
tttggtttctctttgtatgg

SEQ ID NO: 20678 - DNA, 20 bp, Artificial Sequence
  chemically synthesized
atctttcatctttttacttt

SEQ ID NO: 20679 - DNA, 20 bp, Artificial Sequence
  chemically synthesized
cagtctatatttatctttac

SEQ ID NO: 20680 - DNA, 20 bp, Artificial Sequence
  chemically synthesized
ctatatttatctttacaagt

SEQ ID NO: 20681 - DNA, 20 bp, Artificial Sequence
  chemically synthesized
tttatctttacaagtgagat

SEQ ID NO: 20682 - DNA, 20 bp, Artificial Sequence
  chemically synthesized
caagtgagataagtttctta

SEQ ID NO: 20683 - DNA, 20 bp, Artificial Sequence
  chemically synthesized
aagtgagataagtttcttat

SEQ ID NO: 20684 - DNA, 20 bp, Artificial Sequence
  chemically synthesized
tgagataagtttcttatagg

SEQ ID NO: 20685 - DNA, 20 bp, Artificial Sequence
  chemically synthesized
tcttataggcagcttacaac

SEQ ID NO: 20686 - DNA, 20 bp, Artificial Sequence
  chemically synthesized
cttataggcagcttacaact

SEQ ID NO: 20687 - DNA, 20 bp, Artificial Sequence
  chemically synthesized
atttttgttttaaatctatt

SEQ ID NO: 20688 - DNA, 20 bp, Artificial Sequence
  chemically synthesized
ttgttttaaatctatttagc

SEQ ID NO: 20689 - DNA, 20 bp, Artificial Sequence
  chemically synthesized
ttagccagtctatatctttc

SEQ ID NO: 20690 - DNA, 20 bp, Artificial Sequence
  chemically synthesized
aatttaatccatttacatgc

SEQ ID NO: 20691 - DNA, 20 bp, Artificial Sequence
  chemically synthesized
atttaatccatttacatgca

SEQ ID NO: 20692 - DNA, 20 bp, Artificial Sequence
  chemically synthesized
caaggctattattgacatgt

SEQ ID NO: 20693 - DNA, 20 bp, Artificial Sequence
  chemically synthesized
aggctattattgacatgtga

SEQ ID NO: 20694 - DNA, 20 bp, Artificial Sequence
  chemically synthesized
ccattttgttaattgattcc

SEQ ID NO: 20695 - DNA, 20 bp, Artificial Sequence
  chemically synthesized
tggttgttttgttttttttt

SEQ ID NO: 20696 - DNA, 20 bp, Artificial Sequence
  chemically synthesized
tttcttattatttatgattg

SEQ ID NO: 20697 - DNA, 20 bp, Artificial Sequence
  chemically synthesized
tattatttatgattgtggtt

SEQ ID NO: 20698 - DNA, 20 bp, Artificial Sequence
  chemically synthesized
tgtggtttggtgattttctg

SEQ ID NO: 20699 - DNA, 20 bp, Artificial Sequence
  chemically synthesized
ggtttggtgattttctgtag

SEQ ID NO: 20700 - DNA, 20 bp, Artificial Sequence
  chemically synthesized
tttctgtagtggtaacgttt

SEQ ID NO: 20701 - DNA, 20 bp, Artificial Sequence
  chemically synthesized
ttatttgtgttttgctctac

SEQ ID NO: 20702 - DNA, 20 bp, Artificial Sequence
  chemically synthesized
ttgtgttttgctctaccagt

SEQ ID NO: 20703 - DNA, 20 bp, Artificial Sequence
  chemically synthesized
acctttgtgtgtcttcataa

SEQ ID NO: 20704 - DNA, 20 bp, Artificial Sequence
  chemically synthesized
tttgtgtgtcttcataatgg

SEQ ID NO: 20705 - DNA, 20 bp, Artificial Sequence
  chemically synthesized
tgtcctgtcactttcatgtg

SEQ ID NO: 20706 - DNA, 20 bp, Artificial Sequence
  chemically synthesized
gtcctgtcactttcatgtgt

SEQ ID NO: 20707 - DNA, 20 bp, Artificial Sequence
  chemically synthesized
tcccttaaatatttcttgta

SEQ ID NO: 20708 - DNA, 20 bp, Artificial Sequence
  chemically synthesized
ttaaatatttcttgtaaagc

SEQ ID NO: 20709 - DNA, 20 bp, Artificial Sequence
  chemically synthesized
tatttcttgtaaagccagtc

SEQ ID NO: 20710 - DNA, 20 bp, Artificial Sequence
  chemically synthesized
ttgtaaagccagtctagtga

SEQ ID NO: 20711 - DNA, 20 bp, Artificial Sequence
  chemically synthesized
tccttcaaatttttcttgcc

SEQ ID NO: 20712 - DNA, 20 bp, Artificial Sequence
  chemically synthesized
caaatttttcttgcccagaa

SEQ ID NO: 20713 - DNA, 20 bp, Artificial Sequence
  chemically synthesized
ttatttatccttcatttttg

SEQ ID NO: 20714 - DNA, 20 bp, Artificial Sequence
  chemically synthesized
tttttgaagaacaatgttgc

SEQ ID NO: 20715 - DNA, 20 bp, Artificial Sequence
  chemically synthesized
ttttgaagaacaatgttgct

SEQ ID NO: 20716 - DNA, 20 bp, Artificial Sequence
  chemically synthesized
gttgctgggtataacatcct

SEQ ID NO: 20717 - DNA, 20 bp, Artificial Sequence
  chemically synthesized
tatatcatcccatcttctcc

SEQ ID NO: 20718 - DNA, 20 bp, Artificial Sequence
  chemically synthesized
cccatcttctcctggcctgt

SEQ ID NO: 20719 - DNA, 20 bp, Artificial Sequence
  chemically synthesized
ccatcttctcctggcctgtg

SEQ ID NO: 20720 - DNA, 20 bp, Artificial Sequence
  chemically synthesized
tggcctgtgaggtttctgct

SEQ ID NO: 20721 - DNA, 20 bp, Artificial Sequence
  chemically synthesized
ctgttaatctgttaatcttg

SEQ ID NO: 20722 - DNA, 20 bp, Artificial Sequence
  chemically synthesized
ttaatctgttaatcttgtgg

SEQ ID NO: 20723 - DNA, 20 bp, Artificial Sequence
  chemically synthesized
tcttgtggaagttcccttat

SEQ ID NO: 20724 - DNA, 20 bp, Artificial Sequence
  chemically synthesized
gaagttcccttataagtgac

SEQ ID NO: 20725 - DNA, 20 bp, Artificial Sequence
  chemically synthesized
agacattttgcttgctgttt

SEQ ID NO: 20726 - DNA, 20 bp, Artificial Sequence
  chemically synthesized
acattttgcttgctgtttta

SEQ ID NO: 20727 - DNA, 20 bp, Artificial Sequence
  chemically synthesized
gttttagagttcttactctt

SEQ ID NO: 20728 - DNA, 20 bp, Artificial Sequence
  chemically synthesized
tcttactctttggcttttga

SEQ ID NO: 20729 - DNA, 20 bp, Artificial Sequence
  chemically synthesized
agtttgactataatgtgctg

SEQ ID NO: 20730 - DNA, 20 bp, Artificial Sequence
  chemically synthesized
tttgactataatgtgctgtg

SEQ ID NO: 20731 - DNA, 20 bp, Artificial Sequence
  chemically synthesized
gactataatgtgctgtggag

SEQ ID NO: 20732 - DNA, 20 bp, Artificial Sequence
  chemically synthesized
ctataatgtgctgtggagaa

SEQ ID NO: 20733 - DNA, 20 bp, Artificial Sequence
  chemically synthesized
gctttttgcattatattatt

SEQ ID NO: 20734 - DNA, 20 bp, Artificial Sequence
  chemically synthesized
ctttttgcattatattattt

SEQ ID NO: 20735 - DNA, 20 bp, Artificial Sequence
  chemically synthesized
atttctgattttcatttgtc

SEQ ID NO: 20736 - DNA, 20 bp, Artificial Sequence
  chemically synthesized
tggatgtctacatttcttgc

SEQ ID NO: 20737 - DNA, 20 bp, Artificial Sequence
  chemically synthesized
catttcttgctagacttgac

SEQ ID NO: 20738 - DNA, 20 bp, Artificial Sequence
  chemically synthesized
tgctagacttgacaagtttt

SEQ ID NO: 20739 - DNA, 20 bp, Artificial Sequence
  chemically synthesized
tcagctattgtgttgttacg

SEQ ID NO: 20740 - DNA, 20 bp, Artificial Sequence
  chemically synthesized
cagctattgtgttgttacgt

SEQ ID NO: 20741 - DNA, 20 bp, Artificial Sequence
  chemically synthesized
ttcatgttctctttaccttc

SEQ ID NO: 20742 - DNA, 20 bp, Artificial Sequence
  chemically synthesized
tcatgttctctttaccttct

SEQ ID NO: 20743 - DNA, 20 bp, Artificial Sequence
  chemically synthesized
ttgaatatttgttcacttta

SEQ ID NO: 20744 - DNA, 20 bp, Artificial Sequence
  chemically synthesized
tttcctttctatcatttgac

SEQ ID NO: 20745 - DNA, 20 bp, Artificial Sequence
  chemically synthesized
atttgaccagctaattttaa

SEQ ID NO: 20746 - DNA, 20 bp, Artificial Sequence
  chemically synthesized
attttaaaagacctgtcttc

SEQ ID NO: 20747 - DNA, 20 bp, Artificial Sequence
  chemically synthesized
cttgatctgatctattgttg

SEQ ID NO: 20748 - DNA, 20 bp, Artificial Sequence
  chemically synthesized
atttctttcaataaactctt

SEQ ID NO: 20749 - DNA, 20 bp, Artificial Sequence
  chemically synthesized
ttcaataaactcttcagtta

SEQ ID NO: 20750 - DNA, 20 bp, Artificial Sequence
  chemically synthesized
tcagttacagaatttctgtt

SEQ ID NO: 20751 - DNA, 20 bp, Artificial Sequence
  chemically synthesized
ttcttgttgtatctatctct

SEQ ID NO: 20752 - DNA, 20 bp, Artificial Sequence
  chemically synthesized
tcttgttgtatctatctctt

SEQ ID NO: 20753 - DNA, 20 bp, Artificial Sequence
  chemically synthesized
tttctttttattgtttatct

SEQ ID NO: 20754 - DNA, 20 bp, Artificial Sequence
  chemically synthesized
gagttctcttgtgtctcact

SEQ ID NO: 20755 - DNA, 20 bp, Artificial Sequence
  chemically synthesized
cttccttaatatcaacattt

SEQ ID NO: 20756 - DNA, 20 bp, Artificial Sequence
  chemically synthesized
acattttggattcttttttc

SEQ ID NO: 20757 - DNA, 20 bp, Artificial Sequence
  chemically synthesized
taaatgtcttttttttccac

SEQ ID NO: 20758 - DNA, 20 bp, Artificial Sequence
  chemically synthesized
tccactggcttatgttgctg

SEQ ID NO: 20759 - DNA, 20 bp, Artificial Sequence
  chemically synthesized
gaagaattattaaattcctt

SEQ ID NO: 20760 - DNA, 20 bp, Artificial Sequence
  chemically synthesized
gaattattaaattcctttgg

SEQ ID NO: 20761 - DNA, 20 bp, Artificial Sequence
  chemically synthesized
tgcattgatatctctgcatc

SEQ ID NO: 20762 - DNA, 20 bp, Artificial Sequence
  chemically synthesized
ggtgtaatgattgctgcttc

SEQ ID NO: 20763 - DNA, 20 bp, Artificial Sequence
  chemically synthesized
gttttgtaaatttgtttttg

SEQ ID NO: 20764 - DNA, 20 bp, Artificial Sequence
  chemically synthesized
ttttgtaaatttgtttttgt

SEQ ID NO: 20765 - DNA, 20 bp, Artificial Sequence
  chemically synthesized
tttgtaaatttgtttttgta

SEQ ID NO: 20766 - DNA, 20 bp, Artificial Sequence
  chemically synthesized
ttgtaaatttgtttttgtag

SEQ ID NO: 20767 - DNA, 20 bp, Artificial Sequence
  chemically synthesized
taaatttgtttttgtagggg

SEQ ID NO: 20768 - DNA, 20 bp, Artificial Sequence
  chemically synthesized
taggggaagacttttttctg

SEQ ID NO: 20769 - DNA, 20 bp, Artificial Sequence
  chemically synthesized
ttttttctgaagatgtatct

SEQ ID NO: 20770 - DNA, 20 bp, Artificial Sequence
  chemically synthesized
gatgtatcttggtgttgatt

SEQ ID NO: 20771 - DNA, 20 bp, Artificial Sequence
  chemically synthesized
gtatcttggtgttgattgag

SEQ ID NO: 20772 - DNA, 20 bp, Artificial Sequence
  chemically synthesized
tatcttggtgttgattgagt

SEQ ID NO: 20773 - DNA, 20 bp, Artificial Sequence
  chemically synthesized
atcttggtgttgattgagta

SEQ ID NO: 20774 - DNA, 20 bp, Artificial Sequence
  chemically synthesized
ggcactttgattttgatttc

SEQ ID NO: 20775 - DNA, 20 bp, Artificial Sequence
  chemically synthesized
gcactttgattttgatttct

SEQ ID NO: 20776 - DNA, 20 bp, Artificial Sequence
  chemically synthesized
ttttgatttctaggtgcata

SEQ ID NO: 20777 - DNA, 20 bp, Artificial Sequence
  chemically synthesized
tgatttctaggtgcatacag

SEQ ID NO: 20778 - DNA, 20 bp, Artificial Sequence
  chemically synthesized
tctaggtgcatacagcagca

SEQ ID NO: 20779 - DNA, 20 bp, Artificial Sequence
  chemically synthesized
gtcttcatattatttttttt

SEQ ID NO: 20780 - DNA, 20 bp, Artificial Sequence
  chemically synthesized
tattttttttcagctgccaa

SEQ ID NO: 20781 - DNA, 20 bp, Artificial Sequence
  chemically synthesized
tcagctgccaacagtatcat

SEQ ID NO: 20782 - DNA, 20 bp, Artificial Sequence
  chemically synthesized
atcagtgtctgtgatttttt

SEQ ID NO: 20783 - DNA, 20 bp, Artificial Sequence
  chemically synthesized
agtgtctgtgattttttcag

SEQ ID NO: 20784 - DNA, 20 bp, Artificial Sequence
  chemically synthesized
ctgtgattttttcagtggct

SEQ ID NO: 20785 - DNA, 20 bp, Artificial Sequence
  chemically synthesized
tgtgattttttcagtggctt

SEQ ID NO: 20786 - DNA, 20 bp, Artificial Sequence
  chemically synthesized
gtgattttttcagtggctta

SEQ ID NO: 20787 - DNA, 20 bp, Artificial Sequence
  chemically synthesized
gtggcttagggtgcatttgt

SEQ ID NO: 20788 - DNA, 20 bp, Artificial Sequence
  chemically synthesized
ttagggtgcatttgttagtg

SEQ ID NO: 20789 - DNA, 20 bp, Artificial Sequence
  chemically synthesized
tagggtgcatttgttagtga

SEQ ID NO: 20790 - DNA, 20 bp, Artificial Sequence
  chemically synthesized
ggtgcatttgttagtgaagg

SEQ ID NO: 20791 - DNA, 20 bp, Artificial Sequence
  chemically synthesized
ttgttagtgaaggtggtgat

SEQ ID NO: 20792 - DNA, 20 bp, Artificial Sequence
  chemically synthesized
tgttagtgaaggtggtgatg

SEQ ID NO: 20793 - DNA, 20 bp, Artificial Sequence
  chemically synthesized
aggtggtgatgaggttgtgc

SEQ ID NO: 20794 - DNA, 20 bp, Artificial Sequence
  chemically synthesized
gtggtgatgaggttgtgctg

SEQ ID NO: 20795 - DNA, 20 bp, Artificial Sequence
  chemically synthesized
gatgaggttgtgctggagac

SEQ ID NO: 20796 - DNA, 20 bp, Artificial Sequence
  chemically synthesized
gtgctggagacaagaatatc

SEQ ID NO: 20797 - DNA, 20 bp, Artificial Sequence
  chemically synthesized
ctggagacaagaatatcaag

SEQ ID NO: 20798 - DNA, 20 bp, Artificial Sequence
  chemically synthesized
tggagacaagaatatcaagt

SEQ ID NO: 20799 - DNA, 20 bp, Artificial Sequence
  chemically synthesized
gacaagaatatcaagtgggc

SEQ ID NO: 20800 - DNA, 20 bp, Artificial Sequence
  chemically synthesized
atatcaagtgggccagtcct

SEQ ID NO: 20801 - DNA, 20 bp, Artificial Sequence
  chemically synthesized
agtgggccagtccttggccc

SEQ ID NO: 20802 - DNA, 20 bp, Artificial Sequence
  chemically synthesized
gggccagtccttggccccag

SEQ ID NO: 20803 - DNA, 20 bp, Artificial Sequence
  chemically synthesized
ccagtccttggccccagtgg

SEQ ID NO: 20804 - DNA, 20 bp, Artificial Sequence
  chemically synthesized
gtccttggccccagtggtgg

SEQ ID NO: 20805 - DNA, 20 bp, Artificial Sequence
  chemically synthesized
cttggccccagtggtggtgg

SEQ ID NO: 20806 - DNA, 20 bp, Artificial Sequence
  chemically synthesized
ttggccccagtggtggtggt

SEQ ID NO: 20807 - DNA, 20 bp, Artificial Sequence
  chemically synthesized
cccagtggtggtggtgggcc

SEQ ID NO: 20808 - DNA, 20 bp, Artificial Sequence
  chemically synthesized
gggcctagcattcctgtcct

SEQ ID NO: 20809 - DNA, 20 bp, Artificial Sequence
  chemically synthesized
ggcctagcattcctgtcctt

SEQ ID NO: 20810 - DNA, 20 bp, Artificial Sequence
  chemically synthesized
attcctgtccttgggcccca

SEQ ID NO: 20811 - DNA, 20 bp, Artificial Sequence
  chemically synthesized
ggccccatggctgtgtacat

SEQ ID NO: 20812 - DNA, 20 bp, Artificial Sequence
  chemically synthesized
gctgtgtacattggcactga

SEQ ID NO: 20813 - DNA, 20 bp, Artificial Sequence
  chemically synthesized
acattggcactgatggtaat

SEQ ID NO: 20814 - DNA, 20 bp, Artificial Sequence
  chemically synthesized
ggcactgatggtaatgagtc

SEQ ID NO: 20815 - DNA, 20 bp, Artificial Sequence
  chemically synthesized
ctgatggtaatgagtctagt

SEQ ID NO: 20816 - DNA, 20 bp, Artificial Sequence
  chemically synthesized
tgatggtaatgagtctagtt

SEQ ID NO: 20817 - DNA, 20 bp, Artificial Sequence
  chemically synthesized
gtctagttgggttgattctt

SEQ ID NO: 20818 - DNA, 20 bp, Artificial Sequence
  chemically synthesized
tgggttgattctttggcctt

SEQ ID NO: 20819 - DNA, 20 bp, Artificial Sequence
  chemically synthesized
gggttgattctttggccttc

SEQ ID NO: 20820 - DNA, 20 bp, Artificial Sequence
  chemically synthesized
ttgattctttggccttcagg

SEQ ID NO: 20821 - DNA, 20 bp, Artificial Sequence
  chemically synthesized
tggccttcaggcagtttgct

SEQ ID NO: 20822 - DNA, 20 bp, Artificial Sequence
  chemically synthesized
ggccttcaggcagtttgctt

SEQ ID NO: 20823 - DNA, 20 bp, Artificial Sequence
  chemically synthesized
caggcagtttgcttgggtgt

SEQ ID NO: 20824 - DNA, 20 bp, Artificial Sequence
  chemically synthesized
gcagtttgcttgggtgtcag

SEQ ID NO: 20825 - DNA, 20 bp, Artificial Sequence
  chemically synthesized
gtttgcttgggtgtcagtag

SEQ ID NO: 20826 - DNA, 20 bp, Artificial Sequence
  chemically synthesized
ttgggtgtcagtagtggcca

SEQ ID NO: 20827 - DNA, 20 bp, Artificial Sequence
  chemically synthesized
ggtgtcagtagtggccatag

SEQ ID NO: 20828 - DNA, 20 bp, Artificial Sequence
  chemically synthesized
cagtagtggccatagtagac

SEQ ID NO: 20829 - DNA, 20 bp, Artificial Sequence
  chemically synthesized
agtagtggccatagtagact

SEQ ID NO: 20830 - DNA, 20 bp, Artificial Sequence
  chemically synthesized
gtggccatagtagactgggc

SEQ ID NO: 20831 - DNA, 20 bp, Artificial Sequence
  chemically synthesized
tagtagactgggctggtgtg

SEQ ID NO: 20832 - DNA, 20 bp, Artificial Sequence
  chemically synthesized
agtagactgggctggtgtgt

SEQ ID NO: 20833 - DNA, 20 bp, Artificial Sequence
  chemically synthesized
tgggctggtgtgtgggtcct

SEQ ID NO: 20834 - DNA, 20 bp, Artificial Sequence
  chemically synthesized
gggctggtgtgtgggtcctc

SEQ ID NO: 20835 - DNA, 20 bp, Artificial Sequence
  chemically synthesized
tgtgtgggtcctcaggcttc

SEQ ID NO: 20836 - DNA, 20 bp, Artificial Sequence
  chemically synthesized
tgggtcctcaggcttctgga

SEQ ID NO: 20837 - DNA, 20 bp, Artificial Sequence
  chemically synthesized
gtcctcaggcttctggacag

SEQ ID NO: 20838 - DNA, 20 bp, Artificial Sequence
  chemically synthesized
tcctcaggcttctggacagt

SEQ ID NO: 20839 - DNA, 20 bp, Artificial Sequence
  chemically synthesized
aggcttctggacagtgggtg

SEQ ID NO: 20840 - DNA, 20 bp, Artificial Sequence
  chemically synthesized
tctggacagtgggtgtggtg

SEQ ID NO: 20841 - DNA, 20 bp, Artificial Sequence
  chemically synthesized
ctggacagtgggtgtggtgt

SEQ ID NO: 20842 - DNA, 20 bp, Artificial Sequence
  chemically synthesized
agtgggtgtggtgtgggtga

SEQ ID NO: 20843 - DNA, 20 bp, Artificial Sequence
  chemically synthesized
tgtggtgtgggtgatggctg

SEQ ID NO: 20844 - DNA, 20 bp, Artificial Sequence
  chemically synthesized
ggtgatggctgtagcaactg

SEQ ID NO: 20845 - DNA, 20 bp, Artificial Sequence
  chemically synthesized
gtgatggctgtagcaactgc

SEQ ID NO: 20846 - DNA, 20 bp, Artificial Sequence
  chemically synthesized
gcaactgcaggacaaccctc

SEQ ID NO: 20847 - DNA, 20 bp, Artificial Sequence
  chemically synthesized
aggacaaccctctggctccc

SEQ ID NO: 20848 - DNA, 20 bp, Artificial Sequence
  chemically synthesized
acaaccctctggctcccaag

SEQ ID NO: 20849 - DNA, 20 bp, Artificial Sequence
  chemically synthesized
ggctcccaagcagtctgcac

SEQ ID NO: 20850 - DNA, 20 bp, Artificial Sequence
  chemically synthesized
caagcagtctgcactggtgt

SEQ ID NO: 20851 - DNA, 20 bp, Artificial Sequence
  chemically synthesized
gcagtctgcactggtgttgg

SEQ ID NO: 20852 - DNA, 20 bp, Artificial Sequence
  chemically synthesized
gtctgcactggtgttggtgg

SEQ ID NO: 20853 - DNA, 20 bp, Artificial Sequence
  chemically synthesized
ctggtgttggtggtggctgc

SEQ ID NO: 20854 - DNA, 20 bp, Artificial Sequence
  chemically synthesized
tggtgttggtggtggctgca

SEQ ID NO: 20855 - DNA, 20 bp, Artificial Sequence
  chemically synthesized
ggtgttggtggtggctgcaa

SEQ ID NO: 20856 - DNA, 20 bp, Artificial Sequence
  chemically synthesized
ggtggctgcaagggctgaat

SEQ ID NO: 20857 - DNA, 20 bp, Artificial Sequence
  chemically synthesized
gctgcaagggctgaatgagc

SEQ ID NO: 20858 - DNA, 20 bp, Artificial Sequence
  chemically synthesized
gggctgaatgagccagtctt

SEQ ID NO: 20859 - DNA, 20 bp, Artificial Sequence
  chemically synthesized
tgagccagtcttcagaccca

SEQ ID NO: 20860 - DNA, 20 bp, Artificial Sequence
  chemically synthesized
gagccagtcttcagacccac

SEQ ID NO: 20861 - DNA, 20 bp, Artificial Sequence
  chemically synthesized
ccagtcttcagacccacagg

SEQ ID NO: 20862 - DNA, 20 bp, Artificial Sequence
  chemically synthesized
agacccacaggtggcacatg

SEQ ID NO: 20863 - DNA, 20 bp, Artificial Sequence
  chemically synthesized
gacccacaggtggcacatgc

SEQ ID NO: 20864 - DNA, 20 bp, Artificial Sequence
  chemically synthesized
cccacaggtggcacatgcag

SEQ ID NO: 20865 - DNA, 20 bp, Artificial Sequence
  chemically synthesized
ccacaggtggcacatgcagg

SEQ ID NO: 20866 - DNA, 20 bp, Artificial Sequence
  chemically synthesized
gtggcacatgcaggaggtgc

SEQ ID NO: 20867 - DNA, 20 bp, Artificial Sequence
  chemically synthesized
gcaggaggtgccagttgtga

SEQ ID NO: 20868 - DNA, 20 bp, Artificial Sequence
  chemically synthesized
ggaggtgccagttgtgatgg

SEQ ID NO: 20869 - DNA, 20 bp, Artificial Sequence
  chemically synthesized
ggtgccagttgtgatggcag

SEQ ID NO: 20870 - DNA, 20 bp, Artificial Sequence
  chemically synthesized
gccagttgtgatggcagtgg

SEQ ID NO: 20871 - DNA, 20 bp, Artificial Sequence
  chemically synthesized
ttgtgatggcagtggcagat

SEQ ID NO: 20872 - DNA, 20 bp, Artificial Sequence
  chemically synthesized
tgtgatggcagtggcagatt

SEQ ID NO: 20873 - DNA, 20 bp, Artificial Sequence
  chemically synthesized
gatggcagtggcagattggg

SEQ ID NO: 20874 - DNA, 20 bp, Artificial Sequence
  chemically synthesized
atggcagtggcagattgggt

SEQ ID NO: 20875 - DNA, 20 bp, Artificial Sequence
  chemically synthesized
agattgggtaggcccatcat

SEQ ID NO: 20876 - DNA, 20 bp, Artificial Sequence
  chemically synthesized
gattgggtaggcccatcatc

SEQ ID NO: 20877 - DNA, 20 bp, Artificial Sequence
  chemically synthesized
taggcccatcatcaggcttc

SEQ ID NO: 20878 - DNA, 20 bp, Artificial Sequence
  chemically synthesized
aggcccatcatcaggcttct

SEQ ID NO: 20879 - DNA, 20 bp, Artificial Sequence
  chemically synthesized
gcccatcatcaggcttctgg

SEQ ID NO: 20880 - DNA, 20 bp, Artificial Sequence
  chemically synthesized
cccatcatcaggcttctggg

SEQ ID NO: 20881 - DNA, 20 bp, Artificial Sequence
  chemically synthesized
ccatcatcaggcttctggga

SEQ ID NO: 20882 - DNA, 20 bp, Artificial Sequence
  chemically synthesized
aggcttctgggagggttgct

SEQ ID NO: 20883 - DNA, 20 bp, Artificial Sequence
  chemically synthesized
ggcttctgggagggttgctt

SEQ ID NO: 20884 - DNA, 20 bp, Artificial Sequence
  chemically synthesized
tgggagggttgcttaggtac

SEQ ID NO: 20885 - DNA, 20 bp, Artificial Sequence
  chemically synthesized
ggttgcttaggtaccagtca

SEQ ID NO: 20886 - DNA, 20 bp, Artificial Sequence
  chemically synthesized
tgcttaggtaccagtcatgg

SEQ ID NO: 20887 - DNA, 20 bp, Artificial Sequence
  chemically synthesized
taggtaccagtcatggtgga

SEQ ID NO: 20888 - DNA, 20 bp, Artificial Sequence
  chemically synthesized
ccagtcatggtggatggcac

SEQ ID NO: 20889 - DNA, 20 bp, Artificial Sequence
  chemically synthesized
cagtcatggtggatggcaca

SEQ ID NO: 20890 - DNA, 20 bp, Artificial Sequence
  chemically synthesized
ggatggcacaaggctgtctc

SEQ ID NO: 20891 - DNA, 20 bp, Artificial Sequence
  chemically synthesized
gatggcacaaggctgtctct

SEQ ID NO: 20892 - DNA, 20 bp, Artificial Sequence
  chemically synthesized
caaggctgtctctgggttcc

SEQ ID NO: 20893 - DNA, 20 bp, Artificial Sequence
  chemically synthesized
gggttcccagacaacttgct

SEQ ID NO: 20894 - DNA, 20 bp, Artificial Sequence
  chemically synthesized
ggttcccagacaacttgctt

SEQ ID NO: 20895 - DNA, 20 bp, Artificial Sequence
  chemically synthesized
agacaacttgcttaggcatt

SEQ ID NO: 20896 - DNA, 20 bp, Artificial Sequence
  chemically synthesized
gacaacttgcttaggcattg

SEQ ID NO: 20897 - DNA, 20 bp, Artificial Sequence
  chemically synthesized
aacttgcttaggcattgagg

SEQ ID NO: 20898 - DNA, 20 bp, Artificial Sequence
  chemically synthesized
acttgcttaggcattgagga

SEQ ID NO: 20899 - DNA, 20 bp, Artificial Sequence
  chemically synthesized
cttaggcattgaggaaggca

SEQ ID NO: 20900 - DNA, 20 bp, Artificial Sequence
  chemically synthesized
ggcattgaggaaggcaaagc

SEQ ID NO: 20901 - DNA, 20 bp, Artificial Sequence
  chemically synthesized
gcattgaggaaggcaaagcc

SEQ ID NO: 20902 - DNA, 20 bp, Artificial Sequence
  chemically synthesized
tgaggaaggcaaagccaggc

SEQ ID NO: 20903 - DNA, 20 bp, Artificial Sequence
  chemically synthesized
gaggaaggcaaagccaggct

SEQ ID NO: 20904 - DNA, 20 bp, Artificial Sequence
  chemically synthesized
aggctgggtgttcctgacct

SEQ ID NO: 20905 - DNA, 20 bp, Artificial Sequence
  chemically synthesized
ggctgggtgttcctgacctc

SEQ ID NO: 20906 - DNA, 20 bp, Artificial Sequence
  chemically synthesized
gttcctgacctcaggccact

SEQ ID NO: 20907 - DNA, 20 bp, Artificial Sequence
  chemically synthesized
cctgacctcaggccactcag

SEQ ID NO: 20908 - DNA, 20 bp, Artificial Sequence
  chemically synthesized
aggccactcagtggtgtgtg

SEQ ID NO: 20909 - DNA, 20 bp, Artificial Sequence
  chemically synthesized
tcagtggtgtgtgtggacac

SEQ ID NO: 20910 - DNA, 20 bp, Artificial Sequence
  chemically synthesized
tgtgtggacaccggctatca

SEQ ID NO: 20911 - DNA, 20 bp, Artificial Sequence
  chemically synthesized
gtgtggacaccggctatcat

SEQ ID NO: 20912 - DNA, 20 bp, Artificial Sequence
  chemically synthesized
ggacaccggctatcataggc

SEQ ID NO: 20913 - DNA, 20 bp, Artificial Sequence
  chemically synthesized
acaccggctatcataggctg

SEQ ID NO: 20914 - DNA, 20 bp, Artificial Sequence
  chemically synthesized
ccggctatcataggctggag

SEQ ID NO: 20915 - DNA, 20 bp, Artificial Sequence
  chemically synthesized
ggctatcataggctggagtg

SEQ ID NO: 20916 - DNA, 20 bp, Artificial Sequence
  chemically synthesized
ggctggagtggagtgatcct

SEQ ID NO: 20917 - DNA, 20 bp, Artificial Sequence
  chemically synthesized
gctggagtggagtgatcctc

SEQ ID NO: 20918 - DNA, 20 bp, Artificial Sequence
  chemically synthesized
tggagtgatcctcaggcccc

SEQ ID NO: 20919 - DNA, 20 bp, Artificial Sequence
  chemically synthesized
agtgatcctcaggcccccag

SEQ ID NO: 20920 - DNA, 20 bp, Artificial Sequence
  chemically synthesized
aggcccccagcagaatgcct

SEQ ID NO: 20921 - DNA, 20 bp, Artificial Sequence
  chemically synthesized
agcagaatgcctgagtgaat

SEQ ID NO: 20922 - DNA, 20 bp, Artificial Sequence
  chemically synthesized
agaatgcctgagtgaattag

SEQ ID NO: 20923 - DNA, 20 bp, Artificial Sequence
  chemically synthesized
gcattgttgccctgctcttg

SEQ ID NO: 20924 - DNA, 20 bp, Artificial Sequence
  chemically synthesized
cattgttgccctgctcttga

SEQ ID NO: 20925 - DNA, 20 bp, Artificial Sequence
  chemically synthesized
attgttgccctgctcttgaa

SEQ ID NO: 20926 - DNA, 20 bp, Artificial Sequence
  chemically synthesized
ttgttgccctgctcttgaag

SEQ ID NO: 20927 - DNA, 20 bp, Artificial Sequence
  chemically synthesized
gccctgctcttgaaggggtg

SEQ ID NO: 20928 - DNA, 20 bp, Artificial Sequence
  chemically synthesized
ccctgctcttgaaggggtgc

SEQ ID NO: 20929 - DNA, 20 bp, Artificial Sequence
  chemically synthesized
cctgctcttgaaggggtgcg

SEQ ID NO: 20930 - DNA, 20 bp, Artificial Sequence
  chemically synthesized
ggtgcggggtgtgttgcttt

SEQ ID NO: 20931 - DNA, 20 bp, Artificial Sequence
  chemically synthesized
gcggggtgtgttgctttcag

SEQ ID NO: 20932 - DNA, 20 bp, Artificial Sequence
  chemically synthesized
gggtgtgttgctttcagtgg

SEQ ID NO: 20933 - DNA, 20 bp, Artificial Sequence
  chemically synthesized
tgtgttgctttcagtggcag

SEQ ID NO: 20934 - DNA, 20 bp, Artificial Sequence
  chemically synthesized
tcagtggcagcagctataaa

SEQ ID NO: 20935 - DNA, 20 bp, Artificial Sequence
  chemically synthesized
cagtggcagcagctataaat

SEQ ID NO: 20936 - DNA, 20 bp, Artificial Sequence
  chemically synthesized
agcagctataaatgggttgc

SEQ ID NO: 20937 - DNA, 20 bp, Artificial Sequence
  chemically synthesized
agctataaatgggttgctgg

SEQ ID NO: 20938 - DNA, 20 bp, Artificial Sequence
  chemically synthesized
gctataaatgggttgctggt

SEQ ID NO: 20939 - DNA, 20 bp, Artificial Sequence
  chemically synthesized
ttgctggtgggcatgtgttt

SEQ ID NO: 20940 - DNA, 20 bp, Artificial Sequence
  chemically synthesized
gtgggcatgtgtttcagccc

SEQ ID NO: 20941 - DNA, 20 bp, Artificial Sequence
  chemically synthesized
gcatgtgtttcagccccaga

SEQ ID NO: 20942 - DNA, 20 bp, Artificial Sequence
  chemically synthesized
tgtgtttcagccccagatgg

SEQ ID NO: 20943 - DNA, 20 bp, Artificial Sequence
  chemically synthesized
cagccccagatggtggctgc

SEQ ID NO: 20944 - DNA, 20 bp, Artificial Sequence
  chemically synthesized
ccccagatggtggctgcaag

SEQ ID NO: 20945 - DNA, 20 bp, Artificial Sequence
  chemically synthesized
cccagatggtggctgcaagt

SEQ ID NO: 20946 - DNA, 20 bp, Artificial Sequence
  chemically synthesized
ccagatggtggctgcaagtg

SEQ ID NO: 20947 - DNA, 20 bp, Artificial Sequence
  chemically synthesized
gatggtggctgcaagtgggg

SEQ ID NO: 20948 - DNA, 20 bp, Artificial Sequence
  chemically synthesized
caagtggggtagcattttct

SEQ ID NO: 20949 - DNA, 20 bp, Artificial Sequence
  chemically synthesized
aagtggggtagcattttctt

SEQ ID NO: 20950 - DNA, 20 bp, Artificial Sequence
  chemically synthesized
agtggggtagcattttctta

SEQ ID NO: 20951 - DNA, 20 bp, Artificial Sequence
  chemically synthesized
tggggtagcattttcttagg

SEQ ID NO: 20952 - DNA, 20 bp, Artificial Sequence
  chemically synthesized
ttagggagcttataaatgtg

SEQ ID NO: 20953 - DNA, 20 bp, Artificial Sequence
  chemically synthesized
gggagcttataaatgtgtag

SEQ ID NO: 20954 - DNA, 20 bp, Artificial Sequence
  chemically synthesized
atgtgtagcagccctgctac

SEQ ID NO: 20955 - DNA, 20 bp, Artificial Sequence
  chemically synthesized
tgtgtagcagccctgctact

SEQ ID NO: 20956 - DNA, 20 bp, Artificial Sequence
  chemically synthesized
gtgtagcagccctgctactg

SEQ ID NO: 20957 - DNA, 20 bp, Artificial Sequence
  chemically synthesized
tgtagcagccctgctactgg

SEQ ID NO: 20958 - DNA, 20 bp, Artificial Sequence
  chemically synthesized
agcagccctgctactggggg

SEQ ID NO: 20959 - DNA, 20 bp, Artificial Sequence
  chemically synthesized
gcagccctgctactgggggt

SEQ ID NO: 20960 - DNA, 20 bp, Artificial Sequence
  chemically synthesized
cagccctgctactgggggtg

SEQ ID NO: 20961 - DNA, 20 bp, Artificial Sequence
  chemically synthesized
agccctgctactgggggtgg

SEQ ID NO: 20962 - DNA, 20 bp, Artificial Sequence
  chemically synthesized
ccctgctactgggggtgggg

SEQ ID NO: 20963 - DNA, 20 bp, Artificial Sequence
  chemically synthesized
ctaatgacacactttatccc

SEQ ID NO: 20964 - DNA, 20 bp, Artificial Sequence
  chemically synthesized
acacactttatccctggtga

SEQ ID NO: 20965 - DNA, 20 bp, Artificial Sequence
  chemically synthesized
cactttatccctggtgacag

SEQ ID NO: 20966 - DNA, 20 bp, Artificial Sequence
  chemically synthesized
ttatccctggtgacagcagc

SEQ ID NO: 20967 - DNA, 20 bp, Artificial Sequence
  chemically synthesized
tccctggtgacagcagccag

SEQ ID NO: 20968 - DNA, 20 bp, Artificial Sequence
  chemically synthesized
ctggtgacagcagccagcag

SEQ ID NO: 20969 - DNA, 20 bp, Artificial Sequence
  chemically synthesized
cagcagccagcagtagcact

SEQ ID NO: 20970 - DNA, 20 bp, Artificial Sequence
  chemically synthesized
ccagcagtagcactcagctg

SEQ ID NO: 20971 - DNA, 20 bp, Artificial Sequence
  chemically synthesized
cagcagtagcactcagctgt

SEQ ID NO: 20972 - DNA, 20 bp, Artificial Sequence
  chemically synthesized
cagtagcactcagctgtggg

SEQ ID NO: 20973 - DNA, 20 bp, Artificial Sequence
  chemically synthesized
agtagcactcagctgtgggt

SEQ ID NO: 20974 - DNA, 20 bp, Artificial Sequence
  chemically synthesized
gtagcactcagctgtgggtg

SEQ ID NO: 20975 - DNA, 20 bp, Artificial Sequence
  chemically synthesized
tagcactcagctgtgggtgg

SEQ ID NO: 20976 - DNA, 20 bp, Artificial Sequence
  chemically synthesized
cagctgtgggtgggggatgt

SEQ ID NO: 20977 - DNA, 20 bp, Artificial Sequence
  chemically synthesized
ctgtgggtgggggatgtcag

SEQ ID NO: 20978 - DNA, 20 bp, Artificial Sequence
  chemically synthesized
gtgggtgggggatgtcagca

SEQ ID NO: 20979 - DNA, 20 bp, Artificial Sequence
  chemically synthesized
gggggatgtcagcagagctt

SEQ ID NO: 20980 - DNA, 20 bp, Artificial Sequence
  chemically synthesized
ggggatgtcagcagagcttc

SEQ ID NO: 20981 - DNA, 20 bp, Artificial Sequence
  chemically synthesized
gggatgtcagcagagcttca

SEQ ID NO: 20982 - DNA, 20 bp, Artificial Sequence
  chemically synthesized
tcagcagagcttcagggatg

SEQ ID NO: 20983 - DNA, 20 bp, Artificial Sequence
  chemically synthesized
agcagagcttcagggatgta

SEQ ID NO: 20984 - DNA, 20 bp, Artificial Sequence
  chemically synthesized
gcttcagggatgtagagatg

SEQ ID NO: 20985 - DNA, 20 bp, Artificial Sequence
  chemically synthesized
tgtagagatgcagatgatgt

SEQ ID NO: 20986 - DNA, 20 bp, Artificial Sequence
  chemically synthesized
gtagagatgcagatgatgtt

SEQ ID NO: 20987 - DNA, 20 bp, Artificial Sequence
  chemically synthesized
tagagatgcagatgatgttg

SEQ ID NO: 20988 - DNA, 20 bp, Artificial Sequence
  chemically synthesized
tgcagatgatgttggggtct

SEQ ID NO: 20989 - DNA, 20 bp, Artificial Sequence
  chemically synthesized
gcagatgatgttggggtctg

SEQ ID NO: 20990 - DNA, 20 bp, Artificial Sequence
  chemically synthesized
gtctgaggaacgatgtcatc

SEQ ID NO: 20991 - DNA, 20 bp, Artificial Sequence
  chemically synthesized
tgaggaacgatgtcatctgg

SEQ ID NO: 20992 - DNA, 20 bp, Artificial Sequence
  chemically synthesized
gaggaacgatgtcatctggt

SEQ ID NO: 20993 - DNA, 20 bp, Artificial Sequence
  chemically synthesized
cgatgtcatctggtgggtgt

SEQ ID NO: 20994 - DNA, 20 bp, Artificial Sequence
  chemically synthesized
gatgtcatctggtgggtgtt

SEQ ID NO: 20995 - DNA, 20 bp, Artificial Sequence
  chemically synthesized
tgggtgttgggctctcaaaa

SEQ ID NO: 20996 - DNA, 20 bp, Artificial Sequence
  chemically synthesized
caaaatggcaccttgctgct

SEQ ID NO: 20997 - DNA, 20 bp, Artificial Sequence
  chemically synthesized
ggcaccttgctgctcagtaa

SEQ ID NO: 20998 - DNA, 20 bp, Artificial Sequence
  chemically synthesized
gcaccttgctgctcagtaat

SEQ ID NO: 20999 - DNA, 20 bp, Artificial Sequence
  chemically synthesized
caccttgctgctcagtaatg

SEQ ID NO: 21000 - DNA, 20 bp, Artificial Sequence
  chemically synthesized
ttgctgctcagtaatgggga

SEQ ID NO: 21001 - DNA, 20 bp, Artificial Sequence
  chemically synthesized
ctgctcagtaatggggatgg

SEQ ID NO: 21002 - DNA, 20 bp, Artificial Sequence
  chemically synthesized
tgctcagtaatggggatggc

SEQ ID NO: 21003 - DNA, 20 bp, Artificial Sequence
  chemically synthesized
gctcagtaatggggatggca

SEQ ID NO: 21004 - DNA, 20 bp, Artificial Sequence
  chemically synthesized
ctcagtaatggggatggcag

SEQ ID NO: 21005 - DNA, 20 bp, Artificial Sequence
  chemically synthesized
agtaatggggatggcagggg

SEQ ID NO: 21006 - DNA, 20 bp, Artificial Sequence
  chemically synthesized
gtaatggggatggcaggggt

SEQ ID NO: 21007 - DNA, 20 bp, Artificial Sequence
  chemically synthesized
gggatggcaggggtgggacc

SEQ ID NO: 21008 - DNA, 20 bp, Artificial Sequence
  chemically synthesized
tggcaggggtgggacccagt

SEQ ID NO: 21009 - DNA, 20 bp, Artificial Sequence
  chemically synthesized
gcaggggtgggacccagtga

SEQ ID NO: 21010 - DNA, 20 bp, Artificial Sequence
  chemically synthesized
cccagtgagagctccttctc

SEQ ID NO: 21011 - DNA, 20 bp, Artificial Sequence
  chemically synthesized
cagtgagagctccttctctg

SEQ ID NO: 21012 - DNA, 20 bp, Artificial Sequence
  chemically synthesized
caatgcctttgtgcgattgc

SEQ ID NO: 21013 - DNA, 20 bp, Artificial Sequence
  chemically synthesized
aatgcctttgtgcgattgct

SEQ ID NO: 21014 - DNA, 20 bp, Artificial Sequence
  chemically synthesized
gcctttgtgcgattgctggg

SEQ ID NO: 21015 - DNA, 20 bp, Artificial Sequence
  chemically synthesized
tgctgggcagttccttatga

SEQ ID NO: 21016 - DNA, 20 bp, Artificial Sequence
  chemically synthesized
cagttccttatgatagtctc

SEQ ID NO: 21017 - DNA, 20 bp, Artificial Sequence
  chemically synthesized
agttccttatgatagtctca

SEQ ID NO: 21018 - DNA, 20 bp, Artificial Sequence
  chemically synthesized
tgatagtctcaaggcctgca

SEQ ID NO: 21019 - DNA, 20 bp, Artificial Sequence
  chemically synthesized
gtctcaaggcctgcatggtc

SEQ ID NO: 21020 - DNA, 20 bp, Artificial Sequence
  chemically synthesized
tctcaaggcctgcatggtca

SEQ ID NO: 21021 - DNA, 20 bp, Artificial Sequence
  chemically synthesized
ctcaaggcctgcatggtcaa

SEQ ID NO: 21022 - DNA, 20 bp, Artificial Sequence
  chemically synthesized
atggtcaagggactctcctg

SEQ ID NO: 21023 - DNA, 20 bp, Artificial Sequence
  chemically synthesized
tcaagggactctcctgtggc

SEQ ID NO: 21024 - DNA, 20 bp, Artificial Sequence
  chemically synthesized
caagggactctcctgtggct

SEQ ID NO: 21025 - DNA, 20 bp, Artificial Sequence
  chemically synthesized
tctcctgtggctaggattcc

SEQ ID NO: 21026 - DNA, 20 bp, Artificial Sequence
  chemically synthesized
tcctgtggctaggattcctg

SEQ ID NO: 21027 - DNA, 20 bp, Artificial Sequence
  chemically synthesized
gattcctggagtccataatg

SEQ ID NO: 21028 - DNA, 20 bp, Artificial Sequence
  chemically synthesized
tggagtccataatgcagatg

SEQ ID NO: 21029 - DNA, 20 bp, Artificial Sequence
  chemically synthesized
ataatgcagatgtggaccac

SEQ ID NO: 21030 - DNA, 20 bp, Artificial Sequence
  chemically synthesized
taatgcagatgtggaccact

SEQ ID NO: 21031 - DNA, 20 bp, Artificial Sequence
  chemically synthesized
atgcagatgtggaccactgg

SEQ ID NO: 21032 - DNA, 20 bp, Artificial Sequence
  chemically synthesized
agatgtggaccactgggagt

SEQ ID NO: 21033 - DNA, 20 bp, Artificial Sequence
  chemically synthesized
tcacttaactttcgatgcac

SEQ ID NO: 21034 - DNA, 20 bp, Artificial Sequence
  chemically synthesized
cacttaactttcgatgcact

SEQ ID NO: 21035 - DNA, 20 bp, Artificial Sequence
  chemically synthesized
acttaactttcgatgcactg

SEQ ID NO: 21036 - DNA, 20 bp, Artificial Sequence
  chemically synthesized
ttaactttcgatgcactggg

SEQ ID NO: 21037 - DNA, 20 bp, Artificial Sequence
  chemically synthesized
gatgcactggggagcctctc

SEQ ID NO: 21038 - DNA, 20 bp, Artificial Sequence
  chemically synthesized
ggggagcctctctggcctca

SEQ ID NO: 21039 - DNA, 20 bp, Artificial Sequence
  chemically synthesized
ggagcctctctggcctcaca

SEQ ID NO: 21040 - DNA, 20 bp, Artificial Sequence
  chemically synthesized
gagcctctctggcctcacag

SEQ ID NO: 21041 - DNA, 20 bp, Artificial Sequence
  chemically synthesized
gcctcacagaggatccctac

SEQ ID NO: 21042 - DNA, 20 bp, Artificial Sequence
  chemically synthesized
cctcacagaggatccctact

SEQ ID NO: 21043 - DNA, 20 bp, Artificial Sequence
  chemically synthesized
cacagaggatccctactggg

SEQ ID NO: 21044 - DNA, 20 bp, Artificial Sequence
  chemically synthesized
acagaggatccctactgggt

SEQ ID NO: 21045 - DNA, 20 bp, Artificial Sequence
  chemically synthesized
ttccctccccttcattgcct

SEQ ID NO: 21046 - DNA, 20 bp, Artificial Sequence
  chemically synthesized
gtcacttctctgttgaattc

SEQ ID NO: 21047 - DNA, 20 bp, Artificial Sequence
  chemically synthesized
ttccagaattctctcttatg

SEQ ID NO: 21048 - DNA, 20 bp, Artificial Sequence
  chemically synthesized
tccagaattctctcttatgt

SEQ ID NO: 21049 - DNA, 20 bp, Artificial Sequence
  chemically synthesized
ggattttctacttactattt

SEQ ID NO: 21050 - DNA, 20 bp, Artificial Sequence
  chemically synthesized
cttactattttggttctttg

SEQ ID NO: 21051 - DNA, 20 bp, Artificial Sequence
  chemically synthesized
tactattttggttctttgtg

SEQ ID NO: 21052 - DNA, 20 bp, Artificial Sequence
  chemically synthesized
actattttggttctttgtgg

SEQ ID NO: 21053 - DNA, 20 bp, Artificial Sequence
  chemically synthesized
tattttggttctttgtggag

SEQ ID NO: 21054 - DNA, 20 bp, Artificial Sequence
  chemically synthesized
attttggttctttgtggagg

SEQ ID NO: 21055 - DNA, 20 bp, Artificial Sequence
  chemically synthesized
tggttctttgtggaggaggt

SEQ ID NO: 21056 - DNA, 20 bp, Artificial Sequence
  chemically synthesized
tttgtggaggaggtgagtgt

SEQ ID NO: 21057 - DNA, 20 bp, Artificial Sequence
  chemically synthesized
aggtgagtgtcagctgccct

SEQ ID NO: 21058 - DNA, 20 bp, Artificial Sequence
  chemically synthesized
gagtgtcagctgcccttagt

SEQ ID NO: 21059 - DNA, 20 bp, Artificial Sequence
  chemically synthesized
gcccttagtcagtaatcttc

SEQ ID NO: 21060 - DNA, 20 bp, Artificial Sequence
  chemically synthesized
cccttcccttgaaatttttt

SEQ ID NO: 21061 - DNA, 20 bp, Artificial Sequence
  chemically synthesized
ctttatgtttttatttctaa

SEQ ID NO: 21062 - DNA, 20 bp, Artificial Sequence
  chemically synthesized
ttttatttctaatagactga

SEQ ID NO: 21063 - DNA, 20 bp, Artificial Sequence
  chemically synthesized
ttatttctaatagactgaaa

SEQ ID NO: 21064 - DNA, 20 bp, Artificial Sequence
  chemically synthesized
aatcatattttaaacactct

SEQ ID NO: 21065 - DNA, 20 bp, Artificial Sequence
  chemically synthesized
atcatattttaaacactcta

SEQ ID NO: 21066 - DNA, 20 bp, Artificial Sequence
  chemically synthesized
ttaaacactctaaggctata

SEQ ID NO: 21067 - DNA, 20 bp, Artificial Sequence
  chemically synthesized
taaacactctaaggctatat

SEQ ID NO: 21068 - DNA, 20 bp, Artificial Sequence
  chemically synthesized
aaacactctaaggctatatg

SEQ ID NO: 21069 - DNA, 20 bp, Artificial Sequence
  chemically synthesized
aacactctaaggctatatgg

SEQ ID NO: 21070 - DNA, 20 bp, Artificial Sequence
  chemically synthesized
gctatatgggggactatctg

SEQ ID NO: 21071 - DNA, 20 bp, Artificial Sequence
  chemically synthesized
ctatatgggggactatctga

SEQ ID NO: 21072 - DNA, 20 bp, Artificial Sequence
  chemically synthesized
gggggactatctgaaggcct

SEQ ID NO: 21073 - DNA, 20 bp, Artificial Sequence
  chemically synthesized
actatctgaaggcctcagat

SEQ ID NO: 21074 - DNA, 20 bp, Artificial Sequence
  chemically synthesized
tgaaggcctcagatgagtaa

SEQ ID NO: 21075 - DNA, 20 bp, Artificial Sequence
  chemically synthesized
aggcctcagatgagtaaaag

SEQ ID NO: 21076 - DNA, 20 bp, Artificial Sequence
  chemically synthesized
cctcagatgagtaaaagaag

SEQ ID NO: 21077 - DNA, 20 bp, Artificial Sequence
  chemically synthesized
gagtaaaagaagtagcgaat

SEQ ID NO: 21078 - DNA, 20 bp, Artificial Sequence
  chemically synthesized
atcatttgtttcttcaaata

SEQ ID NO: 21079 - DNA, 20 bp, Artificial Sequence
  chemically synthesized
tatttcccccttatgttctt

SEQ ID NO: 21080 - DNA, 20 bp, Artificial Sequence
  chemically synthesized
aaaaatgtttgcatctacca

SEQ ID NO: 21081 - DNA, 20 bp, Artificial Sequence
  chemically synthesized
aaatacgtaatctaacaaac

SEQ ID NO: 21082 - DNA, 20 bp, Artificial Sequence
  chemically synthesized
aatacgtaatctaacaaaca

SEQ ID NO: 21083 - DNA, 20 bp, Artificial Sequence
  chemically synthesized
ctaacaaacaaggatgtttt

SEQ ID NO: 21084 - DNA, 20 bp, Artificial Sequence
  chemically synthesized
aaggatgttttaagatctct

SEQ ID NO: 21085 - DNA, 20 bp, Artificial Sequence
  chemically synthesized
atgttttaagatctctgagt

SEQ ID NO: 21086 - DNA, 20 bp, Artificial Sequence
  chemically synthesized
agatctctgagtaagatgca

SEQ ID NO: 21087 - DNA, 20 bp, Artificial Sequence
  chemically synthesized
agatgcatagttgcaaataa

SEQ ID NO: 21088 - DNA, 20 bp, Artificial Sequence
  chemically synthesized
gatgcatagttgcaaataaa

SEQ ID NO: 21089 - DNA, 20 bp, Artificial Sequence
  chemically synthesized
tgcatagttgcaaataaaag

SEQ ID NO: 21090 - DNA, 20 bp, Artificial Sequence
  chemically synthesized
tgcaaataaaaggagttttc

SEQ ID NO: 21091 - DNA, 20 bp, Artificial Sequence
  chemically synthesized
gcaaataaaaggagttttca

SEQ ID NO: 21092 - DNA, 20 bp, Artificial Sequence
  chemically synthesized
atctaataaatgtgtaccat

SEQ ID NO: 21093 - DNA, 20 bp, Artificial Sequence
  chemically synthesized
tgtgtaccatcagaaactta

SEQ ID NO: 21094 - DNA, 20 bp, Artificial Sequence
  chemically synthesized
aaacttatggtatattctcc

SEQ ID NO: 21095 - DNA, 20 bp, Artificial Sequence
  chemically synthesized
tatggtatattctcctggaa

SEQ ID NO: 21096 - DNA, 20 bp, Artificial Sequence
  chemically synthesized
atattctcctggaaaagatg

SEQ ID NO: 21097 - DNA, 20 bp, Artificial Sequence
  chemically synthesized
tcctggaaaagatgaagatg

SEQ ID NO: 21098 - DNA, 20 bp, Artificial Sequence
  chemically synthesized
aagatgaagatgaagaaaat

SEQ ID NO: 21099 - DNA, 20 bp, Artificial Sequence
  chemically synthesized
agatgaagaaaataagtcta

SEQ ID NO: 21100 - DNA, 20 bp, Artificial Sequence
  chemically synthesized
tgaagaaaataagtctacag

SEQ ID NO: 21101 - DNA, 20 bp, Artificial Sequence
  chemically synthesized
aagaaaataagtctacagaa

SEQ ID NO: 21102 - DNA, 20 bp, Artificial Sequence
  chemically synthesized
agaaaataagtctacagaag

SEQ ID NO: 21103 - DNA, 20 bp, Artificial Sequence
  chemically synthesized
aaaataagtctacagaagag

SEQ ID NO: 21104 - DNA, 20 bp, Artificial Sequence
  chemically synthesized
acagaagaggagaaattctt

SEQ ID NO: 21105 - DNA, 20 bp, Artificial Sequence
  chemically synthesized
ttggaaattttgcatttttg

SEQ ID NO: 21106 - DNA, 20 bp, Artificial Sequence
  chemically synthesized
aaattttgcatttttgtgga

SEQ ID NO: 21107 - DNA, 20 bp, Artificial Sequence
  chemically synthesized
ttttgcatttttgtggatag

SEQ ID NO: 21108 - DNA, 20 bp, Artificial Sequence
  chemically synthesized
ttttgtggatagtggttttg

SEQ ID NO: 21109 - DNA, 20 bp, Artificial Sequence
  chemically synthesized
gtggatagtggttttgaaga

SEQ ID NO: 21110 - DNA, 20 bp, Artificial Sequence
  chemically synthesized
tagtggttttgaagaaagct

SEQ ID NO: 21111 - DNA, 20 bp, Artificial Sequence
  chemically synthesized
atatatttaaatatgttgct

SEQ ID NO: 21112 - DNA, 20 bp, Artificial Sequence
  chemically synthesized
gatgtgactcccacacttta

SEQ ID NO: 21113 - DNA, 20 bp, Artificial Sequence
  chemically synthesized
gactcccacactttaaagaa

SEQ ID NO: 21114 - DNA, 20 bp, Artificial Sequence
  chemically synthesized
taaagaaaagttcttcattt

SEQ ID NO: 21115 - DNA, 20 bp, Artificial Sequence
  chemically synthesized
ttttagttgcccttgcaaat

SEQ ID NO: 21116 - DNA, 20 bp, Artificial Sequence
  chemically synthesized
gttgcccttgcaaattggct

SEQ ID NO: 21117 - DNA, 20 bp, Artificial Sequence
  chemically synthesized
tcctcaacaaataattttga

SEQ ID NO: 21118 - DNA, 20 bp, Artificial Sequence
  chemically synthesized
tgatggtttctaaaattgtc

SEQ ID NO: 21119 - DNA, 20 bp, Artificial Sequence
  chemically synthesized
tctaaaattgtccagaattt

SEQ ID NO: 21120 - DNA, 20 bp, Artificial Sequence
  chemically synthesized
ctaaaattgtccagaatttg

SEQ ID NO: 21121 - DNA, 20 bp, Artificial Sequence
  chemically synthesized
ccagaatttgaggaaatact

SEQ ID NO: 21122 - DNA, 20 bp, Artificial Sequence
  chemically synthesized
tttgaggaaatacttagatg

SEQ ID NO: 21123 - DNA, 20 bp, Artificial Sequence
  chemically synthesized
gaggaaatacttagatgtag

SEQ ID NO: 21124 - DNA, 20 bp, Artificial Sequence
  chemically synthesized
gacatcaatttatgttaact

SEQ ID NO: 21125 - DNA, 20 bp, Artificial Sequence
  chemically synthesized
tgttaacttagatttattgt

SEQ ID NO: 21126 - DNA, 20 bp, Artificial Sequence
  chemically synthesized
aacttagatttattgttgga

SEQ ID NO: 21127 - DNA, 20 bp, Artificial Sequence
  chemically synthesized
agatttattgttggatggtt

SEQ ID NO: 21128 - DNA, 20 bp, Artificial Sequence
  chemically synthesized
taatcatgtctgttcttgtc

SEQ ID NO: 21129 - DNA, 20 bp, Artificial Sequence
  chemically synthesized
atgtctgttcttgtccagtc

SEQ ID NO: 21130 - DNA, 20 bp, Artificial Sequence
  chemically synthesized
tctgttcttgtccagtctag

SEQ ID NO: 21131 - DNA, 20 bp, Artificial Sequence
  chemically synthesized
acatctgaactgtgatttga

SEQ ID NO: 21132 - DNA, 20 bp, Artificial Sequence
  chemically synthesized
tttgacagtgtccttattat

SEQ ID NO: 21133 - DNA, 20 bp, Artificial Sequence
  chemically synthesized
tatcagactctgctcaatga

SEQ ID NO: 21134 - DNA, 20 bp, Artificial Sequence
  chemically synthesized
gtttaaacttctttttgata

SEQ ID NO: 21135 - DNA, 20 bp, Artificial Sequence
  chemically synthesized
cagtaaaaaacttttcctta

SEQ ID NO: 21136 - DNA, 20 bp, Artificial Sequence
  chemically synthesized
tccttaaagatgaaattctt

SEQ ID NO: 21137 - DNA, 20 bp, Artificial Sequence
  chemically synthesized
ccttaaagatgaaattctta

SEQ ID NO: 21138 - DNA, 20 bp, Artificial Sequence
  chemically synthesized
atgaaattcttaaggacaat

SEQ ID NO: 21139 - DNA, 20 bp, Artificial Sequence
  chemically synthesized
ttaaggacaattagcttgtg

SEQ ID NO: 21140 - DNA, 20 bp, Artificial Sequence
  chemically synthesized
tatgaaaattgcttgcattt

SEQ ID NO: 21141 - DNA, 20 bp, Artificial Sequence
  chemically synthesized
tgaaaattgcttgcattttg

SEQ ID NO: 21142 - DNA, 20 bp, Artificial Sequence
  chemically synthesized
cttgcattttggagttacat

SEQ ID NO: 21143 - DNA, 20 bp, Artificial Sequence
  chemically synthesized
tataaattaatgaatcctat

SEQ ID NO: 21144 - DNA, 20 bp, Artificial Sequence
  chemically synthesized
atcctattggtaccatataa

SEQ ID NO: 21145 - DNA, 20 bp, Artificial Sequence
  chemically synthesized
cttttgtgtctcgcctttca

SEQ ID NO: 21146 - DNA, 20 bp, Artificial Sequence
  chemically synthesized
ttttgtgtctcgcctttcaa

SEQ ID NO: 21147 - DNA, 20 bp, Artificial Sequence
  chemically synthesized
tttgtgtctcgcctttcaaa

SEQ ID NO: 21148 - DNA, 20 bp, Artificial Sequence
  chemically synthesized
tcaaagggcaattttccaaa

SEQ ID NO: 21149 - DNA, 20 bp, Artificial Sequence
  chemically synthesized
tccaaaaagtatattttgca

SEQ ID NO: 21150 - DNA, 20 bp, Artificial Sequence
  chemically synthesized
aaagtatattttgcatggct

SEQ ID NO: 21151 - DNA, 20 bp, Artificial Sequence
  chemically synthesized
aagtatattttgcatggctc

SEQ ID NO: 21152 - DNA, 20 bp, Artificial Sequence
  chemically synthesized
ttttgcatggctcaggctaa

SEQ ID NO: 21153 - DNA, 20 bp, Artificial Sequence
  chemically synthesized
caggctaaaagtaatgtctc

SEQ ID NO: 21154 - DNA, 20 bp, Artificial Sequence
  chemically synthesized
aaaagtaatgtctccagatg

SEQ ID NO: 21155 - DNA, 20 bp, Artificial Sequence
  chemically synthesized
cattgattgtgactattgat

SEQ ID NO: 21156 - DNA, 20 bp, Artificial Sequence
  chemically synthesized
ttgataagatttactatgta

SEQ ID NO: 21157 - DNA, 20 bp, Artificial Sequence
  chemically synthesized
agatttactatgtaaagtat

SEQ ID NO: 21158 - DNA, 20 bp, Artificial Sequence
  chemically synthesized
ctatgtaaagtataagttac

SEQ ID NO: 21159 - DNA, 20 bp, Artificial Sequence
  chemically synthesized
gttactggaataatacattt

SEQ ID NO: 21160 - DNA, 20 bp, Artificial Sequence
  chemically synthesized
aataatacatttaagaaata

SEQ ID NO: 21161 - DNA, 20 bp, Artificial Sequence
  chemically synthesized
aatacatttaagaaatatag

SEQ ID NO: 21162 - DNA, 20 bp, Artificial Sequence
  chemically synthesized
atagtagctattaaaacctg

SEQ ID NO: 21163 - DNA, 20 bp, Artificial Sequence
  chemically synthesized
aaacctgtagtctgatgaaa

SEQ ID NO: 21164 - DNA, 20 bp, Artificial Sequence
  chemically synthesized
tgaaatggaatatgttttga

SEQ ID NO: 21165 - DNA, 20 bp, Artificial Sequence
  chemically synthesized
atggaatatgttttgaaaga

SEQ ID NO: 21166 - DNA, 20 bp, Artificial Sequence
  chemically synthesized
gaatatgttttgaaagacag

SEQ ID NO: 21167 - DNA, 20 bp, Artificial Sequence
  chemically synthesized
gaaagacagcagtgaaaaat

SEQ ID NO: 21168 - DNA, 20 bp, Artificial Sequence
  chemically synthesized
agacagcagtgaaaaatgag

SEQ ID NO: 21169 - DNA, 20 bp, Artificial Sequence
  chemically synthesized
aaaaatgagaagtaatatat

SEQ ID NO: 21170 - DNA, 20 bp, Artificial Sequence
  chemically synthesized
taaaattgctttttgcaatt

SEQ ID NO: 21171 - DNA, 20 bp, Artificial Sequence
  chemically synthesized
tgctttttgcaattgagttg

SEQ ID NO: 21172 - DNA, 20 bp, Artificial Sequence
  chemically synthesized
attgagttgaagattgatgc

SEQ ID NO: 21173 - DNA, 20 bp, Artificial Sequence
  chemically synthesized
ttgagttgaagattgatgcc

SEQ ID NO: 21174 - DNA, 20 bp, Artificial Sequence
  chemically synthesized
tgccaggatcttattacctc

SEQ ID NO: 21175 - DNA, 20 bp, Artificial Sequence
  chemically synthesized
gccaggatcttattacctcc

SEQ ID NO: 21176 - DNA, 20 bp, Artificial Sequence
  chemically synthesized
attacctccaggatttcaca

SEQ ID NO: 21177 - DNA, 20 bp, Artificial Sequence
  chemically synthesized
ttacctccaggatttcacaa

SEQ ID NO: 21178 - DNA, 20 bp, Artificial Sequence
  chemically synthesized
gatttcacaaaggatttctt

SEQ ID NO: 21179 - DNA, 20 bp, Artificial Sequence
  chemically synthesized
cttgagtcatccccttgctc

SEQ ID NO: 21180 - DNA, 20 bp, Artificial Sequence
  chemically synthesized
cttgctctagctcatgaaca

SEQ ID NO: 21181 - DNA, 20 bp, Artificial Sequence
  chemically synthesized
tcatgaacaaagtattgctc

SEQ ID NO: 21182 - DNA, 20 bp, Artificial Sequence
  chemically synthesized
agtattgctcaagtaatcga

SEQ ID NO: 21183 - DNA, 20 bp, Artificial Sequence
  chemically synthesized
tctcacatgtgattattatt

SEQ ID NO: 21184 - DNA, 20 bp, Artificial Sequence
  chemically synthesized
attattatttagtgctgtca

SEQ ID NO: 21185 - DNA, 20 bp, Artificial Sequence
  chemically synthesized
ttattatttagtgctgtcac

SEQ ID NO: 21186 - DNA, 20 bp, Artificial Sequence
  chemically synthesized
tcacgggaaatatcctgcct

SEQ ID NO: 21187 - DNA, 20 bp, Artificial Sequence
  chemically synthesized
aatatcctgcctaagtttac

SEQ ID NO: 21188 - DNA, 20 bp, Artificial Sequence
  chemically synthesized
tatcctgcctaagtttactg

SEQ ID NO: 21189 - DNA, 20 bp, Artificial Sequence
  chemically synthesized
atcctgcctaagtttactgg

SEQ ID NO: 21190 - DNA, 20 bp, Artificial Sequence
  chemically synthesized
cctccctatgtcctcctacc

SEQ ID NO: 21191 - DNA, 20 bp, Artificial Sequence
  chemically synthesized
tttccttgcacactctactc

SEQ ID NO: 21192 - DNA, 20 bp, Artificial Sequence
  chemically synthesized
ttgcacactctactccagct

SEQ ID NO: 21193 - DNA, 20 bp, Artificial Sequence
  chemically synthesized
tgcacactctactccagctt

SEQ ID NO: 21194 - DNA, 20 bp, Artificial Sequence
  chemically synthesized
gcacactctactccagctta

SEQ ID NO: 21195 - DNA, 20 bp, Artificial Sequence
  chemically synthesized
ctctactccagcttagggcc

SEQ ID NO: 21196 - DNA, 20 bp, Artificial Sequence
  chemically synthesized
tctactccagcttagggcct

SEQ ID NO: 21197 - DNA, 20 bp, Artificial Sequence
  chemically synthesized
acccttttaattaccccatt

SEQ ID NO: 21198 - DNA, 20 bp, Artificial Sequence
  chemically synthesized
tcaatttttgccttttcaat

SEQ ID NO: 21199 - DNA, 20 bp, Artificial Sequence
  chemically synthesized
aaaatttatttatatatatt

SEQ ID NO: 21200 - DNA, 20 bp, Artificial Sequence
  chemically synthesized
atttatttatatatatttag

SEQ ID NO: 21201 - DNA, 20 bp, Artificial Sequence
  chemically synthesized
tttatttatatatatttaga

SEQ ID NO: 21202 - DNA, 20 bp, Artificial Sequence
  chemically synthesized
tatatttagaaggtatgtac

SEQ ID NO: 21203 - DNA, 20 bp, Artificial Sequence
  chemically synthesized
tcgttatcatgctgcttata

SEQ ID NO: 21204 - DNA, 20 bp, Artificial Sequence
  chemically synthesized
ctgcttataaagacatacct

SEQ ID NO: 21205 - DNA, 20 bp, Artificial Sequence
  chemically synthesized
tataaagacatacctgagac

SEQ ID NO: 21206 - DNA, 20 bp, Artificial Sequence
  chemically synthesized
ataaagacatacctgagact

SEQ ID NO: 21207 - DNA, 20 bp, Artificial Sequence
  chemically synthesized
cctgagactgggtaatttat

SEQ ID NO: 21208 - DNA, 20 bp, Artificial Sequence
  chemically synthesized
ctgagactgggtaatttata

SEQ ID NO: 21209 - DNA, 20 bp, Artificial Sequence
  chemically synthesized
aaaaacgtttaattgtctca

SEQ ID NO: 21210 - DNA, 20 bp, Artificial Sequence
  chemically synthesized
ttaattgtctcacagttcca

SEQ ID NO: 21211 - DNA, 20 bp, Artificial Sequence
  chemically synthesized
taattgtctcacagttccac

SEQ ID NO: 21212 - DNA, 20 bp, Artificial Sequence
  chemically synthesized
aattgtctcacagttccaca

SEQ ID NO: 21213 - DNA, 20 bp, Artificial Sequence
  chemically synthesized
gtctcacagttccacagggc

SEQ ID NO: 21214 - DNA, 20 bp, Artificial Sequence
  chemically synthesized
tctcacagttccacagggct

SEQ ID NO: 21215 - DNA, 20 bp, Artificial Sequence
  chemically synthesized
ctcacagttccacagggctg

SEQ ID NO: 21216 - DNA, 20 bp, Artificial Sequence
  chemically synthesized
cacagttccacagggctggg

SEQ ID NO: 21217 - DNA, 20 bp, Artificial Sequence
  chemically synthesized
acagttccacagggctgggg

SEQ ID NO: 21218 - DNA, 20 bp, Artificial Sequence
  chemically synthesized
ccacagggctggggaggcct

SEQ ID NO: 21219 - DNA, 20 bp, Artificial Sequence
  chemically synthesized
cacagggctggggaggcctc

SEQ ID NO: 21220 - DNA, 20 bp, Artificial Sequence
  chemically synthesized
cctcgggaaacttacaatca

SEQ ID NO: 21221 - DNA, 20 bp, Artificial Sequence
  chemically synthesized
cgggaaacttacaatcatgg

SEQ ID NO: 21222 - DNA, 20 bp, Artificial Sequence
  chemically synthesized
gaaacttacaatcatggcag

SEQ ID NO: 21223 - DNA, 20 bp, Artificial Sequence
  chemically synthesized
acttacaatcatggcagaag

SEQ ID NO: 21224 - DNA, 20 bp, Artificial Sequence
  chemically synthesized
caaacatgtccttcttcaca

SEQ ID NO: 21225 - DNA, 20 bp, Artificial Sequence
  chemically synthesized
acatgtccttcttcacatgg

SEQ ID NO: 21226 - DNA, 20 bp, Artificial Sequence
  chemically synthesized
tgtccttcttcacatggcag

SEQ ID NO: 21227 - DNA, 20 bp, Artificial Sequence
  chemically synthesized
cttcttcacatggcagcagc

SEQ ID NO: 21228 - DNA, 20 bp, Artificial Sequence
  chemically synthesized
cttcacatggcagcagcaag

SEQ ID NO: 21229 - DNA, 20 bp, Artificial Sequence
  chemically synthesized
cacatggcagcagcaagtag

SEQ ID NO: 21230 - DNA, 20 bp, Artificial Sequence
  chemically synthesized
cagcagcaagtagaagtgcc

SEQ ID NO: 21231 - DNA, 20 bp, Artificial Sequence
  chemically synthesized
caagtagaagtgccaagcaa

SEQ ID NO: 21232 - DNA, 20 bp, Artificial Sequence
  chemically synthesized
aagtagaagtgccaagcaaa

SEQ ID NO: 21233 - DNA, 20 bp, Artificial Sequence
  chemically synthesized
agtagaagtgccaagcaaaa

SEQ ID NO: 21234 - DNA, 20 bp, Artificial Sequence
  chemically synthesized
gtagaagtgccaagcaaaag

SEQ ID NO: 21235 - DNA, 20 bp, Artificial Sequence
  chemically synthesized
tagaagtgccaagcaaaagg

SEQ ID NO: 21236 - DNA, 20 bp, Artificial Sequence
  chemically synthesized
gtgccaagcaaaagggggaa

SEQ ID NO: 21237 - DNA, 20 bp, Artificial Sequence
  chemically synthesized
aaagccgcttataaaaccat

SEQ ID NO: 21238 - DNA, 20 bp, Artificial Sequence
  chemically synthesized
ataaaaccatcagatcttgt

SEQ ID NO: 21239 - DNA, 20 bp, Artificial Sequence
  chemically synthesized
ttgtaagaactcactatcac

SEQ ID NO: 21240 - DNA, 20 bp, Artificial Sequence
  chemically synthesized
taagaactcactatcacgag

SEQ ID NO: 21241 - DNA, 20 bp, Artificial Sequence
  chemically synthesized
agaactcactatcacgagaa

SEQ ID NO: 21242 - DNA, 20 bp, Artificial Sequence
  chemically synthesized
cactatcacgagaagagcat

SEQ ID NO: 21243 - DNA, 20 bp, Artificial Sequence
  chemically synthesized
ctatcacgagaagagcatga

SEQ ID NO: 21244 - DNA, 20 bp, Artificial Sequence
  chemically synthesized
aaatccctcccacaacacgt

SEQ ID NO: 21245 - DNA, 20 bp, Artificial Sequence
  chemically synthesized
aatccctcccacaacacgtg

SEQ ID NO: 21246 - DNA, 20 bp, Artificial Sequence
  chemically synthesized
cccacaacacgtgaggatta

SEQ ID NO: 21247 - DNA, 20 bp, Artificial Sequence
  chemically synthesized
ccacaacacgtgaggattat

SEQ ID NO: 21248 - DNA, 20 bp, Artificial Sequence
  chemically synthesized
gattatgggaactacaattc

SEQ ID NO: 21249 - DNA, 20 bp, Artificial Sequence
  chemically synthesized
tgggaactacaattcaagat

SEQ ID NO: 21250 - DNA, 20 bp, Artificial Sequence
  chemically synthesized
ctacaattcaagatgagatt

SEQ ID NO: 21251 - DNA, 20 bp, Artificial Sequence
  chemically synthesized
tacaattcaagatgagattt

SEQ ID NO: 21252 - DNA, 20 bp, Artificial Sequence
  chemically synthesized
aattcaagatgagatttggg

SEQ ID NO: 21253 - DNA, 20 bp, Artificial Sequence
  chemically synthesized
attcaagatgagatttgggt

SEQ ID NO: 21254 - DNA, 20 bp, Artificial Sequence
  chemically synthesized
ttcaagatgagatttgggtg

SEQ ID NO: 21255 - DNA, 20 bp, Artificial Sequence
  chemically synthesized
atgagatttgggtggggaca

SEQ ID NO: 21256 - DNA, 20 bp, Artificial Sequence
  chemically synthesized
atttgggtggggacacagtc

SEQ ID NO: 21257 - DNA, 20 bp, Artificial Sequence
  chemically synthesized
gggacacagtcaagctgtat

SEQ ID NO: 21258 - DNA, 20 bp, Artificial Sequence
  chemically synthesized
ggacacagtcaagctgtatc

SEQ ID NO: 21259 - DNA, 20 bp, Artificial Sequence
  chemically synthesized
gacacagtcaagctgtatca

SEQ ID NO: 21260 - DNA, 20 bp, Artificial Sequence
  chemically synthesized
gtcaagctgtatcagggtac

SEQ ID NO: 21261 - DNA, 20 bp, Artificial Sequence
  chemically synthesized
gctgtatcagggtacaagct

SEQ ID NO: 21262 - DNA, 20 bp, Artificial Sequence
  chemically synthesized
ctgtatcagggtacaagctc

SEQ ID NO: 21263 - DNA, 20 bp, Artificial Sequence
  chemically synthesized
ccttacatatgtatgttgca

SEQ ID NO: 21264 - DNA, 20 bp, Artificial Sequence
  chemically synthesized
tacatatgtatgttgcatag

SEQ ID NO: 21265 - DNA, 20 bp, Artificial Sequence
  chemically synthesized
atgtatgttgcatagtggtg

SEQ ID NO: 21266 - DNA, 20 bp, Artificial Sequence
  chemically synthesized
gttgcatagtggtgaagtct

SEQ ID NO: 21267 - DNA, 20 bp, Artificial Sequence
  chemically synthesized
agtggtgaagtctgagcttt

SEQ ID NO: 21268 - DNA, 20 bp, Artificial Sequence
  chemically synthesized
ggtgaagtctgagcttttag

SEQ ID NO: 21269 - DNA, 20 bp, Artificial Sequence
  chemically synthesized
ttagtggaccatcacctgaa

SEQ ID NO: 21270 - DNA, 20 bp, Artificial Sequence
  chemically synthesized
tgaatgttgtatccaatccg

SEQ ID NO: 21271 - DNA, 20 bp, Artificial Sequence
  chemically synthesized
gtatccaatccgtagttttt

SEQ ID NO: 21272 - DNA, 20 bp, Artificial Sequence
  chemically synthesized
cctatcctcccacctttctc

SEQ ID NO: 21273 - DNA, 20 bp, Artificial Sequence
  chemically synthesized
tcccacctttctctagtctc

SEQ ID NO: 21274 - DNA, 20 bp, Artificial Sequence
  chemically synthesized
gtctatgcttactcatcgtt

SEQ ID NO: 21275 - DNA, 20 bp, Artificial Sequence
  chemically synthesized
ctcatcgtttagctcccact

SEQ ID NO: 21276 - DNA, 20 bp, Artificial Sequence
  chemically synthesized
ccacttggctctcactaaat

SEQ ID NO: 21277 - DNA, 20 bp, Artificial Sequence
  chemically synthesized
gtgtttgactttctgtttct

SEQ ID NO: 21278 - DNA, 20 bp, Artificial Sequence
  chemically synthesized
tgtttctgagttatttcact

SEQ ID NO: 21279 - DNA, 20 bp, Artificial Sequence
  chemically synthesized
gtttctgagttatttcactg

SEQ ID NO: 21280 - DNA, 20 bp, Artificial Sequence
  chemically synthesized
tcactgaggataatgtcctc

SEQ ID NO: 21281 - DNA, 20 bp, Artificial Sequence
  chemically synthesized
tccagttctaaccatgtttc

SEQ ID NO: 21282 - DNA, 20 bp, Artificial Sequence
  chemically synthesized
cagttctaaccatgtttcta

SEQ ID NO: 21283 - DNA, 20 bp, Artificial Sequence
  chemically synthesized
ttctaaccatgtttctagag

SEQ ID NO: 21284 - DNA, 20 bp, Artificial Sequence
  chemically synthesized
catgatttcattctttttta

SEQ ID NO: 21285 - DNA, 20 bp, Artificial Sequence
  chemically synthesized
tttcattcttttttatggct

SEQ ID NO: 21286 - DNA, 20 bp, Artificial Sequence
  chemically synthesized
ttctttatccaatcgtccat

SEQ ID NO: 21287 - DNA, 20 bp, Artificial Sequence
  chemically synthesized
tttatccaatcgtccattgg

SEQ ID NO: 21288 - DNA, 20 bp, Artificial Sequence
  chemically synthesized
atcgtccattggtagacatt

SEQ ID NO: 21289 - DNA, 20 bp, Artificial Sequence
  chemically synthesized
tcgtccattggtagacattt

SEQ ID NO: 21290 - DNA, 20 bp, Artificial Sequence
  chemically synthesized
tgattccatatctttgctat

SEQ ID NO: 21291 - DNA, 20 bp, Artificial Sequence
  chemically synthesized
gattccatatctttgctatt

SEQ ID NO: 21292 - DNA, 20 bp, Artificial Sequence
  chemically synthesized
catatctttgctattgggaa

SEQ ID NO: 21293 - DNA, 20 bp, Artificial Sequence
  chemically synthesized
ctactttgaacatactaatg

SEQ ID NO: 21294 - DNA, 20 bp, Artificial Sequence
  chemically synthesized
taatatgatctctttcactt

SEQ ID NO: 21295 - DNA, 20 bp, Artificial Sequence
  chemically synthesized
aatatgatctctttcacttt

SEQ ID NO: 21296 - DNA, 20 bp, Artificial Sequence
  chemically synthesized
tttcactttgggtccatacc

SEQ ID NO: 21297 - DNA, 20 bp, Artificial Sequence
  chemically synthesized
cactttgggtccatacccag

SEQ ID NO: 21298 - DNA, 20 bp, Artificial Sequence
  chemically synthesized
tttgggtccatacccagtag

SEQ ID NO: 21299 - DNA, 20 bp, Artificial Sequence
  chemically synthesized
ttgggtccatacccagtagt

SEQ ID NO: 21300 - DNA, 20 bp, Artificial Sequence
  chemically synthesized
catacccagtagtgggattg

SEQ ID NO: 21301 - DNA, 20 bp, Artificial Sequence
  chemically synthesized
atacccagtagtgggattgc

SEQ ID NO: 21302 - DNA, 20 bp, Artificial Sequence
  chemically synthesized
agtgggattgcaggattgaa

SEQ ID NO: 21303 - DNA, 20 bp, Artificial Sequence
  chemically synthesized
gggattgcaggattgaatgg

SEQ ID NO: 21304 - DNA, 20 bp, Artificial Sequence
  chemically synthesized
ttgaatggtagttctgtttc

SEQ ID NO: 21305 - DNA, 20 bp, Artificial Sequence
  chemically synthesized
agttctgtttctagttcttt

SEQ ID NO: 21306 - DNA, 20 bp, Artificial Sequence
  chemically synthesized
tcttcatgctgtcttccata

SEQ ID NO: 21307 - DNA, 20 bp, Artificial Sequence
  chemically synthesized
ctaatttacattcttaccaa

SEQ ID NO: 21308 - DNA, 20 bp, Artificial Sequence
  chemically synthesized
cattcttaccaacagtgtat

SEQ ID NO: 21309 - DNA, 20 bp, Artificial Sequence
  chemically synthesized
gtttttgaactttataatga

SEQ ID NO: 21310 - DNA, 20 bp, Artificial Sequence
  chemically synthesized
ataatgatagccattctgac

SEQ ID NO: 21311 - DNA, 20 bp, Artificial Sequence
  chemically synthesized
atagccattctgactggcat

SEQ ID NO: 21312 - DNA, 20 bp, Artificial Sequence
  chemically synthesized
tagccattctgactggcata

SEQ ID NO: 21313 - DNA, 20 bp, Artificial Sequence
  chemically synthesized
gccattctgactggcataag

SEQ ID NO: 21314 - DNA, 20 bp, Artificial Sequence
  chemically synthesized
ccattctgactggcataagg

SEQ ID NO: 21315 - DNA, 20 bp, Artificial Sequence
  chemically synthesized
tggcataaggaggtatcata

SEQ ID NO: 21316 - DNA, 20 bp, Artificial Sequence
  chemically synthesized
cataaggaggtatcatatgg

SEQ ID NO: 21317 - DNA, 20 bp, Artificial Sequence
  chemically synthesized
aatttgcattctctgattat

SEQ ID NO: 21318 - DNA, 20 bp, Artificial Sequence
  chemically synthesized
aacttttttttgacgtttat

SEQ ID NO: 21319 - DNA, 20 bp, Artificial Sequence
  chemically synthesized
gccacttgtatgtcttcttt

SEQ ID NO: 21320 - DNA, 20 bp, Artificial Sequence
  chemically synthesized
tcttttggaaaatgtctgct

SEQ ID NO: 21321 - DNA, 20 bp, Artificial Sequence
  chemically synthesized
cttttggaaaatgtctgctc

SEQ ID NO: 21322 - DNA, 20 bp, Artificial Sequence
  chemically synthesized
aaaatgtctgctcaggacct

SEQ ID NO: 21323 - DNA, 20 bp, Artificial Sequence
  chemically synthesized
cctgagctcactgtatttgt

SEQ ID NO: 21324 - DNA, 20 bp, Artificial Sequence
  chemically synthesized
ctgagctcactgtatttgtc

SEQ ID NO: 21325 - DNA, 20 bp, Artificial Sequence
  chemically synthesized
tgagctcactgtatttgtca

SEQ ID NO: 21326 - DNA, 20 bp, Artificial Sequence
  chemically synthesized
ctgtatttgtcagggttccc

SEQ ID NO: 21327 - DNA, 20 bp, Artificial Sequence
  chemically synthesized
gtatttgtcagggttcccta

SEQ ID NO: 21328 - DNA, 20 bp, Artificial Sequence
  chemically synthesized
atttgtcagggttccctaga

SEQ ID NO: 21329 - DNA, 20 bp, Artificial Sequence
  chemically synthesized
gtcagggttccctagagaga

SEQ ID NO: 21330 - DNA, 20 bp, Artificial Sequence
  chemically synthesized
ccctagagagacagaactaa

SEQ ID NO: 21331 - DNA, 20 bp, Artificial Sequence
  chemically synthesized
cctagagagacagaactaat

SEQ ID NO: 21332 - DNA, 20 bp, Artificial Sequence
  chemically synthesized
tagagagacagaactaatag

SEQ ID NO: 21333 - DNA, 20 bp, Artificial Sequence
  chemically synthesized
gagacagaactaataggaga

SEQ ID NO: 21334 - DNA, 20 bp, Artificial Sequence
  chemically synthesized
cagaactaataggagataga

SEQ ID NO: 21335 - DNA, 20 bp, Artificial Sequence
  chemically synthesized
actaataggagatagataga

SEQ ID NO: 21336 - DNA, 20 bp, Artificial Sequence
  chemically synthesized
ataggagatagatagataga

SEQ ID NO: 21337 - DNA, 20 bp, Artificial Sequence
  chemically synthesized
gagatagatagatagataga

SEQ ID NO: 21338 - DNA, 20 bp, Artificial Sequence
  chemically synthesized
tagatagatagatagataga

SEQ ID NO: 21339 - DNA, 20 bp, Artificial Sequence
  chemically synthesized
tagatagatagatagataga

SEQ ID NO: 21340 - DNA, 20 bp, Artificial Sequence
  chemically synthesized
tagatagatagatagataga

SEQ ID NO: 21341 - DNA, 20 bp, Artificial Sequence
  chemically synthesized
tagatagatagatagataga

SEQ ID NO: 21342 - DNA, 20 bp, Artificial Sequence
  chemically synthesized
tagatagatagatagataga

SEQ ID NO: 21343 - DNA, 20 bp, Artificial Sequence
  chemically synthesized
gatagatagatagatagata

SEQ ID NO: 21344 - DNA, 20 bp, Artificial Sequence
  chemically synthesized
tagatagatagatatagatt

SEQ ID NO: 21345 - DNA, 20 bp, Artificial Sequence
  chemically synthesized
agatatagatttagatataa

SEQ ID NO: 21346 - DNA, 20 bp, Artificial Sequence
  chemically synthesized
gatatagatttagatataaa

SEQ ID NO: 21347 - DNA, 20 bp, Artificial Sequence
  chemically synthesized
atatagatttagatataaaa

SEQ ID NO: 21348 - DNA, 20 bp, Artificial Sequence
  chemically synthesized
atagatttagatataaaagg

SEQ ID NO: 21349 - DNA, 20 bp, Artificial Sequence
  chemically synthesized
gatataaaagggagtttatt

SEQ ID NO: 21350 - DNA, 20 bp, Artificial Sequence
  chemically synthesized
ataaaagggagtttattaag

SEQ ID NO: 21351 - DNA, 20 bp, Artificial Sequence
  chemically synthesized
gtgttaacttacacaatcac

SEQ ID NO: 21352 - DNA, 20 bp, Artificial Sequence
  chemically synthesized
tgttaacttacacaatcaca

SEQ ID NO: 21353 - DNA, 20 bp, Artificial Sequence
  chemically synthesized
acaatcacaaggtcccacaa

SEQ ID NO: 21354 - DNA, 20 bp, Artificial Sequence
  chemically synthesized
caatcacaaggtcccacaat

SEQ ID NO: 21355 - DNA, 20 bp, Artificial Sequence
  chemically synthesized
tcccacaataggccatctgc

SEQ ID NO: 21356 - DNA, 20 bp, Artificial Sequence
  chemically synthesized
cacaataggccatctgcaag

SEQ ID NO: 21357 - DNA, 20 bp, Artificial Sequence
  chemically synthesized
caataggccatctgcaagca

SEQ ID NO: 21358 - DNA, 20 bp, Artificial Sequence
  chemically synthesized
aataggccatctgcaagcag

SEQ ID NO: 21359 - DNA, 20 bp, Artificial Sequence
  chemically synthesized
taggccatctgcaagcagag

SEQ ID NO: 21360 - DNA, 20 bp, Artificial Sequence
  chemically synthesized
ccatctgcaagcagaggagc

SEQ ID NO: 21361 - DNA, 20 bp, Artificial Sequence
  chemically synthesized
catctgcaagcagaggagca

SEQ ID NO: 21362 - DNA, 20 bp, Artificial Sequence
  chemically synthesized
ctgcaagcagaggagcaagg

SEQ ID NO: 21363 - DNA, 20 bp, Artificial Sequence
  chemically synthesized
aagcagaggagcaaggaagc

SEQ ID NO: 21364 - DNA, 20 bp, Artificial Sequence
  chemically synthesized
aggagcaaggaagccagtcc

SEQ ID NO: 21365 - DNA, 20 bp, Artificial Sequence
  chemically synthesized
ggaagccagtccaagtccca

SEQ ID NO: 21366 - DNA, 20 bp, Artificial Sequence
  chemically synthesized
cagtccaagtcccaaagctg

SEQ ID NO: 21367 - DNA, 20 bp, Artificial Sequence
  chemically synthesized
agtccaagtcccaaagctga

SEQ ID NO: 21368 - DNA, 20 bp, Artificial Sequence
  chemically synthesized
agtcccaaagctgaaggact

SEQ ID NO: 21369 - DNA, 20 bp, Artificial Sequence
  chemically synthesized
tcccaaagctgaaggacttg

SEQ ID NO: 21370 - DNA, 20 bp, Artificial Sequence
  chemically synthesized
ggacttggagtccaatgttt

SEQ ID NO: 21371 - DNA, 20 bp, Artificial Sequence
  chemically synthesized
gacttggagtccaatgtttg

SEQ ID NO: 21372 - DNA, 20 bp, Artificial Sequence
  chemically synthesized
acttggagtccaatgtttga

SEQ ID NO: 21373 - DNA, 20 bp, Artificial Sequence
  chemically synthesized
tggagtccaatgtttgaggg

SEQ ID NO: 21374 - DNA, 20 bp, Artificial Sequence
  chemically synthesized
ggagtccaatgtttgagggc

SEQ ID NO: 21375 - DNA, 20 bp, Artificial Sequence
  chemically synthesized
gtccaatgtttgagggcagg

SEQ ID NO: 21376 - DNA, 20 bp, Artificial Sequence
  chemically synthesized
gtttgagggcaggaagcatc

SEQ ID NO: 21377 - DNA, 20 bp, Artificial Sequence
  chemically synthesized
agggcaggaagcatccagca

SEQ ID NO: 21378 - DNA, 20 bp, Artificial Sequence
  chemically synthesized
gggcaggaagcatccagcat

SEQ ID NO: 21379 - DNA, 20 bp, Artificial Sequence
  chemically synthesized
gcaggaagcatccagcatgg

SEQ ID NO: 21380 - DNA, 20 bp, Artificial Sequence
  chemically synthesized
gaagcatccagcatgggaga

SEQ ID NO: 21381 - DNA, 20 bp, Artificial Sequence
  chemically synthesized
tccagcatgggagaaagatg

SEQ ID NO: 21382 - DNA, 20 bp, Artificial Sequence
  chemically synthesized
ccagcatgggagaaagatgt

SEQ ID NO: 21383 - DNA, 20 bp, Artificial Sequence
  chemically synthesized
atgggagaaagatgtaggct

SEQ ID NO: 21384 - DNA, 20 bp, Artificial Sequence
  chemically synthesized
gggagaaagatgtaggcttg

SEQ ID NO: 21385 - DNA, 20 bp, Artificial Sequence
  chemically synthesized
ggagaaagatgtaggcttgg

SEQ ID NO: 21386 - DNA, 20 bp, Artificial Sequence
  chemically synthesized
aagatgtaggcttggaggct

SEQ ID NO: 21387 - DNA, 20 bp, Artificial Sequence
  chemically synthesized
tgtaggcttggaggctaagc

SEQ ID NO: 21388 - DNA, 20 bp, Artificial Sequence
  chemically synthesized
gcttggaggctaagccagtc

SEQ ID NO: 21389 - DNA, 20 bp, Artificial Sequence
  chemically synthesized
cttggaggctaagccagtcc

SEQ ID NO: 21390 - DNA, 20 bp, Artificial Sequence
  chemically synthesized
tttctgcctgctttatatcc

SEQ ID NO: 21391 - DNA, 20 bp, Artificial Sequence
  chemically synthesized
gctttatatcctggccacac

SEQ ID NO: 21392 - DNA, 20 bp, Artificial Sequence
  chemically synthesized
tggccacactggcaactgat

SEQ ID NO: 21393 - DNA, 20 bp, Artificial Sequence
  chemically synthesized
cacactggcaactgattaga

SEQ ID NO: 21394 - DNA, 20 bp, Artificial Sequence
  chemically synthesized
ctgattagatggtgcccacc

SEQ ID NO: 21395 - DNA, 20 bp, Artificial Sequence
  chemically synthesized
agatggtgcccacccagatt

SEQ ID NO: 21396 - DNA, 20 bp, Artificial Sequence
  chemically synthesized
gatggtgcccacccagatta

SEQ ID NO: 21397 - DNA, 20 bp, Artificial Sequence
  chemically synthesized
atggtgcccacccagattaa

SEQ ID NO: 21398 - DNA, 20 bp, Artificial Sequence
  chemically synthesized
gtgcccacccagattaaggg

SEQ ID NO: 21399 - DNA, 20 bp, Artificial Sequence
  chemically synthesized
tgcccacccagattaagggt

SEQ ID NO: 21400 - DNA, 20 bp, Artificial Sequence
  chemically synthesized
aagggtgggtctgcctttcc

SEQ ID NO: 21401 - DNA, 20 bp, Artificial Sequence
  chemically synthesized
actaaaatgttaatctcctt

SEQ ID NO: 21402 - DNA, 20 bp, Artificial Sequence
  chemically synthesized
ctcctttggcaataccctca

SEQ ID NO: 21403 - DNA, 20 bp, Artificial Sequence
  chemically synthesized
aataccctcacagacacact

SEQ ID NO: 21404 - DNA, 20 bp, Artificial Sequence
  chemically synthesized
ataccctcacagacacactc

SEQ ID NO: 21405 - DNA, 20 bp, Artificial Sequence
  chemically synthesized
ttgcacacttcaatccaatc

SEQ ID NO: 21406 - DNA, 20 bp, Artificial Sequence
  chemically synthesized
aatccaatcaagttgacact

SEQ ID NO: 21407 - DNA, 20 bp, Artificial Sequence
  chemically synthesized
cactcagtattaaccatcac

SEQ ID NO: 21408 - DNA, 20 bp, Artificial Sequence
  chemically synthesized
agtccatcgcttgtcaactt

SEQ ID NO: 21409 - DNA, 20 bp, Artificial Sequence
  chemically synthesized
tgagcctatacacatcccct

SEQ ID NO: 21410 - DNA, 20 bp, Artificial Sequence
  chemically synthesized
gagcctatacacatcccctg

SEQ ID NO: 21411 - DNA, 20 bp, Artificial Sequence
  chemically synthesized
tcatacattatcttcaaata

SEQ ID NO: 21412 - DNA, 20 bp, Artificial Sequence
  chemically synthesized
cttcaaataaagacaacaat

SEQ ID NO: 21413 - DNA, 20 bp, Artificial Sequence
  chemically synthesized
aatacttaaatgctgatatg

SEQ ID NO: 21414 - DNA, 20 bp, Artificial Sequence
  chemically synthesized
aaatcttatgtcacatgata

SEQ ID NO: 21415 - DNA, 20 bp, Artificial Sequence
  chemically synthesized
aatcttatgtcacatgataa

SEQ ID NO: 21416 - DNA, 20 bp, Artificial Sequence
  chemically synthesized
atgtcacatgataaaggaaa

SEQ ID NO: 21417 - DNA, 20 bp, Artificial Sequence
  chemically synthesized
tgtcacatgataaaggaaaa

SEQ ID NO: 21418 - DNA, 20 bp, Artificial Sequence
  chemically synthesized
cacatgataaaggaaaaagg

SEQ ID NO: 21419 - DNA, 20 bp, Artificial Sequence
  chemically synthesized
gtaaaatgtatatattttct

SEQ ID NO: 21420 - DNA, 20 bp, Artificial Sequence
  chemically synthesized
tgtatatattttcttagtac

SEQ ID NO: 21421 - DNA, 20 bp, Artificial Sequence
  chemically synthesized
tttcttagtacaagtgtata

SEQ ID NO: 21422 - DNA, 20 bp, Artificial Sequence
  chemically synthesized
tacaagtgtatacagacacg

SEQ ID NO: 21423 - DNA, 20 bp, Artificial Sequence
  chemically synthesized
acaagtgtatacagacacga

SEQ ID NO: 21424 - DNA, 20 bp, Artificial Sequence
  chemically synthesized
cacgaaggtgtttttaacaa

SEQ ID NO: 21425 - DNA, 20 bp, Artificial Sequence
  chemically synthesized
gaaggtgtttttaacaaaag

SEQ ID NO: 21426 - DNA, 20 bp, Artificial Sequence
  chemically synthesized
aaggtgtttttaacaaaaga

SEQ ID NO: 21427 - DNA, 20 bp, Artificial Sequence
  chemically synthesized
ggtgtttttaacaaaagaag

SEQ ID NO: 21428 - DNA, 20 bp, Artificial Sequence
  chemically synthesized
gtgtttttaacaaaagaagg

SEQ ID NO: 21429 - DNA, 20 bp, Artificial Sequence
  chemically synthesized
ggaaatactcatgacaatta

SEQ ID NO: 21430 - DNA, 20 bp, Artificial Sequence
  chemically synthesized
acagtccttgtatctgcaat

SEQ ID NO: 21431 - DNA, 20 bp, Artificial Sequence
  chemically synthesized
tgcaattggtcacgtgatcg

SEQ ID NO: 21432 - DNA, 20 bp, Artificial Sequence
  chemically synthesized
attggtcacgtgatcgtagc

SEQ ID NO: 21433 - DNA, 20 bp, Artificial Sequence
  chemically synthesized
ttctgtattccctttgccct

SEQ ID NO: 21434 - DNA, 20 bp, Artificial Sequence
  chemically synthesized
gtattccctttgccctcagc

SEQ ID NO: 21435 - DNA, 20 bp, Artificial Sequence
  chemically synthesized
tttgccctcagcaagcacct

SEQ ID NO: 21436 - DNA, 20 bp, Artificial Sequence
  chemically synthesized
gccctcagcaagcacctcag

SEQ ID NO: 21437 - DNA, 20 bp, Artificial Sequence
  chemically synthesized
ccctcagcaagcacctcagc

SEQ ID NO: 21438 - DNA, 20 bp, Artificial Sequence
  chemically synthesized
ttttttttttttttttttcc

SEQ ID NO: 21439 - DNA, 20 bp, Artificial Sequence
  chemically synthesized
tttttttttttttttcctgg

SEQ ID NO: 21440 - DNA, 20 bp, Artificial Sequence
  chemically synthesized
tttttttttttttcctggtg

SEQ ID NO: 21441 - DNA, 20 bp, Artificial Sequence
  chemically synthesized
gtgacccaaacctttatttg

SEQ ID NO: 21442 - DNA, 20 bp, Artificial Sequence
  chemically synthesized
cctttatttgtagtcctgcc

SEQ ID NO: 21443 - DNA, 20 bp, Artificial Sequence
  chemically synthesized
atttgtagtcctgcctggaa

SEQ ID NO: 21444 - DNA, 20 bp, Artificial Sequence
  chemically synthesized
gtcctgcctggaatggcctg

SEQ ID NO: 21445 - DNA, 20 bp, Artificial Sequence
  chemically synthesized
ctgcctggaatggcctgtag

SEQ ID NO: 21446 - DNA, 20 bp, Artificial Sequence
  chemically synthesized
tttcccactgaccttaattc

SEQ ID NO: 21447 - DNA, 20 bp, Artificial Sequence
  chemically synthesized
ttcccactgaccttaattcc

SEQ ID NO: 21448 - DNA, 20 bp, Artificial Sequence
  chemically synthesized
ctgaccttaattccaggaca

SEQ ID NO: 21449 - DNA, 20 bp, Artificial Sequence
  chemically synthesized
ttccaggacatggtaaaact

SEQ ID NO: 21450 - DNA, 20 bp, Artificial Sequence
  chemically synthesized
ccaggacatggtaaaactaa

SEQ ID NO: 21451 - DNA, 20 bp, Artificial Sequence
  chemically synthesized
aaaactaagagacaccctaa

SEQ ID NO: 21452 - DNA, 20 bp, Artificial Sequence
  chemically synthesized
acgcttccttacctccattg

SEQ ID NO: 21453 - DNA, 20 bp, Artificial Sequence
  chemically synthesized
gcttccttacctccattgtg

SEQ ID NO: 21454 - DNA, 20 bp, Artificial Sequence
  chemically synthesized
ttacctccattgtggagttg

SEQ ID NO: 21455 - DNA, 20 bp, Artificial Sequence
  chemically synthesized
gtagactgatttcatcttga

SEQ ID NO: 21456 - DNA, 20 bp, Artificial Sequence
  chemically synthesized
ctgatttcatcttgatagtc

SEQ ID NO: 21457 - DNA, 20 bp, Artificial Sequence
  chemically synthesized
tgatttcatcttgatagtct

SEQ ID NO: 21458 - DNA, 20 bp, Artificial Sequence
  chemically synthesized
atagtctgggttaatcaccg

SEQ ID NO: 21459 - DNA, 20 bp, Artificial Sequence
  chemically synthesized
caacactgtaactctcttct

SEQ ID NO: 21460 - DNA, 20 bp, Artificial Sequence
  chemically synthesized
cttcttagcctgttgactta

SEQ ID NO: 21461 - DNA, 20 bp, Artificial Sequence
  chemically synthesized
ttcttagcctgttgacttaa

SEQ ID NO: 21462 - DNA, 20 bp, Artificial Sequence
  chemically synthesized
ttagcctgttgacttaaagg

SEQ ID NO: 21463 - DNA, 20 bp, Artificial Sequence
  chemically synthesized
tagcctgttgacttaaaggt

SEQ ID NO: 21464 - DNA, 20 bp, Artificial Sequence
  chemically synthesized
gcctgttgacttaaaggtgg

SEQ ID NO: 21465 - DNA, 20 bp, Artificial Sequence
  chemically synthesized
cctgttgacttaaaggtggg

SEQ ID NO: 21466 - DNA, 20 bp, Artificial Sequence
  chemically synthesized
tgttgacttaaaggtgggag

SEQ ID NO: 21467 - DNA, 20 bp, Artificial Sequence
  chemically synthesized
ttaaaggtgggaggagccca

SEQ ID NO: 21468 - DNA, 20 bp, Artificial Sequence
  chemically synthesized
tgggaggagcccaaagtgtc

SEQ ID NO: 21469 - DNA, 20 bp, Artificial Sequence
  chemically synthesized
gggaggagcccaaagtgtcc

SEQ ID NO: 21470 - DNA, 20 bp, Artificial Sequence
  chemically synthesized
aggagcccaaagtgtccagg

SEQ ID NO: 21471 - DNA, 20 bp, Artificial Sequence
  chemically synthesized
caggtggcaatcttaatttg

SEQ ID NO: 21472 - DNA, 20 bp, Artificial Sequence
  chemically synthesized
aatcttaatttgcagtttaa

SEQ ID NO: 21473 - DNA, 20 bp, Artificial Sequence
  chemically synthesized
ggaatcattattgtgtcacc

SEQ ID NO: 21474 - DNA, 20 bp, Artificial Sequence
  chemically synthesized
atcattattgtgtcacctgg

SEQ ID NO: 21475 - DNA, 20 bp, Artificial Sequence
  chemically synthesized
attattgtgtcacctggcgg

SEQ ID NO: 21476 - DNA, 20 bp, Artificial Sequence
  chemically synthesized
ggcggcagtgttcctccctc

SEQ ID NO: 21477 - DNA, 20 bp, Artificial Sequence
  chemically synthesized
gtgttcctccctctggaact

SEQ ID NO: 21478 - DNA, 20 bp, Artificial Sequence
  chemically synthesized
cctctggaactaagacctct

SEQ ID NO: 21479 - DNA, 20 bp, Artificial Sequence
  chemically synthesized
tggaactaagacctctaagc

SEQ ID NO: 21480 - DNA, 20 bp, Artificial Sequence
  chemically synthesized
aactaagacctctaagccag

SEQ ID NO: 21481 - DNA, 20 bp, Artificial Sequence
  chemically synthesized
gccagcagaacataatgcca

SEQ ID NO: 21482 - DNA, 20 bp, Artificial Sequence
  chemically synthesized
ccagcagaacataatgccat

SEQ ID NO: 21483 - DNA, 20 bp, Artificial Sequence
  chemically synthesized
agaacataatgccatgggaa

SEQ ID NO: 21484 - DNA, 20 bp, Artificial Sequence
  chemically synthesized
gaacataatgccatgggaac

SEQ ID NO: 21485 - DNA, 20 bp, Artificial Sequence
  chemically synthesized
cataatgccatgggaacagg

SEQ ID NO: 21486 - DNA, 20 bp, Artificial Sequence
  chemically synthesized
acaggaagcaaaaattttgc

SEQ ID NO: 21487 - DNA, 20 bp, Artificial Sequence
  chemically synthesized
ggaagcaaaaattttgctag

SEQ ID NO: 21488 - DNA, 20 bp, Artificial Sequence
  chemically synthesized
aaattttgctagtggaacac

SEQ ID NO: 21489 - DNA, 20 bp, Artificial Sequence
  chemically synthesized
aattttgctagtggaacact

SEQ ID NO: 21490 - DNA, 20 bp, Artificial Sequence
  chemically synthesized
attttgctagtggaacacta

SEQ ID NO: 21491 - DNA, 20 bp, Artificial Sequence
  chemically synthesized
ttttgctagtggaacactag

SEQ ID NO: 21492 - DNA, 20 bp, Artificial Sequence
  chemically synthesized
tagtggaacactaggggtga

SEQ ID NO: 21493 - DNA, 20 bp, Artificial Sequence
  chemically synthesized
ggaacactaggggtgatggt

SEQ ID NO: 21494 - DNA, 20 bp, Artificial Sequence
  chemically synthesized
acactaggggtgatggtgag

SEQ ID NO: 21495 - DNA, 20 bp, Artificial Sequence
  chemically synthesized
cacttccaccctttgattcc

SEQ ID NO: 21496 - DNA, 20 bp, Artificial Sequence
  chemically synthesized
ggacccgtgaatcctgtcta

SEQ ID NO: 21497 - DNA, 20 bp, Artificial Sequence
  chemically synthesized
gacccgtgaatcctgtctat

SEQ ID NO: 21498 - DNA, 20 bp, Artificial Sequence
  chemically synthesized
cccgtgaatcctgtctatgg

SEQ ID NO: 21499 - DNA, 20 bp, Artificial Sequence
  chemically synthesized
aatcctgtctatgggagaaa

SEQ ID NO: 21500 - DNA, 20 bp, Artificial Sequence
  chemically synthesized
ggagaaacagtaccatatat

SEQ ID NO: 21501 - DNA, 20 bp, Artificial Sequence
  chemically synthesized
ccatatattggacactgatt

SEQ ID NO: 21502 - DNA, 20 bp, Artificial Sequence
  chemically synthesized
atatattggacactgattca

SEQ ID NO: 21503 - DNA, 20 bp, Artificial Sequence
  chemically synthesized
acactgattcagagcataca

SEQ ID NO: 21504 - DNA, 20 bp, Artificial Sequence
  chemically synthesized
tcagagcatacacagccttc

SEQ ID NO: 21505 - DNA, 20 bp, Artificial Sequence
  chemically synthesized
agagcatacacagccttctg

SEQ ID NO: 21506 - DNA, 20 bp, Artificial Sequence
  chemically synthesized
ccttctggagaactttgccc

SEQ ID NO: 21507 - DNA, 20 bp, Artificial Sequence
  chemically synthesized
cttctggagaactttgcccc

SEQ ID NO: 21508 - DNA, 20 bp, Artificial Sequence
  chemically synthesized
aactttgccccaggcctgca

SEQ ID NO: 21509 - DNA, 20 bp, Artificial Sequence
  chemically synthesized
gcctgcaaagtattgtcacc

SEQ ID NO: 21510 - DNA, 20 bp, Artificial Sequence
  chemically synthesized
gcaaagtattgtcacctagt

SEQ ID NO: 21511 - DNA, 20 bp, Artificial Sequence
  chemically synthesized
cattgtaatcgtgacttcaa

SEQ ID NO: 21512 - DNA, 20 bp, Artificial Sequence
  chemically synthesized
attgtaatcgtgacttcaaa

SEQ ID NO: 21513 - DNA, 20 bp, Artificial Sequence
  chemically synthesized
gacttcaaaaggccattcaa

SEQ ID NO: 21514 - DNA, 20 bp, Artificial Sequence
  chemically synthesized
aggccattcaaaagctgctt

SEQ ID NO: 21515 - DNA, 20 bp, Artificial Sequence
  chemically synthesized
ggccattcaaaagctgcttc

SEQ ID NO: 21516 - DNA, 20 bp, Artificial Sequence
  chemically synthesized
caaaagctgcttcaggatga

SEQ ID NO: 21517 - DNA, 20 bp, Artificial Sequence
  chemically synthesized
aaaagctgcttcaggatgat

SEQ ID NO: 21518 - DNA, 20 bp, Artificial Sequence
  chemically synthesized
aaagctgcttcaggatgata

SEQ ID NO: 21519 - DNA, 20 bp, Artificial Sequence
  chemically synthesized
cttcaggatgatagggatca

SEQ ID NO: 21520 - DNA, 20 bp, Artificial Sequence
  chemically synthesized
aggatgatagggatcatggt

SEQ ID NO: 21521 - DNA, 20 bp, Artificial Sequence
  chemically synthesized
gatagggatcatggtaagac

SEQ ID NO: 21522 - DNA, 20 bp, Artificial Sequence
  chemically synthesized
gtaagaccagtaaattccat

SEQ ID NO: 21523 - DNA, 20 bp, Artificial Sequence
  chemically synthesized
ccagtaaattccatgagcat

SEQ ID NO: 21524 - DNA, 20 bp, Artificial Sequence
  chemically synthesized
agcccactgtcacacttctt

SEQ ID NO: 21525 - DNA, 20 bp, Artificial Sequence
  chemically synthesized
gtcacacttctttagccata

SEQ ID NO: 21526 - DNA, 20 bp, Artificial Sequence
  chemically synthesized
cacttctttagccataaagt

SEQ ID NO: 21527 - DNA, 20 bp, Artificial Sequence
  chemically synthesized
ttctttagccataaagtgag

SEQ ID NO: 21528 - DNA, 20 bp, Artificial Sequence
  chemically synthesized
tagccataaagtgagtggct

SEQ ID NO: 21529 - DNA, 20 bp, Artificial Sequence
  chemically synthesized
cataaagtgagtggcttggt

SEQ ID NO: 21530 - DNA, 20 bp, Artificial Sequence
  chemically synthesized
aaagtgagtggcttggtcag

SEQ ID NO: 21531 - DNA, 20 bp, Artificial Sequence
  chemically synthesized
tggtcagaagcaatgctgtg

SEQ ID NO: 21532 - DNA, 20 bp, Artificial Sequence
  chemically synthesized
tgctgtgtggaataccatga

SEQ ID NO: 21533 - DNA, 20 bp, Artificial Sequence
  chemically synthesized
tgtgtggaataccatgacag

SEQ ID NO: 21534 - DNA, 20 bp, Artificial Sequence
  chemically synthesized
gaataccatgacagtggata

SEQ ID NO: 21535 - DNA, 20 bp, Artificial Sequence
  chemically synthesized
tacggcattctgtgattcca

SEQ ID NO: 21536 - DNA, 20 bp, Artificial Sequence
  chemically synthesized
gcattctgtgattccatgga

SEQ ID NO: 21537 - DNA, 20 bp, Artificial Sequence
  chemically synthesized
ttctgtgattccatggatgg

SEQ ID NO: 21538 - DNA, 20 bp, Artificial Sequence
  chemically synthesized
gattccatggatggtagtct

SEQ ID NO: 21539 - DNA, 20 bp, Artificial Sequence
  chemically synthesized
atggatggtagtcttggcat

SEQ ID NO: 21540 - DNA, 20 bp, Artificial Sequence
  chemically synthesized
gtagtcttggcataagcatt

SEQ ID NO: 21541 - DNA, 20 bp, Artificial Sequence
  chemically synthesized
cttggcataagcattgagtt

SEQ ID NO: 21542 - DNA, 20 bp, Artificial Sequence
  chemically synthesized
ttggcataagcattgagttc

SEQ ID NO: 21543 - DNA, 20 bp, Artificial Sequence
  chemically synthesized
ataagcattgagttcaggat

SEQ ID NO: 21544 - DNA, 20 bp, Artificial Sequence
  chemically synthesized
taagcattgagttcaggatt

SEQ ID NO: 21545 - DNA, 20 bp, Artificial Sequence
  chemically synthesized
aggattgggaaacccatatc

SEQ ID NO: 21546 - DNA, 20 bp, Artificial Sequence
  chemically synthesized
gattgggaaacccatatcca

SEQ ID NO: 21547 - DNA, 20 bp, Artificial Sequence
  chemically synthesized
gggaaacccatatccagagt

SEQ ID NO: 21548 - DNA, 20 bp, Artificial Sequence
  chemically synthesized
tccagagtaagtgtctattc

SEQ ID NO: 21549 - DNA, 20 bp, Artificial Sequence
  chemically synthesized
gagtaagtgtctattccagt

SEQ ID NO: 21550 - DNA, 20 bp, Artificial Sequence
  chemically synthesized
agtaagtgtctattccagtg

SEQ ID NO: 21551 - DNA, 20 bp, Artificial Sequence
  chemically synthesized
gtgtctattccagtgaggac

SEQ ID NO: 21552 - DNA, 20 bp, Artificial Sequence
  chemically synthesized
agcctctgccctttccatga

SEQ ID NO: 21553 - DNA, 20 bp, Artificial Sequence
  chemically synthesized
ctctgccctttccatgatgg

SEQ ID NO: 21554 - DNA, 20 bp, Artificial Sequence
  chemically synthesized
ctgccctttccatgatggaa

SEQ ID NO: 21555 - DNA, 20 bp, Artificial Sequence
  chemically synthesized
tgccctttccatgatggaag

SEQ ID NO: 21556 - DNA, 20 bp, Artificial Sequence
  chemically synthesized
caatataatcaacctgccac

SEQ ID NO: 21557 - DNA, 20 bp, Artificial Sequence
  chemically synthesized
aatataatcaacctgccacc

SEQ ID NO: 21558 - DNA, 20 bp, Artificial Sequence
  chemically synthesized
ataatcaacctgccaccagg

SEQ ID NO: 21559 - DNA, 20 bp, Artificial Sequence
  chemically synthesized
tcaacctgccaccaggtagc

SEQ ID NO: 21560 - DNA, 20 bp, Artificial Sequence
  chemically synthesized
ggtagctggctgatcacccc

SEQ ID NO: 21561 - DNA, 20 bp, Artificial Sequence
  chemically synthesized
gtagctggctgatcaccccg

SEQ ID NO: 21562 - DNA, 20 bp, Artificial Sequence
  chemically synthesized
tggctgatcaccccgaggaa

SEQ ID NO: 21563 - DNA, 20 bp, Artificial Sequence
  chemically synthesized
ccgaggaatggtgccatatc

SEQ ID NO: 21564 - DNA, 20 bp, Artificial Sequence
  chemically synthesized
cgaggaatggtgccatatca

SEQ ID NO: 21565 - DNA, 20 bp, Artificial Sequence
  chemically synthesized
gaggaatggtgccatatcaa

SEQ ID NO: 21566 - DNA, 20 bp, Artificial Sequence
  chemically synthesized
atggtgccatatcaagggct

SEQ ID NO: 21567 - DNA, 20 bp, Artificial Sequence
  chemically synthesized
ccatatcaagggcttagtgt

SEQ ID NO: 21568 - DNA, 20 bp, Artificial Sequence
  chemically synthesized
ttagtgttggtctctgatgc

SEQ ID NO: 21569 - DNA, 20 bp, Artificial Sequence
  chemically synthesized
tgttggtctctgatgctggc

SEQ ID NO: 21570 - DNA, 20 bp, Artificial Sequence
  chemically synthesized
tggtctctgatgctggcaag

SEQ ID NO: 21571 - DNA, 20 bp, Artificial Sequence
  chemically synthesized
tctctgatgctggcaagcag

SEQ ID NO: 21572 - DNA, 20 bp, Artificial Sequence
  chemically synthesized
atgctggcaagcagtggctg

SEQ ID NO: 21573 - DNA, 20 bp, Artificial Sequence
  chemically synthesized
tggcaagcagtggctgtggc

SEQ ID NO: 21574 - DNA, 20 bp, Artificial Sequence
  chemically synthesized
ggcaagcagtggctgtggcc

SEQ ID NO: 21575 - DNA, 20 bp, Artificial Sequence
  chemically synthesized
agcagtggctgtggccaggt

SEQ ID NO: 21576 - DNA, 20 bp, Artificial Sequence
  chemically synthesized
ggctgtggccaggtcagctt

SEQ ID NO: 21577 - DNA, 20 bp, Artificial Sequence
  chemically synthesized
gtggccaggtcagctttggt

SEQ ID NO: 21578 - DNA, 20 bp, Artificial Sequence
  chemically synthesized
gccaggtcagctttggtgag

SEQ ID NO: 21579 - DNA, 20 bp, Artificial Sequence
  chemically synthesized
aggtcagctttggtgagtgg

SEQ ID NO: 21580 - DNA, 20 bp, Artificial Sequence
  chemically synthesized
gagtggaagtccatgttgct

SEQ ID NO: 21581 - DNA, 20 bp, Artificial Sequence
  chemically synthesized
aagtccatgttgctgagccc

SEQ ID NO: 21582 - DNA, 20 bp, Artificial Sequence
  chemically synthesized
aacttccatccctgcaactg

SEQ ID NO: 21583 - DNA, 20 bp, Artificial Sequence
  chemically synthesized
aactgtggccactttgttca

SEQ ID NO: 21584 - DNA, 20 bp, Artificial Sequence
  chemically synthesized
actgtggccactttgttcat

SEQ ID NO: 21585 - DNA, 20 bp, Artificial Sequence
  chemically synthesized
cactttgttcatgggtccat

SEQ ID NO: 21586 - DNA, 20 bp, Artificial Sequence
  chemically synthesized
ggtccattggacgatgacat

SEQ ID NO: 21587 - DNA, 20 bp, Artificial Sequence
  chemically synthesized
ccattggacgatgacatgag

SEQ ID NO: 21588 - DNA, 20 bp, Artificial Sequence
  chemically synthesized
ggacgatgacatgagtggcc

SEQ ID NO: 21589 - DNA, 20 bp, Artificial Sequence
  chemically synthesized
gacgatgacatgagtggcct

SEQ ID NO: 21590 - DNA, 20 bp, Artificial Sequence
  chemically synthesized
tgacatgagtggcctgggaa

SEQ ID NO: 21591 - DNA, 20 bp, Artificial Sequence
  chemically synthesized
gacatgagtggcctgggaaa

SEQ ID NO: 21592 - DNA, 20 bp, Artificial Sequence
  chemically synthesized
gagtggcctgggaaaaggct

SEQ ID NO: 21593 - DNA, 20 bp, Artificial Sequence
  chemically synthesized
tggcctgggaaaaggctgag

SEQ ID NO: 21594 - DNA, 20 bp, Artificial Sequence
  chemically synthesized
aaaaggctgagtggtgtcca

SEQ ID NO: 21595 - DNA, 20 bp, Artificial Sequence
  chemically synthesized
tattaaaatcctcttctgct

SEQ ID NO: 21596 - DNA, 20 bp, Artificial Sequence
  chemically synthesized
attaaaatcctcttctgctg

SEQ ID NO: 21597 - DNA, 20 bp, Artificial Sequence
  chemically synthesized
cttctgctgaggtcacccat

SEQ ID NO: 21598 - DNA, 20 bp, Artificial Sequence
  chemically synthesized
tgctgaggtcacccattggt

SEQ ID NO: 21599 - DNA, 20 bp, Artificial Sequence
  chemically synthesized
cccattggtgagcactcaca

SEQ ID NO: 21600 - DNA, 20 bp, Artificial Sequence
  chemically synthesized
ccattggtgagcactcacat

SEQ ID NO: 21601 - DNA, 20 bp, Artificial Sequence
  chemically synthesized
atgggatgaaaatatctttg

SEQ ID NO: 21602 - DNA, 20 bp, Artificial Sequence
  chemically synthesized
ttgtagtttttgactaatca

SEQ ID NO: 21603 - DNA, 20 bp, Artificial Sequence
  chemically synthesized
gtagtttttgactaatcata

SEQ ID NO: 21604 - DNA, 20 bp, Artificial Sequence
  chemically synthesized
tagtttttgactaatcatag

SEQ ID NO: 21605 - DNA, 20 bp, Artificial Sequence
  chemically synthesized
tttctttgtcatcaattttc

SEQ ID NO: 21606 - DNA, 20 bp, Artificial Sequence
  chemically synthesized
tttccagtcatgctttttcc

SEQ ID NO: 21607 - DNA, 20 bp, Artificial Sequence
  chemically synthesized
tttccaagtccctgaccatc

SEQ ID NO: 21608 - DNA, 20 bp, Artificial Sequence
  chemically synthesized
tgaccatctagccaaacctt

SEQ ID NO: 21609 - DNA, 20 bp, Artificial Sequence
  chemically synthesized
tctagccaaacctttggcta

SEQ ID NO: 21610 - DNA, 20 bp, Artificial Sequence
  chemically synthesized
tttggctacagcccatgaat

SEQ ID NO: 21611 - DNA, 20 bp, Artificial Sequence
  chemically synthesized
taagtatataatcgcaaatc

SEQ ID NO: 21612 - DNA, 20 bp, Artificial Sequence
  chemically synthesized
gccatttctccttctgtgca

SEQ ID NO: 21613 - DNA, 20 bp, Artificial Sequence
  chemically synthesized
ttctgtgcaaagtgcacaac

SEQ ID NO: 21614 - DNA, 20 bp, Artificial Sequence
  chemically synthesized
tctgtgcaaagtgcacaacc

SEQ ID NO: 21615 - DNA, 20 bp, Artificial Sequence
  chemically synthesized
acaaccaggcacactgctca

SEQ ID NO: 21616 - DNA, 20 bp, Artificial Sequence
  chemically synthesized
ctgctcaaagttctgccaac

SEQ ID NO: 21617 - DNA, 20 bp, Artificial Sequence
  chemically synthesized
tgctcaaagttctgccaact

SEQ ID NO: 21618 - DNA, 20 bp, Artificial Sequence
  chemically synthesized
tcaaagttctgccaactagg

SEQ ID NO: 21619 - DNA, 20 bp, Artificial Sequence
  chemically synthesized
ttcccttcaccgttgtcctt

SEQ ID NO: 21620 - DNA, 20 bp, Artificial Sequence
  chemically synthesized
tcccttcaccgttgtccttc

SEQ ID NO: 21621 - DNA, 20 bp, Artificial Sequence
  chemically synthesized
cccttcaccgttgtccttca

SEQ ID NO: 21622 - DNA, 20 bp, Artificial Sequence
  chemically synthesized
gttgtccttcagggatgtcc

SEQ ID NO: 21623 - DNA, 20 bp, Artificial Sequence
  chemically synthesized
tccttcagggatgtcctaga

SEQ ID NO: 21624 - DNA, 20 bp, Artificial Sequence
  chemically synthesized
ccttcagggatgtcctagaa

SEQ ID NO: 21625 - DNA, 20 bp, Artificial Sequence
  chemically synthesized
cttcagggatgtcctagaaa

SEQ ID NO: 21626 - DNA, 20 bp, Artificial Sequence
  chemically synthesized
ttcagggatgtcctagaaag

SEQ ID NO: 21627 - DNA, 20 bp, Artificial Sequence
  chemically synthesized
gatgtcctagaaaggggctg

SEQ ID NO: 21628 - DNA, 20 bp, Artificial Sequence
  chemically synthesized
agaaaggggctgtagtgctg

SEQ ID NO: 21629 - DNA, 20 bp, Artificial Sequence
  chemically synthesized
gtgctgcggctgtccacttt

SEQ ID NO: 21630 - DNA, 20 bp, Artificial Sequence
  chemically synthesized
tgctgcggctgtccactttt

SEQ ID NO: 21631 - DNA, 20 bp, Artificial Sequence
  chemically synthesized
tgcggctgtccacttttggg

SEQ ID NO: 21632 - DNA, 20 bp, Artificial Sequence
  chemically synthesized
ggtggtgcctgcatatcgtg

SEQ ID NO: 21633 - DNA, 20 bp, Artificial Sequence
  chemically synthesized
gtgcagaactatctgtgaac

SEQ ID NO: 21634 - DNA, 20 bp, Artificial Sequence
  chemically synthesized
tgcagaactatctgtgaacc

SEQ ID NO: 21635 - DNA, 20 bp, Artificial Sequence
  chemically synthesized
actatctgtgaaccaggacc

SEQ ID NO: 21636 - DNA, 20 bp, Artificial Sequence
  chemically synthesized
ctagtcttctcttcctctgt

SEQ ID NO: 21637 - DNA, 20 bp, Artificial Sequence
  chemically synthesized
cttcctctgtcagctgatca

SEQ ID NO: 21638 - DNA, 20 bp, Artificial Sequence
  chemically synthesized
ttcctctgtcagctgatcat

SEQ ID NO: 21639 - DNA, 20 bp, Artificial Sequence
  chemically synthesized
tcctctgtcagctgatcata

SEQ ID NO: 21640 - DNA, 20 bp, Artificial Sequence
  chemically synthesized
gatcatagggaactccccat

SEQ ID NO: 21641 - DNA, 20 bp, Artificial Sequence
  chemically synthesized
ggaactccccatgagaccat

SEQ ID NO: 21642 - DNA, 20 bp, Artificial Sequence
  chemically synthesized
tccccatgagaccatcggtg

SEQ ID NO: 21643 - DNA, 20 bp, Artificial Sequence
  chemically synthesized
tgagaccatcggtgcagtct

SEQ ID NO: 21644 - DNA, 20 bp, Artificial Sequence
  chemically synthesized
gagaccatcggtgcagtctc

SEQ ID NO: 21645 - DNA, 20 bp, Artificial Sequence
  chemically synthesized
agaccatcggtgcagtctca

SEQ ID NO: 21646 - DNA, 20 bp, Artificial Sequence
  chemically synthesized
accatcggtgcagtctcagg

SEQ ID NO: 21647 - DNA, 20 bp, Artificial Sequence
  chemically synthesized
catcggtgcagtctcaggga

SEQ ID NO: 21648 - DNA, 20 bp, Artificial Sequence
  chemically synthesized
ggtgcagtctcagggagaga

SEQ ID NO: 21649 - DNA, 20 bp, Artificial Sequence
  chemically synthesized
gcagtctcagggagagaaag

SEQ ID NO: 21650 - DNA, 20 bp, Artificial Sequence
  chemically synthesized
agggagagaaagcagtgtgt

SEQ ID NO: 21651 - DNA, 20 bp, Artificial Sequence
  chemically synthesized
gggagagaaagcagtgtgtc

SEQ ID NO: 21652 - DNA, 20 bp, Artificial Sequence
  chemically synthesized
gagagaaagcagtgtgtcag

SEQ ID NO: 21653 - DNA, 20 bp, Artificial Sequence
  chemically synthesized
agaaagcagtgtgtcaggag

SEQ ID NO: 21654 - DNA, 20 bp, Artificial Sequence
  chemically synthesized
aaagcagtgtgtcaggagtg

SEQ ID NO: 21655 - DNA, 20 bp, Artificial Sequence
  chemically synthesized
tgtgtcaggagtggagacca

SEQ ID NO: 21656 - DNA, 20 bp, Artificial Sequence
  chemically synthesized
gtgtcaggagtggagaccat

SEQ ID NO: 21657 - DNA, 20 bp, Artificial Sequence
  chemically synthesized
agtggagaccatgggcattt

SEQ ID NO: 21658 - DNA, 20 bp, Artificial Sequence
  chemically synthesized
ccctttctcatgtaacttac

SEQ ID NO: 21659 - DNA, 20 bp, Artificial Sequence
  chemically synthesized
atgtaacttactagtgcctt

SEQ ID NO: 21660 - DNA, 20 bp, Artificial Sequence
  chemically synthesized
tgtaacttactagtgccttc

SEQ ID NO: 21661 - DNA, 20 bp, Artificial Sequence
  chemically synthesized
agtgccttcaggatctgctc

SEQ ID NO: 21662 - DNA, 20 bp, Artificial Sequence
  chemically synthesized
tgatgcaatgctgctgtgca

SEQ ID NO: 21663 - DNA, 20 bp, Artificial Sequence
  chemically synthesized
gctgtgcacagcccacttta

SEQ ID NO: 21664 - DNA, 20 bp, Artificial Sequence
  chemically synthesized
tgcacagcccactttatggc

SEQ ID NO: 21665 - DNA, 20 bp, Artificial Sequence
  chemically synthesized
cagcccactttatggctaga

SEQ ID NO: 21666 - DNA, 20 bp, Artificial Sequence
  chemically synthesized
cactttatggctagatggat

SEQ ID NO: 21667 - DNA, 20 bp, Artificial Sequence
  chemically synthesized
ttatggctagatggatcaga

SEQ ID NO: 21668 - DNA, 20 bp, Artificial Sequence
  chemically synthesized
tagatggatcagaaagcacc

SEQ ID NO: 21669 - DNA, 20 bp, Artificial Sequence
  chemically synthesized
agaaagcacccagttcatga

SEQ ID NO: 21670 - DNA, 20 bp, Artificial Sequence
  chemically synthesized
gaaagcacccagttcatgat

SEQ ID NO: 21671 - DNA, 20 bp, Artificial Sequence
  chemically synthesized
agcacccagttcatgatagg

SEQ ID NO: 21672 - DNA, 20 bp, Artificial Sequence
  chemically synthesized
ccagttcatgataggcagtt

SEQ ID NO: 21673 - DNA, 20 bp, Artificial Sequence
  chemically synthesized
cagttcatgataggcagttc

SEQ ID NO: 21674 - DNA, 20 bp, Artificial Sequence
  chemically synthesized
gataggcagttcaggtcaca

SEQ ID NO: 21675 - DNA, 20 bp, Artificial Sequence
  chemically synthesized
catggtgacttgatgactca

SEQ ID NO: 21676 - DNA, 20 bp, Artificial Sequence
  chemically synthesized
caaatatttcgtttccacca

SEQ ID NO: 21677 - DNA, 20 bp, Artificial Sequence
  chemically synthesized
atttcgtttccaccaaagcc

SEQ ID NO: 21678 - DNA, 20 bp, Artificial Sequence
  chemically synthesized
tttccaccaaagcccagtaa

SEQ ID NO: 21679 - DNA, 20 bp, Artificial Sequence
  chemically synthesized
ttccaccaaagcccagtaac

SEQ ID NO: 21680 - DNA, 20 bp, Artificial Sequence
  chemically synthesized
ccaaagcccagtaacaggcc

SEQ ID NO: 21681 - DNA, 20 bp, Artificial Sequence
  chemically synthesized
aaagcccagtaacaggccaa

SEQ ID NO: 21682 - DNA, 20 bp, Artificial Sequence
  chemically synthesized
gccaagagctttctccctaa

SEQ ID NO: 21683 - DNA, 20 bp, Artificial Sequence
  chemically synthesized
caagagctttctccctaaaa

SEQ ID NO: 21684 - DNA, 20 bp, Artificial Sequence
  chemically synthesized
agagctttctccctaaaaga

SEQ ID NO: 21685 - DNA, 20 bp, Artificial Sequence
  chemically synthesized
gctttctccctaaaagagag

SEQ ID NO: 21686 - DNA, 20 bp, Artificial Sequence
  chemically synthesized
taaaagagagtagttatctg

SEQ ID NO: 21687 - DNA, 20 bp, Artificial Sequence
  chemically synthesized
aagagagtagttatctgcag

SEQ ID NO: 21688 - DNA, 20 bp, Artificial Sequence
  chemically synthesized
gagtagttatctgcagaaga

SEQ ID NO: 21689 - DNA, 20 bp, Artificial Sequence
  chemically synthesized
tagttatctgcagaagatgg

SEQ ID NO: 21690 - DNA, 20 bp, Artificial Sequence
  chemically synthesized
agttatctgcagaagatggc

SEQ ID NO: 21691 - DNA, 20 bp, Artificial Sequence
  chemically synthesized
gttatctgcagaagatggca

SEQ ID NO: 21692 - DNA, 20 bp, Artificial Sequence
  chemically synthesized
agggccttgctccaaaatcc

SEQ ID NO: 21693 - DNA, 20 bp, Artificial Sequence
  chemically synthesized
ggccttgctccaaaatccta

SEQ ID NO: 21694 - DNA, 20 bp, Artificial Sequence
  chemically synthesized
gccttgctccaaaatcctag

SEQ ID NO: 21695 - DNA, 20 bp, Artificial Sequence
  chemically synthesized
tagaggcctccgctgtgatt

SEQ ID NO: 21696 - DNA, 20 bp, Artificial Sequence
  chemically synthesized
agcctgccaaatgctccaaa

SEQ ID NO: 21697 - DNA, 20 bp, Artificial Sequence
  chemically synthesized
ctccaaacagcatccctatc

SEQ ID NO: 21698 - DNA, 20 bp, Artificial Sequence
  chemically synthesized
ctatctggcactgacacctc

SEQ ID NO: 21699 - DNA, 20 bp, Artificial Sequence
  chemically synthesized
actgacacctcaagcatcat

SEQ ID NO: 21700 - DNA, 20 bp, Artificial Sequence
  chemically synthesized
tcaagcatcattggatctgc

SEQ ID NO: 21701 - DNA, 20 bp, Artificial Sequence
  chemically synthesized
caagcatcattggatctgct

SEQ ID NO: 21702 - DNA, 20 bp, Artificial Sequence
  chemically synthesized
attggatctgctaggtcata

SEQ ID NO: 21703 - DNA, 20 bp, Artificial Sequence
  chemically synthesized
tctgctaggtcatatggccc

SEQ ID NO: 21704 - DNA, 20 bp, Artificial Sequence
  chemically synthesized
gctaggtcatatggcccaag

SEQ ID NO: 21705 - DNA, 20 bp, Artificial Sequence
  chemically synthesized
gtcatatggcccaagtggca

SEQ ID NO: 21706 - DNA, 20 bp, Artificial Sequence
  chemically synthesized
atatggcccaagtggcatag

SEQ ID NO: 21707 - DNA, 20 bp, Artificial Sequence
  chemically synthesized
aagtggcatagcagcttgca

SEQ ID NO: 21708 - DNA, 20 bp, Artificial Sequence
  chemically synthesized
tggcatagcagcttgcacag

SEQ ID NO: 21709 - DNA, 20 bp, Artificial Sequence
  chemically synthesized
tagcagcttgcacagcagcc

SEQ ID NO: 21710 - DNA, 20 bp, Artificial Sequence
  chemically synthesized
tgcacagcagcctggacctg

SEQ ID NO: 21711 - DNA, 20 bp, Artificial Sequence
  chemically synthesized
acagcagcctggacctgtgg

SEQ ID NO: 21712 - DNA, 20 bp, Artificial Sequence
  chemically synthesized
agcagcctggacctgtggca

SEQ ID NO: 21713 - DNA, 20 bp, Artificial Sequence
  chemically synthesized
tgtggcagagccttctgttc

SEQ ID NO: 21714 - DNA, 20 bp, Artificial Sequence
  chemically synthesized
ttctggactccactcaaaac

SEQ ID NO: 21715 - DNA, 20 bp, Artificial Sequence
  chemically synthesized
tggactccactcaaaactgg

SEQ ID NO: 21716 - DNA, 20 bp, Artificial Sequence
  chemically synthesized
actcaaaactggcagccttt

SEQ ID NO: 21717 - DNA, 20 bp, Artificial Sequence
  chemically synthesized
cttttggatcactcgataaa

SEQ ID NO: 21718 - DNA, 20 bp, Artificial Sequence
  chemically synthesized
ttttggatcactcgataaat

SEQ ID NO: 21719 - DNA, 20 bp, Artificial Sequence
  chemically synthesized
ggatcactcgataaatgggc

SEQ ID NO: 21720 - DNA, 20 bp, Artificial Sequence
  chemically synthesized
atcactcgataaatgggcca

SEQ ID NO: 21721 - DNA, 20 bp, Artificial Sequence
  chemically synthesized
ccagagtaacacacccaaat

SEQ ID NO: 21722 - DNA, 20 bp, Artificial Sequence
  chemically synthesized
cagagtaacacacccaaatc

SEQ ID NO: 21723 - DNA, 20 bp, Artificial Sequence
  chemically synthesized
tgttgcctccaaaatccaaa

SEQ ID NO: 21724 - DNA, 20 bp, Artificial Sequence
  chemically synthesized
gttgcctccaaaatccaaat

SEQ ID NO: 21725 - DNA, 20 bp, Artificial Sequence
  chemically synthesized
caaaatccaaataggcccac

SEQ ID NO: 21726 - DNA, 20 bp, Artificial Sequence
  chemically synthesized
aaaatccaaataggcccact

SEQ ID NO: 21727 - DNA, 20 bp, Artificial Sequence
  chemically synthesized
taggcgttgtgcctatttct

SEQ ID NO: 21728 - DNA, 20 bp, Artificial Sequence
  chemically synthesized
tgtgcctatttcttggttgt

SEQ ID NO: 21729 - DNA, 20 bp, Artificial Sequence
  chemically synthesized
tgcctatttcttggttgtaa

SEQ ID NO: 21730 - DNA, 20 bp, Artificial Sequence
  chemically synthesized
ctatttcttggttgtaagag

SEQ ID NO: 21731 - DNA, 20 bp, Artificial Sequence
  chemically synthesized
gttgtaagagtggccaaatg

SEQ ID NO: 21732 - DNA, 20 bp, Artificial Sequence
  chemically synthesized
cagcaaattatccttcactt

SEQ ID NO: 21733 - DNA, 20 bp, Artificial Sequence
  chemically synthesized
caaattatccttcactttag

SEQ ID NO: 21734 - DNA, 20 bp, Artificial Sequence
  chemically synthesized
aaattatccttcactttaga

SEQ ID NO: 21735 - DNA, 20 bp, Artificial Sequence
  chemically synthesized
actttagaaggaatatctca

SEQ ID NO: 21736 - DNA, 20 bp, Artificial Sequence
  chemically synthesized
tttagaaggaatatctcaaa

SEQ ID NO: 21737 - DNA, 20 bp, Artificial Sequence
  chemically synthesized
ctcaaagagccccaaaccat

SEQ ID NO: 21738 - DNA, 20 bp, Artificial Sequence
  chemically synthesized
ggacccctataaattttact

SEQ ID NO: 21739 - DNA, 20 bp, Artificial Sequence
  chemically synthesized
gacccctataaattttactg

SEQ ID NO: 21740 - DNA, 20 bp, Artificial Sequence
  chemically synthesized
ccctataaattttactgagg

SEQ ID NO: 21741 - DNA, 20 bp, Artificial Sequence
  chemically synthesized
tataaattttactgaggtag

SEQ ID NO: 21742 - DNA, 20 bp, Artificial Sequence
  chemically synthesized
ataaattttactgaggtaga

SEQ ID NO: 21743 - DNA, 20 bp, Artificial Sequence
  chemically synthesized
agaaggtccctgaatttaat

SEQ ID NO: 21744 - DNA, 20 bp, Artificial Sequence
  chemically synthesized
aaatgtctcatcaataaatc

SEQ ID NO: 21745 - DNA, 20 bp, Artificial Sequence
  chemically synthesized
gtttgctacttcttgctcac

SEQ ID NO: 21746 - DNA, 20 bp, Artificial Sequence
  chemically synthesized
tacttcttgctcactagttc

SEQ ID NO: 21747 - DNA, 20 bp, Artificial Sequence
  chemically synthesized
tcttgctcactagttccagt

SEQ ID NO: 21748 - DNA, 20 bp, Artificial Sequence
  chemically synthesized
tcagcatgtcatcaatgtaa

SEQ ID NO: 21749 - DNA, 20 bp, Artificial Sequence
  chemically synthesized
tggaccactgtgatatcttg

SEQ ID NO: 21750 - DNA, 20 bp, Artificial Sequence
  chemically synthesized
accactgtgatatcttgtgg

SEQ ID NO: 21751 - DNA, 20 bp, Artificial Sequence
  chemically synthesized
gtgatatcttgtggaagtga

SEQ ID NO: 21752 - DNA, 20 bp, Artificial Sequence
  chemically synthesized
tgatatcttgtggaagtgaa

SEQ ID NO: 21753 - DNA, 20 bp, Artificial Sequence
  chemically synthesized
atcttgtggaagtgaaaggt

SEQ ID NO: 21754 - DNA, 20 bp, Artificial Sequence
  chemically synthesized
tgtggaagtgaaaggtgagc

SEQ ID NO: 21755 - DNA, 20 bp, Artificial Sequence
  chemically synthesized
tgagcaagttctctccaaat

SEQ ID NO: 21756 - DNA, 20 bp, Artificial Sequence
  chemically synthesized
gttctctccaaataagatta

SEQ ID NO: 21757 - DNA, 20 bp, Artificial Sequence
  chemically synthesized
ccaaataagattatggcaca

SEQ ID NO: 21758 - DNA, 20 bp, Artificial Sequence
  chemically synthesized
ataagattatggcacaaagc

SEQ ID NO: 21759 - DNA, 20 bp, Artificial Sequence
  chemically synthesized
aagattatggcacaaagctg

SEQ ID NO: 21760 - DNA, 20 bp, Artificial Sequence
  chemically synthesized
gattatggcacaaagctgga

SEQ ID NO: 21761 - DNA, 20 bp, Artificial Sequence
  chemically synthesized
tggagagttgatatactcct

SEQ ID NO: 21762 - DNA, 20 bp, Artificial Sequence
  chemically synthesized
ttttctttcatcactttgtc

SEQ ID NO: 21763 - DNA, 20 bp, Artificial Sequence
  chemically synthesized
actttgtccagcgaacttac

SEQ ID NO: 21764 - DNA, 20 bp, Artificial Sequence
  chemically synthesized
gttccttgattctccacata

SEQ ID NO: 21765 - DNA, 20 bp, Artificial Sequence
  chemically synthesized
gattctccacatatagtcaa

SEQ ID NO: 21766 - DNA, 20 bp, Artificial Sequence
  chemically synthesized
agtcaaaagtattatgtata

SEQ ID NO: 21767 - DNA, 20 bp, Artificial Sequence
  chemically synthesized
caaaagtattatgtatacag

SEQ ID NO: 21768 - DNA, 20 bp, Artificial Sequence
  chemically synthesized
ctaaattccttgcctctcac

SEQ ID NO: 21769 - DNA, 20 bp, Artificial Sequence
  chemically synthesized
cctctcacaagcgttgaatc

SEQ ID NO: 21770 - DNA, 20 bp, Artificial Sequence
  chemically synthesized
tctcacaagcgttgaatcaa

SEQ ID NO: 21771 - DNA, 20 bp, Artificial Sequence
  chemically synthesized
ctctctaaacaattgatgcc

SEQ ID NO: 21772 - DNA, 20 bp, Artificial Sequence
  chemically synthesized
tctctaaacaattgatgcca

SEQ ID NO: 21773 - DNA, 20 bp, Artificial Sequence
  chemically synthesized
caattgatgccaaggattat

SEQ ID NO: 21774 - DNA, 20 bp, Artificial Sequence
  chemically synthesized
atcagtgttctccataccat

SEQ ID NO: 21775 - DNA, 20 bp, Artificial Sequence
  chemically synthesized
agtgttctccataccattag

SEQ ID NO: 21776 - DNA, 20 bp, Artificial Sequence
  chemically synthesized
gttctccataccattagaag

SEQ ID NO: 21777 - DNA, 20 bp, Artificial Sequence
  chemically synthesized
tctccataccattagaagaa

SEQ ID NO: 21778 - DNA, 20 bp, Artificial Sequence
  chemically synthesized
accattagaagaagagtcct

SEQ ID NO: 21779 - DNA, 20 bp, Artificial Sequence
  chemically synthesized
agaagagtccttagcatatt

SEQ ID NO: 21780 - DNA, 20 bp, Artificial Sequence
  chemically synthesized
gaagagtccttagcatattt

SEQ ID NO: 21781 - DNA, 20 bp, Artificial Sequence
  chemically synthesized
tatttgggtctaatcatatt

SEQ ID NO: 21782 - DNA, 20 bp, Artificial Sequence
  chemically synthesized
ttgggtctaatcatattaag

SEQ ID NO: 21783 - DNA, 20 bp, Artificial Sequence
  chemically synthesized
tcatattaagcagccaactc

SEQ ID NO: 21784 - DNA, 20 bp, Artificial Sequence
  chemically synthesized
agaaaccccaaaaccaatga

SEQ ID NO: 21785 - DNA, 20 bp, Artificial Sequence
  chemically synthesized
tccttaatattctgttcctc

SEQ ID NO: 21786 - DNA, 20 bp, Artificial Sequence
  chemically synthesized
tgttcctctagaaccactcc

SEQ ID NO: 21787 - DNA, 20 bp, Artificial Sequence
  chemically synthesized
cctggtaccaaaatctgtat

SEQ ID NO: 21788 - DNA, 20 bp, Artificial Sequence
  chemically synthesized
ctggtaccaaaatctgtatt

SEQ ID NO: 21789 - DNA, 20 bp, Artificial Sequence
  chemically synthesized
tggtaccaaaatctgtatta

SEQ ID NO: 21790 - DNA, 20 bp, Artificial Sequence
  chemically synthesized
aaatctgtattagggttcta

SEQ ID NO: 21791 - DNA, 20 bp, Artificial Sequence
  chemically synthesized
atctgtattagggttctaca

SEQ ID NO: 21792 - DNA, 20 bp, Artificial Sequence
  chemically synthesized
attagggttctacagagaaa

SEQ ID NO: 21793 - DNA, 20 bp, Artificial Sequence
  chemically synthesized
ctacagagaaacagaattaa

SEQ ID NO: 21794 - DNA, 20 bp, Artificial Sequence
  chemically synthesized
tacagagaaacagaattaat

SEQ ID NO: 21795 - DNA, 20 bp, Artificial Sequence
  chemically synthesized
cagagaaacagaattaatag

SEQ ID NO: 21796 - DNA, 20 bp, Artificial Sequence
  chemically synthesized
ctctatatctatatctatat

SEQ ID NO: 21797 - DNA, 20 bp, Artificial Sequence
  chemically synthesized
ctatatctatatctatatga

SEQ ID NO: 21798 - DNA, 20 bp, Artificial Sequence
  chemically synthesized
ctatatgagagtttattatg

SEQ ID NO: 21799 - DNA, 20 bp, Artificial Sequence
  chemically synthesized
gtattgactcacatgttcac

SEQ ID NO: 21800 - DNA, 20 bp, Artificial Sequence
  chemically synthesized
tattgactcacatgttcaca

SEQ ID NO: 21801 - DNA, 20 bp, Artificial Sequence
  chemically synthesized
atgttcacaaggtcccaaaa

SEQ ID NO: 21802 - DNA, 20 bp, Artificial Sequence
  chemically synthesized
tgttcacaaggtcccaaaac

SEQ ID NO: 21803 - DNA, 20 bp, Artificial Sequence
  chemically synthesized
tcccaaaacaggccatctgc

SEQ ID NO: 21804 - DNA, 20 bp, Artificial Sequence
  chemically synthesized
aaacaggccatctgccagct

SEQ ID NO: 21805 - DNA, 20 bp, Artificial Sequence
  chemically synthesized
aacaggccatctgccagctg

SEQ ID NO: 21806 - DNA, 20 bp, Artificial Sequence
  chemically synthesized
ccatctgccagctgaggaac

SEQ ID NO: 21807 - DNA, 20 bp, Artificial Sequence
  chemically synthesized
catctgccagctgaggaaca

SEQ ID NO: 21808 - DNA, 20 bp, Artificial Sequence
  chemically synthesized
ctgccagctgaggaacaagg

SEQ ID NO: 21809 - DNA, 20 bp, Artificial Sequence
  chemically synthesized
cagctgaggaacaaggaagc

SEQ ID NO: 21810 - DNA, 20 bp, Artificial Sequence
  chemically synthesized
tgaggaacaaggaagctagt

SEQ ID NO: 21811 - DNA, 20 bp, Artificial Sequence
  chemically synthesized
aggaacaaggaagctagtcg

SEQ ID NO: 21812 - DNA, 20 bp, Artificial Sequence
  chemically synthesized
ggaagctagtcggagtccca

SEQ ID NO: 21813 - DNA, 20 bp, Artificial Sequence
  chemically synthesized
tagtcggagtcccaaagctg

SEQ ID NO: 21814 - DNA, 20 bp, Artificial Sequence
  chemically synthesized
agtcccaaagctgaagaacc

SEQ ID NO: 21815 - DNA, 20 bp, Artificial Sequence
  chemically synthesized
tcccaaagctgaagaacctg

SEQ ID NO: 21816 - DNA, 20 bp, Artificial Sequence
  chemically synthesized
gaacctggagttcaatgttc

SEQ ID NO: 21817 - DNA, 20 bp, Artificial Sequence
  chemically synthesized
aacctggagttcaatgttcc

SEQ ID NO: 21818 - DNA, 20 bp, Artificial Sequence
  chemically synthesized
acctggagttcaatgttcca

SEQ ID NO: 21819 - DNA, 20 bp, Artificial Sequence
  chemically synthesized
tggagttcaatgttccaggg

SEQ ID NO: 21820 - DNA, 20 bp, Artificial Sequence
  chemically synthesized
ggagttcaatgttccagggc

SEQ ID NO: 21821 - DNA, 20 bp, Artificial Sequence
  chemically synthesized
gttcaatgttccagggcagg

SEQ ID NO: 21822 - DNA, 20 bp, Artificial Sequence
  chemically synthesized
gttccagggcaggaagaatc

SEQ ID NO: 21823 - DNA, 20 bp, Artificial Sequence
  chemically synthesized
agggcaggaagaatccagca

SEQ ID NO: 21824 - DNA, 20 bp, Artificial Sequence
  chemically synthesized
gggcaggaagaatccagcat

SEQ ID NO: 21825 - DNA, 20 bp, Artificial Sequence
  chemically synthesized
gcaggaagaatccagcatgg

SEQ ID NO: 21826 - DNA, 20 bp, Artificial Sequence
  chemically synthesized
tccagcatgggagaaaaatg

SEQ ID NO: 21827 - DNA, 20 bp, Artificial Sequence
  chemically synthesized
ccagcatgggagaaaaatgt

SEQ ID NO: 21828 - DNA, 20 bp, Artificial Sequence
  chemically synthesized
catgggagaaaaatgtaggc

SEQ ID NO: 21829 - DNA, 20 bp, Artificial Sequence
  chemically synthesized
atgggagaaaaatgtaggct

SEQ ID NO: 21830 - DNA, 20 bp, Artificial Sequence
  chemically synthesized
aaaatgtaggctgggatgcc

SEQ ID NO: 21831 - DNA, 20 bp, Artificial Sequence
  chemically synthesized
gctgggatgccaagccaatc

SEQ ID NO: 21832 - DNA, 20 bp, Artificial Sequence
  chemically synthesized
tttctgcctgctttatatcc

SEQ ID NO: 21833 - DNA, 20 bp, Artificial Sequence
  chemically synthesized
gctttatatcctggctgtgc

SEQ ID NO: 21834 - DNA, 20 bp, Artificial Sequence
  chemically synthesized
tggctgtgctggcaactgat

SEQ ID NO: 21835 - DNA, 20 bp, Artificial Sequence
  chemically synthesized
tgtgctggcaactgattaga

SEQ ID NO: 21836 - DNA, 20 bp, Artificial Sequence
  chemically synthesized
ctgattagatggtgcccacc

SEQ ID NO: 21837 - DNA, 20 bp, Artificial Sequence
  chemically synthesized
agatggtgcccacccagatt

SEQ ID NO: 21838 - DNA, 20 bp, Artificial Sequence
  chemically synthesized
gatggtgcccacccagatta

SEQ ID NO: 21839 - DNA, 20 bp, Artificial Sequence
  chemically synthesized
atggtgcccacccagattaa

SEQ ID NO: 21840 - DNA, 20 bp, Artificial Sequence
  chemically synthesized
gtgcccacccagattaaggg

SEQ ID NO: 21841 - DNA, 20 bp, Artificial Sequence
  chemically synthesized
tgcccacccagattaagggt

SEQ ID NO: 21842 - DNA, 20 bp, Artificial Sequence
  chemically synthesized
aagggtgggtctgccttccc

SEQ ID NO: 21843 - DNA, 20 bp, Artificial Sequence
  chemically synthesized
actgaaatattaatctcctt

SEQ ID NO: 21844 - DNA, 20 bp, Artificial Sequence
  chemically synthesized
ctcctttggtaacaccctca

SEQ ID NO: 21845 - DNA, 20 bp, Artificial Sequence
  chemically synthesized
acaccctcacagacacaccc

SEQ ID NO: 21846 - DNA, 20 bp, Artificial Sequence
  chemically synthesized
gatcattactttgcatcctt

SEQ ID NO: 21847 - DNA, 20 bp, Artificial Sequence
  chemically synthesized
ttgcatccttcagtccaatc

SEQ ID NO: 21848 - DNA, 20 bp, Artificial Sequence
  chemically synthesized
agtccaatcaagttgacact

SEQ ID NO: 21849 - DNA, 20 bp, Artificial Sequence
  chemically synthesized
acactcagtattaaccatca

SEQ ID NO: 21850 - DNA, 20 bp, Artificial Sequence
  chemically synthesized
catcacagtcactttctaat

SEQ ID NO: 21851 - DNA, 20 bp, Artificial Sequence
  chemically synthesized
atcacagtcactttctaatg

SEQ ID NO: 21852 - DNA, 20 bp, Artificial Sequence
  chemically synthesized
cagtcactttctaatgaggt

SEQ ID NO: 21853 - DNA, 20 bp, Artificial Sequence
  chemically synthesized
aggttggtttttttgttgtt

SEQ ID NO: 21854 - DNA, 20 bp, Artificial Sequence
  chemically synthesized
ttttgttgttgagttccttg

SEQ ID NO: 21855 - DNA, 20 bp, Artificial Sequence
  chemically synthesized
tccttgtagattctgtatat

SEQ ID NO: 21856 - DNA, 20 bp, Artificial Sequence
  chemically synthesized
ttagccttttgttgcattca

SEQ ID NO: 21857 - DNA, 20 bp, Artificial Sequence
  chemically synthesized
aatttttttttctcattctg

SEQ ID NO: 21858 - DNA, 20 bp, Artificial Sequence
  chemically synthesized
atttttttttctcattctgt

SEQ ID NO: 21859 - DNA, 20 bp, Artificial Sequence
  chemically synthesized
atccgtttactctgttgatt

SEQ ID NO: 21860 - DNA, 20 bp, Artificial Sequence
  chemically synthesized
tctgttgattcggtcttttg

SEQ ID NO: 21861 - DNA, 20 bp, Artificial Sequence
  chemically synthesized
tgattcggtcttttgcggtg

SEQ ID NO: 21862 - DNA, 20 bp, Artificial Sequence
  chemically synthesized
ttcggtcttttgcggtgcag

SEQ ID NO: 21863 - DNA, 20 bp, Artificial Sequence
  chemically synthesized
tttgcggtgcagaagcattt

SEQ ID NO: 21864 - DNA, 20 bp, Artificial Sequence
  chemically synthesized
agaagcattttagtttaatt

SEQ ID NO: 21865 - DNA, 20 bp, Artificial Sequence
  chemically synthesized
gtttttgtttttgttgtgtt

SEQ ID NO: 21866 - DNA, 20 bp, Artificial Sequence
  chemically synthesized
tttttgttgtgtttagtttt

SEQ ID NO: 21867 - DNA, 20 bp, Artificial Sequence
  chemically synthesized
ttttgttgtgtttagttttg

SEQ ID NO: 21868 - DNA, 20 bp, Artificial Sequence
  chemically synthesized
tgtgtttagttttgaggact

SEQ ID NO: 21869 - DNA, 20 bp, Artificial Sequence
  chemically synthesized
ttggtcataaattctttgcc

SEQ ID NO: 21870 - DNA, 20 bp, Artificial Sequence
  chemically synthesized
tggtcataaattctttgcct

SEQ ID NO: 21871 - DNA, 20 bp, Artificial Sequence
  chemically synthesized
tctaatttttaatcctcttt

SEQ ID NO: 21872 - DNA, 20 bp, Artificial Sequence
  chemically synthesized
taatttttaatcctctttta

SEQ ID NO: 21873 - DNA, 20 bp, Artificial Sequence
  chemically synthesized
tttacccccatttgacacat

SEQ ID NO: 21874 - DNA, 20 bp, Artificial Sequence
  chemically synthesized
atttgacacatgagctaatt

SEQ ID NO: 21875 - DNA, 20 bp, Artificial Sequence
  chemically synthesized
aattgagccttctgtctgtt

SEQ ID NO: 21876 - DNA, 20 bp, Artificial Sequence
  chemically synthesized
gagccttctgtctgttaagt

SEQ ID NO: 21877 - DNA, 20 bp, Artificial Sequence
  chemically synthesized
tgtctgttaagtaagttgac

SEQ ID NO: 21878 - DNA, 20 bp, Artificial Sequence
  chemically synthesized
gttaagtaagttgactagtt

SEQ ID NO: 21879 - DNA, 20 bp, Artificial Sequence
  chemically synthesized
taagttgactagttcagtgt

SEQ ID NO: 21880 - DNA, 20 bp, Artificial Sequence
  chemically synthesized
tttttgccatcataatgctt

SEQ ID NO: 21881 - DNA, 20 bp, Artificial Sequence
  chemically synthesized
tactctccttaattttcccc

SEQ ID NO: 21882 - DNA, 20 bp, Artificial Sequence
  chemically synthesized
actctccttaattttccccc

SEQ ID NO: 21883 - DNA, 20 bp, Artificial Sequence
  chemically synthesized
tccttaattttcccccagga

SEQ ID NO: 21884 - DNA, 20 bp, Artificial Sequence
  chemically synthesized
tttcccccaggatggttttc

SEQ ID NO: 21885 - DNA, 20 bp, Artificial Sequence
  chemically synthesized
ccaggatggttttctagatg

SEQ ID NO: 21886 - DNA, 20 bp, Artificial Sequence
  chemically synthesized
ttttctagatgtggacttgc

SEQ ID NO: 21887 - DNA, 20 bp, Artificial Sequence
  chemically synthesized
atgtggacttgctggatcca

SEQ ID NO: 21888 - DNA, 20 bp, Artificial Sequence
  chemically synthesized
ccaaatgtatccatatattg

SEQ ID NO: 21889 - DNA, 20 bp, Artificial Sequence
  chemically synthesized
attgtggctttgtgttttaa

SEQ ID NO: 21890 - DNA, 20 bp, Artificial Sequence
  chemically synthesized
tgtggctttgtgttttaata

SEQ ID NO: 21891 - DNA, 20 bp, Artificial Sequence
  chemically synthesized
gtggctttgtgttttaatag

SEQ ID NO: 21892 - DNA, 20 bp, Artificial Sequence
  chemically synthesized
gctttgtgttttaatagagg

SEQ ID NO: 21893 - DNA, 20 bp, Artificial Sequence
  chemically synthesized
ttgtgttttaatagaggtag

SEQ ID NO: 21894 - DNA, 20 bp, Artificial Sequence
  chemically synthesized
aatagaggtagcagcaatat

SEQ ID NO: 21895 - DNA, 20 bp, Artificial Sequence
  chemically synthesized
tagaggtagcagcaatatta

SEQ ID NO: 21896 - DNA, 20 bp, Artificial Sequence
  chemically synthesized
agaggtagcagcaatattag

SEQ ID NO: 21897 - DNA, 20 bp, Artificial Sequence
  chemically synthesized
aggtagcagcaatattagag

SEQ ID NO: 21898 - DNA, 20 bp, Artificial Sequence
  chemically synthesized
gtagcagcaatattagagga

SEQ ID NO: 21899 - DNA, 20 bp, Artificial Sequence
  chemically synthesized
caatattagaggagagaatt

SEQ ID NO: 21900 - DNA, 20 bp, Artificial Sequence
  chemically synthesized
aatattagaggagagaatta

SEQ ID NO: 21901 - DNA, 20 bp, Artificial Sequence
  chemically synthesized
agagaattaaggaacgattc

SEQ ID NO: 21902 - DNA, 20 bp, Artificial Sequence
  chemically synthesized
attaaggaacgattctagtg

SEQ ID NO: 21903 - DNA, 20 bp, Artificial Sequence
  chemically synthesized
aaggaacgattctagtgtag

SEQ ID NO: 21904 - DNA, 20 bp, Artificial Sequence
  chemically synthesized
aggaacgattctagtgtagc

SEQ ID NO: 21905 - DNA, 20 bp, Artificial Sequence
  chemically synthesized
cgattctagtgtagcaggac

SEQ ID NO: 21906 - DNA, 20 bp, Artificial Sequence
  chemically synthesized
aagctgcatacaaaacccct

SEQ ID NO: 21907 - DNA, 20 bp, Artificial Sequence
  chemically synthesized
tacaaaacccctcagacacc

SEQ ID NO: 21908 - DNA, 20 bp, Artificial Sequence
  chemically synthesized
acccctcagacaccgagtta

SEQ ID NO: 21909 - DNA, 20 bp, Artificial Sequence
  chemically synthesized
cctcagacaccgagttaaag

SEQ ID NO: 21910 - DNA, 20 bp, Artificial Sequence
  chemically synthesized
ctcagacaccgagttaaaga

SEQ ID NO: 21911 - DNA, 20 bp, Artificial Sequence
  chemically synthesized
agacaccgagttaaagaagg

SEQ ID NO: 21912 - DNA, 20 bp, Artificial Sequence
  chemically synthesized
gacaccgagttaaagaagga

SEQ ID NO: 21913 - DNA, 20 bp, Artificial Sequence
  chemically synthesized
acaccgagttaaagaaggaa

SEQ ID NO: 21914 - DNA, 20 bp, Artificial Sequence
  chemically synthesized
aaagaaggaagggctttatt

SEQ ID NO: 21915 - DNA, 20 bp, Artificial Sequence
  chemically synthesized
aaggaagggctttattcggc

SEQ ID NO: 21916 - DNA, 20 bp, Artificial Sequence
  chemically synthesized
aggaagggctttattcggct

SEQ ID NO: 21917 - DNA, 20 bp, Artificial Sequence
  chemically synthesized
gaagggctttattcggctgg

SEQ ID NO: 21918 - DNA, 20 bp, Artificial Sequence
  chemically synthesized
gctttattcggctgggagct

SEQ ID NO: 21919 - DNA, 20 bp, Artificial Sequence
  chemically synthesized
ctttattcggctgggagctt

SEQ ID NO: 21920 - DNA, 20 bp, Artificial Sequence
  chemically synthesized
attcggctgggagcttgggc

SEQ ID NO: 21921 - DNA, 20 bp, Artificial Sequence
  chemically synthesized
gactcacatctccaacaacc

SEQ ID NO: 21922 - DNA, 20 bp, Artificial Sequence
  chemically synthesized
atctccaacaaccaagctct

SEQ ID NO: 21923 - DNA, 20 bp, Artificial Sequence
  chemically synthesized
ctccaacaaccaagctctca

SEQ ID NO: 21924 - DNA, 20 bp, Artificial Sequence
  chemically synthesized
aacaaccaagctctcagagt

SEQ ID NO: 21925 - DNA, 20 bp, Artificial Sequence
  chemically synthesized
gagcaattcctgtccctttt

SEQ ID NO: 21926 - DNA, 20 bp, Artificial Sequence
  chemically synthesized
agcaattcctgtccctttta

SEQ ID NO: 21927 - DNA, 20 bp, Artificial Sequence
  chemically synthesized
gcaattcctgtcccttttaa

SEQ ID NO: 21928 - DNA, 20 bp, Artificial Sequence
  chemically synthesized
ttttaagggcttacaactct

SEQ ID NO: 21929 - DNA, 20 bp, Artificial Sequence
  chemically synthesized
tttaagggcttacaactcta

SEQ ID NO: 21930 - DNA, 20 bp, Artificial Sequence
  chemically synthesized
ttaagggcttacaactctaa

SEQ ID NO: 21931 - DNA, 20 bp, Artificial Sequence
  chemically synthesized
taagggcttacaactctaag

SEQ ID NO: 21932 - DNA, 20 bp, Artificial Sequence
  chemically synthesized
aagggcttacaactctaagg

SEQ ID NO: 21933 - DNA, 20 bp, Artificial Sequence
  chemically synthesized
actctaagggggtacatgac

SEQ ID NO: 21934 - DNA, 20 bp, Artificial Sequence
  chemically synthesized
ctctaagggggtacatgact

SEQ ID NO: 21935 - DNA, 20 bp, Artificial Sequence
  chemically synthesized
tctaagggggtacatgactg

SEQ ID NO: 21936 - DNA, 20 bp, Artificial Sequence
  chemically synthesized
ctaagggggtacatgactgg

SEQ ID NO: 21937 - DNA, 20 bp, Artificial Sequence
  chemically synthesized
tgactgggggctgcatgcac

SEQ ID NO: 21938 - DNA, 20 bp, Artificial Sequence
  chemically synthesized
gggctgcatgcactggtcat

SEQ ID NO: 21939 - DNA, 20 bp, Artificial Sequence
  chemically synthesized
gcatgcactggtcatcagaa

SEQ ID NO: 21940 - DNA, 20 bp, Artificial Sequence
  chemically synthesized
cactggtcatcagaatggaa

SEQ ID NO: 21941 - DNA, 20 bp, Artificial Sequence
  chemically synthesized
gtcatcagaatggaacagaa

SEQ ID NO: 21942 - DNA, 20 bp, Artificial Sequence
  chemically synthesized
tcatcagaatggaacagaac

SEQ ID NO: 21943 - DNA, 20 bp, Artificial Sequence
  chemically synthesized
cagaatggaacagaacagga

SEQ ID NO: 21944 - DNA, 20 bp, Artificial Sequence
  chemically synthesized
agaatggaacagaacaggac

SEQ ID NO: 21945 - DNA, 20 bp, Artificial Sequence
  chemically synthesized
gaatggaacagaacaggaca

SEQ ID NO: 21946 - DNA, 20 bp, Artificial Sequence
  chemically synthesized
tttcacactgcttttccata

SEQ ID NO: 21947 - DNA, 20 bp, Artificial Sequence
  chemically synthesized
ctgcttttccatacagtgtc

SEQ ID NO: 21948 - DNA, 20 bp, Artificial Sequence
  chemically synthesized
catacagtgtctggaatcta

SEQ ID NO: 21949 - DNA, 20 bp, Artificial Sequence
  chemically synthesized
gaatctatagataacataac

SEQ ID NO: 21950 - DNA, 20 bp, Artificial Sequence
  chemically synthesized
ctatagataacataactggc

SEQ ID NO: 21951 - DNA, 20 bp, Artificial Sequence
  chemically synthesized
tatagataacataactggcc

SEQ ID NO: 21952 - DNA, 20 bp, Artificial Sequence
  chemically synthesized
gataacataactggccaggt

SEQ ID NO: 21953 - DNA, 20 bp, Artificial Sequence
  chemically synthesized
ataacataactggccaggtc

SEQ ID NO: 21954 - DNA, 20 bp, Artificial Sequence
  chemically synthesized
taacataactggccaggtca

SEQ ID NO: 21955 - DNA, 20 bp, Artificial Sequence
  chemically synthesized
aacataactggccaggtcag

SEQ ID NO: 21956 - DNA, 20 bp, Artificial Sequence
  chemically synthesized
gtcaggggtctatctttaac

SEQ ID NO: 21957 - DNA, 20 bp, Artificial Sequence
  chemically synthesized
tcaggggtctatctttaacc

SEQ ID NO: 21958 - DNA, 20 bp, Artificial Sequence
  chemically synthesized
ggtctatctttaaccaggcc

SEQ ID NO: 21959 - DNA, 20 bp, Artificial Sequence
  chemically synthesized
gtctatctttaaccaggccc

SEQ ID NO: 21960 - DNA, 20 bp, Artificial Sequence
  chemically synthesized
ctttaaccaggcccaggatg

SEQ ID NO: 21961 - DNA, 20 bp, Artificial Sequence
  chemically synthesized
ccaggcccaggatgtggtct

SEQ ID NO: 21962 - DNA, 20 bp, Artificial Sequence
  chemically synthesized
caggcccaggatgtggtctc

SEQ ID NO: 21963 - DNA, 20 bp, Artificial Sequence
  chemically synthesized
ggtctcaggctgtttgcctg

SEQ ID NO: 21964 - DNA, 20 bp, Artificial Sequence
  chemically synthesized
tggatttcatttctgccttt

SEQ ID NO: 21965 - DNA, 20 bp, Artificial Sequence
  chemically synthesized
gtttttacttcttctttctt

SEQ ID NO: 21966 - DNA, 20 bp, Artificial Sequence
  chemically synthesized
ttttacttcttctttctttg

SEQ ID NO: 21967 - DNA, 20 bp, Artificial Sequence
  chemically synthesized
tttacttcttctttctttgg

SEQ ID NO: 21968 - DNA, 20 bp, Artificial Sequence
  chemically synthesized
acttcttctttctttggagg

SEQ ID NO: 21969 - DNA, 20 bp, Artificial Sequence
  chemically synthesized
ctttctttggaggcagaaat

SEQ ID NO: 21970 - DNA, 20 bp, Artificial Sequence
  chemically synthesized
tttctttggaggcagaaatt

SEQ ID NO: 21971 - DNA, 20 bp, Artificial Sequence
  chemically synthesized
attgggcataaaacaatatg

SEQ ID NO: 21972 - DNA, 20 bp, Artificial Sequence
  chemically synthesized
ttgggcataaaacaatatga

SEQ ID NO: 21973 - DNA, 20 bp, Artificial Sequence
  chemically synthesized
tgggcataaaacaatatgaa

SEQ ID NO: 21974 - DNA, 20 bp, Artificial Sequence
  chemically synthesized
gcataaaacaatatgaaggg

SEQ ID NO: 21975 - DNA, 20 bp, Artificial Sequence
  chemically synthesized
agggtggtctcctcccttac

SEQ ID NO: 21976 - DNA, 20 bp, Artificial Sequence
  chemically synthesized
gggtggtctcctcccttact

SEQ ID NO: 21977 - DNA, 20 bp, Artificial Sequence
  chemically synthesized
tggtctcctcccttactagg

SEQ ID NO: 21978 - DNA, 20 bp, Artificial Sequence
  chemically synthesized
gtctcctcccttactaggaa

SEQ ID NO: 21979 - DNA, 20 bp, Artificial Sequence
  chemically synthesized
ctcctcccttactaggaaga

SEQ ID NO: 21980 - DNA, 20 bp, Artificial Sequence
  chemically synthesized
ggaagagagaaataccatgt

SEQ ID NO: 21981 - DNA, 20 bp, Artificial Sequence
  chemically synthesized
gaaatacgtatttgtgttat

SEQ ID NO: 21982 - DNA, 20 bp, Artificial Sequence
  chemically synthesized
tgtgttattggatttgacat

SEQ ID NO: 21983 - DNA, 20 bp, Artificial Sequence
  chemically synthesized
gtgttattggatttgacatc

SEQ ID NO: 21984 - DNA, 20 bp, Artificial Sequence
  chemically synthesized
tgttattggatttgacatcg

SEQ ID NO: 21985 - DNA, 20 bp, Artificial Sequence
  chemically synthesized
attggatttgacatcggggt

SEQ ID NO: 21986 - DNA, 20 bp, Artificial Sequence
  chemically synthesized
tttgacatcggggttggacc

SEQ ID NO: 21987 - DNA, 20 bp, Artificial Sequence
  chemically synthesized
catcttctatgaacatctat

SEQ ID NO: 21988 - DNA, 20 bp, Artificial Sequence
  chemically synthesized
aagcacgttctccttatcaa

SEQ ID NO: 21989 - DNA, 20 bp, Artificial Sequence
  chemically synthesized
agcacgttctccttatcaaa

SEQ ID NO: 21990 - DNA, 20 bp, Artificial Sequence
  chemically synthesized
ttatcaaaaggtactttgct

SEQ ID NO: 21991 - DNA, 20 bp, Artificial Sequence
  chemically synthesized
tactttgcttggtgctttaa

SEQ ID NO: 21992 - DNA, 20 bp, Artificial Sequence
  chemically synthesized
ttaaaagataaatgactatg

SEQ ID NO: 21993 - DNA, 20 bp, Artificial Sequence
  chemically synthesized
agataaatgactatgtagct

SEQ ID NO: 21994 - DNA, 20 bp, Artificial Sequence
  chemically synthesized
gataaatgactatgtagctt

SEQ ID NO: 21995 - DNA, 20 bp, Artificial Sequence
  chemically synthesized
taaatgactatgtagcttag

SEQ ID NO: 21996 - DNA, 20 bp, Artificial Sequence
  chemically synthesized
ttcttcataattgaaaacca

SEQ ID NO: 21997 - DNA, 20 bp, Artificial Sequence
  chemically synthesized
ttcataattgaaaaccacag

SEQ ID NO: 21998 - DNA, 20 bp, Artificial Sequence
  chemically synthesized
gctgttatttgaacatacct

SEQ ID NO: 21999 - DNA, 20 bp, Artificial Sequence
  chemically synthesized
gaacatacctgagccccttc

SEQ ID NO: 22000 - DNA, 20 bp, Artificial Sequence
  chemically synthesized
gagccccttctggaccactg

SEQ ID NO: 22001 - DNA, 20 bp, Artificial Sequence
  chemically synthesized
agccccttctggaccactgt

SEQ ID NO: 22002 - DNA, 20 bp, Artificial Sequence
  chemically synthesized
ccccttctggaccactgtag

SEQ ID NO: 22003 - DNA, 20 bp, Artificial Sequence
  chemically synthesized
cttctggaccactgtaggag

SEQ ID NO: 22004 - DNA, 20 bp, Artificial Sequence
  chemically synthesized
ttctggaccactgtaggaga

SEQ ID NO: 22005 - DNA, 20 bp, Artificial Sequence
  chemically synthesized
ctggaccactgtaggagaag

SEQ ID NO: 22006 - DNA, 20 bp, Artificial Sequence
  chemically synthesized
tggaccactgtaggagaagg

SEQ ID NO: 22007 - DNA, 20 bp, Artificial Sequence
  chemically synthesized
accactgtaggagaaggagg

SEQ ID NO: 22008 - DNA, 20 bp, Artificial Sequence
  chemically synthesized
cactgtaggagaaggaggaa

SEQ ID NO: 22009 - DNA, 20 bp, Artificial Sequence
  chemically synthesized
ctgtaggagaaggaggaaga

SEQ ID NO: 22010 - DNA, 20 bp, Artificial Sequence
  chemically synthesized
tgtaggagaaggaggaagag

SEQ ID NO: 22011 - DNA, 20 bp, Artificial Sequence
  chemically synthesized
agaaggaggaagagaggtga

SEQ ID NO: 22012 - DNA, 20 bp, Artificial Sequence
  chemically synthesized
tgaaagtgatttctgctgct

SEQ ID NO: 22013 - DNA, 20 bp, Artificial Sequence
  chemically synthesized
gaaagtgatttctgctgctg

SEQ ID NO: 22014 - DNA, 20 bp, Artificial Sequence
  chemically synthesized
aaagtgatttctgctgctga

SEQ ID NO: 22015 - DNA, 20 bp, Artificial Sequence
  chemically synthesized
gagggcatgtatgatgacaa

SEQ ID NO: 22016 - DNA, 20 bp, Artificial Sequence
  chemically synthesized
agggcatgtatgatgacaat

SEQ ID NO: 22017 - DNA, 20 bp, Artificial Sequence
  chemically synthesized
gtcctaactttgacactaca

SEQ ID NO: 22018 - DNA, 20 bp, Artificial Sequence
  chemically synthesized
ctttgacactacaaagtgac

SEQ ID NO: 22019 - DNA, 20 bp, Artificial Sequence
  chemically synthesized
ttgacactacaaagtgactg

SEQ ID NO: 22020 - DNA, 20 bp, Artificial Sequence
  chemically synthesized
ctacaaagtgactggagctt

SEQ ID NO: 22021 - DNA, 20 bp, Artificial Sequence
  chemically synthesized
tacaaagtgactggagcttt

SEQ ID NO: 22022 - DNA, 20 bp, Artificial Sequence
  chemically synthesized
aagtgactggagctttaggc

SEQ ID NO: 22023 - DNA, 20 bp, Artificial Sequence
  chemically synthesized
tgactggagctttaggcaag

SEQ ID NO: 22024 - DNA, 20 bp, Artificial Sequence
  chemically synthesized
agttactccaattgtctttt

SEQ ID NO: 22025 - DNA, 20 bp, Artificial Sequence
  chemically synthesized
ttttcagactctttcttttt

SEQ ID NO: 22026 - DNA, 20 bp, Artificial Sequence
  chemically synthesized
tttcagactctttctttttg

SEQ ID NO: 22027 - DNA, 20 bp, Artificial Sequence
  chemically synthesized
tgaggtatttgacctctttg

SEQ ID NO: 22028 - DNA, 20 bp, Artificial Sequence
  chemically synthesized
atttgacctctttgcggcat

SEQ ID NO: 22029 - DNA, 20 bp, Artificial Sequence
  chemically synthesized
gctgctatttcacatgcacc

SEQ ID NO: 22030 - DNA, 20 bp, Artificial Sequence
  chemically synthesized
gctatttcacatgcacctag

SEQ ID NO: 22031 - DNA, 20 bp, Artificial Sequence
  chemically synthesized
ctatttcacatgcacctaga

SEQ ID NO: 22032 - DNA, 20 bp, Artificial Sequence
  chemically synthesized
tatttcacatgcacctagaa

SEQ ID NO: 22033 - DNA, 20 bp, Artificial Sequence
  chemically synthesized
aagggactttaaaacatgca

SEQ ID NO: 22034 - DNA, 20 bp, Artificial Sequence
  chemically synthesized
aacatgcacagaattgaaca

SEQ ID NO: 22035 - DNA, 20 bp, Artificial Sequence
  chemically synthesized
atgcacagaattgaacaaag

SEQ ID NO: 22036 - DNA, 20 bp, Artificial Sequence
  chemically synthesized
acaaagcagtaaccattcgt

SEQ ID NO: 22037 - DNA, 20 bp, Artificial Sequence
  chemically synthesized
tcaaatactattatttttga

SEQ ID NO: 22038 - DNA, 20 bp, Artificial Sequence
  chemically synthesized
caaatactattatttttgaa

SEQ ID NO: 22039 - DNA, 20 bp, Artificial Sequence
  chemically synthesized
ttgaaaggtaaataaatcct

SEQ ID NO: 22040 - DNA, 20 bp, Artificial Sequence
  chemically synthesized
tgaaaggtaaataaatcctt

SEQ ID NO: 22041 - DNA, 20 bp, Artificial Sequence
  chemically synthesized
ggtaaataaatccttgggct

SEQ ID NO: 22042 - DNA, 20 bp, Artificial Sequence
  chemically synthesized
aaataaatccttgggcttag

SEQ ID NO: 22043 - DNA, 20 bp, Artificial Sequence
  chemically synthesized
attgctaacctgaatgataa

SEQ ID NO: 22044 - DNA, 20 bp, Artificial Sequence
  chemically synthesized
agaaacttttttccttttaa

SEQ ID NO: 22045 - DNA, 20 bp, Artificial Sequence
  chemically synthesized
acttttttccttttaacagt

SEQ ID NO: 22046 - DNA, 20 bp, Artificial Sequence
  chemically synthesized
ttttttccttttaacagttg

SEQ ID NO: 22047 - DNA, 20 bp, Artificial Sequence
  chemically synthesized
tttttccttttaacagttgg

SEQ ID NO: 22048 - DNA, 20 bp, Artificial Sequence
  chemically synthesized
gaggcatctatactgtgatt

SEQ ID NO: 22049 - DNA, 20 bp, Artificial Sequence
  chemically synthesized
tctatactgtgattcagaca

SEQ ID NO: 22050 - DNA, 20 bp, Artificial Sequence
  chemically synthesized
ctatactgtgattcagacaa

SEQ ID NO: 22051 - DNA, 20 bp, Artificial Sequence
  chemically synthesized
tcagacaaaggccaaaacaa

SEQ ID NO: 22052 - DNA, 20 bp, Artificial Sequence
  chemically synthesized
gacaaaggccaaaacaacag

SEQ ID NO: 22053 - DNA, 20 bp, Artificial Sequence
  chemically synthesized
ccaaaacaacagcagatgaa

SEQ ID NO: 22054 - DNA, 20 bp, Artificial Sequence
  chemically synthesized
caaaacaacagcagatgaat

SEQ ID NO: 22055 - DNA, 20 bp, Artificial Sequence
  chemically synthesized
aaaacaacagcagatgaatg

SEQ ID NO: 22056 - DNA, 20 bp, Artificial Sequence
  chemically synthesized
aacaacagcagatgaatggg

SEQ ID NO: 22057 - DNA, 20 bp, Artificial Sequence
  chemically synthesized
caacagcagatgaatgggga

SEQ ID NO: 22058 - DNA, 20 bp, Artificial Sequence
  chemically synthesized
gggagagaactattttctga

SEQ ID NO: 22059 - DNA, 20 bp, Artificial Sequence
  chemically synthesized
ggagagaactattttctgat

SEQ ID NO: 22060 - DNA, 20 bp, Artificial Sequence
  chemically synthesized
ttctgataggtccatatttt

SEQ ID NO: 22061 - DNA, 20 bp, Artificial Sequence
  chemically synthesized
catattttgagcataatatg

SEQ ID NO: 22062 - DNA, 20 bp, Artificial Sequence
  chemically synthesized
ttgagcataatatgaagact

SEQ ID NO: 22063 - DNA, 20 bp, Artificial Sequence
  chemically synthesized
tgagcataatatgaagactc

SEQ ID NO: 22064 - DNA, 20 bp, Artificial Sequence
  chemically synthesized
gcataatatgaagactcagg

SEQ ID NO: 22065 - DNA, 20 bp, Artificial Sequence
  chemically synthesized
atatgaagactcaggtggaa

SEQ ID NO: 22066 - DNA, 20 bp, Artificial Sequence
  chemically synthesized
gaacctgtaaatgatgctgt

SEQ ID NO: 22067 - DNA, 20 bp, Artificial Sequence
  chemically synthesized
cctgtaaatgatgctgtcag

SEQ ID NO: 22068 - DNA, 20 bp, Artificial Sequence
  chemically synthesized
tgtaaatgatgctgtcagaa

SEQ ID NO: 22069 - DNA, 20 bp, Artificial Sequence
  chemically synthesized
aaatgatgctgtcagaagag

SEQ ID NO: 22070 - DNA, 20 bp, Artificial Sequence
  chemically synthesized
tgatgctgtcagaagagcag

SEQ ID NO: 22071 - DNA, 20 bp, Artificial Sequence
  chemically synthesized
gagcagtggacgcaatgaat

SEQ ID NO: 22072 - DNA, 20 bp, Artificial Sequence
  chemically synthesized
gtggacgcaatgaataagca

SEQ ID NO: 22073 - DNA, 20 bp, Artificial Sequence
  chemically synthesized
caatgaataagcatggctgc

SEQ ID NO: 22074 - DNA, 20 bp, Artificial Sequence
  chemically synthesized
acaggttcacactgttccac

SEQ ID NO: 22075 - DNA, 20 bp, Artificial Sequence
  chemically synthesized
gctgttgttttggcctttgt

SEQ ID NO: 22076 - DNA, 20 bp, Artificial Sequence
  chemically synthesized
gcaatttgtttaaagtaata

SEQ ID NO: 22077 - DNA, 20 bp, Artificial Sequence
  chemically synthesized
taaagtaataagggatggaa

SEQ ID NO: 22078 - DNA, 20 bp, Artificial Sequence
  chemically synthesized
cagatttttaaattagcatt

SEQ ID NO: 22079 - DNA, 20 bp, Artificial Sequence
  chemically synthesized
atttaggatccactaagccc

SEQ ID NO: 22080 - DNA, 20 bp, Artificial Sequence
  chemically synthesized
catattgttaagggacacca

SEQ ID NO: 22081 - DNA, 20 bp, Artificial Sequence
  chemically synthesized
ggtcaaatacctcaaaaaga

SEQ ID NO: 22082 - DNA, 20 bp, Artificial Sequence
  chemically synthesized
aaagagtctgaaaagacaat

SEQ ID NO: 22083 - DNA, 20 bp, Artificial Sequence
  chemically synthesized
cccccagtcatgtaccccct

SEQ ID NO: 22084 - DNA, 20 bp, Artificial Sequence
  chemically synthesized
tgtaagcccttaaaagggac

SEQ ID NO: 22085 - DNA, 20 bp, Artificial Sequence
  chemically synthesized
agagcttggttgttggagat

SEQ ID NO: 22086 - DNA, 20 bp, Artificial Sequence
  chemically synthesized
agtcttgcccaagctcccag

SEQ ID NO: 22087 - DNA, 20 bp, Artificial Sequence
  chemically synthesized
cttctttaactcggtgtctg

SEQ ID NO: 22088 - DNA, 20 bp, Artificial Sequence
  chemically synthesized
tgcagcttgtcctgctacac

SEQ ID NO: 22089 - DNA, 20 bp, Artificial Sequence
  chemically synthesized
aaaacacaaagccacaatat

SEQ ID NO: 22090 - DNA, 20 bp, Artificial Sequence
  chemically synthesized
atttggaaaatatgcacact

SEQ ID NO: 22091 - DNA, 20 bp, Artificial Sequence
  chemically synthesized
catcctgggggaaaattaag

SEQ ID NO: 22092 - DNA, 20 bp, Artificial Sequence
  chemically synthesized
aaaattaaggagagtatgaa

SEQ ID NO: 22093 - DNA, 20 bp, Artificial Sequence
  chemically synthesized
aattagctcatgtgtcaaat

SEQ ID NO: 22094 - DNA, 20 bp, Artificial Sequence
  chemically synthesized
gggaaagacaggctctaaaa

SEQ ID NO: 22095 - DNA, 20 bp, Artificial Sequence
  chemically synthesized
aattagatgtggcctaggca

SEQ ID NO: 22096 - DNA, 20 bp, Artificial Sequence
  chemically synthesized
tgcttctgcaccgcaaaaga

SEQ ID NO: 22097 - DNA, 20 bp, Artificial Sequence
  chemically synthesized
accgcaaaagaccgaatcaa

SEQ ID NO: 22098 - DNA, 20 bp, Artificial Sequence
  chemically synthesized
agaccgaatcaacagagtaa

SEQ ID NO: 22099 - DNA, 20 bp, Artificial Sequence
  chemically synthesized
cagagtaaacggataaccta

SEQ ID NO: 22100 - DNA, 20 bp, Artificial Sequence
  chemically synthesized
agaaaaaaaaattgcaaact

SEQ ID NO: 22101 - DNA, 20 bp, Artificial Sequence
  chemically synthesized
tgcaacaaaaggctaatata

SEQ ID NO: 22102 - DNA, 20 bp, Artificial Sequence
  chemically synthesized
agtgactgtgatggttaata

SEQ ID NO: 22103 - DNA, 20 bp, Artificial Sequence
  chemically synthesized
gtgtcaacttgattggactg

SEQ ID NO: 22104 - DNA, 20 bp, Artificial Sequence
  chemically synthesized
aaggatgcaaagtaatgatc

SEQ ID NO: 22105 - DNA, 20 bp, Artificial Sequence
  chemically synthesized
atgatcttgggtgtgtctgt

SEQ ID NO: 22106 - DNA, 20 bp, Artificial Sequence
  chemically synthesized
aaggcagacccacccttaat

SEQ ID NO: 22107 - DNA, 20 bp, Artificial Sequence
  chemically synthesized
taatcagttgccagcacagc

SEQ ID NO: 22108 - DNA, 20 bp, Artificial Sequence
  chemically synthesized
gcctacatttttctcccatg

SEQ ID NO: 22109 - DNA, 20 bp, Artificial Sequence
  chemically synthesized
ttttgggaccttgtgaacat

SEQ ID NO: 22110 - DNA, 20 bp, Artificial Sequence
  chemically synthesized
ctaatacagattttggtacc

SEQ ID NO: 22111 - DNA, 20 bp, Artificial Sequence
  chemically synthesized
caggagtggttctagaggaa

SEQ ID NO: 22112 - DNA, 20 bp, Artificial Sequence
  chemically synthesized
ttctagaggaacagaatatt

SEQ ID NO: 22113 - DNA, 20 bp, Artificial Sequence
  chemically synthesized
gaggaacagaatattaagga

SEQ ID NO: 22114 - DNA, 20 bp, Artificial Sequence
  chemically synthesized
tggagttctttcattggttt

SEQ ID NO: 22115 - DNA, 20 bp, Artificial Sequence
  chemically synthesized
ttcattggttttggggtttc

SEQ ID NO: 22116 - DNA, 20 bp, Artificial Sequence
  chemically synthesized
tccttggcatcaattgttta

SEQ ID NO: 22117 - DNA, 20 bp, Artificial Sequence
  chemically synthesized
ttcaacgcttgtgagaggca

SEQ ID NO: 22118 - DNA, 20 bp, Artificial Sequence
  chemically synthesized
aatacttttgactatatgtg

SEQ ID NO: 22119 - DNA, 20 bp, Artificial Sequence
  chemically synthesized
tgaaagaaaatgatgaactc

SEQ ID NO: 22120 - DNA, 20 bp, Artificial Sequence
  chemically synthesized
agcaagaagtagcaaacaca

SEQ ID NO: 22121 - DNA, 20 bp, Artificial Sequence
  chemically synthesized
gatgagacatttgtgggaca

SEQ ID NO: 22122 - DNA, 20 bp, Artificial Sequence
  chemically synthesized
tctacctcagtaaaatttat

SEQ ID NO: 22123 - DNA, 20 bp, Artificial Sequence
  chemically synthesized
gagatattccttctaaagtg

SEQ ID NO: 22124 - DNA, 20 bp, Artificial Sequence
  chemically synthesized
acaacgcctagtgggcctat

SEQ ID NO: 22125 - DNA, 20 bp, Artificial Sequence
  chemically synthesized
ggaggcaacatattcctgat

SEQ ID NO: 22126 - DNA, 20 bp, Artificial Sequence
  chemically synthesized
gtgttactctggcccattta

SEQ ID NO: 22127 - DNA, 20 bp, Artificial Sequence
  chemically synthesized
gatccaaaaggctgccagtt

SEQ ID NO: 22128 - DNA, 20 bp, Artificial Sequence
  chemically synthesized
aaaaggctgccagttttgag

SEQ ID NO: 22129 - DNA, 20 bp, Artificial Sequence
  chemically synthesized
ttgaggtgtcagtgccagat

SEQ ID NO: 22130 - DNA, 20 bp, Artificial Sequence
  chemically synthesized
tgtttggagcatttggcagg

SEQ ID NO: 22131 - DNA, 20 bp, Artificial Sequence
  chemically synthesized
tgaatcacagcggaggcctc

SEQ ID NO: 22132 - DNA, 20 bp, Artificial Sequence
  chemically synthesized
tggaaacgaaatatttgact

SEQ ID NO: 22133 - DNA, 20 bp, Artificial Sequence
  chemically synthesized
cctgaactgcctatcatgaa

SEQ ID NO: 22134 - DNA, 20 bp, Artificial Sequence
  chemically synthesized
actgcaccgatggtctcatg

SEQ ID NO: 22135 - DNA, 20 bp, Artificial Sequence
  chemically synthesized
gaaatttggggaagaggtat

SEQ ID NO: 22136 - DNA, 20 bp, Artificial Sequence
  chemically synthesized
caaagatattttcatcccat

SEQ ID NO: 22137 - DNA, 20 bp, Artificial Sequence
  chemically synthesized
tcccatgtgagtgctcacca

SEQ ID NO: 22138 - DNA, 20 bp, Artificial Sequence
  chemically synthesized
aatgggtgacctcagcagaa

SEQ ID NO: 22139 - DNA, 20 bp, Artificial Sequence
  chemically synthesized
aagaggattttaataatcaa

SEQ ID NO: 22140 - DNA, 20 bp, Artificial Sequence
  chemically synthesized
gattttaataatcaagtgga

SEQ ID NO: 22141 - DNA, 20 bp, Artificial Sequence
  chemically synthesized
aacaaagtggccacagttgc

SEQ ID NO: 22142 - DNA, 20 bp, Artificial Sequence
  chemically synthesized
cttgatatggcaccattcct

SEQ ID NO: 22143 - DNA, 20 bp, Artificial Sequence
  chemically synthesized
gggcagaggcttgtcctcac

SEQ ID NO: 22144 - DNA, 20 bp, Artificial Sequence
  chemically synthesized
cactggaatagacacttact

SEQ ID NO: 22145 - DNA, 20 bp, Artificial Sequence
  chemically synthesized
aatagacacttactctggat

SEQ ID NO: 22146 - DNA, 20 bp, Artificial Sequence
  chemically synthesized
tatgccaagactaccatcca

SEQ ID NO: 22147 - DNA, 20 bp, Artificial Sequence
  chemically synthesized
gactaccatccatggaatca

SEQ ID NO: 22148 - DNA, 20 bp, Artificial Sequence
  chemically synthesized
tgacagtgggctcatgctca

SEQ ID NO: 22149 - DNA, 20 bp, Artificial Sequence
  chemically synthesized
ctatcatcctgaagcagctt

SEQ ID NO: 22150 - DNA, 20 bp, Artificial Sequence
  chemically synthesized
tccagaaggctgtgtatgct

SEQ ID NO: 22151 - DNA, 20 bp, Artificial Sequence
  chemically synthesized
ggtactgtttctcccataga

SEQ ID NO: 22152 - DNA, 20 bp, Artificial Sequence
  chemically synthesized
ttctcccatagacaggattc

SEQ ID NO: 22153 - DNA, 20 bp, Artificial Sequence
  chemically synthesized
tagacaggattcacgggtcc

SEQ ID NO: 22154 - DNA, 20 bp, Artificial Sequence
  chemically synthesized
attcacgggtccaggaatca

SEQ ID NO: 22155 - DNA, 20 bp, Artificial Sequence
  chemically synthesized
ttaagtcaacaggctaagaa

SEQ ID NO: 22156 - DNA, 20 bp, Artificial Sequence
  chemically synthesized
gaggtaaggaagcgtatgca

SEQ ID NO: 22157 - DNA, 20 bp, Artificial Sequence
  chemically synthesized
atggaatataggagatccat

SEQ ID NO: 22158 - DNA, 20 bp, Artificial Sequence
  chemically synthesized
ctcttagttttaccatgtcc

SEQ ID NO: 22159 - DNA, 20 bp, Artificial Sequence
  chemically synthesized
gcaggactacaaataaaggt

SEQ ID NO: 22160 - DNA, 20 bp, Artificial Sequence
  chemically synthesized
aggtgcttgctgagggcaaa

SEQ ID NO: 22161 - DNA, 20 bp, Artificial Sequence
  chemically synthesized
tgctgagggcaaagggaata

SEQ ID NO: 22162 - DNA, 20 bp, Artificial Sequence
  chemically synthesized
atacaaggactgtaattgtc

SEQ ID NO: 22163 - DNA, 20 bp, Artificial Sequence
  chemically synthesized
tatgtaatagcatttgcaat

SEQ ID NO: 22164 - DNA, 20 bp, Artificial Sequence
  chemically synthesized
ggtgcattttcaattgcacg

SEQ ID NO: 22165 - DNA, 20 bp, Artificial Sequence
  chemically synthesized
gaagataatgtatgacctca

SEQ ID NO: 22166 - DNA, 20 bp, Artificial Sequence
  chemically synthesized
tggacttgtgatggttaata

SEQ ID NO: 22167 - DNA, 20 bp, Artificial Sequence
  chemically synthesized
aatactgagtgtcaacttga

SEQ ID NO: 22168 - DNA, 20 bp, Artificial Sequence
  chemically synthesized
aagtgtgcaaagtattgatc

SEQ ID NO: 22169 - DNA, 20 bp, Artificial Sequence
  chemically synthesized
ttgatcctgagtgtgtctgt

SEQ ID NO: 22170 - DNA, 20 bp, Artificial Sequence
  chemically synthesized
aaggcagacccacccttaat

SEQ ID NO: 22171 - DNA, 20 bp, Artificial Sequence
  chemically synthesized
taatcagttgccagtgtggc

SEQ ID NO: 22172 - DNA, 20 bp, Artificial Sequence
  chemically synthesized
gcctacatctttctcccatg

SEQ ID NO: 22173 - DNA, 20 bp, Artificial Sequence
  chemically synthesized
ttcaacatcactaataatca

SEQ ID NO: 22174 - DNA, 20 bp, Artificial Sequence
  chemically synthesized
tgatacctccttatgccagt

SEQ ID NO: 22175 - DNA, 20 bp, Artificial Sequence
  chemically synthesized
caaaaacagcagatgttggt

SEQ ID NO: 22176 - DNA, 20 bp, Artificial Sequence
  chemically synthesized
aatgcttatacactgttggt

SEQ ID NO: 22177 - DNA, 20 bp, Artificial Sequence
  chemically synthesized
tcaatcctgcaatcccacta

SEQ ID NO: 22178 - DNA, 20 bp, Artificial Sequence
  chemically synthesized
tgttcccaatagcaaagata

SEQ ID NO: 22179 - DNA, 20 bp, Artificial Sequence
  chemically synthesized
aaatgtctaccaatggacga

SEQ ID NO: 22180 - DNA, 20 bp, Artificial Sequence
  chemically synthesized
tatattactcagccataaaa

SEQ ID NO: 22181 - DNA, 20 bp, Artificial Sequence
  chemically synthesized
agccaagtgggagctaaacg

SEQ ID NO: 22182 - DNA, 20 bp, Artificial Sequence
  chemically synthesized
gatgagtaagcatagacata

SEQ ID NO: 22183 - DNA, 20 bp, Artificial Sequence
  chemically synthesized
ttgagactagagaaaggtgg

SEQ ID NO: 22184 - DNA, 20 bp, Artificial Sequence
  chemically synthesized
ctagagaaaggtgggaggat

SEQ ID NO: 22185 - DNA, 20 bp, Artificial Sequence
  chemically synthesized
atggtgaggactgaaaaact

SEQ ID NO: 22186 - DNA, 20 bp, Artificial Sequence
  chemically synthesized
gaggactgaaaaactacgga

SEQ ID NO: 22187 - DNA, 20 bp, Artificial Sequence
  chemically synthesized
gtccccacccaaatctcatc

SEQ ID NO: 22188 - DNA, 20 bp, Artificial Sequence
  chemically synthesized
taatcctcacgtgttgtggg

SEQ ID NO: 22189 - DNA, 20 bp, Artificial Sequence
  chemically synthesized
agggatttggagggaggtaa

SEQ ID NO: 22190 - DNA, 20 bp, Artificial Sequence
  chemically synthesized
ctcatgctcttctcgtgata

SEQ ID NO: 22191 - DNA, 20 bp, Artificial Sequence
  chemically synthesized
gcaagcaaaatatcacttaa

SEQ ID NO: 22192 - DNA, 20 bp, Artificial Sequence
  chemically synthesized
tcacttaatggggtaattaa

SEQ ID NO: 22193 - DNA, 20 bp, Artificial Sequence
  chemically synthesized
agggtgaagaaattgggcaa

SEQ ID NO: 22194 - DNA, 20 bp, Artificial Sequence
  chemically synthesized
ggcaaatggatgtcatgagg

SEQ ID NO: 22195 - DNA, 20 bp, Artificial Sequence
  chemically synthesized
tcagagcccaggccctaagc

SEQ ID NO: 22196 - DNA, 20 bp, Artificial Sequence
  chemically synthesized
gcccaggccctaagctggag

SEQ ID NO: 22197 - DNA, 20 bp, Artificial Sequence
  chemically synthesized
tggagtagagtgtgcaagga

SEQ ID NO: 22198 - DNA, 20 bp, Artificial Sequence
  chemically synthesized
agtgtgcaaggaaagagtaa

SEQ ID NO: 22199 - DNA, 20 bp, Artificial Sequence
  chemically synthesized
gaaagagtaataggattgaa

SEQ ID NO: 22200 - DNA, 20 bp, Artificial Sequence
  chemically synthesized
ccaggtaggaggacataggg

SEQ ID NO: 22201 - DNA, 20 bp, Artificial Sequence
  chemically synthesized
agacctccagtaaacttagg

SEQ ID NO: 22202 - DNA, 20 bp, Artificial Sequence
  chemically synthesized
actaaataataatcacatgt

SEQ ID NO: 22203 - DNA, 20 bp, Artificial Sequence
  chemically synthesized
ttgttcatgagctagagcaa

SEQ ID NO: 22204 - DNA, 20 bp, Artificial Sequence
  chemically synthesized
atgctattatatggtaccaa

SEQ ID NO: 22205 - DNA, 20 bp, Artificial Sequence
  chemically synthesized
aaaatgcaagcaattttcat

SEQ ID NO: 22206 - DNA, 20 bp, Artificial Sequence
  chemically synthesized
tacacaagctaattgtcctt

SEQ ID NO: 22207 - DNA, 20 bp, Artificial Sequence
  chemically synthesized
aagtttaaactgtcattgag

SEQ ID NO: 22208 - DNA, 20 bp, Artificial Sequence
  chemically synthesized
cagatgttatgtgatgagga

SEQ ID NO: 22209 - DNA, 20 bp, Artificial Sequence
  chemically synthesized
agaacttttctttaaagtgt

SEQ ID NO: 22210 - DNA, 20 bp, Artificial Sequence
  chemically synthesized
acaaaaatgcaaaatttcca

SEQ ID NO: 22211 - DNA, 20 bp, Artificial Sequence
  chemically synthesized
ttcatcttcatcttttccag

SEQ ID NO: 22212 - DNA, 20 bp, Artificial Sequence
  chemically synthesized
gatagtcccccatatagcct

SEQ ID NO: 22213 - DNA, 20 bp, Artificial Sequence
  chemically synthesized
gtagaaaatcccacataaga

SEQ ID NO: 22214 - DNA, 20 bp, Artificial Sequence
  chemically synthesized
tcccacataagagagaattc

SEQ ID NO: 22215 - DNA, 20 bp, Artificial Sequence
  chemically synthesized
agcaaggaagcctacccagt

SEQ ID NO: 22216 - DNA, 20 bp, Artificial Sequence
  chemically synthesized
acatctgcattatggactcc

SEQ ID NO: 22217 - DNA, 20 bp, Artificial Sequence
  chemically synthesized
tccaggaatcctagccacag

SEQ ID NO: 22218 - DNA, 20 bp, Artificial Sequence
  chemically synthesized
ctccagagaaggagctctca

SEQ ID NO: 22219 - DNA, 20 bp, Artificial Sequence
  chemically synthesized
ctgacatcccccacccacag

SEQ ID NO: 22220 - DNA, 20 bp, Artificial Sequence
  chemically synthesized
tactgctggctgctgtcacc

SEQ ID NO: 22221 - DNA, 20 bp, Artificial Sequence
  chemically synthesized
aggcattctgctgggggcct

SEQ ID NO: 22222 - DNA, 20 bp, Artificial Sequence
  chemically synthesized
gccggtgtccacacacacca

SEQ ID NO: 22223 - DNA, 20 bp, Artificial Sequence
  chemically synthesized
acctcctgcatgtgccacct

SEQ ID NO: 22224 - DNA, 20 bp, Artificial Sequence
  chemically synthesized
tgcagactgcttgggagcca

SEQ ID NO: 22225 - DNA, 20 bp, Artificial Sequence
  chemically synthesized
agcaaactgcctgaaggcca

SEQ ID NO: 22226 - DNA, 20 bp, Artificial Sequence
  chemically synthesized
cagccatggggcccaaggac

SEQ ID NO: 22227 - DNA, 20 bp, Artificial Sequence
  chemically synthesized
aagaaatatgacacttccaa

SEQ ID NO: 22228 - DNA, 20 bp, Artificial Sequence
  chemically synthesized
atttataaaattctggaaaa

SEQ ID NO: 22229 - DNA, 20 bp, Artificial Sequence
  chemically synthesized
aagaaatcagaaaaacaatt

SEQ ID NO: 22230 - DNA, 20 bp, Artificial Sequence
  chemically synthesized
tcagaaaaacaattcaggat

SEQ ID NO: 22231 - DNA, 20 bp, Artificial Sequence
  chemically synthesized
acccaagagatagatacaac

SEQ ID NO: 22232 - DNA, 20 bp, Artificial Sequence
  chemically synthesized
aaacagaaattctgtaactg

SEQ ID NO: 22233 - DNA, 20 bp, Artificial Sequence
  chemically synthesized
aatgatagaaaggaaaaaaa

SEQ ID NO: 22234 - DNA, 20 bp, Artificial Sequence
  chemically synthesized
agtcaaactgtcaaaagcca

SEQ ID NO: 22235 - DNA, 20 bp, Artificial Sequence
  chemically synthesized
cctcacaggccaggagaaga

SEQ ID NO: 22236 - DNA, 20 bp, Artificial Sequence
  chemically synthesized
tgaaagaaaaaaatgacacc

SEQ ID NO: 22237 - DNA, 20 bp, Artificial Sequence
  chemically synthesized
aacattgttcttcaaaaatg

SEQ ID NO: 22238 - DNA, 20 bp, Artificial Sequence
  chemically synthesized
tctgggcaagaaaaatttga

SEQ ID NO: 22239 - DNA, 20 bp, Artificial Sequence
  chemically synthesized
gctttacaagaaatatttaa

SEQ ID NO: 22240 - DNA, 20 bp, Artificial Sequence
  chemically synthesized
gaaagaaagagagagagaga

SEQ ID NO: 22241 - DNA, 20 bp, Artificial Sequence
  chemically synthesized
aaaaaaaaaacaaaacaacc

SEQ ID NO: 22242 - DNA, 20 bp, Artificial Sequence
  chemically synthesized
gaatcaattaacaaaatggc

SEQ ID NO: 22243 - DNA, 20 bp, Artificial Sequence
  chemically synthesized
aataatagccttgcatgtaa

SEQ ID NO: 22244 - DNA, 20 bp, Artificial Sequence
  chemically synthesized
gataaaaggaacaattcagc

SEQ ID NO: 22245 - DNA, 20 bp, Artificial Sequence
  chemically synthesized
agcaaatgttattagatata

SEQ ID NO: 22246 - DNA, 20 bp, Artificial Sequence
  chemically synthesized
attagatataaagggtgaaa

SEQ ID NO: 22247 - DNA, 20 bp, Artificial Sequence
  chemically synthesized
aatccaatacaataatagtt

SEQ ID NO: 22248 - DNA, 20 bp, Artificial Sequence
  chemically synthesized
agaaaattaacaaagaaaca

SEQ ID NO: 22249 - DNA, 20 bp, Artificial Sequence
  chemically synthesized
taaacttgactttagaccaa

SEQ ID NO: 22250 - DNA, 20 bp, Artificial Sequence
  chemically synthesized
aatatttcatccaacagcta

SEQ ID NO: 22251 - DNA, 20 bp, Artificial Sequence
  chemically synthesized
tcagcacatgacgcattccc

SEQ ID NO: 22252 - DNA, 20 bp, Artificial Sequence
  chemically synthesized
agcatcttctcagaccacaa

SEQ ID NO: 22253 - DNA, 20 bp, Artificial Sequence
  chemically synthesized
ggaaattaaacaacatgctc

SEQ ID NO: 22254 - DNA, 20 bp, Artificial Sequence
  chemically synthesized
atacaacataggaaaagcca

SEQ ID NO: 22255 - DNA, 20 bp, Artificial Sequence
  chemically synthesized
aatagagaaaaacaacaaca

SEQ ID NO: 22256 - DNA, 20 bp, Artificial Sequence
  chemically synthesized
tgttatttaaaaaagataaa

SEQ ID NO: 22257 - DNA, 20 bp, Artificial Sequence
  chemically synthesized
acacataccacctaccaaga

SEQ ID NO: 22258 - DNA, 20 bp, Artificial Sequence
  chemically synthesized
ctaccaagattgaattaaga

SEQ ID NO: 22259 - DNA, 20 bp, Artificial Sequence
  chemically synthesized
aaaacctgaacagaccagta

SEQ ID NO: 22260 - DNA, 20 bp, Artificial Sequence
  chemically synthesized
accagtaatgaataatgaaa

SEQ ID NO: 22261 - DNA, 20 bp, Artificial Sequence
  chemically synthesized
cttttaaaaattaaacagga

SEQ ID NO: 22262 - DNA, 20 bp, Artificial Sequence
  chemically synthesized
tcctgattccataaccagac

SEQ ID NO: 22263 - DNA, 20 bp, Artificial Sequence
  chemically synthesized
ctcaacaaaatactagcaaa

SEQ ID NO: 22264 - DNA, 20 bp, Artificial Sequence
  chemically synthesized
gataatacaccatgatcaag

SEQ ID NO: 22265 - DNA, 20 bp, Artificial Sequence
  chemically synthesized
tgatcaagtgggatttatac

SEQ ID NO: 22266 - DNA, 20 bp, Artificial Sequence
  chemically synthesized
aacccacagctaacatcata

SEQ ID NO: 22267 - DNA, 20 bp, Artificial Sequence
  chemically synthesized
tctaagaactgaaacaaaat

SEQ ID NO: 22268 - DNA, 20 bp, Artificial Sequence
  chemically synthesized
agctaaaaaataaaatattt

SEQ ID NO: 22269 - DNA, 20 bp, Artificial Sequence
  chemically synthesized
aaactacaaaacactgataa

SEQ ID NO: 22270 - DNA, 20 bp, Artificial Sequence
  chemically synthesized
tggagagatatcctatgttc

SEQ ID NO: 22271 - DNA, 20 bp, Artificial Sequence
  chemically synthesized
agacacttagaccaatggaa

SEQ ID NO: 22272 - DNA, 20 bp, Artificial Sequence
  chemically synthesized
agattttcaacaaaggtgac

SEQ ID NO: 22273 - DNA, 20 bp, Artificial Sequence
  chemically synthesized
aagaaatggtgctgaaaaaa

SEQ ID NO: 22274 - DNA, 20 bp, Artificial Sequence
  chemically synthesized
ctgaaaaaattggatatcca

SEQ ID NO: 22275 - DNA, 20 bp, Artificial Sequence
  chemically synthesized
cattggatatccatgtgcaa

SEQ ID NO: 22276 - DNA, 20 bp, Artificial Sequence
  chemically synthesized
aactggactgctgatatggt

SEQ ID NO: 22277 - DNA, 20 bp, Artificial Sequence
  chemically synthesized
aaatataatccccaacttct

SEQ ID NO: 22278 - DNA, 20 bp, Artificial Sequence
  chemically synthesized
cccaacttctcaggatcttg

SEQ ID NO: 22279 - DNA, 20 bp, Artificial Sequence
  chemically synthesized
agcatgtggaggctcgcatt

SEQ ID NO: 22280 - DNA, 20 bp, Artificial Sequence
  chemically synthesized
caggagacaccccaaatact

SEQ ID NO: 22281 - DNA, 20 bp, Artificial Sequence
  chemically synthesized
gagaagtttctgaccttacc

SEQ ID NO: 22282 - DNA, 20 bp, Artificial Sequence
  chemically synthesized
gtttctgaccttacctggag

SEQ ID NO: 22283 - DNA, 20 bp, Artificial Sequence
  chemically synthesized
agaaaggccctgggagctca

SEQ ID NO: 22284 - DNA, 20 bp, Artificial Sequence
  chemically synthesized
aggcatttacattactaaca

SEQ ID NO: 22285 - DNA, 20 bp, Artificial Sequence
  chemically synthesized
ggcctaaatgctccacttaa

SEQ ID NO: 22286 - DNA, 20 bp, Artificial Sequence
  chemically synthesized
catgcaaatggccaccaaaa

SEQ ID NO: 22287 - DNA, 20 bp, Artificial Sequence
  chemically synthesized
agaaagtcaacaaaaaaata

SEQ ID NO: 22288 - DNA, 20 bp, Artificial Sequence
  chemically synthesized
aaaaaaaagttcaggaccag

SEQ ID NO: 22289 - DNA, 20 bp, Artificial Sequence
  chemically synthesized
aggaccagatggattcacaa

SEQ ID NO: 22290 - DNA, 20 bp, Artificial Sequence
  chemically synthesized
attctactagacattcaaag

SEQ ID NO: 22291 - DNA, 20 bp, Artificial Sequence
  chemically synthesized
gatcaagcaggttccatgcc

SEQ ID NO: 22292 - DNA, 20 bp, Artificial Sequence
  chemically synthesized
caggttccatgccagggatg

SEQ ID NO: 22293 - DNA, 20 bp, Artificial Sequence
  chemically synthesized
aacccacagccaacataata

SEQ ID NO: 22294 - DNA, 20 bp, Artificial Sequence
  chemically synthesized
tctgagaactggaacaagac

SEQ ID NO: 22295 - DNA, 20 bp, Artificial Sequence
  chemically synthesized
gcaaagtttccagatacaag

SEQ ID NO: 22296 - DNA, 20 bp, Artificial Sequence
  chemically synthesized
acaccaacagcaaccaaatg

SEQ ID NO: 22297 - DNA, 20 bp, Artificial Sequence
  chemically synthesized
atataaaacgtactctcaag

SEQ ID NO: 22298 - DNA, 20 bp, Artificial Sequence
  chemically synthesized
cacagtgaagagacaagctg

SEQ ID NO: 22299 - DNA, 20 bp, Artificial Sequence
  chemically synthesized
atatttgcatacatttgaca

SEQ ID NO: 22300 - DNA, 20 bp, Artificial Sequence
  chemically synthesized
tttgacaaggaattaatctc

SEQ ID NO: 22301 - DNA, 20 bp, Artificial Sequence
  chemically synthesized
atctcattaaaaaattggca

SEQ ID NO: 22302 - DNA, 20 bp, Artificial Sequence
  chemically synthesized
agaagacatacaaatgcaca

SEQ ID NO: 22303 - DNA, 20 bp, Artificial Sequence
  chemically synthesized
agatatcatcttatgccagt

SEQ ID NO: 22304 - DNA, 20 bp, Artificial Sequence
  chemically synthesized
aataaataacacatgctggc

SEQ ID NO: 22305 - DNA, 20 bp, Artificial Sequence
  chemically synthesized
aagatccagcaatcttatta

SEQ ID NO: 22306 - DNA, 20 bp, Artificial Sequence
  chemically synthesized
tgggtatttatccaaaggaa

SEQ ID NO: 22307 - DNA, 20 bp, Artificial Sequence
  chemically synthesized
ttatccaaaggaaaagaatt

SEQ ID NO: 22308 - DNA, 20 bp, Artificial Sequence
  chemically synthesized
gattcacattagcaaagata

SEQ ID NO: 22309 - DNA, 20 bp, Artificial Sequence
  chemically synthesized
atcaacctaagtgtccatca

SEQ ID NO: 22310 - DNA, 20 bp, Artificial Sequence
  chemically synthesized
acctaagtgtccatcaatgg

SEQ ID NO: 22311 - DNA, 20 bp, Artificial Sequence
  chemically synthesized
aatgtggtgtatacacacaa

SEQ ID NO: 22312 - DNA, 20 bp, Artificial Sequence
  chemically synthesized
atcatttcatttgcagcaac

SEQ ID NO: 22313 - DNA, 20 bp, Artificial Sequence
  chemically synthesized
aagttaatatcatgtaggta

SEQ ID NO: 22314 - DNA, 20 bp, Artificial Sequence
  chemically synthesized
aatatcatgtaggtagagag

SEQ ID NO: 22315 - DNA, 20 bp, Artificial Sequence
  chemically synthesized
gaaacaggcagttagataga

SEQ ID NO: 22316 - DNA, 20 bp, Artificial Sequence
  chemically synthesized
tctgatgttcaatagcaaag

SEQ ID NO: 22317 - DNA, 20 bp, Artificial Sequence
  chemically synthesized
aacgataaatacttgaggtg

SEQ ID NO: 22318 - DNA, 20 bp, Artificial Sequence
  chemically synthesized
aaacttctctcttaacaagc

SEQ ID NO: 22319 - DNA, 20 bp, Artificial Sequence
  chemically synthesized
cttaacaagctagaatataa

SEQ ID NO: 22320 - DNA, 20 bp, Artificial Sequence
  chemically synthesized
tgaatgcaagagcatagaga

SEQ ID NO: 22321 - DNA, 20 bp, Artificial Sequence
  chemically synthesized
gaaaatacttaatatcatta

SEQ ID NO: 22322 - DNA, 20 bp, Artificial Sequence
  chemically synthesized
ttttaccacagcgtaggtca

SEQ ID NO: 22323 - DNA, 20 bp, Artificial Sequence
  chemically synthesized
atcactatttcaaagaagta

SEQ ID NO: 22324 - DNA, 20 bp, Artificial Sequence
  chemically synthesized
gaatagatatcagccaaaat

SEQ ID NO: 22325 - DNA, 20 bp, Artificial Sequence
  chemically synthesized
aggggcctagacatagcatg

SEQ ID NO: 22326 - DNA, 20 bp, Artificial Sequence
  chemically synthesized
gcatgctgaatgaaaaggaa

SEQ ID NO: 22327 - DNA, 20 bp, Artificial Sequence
  chemically synthesized
tgagctaacttcctcatttt

SEQ ID NO: 22328 - DNA, 20 bp, Artificial Sequence
  chemically synthesized
aagaaataagctaataccta

SEQ ID NO: 22329 - DNA, 20 bp, Artificial Sequence
  chemically synthesized
attaaatgctaggcacagtt

SEQ ID NO: 22330 - DNA, 20 bp, Artificial Sequence
  chemically synthesized
caacattacccaggtgatgg

SEQ ID NO: 22331 - DNA, 20 bp, Artificial Sequence
  chemically synthesized
tacccaggtgatggtggagt

SEQ ID NO: 22332 - DNA, 20 bp, Artificial Sequence
  chemically synthesized
gacagcaagatagtaagtaa

SEQ ID NO: 22333 - DNA, 20 bp, Artificial Sequence
  chemically synthesized
aggaatggagcaacaaattg

SEQ ID NO: 22334 - DNA, 20 bp, Artificial Sequence
  chemically synthesized
ttttgcttgtttgtttgaaa

SEQ ID NO: 22335 - DNA, 20 bp, Artificial Sequence
  chemically synthesized
tctcactctgtcaccccggc

SEQ ID NO: 22336 - DNA, 20 bp, Artificial Sequence
  chemically synthesized
ctgaagcctcactagaacgc

SEQ ID NO: 22337 - DNA, 20 bp, Artificial Sequence
  chemically synthesized
tttttaaatttctgtagaaa

SEQ ID NO: 22338 - DNA, 20 bp, Artificial Sequence
  chemically synthesized
aaagtgttgagattacaggt

SEQ ID NO: 22339 - DNA, 20 bp, Artificial Sequence
  chemically synthesized
aatcaccatgctgggccttg

SEQ ID NO: 22340 - DNA, 20 bp, Artificial Sequence
  chemically synthesized
atggatctttaaaagtggtg

SEQ ID NO: 22341 - DNA, 20 bp, Artificial Sequence
  chemically synthesized
aaacatcgttaggtctcggg

SEQ ID NO: 22342 - DNA, 20 bp, Artificial Sequence
  chemically synthesized
tcgttaggtctcgggaagga

SEQ ID NO: 22343 - DNA, 20 bp, Artificial Sequence
  chemically synthesized
tctgtgttaacaaaaaacag

SEQ ID NO: 22344 - DNA, 20 bp, Artificial Sequence
  chemically synthesized
tctgaaggtttagaaactcc

SEQ ID NO: 22345 - DNA, 20 bp, Artificial Sequence
  chemically synthesized
ctttagaactcctgtcctag

SEQ ID NO: 22346 - DNA, 20 bp, Artificial Sequence
  chemically synthesized
accactttgactctagtttt

SEQ ID NO: 22347 - DNA, 20 bp, Artificial Sequence
  chemically synthesized
ccttaacatgttaatttctc

SEQ ID NO: 22348 - DNA, 20 bp, Artificial Sequence
  chemically synthesized
agtaagacctgggcaaagga

SEQ ID NO: 22349 - DNA, 20 bp, Artificial Sequence
  chemically synthesized
tttgggcaaaactttccatc

SEQ ID NO: 22350 - DNA, 20 bp, Artificial Sequence
  chemically synthesized
acttagtacttcccactact

SEQ ID NO: 22351 - DNA, 20 bp, Artificial Sequence
  chemically synthesized
gtacttcccactactgtgga

SEQ ID NO: 22352 - DNA, 20 bp, Artificial Sequence
  chemically synthesized
tttgtcaattcttgaagatt

SEQ ID NO: 22353 - DNA, 20 bp, Artificial Sequence
  chemically synthesized
tgatacctaatagacacttg

SEQ ID NO: 22354 - DNA, 20 bp, Artificial Sequence
  chemically synthesized
agacacttgatgaatcctta

SEQ ID NO: 22355 - DNA, 20 bp, Artificial Sequence
  chemically synthesized
aatccttactgaataataaa

SEQ ID NO: 22356 - DNA, 20 bp, Artificial Sequence
  chemically synthesized
ctgaataataaaatggatta

SEQ ID NO: 22357 - DNA, 20 bp, Artificial Sequence
  chemically synthesized
aaaaggttattttgaagtct

SEQ ID NO: 22358 - DNA, 20 bp, Artificial Sequence
  chemically synthesized
tgggcaaaattctggcagca

SEQ ID NO: 22359 - DNA, 20 bp, Artificial Sequence
  chemically synthesized
ctaagaaaccttttgttttc

SEQ ID NO: 22360 - DNA, 20 bp, Artificial Sequence
  chemically synthesized
aaccttttgttttcttggat

SEQ ID NO: 22361 - DNA, 20 bp, Artificial Sequence
  chemically synthesized
aaaacatggtaagataactg

SEQ ID NO: 22362 - DNA, 20 bp, Artificial Sequence
  chemically synthesized
agaaactgttattcagttta

SEQ ID NO: 22363 - DNA, 20 bp, Artificial Sequence
  chemically synthesized
tcttacataatagtaaaaaa

SEQ ID NO: 22364 - DNA, 20 bp, Artificial Sequence
  chemically synthesized
cttgatcattaaatacctct

SEQ ID NO: 22365 - DNA, 20 bp, Artificial Sequence
  chemically synthesized
caatttgctctatgaactgg

SEQ ID NO: 22366 - DNA, 20 bp, Artificial Sequence
  chemically synthesized
tgctctatgaactggaggag

SEQ ID NO: 22367 - DNA, 20 bp, Artificial Sequence
  chemically synthesized
tatagtggcaatgtattatt

SEQ ID NO: 22368 - DNA, 20 bp, Artificial Sequence
  chemically synthesized
ataagtattaaaggcagctt

SEQ ID NO: 22369 - DNA, 20 bp, Artificial Sequence
  chemically synthesized
ttttatttcaaggcatactc

SEQ ID NO: 22370 - DNA, 20 bp, Artificial Sequence
  chemically synthesized
ttaaaaacacatgctcattt

SEQ ID NO: 22371 - DNA, 20 bp, Artificial Sequence
  chemically synthesized
ggataaagatctctgaggaa

SEQ ID NO: 22372 - DNA, 20 bp, Artificial Sequence
  chemically synthesized
ttctttctcactaaactaca

SEQ ID NO: 22373 - DNA, 20 bp, Artificial Sequence
  chemically synthesized
tgacttttaattttgatttt

SEQ ID NO: 22374 - DNA, 20 bp, Artificial Sequence
  chemically synthesized
ctttgaacagttagtataag

SEQ ID NO: 22375 - DNA, 20 bp, Artificial Sequence
  chemically synthesized
taaggtgaattctgattttt

SEQ ID NO: 22376 - DNA, 20 bp, Artificial Sequence
  chemically synthesized
gtcttgacacttttaaacta

SEQ ID NO: 22377 - DNA, 20 bp, Artificial Sequence
  chemically synthesized
ctagagagtataaacccaca

SEQ ID NO: 22378 - DNA, 20 bp, Artificial Sequence
  chemically synthesized
ttttgccttttgagaagctc

SEQ ID NO: 22379 - DNA, 20 bp, Artificial Sequence
  chemically synthesized
acattaattccaagctaatt

SEQ ID NO: 22380 - DNA, 20 bp, Artificial Sequence
  chemically synthesized
gcatttcatataattactaa

SEQ ID NO: 22381 - DNA, 20 bp, Artificial Sequence
  chemically synthesized
atataattactaacagaatg

SEQ ID NO: 22382 - DNA, 20 bp, Artificial Sequence
  chemically synthesized
tatttctatgttgtcataat

SEQ ID NO: 22383 - DNA, 20 bp, Artificial Sequence
  chemically synthesized
ctagcaattggttatcacta

SEQ ID NO: 22384 - DNA, 20 bp, Artificial Sequence
  chemically synthesized
cccactggggaagcccaccc

SEQ ID NO: 22385 - DNA, 20 bp, Artificial Sequence
  chemically synthesized
cacccagggatgttacagag

SEQ ID NO: 22386 - DNA, 20 bp, Artificial Sequence
  chemically synthesized
tacagtcctccgagactcct

SEQ ID NO: 22387 - DNA, 20 bp, Artificial Sequence
  chemically synthesized
gaacttacaggcacaaaagt

SEQ ID NO: 22388 - DNA, 20 bp, Artificial Sequence
  chemically synthesized
ggcacaaaagttagagttgg

SEQ ID NO: 22389 - DNA, 20 bp, Artificial Sequence
  chemically synthesized
aggctttggtagcttctctt

SEQ ID NO: 22390 - DNA, 20 bp, Artificial Sequence
  chemically synthesized
gaaatcttatgtgcttccca

SEQ ID NO: 22391 - DNA, 20 bp, Artificial Sequence
  chemically synthesized
acagaattcctggtggaagg

SEQ ID NO: 22392 - DNA, 20 bp, Artificial Sequence
  chemically synthesized
gaaagacgagaaagaggagg

SEQ ID NO: 22393 - DNA, 20 bp, Artificial Sequence
  chemically synthesized
gaagaattcctccttccacc

SEQ ID NO: 22394 - DNA, 20 bp, Artificial Sequence
  chemically synthesized
gcctgtaagttctcttctcc

SEQ ID NO: 22395 - DNA, 20 bp, Artificial Sequence
  chemically synthesized
ggattacaactaattgaaac

SEQ ID NO: 22396 - DNA, 20 bp, Artificial Sequence
  chemically synthesized
taattgaaacaggaattcaa

SEQ ID NO: 22397 - DNA, 20 bp, Artificial Sequence
  chemically synthesized
gagtctcggaggactgtaag

SEQ ID NO: 22398 - DNA, 20 bp, Artificial Sequence
  chemically synthesized
gatccctctctgtaacatcc

SEQ ID NO: 22399 - DNA, 20 bp, Artificial Sequence
  chemically synthesized
agtcgaagaacttcctgtgg

SEQ ID NO: 22400 - DNA, 20 bp, Artificial Sequence
  chemically synthesized
ggtttgtactgctcctgaag

SEQ ID NO: 22401 - DNA, 20 bp, Artificial Sequence
  chemically synthesized
acaccttcactaggtgactg

SEQ ID NO: 22402 - DNA, 20 bp, Artificial Sequence
  chemically synthesized
cactaggtgactgaggaatg

SEQ ID NO: 22403 - DNA, 20 bp, Artificial Sequence
  chemically synthesized
ctagtgataaccaattgcta

SEQ ID NO: 22404 - DNA, 20 bp, Artificial Sequence
  chemically synthesized
gagtgaggaaagcatttaaa

SEQ ID NO: 22405 - DNA, 20 bp, Artificial Sequence
  chemically synthesized
cttgtctattacaacaggct

SEQ ID NO: 22406 - DNA, 20 bp, Artificial Sequence
  chemically synthesized
gaaaatattagccattgcca

SEQ ID NO: 22407 - DNA, 20 bp, Artificial Sequence
  chemically synthesized
agtaattatatgaaatgctt

SEQ ID NO: 22408 - DNA, 20 bp, Artificial Sequence
  chemically synthesized
tttcatattcacaattagct

SEQ ID NO: 22409 - DNA, 20 bp, Artificial Sequence
  chemically synthesized
gcaaaatactgtgctccttt

SEQ ID NO: 22410 - DNA, 20 bp, Artificial Sequence
  chemically synthesized
cttcaatgctatgcttatgt

SEQ ID NO: 22411 - DNA, 20 bp, Artificial Sequence
  chemically synthesized
tcaaattgataaaacaattt

SEQ ID NO: 22412 - DNA, 20 bp, Artificial Sequence
  chemically synthesized
gaggtataacctcatctgtg

SEQ ID NO: 22413 - DNA, 20 bp, Artificial Sequence
  chemically synthesized
aaattataaaacaattcctt

SEQ ID NO: 22414 - DNA, 20 bp, Artificial Sequence
  chemically synthesized
aaaagtcatggttttgaagg

SEQ ID NO: 22415 - DNA, 20 bp, Artificial Sequence
  chemically synthesized
ctgagttcctcaagatcttg

SEQ ID NO: 22416 - DNA, 20 bp, Artificial Sequence
  chemically synthesized
agaatcaagccaactgattg

SEQ ID NO: 22417 - DNA, 20 bp, Artificial Sequence
  chemically synthesized
atgtctattacagtaatcta

SEQ ID NO: 22418 - DNA, 20 bp, Artificial Sequence
  chemically synthesized
aaaggatctgaaataataac

SEQ ID NO: 22419 - DNA, 20 bp, Artificial Sequence
  chemically synthesized
tggcatgcattctgaaaaat

SEQ ID NO: 22420 - DNA, 20 bp, Artificial Sequence
  chemically synthesized
tttgcctatgtagaagtgga

SEQ ID NO: 22421 - DNA, 20 bp, Artificial Sequence
  chemically synthesized
ttctctgtagtttagtgaga

SEQ ID NO: 22422 - DNA, 20 bp, Artificial Sequence
  chemically synthesized
cagaaccatctctatcacat

SEQ ID NO: 22423 - DNA, 20 bp, Artificial Sequence
  chemically synthesized
tctctatcacatgtgaatcc

SEQ ID NO: 22424 - DNA, 20 bp, Artificial Sequence
  chemically synthesized
tgaaataaaagttttctcta

SEQ ID NO: 22425 - DNA, 20 bp, Artificial Sequence
  chemically synthesized
ctcaaggacatagcttattg

SEQ ID NO: 22426 - DNA, 20 bp, Artificial Sequence
  chemically synthesized
ggaagggacttgttagcact

SEQ ID NO: 22427 - DNA, 20 bp, Artificial Sequence
  chemically synthesized
cagtgaaactaagttatttt

SEQ ID NO: 22428 - DNA, 20 bp, Artificial Sequence
  chemically synthesized
agtagcatgtgtgttgatct

SEQ ID NO: 22429 - DNA, 20 bp, Artificial Sequence
  chemically synthesized
tggtacatagaaaatgctca

SEQ ID NO: 22430 - DNA, 20 bp, Artificial Sequence
  chemically synthesized
ggtttgagattttcatatag

SEQ ID NO: 22431 - DNA, 20 bp, Artificial Sequence
  chemically synthesized
gtttctttaaatttaatgat

SEQ ID NO: 22432 - DNA, 20 bp, Artificial Sequence
  chemically synthesized
tatgaggtatcttagagatc

SEQ ID NO: 22433 - DNA, 20 bp, Artificial Sequence
  chemically synthesized
tttaatgatcaagcaaatgg

SEQ ID NO: 22434 - DNA, 20 bp, Artificial Sequence
  chemically synthesized
gcaaatggcagagttaggac

SEQ ID NO: 22435 - DNA, 20 bp, Artificial Sequence
  chemically synthesized
tcacttttttactattatgt

SEQ ID NO: 22436 - DNA, 20 bp, Artificial Sequence
  chemically synthesized
agtacttgcagtcaaaggtc

SEQ ID NO: 22437 - DNA, 20 bp, Artificial Sequence
  chemically synthesized
ctgaaaaagaaccccttaaa

SEQ ID NO: 22438 - DNA, 20 bp, Artificial Sequence
  chemically synthesized
aactgaataacagtttcttc

SEQ ID NO: 22439 - DNA, 20 bp, Artificial Sequence
  chemically synthesized
acagtttcttcatgaataaa

SEQ ID NO: 22440 - DNA, 20 bp, Artificial Sequence
  chemically synthesized
aacaaaaggtttcttaggag

SEQ ID NO: 22441 - DNA, 20 bp, Artificial Sequence
  chemically synthesized
ggagaagaatcccttgctgc

SEQ ID NO: 22442 - DNA, 20 bp, Artificial Sequence
  chemically synthesized
gtgaaaaacataacagatga

SEQ ID NO: 22443 - DNA, 20 bp, Artificial Sequence
  chemically synthesized
tgagagagtcacagttagtt

SEQ ID NO: 22444 - DNA, 20 bp, Artificial Sequence
  chemically synthesized
aatccattttattattcagt

SEQ ID NO: 22445 - DNA, 20 bp, Artificial Sequence
  chemically synthesized
gcactgagaggcgagggaga

SEQ ID NO: 22446 - DNA, 20 bp, Artificial Sequence
  chemically synthesized
gaggcgagggagatagagtt

SEQ ID NO: 22447 - DNA, 20 bp, Artificial Sequence
  chemically synthesized
agaactgattcttaatcttc

SEQ ID NO: 22448 - DNA, 20 bp, Artificial Sequence
  chemically synthesized
atacaatacagtcaaatgtg

SEQ ID NO: 22449 - DNA, 20 bp, Artificial Sequence
  chemically synthesized
taagactatacagtgtaccg

SEQ ID NO: 22450 - DNA, 20 bp, Artificial Sequence
  chemically synthesized
atacagtgtaccgtggaatg

SEQ ID NO: 22451 - DNA, 20 bp, Artificial Sequence
  chemically synthesized
gatgtttgagctgacacttg

SEQ ID NO: 22452 - DNA, 20 bp, Artificial Sequence
  chemically synthesized
gctcagagagggaaaaggag

SEQ ID NO: 22453 - DNA, 20 bp, Artificial Sequence
  chemically synthesized
actagattgtgaagctcagg

SEQ ID NO: 22454 - DNA, 20 bp, Artificial Sequence
  chemically synthesized
agggggagttaatagcctta

SEQ ID NO: 22455 - DNA, 20 bp, Artificial Sequence
  chemically synthesized
gccttaaggagttttgtctc

SEQ ID NO: 22456 - DNA, 20 bp, Artificial Sequence
  chemically synthesized
ttgtctccagggtatgaaca

SEQ ID NO: 22457 - DNA, 20 bp, Artificial Sequence
  chemically synthesized
cagggtatgaacaatgaatg

SEQ ID NO: 22458 - DNA, 20 bp, Artificial Sequence
  chemically synthesized
aattagactgtggtgtgacc

SEQ ID NO: 22459 - DNA, 20 bp, Artificial Sequence
  chemically synthesized
tctggagaaattaacatgtt

SEQ ID NO: 22460 - DNA, 20 bp, Artificial Sequence
  chemically synthesized
attaacatgttaaggatatt

SEQ ID NO: 22461 - DNA, 20 bp, Artificial Sequence
  chemically synthesized
cacataatgaaagttaattt

SEQ ID NO: 22462 - DNA, 20 bp, Artificial Sequence
  chemically synthesized
tcagtcttgacactacacct

SEQ ID NO: 22463 - DNA, 20 bp, Artificial Sequence
  chemically synthesized
atggtacaagtggcacaggg

SEQ ID NO: 22464 - DNA, 20 bp, Artificial Sequence
  chemically synthesized
cagggaagaattcagaaaac

SEQ ID NO: 22465 - DNA, 20 bp, Artificial Sequence
  chemically synthesized
ttatggaagaaattataata

SEQ ID NO: 22466 - DNA, 20 bp, Artificial Sequence
  chemically synthesized
tgagtccactcttctaggac

SEQ ID NO: 22467 - DNA, 20 bp, Artificial Sequence
  chemically synthesized
ctttgatataagtgaactca

SEQ ID NO: 22468 - DNA, 20 bp, Artificial Sequence
  chemically synthesized
tttctctagagcaaaatgaa

SEQ ID NO: 22469 - DNA, 20 bp, Artificial Sequence
  chemically synthesized
acttttcaaggctgaggtgg

SEQ ID NO: 22470 - DNA, 20 bp, Artificial Sequence
  chemically synthesized
tgggagaattgtttgagacc

SEQ ID NO: 22471 - DNA, 20 bp, Artificial Sequence
  chemically synthesized
gaattgtttgagaccaagag

SEQ ID NO: 22472 - DNA, 20 bp, Artificial Sequence
  chemically synthesized
tacctgagaggctaaagcag

SEQ ID NO: 22473 - DNA, 20 bp, Artificial Sequence
  chemically synthesized
ggctaaagcaggaggatcaa

SEQ ID NO: 22474 - DNA, 20 bp, Artificial Sequence
  chemically synthesized
ttgcaccattgcactccagc

SEQ ID NO: 22475 - DNA, 20 bp, Artificial Sequence
  chemically synthesized
ttgcactccagccggggtga

SEQ ID NO: 22476 - DNA, 20 bp, Artificial Sequence
  chemically synthesized
taaagtcagactgcatgatt

SEQ ID NO: 22477 - DNA, 20 bp, Artificial Sequence
  chemically synthesized
aattccaactccaccatcac

SEQ ID NO: 22478 - DNA, 20 bp, Artificial Sequence
  chemically synthesized
ttgtcataccagctttcact

SEQ ID NO: 22479 - DNA, 20 bp, Artificial Sequence
  chemically synthesized
cataccagctttcactttga

SEQ ID NO: 22480 - DNA, 20 bp, Artificial Sequence
  chemically synthesized
catcaatgttacttcaatca

SEQ ID NO: 22481 - DNA, 20 bp, Artificial Sequence
  chemically synthesized
atcacgggatgcatagtaat

SEQ ID NO: 22482 - DNA, 20 bp, Artificial Sequence
  chemically synthesized
tctttgccctaattactgat

SEQ ID NO: 22483 - DNA, 20 bp, Artificial Sequence
  chemically synthesized
caggtggtcttgttcaaagt

SEQ ID NO: 22484 - DNA, 20 bp, Artificial Sequence
  chemically synthesized
cagctgctttgattttaact

SEQ ID NO: 22485 - DNA, 20 bp, Artificial Sequence
  chemically synthesized
gcaactgtgttttggaacag

SEQ ID NO: 22486 - DNA, 20 bp, Artificial Sequence
  chemically synthesized
agtgttgccagatgacgact

SEQ ID NO: 22487 - DNA, 20 bp, Artificial Sequence
  chemically synthesized
agtattttcttttttaatgt

SEQ ID NO: 22488 - DNA, 20 bp, Artificial Sequence
  chemically synthesized
tatacctcaaatatgaaaat

SEQ ID NO: 22489 - DNA, 20 bp, Artificial Sequence
  chemically synthesized
aaaaagggctaaaatggtgt

SEQ ID NO: 22490 - DNA, 20 bp, Artificial Sequence
  chemically synthesized
taatgatcaagtcaggtatt

SEQ ID NO: 22491 - DNA, 20 bp, Artificial Sequence
  chemically synthesized
atgattttatatttgtatgg

SEQ ID NO: 22492 - DNA, 20 bp, Artificial Sequence
  chemically synthesized
gattccatatctttgctaat

SEQ ID NO: 22493 - DNA, 20 bp, Artificial Sequence
  chemically synthesized
accagtatctgtttattatt

SEQ ID NO: 22494 - DNA, 20 bp, Artificial Sequence
  chemically synthesized
ttattctgaattcttttcct

SEQ ID NO: 22495 - DNA, 20 bp, Artificial Sequence
  chemically synthesized
aatacccagtaataagattg

SEQ ID NO: 22496 - DNA, 20 bp, Artificial Sequence
  chemically synthesized
catgcttaccaatagtgcct

SEQ ID NO: 22497 - DNA, 20 bp, Artificial Sequence
  chemically synthesized
gattatttgtttttccactg

SEQ ID NO: 22498 - DNA, 20 bp, Artificial Sequence
  chemically synthesized
tttttccactgttgagttgt

SEQ ID NO: 22499 - DNA, 20 bp, Artificial Sequence
  chemically synthesized
ttaagtctttaatccatctt

SEQ ID NO: 22500 - DNA, 20 bp, Artificial Sequence
  chemically synthesized
cgttttatatggcaataaat

SEQ ID NO: 22501 - DNA, 20 bp, Artificial Sequence
  chemically synthesized
atttttgcatctattgtaca

SEQ ID NO: 22502 - DNA, 20 bp, Artificial Sequence
  chemically synthesized
tgcatctattgtacaagggg

SEQ ID NO: 22503 - DNA, 20 bp, Artificial Sequence
  chemically synthesized
tggttgctgttggtgtatag

SEQ ID NO: 22504 - DNA, 20 bp, Artificial Sequence
  chemically synthesized
tcttgtatctggaaactttg

SEQ ID NO: 22505 - DNA, 20 bp, Artificial Sequence
  chemically synthesized
cagttctaggagctttctgg

SEQ ID NO: 22506 - DNA, 20 bp, Artificial Sequence
  chemically synthesized
gagctttctggaggagtctt

SEQ ID NO: 22507 - DNA, 20 bp, Artificial Sequence
  chemically synthesized
ttgacttcctctttactgat

SEQ ID NO: 22508 - DNA, 20 bp, Artificial Sequence
  chemically synthesized
cttccagtactatgttgaag

SEQ ID NO: 22509 - DNA, 20 bp, Artificial Sequence
  chemically synthesized
ctatgttgaagaggagtggt

SEQ ID NO: 22510 - DNA, 20 bp, Artificial Sequence
  chemically synthesized
gtcttgttccagttctcaga

SEQ ID NO: 22511 - DNA, 20 bp, Artificial Sequence
  chemically synthesized
cattcaatattatgttggct

SEQ ID NO: 22512 - DNA, 20 bp, Artificial Sequence
  chemically synthesized
attttaatcataaatgtatg

SEQ ID NO: 22513 - DNA, 20 bp, Artificial Sequence
  chemically synthesized
taaatgtatgctggattttg

SEQ ID NO: 22514 - DNA, 20 bp, Artificial Sequence
  chemically synthesized
atggaacctgcttgatcatg

SEQ ID NO: 22515 - DNA, 20 bp, Artificial Sequence
  chemically synthesized
attatctttttgttatgttg

SEQ ID NO: 22516 - DNA, 20 bp, Artificial Sequence
  chemically synthesized
tggttatctagtattttgtt

SEQ ID NO: 22517 - DNA, 20 bp, Artificial Sequence
  chemically synthesized
ttggtgtgatgctggcttca

SEQ ID NO: 22518 - DNA, 20 bp, Artificial Sequence
  chemically synthesized
tgtgatgctggcttcataga

SEQ ID NO: 22519 - DNA, 20 bp, Artificial Sequence
  chemically synthesized
ttccttctttatctgtcttg

SEQ ID NO: 22520 - DNA, 20 bp, Artificial Sequence
  chemically synthesized
agatggggaccaattcctct

SEQ ID NO: 22521 - DNA, 20 bp, Artificial Sequence
  chemically synthesized
attcctctttgaatgtctag

SEQ ID NO: 22522 - DNA, 20 bp, Artificial Sequence
  chemically synthesized
atgtctagtagaattctgtt

SEQ ID NO: 22523 - DNA, 20 bp, Artificial Sequence
  chemically synthesized
ggagaaatttccacgcgctg

SEQ ID NO: 22524 - DNA, 20 bp, Artificial Sequence
  chemically synthesized
aatttccacgcgctgttgaa

SEQ ID NO: 22525 - DNA, 20 bp, Artificial Sequence
  chemically synthesized
gaatgtgtgttctgtggtta

SEQ ID NO: 22526 - DNA, 20 bp, Artificial Sequence
  chemically synthesized
aatgcctggctatgccaggc

SEQ ID NO: 22527 - DNA, 20 bp, Artificial Sequence
  chemically synthesized
agaccttcagtttctccagt

SEQ ID NO: 22528 - DNA, 20 bp, Artificial Sequence
  chemically synthesized
ggagtgtgtgtttaggagag

SEQ ID NO: 22529 - DNA, 20 bp, Artificial Sequence
  chemically synthesized
gttggggcactcacagtatt

SEQ ID NO: 22530 - DNA, 20 bp, Artificial Sequence
  chemically synthesized
cacagtatttggggtgtctc

SEQ ID NO: 22531 - DNA, 20 bp, Artificial Sequence
  chemically synthesized
ggagcaatctacttccttca

SEQ ID NO: 22532 - DNA, 20 bp, Artificial Sequence
  chemically synthesized
ctacttccttcagagggtct

SEQ ID NO: 22533 - DNA, 20 bp, Artificial Sequence
  chemically synthesized
agagggtctgtgggtcctct

SEQ ID NO: 22534 - DNA, 20 bp, Artificial Sequence
  chemically synthesized
ccacatgctgctctgtccat

SEQ ID NO: 22535 - DNA, 20 bp, Artificial Sequence
  chemically synthesized
cgccaagatcctgagaagtt

SEQ ID NO: 22536 - DNA, 20 bp, Artificial Sequence
  chemically synthesized
ccagttttattcttttgcac

SEQ ID NO: 22537 - DNA, 20 bp, Artificial Sequence
  chemically synthesized
cttttgcacatggatatcca

SEQ ID NO: 22538 - DNA, 20 bp, Artificial Sequence
  chemically synthesized
aatctgttggctataaatat

SEQ ID NO: 22539 - DNA, 20 bp, Artificial Sequence
  chemically synthesized
ctagcattgttcttttttca

SEQ ID NO: 22540 - DNA, 20 bp, Artificial Sequence
  chemically synthesized
ctattttgatagcggtcata

SEQ ID NO: 22541 - DNA, 20 bp, Artificial Sequence
  chemically synthesized
tatagaatctgtagattgct

SEQ ID NO: 22542 - DNA, 20 bp, Artificial Sequence
  chemically synthesized
atttttctgatccatgaaca

SEQ ID NO: 22543 - DNA, 20 bp, Artificial Sequence
  chemically synthesized
tatcagtgttttgtagtttt

SEQ ID NO: 22544 - DNA, 20 bp, Artificial Sequence
  chemically synthesized
tattttttagctattgtaaa

SEQ ID NO: 22545 - DNA, 20 bp, Artificial Sequence
  chemically synthesized
ttttgtctcctgtaacttta

SEQ ID NO: 22546 - DNA, 20 bp, Artificial Sequence
  chemically synthesized
tgaatttatttttcagcgct

SEQ ID NO: 22547 - DNA, 20 bp, Artificial Sequence
  chemically synthesized
cagcgctaagagtgctttgg

SEQ ID NO: 22548 - DNA, 20 bp, Artificial Sequence
  chemically synthesized
ctaggacttccagtattata

SEQ ID NO: 22549 - DNA, 20 bp, Artificial Sequence
  chemically synthesized
cttccagtattatattgaat

SEQ ID NO: 22550 - DNA, 20 bp, Artificial Sequence
  chemically synthesized
aattcagtatgatgttagct

SEQ ID NO: 22551 - DNA, 20 bp, Artificial Sequence
  chemically synthesized
gcagatagtttttatcatga

SEQ ID NO: 22552 - DNA, 20 bp, Artificial Sequence
  chemically synthesized
tgatcatggtgtattatctt

SEQ ID NO: 22553 - DNA, 20 bp, Artificial Sequence
  chemically synthesized
attatcttttggatgtactg

SEQ ID NO: 22554 - DNA, 20 bp, Artificial Sequence
  chemically synthesized
cagtttgctagtattttgtt

SEQ ID NO: 22555 - DNA, 20 bp, Artificial Sequence
  chemically synthesized
tttcacacctatgttccatc

SEQ ID NO: 22556 - DNA, 20 bp, Artificial Sequence
  chemically synthesized
cttgcatccttgtctggtta

SEQ ID NO: 22557 - DNA, 20 bp, Artificial Sequence
  chemically synthesized
tccttgtctggttatggaat

SEQ ID NO: 22558 - DNA, 20 bp, Artificial Sequence
  chemically synthesized
tcaggataatactggcctca

SEQ ID NO: 22559 - DNA, 20 bp, Artificial Sequence
  chemically synthesized
gataatactggcctcagaga

SEQ ID NO: 22560 - DNA, 20 bp, Artificial Sequence
  chemically synthesized
gcctcagagaatgagttagg

SEQ ID NO: 22561 - DNA, 20 bp, Artificial Sequence
  chemically synthesized
ccttcctgtttaatttttaa

SEQ ID NO: 22562 - DNA, 20 bp, Artificial Sequence
  chemically synthesized
tttctttccttctgctagtt

SEQ ID NO: 22563 - DNA, 20 bp, Artificial Sequence
  chemically synthesized
ctaacatatggtgtatcctg

SEQ ID NO: 22564 - DNA, 20 bp, Artificial Sequence
  chemically synthesized
ataaatatattctgtagctg

SEQ ID NO: 22565 - DNA, 20 bp, Artificial Sequence
  chemically synthesized
gatctatctgatgctgagat

SEQ ID NO: 22566 - DNA, 20 bp, Artificial Sequence
  chemically synthesized
aatccccaactattattgta

SEQ ID NO: 22567 - DNA, 20 bp, Artificial Sequence
  chemically synthesized
ataacatttgctttacatat

SEQ ID NO: 22568 - DNA, 20 bp, Artificial Sequence
  chemically synthesized
catatctggatgctctggtg

SEQ ID NO: 22569 - DNA, 20 bp, Artificial Sequence
  chemically synthesized
tggatgctctggtgttgagt

SEQ ID NO: 22570 - DNA, 20 bp, Artificial Sequence
  chemically synthesized
tggtgttgagtgtgaatgtt

SEQ ID NO: 22571 - DNA, 20 bp, Artificial Sequence
  chemically synthesized
agaattgttatatactcttg

SEQ ID NO: 22572 - DNA, 20 bp, Artificial Sequence
  chemically synthesized
ttcttataggcagcttacaa

SEQ ID NO: 22573 - DNA, 20 bp, Artificial Sequence
  chemically synthesized
attttctgtagtggtaacgt

SEQ ID NO: 22574 - DNA, 20 bp, Artificial Sequence
  chemically synthesized
gtaaagccagtctagtgata

SEQ ID NO: 22575 - DNA, 20 bp, Artificial Sequence
  chemically synthesized
atttttgaagaacaatgttg

SEQ ID NO: 22576 - DNA, 20 bp, Artificial Sequence
  chemically synthesized
catttttttctttcactatt

SEQ ID NO: 22577 - DNA, 20 bp, Artificial Sequence
  chemically synthesized
agacattttgcttgctgttt

SEQ ID NO: 22578 - DNA, 20 bp, Artificial Sequence
  chemically synthesized
ctttttgcattatattattt

SEQ ID NO: 22579 - DNA, 20 bp, Artificial Sequence
  chemically synthesized
aatttctgattttcatttgt

SEQ ID NO: 22580 - DNA, 20 bp, Artificial Sequence
  chemically synthesized
ccttctgggaaactgcaaat

SEQ ID NO: 22581 - DNA, 20 bp, Artificial Sequence
  chemically synthesized
ctgatctattgttgaagttt

SEQ ID NO: 22582 - DNA, 20 bp, Artificial Sequence
  chemically synthesized
ttcaataaactcttcagtta

SEQ ID NO: 22583 - DNA, 20 bp, Artificial Sequence
  chemically synthesized
attcttgttgtatctatctc

SEQ ID NO: 22584 - DNA, 20 bp, Artificial Sequence
  chemically synthesized
gtaaatttctcattcatatc

SEQ ID NO: 22585 - DNA, 20 bp, Artificial Sequence
  chemically synthesized
gatttctttttattgtttat

SEQ ID NO: 22586 - DNA, 20 bp, Artificial Sequence
  chemically synthesized
gcttccttaatatcaacatt

SEQ ID NO: 22587 - DNA, 20 bp, Artificial Sequence
  chemically synthesized
acattttggattcttttttc

SEQ ID NO: 22588 - DNA, 20 bp, Artificial Sequence
  chemically synthesized
tccactggcttatgttgctg

SEQ ID NO: 22589 - DNA, 20 bp, Artificial Sequence
  chemically synthesized
aagatgtatcttggtgttga

SEQ ID NO: 22590 - DNA, 20 bp, Artificial Sequence
  chemically synthesized
ctgtgattttttcagtggct

SEQ ID NO: 22591 - DNA, 20 bp, Artificial Sequence
  chemically synthesized
gatgaggttgtgctggagac

SEQ ID NO: 22592 - DNA, 20 bp, Artificial Sequence
  chemically synthesized
gtacattggcactgatggta

SEQ ID NO: 22593 - DNA, 20 bp, Artificial Sequence
  chemically synthesized
actgatggtaatgagtctag

SEQ ID NO: 22594 - DNA, 20 bp, Artificial Sequence
  chemically synthesized
ttggccttcaggcagtttgc

SEQ ID NO: 22595 - DNA, 20 bp, Artificial Sequence
  chemically synthesized
atagtagactgggctggtgt

SEQ ID NO: 22596 - DNA, 20 bp, Artificial Sequence
  chemically synthesized
ggtcctcaggcttctggaca

SEQ ID NO: 22597 - DNA, 20 bp, Artificial Sequence
  chemically synthesized
ttctggacagtgggtgtggt

SEQ ID NO: 22598 - DNA, 20 bp, Artificial Sequence
  chemically synthesized
gttggtggtggctgcaaggg

SEQ ID NO: 22599 - DNA, 20 bp, Artificial Sequence
  chemically synthesized
gttgtgatggcagtggcaga

SEQ ID NO: 22600 - DNA, 20 bp, Artificial Sequence
  chemically synthesized
gcccatcatcaggcttctgg

SEQ ID NO: 22601 - DNA, 20 bp, Artificial Sequence
  chemically synthesized
ttgcttaggtaccagtcatg

SEQ ID NO: 22602 - DNA, 20 bp, Artificial Sequence
  chemically synthesized
tggatggcacaaggctgtct

SEQ ID NO: 22603 - DNA, 20 bp, Artificial Sequence
  chemically synthesized
ttgaggaaggcaaagccagg

SEQ ID NO: 22604 - DNA, 20 bp, Artificial Sequence
  chemically synthesized
ggacaccggctatcataggc

SEQ ID NO: 22605 - DNA, 20 bp, Artificial Sequence
  chemically synthesized
ccggctatcataggctggag

SEQ ID NO: 22606 - DNA, 20 bp, Artificial Sequence
  chemically synthesized
agtgatcctcaggcccccag

SEQ ID NO: 22607 - DNA, 20 bp, Artificial Sequence
  chemically synthesized
tcaggcccccagcagaatgc

SEQ ID NO: 22608 - DNA, 20 bp, Artificial Sequence
  chemically synthesized
gcccccagcagaatgcctga

SEQ ID NO: 22609 - DNA, 20 bp, Artificial Sequence
  chemically synthesized
cattgttgccctgctcttga

SEQ ID NO: 22610 - DNA, 20 bp, Artificial Sequence
  chemically synthesized
gccctgctcttgaaggggtg

SEQ ID NO: 22611 - DNA, 20 bp, Artificial Sequence
  chemically synthesized
ttcagtggcagcagctataa

SEQ ID NO: 22612 - DNA, 20 bp, Artificial Sequence
  chemically synthesized
ccccagatggtggctgcaag

SEQ ID NO: 22613 - DNA, 20 bp, Artificial Sequence
  chemically synthesized
tgtgtagcagccctgctact

SEQ ID NO: 22614 - DNA, 20 bp, Artificial Sequence
  chemically synthesized
agccctgctactgggggtgg

SEQ ID NO: 22615 - DNA, 20 bp, Artificial Sequence
  chemically synthesized
gccagcagtagcactcagct

SEQ ID NO: 22616 - DNA, 20 bp, Artificial Sequence
  chemically synthesized
gtagcactcagctgtgggtg

SEQ ID NO: 22617 - DNA, 20 bp, Artificial Sequence
  chemically synthesized
ggggatgtcagcagagcttc

SEQ ID NO: 22618 - DNA, 20 bp, Artificial Sequence
  chemically synthesized
tgtagagatgcagatgatgt

SEQ ID NO: 22619 - DNA, 20 bp, Artificial Sequence
  chemically synthesized
ctgaggaacgatgtcatctg

SEQ ID NO: 22620 - DNA, 20 bp, Artificial Sequence
  chemically synthesized
gcaccttgctgctcagtaat

SEQ ID NO: 22621 - DNA, 20 bp, Artificial Sequence
  chemically synthesized
tgctcagtaatggggatggc

SEQ ID NO: 22622 - DNA, 20 bp, Artificial Sequence
  chemically synthesized
tcaagggactctcctgtggc

SEQ ID NO: 22623 - DNA, 20 bp, Artificial Sequence
  chemically synthesized
tctcctgtggctaggattcc

SEQ ID NO: 22624 - DNA, 20 bp, Artificial Sequence
  chemically synthesized
taatgcagatgtggaccact

SEQ ID NO: 22625 - DNA, 20 bp, Artificial Sequence
  chemically synthesized
ggagcctctctggcctcaca

SEQ ID NO: 22626 - DNA, 20 bp, Artificial Sequence
  chemically synthesized
ggcctcacagaggatcccta

SEQ ID NO: 22627 - DNA, 20 bp, Artificial Sequence
  chemically synthesized
tgcttcctgtcacttctctg

SEQ ID NO: 22628 - DNA, 20 bp, Artificial Sequence
  chemically synthesized
gtcacttctctgttgaattc

SEQ ID NO: 22629 - DNA, 20 bp, Artificial Sequence
  chemically synthesized
ttccagaattctctcttatg

SEQ ID NO: 22630 - DNA, 20 bp, Artificial Sequence
  chemically synthesized
tttggttctttgtggaggag

SEQ ID NO: 22631 - DNA, 20 bp, Artificial Sequence
  chemically synthesized
ggactatctgaaggcctcag

SEQ ID NO: 22632 - DNA, 20 bp, Artificial Sequence
  chemically synthesized
tcagatgagtaaaagaagta

SEQ ID NO: 22633 - DNA, 20 bp, Artificial Sequence
  chemically synthesized
atcatttgtttcttcaaata

SEQ ID NO: 22634 - DNA, 20 bp, Artificial Sequence
  chemically synthesized
ttgcatctaccaaagtgtat

SEQ ID NO: 22635 - DNA, 20 bp, Artificial Sequence
  chemically synthesized
aaatacgtaatctaacaaac

SEQ ID NO: 22636 - DNA, 20 bp, Artificial Sequence
  chemically synthesized
acaaggatgttttaagatct

SEQ ID NO: 22637 - DNA, 20 bp, Artificial Sequence
  chemically synthesized
gatgcatagttgcaaataaa

SEQ ID NO: 22638 - DNA, 20 bp, Artificial Sequence
  chemically synthesized
tgcaaataaaaggagttttc

SEQ ID NO: 22639 - DNA, 20 bp, Artificial Sequence
  chemically synthesized
tttggaaattttgcattttt

SEQ ID NO: 22640 - DNA, 20 bp, Artificial Sequence
  chemically synthesized
tgatggtttctaaaattgtc

SEQ ID NO: 22641 - DNA, 20 bp, Artificial Sequence
  chemically synthesized
atgttaacttagatttattg

SEQ ID NO: 22642 - DNA, 20 bp, Artificial Sequence
  chemically synthesized
tatgaaaattgcttgcattt

SEQ ID NO: 22643 - DNA, 20 bp, Artificial Sequence
  chemically synthesized
ctcttctcctttataaatta

SEQ ID NO: 22644 - DNA, 20 bp, Artificial Sequence
  chemically synthesized
ctatgtaaagtataagttac

SEQ ID NO: 22645 - DNA, 20 bp, Artificial Sequence
  chemically synthesized
aaacctgtagtctgatgaaa

SEQ ID NO: 22646 - DNA, 20 bp, Artificial Sequence
  chemically synthesized
aataaaattgctttttgcaa

SEQ ID NO: 22647 - DNA, 20 bp, Artificial Sequence
  chemically synthesized
attgagttgaagattgatgc

SEQ ID NO: 22648 - DNA, 20 bp, Artificial Sequence
  chemically synthesized
tgccaggatcttattacctc

SEQ ID NO: 22649 - DNA, 20 bp, Artificial Sequence
  chemically synthesized
attacctccaggatttcaca

SEQ ID NO: 22650 - DNA, 20 bp, Artificial Sequence
  chemically synthesized
aggatttcacaaaggatttc

SEQ ID NO: 22651 - DNA, 20 bp, Artificial Sequence
  chemically synthesized
ttataaagacatacctgaga

SEQ ID NO: 22652 - DNA, 20 bp, Artificial Sequence
  chemically synthesized
cactatcacgagaagagcat

SEQ ID NO: 22653 - DNA, 20 bp, Artificial Sequence
  chemically synthesized
aaatccctcccacaacacgt

SEQ ID NO: 22654 - DNA, 20 bp, Artificial Sequence
  chemically synthesized
actacaattcaagatgagat

SEQ ID NO: 22655 - DNA, 20 bp, Artificial Sequence
  chemically synthesized
gggacacagtcaagctgtat

SEQ ID NO: 22656 - DNA, 20 bp, Artificial Sequence
  chemically synthesized
agctgtatcagggtacaagc

SEQ ID NO: 22657 - DNA, 20 bp, Artificial Sequence
  chemically synthesized
agtggaccatcacctgaaaa

SEQ ID NO: 22658 - DNA, 20 bp, Artificial Sequence
  chemically synthesized
ctgtgtttgactttctgttt

SEQ ID NO: 22659 - DNA, 20 bp, Artificial Sequence
  chemically synthesized
tgtttctgagttatttcact

SEQ ID NO: 22660 - DNA, 20 bp, Artificial Sequence
  chemically synthesized
gatttcattcttttttatgg

SEQ ID NO: 22661 - DNA, 20 bp, Artificial Sequence
  chemically synthesized
ttaatatgatctctttcact

SEQ ID NO: 22662 - DNA, 20 bp, Artificial Sequence
  chemically synthesized
tttgggtccatacccagtag

SEQ ID NO: 22663 - DNA, 20 bp, Artificial Sequence
  chemically synthesized
catacccagtagtgggattg

SEQ ID NO: 22664 - DNA, 20 bp, Artificial Sequence
  chemically synthesized
ccagtagtgggattgcagga

SEQ ID NO: 22665 - DNA, 20 bp, Artificial Sequence
  chemically synthesized
cctgagctcactgtatttgt

SEQ ID NO: 22666 - DNA, 20 bp, Artificial Sequence
  chemically synthesized
atatagatttagatataaaa

SEQ ID NO: 22667 - DNA, 20 bp, Artificial Sequence
  chemically synthesized
agtcccaaagctgaaggact

SEQ ID NO: 22668 - DNA, 20 bp, Artificial Sequence
  chemically synthesized
gcttggaggctaagccagtc

SEQ ID NO: 22669 - DNA, 20 bp, Artificial Sequence
  chemically synthesized
agatggtgcccacccagatt

SEQ ID NO: 22670 - DNA, 20 bp, Artificial Sequence
  chemically synthesized
ggtgcccacccagattaagg

SEQ ID NO: 22671 - DNA, 20 bp, Artificial Sequence
  chemically synthesized
aataccctcacagacacact

SEQ ID NO: 22672 - DNA, 20 bp, Artificial Sequence
  chemically synthesized
tttttttttttttttcctgg

SEQ ID NO: 22673 - DNA, 20 bp, Artificial Sequence
  chemically synthesized
cctttatttgtagtcctgcc

SEQ ID NO: 22674 - DNA, 20 bp, Artificial Sequence
  chemically synthesized
taaaactaagagacacccta

SEQ ID NO: 22675 - DNA, 20 bp, Artificial Sequence
  chemically synthesized
acgcttccttacctccattg

SEQ ID NO: 22676 - DNA, 20 bp, Artificial Sequence
  chemically synthesized
actgatttcatcttgatagt

SEQ ID NO: 22677 - DNA, 20 bp, Artificial Sequence
  chemically synthesized
aatcttaatttgcagtttaa

SEQ ID NO: 22678 - DNA, 20 bp, Artificial Sequence
  chemically synthesized
aattttgctagtggaacact

SEQ ID NO: 22679 - DNA, 20 bp, Artificial Sequence
  chemically synthesized
gtggaacactaggggtgatg

SEQ ID NO: 22680 - DNA, 20 bp, Artificial Sequence
  chemically synthesized
accctttgattcctggaccc

SEQ ID NO: 22681 - DNA, 20 bp, Artificial Sequence
  chemically synthesized
aggccattcaaaagctgctt

SEQ ID NO: 22682 - DNA, 20 bp, Artificial Sequence
  chemically synthesized
aaaagctgcttcaggatgat

SEQ ID NO: 22683 - DNA, 20 bp, Artificial Sequence
  chemically synthesized
cacacttctttagccataaa

SEQ ID NO: 22684 - DNA, 20 bp, Artificial Sequence
  chemically synthesized
tggtcagaagcaatgctgtg

SEQ ID NO: 22685 - DNA, 20 bp, Artificial Sequence
  chemically synthesized
ctgtgtggaataccatgaca

SEQ ID NO: 22686 - DNA, 20 bp, Artificial Sequence
  chemically synthesized
atacggcattctgtgattcc

SEQ ID NO: 22687 - DNA, 20 bp, Artificial Sequence
  chemically synthesized
tggtagtcttggcataagca

SEQ ID NO: 22688 - DNA, 20 bp, Artificial Sequence
  chemically synthesized
cttggcataagcattgagtt

SEQ ID NO: 22689 - DNA, 20 bp, Artificial Sequence
  chemically synthesized
aggattgggaaacccatatc

SEQ ID NO: 22690 - DNA, 20 bp, Artificial Sequence
  chemically synthesized
gtagctggctgatcaccccg

SEQ ID NO: 22691 - DNA, 20 bp, Artificial Sequence
  chemically synthesized
ctgtggccaggtcagctttg

SEQ ID NO: 22692 - DNA, 20 bp, Artificial Sequence
  chemically synthesized
caactgtggccactttgttc

SEQ ID NO: 22693 - DNA, 20 bp, Artificial Sequence
  chemically synthesized
tgggtccattggacgatgac

SEQ ID NO: 22694 - DNA, 20 bp, Artificial Sequence
  chemically synthesized
atgagtggcctgggaaaagg

SEQ ID NO: 22695 - DNA, 20 bp, Artificial Sequence
  chemically synthesized
aaaaggctgagtggtgtcca

SEQ ID NO: 22696 - DNA, 20 bp, Artificial Sequence
  chemically synthesized
cccattggtgagcactcaca

SEQ ID NO: 22697 - DNA, 20 bp, Artificial Sequence
  chemically synthesized
caaacctttggctacagccc

SEQ ID NO: 22698 - DNA, 20 bp, Artificial Sequence
  chemically synthesized
tcccttcaccgttgtccttc

SEQ ID NO: 22699 - DNA, 20 bp, Artificial Sequence
  chemically synthesized
agtgctgcggctgtccactt

SEQ ID NO: 22700 - DNA, 20 bp, Artificial Sequence
  chemically synthesized
gggagagaaagcagtgtgtc

SEQ ID NO: 22701 - DNA, 20 bp, Artificial Sequence
  chemically synthesized
atgtaacttactagtgcctt

SEQ ID NO: 22702 - DNA, 20 bp, Artificial Sequence
  chemically synthesized
acagcccactttatggctag

SEQ ID NO: 22703 - DNA, 20 bp, Artificial Sequence
  chemically synthesized
caagagctttctccctaaaa

SEQ ID NO: 22704 - DNA, 20 bp, Artificial Sequence
  chemically synthesized
cactgacacctcaagcatca

SEQ ID NO: 22705 - DNA, 20 bp, Artificial Sequence
  chemically synthesized
cactcaaaactggcagcctt

SEQ ID NO: 22706 - DNA, 20 bp, Artificial Sequence
  chemically synthesized
ggatcactcgataaatgggc

SEQ ID NO: 22707 - DNA, 20 bp, Artificial Sequence
  chemically synthesized
cagagtaacacacccaaatc

SEQ ID NO: 22708 - DNA, 20 bp, Artificial Sequence
  chemically synthesized
tgtgcctatttcttggttgt

SEQ ID NO: 22709 - DNA, 20 bp, Artificial Sequence
  chemically synthesized
aaattatccttcactttaga

SEQ ID NO: 22710 - DNA, 20 bp, Artificial Sequence
  chemically synthesized
tttactgaggtagaaggtcc

SEQ ID NO: 22711 - DNA, 20 bp, Artificial Sequence
  chemically synthesized
aagattatggcacaaagctg

SEQ ID NO: 22712 - DNA, 20 bp, Artificial Sequence
  chemically synthesized
gctggagagttgatatactc

SEQ ID NO: 22713 - DNA, 20 bp, Artificial Sequence
  chemically synthesized
ttccttgcctctcacaagcg

SEQ ID NO: 22714 - DNA, 20 bp, Artificial Sequence
  chemically synthesized
cctctcacaagcgttgaatc

SEQ ID NO: 22715 - DNA, 20 bp, Artificial Sequence
  chemically synthesized
ctctctaaacaattgatgcc

SEQ ID NO: 22716 - DNA, 20 bp, Artificial Sequence
  chemically synthesized
gttctccataccattagaag

SEQ ID NO: 22717 - DNA, 20 bp, Artificial Sequence
  chemically synthesized
aagaagagtccttagcatat

SEQ ID NO: 22718 - DNA, 20 bp, Artificial Sequence
  chemically synthesized
cctggtaccaaaatctgtat

SEQ ID NO: 22719 - DNA, 20 bp, Artificial Sequence
  chemically synthesized
attagggttctacagagaaa

SEQ ID NO: 22720 - DNA, 20 bp, Artificial Sequence
  chemically synthesized
ctctatatctatatctatat

SEQ ID NO: 22721 - DNA, 20 bp, Artificial Sequence
  chemically synthesized
tgaggaacaaggaagctagt

SEQ ID NO: 22722 - DNA, 20 bp, Artificial Sequence
  chemically synthesized
agtcccaaagctgaagaacc

SEQ ID NO: 22723 - DNA, 20 bp, Artificial Sequence
  chemically synthesized
gttcaatgttccagggcagg

SEQ ID NO: 22724 - DNA, 20 bp, Artificial Sequence
  chemically synthesized
catgggagaaaaatgtaggc

SEQ ID NO: 22725 - DNA, 20 bp, Artificial Sequence
  chemically synthesized
agatggtgcccacccagatt

SEQ ID NO: 22726 - DNA, 20 bp, Artificial Sequence
  chemically synthesized
ggtgcccacccagattaagg

SEQ ID NO: 22727 - DNA, 20 bp, Artificial Sequence
  chemically synthesized
tgaggttggtttttttgttg

SEQ ID NO: 22728 - DNA, 20 bp, Artificial Sequence
  chemically synthesized
tactctccttaattttcccc

SEQ ID NO: 22729 - DNA, 20 bp, Artificial Sequence
  chemically synthesized
gttttctagatgtggacttg

SEQ ID NO: 22730 - DNA, 20 bp, Artificial Sequence
  chemically synthesized
gtagcagcaatattagagga

SEQ ID NO: 22731 - DNA, 20 bp, Artificial Sequence
  chemically synthesized
catacaaaacccctcagaca

SEQ ID NO: 22732 - DNA, 20 bp, Artificial Sequence
  chemically synthesized
atctccaacaaccaagctct

SEQ ID NO: 22733 - DNA, 20 bp, Artificial Sequence
  chemically synthesized
ttaagggcttacaactctaa

SEQ ID NO: 22734 - DNA, 20 bp, Artificial Sequence
  chemically synthesized
gggctgcatgcactggtcat

SEQ ID NO: 22735 - DNA, 20 bp, Artificial Sequence
  chemically synthesized
agaatggaacagaacaggac

SEQ ID NO: 22736 - DNA, 20 bp, Artificial Sequence
  chemically synthesized
ctgcttttccatacagtgtc

SEQ ID NO: 22737 - DNA, 20 bp, Artificial Sequence
  chemically synthesized
ataacataactggccaggtc

SEQ ID NO: 22738 - DNA, 20 bp, Artificial Sequence
  chemically synthesized
ggtctatctttaaccaggcc

SEQ ID NO: 22739 - DNA, 20 bp, Artificial Sequence
  chemically synthesized
tggtctcaggctgtttgcct

SEQ ID NO: 22740 - DNA, 20 bp, Artificial Sequence
  chemically synthesized
attgggcataaaacaatatg

SEQ ID NO: 22741 - DNA, 20 bp, Artificial Sequence
  chemically synthesized
ggaagagagaaataccatgt

SEQ ID NO: 22742 - DNA, 20 bp, Artificial Sequence
  chemically synthesized
tgaaatacgtatttgtgtta

SEQ ID NO: 22743 - DNA, 20 bp, Artificial Sequence
  chemically synthesized
tgtgttattggatttgacat

SEQ ID NO: 22744 - DNA, 20 bp, Artificial Sequence
  chemically synthesized
tgagggcatgtatgatgaca

SEQ ID NO: 22745 - DNA, 20 bp, Artificial Sequence
  chemically synthesized
aagggactttaaaacatgca

SEQ ID NO: 22746 - DNA, 20 bp, Artificial Sequence
  chemically synthesized
taaataaatccttgggctta

SEQ ID NO: 22747 - DNA, 20 bp, Artificial Sequence
  chemically synthesized
actttaaacaaattgctaac

SEQ ID NO: 22748 - DNA, 20 bp, Artificial Sequence
  chemically synthesized
aaaggccaaaacaacagcag

SEQ ID NO: 22749 - DNA, 20 bp, Artificial Sequence
  chemically synthesized
tcagaagagcagtggacgca

SEQ ID NO: 22750 - DNA, 20 bp, Artificial Sequence
  chemically synthesized
atgctcaaaatatggaccta

SEQ ID NO: 22751 - DNA, 20 bp, Artificial Sequence
  chemically synthesized
aaagaggtcaaatacctcaa

SEQ ID NO: 22752 - DNA, 20 bp, Artificial Sequence
  chemically synthesized
catcatacatgccctcagca

SEQ ID NO: 22753 - DNA, 20 bp, Artificial Sequence
  chemically synthesized
ctgctgtggttttcaattat

SEQ ID NO: 22754 - DNA, 20 bp, Artificial Sequence
  chemically synthesized
tatgcccaatttctgcctcc

SEQ ID NO: 22755 - DNA, 20 bp, Artificial Sequence
  chemically synthesized
gaagaagtaaaaactaaaag

SEQ ID NO: 22756 - DNA, 20 bp, Artificial Sequence
  chemically synthesized
atgcagcttgtcctgctaca

SEQ ID NO: 22757 - DNA, 20 bp, Artificial Sequence
  chemically synthesized
tggatccagcaagtccacat

SEQ ID NO: 22758 - DNA, 20 bp, Artificial Sequence
  chemically synthesized
agcattatgatggcaaaaaa

SEQ ID NO: 22759 - DNA, 20 bp, Artificial Sequence
  chemically synthesized
aaattagatgtggcctaggc

SEQ ID NO: 22760 - DNA, 20 bp, Artificial Sequence
  chemically synthesized
acagagtaaacggataacct

SEQ ID NO: 22761 - DNA, 20 bp, Artificial Sequence
  chemically synthesized
taaacggataacctacagaa

SEQ ID NO: 22762 - DNA, 20 bp, Artificial Sequence
  chemically synthesized
atgcaacaaaaggctaatat

SEQ ID NO: 22763 - DNA, 20 bp, Artificial Sequence
  chemically synthesized
caacaaaaaaaccaacctca

SEQ ID NO: 22764 - DNA, 20 bp, Artificial Sequence
  chemically synthesized
acagccaggatataaagcag

SEQ ID NO: 22765 - DNA, 20 bp, Artificial Sequence
  chemically synthesized
ccaggagtggttctagagga

SEQ ID NO: 22766 - DNA, 20 bp, Artificial Sequence
  chemically synthesized
taatacttttgactatatgt

SEQ ID NO: 22767 - DNA, 20 bp, Artificial Sequence
  chemically synthesized
gttcgctggacaaagtgatg

SEQ ID NO: 22768 - DNA, 20 bp, Artificial Sequence
  chemically synthesized
catttggccactcttacaac

SEQ ID NO: 22769 - DNA, 20 bp, Artificial Sequence
  chemically synthesized
agataactactctcttttag

SEQ ID NO: 22770 - DNA, 20 bp, Artificial Sequence
  chemically synthesized
gaaggcactagtaagttaca

SEQ ID NO: 22771 - DNA, 20 bp, Artificial Sequence
  chemically synthesized
gttgtgcactttgcacagaa

SEQ ID NO: 22772 - DNA, 20 bp, Artificial Sequence
  chemically synthesized
atgactggaaaattgatgac

SEQ ID NO: 22773 - DNA, 20 bp, Artificial Sequence
  chemically synthesized
agactaccatccatggaatc

SEQ ID NO: 22774 - DNA, 20 bp, Artificial Sequence
  chemically synthesized
ttgctgagggcaaagggaat

SEQ ID NO: 22775 - DNA, 20 bp, Artificial Sequence
  chemically synthesized
gtgtctgtatacacttgtac

SEQ ID NO: 22776 - DNA, 20 bp, Artificial Sequence
  chemically synthesized
gtggccaggatataaagcag

SEQ ID NO: 22777 - DNA, 20 bp, Artificial Sequence
  chemically synthesized
gttcaacatcactaataatc

SEQ ID NO: 22778 - DNA, 20 bp, Artificial Sequence
  chemically synthesized
atgatacctccttatgccag

SEQ ID NO: 22779 - DNA, 20 bp, Artificial Sequence
  chemically synthesized
tgttggtgaggatgtggaga

SEQ ID NO: 22780 - DNA, 20 bp, Artificial Sequence
  chemically synthesized
aaatgcttatacactgttgg

SEQ ID NO: 22781 - DNA, 20 bp, Artificial Sequence
  chemically synthesized
catgaagatttcttaaagaa

SEQ ID NO: 22782 - DNA, 20 bp, Artificial Sequence
  chemically synthesized
ctaccaatggacgattggat

SEQ ID NO: 22783 - DNA, 20 bp, Artificial Sequence
  chemically synthesized
atatattactcagccataaa

SEQ ID NO: 22784 - DNA, 20 bp, Artificial Sequence
  chemically synthesized
agaatgaaatcatgtcttct

SEQ ID NO: 22785 - DNA, 20 bp, Artificial Sequence
  chemically synthesized
attatcctcagtgaaataac

SEQ ID NO: 22786 - DNA, 20 bp, Artificial Sequence
  chemically synthesized
ctcagtgaaataactcagaa

SEQ ID NO: 22787 - DNA, 20 bp, Artificial Sequence
  chemically synthesized
cgatgagtaagcatagacat

SEQ ID NO: 22788 - DNA, 20 bp, Artificial Sequence
  chemically synthesized
aataatagacacttgagact

SEQ ID NO: 22789 - DNA, 20 bp, Artificial Sequence
  chemically synthesized
aatggggtaattaaaagggt

SEQ ID NO: 22790 - DNA, 20 bp, Artificial Sequence
  chemically synthesized
cactaaataataatcacatg

SEQ ID NO: 22791 - DNA, 20 bp, Artificial Sequence
  chemically synthesized
gctagagcaaggggatgact

SEQ ID NO: 22792 - DNA, 20 bp, Artificial Sequence
  chemically synthesized
ctacacaagctaattgtcct

SEQ ID NO: 22793 - DNA, 20 bp, Artificial Sequence
  chemically synthesized
tcagatgttatgtgatgagg

SEQ ID NO: 22794 - DNA, 20 bp, Artificial Sequence
  chemically synthesized
atagaacacatgaggaggaa

SEQ ID NO: 22795 - DNA, 20 bp, Artificial Sequence
  chemically synthesized
tcctcaaattctggacaatt

SEQ ID NO: 22796 - DNA, 20 bp, Artificial Sequence
  chemically synthesized
cacaaaaatgcaaaatttcc

SEQ ID NO: 22797 - DNA, 20 bp, Artificial Sequence
  chemically synthesized
cttcatcttcatcttttcca

SEQ ID NO: 22798 - DNA, 20 bp, Artificial Sequence
  chemically synthesized
gaaatagagattctttattt

SEQ ID NO: 22799 - DNA, 20 bp, Artificial Sequence
  chemically synthesized
tgatttgggaaatgaaatga

SEQ ID NO: 22800 - DNA, 20 bp, Artificial Sequence
  chemically synthesized
gattatgctctttcagtcta

SEQ ID NO: 22801 - DNA, 20 bp, Artificial Sequence
  chemically synthesized
acaaagaaccaaaatagtaa

SEQ ID NO: 22802 - DNA, 20 bp, Artificial Sequence
  chemically synthesized
agtagaaaatcccacataag

SEQ ID NO: 22803 - DNA, 20 bp, Artificial Sequence
  chemically synthesized
ctacacatttataagctccc

SEQ ID NO: 22804 - DNA, 20 bp, Artificial Sequence
  chemically synthesized
aagcaaactgcctgaaggcc

SEQ ID NO: 22805 - DNA, 20 bp, Artificial Sequence
  chemically synthesized
gactatgctgctgtatgcac

SEQ ID NO: 22806 - DNA, 20 bp, Artificial Sequence
  chemically synthesized
atcaacaccaagatacatct

SEQ ID NO: 22807 - DNA, 20 bp, Artificial Sequence
  chemically synthesized
caaaataaacataaaaaggt

SEQ ID NO: 22808 - DNA, 20 bp, Artificial Sequence
  chemically synthesized
catttataaaattctggaaa

SEQ ID NO: 22809 - DNA, 20 bp, Artificial Sequence
  chemically synthesized
agaactcagataaacaataa

SEQ ID NO: 22810 - DNA, 20 bp, Artificial Sequence
  chemically synthesized
agataaacaataaaaagaaa

SEQ ID NO: 22811 - DNA, 20 bp, Artificial Sequence
  chemically synthesized
aaaacaattcaggatatgaa

SEQ ID NO: 22812 - DNA, 20 bp, Artificial Sequence
  chemically synthesized
tacccaagagatagatacaa

SEQ ID NO: 22813 - DNA, 20 bp, Artificial Sequence
  chemically synthesized
atacaacaagaatgaaccaa

SEQ ID NO: 22814 - DNA, 20 bp, Artificial Sequence
  chemically synthesized
tgtaactgaagagtttattg

SEQ ID NO: 22815 - DNA, 20 bp, Artificial Sequence
  chemically synthesized
acaatagatcagatcaagca

SEQ ID NO: 22816 - DNA, 20 bp, Artificial Sequence
  chemically synthesized
taaaattagctggtcaaatg

SEQ ID NO: 22817 - DNA, 20 bp, Artificial Sequence
  chemically synthesized
aaatgatagaaaggaaaaaa

SEQ ID NO: 22818 - DNA, 20 bp, Artificial Sequence
  chemically synthesized
tgaaaacttgtcaagtctag

SEQ ID NO: 22819 - DNA, 20 bp, Artificial Sequence
  chemically synthesized
gacatccagacaaatgaaaa

SEQ ID NO: 22820 - DNA, 20 bp, Artificial Sequence
  chemically synthesized
gattaacagcagatttctca

SEQ ID NO: 22821 - DNA, 20 bp, Artificial Sequence
  chemically synthesized
atgatatattcaaaatagtg

SEQ ID NO: 22822 - DNA, 20 bp, Artificial Sequence
  chemically synthesized
taaataaaatcttttctggg

SEQ ID NO: 22823 - DNA, 20 bp, Artificial Sequence
  chemically synthesized
ctatcactagactggcttta

SEQ ID NO: 22824 - DNA, 20 bp, Artificial Sequence
  chemically synthesized
gagcaaaacacaaataaaga

SEQ ID NO: 22825 - DNA, 20 bp, Artificial Sequence
  chemically synthesized
agaactcaaacgttaccact

SEQ ID NO: 22826 - DNA, 20 bp, Artificial Sequence
  chemically synthesized
caaaccacaatcataaataa

SEQ ID NO: 22827 - DNA, 20 bp, Artificial Sequence
  chemically synthesized
ccacaatcataaataataag

SEQ ID NO: 22828 - DNA, 20 bp, Artificial Sequence
  chemically synthesized
aatcataaataataagaaag

SEQ ID NO: 22829 - DNA, 20 bp, Artificial Sequence
  chemically synthesized
ataaataataagaaagaaag

SEQ ID NO: 22830 - DNA, 20 bp, Artificial Sequence
  chemically synthesized
ataataagaaagaaagaaag

SEQ ID NO: 22831 - DNA, 20 bp, Artificial Sequence
  chemically synthesized
agaaagaaagagagagagag

SEQ ID NO: 22832 - DNA, 20 bp, Artificial Sequence
  chemically synthesized
agagagagagagagagaatg

SEQ ID NO: 22833 - DNA, 20 bp, Artificial Sequence
  chemically synthesized
agagagagagagaatgaaag

SEQ ID NO: 22834 - DNA, 20 bp, Artificial Sequence
  chemically synthesized
aagaaagaaaaggaaggaag

SEQ ID NO: 22835 - DNA, 20 bp, Artificial Sequence
  chemically synthesized
acccagttgtaagctgccta

SEQ ID NO: 22836 - DNA, 20 bp, Artificial Sequence
  chemically synthesized
atgaaagatcttccatacaa

SEQ ID NO: 22837 - DNA, 20 bp, Artificial Sequence
  chemically synthesized
tattagatataaagggtgaa

SEQ ID NO: 22838 - DNA, 20 bp, Artificial Sequence
  chemically synthesized
gcatcagatagatcatctag

SEQ ID NO: 22839 - DNA, 20 bp, Artificial Sequence
  chemically synthesized
catctagacagaaaattaac

SEQ ID NO: 22840 - DNA, 20 bp, Artificial Sequence
  chemically synthesized
caatatttcatccaacagct

SEQ ID NO: 22841 - DNA, 20 bp, Artificial Sequence
  chemically synthesized
cagaccacaatggaataaaa

SEQ ID NO: 22842 - DNA, 20 bp, Artificial Sequence
  chemically synthesized
ataaaactagaaatcaataa

SEQ ID NO: 22843 - DNA, 20 bp, Artificial Sequence
  chemically synthesized
ctgaatgaacgttatgtcaa

SEQ ID NO: 22844 - DNA, 20 bp, Artificial Sequence
  chemically synthesized
taaacacttaaattaaaaac

SEQ ID NO: 22845 - DNA, 20 bp, Artificial Sequence
  chemically synthesized
taatcatgtacctcaacaag

SEQ ID NO: 22846 - DNA, 20 bp, Artificial Sequence
  chemically synthesized
aacccaaaactagcagaagg

SEQ ID NO: 22847 - DNA, 20 bp, Artificial Sequence
  chemically synthesized
acagaagaacttaatgaaat

SEQ ID NO: 22848 - DNA, 20 bp, Artificial Sequence
  chemically synthesized
atagctctagctagactaac

SEQ ID NO: 22849 - DNA, 20 bp, Artificial Sequence
  chemically synthesized
aaaagagaagagactgaaat

SEQ ID NO: 22850 - DNA, 20 bp, Artificial Sequence
  chemically synthesized
agagactgaaataaagaaaa

SEQ ID NO: 22851 - DNA, 20 bp, Artificial Sequence
  chemically synthesized
taaagaaaatcagaaataaa

SEQ ID NO: 22852 - DNA, 20 bp, Artificial Sequence
  chemically synthesized
aatatattacaaccgatacc

SEQ ID NO: 22853 - DNA, 20 bp, Artificial Sequence
  chemically synthesized
ttacaaccgataccacagaa

SEQ ID NO: 22854 - DNA, 20 bp, Artificial Sequence
  chemically synthesized
accacctaccaagattgaat

SEQ ID NO: 22855 - DNA, 20 bp, Artificial Sequence
  chemically synthesized
cctaccaagattgaattaag

SEQ ID NO: 22856 - DNA, 20 bp, Artificial Sequence
  chemically synthesized
caagattgaattaagaaaga

SEQ ID NO: 22857 - DNA, 20 bp, Artificial Sequence
  chemically synthesized
gtagtaaaaagtctcccaaa

SEQ ID NO: 22858 - DNA, 20 bp, Artificial Sequence
  chemically synthesized
tcaaattttaccaaactttc

SEQ ID NO: 22859 - DNA, 20 bp, Artificial Sequence
  chemically synthesized
atatgatcatctcaatagat

SEQ ID NO: 22860 - DNA, 20 bp, Artificial Sequence
  chemically synthesized
ctagccacagctttcaggtc

SEQ ID NO: 22861 - DNA, 20 bp, Artificial Sequence
  chemically synthesized
ccacagctttcaggtcagag

SEQ ID NO: 22862 - DNA, 20 bp, Artificial Sequence
  chemically synthesized
agctttcaggtcagagaaag

SEQ ID NO: 22863 - DNA, 20 bp, Artificial Sequence
  chemically synthesized
ttcaggtcagagaaagaaag

SEQ ID NO: 22864 - DNA, 20 bp, Artificial Sequence
  chemically synthesized
cagatgacatgattttatac

SEQ ID NO: 22865 - DNA, 20 bp, Artificial Sequence
  chemically synthesized
aaaactacaaaacactgata

SEQ ID NO: 22866 - DNA, 20 bp, Artificial Sequence
  chemically synthesized
tgataaaagaattgaaaagg

SEQ ID NO: 22867 - DNA, 20 bp, Artificial Sequence
  chemically synthesized
agatatcctatgttcatgga

SEQ ID NO: 22868 - DNA, 20 bp, Artificial Sequence
  chemically synthesized
aaatagcaatgtcatttttc

SEQ ID NO: 22869 - DNA, 20 bp, Artificial Sequence
  chemically synthesized
cagacacttagaccaatgga

SEQ ID NO: 22870 - DNA, 20 bp, Artificial Sequence
  chemically synthesized
aatggaagagaatagagaac

SEQ ID NO: 22871 - DNA, 20 bp, Artificial Sequence
  chemically synthesized
cagattttcaacaaaggtga

SEQ ID NO: 22872 - DNA, 20 bp, Artificial Sequence
  chemically synthesized
tgaggaaaggacacagtgtt

SEQ ID NO: 22873 - DNA, 20 bp, Artificial Sequence
  chemically synthesized
ccattggatatccatgtgca

SEQ ID NO: 22874 - DNA, 20 bp, Artificial Sequence
  chemically synthesized
cctaaacacacactcccact

SEQ ID NO: 22875 - DNA, 20 bp, Artificial Sequence
  chemically synthesized
tacaggtgtagaggaagcag

SEQ ID NO: 22876 - DNA, 20 bp, Artificial Sequence
  chemically synthesized
agaacaattactaatagacc

SEQ ID NO: 22877 - DNA, 20 bp, Artificial Sequence
  chemically synthesized
gcactagacagttcatcaag

SEQ ID NO: 22878 - DNA, 20 bp, Artificial Sequence
  chemically synthesized
caggaccagatggattcaca

SEQ ID NO: 22879 - DNA, 20 bp, Artificial Sequence
  chemically synthesized
cagggaaggacataaccaaa

SEQ ID NO: 22880 - DNA, 20 bp, Artificial Sequence
  chemically synthesized
acatgatcatctcaatagat

SEQ ID NO: 22881 - DNA, 20 bp, Artificial Sequence
  chemically synthesized
ccagggcaatcagacaaaac

SEQ ID NO: 22882 - DNA, 20 bp, Artificial Sequence
  chemically synthesized
ttaaaaccctaaagactcct

SEQ ID NO: 22883 - DNA, 20 bp, Artificial Sequence
  chemically synthesized
tacaccaacagcaaccaaat

SEQ ID NO: 22884 - DNA, 20 bp, Artificial Sequence
  chemically synthesized
ttaaaactataaaactacta

SEQ ID NO: 22885 - DNA, 20 bp, Artificial Sequence
  chemically synthesized
aagagacaagctgttgaatg

SEQ ID NO: 22886 - DNA, 20 bp, Artificial Sequence
  chemically synthesized
atttgacaaggaattaatct

SEQ ID NO: 22887 - DNA, 20 bp, Artificial Sequence
  chemically synthesized
gaattaatctccagaatata

SEQ ID NO: 22888 - DNA, 20 bp, Artificial Sequence
  chemically synthesized
gctcaacattactaatcatc

SEQ ID NO: 22889 - DNA, 20 bp, Artificial Sequence
  chemically synthesized
gagatatcatcttatgccag

SEQ ID NO: 22890 - DNA, 20 bp, Artificial Sequence
  chemically synthesized
ctgggtatttatccaaagga

SEQ ID NO: 22891 - DNA, 20 bp, Artificial Sequence
  chemically synthesized
tttatccaaaggaaaagaat

SEQ ID NO: 22892 - DNA, 20 bp, Artificial Sequence
  chemically synthesized
gtgtccatcaatggatgaat

SEQ ID NO: 22893 - DNA, 20 bp, Artificial Sequence
  chemically synthesized
ttaaacgaaataagccaggc

SEQ ID NO: 22894 - DNA, 20 bp, Artificial Sequence
  chemically synthesized
taatatcatgtaggtagaga

SEQ ID NO: 22895 - DNA, 20 bp, Artificial Sequence
  chemically synthesized
tgtaggtagagagtagaatg

SEQ ID NO: 22896 - DNA, 20 bp, Artificial Sequence
  chemically synthesized
gaatgacagaaaccagaggt

SEQ ID NO: 22897 - DNA, 20 bp, Artificial Sequence
  chemically synthesized
ttgtatatttcaaaatagta

SEQ ID NO: 22898 - DNA, 20 bp, Artificial Sequence
  chemically synthesized
tcttgaaatgttcctaacac

SEQ ID NO: 22899 - DNA, 20 bp, Artificial Sequence
  chemically synthesized
aaacacgtcatatatcaata

SEQ ID NO: 22900 - DNA, 20 bp, Artificial Sequence
  chemically synthesized
caaacttctctcttaacaag

SEQ ID NO: 22901 - DNA, 20 bp, Artificial Sequence
  chemically synthesized
ggttttattctgacattaaa

SEQ ID NO: 22902 - DNA, 20 bp, Artificial Sequence
  chemically synthesized
agtatcacaactttcacctg

SEQ ID NO: 22903 - DNA, 20 bp, Artificial Sequence
  chemically synthesized
aatcactatttcaaagaagt

SEQ ID NO: 22904 - DNA, 20 bp, Artificial Sequence
  chemically synthesized
tatacatattatacacatat

SEQ ID NO: 22905 - DNA, 20 bp, Artificial Sequence
  chemically synthesized
tccacatcagtaattagggc

SEQ ID NO: 22906 - DNA, 20 bp, Artificial Sequence
  chemically synthesized
attttatgaataaattttat

SEQ ID NO: 22907 - DNA, 20 bp, Artificial Sequence
  chemically synthesized
tacaggtagattttatatat

SEQ ID NO: 22908 - DNA, 20 bp, Artificial Sequence
  chemically synthesized
gtgagcctccatggccagct

SEQ ID NO: 22909 - DNA, 20 bp, Artificial Sequence
  chemically synthesized
gagaaattttttaaatttct

SEQ ID NO: 22910 - DNA, 20 bp, Artificial Sequence
  chemically synthesized
tttaaaagtggtggggggta

SEQ ID NO: 22911 - DNA, 20 bp, Artificial Sequence
  chemically synthesized
gatccttttcattttgctct

SEQ ID NO: 22912 - DNA, 20 bp, Artificial Sequence
  chemically synthesized
aagtgtgaagtcctcttctc

SEQ ID NO: 22913 - DNA, 20 bp, Artificial Sequence
  chemically synthesized
tagatataatttctgaaggt

SEQ ID NO: 22914 - DNA, 20 bp, Artificial Sequence
  chemically synthesized
gttctgagcaagtgtgtgca

SEQ ID NO: 22915 - DNA, 20 bp, Artificial Sequence
  chemically synthesized
agtacttcccactactgtgg

SEQ ID NO: 22916 - DNA, 20 bp, Artificial Sequence
  chemically synthesized
caaacctctaggtaactagg

SEQ ID NO: 22917 - DNA, 20 bp, Artificial Sequence
  chemically synthesized
atttgtcaattcttgaagat

SEQ ID NO: 22918 - DNA, 20 bp, Artificial Sequence
  chemically synthesized
aaaaaggttattttgaagtc

SEQ ID NO: 22919 - DNA, 20 bp, Artificial Sequence
  chemically synthesized
gcagcaagggattcttctcc

SEQ ID NO: 22920 - DNA, 20 bp, Artificial Sequence
  chemically synthesized
tgaatacatttccttgtttg

SEQ ID NO: 22921 - DNA, 20 bp, Artificial Sequence
  chemically synthesized
ataacattcattttattcat

SEQ ID NO: 22922 - DNA, 20 bp, Artificial Sequence
  chemically synthesized
tcagtttaaggggttctttt

SEQ ID NO: 22923 - DNA, 20 bp, Artificial Sequence
  chemically synthesized
gggttctttttcagaaagtt

SEQ ID NO: 22924 - DNA, 20 bp, Artificial Sequence
  chemically synthesized
aaattcaaatcattaaattt

SEQ ID NO: 22925 - DNA, 20 bp, Artificial Sequence
  chemically synthesized
ttccccttgaaagggaaatg

SEQ ID NO: 22926 - DNA, 20 bp, Artificial Sequence
  chemically synthesized
cattaatgtttgttaaatga

SEQ ID NO: 22927 - DNA, 20 bp, Artificial Sequence
  chemically synthesized
tgagctcctgcccactctct

SEQ ID NO: 22928 - DNA, 20 bp, Artificial Sequence
  chemically synthesized
tggactggaaaaatttgtga

SEQ ID NO: 22929 - DNA, 20 bp, Artificial Sequence
  chemically synthesized
aggataaagatctctgagga

SEQ ID NO: 22930 - DNA, 20 bp, Artificial Sequence
  chemically synthesized
aagaatacaaaataatttaa

SEQ ID NO: 22931 - DNA, 20 bp, Artificial Sequence
  chemically synthesized
aaataatttaaaaagaaaca

SEQ ID NO: 22932 - DNA, 20 bp, Artificial Sequence
  chemically synthesized
attctttctcactaaactac

SEQ ID NO: 22933 - DNA, 20 bp, Artificial Sequence
  chemically synthesized
ataaggtgaattctgatttt

SEQ ID NO: 22934 - DNA, 20 bp, Artificial Sequence
  chemically synthesized
tcctacataagcatagcatt

SEQ ID NO: 22935 - DNA, 20 bp, Artificial Sequence
  chemically synthesized
agcatttcatataattacta

SEQ ID NO: 22936 - DNA, 20 bp, Artificial Sequence
  chemically synthesized
gtttaattatactattttgc

SEQ ID NO: 22937 - DNA, 20 bp, Artificial Sequence
  chemically synthesized
tgaaatcttatgtgcttccc

SEQ ID NO: 22938 - DNA, 20 bp, Artificial Sequence
  chemically synthesized
accgtcctcacaatacctgc

SEQ ID NO: 22939 - DNA, 20 bp, Artificial Sequence
  chemically synthesized
acaatacctgcccagaaaga

SEQ ID NO: 22940 - DNA, 20 bp, Artificial Sequence
  chemically synthesized
agaaagacgagaaagaggag

SEQ ID NO: 22941 - DNA, 20 bp, Artificial Sequence
  chemically synthesized
ggagtctcggaggactgtaa

SEQ ID NO: 22942 - DNA, 20 bp, Artificial Sequence
  chemically synthesized
cttgtgtatgtgttgaagag

SEQ ID NO: 22943 - DNA, 20 bp, Artificial Sequence
  chemically synthesized
aaaatccatattatgacaac

SEQ ID NO: 22944 - DNA, 20 bp, Artificial Sequence
  chemically synthesized
tagtaattatatgaaatgct

SEQ ID NO: 22945 - DNA, 20 bp, Artificial Sequence
  chemically synthesized
ggcaaaatactgtgctcctt

SEQ ID NO: 22946 - DNA, 20 bp, Artificial Sequence
  chemically synthesized
ttatgtaggaattataaaat

SEQ ID NO: 22947 - DNA, 20 bp, Artificial Sequence
  chemically synthesized
actattgaaggaacattagc

SEQ ID NO: 22948 - DNA, 20 bp, Artificial Sequence
  chemically synthesized
gctgagttcctcaagatctt

SEQ ID NO: 22949 - DNA, 20 bp, Artificial Sequence
  chemically synthesized
taaaggatctgaaataataa

SEQ ID NO: 22950 - DNA, 20 bp, Artificial Sequence
  chemically synthesized
atggcatgcattctgaaaaa

SEQ ID NO: 22951 - DNA, 20 bp, Artificial Sequence
  chemically synthesized
ttttgcctatgtagaagtgg

SEQ ID NO: 22952 - DNA, 20 bp, Artificial Sequence
  chemically synthesized
tcttattctctgtagtttag

SEQ ID NO: 22953 - DNA, 20 bp, Artificial Sequence
  chemically synthesized
attctctgtagtttagtgag

SEQ ID NO: 22954 - DNA, 20 bp, Artificial Sequence
  chemically synthesized
gtgagaaagaatctaggagg

SEQ ID NO: 22955 - DNA, 20 bp, Artificial Sequence
  chemically synthesized
tctagaacagtgcctggtac

SEQ ID NO: 22956 - DNA, 20 bp, Artificial Sequence
  chemically synthesized
ttcacttttttactattatg

SEQ ID NO: 22957 - DNA, 20 bp, Artificial Sequence
  chemically synthesized
caaggaaatgtattcacatc

SEQ ID NO: 22958 - DNA, 20 bp, Artificial Sequence
  chemically synthesized
aaacaaaaggtttcttagga

SEQ ID NO: 22959 - DNA, 20 bp, Artificial Sequence
  chemically synthesized
aggagaagaatcccttgctg

SEQ ID NO: 22960 - DNA, 20 bp, Artificial Sequence
  chemically synthesized
agaggcgagggagatagagt

SEQ ID NO: 22961 - DNA, 20 bp, Artificial Sequence
  chemically synthesized
cagaactgattcttaatctt

SEQ ID NO: 22962 - DNA, 20 bp, Artificial Sequence
  chemically synthesized
gaaggataaatagctaaagg

SEQ ID NO: 22963 - DNA, 20 bp, Artificial Sequence
  chemically synthesized
ctcagaacattacaaactct

SEQ ID NO: 22964 - DNA, 20 bp, Artificial Sequence
  chemically synthesized
acacataatgaaagttaatt

SEQ ID NO: 22965 - DNA, 20 bp, Artificial Sequence
  chemically synthesized
tgcttccctcttaaaatgga

SEQ ID NO: 22966 - DNA, 20 bp, Artificial Sequence
  chemically synthesized
catggtacaagtggcacagg

SEQ ID NO: 22967 - DNA, 20 bp, Artificial Sequence
  chemically synthesized
caagtggcacagggaagaat

SEQ ID NO: 22968 - DNA, 20 bp, Artificial Sequence
  chemically synthesized
ctagagtcaaagtggttatg

SEQ ID NO: 22969 - DNA, 20 bp, Artificial Sequence
  chemically synthesized
ctcaaggagtttctaaacct

SEQ ID NO: 22970 - DNA, 20 bp, Artificial Sequence
  chemically synthesized
cacttttcaaggctgaggtg

SEQ ID NO: 22971 - DNA, 20 bp, Artificial Sequence
  chemically synthesized
catagggagaccctgtttct

SEQ ID NO: 22972 - DNA, 20 bp, Artificial Sequence
  chemically synthesized
taataatgttgtgaaaatta

SEQ ID NO: 22973 - DNA, 20 bp, Artificial Sequence
  chemically synthesized
ttgcatttttaaacacaaaa

SEQ ID NO: 22974 - DNA, 20 bp, Artificial Sequence
  chemically synthesized
ctttgattttaactgaggat

SEQ ID NO: 22975 - DNA, 20 bp, Artificial Sequence
  chemically synthesized
agagagagcgagagagaggc

SEQ ID NO: 22976 - DNA, 20 bp, Artificial Sequence
  chemically synthesized
aagtattttcttttttaatg

SEQ ID NO: 22977 - DNA, 20 bp, Artificial Sequence
  chemically synthesized
gctaaaatggtgttggaata

SEQ ID NO: 22978 - DNA, 20 bp, Artificial Sequence
  chemically synthesized
tttggtgtgatgctggcttc

SEQ ID NO: 22979 - DNA, 20 bp, Artificial Sequence
  chemically synthesized
gttccttctttatctgtctt

SEQ ID NO: 22980 - DNA, 20 bp, Artificial Sequence
  chemically synthesized
aattcctctttgaatgtcta

SEQ ID NO: 22981 - DNA, 20 bp, Artificial Sequence
  chemically synthesized
cctatcatatggtctacctt

SEQ ID NO: 22982 - DNA, 20 bp, Artificial Sequence
  chemically synthesized
aaatttccacgcgctgttga

SEQ ID NO: 22983 - DNA, 20 bp, Artificial Sequence
  chemically synthesized
taactcaactccaggtaagg

SEQ ID NO: 22984 - DNA, 20 bp, Artificial Sequence
  chemically synthesized
gctattttgatagcggtcat

SEQ ID NO: 22985 - DNA, 20 bp, Artificial Sequence
  chemically synthesized
agctagtttattattggtgt

SEQ ID NO: 22986 - DNA, 20 bp, Artificial Sequence
  chemically synthesized
atcaggataatactggcctc

SEQ ID NO: 22987 - DNA, 20 bp, Artificial Sequence
  chemically synthesized
ggcctcagagaatgagttag

SEQ ID NO: 22988 - DNA, 20 bp, Artificial Sequence
  chemically synthesized
tccttcctgtttaattttta

SEQ ID NO: 22989 - DNA, 20 bp, Artificial Sequence
  chemically synthesized
tcttggtaggtggtatgtgt

SEQ ID NO: 22990 - DNA, 20 bp, Artificial Sequence
  chemically synthesized
tgatctatctgatgctgaga

SEQ ID NO: 22991 - DNA, 20 bp, Artificial Sequence
  chemically synthesized
ctggtgttgagtgtgaatgt

SEQ ID NO: 22992 - DNA, 20 bp, Artificial Sequence
  chemically synthesized
ttccttcaaatttttcttgc

SEQ ID NO: 22993 - DNA, 20 bp, Artificial Sequence
  chemically synthesized
ctggcctgtgaggtttctgc

SEQ ID NO: 22994 - DNA, 20 bp, Artificial Sequence
  chemically synthesized
tttcaataaactcttcagtt

SEQ ID NO: 22995 - DNA, 20 bp, Artificial Sequence
  chemically synthesized
aacattttggattctttttt

SEQ ID NO: 22996 - DNA, 20 bp, Artificial Sequence
  chemically synthesized
ttccactggcttatgttgct

SEQ ID NO: 22997 - DNA, 20 bp, Artificial Sequence
  chemically synthesized
tgatgaggttgtgctggaga

SEQ ID NO: 22998 - DNA, 20 bp, Artificial Sequence
  chemically synthesized
gagtgatcctcaggccccca

SEQ ID NO: 22999 - DNA, 20 bp, Artificial Sequence
  chemically synthesized
tgtcacttctctgttgaatt

SEQ ID NO: 23000 - DNA, 20 bp, Artificial Sequence
  chemically synthesized
aatcatttgtttcttcaaat

SEQ ID NO: 23001 - DNA, 20 bp, Artificial Sequence
  chemically synthesized
catctaataaatgtgtacca

SEQ ID NO: 23002 - DNA, 20 bp, Artificial Sequence
  chemically synthesized
ctcctggaaaagatgaagat

SEQ ID NO: 23003 - DNA, 20 bp, Artificial Sequence
  chemically synthesized
gaaaataagtctacagaaga

SEQ ID NO: 23004 - DNA, 20 bp, Artificial Sequence
  chemically synthesized
tttttgtggatagtggtttt

SEQ ID NO: 23005 - DNA, 20 bp, Artificial Sequence
  chemically synthesized
agatgtgactcccacacttt

SEQ ID NO: 23006 - DNA, 20 bp, Artificial Sequence
  chemically synthesized
ttgatggtttctaaaattgt

SEQ ID NO: 23007 - DNA, 20 bp, Artificial Sequence
  chemically synthesized
agttactggaataatacatt

SEQ ID NO: 23008 - DNA, 20 bp, Artificial Sequence
  chemically synthesized
aacttacaatcatggcagaa

SEQ ID NO: 23009 - DNA, 20 bp, Artificial Sequence
  chemically synthesized
tagttctgtttctagttctt

SEQ ID NO: 23010 - DNA, 20 bp, Artificial Sequence
  chemically synthesized
ggcaggaagcatccagcatg

SEQ ID NO: 23011 - DNA, 20 bp, Artificial Sequence
  chemically synthesized
acccgtgaatcctgtctatg

SEQ ID NO: 23012 - DNA, 20 bp, Artificial Sequence
  chemically synthesized
gaaaaggctgagtggtgtcc

SEQ ID NO: 23013 - DNA, 20 bp, Artificial Sequence
  chemically synthesized
cgttgtccttcagggatgtc

SEQ ID NO: 23014 - DNA, 20 bp, Artificial Sequence
  chemically synthesized
ccatcggtgcagtctcaggg

SEQ ID NO: 23015 - DNA, 20 bp, Artificial Sequence
  chemically synthesized
ccactttatggctagatgga

SEQ ID NO: 23016 - DNA, 20 bp, Artificial Sequence
  chemically synthesized
atcatattaagcagccaact

SEQ ID NO: 23017 - DNA, 20 bp, Artificial Sequence
  chemically synthesized
aatctgtattagggttctac

SEQ ID NO: 23018 - DNA, 20 bp, Artificial Sequence
  chemically synthesized
tattagggttctacagagaa

SEQ ID NO: 23019 - DNA, 20 bp, Artificial Sequence
  chemically synthesized
agttcaatgttccagggcag

SEQ ID NO: 23020 - DNA, 20 bp, Artificial Sequence
  chemically synthesized
ggcaggaagaatccagcatg

SEQ ID NO: 23021 - DNA, 20 bp, Artificial Sequence
  chemically synthesized
ggtagcagcaatattagagg

SEQ ID NO: 23022 - DNA, 20 bp, Artificial Sequence
  chemically synthesized
ggggctgcatgcactggtca

SEQ ID NO: 23023 - DNA, 20 bp, Artificial Sequence
  chemically synthesized
tacttcttctttctttggag

SEQ ID NO: 23024 - DNA, 20 bp, Artificial Sequence
  chemically synthesized
tctcctcccttactaggaag

SEQ ID NO: 23025 - DNA, 20 bp, Artificial Sequence
  chemically synthesized
aggaagagagaaataccatg

SEQ ID NO: 23026 - DNA, 20 bp, Artificial Sequence
  chemically synthesized
gaagggactttaaaacatgc

SEQ ID NO: 23027 - DNA, 20 bp, Artificial Sequence
  chemically synthesized
aattgctaacctgaatgata

SEQ ID NO: 23028 - DNA, 20 bp, Artificial Sequence
  chemically synthesized
cctccaaagaaagaagaagt

SEQ ID NO: 23029 - DNA, 20 bp, Artificial Sequence
  chemically synthesized
aatattgctgctacctctat

SEQ ID NO: 23030 - DNA, 20 bp, Artificial Sequence
  chemically synthesized
atccagcaagtccacatcta

SEQ ID NO: 23031 - DNA, 20 bp, Artificial Sequence
  chemically synthesized
agaatttatgaccaagtcct

SEQ ID NO: 23032 - DNA, 20 bp, Artificial Sequence
  chemically synthesized
tcctcaaaactaaacacaac

SEQ ID NO: 23033 - DNA, 20 bp, Artificial Sequence
  chemically synthesized
aaactaaacacaacaaaaac

SEQ ID NO: 23034 - DNA, 20 bp, Artificial Sequence
  chemically synthesized
tacaaggaactcaacaacaa

SEQ ID NO: 23035 - DNA, 20 bp, Artificial Sequence
  chemically synthesized
atggacctctatgattagtc

SEQ ID NO: 23036 - DNA, 20 bp, Artificial Sequence
  chemically synthesized
tatttcctccttcttttgtt

SEQ ID NO: 23037 - DNA, 20 bp, Artificial Sequence
  chemically synthesized
ggatataaagcaggcagaaa

SEQ ID NO: 23038 - DNA, 20 bp, Artificial Sequence
  chemically synthesized
aataatcagagaatgcaaat

SEQ ID NO: 23039 - DNA, 20 bp, Artificial Sequence
  chemically synthesized
tggctatcattataaagttc

SEQ ID NO: 23040 - DNA, 20 bp, Artificial Sequence
  chemically synthesized
taggagtatggtgaggactg

SEQ ID NO: 23041 - DNA, 20 bp, Artificial Sequence
  chemically synthesized
catttttcactgctgtcttt

SEQ ID NO: 23042 - DNA, 20 bp, Artificial Sequence
  chemically synthesized
aaatatatctaagctttctt

SEQ ID NO: 23043 - DNA, 20 bp, Artificial Sequence
  chemically synthesized
tatttacattttttatcctt

SEQ ID NO: 23044 - DNA, 20 bp, Artificial Sequence
  chemically synthesized
tgcatcttactcagagatct

SEQ ID NO: 23045 - DNA, 20 bp, Artificial Sequence
  chemically synthesized
ttgggaaatgaaatgaaaag

SEQ ID NO: 23046 - DNA, 20 bp, Artificial Sequence
  chemically synthesized
tctttcagtctattagaaat

SEQ ID NO: 23047 - DNA, 20 bp, Artificial Sequence
  chemically synthesized
agaaaaaagtcttcccctac

SEQ ID NO: 23048 - DNA, 20 bp, Artificial Sequence
  chemically synthesized
cccctacaaaaacaaattta

SEQ ID NO: 23049 - DNA, 20 bp, Artificial Sequence
  chemically synthesized
aaacaataaaaagaaatcag

SEQ ID NO: 23050 - DNA, 20 bp, Artificial Sequence
  chemically synthesized
aagaaatacaaaatacattc

SEQ ID NO: 23051 - DNA, 20 bp, Artificial Sequence
  chemically synthesized
tacgtaacaacacaatagct

SEQ ID NO: 23052 - DNA, 20 bp, Artificial Sequence
  chemically synthesized
aagccaaagagtaagaactc

SEQ ID NO: 23053 - DNA, 20 bp, Artificial Sequence
  chemically synthesized
tatacaactaactggtagag

SEQ ID NO: 23054 - DNA, 20 bp, Artificial Sequence
  chemically synthesized
gaaaaggaaggaaggaagaa

SEQ ID NO: 23055 - DNA, 20 bp, Artificial Sequence
  chemically synthesized
aaggaaggaagaaaaaaaca

SEQ ID NO: 23056 - DNA, 20 bp, Artificial Sequence
  chemically synthesized
caaaacaaacaaactaaaaa

SEQ ID NO: 23057 - DNA, 20 bp, Artificial Sequence
  chemically synthesized
caaacaaactaaaaaaaaaa

SEQ ID NO: 23058 - DNA, 20 bp, Artificial Sequence
  chemically synthesized
atagactggctaaatagatt

SEQ ID NO: 23059 - DNA, 20 bp, Artificial Sequence
  chemically synthesized
gataaaattgactttaaata

SEQ ID NO: 23060 - DNA, 20 bp, Artificial Sequence
  chemically synthesized
cttctcagaccacaatggaa

SEQ ID NO: 23061 - DNA, 20 bp, Artificial Sequence
  chemically synthesized
aactagaaatcaataacaag

SEQ ID NO: 23062 - DNA, 20 bp, Artificial Sequence
  chemically synthesized
atcaataacaagaaaaactt

SEQ ID NO: 23063 - DNA, 20 bp, Artificial Sequence
  chemically synthesized
tatcaataaacacttaaatt

SEQ ID NO: 23064 - DNA, 20 bp, Artificial Sequence
  chemically synthesized
acaagctagaaaagcaagaa

SEQ ID NO: 23065 - DNA, 20 bp, Artificial Sequence
  chemically synthesized
agaaaagcaagaacaaaacc

SEQ ID NO: 23066 - DNA, 20 bp, Artificial Sequence
  chemically synthesized
aagaacttaatgaaatagag

SEQ ID NO: 23067 - DNA, 20 bp, Artificial Sequence
  chemically synthesized
ttatgaacaaccatacacta

SEQ ID NO: 23068 - DNA, 20 bp, Artificial Sequence
  chemically synthesized
gattgaattaagaaagaata

SEQ ID NO: 23069 - DNA, 20 bp, Artificial Sequence
  chemically synthesized
aattttaccaaactttcaaa

SEQ ID NO: 23070 - DNA, 20 bp, Artificial Sequence
  chemically synthesized
gacaaggatgcaagtaaaaa

SEQ ID NO: 23071 - DNA, 20 bp, Artificial Sequence
  chemically synthesized
atcacatcaacaaaaagaac

SEQ ID NO: 23072 - DNA, 20 bp, Artificial Sequence
  chemically synthesized
atttaacattccttcatgat

SEQ ID NO: 23073 - DNA, 20 bp, Artificial Sequence
  chemically synthesized
tgacatgattttatacctag

SEQ ID NO: 23074 - DNA, 20 bp, Artificial Sequence
  chemically synthesized
taaatttaaccaaggaaccg

SEQ ID NO: 23075 - DNA, 20 bp, Artificial Sequence
  chemically synthesized
aaccgaaaaacctctattcg

SEQ ID NO: 23076 - DNA, 20 bp, Artificial Sequence
  chemically synthesized
aacctctattcggaaaacta

SEQ ID NO: 23077 - DNA, 20 bp, Artificial Sequence
  chemically synthesized
gtcatttttcacagaaatgg

SEQ ID NO: 23078 - DNA, 20 bp, Artificial Sequence
  chemically synthesized
gatatccatgtgcaaaagaa

SEQ ID NO: 23079 - DNA, 20 bp, Artificial Sequence
  chemically synthesized
ggccaccaaaagtgagtagg

SEQ ID NO: 23080 - DNA, 20 bp, Artificial Sequence
  chemically synthesized
ctatgaagccagcatcacac

SEQ ID NO: 23081 - DNA, 20 bp, Artificial Sequence
  chemically synthesized
ggaaggacataaccaaaaaa

SEQ ID NO: 23082 - DNA, 20 bp, Artificial Sequence
  chemically synthesized
tacaccacataaacagattt

SEQ ID NO: 23083 - DNA, 20 bp, Artificial Sequence
  chemically synthesized
tcctagccagggcaatcaga

SEQ ID NO: 23084 - DNA, 20 bp, Artificial Sequence
  chemically synthesized
atgatatgatcatttacctt

SEQ ID NO: 23085 - DNA, 20 bp, Artificial Sequence
  chemically synthesized
aacccctatttattgccata

SEQ ID NO: 23086 - DNA, 20 bp, Artificial Sequence
  chemically synthesized
atggattaaagacttaaata

SEQ ID NO: 23087 - DNA, 20 bp, Artificial Sequence
  chemically synthesized
aaagacttaaatataaaact

SEQ ID NO: 23088 - DNA, 20 bp, Artificial Sequence
  chemically synthesized
aaatataaaacttaaaacta

SEQ ID NO: 23089 - DNA, 20 bp, Artificial Sequence
  chemically synthesized
aaactataaaactactaaaa

SEQ ID NO: 23090 - DNA, 20 bp, Artificial Sequence
  chemically synthesized
ctcaaacaactcaacagtgg

SEQ ID NO: 23091 - DNA, 20 bp, Artificial Sequence
  chemically synthesized
atcatcagagaaatgcaaat

SEQ ID NO: 23092 - DNA, 20 bp, Artificial Sequence
  chemically synthesized
aaattagtatagccactatg

SEQ ID NO: 23093 - DNA, 20 bp, Artificial Sequence
  chemically synthesized
aaagtagggtgattatagtt

SEQ ID NO: 23094 - DNA, 20 bp, Artificial Sequence
  chemically synthesized
acatataacaatgaggtggt

SEQ ID NO: 23095 - DNA, 20 bp, Artificial Sequence
  chemically synthesized
ctaatctcaccctcctgttc

SEQ ID NO: 23096 - DNA, 20 bp, Artificial Sequence
  chemically synthesized
aggagaaaaagaggaagaac

SEQ ID NO: 23097 - DNA, 20 bp, Artificial Sequence
  chemically synthesized
ctctagagaaaagccatttg

SEQ ID NO: 23098 - DNA, 20 bp, Artificial Sequence
  chemically synthesized
ggaaaacttctgtgttaaca

SEQ ID NO: 23099 - DNA, 20 bp, Artificial Sequence
  chemically synthesized
agcaatacgttggcttaggc

SEQ ID NO: 23100 - DNA, 20 bp, Artificial Sequence
  chemically synthesized
atttttcccccacatttggg

SEQ ID NO: 23101 - DNA, 20 bp, Artificial Sequence
  chemically synthesized
actggtaacagtgcttcttc

SEQ ID NO: 23102 - DNA, 20 bp, Artificial Sequence
  chemically synthesized
cattgttcataccctggaga

SEQ ID NO: 23103 - DNA, 20 bp, Artificial Sequence
  chemically synthesized
gaagtctgagaattagtacc

SEQ ID NO: 23104 - DNA, 20 bp, Artificial Sequence
  chemically synthesized
atacatttccttgtttgcca

SEQ ID NO: 23105 - DNA, 20 bp, Artificial Sequence
  chemically synthesized
atctataggacatttccttt

SEQ ID NO: 23106 - DNA, 20 bp, Artificial Sequence
  chemically synthesized
cattgtggggacctctccac

SEQ ID NO: 23107 - DNA, 20 bp, Artificial Sequence
  chemically synthesized
taaaggcagcttaggggttg

SEQ ID NO: 23108 - DNA, 20 bp, Artificial Sequence
  chemically synthesized
gctcctgcccactctctaga

SEQ ID NO: 23109 - DNA, 20 bp, Artificial Sequence
  chemically synthesized
caggaactttgggcatattt

SEQ ID NO: 23110 - DNA, 20 bp, Artificial Sequence
  chemically synthesized
gtgactagaaaaaggacatt

SEQ ID NO: 23111 - DNA, 20 bp, Artificial Sequence
  chemically synthesized
atcttgaggaactcagcctt

SEQ ID NO: 23112 - DNA, 20 bp, Artificial Sequence
  chemically synthesized
cttttgagaagctcctgaat

SEQ ID NO: 23113 - DNA, 20 bp, Artificial Sequence
  chemically synthesized
tattttgctgagaaaaattt

SEQ ID NO: 23114 - DNA, 20 bp, Artificial Sequence
  chemically synthesized
aataaagaaaatcaaattga

SEQ ID NO: 23115 - DNA, 20 bp, Artificial Sequence
  chemically synthesized
taaagacatctgtaaaatta

SEQ ID NO: 23116 - DNA, 20 bp, Artificial Sequence
  chemically synthesized
ggacatagcttattggtgga

SEQ ID NO: 23117 - DNA, 20 bp, Artificial Sequence
  chemically synthesized
attatgtaagaattaaatat

SEQ ID NO: 23118 - DNA, 20 bp, Artificial Sequence
  chemically synthesized
ggaaatgtattcacatccaa

SEQ ID NO: 23119 - DNA, 20 bp, Artificial Sequence
  chemically synthesized
ccatgaacaatggaaacgtg

SEQ ID NO: 23120 - DNA, 20 bp, Artificial Sequence
  chemically synthesized
tagttacctagaggtttggg

SEQ ID NO: 23121 - DNA, 20 bp, Artificial Sequence
  chemically synthesized
gtggcacagggaagaattca

SEQ ID NO: 23122 - DNA, 20 bp, Artificial Sequence
  chemically synthesized
gtgaaacacacgatctatgt

SEQ ID NO: 23123 - DNA, 20 bp, Artificial Sequence
  chemically synthesized
ttcaatgacctacgctgtgg

SEQ ID NO: 23124 - DNA, 20 bp, Artificial Sequence
  chemically synthesized
tttcttttttaatgtcagaa

SEQ ID NO: 23125 - DNA, 20 bp, Artificial Sequence
  chemically synthesized
aaatgtgctttataaatagt

SEQ ID NO: 23126 - DNA, 20 bp, Artificial Sequence
  chemically synthesized
aagtgtgctatataaacagt

SEQ ID NO: 23127 - DNA, 20 bp, Artificial Sequence
  chemically synthesized
tcaaggataaaaaatgtaaa

SEQ ID NO: 23128 - DNA, 20 bp, Artificial Sequence
  chemically synthesized
aacttctttttgatacagta

SEQ ID NO: 23129 - DNA, 20 bp, Artificial Sequence
  chemically synthesized
ttaagaaatatagtagctat

SEQ ID NO: 23130 - DNA, 20 bp, Artificial Sequence
  chemically synthesized
gactgggtaatttataagga

SEQ ID NO: 23131 - DNA, 20 bp, Artificial Sequence
  chemically synthesized
aaagggggaaaagccgctta

SEQ ID NO: 23132 - DNA, 20 bp, Artificial Sequence
  chemically synthesized
cataattatgcctaacatac

SEQ ID NO: 23133 - DNA, 20 bp, Artificial Sequence
  chemically synthesized
accttaattccaggacatgg

SEQ ID NO: 23134 - DNA, 20 bp, Artificial Sequence
  chemically synthesized
cttctgttctggactccact

SEQ ID NO: 23135 - DNA, 20 bp, Artificial Sequence
  chemically synthesized
gcagccaactccagaaaccc

SEQ ID NO: 23136 - DNA, 20 bp, Artificial Sequence
  chemically synthesized
ctcacatgttcacaaggtcc

SEQ ID NO: 23137 - DNA, 20 bp, Artificial Sequence
  chemically synthesized
gtagcaggacaagctgcata

SEQ ID NO: 23138 - DNA, 20 bp, Artificial Sequence
  chemically synthesized
ttggaggcagaaattgggca

SEQ ID NO: 23139 - DNA, 20 bp, Artificial Sequence
  chemically synthesized
taggagatttcttcataatt

SEQ ID NO: 23140 - DNA, 20 bp, Artificial Sequence
  chemically synthesized
catgcacctagaagggactt

SEQ ID NO: 23141 - DNA, 20 bp, Artificial Sequence
  chemically synthesized
actgtgattcagacaaaggc

SEQ ID NO: 23142 - DNA, 20 bp, Artificial Sequence
  chemically synthesized
ttctctccccattcatctgc

SEQ ID NO: 23143 - DNA, 20 bp, Artificial Sequence
  chemically synthesized
cctccaactgttaaaaggaa

SEQ ID NO: 23144 - DNA, 20 bp, Artificial Sequence
  chemically synthesized
tattatcattcaggttagca

SEQ ID NO: 23145 - DNA, 20 bp, Artificial Sequence
  chemically synthesized
taataagggatggaaatgag

SEQ ID NO: 23146 - DNA, 20 bp, Artificial Sequence
  chemically synthesized
catttaggatccactaagcc

SEQ ID NO: 23147 - DNA, 20 bp, Artificial Sequence
  chemically synthesized
aagggacaccaacgaatggt

SEQ ID NO: 23148 - DNA, 20 bp, Artificial Sequence
  chemically synthesized
actgctttgttcaattctgt

SEQ ID NO: 23149 - DNA, 20 bp, Artificial Sequence
  chemically synthesized
tatgttcaaataacagctgc

SEQ ID NO: 23150 - DNA, 20 bp, Artificial Sequence
  chemically synthesized
agtaccttttgataaggaga

SEQ ID NO: 23151 - DNA, 20 bp, Artificial Sequence
  chemically synthesized
tgcttatagatgttcataga

SEQ ID NO: 23152 - DNA, 20 bp, Artificial Sequence
  chemically synthesized
agggaggagaccacccttca

SEQ ID NO: 23153 - DNA, 20 bp, Artificial Sequence
  chemically synthesized
acctggccagttatgttatc

SEQ ID NO: 23154 - DNA, 20 bp, Artificial Sequence
  chemically synthesized
ggacaggaattgctcactct

SEQ ID NO: 23155 - DNA, 20 bp, Artificial Sequence
  chemically synthesized
cttctttaactcggtgtctg

SEQ ID NO: 23156 - DNA, 20 bp, Artificial Sequence
  chemically synthesized
ggtgtctgaggggttttgta

SEQ ID NO: 23157 - DNA, 20 bp, Artificial Sequence
  chemically synthesized
aattaaggagagtatgaaaa

SEQ ID NO: 23158 - DNA, 20 bp, Artificial Sequence
  chemically synthesized
caaatgggggtaaaataata

SEQ ID NO: 23159 - DNA, 20 bp, Artificial Sequence
  chemically synthesized
agggaaagacaggctctaaa

SEQ ID NO: 23160 - DNA, 20 bp, Artificial Sequence
  chemically synthesized
aatgggacttaattaaacta

SEQ ID NO: 23161 - DNA, 20 bp, Artificial Sequence
  chemically synthesized
atggttaatactgagtgtca

SEQ ID NO: 23162 - DNA, 20 bp, Artificial Sequence
  chemically synthesized
gtctgtgagggtgttaccaa

SEQ ID NO: 23163 - DNA, 20 bp, Artificial Sequence
  chemically synthesized
aggcagaaaaatgtgaaaag

SEQ ID NO: 23164 - DNA, 20 bp, Artificial Sequence
  chemically synthesized
gaaaaatgtgaaaaggctag

SEQ ID NO: 23165 - DNA, 20 bp, Artificial Sequence
  chemically synthesized
agcctacatttttctcccat

SEQ ID NO: 23166 - DNA, 20 bp, Artificial Sequence
  chemically synthesized
gaacattgaactccaggttc

SEQ ID NO: 23167 - DNA, 20 bp, Artificial Sequence
  chemically synthesized
tcttcagctttgggactccg

SEQ ID NO: 23168 - DNA, 20 bp, Artificial Sequence
  chemically synthesized
tgttcctcagctggcagatg

SEQ ID NO: 23169 - DNA, 20 bp, Artificial Sequence
  chemically synthesized
agatatatatctcctattaa

SEQ ID NO: 23170 - DNA, 20 bp, Artificial Sequence
  chemically synthesized
gtttctctgtagaaccctaa

SEQ ID NO: 23171 - DNA, 20 bp, Artificial Sequence
  chemically synthesized
attaaggatggagttctttc

SEQ ID NO: 23172 - DNA, 20 bp, Artificial Sequence
  chemically synthesized
tggagttctttcattggttt

SEQ ID NO: 23173 - DNA, 20 bp, Artificial Sequence
  chemically synthesized
gttttggggtttctggagtt

SEQ ID NO: 23174 - DNA, 20 bp, Artificial Sequence
  chemically synthesized
tttctggagttggctgctta

SEQ ID NO: 23175 - DNA, 20 bp, Artificial Sequence
  chemically synthesized
cactgataatccttggcatc

SEQ ID NO: 23176 - DNA, 20 bp, Artificial Sequence
  chemically synthesized
aaaataaatgcatttgacac

SEQ ID NO: 23177 - DNA, 20 bp, Artificial Sequence
  chemically synthesized
tgcatttgacactcttgatt

SEQ ID NO: 23178 - DNA, 20 bp, Artificial Sequence
  chemically synthesized
ggaacatagtgaagttggtt

SEQ ID NO: 23179 - DNA, 20 bp, Artificial Sequence
  chemically synthesized
actcaggagtatatcaactc

SEQ ID NO: 23180 - DNA, 20 bp, Artificial Sequence
  chemically synthesized
gagcaagaagtagcaaacac

SEQ ID NO: 23181 - DNA, 20 bp, Artificial Sequence
  chemically synthesized
ggacagaggatgggaaataa

SEQ ID NO: 23182 - DNA, 20 bp, Artificial Sequence
  chemically synthesized
agtaaaatttataggggtcc

SEQ ID NO: 23183 - DNA, 20 bp, Artificial Sequence
  chemically synthesized
cacaacgcctagtgggccta

SEQ ID NO: 23184 - DNA, 20 bp, Artificial Sequence
  chemically synthesized
ggattttggaggcaacatat

SEQ ID NO: 23185 - DNA, 20 bp, Artificial Sequence
  chemically synthesized
atcgagtgatccaaaaggct

SEQ ID NO: 23186 - DNA, 20 bp, Artificial Sequence
  chemically synthesized
atatgacctagcagatccaa

SEQ ID NO: 23187 - DNA, 20 bp, Artificial Sequence
  chemically synthesized
gtgtcagtgccagataggga

SEQ ID NO: 23188 - DNA, 20 bp, Artificial Sequence
  chemically synthesized
ctgaatcacagcggaggcct

SEQ ID NO: 23189 - DNA, 20 bp, Artificial Sequence
  chemically synthesized
agaaagctcttggcctgtta

SEQ ID NO: 23190 - DNA, 20 bp, Artificial Sequence
  chemically synthesized
tgaactgcctatcatgaact

SEQ ID NO: 23191 - DNA, 20 bp, Artificial Sequence
  chemically synthesized
agcaaatggaagtggtatat

SEQ ID NO: 23192 - DNA, 20 bp, Artificial Sequence
  chemically synthesized
tggaagtggtatatatgcga

SEQ ID NO: 23193 - DNA, 20 bp, Artificial Sequence
  chemically synthesized
catggtctccactcctgaca

SEQ ID NO: 23194 - DNA, 20 bp, Artificial Sequence
  chemically synthesized
tttgcacagaaggagaaatg

SEQ ID NO: 23195 - DNA, 20 bp, Artificial Sequence
  chemically synthesized
agaaggagaaatggccagat

SEQ ID NO: 23196 - DNA, 20 bp, Artificial Sequence
  chemically synthesized
cttattcatgggctgtagcc

SEQ ID NO: 23197 - DNA, 20 bp, Artificial Sequence
  chemically synthesized
agaggtatgtggatggacct

SEQ ID NO: 23198 - DNA, 20 bp, Artificial Sequence
  chemically synthesized
caatgggtgacctcagcaga

SEQ ID NO: 23199 - DNA, 20 bp, Artificial Sequence
  chemically synthesized
cacagttgcagggatggaag

SEQ ID NO: 23200 - DNA, 20 bp, Artificial Sequence
  chemically synthesized
aaagctgacctggccacagc

SEQ ID NO: 23201 - DNA, 20 bp, Artificial Sequence
  chemically synthesized
cagccagctacctggtggca

SEQ ID NO: 23202 - DNA, 20 bp, Artificial Sequence
  chemically synthesized
tcttccatcatggaaagggc

SEQ ID NO: 23203 - DNA, 20 bp, Artificial Sequence
  chemically synthesized
aatagacacttactctggat

SEQ ID NO: 23204 - DNA, 20 bp, Artificial Sequence
  chemically synthesized
gggtttcccaatcctgaact

SEQ ID NO: 23205 - DNA, 20 bp, Artificial Sequence
  chemically synthesized
tgtcatggtattccacacag

SEQ ID NO: 23206 - DNA, 20 bp, Artificial Sequence
  chemically synthesized
catgatccctatcatcctga

SEQ ID NO: 23207 - DNA, 20 bp, Artificial Sequence
  chemically synthesized
ttttgaatggccttttgaag

SEQ ID NO: 23208 - DNA, 20 bp, Artificial Sequence
  chemically synthesized
aatcagtgtccaatatatgg

SEQ ID NO: 23209 - DNA, 20 bp, Artificial Sequence
  chemically synthesized
tggtactgtttctcccatag

SEQ ID NO: 23210 - DNA, 20 bp, Artificial Sequence
  chemically synthesized
tagtgttccactagcaaaat

SEQ ID NO: 23211 - DNA, 20 bp, Artificial Sequence
  chemically synthesized
ttcccatggcattatgttct

SEQ ID NO: 23212 - DNA, 20 bp, Artificial Sequence
  chemically synthesized
actgccgccaggtgacacaa

SEQ ID NO: 23213 - DNA, 20 bp, Artificial Sequence
  chemically synthesized
tgattccattaaactgcaaa

SEQ ID NO: 23214 - DNA, 20 bp, Artificial Sequence
  chemically synthesized
gagagttacagtgttggctg

SEQ ID NO: 23215 - DNA, 20 bp, Artificial Sequence
  chemically synthesized
ggagatccattagggtgtct

SEQ ID NO: 23216 - DNA, 20 bp, Artificial Sequence
  chemically synthesized
ttccaggcaggactacaaat

SEQ ID NO: 23217 - DNA, 20 bp, Artificial Sequence
  chemically synthesized
aaaaaagacaagacctgctg

SEQ ID NO: 23218 - DNA, 20 bp, Artificial Sequence
  chemically synthesized
tttttcctttatcatgtgac

SEQ ID NO: 23219 - DNA, 20 bp, Artificial Sequence
  chemically synthesized
atatcagcatttaagtattg

SEQ ID NO: 23220 - DNA, 20 bp, Artificial Sequence
  chemically synthesized
ttatgtaatagcatttgcaa

SEQ ID NO: 23221 - DNA, 20 bp, Artificial Sequence
  chemically synthesized
gcattttcaattgcacgaag

SEQ ID NO: 23222 - DNA, 20 bp, Artificial Sequence
  chemically synthesized
atggttaatactgagtgtca

SEQ ID NO: 23223 - DNA, 20 bp, Artificial Sequence
  chemically synthesized
taatactgagtgtcaacttg

SEQ ID NO: 23224 - DNA, 20 bp, Artificial Sequence
  chemically synthesized
gtctgtgagggtattgccaa

SEQ ID NO: 23225 - DNA, 20 bp, Artificial Sequence
  chemically synthesized
aaaacatgtgaaaatcctgg

SEQ ID NO: 23226 - DNA, 20 bp, Artificial Sequence
  chemically synthesized
ctacatctttctcccatgct

SEQ ID NO: 23227 - DNA, 20 bp, Artificial Sequence
  chemically synthesized
aaacattggactccaagtcc

SEQ ID NO: 23228 - DNA, 20 bp, Artificial Sequence
  chemically synthesized
ccttcagctttgggacttgg

SEQ ID NO: 23229 - DNA, 20 bp, Artificial Sequence
  chemically synthesized
ttggactggcttccttgctc

SEQ ID NO: 23230 - DNA, 20 bp, Artificial Sequence
  chemically synthesized
agatggcctattgtgggacc

SEQ ID NO: 23231 - DNA, 20 bp, Artificial Sequence
  chemically synthesized
gtgaggatgtggagacaaga

SEQ ID NO: 23232 - DNA, 20 bp, Artificial Sequence
  chemically synthesized
aaactttatggaagacagca

SEQ ID NO: 23233 - DNA, 20 bp, Artificial Sequence
  chemically synthesized
caacctaaatgtctaccaat

SEQ ID NO: 23234 - DNA, 20 bp, Artificial Sequence
  chemically synthesized
tatggtgaggactgaaaaac

SEQ ID NO: 23235 - DNA, 20 bp, Artificial Sequence
  chemically synthesized
aacatacatatgtaaggaac

SEQ ID NO: 23236 - DNA, 20 bp, Artificial Sequence
  chemically synthesized
aacccgagcttgtaccctga

SEQ ID NO: 23237 - DNA, 20 bp, Artificial Sequence
  chemically synthesized
ataatcctcacgtgttgtgg

SEQ ID NO: 23238 - DNA, 20 bp, Artificial Sequence
  chemically synthesized
agtgagttcttacaagatct

SEQ ID NO: 23239 - DNA, 20 bp, Artificial Sequence
  chemically synthesized
caagatctgatggttttata

SEQ ID NO: 23240 - DNA, 20 bp, Artificial Sequence
  chemically synthesized
ttataagcggcttttccccc

SEQ ID NO: 23241 - DNA, 20 bp, Artificial Sequence
  chemically synthesized
ctgctgccatgtgaagaagg

SEQ ID NO: 23242 - DNA, 20 bp, Artificial Sequence
  chemically synthesized
tgccatgtgaagaaggacat

SEQ ID NO: 23243 - DNA, 20 bp, Artificial Sequence
  chemically synthesized
catgtttgtttcttcttctg

SEQ ID NO: 23244 - DNA, 20 bp, Artificial Sequence
  chemically synthesized
tttcttcttctgccatgatt

SEQ ID NO: 23245 - DNA, 20 bp, Artificial Sequence
  chemically synthesized
tgtggaactgtgagacaatt

SEQ ID NO: 23246 - DNA, 20 bp, Artificial Sequence
  chemically synthesized
aaaaatataaaataaattag

SEQ ID NO: 23247 - DNA, 20 bp, Artificial Sequence
  chemically synthesized
gagtgtgcaaggaaagagta

SEQ ID NO: 23248 - DNA, 20 bp, Artificial Sequence
  chemically synthesized
gtgagaatacacaaataatc

SEQ ID NO: 23249 - DNA, 20 bp, Artificial Sequence
  chemically synthesized
atattccatttcatcagact

SEQ ID NO: 23250 - DNA, 20 bp, Artificial Sequence
  chemically synthesized
gatgctattatatggtacca

SEQ ID NO: 23251 - DNA, 20 bp, Artificial Sequence
  chemically synthesized
taagaatttcatctttaagg

SEQ ID NO: 23252 - DNA, 20 bp, Artificial Sequence
  chemically synthesized
agttttttactgtatcaaaa

SEQ ID NO: 23253 - DNA, 20 bp, Artificial Sequence
  chemically synthesized
tctagactggacaagaacag

SEQ ID NO: 23254 - DNA, 20 bp, Artificial Sequence
  chemically synthesized
agcaacatatttaaatatat

SEQ ID NO: 23255 - DNA, 20 bp, Artificial Sequence
  chemically synthesized
cttttccaggagaatatacc

SEQ ID NO: 23256 - DNA, 20 bp, Artificial Sequence
  chemically synthesized
tctgatggtacacatttatt

SEQ ID NO: 23257 - DNA, 20 bp, Artificial Sequence
  chemically synthesized
actcagagatcttaaaacat

SEQ ID NO: 23258 - DNA, 20 bp, Artificial Sequence
  chemically synthesized
atcttaaaacatccttgttt

SEQ ID NO: 23259 - DNA, 20 bp, Artificial Sequence
  chemically synthesized
tgaagaacataagggggaaa

SEQ ID NO: 23260 - DNA, 20 bp, Artificial Sequence
  chemically synthesized
gattctttatttgaagaaac

SEQ ID NO: 23261 - DNA, 20 bp, Artificial Sequence
  chemically synthesized
tttatttgaagaaacaaatg

SEQ ID NO: 23262 - DNA, 20 bp, Artificial Sequence
  chemically synthesized
tagtcccccatatagcctta

SEQ ID NO: 23263 - DNA, 20 bp, Artificial Sequence
  chemically synthesized
atagccttagagtgtttaaa

SEQ ID NO: 23264 - DNA, 20 bp, Artificial Sequence
  chemically synthesized
gtctattagaaataaaaaca

SEQ ID NO: 23265 - DNA, 20 bp, Artificial Sequence
  chemically synthesized
gcttaaaaaatttcaaggga

SEQ ID NO: 23266 - DNA, 20 bp, Artificial Sequence
  chemically synthesized
aaatttcaagggaaggggct

SEQ ID NO: 23267 - DNA, 20 bp, Artificial Sequence
  chemically synthesized
ctgaggtcaggaacacccag

SEQ ID NO: 23268 - DNA, 20 bp, Artificial Sequence
  chemically synthesized
ccaccaccaacaccagtgca

SEQ ID NO: 23269 - DNA, 20 bp, Artificial Sequence
  chemically synthesized
aaacagaaattctgtaactg

SEQ ID NO: 23270 - DNA, 20 bp, Artificial Sequence
  chemically synthesized
agtgaacaaatattcaaatt

SEQ ID NO: 23271 - DNA, 20 bp, Artificial Sequence
  chemically synthesized
tcacttataagggaacttcc

SEQ ID NO: 23272 - DNA, 20 bp, Artificial Sequence
  chemically synthesized
aagggaacttccacaagatt

SEQ ID NO: 23273 - DNA, 20 bp, Artificial Sequence
  chemically synthesized
cacaagattaacagattaac

SEQ ID NO: 23274 - DNA, 20 bp, Artificial Sequence
  chemically synthesized
aaggaattcactatcactag

SEQ ID NO: 23275 - DNA, 20 bp, Artificial Sequence
  chemically synthesized
caataatagccttgcatgta

SEQ ID NO: 23276 - DNA, 20 bp, Artificial Sequence
  chemically synthesized
tgaaagatatagactggcta

SEQ ID NO: 23277 - DNA, 20 bp, Artificial Sequence
  chemically synthesized
gaatccaatacaataatagt

SEQ ID NO: 23278 - DNA, 20 bp, Artificial Sequence
  chemically synthesized
cagaaaattaacaaagaaac

SEQ ID NO: 23279 - DNA, 20 bp, Artificial Sequence
  chemically synthesized
agcaaaagcagtgctaagag

SEQ ID NO: 23280 - DNA, 20 bp, Artificial Sequence
  chemically synthesized
acacttaaattaaaaacata

SEQ ID NO: 23281 - DNA, 20 bp, Artificial Sequence
  chemically synthesized
aaatagagaaaaacaacaac

SEQ ID NO: 23282 - DNA, 20 bp, Artificial Sequence
  chemically synthesized
aaccgataccacagaaatag

SEQ ID NO: 23283 - DNA, 20 bp, Artificial Sequence
  chemically synthesized
ttctggacacataccaccta

SEQ ID NO: 23284 - DNA, 20 bp, Artificial Sequence
  chemically synthesized
aaaagaaaatttcaagacca

SEQ ID NO: 23285 - DNA, 20 bp, Artificial Sequence
  chemically synthesized
attctctgaggccagtatta

SEQ ID NO: 23286 - DNA, 20 bp, Artificial Sequence
  chemically synthesized
agataatacaccatgatcaa

SEQ ID NO: 23287 - DNA, 20 bp, Artificial Sequence
  chemically synthesized
ataatactggaagtcctagc

SEQ ID NO: 23288 - DNA, 20 bp, Artificial Sequence
  chemically synthesized
actgtccatctttccagatg

SEQ ID NO: 23289 - DNA, 20 bp, Artificial Sequence
  chemically synthesized
aaatcagcatatgaaacaag

SEQ ID NO: 23290 - DNA, 20 bp, Artificial Sequence
  chemically synthesized
ccatactacccaaagcaatc

SEQ ID NO: 23291 - DNA, 20 bp, Artificial Sequence
  chemically synthesized
aatgctagaggtatcatact

SEQ ID NO: 23292 - DNA, 20 bp, Artificial Sequence
  chemically synthesized
gcatccacatatttatagcc

SEQ ID NO: 23293 - DNA, 20 bp, Artificial Sequence
  chemically synthesized
gaataaaactggactgctga

SEQ ID NO: 23294 - DNA, 20 bp, Artificial Sequence
  chemically synthesized
ctggactgctgatatggttt

SEQ ID NO: 23295 - DNA, 20 bp, Artificial Sequence
  chemically synthesized
cttggcggatgggaggtagg

SEQ ID NO: 23296 - DNA, 20 bp, Artificial Sequence
  chemically synthesized
cccacagaccctctgaagga

SEQ ID NO: 23297 - DNA, 20 bp, Artificial Sequence
  chemically synthesized
tcccactggagaaactgaag

SEQ ID NO: 23298 - DNA, 20 bp, Artificial Sequence
  chemically synthesized
actgaaggtctgtttgtggg

SEQ ID NO: 23299 - DNA, 20 bp, Artificial Sequence
  chemically synthesized
cagaaagtcaacaaaaaaat

SEQ ID NO: 23300 - DNA, 20 bp, Artificial Sequence
  chemically synthesized
taacagaccaataacaagca

SEQ ID NO: 23301 - DNA, 20 bp, Artificial Sequence
  chemically synthesized
caaaaaaaagttcaggacca

SEQ ID NO: 23302 - DNA, 20 bp, Artificial Sequence
  chemically synthesized
ttccatgccagggatgcagg

SEQ ID NO: 23303 - DNA, 20 bp, Artificial Sequence
  chemically synthesized
taagtgtgatacaccacata

SEQ ID NO: 23304 - DNA, 20 bp, Artificial Sequence
  chemically synthesized
caacaaaatccagcatacat

SEQ ID NO: 23305 - DNA, 20 bp, Artificial Sequence
  chemically synthesized
taaagaggaagtcaaactgt

SEQ ID NO: 23306 - DNA, 20 bp, Artificial Sequence
  chemically synthesized
gaactgataaaataattcag

SEQ ID NO: 23307 - DNA, 20 bp, Artificial Sequence
  chemically synthesized
catataaaacgtactctcaa

SEQ ID NO: 23308 - DNA, 20 bp, Artificial Sequence
  chemically synthesized
ataagggagacacttcaaga

SEQ ID NO: 23309 - DNA, 20 bp, Artificial Sequence
  chemically synthesized
cttcaagacatggctttggg

SEQ ID NO: 23310 - DNA, 20 bp, Artificial Sequence
  chemically synthesized
tcttatgccagttagaatca

SEQ ID NO: 23311 - DNA, 20 bp, Artificial Sequence
  chemically synthesized
agccactatggaaaacaata

SEQ ID NO: 23312 - DNA, 20 bp, Artificial Sequence
  chemically synthesized
ataaacagatactggtacca

SEQ ID NO: 23313 - DNA, 20 bp, Artificial Sequence
  chemically synthesized
gtaccacactgtttattgca

SEQ ID NO: 23314 - DNA, 20 bp, Artificial Sequence
  chemically synthesized
tgatgttcaatagcaaagta

SEQ ID NO: 23315 - DNA, 20 bp, Artificial Sequence
  chemically synthesized
tcgatctcatattggttgag

SEQ ID NO: 23316 - DNA, 20 bp, Artificial Sequence
  chemically synthesized
ccctgtactgtcttgctgtg

SEQ ID NO: 23317 - DNA, 20 bp, Artificial Sequence
  chemically synthesized
tgtcctccccatatttttac

SEQ ID NO: 23318 - DNA, 20 bp, Artificial Sequence
  chemically synthesized
catatttttacctcggtttt

SEQ ID NO: 23319 - DNA, 20 bp, Artificial Sequence
  chemically synthesized
ttatatagcacactttgtgc

SEQ ID NO: 23320 - DNA, 20 bp, Artificial Sequence
  chemically synthesized
cactttgtgctatagtttac

SEQ ID NO: 23321 - DNA, 20 bp, Artificial Sequence
  chemically synthesized
catatttgaggtataaacca

SEQ ID NO: 23322 - DNA, 20 bp, Artificial Sequence
  chemically synthesized
tatttttaaatctgcaaata

SEQ ID NO: 23323 - DNA, 20 bp, Artificial Sequence
  chemically synthesized
acttaatatcattaatgaat

SEQ ID NO: 23324 - DNA, 20 bp, Artificial Sequence
  chemically synthesized
ttcctggaacaacatggggg

SEQ ID NO: 23325 - DNA, 20 bp, Artificial Sequence
  chemically synthesized
gagaaatttcactattttgt

SEQ ID NO: 23326 - DNA, 20 bp, Artificial Sequence
  chemically synthesized
aggcagcaggtctggtagga

SEQ ID NO: 23327 - DNA, 20 bp, Artificial Sequence
  chemically synthesized
tgaaaaggaagtgagtagac

SEQ ID NO: 23328 - DNA, 20 bp, Artificial Sequence
  chemically synthesized
cttgaagctgtgcaaccaag

SEQ ID NO: 23329 - DNA, 20 bp, Artificial Sequence
  chemically synthesized
gcatagtttttacatagatc

SEQ ID NO: 23330 - DNA, 20 bp, Artificial Sequence
  chemically synthesized
tgtgtttcacatggtgtgat

SEQ ID NO: 23331 - DNA, 20 bp, Artificial Sequence
  chemically synthesized
agatgccattgacatggccc

SEQ ID NO: 23332 - DNA, 20 bp, Artificial Sequence
  chemically synthesized
aatcctaattactatgcatc

SEQ ID NO: 23333 - DNA, 20 bp, Artificial Sequence
  chemically synthesized
ttttcctattatttctcttt

SEQ ID NO: 23334 - DNA, 20 bp, Artificial Sequence
  chemically synthesized
gaaataagctaatacctaca

SEQ ID NO: 23335 - DNA, 20 bp, Artificial Sequence
  chemically synthesized
taaatgctaggcacagttct

SEQ ID NO: 23336 - DNA, 20 bp, Artificial Sequence
  chemically synthesized
attttcacaacattattaca

SEQ ID NO: 23337 - DNA, 20 bp, Artificial Sequence
  chemically synthesized
agcaacaaattgatggatct

SEQ ID NO: 23338 - DNA, 20 bp, Artificial Sequence
  chemically synthesized
aaattgatggatctttttgc

SEQ ID NO: 23339 - DNA, 20 bp, Artificial Sequence
  chemically synthesized
tgatggatctttttgctttt

SEQ ID NO: 23340 - DNA, 20 bp, Artificial Sequence
  chemically synthesized
ggatctttttgcttttgctt

SEQ ID NO: 23341 - DNA, 20 bp, Artificial Sequence
  chemically synthesized
actgaagcctcactagaacg

SEQ ID NO: 23342 - DNA, 20 bp, Artificial Sequence
  chemically synthesized
cgcctggattcaattgatcc

SEQ ID NO: 23343 - DNA, 20 bp, Artificial Sequence
  chemically synthesized
cacctcagccttgaaaagtg

SEQ ID NO: 23344 - DNA, 20 bp, Artificial Sequence
  chemically synthesized
aatttttagatataatttct

SEQ ID NO: 23345 - DNA, 20 bp, Artificial Sequence
  chemically synthesized
tcttccataaccactttgac

SEQ ID NO: 23346 - DNA, 20 bp, Artificial Sequence
  chemically synthesized
taaattatgtccagcaatac

SEQ ID NO: 23347 - DNA, 20 bp, Artificial Sequence
  chemically synthesized
cgttggcttaggcaaaaaca

SEQ ID NO: 23348 - DNA, 20 bp, Artificial Sequence
  chemically synthesized
ccttaacatgttaatttctc

SEQ ID NO: 23349 - DNA, 20 bp, Artificial Sequence
  chemically synthesized
tgagcaagtgtgtgcagaag

SEQ ID NO: 23350 - DNA, 20 bp, Artificial Sequence
  chemically synthesized
tcctctccctcaactggtaa

SEQ ID NO: 23351 - DNA, 20 bp, Artificial Sequence
  chemically synthesized
cttaaggctattaactcccc

SEQ ID NO: 23352 - DNA, 20 bp, Artificial Sequence
  chemically synthesized
atatatagttctctcacata

SEQ ID NO: 23353 - DNA, 20 bp, Artificial Sequence
  chemically synthesized
ctcaaacatctcatcattag

SEQ ID NO: 23354 - DNA, 20 bp, Artificial Sequence
  chemically synthesized
tctacaaatttgtcaattct

SEQ ID NO: 23355 - DNA, 20 bp, Artificial Sequence
  chemically synthesized
gaatccttactgaataataa

SEQ ID NO: 23356 - DNA, 20 bp, Artificial Sequence
  chemically synthesized
aactgtgactctctcatctg

SEQ ID NO: 23357 - DNA, 20 bp, Artificial Sequence
  chemically synthesized
tctctcatctgttatgtttt

SEQ ID NO: 23358 - DNA, 20 bp, Artificial Sequence
  chemically synthesized
atgggcaaaattctggcagc

SEQ ID NO: 23359 - DNA, 20 bp, Artificial Sequence
  chemically synthesized
gattcttctcctaagaaacc

SEQ ID NO: 23360 - DNA, 20 bp, Artificial Sequence
  chemically synthesized
tcttggatgtgaatacattt

SEQ ID NO: 23361 - DNA, 20 bp, Artificial Sequence
  chemically synthesized
tattcatgaagaaactgtta

SEQ ID NO: 23362 - DNA, 20 bp, Artificial Sequence
  chemically synthesized
gtttaaggggttctttttca

SEQ ID NO: 23363 - DNA, 20 bp, Artificial Sequence
  chemically synthesized
aggacatttcctttgaaaac

SEQ ID NO: 23364 - DNA, 20 bp, Artificial Sequence
  chemically synthesized
atcctggtcctaactctgcc

SEQ ID NO: 23365 - DNA, 20 bp, Artificial Sequence
  chemically synthesized
ttgctctatgaactggagga

SEQ ID NO: 23366 - DNA, 20 bp, Artificial Sequence
  chemically synthesized
gatagaaaataagtattaaa

SEQ ID NO: 23367 - DNA, 20 bp, Artificial Sequence
  chemically synthesized
cctgagatcaacacacatgc

SEQ ID NO: 23368 - DNA, 20 bp, Artificial Sequence
  chemically synthesized
ttataagatccataaaataa

SEQ ID NO: 23369 - DNA, 20 bp, Artificial Sequence
  chemically synthesized
cccaggtaacagtgctccat

SEQ ID NO: 23370 - DNA, 20 bp, Artificial Sequence
  chemically synthesized
acttgtgcagagatcttctg

SEQ ID NO: 23371 - DNA, 20 bp, Artificial Sequence
  chemically synthesized
cccagtgctaacaagtccct

SEQ ID NO: 23372 - DNA, 20 bp, Artificial Sequence
  chemically synthesized
cttttatttcaaggcatact

SEQ ID NO: 23373 - DNA, 20 bp, Artificial Sequence
  chemically synthesized
aatacttcacttctctgtaa

SEQ ID NO: 23374 - DNA, 20 bp, Artificial Sequence
  chemically synthesized
tgtaataaggtttctgtcct

SEQ ID NO: 23375 - DNA, 20 bp, Artificial Sequence
  chemically synthesized
ctaaactacagagaataaga

SEQ ID NO: 23376 - DNA, 20 bp, Artificial Sequence
  chemically synthesized
taggcaaaattgacttttaa

SEQ ID NO: 23377 - DNA, 20 bp, Artificial Sequence
  chemically synthesized
aacagttagtataaggtgaa

SEQ ID NO: 23378 - DNA, 20 bp, Artificial Sequence
  chemically synthesized
catatataatgcatttaatt

SEQ ID NO: 23379 - DNA, 20 bp, Artificial Sequence
  chemically synthesized
taattttgagattatgctgg

SEQ ID NO: 23380 - DNA, 20 bp, Artificial Sequence
  chemically synthesized
ctggttattatttcagatcc

SEQ ID NO: 23381 - DNA, 20 bp, Artificial Sequence
  chemically synthesized
caacacatgacataatttca

SEQ ID NO: 23382 - DNA, 20 bp, Artificial Sequence
  chemically synthesized
tgccatttacccagcaatca

SEQ ID NO: 23383 - DNA, 20 bp, Artificial Sequence
  chemically synthesized
atttacccagcaatcagttg

SEQ ID NO: 23384 - DNA, 20 bp, Artificial Sequence
  chemically synthesized
gagagtataaacccacaagg

SEQ ID NO: 23385 - DNA, 20 bp, Artificial Sequence
  chemically synthesized
gaggttatacctcactcgca

SEQ ID NO: 23386 - DNA, 20 bp, Artificial Sequence
  chemically synthesized
actcgcaaattgttttatca

SEQ ID NO: 23387 - DNA, 20 bp, Artificial Sequence
  chemically synthesized
ttactaacagaatgtagagt

SEQ ID NO: 23388 - DNA, 20 bp, Artificial Sequence
  chemically synthesized
atatacatcttcctaaaata

SEQ ID NO: 23389 - DNA, 20 bp, Artificial Sequence
  chemically synthesized
ttatttctatgttgtcataa

SEQ ID NO: 23390 - DNA, 20 bp, Artificial Sequence
  chemically synthesized
aaatgtagcctaaatatata

SEQ ID NO: 23391 - DNA, 20 bp, Artificial Sequence
  chemically synthesized
cctaaatatatattccgttt

SEQ ID NO: 23392 - DNA, 20 bp, Artificial Sequence
  chemically synthesized
cctccgagactcctttgaat

SEQ ID NO: 23393 - DNA, 20 bp, Artificial Sequence
  chemically synthesized
agttagagttggtagagtta

SEQ ID NO: 23394 - DNA, 20 bp, Artificial Sequence
  chemically synthesized
tggtagagttaccaggcttt

SEQ ID NO: 23395 - DNA, 20 bp, Artificial Sequence
  chemically synthesized
aactagtagcatgaaatctt

SEQ ID NO: 23396 - DNA, 20 bp, Artificial Sequence
  chemically synthesized
aggaattctgtgggaagcac

SEQ ID NO: 23397 - DNA, 20 bp, Artificial Sequence
  chemically synthesized
agcacataagatttcatgct

SEQ ID NO: 23398 - DNA, 20 bp, Artificial Sequence
  chemically synthesized
tgcctgtaagttctcttctc

SEQ ID NO: 23399 - DNA, 20 bp, Artificial Sequence
  chemically synthesized
gtctcggaggactgtaagaa

SEQ ID NO: 23400 - DNA, 20 bp, Artificial Sequence
  chemically synthesized
cctctctgtaacatccctgg

SEQ ID NO: 23401 - DNA, 20 bp, Artificial Sequence
  chemically synthesized
gaggagttactgctctttga

SEQ ID NO: 23402 - DNA, 20 bp, Artificial Sequence
  chemically synthesized
ttgcttgggaagtgaccaat

SEQ ID NO: 23403 - DNA, 20 bp, Artificial Sequence
  chemically synthesized
aggtgactgaggaatgtaga

SEQ ID NO: 23404 - DNA, 20 bp, Artificial Sequence
  chemically synthesized
aaaaagttaatatttacatt

SEQ ID NO: 23405 - DNA, 20 bp, Artificial Sequence
  chemically synthesized
tttattttaggaagatgtat

SEQ ID NO: 23406 - DNA, 20 bp, Artificial Sequence
  chemically synthesized
attctgttagtaattatatg

SEQ ID NO: 23407 - DNA, 20 bp, Artificial Sequence
  chemically synthesized
taattatatgaaatgcttaa

SEQ ID NO: 23408 - DNA, 20 bp, Artificial Sequence
  chemically synthesized
aagaatgtttcatattcaca

SEQ ID NO: 23409 - DNA, 20 bp, Artificial Sequence
  chemically synthesized
attcacaattagcttggaat

SEQ ID NO: 23410 - DNA, 20 bp, Artificial Sequence
  chemically synthesized
tggaattaatgttttaattc

SEQ ID NO: 23411 - DNA, 20 bp, Artificial Sequence
  chemically synthesized
agtaatttttttcttcaatg

SEQ ID NO: 23412 - DNA, 20 bp, Artificial Sequence
  chemically synthesized
aaggtagagaaccacaatgt

SEQ ID NO: 23413 - DNA, 20 bp, Artificial Sequence
  chemically synthesized
aaattataaaacaattcctt

SEQ ID NO: 23414 - DNA, 20 bp, Artificial Sequence
  chemically synthesized
ttccttgtgggtttatactc

SEQ ID NO: 23415 - DNA, 20 bp, Artificial Sequence
  chemically synthesized
aacattagcaaagaaaaagt

SEQ ID NO: 23416 - DNA, 20 bp, Artificial Sequence
  chemically synthesized
agatcttgaagaatcaagcc

SEQ ID NO: 23417 - DNA, 20 bp, Artificial Sequence
  chemically synthesized
gtaaatggcagtgatgactt

SEQ ID NO: 23418 - DNA, 20 bp, Artificial Sequence
  chemically synthesized
taacacatttatttttcatt

SEQ ID NO: 23419 - DNA, 20 bp, Artificial Sequence
  chemically synthesized
caaagcacggtcttattctc

SEQ ID NO: 23420 - DNA, 20 bp, Artificial Sequence
  chemically synthesized
aagtgaagtattttatgtgt

SEQ ID NO: 23421 - DNA, 20 bp, Artificial Sequence
  chemically synthesized
attttatgtgtacctgtttc

SEQ ID NO: 23422 - DNA, 20 bp, Artificial Sequence
  chemically synthesized
atctttatcctgaaatgagc

SEQ ID NO: 23423 - DNA, 20 bp, Artificial Sequence
  chemically synthesized
ctagtcacaaatttttccag

SEQ ID NO: 23424 - DNA, 20 bp, Artificial Sequence
  chemically synthesized
cccggagtatgccttgaaat

SEQ ID NO: 23425 - DNA, 20 bp, Artificial Sequence
  chemically synthesized
agtgggcaggagctcaagga

SEQ ID NO: 23426 - DNA, 20 bp, Artificial Sequence
  chemically synthesized
ctgcacctgagcagagcccc

SEQ ID NO: 23427 - DNA, 20 bp, Artificial Sequence
  chemically synthesized
ctggtacatagaaaatgctc

SEQ ID NO: 23428 - DNA, 20 bp, Artificial Sequence
  chemically synthesized
atggatttttttttgaaaaa

SEQ ID NO: 23429 - DNA, 20 bp, Artificial Sequence
  chemically synthesized
ttccctttcaaggggaaggg

SEQ ID NO: 23430 - DNA, 20 bp, Artificial Sequence
  chemically synthesized
tttgtggagaggtccccaca

SEQ ID NO: 23431 - DNA, 20 bp, Artificial Sequence
  chemically synthesized
ttaatattatcatagcctgg

SEQ ID NO: 23432 - DNA, 20 bp, Artificial Sequence
  chemically synthesized
ttatcatagcctggtatggt

SEQ ID NO: 23433 - DNA, 20 bp, Artificial Sequence
  chemically synthesized
ttcatatagatggataatta

SEQ ID NO: 23434 - DNA, 20 bp, Artificial Sequence
  chemically synthesized
tcctaataatacattgccac

SEQ ID NO: 23435 - DNA, 20 bp, Artificial Sequence
  chemically synthesized
cactatagtttctttaaatt

SEQ ID NO: 23436 - DNA, 20 bp, Artificial Sequence
  chemically synthesized
ctcctccagttcatagagca

SEQ ID NO: 23437 - DNA, 20 bp, Artificial Sequence
  chemically synthesized
agcaaatggcagagttagga

SEQ ID NO: 23438 - DNA, 20 bp, Artificial Sequence
  chemically synthesized
taagaattaaatattaaaac

SEQ ID NO: 23439 - DNA, 20 bp, Artificial Sequence
  chemically synthesized
cagtacttgcagtcaaaggt

SEQ ID NO: 23440 - DNA, 20 bp, Artificial Sequence
  chemically synthesized
aagaaccccttaaactgaat

SEQ ID NO: 23441 - DNA, 20 bp, Artificial Sequence
  chemically synthesized
tatactctccagttatctta

SEQ ID NO: 23442 - DNA, 20 bp, Artificial Sequence
  chemically synthesized
tattcacatccaagaaaaca

SEQ ID NO: 23443 - DNA, 20 bp, Artificial Sequence
  chemically synthesized
taacagatgagagagtcaca

SEQ ID NO: 23444 - DNA, 20 bp, Artificial Sequence
  chemically synthesized
ttaatattaaccttgaaatt

SEQ ID NO: 23445 - DNA, 20 bp, Artificial Sequence
  chemically synthesized
taatccattttattattcag

SEQ ID NO: 23446 - DNA, 20 bp, Artificial Sequence
  chemically synthesized
agatagagttaagaatacag

SEQ ID NO: 23447 - DNA, 20 bp, Artificial Sequence
  chemically synthesized
cagtgtaccgtggaatgggg

SEQ ID NO: 23448 - DNA, 20 bp, Artificial Sequence
  chemically synthesized
ggtttctaacctagttacct

SEQ ID NO: 23449 - DNA, 20 bp, Artificial Sequence
  chemically synthesized
gaaaaacctctctaatgatg

SEQ ID NO: 23450 - DNA, 20 bp, Artificial Sequence
  chemically synthesized
gatgggagagacctgcaggg

SEQ ID NO: 23451 - DNA, 20 bp, Artificial Sequence
  chemically synthesized
agggggagttaatagcctta

SEQ ID NO: 23452 - DNA, 20 bp, Artificial Sequence
  chemically synthesized
gggaagtactaagtagtcag

SEQ ID NO: 23453 - DNA, 20 bp, Artificial Sequence
  chemically synthesized
ctgtggtgtgacccaggatg

SEQ ID NO: 23454 - DNA, 20 bp, Artificial Sequence
  chemically synthesized
tttgcccaaatgtgggggaa

SEQ ID NO: 23455 - DNA, 20 bp, Artificial Sequence
  chemically synthesized
aggatatttaggatcattaa

SEQ ID NO: 23456 - DNA, 20 bp, Artificial Sequence
  chemically synthesized
gagcgatgtagtccctaaat

SEQ ID NO: 23457 - DNA, 20 bp, Artificial Sequence
  chemically synthesized
cttaaaatggactagaaaca

SEQ ID NO: 23458 - DNA, 20 bp, Artificial Sequence
  chemically synthesized
cgtattgctggacataattt

SEQ ID NO: 23459 - DNA, 20 bp, Artificial Sequence
  chemically synthesized
ctttgatataagtgaactca

SEQ ID NO: 23460 - DNA, 20 bp, Artificial Sequence
  chemically synthesized
gaagaggacttcacacttcc

SEQ ID NO: 23461 - DNA, 20 bp, Artificial Sequence
  chemically synthesized
gccgtaaagaacaactgctc

SEQ ID NO: 23462 - DNA, 20 bp, Artificial Sequence
  chemically synthesized
agtttaatactaggctactc

SEQ ID NO: 23463 - DNA, 20 bp, Artificial Sequence
  chemically synthesized
cggctgttttttgttaacac

SEQ ID NO: 23464 - DNA, 20 bp, Artificial Sequence
  chemically synthesized
gttaacacagaagttttcca

SEQ ID NO: 23465 - DNA, 20 bp, Artificial Sequence
  chemically synthesized
ccatccttcccgagacctaa

SEQ ID NO: 23466 - DNA, 20 bp, Artificial Sequence
  chemically synthesized
acgatgtttatctttcgtga

SEQ ID NO: 23467 - DNA, 20 bp, Artificial Sequence
  chemically synthesized
agatccatcaaggcccagca

SEQ ID NO: 23468 - DNA, 20 bp, Artificial Sequence
  chemically synthesized
tttcaaggctgaggtgggag

SEQ ID NO: 23469 - DNA, 20 bp, Artificial Sequence
  chemically synthesized
gcctggggaacatagggaga

SEQ ID NO: 23470 - DNA, 20 bp, Artificial Sequence
  chemically synthesized
attgaatccaggcgttctag

SEQ ID NO: 23471 - DNA, 20 bp, Artificial Sequence
  chemically synthesized
ttctagtgaggcttcagtga

SEQ ID NO: 23472 - DNA, 20 bp, Artificial Sequence
  chemically synthesized
gccggggtgacagagtgaga

SEQ ID NO: 23473 - DNA, 20 bp, Artificial Sequence
  chemically synthesized
tctacagctaaagtcagact

SEQ ID NO: 23474 - DNA, 20 bp, Artificial Sequence
  chemically synthesized
ccaccatcacctgggtaatg

SEQ ID NO: 23475 - DNA, 20 bp, Artificial Sequence
  chemically synthesized
attacatagcatctctgtgc

SEQ ID NO: 23476 - DNA, 20 bp, Artificial Sequence
  chemically synthesized
ttaataaacactctgtaggt

SEQ ID NO: 23477 - DNA, 20 bp, Artificial Sequence
  chemically synthesized
gttagctcatgtattgtcat

SEQ ID NO: 23478 - DNA, 20 bp, Artificial Sequence
  chemically synthesized
aatcacgggatgcatagtaa

SEQ ID NO: 23479 - DNA, 20 bp, Artificial Sequence
  chemically synthesized
acacacgatctatgtaaaaa

SEQ ID NO: 23480 - DNA, 20 bp, Artificial Sequence
  chemically synthesized
gtaaaaactatgcttggttg

SEQ ID NO: 23481 - DNA, 20 bp, Artificial Sequence
  chemically synthesized
cctcccactgccaagactgc

SEQ ID NO: 23482 - DNA, 20 bp, Artificial Sequence
  chemically synthesized
cactgccaagactgcagctg

SEQ ID NO: 23483 - DNA, 20 bp, Artificial Sequence
  chemically synthesized
tctaagtgtataatgacttc

SEQ ID NO: 23484 - DNA, 20 bp, Artificial Sequence
  chemically synthesized
gacttcctctgcttctgcaa

SEQ ID NO: 23485 - DNA, 20 bp, Artificial Sequence
  chemically synthesized
ctgtgttttggaacaggagg

SEQ ID NO: 23486 - DNA, 20 bp, Artificial Sequence
  chemically synthesized
tattctatacttctttgaaa

SEQ ID NO: 23487 - DNA, 20 bp, Artificial Sequence
  chemically synthesized
agtgttgccagatgacgact

SEQ ID NO: 23488 - DNA, 20 bp, Artificial Sequence
  chemically synthesized
agatcaataaaatacaaagt

SEQ ID NO: 23489 - DNA, 20 bp, Artificial Sequence
  chemically synthesized
tcagaataaaaccatttatt

SEQ ID NO: 23490 - DNA, 20 bp, Artificial Sequence
  chemically synthesized
tatatgtgtatgtaaatctc

SEQ ID NO: 23491 - DNA, 20 bp, Artificial Sequence
  chemically synthesized
gctcttgcattcacttatat

SEQ ID NO: 23492 - DNA, 20 bp, Artificial Sequence
  chemically synthesized
atattctagcttgttaagag

SEQ ID NO: 23493 - DNA, 20 bp, Artificial Sequence
  chemically synthesized
agagagaagtttggggcaaa

SEQ ID NO: 23494 - DNA, 20 bp, Artificial Sequence
  chemically synthesized
cagggaaatgtctggaggga

SEQ ID NO: 23495 - DNA, 20 bp, Artificial Sequence
  chemically synthesized
ctttcttttattgatatatg

SEQ ID NO: 23496 - DNA, 20 bp, Artificial Sequence
  chemically synthesized
tattcatcacctcaagtatt

SEQ ID NO: 23497 - DNA, 20 bp, Artificial Sequence
  chemically synthesized
ctattttgaaatatacaata

SEQ ID NO: 23498 - DNA, 20 bp, Artificial Sequence
  chemically synthesized
catattccttctatctaact

SEQ ID NO: 23499 - DNA, 20 bp, Artificial Sequence
  chemically synthesized
cgtacacacctttctctacc

SEQ ID NO: 23500 - DNA, 20 bp, Artificial Sequence
  chemically synthesized
gcaaaatttgtctttctatg

SEQ ID NO: 23501 - DNA, 20 bp, Artificial Sequence
  chemically synthesized
gtctttctatgcctggctta

SEQ ID NO: 23502 - DNA, 20 bp, Artificial Sequence
  chemically synthesized
tttcgtttaacataatgact

SEQ ID NO: 23503 - DNA, 20 bp, Artificial Sequence
  chemically synthesized
catccatgttgctgcaaatg

SEQ ID NO: 23504 - DNA, 20 bp, Artificial Sequence
  chemically synthesized
catccattgatggacactta

SEQ ID NO: 23505 - DNA, 20 bp, Artificial Sequence
  chemically synthesized
ataaacagtgtggtaccagt

SEQ ID NO: 23506 - DNA, 20 bp, Artificial Sequence
  chemically synthesized
ctttggataaatacccagta

SEQ ID NO: 23507 - DNA, 20 bp, Artificial Sequence
  chemically synthesized
gatcttatgatagttcaatt

SEQ ID NO: 23508 - DNA, 20 bp, Artificial Sequence
  chemically synthesized
agctttttggtaaatctaca

SEQ ID NO: 23509 - DNA, 20 bp, Artificial Sequence
  chemically synthesized
catagtggctatactaattt

SEQ ID NO: 23510 - DNA, 20 bp, Artificial Sequence
  chemically synthesized
ttattaatttatttaaatca

SEQ ID NO: 23511 - DNA, 20 bp, Artificial Sequence
  chemically synthesized
ggcataagatgatatctcat

SEQ ID NO: 23512 - DNA, 20 bp, Artificial Sequence
  chemically synthesized
aagatgatatctcattgtgg

SEQ ID NO: 23513 - DNA, 20 bp, Artificial Sequence
  chemically synthesized
ggttttgatttgcatttctc

SEQ ID NO: 23514 - DNA, 20 bp, Artificial Sequence
  chemically synthesized
tatcctttgccaatttttta

SEQ ID NO: 23515 - DNA, 20 bp, Artificial Sequence
  chemically synthesized
gccaattttttaatgagatt

SEQ ID NO: 23516 - DNA, 20 bp, Artificial Sequence
  chemically synthesized
tatttgtttttccactgttg

SEQ ID NO: 23517 - DNA, 20 bp, Artificial Sequence
  chemically synthesized
tttttccactgttgagttgt

SEQ ID NO: 23518 - DNA, 20 bp, Artificial Sequence
  chemically synthesized
tttgagtttcttatatattc

SEQ ID NO: 23519 - DNA, 20 bp, Artificial Sequence
  chemically synthesized
gcaaatattttctcgcattc

SEQ ID NO: 23520 - DNA, 20 bp, Artificial Sequence
  chemically synthesized
aacagcttgtctcttcactg

SEQ ID NO: 23521 - DNA, 20 bp, Artificial Sequence
  chemically synthesized
gcttgtctcttcactgtgtt

SEQ ID NO: 23522 - DNA, 20 bp, Artificial Sequence
  chemically synthesized
cctttactgtgcagatgtat

SEQ ID NO: 23523 - DNA, 20 bp, Artificial Sequence
  chemically synthesized
atatagtcccatttgtctat

SEQ ID NO: 23524 - DNA, 20 bp, Artificial Sequence
  chemically synthesized
tctatttttgcttttgttgc

SEQ ID NO: 23525 - DNA, 20 bp, Artificial Sequence
  chemically synthesized
catgtcttgaagtgtctccc

SEQ ID NO: 23526 - DNA, 20 bp, Artificial Sequence
  chemically synthesized
tctcccttatgttttctttt

SEQ ID NO: 23527 - DNA, 20 bp, Artificial Sequence
  chemically synthesized
atgttttcttttagtagttt

SEQ ID NO: 23528 - DNA, 20 bp, Artificial Sequence
  chemically synthesized
cttttagtagttttatagtt

SEQ ID NO: 23529 - DNA, 20 bp, Artificial Sequence
  chemically synthesized
gtctttaatccatcttgaga

SEQ ID NO: 23530 - DNA, 20 bp, Artificial Sequence
  chemically synthesized
tattgtacaaggggttgagt

SEQ ID NO: 23531 - DNA, 20 bp, Artificial Sequence
  chemically synthesized
tacaaggggttgagttcttg

SEQ ID NO: 23532 - DNA, 20 bp, Artificial Sequence
  chemically synthesized
ctgttggtgtatagaagagt

SEQ ID NO: 23533 - DNA, 20 bp, Artificial Sequence
  chemically synthesized
tgaattattttatcagttct

SEQ ID NO: 23534 - DNA, 20 bp, Artificial Sequence
  chemically synthesized
gagctttctggaggagtctt

SEQ ID NO: 23535 - DNA, 20 bp, Artificial Sequence
  chemically synthesized
tcatatcatcagcaaacagt

SEQ ID NO: 23536 - DNA, 20 bp, Artificial Sequence
  chemically synthesized
tgacagtttgacttcctctt

SEQ ID NO: 23537 - DNA, 20 bp, Artificial Sequence
  chemically synthesized
gatttgaatgccctttattt

SEQ ID NO: 23538 - DNA, 20 bp, Artificial Sequence
  chemically synthesized
gccctttatttctttgtttt

SEQ ID NO: 23539 - DNA, 20 bp, Artificial Sequence
  chemically synthesized
cttgttccagttctcagagg

SEQ ID NO: 23540 - DNA, 20 bp, Artificial Sequence
  chemically synthesized
cattcaatattatgttggct

SEQ ID NO: 23541 - DNA, 20 bp, Artificial Sequence
  chemically synthesized
ttggctgtgggtttgtcaca

SEQ ID NO: 23542 - DNA, 20 bp, Artificial Sequence
  chemically synthesized
actgaggtatgtctcttgta

SEQ ID NO: 23543 - DNA, 20 bp, Artificial Sequence
  chemically synthesized
cattttaatcataaatgtat

SEQ ID NO: 23544 - DNA, 20 bp, Artificial Sequence
  chemically synthesized
aatgtatgctggattttgtt

SEQ ID NO: 23545 - DNA, 20 bp, Artificial Sequence
  chemically synthesized
tattgagatgatcatgtaat

SEQ ID NO: 23546 - DNA, 20 bp, Artificial Sequence
  chemically synthesized
catgtaatttttgtttttaa

SEQ ID NO: 23547 - DNA, 20 bp, Artificial Sequence
  chemically synthesized
ccctgcatccctggcatgga

SEQ ID NO: 23548 - DNA, 20 bp, Artificial Sequence
  chemically synthesized
catggaacctgcttgatcat

SEQ ID NO: 23549 - DNA, 20 bp, Artificial Sequence
  chemically synthesized
ttggttatctagtattttgt

SEQ ID NO: 23550 - DNA, 20 bp, Artificial Sequence
  chemically synthesized
gttcatcaaggctatcagtc

SEQ ID NO: 23551 - DNA, 20 bp, Artificial Sequence
  chemically synthesized
cttttttggttatgtccttc

SEQ ID NO: 23552 - DNA, 20 bp, Artificial Sequence
  chemically synthesized
ttccctggttttggtgtgat

SEQ ID NO: 23553 - DNA, 20 bp, Artificial Sequence
  chemically synthesized
tttaattaccaattaaatct

SEQ ID NO: 23554 - DNA, 20 bp, Artificial Sequence
  chemically synthesized
agctccagtgttaggtgcat

SEQ ID NO: 23555 - DNA, 20 bp, Artificial Sequence
  chemically synthesized
agtgttaggtgcatatatgt

SEQ ID NO: 23556 - DNA, 20 bp, Artificial Sequence
  chemically synthesized
tctttgtctcttttaactgc

SEQ ID NO: 23557 - DNA, 20 bp, Artificial Sequence
  chemically synthesized
tcttttaactgctgttgctt

SEQ ID NO: 23558 - DNA, 20 bp, Artificial Sequence
  chemically synthesized
ttaactgctgttgctttaaa

SEQ ID NO: 23559 - DNA, 20 bp, Artificial Sequence
  chemically synthesized
tgagctcccagggcctttct

SEQ ID NO: 23560 - DNA, 20 bp, Artificial Sequence
  chemically synthesized
acttctcccacaaacagacc

SEQ ID NO: 23561 - DNA, 20 bp, Artificial Sequence
  chemically synthesized
tcagtttctccagtgggagt

SEQ ID NO: 23562 - DNA, 20 bp, Artificial Sequence
  chemically synthesized
cagagggtctgtgggtcctc

SEQ ID NO: 23563 - DNA, 20 bp, Artificial Sequence
  chemically synthesized
ctgtgggtcctctcaggatt

SEQ ID NO: 23564 - DNA, 20 bp, Artificial Sequence
  chemically synthesized
ccgccaagatcctgagaagt

SEQ ID NO: 23565 - DNA, 20 bp, Artificial Sequence
  chemically synthesized
gttggggattatatttcaac

SEQ ID NO: 23566 - DNA, 20 bp, Artificial Sequence
  chemically synthesized
catccaaaccatatcagcag

SEQ ID NO: 23567 - DNA, 20 bp, Artificial Sequence
  chemically synthesized
ctgttctaatgtcagtatca

SEQ ID NO: 23568 - DNA, 20 bp, Artificial Sequence
  chemically synthesized
ttttttaatttcatacaaat

SEQ ID NO: 23569 - DNA, 20 bp, Artificial Sequence
  chemically synthesized
taatttcatacaaattttag

SEQ ID NO: 23570 - DNA, 20 bp, Artificial Sequence
  chemically synthesized
gatagcggtcatatagaatc

SEQ ID NO: 23571 - DNA, 20 bp, Artificial Sequence
  chemically synthesized
gcggtcatatagaatctgta

SEQ ID NO: 23572 - DNA, 20 bp, Artificial Sequence
  chemically synthesized
tgaacataggatatctctcc

SEQ ID NO: 23573 - DNA, 20 bp, Artificial Sequence
  chemically synthesized
gtccttttcaattcttttat

SEQ ID NO: 23574 - DNA, 20 bp, Artificial Sequence
  chemically synthesized
caattcttttatcagtgttt

SEQ ID NO: 23575 - DNA, 20 bp, Artificial Sequence
  chemically synthesized
tgttttgtagttttccgaat

SEQ ID NO: 23576 - DNA, 20 bp, Artificial Sequence
  chemically synthesized
ttattttttagctattgtaa

SEQ ID NO: 23577 - DNA, 20 bp, Artificial Sequence
  chemically synthesized
ccttcttaatttccttctca

SEQ ID NO: 23578 - DNA, 20 bp, Artificial Sequence
  chemically synthesized
ttattattggtgtgtagaaa

SEQ ID NO: 23579 - DNA, 20 bp, Artificial Sequence
  chemically synthesized
tattggtgtgtagaaacatt

SEQ ID NO: 23580 - DNA, 20 bp, Artificial Sequence
  chemically synthesized
gaaacattgcttgtttcata

SEQ ID NO: 23581 - DNA, 20 bp, Artificial Sequence
  chemically synthesized
aatttatttttcagcgctaa

SEQ ID NO: 23582 - DNA, 20 bp, Artificial Sequence
  chemically synthesized
taagagtgctttggtggagt

SEQ ID NO: 23583 - DNA, 20 bp, Artificial Sequence
  chemically synthesized
tcatgtcatctggaaagatg

SEQ ID NO: 23584 - DNA, 20 bp, Artificial Sequence
  chemically synthesized
gatggaagtgggcatcctta

SEQ ID NO: 23585 - DNA, 20 bp, Artificial Sequence
  chemically synthesized
tttgtttcagttcttagagg

SEQ ID NO: 23586 - DNA, 20 bp, Artificial Sequence
  chemically synthesized
cagttcttagaggaaaggct

SEQ ID NO: 23587 - DNA, 20 bp, Artificial Sequence
  chemically synthesized
aattcagtatgatgttagct

SEQ ID NO: 23588 - DNA, 20 bp, Artificial Sequence
  chemically synthesized
tatattgagatatgttcctt

SEQ ID NO: 23589 - DNA, 20 bp, Artificial Sequence
  chemically synthesized
tccttctatgattggctgca

SEQ ID NO: 23590 - DNA, 20 bp, Artificial Sequence
  chemically synthesized
tgtatctattgagatgatca

SEQ ID NO: 23591 - DNA, 20 bp, Artificial Sequence
  chemically synthesized
ttgatgtgatgtatcacatt

SEQ ID NO: 23592 - DNA, 20 bp, Artificial Sequence
  chemically synthesized
tattatcttttggatgtact

SEQ ID NO: 23593 - DNA, 20 bp, Artificial Sequence
  chemically synthesized
cttttggatgtactgttgga

SEQ ID NO: 23594 - DNA, 20 bp, Artificial Sequence
  chemically synthesized
tcagtttgctagtattttgt

SEQ ID NO: 23595 - DNA, 20 bp, Artificial Sequence
  chemically synthesized
ttccatcagggatattgacc

SEQ ID NO: 23596 - DNA, 20 bp, Artificial Sequence
  chemically synthesized
atgagttagggagaattcct

SEQ ID NO: 23597 - DNA, 20 bp, Artificial Sequence
  chemically synthesized
aaaagaatttaaggagactt

SEQ ID NO: 23598 - DNA, 20 bp, Artificial Sequence
  chemically synthesized
gagacttgttagttttcttt

SEQ ID NO: 23599 - DNA, 20 bp, Artificial Sequence
  chemically synthesized
ttttttgggagactttttac

SEQ ID NO: 23600 - DNA, 20 bp, Artificial Sequence
  chemically synthesized
attattcattactggtctgt

SEQ ID NO: 23601 - DNA, 20 bp, Artificial Sequence
  chemically synthesized
ccagaaatttattaatttcc

SEQ ID NO: 23602 - DNA, 20 bp, Artificial Sequence
  chemically synthesized
tattaatttcctctagattt

SEQ ID NO: 23603 - DNA, 20 bp, Artificial Sequence
  chemically synthesized
taatatattttcttttttat

SEQ ID NO: 23604 - DNA, 20 bp, Artificial Sequence
  chemically synthesized
tcattttgctaatcccttgt

SEQ ID NO: 23605 - DNA, 20 bp, Artificial Sequence
  chemically synthesized
ttcattttttctttccttct

SEQ ID NO: 23606 - DNA, 20 bp, Artificial Sequence
  chemically synthesized
tttctttccttctgctagtt

SEQ ID NO: 23607 - DNA, 20 bp, Artificial Sequence
  chemically synthesized
ctgctagttttgggttttgt

SEQ ID NO: 23608 - DNA, 20 bp, Artificial Sequence
  chemically synthesized
ttgggttttgttcttgcttt

SEQ ID NO: 23609 - DNA, 20 bp, Artificial Sequence
  chemically synthesized
cttttctagcttgttgaggt

SEQ ID NO: 23610 - DNA, 20 bp, Artificial Sequence
  chemically synthesized
ctagcttgttgaggtacatg

SEQ ID NO: 23611 - DNA, 20 bp, Artificial Sequence
  chemically synthesized
attatatatttgaaatcttt

SEQ ID NO: 23612 - DNA, 20 bp, Artificial Sequence
  chemically synthesized
tctttctatgtttttaattt

SEQ ID NO: 23613 - DNA, 20 bp, Artificial Sequence
  chemically synthesized
tttaatttaagtgtttattg

SEQ ID NO: 23614 - DNA, 20 bp, Artificial Sequence
  chemically synthesized
ttgataagcttctctcttag

SEQ ID NO: 23615 - DNA, 20 bp, Artificial Sequence
  chemically synthesized
gcactgcttttgctgtatcc

SEQ ID NO: 23616 - DNA, 20 bp, Artificial Sequence
  chemically synthesized
tatgttgtatttcaattttc

SEQ ID NO: 23617 - DNA, 20 bp, Artificial Sequence
  chemically synthesized
tttcatttgtttcaaaaaat

SEQ ID NO: 23618 - DNA, 20 bp, Artificial Sequence
  chemically synthesized
ataacgttcattcaggagca

SEQ ID NO: 23619 - DNA, 20 bp, Artificial Sequence
  chemically synthesized
tttaatttccatgtatttgt

SEQ ID NO: 23620 - DNA, 20 bp, Artificial Sequence
  chemically synthesized
ccatgtatttgtataggttt

SEQ ID NO: 23621 - DNA, 20 bp, Artificial Sequence
  chemically synthesized
ggttttaaagtttttcttgt

SEQ ID NO: 23622 - DNA, 20 bp, Artificial Sequence
  chemically synthesized
agtttttcttgttattgatt

SEQ ID NO: 23623 - DNA, 20 bp, Artificial Sequence
  chemically synthesized
tattccattgtggtctgaga

SEQ ID NO: 23624 - DNA, 20 bp, Artificial Sequence
  chemically synthesized
gtggtctgagaagatgctta

SEQ ID NO: 23625 - DNA, 20 bp, Artificial Sequence
  chemically synthesized
tagatccatttggtctaaag

SEQ ID NO: 23626 - DNA, 20 bp, Artificial Sequence
  chemically synthesized
tctaaagtcaagtttaaatc

SEQ ID NO: 23627 - DNA, 20 bp, Artificial Sequence
  chemically synthesized
tctagatgatctatctgatg

SEQ ID NO: 23628 - DNA, 20 bp, Artificial Sequence
  chemically synthesized
aaatccccaactattattgt

SEQ ID NO: 23629 - DNA, 20 bp, Artificial Sequence
  chemically synthesized
caccctttatatctaataac

SEQ ID NO: 23630 - DNA, 20 bp, Artificial Sequence
  chemically synthesized
gatgctctggtgttgagtgt

SEQ ID NO: 23631 - DNA, 20 bp, Artificial Sequence
  chemically synthesized
atgtaatgacttttgtctct

SEQ ID NO: 23632 - DNA, 20 bp, Artificial Sequence
  chemically synthesized
tataactacttttgctcatt

SEQ ID NO: 23633 - DNA, 20 bp, Artificial Sequence
  chemically synthesized
tatttatctttacaagtgag

SEQ ID NO: 23634 - DNA, 20 bp, Artificial Sequence
  chemically synthesized
agtgagataagtttcttata

SEQ ID NO: 23635 - DNA, 20 bp, Artificial Sequence
  chemically synthesized
agcttacaactgggtcatat

SEQ ID NO: 23636 - DNA, 20 bp, Artificial Sequence
  chemically synthesized
caaggctattattgacatgt

SEQ ID NO: 23637 - DNA, 20 bp, Artificial Sequence
  chemically synthesized
cttattcctgccattttgtt

SEQ ID NO: 23638 - DNA, 20 bp, Artificial Sequence
  chemically synthesized
cattttgttaattgattcct

SEQ ID NO: 23639 - DNA, 20 bp, Artificial Sequence
  chemically synthesized
tgttaattgattcctggttg

SEQ ID NO: 23640 - DNA, 20 bp, Artificial Sequence
  chemically synthesized
cctggttgttttgttttttt

SEQ ID NO: 23641 - DNA, 20 bp, Artificial Sequence
  chemically synthesized
gttgttttgtttttttttta

SEQ ID NO: 23642 - DNA, 20 bp, Artificial Sequence
  chemically synthesized
ttttgttttttttttagttt

SEQ ID NO: 23643 - DNA, 20 bp, Artificial Sequence
  chemically synthesized
ttttttttagtttgtttgtt

SEQ ID NO: 23644 - DNA, 20 bp, Artificial Sequence
  chemically synthesized
ctttctttctttcttattat

SEQ ID NO: 23645 - DNA, 20 bp, Artificial Sequence
  chemically synthesized
tctttcttattatttatgat

SEQ ID NO: 23646 - DNA, 20 bp, Artificial Sequence
  chemically synthesized
tattatttatgattgtggtt

SEQ ID NO: 23647 - DNA, 20 bp, Artificial Sequence
  chemically synthesized
ttggtgattttctgtagtgg

SEQ ID NO: 23648 - DNA, 20 bp, Artificial Sequence
  chemically synthesized
gagttctttctcttctttat

SEQ ID NO: 23649 - DNA, 20 bp, Artificial Sequence
  chemically synthesized
ttcaaatttttcttgcccag

SEQ ID NO: 23650 - DNA, 20 bp, Artificial Sequence
  chemically synthesized
tcccatcttctcctggcctg

SEQ ID NO: 23651 - DNA, 20 bp, Artificial Sequence
  chemically synthesized
cccttataagtgactagaca

SEQ ID NO: 23652 - DNA, 20 bp, Artificial Sequence
  chemically synthesized
aagtgactagacattttgct

SEQ ID NO: 23653 - DNA, 20 bp, Artificial Sequence
  chemically synthesized
ctgttttagagttcttactc

SEQ ID NO: 23654 - DNA, 20 bp, Artificial Sequence
  chemically synthesized
gttcttactctttggctttt

SEQ ID NO: 23655 - DNA, 20 bp, Artificial Sequence
  chemically synthesized
gactataatgtgctgtggag

SEQ ID NO: 23656 - DNA, 20 bp, Artificial Sequence
  chemically synthesized
gcattatattatttgggaat

SEQ ID NO: 23657 - DNA, 20 bp, Artificial Sequence
  chemically synthesized
tacatttcttgctagacttg

SEQ ID NO: 23658 - DNA, 20 bp, Artificial Sequence
  chemically synthesized
ttcagctattgtgttgttac

SEQ ID NO: 23659 - DNA, 20 bp, Artificial Sequence
  chemically synthesized
ttcaagttctgaaatttttc

SEQ ID NO: 23660 - DNA, 20 bp, Artificial Sequence
  chemically synthesized
tgcttgatctgatctattgt

SEQ ID NO: 23661 - DNA, 20 bp, Artificial Sequence
  chemically synthesized
aaactcttcagttacagaat

SEQ ID NO: 23662 - DNA, 20 bp, Artificial Sequence
  chemically synthesized
aatttctcattcatatcctg

SEQ ID NO: 23663 - DNA, 20 bp, Artificial Sequence
  chemically synthesized
attcatatcctgaattgttt

SEQ ID NO: 23664 - DNA, 20 bp, Artificial Sequence
  chemically synthesized
ttgtttttctgatttctttt

SEQ ID NO: 23665 - DNA, 20 bp, Artificial Sequence
  chemically synthesized
ctgagttctcttgtgtctca

SEQ ID NO: 23666 - DNA, 20 bp, Artificial Sequence
  chemically synthesized
agcttccttaatatcaacat

SEQ ID NO: 23667 - DNA, 20 bp, Artificial Sequence
  chemically synthesized
tataaatgtcttttttttcc

SEQ ID NO: 23668 - DNA, 20 bp, Artificial Sequence
  chemically synthesized
tgtcatatttcttcaccttt

SEQ ID NO: 23669 - DNA, 20 bp, Artificial Sequence
  chemically synthesized
tgatatctctgcatctggtg

SEQ ID NO: 23670 - DNA, 20 bp, Artificial Sequence
  chemically synthesized
tctgcatctggtgtaatgat

SEQ ID NO: 23671 - DNA, 20 bp, Artificial Sequence
  chemically synthesized
ctggtgtaatgattgctgct

SEQ ID NO: 23672 - DNA, 20 bp, Artificial Sequence
  chemically synthesized
tgctgcttccagttttgtaa

SEQ ID NO: 23673 - DNA, 20 bp, Artificial Sequence
  chemically synthesized
tttctgaagatgtatcttgg

SEQ ID NO: 23674 - DNA, 20 bp, Artificial Sequence
  chemically synthesized
ggtgttgattgagtagggca

SEQ ID NO: 23675 - DNA, 20 bp, Artificial Sequence
  chemically synthesized
gattgagtagggcactttga

SEQ ID NO: 23676 - DNA, 20 bp, Artificial Sequence
  chemically synthesized
gccaacagtatcatcagtgt

SEQ ID NO: 23677 - DNA, 20 bp, Artificial Sequence
  chemically synthesized
tcagtgtctgtgattttttc

SEQ ID NO: 23678 - DNA, 20 bp, Artificial Sequence
  chemically synthesized
gatggtaatgagtctagttg

SEQ ID NO: 23679 - DNA, 20 bp, Artificial Sequence
  chemically synthesized
ggttgattctttggccttca

SEQ ID NO: 23680 - DNA, 20 bp, Artificial Sequence
  chemically synthesized
gattctttggccttcaggca

SEQ ID NO: 23681 - DNA, 20 bp, Artificial Sequence
  chemically synthesized
ctgggctggtgtgtgggtcc

SEQ ID NO: 23682 - DNA, 20 bp, Artificial Sequence
  chemically synthesized
gtgccagttgtgatggcagt

SEQ ID NO: 23683 - DNA, 20 bp, Artificial Sequence
  chemically synthesized
cagattgggtaggcccatca

SEQ ID NO: 23684 - DNA, 20 bp, Artificial Sequence
  chemically synthesized
catcatcaggcttctgggag

SEQ ID NO: 23685 - DNA, 20 bp, Artificial Sequence
  chemically synthesized
tgtctctgggttcccagaca

SEQ ID NO: 23686 - DNA, 20 bp, Artificial Sequence
  chemically synthesized
tcttgaaggggtgcggggtg

SEQ ID NO: 23687 - DNA, 20 bp, Artificial Sequence
  chemically synthesized
taaatgggttgctggtgggc

SEQ ID NO: 23688 - DNA, 20 bp, Artificial Sequence
  chemically synthesized
agtggggtagcattttctta

SEQ ID NO: 23689 - DNA, 20 bp, Artificial Sequence
  chemically synthesized
ctgtgggtgggggatgtcag

SEQ ID NO: 23690 - DNA, 20 bp, Artificial Sequence
  chemically synthesized
ttctctggagcaatgccttt

SEQ ID NO: 23691 - DNA, 20 bp, Artificial Sequence
  chemically synthesized
gtcaagggactctcctgtgg

SEQ ID NO: 23692 - DNA, 20 bp, Artificial Sequence
  chemically synthesized
tcacagaggatccctactgg

SEQ ID NO: 23693 - DNA, 20 bp, Artificial Sequence
  chemically synthesized
gatccctactgggtaggctt

SEQ ID NO: 23694 - DNA, 20 bp, Artificial Sequence
  chemically synthesized
tccctccccttcattgcctt

SEQ ID NO: 23695 - DNA, 20 bp, Artificial Sequence
  chemically synthesized
attccagaattctctcttat

SEQ ID NO: 23696 - DNA, 20 bp, Artificial Sequence
  chemically synthesized
gccccttcccttgaaatttt

SEQ ID NO: 23697 - DNA, 20 bp, Artificial Sequence
  chemically synthesized
cccttgaaattttttaagct

SEQ ID NO: 23698 - DNA, 20 bp, Artificial Sequence
  chemically synthesized
agaagtagcgaattagttaa

SEQ ID NO: 23699 - DNA, 20 bp, Artificial Sequence
  chemically synthesized
ttcatttcccaaatcaaatc

SEQ ID NO: 23700 - DNA, 20 bp, Artificial Sequence
  chemically synthesized
ttatgttcttcagcaaataa

SEQ ID NO: 23701 - DNA, 20 bp, Artificial Sequence
  chemically synthesized
atacgtaatctaacaaacaa

SEQ ID NO: 23702 - DNA, 20 bp, Artificial Sequence
  chemically synthesized
gatgcatagttgcaaataaa

SEQ ID NO: 23703 - DNA, 20 bp, Artificial Sequence
  chemically synthesized
aattttgcatttttgtggat

SEQ ID NO: 23704 - DNA, 20 bp, Artificial Sequence
  chemically synthesized
ttgtggatagtggttttgaa

SEQ ID NO: 23705 - DNA, 20 bp, Artificial Sequence
  chemically synthesized
tagttgcccttgcaaattgg

SEQ ID NO: 23706 - DNA, 20 bp, Artificial Sequence
  chemically synthesized
tttcctcaacaaataatttt

SEQ ID NO: 23707 - DNA, 20 bp, Artificial Sequence
  chemically synthesized
atgacatcaatttatgttaa

SEQ ID NO: 23708 - DNA, 20 bp, Artificial Sequence
  chemically synthesized
tgtctgttcttgtccagtct

SEQ ID NO: 23709 - DNA, 20 bp, Artificial Sequence
  chemically synthesized
ttcttgtccagtctagaagt

SEQ ID NO: 23710 - DNA, 20 bp, Artificial Sequence
  chemically synthesized
ctcatcacataacatctgaa

SEQ ID NO: 23711 - DNA, 20 bp, Artificial Sequence
  chemically synthesized
attatcagactctgctcaat

SEQ ID NO: 23712 - DNA, 20 bp, Artificial Sequence
  chemically synthesized
agatgaaattcttaaggaca

SEQ ID NO: 23713 - DNA, 20 bp, Artificial Sequence
  chemically synthesized
cttgtgtagactcatatgaa

SEQ ID NO: 23714 - DNA, 20 bp, Artificial Sequence
  chemically synthesized
atgaagttctactttgtgac

SEQ ID NO: 23715 - DNA, 20 bp, Artificial Sequence
  chemically synthesized
accattgattgtgactattg

SEQ ID NO: 23716 - DNA, 20 bp, Artificial Sequence
  chemically synthesized
ctgtagtctgatgaaatgga

SEQ ID NO: 23717 - DNA, 20 bp, Artificial Sequence
  chemically synthesized
aagtaatatataagtaataa

SEQ ID NO: 23718 - DNA, 20 bp, Artificial Sequence
  chemically synthesized
attgctttttgcaattgagt

SEQ ID NO: 23719 - DNA, 20 bp, Artificial Sequence
  chemically synthesized
atgccaggatcttattacct

SEQ ID NO: 23720 - DNA, 20 bp, Artificial Sequence
  chemically synthesized
tattacctccaggatttcac

SEQ ID NO: 23721 - DNA, 20 bp, Artificial Sequence
  chemically synthesized
aaagtattgctcaagtaatc

SEQ ID NO: 23722 - DNA, 20 bp, Artificial Sequence
  chemically synthesized
gattatttgtgtattctcac

SEQ ID NO: 23723 - DNA, 20 bp, Artificial Sequence
  chemically synthesized
tgtcacgggaaatatcctgc

SEQ ID NO: 23724 - DNA, 20 bp, Artificial Sequence
  chemically synthesized
tctttccttgcacactctac

SEQ ID NO: 23725 - DNA, 20 bp, Artificial Sequence
  chemically synthesized
aattaccccattaagtgata

SEQ ID NO: 23726 - DNA, 20 bp, Artificial Sequence
  chemically synthesized
tatgtactagttcgttatca

SEQ ID NO: 23727 - DNA, 20 bp, Artificial Sequence
  chemically synthesized
ctgggtaatttataaggaaa

SEQ ID NO: 23728 - DNA, 20 bp, Artificial Sequence
  chemically synthesized
tgccaagcaaaagggggaaa

SEQ ID NO: 23729 - DNA, 20 bp, Artificial Sequence
  chemically synthesized
gagcatgagagtaacctcct

SEQ ID NO: 23730 - DNA, 20 bp, Artificial Sequence
  chemically synthesized
caaatccctcccacaacacg

SEQ ID NO: 23731 - DNA, 20 bp, Artificial Sequence
  chemically synthesized
tatgggaactacaattcaag

SEQ ID NO: 23732 - DNA, 20 bp, Artificial Sequence
  chemically synthesized
atgttgcatagtggtgaagt

SEQ ID NO: 23733 - DNA, 20 bp, Artificial Sequence
  chemically synthesized
agtgaatgttgtatccaatc

SEQ ID NO: 23734 - DNA, 20 bp, Artificial Sequence
  chemically synthesized
tattatttcattctatatgt

SEQ ID NO: 23735 - DNA, 20 bp, Artificial Sequence
  chemically synthesized
tctatatgtctatgcttact

SEQ ID NO: 23736 - DNA, 20 bp, Artificial Sequence
  chemically synthesized
tctcactaaatgagaacata

SEQ ID NO: 23737 - DNA, 20 bp, Artificial Sequence
  chemically synthesized
agaacatactgtgtttgact

SEQ ID NO: 23738 - DNA, 20 bp, Artificial Sequence
  chemically synthesized
ataatgtcctccagttctaa

SEQ ID NO: 23739 - DNA, 20 bp, Artificial Sequence
  chemically synthesized
taaccatgtttctagagaag

SEQ ID NO: 23740 - DNA, 20 bp, Artificial Sequence
  chemically synthesized
cgtccattggtagacattta

SEQ ID NO: 23741 - DNA, 20 bp, Artificial Sequence
  chemically synthesized
ctttgggtccatacccagta

SEQ ID NO: 23742 - DNA, 20 bp, Artificial Sequence
  chemically synthesized
ccatacccagtagtgggatt

SEQ ID NO: 23743 - DNA, 20 bp, Artificial Sequence
  chemically synthesized
attgcaggattgaatggtag

SEQ ID NO: 23744 - DNA, 20 bp, Artificial Sequence
  chemically synthesized
aatcttcatgctgtcttcca

SEQ ID NO: 23745 - DNA, 20 bp, Artificial Sequence
  chemically synthesized
tccacatcctcaccaacatc

SEQ ID NO: 23746 - DNA, 20 bp, Artificial Sequence
  chemically synthesized
ggcataaggaggtatcatat

SEQ ID NO: 23747 - DNA, 20 bp, Artificial Sequence
  chemically synthesized
tggtggttttaatttgcatt

SEQ ID NO: 23748 - DNA, 20 bp, Artificial Sequence
  chemically synthesized
agtgatgttgaacttttttt

SEQ ID NO: 23749 - DNA, 20 bp, Artificial Sequence
  chemically synthesized
tagatagatagatagataga

SEQ ID NO: 23750 - DNA, 20 bp, Artificial Sequence
  chemically synthesized
atatagatttagatataaaa

SEQ ID NO: 23751 - DNA, 20 bp, Artificial Sequence
  chemically synthesized
aagctgaaggacttggagtc

SEQ ID NO: 23752 - DNA, 20 bp, Artificial Sequence
  chemically synthesized
atccagcatgggagaaagat

SEQ ID NO: 23753 - DNA, 20 bp, Artificial Sequence
  chemically synthesized
ggcttggaggctaagccagt

SEQ ID NO: 23754 - DNA, 20 bp, Artificial Sequence
  chemically synthesized
taagccagtccaggattttc

SEQ ID NO: 23755 - DNA, 20 bp, Artificial Sequence
  chemically synthesized
ttttcacatgttttttttct

SEQ ID NO: 23756 - DNA, 20 bp, Artificial Sequence
  chemically synthesized
tatatcctggccacactggc

SEQ ID NO: 23757 - DNA, 20 bp, Artificial Sequence
  chemically synthesized
aactgattagatggtgccca

SEQ ID NO: 23758 - DNA, 20 bp, Artificial Sequence
  chemically synthesized
agtattaaccatcacaagtc

SEQ ID NO: 23759 - DNA, 20 bp, Artificial Sequence
  chemically synthesized
acaagtgtatacagacacga

SEQ ID NO: 23760 - DNA, 20 bp, Artificial Sequence
  chemically synthesized
tcctgcctggaatggcctgt

SEQ ID NO: 23761 - DNA, 20 bp, Artificial Sequence
  chemically synthesized
ggatctcctatattccatgc

SEQ ID NO: 23762 - DNA, 20 bp, Artificial Sequence
  chemically synthesized
acctccattgtggagttgta

SEQ ID NO: 23763 - DNA, 20 bp, Artificial Sequence
  chemically synthesized
tccaggtggcaatcttaatt

SEQ ID NO: 23764 - DNA, 20 bp, Artificial Sequence
  chemically synthesized
cttccacttccacttccacc

SEQ ID NO: 23765 - DNA, 20 bp, Artificial Sequence
  chemically synthesized
aaacagtaccatatattgga

SEQ ID NO: 23766 - DNA, 20 bp, Artificial Sequence
  chemically synthesized
acttcaaaaggccattcaaa

SEQ ID NO: 23767 - DNA, 20 bp, Artificial Sequence
  chemically synthesized
acttctttagccataaagtg

SEQ ID NO: 23768 - DNA, 20 bp, Artificial Sequence
  chemically synthesized
atgacagtggatacggcatt

SEQ ID NO: 23769 - DNA, 20 bp, Artificial Sequence
  chemically synthesized
tcttggcataagcattgagt

SEQ ID NO: 23770 - DNA, 20 bp, Artificial Sequence
  chemically synthesized
ccgaggaatggtgccatatc

SEQ ID NO: 23771 - DNA, 20 bp, Artificial Sequence
  chemically synthesized
caagcagtggctgtggccag

SEQ ID NO: 23772 - DNA, 20 bp, Artificial Sequence
  chemically synthesized
cagaattgatcatcctatcc

SEQ ID NO: 23773 - DNA, 20 bp, Artificial Sequence
  chemically synthesized
acatgggatgaaaatatctt

SEQ ID NO: 23774 - DNA, 20 bp, Artificial Sequence
  chemically synthesized
ctttgtcatcaattttccag

SEQ ID NO: 23775 - DNA, 20 bp, Artificial Sequence
  chemically synthesized
gctcaaagttctgccaacta

SEQ ID NO: 23776 - DNA, 20 bp, Artificial Sequence
  chemically synthesized
tgatgactcatagtcaaata

SEQ ID NO: 23777 - DNA, 20 bp, Artificial Sequence
  chemically synthesized
ccaaagcccagtaacaggcc

SEQ ID NO: 23778 - DNA, 20 bp, Artificial Sequence
  chemically synthesized
caaaatcctagaggcctccg

SEQ ID NO: 23779 - DNA, 20 bp, Artificial Sequence
  chemically synthesized
tcatatggcccaagtggcat

SEQ ID NO: 23780 - DNA, 20 bp, Artificial Sequence
  chemically synthesized
gtagaaggtccctgaattta

SEQ ID NO: 23781 - DNA, 20 bp, Artificial Sequence
  chemically synthesized
atgtctcatcaataaatcca

SEQ ID NO: 23782 - DNA, 20 bp, Artificial Sequence
  chemically synthesized
ggtgagcaagttctctccaa

SEQ ID NO: 23783 - DNA, 20 bp, Artificial Sequence
  chemically synthesized
ccaaccaacttcactatgtt

SEQ ID NO: 23784 - DNA, 20 bp, Artificial Sequence
  chemically synthesized
actctctaaacaattgatgc

SEQ ID NO: 23785 - DNA, 20 bp, Artificial Sequence
  chemically synthesized
ctctatatctatatctatat

SEQ ID NO: 23786 - DNA, 20 bp, Artificial Sequence
  chemically synthesized
tagccttttcacatttttct

SEQ ID NO: 23787 - DNA, 20 bp, Artificial Sequence
  chemically synthesized
tatatcctggctgtgctggc

SEQ ID NO: 23788 - DNA, 20 bp, Artificial Sequence
  chemically synthesized
aactgattagatggtgccca

SEQ ID NO: 23789 - DNA, 20 bp, Artificial Sequence
  chemically synthesized
cacagtcactttctaatgag

SEQ ID NO: 23790 - DNA, 20 bp, Artificial Sequence
  chemically synthesized
ttttttgttgttgagttcct

SEQ ID NO: 23791 - DNA, 20 bp, Artificial Sequence
  chemically synthesized
tattagccttttgttgcatt

SEQ ID NO: 23792 - DNA, 20 bp, Artificial Sequence
  chemically synthesized
tttttctcattctgtaggtt

SEQ ID NO: 23793 - DNA, 20 bp, Artificial Sequence
  chemically synthesized
tgtaggttatccgtttactc

SEQ ID NO: 23794 - DNA, 20 bp, Artificial Sequence
  chemically synthesized
cttttgcggtgcagaagcat

SEQ ID NO: 23795 - DNA, 20 bp, Artificial Sequence
  chemically synthesized
agtttaattaagtcccattt

SEQ ID NO: 23796 - DNA, 20 bp, Artificial Sequence
  chemically synthesized
attaagtcccatttgtctgt

SEQ ID NO: 23797 - DNA, 20 bp, Artificial Sequence
  chemically synthesized
tttgtctgtttttgtttttg

SEQ ID NO: 23798 - DNA, 20 bp, Artificial Sequence
  chemically synthesized
ctgtttttgtttttgttgtg

SEQ ID NO: 23799 - DNA, 20 bp, Artificial Sequence
  chemically synthesized
aagttgactagttcagtgta

SEQ ID NO: 23800 - DNA, 20 bp, Artificial Sequence
  chemically synthesized
tttctaattttttgccatca

SEQ ID NO: 23801 - DNA, 20 bp, Artificial Sequence
  chemically synthesized
tctccttaattttcccccag

SEQ ID NO: 23802 - DNA, 20 bp, Artificial Sequence
  chemically synthesized
ttccaaatgtatccatatat

SEQ ID NO: 23803 - DNA, 20 bp, Artificial Sequence
  chemically synthesized
tgtatccatatattgtggct

SEQ ID NO: 23804 - DNA, 20 bp, Artificial Sequence
  chemically synthesized
tattagaggagagaattaag

SEQ ID NO: 23805 - DNA, 20 bp, Artificial Sequence
  chemically synthesized
agacaccgagttaaagaagg

SEQ ID NO: 23806 - DNA, 20 bp, Artificial Sequence
  chemically synthesized
aggaagggctttattcggct

SEQ ID NO: 23807 - DNA, 20 bp, Artificial Sequence
  chemically synthesized
gagcaattcctgtccctttt

SEQ ID NO: 23808 - DNA, 20 bp, Artificial Sequence
  chemically synthesized
cagaatggaacagaacagga

SEQ ID NO: 23809 - DNA, 20 bp, Artificial Sequence
  chemically synthesized
gaacaggacagggattttca

SEQ ID NO: 23810 - DNA, 20 bp, Artificial Sequence
  chemically synthesized
aggcccaggatgtggtctca

SEQ ID NO: 23811 - DNA, 20 bp, Artificial Sequence
  chemically synthesized
gtggtctcaggctgtttgcc

SEQ ID NO: 23812 - DNA, 20 bp, Artificial Sequence
  chemically synthesized
tgtggatttcatttctgcct

SEQ ID NO: 23813 - DNA, 20 bp, Artificial Sequence
  chemically synthesized
atgaaatacgtatttgtgtt

SEQ ID NO: 23814 - DNA, 20 bp, Artificial Sequence
  chemically synthesized
gttctccttatcaaaaggta

SEQ ID NO: 23815 - DNA, 20 bp, Artificial Sequence
  chemically synthesized
ttatcaaaaggtactttgct

SEQ ID NO: 23816 - DNA, 20 bp, Artificial Sequence
  chemically synthesized
ctttaaaagataaatgacta

SEQ ID NO: 23817 - DNA, 20 bp, Artificial Sequence
  chemically synthesized
gataaatgactatgtagctt

SEQ ID NO: 23818 - DNA, 20 bp, Artificial Sequence
  chemically synthesized
agaaggaggaagagaggtga

SEQ ID NO: 23819 - DNA, 20 bp, Artificial Sequence
  chemically synthesized
ctttgacactacaaagtgac

SEQ ID NO: 23820 - DNA, 20 bp, Artificial Sequence
  chemically synthesized
tttgaaaggtaaataaatcc

SEQ ID NO: 23821 - DNA, 20 bp, Artificial Sequence
  chemically synthesized
aacagttggaggcatctata

SEQ ID NO: 23822 - DNA, 22 bp, Artificial Sequence
  chemically synthesized
gcagccatgcttattcattgcg

SEQ ID NO: 23823 - DNA, 22 bp, Artificial Sequence
  chemically synthesized
attcattgcgtccactgctctt

SEQ ID NO: 23824 - DNA, 22 bp, Artificial Sequence
  chemically synthesized
ttcattgcgtccactgctcttc

SEQ ID NO: 23825 - DNA, 22 bp, Artificial Sequence
  chemically synthesized
attgcgtccactgctcttctga

SEQ ID NO: 23826 - DNA, 22 bp, Artificial Sequence
  chemically synthesized
cgtccactgctcttctgacagc

SEQ ID NO: 23827 - DNA, 22 bp, Artificial Sequence
  chemically synthesized
ctcttctgacagcatcatttac

SEQ ID NO: 23828 - DNA, 22 bp, Artificial Sequence
  chemically synthesized
ttctgacagcatcatttacagg

SEQ ID NO: 23829 - DNA, 22 bp, Artificial Sequence
  chemically synthesized
ctgacagcatcatttacaggtt

SEQ ID NO: 23830 - DNA, 22 bp, Artificial Sequence
  chemically synthesized
tgacagcatcatttacaggttc

SEQ ID NO: 23831 - DNA, 22 bp, Artificial Sequence
  chemically synthesized
acagcatcatttacaggttcac

SEQ ID NO: 23832 - DNA, 22 bp, Artificial Sequence
  chemically synthesized
acaggttcacactgttccacct

SEQ ID NO: 23833 - DNA, 22 bp, Artificial Sequence
  chemically synthesized
caggttcacactgttccacctg

SEQ ID NO: 23834 - DNA, 22 bp, Artificial Sequence
  chemically synthesized
acactgttccacctgagtcttc

SEQ ID NO: 23835 - DNA, 22 bp, Artificial Sequence
  chemically synthesized
ttccacctgagtcttcatatta

SEQ ID NO: 23836 - DNA, 22 bp, Artificial Sequence
  chemically synthesized
cacctgagtcttcatattatgc

SEQ ID NO: 23837 - DNA, 22 bp, Artificial Sequence
  chemically synthesized
agtcttcatattatgctcaaaa

SEQ ID NO: 23838 - DNA, 22 bp, Artificial Sequence
  chemically synthesized
catattatgctcaaaatatgga

SEQ ID NO: 23839 - DNA, 22 bp, Artificial Sequence
  chemically synthesized
atattatgctcaaaatatggac

SEQ ID NO: 23840 - DNA, 22 bp, Artificial Sequence
  chemically synthesized
tgctcaaaatatggacctatca

SEQ ID NO: 23841 - DNA, 22 bp, Artificial Sequence
  chemically synthesized
aaaatatggacctatcagaaaa

SEQ ID NO: 23842 - DNA, 22 bp, Artificial Sequence
  chemically synthesized
tcagaaaatagttctctcccca

SEQ ID NO: 23843 - DNA, 22 bp, Artificial Sequence
  chemically synthesized
tctccccattcatctgctgttg

SEQ ID NO: 23844 - DNA, 22 bp, Artificial Sequence
  chemically synthesized
tccccattcatctgctgttgtt

SEQ ID NO: 23845 - DNA, 22 bp, Artificial Sequence
  chemically synthesized
cccattcatctgctgttgtttt

SEQ ID NO: 23846 - DNA, 22 bp, Artificial Sequence
  chemically synthesized
atctgctgttgttttggccttt

SEQ ID NO: 23847 - DNA, 22 bp, Artificial Sequence
  chemically synthesized
ctgttgttttggcctttgtctg

SEQ ID NO: 23848 - DNA, 22 bp, Artificial Sequence
  chemically synthesized
ttgttttggcctttgtctgaat

SEQ ID NO: 23849 - DNA, 22 bp, Artificial Sequence
  chemically synthesized
ttttggcctttgtctgaatcac

SEQ ID NO: 23850 - DNA, 22 bp, Artificial Sequence
  chemically synthesized
tggcctttgtctgaatcacagt

SEQ ID NO: 23851 - DNA, 22 bp, Artificial Sequence
  chemically synthesized
ggcctttgtctgaatcacagta

SEQ ID NO: 23852 - DNA, 22 bp, Artificial Sequence
  chemically synthesized
gcctttgtctgaatcacagtat

SEQ ID NO: 23853 - DNA, 22 bp, Artificial Sequence
  chemically synthesized
tgtctgaatcacagtatagatg

SEQ ID NO: 23854 - DNA, 22 bp, Artificial Sequence
  chemically synthesized
gtctgaatcacagtatagatgc

SEQ ID NO: 23855 - DNA, 22 bp, Artificial Sequence
  chemically synthesized
tctgaatcacagtatagatgcc

SEQ ID NO: 23856 - DNA, 22 bp, Artificial Sequence
  chemically synthesized
aatcacagtatagatgcctcca

SEQ ID NO: 23857 - DNA, 22 bp, Artificial Sequence
  chemically synthesized
caactgttaaaaggaaaaaagt

SEQ ID NO: 23858 - DNA, 22 bp, Artificial Sequence
  chemically synthesized
ttaaaaggaaaaaagtttctat

SEQ ID NO: 23859 - DNA, 22 bp, Artificial Sequence
  chemically synthesized
aaaggaaaaaagtttctattat

SEQ ID NO: 23860 - DNA, 22 bp, Artificial Sequence
  chemically synthesized
ctattatcattcaggttagcaa

SEQ ID NO: 23861 - DNA, 22 bp, Artificial Sequence
  chemically synthesized
tattatcattcaggttagcaat

SEQ ID NO: 23862 - DNA, 22 bp, Artificial Sequence
  chemically synthesized
ttatcattcaggttagcaattt

SEQ ID NO: 23863 - DNA, 22 bp, Artificial Sequence
  chemically synthesized
tcattcaggttagcaatttgtt

SEQ ID NO: 23864 - DNA, 22 bp, Artificial Sequence
  chemically synthesized
aggttagcaatttgtttaaagt

SEQ ID NO: 23865 - DNA, 22 bp, Artificial Sequence
  chemically synthesized
gcaatttgtttaaagtaataag

SEQ ID NO: 23866 - DNA, 22 bp, Artificial Sequence
  chemically synthesized
gtttaaagtaataagggatgga

SEQ ID NO: 23867 - DNA, 22 bp, Artificial Sequence
  chemically synthesized
tttaaagtaataagggatggaa

SEQ ID NO: 23868 - DNA, 22 bp, Artificial Sequence
  chemically synthesized
aaagtaataagggatggaaatg

SEQ ID NO: 23869 - DNA, 22 bp, Artificial Sequence
  chemically synthesized
aagtaataagggatggaaatga

SEQ ID NO: 23870 - DNA, 22 bp, Artificial Sequence
  chemically synthesized
agatttttaaattagcatttag

SEQ ID NO: 23871 - DNA, 22 bp, Artificial Sequence
  chemically synthesized
ttaaattagcatttaggatcca

SEQ ID NO: 23872 - DNA, 22 bp, Artificial Sequence
  chemically synthesized
taaattagcatttaggatccac

SEQ ID NO: 23873 - DNA, 22 bp, Artificial Sequence
  chemically synthesized
aaattagcatttaggatccact

SEQ ID NO: 23874 - DNA, 22 bp, Artificial Sequence
  chemically synthesized
aattagcatttaggatccacta

SEQ ID NO: 23875 - DNA, 22 bp, Artificial Sequence
  chemically synthesized
gcatttaggatccactaagccc

SEQ ID NO: 23876 - DNA, 22 bp, Artificial Sequence
  chemically synthesized
aggatccactaagcccaaggat

SEQ ID NO: 23877 - DNA, 22 bp, Artificial Sequence
  chemically synthesized
ggatccactaagcccaaggatt

SEQ ID NO: 23878 - DNA, 22 bp, Artificial Sequence
  chemically synthesized
agcccaaggatttatttacctt

SEQ ID NO: 23879 - DNA, 22 bp, Artificial Sequence
  chemically synthesized
atttacctttcaaaaataatag

SEQ ID NO: 23880 - DNA, 22 bp, Artificial Sequence
  chemically synthesized
tttacctttcaaaaataatagt

SEQ ID NO: 23881 - DNA, 22 bp, Artificial Sequence
  chemically synthesized
acctttcaaaaataatagtatt

SEQ ID NO: 23882 - DNA, 22 bp, Artificial Sequence
  chemically synthesized
cctttcaaaaataatagtattt

SEQ ID NO: 23883 - DNA, 22 bp, Artificial Sequence
  chemically synthesized
tcaaaaataatagtatttgaca

SEQ ID NO: 23884 - DNA, 22 bp, Artificial Sequence
  chemically synthesized
caaaaataatagtatttgacat

SEQ ID NO: 23885 - DNA, 22 bp, Artificial Sequence
  chemically synthesized
aaaaataatagtatttgacata

SEQ ID NO: 23886 - DNA, 22 bp, Artificial Sequence
  chemically synthesized
gacatattgttaagggacacca

SEQ ID NO: 23887 - DNA, 22 bp, Artificial Sequence
  chemically synthesized
acatattgttaagggacaccaa

SEQ ID NO: 23888 - DNA, 22 bp, Artificial Sequence
  chemically synthesized
ttaagggacaccaacgaatggt

SEQ ID NO: 23889 - DNA, 22 bp, Artificial Sequence
  chemically synthesized
agggacaccaacgaatggttac

SEQ ID NO: 23890 - DNA, 22 bp, Artificial Sequence
  chemically synthesized
ctgctttgttcaattctgtgca

SEQ ID NO: 23891 - DNA, 22 bp, Artificial Sequence
  chemically synthesized
ctttgttcaattctgtgcatgt

SEQ ID NO: 23892 - DNA, 22 bp, Artificial Sequence
  chemically synthesized
tgttcaattctgtgcatgtttt

SEQ ID NO: 23893 - DNA, 22 bp, Artificial Sequence
  chemically synthesized
gttcaattctgtgcatgtttta

SEQ ID NO: 23894 - DNA, 22 bp, Artificial Sequence
  chemically synthesized
ttcaattctgtgcatgttttaa

SEQ ID NO: 23895 - DNA, 22 bp, Artificial Sequence
  chemically synthesized
aattctgtgcatgttttaaagt

SEQ ID NO: 23896 - DNA, 22 bp, Artificial Sequence
  chemically synthesized
tgtgcatgttttaaagtccctt

SEQ ID NO: 23897 - DNA, 22 bp, Artificial Sequence
  chemically synthesized
tgcatgttttaaagtcccttct

SEQ ID NO: 23898 - DNA, 22 bp, Artificial Sequence
  chemically synthesized
taaagtcccttctaggtgcatg

SEQ ID NO: 23899 - DNA, 22 bp, Artificial Sequence
  chemically synthesized
aaagtcccttctaggtgcatgt

SEQ ID NO: 23900 - DNA, 22 bp, Artificial Sequence
  chemically synthesized
aagtcccttctaggtgcatgtg

SEQ ID NO: 23901 - DNA, 22 bp, Artificial Sequence
  chemically synthesized
ctaggtgcatgtgaaatagcag

SEQ ID NO: 23902 - DNA, 22 bp, Artificial Sequence
  chemically synthesized
taggtgcatgtgaaatagcagc

SEQ ID NO: 23903 - DNA, 22 bp, Artificial Sequence
  chemically synthesized
ggtgcatgtgaaatagcagcag

SEQ ID NO: 23904 - DNA, 22 bp, Artificial Sequence
  chemically synthesized
atgccgcaaagaggtcaaatac

SEQ ID NO: 23905 - DNA, 22 bp, Artificial Sequence
  chemically synthesized
aaaaagaaagagtctgaaaaga

SEQ ID NO: 23906 - DNA, 22 bp, Artificial Sequence
  chemically synthesized
aaaagacaattggagtaactac

SEQ ID NO: 23907 - DNA, 22 bp, Artificial Sequence
  chemically synthesized
gagtaactacttgcctaaagct

SEQ ID NO: 23908 - DNA, 22 bp, Artificial Sequence
  chemically synthesized
cttgcctaaagctccagtcact

SEQ ID NO: 23909 - DNA, 22 bp, Artificial Sequence
  chemically synthesized
gcctaaagctccagtcactttg

SEQ ID NO: 23910 - DNA, 22 bp, Artificial Sequence
  chemically synthesized
cctaaagctccagtcactttgt

SEQ ID NO: 23911 - DNA, 22 bp, Artificial Sequence
  chemically synthesized
aagctccagtcactttgtagtg

SEQ ID NO: 23912 - DNA, 22 bp, Artificial Sequence
  chemically synthesized
cagtcactttgtagtgtcaaag

SEQ ID NO: 23913 - DNA, 22 bp, Artificial Sequence
  chemically synthesized
tgtagtgtcaaagttaggacaa

SEQ ID NO: 23914 - DNA, 22 bp, Artificial Sequence
  chemically synthesized
gtagtgtcaaagttaggacaaa

SEQ ID NO: 23915 - DNA, 22 bp, Artificial Sequence
  chemically synthesized
tagtgtcaaagttaggacaaat

SEQ ID NO: 23916 - DNA, 22 bp, Artificial Sequence
  chemically synthesized
ggacaaatacccattgtcatca

SEQ ID NO: 23917 - DNA, 22 bp, Artificial Sequence
  chemically synthesized
tcatcatacatgccctcagcag

SEQ ID NO: 23918 - DNA, 22 bp, Artificial Sequence
  chemically synthesized
agcagcagaaatcactttcacc

SEQ ID NO: 23919 - DNA, 22 bp, Artificial Sequence
  chemically synthesized
tcacctctcttcctccttctcc

SEQ ID NO: 23920 - DNA, 22 bp, Artificial Sequence
  chemically synthesized
cacctctcttcctccttctcct

SEQ ID NO: 23921 - DNA, 22 bp, Artificial Sequence
  chemically synthesized
acctctcttcctccttctccta

SEQ ID NO: 23922 - DNA, 22 bp, Artificial Sequence
  chemically synthesized
tcttcctccttctcctacagtg

SEQ ID NO: 23923 - DNA, 22 bp, Artificial Sequence
  chemically synthesized
ttcctccttctcctacagtggt

SEQ ID NO: 23924 - DNA, 22 bp, Artificial Sequence
  chemically synthesized
cctccttctcctacagtggtcc

SEQ ID NO: 23925 - DNA, 22 bp, Artificial Sequence
  chemically synthesized
ctccttctcctacagtggtcca

SEQ ID NO: 23926 - DNA, 22 bp, Artificial Sequence
  chemically synthesized
cttctcctacagtggtccagaa

SEQ ID NO: 23927 - DNA, 22 bp, Artificial Sequence
  chemically synthesized
ctcctacagtggtccagaaggg

SEQ ID NO: 23928 - DNA, 22 bp, Artificial Sequence
  chemically synthesized
tcctacagtggtccagaagggg

SEQ ID NO: 23929 - DNA, 22 bp, Artificial Sequence
  chemically synthesized
ctacagtggtccagaaggggct

SEQ ID NO: 23930 - DNA, 22 bp, Artificial Sequence
  chemically synthesized
cagtggtccagaaggggctcag

SEQ ID NO: 23931 - DNA, 22 bp, Artificial Sequence
  chemically synthesized
aggtatgttcaaataacagctg

SEQ ID NO: 23932 - DNA, 22 bp, Artificial Sequence
  chemically synthesized
aaataacagctgctgtggtttt

SEQ ID NO: 23933 - DNA, 22 bp, Artificial Sequence
  chemically synthesized
ctgtggttttcaattatgaaga

SEQ ID NO: 23934 - DNA, 22 bp, Artificial Sequence
  chemically synthesized
tggttttcaattatgaagaaat

SEQ ID NO: 23935 - DNA, 22 bp, Artificial Sequence
  chemically synthesized
tcaattatgaagaaatctccta

SEQ ID NO: 23936 - DNA, 22 bp, Artificial Sequence
  chemically synthesized
caattatgaagaaatctcctaa

SEQ ID NO: 23937 - DNA, 22 bp, Artificial Sequence
  chemically synthesized
aattatgaagaaatctcctaag

SEQ ID NO: 23938 - DNA, 22 bp, Artificial Sequence
  chemically synthesized
tgaagaaatctcctaagctaca

SEQ ID NO: 23939 - DNA, 22 bp, Artificial Sequence
  chemically synthesized
ctaagctacatagtcatttatc

SEQ ID NO: 23940 - DNA, 22 bp, Artificial Sequence
  chemically synthesized
agctacatagtcatttatcttt

SEQ ID NO: 23941 - DNA, 22 bp, Artificial Sequence
  chemically synthesized
catagtcatttatcttttaaag

SEQ ID NO: 23942 - DNA, 22 bp, Artificial Sequence
  chemically synthesized
atcttttaaagcaccaagcaaa

SEQ ID NO: 23943 - DNA, 22 bp, Artificial Sequence
  chemically synthesized
tcttttaaagcaccaagcaaag

SEQ ID NO: 23944 - DNA, 22 bp, Artificial Sequence
  chemically synthesized
ttaaagcaccaagcaaagtacc

SEQ ID NO: 23945 - DNA, 22 bp, Artificial Sequence
  chemically synthesized
taaagcaccaagcaaagtacct

SEQ ID NO: 23946 - DNA, 22 bp, Artificial Sequence
  chemically synthesized
aaagcaccaagcaaagtacctt

SEQ ID NO: 23947 - DNA, 22 bp, Artificial Sequence
  chemically synthesized
aagcaccaagcaaagtaccttt

SEQ ID NO: 23948 - DNA, 22 bp, Artificial Sequence
  chemically synthesized
ttgataaggagaacgtgcttat

SEQ ID NO: 23949 - DNA, 22 bp, Artificial Sequence
  chemically synthesized
tgataaggagaacgtgcttata

SEQ ID NO: 23950 - DNA, 22 bp, Artificial Sequence
  chemically synthesized
gataaggagaacgtgcttatag

SEQ ID NO: 23951 - DNA, 22 bp, Artificial Sequence
  chemically synthesized
ataaggagaacgtgcttataga

SEQ ID NO: 23952 - DNA, 22 bp, Artificial Sequence
  chemically synthesized
atagatgttcatagaagatgct

SEQ ID NO: 23953 - DNA, 22 bp, Artificial Sequence
  chemically synthesized
tagatgttcatagaagatgctt

SEQ ID NO: 23954 - DNA, 22 bp, Artificial Sequence
  chemically synthesized
atagaagatgcttggtccaacc

SEQ ID NO: 23955 - DNA, 22 bp, Artificial Sequence
  chemically synthesized
ggtccaaccccgatgtcaaatc

SEQ ID NO: 23956 - DNA, 22 bp, Artificial Sequence
  chemically synthesized
gtccaaccccgatgtcaaatcc

SEQ ID NO: 23957 - DNA, 22 bp, Artificial Sequence
  chemically synthesized
cattctcacatggtatttctct

SEQ ID NO: 23958 - DNA, 22 bp, Artificial Sequence
  chemically synthesized
attctcacatggtatttctctc

SEQ ID NO: 23959 - DNA, 22 bp, Artificial Sequence
  chemically synthesized
tcacatggtatttctctcttcc

SEQ ID NO: 23960 - DNA, 22 bp, Artificial Sequence
  chemically synthesized
acatggtatttctctcttccta

SEQ ID NO: 23961 - DNA, 22 bp, Artificial Sequence
  chemically synthesized
ctctcttcctagtaagggagga

SEQ ID NO: 23962 - DNA, 22 bp, Artificial Sequence
  chemically synthesized
tctcttcctagtaagggaggag

SEQ ID NO: 23963 - DNA, 22 bp, Artificial Sequence
  chemically synthesized
tcttcctagtaagggaggagac

SEQ ID NO: 23964 - DNA, 22 bp, Artificial Sequence
  chemically synthesized
ttcctagtaagggaggagacca

SEQ ID NO: 23965 - DNA, 22 bp, Artificial Sequence
  chemically synthesized
cctagtaagggaggagaccacc

SEQ ID NO: 23966 - DNA, 22 bp, Artificial Sequence
  chemically synthesized
ctagtaagggaggagaccaccc

SEQ ID NO: 23967 - DNA, 22 bp, Artificial Sequence
  chemically synthesized
gtaagggaggagaccacccttc

SEQ ID NO: 23968 - DNA, 22 bp, Artificial Sequence
  chemically synthesized
catattgttttatgcccaattt

SEQ ID NO: 23969 - DNA, 22 bp, Artificial Sequence
  chemically synthesized
atattgttttatgcccaatttc

SEQ ID NO: 23970 - DNA, 22 bp, Artificial Sequence
  chemically synthesized
ttttatgcccaatttctgcctc

SEQ ID NO: 23971 - DNA, 22 bp, Artificial Sequence
  chemically synthesized
tatgcccaatttctgcctccaa

SEQ ID NO: 23972 - DNA, 22 bp, Artificial Sequence
  chemically synthesized
atgcccaatttctgcctccaaa

SEQ ID NO: 23973 - DNA, 22 bp, Artificial Sequence
  chemically synthesized
tgcccaatttctgcctccaaag

SEQ ID NO: 23974 - DNA, 22 bp, Artificial Sequence
  chemically synthesized
ctgcctccaaagaaagaagaag

SEQ ID NO: 23975 - DNA, 22 bp, Artificial Sequence
  chemically synthesized
tgcctccaaagaaagaagaagt

SEQ ID NO: 23976 - DNA, 22 bp, Artificial Sequence
  chemically synthesized
cctccaaagaaagaagaagtaa

SEQ ID NO: 23977 - DNA, 22 bp, Artificial Sequence
  chemically synthesized
caaagaaagaagaagtaaaaac

SEQ ID NO: 23978 - DNA, 22 bp, Artificial Sequence
  chemically synthesized
aaaggcagaaatgaaatccaca

SEQ ID NO: 23979 - DNA, 22 bp, Artificial Sequence
  chemically synthesized
agaccacatcctgggcctggtt

SEQ ID NO: 23980 - DNA, 22 bp, Artificial Sequence
  chemically synthesized
ggcctggttaaagatagacccc

SEQ ID NO: 23981 - DNA, 22 bp, Artificial Sequence
  chemically synthesized
gttaaagatagacccctgacct

SEQ ID NO: 23982 - DNA, 22 bp, Artificial Sequence
  chemically synthesized
aagatagacccctgacctggcc

SEQ ID NO: 23983 - DNA, 22 bp, Artificial Sequence
  chemically synthesized
acctggccagttatgttatcta

SEQ ID NO: 23984 - DNA, 22 bp, Artificial Sequence
  chemically synthesized
gccagttatgttatctatagat

SEQ ID NO: 23985 - DNA, 22 bp, Artificial Sequence
  chemically synthesized
tgttatctatagattccagaca

SEQ ID NO: 23986 - DNA, 22 bp, Artificial Sequence
  chemically synthesized
tctatagattccagacactgta

SEQ ID NO: 23987 - DNA, 22 bp, Artificial Sequence
  chemically synthesized
tagattccagacactgtatgga

SEQ ID NO: 23988 - DNA, 22 bp, Artificial Sequence
  chemically synthesized
cagacactgtatggaaaagcag

SEQ ID NO: 23989 - DNA, 22 bp, Artificial Sequence
  chemically synthesized
tatggaaaagcagtgtgaaaat

SEQ ID NO: 23990 - DNA, 22 bp, Artificial Sequence
  chemically synthesized
tcctgttctgttccattctgat

SEQ ID NO: 23991 - DNA, 22 bp, Artificial Sequence
  chemically synthesized
ttctgttccattctgatgacca

SEQ ID NO: 23992 - DNA, 22 bp, Artificial Sequence
  chemically synthesized
tgttccattctgatgaccagtg

SEQ ID NO: 23993 - DNA, 22 bp, Artificial Sequence
  chemically synthesized
ttccattctgatgaccagtgca

SEQ ID NO: 23994 - DNA, 22 bp, Artificial Sequence
  chemically synthesized
cattctgatgaccagtgcatgc

SEQ ID NO: 23995 - DNA, 22 bp, Artificial Sequence
  chemically synthesized
tgatgaccagtgcatgcagccc

SEQ ID NO: 23996 - DNA, 22 bp, Artificial Sequence
  chemically synthesized
atgaccagtgcatgcagccccc

SEQ ID NO: 23997 - DNA, 22 bp, Artificial Sequence
  chemically synthesized
agagttgtaagcccttaaaagg

SEQ ID NO: 23998 - DNA, 22 bp, Artificial Sequence
  chemically synthesized
gagttgtaagcccttaaaaggg

SEQ ID NO: 23999 - DNA, 22 bp, Artificial Sequence
  chemically synthesized
taagcccttaaaagggacagga

SEQ ID NO: 24000 - DNA, 22 bp, Artificial Sequence
  chemically synthesized
aaaagggacaggaattgctcac

SEQ ID NO: 24001 - DNA, 22 bp, Artificial Sequence
  chemically synthesized
aaagggacaggaattgctcact

SEQ ID NO: 24002 - DNA, 22 bp, Artificial Sequence
  chemically synthesized
ctcactctgagagcttggttgt

SEQ ID NO: 24003 - DNA, 22 bp, Artificial Sequence
  chemically synthesized
actctgagagcttggttgttgg

SEQ ID NO: 24004 - DNA, 22 bp, Artificial Sequence
  chemically synthesized
tgagagcttggttgttggagat

SEQ ID NO: 24005 - DNA, 22 bp, Artificial Sequence
  chemically synthesized
agagcttggttgttggagatgt

SEQ ID NO: 24006 - DNA, 22 bp, Artificial Sequence
  chemically synthesized
ggttgttggagatgtgagtctt

SEQ ID NO: 24007 - DNA, 22 bp, Artificial Sequence
  chemically synthesized
gttgttggagatgtgagtcttg

SEQ ID NO: 24008 - DNA, 22 bp, Artificial Sequence
  chemically synthesized
ttggagatgtgagtcttgccca

SEQ ID NO: 24009 - DNA, 22 bp, Artificial Sequence
  chemically synthesized
gagatgtgagtcttgcccaagc

SEQ ID NO: 24010 - DNA, 22 bp, Artificial Sequence
  chemically synthesized
gcccaagctcccagccgaataa

SEQ ID NO: 24011 - DNA, 22 bp, Artificial Sequence
  chemically synthesized
cccaagctcccagccgaataaa

SEQ ID NO: 24012 - DNA, 22 bp, Artificial Sequence
  chemically synthesized
ccagccgaataaagcccttcct

SEQ ID NO: 24013 - DNA, 22 bp, Artificial Sequence
  chemically synthesized
ccttctttaactcggtgtctga

SEQ ID NO: 24014 - DNA, 22 bp, Artificial Sequence
  chemically synthesized
cttctttaactcggtgtctgag

SEQ ID NO: 24015 - DNA, 22 bp, Artificial Sequence
  chemically synthesized
ctttaactcggtgtctgagggg

SEQ ID NO: 24016 - DNA, 22 bp, Artificial Sequence
  chemically synthesized
tttaactcggtgtctgaggggt

SEQ ID NO: 24017 - DNA, 22 bp, Artificial Sequence
  chemically synthesized
taactcggtgtctgaggggttt

SEQ ID NO: 24018 - DNA, 22 bp, Artificial Sequence
  chemically synthesized
aactcggtgtctgaggggtttt

SEQ ID NO: 24019 - DNA, 22 bp, Artificial Sequence
  chemically synthesized
actcggtgtctgaggggttttg

SEQ ID NO: 24020 - DNA, 22 bp, Artificial Sequence
  chemically synthesized
ggtgtctgaggggttttgtatg

SEQ ID NO: 24021 - DNA, 22 bp, Artificial Sequence
  chemically synthesized
aggggttttgtatgcagcttgt

SEQ ID NO: 24022 - DNA, 22 bp, Artificial Sequence
  chemically synthesized
tgtatgcagcttgtcctgctac

SEQ ID NO: 24023 - DNA, 22 bp, Artificial Sequence
  chemically synthesized
gtatgcagcttgtcctgctaca

SEQ ID NO: 24024 - DNA, 22 bp, Artificial Sequence
  chemically synthesized
tatgcagcttgtcctgctacac

SEQ ID NO: 24025 - DNA, 22 bp, Artificial Sequence
  chemically synthesized
gtcctgctacactagaatcgtt

SEQ ID NO: 24026 - DNA, 22 bp, Artificial Sequence
  chemically synthesized
tcctgctacactagaatcgttc

SEQ ID NO: 24027 - DNA, 22 bp, Artificial Sequence
  chemically synthesized
ctacactagaatcgttccttaa

SEQ ID NO: 24028 - DNA, 22 bp, Artificial Sequence
  chemically synthesized
cactagaatcgttccttaattc

SEQ ID NO: 24029 - DNA, 22 bp, Artificial Sequence
  chemically synthesized
gaatcgttccttaattctctcc

SEQ ID NO: 24030 - DNA, 22 bp, Artificial Sequence
  chemically synthesized
cttaattctctcctctaatatt

SEQ ID NO: 24031 - DNA, 22 bp, Artificial Sequence
  chemically synthesized
aattctctcctctaatattgct

SEQ ID NO: 24032 - DNA, 22 bp, Artificial Sequence
  chemically synthesized
attctctcctctaatattgctg

SEQ ID NO: 24033 - DNA, 22 bp, Artificial Sequence
  chemically synthesized
tctcctctaatattgctgctac

SEQ ID NO: 24034 - DNA, 22 bp, Artificial Sequence
  chemically synthesized
tcctctaatattgctgctacct

SEQ ID NO: 24035 - DNA, 22 bp, Artificial Sequence
  chemically synthesized
ctctaatattgctgctacctct

SEQ ID NO: 24036 - DNA, 22 bp, Artificial Sequence
  chemically synthesized
taatattgctgctacctctatt

SEQ ID NO: 24037 - DNA, 22 bp, Artificial Sequence
  chemically synthesized
atattgctgctacctctattaa

SEQ ID NO: 24038 - DNA, 22 bp, Artificial Sequence
  chemically synthesized
ctgctacctctattaaaacaca

SEQ ID NO: 24039 - DNA, 22 bp, Artificial Sequence
  chemically synthesized
ctacctctattaaaacacaaag

SEQ ID NO: 24040 - DNA, 22 bp, Artificial Sequence
  chemically synthesized
cctctattaaaacacaaagcca

SEQ ID NO: 24041 - DNA, 22 bp, Artificial Sequence
  chemically synthesized
tattaaaacacaaagccacaat

SEQ ID NO: 24042 - DNA, 22 bp, Artificial Sequence
  chemically synthesized
ttaaaacacaaagccacaatat

SEQ ID NO: 24043 - DNA, 22 bp, Artificial Sequence
  chemically synthesized
aaacacaaagccacaatatatg

SEQ ID NO: 24044 - DNA, 22 bp, Artificial Sequence
  chemically synthesized
ggaaaatatgcacactttggat

SEQ ID NO: 24045 - DNA, 22 bp, Artificial Sequence
  chemically synthesized
gaaaatatgcacactttggatc

SEQ ID NO: 24046 - DNA, 22 bp, Artificial Sequence
  chemically synthesized
tggatccagcaagtccacatct

SEQ ID NO: 24047 - DNA, 22 bp, Artificial Sequence
  chemically synthesized
ggatccagcaagtccacatcta

SEQ ID NO: 24048 - DNA, 22 bp, Artificial Sequence
  chemically synthesized
gatccagcaagtccacatctag

SEQ ID NO: 24049 - DNA, 22 bp, Artificial Sequence
  chemically synthesized
gaaaaccatcctgggggaaaat

SEQ ID NO: 24050 - DNA, 22 bp, Artificial Sequence
  chemically synthesized
ggggaaaattaaggagagtatg

SEQ ID NO: 24051 - DNA, 22 bp, Artificial Sequence
  chemically synthesized
aggagagtatgaaaaggatgtt

SEQ ID NO: 24052 - DNA, 22 bp, Artificial Sequence
  chemically synthesized
actaaagcattatgatggcaaa

SEQ ID NO: 24053 - DNA, 22 bp, Artificial Sequence
  chemically synthesized
ctaaagcattatgatggcaaaa

SEQ ID NO: 24054 - DNA, 22 bp, Artificial Sequence
  chemically synthesized
aagcattatgatggcaaaaaat

SEQ ID NO: 24055 - DNA, 22 bp, Artificial Sequence
  chemically synthesized
tgatggcaaaaaattagaaaca

SEQ ID NO: 24056 - DNA, 22 bp, Artificial Sequence
  chemically synthesized
gaaacaacttacactgaactag

SEQ ID NO: 24057 - DNA, 22 bp, Artificial Sequence
  chemically synthesized
acactgaactagtcaacttact

SEQ ID NO: 24058 - DNA, 22 bp, Artificial Sequence
  chemically synthesized
cactgaactagtcaacttactt

SEQ ID NO: 24059 - DNA, 22 bp, Artificial Sequence
  chemically synthesized
aactagtcaacttacttaacag

SEQ ID NO: 24060 - DNA, 22 bp, Artificial Sequence
  chemically synthesized
gtcaacttacttaacagacaga

SEQ ID NO: 24061 - DNA, 22 bp, Artificial Sequence
  chemically synthesized
acttaacagacagaaggctcaa

SEQ ID NO: 24062 - DNA, 22 bp, Artificial Sequence
  chemically synthesized
cttaacagacagaaggctcaat

SEQ ID NO: 24063 - DNA, 22 bp, Artificial Sequence
  chemically synthesized
aacagacagaaggctcaattag

SEQ ID NO: 24064 - DNA, 22 bp, Artificial Sequence
  chemically synthesized
acagacagaaggctcaattagc

SEQ ID NO: 24065 - DNA, 22 bp, Artificial Sequence
  chemically synthesized
aattagctcatgtgtcaaatgg

SEQ ID NO: 24066 - DNA, 22 bp, Artificial Sequence
  chemically synthesized
gctcatgtgtcaaatgggggta

SEQ ID NO: 24067 - DNA, 22 bp, Artificial Sequence
  chemically synthesized
atgtgtcaaatgggggtaaaat

SEQ ID NO: 24068 - DNA, 22 bp, Artificial Sequence
  chemically synthesized
agtttggagggaaagacaggct

SEQ ID NO: 24069 - DNA, 22 bp, Artificial Sequence
  chemically synthesized
gtttggagggaaagacaggctc

SEQ ID NO: 24070 - DNA, 22 bp, Artificial Sequence
  chemically synthesized
ggagggaaagacaggctctaaa

SEQ ID NO: 24071 - DNA, 22 bp, Artificial Sequence
  chemically synthesized
gagggaaagacaggctctaaaa

SEQ ID NO: 24072 - DNA, 22 bp, Artificial Sequence
  chemically synthesized
taaaagaggattaaaaattaga

SEQ ID NO: 24073 - DNA, 22 bp, Artificial Sequence
  chemically synthesized
aaagaggattaaaaattagatg

SEQ ID NO: 24074 - DNA, 22 bp, Artificial Sequence
  chemically synthesized
aaaattagatgtggcctaggca

SEQ ID NO: 24075 - DNA, 22 bp, Artificial Sequence
  chemically synthesized
gatgtggcctaggcaaagaatt

SEQ ID NO: 24076 - DNA, 22 bp, Artificial Sequence
  chemically synthesized
ggcaaagaatttatgaccaagt

SEQ ID NO: 24077 - DNA, 22 bp, Artificial Sequence
  chemically synthesized
atgaccaagtcctcaaaactaa

SEQ ID NO: 24078 - DNA, 22 bp, Artificial Sequence
  chemically synthesized
tgaccaagtcctcaaaactaaa

SEQ ID NO: 24079 - DNA, 22 bp, Artificial Sequence
  chemically synthesized
aaaactaaacacaacaaaaaca

SEQ ID NO: 24080 - DNA, 22 bp, Artificial Sequence
  chemically synthesized
aacacaacaaaaacaaaaacag

SEQ ID NO: 24081 - DNA, 22 bp, Artificial Sequence
  chemically synthesized
aattaaactaaaatgcttctgc

SEQ ID NO: 24082 - DNA, 22 bp, Artificial Sequence
  chemically synthesized
attaaactaaaatgcttctgca

SEQ ID NO: 24083 - DNA, 22 bp, Artificial Sequence
  chemically synthesized
aactaaaatgcttctgcaccgc

SEQ ID NO: 24084 - DNA, 22 bp, Artificial Sequence
  chemically synthesized
aaatgcttctgcaccgcaaaag

SEQ ID NO: 24085 - DNA, 22 bp, Artificial Sequence
  chemically synthesized
ctgcaccgcaaaagaccgaatc

SEQ ID NO: 24086 - DNA, 22 bp, Artificial Sequence
  chemically synthesized
tgcaccgcaaaagaccgaatca

SEQ ID NO: 24087 - DNA, 22 bp, Artificial Sequence
  chemically synthesized
caccgcaaaagaccgaatcaac

SEQ ID NO: 24088 - DNA, 22 bp, Artificial Sequence
  chemically synthesized
cagaatgagaaaaaaaaattgc

SEQ ID NO: 24089 - DNA, 22 bp, Artificial Sequence
  chemically synthesized
caaactatgaatgcaacaaaag

SEQ ID NO: 24090 - DNA, 22 bp, Artificial Sequence
  chemically synthesized
tgaatgcaacaaaaggctaata

SEQ ID NO: 24091 - DNA, 22 bp, Artificial Sequence
  chemically synthesized
atatacagaatctacaaggaac

SEQ ID NO: 24092 - DNA, 22 bp, Artificial Sequence
  chemically synthesized
caaggaactcaacaacaaaaaa

SEQ ID NO: 24093 - DNA, 22 bp, Artificial Sequence
  chemically synthesized
aacaacaaaaaaaccaacctca

SEQ ID NO: 24094 - DNA, 22 bp, Artificial Sequence
  chemically synthesized
attagaaagtgactgtgatggt

SEQ ID NO: 24095 - DNA, 22 bp, Artificial Sequence
  chemically synthesized
gaaagtgactgtgatggttaat

SEQ ID NO: 24096 - DNA, 22 bp, Artificial Sequence
  chemically synthesized
tgatggttaatactgagtgtca

SEQ ID NO: 24097 - DNA, 22 bp, Artificial Sequence
  chemically synthesized
atactgagtgtcaacttgattg

SEQ ID NO: 24098 - DNA, 22 bp, Artificial Sequence
  chemically synthesized
agtgtcaacttgattggactga

SEQ ID NO: 24099 - DNA, 22 bp, Artificial Sequence
  chemically synthesized
gattggactgaaggatgcaaag

SEQ ID NO: 24100 - DNA, 22 bp, Artificial Sequence
  chemically synthesized
attggactgaaggatgcaaagt

SEQ ID NO: 24101 - DNA, 22 bp, Artificial Sequence
  chemically synthesized
gactgaaggatgcaaagtaatg

SEQ ID NO: 24102 - DNA, 22 bp, Artificial Sequence
  chemically synthesized
aaggatgcaaagtaatgatctt

SEQ ID NO: 24103 - DNA, 22 bp, Artificial Sequence
  chemically synthesized
gggtgtgtctgtgagggtgtta

SEQ ID NO: 24104 - DNA, 22 bp, Artificial Sequence
  chemically synthesized
ggtgtgtctgtgagggtgttac

SEQ ID NO: 24105 - DNA, 22 bp, Artificial Sequence
  chemically synthesized
tgagggtgttaccaaaggagat

SEQ ID NO: 24106 - DNA, 22 bp, Artificial Sequence
  chemically synthesized
ccaaaggagattaatatttcag

SEQ ID NO: 24107 - DNA, 22 bp, Artificial Sequence
  chemically synthesized
atatttcagtcagtgggctggg

SEQ ID NO: 24108 - DNA, 22 bp, Artificial Sequence
  chemically synthesized
cagtcagtgggctggggaaggc

SEQ ID NO: 24109 - DNA, 22 bp, Artificial Sequence
  chemically synthesized
agtcagtgggctggggaaggca

SEQ ID NO: 24110 - DNA, 22 bp, Artificial Sequence
  chemically synthesized
gggaaggcagacccacccttaa

SEQ ID NO: 24111 - DNA, 22 bp, Artificial Sequence
  chemically synthesized
aatctgggtgggcaccatctaa

SEQ ID NO: 24112 - DNA, 22 bp, Artificial Sequence
  chemically synthesized
atctgggtgggcaccatctaat

SEQ ID NO: 24113 - DNA, 22 bp, Artificial Sequence
  chemically synthesized
ggtgggcaccatctaatcagtt

SEQ ID NO: 24114 - DNA, 22 bp, Artificial Sequence
  chemically synthesized
atcagttgccagcacagccagg

SEQ ID NO: 24115 - DNA, 22 bp, Artificial Sequence
  chemically synthesized
ccagcacagccaggatataaag

SEQ ID NO: 24116 - DNA, 22 bp, Artificial Sequence
  chemically synthesized
gattggcttggcatcccagcct

SEQ ID NO: 24117 - DNA, 22 bp, Artificial Sequence
  chemically synthesized
gcttggcatcccagcctacatt

SEQ ID NO: 24118 - DNA, 22 bp, Artificial Sequence
  chemically synthesized
ggcatcccagcctacatttttc

SEQ ID NO: 24119 - DNA, 22 bp, Artificial Sequence
  chemically synthesized
gcatcccagcctacatttttct

SEQ ID NO: 24120 - DNA, 22 bp, Artificial Sequence
  chemically synthesized
catttttctcccatgctggatt

SEQ ID NO: 24121 - DNA, 22 bp, Artificial Sequence
  chemically synthesized
ttctcccatgctggattcttcc

SEQ ID NO: 24122 - DNA, 22 bp, Artificial Sequence
  chemically synthesized
tctcccatgctggattcttcct

SEQ ID NO: 24123 - DNA, 22 bp, Artificial Sequence
  chemically synthesized
ctcccatgctggattcttcctg

SEQ ID NO: 24124 - DNA, 22 bp, Artificial Sequence
  chemically synthesized
tcccatgctggattcttcctgc

SEQ ID NO: 24125 - DNA, 22 bp, Artificial Sequence
  chemically synthesized
ccatgctggattcttcctgccc

SEQ ID NO: 24126 - DNA, 22 bp, Artificial Sequence
  chemically synthesized
gattcttcctgccctggaacat

SEQ ID NO: 24127 - DNA, 22 bp, Artificial Sequence
  chemically synthesized
ttcctgccctggaacattgaac

SEQ ID NO: 24128 - DNA, 22 bp, Artificial Sequence
  chemically synthesized
cctgccctggaacattgaactc

SEQ ID NO: 24129 - DNA, 22 bp, Artificial Sequence
  chemically synthesized
ctgccctggaacattgaactcc

SEQ ID NO: 24130 - DNA, 22 bp, Artificial Sequence
  chemically synthesized
ccctggaacattgaactccagg

SEQ ID NO: 24131 - DNA, 22 bp, Artificial Sequence
  chemically synthesized
gaacattgaactccaggttctt

SEQ ID NO: 24132 - DNA, 22 bp, Artificial Sequence
  chemically synthesized
aactccaggttcttcagctttg

SEQ ID NO: 24133 - DNA, 22 bp, Artificial Sequence
  chemically synthesized
caggttcttcagctttgggact

SEQ ID NO: 24134 - DNA, 22 bp, Artificial Sequence
  chemically synthesized
ttcagctttgggactccgacta

SEQ ID NO: 24135 - DNA, 22 bp, Artificial Sequence
  chemically synthesized
cagctttgggactccgactagc

SEQ ID NO: 24136 - DNA, 22 bp, Artificial Sequence
  chemically synthesized
agctttgggactccgactagct

SEQ ID NO: 24137 - DNA, 22 bp, Artificial Sequence
  chemically synthesized
tgggactccgactagcttcctt

SEQ ID NO: 24138 - DNA, 22 bp, Artificial Sequence
  chemically synthesized
gggactccgactagcttccttg

SEQ ID NO: 24139 - DNA, 22 bp, Artificial Sequence
  chemically synthesized
ggactccgactagcttccttgt

SEQ ID NO: 24140 - DNA, 22 bp, Artificial Sequence
  chemically synthesized
cgactagcttccttgttcctca

SEQ ID NO: 24141 - DNA, 22 bp, Artificial Sequence
  chemically synthesized
gcttccttgttcctcagctggc

SEQ ID NO: 24142 - DNA, 22 bp, Artificial Sequence
  chemically synthesized
ccttgttcctcagctggcagat

SEQ ID NO: 24143 - DNA, 22 bp, Artificial Sequence
  chemically synthesized
cttgttcctcagctggcagatg

SEQ ID NO: 24144 - DNA, 22 bp, Artificial Sequence
  chemically synthesized
gttcctcagctggcagatggcc

SEQ ID NO: 24145 - DNA, 22 bp, Artificial Sequence
  chemically synthesized
ttcctcagctggcagatggcct

SEQ ID NO: 24146 - DNA, 22 bp, Artificial Sequence
  chemically synthesized
ctcagctggcagatggcctgtt

SEQ ID NO: 24147 - DNA, 22 bp, Artificial Sequence
  chemically synthesized
agctggcagatggcctgttttg

SEQ ID NO: 24148 - DNA, 22 bp, Artificial Sequence
  chemically synthesized
gcagatggcctgttttgggacc

SEQ ID NO: 24149 - DNA, 22 bp, Artificial Sequence
  chemically synthesized
ttttgggaccttgtgaacatgt

SEQ ID NO: 24150 - DNA, 22 bp, Artificial Sequence
  chemically synthesized
tgggaccttgtgaacatgtgag

SEQ ID NO: 24151 - DNA, 22 bp, Artificial Sequence
  chemically synthesized
gggaccttgtgaacatgtgagt

SEQ ID NO: 24152 - DNA, 22 bp, Artificial Sequence
  chemically synthesized
ggaccttgtgaacatgtgagtc

SEQ ID NO: 24153 - DNA, 22 bp, Artificial Sequence
  chemically synthesized
gtgaacatgtgagtcaatacta

SEQ ID NO: 24154 - DNA, 22 bp, Artificial Sequence
  chemically synthesized
tgaacatgtgagtcaatactac

SEQ ID NO: 24155 - DNA, 22 bp, Artificial Sequence
  chemically synthesized
cataataaactctcatatagat

SEQ ID NO: 24156 - DNA, 22 bp, Artificial Sequence
  chemically synthesized
tcatatagatatagatatagag

SEQ ID NO: 24157 - DNA, 22 bp, Artificial Sequence
  chemically synthesized
atatagatatagatatagagat

SEQ ID NO: 24158 - DNA, 22 bp, Artificial Sequence
  chemically synthesized
ctattaattctgtttctctgta

SEQ ID NO: 24159 - DNA, 22 bp, Artificial Sequence
  chemically synthesized
ttaattctgtttctctgtagaa

SEQ ID NO: 24160 - DNA, 22 bp, Artificial Sequence
  chemically synthesized
attctgtttctctgtagaaccc

SEQ ID NO: 24161 - DNA, 22 bp, Artificial Sequence
  chemically synthesized
tgtttctctgtagaaccctaat

SEQ ID NO: 24162 - DNA, 22 bp, Artificial Sequence
  chemically synthesized
tttctctgtagaaccctaatac

SEQ ID NO: 24163 - DNA, 22 bp, Artificial Sequence
  chemically synthesized
ctctgtagaaccctaatacaga

SEQ ID NO: 24164 - DNA, 22 bp, Artificial Sequence
  chemically synthesized
tctgtagaaccctaatacagat

SEQ ID NO: 24165 - DNA, 22 bp, Artificial Sequence
  chemically synthesized
tgtagaaccctaatacagattt

SEQ ID NO: 24166 - DNA, 22 bp, Artificial Sequence
  chemically synthesized
tagaaccctaatacagattttg

SEQ ID NO: 24167 - DNA, 22 bp, Artificial Sequence
  chemically synthesized
atacagattttggtaccaggag

SEQ ID NO: 24168 - DNA, 22 bp, Artificial Sequence
  chemically synthesized
tggtaccaggagtggttctaga

SEQ ID NO: 24169 - DNA, 22 bp, Artificial Sequence
  chemically synthesized
ggtaccaggagtggttctagag

SEQ ID NO: 24170 - DNA, 22 bp, Artificial Sequence
  chemically synthesized
gtaccaggagtggttctagagg

SEQ ID NO: 24171 - DNA, 22 bp, Artificial Sequence
  chemically synthesized
tagaggaacagaatattaagga

SEQ ID NO: 24172 - DNA, 22 bp, Artificial Sequence
  chemically synthesized
gaggaacagaatattaaggatg

SEQ ID NO: 24173 - DNA, 22 bp, Artificial Sequence
  chemically synthesized
aggatggagttctttcattggt

SEQ ID NO: 24174 - DNA, 22 bp, Artificial Sequence
  chemically synthesized
tttcattggttttggggtttct

SEQ ID NO: 24175 - DNA, 22 bp, Artificial Sequence
  chemically synthesized
tcattggttttggggtttctgg

SEQ ID NO: 24176 - DNA, 22 bp, Artificial Sequence
  chemically synthesized
cattggttttggggtttctgga

SEQ ID NO: 24177 - DNA, 22 bp, Artificial Sequence
  chemically synthesized
attggttttggggtttctggag

SEQ ID NO: 24178 - DNA, 22 bp, Artificial Sequence
  chemically synthesized
gttttggggtttctggagttgg

SEQ ID NO: 24179 - DNA, 22 bp, Artificial Sequence
  chemically synthesized
tggggtttctggagttggctgc

SEQ ID NO: 24180 - DNA, 22 bp, Artificial Sequence
  chemically synthesized
ggggtttctggagttggctgct

SEQ ID NO: 24181 - DNA, 22 bp, Artificial Sequence
  chemically synthesized
gggtttctggagttggctgctt

SEQ ID NO: 24182 - DNA, 22 bp, Artificial Sequence
  chemically synthesized
ctggagttggctgcttaatatg

SEQ ID NO: 24183 - DNA, 22 bp, Artificial Sequence
  chemically synthesized
tggagttggctgcttaatatga

SEQ ID NO: 24184 - DNA, 22 bp, Artificial Sequence
  chemically synthesized
gagttggctgcttaatatgatt

SEQ ID NO: 24185 - DNA, 22 bp, Artificial Sequence
  chemically synthesized
gctgcttaatatgattagaccc

SEQ ID NO: 24186 - DNA, 22 bp, Artificial Sequence
  chemically synthesized
cttaatatgattagacccaaat

SEQ ID NO: 24187 - DNA, 22 bp, Artificial Sequence
  chemically synthesized
aatatgattagacccaaatatg

SEQ ID NO: 24188 - DNA, 22 bp, Artificial Sequence
  chemically synthesized
atatgattagacccaaatatgc

SEQ ID NO: 24189 - DNA, 22 bp, Artificial Sequence
  chemically synthesized
gacccaaatatgctaaggactc

SEQ ID NO: 24190 - DNA, 22 bp, Artificial Sequence
  chemically synthesized
aggactcttcttctaatggtat

SEQ ID NO: 24191 - DNA, 22 bp, Artificial Sequence
  chemically synthesized
ttcttctaatggtatggagaac

SEQ ID NO: 24192 - DNA, 22 bp, Artificial Sequence
  chemically synthesized
cttctaatggtatggagaacac

SEQ ID NO: 24193 - DNA, 22 bp, Artificial Sequence
  chemically synthesized
ttctaatggtatggagaacact

SEQ ID NO: 24194 - DNA, 22 bp, Artificial Sequence
  chemically synthesized
ctaatggtatggagaacactga

SEQ ID NO: 24195 - DNA, 22 bp, Artificial Sequence
  chemically synthesized
taatggtatggagaacactgat

SEQ ID NO: 24196 - DNA, 22 bp, Artificial Sequence
  chemically synthesized
atggtatggagaacactgataa

SEQ ID NO: 24197 - DNA, 22 bp, Artificial Sequence
  chemically synthesized
ataatccttggcatcaattgtt

SEQ ID NO: 24198 - DNA, 22 bp, Artificial Sequence
  chemically synthesized
ggcatcaattgtttagagagtt

SEQ ID NO: 24199 - DNA, 22 bp, Artificial Sequence
  chemically synthesized
gcatcaattgtttagagagtta

SEQ ID NO: 24200 - DNA, 22 bp, Artificial Sequence
  chemically synthesized
tttagagagttatgcaaaataa

SEQ ID NO: 24201 - DNA, 22 bp, Artificial Sequence
  chemically synthesized
agagagttatgcaaaataaatg

SEQ ID NO: 24202 - DNA, 22 bp, Artificial Sequence
  chemically synthesized
gagagttatgcaaaataaatgc

SEQ ID NO: 24203 - DNA, 22 bp, Artificial Sequence
  chemically synthesized
tgcaaaataaatgcatttgaca

SEQ ID NO: 24204 - DNA, 22 bp, Artificial Sequence
  chemically synthesized
gacactcttgattcaacgcttg

SEQ ID NO: 24205 - DNA, 22 bp, Artificial Sequence
  chemically synthesized
acactcttgattcaacgcttgt

SEQ ID NO: 24206 - DNA, 22 bp, Artificial Sequence
  chemically synthesized
ttgattcaacgcttgtgagagg

SEQ ID NO: 24207 - DNA, 22 bp, Artificial Sequence
  chemically synthesized
gattcaacgcttgtgagaggca

SEQ ID NO: 24208 - DNA, 22 bp, Artificial Sequence
  chemically synthesized
attcaacgcttgtgagaggcaa

SEQ ID NO: 24209 - DNA, 22 bp, Artificial Sequence
  chemically synthesized
aacgcttgtgagaggcaaggaa

SEQ ID NO: 24210 - DNA, 22 bp, Artificial Sequence
  chemically synthesized
gtgagaggcaaggaatttagct

SEQ ID NO: 24211 - DNA, 22 bp, Artificial Sequence
  chemically synthesized
tgagaggcaaggaatttagcta

SEQ ID NO: 24212 - DNA, 22 bp, Artificial Sequence
  chemically synthesized
agctactgtatacataatactt

SEQ ID NO: 24213 - DNA, 22 bp, Artificial Sequence
  chemically synthesized
gctactgtatacataatacttt

SEQ ID NO: 24214 - DNA, 22 bp, Artificial Sequence
  chemically synthesized
ctgtatacataatacttttgac

SEQ ID NO: 24215 - DNA, 22 bp, Artificial Sequence
  chemically synthesized
tatacataatacttttgactat

SEQ ID NO: 24216 - DNA, 22 bp, Artificial Sequence
  chemically synthesized
ttgactatatgtggagaatcaa

SEQ ID NO: 24217 - DNA, 22 bp, Artificial Sequence
  chemically synthesized
tgactatatgtggagaatcaag

SEQ ID NO: 24218 - DNA, 22 bp, Artificial Sequence
  chemically synthesized
gactatatgtggagaatcaagg

SEQ ID NO: 24219 - DNA, 22 bp, Artificial Sequence
  chemically synthesized
actatatgtggagaatcaagga

SEQ ID NO: 24220 - DNA, 22 bp, Artificial Sequence
  chemically synthesized
tatgtggagaatcaaggaacat

SEQ ID NO: 24221 - DNA, 22 bp, Artificial Sequence
  chemically synthesized
gttggttgcttgtaagttcgct

SEQ ID NO: 24222 - DNA, 22 bp, Artificial Sequence
  chemically synthesized
gttgcttgtaagttcgctggac

SEQ ID NO: 24223 - DNA, 22 bp, Artificial Sequence
  chemically synthesized
cttgtaagttcgctggacaaag

SEQ ID NO: 24224 - DNA, 22 bp, Artificial Sequence
  chemically synthesized
gtaagttcgctggacaaagtga

SEQ ID NO: 24225 - DNA, 22 bp, Artificial Sequence
  chemically synthesized
taagttcgctggacaaagtgat

SEQ ID NO: 24226 - DNA, 22 bp, Artificial Sequence
  chemically synthesized
gctggacaaagtgatgaaagaa

SEQ ID NO: 24227 - DNA, 22 bp, Artificial Sequence
  chemically synthesized
gacaaagtgatgaaagaaaatg

SEQ ID NO: 24228 - DNA, 22 bp, Artificial Sequence
  chemically synthesized
aggagtatatcaactctccagc

SEQ ID NO: 24229 - DNA, 22 bp, Artificial Sequence
  chemically synthesized
tccagctttgtgccataatctt

SEQ ID NO: 24230 - DNA, 22 bp, Artificial Sequence
  chemically synthesized
cagctttgtgccataatcttat

SEQ ID NO: 24231 - DNA, 22 bp, Artificial Sequence
  chemically synthesized
tgtgccataatcttatttggag

SEQ ID NO: 24232 - DNA, 22 bp, Artificial Sequence
  chemically synthesized
gtgccataatcttatttggaga

SEQ ID NO: 24233 - DNA, 22 bp, Artificial Sequence
  chemically synthesized
tgccataatcttatttggagag

SEQ ID NO: 24234 - DNA, 22 bp, Artificial Sequence
  chemically synthesized
atttggagagaacttgctcacc

SEQ ID NO: 24235 - DNA, 22 bp, Artificial Sequence
  chemically synthesized
tttggagagaacttgctcacct

SEQ ID NO: 24236 - DNA, 22 bp, Artificial Sequence
  chemically synthesized
ggagagaacttgctcacctttc

SEQ ID NO: 24237 - DNA, 22 bp, Artificial Sequence
  chemically synthesized
gagagaacttgctcacctttca

SEQ ID NO: 24238 - DNA, 22 bp, Artificial Sequence
  chemically synthesized
gctcacctttcacttccacaag

SEQ ID NO: 24239 - DNA, 22 bp, Artificial Sequence
  chemically synthesized
ctcacctttcacttccacaaga

SEQ ID NO: 24240 - DNA, 22 bp, Artificial Sequence
  chemically synthesized
acctttcacttccacaagatat

SEQ ID NO: 24241 - DNA, 22 bp, Artificial Sequence
  chemically synthesized
tcacttccacaagatatcacag

SEQ ID NO: 24242 - DNA, 22 bp, Artificial Sequence
  chemically synthesized
cacttccacaagatatcacagt

SEQ ID NO: 24243 - DNA, 22 bp, Artificial Sequence
  chemically synthesized
acttccacaagatatcacagtg

SEQ ID NO: 24244 - DNA, 22 bp, Artificial Sequence
  chemically synthesized
ccacaagatatcacagtggtcc

SEQ ID NO: 24245 - DNA, 22 bp, Artificial Sequence
  chemically synthesized
cacaagatatcacagtggtcca

SEQ ID NO: 24246 - DNA, 22 bp, Artificial Sequence
  chemically synthesized
cattgatgacatgctgactgga

SEQ ID NO: 24247 - DNA, 22 bp, Artificial Sequence
  chemically synthesized
atgacatgctgactggaactag

SEQ ID NO: 24248 - DNA, 22 bp, Artificial Sequence
  chemically synthesized
actggaactagtgagcaagaag

SEQ ID NO: 24249 - DNA, 22 bp, Artificial Sequence
  chemically synthesized
gaactagtgagcaagaagtagc

SEQ ID NO: 24250 - DNA, 22 bp, Artificial Sequence
  chemically synthesized
gtgagcaagaagtagcaaacac

SEQ ID NO: 24251 - DNA, 22 bp, Artificial Sequence
  chemically synthesized
gatttattgatgagacatttgt

SEQ ID NO: 24252 - DNA, 22 bp, Artificial Sequence
  chemically synthesized
attgatgagacatttgtgggac

SEQ ID NO: 24253 - DNA, 22 bp, Artificial Sequence
  chemically synthesized
ttgatgagacatttgtgggaca

SEQ ID NO: 24254 - DNA, 22 bp, Artificial Sequence
  chemically synthesized
atgagacatttgtgggacagag

SEQ ID NO: 24255 - DNA, 22 bp, Artificial Sequence
  chemically synthesized
gtgggacagaggatgggaaata

SEQ ID NO: 24256 - DNA, 22 bp, Artificial Sequence
  chemically synthesized
tgggacagaggatgggaaataa

SEQ ID NO: 24257 - DNA, 22 bp, Artificial Sequence
  chemically synthesized
attaaattcagggaccttctac

SEQ ID NO: 24258 - DNA, 22 bp, Artificial Sequence
  chemically synthesized
aattcagggaccttctacctca

SEQ ID NO: 24259 - DNA, 22 bp, Artificial Sequence
  chemically synthesized
agggaccttctacctcagtaaa

SEQ ID NO: 24260 - DNA, 22 bp, Artificial Sequence
  chemically synthesized
ctacctcagtaaaatttatagg

SEQ ID NO: 24261 - DNA, 22 bp, Artificial Sequence
  chemically synthesized
tacctcagtaaaatttataggg

SEQ ID NO: 24262 - DNA, 22 bp, Artificial Sequence
  chemically synthesized
cctcagtaaaatttataggggt

SEQ ID NO: 24263 - DNA, 22 bp, Artificial Sequence
  chemically synthesized
agtaaaatttataggggtccaa

SEQ ID NO: 24264 - DNA, 22 bp, Artificial Sequence
  chemically synthesized
ataggggtccaatggtttgggg

SEQ ID NO: 24265 - DNA, 22 bp, Artificial Sequence
  chemically synthesized
taggggtccaatggtttggggc

SEQ ID NO: 24266 - DNA, 22 bp, Artificial Sequence
  chemically synthesized
ggggctctttgagatattcctt

SEQ ID NO: 24267 - DNA, 22 bp, Artificial Sequence
  chemically synthesized
gggctctttgagatattccttc

SEQ ID NO: 24268 - DNA, 22 bp, Artificial Sequence
  chemically synthesized
tttgagatattccttctaaagt

SEQ ID NO: 24269 - DNA, 22 bp, Artificial Sequence
  chemically synthesized
tgagatattccttctaaagtga

SEQ ID NO: 24270 - DNA, 22 bp, Artificial Sequence
  chemically synthesized
gagatattccttctaaagtgaa

SEQ ID NO: 24271 - DNA, 22 bp, Artificial Sequence
  chemically synthesized
agatattccttctaaagtgaag

SEQ ID NO: 24272 - DNA, 22 bp, Artificial Sequence
  chemically synthesized
cttctaaagtgaaggataattt

SEQ ID NO: 24273 - DNA, 22 bp, Artificial Sequence
  chemically synthesized
ctaaagtgaaggataatttgct

SEQ ID NO: 24274 - DNA, 22 bp, Artificial Sequence
  chemically synthesized
taaagtgaaggataatttgctg

SEQ ID NO: 24275 - DNA, 22 bp, Artificial Sequence
  chemically synthesized
aagtgaaggataatttgctgca

SEQ ID NO: 24276 - DNA, 22 bp, Artificial Sequence
  chemically synthesized
gctgcatttggccactcttaca

SEQ ID NO: 24277 - DNA, 22 bp, Artificial Sequence
  chemically synthesized
ctgcatttggccactcttacaa

SEQ ID NO: 24278 - DNA, 22 bp, Artificial Sequence
  chemically synthesized
catttggccactcttacaacca

SEQ ID NO: 24279 - DNA, 22 bp, Artificial Sequence
  chemically synthesized
ggccactcttacaaccaagaaa

SEQ ID NO: 24280 - DNA, 22 bp, Artificial Sequence
  chemically synthesized
gccactcttacaaccaagaaat

SEQ ID NO: 24281 - DNA, 22 bp, Artificial Sequence
  chemically synthesized
ttacaaccaagaaataggcaca

SEQ ID NO: 24282 - DNA, 22 bp, Artificial Sequence
  chemically synthesized
acaaccaagaaataggcacaac

SEQ ID NO: 24283 - DNA, 22 bp, Artificial Sequence
  chemically synthesized
caaccaagaaataggcacaacg

SEQ ID NO: 24284 - DNA, 22 bp, Artificial Sequence
  chemically synthesized
gtgggcctatttggattttgga

SEQ ID NO: 24285 - DNA, 22 bp, Artificial Sequence
  chemically synthesized
tttggattttggaggcaacata

SEQ ID NO: 24286 - DNA, 22 bp, Artificial Sequence
  chemically synthesized
ggattttggaggcaacatattc

SEQ ID NO: 24287 - DNA, 22 bp, Artificial Sequence
  chemically synthesized
gattttggaggcaacatattcc

SEQ ID NO: 24288 - DNA, 22 bp, Artificial Sequence
  chemically synthesized
tggaggcaacatattcctgatt

SEQ ID NO: 24289 - DNA, 22 bp, Artificial Sequence
  chemically synthesized
ggaggcaacatattcctgattt

SEQ ID NO: 24290 - DNA, 22 bp, Artificial Sequence
  chemically synthesized
gaggcaacatattcctgatttg

SEQ ID NO: 24291 - DNA, 22 bp, Artificial Sequence
  chemically synthesized
ctgatttgggtgtgttactctg

SEQ ID NO: 24292 - DNA, 22 bp, Artificial Sequence
  chemically synthesized
atttgggtgtgttactctggcc

SEQ ID NO: 24293 - DNA, 22 bp, Artificial Sequence
  chemically synthesized
gggtgtgttactctggcccatt

SEQ ID NO: 24294 - DNA, 22 bp, Artificial Sequence
  chemically synthesized
ggtgtgttactctggcccattt

SEQ ID NO: 24295 - DNA, 22 bp, Artificial Sequence
  chemically synthesized
ctctggcccatttatcgagtga

SEQ ID NO: 24296 - DNA, 22 bp, Artificial Sequence
  chemically synthesized
tggcccatttatcgagtgatcc

SEQ ID NO: 24297 - DNA, 22 bp, Artificial Sequence
  chemically synthesized
gcccatttatcgagtgatccaa

SEQ ID NO: 24298 - DNA, 22 bp, Artificial Sequence
  chemically synthesized
atcgagtgatccaaaaggctgc

SEQ ID NO: 24299 - DNA, 22 bp, Artificial Sequence
  chemically synthesized
tcgagtgatccaaaaggctgcc

SEQ ID NO: 24300 - DNA, 22 bp, Artificial Sequence
  chemically synthesized
ccagttttgagtggagtccaga

SEQ ID NO: 24301 - DNA, 22 bp, Artificial Sequence
  chemically synthesized
tgagtggagtccagaacagaag

SEQ ID NO: 24302 - DNA, 22 bp, Artificial Sequence
  chemically synthesized
gagtggagtccagaacagaagg

SEQ ID NO: 24303 - DNA, 22 bp, Artificial Sequence
  chemically synthesized
agtggagtccagaacagaaggc

SEQ ID NO: 24304 - DNA, 22 bp, Artificial Sequence
  chemically synthesized
tgccacaggtccaggctgctgt

SEQ ID NO: 24305 - DNA, 22 bp, Artificial Sequence
  chemically synthesized
ccacaggtccaggctgctgtgc

SEQ ID NO: 24306 - DNA, 22 bp, Artificial Sequence
  chemically synthesized
ctgtgcaagctgctatgccact

SEQ ID NO: 24307 - DNA, 22 bp, Artificial Sequence
  chemically synthesized
tgcaagctgctatgccacttgg

SEQ ID NO: 24308 - DNA, 22 bp, Artificial Sequence
  chemically synthesized
ctatgccacttgggccatatga

SEQ ID NO: 24309 - DNA, 22 bp, Artificial Sequence
  chemically synthesized
tgccacttgggccatatgacct

SEQ ID NO: 24310 - DNA, 22 bp, Artificial Sequence
  chemically synthesized
gggccatatgacctagcagatc

SEQ ID NO: 24311 - DNA, 22 bp, Artificial Sequence
  chemically synthesized
ggccatatgacctagcagatcc

SEQ ID NO: 24312 - DNA, 22 bp, Artificial Sequence
  chemically synthesized
gcagatccaatgatgcttgagg

SEQ ID NO: 24313 - DNA, 22 bp, Artificial Sequence
  chemically synthesized
gaggtgtcagtgccagataggg

SEQ ID NO: 24314 - DNA, 22 bp, Artificial Sequence
  chemically synthesized
aggtgtcagtgccagataggga

SEQ ID NO: 24315 - DNA, 22 bp, Artificial Sequence
  chemically synthesized
tttggagcatttggcaggctga

SEQ ID NO: 24316 - DNA, 22 bp, Artificial Sequence
  chemically synthesized
ggagcatttggcaggctgaatc

SEQ ID NO: 24317 - DNA, 22 bp, Artificial Sequence
  chemically synthesized
gagcatttggcaggctgaatca

SEQ ID NO: 24318 - DNA, 22 bp, Artificial Sequence
  chemically synthesized
ggcaggctgaatcacagcggag

SEQ ID NO: 24319 - DNA, 22 bp, Artificial Sequence
  chemically synthesized
gcaggctgaatcacagcggagg

SEQ ID NO: 24320 - DNA, 22 bp, Artificial Sequence
  chemically synthesized
aatcacagcggaggcctctagg

SEQ ID NO: 24321 - DNA, 22 bp, Artificial Sequence
  chemically synthesized
taggattttggagcaaggccct

SEQ ID NO: 24322 - DNA, 22 bp, Artificial Sequence
  chemically synthesized
ggattttggagcaaggccctgc

SEQ ID NO: 24323 - DNA, 22 bp, Artificial Sequence
  chemically synthesized
tggagcaaggccctgccatctt

SEQ ID NO: 24324 - DNA, 22 bp, Artificial Sequence
  chemically synthesized
ggagcaaggccctgccatcttc

SEQ ID NO: 24325 - DNA, 22 bp, Artificial Sequence
  chemically synthesized
gagcaaggccctgccatcttct

SEQ ID NO: 24326 - DNA, 22 bp, Artificial Sequence
  chemically synthesized
ccatcttctgcagataactact

SEQ ID NO: 24327 - DNA, 22 bp, Artificial Sequence
  chemically synthesized
ctgcagataactactctctttt

SEQ ID NO: 24328 - DNA, 22 bp, Artificial Sequence
  chemically synthesized
tgcagataactactctctttta

SEQ ID NO: 24329 - DNA, 22 bp, Artificial Sequence
  chemically synthesized
cagataactactctcttttagg

SEQ ID NO: 24330 - DNA, 22 bp, Artificial Sequence
  chemically synthesized
ctctcttttagggagaaagctc

SEQ ID NO: 24331 - DNA, 22 bp, Artificial Sequence
  chemically synthesized
tcttttagggagaaagctcttg

SEQ ID NO: 24332 - DNA, 22 bp, Artificial Sequence
  chemically synthesized
ttttagggagaaagctcttggc

SEQ ID NO: 24333 - DNA, 22 bp, Artificial Sequence
  chemically synthesized
ttagggagaaagctcttggcct

SEQ ID NO: 24334 - DNA, 22 bp, Artificial Sequence
  chemically synthesized
tagggagaaagctcttggcctg

SEQ ID NO: 24335 - DNA, 22 bp, Artificial Sequence
  chemically synthesized
agggagaaagctcttggcctgt

SEQ ID NO: 24336 - DNA, 22 bp, Artificial Sequence
  chemically synthesized
gggagaaagctcttggcctgtt

SEQ ID NO: 24337 - DNA, 22 bp, Artificial Sequence
  chemically synthesized
ttggcctgttactgggctttgg

SEQ ID NO: 24338 - DNA, 22 bp, Artificial Sequence
  chemically synthesized
ggcctgttactgggctttggtg

SEQ ID NO: 24339 - DNA, 22 bp, Artificial Sequence
  chemically synthesized
gcctgttactgggctttggtgg

SEQ ID NO: 24340 - DNA, 22 bp, Artificial Sequence
  chemically synthesized
ttactgggctttggtggaaacg

SEQ ID NO: 24341 - DNA, 22 bp, Artificial Sequence
  chemically synthesized
ctgggctttggtggaaacgaaa

SEQ ID NO: 24342 - DNA, 22 bp, Artificial Sequence
  chemically synthesized
ggctttggtggaaacgaaatat

SEQ ID NO: 24343 - DNA, 22 bp, Artificial Sequence
  chemically synthesized
tggtggaaacgaaatatttgac

SEQ ID NO: 24344 - DNA, 22 bp, Artificial Sequence
  chemically synthesized
ggtggaaacgaaatatttgact

SEQ ID NO: 24345 - DNA, 22 bp, Artificial Sequence
  chemically synthesized
gtggaaacgaaatatttgacta

SEQ ID NO: 24346 - DNA, 22 bp, Artificial Sequence
  chemically synthesized
gactatgagtcatcaagtcacc

SEQ ID NO: 24347 - DNA, 22 bp, Artificial Sequence
  chemically synthesized
actatgagtcatcaagtcacca

SEQ ID NO: 24348 - DNA, 22 bp, Artificial Sequence
  chemically synthesized
tgagtcatcaagtcaccatgtg

SEQ ID NO: 24349 - DNA, 22 bp, Artificial Sequence
  chemically synthesized
aactgcctatcatgaactgggt

SEQ ID NO: 24350 - DNA, 22 bp, Artificial Sequence
  chemically synthesized
cctatcatgaactgggtgcttt

SEQ ID NO: 24351 - DNA, 22 bp, Artificial Sequence
  chemically synthesized
tcatgaactgggtgctttctga

SEQ ID NO: 24352 - DNA, 22 bp, Artificial Sequence
  chemically synthesized
ggtgctttctgatccatctagc

SEQ ID NO: 24353 - DNA, 22 bp, Artificial Sequence
  chemically synthesized
tctgatccatctagccataaag

SEQ ID NO: 24354 - DNA, 22 bp, Artificial Sequence
  chemically synthesized
ctgatccatctagccataaagt

SEQ ID NO: 24355 - DNA, 22 bp, Artificial Sequence
  chemically synthesized
tgatccatctagccataaagtg

SEQ ID NO: 24356 - DNA, 22 bp, Artificial Sequence
  chemically synthesized
atccatctagccataaagtggg

SEQ ID NO: 24357 - DNA, 22 bp, Artificial Sequence
  chemically synthesized
gccataaagtgggctgtgcaca

SEQ ID NO: 24358 - DNA, 22 bp, Artificial Sequence
  chemically synthesized
tgcacagcagcattgcatcagc

SEQ ID NO: 24359 - DNA, 22 bp, Artificial Sequence
  chemically synthesized
catcagcaaatggaagtggtat

SEQ ID NO: 24360 - DNA, 22 bp, Artificial Sequence
  chemically synthesized
ggcttgagcagatcctgaaggc

SEQ ID NO: 24361 - DNA, 22 bp, Artificial Sequence
  chemically synthesized
gagcagatcctgaaggcactag

SEQ ID NO: 24362 - DNA, 22 bp, Artificial Sequence
  chemically synthesized
agcagatcctgaaggcactagt

SEQ ID NO: 24363 - DNA, 22 bp, Artificial Sequence
  chemically synthesized
aaggcactagtaagttacatga

SEQ ID NO: 24364 - DNA, 22 bp, Artificial Sequence
  chemically synthesized
gtaagttacatgagaaaggggc

SEQ ID NO: 24365 - DNA, 22 bp, Artificial Sequence
  chemically synthesized
catgagaaaggggctcaaatgc

SEQ ID NO: 24366 - DNA, 22 bp, Artificial Sequence
  chemically synthesized
aaatgcccatggtctccactcc

SEQ ID NO: 24367 - DNA, 22 bp, Artificial Sequence
  chemically synthesized
cactcctgacacactgctttct

SEQ ID NO: 24368 - DNA, 22 bp, Artificial Sequence
  chemically synthesized
ctgacacactgctttctctccc

SEQ ID NO: 24369 - DNA, 22 bp, Artificial Sequence
  chemically synthesized
acacactgctttctctccctga

SEQ ID NO: 24370 - DNA, 22 bp, Artificial Sequence
  chemically synthesized
ctttctctccctgagactgcac

SEQ ID NO: 24371 - DNA, 22 bp, Artificial Sequence
  chemically synthesized
tctctccctgagactgcaccga

SEQ ID NO: 24372 - DNA, 22 bp, Artificial Sequence
  chemically synthesized
ctctccctgagactgcaccgat

SEQ ID NO: 24373 - DNA, 22 bp, Artificial Sequence
  chemically synthesized
tctccctgagactgcaccgatg

SEQ ID NO: 24374 - DNA, 22 bp, Artificial Sequence
  chemically synthesized
tccctgagactgcaccgatggt

SEQ ID NO: 24375 - DNA, 22 bp, Artificial Sequence
  chemically synthesized
cctgagactgcaccgatggtct

SEQ ID NO: 24376 - DNA, 22 bp, Artificial Sequence
  chemically synthesized
agactgcaccgatggtctcatg

SEQ ID NO: 24377 - DNA, 22 bp, Artificial Sequence
  chemically synthesized
caccgatggtctcatggggagt

SEQ ID NO: 24378 - DNA, 22 bp, Artificial Sequence
  chemically synthesized
atggggagttccctatgatcag

SEQ ID NO: 24379 - DNA, 22 bp, Artificial Sequence
  chemically synthesized
cctatgatcagctgacagagga

SEQ ID NO: 24380 - DNA, 22 bp, Artificial Sequence
  chemically synthesized
tgatcagctgacagaggaagag

SEQ ID NO: 24381 - DNA, 22 bp, Artificial Sequence
  chemically synthesized
acagaggaagagaagactaggt

SEQ ID NO: 24382 - DNA, 22 bp, Artificial Sequence
  chemically synthesized
ggtcctggttcacagatagttc

SEQ ID NO: 24383 - DNA, 22 bp, Artificial Sequence
  chemically synthesized
gttcacagatagttctgcacga

SEQ ID NO: 24384 - DNA, 22 bp, Artificial Sequence
  chemically synthesized
acagatagttctgcacgatatg

SEQ ID NO: 24385 - DNA, 22 bp, Artificial Sequence
  chemically synthesized
tgcacgatatgcaggcaccacc

SEQ ID NO: 24386 - DNA, 22 bp, Artificial Sequence
  chemically synthesized
cacgatatgcaggcaccaccca

SEQ ID NO: 24387 - DNA, 22 bp, Artificial Sequence
  chemically synthesized
cagcccctttctaggacatccc

SEQ ID NO: 24388 - DNA, 22 bp, Artificial Sequence
  chemically synthesized
tctaggacatccctgaaggaca

SEQ ID NO: 24389 - DNA, 22 bp, Artificial Sequence
  chemically synthesized
ctaggacatccctgaaggacaa

SEQ ID NO: 24390 - DNA, 22 bp, Artificial Sequence
  chemically synthesized
taggacatccctgaaggacaac

SEQ ID NO: 24391 - DNA, 22 bp, Artificial Sequence
  chemically synthesized
ggacatccctgaaggacaacgg

SEQ ID NO: 24392 - DNA, 22 bp, Artificial Sequence
  chemically synthesized
aaggacaacggtgaagggaaat

SEQ ID NO: 24393 - DNA, 22 bp, Artificial Sequence
  chemically synthesized
cctagttggcagaactttgagc

SEQ ID NO: 24394 - DNA, 22 bp, Artificial Sequence
  chemically synthesized
ctagttggcagaactttgagca

SEQ ID NO: 24395 - DNA, 22 bp, Artificial Sequence
  chemically synthesized
gttggcagaactttgagcagtg

SEQ ID NO: 24396 - DNA, 22 bp, Artificial Sequence
  chemically synthesized
gcagaactttgagcagtgtgcc

SEQ ID NO: 24397 - DNA, 22 bp, Artificial Sequence
  chemically synthesized
tgagcagtgtgcctggttgtgc

SEQ ID NO: 24398 - DNA, 22 bp, Artificial Sequence
  chemically synthesized
gagcagtgtgcctggttgtgca

SEQ ID NO: 24399 - DNA, 22 bp, Artificial Sequence
  chemically synthesized
agcagtgtgcctggttgtgcac

SEQ ID NO: 24400 - DNA, 22 bp, Artificial Sequence
  chemically synthesized
gttgtgcactttgcacagaagg

SEQ ID NO: 24401 - DNA, 22 bp, Artificial Sequence
  chemically synthesized
tgcactttgcacagaaggagaa

SEQ ID NO: 24402 - DNA, 22 bp, Artificial Sequence
  chemically synthesized
tgcacagaaggagaaatggcca

SEQ ID NO: 24403 - DNA, 22 bp, Artificial Sequence
  chemically synthesized
gcacagaaggagaaatggccag

SEQ ID NO: 24404 - DNA, 22 bp, Artificial Sequence
  chemically synthesized
cacagaaggagaaatggccaga

SEQ ID NO: 24405 - DNA, 22 bp, Artificial Sequence
  chemically synthesized
gcgattatatacttattcatgg

SEQ ID NO: 24406 - DNA, 22 bp, Artificial Sequence
  chemically synthesized
cgattatatacttattcatggg

SEQ ID NO: 24407 - DNA, 22 bp, Artificial Sequence
  chemically synthesized
tatacttattcatgggctgtag

SEQ ID NO: 24408 - DNA, 22 bp, Artificial Sequence
  chemically synthesized
attcatgggctgtagccaaagg

SEQ ID NO: 24409 - DNA, 22 bp, Artificial Sequence
  chemically synthesized
ttcatgggctgtagccaaaggt

SEQ ID NO: 24410 - DNA, 22 bp, Artificial Sequence
  chemically synthesized
atgggctgtagccaaaggtttg

SEQ ID NO: 24411 - DNA, 22 bp, Artificial Sequence
  chemically synthesized
tagccaaaggtttggctagatg

SEQ ID NO: 24412 - DNA, 22 bp, Artificial Sequence
  chemically synthesized
ggctagatggtcagggacttgg

SEQ ID NO: 24413 - DNA, 22 bp, Artificial Sequence
  chemically synthesized
gctagatggtcagggacttgga

SEQ ID NO: 24414 - DNA, 22 bp, Artificial Sequence
  chemically synthesized
gatggtcagggacttggaaaaa

SEQ ID NO: 24415 - DNA, 22 bp, Artificial Sequence
  chemically synthesized
ggaaaaagcatgactggaaaat

SEQ ID NO: 24416 - DNA, 22 bp, Artificial Sequence
  chemically synthesized
gaaaaagcatgactggaaaatt

SEQ ID NO: 24417 - DNA, 22 bp, Artificial Sequence
  chemically synthesized
gaaaattgatgacaaagaaatt

SEQ ID NO: 24418 - DNA, 22 bp, Artificial Sequence
  chemically synthesized
atgacaaagaaatttggggaag

SEQ ID NO: 24419 - DNA, 22 bp, Artificial Sequence
  chemically synthesized
ggggaagaggtatgtggatgga

SEQ ID NO: 24420 - DNA, 22 bp, Artificial Sequence
  chemically synthesized
gggaagaggtatgtggatggac

SEQ ID NO: 24421 - DNA, 22 bp, Artificial Sequence
  chemically synthesized
tatgattagtcaaaaactacaa

SEQ ID NO: 24422 - DNA, 22 bp, Artificial Sequence
  chemically synthesized
tgattagtcaaaaactacaaag

SEQ ID NO: 24423 - DNA, 22 bp, Artificial Sequence
  chemically synthesized
gtcaaaaactacaaagatattt

SEQ ID NO: 24424 - DNA, 22 bp, Artificial Sequence
  chemically synthesized
caaagatattttcatcccatgt

SEQ ID NO: 24425 - DNA, 22 bp, Artificial Sequence
  chemically synthesized
tcatcccatgtgagtgctcacc

SEQ ID NO: 24426 - DNA, 22 bp, Artificial Sequence
  chemically synthesized
catcccatgtgagtgctcacca

SEQ ID NO: 24427 - DNA, 22 bp, Artificial Sequence
  chemically synthesized
atcccatgtgagtgctcaccaa

SEQ ID NO: 24428 - DNA, 22 bp, Artificial Sequence
  chemically synthesized
accaatgggtgacctcagcaga

SEQ ID NO: 24429 - DNA, 22 bp, Artificial Sequence
  chemically synthesized
agcagaagaggattttaataat

SEQ ID NO: 24430 - DNA, 22 bp, Artificial Sequence
  chemically synthesized
taataatcaagtggataggatg

SEQ ID NO: 24431 - DNA, 22 bp, Artificial Sequence
  chemically synthesized
aataatcaagtggataggatga

SEQ ID NO: 24432 - DNA, 22 bp, Artificial Sequence
  chemically synthesized
ataatcaagtggataggatgat

SEQ ID NO: 24433 - DNA, 22 bp, Artificial Sequence
  chemically synthesized
tgtggacaccactcagcctttt

SEQ ID NO: 24434 - DNA, 22 bp, Artificial Sequence
  chemically synthesized
tggacaccactcagccttttcc

SEQ ID NO: 24435 - DNA, 22 bp, Artificial Sequence
  chemically synthesized
agccttttcccaggccactcat

SEQ ID NO: 24436 - DNA, 22 bp, Artificial Sequence
  chemically synthesized
ttcccaggccactcatgtcatc

SEQ ID NO: 24437 - DNA, 22 bp, Artificial Sequence
  chemically synthesized
tcccaggccactcatgtcatcg

SEQ ID NO: 24438 - DNA, 22 bp, Artificial Sequence
  chemically synthesized
cccaggccactcatgtcatcgt

SEQ ID NO: 24439 - DNA, 22 bp, Artificial Sequence
  chemically synthesized
ccaggccactcatgtcatcgtc

SEQ ID NO: 24440 - DNA, 22 bp, Artificial Sequence
  chemically synthesized
atgtcatcgtccaatggaccca

SEQ ID NO: 24441 - DNA, 22 bp, Artificial Sequence
  chemically synthesized
cagggatggaagttatgcttgg

SEQ ID NO: 24442 - DNA, 22 bp, Artificial Sequence
  chemically synthesized
tgcttgggctcagcaacatgga

SEQ ID NO: 24443 - DNA, 22 bp, Artificial Sequence
  chemically synthesized
gggctcagcaacatggacttcc

SEQ ID NO: 24444 - DNA, 22 bp, Artificial Sequence
  chemically synthesized
ggctcagcaacatggacttcca

SEQ ID NO: 24445 - DNA, 22 bp, Artificial Sequence
  chemically synthesized
agcaacatggacttccactcac

SEQ ID NO: 24446 - DNA, 22 bp, Artificial Sequence
  chemically synthesized
ccactcaccaaagctgacctgg

SEQ ID NO: 24447 - DNA, 22 bp, Artificial Sequence
  chemically synthesized
cactcaccaaagctgacctggc

SEQ ID NO: 24448 - DNA, 22 bp, Artificial Sequence
  chemically synthesized
accaaagctgacctggccacag

SEQ ID NO: 24449 - DNA, 22 bp, Artificial Sequence
  chemically synthesized
acctggccacagccactgcttg

SEQ ID NO: 24450 - DNA, 22 bp, Artificial Sequence
  chemically synthesized
gccacagccactgcttgccagc

SEQ ID NO: 24451 - DNA, 22 bp, Artificial Sequence
  chemically synthesized
cttgccagcatcagagaccaac

SEQ ID NO: 24452 - DNA, 22 bp, Artificial Sequence
  chemically synthesized
gccagcatcagagaccaacact

SEQ ID NO: 24453 - DNA, 22 bp, Artificial Sequence
  chemically synthesized
ccagcatcagagaccaacacta

SEQ ID NO: 24454 - DNA, 22 bp, Artificial Sequence
  chemically synthesized
agcccttgatatggcaccattc

SEQ ID NO: 24455 - DNA, 22 bp, Artificial Sequence
  chemically synthesized
gatatggcaccattcctcgggg

SEQ ID NO: 24456 - DNA, 22 bp, Artificial Sequence
  chemically synthesized
atatggcaccattcctcggggt

SEQ ID NO: 24457 - DNA, 22 bp, Artificial Sequence
  chemically synthesized
ctcggggtgatcagccagctac

SEQ ID NO: 24458 - DNA, 22 bp, Artificial Sequence
  chemically synthesized
ggggtgatcagccagctacctg

SEQ ID NO: 24459 - DNA, 22 bp, Artificial Sequence
  chemically synthesized
cctggtggcaggttgattatat

SEQ ID NO: 24460 - DNA, 22 bp, Artificial Sequence
  chemically synthesized
gtggcaggttgattatattgga

SEQ ID NO: 24461 - DNA, 22 bp, Artificial Sequence
  chemically synthesized
attatattggacctcttccatc

SEQ ID NO: 24462 - DNA, 22 bp, Artificial Sequence
  chemically synthesized
tattggacctcttccatcatgg

SEQ ID NO: 24463 - DNA, 22 bp, Artificial Sequence
  chemically synthesized
gacctcttccatcatggaaagg

SEQ ID NO: 24464 - DNA, 22 bp, Artificial Sequence
  chemically synthesized
ttccatcatggaaagggcagag

SEQ ID NO: 24465 - DNA, 22 bp, Artificial Sequence
  chemically synthesized
ccatcatggaaagggcagaggc

SEQ ID NO: 24466 - DNA, 22 bp, Artificial Sequence
  chemically synthesized
catcatggaaagggcagaggct

SEQ ID NO: 24467 - DNA, 22 bp, Artificial Sequence
  chemically synthesized
gtcctcactggaatagacactt

SEQ ID NO: 24468 - DNA, 22 bp, Artificial Sequence
  chemically synthesized
tcctcactggaatagacactta

SEQ ID NO: 24469 - DNA, 22 bp, Artificial Sequence
  chemically synthesized
actggaatagacacttactctg

SEQ ID NO: 24470 - DNA, 22 bp, Artificial Sequence
  chemically synthesized
gaatagacacttactctggata

SEQ ID NO: 24471 - DNA, 22 bp, Artificial Sequence
  chemically synthesized
actctggatatgggtttcccaa

SEQ ID NO: 24472 - DNA, 22 bp, Artificial Sequence
  chemically synthesized
ctctggatatgggtttcccaat

SEQ ID NO: 24473 - DNA, 22 bp, Artificial Sequence
  chemically synthesized
tggatatgggtttcccaatcct

SEQ ID NO: 24474 - DNA, 22 bp, Artificial Sequence
  chemically synthesized
gatatgggtttcccaatcctga

SEQ ID NO: 24475 - DNA, 22 bp, Artificial Sequence
  chemically synthesized
cccaatcctgaactcaatgctt

SEQ ID NO: 24476 - DNA, 22 bp, Artificial Sequence
  chemically synthesized
ccaatcctgaactcaatgctta

SEQ ID NO: 24477 - DNA, 22 bp, Artificial Sequence
  chemically synthesized
aactcaatgcttatgccaagac

SEQ ID NO: 24478 - DNA, 22 bp, Artificial Sequence
  chemically synthesized
aatgcttatgccaagactacca

SEQ ID NO: 24479 - DNA, 22 bp, Artificial Sequence
  chemically synthesized
atgccaagactaccatccatgg

SEQ ID NO: 24480 - DNA, 22 bp, Artificial Sequence
  chemically synthesized
tgccaagactaccatccatgga

SEQ ID NO: 24481 - DNA, 22 bp, Artificial Sequence
  chemically synthesized
ccatccatggaatcacagaatg

SEQ ID NO: 24482 - DNA, 22 bp, Artificial Sequence
  chemically synthesized
tcatggtattccacacagcatt

SEQ ID NO: 24483 - DNA, 22 bp, Artificial Sequence
  chemically synthesized
cacacagcattgcttctgacca

SEQ ID NO: 24484 - DNA, 22 bp, Artificial Sequence
  chemically synthesized
cttctgaccaagccactcactt

SEQ ID NO: 24485 - DNA, 22 bp, Artificial Sequence
  chemically synthesized
ctgaccaagccactcactttat

SEQ ID NO: 24486 - DNA, 22 bp, Artificial Sequence
  chemically synthesized
tgaccaagccactcactttatg

SEQ ID NO: 24487 - DNA, 22 bp, Artificial Sequence
  chemically synthesized
accaagccactcactttatggc

SEQ ID NO: 24488 - DNA, 22 bp, Artificial Sequence
  chemically synthesized
actttatggctaaagaagtgtg

SEQ ID NO: 24489 - DNA, 22 bp, Artificial Sequence
  chemically synthesized
tatggctaaagaagtgtgacag

SEQ ID NO: 24490 - DNA, 22 bp, Artificial Sequence
  chemically synthesized
atggctaaagaagtgtgacagt

SEQ ID NO: 24491 - DNA, 22 bp, Artificial Sequence
  chemically synthesized
tggctaaagaagtgtgacagtg

SEQ ID NO: 24492 - DNA, 22 bp, Artificial Sequence
  chemically synthesized
aagaagtgtgacagtgggctca

SEQ ID NO: 24493 - DNA, 22 bp, Artificial Sequence
  chemically synthesized
atgctcatggaatttactggtc

SEQ ID NO: 24494 - DNA, 22 bp, Artificial Sequence
  chemically synthesized
atggaatttactggtcttacca

SEQ ID NO: 24495 - DNA, 22 bp, Artificial Sequence
  chemically synthesized
actggtcttaccatgatcccta

SEQ ID NO: 24496 - DNA, 22 bp, Artificial Sequence
  chemically synthesized
ctggtcttaccatgatccctat

SEQ ID NO: 24497 - DNA, 22 bp, Artificial Sequence
  chemically synthesized
gtcttaccatgatccctatcat

SEQ ID NO: 24498 - DNA, 22 bp, Artificial Sequence
  chemically synthesized
accatgatccctatcatcctga

SEQ ID NO: 24499 - DNA, 22 bp, Artificial Sequence
  chemically synthesized
ccatgatccctatcatcctgaa

SEQ ID NO: 24500 - DNA, 22 bp, Artificial Sequence
  chemically synthesized
tcatcctgaagcagcttttgaa

SEQ ID NO: 24501 - DNA, 22 bp, Artificial Sequence
  chemically synthesized
aagcagcttttgaatggccttt

SEQ ID NO: 24502 - DNA, 22 bp, Artificial Sequence
  chemically synthesized
ttgaatggccttttgaagtcac

SEQ ID NO: 24503 - DNA, 22 bp, Artificial Sequence
  chemically synthesized
tgaatggccttttgaagtcacg

SEQ ID NO: 24504 - DNA, 22 bp, Artificial Sequence
  chemically synthesized
gaatggccttttgaagtcacga

SEQ ID NO: 24505 - DNA, 22 bp, Artificial Sequence
  chemically synthesized
aatggccttttgaagtcacgat

SEQ ID NO: 24506 - DNA, 22 bp, Artificial Sequence
  chemically synthesized
ttgaagtcacgattacaatgcc

SEQ ID NO: 24507 - DNA, 22 bp, Artificial Sequence
  chemically synthesized
tgaagtcacgattacaatgcca

SEQ ID NO: 24508 - DNA, 22 bp, Artificial Sequence
  chemically synthesized
gaagtcacgattacaatgccaa

SEQ ID NO: 24509 - DNA, 22 bp, Artificial Sequence
  chemically synthesized
aagtcacgattacaatgccaac

SEQ ID NO: 24510 - DNA, 22 bp, Artificial Sequence
  chemically synthesized
caatgccaactaggtgacaata

SEQ ID NO: 24511 - DNA, 22 bp, Artificial Sequence
  chemically synthesized
ggtgacaatactttgcaggcct

SEQ ID NO: 24512 - DNA, 22 bp, Artificial Sequence
  chemically synthesized
tgcaggcctggggcaaagttct

SEQ ID NO: 24513 - DNA, 22 bp, Artificial Sequence
  chemically synthesized
gcaggcctggggcaaagttctc

SEQ ID NO: 24514 - DNA, 22 bp, Artificial Sequence
  chemically synthesized
caggcctggggcaaagttctcc

SEQ ID NO: 24515 - DNA, 22 bp, Artificial Sequence
  chemically synthesized
gggcaaagttctccagaaggct

SEQ ID NO: 24516 - DNA, 22 bp, Artificial Sequence
  chemically synthesized
tccagaaggctgtgtatgctct

SEQ ID NO: 24517 - DNA, 22 bp, Artificial Sequence
  chemically synthesized
cagaaggctgtgtatgctctga

SEQ ID NO: 24518 - DNA, 22 bp, Artificial Sequence
  chemically synthesized
tgtatgctctgaatcagtgtcc

SEQ ID NO: 24519 - DNA, 22 bp, Artificial Sequence
  chemically synthesized
tgaatcagtgtccaatatatgg

SEQ ID NO: 24520 - DNA, 22 bp, Artificial Sequence
  chemically synthesized
aatcagtgtccaatatatggta

SEQ ID NO: 24521 - DNA, 22 bp, Artificial Sequence
  chemically synthesized
tttctcccatagacaggattca

SEQ ID NO: 24522 - DNA, 22 bp, Artificial Sequence
  chemically synthesized
ctcccatagacaggattcacgg

SEQ ID NO: 24523 - DNA, 22 bp, Artificial Sequence
  chemically synthesized
tcccatagacaggattcacggg

SEQ ID NO: 24524 - DNA, 22 bp, Artificial Sequence
  chemically synthesized
ccatagacaggattcacgggtc

SEQ ID NO: 24525 - DNA, 22 bp, Artificial Sequence
  chemically synthesized
acgggtccaggaatcaaagggt

SEQ ID NO: 24526 - DNA, 22 bp, Artificial Sequence
  chemically synthesized
accatcacccctagtgttccac

SEQ ID NO: 24527 - DNA, 22 bp, Artificial Sequence
  chemically synthesized
gtgttccactagcaaaattttt

SEQ ID NO: 24528 - DNA, 22 bp, Artificial Sequence
  chemically synthesized
cactagcaaaatttttgcttcc

SEQ ID NO: 24529 - DNA, 22 bp, Artificial Sequence
  chemically synthesized
gcaaaatttttgcttcctgttc

SEQ ID NO: 24530 - DNA, 22 bp, Artificial Sequence
  chemically synthesized
ttgcttcctgttcccatggcat

SEQ ID NO: 24531 - DNA, 22 bp, Artificial Sequence
  chemically synthesized
tgcttcctgttcccatggcatt

SEQ ID NO: 24532 - DNA, 22 bp, Artificial Sequence
  chemically synthesized
gcttcctgttcccatggcatta

SEQ ID NO: 24533 - DNA, 22 bp, Artificial Sequence
  chemically synthesized
cttcctgttcccatggcattat

SEQ ID NO: 24534 - DNA, 22 bp, Artificial Sequence
  chemically synthesized
cctgttcccatggcattatgtt

SEQ ID NO: 24535 - DNA, 22 bp, Artificial Sequence
  chemically synthesized
ctgttcccatggcattatgttc

SEQ ID NO: 24536 - DNA, 22 bp, Artificial Sequence
  chemically synthesized
ttcccatggcattatgttctgc

SEQ ID NO: 24537 - DNA, 22 bp, Artificial Sequence
  chemically synthesized
ccatggcattatgttctgctgg

SEQ ID NO: 24538 - DNA, 22 bp, Artificial Sequence
  chemically synthesized
tgttctgctggcttagaggtct

SEQ ID NO: 24539 - DNA, 22 bp, Artificial Sequence
  chemically synthesized
tgctggcttagaggtcttagtt

SEQ ID NO: 24540 - DNA, 22 bp, Artificial Sequence
  chemically synthesized
ctggcttagaggtcttagttcc

SEQ ID NO: 24541 - DNA, 22 bp, Artificial Sequence
  chemically synthesized
gcttagaggtcttagttccaga

SEQ ID NO: 24542 - DNA, 22 bp, Artificial Sequence
  chemically synthesized
agaggtcttagttccagaggga

SEQ ID NO: 24543 - DNA, 22 bp, Artificial Sequence
  chemically synthesized
gaggtcttagttccagagggag

SEQ ID NO: 24544 - DNA, 22 bp, Artificial Sequence
  chemically synthesized
agttccagagggaggaacactg

SEQ ID NO: 24545 - DNA, 22 bp, Artificial Sequence
  chemically synthesized
gttccagagggaggaacactgc

SEQ ID NO: 24546 - DNA, 22 bp, Artificial Sequence
  chemically synthesized
cagagggaggaacactgccgcc

SEQ ID NO: 24547 - DNA, 22 bp, Artificial Sequence
  chemically synthesized
ccgccaggtgacacaataatga

SEQ ID NO: 24548 - DNA, 22 bp, Artificial Sequence
  chemically synthesized
cattaaactgcaaattaagatt

SEQ ID NO: 24549 - DNA, 22 bp, Artificial Sequence
  chemically synthesized
aactgcaaattaagattgccac

SEQ ID NO: 24550 - DNA, 22 bp, Artificial Sequence
  chemically synthesized
caaattaagattgccacctgga

SEQ ID NO: 24551 - DNA, 22 bp, Artificial Sequence
  chemically synthesized
agattgccacctggacactttg

SEQ ID NO: 24552 - DNA, 22 bp, Artificial Sequence
  chemically synthesized
ccacctggacactttgggctcc

SEQ ID NO: 24553 - DNA, 22 bp, Artificial Sequence
  chemically synthesized
gacactttgggctcctcccacc

SEQ ID NO: 24554 - DNA, 22 bp, Artificial Sequence
  chemically synthesized
tgggctcctcccacctttaagt

SEQ ID NO: 24555 - DNA, 22 bp, Artificial Sequence
  chemically synthesized
gggctcctcccacctttaagtc

SEQ ID NO: 24556 - DNA, 22 bp, Artificial Sequence
  chemically synthesized
ggctcctcccacctttaagtca

SEQ ID NO: 24557 - DNA, 22 bp, Artificial Sequence
  chemically synthesized
ctcccacctttaagtcaacagg

SEQ ID NO: 24558 - DNA, 22 bp, Artificial Sequence
  chemically synthesized
ccacctttaagtcaacaggcta

SEQ ID NO: 24559 - DNA, 22 bp, Artificial Sequence
  chemically synthesized
taagtcaacaggctaagaagag

SEQ ID NO: 24560 - DNA, 22 bp, Artificial Sequence
  chemically synthesized
aagtcaacaggctaagaagaga

SEQ ID NO: 24561 - DNA, 22 bp, Artificial Sequence
  chemically synthesized
agtcaacaggctaagaagagag

SEQ ID NO: 24562 - DNA, 22 bp, Artificial Sequence
  chemically synthesized
agaagagagttacagtgttggc

SEQ ID NO: 24563 - DNA, 22 bp, Artificial Sequence
  chemically synthesized
cagtgttggctgcggtgattaa

SEQ ID NO: 24564 - DNA, 22 bp, Artificial Sequence
  chemically synthesized
gctgcggtgattaacccagact

SEQ ID NO: 24565 - DNA, 22 bp, Artificial Sequence
  chemically synthesized
cggtgattaacccagactatca

SEQ ID NO: 24566 - DNA, 22 bp, Artificial Sequence
  chemically synthesized
acccagactatcaagatgaaat

SEQ ID NO: 24567 - DNA, 22 bp, Artificial Sequence
  chemically synthesized
tcaagatgaaatcagtctacaa

SEQ ID NO: 24568 - DNA, 22 bp, Artificial Sequence
  chemically synthesized
caactccacaatggaggtaagg

SEQ ID NO: 24569 - DNA, 22 bp, Artificial Sequence
  chemically synthesized
cacaatggaggtaaggaagcgt

SEQ ID NO: 24570 - DNA, 22 bp, Artificial Sequence
  chemically synthesized
gggtgtctcttagttttaccat

SEQ ID NO: 24571 - DNA, 22 bp, Artificial Sequence
  chemically synthesized
ttagttttaccatgtcctggaa

SEQ ID NO: 24572 - DNA, 22 bp, Artificial Sequence
  chemically synthesized
agttttaccatgtcctggaatt

SEQ ID NO: 24573 - DNA, 22 bp, Artificial Sequence
  chemically synthesized
gttttaccatgtcctggaatta

SEQ ID NO: 24574 - DNA, 22 bp, Artificial Sequence
  chemically synthesized
taccatgtcctggaattaaggt

SEQ ID NO: 24575 - DNA, 22 bp, Artificial Sequence
  chemically synthesized
accatgtcctggaattaaggtc

SEQ ID NO: 24576 - DNA, 22 bp, Artificial Sequence
  chemically synthesized
ccatgtcctggaattaaggtca

SEQ ID NO: 24577 - DNA, 22 bp, Artificial Sequence
  chemically synthesized
gaattaaggtcagtgggaaact

SEQ ID NO: 24578 - DNA, 22 bp, Artificial Sequence
  chemically synthesized
aggtcagtgggaaactactaca

SEQ ID NO: 24579 - DNA, 22 bp, Artificial Sequence
  chemically synthesized
ctacaggccattccaggcagga

SEQ ID NO: 24580 - DNA, 22 bp, Artificial Sequence
  chemically synthesized
caggccattccaggcaggacta

SEQ ID NO: 24581 - DNA, 22 bp, Artificial Sequence
  chemically synthesized
caggcaggactacaaataaagg

SEQ ID NO: 24582 - DNA, 22 bp, Artificial Sequence
  chemically synthesized
caaataaaggtttgggtcactc

SEQ ID NO: 24583 - DNA, 22 bp, Artificial Sequence
  chemically synthesized
gggtcactccaccaggaaaaaa

SEQ ID NO: 24584 - DNA, 22 bp, Artificial Sequence
  chemically synthesized
ggtcactccaccaggaaaaaaa

SEQ ID NO: 24585 - DNA, 22 bp, Artificial Sequence
  chemically synthesized
caccaggaaaaaaaaaaaaaaa

SEQ ID NO: 24586 - DNA, 22 bp, Artificial Sequence
  chemically synthesized
ctgaggtgcttgctgagggcaa

SEQ ID NO: 24587 - DNA, 22 bp, Artificial Sequence
  chemically synthesized
aggtgcttgctgagggcaaagg

SEQ ID NO: 24588 - DNA, 22 bp, Artificial Sequence
  chemically synthesized
gctgagggcaaagggaatacag

SEQ ID NO: 24589 - DNA, 22 bp, Artificial Sequence
  chemically synthesized
ctgagggcaaagggaatacaga

SEQ ID NO: 24590 - DNA, 22 bp, Artificial Sequence
  chemically synthesized
agggcaaagggaatacagaata

SEQ ID NO: 24591 - DNA, 22 bp, Artificial Sequence
  chemically synthesized
cgatcacgtgaccaattgcaga

SEQ ID NO: 24592 - DNA, 22 bp, Artificial Sequence
  chemically synthesized
cagatacaaggactgtaattgt

SEQ ID NO: 24593 - DNA, 22 bp, Artificial Sequence
  chemically synthesized
taattgtcatgagtatttcctc

SEQ ID NO: 24594 - DNA, 22 bp, Artificial Sequence
  chemically synthesized
tcatgagtatttcctccttctt

SEQ ID NO: 24595 - DNA, 22 bp, Artificial Sequence
  chemically synthesized
cctccttcttttgttaaaaaca

SEQ ID NO: 24596 - DNA, 22 bp, Artificial Sequence
  chemically synthesized
ctccttcttttgttaaaaacac

SEQ ID NO: 24597 - DNA, 22 bp, Artificial Sequence
  chemically synthesized
cttcttttgttaaaaacacctt

SEQ ID NO: 24598 - DNA, 22 bp, Artificial Sequence
  chemically synthesized
cttttgttaaaaacaccttcgt

SEQ ID NO: 24599 - DNA, 22 bp, Artificial Sequence
  chemically synthesized
ttttgttaaaaacaccttcgtg

SEQ ID NO: 24600 - DNA, 22 bp, Artificial Sequence
  chemically synthesized
ttgttaaaaacaccttcgtgtc

SEQ ID NO: 24601 - DNA, 22 bp, Artificial Sequence
  chemically synthesized
tgttaaaaacaccttcgtgtct

SEQ ID NO: 24602 - DNA, 22 bp, Artificial Sequence
  chemically synthesized
gttaaaaacaccttcgtgtctg

SEQ ID NO: 24603 - DNA, 22 bp, Artificial Sequence
  chemically synthesized
ttaaaaacaccttcgtgtctgt

SEQ ID NO: 24604 - DNA, 22 bp, Artificial Sequence
  chemically synthesized
aaaacaccttcgtgtctgtata

SEQ ID NO: 24605 - DNA, 22 bp, Artificial Sequence
  chemically synthesized
cgtgtctgtatacacttgtact

SEQ ID NO: 24606 - DNA, 22 bp, Artificial Sequence
  chemically synthesized
gtgtctgtatacacttgtacta

SEQ ID NO: 24607 - DNA, 22 bp, Artificial Sequence
  chemically synthesized
tatacacttgtactaagaaaat

SEQ ID NO: 24608 - DNA, 22 bp, Artificial Sequence
  chemically synthesized
gtactaagaaaatatatacatt

SEQ ID NO: 24609 - DNA, 22 bp, Artificial Sequence
  chemically synthesized
tactaagaaaatatatacattt

SEQ ID NO: 24610 - DNA, 22 bp, Artificial Sequence
  chemically synthesized
agaaaatatatacattttactt

SEQ ID NO: 24611 - DNA, 22 bp, Artificial Sequence
  chemically synthesized
tacttcctttttcctttatcat

SEQ ID NO: 24612 - DNA, 22 bp, Artificial Sequence
  chemically synthesized
acttcctttttcctttatcatg

SEQ ID NO: 24613 - DNA, 22 bp, Artificial Sequence
  chemically synthesized
cttcctttttcctttatcatgt

SEQ ID NO: 24614 - DNA, 22 bp, Artificial Sequence
  chemically synthesized
cctttttcctttatcatgtgac

SEQ ID NO: 24615 - DNA, 22 bp, Artificial Sequence
  chemically synthesized
ctttttcctttatcatgtgaca

SEQ ID NO: 24616 - DNA, 22 bp, Artificial Sequence
  chemically synthesized
tttcctttatcatgtgacataa

SEQ ID NO: 24617 - DNA, 22 bp, Artificial Sequence
  chemically synthesized
ttcctttatcatgtgacataag

SEQ ID NO: 24618 - DNA, 22 bp, Artificial Sequence
  chemically synthesized
tcctttatcatgtgacataaga

SEQ ID NO: 24619 - DNA, 22 bp, Artificial Sequence
  chemically synthesized
cctttatcatgtgacataagat

SEQ ID NO: 24620 - DNA, 22 bp, Artificial Sequence
  chemically synthesized
ctttatcatgtgacataagatt

SEQ ID NO: 24621 - DNA, 22 bp, Artificial Sequence
  chemically synthesized
tatcatgtgacataagatttat

SEQ ID NO: 24622 - DNA, 22 bp, Artificial Sequence
  chemically synthesized
atcatgtgacataagatttatt

SEQ ID NO: 24623 - DNA, 22 bp, Artificial Sequence
  chemically synthesized
tcatgtgacataagatttattg

SEQ ID NO: 24624 - DNA, 22 bp, Artificial Sequence
  chemically synthesized
attgacttcatatcagcattta

SEQ ID NO: 24625 - DNA, 22 bp, Artificial Sequence
  chemically synthesized
ttgacttcatatcagcatttaa

SEQ ID NO: 24626 - DNA, 22 bp, Artificial Sequence
  chemically synthesized
acttcatatcagcatttaagta

SEQ ID NO: 24627 - DNA, 22 bp, Artificial Sequence
  chemically synthesized
catatcagcatttaagtattgt

SEQ ID NO: 24628 - DNA, 22 bp, Artificial Sequence
  chemically synthesized
atatcagcatttaagtattgtt

SEQ ID NO: 24629 - DNA, 22 bp, Artificial Sequence
  chemically synthesized
aagtattgttaagtttatgtaa

SEQ ID NO: 24630 - DNA, 22 bp, Artificial Sequence
  chemically synthesized
agtattgttaagtttatgtaat

SEQ ID NO: 24631 - DNA, 22 bp, Artificial Sequence
  chemically synthesized
ttaagtttatgtaatagcattt

SEQ ID NO: 24632 - DNA, 22 bp, Artificial Sequence
  chemically synthesized
agtttatgtaatagcatttgca

SEQ ID NO: 24633 - DNA, 22 bp, Artificial Sequence
  chemically synthesized
atgtaatagcatttgcaatggg

SEQ ID NO: 24634 - DNA, 22 bp, Artificial Sequence
  chemically synthesized
tgtaatagcatttgcaatgggg

SEQ ID NO: 24635 - DNA, 22 bp, Artificial Sequence
  chemically synthesized
gcaatggggattggtgcatttt

SEQ ID NO: 24636 - DNA, 22 bp, Artificial Sequence
  chemically synthesized
caatggggattggtgcattttc

SEQ ID NO: 24637 - DNA, 22 bp, Artificial Sequence
  chemically synthesized
gtgcattttcaattgcacgaag

SEQ ID NO: 24638 - DNA, 22 bp, Artificial Sequence
  chemically synthesized
tcaattgcacgaaggatagttt

SEQ ID NO: 24639 - DNA, 22 bp, Artificial Sequence
  chemically synthesized
caattgcacgaaggatagtttt

SEQ ID NO: 24640 - DNA, 22 bp, Artificial Sequence
  chemically synthesized
aattgcacgaaggatagtttta

SEQ ID NO: 24641 - DNA, 22 bp, Artificial Sequence
  chemically synthesized
cacgaaggatagttttagtatg

SEQ ID NO: 24642 - DNA, 22 bp, Artificial Sequence
  chemically synthesized
tagtatgttaggcataattatg

SEQ ID NO: 24643 - DNA, 22 bp, Artificial Sequence
  chemically synthesized
agtatgttaggcataattatga

SEQ ID NO: 24644 - DNA, 22 bp, Artificial Sequence
  chemically synthesized
gtatgttaggcataattatgac

SEQ ID NO: 24645 - DNA, 22 bp, Artificial Sequence
  chemically synthesized
ggcataattatgacttattgtt

SEQ ID NO: 24646 - DNA, 22 bp, Artificial Sequence
  chemically synthesized
tgacttattgttgtctttattt

SEQ ID NO: 24647 - DNA, 22 bp, Artificial Sequence
  chemically synthesized
attgttgtctttatttgaagat

SEQ ID NO: 24648 - DNA, 22 bp, Artificial Sequence
  chemically synthesized
ttgttgtctttatttgaagata

SEQ ID NO: 24649 - DNA, 22 bp, Artificial Sequence
  chemically synthesized
ttgtctttatttgaagataatg

SEQ ID NO: 24650 - DNA, 22 bp, Artificial Sequence
  chemically synthesized
tctttatttgaagataatgtat

SEQ ID NO: 24651 - DNA, 22 bp, Artificial Sequence
  chemically synthesized
tatttgaagataatgtatgacc

SEQ ID NO: 24652 - DNA, 22 bp, Artificial Sequence
  chemically synthesized
atttgaagataatgtatgacct

SEQ ID NO: 24653 - DNA, 22 bp, Artificial Sequence
  chemically synthesized
tttgaagataatgtatgacctc

SEQ ID NO: 24654 - DNA, 22 bp, Artificial Sequence
  chemically synthesized
gaagataatgtatgacctcagg

SEQ ID NO: 24655 - DNA, 22 bp, Artificial Sequence
  chemically synthesized
aagataatgtatgacctcaggg

SEQ ID NO: 24656 - DNA, 22 bp, Artificial Sequence
  chemically synthesized
aggggatgtgtataggctcaag

SEQ ID NO: 24657 - DNA, 22 bp, Artificial Sequence
  chemically synthesized
aagttgacaagcgatggacttg

SEQ ID NO: 24658 - DNA, 22 bp, Artificial Sequence
  chemically synthesized
acaagcgatggacttgtgatgg

SEQ ID NO: 24659 - DNA, 22 bp, Artificial Sequence
  chemically synthesized
gtgatggttaatactgagtgtc

SEQ ID NO: 24660 - DNA, 22 bp, Artificial Sequence
  chemically synthesized
tgatggttaatactgagtgtca

SEQ ID NO: 24661 - DNA, 22 bp, Artificial Sequence
  chemically synthesized
atactgagtgtcaacttgattg

SEQ ID NO: 24662 - DNA, 22 bp, Artificial Sequence
  chemically synthesized
agtgtcaacttgattggattga

SEQ ID NO: 24663 - DNA, 22 bp, Artificial Sequence
  chemically synthesized
gattggattgaagtgtgcaaag

SEQ ID NO: 24664 - DNA, 22 bp, Artificial Sequence
  chemically synthesized
attggattgaagtgtgcaaagt

SEQ ID NO: 24665 - DNA, 22 bp, Artificial Sequence
  chemically synthesized
gattgaagtgtgcaaagtattg

SEQ ID NO: 24666 - DNA, 22 bp, Artificial Sequence
  chemically synthesized
aagtgtgcaaagtattgatcct

SEQ ID NO: 24667 - DNA, 22 bp, Artificial Sequence
  chemically synthesized
atcctgagtgtgtctgtgaggg

SEQ ID NO: 24668 - DNA, 22 bp, Artificial Sequence
  chemically synthesized
agtgtgtctgtgagggtattgc

SEQ ID NO: 24669 - DNA, 22 bp, Artificial Sequence
  chemically synthesized
tgagggtattgccaaaggagat

SEQ ID NO: 24670 - DNA, 22 bp, Artificial Sequence
  chemically synthesized
ccaaaggagattaacattttag

SEQ ID NO: 24671 - DNA, 22 bp, Artificial Sequence
  chemically synthesized
acattttagtcagtgggctggg

SEQ ID NO: 24672 - DNA, 22 bp, Artificial Sequence
  chemically synthesized
tagtcagtgggctgggaaaggc

SEQ ID NO: 24673 - DNA, 22 bp, Artificial Sequence
  chemically synthesized
agtcagtgggctgggaaaggca

SEQ ID NO: 24674 - DNA, 22 bp, Artificial Sequence
  chemically synthesized
gtcagtgggctgggaaaggcag

SEQ ID NO: 24675 - DNA, 22 bp, Artificial Sequence
  chemically synthesized
ggaaaggcagacccacccttaa

SEQ ID NO: 24676 - DNA, 22 bp, Artificial Sequence
  chemically synthesized
aatctgggtgggcaccatctaa

SEQ ID NO: 24677 - DNA, 22 bp, Artificial Sequence
  chemically synthesized
atctgggtgggcaccatctaat

SEQ ID NO: 24678 - DNA, 22 bp, Artificial Sequence
  chemically synthesized
ggtgggcaccatctaatcagtt

SEQ ID NO: 24679 - DNA, 22 bp, Artificial Sequence
  chemically synthesized
atcagttgccagtgtggccagg

SEQ ID NO: 24680 - DNA, 22 bp, Artificial Sequence
  chemically synthesized
ccagtgtggccaggatataaag

SEQ ID NO: 24681 - DNA, 22 bp, Artificial Sequence
  chemically synthesized
gactggcttagcctccaagcct

SEQ ID NO: 24682 - DNA, 22 bp, Artificial Sequence
  chemically synthesized
gcttagcctccaagcctacatc

SEQ ID NO: 24683 - DNA, 22 bp, Artificial Sequence
  chemically synthesized
agcctccaagcctacatctttc

SEQ ID NO: 24684 - DNA, 22 bp, Artificial Sequence
  chemically synthesized
gcctccaagcctacatctttct

SEQ ID NO: 24685 - DNA, 22 bp, Artificial Sequence
  chemically synthesized
caagcctacatctttctcccat

SEQ ID NO: 24686 - DNA, 22 bp, Artificial Sequence
  chemically synthesized
catctttctcccatgctggatg

SEQ ID NO: 24687 - DNA, 22 bp, Artificial Sequence
  chemically synthesized
tctcccatgctggatgcttcct

SEQ ID NO: 24688 - DNA, 22 bp, Artificial Sequence
  chemically synthesized
ctcccatgctggatgcttcctg

SEQ ID NO: 24689 - DNA, 22 bp, Artificial Sequence
  chemically synthesized
tcccatgctggatgcttcctgc

SEQ ID NO: 24690 - DNA, 22 bp, Artificial Sequence
  chemically synthesized
ccatgctggatgcttcctgccc

SEQ ID NO: 24691 - DNA, 22 bp, Artificial Sequence
  chemically synthesized
gatgcttcctgccctcaaacat

SEQ ID NO: 24692 - DNA, 22 bp, Artificial Sequence
  chemically synthesized
cctgccctcaaacattggactc

SEQ ID NO: 24693 - DNA, 22 bp, Artificial Sequence
  chemically synthesized
ctgccctcaaacattggactcc

SEQ ID NO: 24694 - DNA, 22 bp, Artificial Sequence
  chemically synthesized
ccctcaaacattggactccaag

SEQ ID NO: 24695 - DNA, 22 bp, Artificial Sequence
  chemically synthesized
aaacattggactccaagtcctt

SEQ ID NO: 24696 - DNA, 22 bp, Artificial Sequence
  chemically synthesized
gactccaagtccttcagctttg

SEQ ID NO: 24697 - DNA, 22 bp, Artificial Sequence
  chemically synthesized
caagtccttcagctttgggact

SEQ ID NO: 24698 - DNA, 22 bp, Artificial Sequence
  chemically synthesized
cagctttgggacttggactggc

SEQ ID NO: 24699 - DNA, 22 bp, Artificial Sequence
  chemically synthesized
agctttgggacttggactggct

SEQ ID NO: 24700 - DNA, 22 bp, Artificial Sequence
  chemically synthesized
tgggacttggactggcttcctt

SEQ ID NO: 24701 - DNA, 22 bp, Artificial Sequence
  chemically synthesized
gggacttggactggcttccttg

SEQ ID NO: 24702 - DNA, 22 bp, Artificial Sequence
  chemically synthesized
ggacttggactggcttccttgc

SEQ ID NO: 24703 - DNA, 22 bp, Artificial Sequence
  chemically synthesized
ggactggcttccttgctcctct

SEQ ID NO: 24704 - DNA, 22 bp, Artificial Sequence
  chemically synthesized
gactggcttccttgctcctctg

SEQ ID NO: 24705 - DNA, 22 bp, Artificial Sequence
  chemically synthesized
gcttccttgctcctctgcttgc

SEQ ID NO: 24706 - DNA, 22 bp, Artificial Sequence
  chemically synthesized
ccttgctcctctgcttgcagat

SEQ ID NO: 24707 - DNA, 22 bp, Artificial Sequence
  chemically synthesized
cttgctcctctgcttgcagatg

SEQ ID NO: 24708 - DNA, 22 bp, Artificial Sequence
  chemically synthesized
gctcctctgcttgcagatggcc

SEQ ID NO: 24709 - DNA, 22 bp, Artificial Sequence
  chemically synthesized
ctcctctgcttgcagatggcct

SEQ ID NO: 24710 - DNA, 22 bp, Artificial Sequence
  chemically synthesized
ctctgcttgcagatggcctatt

SEQ ID NO: 24711 - DNA, 22 bp, Artificial Sequence
  chemically synthesized
tgcttgcagatggcctattgtg

SEQ ID NO: 24712 - DNA, 22 bp, Artificial Sequence
  chemically synthesized
cttgcagatggcctattgtggg

SEQ ID NO: 24713 - DNA, 22 bp, Artificial Sequence
  chemically synthesized
gcagatggcctattgtgggacc

SEQ ID NO: 24714 - DNA, 22 bp, Artificial Sequence
  chemically synthesized
cagatggcctattgtgggacct

SEQ ID NO: 24715 - DNA, 22 bp, Artificial Sequence
  chemically synthesized
ttgtgggaccttgtgattgtgt

SEQ ID NO: 24716 - DNA, 22 bp, Artificial Sequence
  chemically synthesized
tgggaccttgtgattgtgtaag

SEQ ID NO: 24717 - DNA, 22 bp, Artificial Sequence
  chemically synthesized
gtgattgtgtaagttaacacta

SEQ ID NO: 24718 - DNA, 22 bp, Artificial Sequence
  chemically synthesized
tgattgtgtaagttaacactac

SEQ ID NO: 24719 - DNA, 22 bp, Artificial Sequence
  chemically synthesized
tgtaagttaacactacttaata

SEQ ID NO: 24720 - DNA, 22 bp, Artificial Sequence
  chemically synthesized
acactacttaataaactccctt

SEQ ID NO: 24721 - DNA, 22 bp, Artificial Sequence
  chemically synthesized
cttaataaactcccttttatat

SEQ ID NO: 24722 - DNA, 22 bp, Artificial Sequence
  chemically synthesized
aataaactcccttttatatcta

SEQ ID NO: 24723 - DNA, 22 bp, Artificial Sequence
  chemically synthesized
ataaactcccttttatatctaa

SEQ ID NO: 24724 - DNA, 22 bp, Artificial Sequence
  chemically synthesized
ccttttatatctaaatctatat

SEQ ID NO: 24725 - DNA, 22 bp, Artificial Sequence
  chemically synthesized
ttatatctaaatctatatctat

SEQ ID NO: 24726 - DNA, 22 bp, Artificial Sequence
  chemically synthesized
tatatctaaatctatatctatc

SEQ ID NO: 24727 - DNA, 22 bp, Artificial Sequence
  chemically synthesized
atatctaaatctatatctatct

SEQ ID NO: 24728 - DNA, 22 bp, Artificial Sequence
  chemically synthesized
tatctaaatctatatctatcta

SEQ ID NO: 24729 - DNA, 22 bp, Artificial Sequence
  chemically synthesized
aatctatatctatctatctatc

SEQ ID NO: 24730 - DNA, 22 bp, Artificial Sequence
  chemically synthesized
tatctatctatctatctatcta

SEQ ID NO: 24731 - DNA, 22 bp, Artificial Sequence
  chemically synthesized
tctatctatctatctatctatc

SEQ ID NO: 24732 - DNA, 22 bp, Artificial Sequence
  chemically synthesized
tctatctatctatctatctatc

SEQ ID NO: 24733 - DNA, 22 bp, Artificial Sequence
  chemically synthesized
tctatctatctatctatctatc

SEQ ID NO: 24734 - DNA, 22 bp, Artificial Sequence
  chemically synthesized
tctatctatctatctatctatc

SEQ ID NO: 24735 - DNA, 22 bp, Artificial Sequence
  chemically synthesized
tctatctatctatctatctatc

SEQ ID NO: 24736 - DNA, 22 bp, Artificial Sequence
  chemically synthesized
tctatctatctatctatctcct

SEQ ID NO: 24737 - DNA, 22 bp, Artificial Sequence
  chemically synthesized
tctatctatctatctcctatta

SEQ ID NO: 24738 - DNA, 22 bp, Artificial Sequence
  chemically synthesized
tctatctatctcctattagttc

SEQ ID NO: 24739 - DNA, 22 bp, Artificial Sequence
  chemically synthesized
tctatctcctattagttctgtc

SEQ ID NO: 24740 - DNA, 22 bp, Artificial Sequence
  chemically synthesized
tctcctattagttctgtctctc

SEQ ID NO: 24741 - DNA, 22 bp, Artificial Sequence
  chemically synthesized
ctattagttctgtctctctagg

SEQ ID NO: 24742 - DNA, 22 bp, Artificial Sequence
  chemically synthesized
ttagttctgtctctctagggaa

SEQ ID NO: 24743 - DNA, 22 bp, Artificial Sequence
  chemically synthesized
gttctgtctctctagggaaccc

SEQ ID NO: 24744 - DNA, 22 bp, Artificial Sequence
  chemically synthesized
tgtctctctagggaaccctgac

SEQ ID NO: 24745 - DNA, 22 bp, Artificial Sequence
  chemically synthesized
tctctctagggaaccctgacaa

SEQ ID NO: 24746 - DNA, 22 bp, Artificial Sequence
  chemically synthesized
tctagggaaccctgacaaatac

SEQ ID NO: 24747 - DNA, 22 bp, Artificial Sequence
  chemically synthesized
tagggaaccctgacaaatacag

SEQ ID NO: 24748 - DNA, 22 bp, Artificial Sequence
  chemically synthesized
gggaaccctgacaaatacagtg

SEQ ID NO: 24749 - DNA, 22 bp, Artificial Sequence
  chemically synthesized
acaaatacagtgagctcaggtc

SEQ ID NO: 24750 - DNA, 22 bp, Artificial Sequence
  chemically synthesized
aggtcctgagcagacattttcc

SEQ ID NO: 24751 - DNA, 22 bp, Artificial Sequence
  chemically synthesized
agcagacattttccaaaagaag

SEQ ID NO: 24752 - DNA, 22 bp, Artificial Sequence
  chemically synthesized
tccaaaagaagacatacaagtg

SEQ ID NO: 24753 - DNA, 22 bp, Artificial Sequence
  chemically synthesized
ccaaaagaagacatacaagtgg

SEQ ID NO: 24754 - DNA, 22 bp, Artificial Sequence
  chemically synthesized
caaaagaagacatacaagtggc

SEQ ID NO: 24755 - DNA, 22 bp, Artificial Sequence
  chemically synthesized
aacatcactaataatcagagaa

SEQ ID NO: 24756 - DNA, 22 bp, Artificial Sequence
  chemically synthesized
ataatcagagaatgcaaattaa

SEQ ID NO: 24757 - DNA, 22 bp, Artificial Sequence
  chemically synthesized
aaaccaccatatgatacctcct

SEQ ID NO: 24758 - DNA, 22 bp, Artificial Sequence
  chemically synthesized
cttatgccagtcagaatggcta

SEQ ID NO: 24759 - DNA, 22 bp, Artificial Sequence
  chemically synthesized
atgccagtcagaatggctatca

SEQ ID NO: 24760 - DNA, 22 bp, Artificial Sequence
  chemically synthesized
tgccagtcagaatggctatcat

SEQ ID NO: 24761 - DNA, 22 bp, Artificial Sequence
  chemically synthesized
tcattataaagttcaaaaacag

SEQ ID NO: 24762 - DNA, 22 bp, Artificial Sequence
  chemically synthesized
taaagttcaaaaacagcagatg

SEQ ID NO: 24763 - DNA, 22 bp, Artificial Sequence
  chemically synthesized
aaaaacagcagatgttggtgag

SEQ ID NO: 24764 - DNA, 22 bp, Artificial Sequence
  chemically synthesized
gtgaggatgtggagacaagaaa

SEQ ID NO: 24765 - DNA, 22 bp, Artificial Sequence
  chemically synthesized
atacactgttggtaagaatgta

SEQ ID NO: 24766 - DNA, 22 bp, Artificial Sequence
  chemically synthesized
tacactgttggtaagaatgtaa

SEQ ID NO: 24767 - DNA, 22 bp, Artificial Sequence
  chemically synthesized
ttggtaagaatgtaaattagta

SEQ ID NO: 24768 - DNA, 22 bp, Artificial Sequence
  chemically synthesized
gtaagaatgtaaattagtacaa

SEQ ID NO: 24769 - DNA, 22 bp, Artificial Sequence
  chemically synthesized
gtacaaactttatggaagacag

SEQ ID NO: 24770 - DNA, 22 bp, Artificial Sequence
  chemically synthesized
tatggaagacagcatgaagatt

SEQ ID NO: 24771 - DNA, 22 bp, Artificial Sequence
  chemically synthesized
atggaagacagcatgaagattt

SEQ ID NO: 24772 - DNA, 22 bp, Artificial Sequence
  chemically synthesized
tggaagacagcatgaagatttc

SEQ ID NO: 24773 - DNA, 22 bp, Artificial Sequence
  chemically synthesized
cttaaagaactagaaacagaac

SEQ ID NO: 24774 - DNA, 22 bp, Artificial Sequence
  chemically synthesized
ttaaagaactagaaacagaact

SEQ ID NO: 24775 - DNA, 22 bp, Artificial Sequence
  chemically synthesized
aaagaactagaaacagaactac

SEQ ID NO: 24776 - DNA, 22 bp, Artificial Sequence
  chemically synthesized
aagaactagaaacagaactacc

SEQ ID NO: 24777 - DNA, 22 bp, Artificial Sequence
  chemically synthesized
gaaacagaactaccattcaatc

SEQ ID NO: 24778 - DNA, 22 bp, Artificial Sequence
  chemically synthesized
ccattcaatcctgcaatcccac

SEQ ID NO: 24779 - DNA, 22 bp, Artificial Sequence
  chemically synthesized
aatcctgcaatcccactactgg

SEQ ID NO: 24780 - DNA, 22 bp, Artificial Sequence
  chemically synthesized
caatcccactactgggtatgga

SEQ ID NO: 24781 - DNA, 22 bp, Artificial Sequence
  chemically synthesized
ctgggtatggacccaaagtgaa

SEQ ID NO: 24782 - DNA, 22 bp, Artificial Sequence
  chemically synthesized
ggtatggacccaaagtgaaaga

SEQ ID NO: 24783 - DNA, 22 bp, Artificial Sequence
  chemically synthesized
aaaaagatatctgcattagtat

SEQ ID NO: 24784 - DNA, 22 bp, Artificial Sequence
  chemically synthesized
cattagtatgttcaaagtagca

SEQ ID NO: 24785 - DNA, 22 bp, Artificial Sequence
  chemically synthesized
gtatgttcaaagtagcactgtt

SEQ ID NO: 24786 - DNA, 22 bp, Artificial Sequence
  chemically synthesized
aaagtagcactgttcccaatag

SEQ ID NO: 24787 - DNA, 22 bp, Artificial Sequence
  chemically synthesized
ttcccaatagcaaagatatgga

SEQ ID NO: 24788 - DNA, 22 bp, Artificial Sequence
  chemically synthesized
ccaatagcaaagatatggaatc

SEQ ID NO: 24789 - DNA, 22 bp, Artificial Sequence
  chemically synthesized
aatgtctaccaatggacgattg

SEQ ID NO: 24790 - DNA, 22 bp, Artificial Sequence
  chemically synthesized
ccaatggacgattggataaaga

SEQ ID NO: 24791 - DNA, 22 bp, Artificial Sequence
  chemically synthesized
gataaagaaaatgtggtgtata

SEQ ID NO: 24792 - DNA, 22 bp, Artificial Sequence
  chemically synthesized
atatacatatatattactcagc

SEQ ID NO: 24793 - DNA, 22 bp, Artificial Sequence
  chemically synthesized
tatacatatatattactcagcc

SEQ ID NO: 24794 - DNA, 22 bp, Artificial Sequence
  chemically synthesized
ctcagccataaaaaagaatgaa

SEQ ID NO: 24795 - DNA, 22 bp, Artificial Sequence
  chemically synthesized
agccataaaaaagaatgaaatc

SEQ ID NO: 24796 - DNA, 22 bp, Artificial Sequence
  chemically synthesized
ctctagaaacatggttagaact

SEQ ID NO: 24797 - DNA, 22 bp, Artificial Sequence
  chemically synthesized
tctagaaacatggttagaactg

SEQ ID NO: 24798 - DNA, 22 bp, Artificial Sequence
  chemically synthesized
tagaaacatggttagaactgga

SEQ ID NO: 24799 - DNA, 22 bp, Artificial Sequence
  chemically synthesized
gaaacatggttagaactggagg

SEQ ID NO: 24800 - DNA, 22 bp, Artificial Sequence
  chemically synthesized
gaactggaggacattatcctca

SEQ ID NO: 24801 - DNA, 22 bp, Artificial Sequence
  chemically synthesized
gaggacattatcctcagtgaaa

SEQ ID NO: 24802 - DNA, 22 bp, Artificial Sequence
  chemically synthesized
tcctcagtgaaataactcagaa

SEQ ID NO: 24803 - DNA, 22 bp, Artificial Sequence
  chemically synthesized
agtgaaataactcagaaacaga

SEQ ID NO: 24804 - DNA, 22 bp, Artificial Sequence
  chemically synthesized
agaaacagaaagtcaaacacag

SEQ ID NO: 24805 - DNA, 22 bp, Artificial Sequence
  chemically synthesized
tcatttagtgagagccaagtgg

SEQ ID NO: 24806 - DNA, 22 bp, Artificial Sequence
  chemically synthesized
atttagtgagagccaagtggga

SEQ ID NO: 24807 - DNA, 22 bp, Artificial Sequence
  chemically synthesized
agtgagagccaagtgggagcta

SEQ ID NO: 24808 - DNA, 22 bp, Artificial Sequence
  chemically synthesized
gtgagagccaagtgggagctaa

SEQ ID NO: 24809 - DNA, 22 bp, Artificial Sequence
  chemically synthesized
aacgatgagtaagcatagacat

SEQ ID NO: 24810 - DNA, 22 bp, Artificial Sequence
  chemically synthesized
gagactagagaaaggtgggagg

SEQ ID NO: 24811 - DNA, 22 bp, Artificial Sequence
  chemically synthesized
agactagagaaaggtgggagga

SEQ ID NO: 24812 - DNA, 22 bp, Artificial Sequence
  chemically synthesized
gagaaaggtgggaggataggag

SEQ ID NO: 24813 - DNA, 22 bp, Artificial Sequence
  chemically synthesized
aaaaactacggattggatacaa

SEQ ID NO: 24814 - DNA, 22 bp, Artificial Sequence
  chemically synthesized
cggattggatacaacattcact

SEQ ID NO: 24815 - DNA, 22 bp, Artificial Sequence
  chemically synthesized
gatacaacattcacttttcagg

SEQ ID NO: 24816 - DNA, 22 bp, Artificial Sequence
  chemically synthesized
acttttcaggtgatggtccact

SEQ ID NO: 24817 - DNA, 22 bp, Artificial Sequence
  chemically synthesized
ttcaggtgatggtccactaaaa

SEQ ID NO: 24818 - DNA, 22 bp, Artificial Sequence
  chemically synthesized
tcaggtgatggtccactaaaag

SEQ ID NO: 24819 - DNA, 22 bp, Artificial Sequence
  chemically synthesized
caggtgatggtccactaaaagc

SEQ ID NO: 24820 - DNA, 22 bp, Artificial Sequence
  chemically synthesized
aggtgatggtccactaaaagct

SEQ ID NO: 24821 - DNA, 22 bp, Artificial Sequence
  chemically synthesized
aaagctcagacttcaccactat

SEQ ID NO: 24822 - DNA, 22 bp, Artificial Sequence
  chemically synthesized
agacttcaccactatgcaacat

SEQ ID NO: 24823 - DNA, 22 bp, Artificial Sequence
  chemically synthesized
caccactatgcaacatacatat

SEQ ID NO: 24824 - DNA, 22 bp, Artificial Sequence
  chemically synthesized
accactatgcaacatacatatg

SEQ ID NO: 24825 - DNA, 22 bp, Artificial Sequence
  chemically synthesized
tgcaacatacatatgtaaggaa

SEQ ID NO: 24826 - DNA, 22 bp, Artificial Sequence
  chemically synthesized
gtaccctgatacagcttgactg

SEQ ID NO: 24827 - DNA, 22 bp, Artificial Sequence
  chemically synthesized
taccctgatacagcttgactgt

SEQ ID NO: 24828 - DNA, 22 bp, Artificial Sequence
  chemically synthesized
atacagcttgactgtgtcccca

SEQ ID NO: 24829 - DNA, 22 bp, Artificial Sequence
  chemically synthesized
gactgtgtccccacccaaatct

SEQ ID NO: 24830 - DNA, 22 bp, Artificial Sequence
  chemically synthesized
actgtgtccccacccaaatctc

SEQ ID NO: 24831 - DNA, 22 bp, Artificial Sequence
  chemically synthesized
tgtccccacccaaatctcatct

SEQ ID NO: 24832 - DNA, 22 bp, Artificial Sequence
  chemically synthesized
atcttgaattgtagttcccata

SEQ ID NO: 24833 - DNA, 22 bp, Artificial Sequence
  chemically synthesized
gaattgtagttcccataatcct

SEQ ID NO: 24834 - DNA, 22 bp, Artificial Sequence
  chemically synthesized
aattgtagttcccataatcctc

SEQ ID NO: 24835 - DNA, 22 bp, Artificial Sequence
  chemically synthesized
tagttcccataatcctcacgtg

SEQ ID NO: 24836 - DNA, 22 bp, Artificial Sequence
  chemically synthesized
ccataatcctcacgtgttgtgg

SEQ ID NO: 24837 - DNA, 22 bp, Artificial Sequence
  chemically synthesized
acgtgttgtgggagggatttgg

SEQ ID NO: 24838 - DNA, 22 bp, Artificial Sequence
  chemically synthesized
tgggagggatttggagggaggt

SEQ ID NO: 24839 - DNA, 22 bp, Artificial Sequence
  chemically synthesized
ggagggaggtaattgaatcata

SEQ ID NO: 24840 - DNA, 22 bp, Artificial Sequence
  chemically synthesized
gagggaggtaattgaatcatag

SEQ ID NO: 24841 - DNA, 22 bp, Artificial Sequence
  chemically synthesized
aatcatagaggaggttactctc

SEQ ID NO: 24842 - DNA, 22 bp, Artificial Sequence
  chemically synthesized
ctctcatgctcttctcgtgata

SEQ ID NO: 24843 - DNA, 22 bp, Artificial Sequence
  chemically synthesized
tcatgctcttctcgtgatagtg

SEQ ID NO: 24844 - DNA, 22 bp, Artificial Sequence
  chemically synthesized
atgctcttctcgtgatagtgag

SEQ ID NO: 24845 - DNA, 22 bp, Artificial Sequence
  chemically synthesized
ttctcgtgatagtgagttctta

SEQ ID NO: 24846 - DNA, 22 bp, Artificial Sequence
  chemically synthesized
ctcgtgatagtgagttcttaca

SEQ ID NO: 24847 - DNA, 22 bp, Artificial Sequence
  chemically synthesized
tcgtgatagtgagttcttacaa

SEQ ID NO: 24848 - DNA, 22 bp, Artificial Sequence
  chemically synthesized
gtgatagtgagttcttacaaga

SEQ ID NO: 24849 - DNA, 22 bp, Artificial Sequence
  chemically synthesized
ttacaagatctgatggttttat

SEQ ID NO: 24850 - DNA, 22 bp, Artificial Sequence
  chemically synthesized
acaagatctgatggttttataa

SEQ ID NO: 24851 - DNA, 22 bp, Artificial Sequence
  chemically synthesized
caagatctgatggttttataag

SEQ ID NO: 24852 - DNA, 22 bp, Artificial Sequence
  chemically synthesized
atggttttataagcggcttttc

SEQ ID NO: 24853 - DNA, 22 bp, Artificial Sequence
  chemically synthesized
tataagcggcttttcccccttt

SEQ ID NO: 24854 - DNA, 22 bp, Artificial Sequence
  chemically synthesized
ataagcggcttttccccctttt

SEQ ID NO: 24855 - DNA, 22 bp, Artificial Sequence
  chemically synthesized
taagcggcttttcccccttttg

SEQ ID NO: 24856 - DNA, 22 bp, Artificial Sequence
  chemically synthesized
ttcccccttttgcttggcactt

SEQ ID NO: 24857 - DNA, 22 bp, Artificial Sequence
  chemically synthesized
tcccccttttgcttggcacttc

SEQ ID NO: 24858 - DNA, 22 bp, Artificial Sequence
  chemically synthesized
cccccttttgcttggcacttct

SEQ ID NO: 24859 - DNA, 22 bp, Artificial Sequence
  chemically synthesized
ccccttttgcttggcacttcta

SEQ ID NO: 24860 - DNA, 22 bp, Artificial Sequence
  chemically synthesized
ttgcttggcacttctacttgct

SEQ ID NO: 24861 - DNA, 22 bp, Artificial Sequence
  chemically synthesized
tgcttggcacttctacttgctg

SEQ ID NO: 24862 - DNA, 22 bp, Artificial Sequence
  chemically synthesized
gcttggcacttctacttgctgc

SEQ ID NO: 24863 - DNA, 22 bp, Artificial Sequence
  chemically synthesized
cttggcacttctacttgctgct

SEQ ID NO: 24864 - DNA, 22 bp, Artificial Sequence
  chemically synthesized
ggcacttctacttgctgctgcc

SEQ ID NO: 24865 - DNA, 22 bp, Artificial Sequence
  chemically synthesized
gcacttctacttgctgctgcca

SEQ ID NO: 24866 - DNA, 22 bp, Artificial Sequence
  chemically synthesized
ctacttgctgctgccatgtgaa

SEQ ID NO: 24867 - DNA, 22 bp, Artificial Sequence
  chemically synthesized
tacttgctgctgccatgtgaag

SEQ ID NO: 24868 - DNA, 22 bp, Artificial Sequence
  chemically synthesized
cttgctgctgccatgtgaagaa

SEQ ID NO: 24869 - DNA, 22 bp, Artificial Sequence
  chemically synthesized
gctgctgccatgtgaagaagga

SEQ ID NO: 24870 - DNA, 22 bp, Artificial Sequence
  chemically synthesized
ctgctgccatgtgaagaaggac

SEQ ID NO: 24871 - DNA, 22 bp, Artificial Sequence
  chemically synthesized
ctgccatgtgaagaaggacatg

SEQ ID NO: 24872 - DNA, 22 bp, Artificial Sequence
  chemically synthesized
ccatgtgaagaaggacatgttt

SEQ ID NO: 24873 - DNA, 22 bp, Artificial Sequence
  chemically synthesized
gtttcttcttctgccatgattg

SEQ ID NO: 24874 - DNA, 22 bp, Artificial Sequence
  chemically synthesized
tttcttcttctgccatgattgt

SEQ ID NO: 24875 - DNA, 22 bp, Artificial Sequence
  chemically synthesized
cttcttctgccatgattgtaag

SEQ ID NO: 24876 - DNA, 22 bp, Artificial Sequence
  chemically synthesized
ttcttctgccatgattgtaagt

SEQ ID NO: 24877 - DNA, 22 bp, Artificial Sequence
  chemically synthesized
cttctgccatgattgtaagttt

SEQ ID NO: 24878 - DNA, 22 bp, Artificial Sequence
  chemically synthesized
ttctgccatgattgtaagtttc

SEQ ID NO: 24879 - DNA, 22 bp, Artificial Sequence
  chemically synthesized
ctgccatgattgtaagtttccc

SEQ ID NO: 24880 - DNA, 22 bp, Artificial Sequence
  chemically synthesized
tgccatgattgtaagtttcccg

SEQ ID NO: 24881 - DNA, 22 bp, Artificial Sequence
  chemically synthesized
ccatgattgtaagtttcccgag

SEQ ID NO: 24882 - DNA, 22 bp, Artificial Sequence
  chemically synthesized
taagtttcccgaggcctcccca

SEQ ID NO: 24883 - DNA, 22 bp, Artificial Sequence
  chemically synthesized
cccgaggcctccccagccctgt

SEQ ID NO: 24884 - DNA, 22 bp, Artificial Sequence
  chemically synthesized
ccgaggcctccccagccctgtg

SEQ ID NO: 24885 - DNA, 22 bp, Artificial Sequence
  chemically synthesized
cccagccctgtggaactgtgag

SEQ ID NO: 24886 - DNA, 22 bp, Artificial Sequence
  chemically synthesized
tggaactgtgagacaattaaac

SEQ ID NO: 24887 - DNA, 22 bp, Artificial Sequence
  chemically synthesized
tgagacaattaaacgttttttc

SEQ ID NO: 24888 - DNA, 22 bp, Artificial Sequence
  chemically synthesized
aacgttttttccttataaatta

SEQ ID NO: 24889 - DNA, 22 bp, Artificial Sequence
  chemically synthesized
tttccttataaattacccagtc

SEQ ID NO: 24890 - DNA, 22 bp, Artificial Sequence
  chemically synthesized
ttccttataaattacccagtct

SEQ ID NO: 24891 - DNA, 22 bp, Artificial Sequence
  chemically synthesized
tccttataaattacccagtctc

SEQ ID NO: 24892 - DNA, 22 bp, Artificial Sequence
  chemically synthesized
ccttataaattacccagtctca

SEQ ID NO: 24893 - DNA, 22 bp, Artificial Sequence
  chemically synthesized
cttataaattacccagtctcag

SEQ ID NO: 24894 - DNA, 22 bp, Artificial Sequence
  chemically synthesized
ataaattacccagtctcaggta

SEQ ID NO: 24895 - DNA, 22 bp, Artificial Sequence
  chemically synthesized
taaattacccagtctcaggtat

SEQ ID NO: 24896 - DNA, 22 bp, Artificial Sequence
  chemically synthesized
cccagtctcaggtatgtcttta

SEQ ID NO: 24897 - DNA, 22 bp, Artificial Sequence
  chemically synthesized
aggtatgtctttataagcagca

SEQ ID NO: 24898 - DNA, 22 bp, Artificial Sequence
  chemically synthesized
tataagcagcatgataacgaac

SEQ ID NO: 24899 - DNA, 22 bp, Artificial Sequence
  chemically synthesized
ataagcagcatgataacgaact

SEQ ID NO: 24900 - DNA, 22 bp, Artificial Sequence
  chemically synthesized
taagcagcatgataacgaacta

SEQ ID NO: 24901 - DNA, 22 bp, Artificial Sequence
  chemically synthesized
gtacataccttctaaatatata

SEQ ID NO: 24902 - DNA, 22 bp, Artificial Sequence
  chemically synthesized
ctaaatatatataaataaattt

SEQ ID NO: 24903 - DNA, 22 bp, Artificial Sequence
  chemically synthesized
taaatatatataaataaatttt

SEQ ID NO: 24904 - DNA, 22 bp, Artificial Sequence
  chemically synthesized
aatatatataaataaattttaa

SEQ ID NO: 24905 - DNA, 22 bp, Artificial Sequence
  chemically synthesized
taaaaatataaaataaattaga

SEQ ID NO: 24906 - DNA, 22 bp, Artificial Sequence
  chemically synthesized
aaaaatataaaataaattagat

SEQ ID NO: 24907 - DNA, 22 bp, Artificial Sequence
  chemically synthesized
aaaatataaaataaattagatc

SEQ ID NO: 24908 - DNA, 22 bp, Artificial Sequence
  chemically synthesized
gatctgattgaaaaggcaaaaa

SEQ ID NO: 24909 - DNA, 22 bp, Artificial Sequence
  chemically synthesized
attgaaaaggcaaaaattgagc

SEQ ID NO: 24910 - DNA, 22 bp, Artificial Sequence
  chemically synthesized
aaaaggcaaaaattgagcaagc

SEQ ID NO: 24911 - DNA, 22 bp, Artificial Sequence
  chemically synthesized
agcaagcaaaatatcacttaat

SEQ ID NO: 24912 - DNA, 22 bp, Artificial Sequence
  chemically synthesized
aatggggtaattaaaagggtga

SEQ ID NO: 24913 - DNA, 22 bp, Artificial Sequence
  chemically synthesized
atggggtaattaaaagggtgaa

SEQ ID NO: 24914 - DNA, 22 bp, Artificial Sequence
  chemically synthesized
aaagggtgaagaaattgggcaa

SEQ ID NO: 24915 - DNA, 22 bp, Artificial Sequence
  chemically synthesized
ggcaaatggatgtcatgaggag

SEQ ID NO: 24916 - DNA, 22 bp, Artificial Sequence
  chemically synthesized
ttaggcagaggtaatggtcaga

SEQ ID NO: 24917 - DNA, 22 bp, Artificial Sequence
  chemically synthesized
taggcagaggtaatggtcagag

SEQ ID NO: 24918 - DNA, 22 bp, Artificial Sequence
  chemically synthesized
aggcagaggtaatggtcagagc

SEQ ID NO: 24919 - DNA, 22 bp, Artificial Sequence
  chemically synthesized
ggcagaggtaatggtcagagcc

SEQ ID NO: 24920 - DNA, 22 bp, Artificial Sequence
  chemically synthesized
agctggagtagagtgtgcaagg

SEQ ID NO: 24921 - DNA, 22 bp, Artificial Sequence
  chemically synthesized
gagtagagtgtgcaaggaaaga

SEQ ID NO: 24922 - DNA, 22 bp, Artificial Sequence
  chemically synthesized
aaaaggataaccaggtaggagg

SEQ ID NO: 24923 - DNA, 22 bp, Artificial Sequence
  chemically synthesized
cagtaaacttaggcaggatatt

SEQ ID NO: 24924 - DNA, 22 bp, Artificial Sequence
  chemically synthesized
aggcaggatatttcccgtgaca

SEQ ID NO: 24925 - DNA, 22 bp, Artificial Sequence
  chemically synthesized
ggcaggatatttcccgtgacag

SEQ ID NO: 24926 - DNA, 22 bp, Artificial Sequence
  chemically synthesized
cccgtgacagcactaaataata

SEQ ID NO: 24927 - DNA, 22 bp, Artificial Sequence
  chemically synthesized
ccgtgacagcactaaataataa

SEQ ID NO: 24928 - DNA, 22 bp, Artificial Sequence
  chemically synthesized
aataataatcacatgtgagaat

SEQ ID NO: 24929 - DNA, 22 bp, Artificial Sequence
  chemically synthesized
tcgattacttgagcaatacttt

SEQ ID NO: 24930 - DNA, 22 bp, Artificial Sequence
  chemically synthesized
cttgagcaatactttgttcatg

SEQ ID NO: 24931 - DNA, 22 bp, Artificial Sequence
  chemically synthesized
gagcaatactttgttcatgagc

SEQ ID NO: 24932 - DNA, 22 bp, Artificial Sequence
  chemically synthesized
agcaatactttgttcatgagct

SEQ ID NO: 24933 - DNA, 22 bp, Artificial Sequence
  chemically synthesized
tgttcatgagctagagcaaggg

SEQ ID NO: 24934 - DNA, 22 bp, Artificial Sequence
  chemically synthesized
gttcatgagctagagcaagggg

SEQ ID NO: 24935 - DNA, 22 bp, Artificial Sequence
  chemically synthesized
ttcatgagctagagcaagggga

SEQ ID NO: 24936 - DNA, 22 bp, Artificial Sequence
  chemically synthesized
atgagctagagcaaggggatga

SEQ ID NO: 24937 - DNA, 22 bp, Artificial Sequence
  chemically synthesized
gagcaaggggatgactcaagaa

SEQ ID NO: 24938 - DNA, 22 bp, Artificial Sequence
  chemically synthesized
aagaaatcctttgtgaaatcct

SEQ ID NO: 24939 - DNA, 22 bp, Artificial Sequence
  chemically synthesized
tgtgaaatcctggaggtaataa

SEQ ID NO: 24940 - DNA, 22 bp, Artificial Sequence
  chemically synthesized
gtgaaatcctggaggtaataag

SEQ ID NO: 24941 - DNA, 22 bp, Artificial Sequence
  chemically synthesized
tgaaatcctggaggtaataaga

SEQ ID NO: 24942 - DNA, 22 bp, Artificial Sequence
  chemically synthesized
gaggtaataagatcctggcatc

SEQ ID NO: 24943 - DNA, 22 bp, Artificial Sequence
  chemically synthesized
gcatcaatcttcaactcaattg

SEQ ID NO: 24944 - DNA, 22 bp, Artificial Sequence
  chemically synthesized
caactcaattgcaaaaagcaat

SEQ ID NO: 24945 - DNA, 22 bp, Artificial Sequence
  chemically synthesized
aactcaattgcaaaaagcaatt

SEQ ID NO: 24946 - DNA, 22 bp, Artificial Sequence
  chemically synthesized
aattgcaaaaagcaattttatt

SEQ ID NO: 24947 - DNA, 22 bp, Artificial Sequence
  chemically synthesized
caaaaagcaattttattactta

SEQ ID NO: 24948 - DNA, 22 bp, Artificial Sequence
  chemically synthesized
tattacttatatattacttctc

SEQ ID NO: 24949 - DNA, 22 bp, Artificial Sequence
  chemically synthesized
attacttatatattacttctca

SEQ ID NO: 24950 - DNA, 22 bp, Artificial Sequence
  chemically synthesized
ttacttatatattacttctcat

SEQ ID NO: 24951 - DNA, 22 bp, Artificial Sequence
  chemically synthesized
cttatatattacttctcatttt

SEQ ID NO: 24952 - DNA, 22 bp, Artificial Sequence
  chemically synthesized
atatattacttctcatttttca

SEQ ID NO: 24953 - DNA, 22 bp, Artificial Sequence
  chemically synthesized
tatattacttctcatttttcac

SEQ ID NO: 24954 - DNA, 22 bp, Artificial Sequence
  chemically synthesized
cttctcatttttcactgctgtc

SEQ ID NO: 24955 - DNA, 22 bp, Artificial Sequence
  chemically synthesized
ctcatttttcactgctgtcttt

SEQ ID NO: 24956 - DNA, 22 bp, Artificial Sequence
  chemically synthesized
tcatttttcactgctgtctttc

SEQ ID NO: 24957 - DNA, 22 bp, Artificial Sequence
  chemically synthesized
atttttcactgctgtctttcaa

SEQ ID NO: 24958 - DNA, 22 bp, Artificial Sequence
  chemically synthesized
ttcactgctgtctttcaaaaca

SEQ ID NO: 24959 - DNA, 22 bp, Artificial Sequence
  chemically synthesized
tcactgctgtctttcaaaacat

SEQ ID NO: 24960 - DNA, 22 bp, Artificial Sequence
  chemically synthesized
cactgctgtctttcaaaacata

SEQ ID NO: 24961 - DNA, 22 bp, Artificial Sequence
  chemically synthesized
actgctgtctttcaaaacatat

SEQ ID NO: 24962 - DNA, 22 bp, Artificial Sequence
  chemically synthesized
ctgtctttcaaaacatattcca

SEQ ID NO: 24963 - DNA, 22 bp, Artificial Sequence
  chemically synthesized
tctttcaaaacatattccattt

SEQ ID NO: 24964 - DNA, 22 bp, Artificial Sequence
  chemically synthesized
tcaaaacatattccatttcatc

SEQ ID NO: 24965 - DNA, 22 bp, Artificial Sequence
  chemically synthesized
caaaacatattccatttcatca

SEQ ID NO: 24966 - DNA, 22 bp, Artificial Sequence
  chemically synthesized
aaaacatattccatttcatcag

SEQ ID NO: 24967 - DNA, 22 bp, Artificial Sequence
  chemically synthesized
catttcatcagactacaggttt

SEQ ID NO: 24968 - DNA, 22 bp, Artificial Sequence
  chemically synthesized
catcagactacaggttttaata

SEQ ID NO: 24969 - DNA, 22 bp, Artificial Sequence
  chemically synthesized
atcagactacaggttttaatag

SEQ ID NO: 24970 - DNA, 22 bp, Artificial Sequence
  chemically synthesized
caggttttaatagctactatat

SEQ ID NO: 24971 - DNA, 22 bp, Artificial Sequence
  chemically synthesized
taatagctactatatttcttaa

SEQ ID NO: 24972 - DNA, 22 bp, Artificial Sequence
  chemically synthesized
aatagctactatatttcttaaa

SEQ ID NO: 24973 - DNA, 22 bp, Artificial Sequence
  chemically synthesized
atagctactatatttcttaaat

SEQ ID NO: 24974 - DNA, 22 bp, Artificial Sequence
  chemically synthesized
ctatatttcttaaatgtattat

SEQ ID NO: 24975 - DNA, 22 bp, Artificial Sequence
  chemically synthesized
tatttcttaaatgtattattcc

SEQ ID NO: 24976 - DNA, 22 bp, Artificial Sequence
  chemically synthesized
cttaaatgtattattccagtaa

SEQ ID NO: 24977 - DNA, 22 bp, Artificial Sequence
  chemically synthesized
ttaaatgtattattccagtaac

SEQ ID NO: 24978 - DNA, 22 bp, Artificial Sequence
  chemically synthesized
aaatgtattattccagtaactt

SEQ ID NO: 24979 - DNA, 22 bp, Artificial Sequence
  chemically synthesized
aatgtattattccagtaactta

SEQ ID NO: 24980 - DNA, 22 bp, Artificial Sequence
  chemically synthesized
ttccagtaacttatactttaca

SEQ ID NO: 24981 - DNA, 22 bp, Artificial Sequence
  chemically synthesized
cagtaacttatactttacatag

SEQ ID NO: 24982 - DNA, 22 bp, Artificial Sequence
  chemically synthesized
atactttacatagtaaatctta

SEQ ID NO: 24983 - DNA, 22 bp, Artificial Sequence
  chemically synthesized
tactttacatagtaaatcttat

SEQ ID NO: 24984 - DNA, 22 bp, Artificial Sequence
  chemically synthesized
tacatagtaaatcttatcaata

SEQ ID NO: 24985 - DNA, 22 bp, Artificial Sequence
  chemically synthesized
acatagtaaatcttatcaatag

SEQ ID NO: 24986 - DNA, 22 bp, Artificial Sequence
  chemically synthesized
catagtaaatcttatcaatagt

SEQ ID NO: 24987 - DNA, 22 bp, Artificial Sequence
  chemically synthesized
atcaatagtcacaatcaatggt

SEQ ID NO: 24988 - DNA, 22 bp, Artificial Sequence
  chemically synthesized
tcaatagtcacaatcaatggtc

SEQ ID NO: 24989 - DNA, 22 bp, Artificial Sequence
  chemically synthesized
catctggagacattacttttag

SEQ ID NO: 24990 - DNA, 22 bp, Artificial Sequence
  chemically synthesized
atctggagacattacttttagc

SEQ ID NO: 24991 - DNA, 22 bp, Artificial Sequence
  chemically synthesized
gagacattacttttagcctgag

SEQ ID NO: 24992 - DNA, 22 bp, Artificial Sequence
  chemically synthesized
cttttagcctgagccatgcaaa

SEQ ID NO: 24993 - DNA, 22 bp, Artificial Sequence
  chemically synthesized
ttagcctgagccatgcaaaata

SEQ ID NO: 24994 - DNA, 22 bp, Artificial Sequence
  chemically synthesized
tagcctgagccatgcaaaatat

SEQ ID NO: 24995 - DNA, 22 bp, Artificial Sequence
  chemically synthesized
agcctgagccatgcaaaatata

SEQ ID NO: 24996 - DNA, 22 bp, Artificial Sequence
  chemically synthesized
gcctgagccatgcaaaatatac

SEQ ID NO: 24997 - DNA, 22 bp, Artificial Sequence
  chemically synthesized
agccatgcaaaatatacttttt

SEQ ID NO: 24998 - DNA, 22 bp, Artificial Sequence
  chemically synthesized
tttggaaaattgccctttgaaa

SEQ ID NO: 24999 - DNA, 22 bp, Artificial Sequence
  chemically synthesized
ttggaaaattgccctttgaaag

SEQ ID NO: 25000 - DNA, 22 bp, Artificial Sequence
  chemically synthesized
tggaaaattgccctttgaaagg

SEQ ID NO: 25001 - DNA, 22 bp, Artificial Sequence
  chemically synthesized
ggaaaattgccctttgaaaggc

SEQ ID NO: 25002 - DNA, 22 bp, Artificial Sequence
  chemically synthesized
gaaaattgccctttgaaaggcg

SEQ ID NO: 25003 - DNA, 22 bp, Artificial Sequence
  chemically synthesized
ccctttgaaaggcgagacacaa

SEQ ID NO: 25004 - DNA, 22 bp, Artificial Sequence
  chemically synthesized
tgaaaggcgagacacaaaaggc

SEQ ID NO: 25005 - DNA, 22 bp, Artificial Sequence
  chemically synthesized
gaaaggcgagacacaaaaggca

SEQ ID NO: 25006 - DNA, 22 bp, Artificial Sequence
  chemically synthesized
aaaggcgagacacaaaaggcaa

SEQ ID NO: 25007 - DNA, 22 bp, Artificial Sequence
  chemically synthesized
atgctattatatggtaccaata

SEQ ID NO: 25008 - DNA, 22 bp, Artificial Sequence
  chemically synthesized
ttatatggtaccaataggattc

SEQ ID NO: 25009 - DNA, 22 bp, Artificial Sequence
  chemically synthesized
tatggtaccaataggattcatt

SEQ ID NO: 25010 - DNA, 22 bp, Artificial Sequence
  chemically synthesized
attaatttataaaggagaagag

SEQ ID NO: 25011 - DNA, 22 bp, Artificial Sequence
  chemically synthesized
atttataaaggagaagagctaa

SEQ ID NO: 25012 - DNA, 22 bp, Artificial Sequence
  chemically synthesized
ataaaggagaagagctaatgta

SEQ ID NO: 25013 - DNA, 22 bp, Artificial Sequence
  chemically synthesized
taaaggagaagagctaatgtaa

SEQ ID NO: 25014 - DNA, 22 bp, Artificial Sequence
  chemically synthesized
atgtaactccaaaatgcaagca

SEQ ID NO: 25015 - DNA, 22 bp, Artificial Sequence
  chemically synthesized
caaaatgcaagcaattttcata

SEQ ID NO: 25016 - DNA, 22 bp, Artificial Sequence
  chemically synthesized
tcatatgagtctacacaagcta

SEQ ID NO: 25017 - DNA, 22 bp, Artificial Sequence
  chemically synthesized
catatgagtctacacaagctaa

SEQ ID NO: 25018 - DNA, 22 bp, Artificial Sequence
  chemically synthesized
atatgagtctacacaagctaat

SEQ ID NO: 25019 - DNA, 22 bp, Artificial Sequence
  chemically synthesized
cacaagctaattgtccttaaga

SEQ ID NO: 25020 - DNA, 22 bp, Artificial Sequence
  chemically synthesized
attgtccttaagaatttcatct

SEQ ID NO: 25021 - DNA, 22 bp, Artificial Sequence
  chemically synthesized
tccttaagaatttcatctttaa

SEQ ID NO: 25022 - DNA, 22 bp, Artificial Sequence
  chemically synthesized
aagaatttcatctttaaggaaa

SEQ ID NO: 25023 - DNA, 22 bp, Artificial Sequence
  chemically synthesized
agaatttcatctttaaggaaaa

SEQ ID NO: 25024 - DNA, 22 bp, Artificial Sequence
  chemically synthesized
catctttaaggaaaagtttttt

SEQ ID NO: 25025 - DNA, 22 bp, Artificial Sequence
  chemically synthesized
atctttaaggaaaagtttttta

SEQ ID NO: 25026 - DNA, 22 bp, Artificial Sequence
  chemically synthesized
taaggaaaagttttttactgta

SEQ ID NO: 25027 - DNA, 22 bp, Artificial Sequence
  chemically synthesized
aaggaaaagttttttactgtat

SEQ ID NO: 25028 - DNA, 22 bp, Artificial Sequence
  chemically synthesized
aggaaaagttttttactgtatc

SEQ ID NO: 25029 - DNA, 22 bp, Artificial Sequence
  chemically synthesized
tttactgtatcaaaaagaagtt

SEQ ID NO: 25030 - DNA, 22 bp, Artificial Sequence
  chemically synthesized
ttactgtatcaaaaagaagttt

SEQ ID NO: 25031 - DNA, 22 bp, Artificial Sequence
  chemically synthesized
tactgtatcaaaaagaagttta

SEQ ID NO: 25032 - DNA, 22 bp, Artificial Sequence
  chemically synthesized
actgtatcaaaaagaagtttaa

SEQ ID NO: 25033 - DNA, 22 bp, Artificial Sequence
  chemically synthesized
ctgtatcaaaaagaagtttaaa

SEQ ID NO: 25034 - DNA, 22 bp, Artificial Sequence
  chemically synthesized
tatcaaaaagaagtttaaactg

SEQ ID NO: 25035 - DNA, 22 bp, Artificial Sequence
  chemically synthesized
aaactgtcattgagcagagtct

SEQ ID NO: 25036 - DNA, 22 bp, Artificial Sequence
  chemically synthesized
aactgtcattgagcagagtctg

SEQ ID NO: 25037 - DNA, 22 bp, Artificial Sequence
  chemically synthesized
tcattgagcagagtctgataat

SEQ ID NO: 25038 - DNA, 22 bp, Artificial Sequence
  chemically synthesized
agcagagtctgataataaggac

SEQ ID NO: 25039 - DNA, 22 bp, Artificial Sequence
  chemically synthesized
ataataaggacactgtcaaatc

SEQ ID NO: 25040 - DNA, 22 bp, Artificial Sequence
  chemically synthesized
tcaaatcacagttcagatgtta

SEQ ID NO: 25041 - DNA, 22 bp, Artificial Sequence
  chemically synthesized
agatgttatgtgatgaggacag

SEQ ID NO: 25042 - DNA, 22 bp, Artificial Sequence
  chemically synthesized
tgtgatgaggacagaatagaac

SEQ ID NO: 25043 - DNA, 22 bp, Artificial Sequence
  chemically synthesized
ctagactggacaagaacagaca

SEQ ID NO: 25044 - DNA, 22 bp, Artificial Sequence
  chemically synthesized
tagactggacaagaacagacat

SEQ ID NO: 25045 - DNA, 22 bp, Artificial Sequence
  chemically synthesized
gactggacaagaacagacatga

SEQ ID NO: 25046 - DNA, 22 bp, Artificial Sequence
  chemically synthesized
gacaagaacagacatgattaac

SEQ ID NO: 25047 - DNA, 22 bp, Artificial Sequence
  chemically synthesized
acttaaccatccaacaataaat

SEQ ID NO: 25048 - DNA, 22 bp, Artificial Sequence
  chemically synthesized
aaccatccaacaataaatctaa

SEQ ID NO: 25049 - DNA, 22 bp, Artificial Sequence
  chemically synthesized
accatccaacaataaatctaag

SEQ ID NO: 25050 - DNA, 22 bp, Artificial Sequence
  chemically synthesized
agttaacataaattgatgtcat

SEQ ID NO: 25051 - DNA, 22 bp, Artificial Sequence
  chemically synthesized
acataaattgatgtcatctact

SEQ ID NO: 25052 - DNA, 22 bp, Artificial Sequence
  chemically synthesized
atgtcatctactacatctaagt

SEQ ID NO: 25053 - DNA, 22 bp, Artificial Sequence
  chemically synthesized
ctacatctaagtatttcctcaa

SEQ ID NO: 25054 - DNA, 22 bp, Artificial Sequence
  chemically synthesized
catctaagtatttcctcaaatt

SEQ ID NO: 25055 - DNA, 22 bp, Artificial Sequence
  chemically synthesized
agtatttcctcaaattctggac

SEQ ID NO: 25056 - DNA, 22 bp, Artificial Sequence
  chemically synthesized
cctcaaattctggacaatttta

SEQ ID NO: 25057 - DNA, 22 bp, Artificial Sequence
  chemically synthesized
ctcaaattctggacaattttag

SEQ ID NO: 25058 - DNA, 22 bp, Artificial Sequence
  chemically synthesized
aaattctggacaattttagaaa

SEQ ID NO: 25059 - DNA, 22 bp, Artificial Sequence
  chemically synthesized
tggacaattttagaaaccatca

SEQ ID NO: 25060 - DNA, 22 bp, Artificial Sequence
  chemically synthesized
gacaattttagaaaccatcaaa

SEQ ID NO: 25061 - DNA, 22 bp, Artificial Sequence
  chemically synthesized
tagaaaccatcaaaattatttg

SEQ ID NO: 25062 - DNA, 22 bp, Artificial Sequence
  chemically synthesized
agaaaccatcaaaattatttgt

SEQ ID NO: 25063 - DNA, 22 bp, Artificial Sequence
  chemically synthesized
gaaaccatcaaaattatttgtt

SEQ ID NO: 25064 - DNA, 22 bp, Artificial Sequence
  chemically synthesized
tttgttgaggaaaaataaactt

SEQ ID NO: 25065 - DNA, 22 bp, Artificial Sequence
  chemically synthesized
gttgaggaaaaataaacttagc

SEQ ID NO: 25066 - DNA, 22 bp, Artificial Sequence
  chemically synthesized
ttgaggaaaaataaacttagcc

SEQ ID NO: 25067 - DNA, 22 bp, Artificial Sequence
  chemically synthesized
aggaaaaataaacttagccaat

SEQ ID NO: 25068 - DNA, 22 bp, Artificial Sequence
  chemically synthesized
agccaatttgcaagggcaacta

SEQ ID NO: 25069 - DNA, 22 bp, Artificial Sequence
  chemically synthesized
gccaatttgcaagggcaactaa

SEQ ID NO: 25070 - DNA, 22 bp, Artificial Sequence
  chemically synthesized
gcaagggcaactaaaatgaaga

SEQ ID NO: 25071 - DNA, 22 bp, Artificial Sequence
  chemically synthesized
caagggcaactaaaatgaagaa

SEQ ID NO: 25072 - DNA, 22 bp, Artificial Sequence
  chemically synthesized
aaatgaagaacttttctttaaa

SEQ ID NO: 25073 - DNA, 22 bp, Artificial Sequence
  chemically synthesized
ttctttaaagtgtgggagtcac

SEQ ID NO: 25074 - DNA, 22 bp, Artificial Sequence
  chemically synthesized
tctttaaagtgtgggagtcaca

SEQ ID NO: 25075 - DNA, 22 bp, Artificial Sequence
  chemically synthesized
ctttaaagtgtgggagtcacat

SEQ ID NO: 25076 - DNA, 22 bp, Artificial Sequence
  chemically synthesized
tttaaagtgtgggagtcacatc

SEQ ID NO: 25077 - DNA, 22 bp, Artificial Sequence
  chemically synthesized
taaagtgtgggagtcacatctt

SEQ ID NO: 25078 - DNA, 22 bp, Artificial Sequence
  chemically synthesized
aaagtgtgggagtcacatctta

SEQ ID NO: 25079 - DNA, 22 bp, Artificial Sequence
  chemically synthesized
aagtgtgggagtcacatcttag

SEQ ID NO: 25080 - DNA, 22 bp, Artificial Sequence
  chemically synthesized
agcaacatatttaaatatatct

SEQ ID NO: 25081 - DNA, 22 bp, Artificial Sequence
  chemically synthesized
gcaacatatttaaatatatcta

SEQ ID NO: 25082 - DNA, 22 bp, Artificial Sequence
  chemically synthesized
aaatatatctaagctttcttca

SEQ ID NO: 25083 - DNA, 22 bp, Artificial Sequence
  chemically synthesized
aatatatctaagctttcttcaa

SEQ ID NO: 25084 - DNA, 22 bp, Artificial Sequence
  chemically synthesized
agctttcttcaaaaccactatc

SEQ ID NO: 25085 - DNA, 22 bp, Artificial Sequence
  chemically synthesized
tcttcaaaaccactatccacaa

SEQ ID NO: 25086 - DNA, 22 bp, Artificial Sequence
  chemically synthesized
cttcaaaaccactatccacaaa

SEQ ID NO: 25087 - DNA, 22 bp, Artificial Sequence
  chemically synthesized
ttcaaaaccactatccacaaaa

SEQ ID NO: 25088 - DNA, 22 bp, Artificial Sequence
  chemically synthesized
caaaaccactatccacaaaaat

SEQ ID NO: 25089 - DNA, 22 bp, Artificial Sequence
  chemically synthesized
aaaaccactatccacaaaaatg

SEQ ID NO: 25090 - DNA, 22 bp, Artificial Sequence
  chemically synthesized
tccacaaaaatgcaaaatttcc

SEQ ID NO: 25091 - DNA, 22 bp, Artificial Sequence
  chemically synthesized
ccaaagaatttctcctcttctg

SEQ ID NO: 25092 - DNA, 22 bp, Artificial Sequence
  chemically synthesized
caaagaatttctcctcttctgt

SEQ ID NO: 25093 - DNA, 22 bp, Artificial Sequence
  chemically synthesized
ctcctcttctgtagacttattt

SEQ ID NO: 25094 - DNA, 22 bp, Artificial Sequence
  chemically synthesized
tcctcttctgtagacttatttt

SEQ ID NO: 25095 - DNA, 22 bp, Artificial Sequence
  chemically synthesized
ctcttctgtagacttattttct

SEQ ID NO: 25096 - DNA, 22 bp, Artificial Sequence
  chemically synthesized
ttctgtagacttattttcttca

SEQ ID NO: 25097 - DNA, 22 bp, Artificial Sequence
  chemically synthesized
ctgtagacttattttcttcatc

SEQ ID NO: 25098 - DNA, 22 bp, Artificial Sequence
  chemically synthesized
tgtagacttattttcttcatct

SEQ ID NO: 25099 - DNA, 22 bp, Artificial Sequence
  chemically synthesized
tagacttattttcttcatcttc

SEQ ID NO: 25100 - DNA, 22 bp, Artificial Sequence
  chemically synthesized
attttcttcatcttcatctttt

SEQ ID NO: 25101 - DNA, 22 bp, Artificial Sequence
  chemically synthesized
ttttcttcatcttcatcttttc

SEQ ID NO: 25102 - DNA, 22 bp, Artificial Sequence
  chemically synthesized
tcttcatcttcatcttttccag

SEQ ID NO: 25103 - DNA, 22 bp, Artificial Sequence
  chemically synthesized
cttcatcttcatcttttccagg

SEQ ID NO: 25104 - DNA, 22 bp, Artificial Sequence
  chemically synthesized
ttcatcttcatcttttccagga

SEQ ID NO: 25105 - DNA, 22 bp, Artificial Sequence
  chemically synthesized
catcttcatcttttccaggaga

SEQ ID NO: 25106 - DNA, 22 bp, Artificial Sequence
  chemically synthesized
atcttcatcttttccaggagaa

SEQ ID NO: 25107 - DNA, 22 bp, Artificial Sequence
  chemically synthesized
catcttttccaggagaatatac

SEQ ID NO: 25108 - DNA, 22 bp, Artificial Sequence
  chemically synthesized
atcttttccaggagaatatacc

SEQ ID NO: 25109 - DNA, 22 bp, Artificial Sequence
  chemically synthesized
ttccaggagaatataccataag

SEQ ID NO: 25110 - DNA, 22 bp, Artificial Sequence
  chemically synthesized
tccaggagaatataccataagt

SEQ ID NO: 25111 - DNA, 22 bp, Artificial Sequence
  chemically synthesized
ccaggagaatataccataagtt

SEQ ID NO: 25112 - DNA, 22 bp, Artificial Sequence
  chemically synthesized
caggagaatataccataagttt

SEQ ID NO: 25113 - DNA, 22 bp, Artificial Sequence
  chemically synthesized
ctgatggtacacatttattaga

SEQ ID NO: 25114 - DNA, 22 bp, Artificial Sequence
  chemically synthesized
tgatggtacacatttattagat

SEQ ID NO: 25115 - DNA, 22 bp, Artificial Sequence
  chemically synthesized
atggtacacatttattagatgt

SEQ ID NO: 25116 - DNA, 22 bp, Artificial Sequence
  chemically synthesized
attagatgttttatttacattt

SEQ ID NO: 25117 - DNA, 22 bp, Artificial Sequence
  chemically synthesized
ttagatgttttatttacatttt

SEQ ID NO: 25118 - DNA, 22 bp, Artificial Sequence
  chemically synthesized
gatgttttatttacatttttta

SEQ ID NO: 25119 - DNA, 22 bp, Artificial Sequence
  chemically synthesized
tatttacattttttatccttga

SEQ ID NO: 25120 - DNA, 22 bp, Artificial Sequence
  chemically synthesized
atttacattttttatccttgaa

SEQ ID NO: 25121 - DNA, 22 bp, Artificial Sequence
  chemically synthesized
tttacattttttatccttgaaa

SEQ ID NO: 25122 - DNA, 22 bp, Artificial Sequence
  chemically synthesized
acattttttatccttgaaaact

SEQ ID NO: 25123 - DNA, 22 bp, Artificial Sequence
  chemically synthesized
cattttttatccttgaaaactc

SEQ ID NO: 25124 - DNA, 22 bp, Artificial Sequence
  chemically synthesized
tttatccttgaaaactcctttt

SEQ ID NO: 25125 - DNA, 22 bp, Artificial Sequence
  chemically synthesized
ttatccttgaaaactcctttta

SEQ ID NO: 25126 - DNA, 22 bp, Artificial Sequence
  chemically synthesized
tatccttgaaaactccttttat

SEQ ID NO: 25127 - DNA, 22 bp, Artificial Sequence
  chemically synthesized
atccttgaaaactccttttatt

SEQ ID NO: 25128 - DNA, 22 bp, Artificial Sequence
  chemically synthesized
tccttgaaaactccttttattt

SEQ ID NO: 25129 - DNA, 22 bp, Artificial Sequence
  chemically synthesized
gaaaactccttttatttgcaac

SEQ ID NO: 25130 - DNA, 22 bp, Artificial Sequence
  chemically synthesized
aaaactccttttatttgcaact

SEQ ID NO: 25131 - DNA, 22 bp, Artificial Sequence
  chemically synthesized
cttttatttgcaactatgcatc

SEQ ID NO: 25132 - DNA, 22 bp, Artificial Sequence
  chemically synthesized
ttatttgcaactatgcatctta

SEQ ID NO: 25133 - DNA, 22 bp, Artificial Sequence
  chemically synthesized
tatttgcaactatgcatcttac

SEQ ID NO: 25134 - DNA, 22 bp, Artificial Sequence
  chemically synthesized
atttgcaactatgcatcttact

SEQ ID NO: 25135 - DNA, 22 bp, Artificial Sequence
  chemically synthesized
tttgcaactatgcatcttactc

SEQ ID NO: 25136 - DNA, 22 bp, Artificial Sequence
  chemically synthesized
gcaactatgcatcttactcaga

SEQ ID NO: 25137 - DNA, 22 bp, Artificial Sequence
  chemically synthesized
caactatgcatcttactcagag

SEQ ID NO: 25138 - DNA, 22 bp, Artificial Sequence
  chemically synthesized
tgcatcttactcagagatctta

SEQ ID NO: 25139 - DNA, 22 bp, Artificial Sequence
  chemically synthesized
actcagagatcttaaaacatcc

SEQ ID NO: 25140 - DNA, 22 bp, Artificial Sequence
  chemically synthesized
ctcagagatcttaaaacatcct

SEQ ID NO: 25141 - DNA, 22 bp, Artificial Sequence
  chemically synthesized
agagatcttaaaacatccttgt

SEQ ID NO: 25142 - DNA, 22 bp, Artificial Sequence
  chemically synthesized
aaaacatccttgtttgttagat

SEQ ID NO: 25143 - DNA, 22 bp, Artificial Sequence
  chemically synthesized
aaacatccttgtttgttagatt

SEQ ID NO: 25144 - DNA, 22 bp, Artificial Sequence
  chemically synthesized
gtttgttagattacgtatttca

SEQ ID NO: 25145 - DNA, 22 bp, Artificial Sequence
  chemically synthesized
tttgttagattacgtatttcaa

SEQ ID NO: 25146 - DNA, 22 bp, Artificial Sequence
  chemically synthesized
gttagattacgtatttcaaatt

SEQ ID NO: 25147 - DNA, 22 bp, Artificial Sequence
  chemically synthesized
ttagattacgtatttcaaattc

SEQ ID NO: 25148 - DNA, 22 bp, Artificial Sequence
  chemically synthesized
gattacgtatttcaaattcata

SEQ ID NO: 25149 - DNA, 22 bp, Artificial Sequence
  chemically synthesized
cgtatttcaaattcatatacac

SEQ ID NO: 25150 - DNA, 22 bp, Artificial Sequence
  chemically synthesized
caaattcatatacactttggta

SEQ ID NO: 25151 - DNA, 22 bp, Artificial Sequence
  chemically synthesized
aaattcatatacactttggtag

SEQ ID NO: 25152 - DNA, 22 bp, Artificial Sequence
  chemically synthesized
atatacactttggtagatgcaa

SEQ ID NO: 25153 - DNA, 22 bp, Artificial Sequence
  chemically synthesized
tggtagatgcaaacatttttat

SEQ ID NO: 25154 - DNA, 22 bp, Artificial Sequence
  chemically synthesized
ggtagatgcaaacatttttatt

SEQ ID NO: 25155 - DNA, 22 bp, Artificial Sequence
  chemically synthesized
gtagatgcaaacatttttattt

SEQ ID NO: 25156 - DNA, 22 bp, Artificial Sequence
  chemically synthesized
ttatttgctgaagaacataagg

SEQ ID NO: 25157 - DNA, 22 bp, Artificial Sequence
  chemically synthesized
tatttgctgaagaacataaggg

SEQ ID NO: 25158 - DNA, 22 bp, Artificial Sequence
  chemically synthesized
atttgctgaagaacataagggg

SEQ ID NO: 25159 - DNA, 22 bp, Artificial Sequence
  chemically synthesized
tttgctgaagaacataaggggg

SEQ ID NO: 25160 - DNA, 22 bp, Artificial Sequence
  chemically synthesized
gctgaagaacataagggggaaa

SEQ ID NO: 25161 - DNA, 22 bp, Artificial Sequence
  chemically synthesized
ctgaagaacataagggggaaat

SEQ ID NO: 25162 - DNA, 22 bp, Artificial Sequence
  chemically synthesized
aagaacataagggggaaataga

SEQ ID NO: 25163 - DNA, 22 bp, Artificial Sequence
  chemically synthesized
tttatttgaagaaacaaatgat

SEQ ID NO: 25164 - DNA, 22 bp, Artificial Sequence
  chemically synthesized
tatttgaagaaacaaatgattt

SEQ ID NO: 25165 - DNA, 22 bp, Artificial Sequence
  chemically synthesized
atttgaagaaacaaatgatttg

SEQ ID NO: 25166 - DNA, 22 bp, Artificial Sequence
  chemically synthesized
tttgaagaaacaaatgatttga

SEQ ID NO: 25167 - DNA, 22 bp, Artificial Sequence
  chemically synthesized
gaagaaacaaatgatttgattt

SEQ ID NO: 25168 - DNA, 22 bp, Artificial Sequence
  chemically synthesized
aagaaacaaatgatttgatttg

SEQ ID NO: 25169 - DNA, 22 bp, Artificial Sequence
  chemically synthesized
gatttgggaaatgaaatgaaaa

SEQ ID NO: 25170 - DNA, 22 bp, Artificial Sequence
  chemically synthesized
atttgggaaatgaaatgaaaag

SEQ ID NO: 25171 - DNA, 22 bp, Artificial Sequence
  chemically synthesized
gggaaatgaaatgaaaagaaaa

SEQ ID NO: 25172 - DNA, 22 bp, Artificial Sequence
  chemically synthesized
ggaaatgaaatgaaaagaaaaa

SEQ ID NO: 25173 - DNA, 22 bp, Artificial Sequence
  chemically synthesized
actaattcgctacttcttttac

SEQ ID NO: 25174 - DNA, 22 bp, Artificial Sequence
  chemically synthesized
attcgctacttcttttactcat

SEQ ID NO: 25175 - DNA, 22 bp, Artificial Sequence
  chemically synthesized
gctacttcttttactcatctga

SEQ ID NO: 25176 - DNA, 22 bp, Artificial Sequence
  chemically synthesized
cttcttttactcatctgaggcc

SEQ ID NO: 25177 - DNA, 22 bp, Artificial Sequence
  chemically synthesized
cttttactcatctgaggccttc

SEQ ID NO: 25178 - DNA, 22 bp, Artificial Sequence
  chemically synthesized
ttttactcatctgaggccttca

SEQ ID NO: 25179 - DNA, 22 bp, Artificial Sequence
  chemically synthesized
ttactcatctgaggccttcaga

SEQ ID NO: 25180 - DNA, 22 bp, Artificial Sequence
  chemically synthesized
tactcatctgaggccttcagat

SEQ ID NO: 25181 - DNA, 22 bp, Artificial Sequence
  chemically synthesized
actcatctgaggccttcagata

SEQ ID NO: 25182 - DNA, 22 bp, Artificial Sequence
  chemically synthesized
ctcatctgaggccttcagatag

SEQ ID NO: 25183 - DNA, 22 bp, Artificial Sequence
  chemically synthesized
atctgaggccttcagatagtcc

SEQ ID NO: 25184 - DNA, 22 bp, Artificial Sequence
  chemically synthesized
aggccttcagatagtcccccat

SEQ ID NO: 25185 - DNA, 22 bp, Artificial Sequence
  chemically synthesized
cagatagtcccccatatagcct

SEQ ID NO: 25186 - DNA, 22 bp, Artificial Sequence
  chemically synthesized
agatagtcccccatatagcctt

SEQ ID NO: 25187 - DNA, 22 bp, Artificial Sequence
  chemically synthesized
agagtgtttaaaatatgattat

SEQ ID NO: 25188 - DNA, 22 bp, Artificial Sequence
  chemically synthesized
gagtgtttaaaatatgattatg

SEQ ID NO: 25189 - DNA, 22 bp, Artificial Sequence
  chemically synthesized
aaaatatgattatgctctttca

SEQ ID NO: 25190 - DNA, 22 bp, Artificial Sequence
  chemically synthesized
aaatatgattatgctctttcag

SEQ ID NO: 25191 - DNA, 22 bp, Artificial Sequence
  chemically synthesized
tgctctttcagtctattagaaa

SEQ ID NO: 25192 - DNA, 22 bp, Artificial Sequence
  chemically synthesized
tttcagtctattagaaataaaa

SEQ ID NO: 25193 - DNA, 22 bp, Artificial Sequence
  chemically synthesized
tcagtctattagaaataaaaac

SEQ ID NO: 25194 - DNA, 22 bp, Artificial Sequence
  chemically synthesized
cagtctattagaaataaaaaca

SEQ ID NO: 25195 - DNA, 22 bp, Artificial Sequence
  chemically synthesized
agtctattagaaataaaaacat

SEQ ID NO: 25196 - DNA, 22 bp, Artificial Sequence
  chemically synthesized
ttagaaataaaaacataaagct

SEQ ID NO: 25197 - DNA, 22 bp, Artificial Sequence
  chemically synthesized
gaaataaaaacataaagcttaa

SEQ ID NO: 25198 - DNA, 22 bp, Artificial Sequence
  chemically synthesized
aaaaaatttcaagggaaggggc

SEQ ID NO: 25199 - DNA, 22 bp, Artificial Sequence
  chemically synthesized
aaaaatttcaagggaaggggct

SEQ ID NO: 25200 - DNA, 22 bp, Artificial Sequence
  chemically synthesized
caagggaaggggcttgaagatt

SEQ ID NO: 25201 - DNA, 22 bp, Artificial Sequence
  chemically synthesized
aagggaaggggcttgaagatta

SEQ ID NO: 25202 - DNA, 22 bp, Artificial Sequence
  chemically synthesized
gaagattactgactaagggcag

SEQ ID NO: 25203 - DNA, 22 bp, Artificial Sequence
  chemically synthesized
aagattactgactaagggcagc

SEQ ID NO: 25204 - DNA, 22 bp, Artificial Sequence
  chemically synthesized
ctgactaagggcagctgacact

SEQ ID NO: 25205 - DNA, 22 bp, Artificial Sequence
  chemically synthesized
actaagggcagctgacactcac

SEQ ID NO: 25206 - DNA, 22 bp, Artificial Sequence
  chemically synthesized
agggcagctgacactcacctcc

SEQ ID NO: 25207 - DNA, 22 bp, Artificial Sequence
  chemically synthesized
acactcacctcctccacaaaga

SEQ ID NO: 25208 - DNA, 22 bp, Artificial Sequence
  chemically synthesized
acctcctccacaaagaaccaaa

SEQ ID NO: 25209 - DNA, 22 bp, Artificial Sequence
  chemically synthesized
ctccacaaagaaccaaaatagt

SEQ ID NO: 25210 - DNA, 22 bp, Artificial Sequence
  chemically synthesized
cacaaagaaccaaaatagtaag

SEQ ID NO: 25211 - DNA, 22 bp, Artificial Sequence
  chemically synthesized
tggaattcaacagagaagtgac

SEQ ID NO: 25212 - DNA, 22 bp, Artificial Sequence
  chemically synthesized
gaattcaacagagaagtgacag

SEQ ID NO: 25213 - DNA, 22 bp, Artificial Sequence
  chemically synthesized
aacagagaagtgacaggaagca

SEQ ID NO: 25214 - DNA, 22 bp, Artificial Sequence
  chemically synthesized
aggcaatgaaggggagggaagc

SEQ ID NO: 25215 - DNA, 22 bp, Artificial Sequence
  chemically synthesized
cccagtagggatcctctgtgag

SEQ ID NO: 25216 - DNA, 22 bp, Artificial Sequence
  chemically synthesized
tgtgaggccagagaggctcccc

SEQ ID NO: 25217 - DNA, 22 bp, Artificial Sequence
  chemically synthesized
tgaggccagagaggctccccag

SEQ ID NO: 25218 - DNA, 22 bp, Artificial Sequence
  chemically synthesized
cccagtgcatcgaaagttaagt

SEQ ID NO: 25219 - DNA, 22 bp, Artificial Sequence
  chemically synthesized
agtgactgactcccagtggtcc

SEQ ID NO: 25220 - DNA, 22 bp, Artificial Sequence
  chemically synthesized
actcccagtggtccacatctgc

SEQ ID NO: 25221 - DNA, 22 bp, Artificial Sequence
  chemically synthesized
ccagtggtccacatctgcatta

SEQ ID NO: 25222 - DNA, 22 bp, Artificial Sequence
  chemically synthesized
cattatggactccaggaatcct

SEQ ID NO: 25223 - DNA, 22 bp, Artificial Sequence
  chemically synthesized
tggactccaggaatcctagcca

SEQ ID NO: 25224 - DNA, 22 bp, Artificial Sequence
  chemically synthesized
caggaatcctagccacaggaga

SEQ ID NO: 25225 - DNA, 22 bp, Artificial Sequence
  chemically synthesized
gccacaggagagtcccttgacc

SEQ ID NO: 25226 - DNA, 22 bp, Artificial Sequence
  chemically synthesized
gaccatgcaggccttgagacta

SEQ ID NO: 25227 - DNA, 22 bp, Artificial Sequence
  chemically synthesized
accatgcaggccttgagactat

SEQ ID NO: 25228 - DNA, 22 bp, Artificial Sequence
  chemically synthesized
gagactatcataaggaactgcc

SEQ ID NO: 25229 - DNA, 22 bp, Artificial Sequence
  chemically synthesized
agactatcataaggaactgccc

SEQ ID NO: 25230 - DNA, 22 bp, Artificial Sequence
  chemically synthesized
tcataaggaactgcccagcaat

SEQ ID NO: 25231 - DNA, 22 bp, Artificial Sequence
  chemically synthesized
cccagcaatcgcacaaaggcat

SEQ ID NO: 25232 - DNA, 22 bp, Artificial Sequence
  chemically synthesized
ctccagagaaggagctctcact

SEQ ID NO: 25233 - DNA, 22 bp, Artificial Sequence
  chemically synthesized
cagagaaggagctctcactggg

SEQ ID NO: 25234 - DNA, 22 bp, Artificial Sequence
  chemically synthesized
tcactgggtcccacccctgcca

SEQ ID NO: 25235 - DNA, 22 bp, Artificial Sequence
  chemically synthesized
actgggtcccacccctgccatc

SEQ ID NO: 25236 - DNA, 22 bp, Artificial Sequence
  chemically synthesized
ggtcccacccctgccatcccca

SEQ ID NO: 25237 - DNA, 22 bp, Artificial Sequence
  chemically synthesized
ccatccccattactgagcagca

SEQ ID NO: 25238 - DNA, 22 bp, Artificial Sequence
  chemically synthesized
ctgagcagcaaggtgccatttt

SEQ ID NO: 25239 - DNA, 22 bp, Artificial Sequence
  chemically synthesized
agcagcaaggtgccattttgag

SEQ ID NO: 25240 - DNA, 22 bp, Artificial Sequence
  chemically synthesized
tgagagcccaacacccaccaga

SEQ ID NO: 25241 - DNA, 22 bp, Artificial Sequence
  chemically synthesized
gagagcccaacacccaccagat

SEQ ID NO: 25242 - DNA, 22 bp, Artificial Sequence
  chemically synthesized
agagcccaacacccaccagatg

SEQ ID NO: 25243 - DNA, 22 bp, Artificial Sequence
  chemically synthesized
ctcagaccccaacatcatctgc

SEQ ID NO: 25244 - DNA, 22 bp, Artificial Sequence
  chemically synthesized
agaccccaacatcatctgcatc

SEQ ID NO: 25245 - DNA, 22 bp, Artificial Sequence
  chemically synthesized
catctctacatccctgaagctc

SEQ ID NO: 25246 - DNA, 22 bp, Artificial Sequence
  chemically synthesized
tacatccctgaagctctgctga

SEQ ID NO: 25247 - DNA, 22 bp, Artificial Sequence
  chemically synthesized
catccctgaagctctgctgaca

SEQ ID NO: 25248 - DNA, 22 bp, Artificial Sequence
  chemically synthesized
aagctctgctgacatcccccac

SEQ ID NO: 25249 - DNA, 22 bp, Artificial Sequence
  chemically synthesized
tgctgacatcccccacccacag

SEQ ID NO: 25250 - DNA, 22 bp, Artificial Sequence
  chemically synthesized
ctgacatcccccacccacagct

SEQ ID NO: 25251 - DNA, 22 bp, Artificial Sequence
  chemically synthesized
acatcccccacccacagctgag

SEQ ID NO: 25252 - DNA, 22 bp, Artificial Sequence
  chemically synthesized
agtgctactgctggctgctgtc

SEQ ID NO: 25253 - DNA, 22 bp, Artificial Sequence
  chemically synthesized
ctgctggctgctgtcaccaggg

SEQ ID NO: 25254 - DNA, 22 bp, Artificial Sequence
  chemically synthesized
ctggctgctgtcaccagggata

SEQ ID NO: 25255 - DNA, 22 bp, Artificial Sequence
  chemically synthesized
gctgctgtcaccagggataaag

SEQ ID NO: 25256 - DNA, 22 bp, Artificial Sequence
  chemically synthesized
ctgtcaccagggataaagtgtg

SEQ ID NO: 25257 - DNA, 22 bp, Artificial Sequence
  chemically synthesized
tcaccagggataaagtgtgtca

SEQ ID NO: 25258 - DNA, 22 bp, Artificial Sequence
  chemically synthesized
gaagtggactcccccaccccca

SEQ ID NO: 25259 - DNA, 22 bp, Artificial Sequence
  chemically synthesized
ccccacccccagtagcagggct

SEQ ID NO: 25260 - DNA, 22 bp, Artificial Sequence
  chemically synthesized
ctacacatttataagctcccta

SEQ ID NO: 25261 - DNA, 22 bp, Artificial Sequence
  chemically synthesized
cacatttataagctccctaaga

SEQ ID NO: 25262 - DNA, 22 bp, Artificial Sequence
  chemically synthesized
ataagctccctaagaaaatgct

SEQ ID NO: 25263 - DNA, 22 bp, Artificial Sequence
  chemically synthesized
taagctccctaagaaaatgcta

SEQ ID NO: 25264 - DNA, 22 bp, Artificial Sequence
  chemically synthesized
cctaagaaaatgctaccccact

SEQ ID NO: 25265 - DNA, 22 bp, Artificial Sequence
  chemically synthesized
agaaaatgctaccccacttgca

SEQ ID NO: 25266 - DNA, 22 bp, Artificial Sequence
  chemically synthesized
ccccacttgcagccaccatctg

SEQ ID NO: 25267 - DNA, 22 bp, Artificial Sequence
  chemically synthesized
gcagccaccatctggggctgaa

SEQ ID NO: 25268 - DNA, 22 bp, Artificial Sequence
  chemically synthesized
cagccaccatctggggctgaaa

SEQ ID NO: 25269 - DNA, 22 bp, Artificial Sequence
  chemically synthesized
gggctgaaacacatgcccacca

SEQ ID NO: 25270 - DNA, 22 bp, Artificial Sequence
  chemically synthesized
aaacacatgcccaccagcaacc

SEQ ID NO: 25271 - DNA, 22 bp, Artificial Sequence
  chemically synthesized
atagctgctgccactgaaagca

SEQ ID NO: 25272 - DNA, 22 bp, Artificial Sequence
  chemically synthesized
tagctgctgccactgaaagcaa

SEQ ID NO: 25273 - DNA, 22 bp, Artificial Sequence
  chemically synthesized
ctgccactgaaagcaacacacc

SEQ ID NO: 25274 - DNA, 22 bp, Artificial Sequence
  chemically synthesized
ccactgaaagcaacacaccccg

SEQ ID NO: 25275 - DNA, 22 bp, Artificial Sequence
  chemically synthesized
aaagcaacacaccccgcacccc

SEQ ID NO: 25276 - DNA, 22 bp, Artificial Sequence
  chemically synthesized
caagagcagggcaacaatgcag

SEQ ID NO: 25277 - DNA, 22 bp, Artificial Sequence
  chemically synthesized
aagagcagggcaacaatgcagt

SEQ ID NO: 25278 - DNA, 22 bp, Artificial Sequence
  chemically synthesized
ctaattcactcaggcattctgc

SEQ ID NO: 25279 - DNA, 22 bp, Artificial Sequence
  chemically synthesized
attcactcaggcattctgctgg

SEQ ID NO: 25280 - DNA, 22 bp, Artificial Sequence
  chemically synthesized
actcaggcattctgctgggggc

SEQ ID NO: 25281 - DNA, 22 bp, Artificial Sequence
  chemically synthesized
aggcattctgctgggggcctga

SEQ ID NO: 25282 - DNA, 22 bp, Artificial Sequence
  chemically synthesized
tgctgggggcctgaggatcact

SEQ ID NO: 25283 - DNA, 22 bp, Artificial Sequence
  chemically synthesized
ctgggggcctgaggatcactcc

SEQ ID NO: 25284 - DNA, 22 bp, Artificial Sequence
  chemically synthesized
ggggcctgaggatcactccact

SEQ ID NO: 25285 - DNA, 22 bp, Artificial Sequence
  chemically synthesized
aggatcactccactccagccta

SEQ ID NO: 25286 - DNA, 22 bp, Artificial Sequence
  chemically synthesized
cactccagcctatgatagccgg

SEQ ID NO: 25287 - DNA, 22 bp, Artificial Sequence
  chemically synthesized
cagcctatgatagccggtgtcc

SEQ ID NO: 25288 - DNA, 22 bp, Artificial Sequence
  chemically synthesized
tgatagccggtgtccacacaca

SEQ ID NO: 25289 - DNA, 22 bp, Artificial Sequence
  chemically synthesized
agtggcctgaggtcaggaacac

SEQ ID NO: 25290 - DNA, 22 bp, Artificial Sequence
  chemically synthesized
aggtcaggaacacccagcctgg

SEQ ID NO: 25291 - DNA, 22 bp, Artificial Sequence
  chemically synthesized
gctttgccttcctcaatgccta

SEQ ID NO: 25292 - DNA, 22 bp, Artificial Sequence
  chemically synthesized
tgccttcctcaatgcctaagca

SEQ ID NO: 25293 - DNA, 22 bp, Artificial Sequence
  chemically synthesized
gccttcctcaatgcctaagcaa

SEQ ID NO: 25294 - DNA, 22 bp, Artificial Sequence
  chemically synthesized
ccttcctcaatgcctaagcaag

SEQ ID NO: 25295 - DNA, 22 bp, Artificial Sequence
  chemically synthesized
cctcaatgcctaagcaagttgt

SEQ ID NO: 25296 - DNA, 22 bp, Artificial Sequence
  chemically synthesized
ctcaatgcctaagcaagttgtc

SEQ ID NO: 25297 - DNA, 22 bp, Artificial Sequence
  chemically synthesized
aatgcctaagcaagttgtctgg

SEQ ID NO: 25298 - DNA, 22 bp, Artificial Sequence
  chemically synthesized
agcaagttgtctgggaacccag

SEQ ID NO: 25299 - DNA, 22 bp, Artificial Sequence
  chemically synthesized
tctgggaacccagagacagcct

SEQ ID NO: 25300 - DNA, 22 bp, Artificial Sequence
  chemically synthesized
ggaacccagagacagccttgtg

SEQ ID NO: 25301 - DNA, 22 bp, Artificial Sequence
  chemically synthesized
gtgccatccaccatgactggta

SEQ ID NO: 25302 - DNA, 22 bp, Artificial Sequence
  chemically synthesized
tgccatccaccatgactggtac

SEQ ID NO: 25303 - DNA, 22 bp, Artificial Sequence
  chemically synthesized
gtacctaagcaaccctcccaga

SEQ ID NO: 25304 - DNA, 22 bp, Artificial Sequence
  chemically synthesized
agcaaccctcccagaagcctga

SEQ ID NO: 25305 - DNA, 22 bp, Artificial Sequence
  chemically synthesized
ccagaagcctgatgatgggcct

SEQ ID NO: 25306 - DNA, 22 bp, Artificial Sequence
  chemically synthesized
atgatgggcctacccaatctgc

SEQ ID NO: 25307 - DNA, 22 bp, Artificial Sequence
  chemically synthesized
cccaatctgccactgccatcac

SEQ ID NO: 25308 - DNA, 22 bp, Artificial Sequence
  chemically synthesized
ccactgccatcacaactggcac

SEQ ID NO: 25309 - DNA, 22 bp, Artificial Sequence
  chemically synthesized
ccatcacaactggcacctcctg

SEQ ID NO: 25310 - DNA, 22 bp, Artificial Sequence
  chemically synthesized
gcacctcctgcatgtgccacct

SEQ ID NO: 25311 - DNA, 22 bp, Artificial Sequence
  chemically synthesized
ctgcatgtgccacctgtgggtc

SEQ ID NO: 25312 - DNA, 22 bp, Artificial Sequence
  chemically synthesized
catgtgccacctgtgggtctga

SEQ ID NO: 25313 - DNA, 22 bp, Artificial Sequence
  chemically synthesized
tgggtctgaagactggctcatt

SEQ ID NO: 25314 - DNA, 22 bp, Artificial Sequence
  chemically synthesized
aagactggctcattcagccctt

SEQ ID NO: 25315 - DNA, 22 bp, Artificial Sequence
  chemically synthesized
gctcattcagcccttgcagcca

SEQ ID NO: 25316 - DNA, 22 bp, Artificial Sequence
  chemically synthesized
attcagcccttgcagccaccac

SEQ ID NO: 25317 - DNA, 22 bp, Artificial Sequence
  chemically synthesized
agcccttgcagccaccaccaac

SEQ ID NO: 25318 - DNA, 22 bp, Artificial Sequence
  chemically synthesized
gcagccaccaccaacaccagtg

SEQ ID NO: 25319 - DNA, 22 bp, Artificial Sequence
  chemically synthesized
cagccaccaccaacaccagtgc

SEQ ID NO: 25320 - DNA, 22 bp, Artificial Sequence
  chemically synthesized
cttgggagccagagggttgtcc

SEQ ID NO: 25321 - DNA, 22 bp, Artificial Sequence
  chemically synthesized
gggagccagagggttgtcctgc

SEQ ID NO: 25322 - DNA, 22 bp, Artificial Sequence
  chemically synthesized
ggagccagagggttgtcctgca

SEQ ID NO: 25323 - DNA, 22 bp, Artificial Sequence
  chemically synthesized
tcctgcagttgctacagccatc

SEQ ID NO: 25324 - DNA, 22 bp, Artificial Sequence
  chemically synthesized
cagttgctacagccatcaccca

SEQ ID NO: 25325 - DNA, 22 bp, Artificial Sequence
  chemically synthesized
ctacagccatcacccacaccac

SEQ ID NO: 25326 - DNA, 22 bp, Artificial Sequence
  chemically synthesized
cagccatcacccacaccacacc

SEQ ID NO: 25327 - DNA, 22 bp, Artificial Sequence
  chemically synthesized
tccagaagcctgaggacccaca

SEQ ID NO: 25328 - DNA, 22 bp, Artificial Sequence
  chemically synthesized
aggacccacacaccagcccagt

SEQ ID NO: 25329 - DNA, 22 bp, Artificial Sequence
  chemically synthesized
ctatggccactactgacaccca

SEQ ID NO: 25330 - DNA, 22 bp, Artificial Sequence
  chemically synthesized
tggccactactgacacccaagc

SEQ ID NO: 25331 - DNA, 22 bp, Artificial Sequence
  chemically synthesized
ctgacacccaagcaaactgcct

SEQ ID NO: 25332 - DNA, 22 bp, Artificial Sequence
  chemically synthesized
acacccaagcaaactgcctgaa

SEQ ID NO: 25333 - DNA, 22 bp, Artificial Sequence
  chemically synthesized
cctgaaggccaaagaatcaacc

SEQ ID NO: 25334 - DNA, 22 bp, Artificial Sequence
  chemically synthesized
aaggccaaagaatcaacccaac

SEQ ID NO: 25335 - DNA, 22 bp, Artificial Sequence
  chemically synthesized
gactcattaccatcagtgccaa

SEQ ID NO: 25336 - DNA, 22 bp, Artificial Sequence
  chemically synthesized
attaccatcagtgccaatgtac

SEQ ID NO: 25337 - DNA, 22 bp, Artificial Sequence
  chemically synthesized
ccatcagtgccaatgtacacag

SEQ ID NO: 25338 - DNA, 22 bp, Artificial Sequence
  chemically synthesized
ggcccaccaccaccactggggc

SEQ ID NO: 25339 - DNA, 22 bp, Artificial Sequence
  chemically synthesized
gggccaaggactggcccacttg

SEQ ID NO: 25340 - DNA, 22 bp, Artificial Sequence
  chemically synthesized
gcccacttgatattcttgtctc

SEQ ID NO: 25341 - DNA, 22 bp, Artificial Sequence
  chemically synthesized
gatattcttgtctccagcacaa

SEQ ID NO: 25342 - DNA, 22 bp, Artificial Sequence
  chemically synthesized
atattcttgtctccagcacaac

SEQ ID NO: 25343 - DNA, 22 bp, Artificial Sequence
  chemically synthesized
ttgtctccagcacaacctcatc

SEQ ID NO: 25344 - DNA, 22 bp, Artificial Sequence
  chemically synthesized
gtctccagcacaacctcatcac

SEQ ID NO: 25345 - DNA, 22 bp, Artificial Sequence
  chemically synthesized
tctccagcacaacctcatcacc

SEQ ID NO: 25346 - DNA, 22 bp, Artificial Sequence
  chemically synthesized
cagcacaacctcatcaccacct

SEQ ID NO: 25347 - DNA, 22 bp, Artificial Sequence
  chemically synthesized
atcaccaccttcactaacaaat

SEQ ID NO: 25348 - DNA, 22 bp, Artificial Sequence
  chemically synthesized
cactaacaaatgcaccctaagc

SEQ ID NO: 25349 - DNA, 22 bp, Artificial Sequence
  chemically synthesized
actaacaaatgcaccctaagcc

SEQ ID NO: 25350 - DNA, 22 bp, Artificial Sequence
  chemically synthesized
acaaatgcaccctaagccactg

SEQ ID NO: 25351 - DNA, 22 bp, Artificial Sequence
  chemically synthesized
agccactgaaaaaatcacagac

SEQ ID NO: 25352 - DNA, 22 bp, Artificial Sequence
  chemically synthesized
aaaaaatcacagacactgatga

SEQ ID NO: 25353 - DNA, 22 bp, Artificial Sequence
  chemically synthesized
atgatactgttggcagctgaaa

SEQ ID NO: 25354 - DNA, 22 bp, Artificial Sequence
  chemically synthesized
ttggcagctgaaaaaaaataat

SEQ ID NO: 25355 - DNA, 22 bp, Artificial Sequence
  chemically synthesized
gcagctgaaaaaaaataatatg

SEQ ID NO: 25356 - DNA, 22 bp, Artificial Sequence
  chemically synthesized
aaaaaaaataatatgaagacta

SEQ ID NO: 25357 - DNA, 22 bp, Artificial Sequence
  chemically synthesized
tgctgctgtatgcacctagaaa

SEQ ID NO: 25358 - DNA, 22 bp, Artificial Sequence
  chemically synthesized
ctgtatgcacctagaaatcaaa

SEQ ID NO: 25359 - DNA, 22 bp, Artificial Sequence
  chemically synthesized
tatgcacctagaaatcaaaatc

SEQ ID NO: 25360 - DNA, 22 bp, Artificial Sequence
  chemically synthesized
gaaatcaaaatcaaagtgccct

SEQ ID NO: 25361 - DNA, 22 bp, Artificial Sequence
  chemically synthesized
ctcaatcaacaccaagatacat

SEQ ID NO: 25362 - DNA, 22 bp, Artificial Sequence
  chemically synthesized
aatcaacaccaagatacatctt

SEQ ID NO: 25363 - DNA, 22 bp, Artificial Sequence
  chemically synthesized
cagaaaaaagtcttcccctaca

SEQ ID NO: 25364 - DNA, 22 bp, Artificial Sequence
  chemically synthesized
agaaaaaagtcttcccctacaa

SEQ ID NO: 25365 - DNA, 22 bp, Artificial Sequence
  chemically synthesized
cccctacaaaaacaaatttaca

SEQ ID NO: 25366 - DNA, 22 bp, Artificial Sequence
  chemically synthesized
ccctacaaaaacaaatttacaa

SEQ ID NO: 25367 - DNA, 22 bp, Artificial Sequence
  chemically synthesized
caaaaacaaatttacaaaactg

SEQ ID NO: 25368 - DNA, 22 bp, Artificial Sequence
  chemically synthesized
acaaaactggaagcagcaatca

SEQ ID NO: 25369 - DNA, 22 bp, Artificial Sequence
  chemically synthesized
caaaactggaagcagcaatcat

SEQ ID NO: 25370 - DNA, 22 bp, Artificial Sequence
  chemically synthesized
gaagcagcaatcattacaccag

SEQ ID NO: 25371 - DNA, 22 bp, Artificial Sequence
  chemically synthesized
caccagatgcagagatatcaat

SEQ ID NO: 25372 - DNA, 22 bp, Artificial Sequence
  chemically synthesized
ccaaaggaatttaataattctt

SEQ ID NO: 25373 - DNA, 22 bp, Artificial Sequence
  chemically synthesized
caaaggaatttaataattcttc

SEQ ID NO: 25374 - DNA, 22 bp, Artificial Sequence
  chemically synthesized
aataattcttcagcaacataag

SEQ ID NO: 25375 - DNA, 22 bp, Artificial Sequence
  chemically synthesized
ataattcttcagcaacataagc

SEQ ID NO: 25376 - DNA, 22 bp, Artificial Sequence
  chemically synthesized
ttcagcaacataagccagtgga

SEQ ID NO: 25377 - DNA, 22 bp, Artificial Sequence
  chemically synthesized
cagcaacataagccagtggaaa

SEQ ID NO: 25378 - DNA, 22 bp, Artificial Sequence
  chemically synthesized
agcaacataagccagtggaaaa

SEQ ID NO: 25379 - DNA, 22 bp, Artificial Sequence
  chemically synthesized
ataaaattctggaaaaaagaat

SEQ ID NO: 25380 - DNA, 22 bp, Artificial Sequence
  chemically synthesized
taaaattctggaaaaaagaatc

SEQ ID NO: 25381 - DNA, 22 bp, Artificial Sequence
  chemically synthesized
tggaaaaaagaatccaaaatgt

SEQ ID NO: 25382 - DNA, 22 bp, Artificial Sequence
  chemically synthesized
gaaaaaagaatccaaaatgttg

SEQ ID NO: 25383 - DNA, 22 bp, Artificial Sequence
  chemically synthesized
atattaaggaagctcagtgaga

SEQ ID NO: 25384 - DNA, 22 bp, Artificial Sequence
  chemically synthesized
aggaagctcagtgagacacaag

SEQ ID NO: 25385 - DNA, 22 bp, Artificial Sequence
  chemically synthesized
agtgagacacaagagaactcag

SEQ ID NO: 25386 - DNA, 22 bp, Artificial Sequence
  chemically synthesized
agataaacaataaaaagaaatc

SEQ ID NO: 25387 - DNA, 22 bp, Artificial Sequence
  chemically synthesized
aggatatgaatgagaaatttac

SEQ ID NO: 25388 - DNA, 22 bp, Artificial Sequence
  chemically synthesized
acccaagagatagatacaacaa

SEQ ID NO: 25389 - DNA, 22 bp, Artificial Sequence
  chemically synthesized
cccaagagatagatacaacaag

SEQ ID NO: 25390 - DNA, 22 bp, Artificial Sequence
  chemically synthesized
tgtaactgaagagtttattgaa

SEQ ID NO: 25391 - DNA, 22 bp, Artificial Sequence
  chemically synthesized
taactgaagagtttattgaaag

SEQ ID NO: 25392 - DNA, 22 bp, Artificial Sequence
  chemically synthesized
aagagtttattgaaagaaatac

SEQ ID NO: 25393 - DNA, 22 bp, Artificial Sequence
  chemically synthesized
attgaaagaaatacaaaataca

SEQ ID NO: 25394 - DNA, 22 bp, Artificial Sequence
  chemically synthesized
ttgaaagaaatacaaaatacat

SEQ ID NO: 25395 - DNA, 22 bp, Artificial Sequence
  chemically synthesized
aaagaaatacaaaatacattca

SEQ ID NO: 25396 - DNA, 22 bp, Artificial Sequence
  chemically synthesized
aaaaacttcaacaatagatcag

SEQ ID NO: 25397 - DNA, 22 bp, Artificial Sequence
  chemically synthesized
caacaatagatcagatcaagca

SEQ ID NO: 25398 - DNA, 22 bp, Artificial Sequence
  chemically synthesized
aacaatagatcagatcaagcag

SEQ ID NO: 25399 - DNA, 22 bp, Artificial Sequence
  chemically synthesized
cagaacttgaagacaggtcttt

SEQ ID NO: 25400 - DNA, 22 bp, Artificial Sequence
  chemically synthesized
agaacttgaagacaggtctttt

SEQ ID NO: 25401 - DNA, 22 bp, Artificial Sequence
  chemically synthesized
gaagacaggtcttttaaaatta

SEQ ID NO: 25402 - DNA, 22 bp, Artificial Sequence
  chemically synthesized
aagacaggtcttttaaaattag

SEQ ID NO: 25403 - DNA, 22 bp, Artificial Sequence
  chemically synthesized
ttaaaattagctggtcaaatga

SEQ ID NO: 25404 - DNA, 22 bp, Artificial Sequence
  chemically synthesized
taaaattagctggtcaaatgat

SEQ ID NO: 25405 - DNA, 22 bp, Artificial Sequence
  chemically synthesized
aaaattagctggtcaaatgata

SEQ ID NO: 25406 - DNA, 22 bp, Artificial Sequence
  chemically synthesized
aaattagctggtcaaatgatag

SEQ ID NO: 25407 - DNA, 22 bp, Artificial Sequence
  chemically synthesized
gctggtcaaatgatagaaagga

SEQ ID NO: 25408 - DNA, 22 bp, Artificial Sequence
  chemically synthesized
gtcaaatgatagaaaggaaaaa

SEQ ID NO: 25409 - DNA, 22 bp, Artificial Sequence
  chemically synthesized
taaagtgaacaaatattcaaat

SEQ ID NO: 25410 - DNA, 22 bp, Artificial Sequence
  chemically synthesized
aaatttgcagtttcccagaagg

SEQ ID NO: 25411 - DNA, 22 bp, Artificial Sequence
  chemically synthesized
gcagtttcccagaaggtaaaga

SEQ ID NO: 25412 - DNA, 22 bp, Artificial Sequence
  chemically synthesized
cagtttcccagaaggtaaagag

SEQ ID NO: 25413 - DNA, 22 bp, Artificial Sequence
  chemically synthesized
cccagaaggtaaagagaacatg

SEQ ID NO: 25414 - DNA, 22 bp, Artificial Sequence
  chemically synthesized
ccagaaggtaaagagaacatga

SEQ ID NO: 25415 - DNA, 22 bp, Artificial Sequence
  chemically synthesized
cgtaacaacacaatagctgaaa

SEQ ID NO: 25416 - DNA, 22 bp, Artificial Sequence
  chemically synthesized
aaaacttgtcaagtctagcaag

SEQ ID NO: 25417 - DNA, 22 bp, Artificial Sequence
  chemically synthesized
gtcaagtctagcaagaaatgta

SEQ ID NO: 25418 - DNA, 22 bp, Artificial Sequence
  chemically synthesized
tcaagtctagcaagaaatgtag

SEQ ID NO: 25419 - DNA, 22 bp, Artificial Sequence
  chemically synthesized
gcaagaaatgtagacatccaga

SEQ ID NO: 25420 - DNA, 22 bp, Artificial Sequence
  chemically synthesized
ccaaataatataatgcaaaaag

SEQ ID NO: 25421 - DNA, 22 bp, Artificial Sequence
  chemically synthesized
ttctccacagcacattatagtc

SEQ ID NO: 25422 - DNA, 22 bp, Artificial Sequence
  chemically synthesized
ctccacagcacattatagtcaa

SEQ ID NO: 25423 - DNA, 22 bp, Artificial Sequence
  chemically synthesized
tccacagcacattatagtcaaa

SEQ ID NO: 25424 - DNA, 22 bp, Artificial Sequence
  chemically synthesized
cacagcacattatagtcaaact

SEQ ID NO: 25425 - DNA, 22 bp, Artificial Sequence
  chemically synthesized
tagtcaaactgtcaaaagccaa

SEQ ID NO: 25426 - DNA, 22 bp, Artificial Sequence
  chemically synthesized
tcaaaagccaaagagtaagaac

SEQ ID NO: 25427 - DNA, 22 bp, Artificial Sequence
  chemically synthesized
taaaacagcaagcaaaatgtct

SEQ ID NO: 25428 - DNA, 22 bp, Artificial Sequence
  chemically synthesized
aaacagcaagcaaaatgtctag

SEQ ID NO: 25429 - DNA, 22 bp, Artificial Sequence
  chemically synthesized
gtcacttataagggaacttcca

SEQ ID NO: 25430 - DNA, 22 bp, Artificial Sequence
  chemically synthesized
ataagggaacttccacaagatt

SEQ ID NO: 25431 - DNA, 22 bp, Artificial Sequence
  chemically synthesized
taagggaacttccacaagatta

SEQ ID NO: 25432 - DNA, 22 bp, Artificial Sequence
  chemically synthesized
ccacaagattaacagattaaca

SEQ ID NO: 25433 - DNA, 22 bp, Artificial Sequence
  chemically synthesized
cacaagattaacagattaacag

SEQ ID NO: 25434 - DNA, 22 bp, Artificial Sequence
  chemically synthesized
acagattaacagcagatttctc

SEQ ID NO: 25435 - DNA, 22 bp, Artificial Sequence
  chemically synthesized
acagcagatttctcagcagaaa

SEQ ID NO: 25436 - DNA, 22 bp, Artificial Sequence
  chemically synthesized
ctcagcagaaacctcacaggcc

SEQ ID NO: 25437 - DNA, 22 bp, Artificial Sequence
  chemically synthesized
tcagcagaaacctcacaggcca

SEQ ID NO: 25438 - DNA, 22 bp, Artificial Sequence
  chemically synthesized
agcagaaacctcacaggccagg

SEQ ID NO: 25439 - DNA, 22 bp, Artificial Sequence
  chemically synthesized
acaggccaggagaagatgggat

SEQ ID NO: 25440 - DNA, 22 bp, Artificial Sequence
  chemically synthesized
aaaatagtgaaagaaaaaaatg

SEQ ID NO: 25441 - DNA, 22 bp, Artificial Sequence
  chemically synthesized
tacccagcaacattgttcttca

SEQ ID NO: 25442 - DNA, 22 bp, Artificial Sequence
  chemically synthesized
ttcttcaaaaatgaaggataaa

SEQ ID NO: 25443 - DNA, 22 bp, Artificial Sequence
  chemically synthesized
ttcaaaaatgaaggataaataa

SEQ ID NO: 25444 - DNA, 22 bp, Artificial Sequence
  chemically synthesized
caaaaatgaaggataaataaaa

SEQ ID NO: 25445 - DNA, 22 bp, Artificial Sequence
  chemically synthesized
aaaaatgaaggataaataaaat

SEQ ID NO: 25446 - DNA, 22 bp, Artificial Sequence
  chemically synthesized
ttctgggcaagaaaaatttgaa

SEQ ID NO: 25447 - DNA, 22 bp, Artificial Sequence
  chemically synthesized
tctgggcaagaaaaatttgaag

SEQ ID NO: 25448 - DNA, 22 bp, Artificial Sequence
  chemically synthesized
ctgggcaagaaaaatttgaagg

SEQ ID NO: 25449 - DNA, 22 bp, Artificial Sequence
  chemically synthesized
tgggcaagaaaaatttgaagga

SEQ ID NO: 25450 - DNA, 22 bp, Artificial Sequence
  chemically synthesized
ggcaagaaaaatttgaaggaat

SEQ ID NO: 25451 - DNA, 22 bp, Artificial Sequence
  chemically synthesized
gaaggaattcactatcactaga

SEQ ID NO: 25452 - DNA, 22 bp, Artificial Sequence
  chemically synthesized
aaggaattcactatcactagac

SEQ ID NO: 25453 - DNA, 22 bp, Artificial Sequence
  chemically synthesized
actatcactagactggctttac

SEQ ID NO: 25454 - DNA, 22 bp, Artificial Sequence
  chemically synthesized
tcactagactggctttacaaga

SEQ ID NO: 25455 - DNA, 22 bp, Artificial Sequence
  chemically synthesized
gactggctttacaagaaatatt

SEQ ID NO: 25456 - DNA, 22 bp, Artificial Sequence
  chemically synthesized
gctttacaagaaatatttaagg

SEQ ID NO: 25457 - DNA, 22 bp, Artificial Sequence
  chemically synthesized
tacaagaaatatttaagggagt

SEQ ID NO: 25458 - DNA, 22 bp, Artificial Sequence
  chemically synthesized
acaagaaatatttaagggagtc

SEQ ID NO: 25459 - DNA, 22 bp, Artificial Sequence
  chemically synthesized
caagaaatatttaagggagtcc

SEQ ID NO: 25460 - DNA, 22 bp, Artificial Sequence
  chemically synthesized
aagggagtcctacacatgaaag

SEQ ID NO: 25461 - DNA, 22 bp, Artificial Sequence
  chemically synthesized
agggagtcctacacatgaaagt

SEQ ID NO: 25462 - DNA, 22 bp, Artificial Sequence
  chemically synthesized
cacatgaaagtgacaggacact

SEQ ID NO: 25463 - DNA, 22 bp, Artificial Sequence
  chemically synthesized
ccattatgaagacacacaaagg

SEQ ID NO: 25464 - DNA, 22 bp, Artificial Sequence
  chemically synthesized
tgaagacacacaaaggtataca

SEQ ID NO: 25465 - DNA, 22 bp, Artificial Sequence
  chemically synthesized
actggtagagcaaaacacaaat

SEQ ID NO: 25466 - DNA, 22 bp, Artificial Sequence
  chemically synthesized
gtagagcaaaacacaaataaag

SEQ ID NO: 25467 - DNA, 22 bp, Artificial Sequence
  chemically synthesized
aaacgttaccactacagaaaat

SEQ ID NO: 25468 - DNA, 22 bp, Artificial Sequence
  chemically synthesized
ccactacagaaaatcaccaaac

SEQ ID NO: 25469 - DNA, 22 bp, Artificial Sequence
  chemically synthesized
cagaaaatcaccaaaccacaat

SEQ ID NO: 25470 - DNA, 22 bp, Artificial Sequence
  chemically synthesized
aaaaaaaaacaaaacaaccagg

SEQ ID NO: 25471 - DNA, 22 bp, Artificial Sequence
  chemically synthesized
acaaaatggcaggaataagctc

SEQ ID NO: 25472 - DNA, 22 bp, Artificial Sequence
  chemically synthesized
tcacatgtcaataatagccttg

SEQ ID NO: 25473 - DNA, 22 bp, Artificial Sequence
  chemically synthesized
acatgtcaataatagccttgca

SEQ ID NO: 25474 - DNA, 22 bp, Artificial Sequence
  chemically synthesized
gcatgtaaatggattaaattgt

SEQ ID NO: 25475 - DNA, 22 bp, Artificial Sequence
  chemically synthesized
catgtaaatggattaaattgtt

SEQ ID NO: 25476 - DNA, 22 bp, Artificial Sequence
  chemically synthesized
aattgttacttgaaagatatag

SEQ ID NO: 25477 - DNA, 22 bp, Artificial Sequence
  chemically synthesized
ttacttgaaagatatagactgg

SEQ ID NO: 25478 - DNA, 22 bp, Artificial Sequence
  chemically synthesized
cttgaaagatatagactggcta

SEQ ID NO: 25479 - DNA, 22 bp, Artificial Sequence
  chemically synthesized
gaaagatatagactggctaaat

SEQ ID NO: 25480 - DNA, 22 bp, Artificial Sequence
  chemically synthesized
aaagatatagactggctaaata

SEQ ID NO: 25481 - DNA, 22 bp, Artificial Sequence
  chemically synthesized
gctaaatagatttaaaacaaaa

SEQ ID NO: 25482 - DNA, 22 bp, Artificial Sequence
  chemically synthesized
aatagatttaaaacaaaaatat

SEQ ID NO: 25483 - DNA, 22 bp, Artificial Sequence
  chemically synthesized
aaaacaaaaatatgacccagtt

SEQ ID NO: 25484 - DNA, 22 bp, Artificial Sequence
  chemically synthesized
aaacaaaaatatgacccagttg

SEQ ID NO: 25485 - DNA, 22 bp, Artificial Sequence
  chemically synthesized
taagctgcctataagaaactta

SEQ ID NO: 25486 - DNA, 22 bp, Artificial Sequence
  chemically synthesized
cctataagaaacttatctcact

SEQ ID NO: 25487 - DNA, 22 bp, Artificial Sequence
  chemically synthesized
taagaaacttatctcacttgta

SEQ ID NO: 25488 - DNA, 22 bp, Artificial Sequence
  chemically synthesized
atctcacttgtaaagataaata

SEQ ID NO: 25489 - DNA, 22 bp, Artificial Sequence
  chemically synthesized
tctcacttgtaaagataaatat

SEQ ID NO: 25490 - DNA, 22 bp, Artificial Sequence
  chemically synthesized
acttgtaaagataaatatagac

SEQ ID NO: 25491 - DNA, 22 bp, Artificial Sequence
  chemically synthesized
gtaaagataaatatagactgaa

SEQ ID NO: 25492 - DNA, 22 bp, Artificial Sequence
  chemically synthesized
taaagataaatatagactgaaa

SEQ ID NO: 25493 - DNA, 22 bp, Artificial Sequence
  chemically synthesized
aaagtaaaaagatgaaagatct

SEQ ID NO: 25494 - DNA, 22 bp, Artificial Sequence
  chemically synthesized
ccatacaaagagaaaccaaaaa

SEQ ID NO: 25495 - DNA, 22 bp, Artificial Sequence
  chemically synthesized
catacaaagagaaaccaaaaat

SEQ ID NO: 25496 - DNA, 22 bp, Artificial Sequence
  chemically synthesized
tacctataacagataaaattga

SEQ ID NO: 25497 - DNA, 22 bp, Artificial Sequence
  chemically synthesized
taacagataaaattgactttaa

SEQ ID NO: 25498 - DNA, 22 bp, Artificial Sequence
  chemically synthesized
actttaaataaaaaacactaag

SEQ ID NO: 25499 - DNA, 22 bp, Artificial Sequence
  chemically synthesized
taaataaaaaacactaagagac

SEQ ID NO: 25500 - DNA, 22 bp, Artificial Sequence
  chemically synthesized
aaataaaaaacactaagagaca

SEQ ID NO: 25501 - DNA, 22 bp, Artificial Sequence
  chemically synthesized
aataaaaaacactaagagacaa

SEQ ID NO: 25502 - DNA, 22 bp, Artificial Sequence
  chemically synthesized
agagacaaaagtcattacataa

SEQ ID NO: 25503 - DNA, 22 bp, Artificial Sequence
  chemically synthesized
cataatgataaaaggaacaatt

SEQ ID NO: 25504 - DNA, 22 bp, Artificial Sequence
  chemically synthesized
agcaagagtatataacaattct

SEQ ID NO: 25505 - DNA, 22 bp, Artificial Sequence
  chemically synthesized
taaacattcacactcaacacca

SEQ ID NO: 25506 - DNA, 22 bp, Artificial Sequence
  chemically synthesized
aacattcacactcaacaccaga

SEQ ID NO: 25507 - DNA, 22 bp, Artificial Sequence
  chemically synthesized
acactcaacaccagagcatcca

SEQ ID NO: 25508 - DNA, 22 bp, Artificial Sequence
  chemically synthesized
aacaccagagcatccagatatg

SEQ ID NO: 25509 - DNA, 22 bp, Artificial Sequence
  chemically synthesized
ttagatataaagggtgaaatag

SEQ ID NO: 25510 - DNA, 22 bp, Artificial Sequence
  chemically synthesized
gatataaagggtgaaatagaat

SEQ ID NO: 25511 - DNA, 22 bp, Artificial Sequence
  chemically synthesized
gggatttcaacattctaatctc

SEQ ID NO: 25512 - DNA, 22 bp, Artificial Sequence
  chemically synthesized
caacattctaatctcagcatca

SEQ ID NO: 25513 - DNA, 22 bp, Artificial Sequence
  chemically synthesized
aacattctaatctcagcatcag

SEQ ID NO: 25514 - DNA, 22 bp, Artificial Sequence
  chemically synthesized
taatctcagcatcagatagatc

SEQ ID NO: 25515 - DNA, 22 bp, Artificial Sequence
  chemically synthesized
atctcagcatcagatagatcat

SEQ ID NO: 25516 - DNA, 22 bp, Artificial Sequence
  chemically synthesized
agcatcagatagatcatctaga

SEQ ID NO: 25517 - DNA, 22 bp, Artificial Sequence
  chemically synthesized
gacagaaaattaacaaagaaac

SEQ ID NO: 25518 - DNA, 22 bp, Artificial Sequence
  chemically synthesized
acaaagaaacattggatttaaa

SEQ ID NO: 25519 - DNA, 22 bp, Artificial Sequence
  chemically synthesized
gatttaaacttgactttagacc

SEQ ID NO: 25520 - DNA, 22 bp, Artificial Sequence
  chemically synthesized
aaacttgactttagaccaaatg

SEQ ID NO: 25521 - DNA, 22 bp, Artificial Sequence
  chemically synthesized
aacttgactttagaccaaatgg

SEQ ID NO: 25522 - DNA, 22 bp, Artificial Sequence
  chemically synthesized
gactttagaccaaatggatcta

SEQ ID NO: 25523 - DNA, 22 bp, Artificial Sequence
  chemically synthesized
actttagaccaaatggatctaa

SEQ ID NO: 25524 - DNA, 22 bp, Artificial Sequence
  chemically synthesized
tagaccaaatggatctaacatt

SEQ ID NO: 25525 - DNA, 22 bp, Artificial Sequence
  chemically synthesized
agaccaaatggatctaacattt

SEQ ID NO: 25526 - DNA, 22 bp, Artificial Sequence
  chemically synthesized
gaccaaatggatctaacattta

SEQ ID NO: 25527 - DNA, 22 bp, Artificial Sequence
  chemically synthesized
acatttacacaatatttcatcc

SEQ ID NO: 25528 - DNA, 22 bp, Artificial Sequence
  chemically synthesized
acacaatatttcatccaacagc

SEQ ID NO: 25529 - DNA, 22 bp, Artificial Sequence
  chemically synthesized
cacaatatttcatccaacagct

SEQ ID NO: 25530 - DNA, 22 bp, Artificial Sequence
  chemically synthesized
catccaacagctacagaatata

SEQ ID NO: 25531 - DNA, 22 bp, Artificial Sequence
  chemically synthesized
atccaacagctacagaatatat

SEQ ID NO: 25532 - DNA, 22 bp, Artificial Sequence
  chemically synthesized
cagaatatatttatctcatcag

SEQ ID NO: 25533 - DNA, 22 bp, Artificial Sequence
  chemically synthesized
atctcatcagcacatgacgcat

SEQ ID NO: 25534 - DNA, 22 bp, Artificial Sequence
  chemically synthesized
tctcatcagcacatgacgcatt

SEQ ID NO: 25535 - DNA, 22 bp, Artificial Sequence
  chemically synthesized
atcagcacatgacgcattcccc

SEQ ID NO: 25536 - DNA, 22 bp, Artificial Sequence
  chemically synthesized
cccaggatacaccatatgttag

SEQ ID NO: 25537 - DNA, 22 bp, Artificial Sequence
  chemically synthesized
gaacacaaaagaagtctcaact

SEQ ID NO: 25538 - DNA, 22 bp, Artificial Sequence
  chemically synthesized
aactaatttgaaatatttgaaa

SEQ ID NO: 25539 - DNA, 22 bp, Artificial Sequence
  chemically synthesized
atttgaaatatttgaaatcata

SEQ ID NO: 25540 - DNA, 22 bp, Artificial Sequence
  chemically synthesized
gaaatatttgaaatcatattaa

SEQ ID NO: 25541 - DNA, 22 bp, Artificial Sequence
  chemically synthesized
aaatatttgaaatcatattaag

SEQ ID NO: 25542 - DNA, 22 bp, Artificial Sequence
  chemically synthesized
gaaatcatattaagcatcttct

SEQ ID NO: 25543 - DNA, 22 bp, Artificial Sequence
  chemically synthesized
aaatcatattaagcatcttctc

SEQ ID NO: 25544 - DNA, 22 bp, Artificial Sequence
  chemically synthesized
agcatcttctcagaccacaatg

SEQ ID NO: 25545 - DNA, 22 bp, Artificial Sequence
  chemically synthesized
ctcagaccacaatggaataaaa

SEQ ID NO: 25546 - DNA, 22 bp, Artificial Sequence
  chemically synthesized
tcagaccacaatggaataaaac

SEQ ID NO: 25547 - DNA, 22 bp, Artificial Sequence
  chemically synthesized
agaccacaatggaataaaacta

SEQ ID NO: 25548 - DNA, 22 bp, Artificial Sequence
  chemically synthesized
gaaatcaataacaagaaaaact

SEQ ID NO: 25549 - DNA, 22 bp, Artificial Sequence
  chemically synthesized
taaaacctatacaaatacatgg

SEQ ID NO: 25550 - DNA, 22 bp, Artificial Sequence
  chemically synthesized
aaaacctatacaaatacatgga

SEQ ID NO: 25551 - DNA, 22 bp, Artificial Sequence
  chemically synthesized
aaacctatacaaatacatggaa

SEQ ID NO: 25552 - DNA, 22 bp, Artificial Sequence
  chemically synthesized
tacaaatacatggaaattaaac

SEQ ID NO: 25553 - DNA, 22 bp, Artificial Sequence
  chemically synthesized
aacaacatgctcctgaatgaac

SEQ ID NO: 25554 - DNA, 22 bp, Artificial Sequence
  chemically synthesized
ctgaatgaacgttatgtcaaga

SEQ ID NO: 25555 - DNA, 22 bp, Artificial Sequence
  chemically synthesized
aatgaacgttatgtcaagaaga

SEQ ID NO: 25556 - DNA, 22 bp, Artificial Sequence
  chemically synthesized
tgtcaagaagaaaattaagaag

SEQ ID NO: 25557 - DNA, 22 bp, Artificial Sequence
  chemically synthesized
agaaggaaatcaaaaatttttt

SEQ ID NO: 25558 - DNA, 22 bp, Artificial Sequence
  chemically synthesized
tttgaaacaaatgaaaattgaa

SEQ ID NO: 25559 - DNA, 22 bp, Artificial Sequence
  chemically synthesized
ttgaaacaaatgaaaattgaaa

SEQ ID NO: 25560 - DNA, 22 bp, Artificial Sequence
  chemically synthesized
tgaaacaaatgaaaattgaaat

SEQ ID NO: 25561 - DNA, 22 bp, Artificial Sequence
  chemically synthesized
gaaacaaatgaaaattgaaata

SEQ ID NO: 25562 - DNA, 22 bp, Artificial Sequence
  chemically synthesized
aaacaaatgaaaattgaaatac

SEQ ID NO: 25563 - DNA, 22 bp, Artificial Sequence
  chemically synthesized
aaatacaacataggaaaagcca

SEQ ID NO: 25564 - DNA, 22 bp, Artificial Sequence
  chemically synthesized
agagagaagcttatcaataaac

SEQ ID NO: 25565 - DNA, 22 bp, Artificial Sequence
  chemically synthesized
atcaataaacacttaaattaaa

SEQ ID NO: 25566 - DNA, 22 bp, Artificial Sequence
  chemically synthesized
tcaataaacacttaaattaaaa

SEQ ID NO: 25567 - DNA, 22 bp, Artificial Sequence
  chemically synthesized
aaattaaaaacatagaaagatt

SEQ ID NO: 25568 - DNA, 22 bp, Artificial Sequence
  chemically synthesized
aattaaaaacatagaaagattt

SEQ ID NO: 25569 - DNA, 22 bp, Artificial Sequence
  chemically synthesized
aaaacatagaaagatttcaaat

SEQ ID NO: 25570 - DNA, 22 bp, Artificial Sequence
  chemically synthesized
caaatatataatctaatcatgt

SEQ ID NO: 25571 - DNA, 22 bp, Artificial Sequence
  chemically synthesized
aaatatataatctaatcatgta

SEQ ID NO: 25572 - DNA, 22 bp, Artificial Sequence
  chemically synthesized
atcatgtacctcaacaagctag

SEQ ID NO: 25573 - DNA, 22 bp, Artificial Sequence
  chemically synthesized
aacaagctagaaaagcaagaac

SEQ ID NO: 25574 - DNA, 22 bp, Artificial Sequence
  chemically synthesized
gaaaagcaagaacaaaacccaa

SEQ ID NO: 25575 - DNA, 22 bp, Artificial Sequence
  chemically synthesized
gcagaaggaaagaaaaaatgaa

SEQ ID NO: 25576 - DNA, 22 bp, Artificial Sequence
  chemically synthesized
aatgaaatagagaaaaacaaca

SEQ ID NO: 25577 - DNA, 22 bp, Artificial Sequence
  chemically synthesized
atgaaatagagaaaaacaacaa

SEQ ID NO: 25578 - DNA, 22 bp, Artificial Sequence
  chemically synthesized
gcaaaatgaaaagttgttattt

SEQ ID NO: 25579 - DNA, 22 bp, Artificial Sequence
  chemically synthesized
ttatttaaaaaagataaaatgg

SEQ ID NO: 25580 - DNA, 22 bp, Artificial Sequence
  chemically synthesized
tttaaaaaagataaaatggata

SEQ ID NO: 25581 - DNA, 22 bp, Artificial Sequence
  chemically synthesized
aaaaaagataaaatggatatag

SEQ ID NO: 25582 - DNA, 22 bp, Artificial Sequence
  chemically synthesized
aaaaagataaaatggatatagc

SEQ ID NO: 25583 - DNA, 22 bp, Artificial Sequence
  chemically synthesized
tagctagactaaccaagaaaaa

SEQ ID NO: 25584 - DNA, 22 bp, Artificial Sequence
  chemically synthesized
gctagactaaccaagaaaaaga

SEQ ID NO: 25585 - DNA, 22 bp, Artificial Sequence
  chemically synthesized
gactaaccaagaaaaagagaag

SEQ ID NO: 25586 - DNA, 22 bp, Artificial Sequence
  chemically synthesized
accaagaaaaagagaagagact

SEQ ID NO: 25587 - DNA, 22 bp, Artificial Sequence
  chemically synthesized
aaataaagaaaatcagaaataa

SEQ ID NO: 25588 - DNA, 22 bp, Artificial Sequence
  chemically synthesized
caaccgataccacagaaataga

SEQ ID NO: 25589 - DNA, 22 bp, Artificial Sequence
  chemically synthesized
tcagagactattatgaacaacc

SEQ ID NO: 25590 - DNA, 22 bp, Artificial Sequence
  chemically synthesized
ttatgaacaaccatacactaaa

SEQ ID NO: 25591 - DNA, 22 bp, Artificial Sequence
  chemically synthesized
tgaacaaccatacactaaaaaa

SEQ ID NO: 25592 - DNA, 22 bp, Artificial Sequence
  chemically synthesized
aaaaactgaaaaatctagagga

SEQ ID NO: 25593 - DNA, 22 bp, Artificial Sequence
  chemically synthesized
aaaaatctagaggaaattaata

SEQ ID NO: 25594 - DNA, 22 bp, Artificial Sequence
  chemically synthesized
gaggaaattaataaatttctgg

SEQ ID NO: 25595 - DNA, 22 bp, Artificial Sequence
  chemically synthesized
ataaatttctggacacatacca

SEQ ID NO: 25596 - DNA, 22 bp, Artificial Sequence
  chemically synthesized
ctggacacataccacctaccaa

SEQ ID NO: 25597 - DNA, 22 bp, Artificial Sequence
  chemically synthesized
tggacacataccacctaccaag

SEQ ID NO: 25598 - DNA, 22 bp, Artificial Sequence
  chemically synthesized
gacacataccacctaccaagat

SEQ ID NO: 25599 - DNA, 22 bp, Artificial Sequence
  chemically synthesized
ccaagattgaattaagaaagaa

SEQ ID NO: 25600 - DNA, 22 bp, Artificial Sequence
  chemically synthesized
aattaagaaagaatagaaaacc

SEQ ID NO: 25601 - DNA, 22 bp, Artificial Sequence
  chemically synthesized
agaaagaatagaaaacctgaac

SEQ ID NO: 25602 - DNA, 22 bp, Artificial Sequence
  chemically synthesized
aacagaccagtaatgaataatg

SEQ ID NO: 25603 - DNA, 22 bp, Artificial Sequence
  chemically synthesized
aatcagtagtaaaaagtctccc

SEQ ID NO: 25604 - DNA, 22 bp, Artificial Sequence
  chemically synthesized
ccaaaaaagaaaatttcaagac

SEQ ID NO: 25605 - DNA, 22 bp, Artificial Sequence
  chemically synthesized
caagaccagatggctttactgt

SEQ ID NO: 25606 - DNA, 22 bp, Artificial Sequence
  chemically synthesized
aagaccagatggctttactgtc

SEQ ID NO: 25607 - DNA, 22 bp, Artificial Sequence
  chemically synthesized
tactgtcaaattttaccaaact

SEQ ID NO: 25608 - DNA, 22 bp, Artificial Sequence
  chemically synthesized
actgtcaaattttaccaaactt

SEQ ID NO: 25609 - DNA, 22 bp, Artificial Sequence
  chemically synthesized
ctgtcaaattttaccaaacttt

SEQ ID NO: 25610 - DNA, 22 bp, Artificial Sequence
  chemically synthesized
tcaaattttaccaaactttcaa

SEQ ID NO: 25611 - DNA, 22 bp, Artificial Sequence
  chemically synthesized
taccaaactttcaaagaaaact

SEQ ID NO: 25612 - DNA, 22 bp, Artificial Sequence
  chemically synthesized
accaaactttcaaagaaaacta

SEQ ID NO: 25613 - DNA, 22 bp, Artificial Sequence
  chemically synthesized
ccaaactttcaaagaaaactaa

SEQ ID NO: 25614 - DNA, 22 bp, Artificial Sequence
  chemically synthesized
tcaaagaaaactaacaagtctc

SEQ ID NO: 25615 - DNA, 22 bp, Artificial Sequence
  chemically synthesized
caaagaaaactaacaagtctcc

SEQ ID NO: 25616 - DNA, 22 bp, Artificial Sequence
  chemically synthesized
aaagaaaactaacaagtctcct

SEQ ID NO: 25617 - DNA, 22 bp, Artificial Sequence
  chemically synthesized
acaagtctccttaaattctttt

SEQ ID NO: 25618 - DNA, 22 bp, Artificial Sequence
  chemically synthesized
cttaaattcttttaaaaattaa

SEQ ID NO: 25619 - DNA, 22 bp, Artificial Sequence
  chemically synthesized
aaattcttttaaaaattaaaca

SEQ ID NO: 25620 - DNA, 22 bp, Artificial Sequence
  chemically synthesized
aattcttttaaaaattaaacag

SEQ ID NO: 25621 - DNA, 22 bp, Artificial Sequence
  chemically synthesized
ttttaaaaattaaacaggaagg

SEQ ID NO: 25622 - DNA, 22 bp, Artificial Sequence
  chemically synthesized
ttaaaaattaaacaggaaggaa

SEQ ID NO: 25623 - DNA, 22 bp, Artificial Sequence
  chemically synthesized
taaaaattaaacaggaaggaat

SEQ ID NO: 25624 - DNA, 22 bp, Artificial Sequence
  chemically synthesized
aaaaattaaacaggaaggaatt

SEQ ID NO: 25625 - DNA, 22 bp, Artificial Sequence
  chemically synthesized
aaaattaaacaggaaggaattc

SEQ ID NO: 25626 - DNA, 22 bp, Artificial Sequence
  chemically synthesized
aacaggaaggaattctccctaa

SEQ ID NO: 25627 - DNA, 22 bp, Artificial Sequence
  chemically synthesized
tccctaactcattctctgaggc

SEQ ID NO: 25628 - DNA, 22 bp, Artificial Sequence
  chemically synthesized
cctaactcattctctgaggcca

SEQ ID NO: 25629 - DNA, 22 bp, Artificial Sequence
  chemically synthesized
actcattctctgaggccagtat

SEQ ID NO: 25630 - DNA, 22 bp, Artificial Sequence
  chemically synthesized
attctctgaggccagtattatc

SEQ ID NO: 25631 - DNA, 22 bp, Artificial Sequence
  chemically synthesized
tctgaggccagtattatcctga

SEQ ID NO: 25632 - DNA, 22 bp, Artificial Sequence
  chemically synthesized
tgaggccagtattatcctgatt

SEQ ID NO: 25633 - DNA, 22 bp, Artificial Sequence
  chemically synthesized
aggccagtattatcctgattcc

SEQ ID NO: 25634 - DNA, 22 bp, Artificial Sequence
  chemically synthesized
tcctgattccataaccagacaa

SEQ ID NO: 25635 - DNA, 22 bp, Artificial Sequence
  chemically synthesized
attccataaccagacaaggatg

SEQ ID NO: 25636 - DNA, 22 bp, Artificial Sequence
  chemically synthesized
cataaccagacaaggatgcaag

SEQ ID NO: 25637 - DNA, 22 bp, Artificial Sequence
  chemically synthesized
caggtcaatatccctgatggaa

SEQ ID NO: 25638 - DNA, 22 bp, Artificial Sequence
  chemically synthesized
atggaacataggtgtgaaaatc

SEQ ID NO: 25639 - DNA, 22 bp, Artificial Sequence
  chemically synthesized
aacaaaatactagcaaactgaa

SEQ ID NO: 25640 - DNA, 22 bp, Artificial Sequence
  chemically synthesized
gcaaactgaatccaacagtaca

SEQ ID NO: 25641 - DNA, 22 bp, Artificial Sequence
  chemically synthesized
aatccaacagtacatccaaaag

SEQ ID NO: 25642 - DNA, 22 bp, Artificial Sequence
  chemically synthesized
atactagggttgcaagaacagt

SEQ ID NO: 25643 - DNA, 22 bp, Artificial Sequence
  chemically synthesized
tactagggttgcaagaacagtt

SEQ ID NO: 25644 - DNA, 22 bp, Artificial Sequence
  chemically synthesized
gggttgcaagaacagttcaaat

SEQ ID NO: 25645 - DNA, 22 bp, Artificial Sequence
  chemically synthesized
caagaacagttcaaatcaataa

SEQ ID NO: 25646 - DNA, 22 bp, Artificial Sequence
  chemically synthesized
aaatcaataaatgtgatacatc

SEQ ID NO: 25647 - DNA, 22 bp, Artificial Sequence
  chemically synthesized
aatagatacagaaaaagtattt

SEQ ID NO: 25648 - DNA, 22 bp, Artificial Sequence
  chemically synthesized
gataaaatttaacattccttca

SEQ ID NO: 25649 - DNA, 22 bp, Artificial Sequence
  chemically synthesized
ataaaatttaacattccttcat

SEQ ID NO: 25650 - DNA, 22 bp, Artificial Sequence
  chemically synthesized
aacattccttcatgataaaaac

SEQ ID NO: 25651 - DNA, 22 bp, Artificial Sequence
  chemically synthesized
acattccttcatgataaaaact

SEQ ID NO: 25652 - DNA, 22 bp, Artificial Sequence
  chemically synthesized
cttcatgataaaaactatctgc

SEQ ID NO: 25653 - DNA, 22 bp, Artificial Sequence
  chemically synthesized
catgataaaaactatctgcagc

SEQ ID NO: 25654 - DNA, 22 bp, Artificial Sequence
  chemically synthesized
atgataaaaactatctgcagcc

SEQ ID NO: 25655 - DNA, 22 bp, Artificial Sequence
  chemically synthesized
tctgcagccaatcatagaagga

SEQ ID NO: 25656 - DNA, 22 bp, Artificial Sequence
  chemically synthesized
cagccaatcatagaaggaacat

SEQ ID NO: 25657 - DNA, 22 bp, Artificial Sequence
  chemically synthesized
aatataataaaagtcatatatg

SEQ ID NO: 25658 - DNA, 22 bp, Artificial Sequence
  chemically synthesized
acatcatactgaattgggaaaa

SEQ ID NO: 25659 - DNA, 22 bp, Artificial Sequence
  chemically synthesized
aattgggaaaagctggaagcct

SEQ ID NO: 25660 - DNA, 22 bp, Artificial Sequence
  chemically synthesized
ggaaaagctggaagcctttcct

SEQ ID NO: 25661 - DNA, 22 bp, Artificial Sequence
  chemically synthesized
gaagcctttcctctaagaactg

SEQ ID NO: 25662 - DNA, 22 bp, Artificial Sequence
  chemically synthesized
tcctctaagaactgaaacaaaa

SEQ ID NO: 25663 - DNA, 22 bp, Artificial Sequence
  chemically synthesized
cctctaagaactgaaacaaaat

SEQ ID NO: 25664 - DNA, 22 bp, Artificial Sequence
  chemically synthesized
ctctaagaactgaaacaaaata

SEQ ID NO: 25665 - DNA, 22 bp, Artificial Sequence
  chemically synthesized
taagaactgaaacaaaataagg

SEQ ID NO: 25666 - DNA, 22 bp, Artificial Sequence
  chemically synthesized
agaactgaaacaaaataaggat

SEQ ID NO: 25667 - DNA, 22 bp, Artificial Sequence
  chemically synthesized
aaacaaaataaggatgcccact

SEQ ID NO: 25668 - DNA, 22 bp, Artificial Sequence
  chemically synthesized
ccatcactcctattcaatataa

SEQ ID NO: 25669 - DNA, 22 bp, Artificial Sequence
  chemically synthesized
catcactcctattcaatataat

SEQ ID NO: 25670 - DNA, 22 bp, Artificial Sequence
  chemically synthesized
ctattcaatataatactggaag

SEQ ID NO: 25671 - DNA, 22 bp, Artificial Sequence
  chemically synthesized
ttcaatataatactggaagtcc

SEQ ID NO: 25672 - DNA, 22 bp, Artificial Sequence
  chemically synthesized
aatataatactggaagtcctag

SEQ ID NO: 25673 - DNA, 22 bp, Artificial Sequence
  chemically synthesized
gaagtcctagccacagctttca

SEQ ID NO: 25674 - DNA, 22 bp, Artificial Sequence
  chemically synthesized
gccacagctttcaggtcagaga

SEQ ID NO: 25675 - DNA, 22 bp, Artificial Sequence
  chemically synthesized
tcaggtcagagaaagaaagaaa

SEQ ID NO: 25676 - DNA, 22 bp, Artificial Sequence
  chemically synthesized
caggtcagagaaagaaagaaag

SEQ ID NO: 25677 - DNA, 22 bp, Artificial Sequence
  chemically synthesized
aggtcagagaaagaaagaaaga

SEQ ID NO: 25678 - DNA, 22 bp, Artificial Sequence
  chemically synthesized
tccatctttccagatgacatga

SEQ ID NO: 25679 - DNA, 22 bp, Artificial Sequence
  chemically synthesized
tccagatgacatgattttatac

SEQ ID NO: 25680 - DNA, 22 bp, Artificial Sequence
  chemically synthesized
ccagatgacatgattttatacc

SEQ ID NO: 25681 - DNA, 22 bp, Artificial Sequence
  chemically synthesized
cagatgacatgattttatacct

SEQ ID NO: 25682 - DNA, 22 bp, Artificial Sequence
  chemically synthesized
tatacctagaaaaaccaagact

SEQ ID NO: 25683 - DNA, 22 bp, Artificial Sequence
  chemically synthesized
atacctagaaaaaccaagactc

SEQ ID NO: 25684 - DNA, 22 bp, Artificial Sequence
  chemically synthesized
tacctagaaaaaccaagactcc

SEQ ID NO: 25685 - DNA, 22 bp, Artificial Sequence
  chemically synthesized
gaaaaaccaagactccaccaaa

SEQ ID NO: 25686 - DNA, 22 bp, Artificial Sequence
  chemically synthesized
caccaaagcactcttagcgctg

SEQ ID NO: 25687 - DNA, 22 bp, Artificial Sequence
  chemically synthesized
ttagcgctgaaaaataaattca

SEQ ID NO: 25688 - DNA, 22 bp, Artificial Sequence
  chemically synthesized
agcgctgaaaaataaattcagt

SEQ ID NO: 25689 - DNA, 22 bp, Artificial Sequence
  chemically synthesized
gcgctgaaaaataaattcagta

SEQ ID NO: 25690 - DNA, 22 bp, Artificial Sequence
  chemically synthesized
aaaaataaattcagtaaagtta

SEQ ID NO: 25691 - DNA, 22 bp, Artificial Sequence
  chemically synthesized
agtaaagttacaggagacaaaa

SEQ ID NO: 25692 - DNA, 22 bp, Artificial Sequence
  chemically synthesized
caggagacaaaatcagcatatg

SEQ ID NO: 25693 - DNA, 22 bp, Artificial Sequence
  chemically synthesized
ctacacaccaataataaactag

SEQ ID NO: 25694 - DNA, 22 bp, Artificial Sequence
  chemically synthesized
tacacaccaataataaactagc

SEQ ID NO: 25695 - DNA, 22 bp, Artificial Sequence
  chemically synthesized
cacaccaataataaactagctg

SEQ ID NO: 25696 - DNA, 22 bp, Artificial Sequence
  chemically synthesized
gctgagaaggaaattaagaagg

SEQ ID NO: 25697 - DNA, 22 bp, Artificial Sequence
  chemically synthesized
agaaggaaattaagaaggcaat

SEQ ID NO: 25698 - DNA, 22 bp, Artificial Sequence
  chemically synthesized
agaaggcaatcccatttacaat

SEQ ID NO: 25699 - DNA, 22 bp, Artificial Sequence
  chemically synthesized
acaatagctaaaaaataaaata

SEQ ID NO: 25700 - DNA, 22 bp, Artificial Sequence
  chemically synthesized
caatagctaaaaaataaaatat

SEQ ID NO: 25701 - DNA, 22 bp, Artificial Sequence
  chemically synthesized
aaaaataaaatatttagggata

SEQ ID NO: 25702 - DNA, 22 bp, Artificial Sequence
  chemically synthesized
agggataaatttaaccaaggaa

SEQ ID NO: 25703 - DNA, 22 bp, Artificial Sequence
  chemically synthesized
gggataaatttaaccaaggaac

SEQ ID NO: 25704 - DNA, 22 bp, Artificial Sequence
  chemically synthesized
aaccaaggaaccgaaaaacctc

SEQ ID NO: 25705 - DNA, 22 bp, Artificial Sequence
  chemically synthesized
accaaggaaccgaaaaacctct

SEQ ID NO: 25706 - DNA, 22 bp, Artificial Sequence
  chemically synthesized
tattcggaaaactacaaaacac

SEQ ID NO: 25707 - DNA, 22 bp, Artificial Sequence
  chemically synthesized
ttcggaaaactacaaaacactg

SEQ ID NO: 25708 - DNA, 22 bp, Artificial Sequence
  chemically synthesized
ggaaaactacaaaacactgata

SEQ ID NO: 25709 - DNA, 22 bp, Artificial Sequence
  chemically synthesized
caaaacactgataaaagaattg

SEQ ID NO: 25710 - DNA, 22 bp, Artificial Sequence
  chemically synthesized
ataaaagaattgaaaaggacag

SEQ ID NO: 25711 - DNA, 22 bp, Artificial Sequence
  chemically synthesized
aaaaggacagaaacaaatggag

SEQ ID NO: 25712 - DNA, 22 bp, Artificial Sequence
  chemically synthesized
tgttcatggatcagaaaaatta

SEQ ID NO: 25713 - DNA, 22 bp, Artificial Sequence
  chemically synthesized
atggatcagaaaaattaatatt

SEQ ID NO: 25714 - DNA, 22 bp, Artificial Sequence
  chemically synthesized
atattgttaaaatggccatact

SEQ ID NO: 25715 - DNA, 22 bp, Artificial Sequence
  chemically synthesized
ttaaaatggccatactacccaa

SEQ ID NO: 25716 - DNA, 22 bp, Artificial Sequence
  chemically synthesized
aaatggccatactacccaaagc

SEQ ID NO: 25717 - DNA, 22 bp, Artificial Sequence
  chemically synthesized
cccaaagcaatctacagattct

SEQ ID NO: 25718 - DNA, 22 bp, Artificial Sequence
  chemically synthesized
cagattctatatgaccgctatc

SEQ ID NO: 25719 - DNA, 22 bp, Artificial Sequence
  chemically synthesized
tatatgaccgctatcaaaatag

SEQ ID NO: 25720 - DNA, 22 bp, Artificial Sequence
  chemically synthesized
tatgaccgctatcaaaatagca

SEQ ID NO: 25721 - DNA, 22 bp, Artificial Sequence
  chemically synthesized
tcaaaatagcaatgtcattttt

SEQ ID NO: 25722 - DNA, 22 bp, Artificial Sequence
  chemically synthesized
ttcacagaaatggaaaaaccaa

SEQ ID NO: 25723 - DNA, 22 bp, Artificial Sequence
  chemically synthesized
tcacagaaatggaaaaaccaat

SEQ ID NO: 25724 - DNA, 22 bp, Artificial Sequence
  chemically synthesized
cacagaaatggaaaaaccaatc

SEQ ID NO: 25725 - DNA, 22 bp, Artificial Sequence
  chemically synthesized
acagaaatggaaaaaccaatct

SEQ ID NO: 25726 - DNA, 22 bp, Artificial Sequence
  chemically synthesized
aaatttgtatgaaattaaaaaa

SEQ ID NO: 25727 - DNA, 22 bp, Artificial Sequence
  chemically synthesized
gtatgaaattaaaaaatagctc

SEQ ID NO: 25728 - DNA, 22 bp, Artificial Sequence
  chemically synthesized
tatgaaattaaaaaatagctcc

SEQ ID NO: 25729 - DNA, 22 bp, Artificial Sequence
  chemically synthesized
aaaaatagctccagtagccaaa

SEQ ID NO: 25730 - DNA, 22 bp, Artificial Sequence
  chemically synthesized
cagtagccaaagtcatcctgtg

SEQ ID NO: 25731 - DNA, 22 bp, Artificial Sequence
  chemically synthesized
tgaaaaaagaacaatgctagag

SEQ ID NO: 25732 - DNA, 22 bp, Artificial Sequence
  chemically synthesized
gaggtatcatactacctgattt

SEQ ID NO: 25733 - DNA, 22 bp, Artificial Sequence
  chemically synthesized
cctgatttcaaagtatattaca

SEQ ID NO: 25734 - DNA, 22 bp, Artificial Sequence
  chemically synthesized
atttcaaagtatattacaaaag

SEQ ID NO: 25735 - DNA, 22 bp, Artificial Sequence
  chemically synthesized
caaagtatattacaaaagtata

SEQ ID NO: 25736 - DNA, 22 bp, Artificial Sequence
  chemically synthesized
aaagtatattacaaaagtatag

SEQ ID NO: 25737 - DNA, 22 bp, Artificial Sequence
  chemically synthesized
caaaagtataggaacctaaaca

SEQ ID NO: 25738 - DNA, 22 bp, Artificial Sequence
  chemically synthesized
aacagcatgatactgacattag

SEQ ID NO: 25739 - DNA, 22 bp, Artificial Sequence
  chemically synthesized
acattagaacagacacttagac

SEQ ID NO: 25740 - DNA, 22 bp, Artificial Sequence
  chemically synthesized
gaacagacacttagaccaatgg

SEQ ID NO: 25741 - DNA, 22 bp, Artificial Sequence
  chemically synthesized
agaccaatggaagagaatagag

SEQ ID NO: 25742 - DNA, 22 bp, Artificial Sequence
  chemically synthesized
gaccaatggaagagaatagaga

SEQ ID NO: 25743 - DNA, 22 bp, Artificial Sequence
  chemically synthesized
gaaatgcatccacatatttata

SEQ ID NO: 25744 - DNA, 22 bp, Artificial Sequence
  chemically synthesized
atagccaacagattttcaacaa

SEQ ID NO: 25745 - DNA, 22 bp, Artificial Sequence
  chemically synthesized
tagccaacagattttcaacaaa

SEQ ID NO: 25746 - DNA, 22 bp, Artificial Sequence
  chemically synthesized
tcaacaaaggtgacaagaatat

SEQ ID NO: 25747 - DNA, 22 bp, Artificial Sequence
  chemically synthesized
caacaaaggtgacaagaatata

SEQ ID NO: 25748 - DNA, 22 bp, Artificial Sequence
  chemically synthesized
aacaaaggtgacaagaatatac

SEQ ID NO: 25749 - DNA, 22 bp, Artificial Sequence
  chemically synthesized
aggaaaggacacagtgttcaag

SEQ ID NO: 25750 - DNA, 22 bp, Artificial Sequence
  chemically synthesized
aagaaatggtgctgaaaaaatt

SEQ ID NO: 25751 - DNA, 22 bp, Artificial Sequence
  chemically synthesized
aaaaaattggatatccattgga

SEQ ID NO: 25752 - DNA, 22 bp, Artificial Sequence
  chemically synthesized
gatatccattggatatccatgt

SEQ ID NO: 25753 - DNA, 22 bp, Artificial Sequence
  chemically synthesized
gatatccatgtgcaaaagaata

SEQ ID NO: 25754 - DNA, 22 bp, Artificial Sequence
  chemically synthesized
gactgctgatatggtttggatg

SEQ ID NO: 25755 - DNA, 22 bp, Artificial Sequence
  chemically synthesized
ctgatatggtttggatgtttgt

SEQ ID NO: 25756 - DNA, 22 bp, Artificial Sequence
  chemically synthesized
atatggtttggatgtttgttcc

SEQ ID NO: 25757 - DNA, 22 bp, Artificial Sequence
  chemically synthesized
ggatgtttgttccctccaaatc

SEQ ID NO: 25758 - DNA, 22 bp, Artificial Sequence
  chemically synthesized
gatgtttgttccctccaaatct

SEQ ID NO: 25759 - DNA, 22 bp, Artificial Sequence
  chemically synthesized
gttccctccaaatctcatgttg

SEQ ID NO: 25760 - DNA, 22 bp, Artificial Sequence
  chemically synthesized
ttccctccaaatctcatgttga

SEQ ID NO: 25761 - DNA, 22 bp, Artificial Sequence
  chemically synthesized
cctccaaatctcatgttgaaat

SEQ ID NO: 25762 - DNA, 22 bp, Artificial Sequence
  chemically synthesized
caaatctcatgttgaaatataa

SEQ ID NO: 25763 - DNA, 22 bp, Artificial Sequence
  chemically synthesized
atgttgaaatataatccccaac

SEQ ID NO: 25764 - DNA, 22 bp, Artificial Sequence
  chemically synthesized
aaatataatccccaacttctca

SEQ ID NO: 25765 - DNA, 22 bp, Artificial Sequence
  chemically synthesized
ctcaggatcttggcggatggga

SEQ ID NO: 25766 - DNA, 22 bp, Artificial Sequence
  chemically synthesized
tcaggatcttggcggatgggag

SEQ ID NO: 25767 - DNA, 22 bp, Artificial Sequence
  chemically synthesized
aggatcttggcggatgggaggt

SEQ ID NO: 25768 - DNA, 22 bp, Artificial Sequence
  chemically synthesized
ggcggatgggaggtaggcctag

SEQ ID NO: 25769 - DNA, 22 bp, Artificial Sequence
  chemically synthesized
gcggatgggaggtaggcctaga

SEQ ID NO: 25770 - DNA, 22 bp, Artificial Sequence
  chemically synthesized
gattgcagctccaactcagatg

SEQ ID NO: 25771 - DNA, 22 bp, Artificial Sequence
  chemically synthesized
cagctccaactcagatggacag

SEQ ID NO: 25772 - DNA, 22 bp, Artificial Sequence
  chemically synthesized
caactcagatggacagagcagc

SEQ ID NO: 25773 - DNA, 22 bp, Artificial Sequence
  chemically synthesized
agatggacagagcagcatgtgg

SEQ ID NO: 25774 - DNA, 22 bp, Artificial Sequence
  chemically synthesized
gcattgtgaattttagctgcag

SEQ ID NO: 25775 - DNA, 22 bp, Artificial Sequence
  chemically synthesized
tgaattttagctgcagatagac

SEQ ID NO: 25776 - DNA, 22 bp, Artificial Sequence
  chemically synthesized
tagctgcagatagactgcaaga

SEQ ID NO: 25777 - DNA, 22 bp, Artificial Sequence
  chemically synthesized
agctgcagatagactgcaagaa

SEQ ID NO: 25778 - DNA, 22 bp, Artificial Sequence
  chemically synthesized
gctgcagatagactgcaagaac

SEQ ID NO: 25779 - DNA, 22 bp, Artificial Sequence
  chemically synthesized
cagatagactgcaagaacaaac

SEQ ID NO: 25780 - DNA, 22 bp, Artificial Sequence
  chemically synthesized
caagaacaaaccagcaatcctg

SEQ ID NO: 25781 - DNA, 22 bp, Artificial Sequence
  chemically synthesized
agaggacccacagaccctctga

SEQ ID NO: 25782 - DNA, 22 bp, Artificial Sequence
  chemically synthesized
tgaaggaagtagattgctcctg

SEQ ID NO: 25783 - DNA, 22 bp, Artificial Sequence
  chemically synthesized
aaggaagtagattgctcctgca

SEQ ID NO: 25784 - DNA, 22 bp, Artificial Sequence
  chemically synthesized
ctcctgcaggacccaggagaca

SEQ ID NO: 25785 - DNA, 22 bp, Artificial Sequence
  chemically synthesized
ctgcaggacccaggagacaccc

SEQ ID NO: 25786 - DNA, 22 bp, Artificial Sequence
  chemically synthesized
caggacccaggagacaccccaa

SEQ ID NO: 25787 - DNA, 22 bp, Artificial Sequence
  chemically synthesized
tgagtgccccaactgcggaagt

SEQ ID NO: 25788 - DNA, 22 bp, Artificial Sequence
  chemically synthesized
cggaagtgggaaagggagatcc

SEQ ID NO: 25789 - DNA, 22 bp, Artificial Sequence
  chemically synthesized
ctctcctaaacacacactccca

SEQ ID NO: 25790 - DNA, 22 bp, Artificial Sequence
  chemically synthesized
tcctaaacacacactcccactg

SEQ ID NO: 25791 - DNA, 22 bp, Artificial Sequence
  chemically synthesized
ctaaacacacactcccactgga

SEQ ID NO: 25792 - DNA, 22 bp, Artificial Sequence
  chemically synthesized
aacacacactcccactggagaa

SEQ ID NO: 25793 - DNA, 22 bp, Artificial Sequence
  chemically synthesized
ccactggagaaactgaaggtct

SEQ ID NO: 25794 - DNA, 22 bp, Artificial Sequence
  chemically synthesized
gagaaactgaaggtctgtttgt

SEQ ID NO: 25795 - DNA, 22 bp, Artificial Sequence
  chemically synthesized
aaggtctgtttgtgggagaagt

SEQ ID NO: 25796 - DNA, 22 bp, Artificial Sequence
  chemically synthesized
tttgtgggagaagtttctgacc

SEQ ID NO: 25797 - DNA, 22 bp, Artificial Sequence
  chemically synthesized
gtgggagaagtttctgacctta

SEQ ID NO: 25798 - DNA, 22 bp, Artificial Sequence
  chemically synthesized
tgggagaagtttctgaccttac

SEQ ID NO: 25799 - DNA, 22 bp, Artificial Sequence
  chemically synthesized
ctgaccttacctggagttgagt

SEQ ID NO: 25800 - DNA, 22 bp, Artificial Sequence
  chemically synthesized
tgaccttacctggagttgagtt

SEQ ID NO: 25801 - DNA, 22 bp, Artificial Sequence
  chemically synthesized
accttacctggagttgagttaa

SEQ ID NO: 25802 - DNA, 22 bp, Artificial Sequence
  chemically synthesized
acctggagttgagttaacttag

SEQ ID NO: 25803 - DNA, 22 bp, Artificial Sequence
  chemically synthesized
cctggagttgagttaacttaga

SEQ ID NO: 25804 - DNA, 22 bp, Artificial Sequence
  chemically synthesized
gagttgagttaacttagagagc

SEQ ID NO: 25805 - DNA, 22 bp, Artificial Sequence
  chemically synthesized
agttaacttagagagctgagca

SEQ ID NO: 25806 - DNA, 22 bp, Artificial Sequence
  chemically synthesized
acttagagagctgagcaaaata

SEQ ID NO: 25807 - DNA, 22 bp, Artificial Sequence
  chemically synthesized
agagagctgagcaaaatacagg

SEQ ID NO: 25808 - DNA, 22 bp, Artificial Sequence
  chemically synthesized
gagagctgagcaaaatacaggt

SEQ ID NO: 25809 - DNA, 22 bp, Artificial Sequence
  chemically synthesized
agcaaaatacaggtgtagagga

SEQ ID NO: 25810 - DNA, 22 bp, Artificial Sequence
  chemically synthesized
ggagctcactgggtccctgagc

SEQ ID NO: 25811 - DNA, 22 bp, Artificial Sequence
  chemically synthesized
actgggtccctgagcaggccat

SEQ ID NO: 25812 - DNA, 22 bp, Artificial Sequence
  chemically synthesized
ggtccctgagcaggccattcct

SEQ ID NO: 25813 - DNA, 22 bp, Artificial Sequence
  chemically synthesized
agcaggccattcctgcctggca

SEQ ID NO: 25814 - DNA, 22 bp, Artificial Sequence
  chemically synthesized
ctgcctggcatagccaggcatt

SEQ ID NO: 25815 - DNA, 22 bp, Artificial Sequence
  chemically synthesized
cctggcatagccaggcatttac

SEQ ID NO: 25816 - DNA, 22 bp, Artificial Sequence
  chemically synthesized
gcatagccaggcatttacatta

SEQ ID NO: 25817 - DNA, 22 bp, Artificial Sequence
  chemically synthesized
acattactaacattgaatgtaa

SEQ ID NO: 25818 - DNA, 22 bp, Artificial Sequence
  chemically synthesized
cattactaacattgaatgtaaa

SEQ ID NO: 25819 - DNA, 22 bp, Artificial Sequence
  chemically synthesized
ctaacattgaatgtaaatggcc

SEQ ID NO: 25820 - DNA, 22 bp, Artificial Sequence
  chemically synthesized
acattgaatgtaaatggcctaa

SEQ ID NO: 25821 - DNA, 22 bp, Artificial Sequence
  chemically synthesized
aatgtaaatggcctaaatgctc

SEQ ID NO: 25822 - DNA, 22 bp, Artificial Sequence
  chemically synthesized
aatgctccacttaaaagggtga

SEQ ID NO: 25823 - DNA, 22 bp, Artificial Sequence
  chemically synthesized
cacttaaaagggtgaaaaaggt

SEQ ID NO: 25824 - DNA, 22 bp, Artificial Sequence
  chemically synthesized
aaaagggtgaaaaaggtatttc

SEQ ID NO: 25825 - DNA, 22 bp, Artificial Sequence
  chemically synthesized
aaagggtgaaaaaggtatttca

SEQ ID NO: 25826 - DNA, 22 bp, Artificial Sequence
  chemically synthesized
catgcaaatggccaccaaaagt

SEQ ID NO: 25827 - DNA, 22 bp, Artificial Sequence
  chemically synthesized
atgcaaatggccaccaaaagtg

SEQ ID NO: 25828 - DNA, 22 bp, Artificial Sequence
  chemically synthesized
taaagcaacagcagttaaaaga

SEQ ID NO: 25829 - DNA, 22 bp, Artificial Sequence
  chemically synthesized
aaagcaacagcagttaaaagag

SEQ ID NO: 25830 - DNA, 22 bp, Artificial Sequence
  chemically synthesized
aagcaacagcagttaaaagaga

SEQ ID NO: 25831 - DNA, 22 bp, Artificial Sequence
  chemically synthesized
aaagagacaaagagggacatta

SEQ ID NO: 25832 - DNA, 22 bp, Artificial Sequence
  chemically synthesized
tataatggtaaaaggccttgtc

SEQ ID NO: 25833 - DNA, 22 bp, Artificial Sequence
  chemically synthesized
gtccaacaggaaaatatcacaa

SEQ ID NO: 25834 - DNA, 22 bp, Artificial Sequence
  chemically synthesized
tccaacaggaaaatatcacaat

SEQ ID NO: 25835 - DNA, 22 bp, Artificial Sequence
  chemically synthesized
aaacatatatgcacctaacact

SEQ ID NO: 25836 - DNA, 22 bp, Artificial Sequence
  chemically synthesized
aacatatatgcacctaacactg

SEQ ID NO: 25837 - DNA, 22 bp, Artificial Sequence
  chemically synthesized
acactggagctcccaaatttat

SEQ ID NO: 25838 - DNA, 22 bp, Artificial Sequence
  chemically synthesized
gagctcccaaatttatagaaca

SEQ ID NO: 25839 - DNA, 22 bp, Artificial Sequence
  chemically synthesized
ccaaatttatagaacaattact

SEQ ID NO: 25840 - DNA, 22 bp, Artificial Sequence
  chemically synthesized
atagaacaattactaatagacc

SEQ ID NO: 25841 - DNA, 22 bp, Artificial Sequence
  chemically synthesized
tagaacaattactaatagacct

SEQ ID NO: 25842 - DNA, 22 bp, Artificial Sequence
  chemically synthesized
ctaatagacctaagaaatgaga

SEQ ID NO: 25843 - DNA, 22 bp, Artificial Sequence
  chemically synthesized
atagacctaagaaatgagatag

SEQ ID NO: 25844 - DNA, 22 bp, Artificial Sequence
  chemically synthesized
agaaatgagatagacagcaaca

SEQ ID NO: 25845 - DNA, 22 bp, Artificial Sequence
  chemically synthesized
caatacttcattgacagcacta

SEQ ID NO: 25846 - DNA, 22 bp, Artificial Sequence
  chemically synthesized
aatacttcattgacagcactag

SEQ ID NO: 25847 - DNA, 22 bp, Artificial Sequence
  chemically synthesized
cattgacagcactagacagttc

SEQ ID NO: 25848 - DNA, 22 bp, Artificial Sequence
  chemically synthesized
attgacagcactagacagttca

SEQ ID NO: 25849 - DNA, 22 bp, Artificial Sequence
  chemically synthesized
acagcactagacagttcatcaa

SEQ ID NO: 25850 - DNA, 22 bp, Artificial Sequence
  chemically synthesized
gacagttcatcaagacagaaag

SEQ ID NO: 25851 - DNA, 22 bp, Artificial Sequence
  chemically synthesized
atcaagacagaaagtcaacaaa

SEQ ID NO: 25852 - DNA, 22 bp, Artificial Sequence
  chemically synthesized
aaattataccttagaacaaatg

SEQ ID NO: 25853 - DNA, 22 bp, Artificial Sequence
  chemically synthesized
aattataccttagaacaaatgg

SEQ ID NO: 25854 - DNA, 22 bp, Artificial Sequence
  chemically synthesized
taccttagaacaaatggactta

SEQ ID NO: 25855 - DNA, 22 bp, Artificial Sequence
  chemically synthesized
agaacaaatggacttaacagtt

SEQ ID NO: 25856 - DNA, 22 bp, Artificial Sequence
  chemically synthesized
gaacaaatggacttaacagtta

SEQ ID NO: 25857 - DNA, 22 bp, Artificial Sequence
  chemically synthesized
aacagttatatacagaacattt

SEQ ID NO: 25858 - DNA, 22 bp, Artificial Sequence
  chemically synthesized
acagttatatacagaacatttc

SEQ ID NO: 25859 - DNA, 22 bp, Artificial Sequence
  chemically synthesized
tatacagaacatttcatccaat

SEQ ID NO: 25860 - DNA, 22 bp, Artificial Sequence
  chemically synthesized
catccaataaccacagaacaca

SEQ ID NO: 25861 - DNA, 22 bp, Artificial Sequence
  chemically synthesized
atccaataaccacagaacacac

SEQ ID NO: 25862 - DNA, 22 bp, Artificial Sequence
  chemically synthesized
tattcaacagcgcgtggaaatt

SEQ ID NO: 25863 - DNA, 22 bp, Artificial Sequence
  chemically synthesized
ttcaacagcgcgtggaaatttc

SEQ ID NO: 25864 - DNA, 22 bp, Artificial Sequence
  chemically synthesized
aacagcgcgtggaaatttctcc

SEQ ID NO: 25865 - DNA, 22 bp, Artificial Sequence
  chemically synthesized
ctccaaggtagaccatatgata

SEQ ID NO: 25866 - DNA, 22 bp, Artificial Sequence
  chemically synthesized
tccaaggtagaccatatgatag

SEQ ID NO: 25867 - DNA, 22 bp, Artificial Sequence
  chemically synthesized
caaggtagaccatatgataggc

SEQ ID NO: 25868 - DNA, 22 bp, Artificial Sequence
  chemically synthesized
aataaatttactaacagaccaa

SEQ ID NO: 25869 - DNA, 22 bp, Artificial Sequence
  chemically synthesized
actaacagaccaataacaagca

SEQ ID NO: 25870 - DNA, 22 bp, Artificial Sequence
  chemically synthesized
ctaacagaccaataacaagcag

SEQ ID NO: 25871 - DNA, 22 bp, Artificial Sequence
  chemically synthesized
acagaccaataacaagcagtga

SEQ ID NO: 25872 - DNA, 22 bp, Artificial Sequence
  chemically synthesized
aattggtaattaaaaaattacc

SEQ ID NO: 25873 - DNA, 22 bp, Artificial Sequence
  chemically synthesized
attggtaattaaaaaattacca

SEQ ID NO: 25874 - DNA, 22 bp, Artificial Sequence
  chemically synthesized
gtaattaaaaaattaccaacca

SEQ ID NO: 25875 - DNA, 22 bp, Artificial Sequence
  chemically synthesized
aaaaattaccaaccaaaaaaaa

SEQ ID NO: 25876 - DNA, 22 bp, Artificial Sequence
  chemically synthesized
ccaaccaaaaaaaagttcagga

SEQ ID NO: 25877 - DNA, 22 bp, Artificial Sequence
  chemically synthesized
aggaccagatggattcacaaca

SEQ ID NO: 25878 - DNA, 22 bp, Artificial Sequence
  chemically synthesized
acaacagaattctactagacat

SEQ ID NO: 25879 - DNA, 22 bp, Artificial Sequence
  chemically synthesized
tactagacattcaaagaggaat

SEQ ID NO: 25880 - DNA, 22 bp, Artificial Sequence
  chemically synthesized
ctagacattcaaagaggaattg

SEQ ID NO: 25881 - DNA, 22 bp, Artificial Sequence
  chemically synthesized
gacattcaaagaggaattggtc

SEQ ID NO: 25882 - DNA, 22 bp, Artificial Sequence
  chemically synthesized
aaagaggaattggtccccatct

SEQ ID NO: 25883 - DNA, 22 bp, Artificial Sequence
  chemically synthesized
gtccccatctttttgacactat

SEQ ID NO: 25884 - DNA, 22 bp, Artificial Sequence
  chemically synthesized
tttgacactattctacaagaca

SEQ ID NO: 25885 - DNA, 22 bp, Artificial Sequence
  chemically synthesized
ttgacactattctacaagacag

SEQ ID NO: 25886 - DNA, 22 bp, Artificial Sequence
  chemically synthesized
tgacactattctacaagacaga

SEQ ID NO: 25887 - DNA, 22 bp, Artificial Sequence
  chemically synthesized
gacactattctacaagacagat

SEQ ID NO: 25888 - DNA, 22 bp, Artificial Sequence
  chemically synthesized
acactattctacaagacagata

SEQ ID NO: 25889 - DNA, 22 bp, Artificial Sequence
  chemically synthesized
ttctacaagacagataaagaag

SEQ ID NO: 25890 - DNA, 22 bp, Artificial Sequence
  chemically synthesized
tacaagacagataaagaaggaa

SEQ ID NO: 25891 - DNA, 22 bp, Artificial Sequence
  chemically synthesized
caagacagataaagaaggaacc

SEQ ID NO: 25892 - DNA, 22 bp, Artificial Sequence
  chemically synthesized
ccctaattcattctatgaagcc

SEQ ID NO: 25893 - DNA, 22 bp, Artificial Sequence
  chemically synthesized
attcattctatgaagccagcat

SEQ ID NO: 25894 - DNA, 22 bp, Artificial Sequence
  chemically synthesized
attctatgaagccagcatcaca

SEQ ID NO: 25895 - DNA, 22 bp, Artificial Sequence
  chemically synthesized
tatgaagccagcatcacaccaa

SEQ ID NO: 25896 - DNA, 22 bp, Artificial Sequence
  chemically synthesized
tgaagccagcatcacaccaaaa

SEQ ID NO: 25897 - DNA, 22 bp, Artificial Sequence
  chemically synthesized
cagactgatagccttgatgaac

SEQ ID NO: 25898 - DNA, 22 bp, Artificial Sequence
  chemically synthesized
atagccttgatgaacatagatg

SEQ ID NO: 25899 - DNA, 22 bp, Artificial Sequence
  chemically synthesized
gatgaacatagatgctaaaatc

SEQ ID NO: 25900 - DNA, 22 bp, Artificial Sequence
  chemically synthesized
atgaacatagatgctaaaatcc

SEQ ID NO: 25901 - DNA, 22 bp, Artificial Sequence
  chemically synthesized
aaatccttaacaaaatactaga

SEQ ID NO: 25902 - DNA, 22 bp, Artificial Sequence
  chemically synthesized
aacaaaatactagataaccaaa

SEQ ID NO: 25903 - DNA, 22 bp, Artificial Sequence
  chemically synthesized
acaaaatactagataaccaaat

SEQ ID NO: 25904 - DNA, 22 bp, Artificial Sequence
  chemically synthesized
gataaccaaattcaacaacata

SEQ ID NO: 25905 - DNA, 22 bp, Artificial Sequence
  chemically synthesized
aacaacataacaaaaagataat

SEQ ID NO: 25906 - DNA, 22 bp, Artificial Sequence
  chemically synthesized
catgccagggatgcagggttgg

SEQ ID NO: 25907 - DNA, 22 bp, Artificial Sequence
  chemically synthesized
gtttgacatctgcaagtcaata

SEQ ID NO: 25908 - DNA, 22 bp, Artificial Sequence
  chemically synthesized
gacatctgcaagtcaataagtg

SEQ ID NO: 25909 - DNA, 22 bp, Artificial Sequence
  chemically synthesized
acatctgcaagtcaataagtgt

SEQ ID NO: 25910 - DNA, 22 bp, Artificial Sequence
  chemically synthesized
caagtcaataagtgtgatacac

SEQ ID NO: 25911 - DNA, 22 bp, Artificial Sequence
  chemically synthesized
aaaaacaaaaattacatgatca

SEQ ID NO: 25912 - DNA, 22 bp, Artificial Sequence
  chemically synthesized
aaaacaaaaattacatgatcat

SEQ ID NO: 25913 - DNA, 22 bp, Artificial Sequence
  chemically synthesized
catgatcatctcaatagatgca

SEQ ID NO: 25914 - DNA, 22 bp, Artificial Sequence
  chemically synthesized
aatagatgcagaaaaagcattc

SEQ ID NO: 25915 - DNA, 22 bp, Artificial Sequence
  chemically synthesized
aacaaaatccagcatacattta

SEQ ID NO: 25916 - DNA, 22 bp, Artificial Sequence
  chemically synthesized
atgattaaaatgctcagcaaaa

SEQ ID NO: 25917 - DNA, 22 bp, Artificial Sequence
  chemically synthesized
tgattaaaatgctcagcaaaat

SEQ ID NO: 25918 - DNA, 22 bp, Artificial Sequence
  chemically synthesized
aaatgctcagcaaaatcagcat

SEQ ID NO: 25919 - DNA, 22 bp, Artificial Sequence
  chemically synthesized
agcaaaatcagcatacaagaga

SEQ ID NO: 25920 - DNA, 22 bp, Artificial Sequence
  chemically synthesized
agtgtaataaaagccatctgtg

SEQ ID NO: 25921 - DNA, 22 bp, Artificial Sequence
  chemically synthesized
tgacaaacccacagccaacata

SEQ ID NO: 25922 - DNA, 22 bp, Artificial Sequence
  chemically synthesized
aatggggaaaagttgaaagcat

SEQ ID NO: 25923 - DNA, 22 bp, Artificial Sequence
  chemically synthesized
aaagcattccctctgagaactg

SEQ ID NO: 25924 - DNA, 22 bp, Artificial Sequence
  chemically synthesized
cctctgagaactggaacaagac

SEQ ID NO: 25925 - DNA, 22 bp, Artificial Sequence
  chemically synthesized
tgagaactggaacaagacaagg

SEQ ID NO: 25926 - DNA, 22 bp, Artificial Sequence
  chemically synthesized
agaactggaacaagacaaggat

SEQ ID NO: 25927 - DNA, 22 bp, Artificial Sequence
  chemically synthesized
gaacaagacaaggatgcccact

SEQ ID NO: 25928 - DNA, 22 bp, Artificial Sequence
  chemically synthesized
tcaccactcctcttcaacatag

SEQ ID NO: 25929 - DNA, 22 bp, Artificial Sequence
  chemically synthesized
accactcctcttcaacatagta

SEQ ID NO: 25930 - DNA, 22 bp, Artificial Sequence
  chemically synthesized
ctcttcaacatagtactggaag

SEQ ID NO: 25931 - DNA, 22 bp, Artificial Sequence
  chemically synthesized
ttcaacatagtactggaagtcc

SEQ ID NO: 25932 - DNA, 22 bp, Artificial Sequence
  chemically synthesized
caacatagtactggaagtccta

SEQ ID NO: 25933 - DNA, 22 bp, Artificial Sequence
  chemically synthesized
aacatagtactggaagtcctag

SEQ ID NO: 25934 - DNA, 22 bp, Artificial Sequence
  chemically synthesized
gaagtcctagccagggcaatca

SEQ ID NO: 25935 - DNA, 22 bp, Artificial Sequence
  chemically synthesized
gccagggcaatcagacaaaaca

SEQ ID NO: 25936 - DNA, 22 bp, Artificial Sequence
  chemically synthesized
aaatcagtaaagaggaagtcaa

SEQ ID NO: 25937 - DNA, 22 bp, Artificial Sequence
  chemically synthesized
tcactgtttgctgatgatatga

SEQ ID NO: 25938 - DNA, 22 bp, Artificial Sequence
  chemically synthesized
tttgctgatgatatgatcattt

SEQ ID NO: 25939 - DNA, 22 bp, Artificial Sequence
  chemically synthesized
gctgatgatatgatcatttacc

SEQ ID NO: 25940 - DNA, 22 bp, Artificial Sequence
  chemically synthesized
ctgatgatatgatcatttacct

SEQ ID NO: 25941 - DNA, 22 bp, Artificial Sequence
  chemically synthesized
atgatatgatcatttaccttta

SEQ ID NO: 25942 - DNA, 22 bp, Artificial Sequence
  chemically synthesized
acctttaaaaccctaaagactc

SEQ ID NO: 25943 - DNA, 22 bp, Artificial Sequence
  chemically synthesized
cctttaaaaccctaaagactcc

SEQ ID NO: 25944 - DNA, 22 bp, Artificial Sequence
  chemically synthesized
taaaaccctaaagactcctcca

SEQ ID NO: 25945 - DNA, 22 bp, Artificial Sequence
  chemically synthesized
aaaaccctaaagactcctccag

SEQ ID NO: 25946 - DNA, 22 bp, Artificial Sequence
  chemically synthesized
aaaccctaaagactcctccaga

SEQ ID NO: 25947 - DNA, 22 bp, Artificial Sequence
  chemically synthesized
aagactcctccagaaagctcct

SEQ ID NO: 25948 - DNA, 22 bp, Artificial Sequence
  chemically synthesized
ctccagaaagctcctagaactg

SEQ ID NO: 25949 - DNA, 22 bp, Artificial Sequence
  chemically synthesized
cagaaagctcctagaactgata

SEQ ID NO: 25950 - DNA, 22 bp, Artificial Sequence
  chemically synthesized
ctagaactgataaaataattca

SEQ ID NO: 25951 - DNA, 22 bp, Artificial Sequence
  chemically synthesized
gaactgataaaataattcagca

SEQ ID NO: 25952 - DNA, 22 bp, Artificial Sequence
  chemically synthesized
ataaaataattcagcaaagttt

SEQ ID NO: 25953 - DNA, 22 bp, Artificial Sequence
  chemically synthesized
agcaaagtttccagatacaaga

SEQ ID NO: 25954 - DNA, 22 bp, Artificial Sequence
  chemically synthesized
ccagatacaagatgaatgcaca

SEQ ID NO: 25955 - DNA, 22 bp, Artificial Sequence
  chemically synthesized
cagatacaagatgaatgcacac

SEQ ID NO: 25956 - DNA, 22 bp, Artificial Sequence
  chemically synthesized
ttctatacaccaacagcaacca

SEQ ID NO: 25957 - DNA, 22 bp, Artificial Sequence
  chemically synthesized
ctatacaccaacagcaaccaaa

SEQ ID NO: 25958 - DNA, 22 bp, Artificial Sequence
  chemically synthesized
tatacaccaacagcaaccaaat

SEQ ID NO: 25959 - DNA, 22 bp, Artificial Sequence
  chemically synthesized
tacaccaacagcaaccaaatgg

SEQ ID NO: 25960 - DNA, 22 bp, Artificial Sequence
  chemically synthesized
aaccccttgtacaatagatgca

SEQ ID NO: 25961 - DNA, 22 bp, Artificial Sequence
  chemically synthesized
gtacaatagatgcaaaaatggc

SEQ ID NO: 25962 - DNA, 22 bp, Artificial Sequence
  chemically synthesized
tacaatagatgcaaaaatggcc

SEQ ID NO: 25963 - DNA, 22 bp, Artificial Sequence
  chemically synthesized
atacaacccctatttattgcca

SEQ ID NO: 25964 - DNA, 22 bp, Artificial Sequence
  chemically synthesized
tttattgccatataaaacgtac

SEQ ID NO: 25965 - DNA, 22 bp, Artificial Sequence
  chemically synthesized
attgccatataaaacgtactct

SEQ ID NO: 25966 - DNA, 22 bp, Artificial Sequence
  chemically synthesized
ttgccatataaaacgtactctc

SEQ ID NO: 25967 - DNA, 22 bp, Artificial Sequence
  chemically synthesized
ccatataaaacgtactctcaag

SEQ ID NO: 25968 - DNA, 22 bp, Artificial Sequence
  chemically synthesized
tcaagatggattaaagacttaa

SEQ ID NO: 25969 - DNA, 22 bp, Artificial Sequence
  chemically synthesized
aagatggattaaagacttaaat

SEQ ID NO: 25970 - DNA, 22 bp, Artificial Sequence
  chemically synthesized
aagacttaaatataaaacttaa

SEQ ID NO: 25971 - DNA, 22 bp, Artificial Sequence
  chemically synthesized
aaatataaaacttaaaactata

SEQ ID NO: 25972 - DNA, 22 bp, Artificial Sequence
  chemically synthesized
aatataaaacttaaaactataa

SEQ ID NO: 25973 - DNA, 22 bp, Artificial Sequence
  chemically synthesized
aaaactataaaactactaaaag

SEQ ID NO: 25974 - DNA, 22 bp, Artificial Sequence
  chemically synthesized
aaactataaaactactaaaaga

SEQ ID NO: 25975 - DNA, 22 bp, Artificial Sequence
  chemically synthesized
taaaactactaaaagaaaacat

SEQ ID NO: 25976 - DNA, 22 bp, Artificial Sequence
  chemically synthesized
ctaaaagaaaacataagggaga

SEQ ID NO: 25977 - DNA, 22 bp, Artificial Sequence
  chemically synthesized
aaagaaaacataagggagacac

SEQ ID NO: 25978 - DNA, 22 bp, Artificial Sequence
  chemically synthesized
caagacatggctttgggcaaag

SEQ ID NO: 25979 - DNA, 22 bp, Artificial Sequence
  chemically synthesized
aagacatggctttgggcaaaga

SEQ ID NO: 25980 - DNA, 22 bp, Artificial Sequence
  chemically synthesized
tgggcaaagattttatggccaa

SEQ ID NO: 25981 - DNA, 22 bp, Artificial Sequence
  chemically synthesized
gggcaaagattttatggccaag

SEQ ID NO: 25982 - DNA, 22 bp, Artificial Sequence
  chemically synthesized
ggcaaagattttatggccaaga

SEQ ID NO: 25983 - DNA, 22 bp, Artificial Sequence
  chemically synthesized
tatggccaagacctcaaaagca

SEQ ID NO: 25984 - DNA, 22 bp, Artificial Sequence
  chemically synthesized
atggccaagacctcaaaagcac

SEQ ID NO: 25985 - DNA, 22 bp, Artificial Sequence
  chemically synthesized
tggccaagacctcaaaagcaca

SEQ ID NO: 25986 - DNA, 22 bp, Artificial Sequence
  chemically synthesized
aaaagcacaggcaacaaaagca

SEQ ID NO: 25987 - DNA, 22 bp, Artificial Sequence
  chemically synthesized
tattaagctaaaatacatctgc

SEQ ID NO: 25988 - DNA, 22 bp, Artificial Sequence
  chemically synthesized
agctaaaatacatctgcacagt

SEQ ID NO: 25989 - DNA, 22 bp, Artificial Sequence
  chemically synthesized
aaatacatctgcacagtaaagg

SEQ ID NO: 25990 - DNA, 22 bp, Artificial Sequence
  chemically synthesized
cacagtaaaggaaacaatcaac

SEQ ID NO: 25991 - DNA, 22 bp, Artificial Sequence
  chemically synthesized
ttgaatgcgagaaaatatttgc

SEQ ID NO: 25992 - DNA, 22 bp, Artificial Sequence
  chemically synthesized
aatgcgagaaaatatttgcata

SEQ ID NO: 25993 - DNA, 22 bp, Artificial Sequence
  chemically synthesized
gcatacatttgacaaggaatta

SEQ ID NO: 25994 - DNA, 22 bp, Artificial Sequence
  chemically synthesized
catacatttgacaaggaattaa

SEQ ID NO: 25995 - DNA, 22 bp, Artificial Sequence
  chemically synthesized
gacaaggaattaatctccagaa

SEQ ID NO: 25996 - DNA, 22 bp, Artificial Sequence
  chemically synthesized
acaaggaattaatctccagaat

SEQ ID NO: 25997 - DNA, 22 bp, Artificial Sequence
  chemically synthesized
atctccagaatatataagaaac

SEQ ID NO: 25998 - DNA, 22 bp, Artificial Sequence
  chemically synthesized
cagaatatataagaaactcaaa

SEQ ID NO: 25999 - DNA, 22 bp, Artificial Sequence
  chemically synthesized
aaacaactcaacagtggaaaaa

SEQ ID NO: 26000 - DNA, 22 bp, Artificial Sequence
  chemically synthesized
aacagtggaaaaacaaataatc

SEQ ID NO: 26001 - DNA, 22 bp, Artificial Sequence
  chemically synthesized
attaaaaaattggcaaaggata

SEQ ID NO: 26002 - DNA, 22 bp, Artificial Sequence
  chemically synthesized
aaaaattggcaaaggatatttt

SEQ ID NO: 26003 - DNA, 22 bp, Artificial Sequence
  chemically synthesized
gcaaaggatatttttcaaaaga

SEQ ID NO: 26004 - DNA, 22 bp, Artificial Sequence
  chemically synthesized
ttcaaaagaagacatacaaatg

SEQ ID NO: 26005 - DNA, 22 bp, Artificial Sequence
  chemically synthesized
tcaaaagaagacatacaaatgc

SEQ ID NO: 26006 - DNA, 22 bp, Artificial Sequence
  chemically synthesized
caaaagaagacatacaaatgca

SEQ ID NO: 26007 - DNA, 22 bp, Artificial Sequence
  chemically synthesized
aaaagaagacatacaaatgcac

SEQ ID NO: 26008 - DNA, 22 bp, Artificial Sequence
  chemically synthesized
ctcaacattactaatcatcaga

SEQ ID NO: 26009 - DNA, 22 bp, Artificial Sequence
  chemically synthesized
aacattactaatcatcagagaa

SEQ ID NO: 26010 - DNA, 22 bp, Artificial Sequence
  chemically synthesized
ctaatcatcagagaaatgcaaa

SEQ ID NO: 26011 - DNA, 22 bp, Artificial Sequence
  chemically synthesized
atcatcagagaaatgcaaatca

SEQ ID NO: 26012 - DNA, 22 bp, Artificial Sequence
  chemically synthesized
atgccagttagaatcatcatga

SEQ ID NO: 26013 - DNA, 22 bp, Artificial Sequence
  chemically synthesized
tgccagttagaatcatcatgat

SEQ ID NO: 26014 - DNA, 22 bp, Artificial Sequence
  chemically synthesized
gaatcatcatgatttaaataaa

SEQ ID NO: 26015 - DNA, 22 bp, Artificial Sequence
  chemically synthesized
aaataaattaataaataaataa

SEQ ID NO: 26016 - DNA, 22 bp, Artificial Sequence
  chemically synthesized
aataaattaataaataaataac

SEQ ID NO: 26017 - DNA, 22 bp, Artificial Sequence
  chemically synthesized
ataaataaataacacatgctgg

SEQ ID NO: 26018 - DNA, 22 bp, Artificial Sequence
  chemically synthesized
gcaaggatgtgaaggaaaaggc

SEQ ID NO: 26019 - DNA, 22 bp, Artificial Sequence
  chemically synthesized
gtaggcactattggtaagcatg

SEQ ID NO: 26020 - DNA, 22 bp, Artificial Sequence
  chemically synthesized
ttggtaagcatgcaaattagta

SEQ ID NO: 26021 - DNA, 22 bp, Artificial Sequence
  chemically synthesized
gtaagcatgcaaattagtatag

SEQ ID NO: 26022 - DNA, 22 bp, Artificial Sequence
  chemically synthesized
gtatagccactatggaaaacaa

SEQ ID NO: 26023 - DNA, 22 bp, Artificial Sequence
  chemically synthesized
tggaaaacaatatgtagattta

SEQ ID NO: 26024 - DNA, 22 bp, Artificial Sequence
  chemically synthesized
accaaaaagctaaaaattgaac

SEQ ID NO: 26025 - DNA, 22 bp, Artificial Sequence
  chemically synthesized
ccaaaaagctaaaaattgaact

SEQ ID NO: 26026 - DNA, 22 bp, Artificial Sequence
  chemically synthesized
aaaattgaactatcataagatc

SEQ ID NO: 26027 - DNA, 22 bp, Artificial Sequence
  chemically synthesized
aactatcataagatccagcaat

SEQ ID NO: 26028 - DNA, 22 bp, Artificial Sequence
  chemically synthesized
tcataagatccagcaatcttat

SEQ ID NO: 26029 - DNA, 22 bp, Artificial Sequence
  chemically synthesized
attactgggtatttatccaaag

SEQ ID NO: 26030 - DNA, 22 bp, Artificial Sequence
  chemically synthesized
ttactgggtatttatccaaagg

SEQ ID NO: 26031 - DNA, 22 bp, Artificial Sequence
  chemically synthesized
ctgggtatttatccaaaggaaa

SEQ ID NO: 26032 - DNA, 22 bp, Artificial Sequence
  chemically synthesized
ggtatttatccaaaggaaaaga

SEQ ID NO: 26033 - DNA, 22 bp, Artificial Sequence
  chemically synthesized
atccaaaggaaaagaattcaga

SEQ ID NO: 26034 - DNA, 22 bp, Artificial Sequence
  chemically synthesized
tccaaaggaaaagaattcagaa

SEQ ID NO: 26035 - DNA, 22 bp, Artificial Sequence
  chemically synthesized
agaataataaacagatactggt

SEQ ID NO: 26036 - DNA, 22 bp, Artificial Sequence
  chemically synthesized
gtaccacactgtttattgcagc

SEQ ID NO: 26037 - DNA, 22 bp, Artificial Sequence
  chemically synthesized
tttattgcagcacgattcacat

SEQ ID NO: 26038 - DNA, 22 bp, Artificial Sequence
  chemically synthesized
attgcagcacgattcacattag

SEQ ID NO: 26039 - DNA, 22 bp, Artificial Sequence
  chemically synthesized
ttgcagcacgattcacattagc

SEQ ID NO: 26040 - DNA, 22 bp, Artificial Sequence
  chemically synthesized
cagcacgattcacattagcaaa

SEQ ID NO: 26041 - DNA, 22 bp, Artificial Sequence
  chemically synthesized
acattagcaaagatatggaatc

SEQ ID NO: 26042 - DNA, 22 bp, Artificial Sequence
  chemically synthesized
gcaaagatatggaatcaaccta

SEQ ID NO: 26043 - DNA, 22 bp, Artificial Sequence
  chemically synthesized
agtgtccatcaatggatgaatg

SEQ ID NO: 26044 - DNA, 22 bp, Artificial Sequence
  chemically synthesized
aatattattcaaccatacaaat

SEQ ID NO: 26045 - DNA, 22 bp, Artificial Sequence
  chemically synthesized
ttcaaccatacaaatataaaat

SEQ ID NO: 26046 - DNA, 22 bp, Artificial Sequence
  chemically synthesized
aaccatacaaatataaaatcat

SEQ ID NO: 26047 - DNA, 22 bp, Artificial Sequence
  chemically synthesized
catttgcagcaacatggatgaa

SEQ ID NO: 26048 - DNA, 22 bp, Artificial Sequence
  chemically synthesized
atttgcagcaacatggatgaaa

SEQ ID NO: 26049 - DNA, 22 bp, Artificial Sequence
  chemically synthesized
gcagcaacatggatgaaactgg

SEQ ID NO: 26050 - DNA, 22 bp, Artificial Sequence
  chemically synthesized
cagcaacatggatgaaactgga

SEQ ID NO: 26051 - DNA, 22 bp, Artificial Sequence
  chemically synthesized
gaagtcattatgttaaacgaaa

SEQ ID NO: 26052 - DNA, 22 bp, Artificial Sequence
  chemically synthesized
tgttaaacgaaataagccaggc

SEQ ID NO: 26053 - DNA, 22 bp, Artificial Sequence
  chemically synthesized
aacgaaataagccaggcataga

SEQ ID NO: 26054 - DNA, 22 bp, Artificial Sequence
  chemically synthesized
tgcatgttctcactgatatgtg

SEQ ID NO: 26055 - DNA, 22 bp, Artificial Sequence
  chemically synthesized
gcatgttctcactgatatgtgg

SEQ ID NO: 26056 - DNA, 22 bp, Artificial Sequence
  chemically synthesized
catgttctcactgatatgtggg

SEQ ID NO: 26057 - DNA, 22 bp, Artificial Sequence
  chemically synthesized
tcactgatatgtgggagctaaa

SEQ ID NO: 26058 - DNA, 22 bp, Artificial Sequence
  chemically synthesized
actgatatgtgggagctaaaaa

SEQ ID NO: 26059 - DNA, 22 bp, Artificial Sequence
  chemically synthesized
atatgtgggagctaaaaaagtt

SEQ ID NO: 26060 - DNA, 22 bp, Artificial Sequence
  chemically synthesized
aaaaagttaatatcatgtaggt

SEQ ID NO: 26061 - DNA, 22 bp, Artificial Sequence
  chemically synthesized
atatcatgtaggtagagagtag

SEQ ID NO: 26062 - DNA, 22 bp, Artificial Sequence
  chemically synthesized
tgggaggaagggagacgaagag

SEQ ID NO: 26063 - DNA, 22 bp, Artificial Sequence
  chemically synthesized
gttaatggaaacaggcagttag

SEQ ID NO: 26064 - DNA, 22 bp, Artificial Sequence
  chemically synthesized
atggaaacaggcagttagatag

SEQ ID NO: 26065 - DNA, 22 bp, Artificial Sequence
  chemically synthesized
gatagaaggaatatgttctgat

SEQ ID NO: 26066 - DNA, 22 bp, Artificial Sequence
  chemically synthesized
tgatgttcaatagcaaagtagg

SEQ ID NO: 26067 - DNA, 22 bp, Artificial Sequence
  chemically synthesized
atgttcaatagcaaagtagggt

SEQ ID NO: 26068 - DNA, 22 bp, Artificial Sequence
  chemically synthesized
aatagcaaagtagggtgattat

SEQ ID NO: 26069 - DNA, 22 bp, Artificial Sequence
  chemically synthesized
tagttaaaaacaatatattgta

SEQ ID NO: 26070 - DNA, 22 bp, Artificial Sequence
  chemically synthesized
aaaacaatatattgtatatttc

SEQ ID NO: 26071 - DNA, 22 bp, Artificial Sequence
  chemically synthesized
tatatttcaaaatagtagaaga

SEQ ID NO: 26072 - DNA, 22 bp, Artificial Sequence
  chemically synthesized
caaaatagtagaagaaaggtct

SEQ ID NO: 26073 - DNA, 22 bp, Artificial Sequence
  chemically synthesized
aaaatagtagaagaaaggtctt

SEQ ID NO: 26074 - DNA, 22 bp, Artificial Sequence
  chemically synthesized
gaaatgttcctaacacatagaa

SEQ ID NO: 26075 - DNA, 22 bp, Artificial Sequence
  chemically synthesized
aaatgttcctaacacatagaaa

SEQ ID NO: 26076 - DNA, 22 bp, Artificial Sequence
  chemically synthesized
ctaacacatagaaacgataaat

SEQ ID NO: 26077 - DNA, 22 bp, Artificial Sequence
  chemically synthesized
acacatagaaacgataaatact

SEQ ID NO: 26078 - DNA, 22 bp, Artificial Sequence
  chemically synthesized
gaggtgatgaataccccaaata

SEQ ID NO: 26079 - DNA, 22 bp, Artificial Sequence
  chemically synthesized
aggtgatgaataccccaaatac

SEQ ID NO: 26080 - DNA, 22 bp, Artificial Sequence
  chemically synthesized
acttgatcattatacattatat

SEQ ID NO: 26081 - DNA, 22 bp, Artificial Sequence
  chemically synthesized
gatcattatacattatatgcat

SEQ ID NO: 26082 - DNA, 22 bp, Artificial Sequence
  chemically synthesized
atcattatacattatatgcatg

SEQ ID NO: 26083 - DNA, 22 bp, Artificial Sequence
  chemically synthesized
tacattatatgcatgtaacaaa

SEQ ID NO: 26084 - DNA, 22 bp, Artificial Sequence
  chemically synthesized
tatgcatgtaacaaaatgtcac

SEQ ID NO: 26085 - DNA, 22 bp, Artificial Sequence
  chemically synthesized
atacatataaacacgtcatata

SEQ ID NO: 26086 - DNA, 22 bp, Artificial Sequence
  chemically synthesized
atattggttgaggcctgattgt

SEQ ID NO: 26087 - DNA, 22 bp, Artificial Sequence
  chemically synthesized
gttgaggcctgattgtaagtaa

SEQ ID NO: 26088 - DNA, 22 bp, Artificial Sequence
  chemically synthesized
aggcctgattgtaagtaaatct

SEQ ID NO: 26089 - DNA, 22 bp, Artificial Sequence
  chemically synthesized
attgtaagtaaatctttgtccc

SEQ ID NO: 26090 - DNA, 22 bp, Artificial Sequence
  chemically synthesized
taagtaaatctttgtccctcca

SEQ ID NO: 26091 - DNA, 22 bp, Artificial Sequence
  chemically synthesized
tgtccctccagacatttccctg

SEQ ID NO: 26092 - DNA, 22 bp, Artificial Sequence
  chemically synthesized
gtccctccagacatttccctgt

SEQ ID NO: 26093 - DNA, 22 bp, Artificial Sequence
  chemically synthesized
tccctccagacatttccctgta

SEQ ID NO: 26094 - DNA, 22 bp, Artificial Sequence
  chemically synthesized
cagacatttccctgtactgtct

SEQ ID NO: 26095 - DNA, 22 bp, Artificial Sequence
  chemically synthesized
ccctgtactgtcttgctgtgag

SEQ ID NO: 26096 - DNA, 22 bp, Artificial Sequence
  chemically synthesized
cctgtactgtcttgctgtgagg

SEQ ID NO: 26097 - DNA, 22 bp, Artificial Sequence
  chemically synthesized
tactgtcttgctgtgaggagct

SEQ ID NO: 26098 - DNA, 22 bp, Artificial Sequence
  chemically synthesized
tcttgctgtgaggagcttcttt

SEQ ID NO: 26099 - DNA, 22 bp, Artificial Sequence
  chemically synthesized
gctgtgaggagcttcttttact

SEQ ID NO: 26100 - DNA, 22 bp, Artificial Sequence
  chemically synthesized
ctgtgaggagcttcttttactg

SEQ ID NO: 26101 - DNA, 22 bp, Artificial Sequence
  chemically synthesized
tgaggagcttcttttactgcta

SEQ ID NO: 26102 - DNA, 22 bp, Artificial Sequence
  chemically synthesized
cttttactgctatttcttatat

SEQ ID NO: 26103 - DNA, 22 bp, Artificial Sequence
  chemically synthesized
ttttactgctatttcttatatt

SEQ ID NO: 26104 - DNA, 22 bp, Artificial Sequence
  chemically synthesized
ttactgctatttcttatattcc

SEQ ID NO: 26105 - DNA, 22 bp, Artificial Sequence
  chemically synthesized
tactgctatttcttatattcca

SEQ ID NO: 26106 - DNA, 22 bp, Artificial Sequence
  chemically synthesized
actgctatttcttatattccaa

SEQ ID NO: 26107 - DNA, 22 bp, Artificial Sequence
  chemically synthesized
ctgctatttcttatattccaac

SEQ ID NO: 26108 - DNA, 22 bp, Artificial Sequence
  chemically synthesized
ctatttcttatattccaacacc

SEQ ID NO: 26109 - DNA, 22 bp, Artificial Sequence
  chemically synthesized
tttcttatattccaacaccatt

SEQ ID NO: 26110 - DNA, 22 bp, Artificial Sequence
  chemically synthesized
cttatattccaacaccatttta

SEQ ID NO: 26111 - DNA, 22 bp, Artificial Sequence
  chemically synthesized
ttatattccaacaccattttag

SEQ ID NO: 26112 - DNA, 22 bp, Artificial Sequence
  chemically synthesized
atattccaacaccattttagcc

SEQ ID NO: 26113 - DNA, 22 bp, Artificial Sequence
  chemically synthesized
tattccaacaccattttagccc

SEQ ID NO: 26114 - DNA, 22 bp, Artificial Sequence
  chemically synthesized
caacaccattttagcccttttt

SEQ ID NO: 26115 - DNA, 22 bp, Artificial Sequence
  chemically synthesized
tagcccttttttgtcctcccca

SEQ ID NO: 26116 - DNA, 22 bp, Artificial Sequence
  chemically synthesized
agcccttttttgtcctccccat

SEQ ID NO: 26117 - DNA, 22 bp, Artificial Sequence
  chemically synthesized
gcccttttttgtcctccccata

SEQ ID NO: 26118 - DNA, 22 bp, Artificial Sequence
  chemically synthesized
ttttgtcctccccatattttta

SEQ ID NO: 26119 - DNA, 22 bp, Artificial Sequence
  chemically synthesized
tttgtcctccccatatttttac

SEQ ID NO: 26120 - DNA, 22 bp, Artificial Sequence
  chemically synthesized
ttgtcctccccatatttttacc

SEQ ID NO: 26121 - DNA, 22 bp, Artificial Sequence
  chemically synthesized
tgtcctccccatatttttacct

SEQ ID NO: 26122 - DNA, 22 bp, Artificial Sequence
  chemically synthesized
gtcctccccatatttttacctc

SEQ ID NO: 26123 - DNA, 22 bp, Artificial Sequence
  chemically synthesized
tcctccccatatttttacctcg

SEQ ID NO: 26124 - DNA, 22 bp, Artificial Sequence
  chemically synthesized
cccatatttttacctcggtttt

SEQ ID NO: 26125 - DNA, 22 bp, Artificial Sequence
  chemically synthesized
ttacctcggtttttactgttta

SEQ ID NO: 26126 - DNA, 22 bp, Artificial Sequence
  chemically synthesized
tacctcggtttttactgtttat

SEQ ID NO: 26127 - DNA, 22 bp, Artificial Sequence
  chemically synthesized
acctcggtttttactgtttata

SEQ ID NO: 26128 - DNA, 22 bp, Artificial Sequence
  chemically synthesized
cctcggtttttactgtttatat

SEQ ID NO: 26129 - DNA, 22 bp, Artificial Sequence
  chemically synthesized
ggtttttactgtttatatagca

SEQ ID NO: 26130 - DNA, 22 bp, Artificial Sequence
  chemically synthesized
ttactgtttatatagcacactt

SEQ ID NO: 26131 - DNA, 22 bp, Artificial Sequence
  chemically synthesized
tactgtttatatagcacacttt

SEQ ID NO: 26132 - DNA, 22 bp, Artificial Sequence
  chemically synthesized
actgtttatatagcacactttg

SEQ ID NO: 26133 - DNA, 22 bp, Artificial Sequence
  chemically synthesized
ctgtttatatagcacactttgt

SEQ ID NO: 26134 - DNA, 22 bp, Artificial Sequence
  chemically synthesized
tttatatagcacactttgtgct

SEQ ID NO: 26135 - DNA, 22 bp, Artificial Sequence
  chemically synthesized
atatagcacactttgtgctata

SEQ ID NO: 26136 - DNA, 22 bp, Artificial Sequence
  chemically synthesized
tatagcacactttgtgctatag

SEQ ID NO: 26137 - DNA, 22 bp, Artificial Sequence
  chemically synthesized
tgtgctatagtttacctcagtt

SEQ ID NO: 26138 - DNA, 22 bp, Artificial Sequence
  chemically synthesized
gtgctatagtttacctcagttt

SEQ ID NO: 26139 - DNA, 22 bp, Artificial Sequence
  chemically synthesized
tgctatagtttacctcagtttt

SEQ ID NO: 26140 - DNA, 22 bp, Artificial Sequence
  chemically synthesized
tagtttacctcagtttttacta

SEQ ID NO: 26141 - DNA, 22 bp, Artificial Sequence
  chemically synthesized
acctcagtttttactatttata

SEQ ID NO: 26142 - DNA, 22 bp, Artificial Sequence
  chemically synthesized
cctcagtttttactatttataa

SEQ ID NO: 26143 - DNA, 22 bp, Artificial Sequence
  chemically synthesized
agtttttactatttataaagca

SEQ ID NO: 26144 - DNA, 22 bp, Artificial Sequence
  chemically synthesized
ttactatttataaagcacattt

SEQ ID NO: 26145 - DNA, 22 bp, Artificial Sequence
  chemically synthesized
tactatttataaagcacatttt

SEQ ID NO: 26146 - DNA, 22 bp, Artificial Sequence
  chemically synthesized
actatttataaagcacattttg

SEQ ID NO: 26147 - DNA, 22 bp, Artificial Sequence
  chemically synthesized
ctatttataaagcacattttgc

SEQ ID NO: 26148 - DNA, 22 bp, Artificial Sequence
  chemically synthesized
tttataaagcacattttgcccc

SEQ ID NO: 26149 - DNA, 22 bp, Artificial Sequence
  chemically synthesized
ataaagcacattttgccccaaa

SEQ ID NO: 26150 - DNA, 22 bp, Artificial Sequence
  chemically synthesized
taaagcacattttgccccaaac

SEQ ID NO: 26151 - DNA, 22 bp, Artificial Sequence
  chemically synthesized
tgccccaaacttctctcttaac

SEQ ID NO: 26152 - DNA, 22 bp, Artificial Sequence
  chemically synthesized
gccccaaacttctctcttaaca

SEQ ID NO: 26153 - DNA, 22 bp, Artificial Sequence
  chemically synthesized
ccccaaacttctctcttaacaa

SEQ ID NO: 26154 - DNA, 22 bp, Artificial Sequence
  chemically synthesized
ctctcttaacaagctagaatat

SEQ ID NO: 26155 - DNA, 22 bp, Artificial Sequence
  chemically synthesized
tctcttaacaagctagaatata

SEQ ID NO: 26156 - DNA, 22 bp, Artificial Sequence
  chemically synthesized
tcttaacaagctagaatataag

SEQ ID NO: 26157 - DNA, 22 bp, Artificial Sequence
  chemically synthesized
ttaacaagctagaatataagtg

SEQ ID NO: 26158 - DNA, 22 bp, Artificial Sequence
  chemically synthesized
aacaagctagaatataagtgaa

SEQ ID NO: 26159 - DNA, 22 bp, Artificial Sequence
  chemically synthesized
acaagctagaatataagtgaat

SEQ ID NO: 26160 - DNA, 22 bp, Artificial Sequence
  chemically synthesized
gaatataagtgaatgcaagagc

SEQ ID NO: 26161 - DNA, 22 bp, Artificial Sequence
  chemically synthesized
ctattttcatatttgaggtata

SEQ ID NO: 26162 - DNA, 22 bp, Artificial Sequence
  chemically synthesized
ttttcatatttgaggtataaac

SEQ ID NO: 26163 - DNA, 22 bp, Artificial Sequence
  chemically synthesized
tcatatttgaggtataaaccaa

SEQ ID NO: 26164 - DNA, 22 bp, Artificial Sequence
  chemically synthesized
catatttgaggtataaaccaag

SEQ ID NO: 26165 - DNA, 22 bp, Artificial Sequence
  chemically synthesized
atatttgaggtataaaccaagg

SEQ ID NO: 26166 - DNA, 22 bp, Artificial Sequence
  chemically synthesized
gaggtataaaccaaggagattt

SEQ ID NO: 26167 - DNA, 22 bp, Artificial Sequence
  chemically synthesized
aggtataaaccaaggagattta

SEQ ID NO: 26168 - DNA, 22 bp, Artificial Sequence
  chemically synthesized
acatacacatatatatttttaa

SEQ ID NO: 26169 - DNA, 22 bp, Artificial Sequence
  chemically synthesized
catacacatatatatttttaaa

SEQ ID NO: 26170 - DNA, 22 bp, Artificial Sequence
  chemically synthesized
ttaaatctgcaaataaatggtt

SEQ ID NO: 26171 - DNA, 22 bp, Artificial Sequence
  chemically synthesized
taaatctgcaaataaatggttt

SEQ ID NO: 26172 - DNA, 22 bp, Artificial Sequence
  chemically synthesized
aaatctgcaaataaatggtttt

SEQ ID NO: 26173 - DNA, 22 bp, Artificial Sequence
  chemically synthesized
aatctgcaaataaatggtttta

SEQ ID NO: 26174 - DNA, 22 bp, Artificial Sequence
  chemically synthesized
caaataaatggttttattctga

SEQ ID NO: 26175 - DNA, 22 bp, Artificial Sequence
  chemically synthesized
tattctgacattaaaaaagaaa

SEQ ID NO: 26176 - DNA, 22 bp, Artificial Sequence
  chemically synthesized
attctgacattaaaaaagaaaa

SEQ ID NO: 26177 - DNA, 22 bp, Artificial Sequence
  chemically synthesized
ttctgacattaaaaaagaaaat

SEQ ID NO: 26178 - DNA, 22 bp, Artificial Sequence
  chemically synthesized
tgacattaaaaaagaaaatact

SEQ ID NO: 26179 - DNA, 22 bp, Artificial Sequence
  chemically synthesized
acattaaaaaagaaaatactta

SEQ ID NO: 26180 - DNA, 22 bp, Artificial Sequence
  chemically synthesized
aaaaagaaaatacttaatatca

SEQ ID NO: 26181 - DNA, 22 bp, Artificial Sequence
  chemically synthesized
aatatcattaatgaatgatcgt

SEQ ID NO: 26182 - DNA, 22 bp, Artificial Sequence
  chemically synthesized
atatcattaatgaatgatcgtt

SEQ ID NO: 26183 - DNA, 22 bp, Artificial Sequence
  chemically synthesized
atgaatgatcgttttaccacag

SEQ ID NO: 26184 - DNA, 22 bp, Artificial Sequence
  chemically synthesized
taccacagcgtaggtcattgaa

SEQ ID NO: 26185 - DNA, 22 bp, Artificial Sequence
  chemically synthesized
accacagcgtaggtcattgaat

SEQ ID NO: 26186 - DNA, 22 bp, Artificial Sequence
  chemically synthesized
ccacagcgtaggtcattgaatt

SEQ ID NO: 26187 - DNA, 22 bp, Artificial Sequence
  chemically synthesized
aatttgaacttaaccttcactt

SEQ ID NO: 26188 - DNA, 22 bp, Artificial Sequence
  chemically synthesized
gaacttaaccttcactttcaaa

SEQ ID NO: 26189 - DNA, 22 bp, Artificial Sequence
  chemically synthesized
aacttaaccttcactttcaaac

SEQ ID NO: 26190 - DNA, 22 bp, Artificial Sequence
  chemically synthesized
aaccttcactttcaaacaagta

SEQ ID NO: 26191 - DNA, 22 bp, Artificial Sequence
  chemically synthesized
accttcactttcaaacaagtac

SEQ ID NO: 26192 - DNA, 22 bp, Artificial Sequence
  chemically synthesized
cactttcaaacaagtactttgt

SEQ ID NO: 26193 - DNA, 22 bp, Artificial Sequence
  chemically synthesized
actttcaaacaagtactttgta

SEQ ID NO: 26194 - DNA, 22 bp, Artificial Sequence
  chemically synthesized
tcaaacaagtactttgtatttt

SEQ ID NO: 26195 - DNA, 22 bp, Artificial Sequence
  chemically synthesized
caaacaagtactttgtatttta

SEQ ID NO: 26196 - DNA, 22 bp, Artificial Sequence
  chemically synthesized
aaacaagtactttgtattttat

SEQ ID NO: 26197 - DNA, 22 bp, Artificial Sequence
  chemically synthesized
tgtattttattgatctctattt

SEQ ID NO: 26198 - DNA, 22 bp, Artificial Sequence
  chemically synthesized
gtattttattgatctctatttt

SEQ ID NO: 26199 - DNA, 22 bp, Artificial Sequence
  chemically synthesized
tattttattgatctctattttc

SEQ ID NO: 26200 - DNA, 22 bp, Artificial Sequence
  chemically synthesized
tattgatctctattttcctgga

SEQ ID NO: 26201 - DNA, 22 bp, Artificial Sequence
  chemically synthesized
attgatctctattttcctggaa

SEQ ID NO: 26202 - DNA, 22 bp, Artificial Sequence
  chemically synthesized
ttgatctctattttcctggaac

SEQ ID NO: 26203 - DNA, 22 bp, Artificial Sequence
  chemically synthesized
atctctattttcctggaacaac

SEQ ID NO: 26204 - DNA, 22 bp, Artificial Sequence
  chemically synthesized
tattttcctggaacaacatggg

SEQ ID NO: 26205 - DNA, 22 bp, Artificial Sequence
  chemically synthesized
ttttcctggaacaacatggggg

SEQ ID NO: 26206 - DNA, 22 bp, Artificial Sequence
  chemically synthesized
tcctggaacaacatgggggcta

SEQ ID NO: 26207 - DNA, 22 bp, Artificial Sequence
  chemically synthesized
cctggaacaacatgggggctat

SEQ ID NO: 26208 - DNA, 22 bp, Artificial Sequence
  chemically synthesized
ctggaacaacatgggggctatg

SEQ ID NO: 26209 - DNA, 22 bp, Artificial Sequence
  chemically synthesized
gaacaacatgggggctatgttt

SEQ ID NO: 26210 - DNA, 22 bp, Artificial Sequence
  chemically synthesized
tgtttagcgtgaggacaaagta

SEQ ID NO: 26211 - DNA, 22 bp, Artificial Sequence
  chemically synthesized
agcgtgaggacaaagtatcaca

SEQ ID NO: 26212 - DNA, 22 bp, Artificial Sequence
  chemically synthesized
gcgtgaggacaaagtatcacaa

SEQ ID NO: 26213 - DNA, 22 bp, Artificial Sequence
  chemically synthesized
tcacctgaaagaaaagatgagc

SEQ ID NO: 26214 - DNA, 22 bp, Artificial Sequence
  chemically synthesized
cacctgaaagaaaagatgagct

SEQ ID NO: 26215 - DNA, 22 bp, Artificial Sequence
  chemically synthesized
acctgaaagaaaagatgagcta

SEQ ID NO: 26216 - DNA, 22 bp, Artificial Sequence
  chemically synthesized
aaagaaaagatgagctaccatg

SEQ ID NO: 26217 - DNA, 22 bp, Artificial Sequence
  chemically synthesized
ccatggtacatataacaatgag

SEQ ID NO: 26218 - DNA, 22 bp, Artificial Sequence
  chemically synthesized
aaactctaagtcgtcatctggc

SEQ ID NO: 26219 - DNA, 22 bp, Artificial Sequence
  chemically synthesized
taagtcgtcatctggcaacact

SEQ ID NO: 26220 - DNA, 22 bp, Artificial Sequence
  chemically synthesized
agtcgtcatctggcaacactgc

SEQ ID NO: 26221 - DNA, 22 bp, Artificial Sequence
  chemically synthesized
gcaacactgccaatttactaaa

SEQ ID NO: 26222 - DNA, 22 bp, Artificial Sequence
  chemically synthesized
ccaatttactaaaaatcactat

SEQ ID NO: 26223 - DNA, 22 bp, Artificial Sequence
  chemically synthesized
actaaaaatcactatttcaaag

SEQ ID NO: 26224 - DNA, 22 bp, Artificial Sequence
  chemically synthesized
ctaaaaatcactatttcaaaga

SEQ ID NO: 26225 - DNA, 22 bp, Artificial Sequence
  chemically synthesized
aaaatcactatttcaaagaagt

SEQ ID NO: 26226 - DNA, 22 bp, Artificial Sequence
  chemically synthesized
tttcaaagaagtatagaataga

SEQ ID NO: 26227 - DNA, 22 bp, Artificial Sequence
  chemically synthesized
caaagaagtatagaatagatat

SEQ ID NO: 26228 - DNA, 22 bp, Artificial Sequence
  chemically synthesized
aaagaagtatagaatagatatc

SEQ ID NO: 26229 - DNA, 22 bp, Artificial Sequence
  chemically synthesized
tttctctgcctctctctcgctc

SEQ ID NO: 26230 - DNA, 22 bp, Artificial Sequence
  chemically synthesized
tctctgcctctctctcgctctc

SEQ ID NO: 26231 - DNA, 22 bp, Artificial Sequence
  chemically synthesized
ctctgcctctctctcgctctct

SEQ ID NO: 26232 - DNA, 22 bp, Artificial Sequence
  chemically synthesized
tctgcctctctctcgctctctc

SEQ ID NO: 26233 - DNA, 22 bp, Artificial Sequence
  chemically synthesized
tgcctctctctcgctctctctc

SEQ ID NO: 26234 - DNA, 22 bp, Artificial Sequence
  chemically synthesized
cctctctctcgctctctctctc

SEQ ID NO: 26235 - DNA, 22 bp, Artificial Sequence
  chemically synthesized
tctctcgctctctctctctctc

SEQ ID NO: 26236 - DNA, 22 bp, Artificial Sequence
  chemically synthesized
tctcgctctctctctctctctc

SEQ ID NO: 26237 - DNA, 22 bp, Artificial Sequence
  chemically synthesized
tcgctctctctctctctctccc

SEQ ID NO: 26238 - DNA, 22 bp, Artificial Sequence
  chemically synthesized
gctctctctctctctctccccc

SEQ ID NO: 26239 - DNA, 22 bp, Artificial Sequence
  chemically synthesized
tctctctctctctcccccatct

SEQ ID NO: 26240 - DNA, 22 bp, Artificial Sequence
  chemically synthesized
tctctctctctcccccatctct

SEQ ID NO: 26241 - DNA, 22 bp, Artificial Sequence
  chemically synthesized
tctctctctcccccatctctct

SEQ ID NO: 26242 - DNA, 22 bp, Artificial Sequence
  chemically synthesized
tctctctcccccatctctctct

SEQ ID NO: 26243 - DNA, 22 bp, Artificial Sequence
  chemically synthesized
tctctcccccatctctctctgt

SEQ ID NO: 26244 - DNA, 22 bp, Artificial Sequence
  chemically synthesized
tctcccccatctctctctgtct

SEQ ID NO: 26245 - DNA, 22 bp, Artificial Sequence
  chemically synthesized
tcccccatctctctctgtctct

SEQ ID NO: 26246 - DNA, 22 bp, Artificial Sequence
  chemically synthesized
ccccatctctctctgtctctct

SEQ ID NO: 26247 - DNA, 22 bp, Artificial Sequence
  chemically synthesized
tctctgtctctctctctatata

SEQ ID NO: 26248 - DNA, 22 bp, Artificial Sequence
  chemically synthesized
tctgtctctctctctatatata

SEQ ID NO: 26249 - DNA, 22 bp, Artificial Sequence
  chemically synthesized
tgtctctctctctatatatatg

SEQ ID NO: 26250 - DNA, 22 bp, Artificial Sequence
  chemically synthesized
tctctctctctatatatatgta

SEQ ID NO: 26251 - DNA, 22 bp, Artificial Sequence
  chemically synthesized
tctctctatatatatgtataca

SEQ ID NO: 26252 - DNA, 22 bp, Artificial Sequence
  chemically synthesized
tctctatatatatgtatacaca

SEQ ID NO: 26253 - DNA, 22 bp, Artificial Sequence
  chemically synthesized
tctatatatatgtatacacaca

SEQ ID NO: 26254 - DNA, 22 bp, Artificial Sequence
  chemically synthesized
tatatatatgtatacacacata

SEQ ID NO: 26255 - DNA, 22 bp, Artificial Sequence
  chemically synthesized
tatatatgtatacacacatata

SEQ ID NO: 26256 - DNA, 22 bp, Artificial Sequence
  chemically synthesized
tacacatatggagaaatttcac

SEQ ID NO: 26257 - DNA, 22 bp, Artificial Sequence
  chemically synthesized
cactattttgtatatgcttaaa

SEQ ID NO: 26258 - DNA, 22 bp, Artificial Sequence
  chemically synthesized
actattttgtatatgcttaaaa

SEQ ID NO: 26259 - DNA, 22 bp, Artificial Sequence
  chemically synthesized
ttttgtatatgcttaaaaatta

SEQ ID NO: 26260 - DNA, 22 bp, Artificial Sequence
  chemically synthesized
tgtatatgcttaaaaattacag

SEQ ID NO: 26261 - DNA, 22 bp, Artificial Sequence
  chemically synthesized
gtatatgcttaaaaattacaga

SEQ ID NO: 26262 - DNA, 22 bp, Artificial Sequence
  chemically synthesized
tatatgcttaaaaattacagac

SEQ ID NO: 26263 - DNA, 22 bp, Artificial Sequence
  chemically synthesized
aaaaattacagactttggaagt

SEQ ID NO: 26264 - DNA, 22 bp, Artificial Sequence
  chemically synthesized
aaaattacagactttggaagtc

SEQ ID NO: 26265 - DNA, 22 bp, Artificial Sequence
  chemically synthesized
cagactttggaagtcatatgac

SEQ ID NO: 26266 - DNA, 22 bp, Artificial Sequence
  chemically synthesized
tggaagtcatatgactatttca

SEQ ID NO: 26267 - DNA, 22 bp, Artificial Sequence
  chemically synthesized
ggaagtcatatgactatttcag

SEQ ID NO: 26268 - DNA, 22 bp, Artificial Sequence
  chemically synthesized
gaagtcatatgactatttcagt

SEQ ID NO: 26269 - DNA, 22 bp, Artificial Sequence
  chemically synthesized
tttcagtgtgtgtggctactaa

SEQ ID NO: 26270 - DNA, 22 bp, Artificial Sequence
  chemically synthesized
cagtgtgtgtggctactaatct

SEQ ID NO: 26271 - DNA, 22 bp, Artificial Sequence
  chemically synthesized
agtgtgtgtggctactaatctc

SEQ ID NO: 26272 - DNA, 22 bp, Artificial Sequence
  chemically synthesized
ctaatctcaccctcctgttcca

SEQ ID NO: 26273 - DNA, 22 bp, Artificial Sequence
  chemically synthesized
atctcaccctcctgttccaaaa

SEQ ID NO: 26274 - DNA, 22 bp, Artificial Sequence
  chemically synthesized
accctcctgttccaaaacacag

SEQ ID NO: 26275 - DNA, 22 bp, Artificial Sequence
  chemically synthesized
ctgttccaaaacacagttgcag

SEQ ID NO: 26276 - DNA, 22 bp, Artificial Sequence
  chemically synthesized
ttccaaaacacagttgcagaag

SEQ ID NO: 26277 - DNA, 22 bp, Artificial Sequence
  chemically synthesized
caaaacacagttgcagaagcag

SEQ ID NO: 26278 - DNA, 22 bp, Artificial Sequence
  chemically synthesized
cagaagcagaggaagtcattat

SEQ ID NO: 26279 - DNA, 22 bp, Artificial Sequence
  chemically synthesized
tacacttagaacatcattttat

SEQ ID NO: 26280 - DNA, 22 bp, Artificial Sequence
  chemically synthesized
agaacatcattttataaggcag

SEQ ID NO: 26281 - DNA, 22 bp, Artificial Sequence
  chemically synthesized
gaacatcattttataaggcagc

SEQ ID NO: 26282 - DNA, 22 bp, Artificial Sequence
  chemically synthesized
tataaggcagcaggtctggtag

SEQ ID NO: 26283 - DNA, 22 bp, Artificial Sequence
  chemically synthesized
ataaggcagcaggtctggtagg

SEQ ID NO: 26284 - DNA, 22 bp, Artificial Sequence
  chemically synthesized
taaggcagcaggtctggtagga

SEQ ID NO: 26285 - DNA, 22 bp, Artificial Sequence
  chemically synthesized
gtaggaaggagattaggtgcta

SEQ ID NO: 26286 - DNA, 22 bp, Artificial Sequence
  chemically synthesized
ggtgctacttgtgacaaaggtc

SEQ ID NO: 26287 - DNA, 22 bp, Artificial Sequence
  chemically synthesized
cttgtgacaaaggtcagcaaat

SEQ ID NO: 26288 - DNA, 22 bp, Artificial Sequence
  chemically synthesized
gtgacaaaggtcagcaaatatt

SEQ ID NO: 26289 - DNA, 22 bp, Artificial Sequence
  chemically synthesized
tgacaaaggtcagcaaatattt

SEQ ID NO: 26290 - DNA, 22 bp, Artificial Sequence
  chemically synthesized
gtgttcccagcacttttctaga

SEQ ID NO: 26291 - DNA, 22 bp, Artificial Sequence
  chemically synthesized
tgttcccagcacttttctagat

SEQ ID NO: 26292 - DNA, 22 bp, Artificial Sequence
  chemically synthesized
ccagcacttttctagatcctca

SEQ ID NO: 26293 - DNA, 22 bp, Artificial Sequence
  chemically synthesized
ttctagatcctcagttaaaatc

SEQ ID NO: 26294 - DNA, 22 bp, Artificial Sequence
  chemically synthesized
tctagatcctcagttaaaatca

SEQ ID NO: 26295 - DNA, 22 bp, Artificial Sequence
  chemically synthesized
ctagatcctcagttaaaatcaa

SEQ ID NO: 26296 - DNA, 22 bp, Artificial Sequence
  chemically synthesized
tagatcctcagttaaaatcaaa

SEQ ID NO: 26297 - DNA, 22 bp, Artificial Sequence
  chemically synthesized
gatcctcagttaaaatcaaagc

SEQ ID NO: 26298 - DNA, 22 bp, Artificial Sequence
  chemically synthesized
agttaaaatcaaagcagctgca

SEQ ID NO: 26299 - DNA, 22 bp, Artificial Sequence
  chemically synthesized
aaatcaaagcagctgcagtctt

SEQ ID NO: 26300 - DNA, 22 bp, Artificial Sequence
  chemically synthesized
cagtcttggcagtgggaggtga

SEQ ID NO: 26301 - DNA, 22 bp, Artificial Sequence
  chemically synthesized
ggcagtgggaggtgatactcac

SEQ ID NO: 26302 - DNA, 22 bp, Artificial Sequence
  chemically synthesized
gcagtgggaggtgatactcaca

SEQ ID NO: 26303 - DNA, 22 bp, Artificial Sequence
  chemically synthesized
acactttgaacaagaccacctg

SEQ ID NO: 26304 - DNA, 22 bp, Artificial Sequence
  chemically synthesized
tgaacaagaccacctgcactac

SEQ ID NO: 26305 - DNA, 22 bp, Artificial Sequence
  chemically synthesized
gaacaagaccacctgcactacc

SEQ ID NO: 26306 - DNA, 22 bp, Artificial Sequence
  chemically synthesized
aacaagaccacctgcactacct

SEQ ID NO: 26307 - DNA, 22 bp, Artificial Sequence
  chemically synthesized
cactacctacaatggcagctcc

SEQ ID NO: 26308 - DNA, 22 bp, Artificial Sequence
  chemically synthesized
cctacaatggcagctccaaata

SEQ ID NO: 26309 - DNA, 22 bp, Artificial Sequence
  chemically synthesized
caatggcagctccaaatatttt

SEQ ID NO: 26310 - DNA, 22 bp, Artificial Sequence
  chemically synthesized
caaatattttatatgaaagggg

SEQ ID NO: 26311 - DNA, 22 bp, Artificial Sequence
  chemically synthesized
tatatgaaaggggcctagacat

SEQ ID NO: 26312 - DNA, 22 bp, Artificial Sequence
  chemically synthesized
atatgaaaggggcctagacata

SEQ ID NO: 26313 - DNA, 22 bp, Artificial Sequence
  chemically synthesized
tatgaaaggggcctagacatag

SEQ ID NO: 26314 - DNA, 22 bp, Artificial Sequence
  chemically synthesized
gacatagcatgctgaatgaaaa

SEQ ID NO: 26315 - DNA, 22 bp, Artificial Sequence
  chemically synthesized
aatgaaaaggaagtgagtagac

SEQ ID NO: 26316 - DNA, 22 bp, Artificial Sequence
  chemically synthesized
gtgctttccttgaagctgtgca

SEQ ID NO: 26317 - DNA, 22 bp, Artificial Sequence
  chemically synthesized
tccttgaagctgtgcaaccaag

SEQ ID NO: 26318 - DNA, 22 bp, Artificial Sequence
  chemically synthesized
ccttgaagctgtgcaaccaagc

SEQ ID NO: 26319 - DNA, 22 bp, Artificial Sequence
  chemically synthesized
cttgaagctgtgcaaccaagca

SEQ ID NO: 26320 - DNA, 22 bp, Artificial Sequence
  chemically synthesized
gaagctgtgcaaccaagcatag

SEQ ID NO: 26321 - DNA, 22 bp, Artificial Sequence
  chemically synthesized
aagctgtgcaaccaagcatagt

SEQ ID NO: 26322 - DNA, 22 bp, Artificial Sequence
  chemically synthesized
tgcaaccaagcatagtttttac

SEQ ID NO: 26323 - DNA, 22 bp, Artificial Sequence
  chemically synthesized
ttacatagatcgtgtgtttcac

SEQ ID NO: 26324 - DNA, 22 bp, Artificial Sequence
  chemically synthesized
tacatagatcgtgtgtttcaca

SEQ ID NO: 26325 - DNA, 22 bp, Artificial Sequence
  chemically synthesized
acatagatcgtgtgtttcacat

SEQ ID NO: 26326 - DNA, 22 bp, Artificial Sequence
  chemically synthesized
catagatcgtgtgtttcacatg

SEQ ID NO: 26327 - DNA, 22 bp, Artificial Sequence
  chemically synthesized
cacatggtgtgataacagcttg

SEQ ID NO: 26328 - DNA, 22 bp, Artificial Sequence
  chemically synthesized
acatggtgtgataacagcttga

SEQ ID NO: 26329 - DNA, 22 bp, Artificial Sequence
  chemically synthesized
gagatgccattgacatggccca

SEQ ID NO: 26330 - DNA, 22 bp, Artificial Sequence
  chemically synthesized
agatgccattgacatggcccac

SEQ ID NO: 26331 - DNA, 22 bp, Artificial Sequence
  chemically synthesized
acatggcccaccggcttatcca

SEQ ID NO: 26332 - DNA, 22 bp, Artificial Sequence
  chemically synthesized
atccacatcagtaattagggca

SEQ ID NO: 26333 - DNA, 22 bp, Artificial Sequence
  chemically synthesized
tccacatcagtaattagggcaa

SEQ ID NO: 26334 - DNA, 22 bp, Artificial Sequence
  chemically synthesized
gggcaaagaaatcctaattact

SEQ ID NO: 26335 - DNA, 22 bp, Artificial Sequence
  chemically synthesized
attactatgcatcccgtgattg

SEQ ID NO: 26336 - DNA, 22 bp, Artificial Sequence
  chemically synthesized
ctatgcatcccgtgattgaagt

SEQ ID NO: 26337 - DNA, 22 bp, Artificial Sequence
  chemically synthesized
tgcatcccgtgattgaagtaac

SEQ ID NO: 26338 - DNA, 22 bp, Artificial Sequence
  chemically synthesized
aagtaacattgatgtatacata

SEQ ID NO: 26339 - DNA, 22 bp, Artificial Sequence
  chemically synthesized
atgtatacatattttttcctat

SEQ ID NO: 26340 - DNA, 22 bp, Artificial Sequence
  chemically synthesized
tttcctattatttctctttttg

SEQ ID NO: 26341 - DNA, 22 bp, Artificial Sequence
  chemically synthesized
ttcctattatttctctttttgt

SEQ ID NO: 26342 - DNA, 22 bp, Artificial Sequence
  chemically synthesized
tcctattatttctctttttgtg

SEQ ID NO: 26343 - DNA, 22 bp, Artificial Sequence
  chemically synthesized
cctattatttctctttttgtgt

SEQ ID NO: 26344 - DNA, 22 bp, Artificial Sequence
  chemically synthesized
ctattatttctctttttgtgtt

SEQ ID NO: 26345 - DNA, 22 bp, Artificial Sequence
  chemically synthesized
ttatttctctttttgtgtttaa

SEQ ID NO: 26346 - DNA, 22 bp, Artificial Sequence
  chemically synthesized
tttctctttttgtgtttaaaaa

SEQ ID NO: 26347 - DNA, 22 bp, Artificial Sequence
  chemically synthesized
ctctttttgtgtttaaaaatgc

SEQ ID NO: 26348 - DNA, 22 bp, Artificial Sequence
  chemically synthesized
tctttttgtgtttaaaaatgca

SEQ ID NO: 26349 - DNA, 22 bp, Artificial Sequence
  chemically synthesized
tttttgtgtttaaaaatgcaat

SEQ ID NO: 26350 - DNA, 22 bp, Artificial Sequence
  chemically synthesized
tttgtgtttaaaaatgcaatta

SEQ ID NO: 26351 - DNA, 22 bp, Artificial Sequence
  chemically synthesized
ttgtgtttaaaaatgcaattat

SEQ ID NO: 26352 - DNA, 22 bp, Artificial Sequence
  chemically synthesized
tgtgtttaaaaatgcaattatg

SEQ ID NO: 26353 - DNA, 22 bp, Artificial Sequence
  chemically synthesized
gtgtttaaaaatgcaattatgg

SEQ ID NO: 26354 - DNA, 22 bp, Artificial Sequence
  chemically synthesized
tgtttaaaaatgcaattatgga

SEQ ID NO: 26355 - DNA, 22 bp, Artificial Sequence
  chemically synthesized
aaaaatgcaattatggactcat

SEQ ID NO: 26356 - DNA, 22 bp, Artificial Sequence
  chemically synthesized
aaaatgcaattatggactcatt

SEQ ID NO: 26357 - DNA, 22 bp, Artificial Sequence
  chemically synthesized
tggactcattcaaagtgaaagc

SEQ ID NO: 26358 - DNA, 22 bp, Artificial Sequence
  chemically synthesized
attcaaagtgaaagctggtatg

SEQ ID NO: 26359 - DNA, 22 bp, Artificial Sequence
  chemically synthesized
aaagtgaaagctggtatgacaa

SEQ ID NO: 26360 - DNA, 22 bp, Artificial Sequence
  chemically synthesized
gtatgacaatacatgagctaac

SEQ ID NO: 26361 - DNA, 22 bp, Artificial Sequence
  chemically synthesized
acttcctcattttatgaataaa

SEQ ID NO: 26362 - DNA, 22 bp, Artificial Sequence
  chemically synthesized
cctcattttatgaataaatttt

SEQ ID NO: 26363 - DNA, 22 bp, Artificial Sequence
  chemically synthesized
ctcattttatgaataaatttta

SEQ ID NO: 26364 - DNA, 22 bp, Artificial Sequence
  chemically synthesized
attttatgaataaattttataa

SEQ ID NO: 26365 - DNA, 22 bp, Artificial Sequence
  chemically synthesized
tatgaataaattttataaagaa

SEQ ID NO: 26366 - DNA, 22 bp, Artificial Sequence
  chemically synthesized
atgaataaattttataaagaaa

SEQ ID NO: 26367 - DNA, 22 bp, Artificial Sequence
  chemically synthesized
tgaataaattttataaagaaat

SEQ ID NO: 26368 - DNA, 22 bp, Artificial Sequence
  chemically synthesized
tataaagaaataagctaatacc

SEQ ID NO: 26369 - DNA, 22 bp, Artificial Sequence
  chemically synthesized
ataaagaaataagctaatacct

SEQ ID NO: 26370 - DNA, 22 bp, Artificial Sequence
  chemically synthesized
taaagaaataagctaataccta

SEQ ID NO: 26371 - DNA, 22 bp, Artificial Sequence
  chemically synthesized
atacctacagagtgtttattaa

SEQ ID NO: 26372 - DNA, 22 bp, Artificial Sequence
  chemically synthesized
cagagtgtttattaaatgctag

SEQ ID NO: 26373 - DNA, 22 bp, Artificial Sequence
  chemically synthesized
attaaatgctaggcacagttct

SEQ ID NO: 26374 - DNA, 22 bp, Artificial Sequence
  chemically synthesized
ttaaatgctaggcacagttctg

SEQ ID NO: 26375 - DNA, 22 bp, Artificial Sequence
  chemically synthesized
aatgctaggcacagttctgagt

SEQ ID NO: 26376 - DNA, 22 bp, Artificial Sequence
  chemically synthesized
ggcacagttctgagtgatttac

SEQ ID NO: 26377 - DNA, 22 bp, Artificial Sequence
  chemically synthesized
tgagtgatttacaactggtatt

SEQ ID NO: 26378 - DNA, 22 bp, Artificial Sequence
  chemically synthesized
agtgatttacaactggtatttc

SEQ ID NO: 26379 - DNA, 22 bp, Artificial Sequence
  chemically synthesized
acaactggtatttcttttaatt

SEQ ID NO: 26380 - DNA, 22 bp, Artificial Sequence
  chemically synthesized
caactggtatttcttttaattt

SEQ ID NO: 26381 - DNA, 22 bp, Artificial Sequence
  chemically synthesized
gtatttcttttaattttcacaa

SEQ ID NO: 26382 - DNA, 22 bp, Artificial Sequence
  chemically synthesized
cttttaattttcacaacattat

SEQ ID NO: 26383 - DNA, 22 bp, Artificial Sequence
  chemically synthesized
ttttaattttcacaacattatt

SEQ ID NO: 26384 - DNA, 22 bp, Artificial Sequence
  chemically synthesized
ttaattttcacaacattattac

SEQ ID NO: 26385 - DNA, 22 bp, Artificial Sequence
  chemically synthesized
taattttcacaacattattaca

SEQ ID NO: 26386 - DNA, 22 bp, Artificial Sequence
  chemically synthesized
aattttcacaacattattacag

SEQ ID NO: 26387 - DNA, 22 bp, Artificial Sequence
  chemically synthesized
attttcacaacattattacagg

SEQ ID NO: 26388 - DNA, 22 bp, Artificial Sequence
  chemically synthesized
tcacaacattattacaggtaga

SEQ ID NO: 26389 - DNA, 22 bp, Artificial Sequence
  chemically synthesized
cacaacattattacaggtagat

SEQ ID NO: 26390 - DNA, 22 bp, Artificial Sequence
  chemically synthesized
acaacattattacaggtagatt

SEQ ID NO: 26391 - DNA, 22 bp, Artificial Sequence
  chemically synthesized
ttacaggtagattttatatatg

SEQ ID NO: 26392 - DNA, 22 bp, Artificial Sequence
  chemically synthesized
caggtagattttatatatggag

SEQ ID NO: 26393 - DNA, 22 bp, Artificial Sequence
  chemically synthesized
tatatatggagaaactgaggca

SEQ ID NO: 26394 - DNA, 22 bp, Artificial Sequence
  chemically synthesized
atatatggagaaactgaggcac

SEQ ID NO: 26395 - DNA, 22 bp, Artificial Sequence
  chemically synthesized
tatatggagaaactgaggcaca

SEQ ID NO: 26396 - DNA, 22 bp, Artificial Sequence
  chemically synthesized
aggcacagagatgctatgtaat

SEQ ID NO: 26397 - DNA, 22 bp, Artificial Sequence
  chemically synthesized
tgtaataaatctcaacattacc

SEQ ID NO: 26398 - DNA, 22 bp, Artificial Sequence
  chemically synthesized
aacattacccaggtgatggtgg

SEQ ID NO: 26399 - DNA, 22 bp, Artificial Sequence
  chemically synthesized
cccaggtgatggtggagttgga

SEQ ID NO: 26400 - DNA, 22 bp, Artificial Sequence
  chemically synthesized
gaattccaaatcatgcagtctg

SEQ ID NO: 26401 - DNA, 22 bp, Artificial Sequence
  chemically synthesized
caaatcatgcagtctgacttta

SEQ ID NO: 26402 - DNA, 22 bp, Artificial Sequence
  chemically synthesized
actttagctgtagacagcaaga

SEQ ID NO: 26403 - DNA, 22 bp, Artificial Sequence
  chemically synthesized
tagctgtagacagcaagatagt

SEQ ID NO: 26404 - DNA, 22 bp, Artificial Sequence
  chemically synthesized
agctgtagacagcaagatagta

SEQ ID NO: 26405 - DNA, 22 bp, Artificial Sequence
  chemically synthesized
gctgtagacagcaagatagtaa

SEQ ID NO: 26406 - DNA, 22 bp, Artificial Sequence
  chemically synthesized
tagacagcaagatagtaagtaa

SEQ ID NO: 26407 - DNA, 22 bp, Artificial Sequence
  chemically synthesized
atggatctttttgcttttgctt

SEQ ID NO: 26408 - DNA, 22 bp, Artificial Sequence
  chemically synthesized
tttgcttttgcttgtttgtttg

SEQ ID NO: 26409 - DNA, 22 bp, Artificial Sequence
  chemically synthesized
ttgcttttgcttgtttgtttga

SEQ ID NO: 26410 - DNA, 22 bp, Artificial Sequence
  chemically synthesized
tgcttttgcttgtttgtttgaa

SEQ ID NO: 26411 - DNA, 22 bp, Artificial Sequence
  chemically synthesized
gcttttgcttgtttgtttgaaa

SEQ ID NO: 26412 - DNA, 22 bp, Artificial Sequence
  chemically synthesized
cttttgcttgtttgtttgaaac

SEQ ID NO: 26413 - DNA, 22 bp, Artificial Sequence
  chemically synthesized
ttgcttgtttgtttgaaacagg

SEQ ID NO: 26414 - DNA, 22 bp, Artificial Sequence
  chemically synthesized
tgcttgtttgtttgaaacaggg

SEQ ID NO: 26415 - DNA, 22 bp, Artificial Sequence
  chemically synthesized
gcttgtttgtttgaaacagggt

SEQ ID NO: 26416 - DNA, 22 bp, Artificial Sequence
  chemically synthesized
cttgtttgtttgaaacagggtc

SEQ ID NO: 26417 - DNA, 22 bp, Artificial Sequence
  chemically synthesized
gtttgtttgaaacagggtctca

SEQ ID NO: 26418 - DNA, 22 bp, Artificial Sequence
  chemically synthesized
tttgtttgaaacagggtctcac

SEQ ID NO: 26419 - DNA, 22 bp, Artificial Sequence
  chemically synthesized
gtttgaaacagggtctcactct

SEQ ID NO: 26420 - DNA, 22 bp, Artificial Sequence
  chemically synthesized
tttgaaacagggtctcactctg

SEQ ID NO: 26421 - DNA, 22 bp, Artificial Sequence
  chemically synthesized
gaaacagggtctcactctgtca

SEQ ID NO: 26422 - DNA, 22 bp, Artificial Sequence
  chemically synthesized
aaacagggtctcactctgtcac

SEQ ID NO: 26423 - DNA, 22 bp, Artificial Sequence
  chemically synthesized
actctgtcaccccggctggagt

SEQ ID NO: 26424 - DNA, 22 bp, Artificial Sequence
  chemically synthesized
tgtcaccccggctggagtgcaa

SEQ ID NO: 26425 - DNA, 22 bp, Artificial Sequence
  chemically synthesized
tcaccccggctggagtgcaatg

SEQ ID NO: 26426 - DNA, 22 bp, Artificial Sequence
  chemically synthesized
gagtgcaatggtgcaatcttgc

SEQ ID NO: 26427 - DNA, 22 bp, Artificial Sequence
  chemically synthesized
gctcactgaagcctcactagaa

SEQ ID NO: 26428 - DNA, 22 bp, Artificial Sequence
  chemically synthesized
ctcactgaagcctcactagaac

SEQ ID NO: 26429 - DNA, 22 bp, Artificial Sequence
  chemically synthesized
actgaagcctcactagaacgcc

SEQ ID NO: 26430 - DNA, 22 bp, Artificial Sequence
  chemically synthesized
aagcctcactagaacgcctgga

SEQ ID NO: 26431 - DNA, 22 bp, Artificial Sequence
  chemically synthesized
actagaacgcctggattcaatt

SEQ ID NO: 26432 - DNA, 22 bp, Artificial Sequence
  chemically synthesized
gaacgcctggattcaattgatc

SEQ ID NO: 26433 - DNA, 22 bp, Artificial Sequence
  chemically synthesized
gattcaattgatcctcctgctt

SEQ ID NO: 26434 - DNA, 22 bp, Artificial Sequence
  chemically synthesized
aattgatcctcctgctttagcc

SEQ ID NO: 26435 - DNA, 22 bp, Artificial Sequence
  chemically synthesized
atcctcctgctttagcctctca

SEQ ID NO: 26436 - DNA, 22 bp, Artificial Sequence
  chemically synthesized
ctgctttagcctctcaggtagc

SEQ ID NO: 26437 - DNA, 22 bp, Artificial Sequence
  chemically synthesized
ctttagcctctcaggtagctag

SEQ ID NO: 26438 - DNA, 22 bp, Artificial Sequence
  chemically synthesized
tagcctctcaggtagctaggac

SEQ ID NO: 26439 - DNA, 22 bp, Artificial Sequence
  chemically synthesized
agcctctcaggtagctaggact

SEQ ID NO: 26440 - DNA, 22 bp, Artificial Sequence
  chemically synthesized
gcctctcaggtagctaggacta

SEQ ID NO: 26441 - DNA, 22 bp, Artificial Sequence
  chemically synthesized
tcaggtagctaggactacaggt

SEQ ID NO: 26442 - DNA, 22 bp, Artificial Sequence
  chemically synthesized
aggtagctaggactacaggtgt

SEQ ID NO: 26443 - DNA, 22 bp, Artificial Sequence
  chemically synthesized
ggactacaggtgtgagcctcca

SEQ ID NO: 26444 - DNA, 22 bp, Artificial Sequence
  chemically synthesized
caggtgtgagcctccatggcca

SEQ ID NO: 26445 - DNA, 22 bp, Artificial Sequence
  chemically synthesized
catggccagctagagaaatttt

SEQ ID NO: 26446 - DNA, 22 bp, Artificial Sequence
  chemically synthesized
gagaaattttttaaatttctgt

SEQ ID NO: 26447 - DNA, 22 bp, Artificial Sequence
  chemically synthesized
tttaaatttctgtagaaacagg

SEQ ID NO: 26448 - DNA, 22 bp, Artificial Sequence
  chemically synthesized
ttaaatttctgtagaaacaggg

SEQ ID NO: 26449 - DNA, 22 bp, Artificial Sequence
  chemically synthesized
taaatttctgtagaaacagggt

SEQ ID NO: 26450 - DNA, 22 bp, Artificial Sequence
  chemically synthesized
aaatttctgtagaaacagggtc

SEQ ID NO: 26451 - DNA, 22 bp, Artificial Sequence
  chemically synthesized
aatttctgtagaaacagggtct

SEQ ID NO: 26452 - DNA, 22 bp, Artificial Sequence
  chemically synthesized
ctgtagaaacagggtctcccta

SEQ ID NO: 26453 - DNA, 22 bp, Artificial Sequence
  chemically synthesized
tgtagaaacagggtctccctat

SEQ ID NO: 26454 - DNA, 22 bp, Artificial Sequence
  chemically synthesized
tagaaacagggtctccctatgt

SEQ ID NO: 26455 - DNA, 22 bp, Artificial Sequence
  chemically synthesized
cctatgttccccaggctggtat

SEQ ID NO: 26456 - DNA, 22 bp, Artificial Sequence
  chemically synthesized
tgttccccaggctggtatccaa

SEQ ID NO: 26457 - DNA, 22 bp, Artificial Sequence
  chemically synthesized
cccaggctggtatccaactctt

SEQ ID NO: 26458 - DNA, 22 bp, Artificial Sequence
  chemically synthesized
gtatccaactcttggtctcaaa

SEQ ID NO: 26459 - DNA, 22 bp, Artificial Sequence
  chemically synthesized
ttggtctcaaacaattctccca

SEQ ID NO: 26460 - DNA, 22 bp, Artificial Sequence
  chemically synthesized
ggtctcaaacaattctcccacc

SEQ ID NO: 26461 - DNA, 22 bp, Artificial Sequence
  chemically synthesized
gtctcaaacaattctcccacct

SEQ ID NO: 26462 - DNA, 22 bp, Artificial Sequence
  chemically synthesized
aaacaattctcccacctcagcc

SEQ ID NO: 26463 - DNA, 22 bp, Artificial Sequence
  chemically synthesized
tcccacctcagccttgaaaagt

SEQ ID NO: 26464 - DNA, 22 bp, Artificial Sequence
  chemically synthesized
ccacctcagccttgaaaagtgt

SEQ ID NO: 26465 - DNA, 22 bp, Artificial Sequence
  chemically synthesized
agccttgaaaagtgttgagatt

SEQ ID NO: 26466 - DNA, 22 bp, Artificial Sequence
  chemically synthesized
gaaaagtgttgagattacaggt

SEQ ID NO: 26467 - DNA, 22 bp, Artificial Sequence
  chemically synthesized
aaaagtgttgagattacaggtg

SEQ ID NO: 26468 - DNA, 22 bp, Artificial Sequence
  chemically synthesized
agattacaggtgtgaatcacca

SEQ ID NO: 26469 - DNA, 22 bp, Artificial Sequence
  chemically synthesized
caggtgtgaatcaccatgctgg

SEQ ID NO: 26470 - DNA, 22 bp, Artificial Sequence
  chemically synthesized
ggccttgatggatctttaaaag

SEQ ID NO: 26471 - DNA, 22 bp, Artificial Sequence
  chemically synthesized
gatggatctttaaaagtggtgg

SEQ ID NO: 26472 - DNA, 22 bp, Artificial Sequence
  chemically synthesized
atggatctttaaaagtggtggg

SEQ ID NO: 26473 - DNA, 22 bp, Artificial Sequence
  chemically synthesized
taaaagtggtggggggtaggag

SEQ ID NO: 26474 - DNA, 22 bp, Artificial Sequence
  chemically synthesized
aaaagtggtggggggtaggaga

SEQ ID NO: 26475 - DNA, 22 bp, Artificial Sequence
  chemically synthesized
aaagtggtggggggtaggagaa

SEQ ID NO: 26476 - DNA, 22 bp, Artificial Sequence
  chemically synthesized
ggtctcgggaaggatgggatcc

SEQ ID NO: 26477 - DNA, 22 bp, Artificial Sequence
  chemically synthesized
gggaaggatgggatccttttca

SEQ ID NO: 26478 - DNA, 22 bp, Artificial Sequence
  chemically synthesized
ttcattttgctctagagaaaag

SEQ ID NO: 26479 - DNA, 22 bp, Artificial Sequence
  chemically synthesized
tcattttgctctagagaaaagc

SEQ ID NO: 26480 - DNA, 22 bp, Artificial Sequence
  chemically synthesized
cattttgctctagagaaaagcc

SEQ ID NO: 26481 - DNA, 22 bp, Artificial Sequence
  chemically synthesized
attttgctctagagaaaagcca

SEQ ID NO: 26482 - DNA, 22 bp, Artificial Sequence
  chemically synthesized
tgctctagagaaaagccatttg

SEQ ID NO: 26483 - DNA, 22 bp, Artificial Sequence
  chemically synthesized
gctctagagaaaagccatttgg

SEQ ID NO: 26484 - DNA, 22 bp, Artificial Sequence
  chemically synthesized
ctctagagaaaagccatttgga

SEQ ID NO: 26485 - DNA, 22 bp, Artificial Sequence
  chemically synthesized
tagagaaaagccatttggaaaa

SEQ ID NO: 26486 - DNA, 22 bp, Artificial Sequence
  chemically synthesized
gagaaaagccatttggaaaact

SEQ ID NO: 26487 - DNA, 22 bp, Artificial Sequence
  chemically synthesized
ggaaaacttctgtgttaacaaa

SEQ ID NO: 26488 - DNA, 22 bp, Artificial Sequence
  chemically synthesized
gaaaacttctgtgttaacaaaa

SEQ ID NO: 26489 - DNA, 22 bp, Artificial Sequence
  chemically synthesized
ctgtgttaacaaaaaacagccg

SEQ ID NO: 26490 - DNA, 22 bp, Artificial Sequence
  chemically synthesized
tgtgttaacaaaaaacagccga

SEQ ID NO: 26491 - DNA, 22 bp, Artificial Sequence
  chemically synthesized
tgttaacaaaaaacagccgagt

SEQ ID NO: 26492 - DNA, 22 bp, Artificial Sequence
  chemically synthesized
acaaaaaacagccgagtagcct

SEQ ID NO: 26493 - DNA, 22 bp, Artificial Sequence
  chemically synthesized
gtattaaactttagagcagttg

SEQ ID NO: 26494 - DNA, 22 bp, Artificial Sequence
  chemically synthesized
aactttagagcagttgttcttt

SEQ ID NO: 26495 - DNA, 22 bp, Artificial Sequence
  chemically synthesized
tagagcagttgttctttacggc

SEQ ID NO: 26496 - DNA, 22 bp, Artificial Sequence
  chemically synthesized
agagcagttgttctttacggca

SEQ ID NO: 26497 - DNA, 22 bp, Artificial Sequence
  chemically synthesized
gagcagttgttctttacggcaa

SEQ ID NO: 26498 - DNA, 22 bp, Artificial Sequence
  chemically synthesized
ttctttacggcaattacagggg

SEQ ID NO: 26499 - DNA, 22 bp, Artificial Sequence
  chemically synthesized
tttacggcaattacaggggcct

SEQ ID NO: 26500 - DNA, 22 bp, Artificial Sequence
  chemically synthesized
tacggcaattacaggggccttc

SEQ ID NO: 26501 - DNA, 22 bp, Artificial Sequence
  chemically synthesized
acggcaattacaggggccttca

SEQ ID NO: 26502 - DNA, 22 bp, Artificial Sequence
  chemically synthesized
cggcaattacaggggccttcag

SEQ ID NO: 26503 - DNA, 22 bp, Artificial Sequence
  chemically synthesized
caggggccttcaggaagctgat

SEQ ID NO: 26504 - DNA, 22 bp, Artificial Sequence
  chemically synthesized
caggaagctgatggaagtgtga

SEQ ID NO: 26505 - DNA, 22 bp, Artificial Sequence
  chemically synthesized
aggaagctgatggaagtgtgaa

SEQ ID NO: 26506 - DNA, 22 bp, Artificial Sequence
  chemically synthesized
atggaagtgtgaagtcctcttc

SEQ ID NO: 26507 - DNA, 22 bp, Artificial Sequence
  chemically synthesized
ttctcagagaaaagtacttcta

SEQ ID NO: 26508 - DNA, 22 bp, Artificial Sequence
  chemically synthesized
ctcagagaaaagtacttctata

SEQ ID NO: 26509 - DNA, 22 bp, Artificial Sequence
  chemically synthesized
tcagagaaaagtacttctatat

SEQ ID NO: 26510 - DNA, 22 bp, Artificial Sequence
  chemically synthesized
agagaaaagtacttctatatac

SEQ ID NO: 26511 - DNA, 22 bp, Artificial Sequence
  chemically synthesized
ctatatacgtgcacctaatttt

SEQ ID NO: 26512 - DNA, 22 bp, Artificial Sequence
  chemically synthesized
tatatacgtgcacctaattttt

SEQ ID NO: 26513 - DNA, 22 bp, Artificial Sequence
  chemically synthesized
tatacgtgcacctaatttttag

SEQ ID NO: 26514 - DNA, 22 bp, Artificial Sequence
  chemically synthesized
atttttagatataatttctgaa

SEQ ID NO: 26515 - DNA, 22 bp, Artificial Sequence
  chemically synthesized
ttagatataatttctgaaggtt

SEQ ID NO: 26516 - DNA, 22 bp, Artificial Sequence
  chemically synthesized
tagatataatttctgaaggttt

SEQ ID NO: 26517 - DNA, 22 bp, Artificial Sequence
  chemically synthesized
agatataatttctgaaggttta

SEQ ID NO: 26518 - DNA, 22 bp, Artificial Sequence
  chemically synthesized
gatataatttctgaaggtttag

SEQ ID NO: 26519 - DNA, 22 bp, Artificial Sequence
  chemically synthesized
ctgaaggtttagaaactccttg

SEQ ID NO: 26520 - DNA, 22 bp, Artificial Sequence
  chemically synthesized
tgaaggtttagaaactccttga

SEQ ID NO: 26521 - DNA, 22 bp, Artificial Sequence
  chemically synthesized
aaggtttagaaactccttgagt

SEQ ID NO: 26522 - DNA, 22 bp, Artificial Sequence
  chemically synthesized
agaaactccttgagttcactta

SEQ ID NO: 26523 - DNA, 22 bp, Artificial Sequence
  chemically synthesized
gaaactccttgagttcacttat

SEQ ID NO: 26524 - DNA, 22 bp, Artificial Sequence
  chemically synthesized
cttgagttcacttatatcaaag

SEQ ID NO: 26525 - DNA, 22 bp, Artificial Sequence
  chemically synthesized
gagttcacttatatcaaagtcc

SEQ ID NO: 26526 - DNA, 22 bp, Artificial Sequence
  chemically synthesized
agttcacttatatcaaagtcct

SEQ ID NO: 26527 - DNA, 22 bp, Artificial Sequence
  chemically synthesized
acttatatcaaagtcctcacct

SEQ ID NO: 26528 - DNA, 22 bp, Artificial Sequence
  chemically synthesized
atatcaaagtcctcacctttag

SEQ ID NO: 26529 - DNA, 22 bp, Artificial Sequence
  chemically synthesized
tatcaaagtcctcacctttaga

SEQ ID NO: 26530 - DNA, 22 bp, Artificial Sequence
  chemically synthesized
acctttagaactcctgtcctag

SEQ ID NO: 26531 - DNA, 22 bp, Artificial Sequence
  chemically synthesized
tagaactcctgtcctagaagag

SEQ ID NO: 26532 - DNA, 22 bp, Artificial Sequence
  chemically synthesized
agaactcctgtcctagaagagt

SEQ ID NO: 26533 - DNA, 22 bp, Artificial Sequence
  chemically synthesized
gaactcctgtcctagaagagtg

SEQ ID NO: 26534 - DNA, 22 bp, Artificial Sequence
  chemically synthesized
ctgtcctagaagagtggactca

SEQ ID NO: 26535 - DNA, 22 bp, Artificial Sequence
  chemically synthesized
tcctagaagagtggactcatta

SEQ ID NO: 26536 - DNA, 22 bp, Artificial Sequence
  chemically synthesized
gaagagtggactcattattata

SEQ ID NO: 26537 - DNA, 22 bp, Artificial Sequence
  chemically synthesized
attattataatttcttccataa

SEQ ID NO: 26538 - DNA, 22 bp, Artificial Sequence
  chemically synthesized
ttataatttcttccataaccac

SEQ ID NO: 26539 - DNA, 22 bp, Artificial Sequence
  chemically synthesized
taatttcttccataaccacttt

SEQ ID NO: 26540 - DNA, 22 bp, Artificial Sequence
  chemically synthesized
cttccataaccactttgactct

SEQ ID NO: 26541 - DNA, 22 bp, Artificial Sequence
  chemically synthesized
ttccataaccactttgactcta

SEQ ID NO: 26542 - DNA, 22 bp, Artificial Sequence
  chemically synthesized
ccataaccactttgactctagt

SEQ ID NO: 26543 - DNA, 22 bp, Artificial Sequence
  chemically synthesized
cataaccactttgactctagtt

SEQ ID NO: 26544 - DNA, 22 bp, Artificial Sequence
  chemically synthesized
tgactctagttttctgaattct

SEQ ID NO: 26545 - DNA, 22 bp, Artificial Sequence
  chemically synthesized
gactctagttttctgaattctt

SEQ ID NO: 26546 - DNA, 22 bp, Artificial Sequence
  chemically synthesized
actctagttttctgaattcttc

SEQ ID NO: 26547 - DNA, 22 bp, Artificial Sequence
  chemically synthesized
tagttttctgaattcttccctg

SEQ ID NO: 26548 - DNA, 22 bp, Artificial Sequence
  chemically synthesized
gttttctgaattcttccctgtg

SEQ ID NO: 26549 - DNA, 22 bp, Artificial Sequence
  chemically synthesized
tctgaattcttccctgtgccac

SEQ ID NO: 26550 - DNA, 22 bp, Artificial Sequence
  chemically synthesized
ctgaattcttccctgtgccact

SEQ ID NO: 26551 - DNA, 22 bp, Artificial Sequence
  chemically synthesized
tgaattcttccctgtgccactt

SEQ ID NO: 26552 - DNA, 22 bp, Artificial Sequence
  chemically synthesized
aattcttccctgtgccacttgt

SEQ ID NO: 26553 - DNA, 22 bp, Artificial Sequence
  chemically synthesized
ttccctgtgccacttgtaccat

SEQ ID NO: 26554 - DNA, 22 bp, Artificial Sequence
  chemically synthesized
ccctgtgccacttgtaccatgt

SEQ ID NO: 26555 - DNA, 22 bp, Artificial Sequence
  chemically synthesized
cctgtgccacttgtaccatgta

SEQ ID NO: 26556 - DNA, 22 bp, Artificial Sequence
  chemically synthesized
tgccacttgtaccatgtaattc

SEQ ID NO: 26557 - DNA, 22 bp, Artificial Sequence
  chemically synthesized
gtaccatgtaattcagaggtgt

SEQ ID NO: 26558 - DNA, 22 bp, Artificial Sequence
  chemically synthesized
taccatgtaattcagaggtgta

SEQ ID NO: 26559 - DNA, 22 bp, Artificial Sequence
  chemically synthesized
agaggtgtagtgtcaagactga

SEQ ID NO: 26560 - DNA, 22 bp, Artificial Sequence
  chemically synthesized
aggaggaagcaggtaaattatg

SEQ ID NO: 26561 - DNA, 22 bp, Artificial Sequence
  chemically synthesized
tgtccagcaatacgttggctta

SEQ ID NO: 26562 - DNA, 22 bp, Artificial Sequence
  chemically synthesized
gcttaggcaaaaacaaattgtt

SEQ ID NO: 26563 - DNA, 22 bp, Artificial Sequence
  chemically synthesized
aggcaaaaacaaattgtttcta

SEQ ID NO: 26564 - DNA, 22 bp, Artificial Sequence
  chemically synthesized
ggcaaaaacaaattgtttctag

SEQ ID NO: 26565 - DNA, 22 bp, Artificial Sequence
  chemically synthesized
tttctagtccattttaagaggg

SEQ ID NO: 26566 - DNA, 22 bp, Artificial Sequence
  chemically synthesized
ctagtccattttaagagggaag

SEQ ID NO: 26567 - DNA, 22 bp, Artificial Sequence
  chemically synthesized
tagtccattttaagagggaagc

SEQ ID NO: 26568 - DNA, 22 bp, Artificial Sequence
  chemically synthesized
gtccattttaagagggaagcat

SEQ ID NO: 26569 - DNA, 22 bp, Artificial Sequence
  chemically synthesized
taagagggaagcatttatttag

SEQ ID NO: 26570 - DNA, 22 bp, Artificial Sequence
  chemically synthesized
aagagggaagcatttatttagg

SEQ ID NO: 26571 - DNA, 22 bp, Artificial Sequence
  chemically synthesized
agagggaagcatttatttaggg

SEQ ID NO: 26572 - DNA, 22 bp, Artificial Sequence
  chemically synthesized
atttagggactacatcgctcaa

SEQ ID NO: 26573 - DNA, 22 bp, Artificial Sequence
  chemically synthesized
tttagggactacatcgctcaag

SEQ ID NO: 26574 - DNA, 22 bp, Artificial Sequence
  chemically synthesized
agggactacatcgctcaagtct

SEQ ID NO: 26575 - DNA, 22 bp, Artificial Sequence
  chemically synthesized
gggactacatcgctcaagtctt

SEQ ID NO: 26576 - DNA, 22 bp, Artificial Sequence
  chemically synthesized
catcgctcaagtctttacaatt

SEQ ID NO: 26577 - DNA, 22 bp, Artificial Sequence
  chemically synthesized
aagtctttacaattcttaaatt

SEQ ID NO: 26578 - DNA, 22 bp, Artificial Sequence
  chemically synthesized
tacaattcttaaattaactttc

SEQ ID NO: 26579 - DNA, 22 bp, Artificial Sequence
  chemically synthesized
acaattcttaaattaactttca

SEQ ID NO: 26580 - DNA, 22 bp, Artificial Sequence
  chemically synthesized
caattcttaaattaactttcat

SEQ ID NO: 26581 - DNA, 22 bp, Artificial Sequence
  chemically synthesized
ttaaattaactttcattatgtg

SEQ ID NO: 26582 - DNA, 22 bp, Artificial Sequence
  chemically synthesized
aaattaactttcattatgtgtg

SEQ ID NO: 26583 - DNA, 22 bp, Artificial Sequence
  chemically synthesized
aattaactttcattatgtgtga

SEQ ID NO: 26584 - DNA, 22 bp, Artificial Sequence
  chemically synthesized
actttcattatgtgtgacaaca

SEQ ID NO: 26585 - DNA, 22 bp, Artificial Sequence
  chemically synthesized
tcattatgtgtgacaacattta

SEQ ID NO: 26586 - DNA, 22 bp, Artificial Sequence
  chemically synthesized
cattatgtgtgacaacatttat

SEQ ID NO: 26587 - DNA, 22 bp, Artificial Sequence
  chemically synthesized
attatgtgtgacaacatttatt

SEQ ID NO: 26588 - DNA, 22 bp, Artificial Sequence
  chemically synthesized
tgtgtgacaacatttattaaac

SEQ ID NO: 26589 - DNA, 22 bp, Artificial Sequence
  chemically synthesized
attaaacttttttaatgatcct

SEQ ID NO: 26590 - DNA, 22 bp, Artificial Sequence
  chemically synthesized
ttaaacttttttaatgatccta

SEQ ID NO: 26591 - DNA, 22 bp, Artificial Sequence
  chemically synthesized
aacttttttaatgatcctaaat

SEQ ID NO: 26592 - DNA, 22 bp, Artificial Sequence
  chemically synthesized
ttttaatgatcctaaatatcct

SEQ ID NO: 26593 - DNA, 22 bp, Artificial Sequence
  chemically synthesized
tttaatgatcctaaatatcctt

SEQ ID NO: 26594 - DNA, 22 bp, Artificial Sequence
  chemically synthesized
ttaatgatcctaaatatcctta

SEQ ID NO: 26595 - DNA, 22 bp, Artificial Sequence
  chemically synthesized
taatgatcctaaatatccttaa

SEQ ID NO: 26596 - DNA, 22 bp, Artificial Sequence
  chemically synthesized
aatgatcctaaatatccttaac

SEQ ID NO: 26597 - DNA, 22 bp, Artificial Sequence
  chemically synthesized
atgatcctaaatatccttaaca

SEQ ID NO: 26598 - DNA, 22 bp, Artificial Sequence
  chemically synthesized
aatatccttaacatgttaattt

SEQ ID NO: 26599 - DNA, 22 bp, Artificial Sequence
  chemically synthesized
aacatgttaatttctccagagt

SEQ ID NO: 26600 - DNA, 22 bp, Artificial Sequence
  chemically synthesized
acatgttaatttctccagagtt

SEQ ID NO: 26601 - DNA, 22 bp, Artificial Sequence
  chemically synthesized
atttctccagagtttgtaatgt

SEQ ID NO: 26602 - DNA, 22 bp, Artificial Sequence
  chemically synthesized
ctccagagtttgtaatgttctg

SEQ ID NO: 26603 - DNA, 22 bp, Artificial Sequence
  chemically synthesized
tccagagtttgtaatgttctga

SEQ ID NO: 26604 - DNA, 22 bp, Artificial Sequence
  chemically synthesized
cagagtttgtaatgttctgagc

SEQ ID NO: 26605 - DNA, 22 bp, Artificial Sequence
  chemically synthesized
gtaatgttctgagcaagtgtgt

SEQ ID NO: 26606 - DNA, 22 bp, Artificial Sequence
  chemically synthesized
taatgttctgagcaagtgtgtg

SEQ ID NO: 26607 - DNA, 22 bp, Artificial Sequence
  chemically synthesized
tgagcaagtgtgtgcagaagaa

SEQ ID NO: 26608 - DNA, 22 bp, Artificial Sequence
  chemically synthesized
agcaagtgtgtgcagaagaaat

SEQ ID NO: 26609 - DNA, 22 bp, Artificial Sequence
  chemically synthesized
tagtaagacctgggcaaaggag

SEQ ID NO: 26610 - DNA, 22 bp, Artificial Sequence
  chemically synthesized
ggcaaaggagagagtaaacatt

SEQ ID NO: 26611 - DNA, 22 bp, Artificial Sequence
  chemically synthesized
ttcccccacatttgggcaaaac

SEQ ID NO: 26612 - DNA, 22 bp, Artificial Sequence
  chemically synthesized
tcccccacatttgggcaaaact

SEQ ID NO: 26613 - DNA, 22 bp, Artificial Sequence
  chemically synthesized
cccccacatttgggcaaaactt

SEQ ID NO: 26614 - DNA, 22 bp, Artificial Sequence
  chemically synthesized
ccccacatttgggcaaaacttt

SEQ ID NO: 26615 - DNA, 22 bp, Artificial Sequence
  chemically synthesized
gggcaaaactttccatcctggg

SEQ ID NO: 26616 - DNA, 22 bp, Artificial Sequence
  chemically synthesized
ggcaaaactttccatcctgggt

SEQ ID NO: 26617 - DNA, 22 bp, Artificial Sequence
  chemically synthesized
tccatcctgggtcacaccacag

SEQ ID NO: 26618 - DNA, 22 bp, Artificial Sequence
  chemically synthesized
ccatcctgggtcacaccacagt

SEQ ID NO: 26619 - DNA, 22 bp, Artificial Sequence
  chemically synthesized
catcctgggtcacaccacagtc

SEQ ID NO: 26620 - DNA, 22 bp, Artificial Sequence
  chemically synthesized
ggtcacaccacagtctaatttc

SEQ ID NO: 26621 - DNA, 22 bp, Artificial Sequence
  chemically synthesized
atttccctcctctcctctccct

SEQ ID NO: 26622 - DNA, 22 bp, Artificial Sequence
  chemically synthesized
ccctcctctcctctccctcaac

SEQ ID NO: 26623 - DNA, 22 bp, Artificial Sequence
  chemically synthesized
cctcctctcctctccctcaact

SEQ ID NO: 26624 - DNA, 22 bp, Artificial Sequence
  chemically synthesized
ctctcctctccctcaactggta

SEQ ID NO: 26625 - DNA, 22 bp, Artificial Sequence
  chemically synthesized
tcctctccctcaactggtaaca

SEQ ID NO: 26626 - DNA, 22 bp, Artificial Sequence
  chemically synthesized
ctctccctcaactggtaacagt

SEQ ID NO: 26627 - DNA, 22 bp, Artificial Sequence
  chemically synthesized
tccctcaactggtaacagtgct

SEQ ID NO: 26628 - DNA, 22 bp, Artificial Sequence
  chemically synthesized
cctcaactggtaacagtgcttc

SEQ ID NO: 26629 - DNA, 22 bp, Artificial Sequence
  chemically synthesized
aactggtaacagtgcttcttcc

SEQ ID NO: 26630 - DNA, 22 bp, Artificial Sequence
  chemically synthesized
gtaacagtgcttcttccaaaac

SEQ ID NO: 26631 - DNA, 22 bp, Artificial Sequence
  chemically synthesized
cttccaaaacatacctgactac

SEQ ID NO: 26632 - DNA, 22 bp, Artificial Sequence
  chemically synthesized
ttccaaaacatacctgactact

SEQ ID NO: 26633 - DNA, 22 bp, Artificial Sequence
  chemically synthesized
ccaaaacatacctgactactta

SEQ ID NO: 26634 - DNA, 22 bp, Artificial Sequence
  chemically synthesized
caaaacatacctgactacttag

SEQ ID NO: 26635 - DNA, 22 bp, Artificial Sequence
  chemically synthesized
actacttagtacttcccactac

SEQ ID NO: 26636 - DNA, 22 bp, Artificial Sequence
  chemically synthesized
cttagtacttcccactactgtg

SEQ ID NO: 26637 - DNA, 22 bp, Artificial Sequence
  chemically synthesized
agtacttcccactactgtggat

SEQ ID NO: 26638 - DNA, 22 bp, Artificial Sequence
  chemically synthesized
gtacttcccactactgtggata

SEQ ID NO: 26639 - DNA, 22 bp, Artificial Sequence
  chemically synthesized
cccactactgtggatagaattt

SEQ ID NO: 26640 - DNA, 22 bp, Artificial Sequence
  chemically synthesized
ccactactgtggatagaatttc

SEQ ID NO: 26641 - DNA, 22 bp, Artificial Sequence
  chemically synthesized
ctgtggatagaatttcagtgac

SEQ ID NO: 26642 - DNA, 22 bp, Artificial Sequence
  chemically synthesized
tggatagaatttcagtgactcc

SEQ ID NO: 26643 - DNA, 22 bp, Artificial Sequence
  chemically synthesized
cagtgactcctcattcattgtt

SEQ ID NO: 26644 - DNA, 22 bp, Artificial Sequence
  chemically synthesized
agtgactcctcattcattgttc

SEQ ID NO: 26645 - DNA, 22 bp, Artificial Sequence
  chemically synthesized
ctcattcattgttcataccctg

SEQ ID NO: 26646 - DNA, 22 bp, Artificial Sequence
  chemically synthesized
attcattgttcataccctggag

SEQ ID NO: 26647 - DNA, 22 bp, Artificial Sequence
  chemically synthesized
attgttcataccctggagacaa

SEQ ID NO: 26648 - DNA, 22 bp, Artificial Sequence
  chemically synthesized
ttcataccctggagacaaaact

SEQ ID NO: 26649 - DNA, 22 bp, Artificial Sequence
  chemically synthesized
ataccctggagacaaaactcct

SEQ ID NO: 26650 - DNA, 22 bp, Artificial Sequence
  chemically synthesized
gagacaaaactccttaaggcta

SEQ ID NO: 26651 - DNA, 22 bp, Artificial Sequence
  chemically synthesized
cttaaggctattaactccccct

SEQ ID NO: 26652 - DNA, 22 bp, Artificial Sequence
  chemically synthesized
aaggctattaactccccctgag

SEQ ID NO: 26653 - DNA, 22 bp, Artificial Sequence
  chemically synthesized
aggctattaactccccctgagc

SEQ ID NO: 26654 - DNA, 22 bp, Artificial Sequence
  chemically synthesized
ttaactccccctgagcttcaca

SEQ ID NO: 26655 - DNA, 22 bp, Artificial Sequence
  chemically synthesized
actccccctgagcttcacaatc

SEQ ID NO: 26656 - DNA, 22 bp, Artificial Sequence
  chemically synthesized
cccctgagcttcacaatctagt

SEQ ID NO: 26657 - DNA, 22 bp, Artificial Sequence
  chemically synthesized
agcttcacaatctagtccctgc

SEQ ID NO: 26658 - DNA, 22 bp, Artificial Sequence
  chemically synthesized
cacaatctagtccctgcaggtc

SEQ ID NO: 26659 - DNA, 22 bp, Artificial Sequence
  chemically synthesized
acaatctagtccctgcaggtct

SEQ ID NO: 26660 - DNA, 22 bp, Artificial Sequence
  chemically synthesized
gtccctgcaggtctctcccatc

SEQ ID NO: 26661 - DNA, 22 bp, Artificial Sequence
  chemically synthesized
caggtctctcccatcttctctc

SEQ ID NO: 26662 - DNA, 22 bp, Artificial Sequence
  chemically synthesized
tcccatcttctctcatactcct

SEQ ID NO: 26663 - DNA, 22 bp, Artificial Sequence
  chemically synthesized
ccatcttctctcatactcctct

SEQ ID NO: 26664 - DNA, 22 bp, Artificial Sequence
  chemically synthesized
ctctcatactcctctccttttc

SEQ ID NO: 26665 - DNA, 22 bp, Artificial Sequence
  chemically synthesized
tctcatactcctctccttttcc

SEQ ID NO: 26666 - DNA, 22 bp, Artificial Sequence
  chemically synthesized
tcatactcctctccttttccct

SEQ ID NO: 26667 - DNA, 22 bp, Artificial Sequence
  chemically synthesized
atactcctctccttttccctct

SEQ ID NO: 26668 - DNA, 22 bp, Artificial Sequence
  chemically synthesized
ctctccttttccctctctgagc

SEQ ID NO: 26669 - DNA, 22 bp, Artificial Sequence
  chemically synthesized
tccttttccctctctgagcccc

SEQ ID NO: 26670 - DNA, 22 bp, Artificial Sequence
  chemically synthesized
cttttccctctctgagccccgc

SEQ ID NO: 26671 - DNA, 22 bp, Artificial Sequence
  chemically synthesized
ttccctctctgagccccgctca

SEQ ID NO: 26672 - DNA, 22 bp, Artificial Sequence
  chemically synthesized
tccctctctgagccccgctcag

SEQ ID NO: 26673 - DNA, 22 bp, Artificial Sequence
  chemically synthesized
ccctctctgagccccgctcaga

SEQ ID NO: 26674 - DNA, 22 bp, Artificial Sequence
  chemically synthesized
cctctctgagccccgctcagat

SEQ ID NO: 26675 - DNA, 22 bp, Artificial Sequence
  chemically synthesized
tctgagccccgctcagatcttc

SEQ ID NO: 26676 - DNA, 22 bp, Artificial Sequence
  chemically synthesized
tgagccccgctcagatcttcga

SEQ ID NO: 26677 - DNA, 22 bp, Artificial Sequence
  chemically synthesized
agccccgctcagatcttcgaac

SEQ ID NO: 26678 - DNA, 22 bp, Artificial Sequence
  chemically synthesized
agatcttcgaacagagaacact

SEQ ID NO: 26679 - DNA, 22 bp, Artificial Sequence
  chemically synthesized
cgaacagagaacacttctgcat

SEQ ID NO: 26680 - DNA, 22 bp, Artificial Sequence
  chemically synthesized
gaacagagaacacttctgcatc

SEQ ID NO: 26681 - DNA, 22 bp, Artificial Sequence
  chemically synthesized
ctgcatcttggcatatatagtt

SEQ ID NO: 26682 - DNA, 22 bp, Artificial Sequence
  chemically synthesized
tgcatcttggcatatatagttc

SEQ ID NO: 26683 - DNA, 22 bp, Artificial Sequence
  chemically synthesized
catcttggcatatatagttctc

SEQ ID NO: 26684 - DNA, 22 bp, Artificial Sequence
  chemically synthesized
ggcatatatagttctctcacat

SEQ ID NO: 26685 - DNA, 22 bp, Artificial Sequence
  chemically synthesized
gcatatatagttctctcacata

SEQ ID NO: 26686 - DNA, 22 bp, Artificial Sequence
  chemically synthesized
tctcacatagaacgctttctcc

SEQ ID NO: 26687 - DNA, 22 bp, Artificial Sequence
  chemically synthesized
tcacatagaacgctttctcccc

SEQ ID NO: 26688 - DNA, 22 bp, Artificial Sequence
  chemically synthesized
acatagaacgctttctcccctt

SEQ ID NO: 26689 - DNA, 22 bp, Artificial Sequence
  chemically synthesized
tctcccctttagctatttatcc

SEQ ID NO: 26690 - DNA, 22 bp, Artificial Sequence
  chemically synthesized
ctcccctttagctatttatcct

SEQ ID NO: 26691 - DNA, 22 bp, Artificial Sequence
  chemically synthesized
tcccctttagctatttatcctt

SEQ ID NO: 26692 - DNA, 22 bp, Artificial Sequence
  chemically synthesized
ccctttagctatttatccttca

SEQ ID NO: 26693 - DNA, 22 bp, Artificial Sequence
  chemically synthesized
tagctatttatccttcaagtgt

SEQ ID NO: 26694 - DNA, 22 bp, Artificial Sequence
  chemically synthesized
agctatttatccttcaagtgtc

SEQ ID NO: 26695 - DNA, 22 bp, Artificial Sequence
  chemically synthesized
gctatttatccttcaagtgtca

SEQ ID NO: 26696 - DNA, 22 bp, Artificial Sequence
  chemically synthesized
tttatccttcaagtgtcagctc

SEQ ID NO: 26697 - DNA, 22 bp, Artificial Sequence
  chemically synthesized
atccttcaagtgtcagctcaaa

SEQ ID NO: 26698 - DNA, 22 bp, Artificial Sequence
  chemically synthesized
tccttcaagtgtcagctcaaac

SEQ ID NO: 26699 - DNA, 22 bp, Artificial Sequence
  chemically synthesized
caagtgtcagctcaaacatctc

SEQ ID NO: 26700 - DNA, 22 bp, Artificial Sequence
  chemically synthesized
aagtgtcagctcaaacatctca

SEQ ID NO: 26701 - DNA, 22 bp, Artificial Sequence
  chemically synthesized
aaacatctcatcattagagagg

SEQ ID NO: 26702 - DNA, 22 bp, Artificial Sequence
  chemically synthesized
atcattagagaggtttttccca

SEQ ID NO: 26703 - DNA, 22 bp, Artificial Sequence
  chemically synthesized
gagaggtttttcccaaacctct

SEQ ID NO: 26704 - DNA, 22 bp, Artificial Sequence
  chemically synthesized
ttcccaaacctctaggtaacta

SEQ ID NO: 26705 - DNA, 22 bp, Artificial Sequence
  chemically synthesized
tcccaaacctctaggtaactag

SEQ ID NO: 26706 - DNA, 22 bp, Artificial Sequence
  chemically synthesized
cccaaacctctaggtaactagg

SEQ ID NO: 26707 - DNA, 22 bp, Artificial Sequence
  chemically synthesized
ccaaacctctaggtaactaggt

SEQ ID NO: 26708 - DNA, 22 bp, Artificial Sequence
  chemically synthesized
taggtaactaggttagaaacca

SEQ ID NO: 26709 - DNA, 22 bp, Artificial Sequence
  chemically synthesized
ggtaactaggttagaaaccact

SEQ ID NO: 26710 - DNA, 22 bp, Artificial Sequence
  chemically synthesized
ggttagaaaccactccccattc

SEQ ID NO: 26711 - DNA, 22 bp, Artificial Sequence
  chemically synthesized
gaaaccactccccattccacgg

SEQ ID NO: 26712 - DNA, 22 bp, Artificial Sequence
  chemically synthesized
cccattccacggtacactgtat

SEQ ID NO: 26713 - DNA, 22 bp, Artificial Sequence
  chemically synthesized
cacggtacactgtatagtctta

SEQ ID NO: 26714 - DNA, 22 bp, Artificial Sequence
  chemically synthesized
tatagtcttaggacacctggtt

SEQ ID NO: 26715 - DNA, 22 bp, Artificial Sequence
  chemically synthesized
aggacacctggttcccttagtc

SEQ ID NO: 26716 - DNA, 22 bp, Artificial Sequence
  chemically synthesized
ggacacctggttcccttagtct

SEQ ID NO: 26717 - DNA, 22 bp, Artificial Sequence
  chemically synthesized
gttcccttagtctcacactcat

SEQ ID NO: 26718 - DNA, 22 bp, Artificial Sequence
  chemically synthesized
ccttagtctcacactcatcaca

SEQ ID NO: 26719 - DNA, 22 bp, Artificial Sequence
  chemically synthesized
agtctcacactcatcacatttg

SEQ ID NO: 26720 - DNA, 22 bp, Artificial Sequence
  chemically synthesized
gtctcacactcatcacatttga

SEQ ID NO: 26721 - DNA, 22 bp, Artificial Sequence
  chemically synthesized
acactcatcacatttgactgta

SEQ ID NO: 26722 - DNA, 22 bp, Artificial Sequence
  chemically synthesized
atcacatttgactgtattgtat

SEQ ID NO: 26723 - DNA, 22 bp, Artificial Sequence
  chemically synthesized
gactgtattgtatgttcaatgt

SEQ ID NO: 26724 - DNA, 22 bp, Artificial Sequence
  chemically synthesized
actgtattgtatgttcaatgtc

SEQ ID NO: 26725 - DNA, 22 bp, Artificial Sequence
  chemically synthesized
tattgtatgttcaatgtctacc

SEQ ID NO: 26726 - DNA, 22 bp, Artificial Sequence
  chemically synthesized
tatgttcaatgtctaccttcta

SEQ ID NO: 26727 - DNA, 22 bp, Artificial Sequence
  chemically synthesized
aatgtctaccttctacaaattt

SEQ ID NO: 26728 - DNA, 22 bp, Artificial Sequence
  chemically synthesized
ccttctacaaatttgtcaattc

SEQ ID NO: 26729 - DNA, 22 bp, Artificial Sequence
  chemically synthesized
ctacaaatttgtcaattcttga

SEQ ID NO: 26730 - DNA, 22 bp, Artificial Sequence
  chemically synthesized
tacaaatttgtcaattcttgaa

SEQ ID NO: 26731 - DNA, 22 bp, Artificial Sequence
  chemically synthesized
caaatttgtcaattcttgaaga

SEQ ID NO: 26732 - DNA, 22 bp, Artificial Sequence
  chemically synthesized
gtcaattcttgaagattaagaa

SEQ ID NO: 26733 - DNA, 22 bp, Artificial Sequence
  chemically synthesized
tcaattcttgaagattaagaat

SEQ ID NO: 26734 - DNA, 22 bp, Artificial Sequence
  chemically synthesized
ttgaagattaagaatcagttct

SEQ ID NO: 26735 - DNA, 22 bp, Artificial Sequence
  chemically synthesized
gaagattaagaatcagttctgt

SEQ ID NO: 26736 - DNA, 22 bp, Artificial Sequence
  chemically synthesized
aagattaagaatcagttctgta

SEQ ID NO: 26737 - DNA, 22 bp, Artificial Sequence
  chemically synthesized
agaatcagttctgtattcttaa

SEQ ID NO: 26738 - DNA, 22 bp, Artificial Sequence
  chemically synthesized
tgtattcttaactctatctccc

SEQ ID NO: 26739 - DNA, 22 bp, Artificial Sequence
  chemically synthesized
tattcttaactctatctccctc

SEQ ID NO: 26740 - DNA, 22 bp, Artificial Sequence
  chemically synthesized
ttaactctatctccctcgcctc

SEQ ID NO: 26741 - DNA, 22 bp, Artificial Sequence
  chemically synthesized
aactctatctccctcgcctctc

SEQ ID NO: 26742 - DNA, 22 bp, Artificial Sequence
  chemically synthesized
actctatctccctcgcctctca

SEQ ID NO: 26743 - DNA, 22 bp, Artificial Sequence
  chemically synthesized
tatctccctcgcctctcagtgc

SEQ ID NO: 26744 - DNA, 22 bp, Artificial Sequence
  chemically synthesized
tctccctcgcctctcagtgcct

SEQ ID NO: 26745 - DNA, 22 bp, Artificial Sequence
  chemically synthesized
cctcgcctctcagtgcctgata

SEQ ID NO: 26746 - DNA, 22 bp, Artificial Sequence
  chemically synthesized
gcctctcagtgcctgataccta

SEQ ID NO: 26747 - DNA, 22 bp, Artificial Sequence
  chemically synthesized
tcagtgcctgatacctaataga

SEQ ID NO: 26748 - DNA, 22 bp, Artificial Sequence
  chemically synthesized
agtgcctgatacctaatagaca

SEQ ID NO: 26749 - DNA, 22 bp, Artificial Sequence
  chemically synthesized
atacctaatagacacttgatga

SEQ ID NO: 26750 - DNA, 22 bp, Artificial Sequence
  chemically synthesized
atagacacttgatgaatcctta

SEQ ID NO: 26751 - DNA, 22 bp, Artificial Sequence
  chemically synthesized
gatgaatccttactgaataata

SEQ ID NO: 26752 - DNA, 22 bp, Artificial Sequence
  chemically synthesized
atgaatccttactgaataataa

SEQ ID NO: 26753 - DNA, 22 bp, Artificial Sequence
  chemically synthesized
actgaataataaaatggattaa

SEQ ID NO: 26754 - DNA, 22 bp, Artificial Sequence
  chemically synthesized
ctgaataataaaatggattaat

SEQ ID NO: 26755 - DNA, 22 bp, Artificial Sequence
  chemically synthesized
aataataaaatggattaatgaa

SEQ ID NO: 26756 - DNA, 22 bp, Artificial Sequence
  chemically synthesized
atgaataaaagcaataaatttc

SEQ ID NO: 26757 - DNA, 22 bp, Artificial Sequence
  chemically synthesized
caaggttaatattaataaatta

SEQ ID NO: 26758 - DNA, 22 bp, Artificial Sequence
  chemically synthesized
aaggttaatattaataaattaa

SEQ ID NO: 26759 - DNA, 22 bp, Artificial Sequence
  chemically synthesized
atattaataaattaaaaaggtt

SEQ ID NO: 26760 - DNA, 22 bp, Artificial Sequence
  chemically synthesized
ataaattaaaaaggttattttg

SEQ ID NO: 26761 - DNA, 22 bp, Artificial Sequence
  chemically synthesized
aaaaggttattttgaagtctga

SEQ ID NO: 26762 - DNA, 22 bp, Artificial Sequence
  chemically synthesized
ttttgaagtctgagaattagta

SEQ ID NO: 26763 - DNA, 22 bp, Artificial Sequence
  chemically synthesized
tgaagtctgagaattagtaccc

SEQ ID NO: 26764 - DNA, 22 bp, Artificial Sequence
  chemically synthesized
gaagtctgagaattagtaccca

SEQ ID NO: 26765 - DNA, 22 bp, Artificial Sequence
  chemically synthesized
aagtctgagaattagtacccaa

SEQ ID NO: 26766 - DNA, 22 bp, Artificial Sequence
  chemically synthesized
agaattagtacccaaaactaac

SEQ ID NO: 26767 - DNA, 22 bp, Artificial Sequence
  chemically synthesized
gtacccaaaactaactgtgact

SEQ ID NO: 26768 - DNA, 22 bp, Artificial Sequence
  chemically synthesized
actgtgactctctcatctgtta

SEQ ID NO: 26769 - DNA, 22 bp, Artificial Sequence
  chemically synthesized
tgactctctcatctgttatgtt

SEQ ID NO: 26770 - DNA, 22 bp, Artificial Sequence
  chemically synthesized
tctcatctgttatgtttttcac

SEQ ID NO: 26771 - DNA, 22 bp, Artificial Sequence
  chemically synthesized
tcatctgttatgtttttcacgt

SEQ ID NO: 26772 - DNA, 22 bp, Artificial Sequence
  chemically synthesized
atctgttatgtttttcacgttt

SEQ ID NO: 26773 - DNA, 22 bp, Artificial Sequence
  chemically synthesized
ttatgtttttcacgtttccatt

SEQ ID NO: 26774 - DNA, 22 bp, Artificial Sequence
  chemically synthesized
tgtttttcacgtttccattgtt

SEQ ID NO: 26775 - DNA, 22 bp, Artificial Sequence
  chemically synthesized
ttcacgtttccattgttcatgg

SEQ ID NO: 26776 - DNA, 22 bp, Artificial Sequence
  chemically synthesized
tcacgtttccattgttcatggg

SEQ ID NO: 26777 - DNA, 22 bp, Artificial Sequence
  chemically synthesized
cacgtttccattgttcatgggc

SEQ ID NO: 26778 - DNA, 22 bp, Artificial Sequence
  chemically synthesized
acgtttccattgttcatgggca

SEQ ID NO: 26779 - DNA, 22 bp, Artificial Sequence
  chemically synthesized
ccattgttcatgggcaaaattc

SEQ ID NO: 26780 - DNA, 22 bp, Artificial Sequence
  chemically synthesized
cattgttcatgggcaaaattct

SEQ ID NO: 26781 - DNA, 22 bp, Artificial Sequence
  chemically synthesized
ttcatgggcaaaattctggcag

SEQ ID NO: 26782 - DNA, 22 bp, Artificial Sequence
  chemically synthesized
atgggcaaaattctggcagcaa

SEQ ID NO: 26783 - DNA, 22 bp, Artificial Sequence
  chemically synthesized
tggcagcaagggattcttctcc

SEQ ID NO: 26784 - DNA, 22 bp, Artificial Sequence
  chemically synthesized
gcagcaagggattcttctccta

SEQ ID NO: 26785 - DNA, 22 bp, Artificial Sequence
  chemically synthesized
ttctcctaagaaaccttttgtt

SEQ ID NO: 26786 - DNA, 22 bp, Artificial Sequence
  chemically synthesized
ctcctaagaaaccttttgtttt

SEQ ID NO: 26787 - DNA, 22 bp, Artificial Sequence
  chemically synthesized
tcctaagaaaccttttgttttc

SEQ ID NO: 26788 - DNA, 22 bp, Artificial Sequence
  chemically synthesized
ctaagaaaccttttgttttctt

SEQ ID NO: 26789 - DNA, 22 bp, Artificial Sequence
  chemically synthesized
agaaaccttttgttttcttgga

SEQ ID NO: 26790 - DNA, 22 bp, Artificial Sequence
  chemically synthesized
ttgttttcttggatgtgaatac

SEQ ID NO: 26791 - DNA, 22 bp, Artificial Sequence
  chemically synthesized
tgttttcttggatgtgaataca

SEQ ID NO: 26792 - DNA, 22 bp, Artificial Sequence
  chemically synthesized
gttttcttggatgtgaatacat

SEQ ID NO: 26793 - DNA, 22 bp, Artificial Sequence
  chemically synthesized
ttttcttggatgtgaatacatt

SEQ ID NO: 26794 - DNA, 22 bp, Artificial Sequence
  chemically synthesized
tcttggatgtgaatacatttcc

SEQ ID NO: 26795 - DNA, 22 bp, Artificial Sequence
  chemically synthesized
cttggatgtgaatacatttcct

SEQ ID NO: 26796 - DNA, 22 bp, Artificial Sequence
  chemically synthesized
ttggatgtgaatacatttcctt

SEQ ID NO: 26797 - DNA, 22 bp, Artificial Sequence
  chemically synthesized
ggatgtgaatacatttccttgt

SEQ ID NO: 26798 - DNA, 22 bp, Artificial Sequence
  chemically synthesized
gatgtgaatacatttccttgtt

SEQ ID NO: 26799 - DNA, 22 bp, Artificial Sequence
  chemically synthesized
ccttgtttgccagaaaacatgg

SEQ ID NO: 26800 - DNA, 22 bp, Artificial Sequence
  chemically synthesized
cttgtttgccagaaaacatggt

SEQ ID NO: 26801 - DNA, 22 bp, Artificial Sequence
  chemically synthesized
gtttgccagaaaacatggtaag

SEQ ID NO: 26802 - DNA, 22 bp, Artificial Sequence
  chemically synthesized
tttgccagaaaacatggtaaga

SEQ ID NO: 26803 - DNA, 22 bp, Artificial Sequence
  chemically synthesized
gccagaaaacatggtaagataa

SEQ ID NO: 26804 - DNA, 22 bp, Artificial Sequence
  chemically synthesized
ccagaaaacatggtaagataac

SEQ ID NO: 26805 - DNA, 22 bp, Artificial Sequence
  chemically synthesized
gagagtataacattcattttat

SEQ ID NO: 26806 - DNA, 22 bp, Artificial Sequence
  chemically synthesized
attttattcatgaagaaactgt

SEQ ID NO: 26807 - DNA, 22 bp, Artificial Sequence
  chemically synthesized
tattcatgaagaaactgttatt

SEQ ID NO: 26808 - DNA, 22 bp, Artificial Sequence
  chemically synthesized
attcatgaagaaactgttattc

SEQ ID NO: 26809 - DNA, 22 bp, Artificial Sequence
  chemically synthesized
ttcatgaagaaactgttattca

SEQ ID NO: 26810 - DNA, 22 bp, Artificial Sequence
  chemically synthesized
atgaagaaactgttattcagtt

SEQ ID NO: 26811 - DNA, 22 bp, Artificial Sequence
  chemically synthesized
ttattcagtttaaggggttctt

SEQ ID NO: 26812 - DNA, 22 bp, Artificial Sequence
  chemically synthesized
ttcagtttaaggggttcttttt

SEQ ID NO: 26813 - DNA, 22 bp, Artificial Sequence
  chemically synthesized
agtttaaggggttctttttcag

SEQ ID NO: 26814 - DNA, 22 bp, Artificial Sequence
  chemically synthesized
aaggggttctttttcagaaagt

SEQ ID NO: 26815 - DNA, 22 bp, Artificial Sequence
  chemically synthesized
aggggttctttttcagaaagtt

SEQ ID NO: 26816 - DNA, 22 bp, Artificial Sequence
  chemically synthesized
tttttcagaaagtttcagaaat

SEQ ID NO: 26817 - DNA, 22 bp, Artificial Sequence
  chemically synthesized
tttcagaaagtttcagaaatcc

SEQ ID NO: 26818 - DNA, 22 bp, Artificial Sequence
  chemically synthesized
ttcagaaagtttcagaaatcca

SEQ ID NO: 26819 - DNA, 22 bp, Artificial Sequence
  chemically synthesized
tcagaaagtttcagaaatccaa

SEQ ID NO: 26820 - DNA, 22 bp, Artificial Sequence
  chemically synthesized
cagaaagtttcagaaatccaag

SEQ ID NO: 26821 - DNA, 22 bp, Artificial Sequence
  chemically synthesized
agaaagtttcagaaatccaaga

SEQ ID NO: 26822 - DNA, 22 bp, Artificial Sequence
  chemically synthesized
cagaaatccaagacctttgact

SEQ ID NO: 26823 - DNA, 22 bp, Artificial Sequence
  chemically synthesized
agaaatccaagacctttgactg

SEQ ID NO: 26824 - DNA, 22 bp, Artificial Sequence
  chemically synthesized
tgactgcaagtactgtgttctt

SEQ ID NO: 26825 - DNA, 22 bp, Artificial Sequence
  chemically synthesized
gactgcaagtactgtgttcttt

SEQ ID NO: 26826 - DNA, 22 bp, Artificial Sequence
  chemically synthesized
actgcaagtactgtgttctttc

SEQ ID NO: 26827 - DNA, 22 bp, Artificial Sequence
  chemically synthesized
caagtactgtgttctttcatct

SEQ ID NO: 26828 - DNA, 22 bp, Artificial Sequence
  chemically synthesized
tgttctttcatctataggacat

SEQ ID NO: 26829 - DNA, 22 bp, Artificial Sequence
  chemically synthesized
tttcatctataggacatttcct

SEQ ID NO: 26830 - DNA, 22 bp, Artificial Sequence
  chemically synthesized
tcatctataggacatttccttt

SEQ ID NO: 26831 - DNA, 22 bp, Artificial Sequence
  chemically synthesized
catctataggacatttcctttg

SEQ ID NO: 26832 - DNA, 22 bp, Artificial Sequence
  chemically synthesized
atctataggacatttcctttga

SEQ ID NO: 26833 - DNA, 22 bp, Artificial Sequence
  chemically synthesized
taggacatttcctttgaaaact

SEQ ID NO: 26834 - DNA, 22 bp, Artificial Sequence
  chemically synthesized
cctttgaaaactgaggttttaa

SEQ ID NO: 26835 - DNA, 22 bp, Artificial Sequence
  chemically synthesized
ctttgaaaactgaggttttaat

SEQ ID NO: 26836 - DNA, 22 bp, Artificial Sequence
  chemically synthesized
tgaaaactgaggttttaatatt

SEQ ID NO: 26837 - DNA, 22 bp, Artificial Sequence
  chemically synthesized
gaaaactgaggttttaatattt

SEQ ID NO: 26838 - DNA, 22 bp, Artificial Sequence
  chemically synthesized
aaaactgaggttttaatattta

SEQ ID NO: 26839 - DNA, 22 bp, Artificial Sequence
  chemically synthesized
aggttttaatatttaattctta

SEQ ID NO: 26840 - DNA, 22 bp, Artificial Sequence
  chemically synthesized
taatatttaattcttacataat

SEQ ID NO: 26841 - DNA, 22 bp, Artificial Sequence
  chemically synthesized
aatatttaattcttacataata

SEQ ID NO: 26842 - DNA, 22 bp, Artificial Sequence
  chemically synthesized
atatttaattcttacataatag

SEQ ID NO: 26843 - DNA, 22 bp, Artificial Sequence
  chemically synthesized
aattcttacataatagtaaaaa

SEQ ID NO: 26844 - DNA, 22 bp, Artificial Sequence
  chemically synthesized
attcttacataatagtaaaaaa

SEQ ID NO: 26845 - DNA, 22 bp, Artificial Sequence
  chemically synthesized
ttacataatagtaaaaaagtga

SEQ ID NO: 26846 - DNA, 22 bp, Artificial Sequence
  chemically synthesized
acataatagtaaaaaagtgaat

SEQ ID NO: 26847 - DNA, 22 bp, Artificial Sequence
  chemically synthesized
cataatagtaaaaaagtgaatt

SEQ ID NO: 26848 - DNA, 22 bp, Artificial Sequence
  chemically synthesized
gccttggaaaagacctaaatcc

SEQ ID NO: 26849 - DNA, 22 bp, Artificial Sequence
  chemically synthesized
ggaaaagacctaaatcctggtc

SEQ ID NO: 26850 - DNA, 22 bp, Artificial Sequence
  chemically synthesized
gaaaagacctaaatcctggtcc

SEQ ID NO: 26851 - DNA, 22 bp, Artificial Sequence
  chemically synthesized
aatcctggtcctaactctgcca

SEQ ID NO: 26852 - DNA, 22 bp, Artificial Sequence
  chemically synthesized
gtcctaactctgccatttgctt

SEQ ID NO: 26853 - DNA, 22 bp, Artificial Sequence
  chemically synthesized
actctgccatttgcttgatcat

SEQ ID NO: 26854 - DNA, 22 bp, Artificial Sequence
  chemically synthesized
tgccatttgcttgatcattaaa

SEQ ID NO: 26855 - DNA, 22 bp, Artificial Sequence
  chemically synthesized
ccatttgcttgatcattaaata

SEQ ID NO: 26856 - DNA, 22 bp, Artificial Sequence
  chemically synthesized
gcttgatcattaaatacctcta

SEQ ID NO: 26857 - DNA, 22 bp, Artificial Sequence
  chemically synthesized
cttgatcattaaatacctctac

SEQ ID NO: 26858 - DNA, 22 bp, Artificial Sequence
  chemically synthesized
gatcattaaatacctctacgaa

SEQ ID NO: 26859 - DNA, 22 bp, Artificial Sequence
  chemically synthesized
atcattaaatacctctacgaat

SEQ ID NO: 26860 - DNA, 22 bp, Artificial Sequence
  chemically synthesized
aatacctctacgaatcaatttg

SEQ ID NO: 26861 - DNA, 22 bp, Artificial Sequence
  chemically synthesized
tacgaatcaatttgctctatga

SEQ ID NO: 26862 - DNA, 22 bp, Artificial Sequence
  chemically synthesized
cgaatcaatttgctctatgaac

SEQ ID NO: 26863 - DNA, 22 bp, Artificial Sequence
  chemically synthesized
gctctatgaactggaggagtgg

SEQ ID NO: 26864 - DNA, 22 bp, Artificial Sequence
  chemically synthesized
ctctatgaactggaggagtggg

SEQ ID NO: 26865 - DNA, 22 bp, Artificial Sequence
  chemically synthesized
tatgaactggaggagtgggatt

SEQ ID NO: 26866 - DNA, 22 bp, Artificial Sequence
  chemically synthesized
tgaactggaggagtgggattca

SEQ ID NO: 26867 - DNA, 22 bp, Artificial Sequence
  chemically synthesized
gaggagtgggattcatgatctc

SEQ ID NO: 26868 - DNA, 22 bp, Artificial Sequence
  chemically synthesized
atgatctctaagatacctcata

SEQ ID NO: 26869 - DNA, 22 bp, Artificial Sequence
  chemically synthesized
taagatacctcatatcactact

SEQ ID NO: 26870 - DNA, 22 bp, Artificial Sequence
  chemically synthesized
agatacctcatatcactactat

SEQ ID NO: 26871 - DNA, 22 bp, Artificial Sequence
  chemically synthesized
atatcactactatgaaatgcag

SEQ ID NO: 26872 - DNA, 22 bp, Artificial Sequence
  chemically synthesized
ctatgaaatgcagggaagtaaa

SEQ ID NO: 26873 - DNA, 22 bp, Artificial Sequence
  chemically synthesized
tgaaatgcagggaagtaaaaat

SEQ ID NO: 26874 - DNA, 22 bp, Artificial Sequence
  chemically synthesized
aaatcattaaatttaaagaaac

SEQ ID NO: 26875 - DNA, 22 bp, Artificial Sequence
  chemically synthesized
aatttaaagaaactatagtggc

SEQ ID NO: 26876 - DNA, 22 bp, Artificial Sequence
  chemically synthesized
aaagaaactatagtggcaatgt

SEQ ID NO: 26877 - DNA, 22 bp, Artificial Sequence
  chemically synthesized
aagaaactatagtggcaatgta

SEQ ID NO: 26878 - DNA, 22 bp, Artificial Sequence
  chemically synthesized
tagtggcaatgtattattagga

SEQ ID NO: 26879 - DNA, 22 bp, Artificial Sequence
  chemically synthesized
ttaggaataaacacaataatta

SEQ ID NO: 26880 - DNA, 22 bp, Artificial Sequence
  chemically synthesized
ggaataaacacaataattatcc

SEQ ID NO: 26881 - DNA, 22 bp, Artificial Sequence
  chemically synthesized
tccatctatatgaaaatctcaa

SEQ ID NO: 26882 - DNA, 22 bp, Artificial Sequence
  chemically synthesized
tatgaaaatctcaaaccatacc

SEQ ID NO: 26883 - DNA, 22 bp, Artificial Sequence
  chemically synthesized
aaaccataccaggctatgataa

SEQ ID NO: 26884 - DNA, 22 bp, Artificial Sequence
  chemically synthesized
tgataatattaaaataaagata

SEQ ID NO: 26885 - DNA, 22 bp, Artificial Sequence
  chemically synthesized
aaataaagatacattgaagatg

SEQ ID NO: 26886 - DNA, 22 bp, Artificial Sequence
  chemically synthesized
aagatgatatcaacttgtgtaa

SEQ ID NO: 26887 - DNA, 22 bp, Artificial Sequence
  chemically synthesized
gtgtaaatcacattgtggggac

SEQ ID NO: 26888 - DNA, 22 bp, Artificial Sequence
  chemically synthesized
tgtaaatcacattgtggggacc

SEQ ID NO: 26889 - DNA, 22 bp, Artificial Sequence
  chemically synthesized
tggggacctctccacaaaaaca

SEQ ID NO: 26890 - DNA, 22 bp, Artificial Sequence
  chemically synthesized
tccacaaaaacacttcccttcc

SEQ ID NO: 26891 - DNA, 22 bp, Artificial Sequence
  chemically synthesized
cacaaaaacacttcccttcccc

SEQ ID NO: 26892 - DNA, 22 bp, Artificial Sequence
  chemically synthesized
cccttccccttgaaagggaaat

SEQ ID NO: 26893 - DNA, 22 bp, Artificial Sequence
  chemically synthesized
ccttccccttgaaagggaaatg

SEQ ID NO: 26894 - DNA, 22 bp, Artificial Sequence
  chemically synthesized
ccccttgaaagggaaatgatag

SEQ ID NO: 26895 - DNA, 22 bp, Artificial Sequence
  chemically synthesized
cccttgaaagggaaatgataga

SEQ ID NO: 26896 - DNA, 22 bp, Artificial Sequence
  chemically synthesized
gaaagggaaatgatagaaaata

SEQ ID NO: 26897 - DNA, 22 bp, Artificial Sequence
  chemically synthesized
aaagggaaatgatagaaaataa

SEQ ID NO: 26898 - DNA, 22 bp, Artificial Sequence
  chemically synthesized
aaggcagcttaggggttgaaaa

SEQ ID NO: 26899 - DNA, 22 bp, Artificial Sequence
  chemically synthesized
aggggttgaaaaacaaattttt

SEQ ID NO: 26900 - DNA, 22 bp, Artificial Sequence
  chemically synthesized
ggggttgaaaaacaaatttttt

SEQ ID NO: 26901 - DNA, 22 bp, Artificial Sequence
  chemically synthesized
aaaaacaaattttttcaaaaaa

SEQ ID NO: 26902 - DNA, 22 bp, Artificial Sequence
  chemically synthesized
tttcaaaaaaaaatccattgag

SEQ ID NO: 26903 - DNA, 22 bp, Artificial Sequence
  chemically synthesized
ttcaaaaaaaaatccattgagc

SEQ ID NO: 26904 - DNA, 22 bp, Artificial Sequence
  chemically synthesized
tcaaaaaaaaatccattgagca

SEQ ID NO: 26905 - DNA, 22 bp, Artificial Sequence
  chemically synthesized
caaaaaaaaatccattgagcat

SEQ ID NO: 26906 - DNA, 22 bp, Artificial Sequence
  chemically synthesized
aaaaaaaaatccattgagcatt

SEQ ID NO: 26907 - DNA, 22 bp, Artificial Sequence
  chemically synthesized
agcattttctatgtaccaggca

SEQ ID NO: 26908 - DNA, 22 bp, Artificial Sequence
  chemically synthesized
tctatgtaccaggcactgttct

SEQ ID NO: 26909 - DNA, 22 bp, Artificial Sequence
  chemically synthesized
ctatgtaccaggcactgttcta

SEQ ID NO: 26910 - DNA, 22 bp, Artificial Sequence
  chemically synthesized
tatgtaccaggcactgttctag

SEQ ID NO: 26911 - DNA, 22 bp, Artificial Sequence
  chemically synthesized
tgtaccaggcactgttctagac

SEQ ID NO: 26912 - DNA, 22 bp, Artificial Sequence
  chemically synthesized
ttctagaccctgagatcaacac

SEQ ID NO: 26913 - DNA, 22 bp, Artificial Sequence
  chemically synthesized
tagaccctgagatcaacacaca

SEQ ID NO: 26914 - DNA, 22 bp, Artificial Sequence
  chemically synthesized
gaccctgagatcaacacacatg

SEQ ID NO: 26915 - DNA, 22 bp, Artificial Sequence
  chemically synthesized
agatcaacacacatgctactga

SEQ ID NO: 26916 - DNA, 22 bp, Artificial Sequence
  chemically synthesized
ctgattataagatccataaaat

SEQ ID NO: 26917 - DNA, 22 bp, Artificial Sequence
  chemically synthesized
attataagatccataaaataac

SEQ ID NO: 26918 - DNA, 22 bp, Artificial Sequence
  chemically synthesized
taagatccataaaataacttag

SEQ ID NO: 26919 - DNA, 22 bp, Artificial Sequence
  chemically synthesized
agtttcactggcgtgttcccag

SEQ ID NO: 26920 - DNA, 22 bp, Artificial Sequence
  chemically synthesized
gtttcactggcgtgttcccagt

SEQ ID NO: 26921 - DNA, 22 bp, Artificial Sequence
  chemically synthesized
cactggcgtgttcccagtgccc

SEQ ID NO: 26922 - DNA, 22 bp, Artificial Sequence
  chemically synthesized
actggcgtgttcccagtgccca

SEQ ID NO: 26923 - DNA, 22 bp, Artificial Sequence
  chemically synthesized
gcgtgttcccagtgcccaggta

SEQ ID NO: 26924 - DNA, 22 bp, Artificial Sequence
  chemically synthesized
ccagtgcccaggtaacagtgct

SEQ ID NO: 26925 - DNA, 22 bp, Artificial Sequence
  chemically synthesized
cattaatgtttgttaaatgatg

SEQ ID NO: 26926 - DNA, 22 bp, Artificial Sequence
  chemically synthesized
atgtttgttaaatgatgagaaa

SEQ ID NO: 26927 - DNA, 22 bp, Artificial Sequence
  chemically synthesized
gttaaatgatgagaaaagagga

SEQ ID NO: 26928 - DNA, 22 bp, Artificial Sequence
  chemically synthesized
ttaaatgatgagaaaagaggaa

SEQ ID NO: 26929 - DNA, 22 bp, Artificial Sequence
  chemically synthesized
aatgatgagaaaagaggaaagc

SEQ ID NO: 26930 - DNA, 22 bp, Artificial Sequence
  chemically synthesized
tgctcaggtgcaggaacttgtg

SEQ ID NO: 26931 - DNA, 22 bp, Artificial Sequence
  chemically synthesized
ctcaggtgcaggaacttgtgca

SEQ ID NO: 26932 - DNA, 22 bp, Artificial Sequence
  chemically synthesized
aggtgcaggaacttgtgcagag

SEQ ID NO: 26933 - DNA, 22 bp, Artificial Sequence
  chemically synthesized
gtgcagagatcttctggactga

SEQ ID NO: 26934 - DNA, 22 bp, Artificial Sequence
  chemically synthesized
tgcagagatcttctggactgat

SEQ ID NO: 26935 - DNA, 22 bp, Artificial Sequence
  chemically synthesized
ctggactgattcccagtgctaa

SEQ ID NO: 26936 - DNA, 22 bp, Artificial Sequence
  chemically synthesized
tggactgattcccagtgctaac

SEQ ID NO: 26937 - DNA, 22 bp, Artificial Sequence
  chemically synthesized
gactgattcccagtgctaacaa

SEQ ID NO: 26938 - DNA, 22 bp, Artificial Sequence
  chemically synthesized
attcccagtgctaacaagtccc

SEQ ID NO: 26939 - DNA, 22 bp, Artificial Sequence
  chemically synthesized
ccagtgctaacaagtcccttcc

SEQ ID NO: 26940 - DNA, 22 bp, Artificial Sequence
  chemically synthesized
acaagtcccttccagttttatc

SEQ ID NO: 26941 - DNA, 22 bp, Artificial Sequence
  chemically synthesized
ccagttttatccaccaataagc

SEQ ID NO: 26942 - DNA, 22 bp, Artificial Sequence
  chemically synthesized
cagttttatccaccaataagct

SEQ ID NO: 26943 - DNA, 22 bp, Artificial Sequence
  chemically synthesized
tatccaccaataagctatgtcc

SEQ ID NO: 26944 - DNA, 22 bp, Artificial Sequence
  chemically synthesized
atccaccaataagctatgtcct

SEQ ID NO: 26945 - DNA, 22 bp, Artificial Sequence
  chemically synthesized
tccaccaataagctatgtcctt

SEQ ID NO: 26946 - DNA, 22 bp, Artificial Sequence
  chemically synthesized
tgtccttgagctcctgcccact

SEQ ID NO: 26947 - DNA, 22 bp, Artificial Sequence
  chemically synthesized
gagctcctgcccactctctaga

SEQ ID NO: 26948 - DNA, 22 bp, Artificial Sequence
  chemically synthesized
agctcctgcccactctctagag

SEQ ID NO: 26949 - DNA, 22 bp, Artificial Sequence
  chemically synthesized
ctgcccactctctagagaaaac

SEQ ID NO: 26950 - DNA, 22 bp, Artificial Sequence
  chemically synthesized
cccactctctagagaaaacttt

SEQ ID NO: 26951 - DNA, 22 bp, Artificial Sequence
  chemically synthesized
tctagagaaaacttttatttca

SEQ ID NO: 26952 - DNA, 22 bp, Artificial Sequence
  chemically synthesized
tagagaaaacttttatttcaag

SEQ ID NO: 26953 - DNA, 22 bp, Artificial Sequence
  chemically synthesized
gagaaaacttttatttcaaggc

SEQ ID NO: 26954 - DNA, 22 bp, Artificial Sequence
  chemically synthesized
ttatttcaaggcatactccggg

SEQ ID NO: 26955 - DNA, 22 bp, Artificial Sequence
  chemically synthesized
tatttcaaggcatactccggga

SEQ ID NO: 26956 - DNA, 22 bp, Artificial Sequence
  chemically synthesized
atttcaaggcatactccgggat

SEQ ID NO: 26957 - DNA, 22 bp, Artificial Sequence
  chemically synthesized
tttcaaggcatactccgggatt

SEQ ID NO: 26958 - DNA, 22 bp, Artificial Sequence
  chemically synthesized
caaggcatactccgggattcac

SEQ ID NO: 26959 - DNA, 22 bp, Artificial Sequence
  chemically synthesized
aaggcatactccgggattcaca

SEQ ID NO: 26960 - DNA, 22 bp, Artificial Sequence
  chemically synthesized
cgggattcacatgtgatagaga

SEQ ID NO: 26961 - DNA, 22 bp, Artificial Sequence
  chemically synthesized
acatgtgatagagatggttctg

SEQ ID NO: 26962 - DNA, 22 bp, Artificial Sequence
  chemically synthesized
tgttcccaggaactttgggcat

SEQ ID NO: 26963 - DNA, 22 bp, Artificial Sequence
  chemically synthesized
ttcccaggaactttgggcatat

SEQ ID NO: 26964 - DNA, 22 bp, Artificial Sequence
  chemically synthesized
ccaggaactttgggcatattta

SEQ ID NO: 26965 - DNA, 22 bp, Artificial Sequence
  chemically synthesized
tgggcatatttaaaaactggac

SEQ ID NO: 26966 - DNA, 22 bp, Artificial Sequence
  chemically synthesized
gggcatatttaaaaactggact

SEQ ID NO: 26967 - DNA, 22 bp, Artificial Sequence
  chemically synthesized
ggcatatttaaaaactggactg

SEQ ID NO: 26968 - DNA, 22 bp, Artificial Sequence
  chemically synthesized
aaaaactggactggaaaaattt

SEQ ID NO: 26969 - DNA, 22 bp, Artificial Sequence
  chemically synthesized
aaaactggactggaaaaatttg

SEQ ID NO: 26970 - DNA, 22 bp, Artificial Sequence
  chemically synthesized
gactggaaaaatttgtgactag

SEQ ID NO: 26971 - DNA, 22 bp, Artificial Sequence
  chemically synthesized
gaaaaatttgtgactagaaaaa

SEQ ID NO: 26972 - DNA, 22 bp, Artificial Sequence
  chemically synthesized
gtgactagaaaaaggacattaa

SEQ ID NO: 26973 - DNA, 22 bp, Artificial Sequence
  chemically synthesized
tgactagaaaaaggacattaaa

SEQ ID NO: 26974 - DNA, 22 bp, Artificial Sequence
  chemically synthesized
gaaaaaggacattaaaaacaca

SEQ ID NO: 26975 - DNA, 22 bp, Artificial Sequence
  chemically synthesized
aaaacacatgctcatttcagga

SEQ ID NO: 26976 - DNA, 22 bp, Artificial Sequence
  chemically synthesized
atttcaggataaagatctctga

SEQ ID NO: 26977 - DNA, 22 bp, Artificial Sequence
  chemically synthesized
caggataaagatctctgaggaa

SEQ ID NO: 26978 - DNA, 22 bp, Artificial Sequence
  chemically synthesized
aggataaagatctctgaggaaa

SEQ ID NO: 26979 - DNA, 22 bp, Artificial Sequence
  chemically synthesized
tgaggaaaagaatacaaaataa

SEQ ID NO: 26980 - DNA, 22 bp, Artificial Sequence
  chemically synthesized
aggaaaagaatacaaaataatt

SEQ ID NO: 26981 - DNA, 22 bp, Artificial Sequence
  chemically synthesized
aaaaagaaacaacagaaacagg

SEQ ID NO: 26982 - DNA, 22 bp, Artificial Sequence
  chemically synthesized
aaaagaaacaacagaaacaggt

SEQ ID NO: 26983 - DNA, 22 bp, Artificial Sequence
  chemically synthesized
cacttctctgtaataaggtttc

SEQ ID NO: 26984 - DNA, 22 bp, Artificial Sequence
  chemically synthesized
acttctctgtaataaggtttct

SEQ ID NO: 26985 - DNA, 22 bp, Artificial Sequence
  chemically synthesized
ctctgtaataaggtttctgtcc

SEQ ID NO: 26986 - DNA, 22 bp, Artificial Sequence
  chemically synthesized
tctgtaataaggtttctgtcct

SEQ ID NO: 26987 - DNA, 22 bp, Artificial Sequence
  chemically synthesized
tgtaataaggtttctgtcctcc

SEQ ID NO: 26988 - DNA, 22 bp, Artificial Sequence
  chemically synthesized
taataaggtttctgtcctccta

SEQ ID NO: 26989 - DNA, 22 bp, Artificial Sequence
  chemically synthesized
ctgtcctcctagattctttctc

SEQ ID NO: 26990 - DNA, 22 bp, Artificial Sequence
  chemically synthesized
tgtcctcctagattctttctca

SEQ ID NO: 26991 - DNA, 22 bp, Artificial Sequence
  chemically synthesized
tcctcctagattctttctcact

SEQ ID NO: 26992 - DNA, 22 bp, Artificial Sequence
  chemically synthesized
ctagattctttctcactaaact

SEQ ID NO: 26993 - DNA, 22 bp, Artificial Sequence
  chemically synthesized
gattctttctcactaaactaca

SEQ ID NO: 26994 - DNA, 22 bp, Artificial Sequence
  chemically synthesized
tttctcactaaactacagagaa

SEQ ID NO: 26995 - DNA, 22 bp, Artificial Sequence
  chemically synthesized
tctcactaaactacagagaata

SEQ ID NO: 26996 - DNA, 22 bp, Artificial Sequence
  chemically synthesized
ctcactaaactacagagaataa

SEQ ID NO: 26997 - DNA, 22 bp, Artificial Sequence
  chemically synthesized
tcactaaactacagagaataag

SEQ ID NO: 26998 - DNA, 22 bp, Artificial Sequence
  chemically synthesized
actaaactacagagaataagac

SEQ ID NO: 26999 - DNA, 22 bp, Artificial Sequence
  chemically synthesized
aactacagagaataagaccgtg

SEQ ID NO: 27000 - DNA, 22 bp, Artificial Sequence
  chemically synthesized
cagagaataagaccgtgctttg

SEQ ID NO: 27001 - DNA, 22 bp, Artificial Sequence
  chemically synthesized
tgttctcttatatgcattctgt

SEQ ID NO: 27002 - DNA, 22 bp, Artificial Sequence
  chemically synthesized
gttctcttatatgcattctgtc

SEQ ID NO: 27003 - DNA, 22 bp, Artificial Sequence
  chemically synthesized
ttctcttatatgcattctgtcc

SEQ ID NO: 27004 - DNA, 22 bp, Artificial Sequence
  chemically synthesized
tcttatatgcattctgtccact

SEQ ID NO: 27005 - DNA, 22 bp, Artificial Sequence
  chemically synthesized
ttatatgcattctgtccacttc

SEQ ID NO: 27006 - DNA, 22 bp, Artificial Sequence
  chemically synthesized
atatgcattctgtccacttcta

SEQ ID NO: 27007 - DNA, 22 bp, Artificial Sequence
  chemically synthesized
tatgcattctgtccacttctac

SEQ ID NO: 27008 - DNA, 22 bp, Artificial Sequence
  chemically synthesized
tgtccacttctacataggcaaa

SEQ ID NO: 27009 - DNA, 22 bp, Artificial Sequence
  chemically synthesized
tccacttctacataggcaaaat

SEQ ID NO: 27010 - DNA, 22 bp, Artificial Sequence
  chemically synthesized
ctacataggcaaaattgacttt

SEQ ID NO: 27011 - DNA, 22 bp, Artificial Sequence
  chemically synthesized
tacataggcaaaattgactttt

SEQ ID NO: 27012 - DNA, 22 bp, Artificial Sequence
  chemically synthesized
cataggcaaaattgacttttaa

SEQ ID NO: 27013 - DNA, 22 bp, Artificial Sequence
  chemically synthesized
acttttaattttgattttatga

SEQ ID NO: 27014 - DNA, 22 bp, Artificial Sequence
  chemically synthesized
ttaattttgattttatgaatgc

SEQ ID NO: 27015 - DNA, 22 bp, Artificial Sequence
  chemically synthesized
taattttgattttatgaatgca

SEQ ID NO: 27016 - DNA, 22 bp, Artificial Sequence
  chemically synthesized
aattttgattttatgaatgcat

SEQ ID NO: 27017 - DNA, 22 bp, Artificial Sequence
  chemically synthesized
attttgattttatgaatgcata

SEQ ID NO: 27018 - DNA, 22 bp, Artificial Sequence
  chemically synthesized
tgattttatgaatgcatacaca

SEQ ID NO: 27019 - DNA, 22 bp, Artificial Sequence
  chemically synthesized
gattttatgaatgcatacacac

SEQ ID NO: 27020 - DNA, 22 bp, Artificial Sequence
  chemically synthesized
attttatgaatgcatacacacg

SEQ ID NO: 27021 - DNA, 22 bp, Artificial Sequence
  chemically synthesized
tatgaatgcatacacacgagaa

SEQ ID NO: 27022 - DNA, 22 bp, Artificial Sequence
  chemically synthesized
atgaatgcatacacacgagaac

SEQ ID NO: 27023 - DNA, 22 bp, Artificial Sequence
  chemically synthesized
tgaatgcatacacacgagaact

SEQ ID NO: 27024 - DNA, 22 bp, Artificial Sequence
  chemically synthesized
tgaacagttagtataaggtgaa

SEQ ID NO: 27025 - DNA, 22 bp, Artificial Sequence
  chemically synthesized
gaacagttagtataaggtgaat

SEQ ID NO: 27026 - DNA, 22 bp, Artificial Sequence
  chemically synthesized
aacagttagtataaggtgaatt

SEQ ID NO: 27027 - DNA, 22 bp, Artificial Sequence
  chemically synthesized
gtataaggtgaattctgatttt

SEQ ID NO: 27028 - DNA, 22 bp, Artificial Sequence
  chemically synthesized
tgatttttcagaatgcatgcca

SEQ ID NO: 27029 - DNA, 22 bp, Artificial Sequence
  chemically synthesized
atttttcagaatgcatgccata

SEQ ID NO: 27030 - DNA, 22 bp, Artificial Sequence
  chemically synthesized
ttcagaatgcatgccatatata

SEQ ID NO: 27031 - DNA, 22 bp, Artificial Sequence
  chemically synthesized
tcagaatgcatgccatatataa

SEQ ID NO: 27032 - DNA, 22 bp, Artificial Sequence
  chemically synthesized
cagaatgcatgccatatataat

SEQ ID NO: 27033 - DNA, 22 bp, Artificial Sequence
  chemically synthesized
agaatgcatgccatatataatg

SEQ ID NO: 27034 - DNA, 22 bp, Artificial Sequence
  chemically synthesized
aattttgagattatgctggctc

SEQ ID NO: 27035 - DNA, 22 bp, Artificial Sequence
  chemically synthesized
attttgagattatgctggctct

SEQ ID NO: 27036 - DNA, 22 bp, Artificial Sequence
  chemically synthesized
tgagattatgctggctctgatt

SEQ ID NO: 27037 - DNA, 22 bp, Artificial Sequence
  chemically synthesized
gagattatgctggctctgatta

SEQ ID NO: 27038 - DNA, 22 bp, Artificial Sequence
  chemically synthesized
agattatgctggctctgattag

SEQ ID NO: 27039 - DNA, 22 bp, Artificial Sequence
  chemically synthesized
tgctggctctgattagccaaaa

SEQ ID NO: 27040 - DNA, 22 bp, Artificial Sequence
  chemically synthesized
gctctgattagccaaaagaagg

SEQ ID NO: 27041 - DNA, 22 bp, Artificial Sequence
  chemically synthesized
tgattagccaaaagaaggaagt

SEQ ID NO: 27042 - DNA, 22 bp, Artificial Sequence
  chemically synthesized
attagccaaaagaaggaagtaa

SEQ ID NO: 27043 - DNA, 22 bp, Artificial Sequence
  chemically synthesized
gccaaaagaaggaagtaatata

SEQ ID NO: 27044 - DNA, 22 bp, Artificial Sequence
  chemically synthesized
tggttattatttcagatccttt

SEQ ID NO: 27045 - DNA, 22 bp, Artificial Sequence
  chemically synthesized
gttattatttcagatcctttag

SEQ ID NO: 27046 - DNA, 22 bp, Artificial Sequence
  chemically synthesized
ttatttcagatcctttagatta

SEQ ID NO: 27047 - DNA, 22 bp, Artificial Sequence
  chemically synthesized
tttcagatcctttagattactg

SEQ ID NO: 27048 - DNA, 22 bp, Artificial Sequence
  chemically synthesized
cagatcctttagattactgtaa

SEQ ID NO: 27049 - DNA, 22 bp, Artificial Sequence
  chemically synthesized
agatcctttagattactgtaat

SEQ ID NO: 27050 - DNA, 22 bp, Artificial Sequence
  chemically synthesized
tagattactgtaatagacatga

SEQ ID NO: 27051 - DNA, 22 bp, Artificial Sequence
  chemically synthesized
agattactgtaatagacatgaa

SEQ ID NO: 27052 - DNA, 22 bp, Artificial Sequence
  chemically synthesized
gattactgtaatagacatgaaa

SEQ ID NO: 27053 - DNA, 22 bp, Artificial Sequence
  chemically synthesized
ctgtaatagacatgaaatagta

SEQ ID NO: 27054 - DNA, 22 bp, Artificial Sequence
  chemically synthesized
taatagacatgaaatagtaaac

SEQ ID NO: 27055 - DNA, 22 bp, Artificial Sequence
  chemically synthesized
tatatcacaacacatgacataa

SEQ ID NO: 27056 - DNA, 22 bp, Artificial Sequence
  chemically synthesized
cagatcgtttaaatcacacaag

SEQ ID NO: 27057 - DNA, 22 bp, Artificial Sequence
  chemically synthesized
agatcgtttaaatcacacaagt

SEQ ID NO: 27058 - DNA, 22 bp, Artificial Sequence
  chemically synthesized
aaatcacacaagtcatcactgc

SEQ ID NO: 27059 - DNA, 22 bp, Artificial Sequence
  chemically synthesized
aatcacacaagtcatcactgcc

SEQ ID NO: 27060 - DNA, 22 bp, Artificial Sequence
  chemically synthesized
ccatttacccagcaatcagttg

SEQ ID NO: 27061 - DNA, 22 bp, Artificial Sequence
  chemically synthesized
acccagcaatcagttggcttga

SEQ ID NO: 27062 - DNA, 22 bp, Artificial Sequence
  chemically synthesized
cccagcaatcagttggcttgat

SEQ ID NO: 27063 - DNA, 22 bp, Artificial Sequence
  chemically synthesized
gcttgattcttcaagatcttga

SEQ ID NO: 27064 - DNA, 22 bp, Artificial Sequence
  chemically synthesized
gattcttcaagatcttgaggaa

SEQ ID NO: 27065 - DNA, 22 bp, Artificial Sequence
  chemically synthesized
attcttcaagatcttgaggaac

SEQ ID NO: 27066 - DNA, 22 bp, Artificial Sequence
  chemically synthesized
ttcaagatcttgaggaactcag

SEQ ID NO: 27067 - DNA, 22 bp, Artificial Sequence
  chemically synthesized
caagatcttgaggaactcagcc

SEQ ID NO: 27068 - DNA, 22 bp, Artificial Sequence
  chemically synthesized
aagatcttgaggaactcagcct

SEQ ID NO: 27069 - DNA, 22 bp, Artificial Sequence
  chemically synthesized
gaggaactcagccttcaaaacc

SEQ ID NO: 27070 - DNA, 22 bp, Artificial Sequence
  chemically synthesized
aggaactcagccttcaaaacca

SEQ ID NO: 27071 - DNA, 22 bp, Artificial Sequence
  chemically synthesized
agccttcaaaaccatgactttt

SEQ ID NO: 27072 - DNA, 22 bp, Artificial Sequence
  chemically synthesized
caaaaccatgactttttctttg

SEQ ID NO: 27073 - DNA, 22 bp, Artificial Sequence
  chemically synthesized
aaaaccatgactttttctttgc

SEQ ID NO: 27074 - DNA, 22 bp, Artificial Sequence
  chemically synthesized
tttctttgctaatgttccttca

SEQ ID NO: 27075 - DNA, 22 bp, Artificial Sequence
  chemically synthesized
ttctttgctaatgttccttcaa

SEQ ID NO: 27076 - DNA, 22 bp, Artificial Sequence
  chemically synthesized
tctttgctaatgttccttcaat

SEQ ID NO: 27077 - DNA, 22 bp, Artificial Sequence
  chemically synthesized
ctttgctaatgttccttcaata

SEQ ID NO: 27078 - DNA, 22 bp, Artificial Sequence
  chemically synthesized
tttgctaatgttccttcaatag

SEQ ID NO: 27079 - DNA, 22 bp, Artificial Sequence
  chemically synthesized
tgctaatgttccttcaatagtc

SEQ ID NO: 27080 - DNA, 22 bp, Artificial Sequence
  chemically synthesized
gctaatgttccttcaatagtct

SEQ ID NO: 27081 - DNA, 22 bp, Artificial Sequence
  chemically synthesized
ctaatgttccttcaatagtctt

SEQ ID NO: 27082 - DNA, 22 bp, Artificial Sequence
  chemically synthesized
atgttccttcaatagtcttgac

SEQ ID NO: 27083 - DNA, 22 bp, Artificial Sequence
  chemically synthesized
cttcaatagtcttgacactttt

SEQ ID NO: 27084 - DNA, 22 bp, Artificial Sequence
  chemically synthesized
caatagtcttgacacttttaaa

SEQ ID NO: 27085 - DNA, 22 bp, Artificial Sequence
  chemically synthesized
aatagtcttgacacttttaaac

SEQ ID NO: 27086 - DNA, 22 bp, Artificial Sequence
  chemically synthesized
gacacttttaaactagagagta

SEQ ID NO: 27087 - DNA, 22 bp, Artificial Sequence
  chemically synthesized
acacttttaaactagagagtat

SEQ ID NO: 27088 - DNA, 22 bp, Artificial Sequence
  chemically synthesized
ttaaactagagagtataaaccc

SEQ ID NO: 27089 - DNA, 22 bp, Artificial Sequence
  chemically synthesized
taaactagagagtataaaccca

SEQ ID NO: 27090 - DNA, 22 bp, Artificial Sequence
  chemically synthesized
aaactagagagtataaacccac

SEQ ID NO: 27091 - DNA, 22 bp, Artificial Sequence
  chemically synthesized
aactagagagtataaacccaca

SEQ ID NO: 27092 - DNA, 22 bp, Artificial Sequence
  chemically synthesized
gagagtataaacccacaaggaa

SEQ ID NO: 27093 - DNA, 22 bp, Artificial Sequence
  chemically synthesized
ttttataattttacagatgtct

SEQ ID NO: 27094 - DNA, 22 bp, Artificial Sequence
  chemically synthesized
tataattttacagatgtcttta

SEQ ID NO: 27095 - DNA, 22 bp, Artificial Sequence
  chemically synthesized
ataattttacagatgtctttat

SEQ ID NO: 27096 - DNA, 22 bp, Artificial Sequence
  chemically synthesized
taattttacagatgtctttatt

SEQ ID NO: 27097 - DNA, 22 bp, Artificial Sequence
  chemically synthesized
tacagatgtctttattttcaaa

SEQ ID NO: 27098 - DNA, 22 bp, Artificial Sequence
  chemically synthesized
acagatgtctttattttcaaaa

SEQ ID NO: 27099 - DNA, 22 bp, Artificial Sequence
  chemically synthesized
cagatgtctttattttcaaaat

SEQ ID NO: 27100 - DNA, 22 bp, Artificial Sequence
  chemically synthesized
tattttcaaaatcatttacatt

SEQ ID NO: 27101 - DNA, 22 bp, Artificial Sequence
  chemically synthesized
attttcaaaatcatttacattg

SEQ ID NO: 27102 - DNA, 22 bp, Artificial Sequence
  chemically synthesized
ttttcaaaatcatttacattgt

SEQ ID NO: 27103 - DNA, 22 bp, Artificial Sequence
  chemically synthesized
tcaaaatcatttacattgtggt

SEQ ID NO: 27104 - DNA, 22 bp, Artificial Sequence
  chemically synthesized
caaaatcatttacattgtggtt

SEQ ID NO: 27105 - DNA, 22 bp, Artificial Sequence
  chemically synthesized
aaaatcatttacattgtggttc

SEQ ID NO: 27106 - DNA, 22 bp, Artificial Sequence
  chemically synthesized
acattgtggttctctaccttgc

SEQ ID NO: 27107 - DNA, 22 bp, Artificial Sequence
  chemically synthesized
cattgtggttctctaccttgcc

SEQ ID NO: 27108 - DNA, 22 bp, Artificial Sequence
  chemically synthesized
tggttctctaccttgccttctc

SEQ ID NO: 27109 - DNA, 22 bp, Artificial Sequence
  chemically synthesized
tctaccttgccttctcttaccc

SEQ ID NO: 27110 - DNA, 22 bp, Artificial Sequence
  chemically synthesized
taccttgccttctcttacccag

SEQ ID NO: 27111 - DNA, 22 bp, Artificial Sequence
  chemically synthesized
ccttgccttctcttacccagca

SEQ ID NO: 27112 - DNA, 22 bp, Artificial Sequence
  chemically synthesized
gccttctcttacccagcacaga

SEQ ID NO: 27113 - DNA, 22 bp, Artificial Sequence
  chemically synthesized
ccttctcttacccagcacagat

SEQ ID NO: 27114 - DNA, 22 bp, Artificial Sequence
  chemically synthesized
ctcttacccagcacagatgagg

SEQ ID NO: 27115 - DNA, 22 bp, Artificial Sequence
  chemically synthesized
tcttacccagcacagatgaggt

SEQ ID NO: 27116 - DNA, 22 bp, Artificial Sequence
  chemically synthesized
ttacccagcacagatgaggtta

SEQ ID NO: 27117 - DNA, 22 bp, Artificial Sequence
  chemically synthesized
acccagcacagatgaggttata

SEQ ID NO: 27118 - DNA, 22 bp, Artificial Sequence
  chemically synthesized
cccagcacagatgaggttatac

SEQ ID NO: 27119 - DNA, 22 bp, Artificial Sequence
  chemically synthesized
tacctcactcgcaaattgtttt

SEQ ID NO: 27120 - DNA, 22 bp, Artificial Sequence
  chemically synthesized
actcgcaaattgttttatcaat

SEQ ID NO: 27121 - DNA, 22 bp, Artificial Sequence
  chemically synthesized
gcaaattgttttatcaatttga

SEQ ID NO: 27122 - DNA, 22 bp, Artificial Sequence
  chemically synthesized
ttttatcaatttgattttcttt

SEQ ID NO: 27123 - DNA, 22 bp, Artificial Sequence
  chemically synthesized
tatcaatttgattttctttatt

SEQ ID NO: 27124 - DNA, 22 bp, Artificial Sequence
  chemically synthesized
atcaatttgattttctttattt

SEQ ID NO: 27125 - DNA, 22 bp, Artificial Sequence
  chemically synthesized
tcaatttgattttctttatttt

SEQ ID NO: 27126 - DNA, 22 bp, Artificial Sequence
  chemically synthesized
gattttctttattttataattc

SEQ ID NO: 27127 - DNA, 22 bp, Artificial Sequence
  chemically synthesized
attttctttattttataattcc

SEQ ID NO: 27128 - DNA, 22 bp, Artificial Sequence
  chemically synthesized
tctttattttataattcctaca

SEQ ID NO: 27129 - DNA, 22 bp, Artificial Sequence
  chemically synthesized
ctttattttataattcctacat

SEQ ID NO: 27130 - DNA, 22 bp, Artificial Sequence
  chemically synthesized
tttattttataattcctacata

SEQ ID NO: 27131 - DNA, 22 bp, Artificial Sequence
  chemically synthesized
tattttataattcctacataag

SEQ ID NO: 27132 - DNA, 22 bp, Artificial Sequence
  chemically synthesized
attttataattcctacataagc

SEQ ID NO: 27133 - DNA, 22 bp, Artificial Sequence
  chemically synthesized
ttttataattcctacataagca

SEQ ID NO: 27134 - DNA, 22 bp, Artificial Sequence
  chemically synthesized
tataattcctacataagcatag

SEQ ID NO: 27135 - DNA, 22 bp, Artificial Sequence
  chemically synthesized
ataattcctacataagcatagc

SEQ ID NO: 27136 - DNA, 22 bp, Artificial Sequence
  chemically synthesized
taattcctacataagcatagca

SEQ ID NO: 27137 - DNA, 22 bp, Artificial Sequence
  chemically synthesized
ctacataagcatagcattgaag

SEQ ID NO: 27138 - DNA, 22 bp, Artificial Sequence
  chemically synthesized
cataagcatagcattgaagaaa

SEQ ID NO: 27139 - DNA, 22 bp, Artificial Sequence
  chemically synthesized
aagaaaaaaattactttcattc

SEQ ID NO: 27140 - DNA, 22 bp, Artificial Sequence
  chemically synthesized
ctttcattctgaaaggagcaca

SEQ ID NO: 27141 - DNA, 22 bp, Artificial Sequence
  chemically synthesized
tcattctgaaaggagcacagta

SEQ ID NO: 27142 - DNA, 22 bp, Artificial Sequence
  chemically synthesized
cattctgaaaggagcacagtat

SEQ ID NO: 27143 - DNA, 22 bp, Artificial Sequence
  chemically synthesized
attctgaaaggagcacagtatt

SEQ ID NO: 27144 - DNA, 22 bp, Artificial Sequence
  chemically synthesized
tgaaaggagcacagtattttgc

SEQ ID NO: 27145 - DNA, 22 bp, Artificial Sequence
  chemically synthesized
aaaggagcacagtattttgcct

SEQ ID NO: 27146 - DNA, 22 bp, Artificial Sequence
  chemically synthesized
tgccttttgagaagctcctgaa

SEQ ID NO: 27147 - DNA, 22 bp, Artificial Sequence
  chemically synthesized
gccttttgagaagctcctgaat

SEQ ID NO: 27148 - DNA, 22 bp, Artificial Sequence
  chemically synthesized
ccttttgagaagctcctgaatt

SEQ ID NO: 27149 - DNA, 22 bp, Artificial Sequence
  chemically synthesized
ttgagaagctcctgaattaaaa

SEQ ID NO: 27150 - DNA, 22 bp, Artificial Sequence
  chemically synthesized
tgagaagctcctgaattaaaac

SEQ ID NO: 27151 - DNA, 22 bp, Artificial Sequence
  chemically synthesized
gagaagctcctgaattaaaaca

SEQ ID NO: 27152 - DNA, 22 bp, Artificial Sequence
  chemically synthesized
agaagctcctgaattaaaacat

SEQ ID NO: 27153 - DNA, 22 bp, Artificial Sequence
  chemically synthesized
ctgaattaaaacattaattcca

SEQ ID NO: 27154 - DNA, 22 bp, Artificial Sequence
  chemically synthesized
aattaaaacattaattccaagc

SEQ ID NO: 27155 - DNA, 22 bp, Artificial Sequence
  chemically synthesized
aaacattaattccaagctaatt

SEQ ID NO: 27156 - DNA, 22 bp, Artificial Sequence
  chemically synthesized
attccaagctaattgtgaatat

SEQ ID NO: 27157 - DNA, 22 bp, Artificial Sequence
  chemically synthesized
caagctaattgtgaatatgaaa

SEQ ID NO: 27158 - DNA, 22 bp, Artificial Sequence
  chemically synthesized
attgtgaatatgaaacattctt

SEQ ID NO: 27159 - DNA, 22 bp, Artificial Sequence
  chemically synthesized
tgaatatgaaacattcttaagc

SEQ ID NO: 27160 - DNA, 22 bp, Artificial Sequence
  chemically synthesized
ttaagcatttcatataattact

SEQ ID NO: 27161 - DNA, 22 bp, Artificial Sequence
  chemically synthesized
aagcatttcatataattactaa

SEQ ID NO: 27162 - DNA, 22 bp, Artificial Sequence
  chemically synthesized
agcatttcatataattactaac

SEQ ID NO: 27163 - DNA, 22 bp, Artificial Sequence
  chemically synthesized
catataattactaacagaatgt

SEQ ID NO: 27164 - DNA, 22 bp, Artificial Sequence
  chemically synthesized
atataattactaacagaatgta

SEQ ID NO: 27165 - DNA, 22 bp, Artificial Sequence
  chemically synthesized
ctaacagaatgtagagttgagg

SEQ ID NO: 27166 - DNA, 22 bp, Artificial Sequence
  chemically synthesized
acagaatgtagagttgaggttt

SEQ ID NO: 27167 - DNA, 22 bp, Artificial Sequence
  chemically synthesized
aggtttccaactggttctaatc

SEQ ID NO: 27168 - DNA, 22 bp, Artificial Sequence
  chemically synthesized
ccaactggttctaatcacatat

SEQ ID NO: 27169 - DNA, 22 bp, Artificial Sequence
  chemically synthesized
caactggttctaatcacatata

SEQ ID NO: 27170 - DNA, 22 bp, Artificial Sequence
  chemically synthesized
gttctaatcacatatacatctt

SEQ ID NO: 27171 - DNA, 22 bp, Artificial Sequence
  chemically synthesized
taatcacatatacatcttccta

SEQ ID NO: 27172 - DNA, 22 bp, Artificial Sequence
  chemically synthesized
atcacatatacatcttcctaaa

SEQ ID NO: 27173 - DNA, 22 bp, Artificial Sequence
  chemically synthesized
cctaaaataaaatgtttaatta

SEQ ID NO: 27174 - DNA, 22 bp, Artificial Sequence
  chemically synthesized
ctaaaataaaatgtttaattat

SEQ ID NO: 27175 - DNA, 22 bp, Artificial Sequence
  chemically synthesized
aaataaaatgtttaattatact

SEQ ID NO: 27176 - DNA, 22 bp, Artificial Sequence
  chemically synthesized
aattatactattttgctgagaa

SEQ ID NO: 27177 - DNA, 22 bp, Artificial Sequence
  chemically synthesized
attatactattttgctgagaaa

SEQ ID NO: 27178 - DNA, 22 bp, Artificial Sequence
  chemically synthesized
tactattttgctgagaaaaatt

SEQ ID NO: 27179 - DNA, 22 bp, Artificial Sequence
  chemically synthesized
ttttgctgagaaaaattttaaa

SEQ ID NO: 27180 - DNA, 22 bp, Artificial Sequence
  chemically synthesized
tgctgagaaaaattttaaaaca

SEQ ID NO: 27181 - DNA, 22 bp, Artificial Sequence
  chemically synthesized
gctgagaaaaattttaaaacaa

SEQ ID NO: 27182 - DNA, 22 bp, Artificial Sequence
  chemically synthesized
ctgagaaaaattttaaaacaaa

SEQ ID NO: 27183 - DNA, 22 bp, Artificial Sequence
  chemically synthesized
agaaaaattttaaaacaaaaaa

SEQ ID NO: 27184 - DNA, 22 bp, Artificial Sequence
  chemically synthesized
taaaacaaaaaatgtaaatatt

SEQ ID NO: 27185 - DNA, 22 bp, Artificial Sequence
  chemically synthesized
aaaacaaaaaatgtaaatatta

SEQ ID NO: 27186 - DNA, 22 bp, Artificial Sequence
  chemically synthesized
aaacaaaaaatgtaaatattaa

SEQ ID NO: 27187 - DNA, 22 bp, Artificial Sequence
  chemically synthesized
actttttatttctatgttgtca

SEQ ID NO: 27188 - DNA, 22 bp, Artificial Sequence
  chemically synthesized
tttatttctatgttgtcataat

SEQ ID NO: 27189 - DNA, 22 bp, Artificial Sequence
  chemically synthesized
ttatttctatgttgtcataata

SEQ ID NO: 27190 - DNA, 22 bp, Artificial Sequence
  chemically synthesized
tatttctatgttgtcataatat

SEQ ID NO: 27191 - DNA, 22 bp, Artificial Sequence
  chemically synthesized
atttctatgttgtcataatatg

SEQ ID NO: 27192 - DNA, 22 bp, Artificial Sequence
  chemically synthesized
tttctatgttgtcataatatgg

SEQ ID NO: 27193 - DNA, 22 bp, Artificial Sequence
  chemically synthesized
ctatgttgtcataatatggatt

SEQ ID NO: 27194 - DNA, 22 bp, Artificial Sequence
  chemically synthesized
tatgttgtcataatatggattt

SEQ ID NO: 27195 - DNA, 22 bp, Artificial Sequence
  chemically synthesized
tgttgtcataatatggatttta

SEQ ID NO: 27196 - DNA, 22 bp, Artificial Sequence
  chemically synthesized
tcataatatggattttaaattt

SEQ ID NO: 27197 - DNA, 22 bp, Artificial Sequence
  chemically synthesized
taaattttaatttaaatgcaca

SEQ ID NO: 27198 - DNA, 22 bp, Artificial Sequence
  chemically synthesized
aaattttaatttaaatgcacat

SEQ ID NO: 27199 - DNA, 22 bp, Artificial Sequence
  chemically synthesized
aattttaatttaaatgcacatt

SEQ ID NO: 27200 - DNA, 22 bp, Artificial Sequence
  chemically synthesized
taatttaaatgcacattccatg

SEQ ID NO: 27201 - DNA, 22 bp, Artificial Sequence
  chemically synthesized
aatttaaatgcacattccatgg

SEQ ID NO: 27202 - DNA, 22 bp, Artificial Sequence
  chemically synthesized
atttaaatgcacattccatggc

SEQ ID NO: 27203 - DNA, 22 bp, Artificial Sequence
  chemically synthesized
aaatgcacattccatggcaatg

SEQ ID NO: 27204 - DNA, 22 bp, Artificial Sequence
  chemically synthesized
aatgcacattccatggcaatgg

SEQ ID NO: 27205 - DNA, 22 bp, Artificial Sequence
  chemically synthesized
catggcaatggctaatattttc

SEQ ID NO: 27206 - DNA, 22 bp, Artificial Sequence
  chemically synthesized
atattttcaactttctccctct

SEQ ID NO: 27207 - DNA, 22 bp, Artificial Sequence
  chemically synthesized
tcaactttctccctcttcaaca

SEQ ID NO: 27208 - DNA, 22 bp, Artificial Sequence
  chemically synthesized
caactttctccctcttcaacac

SEQ ID NO: 27209 - DNA, 22 bp, Artificial Sequence
  chemically synthesized
aactttctccctcttcaacaca

SEQ ID NO: 27210 - DNA, 22 bp, Artificial Sequence
  chemically synthesized
tctccctcttcaacacatacac

SEQ ID NO: 27211 - DNA, 22 bp, Artificial Sequence
  chemically synthesized
ctccctcttcaacacatacaca

SEQ ID NO: 27212 - DNA, 22 bp, Artificial Sequence
  chemically synthesized
tccctcttcaacacatacacaa

SEQ ID NO: 27213 - DNA, 22 bp, Artificial Sequence
  chemically synthesized
cctcttcaacacatacacaagt

SEQ ID NO: 27214 - DNA, 22 bp, Artificial Sequence
  chemically synthesized
ttcaacacatacacaagtctgt

SEQ ID NO: 27215 - DNA, 22 bp, Artificial Sequence
  chemically synthesized
caacacatacacaagtctgtat

SEQ ID NO: 27216 - DNA, 22 bp, Artificial Sequence
  chemically synthesized
aacacatacacaagtctgtatt

SEQ ID NO: 27217 - DNA, 22 bp, Artificial Sequence
  chemically synthesized
tattcatagcctgttgtaatag

SEQ ID NO: 27218 - DNA, 22 bp, Artificial Sequence
  chemically synthesized
atagcctgttgtaatagacaag

SEQ ID NO: 27219 - DNA, 22 bp, Artificial Sequence
  chemically synthesized
ttgtaatagacaaggttaaatg

SEQ ID NO: 27220 - DNA, 22 bp, Artificial Sequence
  chemically synthesized
taatagacaaggttaaatgtag

SEQ ID NO: 27221 - DNA, 22 bp, Artificial Sequence
  chemically synthesized
aatgtagcctaaatatatattc

SEQ ID NO: 27222 - DNA, 22 bp, Artificial Sequence
  chemically synthesized
aatatatattccgtttaaatgc

SEQ ID NO: 27223 - DNA, 22 bp, Artificial Sequence
  chemically synthesized
cgtttaaatgctttcctcactc

SEQ ID NO: 27224 - DNA, 22 bp, Artificial Sequence
  chemically synthesized
aaatgctttcctcactcactag

SEQ ID NO: 27225 - DNA, 22 bp, Artificial Sequence
  chemically synthesized
aatgctttcctcactcactagc

SEQ ID NO: 27226 - DNA, 22 bp, Artificial Sequence
  chemically synthesized
tcctcactcactagcaattggt

SEQ ID NO: 27227 - DNA, 22 bp, Artificial Sequence
  chemically synthesized
cctcactcactagcaattggtt

SEQ ID NO: 27228 - DNA, 22 bp, Artificial Sequence
  chemically synthesized
ctcactcactagcaattggtta

SEQ ID NO: 27229 - DNA, 22 bp, Artificial Sequence
  chemically synthesized
actcactagcaattggttatca

SEQ ID NO: 27230 - DNA, 22 bp, Artificial Sequence
  chemically synthesized
actagcaattggttatcactag

SEQ ID NO: 27231 - DNA, 22 bp, Artificial Sequence
  chemically synthesized
gcaattggttatcactagagag

SEQ ID NO: 27232 - DNA, 22 bp, Artificial Sequence
  chemically synthesized
gttatcactagagagttatctg

SEQ ID NO: 27233 - DNA, 22 bp, Artificial Sequence
  chemically synthesized
tcactagagagttatctgtgaa

SEQ ID NO: 27234 - DNA, 22 bp, Artificial Sequence
  chemically synthesized
gagagttatctgtgaaatctta

SEQ ID NO: 27235 - DNA, 22 bp, Artificial Sequence
  chemically synthesized
tctgtgaaatcttactctacat

SEQ ID NO: 27236 - DNA, 22 bp, Artificial Sequence
  chemically synthesized
tgaaatcttactctacattcct

SEQ ID NO: 27237 - DNA, 22 bp, Artificial Sequence
  chemically synthesized
actctacattcctcagtcacct

SEQ ID NO: 27238 - DNA, 22 bp, Artificial Sequence
  chemically synthesized
ctctacattcctcagtcaccta

SEQ ID NO: 27239 - DNA, 22 bp, Artificial Sequence
  chemically synthesized
tacattcctcagtcacctagtg

SEQ ID NO: 27240 - DNA, 22 bp, Artificial Sequence
  chemically synthesized
cattcctcagtcacctagtgaa

SEQ ID NO: 27241 - DNA, 22 bp, Artificial Sequence
  chemically synthesized
ctcagtcacctagtgaaggtgt

SEQ ID NO: 27242 - DNA, 22 bp, Artificial Sequence
  chemically synthesized
agtcacctagtgaaggtgtact

SEQ ID NO: 27243 - DNA, 22 bp, Artificial Sequence
  chemically synthesized
gtgaaggtgtactgatccacct

SEQ ID NO: 27244 - DNA, 22 bp, Artificial Sequence
  chemically synthesized
atccaccttcaggagcagtaca

SEQ ID NO: 27245 - DNA, 22 bp, Artificial Sequence
  chemically synthesized
caggagcagtacaaacctttat

SEQ ID NO: 27246 - DNA, 22 bp, Artificial Sequence
  chemically synthesized
aggagcagtacaaacctttatt

SEQ ID NO: 27247 - DNA, 22 bp, Artificial Sequence
  chemically synthesized
tattggtcacttcccaagcaac

SEQ ID NO: 27248 - DNA, 22 bp, Artificial Sequence
  chemically synthesized
attggtcacttcccaagcaact

SEQ ID NO: 27249 - DNA, 22 bp, Artificial Sequence
  chemically synthesized
ttggtcacttcccaagcaactt

SEQ ID NO: 27250 - DNA, 22 bp, Artificial Sequence
  chemically synthesized
gtcacttcccaagcaacttcaa

SEQ ID NO: 27251 - DNA, 22 bp, Artificial Sequence
  chemically synthesized
cccaagcaacttcaaagagcag

SEQ ID NO: 27252 - DNA, 22 bp, Artificial Sequence
  chemically synthesized
ccaagcaacttcaaagagcagt

SEQ ID NO: 27253 - DNA, 22 bp, Artificial Sequence
  chemically synthesized
caaagagcagtaactcctccac

SEQ ID NO: 27254 - DNA, 22 bp, Artificial Sequence
  chemically synthesized
aaagagcagtaactcctccaca

SEQ ID NO: 27255 - DNA, 22 bp, Artificial Sequence
  chemically synthesized
ctccacaggaagttcttcgact

SEQ ID NO: 27256 - DNA, 22 bp, Artificial Sequence
  chemically synthesized
cacaggaagttcttcgacttcc

SEQ ID NO: 27257 - DNA, 22 bp, Artificial Sequence
  chemically synthesized
ttcgacttcccactggggaagc

SEQ ID NO: 27258 - DNA, 22 bp, Artificial Sequence
  chemically synthesized
cgacttcccactggggaagccc

SEQ ID NO: 27259 - DNA, 22 bp, Artificial Sequence
  chemically synthesized
gacttcccactggggaagccca

SEQ ID NO: 27260 - DNA, 22 bp, Artificial Sequence
  chemically synthesized
cccactggggaagcccacccag

SEQ ID NO: 27261 - DNA, 22 bp, Artificial Sequence
  chemically synthesized
ccactggggaagcccacccagg

SEQ ID NO: 27262 - DNA, 22 bp, Artificial Sequence
  chemically synthesized
gggaagcccacccagggatgtt

SEQ ID NO: 27263 - DNA, 22 bp, Artificial Sequence
  chemically synthesized
cagagagggatcggcctcgaag

SEQ ID NO: 27264 - DNA, 22 bp, Artificial Sequence
  chemically synthesized
gaagcattcttcttacagtcct

SEQ ID NO: 27265 - DNA, 22 bp, Artificial Sequence
  chemically synthesized
ttcttacagtcctccgagactc

SEQ ID NO: 27266 - DNA, 22 bp, Artificial Sequence
  chemically synthesized
cttacagtcctccgagactcct

SEQ ID NO: 27267 - DNA, 22 bp, Artificial Sequence
  chemically synthesized
ttacagtcctccgagactcctt

SEQ ID NO: 27268 - DNA, 22 bp, Artificial Sequence
  chemically synthesized
acagtcctccgagactcctttg

SEQ ID NO: 27269 - DNA, 22 bp, Artificial Sequence
  chemically synthesized
cagtcctccgagactcctttga

SEQ ID NO: 27270 - DNA, 22 bp, Artificial Sequence
  chemically synthesized
cgagactcctttgaattcctgt

SEQ ID NO: 27271 - DNA, 22 bp, Artificial Sequence
  chemically synthesized
ctttgaattcctgtttcaatta

SEQ ID NO: 27272 - DNA, 22 bp, Artificial Sequence
  chemically synthesized
tgaattcctgtttcaattagtt

SEQ ID NO: 27273 - DNA, 22 bp, Artificial Sequence
  chemically synthesized
gaattcctgtttcaattagttg

SEQ ID NO: 27274 - DNA, 22 bp, Artificial Sequence
  chemically synthesized
aattcctgtttcaattagttgt

SEQ ID NO: 27275 - DNA, 22 bp, Artificial Sequence
  chemically synthesized
ctgtttcaattagttgtaatcc

SEQ ID NO: 27276 - DNA, 22 bp, Artificial Sequence
  chemically synthesized
tttcaattagttgtaatcccag

SEQ ID NO: 27277 - DNA, 22 bp, Artificial Sequence
  chemically synthesized
caattagttgtaatcccaggag

SEQ ID NO: 27278 - DNA, 22 bp, Artificial Sequence
  chemically synthesized
aattagttgtaatcccaggaga

SEQ ID NO: 27279 - DNA, 22 bp, Artificial Sequence
  chemically synthesized
gttgtaatcccaggagaagaga

SEQ ID NO: 27280 - DNA, 22 bp, Artificial Sequence
  chemically synthesized
taatcccaggagaagagaactt

SEQ ID NO: 27281 - DNA, 22 bp, Artificial Sequence
  chemically synthesized
acaggcacaaaagttagagttg

SEQ ID NO: 27282 - DNA, 22 bp, Artificial Sequence
  chemically synthesized
caggcacaaaagttagagttgg

SEQ ID NO: 27283 - DNA, 22 bp, Artificial Sequence
  chemically synthesized
gagttggtagagttaccaggct

SEQ ID NO: 27284 - DNA, 22 bp, Artificial Sequence
  chemically synthesized
gtagagttaccaggctttggta

SEQ ID NO: 27285 - DNA, 22 bp, Artificial Sequence
  chemically synthesized
ccaggctttggtagcttctctt

SEQ ID NO: 27286 - DNA, 22 bp, Artificial Sequence
  chemically synthesized
tggtagcttctcttgggaataa

SEQ ID NO: 27287 - DNA, 22 bp, Artificial Sequence
  chemically synthesized
ggtagcttctcttgggaataaa

SEQ ID NO: 27288 - DNA, 22 bp, Artificial Sequence
  chemically synthesized
gtagcttctcttgggaataaac

SEQ ID NO: 27289 - DNA, 22 bp, Artificial Sequence
  chemically synthesized
ctcttgggaataaactagtagc

SEQ ID NO: 27290 - DNA, 22 bp, Artificial Sequence
  chemically synthesized
tcttgggaataaactagtagca

SEQ ID NO: 27291 - DNA, 22 bp, Artificial Sequence
  chemically synthesized
ttgggaataaactagtagcatg

SEQ ID NO: 27292 - DNA, 22 bp, Artificial Sequence
  chemically synthesized
gggaataaactagtagcatgaa

SEQ ID NO: 27293 - DNA, 22 bp, Artificial Sequence
  chemically synthesized
ggaataaactagtagcatgaaa

SEQ ID NO: 27294 - DNA, 22 bp, Artificial Sequence
  chemically synthesized
gtagcatgaaatcttatgtgct

SEQ ID NO: 27295 - DNA, 22 bp, Artificial Sequence
  chemically synthesized
atgtgcttcccacagaattcct

SEQ ID NO: 27296 - DNA, 22 bp, Artificial Sequence
  chemically synthesized
tgtgcttcccacagaattcctg

SEQ ID NO: 27297 - DNA, 22 bp, Artificial Sequence
  chemically synthesized
cccacagaattcctggtggaag

SEQ ID NO: 27298 - DNA, 22 bp, Artificial Sequence
  chemically synthesized
ccacagaattcctggtggaagg

SEQ ID NO: 27299 - DNA, 22 bp, Artificial Sequence
  chemically synthesized
ctggtggaaggaggaattcttc

SEQ ID NO: 27300 - DNA, 22 bp, Artificial Sequence
  chemically synthesized
gtggaaggaggaattcttcctc

SEQ ID NO: 27301 - DNA, 22 bp, Artificial Sequence
  chemically synthesized
ttcctcctctttctcgtctttc

SEQ ID NO: 27302 - DNA, 22 bp, Artificial Sequence
  chemically synthesized
cctcctctttctcgtctttctg

SEQ ID NO: 27303 - DNA, 22 bp, Artificial Sequence
  chemically synthesized
ctcctctttctcgtctttctgg

SEQ ID NO: 27304 - DNA, 22 bp, Artificial Sequence
  chemically synthesized
ctctttctcgtctttctgggca

SEQ ID NO: 27305 - DNA, 22 bp, Artificial Sequence
  chemically synthesized
tttctcgtctttctgggcaggt

SEQ ID NO: 27306 - DNA, 22 bp, Artificial Sequence
  chemically synthesized
tctcgtctttctgggcaggtat

SEQ ID NO: 27307 - DNA, 22 bp, Artificial Sequence
  chemically synthesized
ctcgtctttctgggcaggtatt

SEQ ID NO: 27308 - DNA, 22 bp, Artificial Sequence
  chemically synthesized
tcgtctttctgggcaggtattg

SEQ ID NO: 27309 - DNA, 22 bp, Artificial Sequence
  chemically synthesized
gtctttctgggcaggtattgtg

SEQ ID NO: 27310 - DNA, 22 bp, Artificial Sequence
  chemically synthesized
tctgggcaggtattgtgaggac

SEQ ID NO: 27311 - DNA, 22 bp, Artificial Sequence
  chemically synthesized
ctgggcaggtattgtgaggacg

SEQ ID NO: 27312 - DNA, 22 bp, Artificial Sequence
  chemically synthesized
tgggcaggtattgtgaggacgg

SEQ ID NO: 27313 - DNA, 22 bp, Artificial Sequence
  chemically synthesized
ggcaggtattgtgaggacggta

SEQ ID NO: 27314 - DNA, 22 bp, Artificial Sequence
  chemically synthesized
tgaggacggtatctgccctgtc

SEQ ID NO: 27315 - DNA, 22 bp, Artificial Sequence
  chemically synthesized
acagggcagataccgtcctcac

SEQ ID NO: 27316 - DNA, 22 bp, Artificial Sequence
  chemically synthesized
acaatacctgcccagaaagacg

SEQ ID NO: 27317 - DNA, 22 bp, Artificial Sequence
  chemically synthesized
cccagaaagacgagaaagagga

SEQ ID NO: 27318 - DNA, 22 bp, Artificial Sequence
  chemically synthesized
ctccttccaccaggaattctgt

SEQ ID NO: 27319 - DNA, 22 bp, Artificial Sequence
  chemically synthesized
cttccaccaggaattctgtggg

SEQ ID NO: 27320 - DNA, 22 bp, Artificial Sequence
  chemically synthesized
ccaccaggaattctgtgggaag

SEQ ID NO: 27321 - DNA, 22 bp, Artificial Sequence
  chemically synthesized
caccaggaattctgtgggaagc

SEQ ID NO: 27322 - DNA, 22 bp, Artificial Sequence
  chemically synthesized
tgtgggaagcacataagatttc

SEQ ID NO: 27323 - DNA, 22 bp, Artificial Sequence
  chemically synthesized
tgggaagcacataagatttcat

SEQ ID NO: 27324 - DNA, 22 bp, Artificial Sequence
  chemically synthesized
catgctactagtttattcccaa

SEQ ID NO: 27325 - DNA, 22 bp, Artificial Sequence
  chemically synthesized
atgctactagtttattcccaag

SEQ ID NO: 27326 - DNA, 22 bp, Artificial Sequence
  chemically synthesized
ctagtttattcccaagagaagc

SEQ ID NO: 27327 - DNA, 22 bp, Artificial Sequence
  chemically synthesized
gtttattcccaagagaagctac

SEQ ID NO: 27328 - DNA, 22 bp, Artificial Sequence
  chemically synthesized
attcccaagagaagctaccaaa

SEQ ID NO: 27329 - DNA, 22 bp, Artificial Sequence
  chemically synthesized
ttcccaagagaagctaccaaag

SEQ ID NO: 27330 - DNA, 22 bp, Artificial Sequence
  chemically synthesized
ccaagagaagctaccaaagcct

SEQ ID NO: 27331 - DNA, 22 bp, Artificial Sequence
  chemically synthesized
ccaaagcctggtaactctacca

SEQ ID NO: 27332 - DNA, 22 bp, Artificial Sequence
  chemically synthesized
gtaactctaccaactctaactt

SEQ ID NO: 27333 - DNA, 22 bp, Artificial Sequence
  chemically synthesized
taccaactctaacttttgtgcc

SEQ ID NO: 27334 - DNA, 22 bp, Artificial Sequence
  chemically synthesized
ccaactctaacttttgtgcctg

SEQ ID NO: 27335 - DNA, 22 bp, Artificial Sequence
  chemically synthesized
taacttttgtgcctgtaagttc

SEQ ID NO: 27336 - DNA, 22 bp, Artificial Sequence
  chemically synthesized
acttttgtgcctgtaagttctc

SEQ ID NO: 27337 - DNA, 22 bp, Artificial Sequence
  chemically synthesized
ttgtgcctgtaagttctcttct

SEQ ID NO: 27338 - DNA, 22 bp, Artificial Sequence
  chemically synthesized
tgtgcctgtaagttctcttctc

SEQ ID NO: 27339 - DNA, 22 bp, Artificial Sequence
  chemically synthesized
gtgcctgtaagttctcttctcc

SEQ ID NO: 27340 - DNA, 22 bp, Artificial Sequence
  chemically synthesized
tgcctgtaagttctcttctcct

SEQ ID NO: 27341 - DNA, 22 bp, Artificial Sequence
  chemically synthesized
taagttctcttctcctgggatt

SEQ ID NO: 27342 - DNA, 22 bp, Artificial Sequence
  chemically synthesized
tcttctcctgggattacaacta

SEQ ID NO: 27343 - DNA, 22 bp, Artificial Sequence
  chemically synthesized
ttctcctgggattacaactaat

SEQ ID NO: 27344 - DNA, 22 bp, Artificial Sequence
  chemically synthesized
ctcctgggattacaactaattg

SEQ ID NO: 27345 - DNA, 22 bp, Artificial Sequence
  chemically synthesized
tcctgggattacaactaattga

SEQ ID NO: 27346 - DNA, 22 bp, Artificial Sequence
  chemically synthesized
ctgggattacaactaattgaaa

SEQ ID NO: 27347 - DNA, 22 bp, Artificial Sequence
  chemically synthesized
ggattacaactaattgaaacag

SEQ ID NO: 27348 - DNA, 22 bp, Artificial Sequence
  chemically synthesized
caactaattgaaacaggaattc

SEQ ID NO: 27349 - DNA, 22 bp, Artificial Sequence
  chemically synthesized
attgaaacaggaattcaaagga

SEQ ID NO: 27350 - DNA, 22 bp, Artificial Sequence
  chemically synthesized
aaacaggaattcaaaggagtct

SEQ ID NO: 27351 - DNA, 22 bp, Artificial Sequence
  chemically synthesized
aaaggagtctcggaggactgta

SEQ ID NO: 27352 - DNA, 22 bp, Artificial Sequence
  chemically synthesized
ggaggactgtaagaagaatgct

SEQ ID NO: 27353 - DNA, 22 bp, Artificial Sequence
  chemically synthesized
taagaagaatgcttcgaggccg

SEQ ID NO: 27354 - DNA, 22 bp, Artificial Sequence
  chemically synthesized
cgaggccgatccctctctgtaa

SEQ ID NO: 27355 - DNA, 22 bp, Artificial Sequence
  chemically synthesized
gaggccgatccctctctgtaac

SEQ ID NO: 27356 - DNA, 22 bp, Artificial Sequence
  chemically synthesized
tctgtaacatccctgggtgggc

SEQ ID NO: 27357 - DNA, 22 bp, Artificial Sequence
  chemically synthesized
tgtaacatccctgggtgggctt

SEQ ID NO: 27358 - DNA, 22 bp, Artificial Sequence
  chemically synthesized
taacatccctgggtgggcttcc

SEQ ID NO: 27359 - DNA, 22 bp, Artificial Sequence
  chemically synthesized
ggtgggcttccccagtgggaag

SEQ ID NO: 27360 - DNA, 22 bp, Artificial Sequence
  chemically synthesized
ccccagtgggaagtcgaagaac

SEQ ID NO: 27361 - DNA, 22 bp, Artificial Sequence
  chemically synthesized
cccagtgggaagtcgaagaact

SEQ ID NO: 27362 - DNA, 22 bp, Artificial Sequence
  chemically synthesized
cctgtggaggagttactgctct

SEQ ID NO: 27363 - DNA, 22 bp, Artificial Sequence
  chemically synthesized
ctgtggaggagttactgctctt

SEQ ID NO: 27364 - DNA, 22 bp, Artificial Sequence
  chemically synthesized
tggaggagttactgctctttga

SEQ ID NO: 27365 - DNA, 22 bp, Artificial Sequence
  chemically synthesized
ctgctctttgaagttgcttggg

SEQ ID NO: 27366 - DNA, 22 bp, Artificial Sequence
  chemically synthesized
ctctttgaagttgcttgggaag

SEQ ID NO: 27367 - DNA, 22 bp, Artificial Sequence
  chemically synthesized
tttgaagttgcttgggaagtga

SEQ ID NO: 27368 - DNA, 22 bp, Artificial Sequence
  chemically synthesized
tgaagttgcttgggaagtgacc

SEQ ID NO: 27369 - DNA, 22 bp, Artificial Sequence
  chemically synthesized
gaagttgcttgggaagtgacca

SEQ ID NO: 27370 - DNA, 22 bp, Artificial Sequence
  chemically synthesized
aagttgcttgggaagtgaccaa

SEQ ID NO: 27371 - DNA, 22 bp, Artificial Sequence
  chemically synthesized
cttgggaagtgaccaataaagg

SEQ ID NO: 27372 - DNA, 22 bp, Artificial Sequence
  chemically synthesized
gggaagtgaccaataaaggttt

SEQ ID NO: 27373 - DNA, 22 bp, Artificial Sequence
  chemically synthesized
ggaagtgaccaataaaggtttg

SEQ ID NO: 27374 - DNA, 22 bp, Artificial Sequence
  chemically synthesized
gtactgctcctgaaggtggatc

SEQ ID NO: 27375 - DNA, 22 bp, Artificial Sequence
  chemically synthesized
tactgctcctgaaggtggatca

SEQ ID NO: 27376 - DNA, 22 bp, Artificial Sequence
  chemically synthesized
ctcctgaaggtggatcagtaca

SEQ ID NO: 27377 - DNA, 22 bp, Artificial Sequence
  chemically synthesized
ctgaaggtggatcagtacacct

SEQ ID NO: 27378 - DNA, 22 bp, Artificial Sequence
  chemically synthesized
aaggtggatcagtacaccttca

SEQ ID NO: 27379 - DNA, 22 bp, Artificial Sequence
  chemically synthesized
cactaggtgactgaggaatgta

SEQ ID NO: 27380 - DNA, 22 bp, Artificial Sequence
  chemically synthesized
actaggtgactgaggaatgtag

SEQ ID NO: 27381 - DNA, 22 bp, Artificial Sequence
  chemically synthesized
ggtgactgaggaatgtagagta

SEQ ID NO: 27382 - DNA, 22 bp, Artificial Sequence
  chemically synthesized
aggaatgtagagtaagatttca

SEQ ID NO: 27383 - DNA, 22 bp, Artificial Sequence
  chemically synthesized
cacagataactctctagtgata

SEQ ID NO: 27384 - DNA, 22 bp, Artificial Sequence
  chemically synthesized
acagataactctctagtgataa

SEQ ID NO: 27385 - DNA, 22 bp, Artificial Sequence
  chemically synthesized
tctagtgataaccaattgctag

SEQ ID NO: 27386 - DNA, 22 bp, Artificial Sequence
  chemically synthesized
tagtgataaccaattgctagtg

SEQ ID NO: 27387 - DNA, 22 bp, Artificial Sequence
  chemically synthesized
gtgataaccaattgctagtgag

SEQ ID NO: 27388 - DNA, 22 bp, Artificial Sequence
  chemically synthesized
ctagtgagtgaggaaagcattt

SEQ ID NO: 27389 - DNA, 22 bp, Artificial Sequence
  chemically synthesized
gtgagtgaggaaagcatttaaa

SEQ ID NO: 27390 - DNA, 22 bp, Artificial Sequence
  chemically synthesized
aaacggaatatatatttaggct

SEQ ID NO: 27391 - DNA, 22 bp, Artificial Sequence
  chemically synthesized
aacggaatatatatttaggcta

SEQ ID NO: 27392 - DNA, 22 bp, Artificial Sequence
  chemically synthesized
aggctacatttaaccttgtcta

SEQ ID NO: 27393 - DNA, 22 bp, Artificial Sequence
  chemically synthesized
ggctacatttaaccttgtctat

SEQ ID NO: 27394 - DNA, 22 bp, Artificial Sequence
  chemically synthesized
catttaaccttgtctattacaa

SEQ ID NO: 27395 - DNA, 22 bp, Artificial Sequence
  chemically synthesized
aaccttgtctattacaacaggc

SEQ ID NO: 27396 - DNA, 22 bp, Artificial Sequence
  chemically synthesized
accttgtctattacaacaggct

SEQ ID NO: 27397 - DNA, 22 bp, Artificial Sequence
  chemically synthesized
gtctattacaacaggctatgaa

SEQ ID NO: 27398 - DNA, 22 bp, Artificial Sequence
  chemically synthesized
tctattacaacaggctatgaat

SEQ ID NO: 27399 - DNA, 22 bp, Artificial Sequence
  chemically synthesized
ttacaacaggctatgaatacag

SEQ ID NO: 27400 - DNA, 22 bp, Artificial Sequence
  chemically synthesized
caacaggctatgaatacagact

SEQ ID NO: 27401 - DNA, 22 bp, Artificial Sequence
  chemically synthesized
tgaatacagacttgtgtatgtg

SEQ ID NO: 27402 - DNA, 22 bp, Artificial Sequence
  chemically synthesized
gtgtatgtgttgaagagggaga

SEQ ID NO: 27403 - DNA, 22 bp, Artificial Sequence
  chemically synthesized
tgtatgtgttgaagagggagaa

SEQ ID NO: 27404 - DNA, 22 bp, Artificial Sequence
  chemically synthesized
aagagggagaaagttgaaaata

SEQ ID NO: 27405 - DNA, 22 bp, Artificial Sequence
  chemically synthesized
aaaatattagccattgccatgg

SEQ ID NO: 27406 - DNA, 22 bp, Artificial Sequence
  chemically synthesized
gccattgccatggaatgtgcat

SEQ ID NO: 27407 - DNA, 22 bp, Artificial Sequence
  chemically synthesized
ccatggaatgtgcatttaaatt

SEQ ID NO: 27408 - DNA, 22 bp, Artificial Sequence
  chemically synthesized
aaattaaaatttaaaatccata

SEQ ID NO: 27409 - DNA, 22 bp, Artificial Sequence
  chemically synthesized
aattaaaatttaaaatccatat

SEQ ID NO: 27410 - DNA, 22 bp, Artificial Sequence
  chemically synthesized
aaatttaaaatccatattatga

SEQ ID NO: 27411 - DNA, 22 bp, Artificial Sequence
  chemically synthesized
aaaatccatattatgacaacat

SEQ ID NO: 27412 - DNA, 22 bp, Artificial Sequence
  chemically synthesized
aaatccatattatgacaacata

SEQ ID NO: 27413 - DNA, 22 bp, Artificial Sequence
  chemically synthesized
tgacaacatagaaataaaaagt

SEQ ID NO: 27414 - DNA, 22 bp, Artificial Sequence
  chemically synthesized
atatttacattttttgttttaa

SEQ ID NO: 27415 - DNA, 22 bp, Artificial Sequence
  chemically synthesized
acattttttgttttaaaatttt

SEQ ID NO: 27416 - DNA, 22 bp, Artificial Sequence
  chemically synthesized
cattttttgttttaaaattttt

SEQ ID NO: 27417 - DNA, 22 bp, Artificial Sequence
  chemically synthesized
tttgttttaaaatttttctcag

SEQ ID NO: 27418 - DNA, 22 bp, Artificial Sequence
  chemically synthesized
ttgttttaaaatttttctcagc

SEQ ID NO: 27419 - DNA, 22 bp, Artificial Sequence
  chemically synthesized
tgttttaaaatttttctcagca

SEQ ID NO: 27420 - DNA, 22 bp, Artificial Sequence
  chemically synthesized
gttttaaaatttttctcagcaa

SEQ ID NO: 27421 - DNA, 22 bp, Artificial Sequence
  chemically synthesized
ttttaaaatttttctcagcaaa

SEQ ID NO: 27422 - DNA, 22 bp, Artificial Sequence
  chemically synthesized
taaaatttttctcagcaaaata

SEQ ID NO: 27423 - DNA, 22 bp, Artificial Sequence
  chemically synthesized
aaaatttttctcagcaaaatag

SEQ ID NO: 27424 - DNA, 22 bp, Artificial Sequence
  chemically synthesized
aaatttttctcagcaaaatagt

SEQ ID NO: 27425 - DNA, 22 bp, Artificial Sequence
  chemically synthesized
ttctcagcaaaatagtataatt

SEQ ID NO: 27426 - DNA, 22 bp, Artificial Sequence
  chemically synthesized
tctcagcaaaatagtataatta

SEQ ID NO: 27427 - DNA, 22 bp, Artificial Sequence
  chemically synthesized
ctcagcaaaatagtataattaa

SEQ ID NO: 27428 - DNA, 22 bp, Artificial Sequence
  chemically synthesized
tcagcaaaatagtataattaaa

SEQ ID NO: 27429 - DNA, 22 bp, Artificial Sequence
  chemically synthesized
agcaaaatagtataattaaaca

SEQ ID NO: 27430 - DNA, 22 bp, Artificial Sequence
  chemically synthesized
aacattttattttaggaagatg

SEQ ID NO: 27431 - DNA, 22 bp, Artificial Sequence
  chemically synthesized
tattttaggaagatgtatatgt

SEQ ID NO: 27432 - DNA, 22 bp, Artificial Sequence
  chemically synthesized
attttaggaagatgtatatgtg

SEQ ID NO: 27433 - DNA, 22 bp, Artificial Sequence
  chemically synthesized
ttttaggaagatgtatatgtga

SEQ ID NO: 27434 - DNA, 22 bp, Artificial Sequence
  chemically synthesized
taggaagatgtatatgtgatta

SEQ ID NO: 27435 - DNA, 22 bp, Artificial Sequence
  chemically synthesized
aggaagatgtatatgtgattag

SEQ ID NO: 27436 - DNA, 22 bp, Artificial Sequence
  chemically synthesized
ggaagatgtatatgtgattaga

SEQ ID NO: 27437 - DNA, 22 bp, Artificial Sequence
  chemically synthesized
gaaccagttggaaacctcaact

SEQ ID NO: 27438 - DNA, 22 bp, Artificial Sequence
  chemically synthesized
gaaacctcaactctacattctg

SEQ ID NO: 27439 - DNA, 22 bp, Artificial Sequence
  chemically synthesized
aactctacattctgttagtaat

SEQ ID NO: 27440 - DNA, 22 bp, Artificial Sequence
  chemically synthesized
tacattctgttagtaattatat

SEQ ID NO: 27441 - DNA, 22 bp, Artificial Sequence
  chemically synthesized
cattctgttagtaattatatga

SEQ ID NO: 27442 - DNA, 22 bp, Artificial Sequence
  chemically synthesized
tgttagtaattatatgaaatgc

SEQ ID NO: 27443 - DNA, 22 bp, Artificial Sequence
  chemically synthesized
ttagtaattatatgaaatgctt

SEQ ID NO: 27444 - DNA, 22 bp, Artificial Sequence
  chemically synthesized
gtaattatatgaaatgcttaag

SEQ ID NO: 27445 - DNA, 22 bp, Artificial Sequence
  chemically synthesized
tatgaaatgcttaagaatgttt

SEQ ID NO: 27446 - DNA, 22 bp, Artificial Sequence
  chemically synthesized
aagaatgtttcatattcacaat

SEQ ID NO: 27447 - DNA, 22 bp, Artificial Sequence
  chemically synthesized
agaatgtttcatattcacaatt

SEQ ID NO: 27448 - DNA, 22 bp, Artificial Sequence
  chemically synthesized
catattcacaattagcttggaa

SEQ ID NO: 27449 - DNA, 22 bp, Artificial Sequence
  chemically synthesized
atattcacaattagcttggaat

SEQ ID NO: 27450 - DNA, 22 bp, Artificial Sequence
  chemically synthesized
acaattagcttggaattaatgt

SEQ ID NO: 27451 - DNA, 22 bp, Artificial Sequence
  chemically synthesized
gcttggaattaatgttttaatt

SEQ ID NO: 27452 - DNA, 22 bp, Artificial Sequence
  chemically synthesized
ggaattaatgttttaattcagg

SEQ ID NO: 27453 - DNA, 22 bp, Artificial Sequence
  chemically synthesized
gaattaatgttttaattcagga

SEQ ID NO: 27454 - DNA, 22 bp, Artificial Sequence
  chemically synthesized
atgttttaattcaggagcttct

SEQ ID NO: 27455 - DNA, 22 bp, Artificial Sequence
  chemically synthesized
taattcaggagcttctcaaaag

SEQ ID NO: 27456 - DNA, 22 bp, Artificial Sequence
  chemically synthesized
aattcaggagcttctcaaaagg

SEQ ID NO: 27457 - DNA, 22 bp, Artificial Sequence
  chemically synthesized
attcaggagcttctcaaaaggc

SEQ ID NO: 27458 - DNA, 22 bp, Artificial Sequence
  chemically synthesized
aggagcttctcaaaaggcaaaa

SEQ ID NO: 27459 - DNA, 22 bp, Artificial Sequence
  chemically synthesized
ctcaaaaggcaaaatactgtgc

SEQ ID NO: 27460 - DNA, 22 bp, Artificial Sequence
  chemically synthesized
tcaaaaggcaaaatactgtgct

SEQ ID NO: 27461 - DNA, 22 bp, Artificial Sequence
  chemically synthesized
aaaaggcaaaatactgtgctcc

SEQ ID NO: 27462 - DNA, 22 bp, Artificial Sequence
  chemically synthesized
tgctcctttcagaatgaaagta

SEQ ID NO: 27463 - DNA, 22 bp, Artificial Sequence
  chemically synthesized
ctttcagaatgaaagtaatttt

SEQ ID NO: 27464 - DNA, 22 bp, Artificial Sequence
  chemically synthesized
tcagaatgaaagtaattttttt

SEQ ID NO: 27465 - DNA, 22 bp, Artificial Sequence
  chemically synthesized
cagaatgaaagtaatttttttc

SEQ ID NO: 27466 - DNA, 22 bp, Artificial Sequence
  chemically synthesized
agaatgaaagtaatttttttct

SEQ ID NO: 27467 - DNA, 22 bp, Artificial Sequence
  chemically synthesized
ttttcttcaatgctatgcttat

SEQ ID NO: 27468 - DNA, 22 bp, Artificial Sequence
  chemically synthesized
tttcttcaatgctatgcttatg

SEQ ID NO: 27469 - DNA, 22 bp, Artificial Sequence
  chemically synthesized
ttcttcaatgctatgcttatgt

SEQ ID NO: 27470 - DNA, 22 bp, Artificial Sequence
  chemically synthesized
tcttcaatgctatgcttatgta

SEQ ID NO: 27471 - DNA, 22 bp, Artificial Sequence
  chemically synthesized
cttcaatgctatgcttatgtag

SEQ ID NO: 27472 - DNA, 22 bp, Artificial Sequence
  chemically synthesized
ttcaatgctatgcttatgtagg

SEQ ID NO: 27473 - DNA, 22 bp, Artificial Sequence
  chemically synthesized
caatgctatgcttatgtaggaa

SEQ ID NO: 27474 - DNA, 22 bp, Artificial Sequence
  chemically synthesized
aatgctatgcttatgtaggaat

SEQ ID NO: 27475 - DNA, 22 bp, Artificial Sequence
  chemically synthesized
tgcttatgtaggaattataaaa

SEQ ID NO: 27476 - DNA, 22 bp, Artificial Sequence
  chemically synthesized
atgtaggaattataaaataaag

SEQ ID NO: 27477 - DNA, 22 bp, Artificial Sequence
  chemically synthesized
tgtaggaattataaaataaaga

SEQ ID NO: 27478 - DNA, 22 bp, Artificial Sequence
  chemically synthesized
taaaataaagaaaatcaaattg

SEQ ID NO: 27479 - DNA, 22 bp, Artificial Sequence
  chemically synthesized
ataaaacaatttgcgagtgagg

SEQ ID NO: 27480 - DNA, 22 bp, Artificial Sequence
  chemically synthesized
gcgagtgaggtataacctcatc

SEQ ID NO: 27481 - DNA, 22 bp, Artificial Sequence
  chemically synthesized
cgagtgaggtataacctcatct

SEQ ID NO: 27482 - DNA, 22 bp, Artificial Sequence
  chemically synthesized
atctgtgctgggtaagagaagg

SEQ ID NO: 27483 - DNA, 22 bp, Artificial Sequence
  chemically synthesized
tgctgggtaagagaaggcaagg

SEQ ID NO: 27484 - DNA, 22 bp, Artificial Sequence
  chemically synthesized
ggtaagagaaggcaaggtagag

SEQ ID NO: 27485 - DNA, 22 bp, Artificial Sequence
  chemically synthesized
tgaaaataaagacatctgtaaa

SEQ ID NO: 27486 - DNA, 22 bp, Artificial Sequence
  chemically synthesized
gaaaataaagacatctgtaaaa

SEQ ID NO: 27487 - DNA, 22 bp, Artificial Sequence
  chemically synthesized
aaaataaagacatctgtaaaat

SEQ ID NO: 27488 - DNA, 22 bp, Artificial Sequence
  chemically synthesized
taaaattataaaacaattcctt

SEQ ID NO: 27489 - DNA, 22 bp, Artificial Sequence
  chemically synthesized
taaaacaattccttgtgggttt

SEQ ID NO: 27490 - DNA, 22 bp, Artificial Sequence
  chemically synthesized
cttgtgggtttatactctctag

SEQ ID NO: 27491 - DNA, 22 bp, Artificial Sequence
  chemically synthesized
gtgggtttatactctctagttt

SEQ ID NO: 27492 - DNA, 22 bp, Artificial Sequence
  chemically synthesized
tgggtttatactctctagttta

SEQ ID NO: 27493 - DNA, 22 bp, Artificial Sequence
  chemically synthesized
atactctctagtttaaaagtgt

SEQ ID NO: 27494 - DNA, 22 bp, Artificial Sequence
  chemically synthesized
tactctctagtttaaaagtgtc

SEQ ID NO: 27495 - DNA, 22 bp, Artificial Sequence
  chemically synthesized
tctagtttaaaagtgtcaagac

SEQ ID NO: 27496 - DNA, 22 bp, Artificial Sequence
  chemically synthesized
tagtttaaaagtgtcaagacta

SEQ ID NO: 27497 - DNA, 22 bp, Artificial Sequence
  chemically synthesized
gtttaaaagtgtcaagactatt

SEQ ID NO: 27498 - DNA, 22 bp, Artificial Sequence
  chemically synthesized
aaaagtgtcaagactattgaag

SEQ ID NO: 27499 - DNA, 22 bp, Artificial Sequence
  chemically synthesized
aaagtgtcaagactattgaagg

SEQ ID NO: 27500 - DNA, 22 bp, Artificial Sequence
  chemically synthesized
ttgaaggaacattagcaaagaa

SEQ ID NO: 27501 - DNA, 22 bp, Artificial Sequence
  chemically synthesized
aaggaacattagcaaagaaaaa

SEQ ID NO: 27502 - DNA, 22 bp, Artificial Sequence
  chemically synthesized
gcaaagaaaaagtcatggtttt

SEQ ID NO: 27503 - DNA, 22 bp, Artificial Sequence
  chemically synthesized
tgaaggctgagttcctcaagat

SEQ ID NO: 27504 - DNA, 22 bp, Artificial Sequence
  chemically synthesized
gaaggctgagttcctcaagatc

SEQ ID NO: 27505 - DNA, 22 bp, Artificial Sequence
  chemically synthesized
aaggctgagttcctcaagatct

SEQ ID NO: 27506 - DNA, 22 bp, Artificial Sequence
  chemically synthesized
agttcctcaagatcttgaagaa

SEQ ID NO: 27507 - DNA, 22 bp, Artificial Sequence
  chemically synthesized
ctcaagatcttgaagaatcaag

SEQ ID NO: 27508 - DNA, 22 bp, Artificial Sequence
  chemically synthesized
aagatcttgaagaatcaagcca

SEQ ID NO: 27509 - DNA, 22 bp, Artificial Sequence
  chemically synthesized
gaagaatcaagccaactgattg

SEQ ID NO: 27510 - DNA, 22 bp, Artificial Sequence
  chemically synthesized
aagaatcaagccaactgattgc

SEQ ID NO: 27511 - DNA, 22 bp, Artificial Sequence
  chemically synthesized
attgctgggtaaatggcagtga

SEQ ID NO: 27512 - DNA, 22 bp, Artificial Sequence
  chemically synthesized
ctgggtaaatggcagtgatgac

SEQ ID NO: 27513 - DNA, 22 bp, Artificial Sequence
  chemically synthesized
ggtaaatggcagtgatgacttg

SEQ ID NO: 27514 - DNA, 22 bp, Artificial Sequence
  chemically synthesized
gtgtgatttaaacgatctgaaa

SEQ ID NO: 27515 - DNA, 22 bp, Artificial Sequence
  chemically synthesized
tgtgatttaaacgatctgaaat

SEQ ID NO: 27516 - DNA, 22 bp, Artificial Sequence
  chemically synthesized
aaacgatctgaaattatgtcat

SEQ ID NO: 27517 - DNA, 22 bp, Artificial Sequence
  chemically synthesized
aacgatctgaaattatgtcatg

SEQ ID NO: 27518 - DNA, 22 bp, Artificial Sequence
  chemically synthesized
aaattatgtcatgtgttgtgat

SEQ ID NO: 27519 - DNA, 22 bp, Artificial Sequence
  chemically synthesized
tgtcatgtgttgtgatatataa

SEQ ID NO: 27520 - DNA, 22 bp, Artificial Sequence
  chemically synthesized
tgatatataacacatttatttt

SEQ ID NO: 27521 - DNA, 22 bp, Artificial Sequence
  chemically synthesized
atttttcattttgtgtttacta

SEQ ID NO: 27522 - DNA, 22 bp, Artificial Sequence
  chemically synthesized
tttttcattttgtgtttactat

SEQ ID NO: 27523 - DNA, 22 bp, Artificial Sequence
  chemically synthesized
ttcattttgtgtttactatttc

SEQ ID NO: 27524 - DNA, 22 bp, Artificial Sequence
  chemically synthesized
tcattttgtgtttactatttca

SEQ ID NO: 27525 - DNA, 22 bp, Artificial Sequence
  chemically synthesized
cattttgtgtttactatttcat

SEQ ID NO: 27526 - DNA, 22 bp, Artificial Sequence
  chemically synthesized
attttgtgtttactatttcatg

SEQ ID NO: 27527 - DNA, 22 bp, Artificial Sequence
  chemically synthesized
tgtgtttactatttcatgtcta

SEQ ID NO: 27528 - DNA, 22 bp, Artificial Sequence
  chemically synthesized
gtgtttactatttcatgtctat

SEQ ID NO: 27529 - DNA, 22 bp, Artificial Sequence
  chemically synthesized
tgtttactatttcatgtctatt

SEQ ID NO: 27530 - DNA, 22 bp, Artificial Sequence
  chemically synthesized
actatttcatgtctattacagt

SEQ ID NO: 27531 - DNA, 22 bp, Artificial Sequence
  chemically synthesized
ctatttcatgtctattacagta

SEQ ID NO: 27532 - DNA, 22 bp, Artificial Sequence
  chemically synthesized
tttcatgtctattacagtaatc

SEQ ID NO: 27533 - DNA, 22 bp, Artificial Sequence
  chemically synthesized
catgtctattacagtaatctaa

SEQ ID NO: 27534 - DNA, 22 bp, Artificial Sequence
  chemically synthesized
atgtctattacagtaatctaaa

SEQ ID NO: 27535 - DNA, 22 bp, Artificial Sequence
  chemically synthesized
ttacagtaatctaaaggatctg

SEQ ID NO: 27536 - DNA, 22 bp, Artificial Sequence
  chemically synthesized
cagtaatctaaaggatctgaaa

SEQ ID NO: 27537 - DNA, 22 bp, Artificial Sequence
  chemically synthesized
aaggatctgaaataataaccag

SEQ ID NO: 27538 - DNA, 22 bp, Artificial Sequence
  chemically synthesized
aaataataaccagaatgtgata

SEQ ID NO: 27539 - DNA, 22 bp, Artificial Sequence
  chemically synthesized
cttccttcttttggctaatcag

SEQ ID NO: 27540 - DNA, 22 bp, Artificial Sequence
  chemically synthesized
ccttcttttggctaatcagagc

SEQ ID NO: 27541 - DNA, 22 bp, Artificial Sequence
  chemically synthesized
cttcttttggctaatcagagcc

SEQ ID NO: 27542 - DNA, 22 bp, Artificial Sequence
  chemically synthesized
cttttggctaatcagagccagc

SEQ ID NO: 27543 - DNA, 22 bp, Artificial Sequence
  chemically synthesized
ttttggctaatcagagccagca

SEQ ID NO: 27544 - DNA, 22 bp, Artificial Sequence
  chemically synthesized
ttggctaatcagagccagcata

SEQ ID NO: 27545 - DNA, 22 bp, Artificial Sequence
  chemically synthesized
tggctaatcagagccagcataa

SEQ ID NO: 27546 - DNA, 22 bp, Artificial Sequence
  chemically synthesized
ggctaatcagagccagcataat

SEQ ID NO: 27547 - DNA, 22 bp, Artificial Sequence
  chemically synthesized
gctaatcagagccagcataatc

SEQ ID NO: 27548 - DNA, 22 bp, Artificial Sequence
  chemically synthesized
atcagagccagcataatctcaa

SEQ ID NO: 27549 - DNA, 22 bp, Artificial Sequence
  chemically synthesized
aaaattaaatgcattatatatg

SEQ ID NO: 27550 - DNA, 22 bp, Artificial Sequence
  chemically synthesized
aatgcattatatatggcatgca

SEQ ID NO: 27551 - DNA, 22 bp, Artificial Sequence
  chemically synthesized
tatatggcatgcattctgaaaa

SEQ ID NO: 27552 - DNA, 22 bp, Artificial Sequence
  chemically synthesized
tgaaaaatcagaattcacctta

SEQ ID NO: 27553 - DNA, 22 bp, Artificial Sequence
  chemically synthesized
aaaaatcagaattcaccttata

SEQ ID NO: 27554 - DNA, 22 bp, Artificial Sequence
  chemically synthesized
accttatactaactgttcaaag

SEQ ID NO: 27555 - DNA, 22 bp, Artificial Sequence
  chemically synthesized
atactaactgttcaaagttctc

SEQ ID NO: 27556 - DNA, 22 bp, Artificial Sequence
  chemically synthesized
tactaactgttcaaagttctcg

SEQ ID NO: 27557 - DNA, 22 bp, Artificial Sequence
  chemically synthesized
actgttcaaagttctcgtgtgt

SEQ ID NO: 27558 - DNA, 22 bp, Artificial Sequence
  chemically synthesized
ttcaaagttctcgtgtgtatgc

SEQ ID NO: 27559 - DNA, 22 bp, Artificial Sequence
  chemically synthesized
aaagttctcgtgtgtatgcatt

SEQ ID NO: 27560 - DNA, 22 bp, Artificial Sequence
  chemically synthesized
tcgtgtgtatgcattcataaaa

SEQ ID NO: 27561 - DNA, 22 bp, Artificial Sequence
  chemically synthesized
gtgtgtatgcattcataaaatc

SEQ ID NO: 27562 - DNA, 22 bp, Artificial Sequence
  chemically synthesized
ataaaatcaaaattaaaagtca

SEQ ID NO: 27563 - DNA, 22 bp, Artificial Sequence
  chemically synthesized
aaagtcaattttgcctatgtag

SEQ ID NO: 27564 - DNA, 22 bp, Artificial Sequence
  chemically synthesized
tgcctatgtagaagtggacaga

SEQ ID NO: 27565 - DNA, 22 bp, Artificial Sequence
  chemically synthesized
gcctatgtagaagtggacagaa

SEQ ID NO: 27566 - DNA, 22 bp, Artificial Sequence
  chemically synthesized
cctatgtagaagtggacagaat

SEQ ID NO: 27567 - DNA, 22 bp, Artificial Sequence
  chemically synthesized
tgtagaagtggacagaatgcat

SEQ ID NO: 27568 - DNA, 22 bp, Artificial Sequence
  chemically synthesized
attctctgtagtttagtgagaa

SEQ ID NO: 27569 - DNA, 22 bp, Artificial Sequence
  chemically synthesized
ttctctgtagtttagtgagaaa

SEQ ID NO: 27570 - DNA, 22 bp, Artificial Sequence
  chemically synthesized
tctgtagtttagtgagaaagaa

SEQ ID NO: 27571 - DNA, 22 bp, Artificial Sequence
  chemically synthesized
tgtagtttagtgagaaagaatc

SEQ ID NO: 27572 - DNA, 22 bp, Artificial Sequence
  chemically synthesized
tagtttagtgagaaagaatcta

SEQ ID NO: 27573 - DNA, 22 bp, Artificial Sequence
  chemically synthesized
agtgagaaagaatctaggagga

SEQ ID NO: 27574 - DNA, 22 bp, Artificial Sequence
  chemically synthesized
gtgagaaagaatctaggaggac

SEQ ID NO: 27575 - DNA, 22 bp, Artificial Sequence
  chemically synthesized
ggaggacagaaaccttattaca

SEQ ID NO: 27576 - DNA, 22 bp, Artificial Sequence
  chemically synthesized
attacagagaagtgaagtattt

SEQ ID NO: 27577 - DNA, 22 bp, Artificial Sequence
  chemically synthesized
ttacagagaagtgaagtatttt

SEQ ID NO: 27578 - DNA, 22 bp, Artificial Sequence
  chemically synthesized
cagagaagtgaagtattttatg

SEQ ID NO: 27579 - DNA, 22 bp, Artificial Sequence
  chemically synthesized
tatgtgtacctgtttctgttgt

SEQ ID NO: 27580 - DNA, 22 bp, Artificial Sequence
  chemically synthesized
atgtgtacctgtttctgttgtt

SEQ ID NO: 27581 - DNA, 22 bp, Artificial Sequence
  chemically synthesized
tgtgtacctgtttctgttgttt

SEQ ID NO: 27582 - DNA, 22 bp, Artificial Sequence
  chemically synthesized
tttctgttgtttctttttaaat

SEQ ID NO: 27583 - DNA, 22 bp, Artificial Sequence
  chemically synthesized
ctgttgtttctttttaaattat

SEQ ID NO: 27584 - DNA, 22 bp, Artificial Sequence
  chemically synthesized
tgttgtttctttttaaattatt

SEQ ID NO: 27585 - DNA, 22 bp, Artificial Sequence
  chemically synthesized
ttgtttctttttaaattatttt

SEQ ID NO: 27586 - DNA, 22 bp, Artificial Sequence
  chemically synthesized
tttctttttaaattattttgta

SEQ ID NO: 27587 - DNA, 22 bp, Artificial Sequence
  chemically synthesized
ctttttaaattattttgtattc

SEQ ID NO: 27588 - DNA, 22 bp, Artificial Sequence
  chemically synthesized
tttttaaattattttgtattct

SEQ ID NO: 27589 - DNA, 22 bp, Artificial Sequence
  chemically synthesized
tttaaattattttgtattcttt

SEQ ID NO: 27590 - DNA, 22 bp, Artificial Sequence
  chemically synthesized
ttaaattattttgtattctttt

SEQ ID NO: 27591 - DNA, 22 bp, Artificial Sequence
  chemically synthesized
taaattattttgtattcttttc

SEQ ID NO: 27592 - DNA, 22 bp, Artificial Sequence
  chemically synthesized
aaattattttgtattcttttcc

SEQ ID NO: 27593 - DNA, 22 bp, Artificial Sequence
  chemically synthesized
aattattttgtattcttttcct

SEQ ID NO: 27594 - DNA, 22 bp, Artificial Sequence
  chemically synthesized
ttttgtattcttttcctcagag

SEQ ID NO: 27595 - DNA, 22 bp, Artificial Sequence
  chemically synthesized
tgtattcttttcctcagagatc

SEQ ID NO: 27596 - DNA, 22 bp, Artificial Sequence
  chemically synthesized
gtattcttttcctcagagatct

SEQ ID NO: 27597 - DNA, 22 bp, Artificial Sequence
  chemically synthesized
tattcttttcctcagagatctt

SEQ ID NO: 27598 - DNA, 22 bp, Artificial Sequence
  chemically synthesized
ttttcctcagagatctttatcc

SEQ ID NO: 27599 - DNA, 22 bp, Artificial Sequence
  chemically synthesized
ttcctcagagatctttatcctg

SEQ ID NO: 27600 - DNA, 22 bp, Artificial Sequence
  chemically synthesized
tcctcagagatctttatcctga

SEQ ID NO: 27601 - DNA, 22 bp, Artificial Sequence
  chemically synthesized
cctcagagatctttatcctgaa

SEQ ID NO: 27602 - DNA, 22 bp, Artificial Sequence
  chemically synthesized
ctcagagatctttatcctgaaa

SEQ ID NO: 27603 - DNA, 22 bp, Artificial Sequence
  chemically synthesized
agagatctttatcctgaaatga

SEQ ID NO: 27604 - DNA, 22 bp, Artificial Sequence
  chemically synthesized
tatcctgaaatgagcatgtgtt

SEQ ID NO: 27605 - DNA, 22 bp, Artificial Sequence
  chemically synthesized
atcctgaaatgagcatgtgttt

SEQ ID NO: 27606 - DNA, 22 bp, Artificial Sequence
  chemically synthesized
tcctgaaatgagcatgtgtttt

SEQ ID NO: 27607 - DNA, 22 bp, Artificial Sequence
  chemically synthesized
aaatgagcatgtgtttttaatg

SEQ ID NO: 27608 - DNA, 22 bp, Artificial Sequence
  chemically synthesized
ttaatgtcctttttctagtcac

SEQ ID NO: 27609 - DNA, 22 bp, Artificial Sequence
  chemically synthesized
taatgtcctttttctagtcaca

SEQ ID NO: 27610 - DNA, 22 bp, Artificial Sequence
  chemically synthesized
aatgtcctttttctagtcacaa

SEQ ID NO: 27611 - DNA, 22 bp, Artificial Sequence
  chemically synthesized
atgtcctttttctagtcacaaa

SEQ ID NO: 27612 - DNA, 22 bp, Artificial Sequence
  chemically synthesized
tttctagtcacaaatttttcca

SEQ ID NO: 27613 - DNA, 22 bp, Artificial Sequence
  chemically synthesized
ttctagtcacaaatttttccag

SEQ ID NO: 27614 - DNA, 22 bp, Artificial Sequence
  chemically synthesized
tctagtcacaaatttttccagt

SEQ ID NO: 27615 - DNA, 22 bp, Artificial Sequence
  chemically synthesized
ctagtcacaaatttttccagtc

SEQ ID NO: 27616 - DNA, 22 bp, Artificial Sequence
  chemically synthesized
tagtcacaaatttttccagtcc

SEQ ID NO: 27617 - DNA, 22 bp, Artificial Sequence
  chemically synthesized
gtcacaaatttttccagtccag

SEQ ID NO: 27618 - DNA, 22 bp, Artificial Sequence
  chemically synthesized
ttccagtccagtttttaaatat

SEQ ID NO: 27619 - DNA, 22 bp, Artificial Sequence
  chemically synthesized
tccagtccagtttttaaatatg

SEQ ID NO: 27620 - DNA, 22 bp, Artificial Sequence
  chemically synthesized
ccagtccagtttttaaatatgc

SEQ ID NO: 27621 - DNA, 22 bp, Artificial Sequence
  chemically synthesized
cagtccagtttttaaatatgcc

SEQ ID NO: 27622 - DNA, 22 bp, Artificial Sequence
  chemically synthesized
ttaaatatgcccaaagttcctg

SEQ ID NO: 27623 - DNA, 22 bp, Artificial Sequence
  chemically synthesized
taaatatgcccaaagttcctgg

SEQ ID NO: 27624 - DNA, 22 bp, Artificial Sequence
  chemically synthesized
aaatatgcccaaagttcctggg

SEQ ID NO: 27625 - DNA, 22 bp, Artificial Sequence
  chemically synthesized
aatatgcccaaagttcctggga

SEQ ID NO: 27626 - DNA, 22 bp, Artificial Sequence
  chemically synthesized
ctgggaacagaaccatctctat

SEQ ID NO: 27627 - DNA, 22 bp, Artificial Sequence
  chemically synthesized
ggaacagaaccatctctatcac

SEQ ID NO: 27628 - DNA, 22 bp, Artificial Sequence
  chemically synthesized
tatcacatgtgaatcccggagt

SEQ ID NO: 27629 - DNA, 22 bp, Artificial Sequence
  chemically synthesized
tcacatgtgaatcccggagtat

SEQ ID NO: 27630 - DNA, 22 bp, Artificial Sequence
  chemically synthesized
gaaataaaagttttctctagag

SEQ ID NO: 27631 - DNA, 22 bp, Artificial Sequence
  chemically synthesized
aaataaaagttttctctagaga

SEQ ID NO: 27632 - DNA, 22 bp, Artificial Sequence
  chemically synthesized
tctctagagagtgggcaggagc

SEQ ID NO: 27633 - DNA, 22 bp, Artificial Sequence
  chemically synthesized
ctctagagagtgggcaggagct

SEQ ID NO: 27634 - DNA, 22 bp, Artificial Sequence
  chemically synthesized
tctagagagtgggcaggagctc

SEQ ID NO: 27635 - DNA, 22 bp, Artificial Sequence
  chemically synthesized
tagagagtgggcaggagctcaa

SEQ ID NO: 27636 - DNA, 22 bp, Artificial Sequence
  chemically synthesized
gagagtgggcaggagctcaagg

SEQ ID NO: 27637 - DNA, 22 bp, Artificial Sequence
  chemically synthesized
aaggacatagcttattggtgga

SEQ ID NO: 27638 - DNA, 22 bp, Artificial Sequence
  chemically synthesized
attggtggataaaactggaagg

SEQ ID NO: 27639 - DNA, 22 bp, Artificial Sequence
  chemically synthesized
ttggtggataaaactggaaggg

SEQ ID NO: 27640 - DNA, 22 bp, Artificial Sequence
  chemically synthesized
gtggataaaactggaagggact

SEQ ID NO: 27641 - DNA, 22 bp, Artificial Sequence
  chemically synthesized
gaagggacttgttagcactggg

SEQ ID NO: 27642 - DNA, 22 bp, Artificial Sequence
  chemically synthesized
gttagcactgggaatcagtcca

SEQ ID NO: 27643 - DNA, 22 bp, Artificial Sequence
  chemically synthesized
ttagcactgggaatcagtccag

SEQ ID NO: 27644 - DNA, 22 bp, Artificial Sequence
  chemically synthesized
gcactgggaatcagtccagaag

SEQ ID NO: 27645 - DNA, 22 bp, Artificial Sequence
  chemically synthesized
ggaatcagtccagaagatctct

SEQ ID NO: 27646 - DNA, 22 bp, Artificial Sequence
  chemically synthesized
tgcacaagttcctgcacctgag

SEQ ID NO: 27647 - DNA, 22 bp, Artificial Sequence
  chemically synthesized
cacaagttcctgcacctgagca

SEQ ID NO: 27648 - DNA, 22 bp, Artificial Sequence
  chemically synthesized
ctgcacctgagcagagcccctt

SEQ ID NO: 27649 - DNA, 22 bp, Artificial Sequence
  chemically synthesized
cacctgagcagagccccttctg

SEQ ID NO: 27650 - DNA, 22 bp, Artificial Sequence
  chemically synthesized
agcagagccccttctgctttcc

SEQ ID NO: 27651 - DNA, 22 bp, Artificial Sequence
  chemically synthesized
ctgctttcctcttttctcatca

SEQ ID NO: 27652 - DNA, 22 bp, Artificial Sequence
  chemically synthesized
tgctttcctcttttctcatcat

SEQ ID NO: 27653 - DNA, 22 bp, Artificial Sequence
  chemically synthesized
ctttcctcttttctcatcattt

SEQ ID NO: 27654 - DNA, 22 bp, Artificial Sequence
  chemically synthesized
tcctcttttctcatcatttaac

SEQ ID NO: 27655 - DNA, 22 bp, Artificial Sequence
  chemically synthesized
cctcttttctcatcatttaaca

SEQ ID NO: 27656 - DNA, 22 bp, Artificial Sequence
  chemically synthesized
ctcttttctcatcatttaacaa

SEQ ID NO: 27657 - DNA, 22 bp, Artificial Sequence
  chemically synthesized
ttttctcatcatttaacaaaca

SEQ ID NO: 27658 - DNA, 22 bp, Artificial Sequence
  chemically synthesized
ttctcatcatttaacaaacatt

SEQ ID NO: 27659 - DNA, 22 bp, Artificial Sequence
  chemically synthesized
tctcatcatttaacaaacatta

SEQ ID NO: 27660 - DNA, 22 bp, Artificial Sequence
  chemically synthesized
ctcatcatttaacaaacattaa

SEQ ID NO: 27661 - DNA, 22 bp, Artificial Sequence
  chemically synthesized
tcatcatttaacaaacattaat

SEQ ID NO: 27662 - DNA, 22 bp, Artificial Sequence
  chemically synthesized
atcatttaacaaacattaatgg

SEQ ID NO: 27663 - DNA, 22 bp, Artificial Sequence
  chemically synthesized
aacaaacattaatggagcactg

SEQ ID NO: 27664 - DNA, 22 bp, Artificial Sequence
  chemically synthesized
acaaacattaatggagcactgt

SEQ ID NO: 27665 - DNA, 22 bp, Artificial Sequence
  chemically synthesized
atggagcactgttacctgggca

SEQ ID NO: 27666 - DNA, 22 bp, Artificial Sequence
  chemically synthesized
ttacctgggcactgggaacacg

SEQ ID NO: 27667 - DNA, 22 bp, Artificial Sequence
  chemically synthesized
cctgggcactgggaacacgcca

SEQ ID NO: 27668 - DNA, 22 bp, Artificial Sequence
  chemically synthesized
ggcactgggaacacgccagtga

SEQ ID NO: 27669 - DNA, 22 bp, Artificial Sequence
  chemically synthesized
ggaacacgccagtgaaactaag

SEQ ID NO: 27670 - DNA, 22 bp, Artificial Sequence
  chemically synthesized
agttattttatggatcttataa

SEQ ID NO: 27671 - DNA, 22 bp, Artificial Sequence
  chemically synthesized
ttttatggatcttataatcagt

SEQ ID NO: 27672 - DNA, 22 bp, Artificial Sequence
  chemically synthesized
tatggatcttataatcagtagc

SEQ ID NO: 27673 - DNA, 22 bp, Artificial Sequence
  chemically synthesized
atggatcttataatcagtagca

SEQ ID NO: 27674 - DNA, 22 bp, Artificial Sequence
  chemically synthesized
tggatcttataatcagtagcat

SEQ ID NO: 27675 - DNA, 22 bp, Artificial Sequence
  chemically synthesized
ataatcagtagcatgtgtgttg

SEQ ID NO: 27676 - DNA, 22 bp, Artificial Sequence
  chemically synthesized
taatcagtagcatgtgtgttga

SEQ ID NO: 27677 - DNA, 22 bp, Artificial Sequence
  chemically synthesized
atctcagggtctagaacagtgc

SEQ ID NO: 27678 - DNA, 22 bp, Artificial Sequence
  chemically synthesized
agggtctagaacagtgcctggt

SEQ ID NO: 27679 - DNA, 22 bp, Artificial Sequence
  chemically synthesized
gaacagtgcctggtacatagaa

SEQ ID NO: 27680 - DNA, 22 bp, Artificial Sequence
  chemically synthesized
gtacatagaaaatgctcaatgg

SEQ ID NO: 27681 - DNA, 22 bp, Artificial Sequence
  chemically synthesized
aatggatttttttttgaaaaaa

SEQ ID NO: 27682 - DNA, 22 bp, Artificial Sequence
  chemically synthesized
ttttttgaaaaaatttgttttt

SEQ ID NO: 27683 - DNA, 22 bp, Artificial Sequence
  chemically synthesized
tttttgaaaaaatttgtttttc

SEQ ID NO: 27684 - DNA, 22 bp, Artificial Sequence
  chemically synthesized
ttttgaaaaaatttgtttttca

SEQ ID NO: 27685 - DNA, 22 bp, Artificial Sequence
  chemically synthesized
tttgaaaaaatttgtttttcaa

SEQ ID NO: 27686 - DNA, 22 bp, Artificial Sequence
  chemically synthesized
ttgaaaaaatttgtttttcaac

SEQ ID NO: 27687 - DNA, 22 bp, Artificial Sequence
  chemically synthesized
tgaaaaaatttgtttttcaacc

SEQ ID NO: 27688 - DNA, 22 bp, Artificial Sequence
  chemically synthesized
gaaaaaatttgtttttcaaccc

SEQ ID NO: 27689 - DNA, 22 bp, Artificial Sequence
  chemically synthesized
aaaaaatttgtttttcaacccc

SEQ ID NO: 27690 - DNA, 22 bp, Artificial Sequence
  chemically synthesized
gtttttcaacccctaagctgcc

SEQ ID NO: 27691 - DNA, 22 bp, Artificial Sequence
  chemically synthesized
tttttcaacccctaagctgcct

SEQ ID NO: 27692 - DNA, 22 bp, Artificial Sequence
  chemically synthesized
ttcaacccctaagctgccttta

SEQ ID NO: 27693 - DNA, 22 bp, Artificial Sequence
  chemically synthesized
tcaacccctaagctgcctttaa

SEQ ID NO: 27694 - DNA, 22 bp, Artificial Sequence
  chemically synthesized
caacccctaagctgcctttaat

SEQ ID NO: 27695 - DNA, 22 bp, Artificial Sequence
  chemically synthesized
aacccctaagctgcctttaata

SEQ ID NO: 27696 - DNA, 22 bp, Artificial Sequence
  chemically synthesized
agctgcctttaatacttatttt

SEQ ID NO: 27697 - DNA, 22 bp, Artificial Sequence
  chemically synthesized
cctttaatacttattttctatc

SEQ ID NO: 27698 - DNA, 22 bp, Artificial Sequence
  chemically synthesized
taatacttattttctatcattt

SEQ ID NO: 27699 - DNA, 22 bp, Artificial Sequence
  chemically synthesized
aatacttattttctatcatttc

SEQ ID NO: 27700 - DNA, 22 bp, Artificial Sequence
  chemically synthesized
atacttattttctatcatttcc

SEQ ID NO: 27701 - DNA, 22 bp, Artificial Sequence
  chemically synthesized
attttctatcatttccctttca

SEQ ID NO: 27702 - DNA, 22 bp, Artificial Sequence
  chemically synthesized
ttttctatcatttccctttcaa

SEQ ID NO: 27703 - DNA, 22 bp, Artificial Sequence
  chemically synthesized
tctatcatttccctttcaaggg

SEQ ID NO: 27704 - DNA, 22 bp, Artificial Sequence
  chemically synthesized
ctatcatttccctttcaagggg

SEQ ID NO: 27705 - DNA, 22 bp, Artificial Sequence
  chemically synthesized
tatcatttccctttcaagggga

SEQ ID NO: 27706 - DNA, 22 bp, Artificial Sequence
  chemically synthesized
tcatttccctttcaaggggaag

SEQ ID NO: 27707 - DNA, 22 bp, Artificial Sequence
  chemically synthesized
ccctttcaaggggaagggaagt

SEQ ID NO: 27708 - DNA, 22 bp, Artificial Sequence
  chemically synthesized
cctttcaaggggaagggaagtg

SEQ ID NO: 27709 - DNA, 22 bp, Artificial Sequence
  chemically synthesized
tcaaggggaagggaagtgtttt

SEQ ID NO: 27710 - DNA, 22 bp, Artificial Sequence
  chemically synthesized
caaggggaagggaagtgttttt

SEQ ID NO: 27711 - DNA, 22 bp, Artificial Sequence
  chemically synthesized
aaggggaagggaagtgtttttg

SEQ ID NO: 27712 - DNA, 22 bp, Artificial Sequence
  chemically synthesized
ttgtggagaggtccccacaatg

SEQ ID NO: 27713 - DNA, 22 bp, Artificial Sequence
  chemically synthesized
tgtggagaggtccccacaatgt

SEQ ID NO: 27714 - DNA, 22 bp, Artificial Sequence
  chemically synthesized
gtggagaggtccccacaatgtg

SEQ ID NO: 27715 - DNA, 22 bp, Artificial Sequence
  chemically synthesized
tggagaggtccccacaatgtga

SEQ ID NO: 27716 - DNA, 22 bp, Artificial Sequence
  chemically synthesized
acacaagttgatatcatcttca

SEQ ID NO: 27717 - DNA, 22 bp, Artificial Sequence
  chemically synthesized
cacaagttgatatcatcttcaa

SEQ ID NO: 27718 - DNA, 22 bp, Artificial Sequence
  chemically synthesized
atatcatcttcaatgtatcttt

SEQ ID NO: 27719 - DNA, 22 bp, Artificial Sequence
  chemically synthesized
caatgtatctttattttaatat

SEQ ID NO: 27720 - DNA, 22 bp, Artificial Sequence
  chemically synthesized
aatgtatctttattttaatatt

SEQ ID NO: 27721 - DNA, 22 bp, Artificial Sequence
  chemically synthesized
tattttaatattatcatagcct

SEQ ID NO: 27722 - DNA, 22 bp, Artificial Sequence
  chemically synthesized
attttaatattatcatagcctg

SEQ ID NO: 27723 - DNA, 22 bp, Artificial Sequence
  chemically synthesized
ttttaatattatcatagcctgg

SEQ ID NO: 27724 - DNA, 22 bp, Artificial Sequence
  chemically synthesized
taatattatcatagcctggtat

SEQ ID NO: 27725 - DNA, 22 bp, Artificial Sequence
  chemically synthesized
aatattatcatagcctggtatg

SEQ ID NO: 27726 - DNA, 22 bp, Artificial Sequence
  chemically synthesized
atattatcatagcctggtatgg

SEQ ID NO: 27727 - DNA, 22 bp, Artificial Sequence
  chemically synthesized
tcatagcctggtatggtttgag

SEQ ID NO: 27728 - DNA, 22 bp, Artificial Sequence
  chemically synthesized
gtatggtttgagattttcatat

SEQ ID NO: 27729 - DNA, 22 bp, Artificial Sequence
  chemically synthesized
gagattttcatatagatggata

SEQ ID NO: 27730 - DNA, 22 bp, Artificial Sequence
  chemically synthesized
agattttcatatagatggataa

SEQ ID NO: 27731 - DNA, 22 bp, Artificial Sequence
  chemically synthesized
tcatatagatggataattattg

SEQ ID NO: 27732 - DNA, 22 bp, Artificial Sequence
  chemically synthesized
catatagatggataattattgt

SEQ ID NO: 27733 - DNA, 22 bp, Artificial Sequence
  chemically synthesized
atatagatggataattattgtg

SEQ ID NO: 27734 - DNA, 22 bp, Artificial Sequence
  chemically synthesized
ttgtgtttattcctaataatac

SEQ ID NO: 27735 - DNA, 22 bp, Artificial Sequence
  chemically synthesized
tgtttattcctaataatacatt

SEQ ID NO: 27736 - DNA, 22 bp, Artificial Sequence
  chemically synthesized
attcctaataatacattgccac

SEQ ID NO: 27737 - DNA, 22 bp, Artificial Sequence
  chemically synthesized
ttcctaataatacattgccact

SEQ ID NO: 27738 - DNA, 22 bp, Artificial Sequence
  chemically synthesized
ctaataatacattgccactata

SEQ ID NO: 27739 - DNA, 22 bp, Artificial Sequence
  chemically synthesized
ataatacattgccactatagtt

SEQ ID NO: 27740 - DNA, 22 bp, Artificial Sequence
  chemically synthesized
ccactatagtttctttaaattt

SEQ ID NO: 27741 - DNA, 22 bp, Artificial Sequence
  chemically synthesized
tagtttctttaaatttaatgat

SEQ ID NO: 27742 - DNA, 22 bp, Artificial Sequence
  chemically synthesized
ctttaaatttaatgatttgaat

SEQ ID NO: 27743 - DNA, 22 bp, Artificial Sequence
  chemically synthesized
tttaaatttaatgatttgaatt

SEQ ID NO: 27744 - DNA, 22 bp, Artificial Sequence
  chemically synthesized
taaatttaatgatttgaatttt

SEQ ID NO: 27745 - DNA, 22 bp, Artificial Sequence
  chemically synthesized
aaatttaatgatttgaattttt

SEQ ID NO: 27746 - DNA, 22 bp, Artificial Sequence
  chemically synthesized
aatttaatgatttgaattttta

SEQ ID NO: 27747 - DNA, 22 bp, Artificial Sequence
  chemically synthesized
aatgatttgaatttttacttcc

SEQ ID NO: 27748 - DNA, 22 bp, Artificial Sequence
  chemically synthesized
atgatttgaatttttacttccc

SEQ ID NO: 27749 - DNA, 22 bp, Artificial Sequence
  chemically synthesized
gaatttttacttccctgcattt

SEQ ID NO: 27750 - DNA, 22 bp, Artificial Sequence
  chemically synthesized
aatttttacttccctgcatttc

SEQ ID NO: 27751 - DNA, 22 bp, Artificial Sequence
  chemically synthesized
ttacttccctgcatttcatagt

SEQ ID NO: 27752 - DNA, 22 bp, Artificial Sequence
  chemically synthesized
tacttccctgcatttcatagta

SEQ ID NO: 27753 - DNA, 22 bp, Artificial Sequence
  chemically synthesized
acttccctgcatttcatagtag

SEQ ID NO: 27754 - DNA, 22 bp, Artificial Sequence
  chemically synthesized
cttccctgcatttcatagtagt

SEQ ID NO: 27755 - DNA, 22 bp, Artificial Sequence
  chemically synthesized
ccctgcatttcatagtagtgat

SEQ ID NO: 27756 - DNA, 22 bp, Artificial Sequence
  chemically synthesized
cctgcatttcatagtagtgata

SEQ ID NO: 27757 - DNA, 22 bp, Artificial Sequence
  chemically synthesized
catttcatagtagtgatatgag

SEQ ID NO: 27758 - DNA, 22 bp, Artificial Sequence
  chemically synthesized
catagtagtgatatgaggtatc

SEQ ID NO: 27759 - DNA, 22 bp, Artificial Sequence
  chemically synthesized
atagtagtgatatgaggtatct

SEQ ID NO: 27760 - DNA, 22 bp, Artificial Sequence
  chemically synthesized
agagatcatgaatcccactcct

SEQ ID NO: 27761 - DNA, 22 bp, Artificial Sequence
  chemically synthesized
gagatcatgaatcccactcctc

SEQ ID NO: 27762 - DNA, 22 bp, Artificial Sequence
  chemically synthesized
ctccagttcatagagcaaattg

SEQ ID NO: 27763 - DNA, 22 bp, Artificial Sequence
  chemically synthesized
cagttcatagagcaaattgatt

SEQ ID NO: 27764 - DNA, 22 bp, Artificial Sequence
  chemically synthesized
atagagcaaattgattcgtaga

SEQ ID NO: 27765 - DNA, 22 bp, Artificial Sequence
  chemically synthesized
attcgtagaggtatttaatgat

SEQ ID NO: 27766 - DNA, 22 bp, Artificial Sequence
  chemically synthesized
gtagaggtatttaatgatcaag

SEQ ID NO: 27767 - DNA, 22 bp, Artificial Sequence
  chemically synthesized
aatgatcaagcaaatggcagag

SEQ ID NO: 27768 - DNA, 22 bp, Artificial Sequence
  chemically synthesized
atgatcaagcaaatggcagagt

SEQ ID NO: 27769 - DNA, 22 bp, Artificial Sequence
  chemically synthesized
ggaccaggatttaggtcttttc

SEQ ID NO: 27770 - DNA, 22 bp, Artificial Sequence
  chemically synthesized
aggtcttttccaaggccaattc

SEQ ID NO: 27771 - DNA, 22 bp, Artificial Sequence
  chemically synthesized
ggtcttttccaaggccaattca

SEQ ID NO: 27772 - DNA, 22 bp, Artificial Sequence
  chemically synthesized
ttccaaggccaattcacttttt

SEQ ID NO: 27773 - DNA, 22 bp, Artificial Sequence
  chemically synthesized
tccaaggccaattcactttttt

SEQ ID NO: 27774 - DNA, 22 bp, Artificial Sequence
  chemically synthesized
ccaaggccaattcactttttta

SEQ ID NO: 27775 - DNA, 22 bp, Artificial Sequence
  chemically synthesized
caaggccaattcacttttttac

SEQ ID NO: 27776 - DNA, 22 bp, Artificial Sequence
  chemically synthesized
acttttttactattatgtaaga

SEQ ID NO: 27777 - DNA, 22 bp, Artificial Sequence
  chemically synthesized
ttttactattatgtaagaatta

SEQ ID NO: 27778 - DNA, 22 bp, Artificial Sequence
  chemically synthesized
tttactattatgtaagaattaa

SEQ ID NO: 27779 - DNA, 22 bp, Artificial Sequence
  chemically synthesized
ttactattatgtaagaattaaa

SEQ ID NO: 27780 - DNA, 22 bp, Artificial Sequence
  chemically synthesized
tactattatgtaagaattaaat

SEQ ID NO: 27781 - DNA, 22 bp, Artificial Sequence
  chemically synthesized
actattatgtaagaattaaata

SEQ ID NO: 27782 - DNA, 22 bp, Artificial Sequence
  chemically synthesized
ctattatgtaagaattaaatat

SEQ ID NO: 27783 - DNA, 22 bp, Artificial Sequence
  chemically synthesized
ttatgtaagaattaaatattaa

SEQ ID NO: 27784 - DNA, 22 bp, Artificial Sequence
  chemically synthesized
tgtaagaattaaatattaaaac

SEQ ID NO: 27785 - DNA, 22 bp, Artificial Sequence
  chemically synthesized
aatattaaaacctcagttttca

SEQ ID NO: 27786 - DNA, 22 bp, Artificial Sequence
  chemically synthesized
aaacctcagttttcaaaggaaa

SEQ ID NO: 27787 - DNA, 22 bp, Artificial Sequence
  chemically synthesized
agttttcaaaggaaatgtccta

SEQ ID NO: 27788 - DNA, 22 bp, Artificial Sequence
  chemically synthesized
tcaaaggaaatgtcctatagat

SEQ ID NO: 27789 - DNA, 22 bp, Artificial Sequence
  chemically synthesized
caaaggaaatgtcctatagatg

SEQ ID NO: 27790 - DNA, 22 bp, Artificial Sequence
  chemically synthesized
aaaggaaatgtcctatagatga

SEQ ID NO: 27791 - DNA, 22 bp, Artificial Sequence
  chemically synthesized
tagatgaaagaacacagtactt

SEQ ID NO: 27792 - DNA, 22 bp, Artificial Sequence
  chemically synthesized
gcagtcaaaggtcttggatttc

SEQ ID NO: 27793 - DNA, 22 bp, Artificial Sequence
  chemically synthesized
cagtcaaaggtcttggatttct

SEQ ID NO: 27794 - DNA, 22 bp, Artificial Sequence
  chemically synthesized
ggatttctgaaactttctgaaa

SEQ ID NO: 27795 - DNA, 22 bp, Artificial Sequence
  chemically synthesized
gatttctgaaactttctgaaaa

SEQ ID NO: 27796 - DNA, 22 bp, Artificial Sequence
  chemically synthesized
ctgaaactttctgaaaaagaac

SEQ ID NO: 27797 - DNA, 22 bp, Artificial Sequence
  chemically synthesized
tgaaactttctgaaaaagaacc

SEQ ID NO: 27798 - DNA, 22 bp, Artificial Sequence
  chemically synthesized
aaactttctgaaaaagaacccc

SEQ ID NO: 27799 - DNA, 22 bp, Artificial Sequence
  chemically synthesized
tctgaaaaagaaccccttaaac

SEQ ID NO: 27800 - DNA, 22 bp, Artificial Sequence
  chemically synthesized
ctgaaaaagaaccccttaaact

SEQ ID NO: 27801 - DNA, 22 bp, Artificial Sequence
  chemically synthesized
tgaaaaagaaccccttaaactg

SEQ ID NO: 27802 - DNA, 22 bp, Artificial Sequence
  chemically synthesized
aaaaagaaccccttaaactgaa

SEQ ID NO: 27803 - DNA, 22 bp, Artificial Sequence
  chemically synthesized
aaactgaataacagtttcttca

SEQ ID NO: 27804 - DNA, 22 bp, Artificial Sequence
  chemically synthesized
aactgaataacagtttcttcat

SEQ ID NO: 27805 - DNA, 22 bp, Artificial Sequence
  chemically synthesized
aataacagtttcttcatgaata

SEQ ID NO: 27806 - DNA, 22 bp, Artificial Sequence
  chemically synthesized
cttcatgaataaaatgaatgtt

SEQ ID NO: 27807 - DNA, 22 bp, Artificial Sequence
  chemically synthesized
ttcatgaataaaatgaatgtta

SEQ ID NO: 27808 - DNA, 22 bp, Artificial Sequence
  chemically synthesized
catgaataaaatgaatgttata

SEQ ID NO: 27809 - DNA, 22 bp, Artificial Sequence
  chemically synthesized
atgaataaaatgaatgttatac

SEQ ID NO: 27810 - DNA, 22 bp, Artificial Sequence
  chemically synthesized
tactctccagttatcttaccat

SEQ ID NO: 27811 - DNA, 22 bp, Artificial Sequence
  chemically synthesized
tccagttatcttaccatgtttt

SEQ ID NO: 27812 - DNA, 22 bp, Artificial Sequence
  chemically synthesized
cagttatcttaccatgttttct

SEQ ID NO: 27813 - DNA, 22 bp, Artificial Sequence
  chemically synthesized
tcttaccatgttttctggcaaa

SEQ ID NO: 27814 - DNA, 22 bp, Artificial Sequence
  chemically synthesized
accatgttttctggcaaacaag

SEQ ID NO: 27815 - DNA, 22 bp, Artificial Sequence
  chemically synthesized
ccatgttttctggcaaacaagg

SEQ ID NO: 27816 - DNA, 22 bp, Artificial Sequence
  chemically synthesized
tctggcaaacaaggaaatgtat

SEQ ID NO: 27817 - DNA, 22 bp, Artificial Sequence
  chemically synthesized
ctggcaaacaaggaaatgtatt

SEQ ID NO: 27818 - DNA, 22 bp, Artificial Sequence
  chemically synthesized
tggcaaacaaggaaatgtattc

SEQ ID NO: 27819 - DNA, 22 bp, Artificial Sequence
  chemically synthesized
gcaaacaaggaaatgtattcac

SEQ ID NO: 27820 - DNA, 22 bp, Artificial Sequence
  chemically synthesized
acatccaagaaaacaaaaggtt

SEQ ID NO: 27821 - DNA, 22 bp, Artificial Sequence
  chemically synthesized
cttaggagaagaatcccttgct

SEQ ID NO: 27822 - DNA, 22 bp, Artificial Sequence
  chemically synthesized
ttaggagaagaatcccttgctg

SEQ ID NO: 27823 - DNA, 22 bp, Artificial Sequence
  chemically synthesized
aggagaagaatcccttgctgcc

SEQ ID NO: 27824 - DNA, 22 bp, Artificial Sequence
  chemically synthesized
ggagaagaatcccttgctgcca

SEQ ID NO: 27825 - DNA, 22 bp, Artificial Sequence
  chemically synthesized
gctgccagaattttgcccatga

SEQ ID NO: 27826 - DNA, 22 bp, Artificial Sequence
  chemically synthesized
ctgccagaattttgcccatgaa

SEQ ID NO: 27827 - DNA, 22 bp, Artificial Sequence
  chemically synthesized
ccagaattttgcccatgaacaa

SEQ ID NO: 27828 - DNA, 22 bp, Artificial Sequence
  chemically synthesized
tgcccatgaacaatggaaacgt

SEQ ID NO: 27829 - DNA, 22 bp, Artificial Sequence
  chemically synthesized
gcccatgaacaatggaaacgtg

SEQ ID NO: 27830 - DNA, 22 bp, Artificial Sequence
  chemically synthesized
cccatgaacaatggaaacgtga

SEQ ID NO: 27831 - DNA, 22 bp, Artificial Sequence
  chemically synthesized
gttttgggtactaattctcaga

SEQ ID NO: 27832 - DNA, 22 bp, Artificial Sequence
  chemically synthesized
tgggtactaattctcagacttc

SEQ ID NO: 27833 - DNA, 22 bp, Artificial Sequence
  chemically synthesized
gggtactaattctcagacttca

SEQ ID NO: 27834 - DNA, 22 bp, Artificial Sequence
  chemically synthesized
ggtactaattctcagacttcaa

SEQ ID NO: 27835 - DNA, 22 bp, Artificial Sequence
  chemically synthesized
attctcagacttcaaaataacc

SEQ ID NO: 27836 - DNA, 22 bp, Artificial Sequence
  chemically synthesized
tcagacttcaaaataacctttt

SEQ ID NO: 27837 - DNA, 22 bp, Artificial Sequence
  chemically synthesized
agacttcaaaataaccttttta

SEQ ID NO: 27838 - DNA, 22 bp, Artificial Sequence
  chemically synthesized
caaaataacctttttaatttat

SEQ ID NO: 27839 - DNA, 22 bp, Artificial Sequence
  chemically synthesized
aaaataacctttttaatttatt

SEQ ID NO: 27840 - DNA, 22 bp, Artificial Sequence
  chemically synthesized
tttaatttattaatattaacct

SEQ ID NO: 27841 - DNA, 22 bp, Artificial Sequence
  chemically synthesized
ttaatttattaatattaacctt

SEQ ID NO: 27842 - DNA, 22 bp, Artificial Sequence
  chemically synthesized
taatttattaatattaaccttg

SEQ ID NO: 27843 - DNA, 22 bp, Artificial Sequence
  chemically synthesized
aatttattaatattaaccttga

SEQ ID NO: 27844 - DNA, 22 bp, Artificial Sequence
  chemically synthesized
atttattaatattaaccttgaa

SEQ ID NO: 27845 - DNA, 22 bp, Artificial Sequence
  chemically synthesized
attaatattaaccttgaaattt

SEQ ID NO: 27846 - DNA, 22 bp, Artificial Sequence
  chemically synthesized
ttaatattaaccttgaaattta

SEQ ID NO: 27847 - DNA, 22 bp, Artificial Sequence
  chemically synthesized
atattaaccttgaaatttattg

SEQ ID NO: 27848 - DNA, 22 bp, Artificial Sequence
  chemically synthesized
accttgaaatttattgctttta

SEQ ID NO: 27849 - DNA, 22 bp, Artificial Sequence
  chemically synthesized
gaaatttattgcttttattcat

SEQ ID NO: 27850 - DNA, 22 bp, Artificial Sequence
  chemically synthesized
aaatttattgcttttattcatt

SEQ ID NO: 27851 - DNA, 22 bp, Artificial Sequence
  chemically synthesized
attgcttttattcattaatcca

SEQ ID NO: 27852 - DNA, 22 bp, Artificial Sequence
  chemically synthesized
ttgcttttattcattaatccat

SEQ ID NO: 27853 - DNA, 22 bp, Artificial Sequence
  chemically synthesized
cttttattcattaatccatttt

SEQ ID NO: 27854 - DNA, 22 bp, Artificial Sequence
  chemically synthesized
ttattcattaatccattttatt

SEQ ID NO: 27855 - DNA, 22 bp, Artificial Sequence
  chemically synthesized
tattcattaatccattttatta

SEQ ID NO: 27856 - DNA, 22 bp, Artificial Sequence
  chemically synthesized
attcattaatccattttattat

SEQ ID NO: 27857 - DNA, 22 bp, Artificial Sequence
  chemically synthesized
ttcattaatccattttattatt

SEQ ID NO: 27858 - DNA, 22 bp, Artificial Sequence
  chemically synthesized
attaatccattttattattcag

SEQ ID NO: 27859 - DNA, 22 bp, Artificial Sequence
  chemically synthesized
atccattttattattcagtaag

SEQ ID NO: 27860 - DNA, 22 bp, Artificial Sequence
  chemically synthesized
tattattcagtaaggattcatc

SEQ ID NO: 27861 - DNA, 22 bp, Artificial Sequence
  chemically synthesized
attattcagtaaggattcatca

SEQ ID NO: 27862 - DNA, 22 bp, Artificial Sequence
  chemically synthesized
ttattcagtaaggattcatcaa

SEQ ID NO: 27863 - DNA, 22 bp, Artificial Sequence
  chemically synthesized
ttcagtaaggattcatcaagtg

SEQ ID NO: 27864 - DNA, 22 bp, Artificial Sequence
  chemically synthesized
agtaaggattcatcaagtgtct

SEQ ID NO: 27865 - DNA, 22 bp, Artificial Sequence
  chemically synthesized
atcaagtgtctattaggtatca

SEQ ID NO: 27866 - DNA, 22 bp, Artificial Sequence
  chemically synthesized
ttaggtatcaggcactgagagg

SEQ ID NO: 27867 - DNA, 22 bp, Artificial Sequence
  chemically synthesized
ggtatcaggcactgagaggcga

SEQ ID NO: 27868 - DNA, 22 bp, Artificial Sequence
  chemically synthesized
agaggcgagggagatagagtta

SEQ ID NO: 27869 - DNA, 22 bp, Artificial Sequence
  chemically synthesized
agaatacagaactgattcttaa

SEQ ID NO: 27870 - DNA, 22 bp, Artificial Sequence
  chemically synthesized
attcttaatcttcaagaattga

SEQ ID NO: 27871 - DNA, 22 bp, Artificial Sequence
  chemically synthesized
ttaatcttcaagaattgacaaa

SEQ ID NO: 27872 - DNA, 22 bp, Artificial Sequence
  chemically synthesized
aatcttcaagaattgacaaatt

SEQ ID NO: 27873 - DNA, 22 bp, Artificial Sequence
  chemically synthesized
atcttcaagaattgacaaattt

SEQ ID NO: 27874 - DNA, 22 bp, Artificial Sequence
  chemically synthesized
caagaattgacaaatttgtaga

SEQ ID NO: 27875 - DNA, 22 bp, Artificial Sequence
  chemically synthesized
aagaattgacaaatttgtagaa

SEQ ID NO: 27876 - DNA, 22 bp, Artificial Sequence
  chemically synthesized
acaaatttgtagaaggtagaca

SEQ ID NO: 27877 - DNA, 22 bp, Artificial Sequence
  chemically synthesized
gtagaaggtagacattgaacat

SEQ ID NO: 27878 - DNA, 22 bp, Artificial Sequence
  chemically synthesized
tagaaggtagacattgaacata

SEQ ID NO: 27879 - DNA, 22 bp, Artificial Sequence
  chemically synthesized
aacatacaatacagtcaaatgt

SEQ ID NO: 27880 - DNA, 22 bp, Artificial Sequence
  chemically synthesized
agggaaccaggtgtcctaagac

SEQ ID NO: 27881 - DNA, 22 bp, Artificial Sequence
  chemically synthesized
agactatacagtgtaccgtgga

SEQ ID NO: 27882 - DNA, 22 bp, Artificial Sequence
  chemically synthesized
tacagtgtaccgtggaatgggg

SEQ ID NO: 27883 - DNA, 22 bp, Artificial Sequence
  chemically synthesized
ctaacctagttacctagaggtt

SEQ ID NO: 27884 - DNA, 22 bp, Artificial Sequence
  chemically synthesized
taacctagttacctagaggttt

SEQ ID NO: 27885 - DNA, 22 bp, Artificial Sequence
  chemically synthesized
acctagttacctagaggtttgg

SEQ ID NO: 27886 - DNA, 22 bp, Artificial Sequence
  chemically synthesized
gttacctagaggtttgggaaaa

SEQ ID NO: 27887 - DNA, 22 bp, Artificial Sequence
  chemically synthesized
cctagaggtttgggaaaaacct

SEQ ID NO: 27888 - DNA, 22 bp, Artificial Sequence
  chemically synthesized
gaggtttgggaaaaacctctct

SEQ ID NO: 27889 - DNA, 22 bp, Artificial Sequence
  chemically synthesized
gggaaaaacctctctaatgatg

SEQ ID NO: 27890 - DNA, 22 bp, Artificial Sequence
  chemically synthesized
ggaaaaacctctctaatgatga

SEQ ID NO: 27891 - DNA, 22 bp, Artificial Sequence
  chemically synthesized
tctaatgatgagatgtttgagc

SEQ ID NO: 27892 - DNA, 22 bp, Artificial Sequence
  chemically synthesized
taatgatgagatgtttgagctg

SEQ ID NO: 27893 - DNA, 22 bp, Artificial Sequence
  chemically synthesized
atgatgagatgtttgagctgac

SEQ ID NO: 27894 - DNA, 22 bp, Artificial Sequence
  chemically synthesized
gagctgacacttgaaggataaa

SEQ ID NO: 27895 - DNA, 22 bp, Artificial Sequence
  chemically synthesized
agctgacacttgaaggataaat

SEQ ID NO: 27896 - DNA, 22 bp, Artificial Sequence
  chemically synthesized
acacttgaaggataaatagcta

SEQ ID NO: 27897 - DNA, 22 bp, Artificial Sequence
  chemically synthesized
gaaggataaatagctaaagggg

SEQ ID NO: 27898 - DNA, 22 bp, Artificial Sequence
  chemically synthesized
aaggataaatagctaaagggga

SEQ ID NO: 27899 - DNA, 22 bp, Artificial Sequence
  chemically synthesized
aaggggagaaagcgttctatgt

SEQ ID NO: 27900 - DNA, 22 bp, Artificial Sequence
  chemically synthesized
tatgtgagagaactatatatgc

SEQ ID NO: 27901 - DNA, 22 bp, Artificial Sequence
  chemically synthesized
tgtgagagaactatatatgcca

SEQ ID NO: 27902 - DNA, 22 bp, Artificial Sequence
  chemically synthesized
tatatgccaagatgcagaagtg

SEQ ID NO: 27903 - DNA, 22 bp, Artificial Sequence
  chemically synthesized
tctgttcgaagatctgagcggg

SEQ ID NO: 27904 - DNA, 22 bp, Artificial Sequence
  chemically synthesized
tgttcgaagatctgagcggggc

SEQ ID NO: 27905 - DNA, 22 bp, Artificial Sequence
  chemically synthesized
ttcgaagatctgagcggggctc

SEQ ID NO: 27906 - DNA, 22 bp, Artificial Sequence
  chemically synthesized
gaagatctgagcggggctcaga

SEQ ID NO: 27907 - DNA, 22 bp, Artificial Sequence
  chemically synthesized
agcggggctcagagagggaaaa

SEQ ID NO: 27908 - DNA, 22 bp, Artificial Sequence
  chemically synthesized
agagagggaaaaggagaggagt

SEQ ID NO: 27909 - DNA, 22 bp, Artificial Sequence
  chemically synthesized
cagggactagattgtgaagctc

SEQ ID NO: 27910 - DNA, 22 bp, Artificial Sequence
  chemically synthesized
gattgtgaagctcagggggagt

SEQ ID NO: 27911 - DNA, 22 bp, Artificial Sequence
  chemically synthesized
tgaagctcagggggagttaata

SEQ ID NO: 27912 - DNA, 22 bp, Artificial Sequence
  chemically synthesized
agggggagttaatagccttaag

SEQ ID NO: 27913 - DNA, 22 bp, Artificial Sequence
  chemically synthesized
atagccttaaggagttttgtct

SEQ ID NO: 27914 - DNA, 22 bp, Artificial Sequence
  chemically synthesized
aaggagttttgtctccagggta

SEQ ID NO: 27915 - DNA, 22 bp, Artificial Sequence
  chemically synthesized
aggagttttgtctccagggtat

SEQ ID NO: 27916 - DNA, 22 bp, Artificial Sequence
  chemically synthesized
tgtctccagggtatgaacaatg

SEQ ID NO: 27917 - DNA, 22 bp, Artificial Sequence
  chemically synthesized
gtctccagggtatgaacaatga

SEQ ID NO: 27918 - DNA, 22 bp, Artificial Sequence
  chemically synthesized
tctccagggtatgaacaatgaa

SEQ ID NO: 27919 - DNA, 22 bp, Artificial Sequence
  chemically synthesized
cagggtatgaacaatgaatgag

SEQ ID NO: 27920 - DNA, 22 bp, Artificial Sequence
  chemically synthesized
aaattctatccacagtagtggg

SEQ ID NO: 27921 - DNA, 22 bp, Artificial Sequence
  chemically synthesized
tatccacagtagtgggaagtac

SEQ ID NO: 27922 - DNA, 22 bp, Artificial Sequence
  chemically synthesized
tccacagtagtgggaagtacta

SEQ ID NO: 27923 - DNA, 22 bp, Artificial Sequence
  chemically synthesized
agtagtcaggtatgttttggaa

SEQ ID NO: 27924 - DNA, 22 bp, Artificial Sequence
  chemically synthesized
tggaagaagcactgttaccagt

SEQ ID NO: 27925 - DNA, 22 bp, Artificial Sequence
  chemically synthesized
ggaagaagcactgttaccagtt

SEQ ID NO: 27926 - DNA, 22 bp, Artificial Sequence
  chemically synthesized
gaagaagcactgttaccagttg

SEQ ID NO: 27927 - DNA, 22 bp, Artificial Sequence
  chemically synthesized
ttaccagttgagggagaggaga

SEQ ID NO: 27928 - DNA, 22 bp, Artificial Sequence
  chemically synthesized
ccagttgagggagaggagagga

SEQ ID NO: 27929 - DNA, 22 bp, Artificial Sequence
  chemically synthesized
agggagaggagaggagggaaat

SEQ ID NO: 27930 - DNA, 22 bp, Artificial Sequence
  chemically synthesized
gactgtggtgtgacccaggatg

SEQ ID NO: 27931 - DNA, 22 bp, Artificial Sequence
  chemically synthesized
tggtgtgacccaggatggaaag

SEQ ID NO: 27932 - DNA, 22 bp, Artificial Sequence
  chemically synthesized
tgcccaaatgtgggggaaaaat

SEQ ID NO: 27933 - DNA, 22 bp, Artificial Sequence
  chemically synthesized
gcccaaatgtgggggaaaaatg

SEQ ID NO: 27934 - DNA, 22 bp, Artificial Sequence
  chemically synthesized
cccaaatgtgggggaaaaatgt

SEQ ID NO: 27935 - DNA, 22 bp, Artificial Sequence
  chemically synthesized
actctctcctttgcccaggtct

SEQ ID NO: 27936 - DNA, 22 bp, Artificial Sequence
  chemically synthesized
ctctctcctttgcccaggtctt

SEQ ID NO: 27937 - DNA, 22 bp, Artificial Sequence
  chemically synthesized
tctcctttgcccaggtcttact

SEQ ID NO: 27938 - DNA, 22 bp, Artificial Sequence
  chemically synthesized
tcctttgcccaggtcttactac

SEQ ID NO: 27939 - DNA, 22 bp, Artificial Sequence
  chemically synthesized
ctttgcccaggtcttactacaa

SEQ ID NO: 27940 - DNA, 22 bp, Artificial Sequence
  chemically synthesized
tgcccaggtcttactacaatca

SEQ ID NO: 27941 - DNA, 22 bp, Artificial Sequence
  chemically synthesized
gcccaggtcttactacaatcat

SEQ ID NO: 27942 - DNA, 22 bp, Artificial Sequence
  chemically synthesized
cccaggtcttactacaatcatt

SEQ ID NO: 27943 - DNA, 22 bp, Artificial Sequence
  chemically synthesized
actacaatcatttcttctgcac

SEQ ID NO: 27944 - DNA, 22 bp, Artificial Sequence
  chemically synthesized
ctacaatcatttcttctgcaca

SEQ ID NO: 27945 - DNA, 22 bp, Artificial Sequence
  chemically synthesized
caatcatttcttctgcacacac

SEQ ID NO: 27946 - DNA, 22 bp, Artificial Sequence
  chemically synthesized
cttctgcacacacttgctcaga

SEQ ID NO: 27947 - DNA, 22 bp, Artificial Sequence
  chemically synthesized
ttctgcacacacttgctcagaa

SEQ ID NO: 27948 - DNA, 22 bp, Artificial Sequence
  chemically synthesized
ctgcacacacttgctcagaaca

SEQ ID NO: 27949 - DNA, 22 bp, Artificial Sequence
  chemically synthesized
tgcacacacttgctcagaacat

SEQ ID NO: 27950 - DNA, 22 bp, Artificial Sequence
  chemically synthesized
cacacacttgctcagaacatta

SEQ ID NO: 27951 - DNA, 22 bp, Artificial Sequence
  chemically synthesized
gctcagaacattacaaactctg

SEQ ID NO: 27952 - DNA, 22 bp, Artificial Sequence
  chemically synthesized
ctcagaacattacaaactctgg

SEQ ID NO: 27953 - DNA, 22 bp, Artificial Sequence
  chemically synthesized
agaacattacaaactctggaga

SEQ ID NO: 27954 - DNA, 22 bp, Artificial Sequence
  chemically synthesized
caaactctggagaaattaacat

SEQ ID NO: 27955 - DNA, 22 bp, Artificial Sequence
  chemically synthesized
tggagaaattaacatgttaagg

SEQ ID NO: 27956 - DNA, 22 bp, Artificial Sequence
  chemically synthesized
gagaaattaacatgttaaggat

SEQ ID NO: 27957 - DNA, 22 bp, Artificial Sequence
  chemically synthesized
acatgttaaggatatttaggat

SEQ ID NO: 27958 - DNA, 22 bp, Artificial Sequence
  chemically synthesized
aggatatttaggatcattaaaa

SEQ ID NO: 27959 - DNA, 22 bp, Artificial Sequence
  chemically synthesized
aggatcattaaaaaagtttaat

SEQ ID NO: 27960 - DNA, 22 bp, Artificial Sequence
  chemically synthesized
ggatcattaaaaaagtttaata

SEQ ID NO: 27961 - DNA, 22 bp, Artificial Sequence
  chemically synthesized
aaaaagtttaataaatgttgtc

SEQ ID NO: 27962 - DNA, 22 bp, Artificial Sequence
  chemically synthesized
aataaatgttgtcacacataat

SEQ ID NO: 27963 - DNA, 22 bp, Artificial Sequence
  chemically synthesized
ataaatgttgtcacacataatg

SEQ ID NO: 27964 - DNA, 22 bp, Artificial Sequence
  chemically synthesized
tcacacataatgaaagttaatt

SEQ ID NO: 27965 - DNA, 22 bp, Artificial Sequence
  chemically synthesized
atttaagaattgtaaagacttg

SEQ ID NO: 27966 - DNA, 22 bp, Artificial Sequence
  chemically synthesized
aagaattgtaaagacttgagcg

SEQ ID NO: 27967 - DNA, 22 bp, Artificial Sequence
  chemically synthesized
agaattgtaaagacttgagcga

SEQ ID NO: 27968 - DNA, 22 bp, Artificial Sequence
  chemically synthesized
taaagacttgagcgatgtagtc

SEQ ID NO: 27969 - DNA, 22 bp, Artificial Sequence
  chemically synthesized
gagcgatgtagtccctaaataa

SEQ ID NO: 27970 - DNA, 22 bp, Artificial Sequence
  chemically synthesized
agcgatgtagtccctaaataaa

SEQ ID NO: 27971 - DNA, 22 bp, Artificial Sequence
  chemically synthesized
aataaatgcttccctcttaaaa

SEQ ID NO: 27972 - DNA, 22 bp, Artificial Sequence
  chemically synthesized
ccctcttaaaatggactagaaa

SEQ ID NO: 27973 - DNA, 22 bp, Artificial Sequence
  chemically synthesized
cctcttaaaatggactagaaac

SEQ ID NO: 27974 - DNA, 22 bp, Artificial Sequence
  chemically synthesized
ttaaaatggactagaaacaatt

SEQ ID NO: 27975 - DNA, 22 bp, Artificial Sequence
  chemically synthesized
aaaatggactagaaacaatttg

SEQ ID NO: 27976 - DNA, 22 bp, Artificial Sequence
  chemically synthesized
aaatggactagaaacaatttgt

SEQ ID NO: 27977 - DNA, 22 bp, Artificial Sequence
  chemically synthesized
gaaacaatttgtttttgcctaa

SEQ ID NO: 27978 - DNA, 22 bp, Artificial Sequence
  chemically synthesized
gtttttgcctaagccaacgtat

SEQ ID NO: 27979 - DNA, 22 bp, Artificial Sequence
  chemically synthesized
tttttgcctaagccaacgtatt

SEQ ID NO: 27980 - DNA, 22 bp, Artificial Sequence
  chemically synthesized
ttgcctaagccaacgtattgct

SEQ ID NO: 27981 - DNA, 22 bp, Artificial Sequence
  chemically synthesized
tgcctaagccaacgtattgctg

SEQ ID NO: 27982 - DNA, 22 bp, Artificial Sequence
  chemically synthesized
gcctaagccaacgtattgctgg

SEQ ID NO: 27983 - DNA, 22 bp, Artificial Sequence
  chemically synthesized
cctaagccaacgtattgctgga

SEQ ID NO: 27984 - DNA, 22 bp, Artificial Sequence
  chemically synthesized
agccaacgtattgctggacata

SEQ ID NO: 27985 - DNA, 22 bp, Artificial Sequence
  chemically synthesized
ctggacataatttacctgcttc

SEQ ID NO: 27986 - DNA, 22 bp, Artificial Sequence
  chemically synthesized
gacataatttacctgcttcctc

SEQ ID NO: 27987 - DNA, 22 bp, Artificial Sequence
  chemically synthesized
acctgcttcctcctcagtcttg

SEQ ID NO: 27988 - DNA, 22 bp, Artificial Sequence
  chemically synthesized
cctgcttcctcctcagtcttga

SEQ ID NO: 27989 - DNA, 22 bp, Artificial Sequence
  chemically synthesized
cttcctcctcagtcttgacact

SEQ ID NO: 27990 - DNA, 22 bp, Artificial Sequence
  chemically synthesized
cctcctcagtcttgacactaca

SEQ ID NO: 27991 - DNA, 22 bp, Artificial Sequence
  chemically synthesized
ctcctcagtcttgacactacac

SEQ ID NO: 27992 - DNA, 22 bp, Artificial Sequence
  chemically synthesized
ctcagtcttgacactacacctc

SEQ ID NO: 27993 - DNA, 22 bp, Artificial Sequence
  chemically synthesized
agtcttgacactacacctctga

SEQ ID NO: 27994 - DNA, 22 bp, Artificial Sequence
  chemically synthesized
gacactacacctctgaattaca

SEQ ID NO: 27995 - DNA, 22 bp, Artificial Sequence
  chemically synthesized
acactacacctctgaattacat

SEQ ID NO: 27996 - DNA, 22 bp, Artificial Sequence
  chemically synthesized
cacctctgaattacatggtaca

SEQ ID NO: 27997 - DNA, 22 bp, Artificial Sequence
  chemically synthesized
tgaattacatggtacaagtggc

SEQ ID NO: 27998 - DNA, 22 bp, Artificial Sequence
  chemically synthesized
aattacatggtacaagtggcac

SEQ ID NO: 27999 - DNA, 22 bp, Artificial Sequence
  chemically synthesized
catggtacaagtggcacaggga

SEQ ID NO: 28000 - DNA, 22 bp, Artificial Sequence
  chemically synthesized
agaaaactagagtcaaagtggt

SEQ ID NO: 28001 - DNA, 22 bp, Artificial Sequence
  chemically synthesized
gagtcaaagtggttatggaaga

SEQ ID NO: 28002 - DNA, 22 bp, Artificial Sequence
  chemically synthesized
tggaagaaattataataatgag

SEQ ID NO: 28003 - DNA, 22 bp, Artificial Sequence
  chemically synthesized
taataatgagtccactcttcta

SEQ ID NO: 28004 - DNA, 22 bp, Artificial Sequence
  chemically synthesized
ttctaggacaggagttctaaag

SEQ ID NO: 28005 - DNA, 22 bp, Artificial Sequence
  chemically synthesized
ctaggacaggagttctaaaggt

SEQ ID NO: 28006 - DNA, 22 bp, Artificial Sequence
  chemically synthesized
taggacaggagttctaaaggtg

SEQ ID NO: 28007 - DNA, 22 bp, Artificial Sequence
  chemically synthesized
ggacaggagttctaaaggtgag

SEQ ID NO: 28008 - DNA, 22 bp, Artificial Sequence
  chemically synthesized
taaaggtgaggactttgatata

SEQ ID NO: 28009 - DNA, 22 bp, Artificial Sequence
  chemically synthesized
aaggtgaggactttgatataag

SEQ ID NO: 28010 - DNA, 22 bp, Artificial Sequence
  chemically synthesized
tgatataagtgaactcaaggag

SEQ ID NO: 28011 - DNA, 22 bp, Artificial Sequence
  chemically synthesized
gatataagtgaactcaaggagt

SEQ ID NO: 28012 - DNA, 22 bp, Artificial Sequence
  chemically synthesized
atataagtgaactcaaggagtt

SEQ ID NO: 28013 - DNA, 22 bp, Artificial Sequence
  chemically synthesized
aaggagtttctaaaccttcaga

SEQ ID NO: 28014 - DNA, 22 bp, Artificial Sequence
  chemically synthesized
ctaaaccttcagaaattatatc

SEQ ID NO: 28015 - DNA, 22 bp, Artificial Sequence
  chemically synthesized
taaaccttcagaaattatatct

SEQ ID NO: 28016 - DNA, 22 bp, Artificial Sequence
  chemically synthesized
aaccttcagaaattatatctaa

SEQ ID NO: 28017 - DNA, 22 bp, Artificial Sequence
  chemically synthesized
cagaaattatatctaaaaatta

SEQ ID NO: 28018 - DNA, 22 bp, Artificial Sequence
  chemically synthesized
agaaattatatctaaaaattag

SEQ ID NO: 28019 - DNA, 22 bp, Artificial Sequence
  chemically synthesized
tatctaaaaattaggtgcacgt

SEQ ID NO: 28020 - DNA, 22 bp, Artificial Sequence
  chemically synthesized
aaaattaggtgcacgtatatag

SEQ ID NO: 28021 - DNA, 22 bp, Artificial Sequence
  chemically synthesized
ggtgcacgtatatagaagtact

SEQ ID NO: 28022 - DNA, 22 bp, Artificial Sequence
  chemically synthesized
ttctctgagaagaggacttcac

SEQ ID NO: 28023 - DNA, 22 bp, Artificial Sequence
  chemically synthesized
tctctgagaagaggacttcaca

SEQ ID NO: 28024 - DNA, 22 bp, Artificial Sequence
  chemically synthesized
ctctgagaagaggacttcacac

SEQ ID NO: 28025 - DNA, 22 bp, Artificial Sequence
  chemically synthesized
tctgagaagaggacttcacact

SEQ ID NO: 28026 - DNA, 22 bp, Artificial Sequence
  chemically synthesized
tgagaagaggacttcacacttc

SEQ ID NO: 28027 - DNA, 22 bp, Artificial Sequence
  chemically synthesized
agaagaggacttcacacttcca

SEQ ID NO: 28028 - DNA, 22 bp, Artificial Sequence
  chemically synthesized
cacacttccatcagcttcctga

SEQ ID NO: 28029 - DNA, 22 bp, Artificial Sequence
  chemically synthesized
acacttccatcagcttcctgaa

SEQ ID NO: 28030 - DNA, 22 bp, Artificial Sequence
  chemically synthesized
ccatcagcttcctgaaggcccc

SEQ ID NO: 28031 - DNA, 22 bp, Artificial Sequence
  chemically synthesized
catcagcttcctgaaggcccct

SEQ ID NO: 28032 - DNA, 22 bp, Artificial Sequence
  chemically synthesized
cctgaaggcccctgtaattgcc

SEQ ID NO: 28033 - DNA, 22 bp, Artificial Sequence
  chemically synthesized
ctgaaggcccctgtaattgccg

SEQ ID NO: 28034 - DNA, 22 bp, Artificial Sequence
  chemically synthesized
aaggcccctgtaattgccgtaa

SEQ ID NO: 28035 - DNA, 22 bp, Artificial Sequence
  chemically synthesized
taattgccgtaaagaacaactg

SEQ ID NO: 28036 - DNA, 22 bp, Artificial Sequence
  chemically synthesized
ccgtaaagaacaactgctctaa

SEQ ID NO: 28037 - DNA, 22 bp, Artificial Sequence
  chemically synthesized
ctctaaagtttaatactaggct

SEQ ID NO: 28038 - DNA, 22 bp, Artificial Sequence
  chemically synthesized
taaagtttaatactaggctact

SEQ ID NO: 28039 - DNA, 22 bp, Artificial Sequence
  chemically synthesized
aagtttaatactaggctactcg

SEQ ID NO: 28040 - DNA, 22 bp, Artificial Sequence
  chemically synthesized
aatactaggctactcggctgtt

SEQ ID NO: 28041 - DNA, 22 bp, Artificial Sequence
  chemically synthesized
atactaggctactcggctgttt

SEQ ID NO: 28042 - DNA, 22 bp, Artificial Sequence
  chemically synthesized
ggctactcggctgttttttgtt

SEQ ID NO: 28043 - DNA, 22 bp, Artificial Sequence
  chemically synthesized
ctcggctgttttttgttaacac

SEQ ID NO: 28044 - DNA, 22 bp, Artificial Sequence
  chemically synthesized
ggctgttttttgttaacacaga

SEQ ID NO: 28045 - DNA, 22 bp, Artificial Sequence
  chemically synthesized
ttttttgttaacacagaagttt

SEQ ID NO: 28046 - DNA, 22 bp, Artificial Sequence
  chemically synthesized
tttgttaacacagaagttttcc

SEQ ID NO: 28047 - DNA, 22 bp, Artificial Sequence
  chemically synthesized
ttgttaacacagaagttttcca

SEQ ID NO: 28048 - DNA, 22 bp, Artificial Sequence
  chemically synthesized
tgttaacacagaagttttccaa

SEQ ID NO: 28049 - DNA, 22 bp, Artificial Sequence
  chemically synthesized
gttaacacagaagttttccaaa

SEQ ID NO: 28050 - DNA, 22 bp, Artificial Sequence
  chemically synthesized
ttaacacagaagttttccaaat

SEQ ID NO: 28051 - DNA, 22 bp, Artificial Sequence
  chemically synthesized
acacagaagttttccaaatggc

SEQ ID NO: 28052 - DNA, 22 bp, Artificial Sequence
  chemically synthesized
tccaaatggcttttctctagag

SEQ ID NO: 28053 - DNA, 22 bp, Artificial Sequence
  chemically synthesized
ccaaatggcttttctctagagc

SEQ ID NO: 28054 - DNA, 22 bp, Artificial Sequence
  chemically synthesized
caaatggcttttctctagagca

SEQ ID NO: 28055 - DNA, 22 bp, Artificial Sequence
  chemically synthesized
ttctctagagcaaaatgaaaag

SEQ ID NO: 28056 - DNA, 22 bp, Artificial Sequence
  chemically synthesized
tctctagagcaaaatgaaaagg

SEQ ID NO: 28057 - DNA, 22 bp, Artificial Sequence
  chemically synthesized
ctctagagcaaaatgaaaagga

SEQ ID NO: 28058 - DNA, 22 bp, Artificial Sequence
  chemically synthesized
tctagagcaaaatgaaaaggat

SEQ ID NO: 28059 - DNA, 22 bp, Artificial Sequence
  chemically synthesized
tagagcaaaatgaaaaggatcc

SEQ ID NO: 28060 - DNA, 22 bp, Artificial Sequence
  chemically synthesized
gagcaaaatgaaaaggatccca

SEQ ID NO: 28061 - DNA, 22 bp, Artificial Sequence
  chemically synthesized
cccgagacctaacgatgtttat

SEQ ID NO: 28062 - DNA, 22 bp, Artificial Sequence
  chemically synthesized
ccgagacctaacgatgtttatc

SEQ ID NO: 28063 - DNA, 22 bp, Artificial Sequence
  chemically synthesized
acgatgtttatctttcgtgata

SEQ ID NO: 28064 - DNA, 22 bp, Artificial Sequence
  chemically synthesized
atctttcgtgatactgtttttg

SEQ ID NO: 28065 - DNA, 22 bp, Artificial Sequence
  chemically synthesized
tctttcgtgatactgtttttgt

SEQ ID NO: 28066 - DNA, 22 bp, Artificial Sequence
  chemically synthesized
tcgtgatactgtttttgttctt

SEQ ID NO: 28067 - DNA, 22 bp, Artificial Sequence
  chemically synthesized
cgtgatactgtttttgttcttc

SEQ ID NO: 28068 - DNA, 22 bp, Artificial Sequence
  chemically synthesized
gtgatactgtttttgttcttcc

SEQ ID NO: 28069 - DNA, 22 bp, Artificial Sequence
  chemically synthesized
tttttgttcttcctctttttct

SEQ ID NO: 28070 - DNA, 22 bp, Artificial Sequence
  chemically synthesized
ttgttcttcctctttttctcct

SEQ ID NO: 28071 - DNA, 22 bp, Artificial Sequence
  chemically synthesized
tgttcttcctctttttctccta

SEQ ID NO: 28072 - DNA, 22 bp, Artificial Sequence
  chemically synthesized
gttcttcctctttttctcctac

SEQ ID NO: 28073 - DNA, 22 bp, Artificial Sequence
  chemically synthesized
ttcttcctctttttctcctacc

SEQ ID NO: 28074 - DNA, 22 bp, Artificial Sequence
  chemically synthesized
ttcctctttttctcctaccccc

SEQ ID NO: 28075 - DNA, 22 bp, Artificial Sequence
  chemically synthesized
cctctttttctcctacccccca

SEQ ID NO: 28076 - DNA, 22 bp, Artificial Sequence
  chemically synthesized
ctctttttctcctaccccccac

SEQ ID NO: 28077 - DNA, 22 bp, Artificial Sequence
  chemically synthesized
tttttctcctaccccccaccac

SEQ ID NO: 28078 - DNA, 22 bp, Artificial Sequence
  chemically synthesized
tttctcctaccccccaccactt

SEQ ID NO: 28079 - DNA, 22 bp, Artificial Sequence
  chemically synthesized
ttctcctaccccccaccacttt

SEQ ID NO: 28080 - DNA, 22 bp, Artificial Sequence
  chemically synthesized
tctcctaccccccaccactttt

SEQ ID NO: 28081 - DNA, 22 bp, Artificial Sequence
  chemically synthesized
ctcctaccccccaccactttta

SEQ ID NO: 28082 - DNA, 22 bp, Artificial Sequence
  chemically synthesized
tcctaccccccaccacttttaa

SEQ ID NO: 28083 - DNA, 22 bp, Artificial Sequence
  chemically synthesized
ctaccccccaccacttttaaag

SEQ ID NO: 28084 - DNA, 22 bp, Artificial Sequence
  chemically synthesized
ccccccaccacttttaaagatc

SEQ ID NO: 28085 - DNA, 22 bp, Artificial Sequence
  chemically synthesized
ttaaagatccatcaaggcccag

SEQ ID NO: 28086 - DNA, 22 bp, Artificial Sequence
  chemically synthesized
taaagatccatcaaggcccagc

SEQ ID NO: 28087 - DNA, 22 bp, Artificial Sequence
  chemically synthesized
aaagatccatcaaggcccagca

SEQ ID NO: 28088 - DNA, 22 bp, Artificial Sequence
  chemically synthesized
aagatccatcaaggcccagcat

SEQ ID NO: 28089 - DNA, 22 bp, Artificial Sequence
  chemically synthesized
acacctgtaatctcaacacttt

SEQ ID NO: 28090 - DNA, 22 bp, Artificial Sequence
  chemically synthesized
taatctcaacacttttcaaggc

SEQ ID NO: 28091 - DNA, 22 bp, Artificial Sequence
  chemically synthesized
aacacttttcaaggctgaggtg

SEQ ID NO: 28092 - DNA, 22 bp, Artificial Sequence
  chemically synthesized
ttcaaggctgaggtgggagaat

SEQ ID NO: 28093 - DNA, 22 bp, Artificial Sequence
  chemically synthesized
tcaaggctgaggtgggagaatt

SEQ ID NO: 28094 - DNA, 22 bp, Artificial Sequence
  chemically synthesized
caaggctgaggtgggagaattg

SEQ ID NO: 28095 - DNA, 22 bp, Artificial Sequence
  chemically synthesized
aaggctgaggtgggagaattgt

SEQ ID NO: 28096 - DNA, 22 bp, Artificial Sequence
  chemically synthesized
aggtgggagaattgtttgagac

SEQ ID NO: 28097 - DNA, 22 bp, Artificial Sequence
  chemically synthesized
tttgagaccaagagttggatac

SEQ ID NO: 28098 - DNA, 22 bp, Artificial Sequence
  chemically synthesized
gagaccaagagttggataccag

SEQ ID NO: 28099 - DNA, 22 bp, Artificial Sequence
  chemically synthesized
agaccaagagttggataccagc

SEQ ID NO: 28100 - DNA, 22 bp, Artificial Sequence
  chemically synthesized
gataccagcctggggaacatag

SEQ ID NO: 28101 - DNA, 22 bp, Artificial Sequence
  chemically synthesized
gggaacatagggagaccctgtt

SEQ ID NO: 28102 - DNA, 22 bp, Artificial Sequence
  chemically synthesized
tttctacagaaatttaaaaaat

SEQ ID NO: 28103 - DNA, 22 bp, Artificial Sequence
  chemically synthesized
ctacagaaatttaaaaaatttc

SEQ ID NO: 28104 - DNA, 22 bp, Artificial Sequence
  chemically synthesized
tacagaaatttaaaaaatttct

SEQ ID NO: 28105 - DNA, 22 bp, Artificial Sequence
  chemically synthesized
cagaaatttaaaaaatttctct

SEQ ID NO: 28106 - DNA, 22 bp, Artificial Sequence
  chemically synthesized
aaaaaatttctctagctggcca

SEQ ID NO: 28107 - DNA, 22 bp, Artificial Sequence
  chemically synthesized
aaaaatttctctagctggccat

SEQ ID NO: 28108 - DNA, 22 bp, Artificial Sequence
  chemically synthesized
ctctagctggccatggaggctc

SEQ ID NO: 28109 - DNA, 22 bp, Artificial Sequence
  chemically synthesized
tctagctggccatggaggctca

SEQ ID NO: 28110 - DNA, 22 bp, Artificial Sequence
  chemically synthesized
tagctggccatggaggctcaca

SEQ ID NO: 28111 - DNA, 22 bp, Artificial Sequence
  chemically synthesized
gctggccatggaggctcacacc

SEQ ID NO: 28112 - DNA, 22 bp, Artificial Sequence
  chemically synthesized
gccatggaggctcacacctgta

SEQ ID NO: 28113 - DNA, 22 bp, Artificial Sequence
  chemically synthesized
acacctgtagtcctagctacct

SEQ ID NO: 28114 - DNA, 22 bp, Artificial Sequence
  chemically synthesized
tagtcctagctacctgagaggc

SEQ ID NO: 28115 - DNA, 22 bp, Artificial Sequence
  chemically synthesized
gctacctgagaggctaaagcag

SEQ ID NO: 28116 - DNA, 22 bp, Artificial Sequence
  chemically synthesized
cctgagaggctaaagcaggagg

SEQ ID NO: 28117 - DNA, 22 bp, Artificial Sequence
  chemically synthesized
agaggctaaagcaggaggatca

SEQ ID NO: 28118 - DNA, 22 bp, Artificial Sequence
  chemically synthesized
aagcaggaggatcaattgaatc

SEQ ID NO: 28119 - DNA, 22 bp, Artificial Sequence
  chemically synthesized
aatccaggcgttctagtgaggc

SEQ ID NO: 28120 - DNA, 22 bp, Artificial Sequence
  chemically synthesized
tagtgaggcttcagtgagcaag

SEQ ID NO: 28121 - DNA, 22 bp, Artificial Sequence
  chemically synthesized
gtgaggcttcagtgagcaagat

SEQ ID NO: 28122 - DNA, 22 bp, Artificial Sequence
  chemically synthesized
cagtgagcaagattgcaccatt

SEQ ID NO: 28123 - DNA, 22 bp, Artificial Sequence
  chemically synthesized
agtgagcaagattgcaccattg

SEQ ID NO: 28124 - DNA, 22 bp, Artificial Sequence
  chemically synthesized
caccattgcactccagccgggg

SEQ ID NO: 28125 - DNA, 22 bp, Artificial Sequence
  chemically synthesized
cactccagccggggtgacagag

SEQ ID NO: 28126 - DNA, 22 bp, Artificial Sequence
  chemically synthesized
cagccggggtgacagagtgaga

SEQ ID NO: 28127 - DNA, 22 bp, Artificial Sequence
  chemically synthesized
tttcaaacaaacaagcaaaagc

SEQ ID NO: 28128 - DNA, 22 bp, Artificial Sequence
  chemically synthesized
caaacaaacaagcaaaagcaaa

SEQ ID NO: 28129 - DNA, 22 bp, Artificial Sequence
  chemically synthesized
aaacaaacaagcaaaagcaaaa

SEQ ID NO: 28130 - DNA, 22 bp, Artificial Sequence
  chemically synthesized
gttgctccattcctttacttac

SEQ ID NO: 28131 - DNA, 22 bp, Artificial Sequence
  chemically synthesized
ttgctccattcctttacttact

SEQ ID NO: 28132 - DNA, 22 bp, Artificial Sequence
  chemically synthesized
ctccattcctttacttactatc

SEQ ID NO: 28133 - DNA, 22 bp, Artificial Sequence
  chemically synthesized
cattcctttacttactatcttg

SEQ ID NO: 28134 - DNA, 22 bp, Artificial Sequence
  chemically synthesized
ctttacttactatcttgctgtc

SEQ ID NO: 28135 - DNA, 22 bp, Artificial Sequence
  chemically synthesized
tacttactatcttgctgtctac

SEQ ID NO: 28136 - DNA, 22 bp, Artificial Sequence
  chemically synthesized
acttactatcttgctgtctaca

SEQ ID NO: 28137 - DNA, 22 bp, Artificial Sequence
  chemically synthesized
cttactatcttgctgtctacag

SEQ ID NO: 28138 - DNA, 22 bp, Artificial Sequence
  chemically synthesized
actatcttgctgtctacagcta

SEQ ID NO: 28139 - DNA, 22 bp, Artificial Sequence
  chemically synthesized
ctatcttgctgtctacagctaa

SEQ ID NO: 28140 - DNA, 22 bp, Artificial Sequence
  chemically synthesized
tcttgctgtctacagctaaagt

SEQ ID NO: 28141 - DNA, 22 bp, Artificial Sequence
  chemically synthesized
gctgtctacagctaaagtcaga

SEQ ID NO: 28142 - DNA, 22 bp, Artificial Sequence
  chemically synthesized
ctgtctacagctaaagtcagac

SEQ ID NO: 28143 - DNA, 22 bp, Artificial Sequence
  chemically synthesized
tctacagctaaagtcagactgc

SEQ ID NO: 28144 - DNA, 22 bp, Artificial Sequence
  chemically synthesized
cagctaaagtcagactgcatga

SEQ ID NO: 28145 - DNA, 22 bp, Artificial Sequence
  chemically synthesized
aagtcagactgcatgatttgga

SEQ ID NO: 28146 - DNA, 22 bp, Artificial Sequence
  chemically synthesized
catgatttggaattccaactcc

SEQ ID NO: 28147 - DNA, 22 bp, Artificial Sequence
  chemically synthesized
ggaattccaactccaccatcac

SEQ ID NO: 28148 - DNA, 22 bp, Artificial Sequence
  chemically synthesized
gaattccaactccaccatcacc

SEQ ID NO: 28149 - DNA, 22 bp, Artificial Sequence
  chemically synthesized
caactccaccatcacctgggta

SEQ ID NO: 28150 - DNA, 22 bp, Artificial Sequence
  chemically synthesized
caccatcacctgggtaatgttg

SEQ ID NO: 28151 - DNA, 22 bp, Artificial Sequence
  chemically synthesized
ggtaatgttgagatttattaca

SEQ ID NO: 28152 - DNA, 22 bp, Artificial Sequence
  chemically synthesized
agatttattacatagcatctct

SEQ ID NO: 28153 - DNA, 22 bp, Artificial Sequence
  chemically synthesized
attacatagcatctctgtgcct

SEQ ID NO: 28154 - DNA, 22 bp, Artificial Sequence
  chemically synthesized
ttacatagcatctctgtgcctc

SEQ ID NO: 28155 - DNA, 22 bp, Artificial Sequence
  chemically synthesized
catagcatctctgtgcctcagt

SEQ ID NO: 28156 - DNA, 22 bp, Artificial Sequence
  chemically synthesized
tgtgcctcagtttctccatata

SEQ ID NO: 28157 - DNA, 22 bp, Artificial Sequence
  chemically synthesized
tgcctcagtttctccatatata

SEQ ID NO: 28158 - DNA, 22 bp, Artificial Sequence
  chemically synthesized
agtttctccatatataaaatct

SEQ ID NO: 28159 - DNA, 22 bp, Artificial Sequence
  chemically synthesized
ctccatatataaaatctacctg

SEQ ID NO: 28160 - DNA, 22 bp, Artificial Sequence
  chemically synthesized
tccatatataaaatctacctgt

SEQ ID NO: 28161 - DNA, 22 bp, Artificial Sequence
  chemically synthesized
catatataaaatctacctgtaa

SEQ ID NO: 28162 - DNA, 22 bp, Artificial Sequence
  chemically synthesized
cctgtaataatgttgtgaaaat

SEQ ID NO: 28163 - DNA, 22 bp, Artificial Sequence
  chemically synthesized
taataatgttgtgaaaattaaa

SEQ ID NO: 28164 - DNA, 22 bp, Artificial Sequence
  chemically synthesized
tgaaaattaaaagaaataccag

SEQ ID NO: 28165 - DNA, 22 bp, Artificial Sequence
  chemically synthesized
aaagaaataccagttgtaaatc

SEQ ID NO: 28166 - DNA, 22 bp, Artificial Sequence
  chemically synthesized
taaatcactcagaactgtgcct

SEQ ID NO: 28167 - DNA, 22 bp, Artificial Sequence
  chemically synthesized
agaactgtgcctagcatttaat

SEQ ID NO: 28168 - DNA, 22 bp, Artificial Sequence
  chemically synthesized
tgcctagcatttaataaacact

SEQ ID NO: 28169 - DNA, 22 bp, Artificial Sequence
  chemically synthesized
gcatttaataaacactctgtag

SEQ ID NO: 28170 - DNA, 22 bp, Artificial Sequence
  chemically synthesized
aataaacactctgtaggtatta

SEQ ID NO: 28171 - DNA, 22 bp, Artificial Sequence
  chemically synthesized
ataaacactctgtaggtattag

SEQ ID NO: 28172 - DNA, 22 bp, Artificial Sequence
  chemically synthesized
tgtaggtattagcttatttctt

SEQ ID NO: 28173 - DNA, 22 bp, Artificial Sequence
  chemically synthesized
taggtattagcttatttcttta

SEQ ID NO: 28174 - DNA, 22 bp, Artificial Sequence
  chemically synthesized
gcttatttctttataaaattta

SEQ ID NO: 28175 - DNA, 22 bp, Artificial Sequence
  chemically synthesized
atttctttataaaatttattca

SEQ ID NO: 28176 - DNA, 22 bp, Artificial Sequence
  chemically synthesized
tttctttataaaatttattcat

SEQ ID NO: 28177 - DNA, 22 bp, Artificial Sequence
  chemically synthesized
ctttataaaatttattcataaa

SEQ ID NO: 28178 - DNA, 22 bp, Artificial Sequence
  chemically synthesized
tttataaaatttattcataaaa

SEQ ID NO: 28179 - DNA, 22 bp, Artificial Sequence
  chemically synthesized
tataaaatttattcataaaatg

SEQ ID NO: 28180 - DNA, 22 bp, Artificial Sequence
  chemically synthesized
ataaaatttattcataaaatga

SEQ ID NO: 28181 - DNA, 22 bp, Artificial Sequence
  chemically synthesized
taaaatttattcataaaatgag

SEQ ID NO: 28182 - DNA, 22 bp, Artificial Sequence
  chemically synthesized
attcataaaatgaggaagttag

SEQ ID NO: 28183 - DNA, 22 bp, Artificial Sequence
  chemically synthesized
ttcataaaatgaggaagttagc

SEQ ID NO: 28184 - DNA, 22 bp, Artificial Sequence
  chemically synthesized
ataaaatgaggaagttagctca

SEQ ID NO: 28185 - DNA, 22 bp, Artificial Sequence
  chemically synthesized
gctcatgtattgtcataccagc

SEQ ID NO: 28186 - DNA, 22 bp, Artificial Sequence
  chemically synthesized
atgtattgtcataccagctttc

SEQ ID NO: 28187 - DNA, 22 bp, Artificial Sequence
  chemically synthesized
tcataccagctttcactttgaa

SEQ ID NO: 28188 - DNA, 22 bp, Artificial Sequence
  chemically synthesized
tcactttgaatgagtccataat

SEQ ID NO: 28189 - DNA, 22 bp, Artificial Sequence
  chemically synthesized
cactttgaatgagtccataatt

SEQ ID NO: 28190 - DNA, 22 bp, Artificial Sequence
  chemically synthesized
actttgaatgagtccataattg

SEQ ID NO: 28191 - DNA, 22 bp, Artificial Sequence
  chemically synthesized
tgaatgagtccataattgcatt

SEQ ID NO: 28192 - DNA, 22 bp, Artificial Sequence
  chemically synthesized
gaatgagtccataattgcattt

SEQ ID NO: 28193 - DNA, 22 bp, Artificial Sequence
  chemically synthesized
aatgagtccataattgcatttt

SEQ ID NO: 28194 - DNA, 22 bp, Artificial Sequence
  chemically synthesized
catttttaaacacaaaaagaga

SEQ ID NO: 28195 - DNA, 22 bp, Artificial Sequence
  chemically synthesized
ttaaacacaaaaagagaaataa

SEQ ID NO: 28196 - DNA, 22 bp, Artificial Sequence
  chemically synthesized
taaacacaaaaagagaaataat

SEQ ID NO: 28197 - DNA, 22 bp, Artificial Sequence
  chemically synthesized
aaacacaaaaagagaaataata

SEQ ID NO: 28198 - DNA, 22 bp, Artificial Sequence
  chemically synthesized
aacacaaaaagagaaataatag

SEQ ID NO: 28199 - DNA, 22 bp, Artificial Sequence
  chemically synthesized
cttcaatcacgggatgcatagt

SEQ ID NO: 28200 - DNA, 22 bp, Artificial Sequence
  chemically synthesized
caatcacgggatgcatagtaat

SEQ ID NO: 28201 - DNA, 22 bp, Artificial Sequence
  chemically synthesized
aatcacgggatgcatagtaatt

SEQ ID NO: 28202 - DNA, 22 bp, Artificial Sequence
  chemically synthesized
ggatttctttgccctaattact

SEQ ID NO: 28203 - DNA, 22 bp, Artificial Sequence
  chemically synthesized
ctttgccctaattactgatgtg

SEQ ID NO: 28204 - DNA, 22 bp, Artificial Sequence
  chemically synthesized
tttgccctaattactgatgtgg

SEQ ID NO: 28205 - DNA, 22 bp, Artificial Sequence
  chemically synthesized
tgccctaattactgatgtggat

SEQ ID NO: 28206 - DNA, 22 bp, Artificial Sequence
  chemically synthesized
gccctaattactgatgtggata

SEQ ID NO: 28207 - DNA, 22 bp, Artificial Sequence
  chemically synthesized
ccctaattactgatgtggataa

SEQ ID NO: 28208 - DNA, 22 bp, Artificial Sequence
  chemically synthesized
attactgatgtggataagccgg

SEQ ID NO: 28209 - DNA, 22 bp, Artificial Sequence
  chemically synthesized
ctgatgtggataagccggtggg

SEQ ID NO: 28210 - DNA, 22 bp, Artificial Sequence
  chemically synthesized
atgtggataagccggtgggcca

SEQ ID NO: 28211 - DNA, 22 bp, Artificial Sequence
  chemically synthesized
aagctgttatcacaccatgtga

SEQ ID NO: 28212 - DNA, 22 bp, Artificial Sequence
  chemically synthesized
ttatcacaccatgtgaaacaca

SEQ ID NO: 28213 - DNA, 22 bp, Artificial Sequence
  chemically synthesized
tcacaccatgtgaaacacacga

SEQ ID NO: 28214 - DNA, 22 bp, Artificial Sequence
  chemically synthesized
tgtaaaaactatgcttggttgc

SEQ ID NO: 28215 - DNA, 22 bp, Artificial Sequence
  chemically synthesized
tgcttggttgcacagcttcaag

SEQ ID NO: 28216 - DNA, 22 bp, Artificial Sequence
  chemically synthesized
ggttgcacagcttcaaggaaag

SEQ ID NO: 28217 - DNA, 22 bp, Artificial Sequence
  chemically synthesized
gttgcacagcttcaaggaaagc

SEQ ID NO: 28218 - DNA, 22 bp, Artificial Sequence
  chemically synthesized
cacagcttcaaggaaagcacta

SEQ ID NO: 28219 - DNA, 22 bp, Artificial Sequence
  chemically synthesized
caaggaaagcactagtctactc

SEQ ID NO: 28220 - DNA, 22 bp, Artificial Sequence
  chemically synthesized
aaggaaagcactagtctactca

SEQ ID NO: 28221 - DNA, 22 bp, Artificial Sequence
  chemically synthesized
gtctactcacttccttttcatt

SEQ ID NO: 28222 - DNA, 22 bp, Artificial Sequence
  chemically synthesized
ctcacttccttttcattcagca

SEQ ID NO: 28223 - DNA, 22 bp, Artificial Sequence
  chemically synthesized
acttccttttcattcagcatgc

SEQ ID NO: 28224 - DNA, 22 bp, Artificial Sequence
  chemically synthesized
ccttttcattcagcatgctatg

SEQ ID NO: 28225 - DNA, 22 bp, Artificial Sequence
  chemically synthesized
cttttcattcagcatgctatgt

SEQ ID NO: 28226 - DNA, 22 bp, Artificial Sequence
  chemically synthesized
ttcattcagcatgctatgtcta

SEQ ID NO: 28227 - DNA, 22 bp, Artificial Sequence
  chemically synthesized
tcattcagcatgctatgtctag

SEQ ID NO: 28228 - DNA, 22 bp, Artificial Sequence
  chemically synthesized
cattcagcatgctatgtctagg

SEQ ID NO: 28229 - DNA, 22 bp, Artificial Sequence
  chemically synthesized
attcagcatgctatgtctaggc

SEQ ID NO: 28230 - DNA, 22 bp, Artificial Sequence
  chemically synthesized
agcatgctatgtctaggcccct

SEQ ID NO: 28231 - DNA, 22 bp, Artificial Sequence
  chemically synthesized
tgtctaggcccctttcatataa

SEQ ID NO: 28232 - DNA, 22 bp, Artificial Sequence
  chemically synthesized
ggcccctttcatataaaatatt

SEQ ID NO: 28233 - DNA, 22 bp, Artificial Sequence
  chemically synthesized
tcatataaaatatttggagctg

SEQ ID NO: 28234 - DNA, 22 bp, Artificial Sequence
  chemically synthesized
catataaaatatttggagctgc

SEQ ID NO: 28235 - DNA, 22 bp, Artificial Sequence
  chemically synthesized
atataaaatatttggagctgcc

SEQ ID NO: 28236 - DNA, 22 bp, Artificial Sequence
  chemically synthesized
ggagctgccattgtaggtagtg

SEQ ID NO: 28237 - DNA, 22 bp, Artificial Sequence
  chemically synthesized
gagctgccattgtaggtagtgc

SEQ ID NO: 28238 - DNA, 22 bp, Artificial Sequence
  chemically synthesized
ccattgtaggtagtgcaggtgg

SEQ ID NO: 28239 - DNA, 22 bp, Artificial Sequence
  chemically synthesized
taggtagtgcaggtggtcttgt

SEQ ID NO: 28240 - DNA, 22 bp, Artificial Sequence
  chemically synthesized
gttcaaagtgtgagtatcacct

SEQ ID NO: 28241 - DNA, 22 bp, Artificial Sequence
  chemically synthesized
ttcaaagtgtgagtatcacctc

SEQ ID NO: 28242 - DNA, 22 bp, Artificial Sequence
  chemically synthesized
aaagtgtgagtatcacctccca

SEQ ID NO: 28243 - DNA, 22 bp, Artificial Sequence
  chemically synthesized
ccactgccaagactgcagctgc

SEQ ID NO: 28244 - DNA, 22 bp, Artificial Sequence
  chemically synthesized
ccaagactgcagctgctttgat

SEQ ID NO: 28245 - DNA, 22 bp, Artificial Sequence
  chemically synthesized
cagctgctttgattttaactga

SEQ ID NO: 28246 - DNA, 22 bp, Artificial Sequence
  chemically synthesized
ctttgattttaactgaggatct

SEQ ID NO: 28247 - DNA, 22 bp, Artificial Sequence
  chemically synthesized
tgattttaactgaggatctaga

SEQ ID NO: 28248 - DNA, 22 bp, Artificial Sequence
  chemically synthesized
gattttaactgaggatctagaa

SEQ ID NO: 28249 - DNA, 22 bp, Artificial Sequence
  chemically synthesized
attttaactgaggatctagaaa

SEQ ID NO: 28250 - DNA, 22 bp, Artificial Sequence
  chemically synthesized
taactgaggatctagaaaagtg

SEQ ID NO: 28251 - DNA, 22 bp, Artificial Sequence
  chemically synthesized
aactgaggatctagaaaagtgc

SEQ ID NO: 28252 - DNA, 22 bp, Artificial Sequence
  chemically synthesized
actgaggatctagaaaagtgct

SEQ ID NO: 28253 - DNA, 22 bp, Artificial Sequence
  chemically synthesized
aggatctagaaaagtgctggga

SEQ ID NO: 28254 - DNA, 22 bp, Artificial Sequence
  chemically synthesized
gaaaagtgctgggaacacaaat

SEQ ID NO: 28255 - DNA, 22 bp, Artificial Sequence
  chemically synthesized
ggaacacaaatatttgctgacc

SEQ ID NO: 28256 - DNA, 22 bp, Artificial Sequence
  chemically synthesized
gctgacctttgtcacaagtagc

SEQ ID NO: 28257 - DNA, 22 bp, Artificial Sequence
  chemically synthesized
ctgacctttgtcacaagtagca

SEQ ID NO: 28258 - DNA, 22 bp, Artificial Sequence
  chemically synthesized
acctttgtcacaagtagcacct

SEQ ID NO: 28259 - DNA, 22 bp, Artificial Sequence
  chemically synthesized
tgtcacaagtagcacctaatct

SEQ ID NO: 28260 - DNA, 22 bp, Artificial Sequence
  chemically synthesized
gtcacaagtagcacctaatctc

SEQ ID NO: 28261 - DNA, 22 bp, Artificial Sequence
  chemically synthesized
tcacaagtagcacctaatctcc

SEQ ID NO: 28262 - DNA, 22 bp, Artificial Sequence
  chemically synthesized
atctccttcctaccagacctgc

SEQ ID NO: 28263 - DNA, 22 bp, Artificial Sequence
  chemically synthesized
cttcctaccagacctgctgcct

SEQ ID NO: 28264 - DNA, 22 bp, Artificial Sequence
  chemically synthesized
cctaccagacctgctgccttat

SEQ ID NO: 28265 - DNA, 22 bp, Artificial Sequence
  chemically synthesized
ctaccagacctgctgccttata

SEQ ID NO: 28266 - DNA, 22 bp, Artificial Sequence
  chemically synthesized
ccagacctgctgccttataaaa

SEQ ID NO: 28267 - DNA, 22 bp, Artificial Sequence
  chemically synthesized
ctgccttataaaatgatgttct

SEQ ID NO: 28268 - DNA, 22 bp, Artificial Sequence
  chemically synthesized
ccttataaaatgatgttctaag

SEQ ID NO: 28269 - DNA, 22 bp, Artificial Sequence
  chemically synthesized
ataaaatgatgttctaagtgta

SEQ ID NO: 28270 - DNA, 22 bp, Artificial Sequence
  chemically synthesized
taaaatgatgttctaagtgtat

SEQ ID NO: 28271 - DNA, 22 bp, Artificial Sequence
  chemically synthesized
taagtgtataatgacttcctct

SEQ ID NO: 28272 - DNA, 22 bp, Artificial Sequence
  chemically synthesized
agtgtataatgacttcctctgc

SEQ ID NO: 28273 - DNA, 22 bp, Artificial Sequence
  chemically synthesized
cctctgcttctgcaactgtgtt

SEQ ID NO: 28274 - DNA, 22 bp, Artificial Sequence
  chemically synthesized
ctctgcttctgcaactgtgttt

SEQ ID NO: 28275 - DNA, 22 bp, Artificial Sequence
  chemically synthesized
tgcttctgcaactgtgttttgg

SEQ ID NO: 28276 - DNA, 22 bp, Artificial Sequence
  chemically synthesized
cttctgcaactgtgttttggaa

SEQ ID NO: 28277 - DNA, 22 bp, Artificial Sequence
  chemically synthesized
ctgcaactgtgttttggaacag

SEQ ID NO: 28278 - DNA, 22 bp, Artificial Sequence
  chemically synthesized
tgcaactgtgttttggaacagg

SEQ ID NO: 28279 - DNA, 22 bp, Artificial Sequence
  chemically synthesized
caactgtgttttggaacaggag

SEQ ID NO: 28280 - DNA, 22 bp, Artificial Sequence
  chemically synthesized
tgttttggaacaggagggtgag

SEQ ID NO: 28281 - DNA, 22 bp, Artificial Sequence
  chemically synthesized
tggaacaggagggtgagattag

SEQ ID NO: 28282 - DNA, 22 bp, Artificial Sequence
  chemically synthesized
ggaacaggagggtgagattagt

SEQ ID NO: 28283 - DNA, 22 bp, Artificial Sequence
  chemically synthesized
gaacaggagggtgagattagta

SEQ ID NO: 28284 - DNA, 22 bp, Artificial Sequence
  chemically synthesized
gtagccacacacactgaaatag

SEQ ID NO: 28285 - DNA, 22 bp, Artificial Sequence
  chemically synthesized
aaatagtcatatgacttccaaa

SEQ ID NO: 28286 - DNA, 22 bp, Artificial Sequence
  chemically synthesized
ccaaagtctgtaatttttaagc

SEQ ID NO: 28287 - DNA, 22 bp, Artificial Sequence
  chemically synthesized
caaagtctgtaatttttaagca

SEQ ID NO: 28288 - DNA, 22 bp, Artificial Sequence
  chemically synthesized
taatttttaagcatatacaaaa

SEQ ID NO: 28289 - DNA, 22 bp, Artificial Sequence
  chemically synthesized
ttaagcatatacaaaatagtga

SEQ ID NO: 28290 - DNA, 22 bp, Artificial Sequence
  chemically synthesized
taagcatatacaaaatagtgaa

SEQ ID NO: 28291 - DNA, 22 bp, Artificial Sequence
  chemically synthesized
aagcatatacaaaatagtgaaa

SEQ ID NO: 28292 - DNA, 22 bp, Artificial Sequence
  chemically synthesized
agcatatacaaaatagtgaaat

SEQ ID NO: 28293 - DNA, 22 bp, Artificial Sequence
  chemically synthesized
ctccatatgtgtataatatgta

SEQ ID NO: 28294 - DNA, 22 bp, Artificial Sequence
  chemically synthesized
tccatatgtgtataatatgtat

SEQ ID NO: 28295 - DNA, 22 bp, Artificial Sequence
  chemically synthesized
catatgtgtataatatgtatat

SEQ ID NO: 28296 - DNA, 22 bp, Artificial Sequence
  chemically synthesized
attttggctgatatctattcta

SEQ ID NO: 28297 - DNA, 22 bp, Artificial Sequence
  chemically synthesized
ttttggctgatatctattctat

SEQ ID NO: 28298 - DNA, 22 bp, Artificial Sequence
  chemically synthesized
tggctgatatctattctatact

SEQ ID NO: 28299 - DNA, 22 bp, Artificial Sequence
  chemically synthesized
ggctgatatctattctatactt

SEQ ID NO: 28300 - DNA, 22 bp, Artificial Sequence
  chemically synthesized
gctgatatctattctatacttc

SEQ ID NO: 28301 - DNA, 22 bp, Artificial Sequence
  chemically synthesized
atatctattctatacttctttg

SEQ ID NO: 28302 - DNA, 22 bp, Artificial Sequence
  chemically synthesized
ttctatacttctttgaaatagt

SEQ ID NO: 28303 - DNA, 22 bp, Artificial Sequence
  chemically synthesized
tatacttctttgaaatagtgat

SEQ ID NO: 28304 - DNA, 22 bp, Artificial Sequence
  chemically synthesized
tacttctttgaaatagtgattt

SEQ ID NO: 28305 - DNA, 22 bp, Artificial Sequence
  chemically synthesized
ctttgaaatagtgatttttagt

SEQ ID NO: 28306 - DNA, 22 bp, Artificial Sequence
  chemically synthesized
tttgaaatagtgatttttagta

SEQ ID NO: 28307 - DNA, 22 bp, Artificial Sequence
  chemically synthesized
tgaaatagtgatttttagtaaa

SEQ ID NO: 28308 - DNA, 22 bp, Artificial Sequence
  chemically synthesized
gaaatagtgatttttagtaaat

SEQ ID NO: 28309 - DNA, 22 bp, Artificial Sequence
  chemically synthesized
aaatagtgatttttagtaaatt

SEQ ID NO: 28310 - DNA, 22 bp, Artificial Sequence
  chemically synthesized
ttagtaaattggcagtgttgcc

SEQ ID NO: 28311 - DNA, 22 bp, Artificial Sequence
  chemically synthesized
tagtaaattggcagtgttgcca

SEQ ID NO: 28312 - DNA, 22 bp, Artificial Sequence
  chemically synthesized
agtaaattggcagtgttgccag

SEQ ID NO: 28313 - DNA, 22 bp, Artificial Sequence
  chemically synthesized
gtaaattggcagtgttgccaga

SEQ ID NO: 28314 - DNA, 22 bp, Artificial Sequence
  chemically synthesized
gcagtgttgccagatgacgact

SEQ ID NO: 28315 - DNA, 22 bp, Artificial Sequence
  chemically synthesized
ccagatgacgacttagagtttt

SEQ ID NO: 28316 - DNA, 22 bp, Artificial Sequence
  chemically synthesized
agagttttaaccacctcattgt

SEQ ID NO: 28317 - DNA, 22 bp, Artificial Sequence
  chemically synthesized
gagttttaaccacctcattgtt

SEQ ID NO: 28318 - DNA, 22 bp, Artificial Sequence
  chemically synthesized
taaccacctcattgttatatgt

SEQ ID NO: 28319 - DNA, 22 bp, Artificial Sequence
  chemically synthesized
aaccacctcattgttatatgta

SEQ ID NO: 28320 - DNA, 22 bp, Artificial Sequence
  chemically synthesized
accacctcattgttatatgtac

SEQ ID NO: 28321 - DNA, 22 bp, Artificial Sequence
  chemically synthesized
attgttatatgtaccatggtag

SEQ ID NO: 28322 - DNA, 22 bp, Artificial Sequence
  chemically synthesized
ttatatgtaccatggtagctca

SEQ ID NO: 28323 - DNA, 22 bp, Artificial Sequence
  chemically synthesized
tatgtaccatggtagctcatct

SEQ ID NO: 28324 - DNA, 22 bp, Artificial Sequence
  chemically synthesized
atcttttctttcaggtgaaagt

SEQ ID NO: 28325 - DNA, 22 bp, Artificial Sequence
  chemically synthesized
ttctttcaggtgaaagttgtga

SEQ ID NO: 28326 - DNA, 22 bp, Artificial Sequence
  chemically synthesized
tctttcaggtgaaagttgtgat

SEQ ID NO: 28327 - DNA, 22 bp, Artificial Sequence
  chemically synthesized
ctttcaggtgaaagttgtgata

SEQ ID NO: 28328 - DNA, 22 bp, Artificial Sequence
  chemically synthesized
tttcaggtgaaagttgtgatac

SEQ ID NO: 28329 - DNA, 22 bp, Artificial Sequence
  chemically synthesized
tcaggtgaaagttgtgatactt

SEQ ID NO: 28330 - DNA, 22 bp, Artificial Sequence
  chemically synthesized
caggtgaaagttgtgatacttt

SEQ ID NO: 28331 - DNA, 22 bp, Artificial Sequence
  chemically synthesized
aggtgaaagttgtgatactttg

SEQ ID NO: 28332 - DNA, 22 bp, Artificial Sequence
  chemically synthesized
tgatactttgtcctcacgctaa

SEQ ID NO: 28333 - DNA, 22 bp, Artificial Sequence
  chemically synthesized
tgtcctcacgctaaacatagcc

SEQ ID NO: 28334 - DNA, 22 bp, Artificial Sequence
  chemically synthesized
gtcctcacgctaaacatagccc

SEQ ID NO: 28335 - DNA, 22 bp, Artificial Sequence
  chemically synthesized
tcctcacgctaaacatagcccc

SEQ ID NO: 28336 - DNA, 22 bp, Artificial Sequence
  chemically synthesized
acgctaaacatagcccccatgt

SEQ ID NO: 28337 - DNA, 22 bp, Artificial Sequence
  chemically synthesized
aacatagcccccatgttgttcc

SEQ ID NO: 28338 - DNA, 22 bp, Artificial Sequence
  chemically synthesized
ttccaggaaaatagagatcaat

SEQ ID NO: 28339 - DNA, 22 bp, Artificial Sequence
  chemically synthesized
caggaaaatagagatcaataaa

SEQ ID NO: 28340 - DNA, 22 bp, Artificial Sequence
  chemically synthesized
gtttgaaagtgaaggttaagtt

SEQ ID NO: 28341 - DNA, 22 bp, Artificial Sequence
  chemically synthesized
tttgaaagtgaaggttaagttc

SEQ ID NO: 28342 - DNA, 22 bp, Artificial Sequence
  chemically synthesized
gaaagtgaaggttaagttcaaa

SEQ ID NO: 28343 - DNA, 22 bp, Artificial Sequence
  chemically synthesized
aaagtgaaggttaagttcaaat

SEQ ID NO: 28344 - DNA, 22 bp, Artificial Sequence
  chemically synthesized
agttcaaattcaatgacctacg

SEQ ID NO: 28345 - DNA, 22 bp, Artificial Sequence
  chemically synthesized
aaattcaatgacctacgctgtg

SEQ ID NO: 28346 - DNA, 22 bp, Artificial Sequence
  chemically synthesized
aatgacctacgctgtggtaaaa

SEQ ID NO: 28347 - DNA, 22 bp, Artificial Sequence
  chemically synthesized
cgctgtggtaaaacgatcattc

SEQ ID NO: 28348 - DNA, 22 bp, Artificial Sequence
  chemically synthesized
tggtaaaacgatcattcattaa

SEQ ID NO: 28349 - DNA, 22 bp, Artificial Sequence
  chemically synthesized
attaatgatattaagtattttc

SEQ ID NO: 28350 - DNA, 22 bp, Artificial Sequence
  chemically synthesized
atgatattaagtattttctttt

SEQ ID NO: 28351 - DNA, 22 bp, Artificial Sequence
  chemically synthesized
agtattttcttttttaatgtca

SEQ ID NO: 28352 - DNA, 22 bp, Artificial Sequence
  chemically synthesized
tcttttttaatgtcagaataaa

SEQ ID NO: 28353 - DNA, 22 bp, Artificial Sequence
  chemically synthesized
cttttttaatgtcagaataaaa

SEQ ID NO: 28354 - DNA, 22 bp, Artificial Sequence
  chemically synthesized
ttttttaatgtcagaataaaac

SEQ ID NO: 28355 - DNA, 22 bp, Artificial Sequence
  chemically synthesized
ttttaatgtcagaataaaacca

SEQ ID NO: 28356 - DNA, 22 bp, Artificial Sequence
  chemically synthesized
tttaatgtcagaataaaaccat

SEQ ID NO: 28357 - DNA, 22 bp, Artificial Sequence
  chemically synthesized
ttaatgtcagaataaaaccatt

SEQ ID NO: 28358 - DNA, 22 bp, Artificial Sequence
  chemically synthesized
taatgtcagaataaaaccattt

SEQ ID NO: 28359 - DNA, 22 bp, Artificial Sequence
  chemically synthesized
aatgtcagaataaaaccattta

SEQ ID NO: 28360 - DNA, 22 bp, Artificial Sequence
  chemically synthesized
atgtcagaataaaaccatttat

SEQ ID NO: 28361 - DNA, 22 bp, Artificial Sequence
  chemically synthesized
atttgcagatttaaaaatatat

SEQ ID NO: 28362 - DNA, 22 bp, Artificial Sequence
  chemically synthesized
tttgcagatttaaaaatatata

SEQ ID NO: 28363 - DNA, 22 bp, Artificial Sequence
  chemically synthesized
gcagatttaaaaatatatatgt

SEQ ID NO: 28364 - DNA, 22 bp, Artificial Sequence
  chemically synthesized
cagatttaaaaatatatatgtg

SEQ ID NO: 28365 - DNA, 22 bp, Artificial Sequence
  chemically synthesized
aaaaatatatatgtgtatgtaa

SEQ ID NO: 28366 - DNA, 22 bp, Artificial Sequence
  chemically synthesized
aaaatatatatgtgtatgtaaa

SEQ ID NO: 28367 - DNA, 22 bp, Artificial Sequence
  chemically synthesized
cttggtttatacctcaaatatg

SEQ ID NO: 28368 - DNA, 22 bp, Artificial Sequence
  chemically synthesized
ggtttatacctcaaatatgaaa

SEQ ID NO: 28369 - DNA, 22 bp, Artificial Sequence
  chemically synthesized
gtttatacctcaaatatgaaaa

SEQ ID NO: 28370 - DNA, 22 bp, Artificial Sequence
  chemically synthesized
atacctcaaatatgaaaatagg

SEQ ID NO: 28371 - DNA, 22 bp, Artificial Sequence
  chemically synthesized
tacctcaaatatgaaaatagga

SEQ ID NO: 28372 - DNA, 22 bp, Artificial Sequence
  chemically synthesized
aaatatgaaaataggaatgacc

SEQ ID NO: 28373 - DNA, 22 bp, Artificial Sequence
  chemically synthesized
tctctatgctcttgcattcact

SEQ ID NO: 28374 - DNA, 22 bp, Artificial Sequence
  chemically synthesized
tatgctcttgcattcacttata

SEQ ID NO: 28375 - DNA, 22 bp, Artificial Sequence
  chemically synthesized
tgctcttgcattcacttatatt

SEQ ID NO: 28376 - DNA, 22 bp, Artificial Sequence
  chemically synthesized
ttgcattcacttatattctagc

SEQ ID NO: 28377 - DNA, 22 bp, Artificial Sequence
  chemically synthesized
gcattcacttatattctagctt

SEQ ID NO: 28378 - DNA, 22 bp, Artificial Sequence
  chemically synthesized
cattcacttatattctagcttg

SEQ ID NO: 28379 - DNA, 22 bp, Artificial Sequence
  chemically synthesized
acttatattctagcttgttaag

SEQ ID NO: 28380 - DNA, 22 bp, Artificial Sequence
  chemically synthesized
atattctagcttgttaagagag

SEQ ID NO: 28381 - DNA, 22 bp, Artificial Sequence
  chemically synthesized
tattctagcttgttaagagaga

SEQ ID NO: 28382 - DNA, 22 bp, Artificial Sequence
  chemically synthesized
tagcttgttaagagagaagttt

SEQ ID NO: 28383 - DNA, 22 bp, Artificial Sequence
  chemically synthesized
gcttgttaagagagaagtttgg

SEQ ID NO: 28384 - DNA, 22 bp, Artificial Sequence
  chemically synthesized
gttaagagagaagtttggggca

SEQ ID NO: 28385 - DNA, 22 bp, Artificial Sequence
  chemically synthesized
ttaagagagaagtttggggcaa

SEQ ID NO: 28386 - DNA, 22 bp, Artificial Sequence
  chemically synthesized
agagagaagtttggggcaaaat

SEQ ID NO: 28387 - DNA, 22 bp, Artificial Sequence
  chemically synthesized
ggggcaaaatgtgctttataaa

SEQ ID NO: 28388 - DNA, 22 bp, Artificial Sequence
  chemically synthesized
gggcaaaatgtgctttataaat

SEQ ID NO: 28389 - DNA, 22 bp, Artificial Sequence
  chemically synthesized
tataaatagtaaaaactgaggt

SEQ ID NO: 28390 - DNA, 22 bp, Artificial Sequence
  chemically synthesized
ataaatagtaaaaactgaggta

SEQ ID NO: 28391 - DNA, 22 bp, Artificial Sequence
  chemically synthesized
taaatagtaaaaactgaggtaa

SEQ ID NO: 28392 - DNA, 22 bp, Artificial Sequence
  chemically synthesized
aggtaaactatagcacaaagtg

SEQ ID NO: 28393 - DNA, 22 bp, Artificial Sequence
  chemically synthesized
tagcacaaagtgtgctatataa

SEQ ID NO: 28394 - DNA, 22 bp, Artificial Sequence
  chemically synthesized
tataaacagtaaaaaccgaggt

SEQ ID NO: 28395 - DNA, 22 bp, Artificial Sequence
  chemically synthesized
aaatggtgttggaatataagaa

SEQ ID NO: 28396 - DNA, 22 bp, Artificial Sequence
  chemically synthesized
gaatataagaaatagcagtaaa

SEQ ID NO: 28397 - DNA, 22 bp, Artificial Sequence
  chemically synthesized
ctcacagcaagacagtacaggg

SEQ ID NO: 28398 - DNA, 22 bp, Artificial Sequence
  chemically synthesized
acagcaagacagtacagggaaa

SEQ ID NO: 28399 - DNA, 22 bp, Artificial Sequence
  chemically synthesized
gagggacaaagatttacttaca

SEQ ID NO: 28400 - DNA, 22 bp, Artificial Sequence
  chemically synthesized
acttacaatcaggcctcaacca

SEQ ID NO: 28401 - DNA, 22 bp, Artificial Sequence
  chemically synthesized
cttacaatcaggcctcaaccaa

SEQ ID NO: 28402 - DNA, 22 bp, Artificial Sequence
  chemically synthesized
acaatcaggcctcaaccaatat

SEQ ID NO: 28403 - DNA, 22 bp, Artificial Sequence
  chemically synthesized
caatcaggcctcaaccaatatg

SEQ ID NO: 28404 - DNA, 22 bp, Artificial Sequence
  chemically synthesized
aaccaatatgagatcgactttc

SEQ ID NO: 28405 - DNA, 22 bp, Artificial Sequence
  chemically synthesized
tcttttattgatatatgacgtg

SEQ ID NO: 28406 - DNA, 22 bp, Artificial Sequence
  chemically synthesized
cttttattgatatatgacgtgt

SEQ ID NO: 28407 - DNA, 22 bp, Artificial Sequence
  chemically synthesized
ttttattgatatatgacgtgtt

SEQ ID NO: 28408 - DNA, 22 bp, Artificial Sequence
  chemically synthesized
ttattgatatatgacgtgttta

SEQ ID NO: 28409 - DNA, 22 bp, Artificial Sequence
  chemically synthesized
tattgatatatgacgtgtttat

SEQ ID NO: 28410 - DNA, 22 bp, Artificial Sequence
  chemically synthesized
attgatatatgacgtgtttata

SEQ ID NO: 28411 - DNA, 22 bp, Artificial Sequence
  chemically synthesized
ttgatatatgacgtgtttatat

SEQ ID NO: 28412 - DNA, 22 bp, Artificial Sequence
  chemically synthesized
atatatgacgtgtttatatgta

SEQ ID NO: 28413 - DNA, 22 bp, Artificial Sequence
  chemically synthesized
atatgtatcaggtacatgtgac

SEQ ID NO: 28414 - DNA, 22 bp, Artificial Sequence
  chemically synthesized
tatgtatcaggtacatgtgaca

SEQ ID NO: 28415 - DNA, 22 bp, Artificial Sequence
  chemically synthesized
tgttacatgcatataatgtata

SEQ ID NO: 28416 - DNA, 22 bp, Artificial Sequence
  chemically synthesized
gttacatgcatataatgtataa

SEQ ID NO: 28417 - DNA, 22 bp, Artificial Sequence
  chemically synthesized
ttacatgcatataatgtataat

SEQ ID NO: 28418 - DNA, 22 bp, Artificial Sequence
  chemically synthesized
catgcatataatgtataatgat

SEQ ID NO: 28419 - DNA, 22 bp, Artificial Sequence
  chemically synthesized
ggggtattcatcacctcaagta

SEQ ID NO: 28420 - DNA, 22 bp, Artificial Sequence
  chemically synthesized
gggtattcatcacctcaagtat

SEQ ID NO: 28421 - DNA, 22 bp, Artificial Sequence
  chemically synthesized
atcacctcaagtatttatcgtt

SEQ ID NO: 28422 - DNA, 22 bp, Artificial Sequence
  chemically synthesized
aagtatttatcgtttctatgtg

SEQ ID NO: 28423 - DNA, 22 bp, Artificial Sequence
  chemically synthesized
atcgtttctatgtgttaggaac

SEQ ID NO: 28424 - DNA, 22 bp, Artificial Sequence
  chemically synthesized
tcgtttctatgtgttaggaaca

SEQ ID NO: 28425 - DNA, 22 bp, Artificial Sequence
  chemically synthesized
ctatgtgttaggaacatttcaa

SEQ ID NO: 28426 - DNA, 22 bp, Artificial Sequence
  chemically synthesized
tatgtgttaggaacatttcaag

SEQ ID NO: 28427 - DNA, 22 bp, Artificial Sequence
  chemically synthesized
tgtgttaggaacatttcaagac

SEQ ID NO: 28428 - DNA, 22 bp, Artificial Sequence
  chemically synthesized
ggaacatttcaagacctttctt

SEQ ID NO: 28429 - DNA, 22 bp, Artificial Sequence
  chemically synthesized
caagacctttcttctactattt

SEQ ID NO: 28430 - DNA, 22 bp, Artificial Sequence
  chemically synthesized
aagacctttcttctactatttt

SEQ ID NO: 28431 - DNA, 22 bp, Artificial Sequence
  chemically synthesized
tcttctactattttgaaatata

SEQ ID NO: 28432 - DNA, 22 bp, Artificial Sequence
  chemically synthesized
cttctactattttgaaatatac

SEQ ID NO: 28433 - DNA, 22 bp, Artificial Sequence
  chemically synthesized
ttctactattttgaaatataca

SEQ ID NO: 28434 - DNA, 22 bp, Artificial Sequence
  chemically synthesized
ctactattttgaaatatacaat

SEQ ID NO: 28435 - DNA, 22 bp, Artificial Sequence
  chemically synthesized
tactattttgaaatatacaata

SEQ ID NO: 28436 - DNA, 22 bp, Artificial Sequence
  chemically synthesized
ctattttgaaatatacaatata

SEQ ID NO: 28437 - DNA, 22 bp, Artificial Sequence
  chemically synthesized
ttttgaaatatacaatatattg

SEQ ID NO: 28438 - DNA, 22 bp, Artificial Sequence
  chemically synthesized
tgaaatatacaatatattgttt

SEQ ID NO: 28439 - DNA, 22 bp, Artificial Sequence
  chemically synthesized
gaaatatacaatatattgtttt

SEQ ID NO: 28440 - DNA, 22 bp, Artificial Sequence
  chemically synthesized
aaatatacaatatattgttttt

SEQ ID NO: 28441 - DNA, 22 bp, Artificial Sequence
  chemically synthesized
tttttaactataatcaccctac

SEQ ID NO: 28442 - DNA, 22 bp, Artificial Sequence
  chemically synthesized
ttaactataatcaccctacttt

SEQ ID NO: 28443 - DNA, 22 bp, Artificial Sequence
  chemically synthesized
taactataatcaccctactttg

SEQ ID NO: 28444 - DNA, 22 bp, Artificial Sequence
  chemically synthesized
aactataatcaccctactttgc

SEQ ID NO: 28445 - DNA, 22 bp, Artificial Sequence
  chemically synthesized
actataatcaccctactttgct

SEQ ID NO: 28446 - DNA, 22 bp, Artificial Sequence
  chemically synthesized
taatcaccctactttgctattg

SEQ ID NO: 28447 - DNA, 22 bp, Artificial Sequence
  chemically synthesized
ctttgctattgaacatcagaac

SEQ ID NO: 28448 - DNA, 22 bp, Artificial Sequence
  chemically synthesized
tgctattgaacatcagaacata

SEQ ID NO: 28449 - DNA, 22 bp, Artificial Sequence
  chemically synthesized
gctattgaacatcagaacatat

SEQ ID NO: 28450 - DNA, 22 bp, Artificial Sequence
  chemically synthesized
ctattgaacatcagaacatatt

SEQ ID NO: 28451 - DNA, 22 bp, Artificial Sequence
  chemically synthesized
ttgaacatcagaacatattcct

SEQ ID NO: 28452 - DNA, 22 bp, Artificial Sequence
  chemically synthesized
aacatcagaacatattccttct

SEQ ID NO: 28453 - DNA, 22 bp, Artificial Sequence
  chemically synthesized
cttctatctaactgcctgtttc

SEQ ID NO: 28454 - DNA, 22 bp, Artificial Sequence
  chemically synthesized
ctatctaactgcctgtttccat

SEQ ID NO: 28455 - DNA, 22 bp, Artificial Sequence
  chemically synthesized
tatctaactgcctgtttccatt

SEQ ID NO: 28456 - DNA, 22 bp, Artificial Sequence
  chemically synthesized
tctaactgcctgtttccattaa

SEQ ID NO: 28457 - DNA, 22 bp, Artificial Sequence
  chemically synthesized
actgcctgtttccattaaccaa

SEQ ID NO: 28458 - DNA, 22 bp, Artificial Sequence
  chemically synthesized
cctgtttccattaaccaacttc

SEQ ID NO: 28459 - DNA, 22 bp, Artificial Sequence
  chemically synthesized
tttccattaaccaacttctctt

SEQ ID NO: 28460 - DNA, 22 bp, Artificial Sequence
  chemically synthesized
ccattaaccaacttctcttcgt

SEQ ID NO: 28461 - DNA, 22 bp, Artificial Sequence
  chemically synthesized
cattaaccaacttctcttcgtc

SEQ ID NO: 28462 - DNA, 22 bp, Artificial Sequence
  chemically synthesized
accaacttctcttcgtctccct

SEQ ID NO: 28463 - DNA, 22 bp, Artificial Sequence
  chemically synthesized
ctcttcgtctcccttcctccca

SEQ ID NO: 28464 - DNA, 22 bp, Artificial Sequence
  chemically synthesized
tcttcgtctcccttcctcccat

SEQ ID NO: 28465 - DNA, 22 bp, Artificial Sequence
  chemically synthesized
ttcgtctcccttcctcccataa

SEQ ID NO: 28466 - DNA, 22 bp, Artificial Sequence
  chemically synthesized
cgtctcccttcctcccataacg

SEQ ID NO: 28467 - DNA, 22 bp, Artificial Sequence
  chemically synthesized
gtctcccttcctcccataacgt

SEQ ID NO: 28468 - DNA, 22 bp, Artificial Sequence
  chemically synthesized
ccttcctcccataacgtacaca

SEQ ID NO: 28469 - DNA, 22 bp, Artificial Sequence
  chemically synthesized
cctcccataacgtacacacctt

SEQ ID NO: 28470 - DNA, 22 bp, Artificial Sequence
  chemically synthesized
ctcccataacgtacacaccttt

SEQ ID NO: 28471 - DNA, 22 bp, Artificial Sequence
  chemically synthesized
ccataacgtacacacctttctc

SEQ ID NO: 28472 - DNA, 22 bp, Artificial Sequence
  chemically synthesized
tctctacctctggtttctgtca

SEQ ID NO: 28473 - DNA, 22 bp, Artificial Sequence
  chemically synthesized
ctctacctctggtttctgtcat

SEQ ID NO: 28474 - DNA, 22 bp, Artificial Sequence
  chemically synthesized
tctacctctggtttctgtcatt

SEQ ID NO: 28475 - DNA, 22 bp, Artificial Sequence
  chemically synthesized
tacctctggtttctgtcattct

SEQ ID NO: 28476 - DNA, 22 bp, Artificial Sequence
  chemically synthesized
cctctggtttctgtcattctac

SEQ ID NO: 28477 - DNA, 22 bp, Artificial Sequence
  chemically synthesized
tggtttctgtcattctactctc

SEQ ID NO: 28478 - DNA, 22 bp, Artificial Sequence
  chemically synthesized
gtttctgtcattctactctcta

SEQ ID NO: 28479 - DNA, 22 bp, Artificial Sequence
  chemically synthesized
ctgtcattctactctctaccta

SEQ ID NO: 28480 - DNA, 22 bp, Artificial Sequence
  chemically synthesized
tgtcattctactctctacctac

SEQ ID NO: 28481 - DNA, 22 bp, Artificial Sequence
  chemically synthesized
tcattctactctctacctacat

SEQ ID NO: 28482 - DNA, 22 bp, Artificial Sequence
  chemically synthesized
tactctctacctacatgatatt

SEQ ID NO: 28483 - DNA, 22 bp, Artificial Sequence
  chemically synthesized
ctctctacctacatgatattaa

SEQ ID NO: 28484 - DNA, 22 bp, Artificial Sequence
  chemically synthesized
tctacctacatgatattaactt

SEQ ID NO: 28485 - DNA, 22 bp, Artificial Sequence
  chemically synthesized
tacctacatgatattaactttt

SEQ ID NO: 28486 - DNA, 22 bp, Artificial Sequence
  chemically synthesized
cctacatgatattaactttttt

SEQ ID NO: 28487 - DNA, 22 bp, Artificial Sequence
  chemically synthesized
catgatattaacttttttagct

SEQ ID NO: 28488 - DNA, 22 bp, Artificial Sequence
  chemically synthesized
acttttttagctcccacatatc

SEQ ID NO: 28489 - DNA, 22 bp, Artificial Sequence
  chemically synthesized
ttttagctcccacatatcagtg

SEQ ID NO: 28490 - DNA, 22 bp, Artificial Sequence
  chemically synthesized
tttagctcccacatatcagtga

SEQ ID NO: 28491 - DNA, 22 bp, Artificial Sequence
  chemically synthesized
ttagctcccacatatcagtgag

SEQ ID NO: 28492 - DNA, 22 bp, Artificial Sequence
  chemically synthesized
tagctcccacatatcagtgaga

SEQ ID NO: 28493 - DNA, 22 bp, Artificial Sequence
  chemically synthesized
agctcccacatatcagtgagaa

SEQ ID NO: 28494 - DNA, 22 bp, Artificial Sequence
  chemically synthesized
gctcccacatatcagtgagaac

SEQ ID NO: 28495 - DNA, 22 bp, Artificial Sequence
  chemically synthesized
ccacatatcagtgagaacatgc

SEQ ID NO: 28496 - DNA, 22 bp, Artificial Sequence
  chemically synthesized
gtctttctatgcctggcttatt

SEQ ID NO: 28497 - DNA, 22 bp, Artificial Sequence
  chemically synthesized
tctttctatgcctggcttattt

SEQ ID NO: 28498 - DNA, 22 bp, Artificial Sequence
  chemically synthesized
tctatgcctggcttatttcgtt

SEQ ID NO: 28499 - DNA, 22 bp, Artificial Sequence
  chemically synthesized
ctatgcctggcttatttcgttt

SEQ ID NO: 28500 - DNA, 22 bp, Artificial Sequence
  chemically synthesized
tatgcctggcttatttcgttta

SEQ ID NO: 28501 - DNA, 22 bp, Artificial Sequence
  chemically synthesized
tgcctggcttatttcgtttaac

SEQ ID NO: 28502 - DNA, 22 bp, Artificial Sequence
  chemically synthesized
gcttatttcgtttaacataatg

SEQ ID NO: 28503 - DNA, 22 bp, Artificial Sequence
  chemically synthesized
atttcgtttaacataatgactt

SEQ ID NO: 28504 - DNA, 22 bp, Artificial Sequence
  chemically synthesized
tttcgtttaacataatgacttc

SEQ ID NO: 28505 - DNA, 22 bp, Artificial Sequence
  chemically synthesized
cgtttaacataatgacttccag

SEQ ID NO: 28506 - DNA, 22 bp, Artificial Sequence
  chemically synthesized
gtttaacataatgacttccagt

SEQ ID NO: 28507 - DNA, 22 bp, Artificial Sequence
  chemically synthesized
aacataatgacttccagtttca

SEQ ID NO: 28508 - DNA, 22 bp, Artificial Sequence
  chemically synthesized
acataatgacttccagtttcat

SEQ ID NO: 28509 - DNA, 22 bp, Artificial Sequence
  chemically synthesized
ccagtttcatccatgttgctgc

SEQ ID NO: 28510 - DNA, 22 bp, Artificial Sequence
  chemically synthesized
cagtttcatccatgttgctgca

SEQ ID NO: 28511 - DNA, 22 bp, Artificial Sequence
  chemically synthesized
catccatgttgctgcaaatgaa

SEQ ID NO: 28512 - DNA, 22 bp, Artificial Sequence
  chemically synthesized
atccatgttgctgcaaatgaaa

SEQ ID NO: 28513 - DNA, 22 bp, Artificial Sequence
  chemically synthesized
ctgcaaatgaaatgattttata

SEQ ID NO: 28514 - DNA, 22 bp, Artificial Sequence
  chemically synthesized
caaatgaaatgattttatattt

SEQ ID NO: 28515 - DNA, 22 bp, Artificial Sequence
  chemically synthesized
tatatttgtatggttgaataat

SEQ ID NO: 28516 - DNA, 22 bp, Artificial Sequence
  chemically synthesized
atatttgtatggttgaataata

SEQ ID NO: 28517 - DNA, 22 bp, Artificial Sequence
  chemically synthesized
tatttgtatggttgaataatat

SEQ ID NO: 28518 - DNA, 22 bp, Artificial Sequence
  chemically synthesized
gtatggttgaataatattcaat

SEQ ID NO: 28519 - DNA, 22 bp, Artificial Sequence
  chemically synthesized
tatggttgaataatattcaatt

SEQ ID NO: 28520 - DNA, 22 bp, Artificial Sequence
  chemically synthesized
aataatattcaattgtgtgtat

SEQ ID NO: 28521 - DNA, 22 bp, Artificial Sequence
  chemically synthesized
aattgtgtgtatacaccacatt

SEQ ID NO: 28522 - DNA, 22 bp, Artificial Sequence
  chemically synthesized
tgtgtatacaccacattttctt

SEQ ID NO: 28523 - DNA, 22 bp, Artificial Sequence
  chemically synthesized
tcttcattcatccattgatgga

SEQ ID NO: 28524 - DNA, 22 bp, Artificial Sequence
  chemically synthesized
cttcattcatccattgatggac

SEQ ID NO: 28525 - DNA, 22 bp, Artificial Sequence
  chemically synthesized
ttcattcatccattgatggaca

SEQ ID NO: 28526 - DNA, 22 bp, Artificial Sequence
  chemically synthesized
cattcatccattgatggacact

SEQ ID NO: 28527 - DNA, 22 bp, Artificial Sequence
  chemically synthesized
attcatccattgatggacactt

SEQ ID NO: 28528 - DNA, 22 bp, Artificial Sequence
  chemically synthesized
atccattgatggacacttaggt

SEQ ID NO: 28529 - DNA, 22 bp, Artificial Sequence
  chemically synthesized
atggacacttaggttgattcca

SEQ ID NO: 28530 - DNA, 22 bp, Artificial Sequence
  chemically synthesized
aggttgattccatatctttgct

SEQ ID NO: 28531 - DNA, 22 bp, Artificial Sequence
  chemically synthesized
ggttgattccatatctttgcta

SEQ ID NO: 28532 - DNA, 22 bp, Artificial Sequence
  chemically synthesized
attccatatctttgctaatgtg

SEQ ID NO: 28533 - DNA, 22 bp, Artificial Sequence
  chemically synthesized
catatctttgctaatgtgaatc

SEQ ID NO: 28534 - DNA, 22 bp, Artificial Sequence
  chemically synthesized
tgctaatgtgaatcgtgctgca

SEQ ID NO: 28535 - DNA, 22 bp, Artificial Sequence
  chemically synthesized
gctaatgtgaatcgtgctgcaa

SEQ ID NO: 28536 - DNA, 22 bp, Artificial Sequence
  chemically synthesized
ctaatgtgaatcgtgctgcaat

SEQ ID NO: 28537 - DNA, 22 bp, Artificial Sequence
  chemically synthesized
atgtgaatcgtgctgcaataaa

SEQ ID NO: 28538 - DNA, 22 bp, Artificial Sequence
  chemically synthesized
caataaacagtgtggtaccagt

SEQ ID NO: 28539 - DNA, 22 bp, Artificial Sequence
  chemically synthesized
tttattattctgaattcttttc

SEQ ID NO: 28540 - DNA, 22 bp, Artificial Sequence
  chemically synthesized
attattctgaattcttttcctt

SEQ ID NO: 28541 - DNA, 22 bp, Artificial Sequence
  chemically synthesized
ttattctgaattcttttccttt

SEQ ID NO: 28542 - DNA, 22 bp, Artificial Sequence
  chemically synthesized
ttctgaattcttttcctttgga

SEQ ID NO: 28543 - DNA, 22 bp, Artificial Sequence
  chemically synthesized
tgaattcttttcctttggataa

SEQ ID NO: 28544 - DNA, 22 bp, Artificial Sequence
  chemically synthesized
aattcttttcctttggataaat

SEQ ID NO: 28545 - DNA, 22 bp, Artificial Sequence
  chemically synthesized
ttttcctttggataaataccca

SEQ ID NO: 28546 - DNA, 22 bp, Artificial Sequence
  chemically synthesized
ttcctttggataaatacccagt

SEQ ID NO: 28547 - DNA, 22 bp, Artificial Sequence
  chemically synthesized
tcctttggataaatacccagta

SEQ ID NO: 28548 - DNA, 22 bp, Artificial Sequence
  chemically synthesized
cctttggataaatacccagtaa

SEQ ID NO: 28549 - DNA, 22 bp, Artificial Sequence
  chemically synthesized
ctttggataaatacccagtaat

SEQ ID NO: 28550 - DNA, 22 bp, Artificial Sequence
  chemically synthesized
tggataaatacccagtaataag

SEQ ID NO: 28551 - DNA, 22 bp, Artificial Sequence
  chemically synthesized
ggataaatacccagtaataaga

SEQ ID NO: 28552 - DNA, 22 bp, Artificial Sequence
  chemically synthesized
gataaatacccagtaataagat

SEQ ID NO: 28553 - DNA, 22 bp, Artificial Sequence
  chemically synthesized
ctggatcttatgatagttcaat

SEQ ID NO: 28554 - DNA, 22 bp, Artificial Sequence
  chemically synthesized
gatcttatgatagttcaatttt

SEQ ID NO: 28555 - DNA, 22 bp, Artificial Sequence
  chemically synthesized
atgatagttcaatttttagctt

SEQ ID NO: 28556 - DNA, 22 bp, Artificial Sequence
  chemically synthesized
tgatagttcaatttttagcttt

SEQ ID NO: 28557 - DNA, 22 bp, Artificial Sequence
  chemically synthesized
aatttttagctttttggtaaat

SEQ ID NO: 28558 - DNA, 22 bp, Artificial Sequence
  chemically synthesized
ttagctttttggtaaatctaca

SEQ ID NO: 28559 - DNA, 22 bp, Artificial Sequence
  chemically synthesized
tagctttttggtaaatctacat

SEQ ID NO: 28560 - DNA, 22 bp, Artificial Sequence
  chemically synthesized
agctttttggtaaatctacata

SEQ ID NO: 28561 - DNA, 22 bp, Artificial Sequence
  chemically synthesized
gctttttggtaaatctacatat

SEQ ID NO: 28562 - DNA, 22 bp, Artificial Sequence
  chemically synthesized
tttggtaaatctacatattgtt

SEQ ID NO: 28563 - DNA, 22 bp, Artificial Sequence
  chemically synthesized
ttggtaaatctacatattgttt

SEQ ID NO: 28564 - DNA, 22 bp, Artificial Sequence
  chemically synthesized
tggtaaatctacatattgtttt

SEQ ID NO: 28565 - DNA, 22 bp, Artificial Sequence
  chemically synthesized
ggtaaatctacatattgttttc

SEQ ID NO: 28566 - DNA, 22 bp, Artificial Sequence
  chemically synthesized
gtaaatctacatattgttttcc

SEQ ID NO: 28567 - DNA, 22 bp, Artificial Sequence
  chemically synthesized
catattgttttccatagtggct

SEQ ID NO: 28568 - DNA, 22 bp, Artificial Sequence
  chemically synthesized
ttttccatagtggctatactaa

SEQ ID NO: 28569 - DNA, 22 bp, Artificial Sequence
  chemically synthesized
tccatagtggctatactaattt

SEQ ID NO: 28570 - DNA, 22 bp, Artificial Sequence
  chemically synthesized
ccatagtggctatactaatttg

SEQ ID NO: 28571 - DNA, 22 bp, Artificial Sequence
  chemically synthesized
catagtggctatactaatttgc

SEQ ID NO: 28572 - DNA, 22 bp, Artificial Sequence
  chemically synthesized
tactaatttgcatgcttaccaa

SEQ ID NO: 28573 - DNA, 22 bp, Artificial Sequence
  chemically synthesized
atttgcatgcttaccaatagtg

SEQ ID NO: 28574 - DNA, 22 bp, Artificial Sequence
  chemically synthesized
gcatgcttaccaatagtgccta

SEQ ID NO: 28575 - DNA, 22 bp, Artificial Sequence
  chemically synthesized
catgcttaccaatagtgcctac

SEQ ID NO: 28576 - DNA, 22 bp, Artificial Sequence
  chemically synthesized
accaatagtgcctacgagtgcc

SEQ ID NO: 28577 - DNA, 22 bp, Artificial Sequence
  chemically synthesized
ccaatagtgcctacgagtgcct

SEQ ID NO: 28578 - DNA, 22 bp, Artificial Sequence
  chemically synthesized
cgagtgccttttccttcacatc

SEQ ID NO: 28579 - DNA, 22 bp, Artificial Sequence
  chemically synthesized
ttccttcacatccttgccagca

SEQ ID NO: 28580 - DNA, 22 bp, Artificial Sequence
  chemically synthesized
tccttcacatccttgccagcat

SEQ ID NO: 28581 - DNA, 22 bp, Artificial Sequence
  chemically synthesized
ccttcacatccttgccagcatg

SEQ ID NO: 28582 - DNA, 22 bp, Artificial Sequence
  chemically synthesized
cttcacatccttgccagcatgt

SEQ ID NO: 28583 - DNA, 22 bp, Artificial Sequence
  chemically synthesized
cacatccttgccagcatgtgtt

SEQ ID NO: 28584 - DNA, 22 bp, Artificial Sequence
  chemically synthesized
acatccttgccagcatgtgtta

SEQ ID NO: 28585 - DNA, 22 bp, Artificial Sequence
  chemically synthesized
gccagcatgtgttatttattta

SEQ ID NO: 28586 - DNA, 22 bp, Artificial Sequence
  chemically synthesized
ccagcatgtgttatttatttat

SEQ ID NO: 28587 - DNA, 22 bp, Artificial Sequence
  chemically synthesized
tttatttattaatttatttaaa

SEQ ID NO: 28588 - DNA, 22 bp, Artificial Sequence
  chemically synthesized
atttattaatttatttaaatca

SEQ ID NO: 28589 - DNA, 22 bp, Artificial Sequence
  chemically synthesized
tttattaatttatttaaatcat

SEQ ID NO: 28590 - DNA, 22 bp, Artificial Sequence
  chemically synthesized
attaatttatttaaatcatgat

SEQ ID NO: 28591 - DNA, 22 bp, Artificial Sequence
  chemically synthesized
ttaatttatttaaatcatgatg

SEQ ID NO: 28592 - DNA, 22 bp, Artificial Sequence
  chemically synthesized
atttatttaaatcatgatgatt

SEQ ID NO: 28593 - DNA, 22 bp, Artificial Sequence
  chemically synthesized
atttaaatcatgatgattctaa

SEQ ID NO: 28594 - DNA, 22 bp, Artificial Sequence
  chemically synthesized
tttaaatcatgatgattctaac

SEQ ID NO: 28595 - DNA, 22 bp, Artificial Sequence
  chemically synthesized
aaatcatgatgattctaactgg

SEQ ID NO: 28596 - DNA, 22 bp, Artificial Sequence
  chemically synthesized
aatcatgatgattctaactggc

SEQ ID NO: 28597 - DNA, 22 bp, Artificial Sequence
  chemically synthesized
taactggcataagatgatatct

SEQ ID NO: 28598 - DNA, 22 bp, Artificial Sequence
  chemically synthesized
actggcataagatgatatctca

SEQ ID NO: 28599 - DNA, 22 bp, Artificial Sequence
  chemically synthesized
gcataagatgatatctcattgt

SEQ ID NO: 28600 - DNA, 22 bp, Artificial Sequence
  chemically synthesized
attgtggttttgatttgcattt

SEQ ID NO: 28601 - DNA, 22 bp, Artificial Sequence
  chemically synthesized
tggttttgatttgcatttctct

SEQ ID NO: 28602 - DNA, 22 bp, Artificial Sequence
  chemically synthesized
tgatttgcatttctctgatgat

SEQ ID NO: 28603 - DNA, 22 bp, Artificial Sequence
  chemically synthesized
gatttgcatttctctgatgatt

SEQ ID NO: 28604 - DNA, 22 bp, Artificial Sequence
  chemically synthesized
atttgcatttctctgatgatta

SEQ ID NO: 28605 - DNA, 22 bp, Artificial Sequence
  chemically synthesized
gcatttctctgatgattagtaa

SEQ ID NO: 28606 - DNA, 22 bp, Artificial Sequence
  chemically synthesized
catttctctgatgattagtaat

SEQ ID NO: 28607 - DNA, 22 bp, Artificial Sequence
  chemically synthesized
ctctgatgattagtaatgttga

SEQ ID NO: 28608 - DNA, 22 bp, Artificial Sequence
  chemically synthesized
tctgatgattagtaatgttgag

SEQ ID NO: 28609 - DNA, 22 bp, Artificial Sequence
  chemically synthesized
tgatgattagtaatgttgagca

SEQ ID NO: 28610 - DNA, 22 bp, Artificial Sequence
  chemically synthesized
atgattagtaatgttgagcaat

SEQ ID NO: 28611 - DNA, 22 bp, Artificial Sequence
  chemically synthesized
gtaatgttgagcaatttcccca

SEQ ID NO: 28612 - DNA, 22 bp, Artificial Sequence
  chemically synthesized
agcaatttccccatacccattg

SEQ ID NO: 28613 - DNA, 22 bp, Artificial Sequence
  chemically synthesized
ccccatacccattgtgcatttg

SEQ ID NO: 28614 - DNA, 22 bp, Artificial Sequence
  chemically synthesized
cccatacccattgtgcatttgt

SEQ ID NO: 28615 - DNA, 22 bp, Artificial Sequence
  chemically synthesized
tgcatttgtatgtcttcttttg

SEQ ID NO: 28616 - DNA, 22 bp, Artificial Sequence
  chemically synthesized
gtatgtcttcttttgaaaaata

SEQ ID NO: 28617 - DNA, 22 bp, Artificial Sequence
  chemically synthesized
tatgtcttcttttgaaaaatat

SEQ ID NO: 28618 - DNA, 22 bp, Artificial Sequence
  chemically synthesized
cttttgaaaaatatcctttgcc

SEQ ID NO: 28619 - DNA, 22 bp, Artificial Sequence
  chemically synthesized
ttttgaaaaatatcctttgcca

SEQ ID NO: 28620 - DNA, 22 bp, Artificial Sequence
  chemically synthesized
ttgaaaaatatcctttgccaat

SEQ ID NO: 28621 - DNA, 22 bp, Artificial Sequence
  chemically synthesized
tgaaaaatatcctttgccaatt

SEQ ID NO: 28622 - DNA, 22 bp, Artificial Sequence
  chemically synthesized
gaaaaatatcctttgccaattt

SEQ ID NO: 28623 - DNA, 22 bp, Artificial Sequence
  chemically synthesized
aaaaatatcctttgccaatttt

SEQ ID NO: 28624 - DNA, 22 bp, Artificial Sequence
  chemically synthesized
tgccaattttttaatgagatta

SEQ ID NO: 28625 - DNA, 22 bp, Artificial Sequence
  chemically synthesized
gccaattttttaatgagattat

SEQ ID NO: 28626 - DNA, 22 bp, Artificial Sequence
  chemically synthesized
ccaattttttaatgagattatt

SEQ ID NO: 28627 - DNA, 22 bp, Artificial Sequence
  chemically synthesized
tttaatgagattatttgttttt

SEQ ID NO: 28628 - DNA, 22 bp, Artificial Sequence
  chemically synthesized
ttaatgagattatttgtttttc

SEQ ID NO: 28629 - DNA, 22 bp, Artificial Sequence
  chemically synthesized
taatgagattatttgtttttcc

SEQ ID NO: 28630 - DNA, 22 bp, Artificial Sequence
  chemically synthesized
aatgagattatttgtttttcca

SEQ ID NO: 28631 - DNA, 22 bp, Artificial Sequence
  chemically synthesized
atgagattatttgtttttccac

SEQ ID NO: 28632 - DNA, 22 bp, Artificial Sequence
  chemically synthesized
tttgtttttccactgttgagtt

SEQ ID NO: 28633 - DNA, 22 bp, Artificial Sequence
  chemically synthesized
gtttttccactgttgagttgtt

SEQ ID NO: 28634 - DNA, 22 bp, Artificial Sequence
  chemically synthesized
tttttccactgttgagttgttt

SEQ ID NO: 28635 - DNA, 22 bp, Artificial Sequence
  chemically synthesized
ttccactgttgagttgtttgag

SEQ ID NO: 28636 - DNA, 22 bp, Artificial Sequence
  chemically synthesized
tccactgttgagttgtttgagt

SEQ ID NO: 28637 - DNA, 22 bp, Artificial Sequence
  chemically synthesized
ccactgttgagttgtttgagtt

SEQ ID NO: 28638 - DNA, 22 bp, Artificial Sequence
  chemically synthesized
cactgttgagttgtttgagttt

SEQ ID NO: 28639 - DNA, 22 bp, Artificial Sequence
  chemically synthesized
ttgagttgtttgagtttcttat

SEQ ID NO: 28640 - DNA, 22 bp, Artificial Sequence
  chemically synthesized
agttgtttgagtttcttatata

SEQ ID NO: 28641 - DNA, 22 bp, Artificial Sequence
  chemically synthesized
tttgagtttcttatatattctg

SEQ ID NO: 28642 - DNA, 22 bp, Artificial Sequence
  chemically synthesized
gagtttcttatatattctggag

SEQ ID NO: 28643 - DNA, 22 bp, Artificial Sequence
  chemically synthesized
agtttcttatatattctggaga

SEQ ID NO: 28644 - DNA, 22 bp, Artificial Sequence
  chemically synthesized
cttatatattctggagattaat

SEQ ID NO: 28645 - DNA, 22 bp, Artificial Sequence
  chemically synthesized
ttatatattctggagattaatt

SEQ ID NO: 28646 - DNA, 22 bp, Artificial Sequence
  chemically synthesized
atatattctggagattaattcc

SEQ ID NO: 28647 - DNA, 22 bp, Artificial Sequence
  chemically synthesized
tatattctggagattaattcct

SEQ ID NO: 28648 - DNA, 22 bp, Artificial Sequence
  chemically synthesized
tggagattaattccttgtcaaa

SEQ ID NO: 28649 - DNA, 22 bp, Artificial Sequence
  chemically synthesized
gagattaattccttgtcaaatg

SEQ ID NO: 28650 - DNA, 22 bp, Artificial Sequence
  chemically synthesized
attccttgtcaaatgtatgcaa

SEQ ID NO: 28651 - DNA, 22 bp, Artificial Sequence
  chemically synthesized
cttgtcaaatgtatgcaaatat

SEQ ID NO: 28652 - DNA, 22 bp, Artificial Sequence
  chemically synthesized
gtcaaatgtatgcaaatatttt

SEQ ID NO: 28653 - DNA, 22 bp, Artificial Sequence
  chemically synthesized
tcaaatgtatgcaaatattttc

SEQ ID NO: 28654 - DNA, 22 bp, Artificial Sequence
  chemically synthesized
tctcgcattcaacagcttgtct

SEQ ID NO: 28655 - DNA, 22 bp, Artificial Sequence
  chemically synthesized
ctcgcattcaacagcttgtctc

SEQ ID NO: 28656 - DNA, 22 bp, Artificial Sequence
  chemically synthesized
tcgcattcaacagcttgtctct

SEQ ID NO: 28657 - DNA, 22 bp, Artificial Sequence
  chemically synthesized
gcattcaacagcttgtctcttc

SEQ ID NO: 28658 - DNA, 22 bp, Artificial Sequence
  chemically synthesized
aacagcttgtctcttcactgtg

SEQ ID NO: 28659 - DNA, 22 bp, Artificial Sequence
  chemically synthesized
gtctcttcactgtgttgattgt

SEQ ID NO: 28660 - DNA, 22 bp, Artificial Sequence
  chemically synthesized
tctcttcactgtgttgattgtt

SEQ ID NO: 28661 - DNA, 22 bp, Artificial Sequence
  chemically synthesized
ttcactgtgttgattgtttcct

SEQ ID NO: 28662 - DNA, 22 bp, Artificial Sequence
  chemically synthesized
cactgtgttgattgtttccttt

SEQ ID NO: 28663 - DNA, 22 bp, Artificial Sequence
  chemically synthesized
actgtgttgattgtttccttta

SEQ ID NO: 28664 - DNA, 22 bp, Artificial Sequence
  chemically synthesized
tgttgattgtttcctttactgt

SEQ ID NO: 28665 - DNA, 22 bp, Artificial Sequence
  chemically synthesized
attgtttcctttactgtgcaga

SEQ ID NO: 28666 - DNA, 22 bp, Artificial Sequence
  chemically synthesized
tttcctttactgtgcagatgta

SEQ ID NO: 28667 - DNA, 22 bp, Artificial Sequence
  chemically synthesized
cctttactgtgcagatgtattt

SEQ ID NO: 28668 - DNA, 22 bp, Artificial Sequence
  chemically synthesized
ctttactgtgcagatgtatttt

SEQ ID NO: 28669 - DNA, 22 bp, Artificial Sequence
  chemically synthesized
tactgtgcagatgtattttagc

SEQ ID NO: 28670 - DNA, 22 bp, Artificial Sequence
  chemically synthesized
actgtgcagatgtattttagct

SEQ ID NO: 28671 - DNA, 22 bp, Artificial Sequence
  chemically synthesized
ctgtgcagatgtattttagctt

SEQ ID NO: 28672 - DNA, 22 bp, Artificial Sequence
  chemically synthesized
tgcagatgtattttagcttaat

SEQ ID NO: 28673 - DNA, 22 bp, Artificial Sequence
  chemically synthesized
tagcttaatatagtcccatttg

SEQ ID NO: 28674 - DNA, 22 bp, Artificial Sequence
  chemically synthesized
agcttaatatagtcccatttgt

SEQ ID NO: 28675 - DNA, 22 bp, Artificial Sequence
  chemically synthesized
gcttaatatagtcccatttgtc

SEQ ID NO: 28676 - DNA, 22 bp, Artificial Sequence
  chemically synthesized
aatatagtcccatttgtctatt

SEQ ID NO: 28677 - DNA, 22 bp, Artificial Sequence
  chemically synthesized
atatagtcccatttgtctattt

SEQ ID NO: 28678 - DNA, 22 bp, Artificial Sequence
  chemically synthesized
gtctatttttgcttttgttgcc

SEQ ID NO: 28679 - DNA, 22 bp, Artificial Sequence
  chemically synthesized
tctatttttgcttttgttgcct

SEQ ID NO: 28680 - DNA, 22 bp, Artificial Sequence
  chemically synthesized
tttttgcttttgttgcctgtgc

SEQ ID NO: 28681 - DNA, 22 bp, Artificial Sequence
  chemically synthesized
ttgcttttgttgcctgtgcttt

SEQ ID NO: 28682 - DNA, 22 bp, Artificial Sequence
  chemically synthesized
tgcttttgttgcctgtgctttt

SEQ ID NO: 28683 - DNA, 22 bp, Artificial Sequence
  chemically synthesized
gcttttgttgcctgtgcttttg

SEQ ID NO: 28684 - DNA, 22 bp, Artificial Sequence
  chemically synthesized
cttttgttgcctgtgcttttga

SEQ ID NO: 28685 - DNA, 22 bp, Artificial Sequence
  chemically synthesized
ttgttgcctgtgcttttgaggt

SEQ ID NO: 28686 - DNA, 22 bp, Artificial Sequence
  chemically synthesized
tgttgcctgtgcttttgaggtc

SEQ ID NO: 28687 - DNA, 22 bp, Artificial Sequence
  chemically synthesized
gttgcctgtgcttttgaggtct

SEQ ID NO: 28688 - DNA, 22 bp, Artificial Sequence
  chemically synthesized
ttgcctgtgcttttgaggtctt

SEQ ID NO: 28689 - DNA, 22 bp, Artificial Sequence
  chemically synthesized
cctgtgcttttgaggtcttggc

SEQ ID NO: 28690 - DNA, 22 bp, Artificial Sequence
  chemically synthesized
tgcttttgaggtcttggccata

SEQ ID NO: 28691 - DNA, 22 bp, Artificial Sequence
  chemically synthesized
ttgaggtcttggccataaaatc

SEQ ID NO: 28692 - DNA, 22 bp, Artificial Sequence
  chemically synthesized
tgaggtcttggccataaaatct

SEQ ID NO: 28693 - DNA, 22 bp, Artificial Sequence
  chemically synthesized
gaggtcttggccataaaatctt

SEQ ID NO: 28694 - DNA, 22 bp, Artificial Sequence
  chemically synthesized
aggtcttggccataaaatcttt

SEQ ID NO: 28695 - DNA, 22 bp, Artificial Sequence
  chemically synthesized
ggccataaaatctttgcccaaa

SEQ ID NO: 28696 - DNA, 22 bp, Artificial Sequence
  chemically synthesized
gccataaaatctttgcccaaag

SEQ ID NO: 28697 - DNA, 22 bp, Artificial Sequence
  chemically synthesized
tgcccaaagccatgtcttgaag

SEQ ID NO: 28698 - DNA, 22 bp, Artificial Sequence
  chemically synthesized
gcccaaagccatgtcttgaagt

SEQ ID NO: 28699 - DNA, 22 bp, Artificial Sequence
  chemically synthesized
cccaaagccatgtcttgaagtg

SEQ ID NO: 28700 - DNA, 22 bp, Artificial Sequence
  chemically synthesized
gaagtgtctcccttatgttttc

SEQ ID NO: 28701 - DNA, 22 bp, Artificial Sequence
  chemically synthesized
aagtgtctcccttatgttttct

SEQ ID NO: 28702 - DNA, 22 bp, Artificial Sequence
  chemically synthesized
ccttatgttttcttttagtagt

SEQ ID NO: 28703 - DNA, 22 bp, Artificial Sequence
  chemically synthesized
atgttttcttttagtagtttta

SEQ ID NO: 28704 - DNA, 22 bp, Artificial Sequence
  chemically synthesized
tgttttcttttagtagttttat

SEQ ID NO: 28705 - DNA, 22 bp, Artificial Sequence
  chemically synthesized
tcttttagtagttttatagttt

SEQ ID NO: 28706 - DNA, 22 bp, Artificial Sequence
  chemically synthesized
cttttagtagttttatagtttt

SEQ ID NO: 28707 - DNA, 22 bp, Artificial Sequence
  chemically synthesized
ttttagtagttttatagtttta

SEQ ID NO: 28708 - DNA, 22 bp, Artificial Sequence
  chemically synthesized
ttagtagttttatagttttaag

SEQ ID NO: 28709 - DNA, 22 bp, Artificial Sequence
  chemically synthesized
tagtagttttatagttttaagt

SEQ ID NO: 28710 - DNA, 22 bp, Artificial Sequence
  chemically synthesized
agtagttttatagttttaagtt

SEQ ID NO: 28711 - DNA, 22 bp, Artificial Sequence
  chemically synthesized
gtagttttatagttttaagttt

SEQ ID NO: 28712 - DNA, 22 bp, Artificial Sequence
  chemically synthesized
tatagttttaagttttatattt

SEQ ID NO: 28713 - DNA, 22 bp, Artificial Sequence
  chemically synthesized
atagttttaagttttatattta

SEQ ID NO: 28714 - DNA, 22 bp, Artificial Sequence
  chemically synthesized
tagttttaagttttatatttaa

SEQ ID NO: 28715 - DNA, 22 bp, Artificial Sequence
  chemically synthesized
taagttttatatttaagtcttt

SEQ ID NO: 28716 - DNA, 22 bp, Artificial Sequence
  chemically synthesized
aagttttatatttaagtcttta

SEQ ID NO: 28717 - DNA, 22 bp, Artificial Sequence
  chemically synthesized
agttttatatttaagtctttaa

SEQ ID NO: 28718 - DNA, 22 bp, Artificial Sequence
  chemically synthesized
tatatttaagtctttaatccat

SEQ ID NO: 28719 - DNA, 22 bp, Artificial Sequence
  chemically synthesized
atatttaagtctttaatccatc

SEQ ID NO: 28720 - DNA, 22 bp, Artificial Sequence
  chemically synthesized
tatttaagtctttaatccatct

SEQ ID NO: 28721 - DNA, 22 bp, Artificial Sequence
  chemically synthesized
aagtctttaatccatcttgaga

SEQ ID NO: 28722 - DNA, 22 bp, Artificial Sequence
  chemically synthesized
agtctttaatccatcttgagag

SEQ ID NO: 28723 - DNA, 22 bp, Artificial Sequence
  chemically synthesized
taatccatcttgagagtacgtt

SEQ ID NO: 28724 - DNA, 22 bp, Artificial Sequence
  chemically synthesized
aatccatcttgagagtacgttt

SEQ ID NO: 28725 - DNA, 22 bp, Artificial Sequence
  chemically synthesized
atccatcttgagagtacgtttt

SEQ ID NO: 28726 - DNA, 22 bp, Artificial Sequence
  chemically synthesized
gagagtacgttttatatggcaa

SEQ ID NO: 28727 - DNA, 22 bp, Artificial Sequence
  chemically synthesized
agagtacgttttatatggcaat

SEQ ID NO: 28728 - DNA, 22 bp, Artificial Sequence
  chemically synthesized
tatatggcaataaataggggtt

SEQ ID NO: 28729 - DNA, 22 bp, Artificial Sequence
  chemically synthesized
atatggcaataaataggggttg

SEQ ID NO: 28730 - DNA, 22 bp, Artificial Sequence
  chemically synthesized
tatggcaataaataggggttgt

SEQ ID NO: 28731 - DNA, 22 bp, Artificial Sequence
  chemically synthesized
tattaggccatttttgcatcta

SEQ ID NO: 28732 - DNA, 22 bp, Artificial Sequence
  chemically synthesized
ggccatttttgcatctattgta

SEQ ID NO: 28733 - DNA, 22 bp, Artificial Sequence
  chemically synthesized
ttgcatctattgtacaaggggt

SEQ ID NO: 28734 - DNA, 22 bp, Artificial Sequence
  chemically synthesized
tgcatctattgtacaaggggtt

SEQ ID NO: 28735 - DNA, 22 bp, Artificial Sequence
  chemically synthesized
gcatctattgtacaaggggttg

SEQ ID NO: 28736 - DNA, 22 bp, Artificial Sequence
  chemically synthesized
catctattgtacaaggggttga

SEQ ID NO: 28737 - DNA, 22 bp, Artificial Sequence
  chemically synthesized
ttgtacaaggggttgagttctt

SEQ ID NO: 28738 - DNA, 22 bp, Artificial Sequence
  chemically synthesized
tacaaggggttgagttcttgat

SEQ ID NO: 28739 - DNA, 22 bp, Artificial Sequence
  chemically synthesized
agttcttgatttgattctccat

SEQ ID NO: 28740 - DNA, 22 bp, Artificial Sequence
  chemically synthesized
ttgatttgattctccatttggt

SEQ ID NO: 28741 - DNA, 22 bp, Artificial Sequence
  chemically synthesized
gatttgattctccatttggttg

SEQ ID NO: 28742 - DNA, 22 bp, Artificial Sequence
  chemically synthesized
atttgattctccatttggttgc

SEQ ID NO: 28743 - DNA, 22 bp, Artificial Sequence
  chemically synthesized
gattctccatttggttgctgtt

SEQ ID NO: 28744 - DNA, 22 bp, Artificial Sequence
  chemically synthesized
attctccatttggttgctgttg

SEQ ID NO: 28745 - DNA, 22 bp, Artificial Sequence
  chemically synthesized
tccatttggttgctgttggtgt

SEQ ID NO: 28746 - DNA, 22 bp, Artificial Sequence
  chemically synthesized
catttggttgctgttggtgtat

SEQ ID NO: 28747 - DNA, 22 bp, Artificial Sequence
  chemically synthesized
ggttgctgttggtgtatagaag

SEQ ID NO: 28748 - DNA, 22 bp, Artificial Sequence
  chemically synthesized
gttgctgttggtgtatagaaga

SEQ ID NO: 28749 - DNA, 22 bp, Artificial Sequence
  chemically synthesized
ctgttggtgtatagaagagtta

SEQ ID NO: 28750 - DNA, 22 bp, Artificial Sequence
  chemically synthesized
ttggtgtatagaagagttactg

SEQ ID NO: 28751 - DNA, 22 bp, Artificial Sequence
  chemically synthesized
gtgtatagaagagttactgatt

SEQ ID NO: 28752 - DNA, 22 bp, Artificial Sequence
  chemically synthesized
ctgatttgtgtgcattcatctt

SEQ ID NO: 28753 - DNA, 22 bp, Artificial Sequence
  chemically synthesized
atttgtgtgcattcatcttgta

SEQ ID NO: 28754 - DNA, 22 bp, Artificial Sequence
  chemically synthesized
gtgtgcattcatcttgtatctg

SEQ ID NO: 28755 - DNA, 22 bp, Artificial Sequence
  chemically synthesized
tgtgcattcatcttgtatctgg

SEQ ID NO: 28756 - DNA, 22 bp, Artificial Sequence
  chemically synthesized
atcttgtatctggaaactttgc

SEQ ID NO: 28757 - DNA, 22 bp, Artificial Sequence
  chemically synthesized
gtatctggaaactttgctgaat

SEQ ID NO: 28758 - DNA, 22 bp, Artificial Sequence
  chemically synthesized
tatctggaaactttgctgaatt

SEQ ID NO: 28759 - DNA, 22 bp, Artificial Sequence
  chemically synthesized
gaaactttgctgaattatttta

SEQ ID NO: 28760 - DNA, 22 bp, Artificial Sequence
  chemically synthesized
tgctgaattattttatcagttc

SEQ ID NO: 28761 - DNA, 22 bp, Artificial Sequence
  chemically synthesized
gctgaattattttatcagttct

SEQ ID NO: 28762 - DNA, 22 bp, Artificial Sequence
  chemically synthesized
ctgaattattttatcagttcta

SEQ ID NO: 28763 - DNA, 22 bp, Artificial Sequence
  chemically synthesized
aattattttatcagttctagga

SEQ ID NO: 28764 - DNA, 22 bp, Artificial Sequence
  chemically synthesized
ttttatcagttctaggagcttt

SEQ ID NO: 28765 - DNA, 22 bp, Artificial Sequence
  chemically synthesized
tatcagttctaggagctttctg

SEQ ID NO: 28766 - DNA, 22 bp, Artificial Sequence
  chemically synthesized
atcagttctaggagctttctgg

SEQ ID NO: 28767 - DNA, 22 bp, Artificial Sequence
  chemically synthesized
tcagttctaggagctttctgga

SEQ ID NO: 28768 - DNA, 22 bp, Artificial Sequence
  chemically synthesized
taggagctttctggaggagtct

SEQ ID NO: 28769 - DNA, 22 bp, Artificial Sequence
  chemically synthesized
ggagctttctggaggagtcttt

SEQ ID NO: 28770 - DNA, 22 bp, Artificial Sequence
  chemically synthesized
tctggaggagtctttagggttt

SEQ ID NO: 28771 - DNA, 22 bp, Artificial Sequence
  chemically synthesized
ctggaggagtctttagggtttt

SEQ ID NO: 28772 - DNA, 22 bp, Artificial Sequence
  chemically synthesized
tggaggagtctttagggtttta

SEQ ID NO: 28773 - DNA, 22 bp, Artificial Sequence
  chemically synthesized
gaggagtctttagggttttaaa

SEQ ID NO: 28774 - DNA, 22 bp, Artificial Sequence
  chemically synthesized
tagggttttaaaggtaaatgat

SEQ ID NO: 28775 - DNA, 22 bp, Artificial Sequence
  chemically synthesized
agggttttaaaggtaaatgatc

SEQ ID NO: 28776 - DNA, 22 bp, Artificial Sequence
  chemically synthesized
gggttttaaaggtaaatgatca

SEQ ID NO: 28777 - DNA, 22 bp, Artificial Sequence
  chemically synthesized
taaaggtaaatgatcatatcat

SEQ ID NO: 28778 - DNA, 22 bp, Artificial Sequence
  chemically synthesized
aaaggtaaatgatcatatcatc

SEQ ID NO: 28779 - DNA, 22 bp, Artificial Sequence
  chemically synthesized
aaggtaaatgatcatatcatca

SEQ ID NO: 28780 - DNA, 22 bp, Artificial Sequence
  chemically synthesized
gacttcctctttactgatttga

SEQ ID NO: 28781 - DNA, 22 bp, Artificial Sequence
  chemically synthesized
acttcctctttactgatttgaa

SEQ ID NO: 28782 - DNA, 22 bp, Artificial Sequence
  chemically synthesized
cctctttactgatttgaatgcc

SEQ ID NO: 28783 - DNA, 22 bp, Artificial Sequence
  chemically synthesized
ctctttactgatttgaatgccc

SEQ ID NO: 28784 - DNA, 22 bp, Artificial Sequence
  chemically synthesized
tttactgatttgaatgcccttt

SEQ ID NO: 28785 - DNA, 22 bp, Artificial Sequence
  chemically synthesized
tactgatttgaatgccctttat

SEQ ID NO: 28786 - DNA, 22 bp, Artificial Sequence
  chemically synthesized
actgatttgaatgccctttatt

SEQ ID NO: 28787 - DNA, 22 bp, Artificial Sequence
  chemically synthesized
ctgatttgaatgccctttattt

SEQ ID NO: 28788 - DNA, 22 bp, Artificial Sequence
  chemically synthesized
atttgaatgccctttatttctt

SEQ ID NO: 28789 - DNA, 22 bp, Artificial Sequence
  chemically synthesized
gaatgccctttatttctttgtt

SEQ ID NO: 28790 - DNA, 22 bp, Artificial Sequence
  chemically synthesized
aatgccctttatttctttgttt

SEQ ID NO: 28791 - DNA, 22 bp, Artificial Sequence
  chemically synthesized
tatttctttgttttgtctgatt

SEQ ID NO: 28792 - DNA, 22 bp, Artificial Sequence
  chemically synthesized
atttctttgttttgtctgattg

SEQ ID NO: 28793 - DNA, 22 bp, Artificial Sequence
  chemically synthesized
tttctttgttttgtctgattgc

SEQ ID NO: 28794 - DNA, 22 bp, Artificial Sequence
  chemically synthesized
ctttgttttgtctgattgccct

SEQ ID NO: 28795 - DNA, 22 bp, Artificial Sequence
  chemically synthesized
tttgttttgtctgattgccctg

SEQ ID NO: 28796 - DNA, 22 bp, Artificial Sequence
  chemically synthesized
tgttttgtctgattgccctggc

SEQ ID NO: 28797 - DNA, 22 bp, Artificial Sequence
  chemically synthesized
gttttgtctgattgccctggct

SEQ ID NO: 28798 - DNA, 22 bp, Artificial Sequence
  chemically synthesized
ttttgtctgattgccctggcta

SEQ ID NO: 28799 - DNA, 22 bp, Artificial Sequence
  chemically synthesized
tgtctgattgccctggctagga

SEQ ID NO: 28800 - DNA, 22 bp, Artificial Sequence
  chemically synthesized
gtctgattgccctggctaggac

SEQ ID NO: 28801 - DNA, 22 bp, Artificial Sequence
  chemically synthesized
tctgattgccctggctaggact

SEQ ID NO: 28802 - DNA, 22 bp, Artificial Sequence
  chemically synthesized
attgccctggctaggacttcca

SEQ ID NO: 28803 - DNA, 22 bp, Artificial Sequence
  chemically synthesized
ccctggctaggacttccagtac

SEQ ID NO: 28804 - DNA, 22 bp, Artificial Sequence
  chemically synthesized
gctaggacttccagtactatgt

SEQ ID NO: 28805 - DNA, 22 bp, Artificial Sequence
  chemically synthesized
ggacttccagtactatgttgaa

SEQ ID NO: 28806 - DNA, 22 bp, Artificial Sequence
  chemically synthesized
ccagtactatgttgaagaggag

SEQ ID NO: 28807 - DNA, 22 bp, Artificial Sequence
  chemically synthesized
cagtactatgttgaagaggagt

SEQ ID NO: 28808 - DNA, 22 bp, Artificial Sequence
  chemically synthesized
tgttgaagaggagtggtgagag

SEQ ID NO: 28809 - DNA, 22 bp, Artificial Sequence
  chemically synthesized
aagaggagtggtgagagtgggc

SEQ ID NO: 28810 - DNA, 22 bp, Artificial Sequence
  chemically synthesized
gtcttgttccagttctcagagg

SEQ ID NO: 28811 - DNA, 22 bp, Artificial Sequence
  chemically synthesized
tcttgttccagttctcagaggg

SEQ ID NO: 28812 - DNA, 22 bp, Artificial Sequence
  chemically synthesized
gttccagttctcagagggaatg

SEQ ID NO: 28813 - DNA, 22 bp, Artificial Sequence
  chemically synthesized
ttccagttctcagagggaatgc

SEQ ID NO: 28814 - DNA, 22 bp, Artificial Sequence
  chemically synthesized
cagttctcagagggaatgcttt

SEQ ID NO: 28815 - DNA, 22 bp, Artificial Sequence
  chemically synthesized
tcagagggaatgctttcaactt

SEQ ID NO: 28816 - DNA, 22 bp, Artificial Sequence
  chemically synthesized
agagggaatgctttcaactttt

SEQ ID NO: 28817 - DNA, 22 bp, Artificial Sequence
  chemically synthesized
tcaacttttccccattcaatat

SEQ ID NO: 28818 - DNA, 22 bp, Artificial Sequence
  chemically synthesized
caacttttccccattcaatatt

SEQ ID NO: 28819 - DNA, 22 bp, Artificial Sequence
  chemically synthesized
aacttttccccattcaatatta

SEQ ID NO: 28820 - DNA, 22 bp, Artificial Sequence
  chemically synthesized
ttccccattcaatattatgttg

SEQ ID NO: 28821 - DNA, 22 bp, Artificial Sequence
  chemically synthesized
tccccattcaatattatgttgg

SEQ ID NO: 28822 - DNA, 22 bp, Artificial Sequence
  chemically synthesized
ccccattcaatattatgttggc

SEQ ID NO: 28823 - DNA, 22 bp, Artificial Sequence
  chemically synthesized
cccattcaatattatgttggct

SEQ ID NO: 28824 - DNA, 22 bp, Artificial Sequence
  chemically synthesized
aatattatgttggctgtgggtt

SEQ ID NO: 28825 - DNA, 22 bp, Artificial Sequence
  chemically synthesized
tgttggctgtgggtttgtcaca

SEQ ID NO: 28826 - DNA, 22 bp, Artificial Sequence
  chemically synthesized
gctgtgggtttgtcacagatgg

SEQ ID NO: 28827 - DNA, 22 bp, Artificial Sequence
  chemically synthesized
tgggtttgtcacagatggcttt

SEQ ID NO: 28828 - DNA, 22 bp, Artificial Sequence
  chemically synthesized
gtcacagatggcttttattaca

SEQ ID NO: 28829 - DNA, 22 bp, Artificial Sequence
  chemically synthesized
tcacagatggcttttattacac

SEQ ID NO: 28830 - DNA, 22 bp, Artificial Sequence
  chemically synthesized
ttattacactgaggtatgtctc

SEQ ID NO: 28831 - DNA, 22 bp, Artificial Sequence
  chemically synthesized
tattacactgaggtatgtctct

SEQ ID NO: 28832 - DNA, 22 bp, Artificial Sequence
  chemically synthesized
attacactgaggtatgtctctt

SEQ ID NO: 28833 - DNA, 22 bp, Artificial Sequence
  chemically synthesized
ttacactgaggtatgtctcttg

SEQ ID NO: 28834 - DNA, 22 bp, Artificial Sequence
  chemically synthesized
cactgaggtatgtctcttgtat

SEQ ID NO: 28835 - DNA, 22 bp, Artificial Sequence
  chemically synthesized
aggtatgtctcttgtatgctga

SEQ ID NO: 28836 - DNA, 22 bp, Artificial Sequence
  chemically synthesized
ttgtatgctgattttgctgagc

SEQ ID NO: 28837 - DNA, 22 bp, Artificial Sequence
  chemically synthesized
gtatgctgattttgctgagcat

SEQ ID NO: 28838 - DNA, 22 bp, Artificial Sequence
  chemically synthesized
tatgctgattttgctgagcatt

SEQ ID NO: 28839 - DNA, 22 bp, Artificial Sequence
  chemically synthesized
attttgctgagcattttaatca

SEQ ID NO: 28840 - DNA, 22 bp, Artificial Sequence
  chemically synthesized
tgctgagcattttaatcataaa

SEQ ID NO: 28841 - DNA, 22 bp, Artificial Sequence
  chemically synthesized
gctgagcattttaatcataaat

SEQ ID NO: 28842 - DNA, 22 bp, Artificial Sequence
  chemically synthesized
ctgagcattttaatcataaatg

SEQ ID NO: 28843 - DNA, 22 bp, Artificial Sequence
  chemically synthesized
agcattttaatcataaatgtat

SEQ ID NO: 28844 - DNA, 22 bp, Artificial Sequence
  chemically synthesized
taatcataaatgtatgctggat

SEQ ID NO: 28845 - DNA, 22 bp, Artificial Sequence
  chemically synthesized
aatcataaatgtatgctggatt

SEQ ID NO: 28846 - DNA, 22 bp, Artificial Sequence
  chemically synthesized
atcataaatgtatgctggattt

SEQ ID NO: 28847 - DNA, 22 bp, Artificial Sequence
  chemically synthesized
gattttgttgaatgctttttct

SEQ ID NO: 28848 - DNA, 22 bp, Artificial Sequence
  chemically synthesized
tgttgaatgctttttctgcatc

SEQ ID NO: 28849 - DNA, 22 bp, Artificial Sequence
  chemically synthesized
gttgaatgctttttctgcatct

SEQ ID NO: 28850 - DNA, 22 bp, Artificial Sequence
  chemically synthesized
ttgaatgctttttctgcatcta

SEQ ID NO: 28851 - DNA, 22 bp, Artificial Sequence
  chemically synthesized
aatgctttttctgcatctattg

SEQ ID NO: 28852 - DNA, 22 bp, Artificial Sequence
  chemically synthesized
tttctgcatctattgagatgat

SEQ ID NO: 28853 - DNA, 22 bp, Artificial Sequence
  chemically synthesized
ttctgcatctattgagatgatc

SEQ ID NO: 28854 - DNA, 22 bp, Artificial Sequence
  chemically synthesized
tctgcatctattgagatgatca

SEQ ID NO: 28855 - DNA, 22 bp, Artificial Sequence
  chemically synthesized
ctgcatctattgagatgatcat

SEQ ID NO: 28856 - DNA, 22 bp, Artificial Sequence
  chemically synthesized
tgcatctattgagatgatcatg

SEQ ID NO: 28857 - DNA, 22 bp, Artificial Sequence
  chemically synthesized
catctattgagatgatcatgta

SEQ ID NO: 28858 - DNA, 22 bp, Artificial Sequence
  chemically synthesized
ttgagatgatcatgtaattttt

SEQ ID NO: 28859 - DNA, 22 bp, Artificial Sequence
  chemically synthesized
agatgatcatgtaatttttgtt

SEQ ID NO: 28860 - DNA, 22 bp, Artificial Sequence
  chemically synthesized
ttgtttttaaatctgtttatgt

SEQ ID NO: 28861 - DNA, 22 bp, Artificial Sequence
  chemically synthesized
tgtttttaaatctgtttatgtg

SEQ ID NO: 28862 - DNA, 22 bp, Artificial Sequence
  chemically synthesized
gtttttaaatctgtttatgtgg

SEQ ID NO: 28863 - DNA, 22 bp, Artificial Sequence
  chemically synthesized
tttttaaatctgtttatgtggt

SEQ ID NO: 28864 - DNA, 22 bp, Artificial Sequence
  chemically synthesized
ttaaatctgtttatgtggtgta

SEQ ID NO: 28865 - DNA, 22 bp, Artificial Sequence
  chemically synthesized
taaatctgtttatgtggtgtat

SEQ ID NO: 28866 - DNA, 22 bp, Artificial Sequence
  chemically synthesized
aaatctgtttatgtggtgtatc

SEQ ID NO: 28867 - DNA, 22 bp, Artificial Sequence
  chemically synthesized
aatctgtttatgtggtgtatca

SEQ ID NO: 28868 - DNA, 22 bp, Artificial Sequence
  chemically synthesized
tttatgtggtgtatcacactta

SEQ ID NO: 28869 - DNA, 22 bp, Artificial Sequence
  chemically synthesized
atgtggtgtatcacacttattg

SEQ ID NO: 28870 - DNA, 22 bp, Artificial Sequence
  chemically synthesized
tgtggtgtatcacacttattga

SEQ ID NO: 28871 - DNA, 22 bp, Artificial Sequence
  chemically synthesized
attgacttgcagatgtcaaacc

SEQ ID NO: 28872 - DNA, 22 bp, Artificial Sequence
  chemically synthesized
ttgacttgcagatgtcaaacca

SEQ ID NO: 28873 - DNA, 22 bp, Artificial Sequence
  chemically synthesized
acttgcagatgtcaaaccaacc

SEQ ID NO: 28874 - DNA, 22 bp, Artificial Sequence
  chemically synthesized
gcagatgtcaaaccaaccctgc

SEQ ID NO: 28875 - DNA, 22 bp, Artificial Sequence
  chemically synthesized
cagatgtcaaaccaaccctgca

SEQ ID NO: 28876 - DNA, 22 bp, Artificial Sequence
  chemically synthesized
catccctggcatggaacctgct

SEQ ID NO: 28877 - DNA, 22 bp, Artificial Sequence
  chemically synthesized
gcatggaacctgcttgatcatg

SEQ ID NO: 28878 - DNA, 22 bp, Artificial Sequence
  chemically synthesized
cttgatcatggtggattatctt

SEQ ID NO: 28879 - DNA, 22 bp, Artificial Sequence
  chemically synthesized
gatcatggtggattatcttttt

SEQ ID NO: 28880 - DNA, 22 bp, Artificial Sequence
  chemically synthesized
atcatggtggattatctttttg

SEQ ID NO: 28881 - DNA, 22 bp, Artificial Sequence
  chemically synthesized
tctttttgttatgttgttgaat

SEQ ID NO: 28882 - DNA, 22 bp, Artificial Sequence
  chemically synthesized
tttgttatgttgttgaatttgg

SEQ ID NO: 28883 - DNA, 22 bp, Artificial Sequence
  chemically synthesized
ttgttatgttgttgaatttggt

SEQ ID NO: 28884 - DNA, 22 bp, Artificial Sequence
  chemically synthesized
tgttatgttgttgaatttggtt

SEQ ID NO: 28885 - DNA, 22 bp, Artificial Sequence
  chemically synthesized
gttatgttgttgaatttggtta

SEQ ID NO: 28886 - DNA, 22 bp, Artificial Sequence
  chemically synthesized
ttatgttgttgaatttggttat

SEQ ID NO: 28887 - DNA, 22 bp, Artificial Sequence
  chemically synthesized
tgttgttgaatttggttatcta

SEQ ID NO: 28888 - DNA, 22 bp, Artificial Sequence
  chemically synthesized
ttgaatttggttatctagtatt

SEQ ID NO: 28889 - DNA, 22 bp, Artificial Sequence
  chemically synthesized
aatttggttatctagtattttg

SEQ ID NO: 28890 - DNA, 22 bp, Artificial Sequence
  chemically synthesized
ggttatctagtattttgttaag

SEQ ID NO: 28891 - DNA, 22 bp, Artificial Sequence
  chemically synthesized
gttatctagtattttgttaagg

SEQ ID NO: 28892 - DNA, 22 bp, Artificial Sequence
  chemically synthesized
tctagtattttgttaaggattt

SEQ ID NO: 28893 - DNA, 22 bp, Artificial Sequence
  chemically synthesized
gtattttgttaaggattttagc

SEQ ID NO: 28894 - DNA, 22 bp, Artificial Sequence
  chemically synthesized
tgttaaggattttagcatctat

SEQ ID NO: 28895 - DNA, 22 bp, Artificial Sequence
  chemically synthesized
gttaaggattttagcatctatg

SEQ ID NO: 28896 - DNA, 22 bp, Artificial Sequence
  chemically synthesized
ttaaggattttagcatctatgt

SEQ ID NO: 28897 - DNA, 22 bp, Artificial Sequence
  chemically synthesized
aggattttagcatctatgttca

SEQ ID NO: 28898 - DNA, 22 bp, Artificial Sequence
  chemically synthesized
tagcatctatgttcatcaaggc

SEQ ID NO: 28899 - DNA, 22 bp, Artificial Sequence
  chemically synthesized
agcatctatgttcatcaaggct

SEQ ID NO: 28900 - DNA, 22 bp, Artificial Sequence
  chemically synthesized
gcatctatgttcatcaaggcta

SEQ ID NO: 28901 - DNA, 22 bp, Artificial Sequence
  chemically synthesized
tgttcatcaaggctatcagtct

SEQ ID NO: 28902 - DNA, 22 bp, Artificial Sequence
  chemically synthesized
atcaaggctatcagtctgtagt

SEQ ID NO: 28903 - DNA, 22 bp, Artificial Sequence
  chemically synthesized
tcagtctgtagttttctttttt

SEQ ID NO: 28904 - DNA, 22 bp, Artificial Sequence
  chemically synthesized
tagttttcttttttggttatgt

SEQ ID NO: 28905 - DNA, 22 bp, Artificial Sequence
  chemically synthesized
tcttttttggttatgtccttcc

SEQ ID NO: 28906 - DNA, 22 bp, Artificial Sequence
  chemically synthesized
cttttttggttatgtccttccc

SEQ ID NO: 28907 - DNA, 22 bp, Artificial Sequence
  chemically synthesized
ttttttggttatgtccttccct

SEQ ID NO: 28908 - DNA, 22 bp, Artificial Sequence
  chemically synthesized
ttttggttatgtccttccctgg

SEQ ID NO: 28909 - DNA, 22 bp, Artificial Sequence
  chemically synthesized
tttggttatgtccttccctggt

SEQ ID NO: 28910 - DNA, 22 bp, Artificial Sequence
  chemically synthesized
ttggttatgtccttccctggtt

SEQ ID NO: 28911 - DNA, 22 bp, Artificial Sequence
  chemically synthesized
tggttatgtccttccctggttt

SEQ ID NO: 28912 - DNA, 22 bp, Artificial Sequence
  chemically synthesized
ggttatgtccttccctggtttt

SEQ ID NO: 28913 - DNA, 22 bp, Artificial Sequence
  chemically synthesized
gttatgtccttccctggttttg

SEQ ID NO: 28914 - DNA, 22 bp, Artificial Sequence
  chemically synthesized
tgtccttccctggttttggtgt

SEQ ID NO: 28915 - DNA, 22 bp, Artificial Sequence
  chemically synthesized
ccctggttttggtgtgatgctg

SEQ ID NO: 28916 - DNA, 22 bp, Artificial Sequence
  chemically synthesized
cctggttttggtgtgatgctgg

SEQ ID NO: 28917 - DNA, 22 bp, Artificial Sequence
  chemically synthesized
gttttggtgtgatgctggcttc

SEQ ID NO: 28918 - DNA, 22 bp, Artificial Sequence
  chemically synthesized
tggtgtgatgctggcttcatag

SEQ ID NO: 28919 - DNA, 22 bp, Artificial Sequence
  chemically synthesized
ggtgtgatgctggcttcataga

SEQ ID NO: 28920 - DNA, 22 bp, Artificial Sequence
  chemically synthesized
gtgtgatgctggcttcatagaa

SEQ ID NO: 28921 - DNA, 22 bp, Artificial Sequence
  chemically synthesized
gcttcatagaatgaattagggc

SEQ ID NO: 28922 - DNA, 22 bp, Artificial Sequence
  chemically synthesized
catagaatgaattagggcaggt

SEQ ID NO: 28923 - DNA, 22 bp, Artificial Sequence
  chemically synthesized
atagaatgaattagggcaggtt

SEQ ID NO: 28924 - DNA, 22 bp, Artificial Sequence
  chemically synthesized
gggcaggttccttctttatctg

SEQ ID NO: 28925 - DNA, 22 bp, Artificial Sequence
  chemically synthesized
cttctttatctgtcttgtagaa

SEQ ID NO: 28926 - DNA, 22 bp, Artificial Sequence
  chemically synthesized
ctttatctgtcttgtagaatag

SEQ ID NO: 28927 - DNA, 22 bp, Artificial Sequence
  chemically synthesized
tttatctgtcttgtagaatagt

SEQ ID NO: 28928 - DNA, 22 bp, Artificial Sequence
  chemically synthesized
tatctgtcttgtagaatagtgt

SEQ ID NO: 28929 - DNA, 22 bp, Artificial Sequence
  chemically synthesized
atctgtcttgtagaatagtgtc

SEQ ID NO: 28930 - DNA, 22 bp, Artificial Sequence
  chemically synthesized
tctgtcttgtagaatagtgtca

SEQ ID NO: 28931 - DNA, 22 bp, Artificial Sequence
  chemically synthesized
tcttgtagaatagtgtcaaaaa

SEQ ID NO: 28932 - DNA, 22 bp, Artificial Sequence
  chemically synthesized
gtagaatagtgtcaaaaagatg

SEQ ID NO: 28933 - DNA, 22 bp, Artificial Sequence
  chemically synthesized
tagaatagtgtcaaaaagatgg

SEQ ID NO: 28934 - DNA, 22 bp, Artificial Sequence
  chemically synthesized
ctctttgaatgtctagtagaat

SEQ ID NO: 28935 - DNA, 22 bp, Artificial Sequence
  chemically synthesized
tttgaatgtctagtagaattct

SEQ ID NO: 28936 - DNA, 22 bp, Artificial Sequence
  chemically synthesized
tgaatgtctagtagaattctgt

SEQ ID NO: 28937 - DNA, 22 bp, Artificial Sequence
  chemically synthesized
gaatgtctagtagaattctgtt

SEQ ID NO: 28938 - DNA, 22 bp, Artificial Sequence
  chemically synthesized
aatgtctagtagaattctgttg

SEQ ID NO: 28939 - DNA, 22 bp, Artificial Sequence
  chemically synthesized
gtagaattctgttgtgaatcca

SEQ ID NO: 28940 - DNA, 22 bp, Artificial Sequence
  chemically synthesized
tgttgtgaatccatctggtcct

SEQ ID NO: 28941 - DNA, 22 bp, Artificial Sequence
  chemically synthesized
ttgtgaatccatctggtcctga

SEQ ID NO: 28942 - DNA, 22 bp, Artificial Sequence
  chemically synthesized
tgaatccatctggtcctgaact

SEQ ID NO: 28943 - DNA, 22 bp, Artificial Sequence
  chemically synthesized
gtcctgaacttttttttggttg

SEQ ID NO: 28944 - DNA, 22 bp, Artificial Sequence
  chemically synthesized
aacttttttttggttggtaatt

SEQ ID NO: 28945 - DNA, 22 bp, Artificial Sequence
  chemically synthesized
ttttttggttggtaatttttta

SEQ ID NO: 28946 - DNA, 22 bp, Artificial Sequence
  chemically synthesized
tttttggttggtaattttttaa

SEQ ID NO: 28947 - DNA, 22 bp, Artificial Sequence
  chemically synthesized
ttttggttggtaattttttaat

SEQ ID NO: 28948 - DNA, 22 bp, Artificial Sequence
  chemically synthesized
tttggttggtaattttttaatt

SEQ ID NO: 28949 - DNA, 22 bp, Artificial Sequence
  chemically synthesized
ttggttggtaattttttaatta

SEQ ID NO: 28950 - DNA, 22 bp, Artificial Sequence
  chemically synthesized
tggttggtaattttttaattac

SEQ ID NO: 28951 - DNA, 22 bp, Artificial Sequence
  chemically synthesized
ggttggtaattttttaattacc

SEQ ID NO: 28952 - DNA, 22 bp, Artificial Sequence
  chemically synthesized
gttggtaattttttaattacca

SEQ ID NO: 28953 - DNA, 22 bp, Artificial Sequence
  chemically synthesized
gtaattttttaattaccaatta

SEQ ID NO: 28954 - DNA, 22 bp, Artificial Sequence
  chemically synthesized
tttaattaccaattaaatctca

SEQ ID NO: 28955 - DNA, 22 bp, Artificial Sequence
  chemically synthesized
ttaattaccaattaaatctcac

SEQ ID NO: 28956 - DNA, 22 bp, Artificial Sequence
  chemically synthesized
taattaccaattaaatctcact

SEQ ID NO: 28957 - DNA, 22 bp, Artificial Sequence
  chemically synthesized
aattaccaattaaatctcactg

SEQ ID NO: 28958 - DNA, 22 bp, Artificial Sequence
  chemically synthesized
attaccaattaaatctcactgc

SEQ ID NO: 28959 - DNA, 22 bp, Artificial Sequence
  chemically synthesized
ccaattaaatctcactgcttgt

SEQ ID NO: 28960 - DNA, 22 bp, Artificial Sequence
  chemically synthesized
aatctcactgcttgttattggt

SEQ ID NO: 28961 - DNA, 22 bp, Artificial Sequence
  chemically synthesized
actgcttgttattggtctgtta

SEQ ID NO: 28962 - DNA, 22 bp, Artificial Sequence
  chemically synthesized
cttgttattggtctgttagtaa

SEQ ID NO: 28963 - DNA, 22 bp, Artificial Sequence
  chemically synthesized
gttattggtctgttagtaaatt

SEQ ID NO: 28964 - DNA, 22 bp, Artificial Sequence
  chemically synthesized
ttattggtctgttagtaaattt

SEQ ID NO: 28965 - DNA, 22 bp, Artificial Sequence
  chemically synthesized
ttggtctgttagtaaatttatt

SEQ ID NO: 28966 - DNA, 22 bp, Artificial Sequence
  chemically synthesized
gtctgttagtaaatttattgag

SEQ ID NO: 28967 - DNA, 22 bp, Artificial Sequence
  chemically synthesized
ttagtaaatttattgaggctca

SEQ ID NO: 28968 - DNA, 22 bp, Artificial Sequence
  chemically synthesized
gtaaatttattgaggctcattt

SEQ ID NO: 28969 - DNA, 22 bp, Artificial Sequence
  chemically synthesized
attgaggctcatttcatggcct

SEQ ID NO: 28970 - DNA, 22 bp, Artificial Sequence
  chemically synthesized
ttgaggctcatttcatggccta

SEQ ID NO: 28971 - DNA, 22 bp, Artificial Sequence
  chemically synthesized
aggctcatttcatggcctatca

SEQ ID NO: 28972 - DNA, 22 bp, Artificial Sequence
  chemically synthesized
atttcatggcctatcatatggt

SEQ ID NO: 28973 - DNA, 22 bp, Artificial Sequence
  chemically synthesized
catggcctatcatatggtctac

SEQ ID NO: 28974 - DNA, 22 bp, Artificial Sequence
  chemically synthesized
atggcctatcatatggtctacc

SEQ ID NO: 28975 - DNA, 22 bp, Artificial Sequence
  chemically synthesized
tcatatggtctaccttggagaa

SEQ ID NO: 28976 - DNA, 22 bp, Artificial Sequence
  chemically synthesized
ccttggagaaatttccacgcgc

SEQ ID NO: 28977 - DNA, 22 bp, Artificial Sequence
  chemically synthesized
ggagaaatttccacgcgctgtt

SEQ ID NO: 28978 - DNA, 22 bp, Artificial Sequence
  chemically synthesized
gagaaatttccacgcgctgttg

SEQ ID NO: 28979 - DNA, 22 bp, Artificial Sequence
  chemically synthesized
ccacgcgctgttgaatagaatg

SEQ ID NO: 28980 - DNA, 22 bp, Artificial Sequence
  chemically synthesized
cacgcgctgttgaatagaatgt

SEQ ID NO: 28981 - DNA, 22 bp, Artificial Sequence
  chemically synthesized
ttgaatagaatgtgtgttctgt

SEQ ID NO: 28982 - DNA, 22 bp, Artificial Sequence
  chemically synthesized
aatagaatgtgtgttctgtggt

SEQ ID NO: 28983 - DNA, 22 bp, Artificial Sequence
  chemically synthesized
tgtggttattggatgaaatgtt

SEQ ID NO: 28984 - DNA, 22 bp, Artificial Sequence
  chemically synthesized
tggttattggatgaaatgttct

SEQ ID NO: 28985 - DNA, 22 bp, Artificial Sequence
  chemically synthesized
ttggatgaaatgttctgtatat

SEQ ID NO: 28986 - DNA, 22 bp, Artificial Sequence
  chemically synthesized
gatgaaatgttctgtatataac

SEQ ID NO: 28987 - DNA, 22 bp, Artificial Sequence
  chemically synthesized
tgtatataactgttaagtccat

SEQ ID NO: 28988 - DNA, 22 bp, Artificial Sequence
  chemically synthesized
tatataactgttaagtccattt

SEQ ID NO: 28989 - DNA, 22 bp, Artificial Sequence
  chemically synthesized
ttaagtccatttgttctaaggt

SEQ ID NO: 28990 - DNA, 22 bp, Artificial Sequence
  chemically synthesized
agtccatttgttctaaggtata

SEQ ID NO: 28991 - DNA, 22 bp, Artificial Sequence
  chemically synthesized
gttctaaggtataatttaaatc

SEQ ID NO: 28992 - DNA, 22 bp, Artificial Sequence
  chemically synthesized
ttctaaggtataatttaaatcc

SEQ ID NO: 28993 - DNA, 22 bp, Artificial Sequence
  chemically synthesized
taaggtataatttaaatccatt

SEQ ID NO: 28994 - DNA, 22 bp, Artificial Sequence
  chemically synthesized
aggtataatttaaatccattat

SEQ ID NO: 28995 - DNA, 22 bp, Artificial Sequence
  chemically synthesized
aaatccattatttttttgttga

SEQ ID NO: 28996 - DNA, 22 bp, Artificial Sequence
  chemically synthesized
aatccattatttttttgttgac

SEQ ID NO: 28997 - DNA, 22 bp, Artificial Sequence
  chemically synthesized
tttttttgttgactttctgtct

SEQ ID NO: 28998 - DNA, 22 bp, Artificial Sequence
  chemically synthesized
ttttgttgactttctgtcttga

SEQ ID NO: 28999 - DNA, 22 bp, Artificial Sequence
  chemically synthesized
tttgttgactttctgtcttgat

SEQ ID NO: 29000 - DNA, 22 bp, Artificial Sequence
  chemically synthesized
ttgttgactttctgtcttgatg

SEQ ID NO: 29001 - DNA, 22 bp, Artificial Sequence
  chemically synthesized
tgttgactttctgtcttgatga

SEQ ID NO: 29002 - DNA, 22 bp, Artificial Sequence
  chemically synthesized
gttgactttctgtcttgatgaa

SEQ ID NO: 29003 - DNA, 22 bp, Artificial Sequence
  chemically synthesized
ttgactttctgtcttgatgaac

SEQ ID NO: 29004 - DNA, 22 bp, Artificial Sequence
  chemically synthesized
actttctgtcttgatgaactgt

SEQ ID NO: 29005 - DNA, 22 bp, Artificial Sequence
  chemically synthesized
tctgtcttgatgaactgtctag

SEQ ID NO: 29006 - DNA, 22 bp, Artificial Sequence
  chemically synthesized
ctgtcttgatgaactgtctagt

SEQ ID NO: 29007 - DNA, 22 bp, Artificial Sequence
  chemically synthesized
tgtcttgatgaactgtctagtg

SEQ ID NO: 29008 - DNA, 22 bp, Artificial Sequence
  chemically synthesized
tcttgatgaactgtctagtgct

SEQ ID NO: 29009 - DNA, 22 bp, Artificial Sequence
  chemically synthesized
gatgaactgtctagtgctgtca

SEQ ID NO: 29010 - DNA, 22 bp, Artificial Sequence
  chemically synthesized
atgaactgtctagtgctgtcaa

SEQ ID NO: 29011 - DNA, 22 bp, Artificial Sequence
  chemically synthesized
tctagtgctgtcaatgaagtat

SEQ ID NO: 29012 - DNA, 22 bp, Artificial Sequence
  chemically synthesized
gtgctgtcaatgaagtattgaa

SEQ ID NO: 29013 - DNA, 22 bp, Artificial Sequence
  chemically synthesized
tcaatgaagtattgaagtcccc

SEQ ID NO: 29014 - DNA, 22 bp, Artificial Sequence
  chemically synthesized
aagtcccccactattattgtgt

SEQ ID NO: 29015 - DNA, 22 bp, Artificial Sequence
  chemically synthesized
ttattgtgttgctgtctatctc

SEQ ID NO: 29016 - DNA, 22 bp, Artificial Sequence
  chemically synthesized
ttgtgttgctgtctatctcatt

SEQ ID NO: 29017 - DNA, 22 bp, Artificial Sequence
  chemically synthesized
tgttgctgtctatctcatttct

SEQ ID NO: 29018 - DNA, 22 bp, Artificial Sequence
  chemically synthesized
ctgtctatctcatttcttaggt

SEQ ID NO: 29019 - DNA, 22 bp, Artificial Sequence
  chemically synthesized
tctatctcatttcttaggtcta

SEQ ID NO: 29020 - DNA, 22 bp, Artificial Sequence
  chemically synthesized
tctcatttcttaggtctattag

SEQ ID NO: 29021 - DNA, 22 bp, Artificial Sequence
  chemically synthesized
atttcttaggtctattagtaat

SEQ ID NO: 29022 - DNA, 22 bp, Artificial Sequence
  chemically synthesized
cttaggtctattagtaattgtt

SEQ ID NO: 29023 - DNA, 22 bp, Artificial Sequence
  chemically synthesized
ttaggtctattagtaattgttc

SEQ ID NO: 29024 - DNA, 22 bp, Artificial Sequence
  chemically synthesized
aggtctattagtaattgttcta

SEQ ID NO: 29025 - DNA, 22 bp, Artificial Sequence
  chemically synthesized
ggtctattagtaattgttctat

SEQ ID NO: 29026 - DNA, 22 bp, Artificial Sequence
  chemically synthesized
ttagtaattgttctataaattt

SEQ ID NO: 29027 - DNA, 22 bp, Artificial Sequence
  chemically synthesized
gtaattgttctataaatttggg

SEQ ID NO: 29028 - DNA, 22 bp, Artificial Sequence
  chemically synthesized
ttctataaatttgggagctcca

SEQ ID NO: 29029 - DNA, 22 bp, Artificial Sequence
  chemically synthesized
tataaatttgggagctccagtg

SEQ ID NO: 29030 - DNA, 22 bp, Artificial Sequence
  chemically synthesized
taaatttgggagctccagtgtt

SEQ ID NO: 29031 - DNA, 22 bp, Artificial Sequence
  chemically synthesized
gggagctccagtgttaggtgca

SEQ ID NO: 29032 - DNA, 22 bp, Artificial Sequence
  chemically synthesized
ggagctccagtgttaggtgcat

SEQ ID NO: 29033 - DNA, 22 bp, Artificial Sequence
  chemically synthesized
cagtgttaggtgcatatatgtt

SEQ ID NO: 29034 - DNA, 22 bp, Artificial Sequence
  chemically synthesized
ggtgcatatatgtttaagattg

SEQ ID NO: 29035 - DNA, 22 bp, Artificial Sequence
  chemically synthesized
aagattgtgatattttcctgtt

SEQ ID NO: 29036 - DNA, 22 bp, Artificial Sequence
  chemically synthesized
agattgtgatattttcctgttg

SEQ ID NO: 29037 - DNA, 22 bp, Artificial Sequence
  chemically synthesized
tgatattttcctgttggacaag

SEQ ID NO: 29038 - DNA, 22 bp, Artificial Sequence
  chemically synthesized
tcctgttggacaaggcctttta

SEQ ID NO: 29039 - DNA, 22 bp, Artificial Sequence
  chemically synthesized
cctgttggacaaggccttttac

SEQ ID NO: 29040 - DNA, 22 bp, Artificial Sequence
  chemically synthesized
ctgttggacaaggccttttacc

SEQ ID NO: 29041 - DNA, 22 bp, Artificial Sequence
  chemically synthesized
ttggacaaggccttttaccatt

SEQ ID NO: 29042 - DNA, 22 bp, Artificial Sequence
  chemically synthesized
gacaaggccttttaccattata

SEQ ID NO: 29043 - DNA, 22 bp, Artificial Sequence
  chemically synthesized
ttaccattatataatgtccctc

SEQ ID NO: 29044 - DNA, 22 bp, Artificial Sequence
  chemically synthesized
taccattatataatgtccctct

SEQ ID NO: 29045 - DNA, 22 bp, Artificial Sequence
  chemically synthesized
accattatataatgtccctctt

SEQ ID NO: 29046 - DNA, 22 bp, Artificial Sequence
  chemically synthesized
ccattatataatgtccctcttt

SEQ ID NO: 29047 - DNA, 22 bp, Artificial Sequence
  chemically synthesized
tataatgtccctctttgtctct

SEQ ID NO: 29048 - DNA, 22 bp, Artificial Sequence
  chemically synthesized
tttgtctcttttaactgctgtt

SEQ ID NO: 29049 - DNA, 22 bp, Artificial Sequence
  chemically synthesized
tgtctcttttaactgctgttgc

SEQ ID NO: 29050 - DNA, 22 bp, Artificial Sequence
  chemically synthesized
gtctcttttaactgctgttgct

SEQ ID NO: 29051 - DNA, 22 bp, Artificial Sequence
  chemically synthesized
tctcttttaactgctgttgctt

SEQ ID NO: 29052 - DNA, 22 bp, Artificial Sequence
  chemically synthesized
ttttaactgctgttgctttaaa

SEQ ID NO: 29053 - DNA, 22 bp, Artificial Sequence
  chemically synthesized
ttaactgctgttgctttaaagt

SEQ ID NO: 29054 - DNA, 22 bp, Artificial Sequence
  chemically synthesized
taactgctgttgctttaaagtt

SEQ ID NO: 29055 - DNA, 22 bp, Artificial Sequence
  chemically synthesized
aactgctgttgctttaaagttt

SEQ ID NO: 29056 - DNA, 22 bp, Artificial Sequence
  chemically synthesized
actgctgttgctttaaagtttg

SEQ ID NO: 29057 - DNA, 22 bp, Artificial Sequence
  chemically synthesized
ctgttgctttaaagtttgtttt

SEQ ID NO: 29058 - DNA, 22 bp, Artificial Sequence
  chemically synthesized
ttgctttaaagtttgttttgcc

SEQ ID NO: 29059 - DNA, 22 bp, Artificial Sequence
  chemically synthesized
ctttaaagtttgttttgcctac

SEQ ID NO: 29060 - DNA, 22 bp, Artificial Sequence
  chemically synthesized
taaagtttgttttgcctactca

SEQ ID NO: 29061 - DNA, 22 bp, Artificial Sequence
  chemically synthesized
aaagtttgttttgcctactcac

SEQ ID NO: 29062 - DNA, 22 bp, Artificial Sequence
  chemically synthesized
aagtttgttttgcctactcact

SEQ ID NO: 29063 - DNA, 22 bp, Artificial Sequence
  chemically synthesized
gttttgcctactcacttttggt

SEQ ID NO: 29064 - DNA, 22 bp, Artificial Sequence
  chemically synthesized
ttttgcctactcacttttggtg

SEQ ID NO: 29065 - DNA, 22 bp, Artificial Sequence
  chemically synthesized
tgcctactcacttttggtggcc

SEQ ID NO: 29066 - DNA, 22 bp, Artificial Sequence
  chemically synthesized
gcctactcacttttggtggcca

SEQ ID NO: 29067 - DNA, 22 bp, Artificial Sequence
  chemically synthesized
cctactcacttttggtggccat

SEQ ID NO: 29068 - DNA, 22 bp, Artificial Sequence
  chemically synthesized
ctcacttttggtggccatttgc

SEQ ID NO: 29069 - DNA, 22 bp, Artificial Sequence
  chemically synthesized
acttttggtggccatttgcatg

SEQ ID NO: 29070 - DNA, 22 bp, Artificial Sequence
  chemically synthesized
ttggtggccatttgcatgaaat

SEQ ID NO: 29071 - DNA, 22 bp, Artificial Sequence
  chemically synthesized
tggtggccatttgcatgaaata

SEQ ID NO: 29072 - DNA, 22 bp, Artificial Sequence
  chemically synthesized
ggtggccatttgcatgaaatac

SEQ ID NO: 29073 - DNA, 22 bp, Artificial Sequence
  chemically synthesized
gtggccatttgcatgaaatacc

SEQ ID NO: 29074 - DNA, 22 bp, Artificial Sequence
  chemically synthesized
gcatgaaatacctttttcaccc

SEQ ID NO: 29075 - DNA, 22 bp, Artificial Sequence
  chemically synthesized
catgaaatacctttttcaccct

SEQ ID NO: 29076 - DNA, 22 bp, Artificial Sequence
  chemically synthesized
tttcacccttttaagtggagca

SEQ ID NO: 29077 - DNA, 22 bp, Artificial Sequence
  chemically synthesized
ttcacccttttaagtggagcat

SEQ ID NO: 29078 - DNA, 22 bp, Artificial Sequence
  chemically synthesized
tcacccttttaagtggagcatt

SEQ ID NO: 29079 - DNA, 22 bp, Artificial Sequence
  chemically synthesized
cacccttttaagtggagcattt

SEQ ID NO: 29080 - DNA, 22 bp, Artificial Sequence
  chemically synthesized
acccttttaagtggagcattta

SEQ ID NO: 29081 - DNA, 22 bp, Artificial Sequence
  chemically synthesized
ttaagtggagcatttaggccat

SEQ ID NO: 29082 - DNA, 22 bp, Artificial Sequence
  chemically synthesized
taagtggagcatttaggccatt

SEQ ID NO: 29083 - DNA, 22 bp, Artificial Sequence
  chemically synthesized
aagtggagcatttaggccattt

SEQ ID NO: 29084 - DNA, 22 bp, Artificial Sequence
  chemically synthesized
agtggagcatttaggccattta

SEQ ID NO: 29085 - DNA, 22 bp, Artificial Sequence
  chemically synthesized
aggccatttacattcaatgtta

SEQ ID NO: 29086 - DNA, 22 bp, Artificial Sequence
  chemically synthesized
ggccatttacattcaatgttag

SEQ ID NO: 29087 - DNA, 22 bp, Artificial Sequence
  chemically synthesized
acattcaatgttagtaatgtaa

SEQ ID NO: 29088 - DNA, 22 bp, Artificial Sequence
  chemically synthesized
cattcaatgttagtaatgtaaa

SEQ ID NO: 29089 - DNA, 22 bp, Artificial Sequence
  chemically synthesized
aatgttagtaatgtaaatgcct

SEQ ID NO: 29090 - DNA, 22 bp, Artificial Sequence
  chemically synthesized
gtaatgtaaatgcctggctatg

SEQ ID NO: 29091 - DNA, 22 bp, Artificial Sequence
  chemically synthesized
gctatgccaggcaggaatggcc

SEQ ID NO: 29092 - DNA, 22 bp, Artificial Sequence
  chemically synthesized
tgccaggcaggaatggcctgct

SEQ ID NO: 29093 - DNA, 22 bp, Artificial Sequence
  chemically synthesized
ctcagggacccagtgagctccc

SEQ ID NO: 29094 - DNA, 22 bp, Artificial Sequence
  chemically synthesized
agggacccagtgagctcccagg

SEQ ID NO: 29095 - DNA, 22 bp, Artificial Sequence
  chemically synthesized
ccagggcctttctcactgcttc

SEQ ID NO: 29096 - DNA, 22 bp, Artificial Sequence
  chemically synthesized
tctcactgcttcctctacacct

SEQ ID NO: 29097 - DNA, 22 bp, Artificial Sequence
  chemically synthesized
ctcactgcttcctctacacctg

SEQ ID NO: 29098 - DNA, 22 bp, Artificial Sequence
  chemically synthesized
tcactgcttcctctacacctgt

SEQ ID NO: 29099 - DNA, 22 bp, Artificial Sequence
  chemically synthesized
actgcttcctctacacctgtat

SEQ ID NO: 29100 - DNA, 22 bp, Artificial Sequence
  chemically synthesized
cttcctctacacctgtattttg

SEQ ID NO: 29101 - DNA, 22 bp, Artificial Sequence
  chemically synthesized
cctctacacctgtattttgctc

SEQ ID NO: 29102 - DNA, 22 bp, Artificial Sequence
  chemically synthesized
ctctacacctgtattttgctca

SEQ ID NO: 29103 - DNA, 22 bp, Artificial Sequence
  chemically synthesized
tacacctgtattttgctcagct

SEQ ID NO: 29104 - DNA, 22 bp, Artificial Sequence
  chemically synthesized
cacctgtattttgctcagctct

SEQ ID NO: 29105 - DNA, 22 bp, Artificial Sequence
  chemically synthesized
tattttgctcagctctctaagt

SEQ ID NO: 29106 - DNA, 22 bp, Artificial Sequence
  chemically synthesized
tgctcagctctctaagttaact

SEQ ID NO: 29107 - DNA, 22 bp, Artificial Sequence
  chemically synthesized
gctcagctctctaagttaactc

SEQ ID NO: 29108 - DNA, 22 bp, Artificial Sequence
  chemically synthesized
ctcagctctctaagttaactca

SEQ ID NO: 29109 - DNA, 22 bp, Artificial Sequence
  chemically synthesized
agctctctaagttaactcaact

SEQ ID NO: 29110 - DNA, 22 bp, Artificial Sequence
  chemically synthesized
tctaagttaactcaactccagg

SEQ ID NO: 29111 - DNA, 22 bp, Artificial Sequence
  chemically synthesized
taagttaactcaactccaggta

SEQ ID NO: 29112 - DNA, 22 bp, Artificial Sequence
  chemically synthesized
agttaactcaactccaggtaag

SEQ ID NO: 29113 - DNA, 22 bp, Artificial Sequence
  chemically synthesized
actcaactccaggtaaggtcag

SEQ ID NO: 29114 - DNA, 22 bp, Artificial Sequence
  chemically synthesized
aactccaggtaaggtcagaaac

SEQ ID NO: 29115 - DNA, 22 bp, Artificial Sequence
  chemically synthesized
caggtaaggtcagaaacttctc

SEQ ID NO: 29116 - DNA, 22 bp, Artificial Sequence
  chemically synthesized
ctcccacaaacagaccttcagt

SEQ ID NO: 29117 - DNA, 22 bp, Artificial Sequence
  chemically synthesized
tcccacaaacagaccttcagtt

SEQ ID NO: 29118 - DNA, 22 bp, Artificial Sequence
  chemically synthesized
ccacaaacagaccttcagtttc

SEQ ID NO: 29119 - DNA, 22 bp, Artificial Sequence
  chemically synthesized
cagtttctccagtgggagtgtg

SEQ ID NO: 29120 - DNA, 22 bp, Artificial Sequence
  chemically synthesized
agtttctccagtgggagtgtgt

SEQ ID NO: 29121 - DNA, 22 bp, Artificial Sequence
  chemically synthesized
ctccagtgggagtgtgtgttta

SEQ ID NO: 29122 - DNA, 22 bp, Artificial Sequence
  chemically synthesized
tccagtgggagtgtgtgtttag

SEQ ID NO: 29123 - DNA, 22 bp, Artificial Sequence
  chemically synthesized
cagtgggagtgtgtgtttagga

SEQ ID NO: 29124 - DNA, 22 bp, Artificial Sequence
  chemically synthesized
aggagaggaggatctccctttc

SEQ ID NO: 29125 - DNA, 22 bp, Artificial Sequence
  chemically synthesized
ggagaggaggatctccctttcc

SEQ ID NO: 29126 - DNA, 22 bp, Artificial Sequence
  chemically synthesized
cctttcccacttccgcagttgg

SEQ ID NO: 29127 - DNA, 22 bp, Artificial Sequence
  chemically synthesized
tcccacttccgcagttggggca

SEQ ID NO: 29128 - DNA, 22 bp, Artificial Sequence
  chemically synthesized
cccacttccgcagttggggcac

SEQ ID NO: 29129 - DNA, 22 bp, Artificial Sequence
  chemically synthesized
ccacttccgcagttggggcact

SEQ ID NO: 29130 - DNA, 22 bp, Artificial Sequence
  chemically synthesized
ccgcagttggggcactcacagt

SEQ ID NO: 29131 - DNA, 22 bp, Artificial Sequence
  chemically synthesized
cgcagttggggcactcacagta

SEQ ID NO: 29132 - DNA, 22 bp, Artificial Sequence
  chemically synthesized
gggcactcacagtatttggggt

SEQ ID NO: 29133 - DNA, 22 bp, Artificial Sequence
  chemically synthesized
acagtatttggggtgtctcctg

SEQ ID NO: 29134 - DNA, 22 bp, Artificial Sequence
  chemically synthesized
ggggtgtctcctgggtcctgca

SEQ ID NO: 29135 - DNA, 22 bp, Artificial Sequence
  chemically synthesized
gggtgtctcctgggtcctgcag

SEQ ID NO: 29136 - DNA, 22 bp, Artificial Sequence
  chemically synthesized
ctgggtcctgcaggagcaatct

SEQ ID NO: 29137 - DNA, 22 bp, Artificial Sequence
  chemically synthesized
ggtcctgcaggagcaatctact

SEQ ID NO: 29138 - DNA, 22 bp, Artificial Sequence
  chemically synthesized
caggagcaatctacttccttca

SEQ ID NO: 29139 - DNA, 22 bp, Artificial Sequence
  chemically synthesized
cttccttcagagggtctgtggg

SEQ ID NO: 29140 - DNA, 22 bp, Artificial Sequence
  chemically synthesized
ccttcagagggtctgtgggtcc

SEQ ID NO: 29141 - DNA, 22 bp, Artificial Sequence
  chemically synthesized
cttcagagggtctgtgggtcct

SEQ ID NO: 29142 - DNA, 22 bp, Artificial Sequence
  chemically synthesized
cagagggtctgtgggtcctctc

SEQ ID NO: 29143 - DNA, 22 bp, Artificial Sequence
  chemically synthesized
agagggtctgtgggtcctctca

SEQ ID NO: 29144 - DNA, 22 bp, Artificial Sequence
  chemically synthesized
tgggtcctctcaggattgctgg

SEQ ID NO: 29145 - DNA, 22 bp, Artificial Sequence
  chemically synthesized
tcaggattgctggtttgttctt

SEQ ID NO: 29146 - DNA, 22 bp, Artificial Sequence
  chemically synthesized
aggattgctggtttgttcttgc

SEQ ID NO: 29147 - DNA, 22 bp, Artificial Sequence
  chemically synthesized
ctggtttgttcttgcagtctat

SEQ ID NO: 29148 - DNA, 22 bp, Artificial Sequence
  chemically synthesized
gtttgttcttgcagtctatctg

SEQ ID NO: 29149 - DNA, 22 bp, Artificial Sequence
  chemically synthesized
gttcttgcagtctatctgcagc

SEQ ID NO: 29150 - DNA, 22 bp, Artificial Sequence
  chemically synthesized
ttcttgcagtctatctgcagct

SEQ ID NO: 29151 - DNA, 22 bp, Artificial Sequence
  chemically synthesized
ttgcagtctatctgcagctaaa

SEQ ID NO: 29152 - DNA, 22 bp, Artificial Sequence
  chemically synthesized
gcagtctatctgcagctaaaat

SEQ ID NO: 29153 - DNA, 22 bp, Artificial Sequence
  chemically synthesized
cagtctatctgcagctaaaatt

SEQ ID NO: 29154 - DNA, 22 bp, Artificial Sequence
  chemically synthesized
tctgcagctaaaattcacaatg

SEQ ID NO: 29155 - DNA, 22 bp, Artificial Sequence
  chemically synthesized
cagctaaaattcacaatgcgag

SEQ ID NO: 29156 - DNA, 22 bp, Artificial Sequence
  chemically synthesized
aaattcacaatgcgagcctcca

SEQ ID NO: 29157 - DNA, 22 bp, Artificial Sequence
  chemically synthesized
acaatgcgagcctccacatgct

SEQ ID NO: 29158 - DNA, 22 bp, Artificial Sequence
  chemically synthesized
cacatgctgctctgtccatctg

SEQ ID NO: 29159 - DNA, 22 bp, Artificial Sequence
  chemically synthesized
ctctgtccatctgagttggagc

SEQ ID NO: 29160 - DNA, 22 bp, Artificial Sequence
  chemically synthesized
tgtccatctgagttggagctgc

SEQ ID NO: 29161 - DNA, 22 bp, Artificial Sequence
  chemically synthesized
tccatctgagttggagctgcaa

SEQ ID NO: 29162 - DNA, 22 bp, Artificial Sequence
  chemically synthesized
agttggagctgcaatctaggcc

SEQ ID NO: 29163 - DNA, 22 bp, Artificial Sequence
  chemically synthesized
gagctgcaatctaggcctacct

SEQ ID NO: 29164 - DNA, 22 bp, Artificial Sequence
  chemically synthesized
caatctaggcctacctcccatc

SEQ ID NO: 29165 - DNA, 22 bp, Artificial Sequence
  chemically synthesized
ggcctacctcccatccgccaag

SEQ ID NO: 29166 - DNA, 22 bp, Artificial Sequence
  chemically synthesized
cctcccatccgccaagatcctg

SEQ ID NO: 29167 - DNA, 22 bp, Artificial Sequence
  chemically synthesized
ccatccgccaagatcctgagaa

SEQ ID NO: 29168 - DNA, 22 bp, Artificial Sequence
  chemically synthesized
agaagttggggattatatttca

SEQ ID NO: 29169 - DNA, 22 bp, Artificial Sequence
  chemically synthesized
gggattatatttcaacatgaga

SEQ ID NO: 29170 - DNA, 22 bp, Artificial Sequence
  chemically synthesized
tatttcaacatgagatttggag

SEQ ID NO: 29171 - DNA, 22 bp, Artificial Sequence
  chemically synthesized
caacatgagatttggagggaac

SEQ ID NO: 29172 - DNA, 22 bp, Artificial Sequence
  chemically synthesized
aacatgagatttggagggaaca

SEQ ID NO: 29173 - DNA, 22 bp, Artificial Sequence
  chemically synthesized
ggagggaacaaacatccaaacc

SEQ ID NO: 29174 - DNA, 22 bp, Artificial Sequence
  chemically synthesized
gagggaacaaacatccaaacca

SEQ ID NO: 29175 - DNA, 22 bp, Artificial Sequence
  chemically synthesized
tattcttttgcacatggatatc

SEQ ID NO: 29176 - DNA, 22 bp, Artificial Sequence
  chemically synthesized
attcttttgcacatggatatcc

SEQ ID NO: 29177 - DNA, 22 bp, Artificial Sequence
  chemically synthesized
ttcttttgcacatggatatcca

SEQ ID NO: 29178 - DNA, 22 bp, Artificial Sequence
  chemically synthesized
ttttgcacatggatatccaatg

SEQ ID NO: 29179 - DNA, 22 bp, Artificial Sequence
  chemically synthesized
ttgcacatggatatccaatgga

SEQ ID NO: 29180 - DNA, 22 bp, Artificial Sequence
  chemically synthesized
tgcacatggatatccaatggat

SEQ ID NO: 29181 - DNA, 22 bp, Artificial Sequence
  chemically synthesized
gcacatggatatccaatggata

SEQ ID NO: 29182 - DNA, 22 bp, Artificial Sequence
  chemically synthesized
cacatggatatccaatggatat

SEQ ID NO: 29183 - DNA, 22 bp, Artificial Sequence
  chemically synthesized
tttcagcaccatttcttgaaca

SEQ ID NO: 29184 - DNA, 22 bp, Artificial Sequence
  chemically synthesized
ttcagcaccatttcttgaacac

SEQ ID NO: 29185 - DNA, 22 bp, Artificial Sequence
  chemically synthesized
tcagcaccatttcttgaacact

SEQ ID NO: 29186 - DNA, 22 bp, Artificial Sequence
  chemically synthesized
cagcaccatttcttgaacactg

SEQ ID NO: 29187 - DNA, 22 bp, Artificial Sequence
  chemically synthesized
agcaccatttcttgaacactgt

SEQ ID NO: 29188 - DNA, 22 bp, Artificial Sequence
  chemically synthesized
cttgaacactgtgtcctttcct

SEQ ID NO: 29189 - DNA, 22 bp, Artificial Sequence
  chemically synthesized
ttgaacactgtgtcctttcctc

SEQ ID NO: 29190 - DNA, 22 bp, Artificial Sequence
  chemically synthesized
gaacactgtgtcctttcctcaa

SEQ ID NO: 29191 - DNA, 22 bp, Artificial Sequence
  chemically synthesized
aacactgtgtcctttcctcaat

SEQ ID NO: 29192 - DNA, 22 bp, Artificial Sequence
  chemically synthesized
tgtcctttcctcaatgtatatt

SEQ ID NO: 29193 - DNA, 22 bp, Artificial Sequence
  chemically synthesized
tcctcaatgtatattcttgtca

SEQ ID NO: 29194 - DNA, 22 bp, Artificial Sequence
  chemically synthesized
cctcaatgtatattcttgtcac

SEQ ID NO: 29195 - DNA, 22 bp, Artificial Sequence
  chemically synthesized
ctcaatgtatattcttgtcacc

SEQ ID NO: 29196 - DNA, 22 bp, Artificial Sequence
  chemically synthesized
aatgtatattcttgtcaccttt

SEQ ID NO: 29197 - DNA, 22 bp, Artificial Sequence
  chemically synthesized
ttgtcacctttgttgaaaatct

SEQ ID NO: 29198 - DNA, 22 bp, Artificial Sequence
  chemically synthesized
gtcacctttgttgaaaatctgt

SEQ ID NO: 29199 - DNA, 22 bp, Artificial Sequence
  chemically synthesized
tcacctttgttgaaaatctgtt

SEQ ID NO: 29200 - DNA, 22 bp, Artificial Sequence
  chemically synthesized
tgttgaaaatctgttggctata

SEQ ID NO: 29201 - DNA, 22 bp, Artificial Sequence
  chemically synthesized
gttgaaaatctgttggctataa

SEQ ID NO: 29202 - DNA, 22 bp, Artificial Sequence
  chemically synthesized
ttgaaaatctgttggctataaa

SEQ ID NO: 29203 - DNA, 22 bp, Artificial Sequence
  chemically synthesized
aaaatctgttggctataaatat

SEQ ID NO: 29204 - DNA, 22 bp, Artificial Sequence
  chemically synthesized
ttggctataaatatgtggatgc

SEQ ID NO: 29205 - DNA, 22 bp, Artificial Sequence
  chemically synthesized
gctataaatatgtggatgcatt

SEQ ID NO: 29206 - DNA, 22 bp, Artificial Sequence
  chemically synthesized
taaatatgtggatgcatttcta

SEQ ID NO: 29207 - DNA, 22 bp, Artificial Sequence
  chemically synthesized
ctaggttctctattctcttcca

SEQ ID NO: 29208 - DNA, 22 bp, Artificial Sequence
  chemically synthesized
taggttctctattctcttccat

SEQ ID NO: 29209 - DNA, 22 bp, Artificial Sequence
  chemically synthesized
ggttctctattctcttccattg

SEQ ID NO: 29210 - DNA, 22 bp, Artificial Sequence
  chemically synthesized
tctattctcttccattggtcta

SEQ ID NO: 29211 - DNA, 22 bp, Artificial Sequence
  chemically synthesized
tattctcttccattggtctaag

SEQ ID NO: 29212 - DNA, 22 bp, Artificial Sequence
  chemically synthesized
ttctcttccattggtctaagtg

SEQ ID NO: 29213 - DNA, 22 bp, Artificial Sequence
  chemically synthesized
tcttccattggtctaagtgtct

SEQ ID NO: 29214 - DNA, 22 bp, Artificial Sequence
  chemically synthesized
ttccattggtctaagtgtctgt

SEQ ID NO: 29215 - DNA, 22 bp, Artificial Sequence
  chemically synthesized
ccattggtctaagtgtctgttc

SEQ ID NO: 29216 - DNA, 22 bp, Artificial Sequence
  chemically synthesized
cattggtctaagtgtctgttct

SEQ ID NO: 29217 - DNA, 22 bp, Artificial Sequence
  chemically synthesized
gtctaagtgtctgttctaatgt

SEQ ID NO: 29218 - DNA, 22 bp, Artificial Sequence
  chemically synthesized
agtgtctgttctaatgtcagta

SEQ ID NO: 29219 - DNA, 22 bp, Artificial Sequence
  chemically synthesized
ttctaatgtcagtatcatgctg

SEQ ID NO: 29220 - DNA, 22 bp, Artificial Sequence
  chemically synthesized
taatgtcagtatcatgctgttt

SEQ ID NO: 29221 - DNA, 22 bp, Artificial Sequence
  chemically synthesized
atgtcagtatcatgctgtttag

SEQ ID NO: 29222 - DNA, 22 bp, Artificial Sequence
  chemically synthesized
tttaggttcctatacttttgta

SEQ ID NO: 29223 - DNA, 22 bp, Artificial Sequence
  chemically synthesized
aggttcctatacttttgtaata

SEQ ID NO: 29224 - DNA, 22 bp, Artificial Sequence
  chemically synthesized
ggttcctatacttttgtaatat

SEQ ID NO: 29225 - DNA, 22 bp, Artificial Sequence
  chemically synthesized
ctatacttttgtaatatacttt

SEQ ID NO: 29226 - DNA, 22 bp, Artificial Sequence
  chemically synthesized
tacttttgtaatatactttgaa

SEQ ID NO: 29227 - DNA, 22 bp, Artificial Sequence
  chemically synthesized
ttgtaatatactttgaaatcag

SEQ ID NO: 29228 - DNA, 22 bp, Artificial Sequence
  chemically synthesized
tgtaatatactttgaaatcagg

SEQ ID NO: 29229 - DNA, 22 bp, Artificial Sequence
  chemically synthesized
gtaatatactttgaaatcaggt

SEQ ID NO: 29230 - DNA, 22 bp, Artificial Sequence
  chemically synthesized
taatatactttgaaatcaggta

SEQ ID NO: 29231 - DNA, 22 bp, Artificial Sequence
  chemically synthesized
tgaaatcaggtagtatgatacc

SEQ ID NO: 29232 - DNA, 22 bp, Artificial Sequence
  chemically synthesized
gaaatcaggtagtatgatacct

SEQ ID NO: 29233 - DNA, 22 bp, Artificial Sequence
  chemically synthesized
aaatcaggtagtatgatacctc

SEQ ID NO: 29234 - DNA, 22 bp, Artificial Sequence
  chemically synthesized
tagcattgttcttttttcacag

SEQ ID NO: 29235 - DNA, 22 bp, Artificial Sequence
  chemically synthesized
gcattgttcttttttcacagga

SEQ ID NO: 29236 - DNA, 22 bp, Artificial Sequence
  chemically synthesized
ttcttttttcacaggatgactt

SEQ ID NO: 29237 - DNA, 22 bp, Artificial Sequence
  chemically synthesized
ttttttcacaggatgactttgg

SEQ ID NO: 29238 - DNA, 22 bp, Artificial Sequence
  chemically synthesized
ttttcacaggatgactttggct

SEQ ID NO: 29239 - DNA, 22 bp, Artificial Sequence
  chemically synthesized
tttcacaggatgactttggcta

SEQ ID NO: 29240 - DNA, 22 bp, Artificial Sequence
  chemically synthesized
ttcacaggatgactttggctac

SEQ ID NO: 29241 - DNA, 22 bp, Artificial Sequence
  chemically synthesized
tcacaggatgactttggctact

SEQ ID NO: 29242 - DNA, 22 bp, Artificial Sequence
  chemically synthesized
cacaggatgactttggctactg

SEQ ID NO: 29243 - DNA, 22 bp, Artificial Sequence
  chemically synthesized
acaggatgactttggctactgg

SEQ ID NO: 29244 - DNA, 22 bp, Artificial Sequence
  chemically synthesized
tggctactggagctatttttta

SEQ ID NO: 29245 - DNA, 22 bp, Artificial Sequence
  chemically synthesized
ggctactggagctattttttaa

SEQ ID NO: 29246 - DNA, 22 bp, Artificial Sequence
  chemically synthesized
gctactggagctattttttaat

SEQ ID NO: 29247 - DNA, 22 bp, Artificial Sequence
  chemically synthesized
ctggagctattttttaatttca

SEQ ID NO: 29248 - DNA, 22 bp, Artificial Sequence
  chemically synthesized
gagctattttttaatttcatac

SEQ ID NO: 29249 - DNA, 22 bp, Artificial Sequence
  chemically synthesized
ttttttaatttcatacaaattt

SEQ ID NO: 29250 - DNA, 22 bp, Artificial Sequence
  chemically synthesized
tttaatttcatacaaattttag

SEQ ID NO: 29251 - DNA, 22 bp, Artificial Sequence
  chemically synthesized
ttaatttcatacaaattttaga

SEQ ID NO: 29252 - DNA, 22 bp, Artificial Sequence
  chemically synthesized
taatttcatacaaattttagat

SEQ ID NO: 29253 - DNA, 22 bp, Artificial Sequence
  chemically synthesized
aatttcatacaaattttagatt

SEQ ID NO: 29254 - DNA, 22 bp, Artificial Sequence
  chemically synthesized
atttcatacaaattttagattg

SEQ ID NO: 29255 - DNA, 22 bp, Artificial Sequence
  chemically synthesized
catacaaattttagattggttt

SEQ ID NO: 29256 - DNA, 22 bp, Artificial Sequence
  chemically synthesized
atacaaattttagattggtttt

SEQ ID NO: 29257 - DNA, 22 bp, Artificial Sequence
  chemically synthesized
tagattggtttttccatttctg

SEQ ID NO: 29258 - DNA, 22 bp, Artificial Sequence
  chemically synthesized
agattggtttttccatttctgt

SEQ ID NO: 29259 - DNA, 22 bp, Artificial Sequence
  chemically synthesized
gattggtttttccatttctgtg

SEQ ID NO: 29260 - DNA, 22 bp, Artificial Sequence
  chemically synthesized
gtttttccatttctgtgaaaaa

SEQ ID NO: 29261 - DNA, 22 bp, Artificial Sequence
  chemically synthesized
ttccatttctgtgaaaaatgac

SEQ ID NO: 29262 - DNA, 22 bp, Artificial Sequence
  chemically synthesized
tccatttctgtgaaaaatgaca

SEQ ID NO: 29263 - DNA, 22 bp, Artificial Sequence
  chemically synthesized
ccatttctgtgaaaaatgacat

SEQ ID NO: 29264 - DNA, 22 bp, Artificial Sequence
  chemically synthesized
catttctgtgaaaaatgacatt

SEQ ID NO: 29265 - DNA, 22 bp, Artificial Sequence
  chemically synthesized
ctgtgaaaaatgacattgctat

SEQ ID NO: 29266 - DNA, 22 bp, Artificial Sequence
  chemically synthesized
tgtgaaaaatgacattgctatt

SEQ ID NO: 29267 - DNA, 22 bp, Artificial Sequence
  chemically synthesized
tgaaaaatgacattgctatttt

SEQ ID NO: 29268 - DNA, 22 bp, Artificial Sequence
  chemically synthesized
ctattttgatagcggtcatata

SEQ ID NO: 29269 - DNA, 22 bp, Artificial Sequence
  chemically synthesized
ttttgatagcggtcatatagaa

SEQ ID NO: 29270 - DNA, 22 bp, Artificial Sequence
  chemically synthesized
tgatagcggtcatatagaatct

SEQ ID NO: 29271 - DNA, 22 bp, Artificial Sequence
  chemically synthesized
gatagcggtcatatagaatctg

SEQ ID NO: 29272 - DNA, 22 bp, Artificial Sequence
  chemically synthesized
atagcggtcatatagaatctgt

SEQ ID NO: 29273 - DNA, 22 bp, Artificial Sequence
  chemically synthesized
tagattgctttgggtagtatgg

SEQ ID NO: 29274 - DNA, 22 bp, Artificial Sequence
  chemically synthesized
ctttgggtagtatggccatttt

SEQ ID NO: 29275 - DNA, 22 bp, Artificial Sequence
  chemically synthesized
tgggtagtatggccattttaac

SEQ ID NO: 29276 - DNA, 22 bp, Artificial Sequence
  chemically synthesized
gggtagtatggccattttaaca

SEQ ID NO: 29277 - DNA, 22 bp, Artificial Sequence
  chemically synthesized
ggtagtatggccattttaacaa

SEQ ID NO: 29278 - DNA, 22 bp, Artificial Sequence
  chemically synthesized
taacaatattaatttttctgat

SEQ ID NO: 29279 - DNA, 22 bp, Artificial Sequence
  chemically synthesized
aacaatattaatttttctgatc

SEQ ID NO: 29280 - DNA, 22 bp, Artificial Sequence
  chemically synthesized
acaatattaatttttctgatcc

SEQ ID NO: 29281 - DNA, 22 bp, Artificial Sequence
  chemically synthesized
atttttctgatccatgaacata

SEQ ID NO: 29282 - DNA, 22 bp, Artificial Sequence
  chemically synthesized
ttctgatccatgaacataggat

SEQ ID NO: 29283 - DNA, 22 bp, Artificial Sequence
  chemically synthesized
tctgatccatgaacataggata

SEQ ID NO: 29284 - DNA, 22 bp, Artificial Sequence
  chemically synthesized
ctgatccatgaacataggatat

SEQ ID NO: 29285 - DNA, 22 bp, Artificial Sequence
  chemically synthesized
tgatccatgaacataggatatc

SEQ ID NO: 29286 - DNA, 22 bp, Artificial Sequence
  chemically synthesized
atccatgaacataggatatctc

SEQ ID NO: 29287 - DNA, 22 bp, Artificial Sequence
  chemically synthesized
tccatttgtttctgtccttttc

SEQ ID NO: 29288 - DNA, 22 bp, Artificial Sequence
  chemically synthesized
catttgtttctgtccttttcaa

SEQ ID NO: 29289 - DNA, 22 bp, Artificial Sequence
  chemically synthesized
gtttctgtccttttcaattctt

SEQ ID NO: 29290 - DNA, 22 bp, Artificial Sequence
  chemically synthesized
tttctgtccttttcaattcttt

SEQ ID NO: 29291 - DNA, 22 bp, Artificial Sequence
  chemically synthesized
ctgtccttttcaattcttttat

SEQ ID NO: 29292 - DNA, 22 bp, Artificial Sequence
  chemically synthesized
tgtccttttcaattcttttatc

SEQ ID NO: 29293 - DNA, 22 bp, Artificial Sequence
  chemically synthesized
tccttttcaattcttttatcag

SEQ ID NO: 29294 - DNA, 22 bp, Artificial Sequence
  chemically synthesized
ttcaattcttttatcagtgttt

SEQ ID NO: 29295 - DNA, 22 bp, Artificial Sequence
  chemically synthesized
tcaattcttttatcagtgtttt

SEQ ID NO: 29296 - DNA, 22 bp, Artificial Sequence
  chemically synthesized
caattcttttatcagtgttttg

SEQ ID NO: 29297 - DNA, 22 bp, Artificial Sequence
  chemically synthesized
aattcttttatcagtgttttgt

SEQ ID NO: 29298 - DNA, 22 bp, Artificial Sequence
  chemically synthesized
ttttatcagtgttttgtagttt

SEQ ID NO: 29299 - DNA, 22 bp, Artificial Sequence
  chemically synthesized
ttatcagtgttttgtagttttc

SEQ ID NO: 29300 - DNA, 22 bp, Artificial Sequence
  chemically synthesized
tatcagtgttttgtagttttcc

SEQ ID NO: 29301 - DNA, 22 bp, Artificial Sequence
  chemically synthesized
atcagtgttttgtagttttccg

SEQ ID NO: 29302 - DNA, 22 bp, Artificial Sequence
  chemically synthesized
tcagtgttttgtagttttccga

SEQ ID NO: 29303 - DNA, 22 bp, Artificial Sequence
  chemically synthesized
tgtagttttccgaatagaggtt

SEQ ID NO: 29304 - DNA, 22 bp, Artificial Sequence
  chemically synthesized
gtagttttccgaatagaggttt

SEQ ID NO: 29305 - DNA, 22 bp, Artificial Sequence
  chemically synthesized
tagttttccgaatagaggtttt

SEQ ID NO: 29306 - DNA, 22 bp, Artificial Sequence
  chemically synthesized
tccgaatagaggtttttcggtt

SEQ ID NO: 29307 - DNA, 22 bp, Artificial Sequence
  chemically synthesized
ccgaatagaggtttttcggttc

SEQ ID NO: 29308 - DNA, 22 bp, Artificial Sequence
  chemically synthesized
cgaatagaggtttttcggttcc

SEQ ID NO: 29309 - DNA, 22 bp, Artificial Sequence
  chemically synthesized
ttcggttccttggttaaattta

SEQ ID NO: 29310 - DNA, 22 bp, Artificial Sequence
  chemically synthesized
tcggttccttggttaaatttat

SEQ ID NO: 29311 - DNA, 22 bp, Artificial Sequence
  chemically synthesized
cggttccttggttaaatttatc

SEQ ID NO: 29312 - DNA, 22 bp, Artificial Sequence
  chemically synthesized
ggttccttggttaaatttatcc

SEQ ID NO: 29313 - DNA, 22 bp, Artificial Sequence
  chemically synthesized
cttggttaaatttatccctaaa

SEQ ID NO: 29314 - DNA, 22 bp, Artificial Sequence
  chemically synthesized
ggttaaatttatccctaaatat

SEQ ID NO: 29315 - DNA, 22 bp, Artificial Sequence
  chemically synthesized
gttaaatttatccctaaatatt

SEQ ID NO: 29316 - DNA, 22 bp, Artificial Sequence
  chemically synthesized
aatttatccctaaatattttat

SEQ ID NO: 29317 - DNA, 22 bp, Artificial Sequence
  chemically synthesized
atccctaaatattttatttttt

SEQ ID NO: 29318 - DNA, 22 bp, Artificial Sequence
  chemically synthesized
tccctaaatattttatttttta

SEQ ID NO: 29319 - DNA, 22 bp, Artificial Sequence
  chemically synthesized
aatattttattttttagctatt

SEQ ID NO: 29320 - DNA, 22 bp, Artificial Sequence
  chemically synthesized
tattttttagctattgtaaatg

SEQ ID NO: 29321 - DNA, 22 bp, Artificial Sequence
  chemically synthesized
attttttagctattgtaaatgg

SEQ ID NO: 29322 - DNA, 22 bp, Artificial Sequence
  chemically synthesized
ttttttagctattgtaaatggg

SEQ ID NO: 29323 - DNA, 22 bp, Artificial Sequence
  chemically synthesized
tttagctattgtaaatgggatt

SEQ ID NO: 29324 - DNA, 22 bp, Artificial Sequence
  chemically synthesized
ttagctattgtaaatgggattg

SEQ ID NO: 29325 - DNA, 22 bp, Artificial Sequence
  chemically synthesized
tagctattgtaaatgggattgc

SEQ ID NO: 29326 - DNA, 22 bp, Artificial Sequence
  chemically synthesized
agctattgtaaatgggattgcc

SEQ ID NO: 29327 - DNA, 22 bp, Artificial Sequence
  chemically synthesized
gctattgtaaatgggattgcct

SEQ ID NO: 29328 - DNA, 22 bp, Artificial Sequence
  chemically synthesized
ttgtaaatgggattgccttctt

SEQ ID NO: 29329 - DNA, 22 bp, Artificial Sequence
  chemically synthesized
taaatgggattgccttcttaat

SEQ ID NO: 29330 - DNA, 22 bp, Artificial Sequence
  chemically synthesized
ccttcttaatttccttctcagc

SEQ ID NO: 29331 - DNA, 22 bp, Artificial Sequence
  chemically synthesized
cttaatttccttctcagctagt

SEQ ID NO: 29332 - DNA, 22 bp, Artificial Sequence
  chemically synthesized
ttaatttccttctcagctagtt

SEQ ID NO: 29333 - DNA, 22 bp, Artificial Sequence
  chemically synthesized
aatttccttctcagctagttta

SEQ ID NO: 29334 - DNA, 22 bp, Artificial Sequence
  chemically synthesized
atttccttctcagctagtttat

SEQ ID NO: 29335 - DNA, 22 bp, Artificial Sequence
  chemically synthesized
ccttctcagctagtttattatt

SEQ ID NO: 29336 - DNA, 22 bp, Artificial Sequence
  chemically synthesized
cttctcagctagtttattattg

SEQ ID NO: 29337 - DNA, 22 bp, Artificial Sequence
  chemically synthesized
ctcagctagtttattattggtg

SEQ ID NO: 29338 - DNA, 22 bp, Artificial Sequence
  chemically synthesized
tcagctagtttattattggtgt

SEQ ID NO: 29339 - DNA, 22 bp, Artificial Sequence
  chemically synthesized
agctagtttattattggtgtgt

SEQ ID NO: 29340 - DNA, 22 bp, Artificial Sequence
  chemically synthesized
gtttattattggtgtgtagaaa

SEQ ID NO: 29341 - DNA, 22 bp, Artificial Sequence
  chemically synthesized
attattggtgtgtagaaacatt

SEQ ID NO: 29342 - DNA, 22 bp, Artificial Sequence
  chemically synthesized
ttattggtgtgtagaaacattg

SEQ ID NO: 29343 - DNA, 22 bp, Artificial Sequence
  chemically synthesized
ttggtgtgtagaaacattgctt

SEQ ID NO: 29344 - DNA, 22 bp, Artificial Sequence
  chemically synthesized
gtgtgtagaaacattgcttgtt

SEQ ID NO: 29345 - DNA, 22 bp, Artificial Sequence
  chemically synthesized
cttgtttcatatgctgattttg

SEQ ID NO: 29346 - DNA, 22 bp, Artificial Sequence
  chemically synthesized
gtttcatatgctgattttgtct

SEQ ID NO: 29347 - DNA, 22 bp, Artificial Sequence
  chemically synthesized
tttcatatgctgattttgtctc

SEQ ID NO: 29348 - DNA, 22 bp, Artificial Sequence
  chemically synthesized
catatgctgattttgtctcctg

SEQ ID NO: 29349 - DNA, 22 bp, Artificial Sequence
  chemically synthesized
atatgctgattttgtctcctgt

SEQ ID NO: 29350 - DNA, 22 bp, Artificial Sequence
  chemically synthesized
attttgtctcctgtaactttac

SEQ ID NO: 29351 - DNA, 22 bp, Artificial Sequence
  chemically synthesized
tgtctcctgtaactttactgaa

SEQ ID NO: 29352 - DNA, 22 bp, Artificial Sequence
  chemically synthesized
gtctcctgtaactttactgaat

SEQ ID NO: 29353 - DNA, 22 bp, Artificial Sequence
  chemically synthesized
tctcctgtaactttactgaatt

SEQ ID NO: 29354 - DNA, 22 bp, Artificial Sequence
  chemically synthesized
ctgtaactttactgaatttatt

SEQ ID NO: 29355 - DNA, 22 bp, Artificial Sequence
  chemically synthesized
taactttactgaatttattttt

SEQ ID NO: 29356 - DNA, 22 bp, Artificial Sequence
  chemically synthesized
tactgaatttatttttcagcgc

SEQ ID NO: 29357 - DNA, 22 bp, Artificial Sequence
  chemically synthesized
actgaatttatttttcagcgct

SEQ ID NO: 29358 - DNA, 22 bp, Artificial Sequence
  chemically synthesized
ctgaatttatttttcagcgcta

SEQ ID NO: 29359 - DNA, 22 bp, Artificial Sequence
  chemically synthesized
aatttatttttcagcgctaaga

SEQ ID NO: 29360 - DNA, 22 bp, Artificial Sequence
  chemically synthesized
atttttcagcgctaagagtgct

SEQ ID NO: 29361 - DNA, 22 bp, Artificial Sequence
  chemically synthesized
tttttcagcgctaagagtgctt

SEQ ID NO: 29362 - DNA, 22 bp, Artificial Sequence
  chemically synthesized
ttcagcgctaagagtgctttgg

SEQ ID NO: 29363 - DNA, 22 bp, Artificial Sequence
  chemically synthesized
tcagcgctaagagtgctttggt

SEQ ID NO: 29364 - DNA, 22 bp, Artificial Sequence
  chemically synthesized
cagcgctaagagtgctttggtg

SEQ ID NO: 29365 - DNA, 22 bp, Artificial Sequence
  chemically synthesized
agcgctaagagtgctttggtgg

SEQ ID NO: 29366 - DNA, 22 bp, Artificial Sequence
  chemically synthesized
agagtgctttggtggagtcttg

SEQ ID NO: 29367 - DNA, 22 bp, Artificial Sequence
  chemically synthesized
tggtggagtcttggtttttcta

SEQ ID NO: 29368 - DNA, 22 bp, Artificial Sequence
  chemically synthesized
ggtggagtcttggtttttctag

SEQ ID NO: 29369 - DNA, 22 bp, Artificial Sequence
  chemically synthesized
gtggagtcttggtttttctagg

SEQ ID NO: 29370 - DNA, 22 bp, Artificial Sequence
  chemically synthesized
ggtttttctaggtataaaatca

SEQ ID NO: 29371 - DNA, 22 bp, Artificial Sequence
  chemically synthesized
gtttttctaggtataaaatcat

SEQ ID NO: 29372 - DNA, 22 bp, Artificial Sequence
  chemically synthesized
ttctaggtataaaatcatgtca

SEQ ID NO: 29373 - DNA, 22 bp, Artificial Sequence
  chemically synthesized
tctaggtataaaatcatgtcat

SEQ ID NO: 29374 - DNA, 22 bp, Artificial Sequence
  chemically synthesized
ctaggtataaaatcatgtcatc

SEQ ID NO: 29375 - DNA, 22 bp, Artificial Sequence
  chemically synthesized
taggtataaaatcatgtcatct

SEQ ID NO: 29376 - DNA, 22 bp, Artificial Sequence
  chemically synthesized
ggtataaaatcatgtcatctgg

SEQ ID NO: 29377 - DNA, 22 bp, Artificial Sequence
  chemically synthesized
gaaagatggacagtttgacttc

SEQ ID NO: 29378 - DNA, 22 bp, Artificial Sequence
  chemically synthesized
gacttcatcttttcctatttgc

SEQ ID NO: 29379 - DNA, 22 bp, Artificial Sequence
  chemically synthesized
acttcatcttttcctatttgca

SEQ ID NO: 29380 - DNA, 22 bp, Artificial Sequence
  chemically synthesized
catcttttcctatttgcatgcc

SEQ ID NO: 29381 - DNA, 22 bp, Artificial Sequence
  chemically synthesized
atcttttcctatttgcatgcct

SEQ ID NO: 29382 - DNA, 22 bp, Artificial Sequence
  chemically synthesized
ttcctatttgcatgccttttct

SEQ ID NO: 29383 - DNA, 22 bp, Artificial Sequence
  chemically synthesized
tcctatttgcatgccttttctt

SEQ ID NO: 29384 - DNA, 22 bp, Artificial Sequence
  chemically synthesized
cctatttgcatgccttttcttt

SEQ ID NO: 29385 - DNA, 22 bp, Artificial Sequence
  chemically synthesized
ctatttgcatgccttttctttc

SEQ ID NO: 29386 - DNA, 22 bp, Artificial Sequence
  chemically synthesized
tttgcatgccttttctttcttt

SEQ ID NO: 29387 - DNA, 22 bp, Artificial Sequence
  chemically synthesized
gcatgccttttctttctttctt

SEQ ID NO: 29388 - DNA, 22 bp, Artificial Sequence
  chemically synthesized
catgccttttctttctttcttt

SEQ ID NO: 29389 - DNA, 22 bp, Artificial Sequence
  chemically synthesized
ttctttctttctttctctgacc

SEQ ID NO: 29390 - DNA, 22 bp, Artificial Sequence
  chemically synthesized
tctttctttctttctctgacct

SEQ ID NO: 29391 - DNA, 22 bp, Artificial Sequence
  chemically synthesized
ctttctttctttctctgacctg

SEQ ID NO: 29392 - DNA, 22 bp, Artificial Sequence
  chemically synthesized
tttctttctttctctgacctga

SEQ ID NO: 29393 - DNA, 22 bp, Artificial Sequence
  chemically synthesized
tctttctttctctgacctgaaa

SEQ ID NO: 29394 - DNA, 22 bp, Artificial Sequence
  chemically synthesized
ctttctttctctgacctgaaag

SEQ ID NO: 29395 - DNA, 22 bp, Artificial Sequence
  chemically synthesized
tttctttctctgacctgaaagc

SEQ ID NO: 29396 - DNA, 22 bp, Artificial Sequence
  chemically synthesized
tctttctctgacctgaaagctg

SEQ ID NO: 29397 - DNA, 22 bp, Artificial Sequence
  chemically synthesized
ctttctctgacctgaaagctgt

SEQ ID NO: 29398 - DNA, 22 bp, Artificial Sequence
  chemically synthesized
tttctctgacctgaaagctgtg

SEQ ID NO: 29399 - DNA, 22 bp, Artificial Sequence
  chemically synthesized
tctctgacctgaaagctgtggc

SEQ ID NO: 29400 - DNA, 22 bp, Artificial Sequence
  chemically synthesized
ctctgacctgaaagctgtggct

SEQ ID NO: 29401 - DNA, 22 bp, Artificial Sequence
  chemically synthesized
tctgacctgaaagctgtggcta

SEQ ID NO: 29402 - DNA, 22 bp, Artificial Sequence
  chemically synthesized
tgacctgaaagctgtggctagg

SEQ ID NO: 29403 - DNA, 22 bp, Artificial Sequence
  chemically synthesized
acctgaaagctgtggctaggac

SEQ ID NO: 29404 - DNA, 22 bp, Artificial Sequence
  chemically synthesized
aaagctgtggctaggacttcca

SEQ ID NO: 29405 - DNA, 22 bp, Artificial Sequence
  chemically synthesized
tggctaggacttccagtattat

SEQ ID NO: 29406 - DNA, 22 bp, Artificial Sequence
  chemically synthesized
ggacttccagtattatattgaa

SEQ ID NO: 29407 - DNA, 22 bp, Artificial Sequence
  chemically synthesized
ccagtattatattgaataggag

SEQ ID NO: 29408 - DNA, 22 bp, Artificial Sequence
  chemically synthesized
cagtattatattgaataggagt

SEQ ID NO: 29409 - DNA, 22 bp, Artificial Sequence
  chemically synthesized
tattgaataggagtgatggaag

SEQ ID NO: 29410 - DNA, 22 bp, Artificial Sequence
  chemically synthesized
aataggagtgatggaagtgggc

SEQ ID NO: 29411 - DNA, 22 bp, Artificial Sequence
  chemically synthesized
attttgtttcagttcttagagg

SEQ ID NO: 29412 - DNA, 22 bp, Artificial Sequence
  chemically synthesized
ttttgtttcagttcttagagga

SEQ ID NO: 29413 - DNA, 22 bp, Artificial Sequence
  chemically synthesized
tgtttcagttcttagaggaaag

SEQ ID NO: 29414 - DNA, 22 bp, Artificial Sequence
  chemically synthesized
gtttcagttcttagaggaaagg

SEQ ID NO: 29415 - DNA, 22 bp, Artificial Sequence
  chemically synthesized
tttcagttcttagaggaaaggc

SEQ ID NO: 29416 - DNA, 22 bp, Artificial Sequence
  chemically synthesized
cagttcttagaggaaaggcttc

SEQ ID NO: 29417 - DNA, 22 bp, Artificial Sequence
  chemically synthesized
agttcttagaggaaaggcttcc

SEQ ID NO: 29418 - DNA, 22 bp, Artificial Sequence
  chemically synthesized
ttagaggaaaggcttccagctt

SEQ ID NO: 29419 - DNA, 22 bp, Artificial Sequence
  chemically synthesized
agaggaaaggcttccagctttt

SEQ ID NO: 29420 - DNA, 22 bp, Artificial Sequence
  chemically synthesized
gaggaaaggcttccagcttttc

SEQ ID NO: 29421 - DNA, 22 bp, Artificial Sequence
  chemically synthesized
ccagcttttcccaattcagtat

SEQ ID NO: 29422 - DNA, 22 bp, Artificial Sequence
  chemically synthesized
cagcttttcccaattcagtatg

SEQ ID NO: 29423 - DNA, 22 bp, Artificial Sequence
  chemically synthesized
ttcccaattcagtatgatgtta

SEQ ID NO: 29424 - DNA, 22 bp, Artificial Sequence
  chemically synthesized
tcccaattcagtatgatgttag

SEQ ID NO: 29425 - DNA, 22 bp, Artificial Sequence
  chemically synthesized
cccaattcagtatgatgttagc

SEQ ID NO: 29426 - DNA, 22 bp, Artificial Sequence
  chemically synthesized
ccaattcagtatgatgttagct

SEQ ID NO: 29427 - DNA, 22 bp, Artificial Sequence
  chemically synthesized
agtatgatgttagctgtgggtt

SEQ ID NO: 29428 - DNA, 22 bp, Artificial Sequence
  chemically synthesized
gctgtgggtttgtcatatatga

SEQ ID NO: 29429 - DNA, 22 bp, Artificial Sequence
  chemically synthesized
tgggtttgtcatatatgacttt

SEQ ID NO: 29430 - DNA, 22 bp, Artificial Sequence
  chemically synthesized
gtcatatatgacttttattata

SEQ ID NO: 29431 - DNA, 22 bp, Artificial Sequence
  chemically synthesized
tcatatatgacttttattatat

SEQ ID NO: 29432 - DNA, 22 bp, Artificial Sequence
  chemically synthesized
ttattatattgagatatgttcc

SEQ ID NO: 29433 - DNA, 22 bp, Artificial Sequence
  chemically synthesized
tattatattgagatatgttcct

SEQ ID NO: 29434 - DNA, 22 bp, Artificial Sequence
  chemically synthesized
attatattgagatatgttcctt

SEQ ID NO: 29435 - DNA, 22 bp, Artificial Sequence
  chemically synthesized
ttatattgagatatgttccttc

SEQ ID NO: 29436 - DNA, 22 bp, Artificial Sequence
  chemically synthesized
tattgagatatgttccttctat

SEQ ID NO: 29437 - DNA, 22 bp, Artificial Sequence
  chemically synthesized
agatatgttccttctatgattg

SEQ ID NO: 29438 - DNA, 22 bp, Artificial Sequence
  chemically synthesized
cttctatgattggctgcagata

SEQ ID NO: 29439 - DNA, 22 bp, Artificial Sequence
  chemically synthesized
ctatgattggctgcagatagtt

SEQ ID NO: 29440 - DNA, 22 bp, Artificial Sequence
  chemically synthesized
tatgattggctgcagatagttt

SEQ ID NO: 29441 - DNA, 22 bp, Artificial Sequence
  chemically synthesized
tgattggctgcagatagttttt

SEQ ID NO: 29442 - DNA, 22 bp, Artificial Sequence
  chemically synthesized
gctgcagatagtttttatcatg

SEQ ID NO: 29443 - DNA, 22 bp, Artificial Sequence
  chemically synthesized
cagatagtttttatcatgaagg

SEQ ID NO: 29444 - DNA, 22 bp, Artificial Sequence
  chemically synthesized
ttatcatgaaggaatgttaaat

SEQ ID NO: 29445 - DNA, 22 bp, Artificial Sequence
  chemically synthesized
tatcatgaaggaatgttaaatt

SEQ ID NO: 29446 - DNA, 22 bp, Artificial Sequence
  chemically synthesized
atcatgaaggaatgttaaattt

SEQ ID NO: 29447 - DNA, 22 bp, Artificial Sequence
  chemically synthesized
tcatgaaggaatgttaaatttt

SEQ ID NO: 29448 - DNA, 22 bp, Artificial Sequence
  chemically synthesized
aattttatcaaatactttttct

SEQ ID NO: 29449 - DNA, 22 bp, Artificial Sequence
  chemically synthesized
tatcaaatactttttctgtatc

SEQ ID NO: 29450 - DNA, 22 bp, Artificial Sequence
  chemically synthesized
atcaaatactttttctgtatct

SEQ ID NO: 29451 - DNA, 22 bp, Artificial Sequence
  chemically synthesized
tcaaatactttttctgtatcta

SEQ ID NO: 29452 - DNA, 22 bp, Artificial Sequence
  chemically synthesized
tttctgtatctattgagatgat

SEQ ID NO: 29453 - DNA, 22 bp, Artificial Sequence
  chemically synthesized
ttctgtatctattgagatgatc

SEQ ID NO: 29454 - DNA, 22 bp, Artificial Sequence
  chemically synthesized
tctgtatctattgagatgatca

SEQ ID NO: 29455 - DNA, 22 bp, Artificial Sequence
  chemically synthesized
ctgtatctattgagatgatcat

SEQ ID NO: 29456 - DNA, 22 bp, Artificial Sequence
  chemically synthesized
tgtatctattgagatgatcata

SEQ ID NO: 29457 - DNA, 22 bp, Artificial Sequence
  chemically synthesized
tatctattgagatgatcatatg

SEQ ID NO: 29458 - DNA, 22 bp, Artificial Sequence
  chemically synthesized
ttgagatgatcatatggttttt

SEQ ID NO: 29459 - DNA, 22 bp, Artificial Sequence
  chemically synthesized
agatgatcatatggtttttgtt

SEQ ID NO: 29460 - DNA, 22 bp, Artificial Sequence
  chemically synthesized
ttgttctttttgttgatgtgat

SEQ ID NO: 29461 - DNA, 22 bp, Artificial Sequence
  chemically synthesized
tgttctttttgttgatgtgatg

SEQ ID NO: 29462 - DNA, 22 bp, Artificial Sequence
  chemically synthesized
gttctttttgttgatgtgatgt

SEQ ID NO: 29463 - DNA, 22 bp, Artificial Sequence
  chemically synthesized
ttctttttgttgatgtgatgta

SEQ ID NO: 29464 - DNA, 22 bp, Artificial Sequence
  chemically synthesized
tttttgttgatgtgatgtatca

SEQ ID NO: 29465 - DNA, 22 bp, Artificial Sequence
  chemically synthesized
tttgttgatgtgatgtatcaca

SEQ ID NO: 29466 - DNA, 22 bp, Artificial Sequence
  chemically synthesized
ttgttgatgtgatgtatcacat

SEQ ID NO: 29467 - DNA, 22 bp, Artificial Sequence
  chemically synthesized
tgttgatgtgatgtatcacatt

SEQ ID NO: 29468 - DNA, 22 bp, Artificial Sequence
  chemically synthesized
gttgatgtgatgtatcacattt

SEQ ID NO: 29469 - DNA, 22 bp, Artificial Sequence
  chemically synthesized
ttgatgtgatgtatcacattta

SEQ ID NO: 29470 - DNA, 22 bp, Artificial Sequence
  chemically synthesized
atgtgatgtatcacatttattg

SEQ ID NO: 29471 - DNA, 22 bp, Artificial Sequence
  chemically synthesized
attgatttgaactgttcttgca

SEQ ID NO: 29472 - DNA, 22 bp, Artificial Sequence
  chemically synthesized
ttgatttgaactgttcttgcaa

SEQ ID NO: 29473 - DNA, 22 bp, Artificial Sequence
  chemically synthesized
atttgaactgttcttgcaaccc

SEQ ID NO: 29474 - DNA, 22 bp, Artificial Sequence
  chemically synthesized
gaactgttcttgcaaccctagt

SEQ ID NO: 29475 - DNA, 22 bp, Artificial Sequence
  chemically synthesized
aactgttcttgcaaccctagta

SEQ ID NO: 29476 - DNA, 22 bp, Artificial Sequence
  chemically synthesized
ttcttgcaaccctagtataaat

SEQ ID NO: 29477 - DNA, 22 bp, Artificial Sequence
  chemically synthesized
ttgcaaccctagtataaatccc

SEQ ID NO: 29478 - DNA, 22 bp, Artificial Sequence
  chemically synthesized
gcaaccctagtataaatcccac

SEQ ID NO: 29479 - DNA, 22 bp, Artificial Sequence
  chemically synthesized
caaccctagtataaatcccact

SEQ ID NO: 29480 - DNA, 22 bp, Artificial Sequence
  chemically synthesized
gtataaatcccacttgatcatg

SEQ ID NO: 29481 - DNA, 22 bp, Artificial Sequence
  chemically synthesized
gatcatggtgtattatcttttg

SEQ ID NO: 29482 - DNA, 22 bp, Artificial Sequence
  chemically synthesized
atcatggtgtattatcttttgg

SEQ ID NO: 29483 - DNA, 22 bp, Artificial Sequence
  chemically synthesized
tcttttggatgtactgttggat

SEQ ID NO: 29484 - DNA, 22 bp, Artificial Sequence
  chemically synthesized
ttggatgtactgttggattcag

SEQ ID NO: 29485 - DNA, 22 bp, Artificial Sequence
  chemically synthesized
tggatgtactgttggattcagt

SEQ ID NO: 29486 - DNA, 22 bp, Artificial Sequence
  chemically synthesized
ggatgtactgttggattcagtt

SEQ ID NO: 29487 - DNA, 22 bp, Artificial Sequence
  chemically synthesized
gatgtactgttggattcagttt

SEQ ID NO: 29488 - DNA, 22 bp, Artificial Sequence
  chemically synthesized
ttggattcagtttgctagtatt

SEQ ID NO: 29489 - DNA, 22 bp, Artificial Sequence
  chemically synthesized
gattcagtttgctagtattttg

SEQ ID NO: 29490 - DNA, 22 bp, Artificial Sequence
  chemically synthesized
agtttgctagtattttgttgag

SEQ ID NO: 29491 - DNA, 22 bp, Artificial Sequence
  chemically synthesized
gctagtattttgttgaggattt

SEQ ID NO: 29492 - DNA, 22 bp, Artificial Sequence
  chemically synthesized
ctagtattttgttgaggatttt

SEQ ID NO: 29493 - DNA, 22 bp, Artificial Sequence
  chemically synthesized
gtattttgttgaggattttcac

SEQ ID NO: 29494 - DNA, 22 bp, Artificial Sequence
  chemically synthesized
tgttgaggattttcacacctat

SEQ ID NO: 29495 - DNA, 22 bp, Artificial Sequence
  chemically synthesized
gttgaggattttcacacctatg

SEQ ID NO: 29496 - DNA, 22 bp, Artificial Sequence
  chemically synthesized
ttgaggattttcacacctatgt

SEQ ID NO: 29497 - DNA, 22 bp, Artificial Sequence
  chemically synthesized
aggattttcacacctatgttcc

SEQ ID NO: 29498 - DNA, 22 bp, Artificial Sequence
  chemically synthesized
tcacacctatgttccatcaggg

SEQ ID NO: 29499 - DNA, 22 bp, Artificial Sequence
  chemically synthesized
cacacctatgttccatcaggga

SEQ ID NO: 29500 - DNA, 22 bp, Artificial Sequence
  chemically synthesized
acacctatgttccatcagggat

SEQ ID NO: 29501 - DNA, 22 bp, Artificial Sequence
  chemically synthesized
tgttccatcagggatattgacc

SEQ ID NO: 29502 - DNA, 22 bp, Artificial Sequence
  chemically synthesized
catcagggatattgacctgcag

SEQ ID NO: 29503 - DNA, 22 bp, Artificial Sequence
  chemically synthesized
acctgcagttttatttttactt

SEQ ID NO: 29504 - DNA, 22 bp, Artificial Sequence
  chemically synthesized
cagttttatttttacttgcatc

SEQ ID NO: 29505 - DNA, 22 bp, Artificial Sequence
  chemically synthesized
tatttttacttgcatccttgtc

SEQ ID NO: 29506 - DNA, 22 bp, Artificial Sequence
  chemically synthesized
atttttacttgcatccttgtct

SEQ ID NO: 29507 - DNA, 22 bp, Artificial Sequence
  chemically synthesized
tttttacttgcatccttgtctg

SEQ ID NO: 29508 - DNA, 22 bp, Artificial Sequence
  chemically synthesized
ttacttgcatccttgtctggtt

SEQ ID NO: 29509 - DNA, 22 bp, Artificial Sequence
  chemically synthesized
tacttgcatccttgtctggtta

SEQ ID NO: 29510 - DNA, 22 bp, Artificial Sequence
  chemically synthesized
acttgcatccttgtctggttat

SEQ ID NO: 29511 - DNA, 22 bp, Artificial Sequence
  chemically synthesized
cttgcatccttgtctggttatg

SEQ ID NO: 29512 - DNA, 22 bp, Artificial Sequence
  chemically synthesized
gcatccttgtctggttatggaa

SEQ ID NO: 29513 - DNA, 22 bp, Artificial Sequence
  chemically synthesized
catccttgtctggttatggaat

SEQ ID NO: 29514 - DNA, 22 bp, Artificial Sequence
  chemically synthesized
gtctggttatggaatcaggata

SEQ ID NO: 29515 - DNA, 22 bp, Artificial Sequence
  chemically synthesized
tctggttatggaatcaggataa

SEQ ID NO: 29516 - DNA, 22 bp, Artificial Sequence
  chemically synthesized
gttatggaatcaggataatact

SEQ ID NO: 29517 - DNA, 22 bp, Artificial Sequence
  chemically synthesized
tggaatcaggataatactggcc

SEQ ID NO: 29518 - DNA, 22 bp, Artificial Sequence
  chemically synthesized
gcctcagagaatgagttaggga

SEQ ID NO: 29519 - DNA, 22 bp, Artificial Sequence
  chemically synthesized
agagaatgagttagggagaatt

SEQ ID NO: 29520 - DNA, 22 bp, Artificial Sequence
  chemically synthesized
gggagaattccttcctgtttaa

SEQ ID NO: 29521 - DNA, 22 bp, Artificial Sequence
  chemically synthesized
cttcctgtttaatttttaaaag

SEQ ID NO: 29522 - DNA, 22 bp, Artificial Sequence
  chemically synthesized
cctgtttaatttttaaaagaat

SEQ ID NO: 29523 - DNA, 22 bp, Artificial Sequence
  chemically synthesized
ctgtttaatttttaaaagaatt

SEQ ID NO: 29524 - DNA, 22 bp, Artificial Sequence
  chemically synthesized
tttaatttttaaaagaatttaa

SEQ ID NO: 29525 - DNA, 22 bp, Artificial Sequence
  chemically synthesized
aatttttaaaagaatttaagga

SEQ ID NO: 29526 - DNA, 22 bp, Artificial Sequence
  chemically synthesized
atttttaaaagaatttaaggag

SEQ ID NO: 29527 - DNA, 22 bp, Artificial Sequence
  chemically synthesized
ttaaaagaatttaaggagactt

SEQ ID NO: 29528 - DNA, 22 bp, Artificial Sequence
  chemically synthesized
taaaagaatttaaggagacttg

SEQ ID NO: 29529 - DNA, 22 bp, Artificial Sequence
  chemically synthesized
aaaagaatttaaggagacttgt

SEQ ID NO: 29530 - DNA, 22 bp, Artificial Sequence
  chemically synthesized
aaagaatttaaggagacttgtt

SEQ ID NO: 29531 - DNA, 22 bp, Artificial Sequence
  chemically synthesized
aaggagacttgttagttttctt

SEQ ID NO: 29532 - DNA, 22 bp, Artificial Sequence
  chemically synthesized
aggagacttgttagttttcttt

SEQ ID NO: 29533 - DNA, 22 bp, Artificial Sequence
  chemically synthesized
gttagttttctttgaaagtttg

SEQ ID NO: 29534 - DNA, 22 bp, Artificial Sequence
  chemically synthesized
ttagttttctttgaaagtttgg

SEQ ID NO: 29535 - DNA, 22 bp, Artificial Sequence
  chemically synthesized
gttttctttgaaagtttggtaa

SEQ ID NO: 29536 - DNA, 22 bp, Artificial Sequence
  chemically synthesized
tctttgaaagtttggtaaaatt

SEQ ID NO: 29537 - DNA, 22 bp, Artificial Sequence
  chemically synthesized
ctttgaaagtttggtaaaattt

SEQ ID NO: 29538 - DNA, 22 bp, Artificial Sequence
  chemically synthesized
tttgaaagtttggtaaaatttg

SEQ ID NO: 29539 - DNA, 22 bp, Artificial Sequence
  chemically synthesized
tgaaagtttggtaaaatttgac

SEQ ID NO: 29540 - DNA, 22 bp, Artificial Sequence
  chemically synthesized
gaaagtttggtaaaatttgaca

SEQ ID NO: 29541 - DNA, 22 bp, Artificial Sequence
  chemically synthesized
aaagtttggtaaaatttgacag

SEQ ID NO: 29542 - DNA, 22 bp, Artificial Sequence
  chemically synthesized
ggtaaaatttgacagtaaagcc

SEQ ID NO: 29543 - DNA, 22 bp, Artificial Sequence
  chemically synthesized
gtaaaatttgacagtaaagcca

SEQ ID NO: 29544 - DNA, 22 bp, Artificial Sequence
  chemically synthesized
gacagtaaagccatctggtctt

SEQ ID NO: 29545 - DNA, 22 bp, Artificial Sequence
  chemically synthesized
acagtaaagccatctggtcttg

SEQ ID NO: 29546 - DNA, 22 bp, Artificial Sequence
  chemically synthesized
gtcttgaaattttcttttttgg

SEQ ID NO: 29547 - DNA, 22 bp, Artificial Sequence
  chemically synthesized
gaaattttcttttttgggagac

SEQ ID NO: 29548 - DNA, 22 bp, Artificial Sequence
  chemically synthesized
aaattttcttttttgggagact

SEQ ID NO: 29549 - DNA, 22 bp, Artificial Sequence
  chemically synthesized
tcttttttgggagactttttac

SEQ ID NO: 29550 - DNA, 22 bp, Artificial Sequence
  chemically synthesized
cttttttgggagactttttact

SEQ ID NO: 29551 - DNA, 22 bp, Artificial Sequence
  chemically synthesized
ttttttgggagactttttacta

SEQ ID NO: 29552 - DNA, 22 bp, Artificial Sequence
  chemically synthesized
ttttgggagactttttactact

SEQ ID NO: 29553 - DNA, 22 bp, Artificial Sequence
  chemically synthesized
tttgggagactttttactactg

SEQ ID NO: 29554 - DNA, 22 bp, Artificial Sequence
  chemically synthesized
ttgggagactttttactactga

SEQ ID NO: 29555 - DNA, 22 bp, Artificial Sequence
  chemically synthesized
tgggagactttttactactgat

SEQ ID NO: 29556 - DNA, 22 bp, Artificial Sequence
  chemically synthesized
gggagactttttactactgatt

SEQ ID NO: 29557 - DNA, 22 bp, Artificial Sequence
  chemically synthesized
ggagactttttactactgattc

SEQ ID NO: 29558 - DNA, 22 bp, Artificial Sequence
  chemically synthesized
tttactactgattcaatttcat

SEQ ID NO: 29559 - DNA, 22 bp, Artificial Sequence
  chemically synthesized
ttactactgattcaatttcatt

SEQ ID NO: 29560 - DNA, 22 bp, Artificial Sequence
  chemically synthesized
tactactgattcaatttcatta

SEQ ID NO: 29561 - DNA, 22 bp, Artificial Sequence
  chemically synthesized
actactgattcaatttcattat

SEQ ID NO: 29562 - DNA, 22 bp, Artificial Sequence
  chemically synthesized
ctactgattcaatttcattatt

SEQ ID NO: 29563 - DNA, 22 bp, Artificial Sequence
  chemically synthesized
ctgattcaatttcattattcat

SEQ ID NO: 29564 - DNA, 22 bp, Artificial Sequence
  chemically synthesized
attcaatttcattattcattac

SEQ ID NO: 29565 - DNA, 22 bp, Artificial Sequence
  chemically synthesized
aatttcattattcattactggt

SEQ ID NO: 29566 - DNA, 22 bp, Artificial Sequence
  chemically synthesized
cattattcattactggtctgtt

SEQ ID NO: 29567 - DNA, 22 bp, Artificial Sequence
  chemically synthesized
attattcattactggtctgttc

SEQ ID NO: 29568 - DNA, 22 bp, Artificial Sequence
  chemically synthesized
ttcattactggtctgttcaggt

SEQ ID NO: 29569 - DNA, 22 bp, Artificial Sequence
  chemically synthesized
attactggtctgttcaggtttt

SEQ ID NO: 29570 - DNA, 22 bp, Artificial Sequence
  chemically synthesized
ctggtctgttcaggttttctat

SEQ ID NO: 29571 - DNA, 22 bp, Artificial Sequence
  chemically synthesized
gtctgttcaggttttctattct

SEQ ID NO: 29572 - DNA, 22 bp, Artificial Sequence
  chemically synthesized
ttcaggttttctattctttctt

SEQ ID NO: 29573 - DNA, 22 bp, Artificial Sequence
  chemically synthesized
aggttttctattctttcttaat

SEQ ID NO: 29574 - DNA, 22 bp, Artificial Sequence
  chemically synthesized
tctattctttcttaattcaatc

SEQ ID NO: 29575 - DNA, 22 bp, Artificial Sequence
  chemically synthesized
ctattctttcttaattcaatct

SEQ ID NO: 29576 - DNA, 22 bp, Artificial Sequence
  chemically synthesized
tattctttcttaattcaatctt

SEQ ID NO: 29577 - DNA, 22 bp, Artificial Sequence
  chemically synthesized
ttctttcttaattcaatcttgg

SEQ ID NO: 29578 - DNA, 22 bp, Artificial Sequence
  chemically synthesized
tttcttaattcaatcttggtag

SEQ ID NO: 29579 - DNA, 22 bp, Artificial Sequence
  chemically synthesized
tcttaattcaatcttggtaggt

SEQ ID NO: 29580 - DNA, 22 bp, Artificial Sequence
  chemically synthesized
cttaattcaatcttggtaggtg

SEQ ID NO: 29581 - DNA, 22 bp, Artificial Sequence
  chemically synthesized
ttaattcaatcttggtaggtgg

SEQ ID NO: 29582 - DNA, 22 bp, Artificial Sequence
  chemically synthesized
aattcaatcttggtaggtggta

SEQ ID NO: 29583 - DNA, 22 bp, Artificial Sequence
  chemically synthesized
attcaatcttggtaggtggtat

SEQ ID NO: 29584 - DNA, 22 bp, Artificial Sequence
  chemically synthesized
aatcttggtaggtggtatgtgt

SEQ ID NO: 29585 - DNA, 22 bp, Artificial Sequence
  chemically synthesized
ggtaggtggtatgtgtccagaa

SEQ ID NO: 29586 - DNA, 22 bp, Artificial Sequence
  chemically synthesized
gtaggtggtatgtgtccagaaa

SEQ ID NO: 29587 - DNA, 22 bp, Artificial Sequence
  chemically synthesized
attaatttcctctagatttttc

SEQ ID NO: 29588 - DNA, 22 bp, Artificial Sequence
  chemically synthesized
ttaatttcctctagatttttca

SEQ ID NO: 29589 - DNA, 22 bp, Artificial Sequence
  chemically synthesized
atttcctctagatttttcagtt

SEQ ID NO: 29590 - DNA, 22 bp, Artificial Sequence
  chemically synthesized
cctctagatttttcagtttttt

SEQ ID NO: 29591 - DNA, 22 bp, Artificial Sequence
  chemically synthesized
ctctagatttttcagtttttta

SEQ ID NO: 29592 - DNA, 22 bp, Artificial Sequence
  chemically synthesized
tagatttttcagttttttagtg

SEQ ID NO: 29593 - DNA, 22 bp, Artificial Sequence
  chemically synthesized
gatttttcagttttttagtgta

SEQ ID NO: 29594 - DNA, 22 bp, Artificial Sequence
  chemically synthesized
ttcagttttttagtgtatggtt

SEQ ID NO: 29595 - DNA, 22 bp, Artificial Sequence
  chemically synthesized
tcagttttttagtgtatggttg

SEQ ID NO: 29596 - DNA, 22 bp, Artificial Sequence
  chemically synthesized
cagttttttagtgtatggttgt

SEQ ID NO: 29597 - DNA, 22 bp, Artificial Sequence
  chemically synthesized
agttttttagtgtatggttgtt

SEQ ID NO: 29598 - DNA, 22 bp, Artificial Sequence
  chemically synthesized
tttagtgtatggttgttcataa

SEQ ID NO: 29599 - DNA, 22 bp, Artificial Sequence
  chemically synthesized
ttagtgtatggttgttcataat

SEQ ID NO: 29600 - DNA, 22 bp, Artificial Sequence
  chemically synthesized
tagtgtatggttgttcataata

SEQ ID NO: 29601 - DNA, 22 bp, Artificial Sequence
  chemically synthesized
agtgtatggttgttcataatag

SEQ ID NO: 29602 - DNA, 22 bp, Artificial Sequence
  chemically synthesized
gtgtatggttgttcataatagt

SEQ ID NO: 29603 - DNA, 22 bp, Artificial Sequence
  chemically synthesized
ttcataatagtctctgataatc

SEQ ID NO: 29604 - DNA, 22 bp, Artificial Sequence
  chemically synthesized
ataatagtctctgataatcttt

SEQ ID NO: 29605 - DNA, 22 bp, Artificial Sequence
  chemically synthesized
tgataatcttttctatttctgt

SEQ ID NO: 29606 - DNA, 22 bp, Artificial Sequence
  chemically synthesized
ataatcttttctatttctgtgg

SEQ ID NO: 29607 - DNA, 22 bp, Artificial Sequence
  chemically synthesized
ttctatttctgtggtatcggtt

SEQ ID NO: 29608 - DNA, 22 bp, Artificial Sequence
  chemically synthesized
tctatttctgtggtatcggttg

SEQ ID NO: 29609 - DNA, 22 bp, Artificial Sequence
  chemically synthesized
ctatttctgtggtatcggttgt

SEQ ID NO: 29610 - DNA, 22 bp, Artificial Sequence
  chemically synthesized
tatttctgtggtatcggttgta

SEQ ID NO: 29611 - DNA, 22 bp, Artificial Sequence
  chemically synthesized
tttctgtggtatcggttgtaat

SEQ ID NO: 29612 - DNA, 22 bp, Artificial Sequence
  chemically synthesized
ctgtggtatcggttgtaatata

SEQ ID NO: 29613 - DNA, 22 bp, Artificial Sequence
  chemically synthesized
tgtggtatcggttgtaatatat

SEQ ID NO: 29614 - DNA, 22 bp, Artificial Sequence
  chemically synthesized
tggtatcggttgtaatatattt

SEQ ID NO: 29615 - DNA, 22 bp, Artificial Sequence
  chemically synthesized
taatatattttcttttttattt

SEQ ID NO: 29616 - DNA, 22 bp, Artificial Sequence
  chemically synthesized
tcttttttatttctgattttct

SEQ ID NO: 29617 - DNA, 22 bp, Artificial Sequence
  chemically synthesized
cttttttatttctgattttctt

SEQ ID NO: 29618 - DNA, 22 bp, Artificial Sequence
  chemically synthesized
ttttttatttctgattttcttt

SEQ ID NO: 29619 - DNA, 22 bp, Artificial Sequence
  chemically synthesized
ttttatttctgattttctttat

SEQ ID NO: 29620 - DNA, 22 bp, Artificial Sequence
  chemically synthesized
tttatttctgattttctttatt

SEQ ID NO: 29621 - DNA, 22 bp, Artificial Sequence
  chemically synthesized
ttatttctgattttctttattt

SEQ ID NO: 29622 - DNA, 22 bp, Artificial Sequence
  chemically synthesized
tatttctgattttctttatttc

SEQ ID NO: 29623 - DNA, 22 bp, Artificial Sequence
  chemically synthesized
atttctgattttctttatttca

SEQ ID NO: 29624 - DNA, 22 bp, Artificial Sequence
  chemically synthesized
tttctgattttctttatttcag

SEQ ID NO: 29625 - DNA, 22 bp, Artificial Sequence
  chemically synthesized
ctgattttctttatttcagtct

SEQ ID NO: 29626 - DNA, 22 bp, Artificial Sequence
  chemically synthesized
tgattttctttatttcagtctc

SEQ ID NO: 29627 - DNA, 22 bp, Artificial Sequence
  chemically synthesized
attttctttatttcagtctctt

SEQ ID NO: 29628 - DNA, 22 bp, Artificial Sequence
  chemically synthesized
tctttatttcagtctcttctct

SEQ ID NO: 29629 - DNA, 22 bp, Artificial Sequence
  chemically synthesized
ctttatttcagtctcttctctt

SEQ ID NO: 29630 - DNA, 22 bp, Artificial Sequence
  chemically synthesized
tttatttcagtctcttctcttt

SEQ ID NO: 29631 - DNA, 22 bp, Artificial Sequence
  chemically synthesized
tatttcagtctcttctcttttt

SEQ ID NO: 29632 - DNA, 22 bp, Artificial Sequence
  chemically synthesized
atttcagtctcttctctttttc

SEQ ID NO: 29633 - DNA, 22 bp, Artificial Sequence
  chemically synthesized
tttcagtctcttctctttttct

SEQ ID NO: 29634 - DNA, 22 bp, Artificial Sequence
  chemically synthesized
cagtctcttctctttttcttgg

SEQ ID NO: 29635 - DNA, 22 bp, Artificial Sequence
  chemically synthesized
agtctcttctctttttcttggt

SEQ ID NO: 29636 - DNA, 22 bp, Artificial Sequence
  chemically synthesized
ttctctttttcttggttagtct

SEQ ID NO: 29637 - DNA, 22 bp, Artificial Sequence
  chemically synthesized
ctctttttcttggttagtctag

SEQ ID NO: 29638 - DNA, 22 bp, Artificial Sequence
  chemically synthesized
tctttttcttggttagtctagc

SEQ ID NO: 29639 - DNA, 22 bp, Artificial Sequence
  chemically synthesized
tttttcttggttagtctagcta

SEQ ID NO: 29640 - DNA, 22 bp, Artificial Sequence
  chemically synthesized
tttcttggttagtctagctaga

SEQ ID NO: 29641 - DNA, 22 bp, Artificial Sequence
  chemically synthesized
ttcttggttagtctagctagag

SEQ ID NO: 29642 - DNA, 22 bp, Artificial Sequence
  chemically synthesized
tcttggttagtctagctagagc

SEQ ID NO: 29643 - DNA, 22 bp, Artificial Sequence
  chemically synthesized
cttggttagtctagctagagct

SEQ ID NO: 29644 - DNA, 22 bp, Artificial Sequence
  chemically synthesized
ttggttagtctagctagagcta

SEQ ID NO: 29645 - DNA, 22 bp, Artificial Sequence
  chemically synthesized
ggttagtctagctagagctata

SEQ ID NO: 29646 - DNA, 22 bp, Artificial Sequence
  chemically synthesized
gttagtctagctagagctatat

SEQ ID NO: 29647 - DNA, 22 bp, Artificial Sequence
  chemically synthesized
gtctagctagagctatatccat

SEQ ID NO: 29648 - DNA, 22 bp, Artificial Sequence
  chemically synthesized
gctagagctatatccattttat

SEQ ID NO: 29649 - DNA, 22 bp, Artificial Sequence
  chemically synthesized
gagctatatccattttatcttt

SEQ ID NO: 29650 - DNA, 22 bp, Artificial Sequence
  chemically synthesized
tatccattttatcttttttaaa

SEQ ID NO: 29651 - DNA, 22 bp, Artificial Sequence
  chemically synthesized
tatcttttttaaataacaactt

SEQ ID NO: 29652 - DNA, 22 bp, Artificial Sequence
  chemically synthesized
atcttttttaaataacaacttt

SEQ ID NO: 29653 - DNA, 22 bp, Artificial Sequence
  chemically synthesized
tcttttttaaataacaactttt

SEQ ID NO: 29654 - DNA, 22 bp, Artificial Sequence
  chemically synthesized
ttttaaataacaacttttcatt

SEQ ID NO: 29655 - DNA, 22 bp, Artificial Sequence
  chemically synthesized
tttaaataacaacttttcattt

SEQ ID NO: 29656 - DNA, 22 bp, Artificial Sequence
  chemically synthesized
ttaaataacaacttttcatttt

SEQ ID NO: 29657 - DNA, 22 bp, Artificial Sequence
  chemically synthesized
taaataacaacttttcattttg

SEQ ID NO: 29658 - DNA, 22 bp, Artificial Sequence
  chemically synthesized
aaataacaacttttcattttgc

SEQ ID NO: 29659 - DNA, 22 bp, Artificial Sequence
  chemically synthesized
aataacaacttttcattttgct

SEQ ID NO: 29660 - DNA, 22 bp, Artificial Sequence
  chemically synthesized
ttcattttgctaatcccttgtt

SEQ ID NO: 29661 - DNA, 22 bp, Artificial Sequence
  chemically synthesized
tcattttgctaatcccttgttg

SEQ ID NO: 29662 - DNA, 22 bp, Artificial Sequence
  chemically synthesized
cattttgctaatcccttgttgt

SEQ ID NO: 29663 - DNA, 22 bp, Artificial Sequence
  chemically synthesized
attttgctaatcccttgttgtt

SEQ ID NO: 29664 - DNA, 22 bp, Artificial Sequence
  chemically synthesized
tgctaatcccttgttgttgttt

SEQ ID NO: 29665 - DNA, 22 bp, Artificial Sequence
  chemically synthesized
gctaatcccttgttgttgtttt

SEQ ID NO: 29666 - DNA, 22 bp, Artificial Sequence
  chemically synthesized
ctaatcccttgttgttgttttt

SEQ ID NO: 29667 - DNA, 22 bp, Artificial Sequence
  chemically synthesized
atcccttgttgttgtttttctc

SEQ ID NO: 29668 - DNA, 22 bp, Artificial Sequence
  chemically synthesized
gttgttgtttttctctatttca

SEQ ID NO: 29669 - DNA, 22 bp, Artificial Sequence
  chemically synthesized
ttgttgtttttctctatttcat

SEQ ID NO: 29670 - DNA, 22 bp, Artificial Sequence
  chemically synthesized
ttgtttttctctatttcattaa

SEQ ID NO: 29671 - DNA, 22 bp, Artificial Sequence
  chemically synthesized
tttttctctatttcattaagtt

SEQ ID NO: 29672 - DNA, 22 bp, Artificial Sequence
  chemically synthesized
ttctctatttcattaagttctt

SEQ ID NO: 29673 - DNA, 22 bp, Artificial Sequence
  chemically synthesized
tctctatttcattaagttcttc

SEQ ID NO: 29674 - DNA, 22 bp, Artificial Sequence
  chemically synthesized
ctctatttcattaagttcttct

SEQ ID NO: 29675 - DNA, 22 bp, Artificial Sequence
  chemically synthesized
tctatttcattaagttcttctg

SEQ ID NO: 29676 - DNA, 22 bp, Artificial Sequence
  chemically synthesized
tatttcattaagttcttctgtt

SEQ ID NO: 29677 - DNA, 22 bp, Artificial Sequence
  chemically synthesized
tttcattaagttcttctgttct

SEQ ID NO: 29678 - DNA, 22 bp, Artificial Sequence
  chemically synthesized
cattaagttcttctgttcttca

SEQ ID NO: 29679 - DNA, 22 bp, Artificial Sequence
  chemically synthesized
attaagttcttctgttcttcat

SEQ ID NO: 29680 - DNA, 22 bp, Artificial Sequence
  chemically synthesized
agttcttctgttcttcattttt

SEQ ID NO: 29681 - DNA, 22 bp, Artificial Sequence
  chemically synthesized
ttctgttcttcattttttcttt

SEQ ID NO: 29682 - DNA, 22 bp, Artificial Sequence
  chemically synthesized
ctgttcttcattttttctttcc

SEQ ID NO: 29683 - DNA, 22 bp, Artificial Sequence
  chemically synthesized
tgttcttcattttttctttcct

SEQ ID NO: 29684 - DNA, 22 bp, Artificial Sequence
  chemically synthesized
ttcttcattttttctttccttc

SEQ ID NO: 29685 - DNA, 22 bp, Artificial Sequence
  chemically synthesized
ttcattttttctttccttctgc

SEQ ID NO: 29686 - DNA, 22 bp, Artificial Sequence
  chemically synthesized
cattttttctttccttctgcta

SEQ ID NO: 29687 - DNA, 22 bp, Artificial Sequence
  chemically synthesized
attttttctttccttctgctag

SEQ ID NO: 29688 - DNA, 22 bp, Artificial Sequence
  chemically synthesized
tttctttccttctgctagtttt

SEQ ID NO: 29689 - DNA, 22 bp, Artificial Sequence
  chemically synthesized
ttctttccttctgctagttttg

SEQ ID NO: 29690 - DNA, 22 bp, Artificial Sequence
  chemically synthesized
tctttccttctgctagttttgg

SEQ ID NO: 29691 - DNA, 22 bp, Artificial Sequence
  chemically synthesized
ctttccttctgctagttttggg

SEQ ID NO: 29692 - DNA, 22 bp, Artificial Sequence
  chemically synthesized
tttccttctgctagttttgggt

SEQ ID NO: 29693 - DNA, 22 bp, Artificial Sequence
  chemically synthesized
tccttctgctagttttgggttt

SEQ ID NO: 29694 - DNA, 22 bp, Artificial Sequence
  chemically synthesized
ccttctgctagttttgggtttt

SEQ ID NO: 29695 - DNA, 22 bp, Artificial Sequence
  chemically synthesized
cttctgctagttttgggttttg

SEQ ID NO: 29696 - DNA, 22 bp, Artificial Sequence
  chemically synthesized
ctgctagttttgggttttgttc

SEQ ID NO: 29697 - DNA, 22 bp, Artificial Sequence
  chemically synthesized
tgctagttttgggttttgttct

SEQ ID NO: 29698 - DNA, 22 bp, Artificial Sequence
  chemically synthesized
ctagttttgggttttgttcttg

SEQ ID NO: 29699 - DNA, 22 bp, Artificial Sequence
  chemically synthesized
gttttgggttttgttcttgctt

SEQ ID NO: 29700 - DNA, 22 bp, Artificial Sequence
  chemically synthesized
tgggttttgttcttgcttttct

SEQ ID NO: 29701 - DNA, 22 bp, Artificial Sequence
  chemically synthesized
gggttttgttcttgcttttcta

SEQ ID NO: 29702 - DNA, 22 bp, Artificial Sequence
  chemically synthesized
ggttttgttcttgcttttctag

SEQ ID NO: 29703 - DNA, 22 bp, Artificial Sequence
  chemically synthesized
tgttcttgcttttctagcttgt

SEQ ID NO: 29704 - DNA, 22 bp, Artificial Sequence
  chemically synthesized
gttcttgcttttctagcttgtt

SEQ ID NO: 29705 - DNA, 22 bp, Artificial Sequence
  chemically synthesized
ttcttgcttttctagcttgttg

SEQ ID NO: 29706 - DNA, 22 bp, Artificial Sequence
  chemically synthesized
ttgcttttctagcttgttgagg

SEQ ID NO: 29707 - DNA, 22 bp, Artificial Sequence
  chemically synthesized
gcttttctagcttgttgaggta

SEQ ID NO: 29708 - DNA, 22 bp, Artificial Sequence
  chemically synthesized
cttttctagcttgttgaggtac

SEQ ID NO: 29709 - DNA, 22 bp, Artificial Sequence
  chemically synthesized
ttctagcttgttgaggtacatg

SEQ ID NO: 29710 - DNA, 22 bp, Artificial Sequence
  chemically synthesized
tctagcttgttgaggtacatga

SEQ ID NO: 29711 - DNA, 22 bp, Artificial Sequence
  chemically synthesized
ctagcttgttgaggtacatgat

SEQ ID NO: 29712 - DNA, 22 bp, Artificial Sequence
  chemically synthesized
tagcttgttgaggtacatgatt

SEQ ID NO: 29713 - DNA, 22 bp, Artificial Sequence
  chemically synthesized
gcttgttgaggtacatgattag

SEQ ID NO: 29714 - DNA, 22 bp, Artificial Sequence
  chemically synthesized
gttgaggtacatgattagatta

SEQ ID NO: 29715 - DNA, 22 bp, Artificial Sequence
  chemically synthesized
ttgaggtacatgattagattat

SEQ ID NO: 29716 - DNA, 22 bp, Artificial Sequence
  chemically synthesized
aggtacatgattagattatata

SEQ ID NO: 29717 - DNA, 22 bp, Artificial Sequence
  chemically synthesized
gattatatatttgaaatctttc

SEQ ID NO: 29718 - DNA, 22 bp, Artificial Sequence
  chemically synthesized
tatatttgaaatctttctatgt

SEQ ID NO: 29719 - DNA, 22 bp, Artificial Sequence
  chemically synthesized
gaaatctttctatgtttttaat

SEQ ID NO: 29720 - DNA, 22 bp, Artificial Sequence
  chemically synthesized
aaatctttctatgtttttaatt

SEQ ID NO: 29721 - DNA, 22 bp, Artificial Sequence
  chemically synthesized
tctatgtttttaatttaagtgt

SEQ ID NO: 29722 - DNA, 22 bp, Artificial Sequence
  chemically synthesized
ctatgtttttaatttaagtgtt

SEQ ID NO: 29723 - DNA, 22 bp, Artificial Sequence
  chemically synthesized
tatgtttttaatttaagtgttt

SEQ ID NO: 29724 - DNA, 22 bp, Artificial Sequence
  chemically synthesized
tgtttttaatttaagtgtttat

SEQ ID NO: 29725 - DNA, 22 bp, Artificial Sequence
  chemically synthesized
ttaatttaagtgtttattgata

SEQ ID NO: 29726 - DNA, 22 bp, Artificial Sequence
  chemically synthesized
taatttaagtgtttattgataa

SEQ ID NO: 29727 - DNA, 22 bp, Artificial Sequence
  chemically synthesized
aatttaagtgtttattgataag

SEQ ID NO: 29728 - DNA, 22 bp, Artificial Sequence
  chemically synthesized
atttaagtgtttattgataagc

SEQ ID NO: 29729 - DNA, 22 bp, Artificial Sequence
  chemically synthesized
aagtgtttattgataagcttct

SEQ ID NO: 29730 - DNA, 22 bp, Artificial Sequence
  chemically synthesized
agtgtttattgataagcttctc

SEQ ID NO: 29731 - DNA, 22 bp, Artificial Sequence
  chemically synthesized
attgataagcttctctcttagc

SEQ ID NO: 29732 - DNA, 22 bp, Artificial Sequence
  chemically synthesized
ttgataagcttctctcttagca

SEQ ID NO: 29733 - DNA, 22 bp, Artificial Sequence
  chemically synthesized
ataagcttctctcttagcactg

SEQ ID NO: 29734 - DNA, 22 bp, Artificial Sequence
  chemically synthesized
ctctcttagcactgcttttgct

SEQ ID NO: 29735 - DNA, 22 bp, Artificial Sequence
  chemically synthesized
tctcttagcactgcttttgctg

SEQ ID NO: 29736 - DNA, 22 bp, Artificial Sequence
  chemically synthesized
tcttagcactgcttttgctgta

SEQ ID NO: 29737 - DNA, 22 bp, Artificial Sequence
  chemically synthesized
ttagcactgcttttgctgtatc

SEQ ID NO: 29738 - DNA, 22 bp, Artificial Sequence
  chemically synthesized
agcactgcttttgctgtatccc

SEQ ID NO: 29739 - DNA, 22 bp, Artificial Sequence
  chemically synthesized
gcactgcttttgctgtatccca

SEQ ID NO: 29740 - DNA, 22 bp, Artificial Sequence
  chemically synthesized
cttttgctgtatcccatggctt

SEQ ID NO: 29741 - DNA, 22 bp, Artificial Sequence
  chemically synthesized
ttgctgtatcccatggcttttc

SEQ ID NO: 29742 - DNA, 22 bp, Artificial Sequence
  chemically synthesized
tgctgtatcccatggcttttcc

SEQ ID NO: 29743 - DNA, 22 bp, Artificial Sequence
  chemically synthesized
gctgtatcccatggcttttcct

SEQ ID NO: 29744 - DNA, 22 bp, Artificial Sequence
  chemically synthesized
ctgtatcccatggcttttccta

SEQ ID NO: 29745 - DNA, 22 bp, Artificial Sequence
  chemically synthesized
tatcccatggcttttcctatgt

SEQ ID NO: 29746 - DNA, 22 bp, Artificial Sequence
  chemically synthesized
ttcctatgttgtatttcaattt

SEQ ID NO: 29747 - DNA, 22 bp, Artificial Sequence
  chemically synthesized
tcctatgttgtatttcaatttt

SEQ ID NO: 29748 - DNA, 22 bp, Artificial Sequence
  chemically synthesized
cctatgttgtatttcaattttc

SEQ ID NO: 29749 - DNA, 22 bp, Artificial Sequence
  chemically synthesized
ctatgttgtatttcaattttca

SEQ ID NO: 29750 - DNA, 22 bp, Artificial Sequence
  chemically synthesized
tgttgtatttcaattttcattt

SEQ ID NO: 29751 - DNA, 22 bp, Artificial Sequence
  chemically synthesized
tatttcaattttcatttgtttc

SEQ ID NO: 29752 - DNA, 22 bp, Artificial Sequence
  chemically synthesized
caattttcatttgtttcaaaaa

SEQ ID NO: 29753 - DNA, 22 bp, Artificial Sequence
  chemically synthesized
aattttcatttgtttcaaaaaa

SEQ ID NO: 29754 - DNA, 22 bp, Artificial Sequence
  chemically synthesized
tcatttgtttcaaaaaattttt

SEQ ID NO: 29755 - DNA, 22 bp, Artificial Sequence
  chemically synthesized
catttgtttcaaaaaatttttg

SEQ ID NO: 29756 - DNA, 22 bp, Artificial Sequence
  chemically synthesized
atttgtttcaaaaaatttttga

SEQ ID NO: 29757 - DNA, 22 bp, Artificial Sequence
  chemically synthesized
gtttcaaaaaatttttgatttc

SEQ ID NO: 29758 - DNA, 22 bp, Artificial Sequence
  chemically synthesized
tttcaaaaaatttttgatttcc

SEQ ID NO: 29759 - DNA, 22 bp, Artificial Sequence
  chemically synthesized
caaaaaatttttgatttccttc

SEQ ID NO: 29760 - DNA, 22 bp, Artificial Sequence
  chemically synthesized
aaaaaatttttgatttccttct

SEQ ID NO: 29761 - DNA, 22 bp, Artificial Sequence
  chemically synthesized
ttgatttccttcttaattttct

SEQ ID NO: 29762 - DNA, 22 bp, Artificial Sequence
  chemically synthesized
tgatttccttcttaattttctt

SEQ ID NO: 29763 - DNA, 22 bp, Artificial Sequence
  chemically synthesized
gatttccttcttaattttcttc

SEQ ID NO: 29764 - DNA, 22 bp, Artificial Sequence
  chemically synthesized
atttccttcttaattttcttct

SEQ ID NO: 29765 - DNA, 22 bp, Artificial Sequence
  chemically synthesized
ccttcttaattttcttcttgac

SEQ ID NO: 29766 - DNA, 22 bp, Artificial Sequence
  chemically synthesized
cttcttaattttcttcttgaca

SEQ ID NO: 29767 - DNA, 22 bp, Artificial Sequence
  chemically synthesized
cttaattttcttcttgacataa

SEQ ID NO: 29768 - DNA, 22 bp, Artificial Sequence
  chemically synthesized
ttaattttcttcttgacataac

SEQ ID NO: 29769 - DNA, 22 bp, Artificial Sequence
  chemically synthesized
aattttcttcttgacataacgt

SEQ ID NO: 29770 - DNA, 22 bp, Artificial Sequence
  chemically synthesized
attttcttcttgacataacgtt

SEQ ID NO: 29771 - DNA, 22 bp, Artificial Sequence
  chemically synthesized
tcttcttgacataacgttcatt

SEQ ID NO: 29772 - DNA, 22 bp, Artificial Sequence
  chemically synthesized
cttcttgacataacgttcattc

SEQ ID NO: 29773 - DNA, 22 bp, Artificial Sequence
  chemically synthesized
ttcttgacataacgttcattca

SEQ ID NO: 29774 - DNA, 22 bp, Artificial Sequence
  chemically synthesized
cttgacataacgttcattcagg

SEQ ID NO: 29775 - DNA, 22 bp, Artificial Sequence
  chemically synthesized
ttgacataacgttcattcagga

SEQ ID NO: 29776 - DNA, 22 bp, Artificial Sequence
  chemically synthesized
gacataacgttcattcaggagc

SEQ ID NO: 29777 - DNA, 22 bp, Artificial Sequence
  chemically synthesized
acataacgttcattcaggagca

SEQ ID NO: 29778 - DNA, 22 bp, Artificial Sequence
  chemically synthesized
attcaggagcatgttgtttaat

SEQ ID NO: 29779 - DNA, 22 bp, Artificial Sequence
  chemically synthesized
aggagcatgttgtttaatttcc

SEQ ID NO: 29780 - DNA, 22 bp, Artificial Sequence
  chemically synthesized
tttaatttccatgtatttgtat

SEQ ID NO: 29781 - DNA, 22 bp, Artificial Sequence
  chemically synthesized
aatttccatgtatttgtatagg

SEQ ID NO: 29782 - DNA, 22 bp, Artificial Sequence
  chemically synthesized
atttccatgtatttgtataggt

SEQ ID NO: 29783 - DNA, 22 bp, Artificial Sequence
  chemically synthesized
ccatgtatttgtataggtttta

SEQ ID NO: 29784 - DNA, 22 bp, Artificial Sequence
  chemically synthesized
catgtatttgtataggttttaa

SEQ ID NO: 29785 - DNA, 22 bp, Artificial Sequence
  chemically synthesized
gtataggttttaaagtttttct

SEQ ID NO: 29786 - DNA, 22 bp, Artificial Sequence
  chemically synthesized
tataggttttaaagtttttctt

SEQ ID NO: 29787 - DNA, 22 bp, Artificial Sequence
  chemically synthesized
taaagtttttcttgttattgat

SEQ ID NO: 29788 - DNA, 22 bp, Artificial Sequence
  chemically synthesized
aaagtttttcttgttattgatt

SEQ ID NO: 29789 - DNA, 22 bp, Artificial Sequence
  chemically synthesized
aagtttttcttgttattgattt

SEQ ID NO: 29790 - DNA, 22 bp, Artificial Sequence
  chemically synthesized
ttcttgttattgatttctagtt

SEQ ID NO: 29791 - DNA, 22 bp, Artificial Sequence
  chemically synthesized
tcttgttattgatttctagttt

SEQ ID NO: 29792 - DNA, 22 bp, Artificial Sequence
  chemically synthesized
cttgttattgatttctagtttt

SEQ ID NO: 29793 - DNA, 22 bp, Artificial Sequence
  chemically synthesized
ttgttattgatttctagtttta

SEQ ID NO: 29794 - DNA, 22 bp, Artificial Sequence
  chemically synthesized
gttattgatttctagttttatt

SEQ ID NO: 29795 - DNA, 22 bp, Artificial Sequence
  chemically synthesized
ttattgatttctagttttattc

SEQ ID NO: 29796 - DNA, 22 bp, Artificial Sequence
  chemically synthesized
ttgatttctagttttattccat

SEQ ID NO: 29797 - DNA, 22 bp, Artificial Sequence
  chemically synthesized
atttctagttttattccattgt

SEQ ID NO: 29798 - DNA, 22 bp, Artificial Sequence
  chemically synthesized
ctagttttattccattgtggtc

SEQ ID NO: 29799 - DNA, 22 bp, Artificial Sequence
  chemically synthesized
tagttttattccattgtggtct

SEQ ID NO: 29800 - DNA, 22 bp, Artificial Sequence
  chemically synthesized
gttttattccattgtggtctga

SEQ ID NO: 29801 - DNA, 22 bp, Artificial Sequence
  chemically synthesized
tattccattgtggtctgagaag

SEQ ID NO: 29802 - DNA, 22 bp, Artificial Sequence
  chemically synthesized
attccattgtggtctgagaaga

SEQ ID NO: 29803 - DNA, 22 bp, Artificial Sequence
  chemically synthesized
ttccattgtggtctgagaagat

SEQ ID NO: 29804 - DNA, 22 bp, Artificial Sequence
  chemically synthesized
cattgtggtctgagaagatgct

SEQ ID NO: 29805 - DNA, 22 bp, Artificial Sequence
  chemically synthesized
tggtctgagaagatgcttaata

SEQ ID NO: 29806 - DNA, 22 bp, Artificial Sequence
  chemically synthesized
agaagatgcttaatatgatttc

SEQ ID NO: 29807 - DNA, 22 bp, Artificial Sequence
  chemically synthesized
aatatgatttcaaatatttcaa

SEQ ID NO: 29808 - DNA, 22 bp, Artificial Sequence
  chemically synthesized
atatgatttcaaatatttcaaa

SEQ ID NO: 29809 - DNA, 22 bp, Artificial Sequence
  chemically synthesized
caaatatttcaaattagttgag

SEQ ID NO: 29810 - DNA, 22 bp, Artificial Sequence
  chemically synthesized
aaatatttcaaattagttgaga

SEQ ID NO: 29811 - DNA, 22 bp, Artificial Sequence
  chemically synthesized
caaattagttgagacttctttt

SEQ ID NO: 29812 - DNA, 22 bp, Artificial Sequence
  chemically synthesized
aaattagttgagacttcttttg

SEQ ID NO: 29813 - DNA, 22 bp, Artificial Sequence
  chemically synthesized
gttgagacttcttttgtgttct

SEQ ID NO: 29814 - DNA, 22 bp, Artificial Sequence
  chemically synthesized
agacttcttttgtgttctaaca

SEQ ID NO: 29815 - DNA, 22 bp, Artificial Sequence
  chemically synthesized
cttttgtgttctaacatatggt

SEQ ID NO: 29816 - DNA, 22 bp, Artificial Sequence
  chemically synthesized
ttttgtgttctaacatatggtg

SEQ ID NO: 29817 - DNA, 22 bp, Artificial Sequence
  chemically synthesized
ttgtgttctaacatatggtgta

SEQ ID NO: 29818 - DNA, 22 bp, Artificial Sequence
  chemically synthesized
tgtgttctaacatatggtgtat

SEQ ID NO: 29819 - DNA, 22 bp, Artificial Sequence
  chemically synthesized
gtgttctaacatatggtgtatc

SEQ ID NO: 29820 - DNA, 22 bp, Artificial Sequence
  chemically synthesized
tgttctaacatatggtgtatcc

SEQ ID NO: 29821 - DNA, 22 bp, Artificial Sequence
  chemically synthesized
taacatatggtgtatcctgggg

SEQ ID NO: 29822 - DNA, 22 bp, Artificial Sequence
  chemically synthesized
acatatggtgtatcctggggaa

SEQ ID NO: 29823 - DNA, 22 bp, Artificial Sequence
  chemically synthesized
gggaatgcgtcatgtgctgatg

SEQ ID NO: 29824 - DNA, 22 bp, Artificial Sequence
  chemically synthesized
atgagataaatatattctgtag

SEQ ID NO: 29825 - DNA, 22 bp, Artificial Sequence
  chemically synthesized
tgtagctgttggatgaaatatt

SEQ ID NO: 29826 - DNA, 22 bp, Artificial Sequence
  chemically synthesized
tagctgttggatgaaatattgt

SEQ ID NO: 29827 - DNA, 22 bp, Artificial Sequence
  chemically synthesized
ttggatgaaatattgtgtaaat

SEQ ID NO: 29828 - DNA, 22 bp, Artificial Sequence
  chemically synthesized
gatgaaatattgtgtaaatgtt

SEQ ID NO: 29829 - DNA, 22 bp, Artificial Sequence
  chemically synthesized
tgtaaatgttagatccatttgg

SEQ ID NO: 29830 - DNA, 22 bp, Artificial Sequence
  chemically synthesized
gatccatttggtctaaagtcaa

SEQ ID NO: 29831 - DNA, 22 bp, Artificial Sequence
  chemically synthesized
ggtctaaagtcaagtttaaatc

SEQ ID NO: 29832 - DNA, 22 bp, Artificial Sequence
  chemically synthesized
gtctaaagtcaagtttaaatcc

SEQ ID NO: 29833 - DNA, 22 bp, Artificial Sequence
  chemically synthesized
aagtcaagtttaaatccaatgt

SEQ ID NO: 29834 - DNA, 22 bp, Artificial Sequence
  chemically synthesized
aaatccaatgtttctttgttaa

SEQ ID NO: 29835 - DNA, 22 bp, Artificial Sequence
  chemically synthesized
aatccaatgtttctttgttaat

SEQ ID NO: 29836 - DNA, 22 bp, Artificial Sequence
  chemically synthesized
ctttgttaattttctgtctaga

SEQ ID NO: 29837 - DNA, 22 bp, Artificial Sequence
  chemically synthesized
tttgttaattttctgtctagat

SEQ ID NO: 29838 - DNA, 22 bp, Artificial Sequence
  chemically synthesized
tgttaattttctgtctagatga

SEQ ID NO: 29839 - DNA, 22 bp, Artificial Sequence
  chemically synthesized
gttaattttctgtctagatgat

SEQ ID NO: 29840 - DNA, 22 bp, Artificial Sequence
  chemically synthesized
ttaattttctgtctagatgatc

SEQ ID NO: 29841 - DNA, 22 bp, Artificial Sequence
  chemically synthesized
attttctgtctagatgatctat

SEQ ID NO: 29842 - DNA, 22 bp, Artificial Sequence
  chemically synthesized
tctgtctagatgatctatctga

SEQ ID NO: 29843 - DNA, 22 bp, Artificial Sequence
  chemically synthesized
ctgtctagatgatctatctgat

SEQ ID NO: 29844 - DNA, 22 bp, Artificial Sequence
  chemically synthesized
tgtctagatgatctatctgatg

SEQ ID NO: 29845 - DNA, 22 bp, Artificial Sequence
  chemically synthesized
tctagatgatctatctgatgct

SEQ ID NO: 29846 - DNA, 22 bp, Artificial Sequence
  chemically synthesized
gatgatctatctgatgctgaga

SEQ ID NO: 29847 - DNA, 22 bp, Artificial Sequence
  chemically synthesized
tctgatgctgagattagaatgt

SEQ ID NO: 29848 - DNA, 22 bp, Artificial Sequence
  chemically synthesized
atgctgagattagaatgttgaa

SEQ ID NO: 29849 - DNA, 22 bp, Artificial Sequence
  chemically synthesized
agattagaatgttgaaatcccc

SEQ ID NO: 29850 - DNA, 22 bp, Artificial Sequence
  chemically synthesized
gaatgttgaaatccccaactat

SEQ ID NO: 29851 - DNA, 22 bp, Artificial Sequence
  chemically synthesized
aaatccccaactattattgtat

SEQ ID NO: 29852 - DNA, 22 bp, Artificial Sequence
  chemically synthesized
ttattgtattggattctatttc

SEQ ID NO: 29853 - DNA, 22 bp, Artificial Sequence
  chemically synthesized
ttgtattggattctatttcacc

SEQ ID NO: 29854 - DNA, 22 bp, Artificial Sequence
  chemically synthesized
tattggattctatttcaccctt

SEQ ID NO: 29855 - DNA, 22 bp, Artificial Sequence
  chemically synthesized
gattctatttcaccctttatat

SEQ ID NO: 29856 - DNA, 22 bp, Artificial Sequence
  chemically synthesized
tatttcaccctttatatctaat

SEQ ID NO: 29857 - DNA, 22 bp, Artificial Sequence
  chemically synthesized
tttcaccctttatatctaataa

SEQ ID NO: 29858 - DNA, 22 bp, Artificial Sequence
  chemically synthesized
caccctttatatctaataacat

SEQ ID NO: 29859 - DNA, 22 bp, Artificial Sequence
  chemically synthesized
accctttatatctaataacatt

SEQ ID NO: 29860 - DNA, 22 bp, Artificial Sequence
  chemically synthesized
tatatctaataacatttgcttt

SEQ ID NO: 29861 - DNA, 22 bp, Artificial Sequence
  chemically synthesized
atatctaataacatttgcttta

SEQ ID NO: 29862 - DNA, 22 bp, Artificial Sequence
  chemically synthesized
tatctaataacatttgctttac

SEQ ID NO: 29863 - DNA, 22 bp, Artificial Sequence
  chemically synthesized
ataacatttgctttacatatct

SEQ ID NO: 29864 - DNA, 22 bp, Artificial Sequence
  chemically synthesized
gctttacatatctggatgctct

SEQ ID NO: 29865 - DNA, 22 bp, Artificial Sequence
  chemically synthesized
ctttacatatctggatgctctg

SEQ ID NO: 29866 - DNA, 22 bp, Artificial Sequence
  chemically synthesized
tacatatctggatgctctggtg

SEQ ID NO: 29867 - DNA, 22 bp, Artificial Sequence
  chemically synthesized
acatatctggatgctctggtgt

SEQ ID NO: 29868 - DNA, 22 bp, Artificial Sequence
  chemically synthesized
catatctggatgctctggtgtt

SEQ ID NO: 29869 - DNA, 22 bp, Artificial Sequence
  chemically synthesized
gatgctctggtgttgagtgtga

SEQ ID NO: 29870 - DNA, 22 bp, Artificial Sequence
  chemically synthesized
tggtgttgagtgtgaatgttta

SEQ ID NO: 29871 - DNA, 22 bp, Artificial Sequence
  chemically synthesized
gtgttgagtgtgaatgtttaga

SEQ ID NO: 29872 - DNA, 22 bp, Artificial Sequence
  chemically synthesized
agtgtgaatgtttagaattgtt

SEQ ID NO: 29873 - DNA, 22 bp, Artificial Sequence
  chemically synthesized
agaattgttatatactcttgct

SEQ ID NO: 29874 - DNA, 22 bp, Artificial Sequence
  chemically synthesized
gaattgttatatactcttgctg

SEQ ID NO: 29875 - DNA, 22 bp, Artificial Sequence
  chemically synthesized
ttatatactcttgctgaattgt

SEQ ID NO: 29876 - DNA, 22 bp, Artificial Sequence
  chemically synthesized
tatactcttgctgaattgttcc

SEQ ID NO: 29877 - DNA, 22 bp, Artificial Sequence
  chemically synthesized
ttgctgaattgttccttttatc

SEQ ID NO: 29878 - DNA, 22 bp, Artificial Sequence
  chemically synthesized
gctgaattgttccttttatcat

SEQ ID NO: 29879 - DNA, 22 bp, Artificial Sequence
  chemically synthesized
ctgaattgttccttttatcatt

SEQ ID NO: 29880 - DNA, 22 bp, Artificial Sequence
  chemically synthesized
aattgttccttttatcattatg

SEQ ID NO: 29881 - DNA, 22 bp, Artificial Sequence
  chemically synthesized
ttccttttatcattatgtaatg

SEQ ID NO: 29882 - DNA, 22 bp, Artificial Sequence
  chemically synthesized
cttttatcattatgtaatgact

SEQ ID NO: 29883 - DNA, 22 bp, Artificial Sequence
  chemically synthesized
ttatcattatgtaatgactttt

SEQ ID NO: 29884 - DNA, 22 bp, Artificial Sequence
  chemically synthesized
tatcattatgtaatgacttttg

SEQ ID NO: 29885 - DNA, 22 bp, Artificial Sequence
  chemically synthesized
atcattatgtaatgacttttgt

SEQ ID NO: 29886 - DNA, 22 bp, Artificial Sequence
  chemically synthesized
tcattatgtaatgacttttgtc

SEQ ID NO: 29887 - DNA, 22 bp, Artificial Sequence
  chemically synthesized
tgtaatgacttttgtctcttag

SEQ ID NO: 29888 - DNA, 22 bp, Artificial Sequence
  chemically synthesized
ttgtctcttagtgttttttatt

SEQ ID NO: 29889 - DNA, 22 bp, Artificial Sequence
  chemically synthesized
tgtctcttagtgttttttattt

SEQ ID NO: 29890 - DNA, 22 bp, Artificial Sequence
  chemically synthesized
gtctcttagtgttttttattta

SEQ ID NO: 29891 - DNA, 22 bp, Artificial Sequence
  chemically synthesized
tctcttagtgttttttatttaa

SEQ ID NO: 29892 - DNA, 22 bp, Artificial Sequence
  chemically synthesized
ttagtgttttttatttaaagtc

SEQ ID NO: 29893 - DNA, 22 bp, Artificial Sequence
  chemically synthesized
agtgttttttatttaaagtcaa

SEQ ID NO: 29894 - DNA, 22 bp, Artificial Sequence
  chemically synthesized
gtgttttttatttaaagtcaat

SEQ ID NO: 29895 - DNA, 22 bp, Artificial Sequence
  chemically synthesized
tttatttaaagtcaattttatc

SEQ ID NO: 29896 - DNA, 22 bp, Artificial Sequence
  chemically synthesized
ttatttaaagtcaattttatct

SEQ ID NO: 29897 - DNA, 22 bp, Artificial Sequence
  chemically synthesized
tatttaaagtcaattttatctg

SEQ ID NO: 29898 - DNA, 22 bp, Artificial Sequence
  chemically synthesized
atttaaagtcaattttatctgt

SEQ ID NO: 29899 - DNA, 22 bp, Artificial Sequence
  chemically synthesized
tttaaagtcaattttatctgtt

SEQ ID NO: 29900 - DNA, 22 bp, Artificial Sequence
  chemically synthesized
aaagtcaattttatctgttata

SEQ ID NO: 29901 - DNA, 22 bp, Artificial Sequence
  chemically synthesized
aagtcaattttatctgttatag

SEQ ID NO: 29902 - DNA, 22 bp, Artificial Sequence
  chemically synthesized
tatctgttataggtataactac

SEQ ID NO: 29903 - DNA, 22 bp, Artificial Sequence
  chemically synthesized
atctgttataggtataactact

SEQ ID NO: 29904 - DNA, 22 bp, Artificial Sequence
  chemically synthesized
tctgttataggtataactactt

SEQ ID NO: 29905 - DNA, 22 bp, Artificial Sequence
  chemically synthesized
ttataggtataactacttttgc

SEQ ID NO: 29906 - DNA, 22 bp, Artificial Sequence
  chemically synthesized
taggtataactacttttgctca

SEQ ID NO: 29907 - DNA, 22 bp, Artificial Sequence
  chemically synthesized
cttttgctcatttttggtttct

SEQ ID NO: 29908 - DNA, 22 bp, Artificial Sequence
  chemically synthesized
ttgctcatttttggtttctctt

SEQ ID NO: 29909 - DNA, 22 bp, Artificial Sequence
  chemically synthesized
tgctcatttttggtttctcttt

SEQ ID NO: 29910 - DNA, 22 bp, Artificial Sequence
  chemically synthesized
gctcatttttggtttctctttg

SEQ ID NO: 29911 - DNA, 22 bp, Artificial Sequence
  chemically synthesized
ctcatttttggtttctctttgt

SEQ ID NO: 29912 - DNA, 22 bp, Artificial Sequence
  chemically synthesized
atttttggtttctctttgtatg

SEQ ID NO: 29913 - DNA, 22 bp, Artificial Sequence
  chemically synthesized
ttggtttctctttgtatggaag

SEQ ID NO: 29914 - DNA, 22 bp, Artificial Sequence
  chemically synthesized
tggtttctctttgtatggaaga

SEQ ID NO: 29915 - DNA, 22 bp, Artificial Sequence
  chemically synthesized
ggtttctctttgtatggaagat

SEQ ID NO: 29916 - DNA, 22 bp, Artificial Sequence
  chemically synthesized
gtttctctttgtatggaagatc

SEQ ID NO: 29917 - DNA, 22 bp, Artificial Sequence
  chemically synthesized
ctctttgtatggaagatctttc

SEQ ID NO: 29918 - DNA, 22 bp, Artificial Sequence
  chemically synthesized
tctttgtatggaagatctttca

SEQ ID NO: 29919 - DNA, 22 bp, Artificial Sequence
  chemically synthesized
tttgtatggaagatctttcatc

SEQ ID NO: 29920 - DNA, 22 bp, Artificial Sequence
  chemically synthesized
tgtatggaagatctttcatctt

SEQ ID NO: 29921 - DNA, 22 bp, Artificial Sequence
  chemically synthesized
gtatggaagatctttcatcttt

SEQ ID NO: 29922 - DNA, 22 bp, Artificial Sequence
  chemically synthesized
tatggaagatctttcatctttt

SEQ ID NO: 29923 - DNA, 22 bp, Artificial Sequence
  chemically synthesized
tcatctttttactttcagtcta

SEQ ID NO: 29924 - DNA, 22 bp, Artificial Sequence
  chemically synthesized
catctttttactttcagtctat

SEQ ID NO: 29925 - DNA, 22 bp, Artificial Sequence
  chemically synthesized
atctttttactttcagtctata

SEQ ID NO: 29926 - DNA, 22 bp, Artificial Sequence
  chemically synthesized
tttactttcagtctatatttat

SEQ ID NO: 29927 - DNA, 22 bp, Artificial Sequence
  chemically synthesized
ttactttcagtctatatttatc

SEQ ID NO: 29928 - DNA, 22 bp, Artificial Sequence
  chemically synthesized
tactttcagtctatatttatct

SEQ ID NO: 29929 - DNA, 22 bp, Artificial Sequence
  chemically synthesized
actttcagtctatatttatctt

SEQ ID NO: 29930 - DNA, 22 bp, Artificial Sequence
  chemically synthesized
ctttcagtctatatttatcttt

SEQ ID NO: 29931 - DNA, 22 bp, Artificial Sequence
  chemically synthesized
tcagtctatatttatctttaca

SEQ ID NO: 29932 - DNA, 22 bp, Artificial Sequence
  chemically synthesized
cagtctatatttatctttacaa

SEQ ID NO: 29933 - DNA, 22 bp, Artificial Sequence
  chemically synthesized
agtctatatttatctttacaag

SEQ ID NO: 29934 - DNA, 22 bp, Artificial Sequence
  chemically synthesized
tatttatctttacaagtgagat

SEQ ID NO: 29935 - DNA, 22 bp, Artificial Sequence
  chemically synthesized
atctttacaagtgagataagtt

SEQ ID NO: 29936 - DNA, 22 bp, Artificial Sequence
  chemically synthesized
tctttacaagtgagataagttt

SEQ ID NO: 29937 - DNA, 22 bp, Artificial Sequence
  chemically synthesized
tacaagtgagataagtttctta

SEQ ID NO: 29938 - DNA, 22 bp, Artificial Sequence
  chemically synthesized
acaagtgagataagtttcttat

SEQ ID NO: 29939 - DNA, 22 bp, Artificial Sequence
  chemically synthesized
caagtgagataagtttcttata

SEQ ID NO: 29940 - DNA, 22 bp, Artificial Sequence
  chemically synthesized
cttataggcagcttacaactgg

SEQ ID NO: 29941 - DNA, 22 bp, Artificial Sequence
  chemically synthesized
ttataggcagcttacaactggg

SEQ ID NO: 29942 - DNA, 22 bp, Artificial Sequence
  chemically synthesized
ataggcagcttacaactgggtc

SEQ ID NO: 29943 - DNA, 22 bp, Artificial Sequence
  chemically synthesized
taggcagcttacaactgggtca

SEQ ID NO: 29944 - DNA, 22 bp, Artificial Sequence
  chemically synthesized
acaactgggtcatatttttgtt

SEQ ID NO: 29945 - DNA, 22 bp, Artificial Sequence
  chemically synthesized
caactgggtcatatttttgttt

SEQ ID NO: 29946 - DNA, 22 bp, Artificial Sequence
  chemically synthesized
ggtcatatttttgttttaaatc

SEQ ID NO: 29947 - DNA, 22 bp, Artificial Sequence
  chemically synthesized
ttgttttaaatctatttagcca

SEQ ID NO: 29948 - DNA, 22 bp, Artificial Sequence
  chemically synthesized
tgttttaaatctatttagccag

SEQ ID NO: 29949 - DNA, 22 bp, Artificial Sequence
  chemically synthesized
gttttaaatctatttagccagt

SEQ ID NO: 29950 - DNA, 22 bp, Artificial Sequence
  chemically synthesized
ttttaaatctatttagccagtc

SEQ ID NO: 29951 - DNA, 22 bp, Artificial Sequence
  chemically synthesized
taaatctatttagccagtctat

SEQ ID NO: 29952 - DNA, 22 bp, Artificial Sequence
  chemically synthesized
aaatctatttagccagtctata

SEQ ID NO: 29953 - DNA, 22 bp, Artificial Sequence
  chemically synthesized
aatctatttagccagtctatat

SEQ ID NO: 29954 - DNA, 22 bp, Artificial Sequence
  chemically synthesized
tttagccagtctatatctttca

SEQ ID NO: 29955 - DNA, 22 bp, Artificial Sequence
  chemically synthesized
agccagtctatatctttcaagt

SEQ ID NO: 29956 - DNA, 22 bp, Artificial Sequence
  chemically synthesized
gccagtctatatctttcaagta

SEQ ID NO: 29957 - DNA, 22 bp, Artificial Sequence
  chemically synthesized
tatctttcaagtaacaatttaa

SEQ ID NO: 29958 - DNA, 22 bp, Artificial Sequence
  chemically synthesized
tcaagtaacaatttaatccatt

SEQ ID NO: 29959 - DNA, 22 bp, Artificial Sequence
  chemically synthesized
caagtaacaatttaatccattt

SEQ ID NO: 29960 - DNA, 22 bp, Artificial Sequence
  chemically synthesized
aagtaacaatttaatccattta

SEQ ID NO: 29961 - DNA, 22 bp, Artificial Sequence
  chemically synthesized
aatccatttacatgcaaggcta

SEQ ID NO: 29962 - DNA, 22 bp, Artificial Sequence
  chemically synthesized
atccatttacatgcaaggctat

SEQ ID NO: 29963 - DNA, 22 bp, Artificial Sequence
  chemically synthesized
acatgcaaggctattattgaca

SEQ ID NO: 29964 - DNA, 22 bp, Artificial Sequence
  chemically synthesized
catgcaaggctattattgacat

SEQ ID NO: 29965 - DNA, 22 bp, Artificial Sequence
  chemically synthesized
ttattgacatgtgagagcttat

SEQ ID NO: 29966 - DNA, 22 bp, Artificial Sequence
  chemically synthesized
ttgacatgtgagagcttattcc

SEQ ID NO: 29967 - DNA, 22 bp, Artificial Sequence
  chemically synthesized
acatgtgagagcttattcctgc

SEQ ID NO: 29968 - DNA, 22 bp, Artificial Sequence
  chemically synthesized
attcctgccattttgttaattg

SEQ ID NO: 29969 - DNA, 22 bp, Artificial Sequence
  chemically synthesized
ttcctgccattttgttaattga

SEQ ID NO: 29970 - DNA, 22 bp, Artificial Sequence
  chemically synthesized
ctgccattttgttaattgattc

SEQ ID NO: 29971 - DNA, 22 bp, Artificial Sequence
  chemically synthesized
ccattttgttaattgattcctg

SEQ ID NO: 29972 - DNA, 22 bp, Artificial Sequence
  chemically synthesized
tgttaattgattcctggttgtt

SEQ ID NO: 29973 - DNA, 22 bp, Artificial Sequence
  chemically synthesized
gttaattgattcctggttgttt

SEQ ID NO: 29974 - DNA, 22 bp, Artificial Sequence
  chemically synthesized
ttaattgattcctggttgtttt

SEQ ID NO: 29975 - DNA, 22 bp, Artificial Sequence
  chemically synthesized
attgattcctggttgttttgtt

SEQ ID NO: 29976 - DNA, 22 bp, Artificial Sequence
  chemically synthesized
attcctggttgttttgtttttt

SEQ ID NO: 29977 - DNA, 22 bp, Artificial Sequence
  chemically synthesized
ctggttgttttgtttttttttt

SEQ ID NO: 29978 - DNA, 22 bp, Artificial Sequence
  chemically synthesized
gttgttttgttttttttttagt

SEQ ID NO: 29979 - DNA, 22 bp, Artificial Sequence
  chemically synthesized
ttttgttttttttttagtttgt

SEQ ID NO: 29980 - DNA, 22 bp, Artificial Sequence
  chemically synthesized
tgttttttttttagtttgtttg

SEQ ID NO: 29981 - DNA, 22 bp, Artificial Sequence
  chemically synthesized
gttttttttttagtttgtttgt

SEQ ID NO: 29982 - DNA, 22 bp, Artificial Sequence
  chemically synthesized
ttttttttttagtttgtttgtt

SEQ ID NO: 29983 - DNA, 22 bp, Artificial Sequence
  chemically synthesized
tttttttagtttgtttgttttg

SEQ ID NO: 29984 - DNA, 22 bp, Artificial Sequence
  chemically synthesized
ttttttagtttgtttgttttgt

SEQ ID NO: 29985 - DNA, 22 bp, Artificial Sequence
  chemically synthesized
tttttagtttgtttgttttgtg

SEQ ID NO: 29986 - DNA, 22 bp, Artificial Sequence
  chemically synthesized
ttttagtttgtttgttttgtgt

SEQ ID NO: 29987 - DNA, 22 bp, Artificial Sequence
  chemically synthesized
tttagtttgtttgttttgtgtt

SEQ ID NO: 29988 - DNA, 22 bp, Artificial Sequence
  chemically synthesized
ttagtttgtttgttttgtgttt

SEQ ID NO: 29989 - DNA, 22 bp, Artificial Sequence
  chemically synthesized
tagtttgtttgttttgtgtttt

SEQ ID NO: 29990 - DNA, 22 bp, Artificial Sequence
  chemically synthesized
agtttgtttgttttgtgttttt

SEQ ID NO: 29991 - DNA, 22 bp, Artificial Sequence
  chemically synthesized
gtttgtttgttttgtgtttttt

SEQ ID NO: 29992 - DNA, 22 bp, Artificial Sequence
  chemically synthesized
gtttgttttgtgtttttttctt

SEQ ID NO: 29993 - DNA, 22 bp, Artificial Sequence
  chemically synthesized
tttgttttgtgtttttttcttc

SEQ ID NO: 29994 - DNA, 22 bp, Artificial Sequence
  chemically synthesized
gttttgtgtttttttcttcctt

SEQ ID NO: 29995 - DNA, 22 bp, Artificial Sequence
  chemically synthesized
ttttgtgtttttttcttccttc

SEQ ID NO: 29996 - DNA, 22 bp, Artificial Sequence
  chemically synthesized
tgtgtttttttcttccttcctt

SEQ ID NO: 29997 - DNA, 22 bp, Artificial Sequence
  chemically synthesized
gtgtttttttcttccttccttc

SEQ ID NO: 29998 - DNA, 22 bp, Artificial Sequence
  chemically synthesized
tgtttttttcttccttccttcc

SEQ ID NO: 29999 - DNA, 22 bp, Artificial Sequence
  chemically synthesized
ttttcttccttccttccttttc

SEQ ID NO: 30000 - DNA, 22 bp, Artificial Sequence
  chemically synthesized
tttcttccttccttccttttct

SEQ ID NO: 30001 - DNA, 22 bp, Artificial Sequence
  chemically synthesized
ttcttccttccttccttttctt

SEQ ID NO: 30002 - DNA, 22 bp, Artificial Sequence
  chemically synthesized
tcttccttccttccttttcttt

SEQ ID NO: 30003 - DNA, 22 bp, Artificial Sequence
  chemically synthesized
cttccttccttccttttctttc

SEQ ID NO: 30004 - DNA, 22 bp, Artificial Sequence
  chemically synthesized
ttccttccttccttttctttct

SEQ ID NO: 30005 - DNA, 22 bp, Artificial Sequence
  chemically synthesized
ccttccttccttttctttcttt

SEQ ID NO: 30006 - DNA, 22 bp, Artificial Sequence
  chemically synthesized
cttccttccttttctttctttc

SEQ ID NO: 30007 - DNA, 22 bp, Artificial Sequence
  chemically synthesized
ccttccttttctttctttcatt

SEQ ID NO: 30008 - DNA, 22 bp, Artificial Sequence
  chemically synthesized
cttccttttctttctttcattc

SEQ ID NO: 30009 - DNA, 22 bp, Artificial Sequence
  chemically synthesized
ccttttctttctttcattctct

SEQ ID NO: 30010 - DNA, 22 bp, Artificial Sequence
  chemically synthesized
cttttctttctttcattctctc

SEQ ID NO: 30011 - DNA, 22 bp, Artificial Sequence
  chemically synthesized
ttctttctttcattctctctct

SEQ ID NO: 30012 - DNA, 22 bp, Artificial Sequence
  chemically synthesized
tctttctttcattctctctctc

SEQ ID NO: 30013 - DNA, 22 bp, Artificial Sequence
  chemically synthesized
ctttctttcattctctctctct

SEQ ID NO: 30014 - DNA, 22 bp, Artificial Sequence
  chemically synthesized
tttctttcattctctctctctc

SEQ ID NO: 30015 - DNA, 22 bp, Artificial Sequence
  chemically synthesized
tctttcattctctctctctctc

SEQ ID NO: 30016 - DNA, 22 bp, Artificial Sequence
  chemically synthesized
ctttcattctctctctctctct

SEQ ID NO: 30017 - DNA, 22 bp, Artificial Sequence
  chemically synthesized
tttcattctctctctctctctc

SEQ ID NO: 30018 - DNA, 22 bp, Artificial Sequence
  chemically synthesized
tcattctctctctctctctctt

SEQ ID NO: 30019 - DNA, 22 bp, Artificial Sequence
  chemically synthesized
cattctctctctctctctcttt

SEQ ID NO: 30020 - DNA, 22 bp, Artificial Sequence
  chemically synthesized
attctctctctctctctctttc

SEQ ID NO: 30021 - DNA, 22 bp, Artificial Sequence
  chemically synthesized
tctctctctctctctttctttc

SEQ ID NO: 30022 - DNA, 22 bp, Artificial Sequence
  chemically synthesized
tctctctctctctttctttctt

SEQ ID NO: 30023 - DNA, 22 bp, Artificial Sequence
  chemically synthesized
tctctctctctttctttctttc

SEQ ID NO: 30024 - DNA, 22 bp, Artificial Sequence
  chemically synthesized
tctctctctttctttctttctt

SEQ ID NO: 30025 - DNA, 22 bp, Artificial Sequence
  chemically synthesized
tctctctttctttctttctttc

SEQ ID NO: 30026 - DNA, 22 bp, Artificial Sequence
  chemically synthesized
tctctttctttctttctttctt

SEQ ID NO: 30027 - DNA, 22 bp, Artificial Sequence
  chemically synthesized
tctttctttctttctttctttc

SEQ ID NO: 30028 - DNA, 22 bp, Artificial Sequence
  chemically synthesized
tttctttctttctttctttctt

SEQ ID NO: 30029 - DNA, 22 bp, Artificial Sequence
  chemically synthesized
tctttctttctttctttcttat

SEQ ID NO: 30030 - DNA, 22 bp, Artificial Sequence
  chemically synthesized
ctttctttctttctttcttatt

SEQ ID NO: 30031 - DNA, 22 bp, Artificial Sequence
  chemically synthesized
tttctttctttctttcttatta

SEQ ID NO: 30032 - DNA, 22 bp, Artificial Sequence
  chemically synthesized
tctttctttctttcttattatt

SEQ ID NO: 30033 - DNA, 22 bp, Artificial Sequence
  chemically synthesized
ctttctttctttcttattattt

SEQ ID NO: 30034 - DNA, 22 bp, Artificial Sequence
  chemically synthesized
tttctttctttcttattattta

SEQ ID NO: 30035 - DNA, 22 bp, Artificial Sequence
  chemically synthesized
tctttctttcttattatttatg

SEQ ID NO: 30036 - DNA, 22 bp, Artificial Sequence
  chemically synthesized
ctttctttcttattatttatga

SEQ ID NO: 30037 - DNA, 22 bp, Artificial Sequence
  chemically synthesized
tttctttcttattatttatgat

SEQ ID NO: 30038 - DNA, 22 bp, Artificial Sequence
  chemically synthesized
tctttcttattatttatgattg

SEQ ID NO: 30039 - DNA, 22 bp, Artificial Sequence
  chemically synthesized
ctttcttattatttatgattgt

SEQ ID NO: 30040 - DNA, 22 bp, Artificial Sequence
  chemically synthesized
tttcttattatttatgattgtg

SEQ ID NO: 30041 - DNA, 22 bp, Artificial Sequence
  chemically synthesized
tcttattatttatgattgtggt

SEQ ID NO: 30042 - DNA, 22 bp, Artificial Sequence
  chemically synthesized
cttattatttatgattgtggtt

SEQ ID NO: 30043 - DNA, 22 bp, Artificial Sequence
  chemically synthesized
ttattatttatgattgtggttt

SEQ ID NO: 30044 - DNA, 22 bp, Artificial Sequence
  chemically synthesized
attatttatgattgtggtttgg

SEQ ID NO: 30045 - DNA, 22 bp, Artificial Sequence
  chemically synthesized
ttatttatgattgtggtttggt

SEQ ID NO: 30046 - DNA, 22 bp, Artificial Sequence
  chemically synthesized
tttatgattgtggtttggtgat

SEQ ID NO: 30047 - DNA, 22 bp, Artificial Sequence
  chemically synthesized
atgattgtggtttggtgatttt

SEQ ID NO: 30048 - DNA, 22 bp, Artificial Sequence
  chemically synthesized
tgattgtggtttggtgattttc

SEQ ID NO: 30049 - DNA, 22 bp, Artificial Sequence
  chemically synthesized
tggtttggtgattttctgtagt

SEQ ID NO: 30050 - DNA, 22 bp, Artificial Sequence
  chemically synthesized
ggtgattttctgtagtggtaac

SEQ ID NO: 30051 - DNA, 22 bp, Artificial Sequence
  chemically synthesized
gtgattttctgtagtggtaacg

SEQ ID NO: 30052 - DNA, 22 bp, Artificial Sequence
  chemically synthesized
tctgtagtggtaacgtttgagt

SEQ ID NO: 30053 - DNA, 22 bp, Artificial Sequence
  chemically synthesized
ctgtagtggtaacgtttgagtt

SEQ ID NO: 30054 - DNA, 22 bp, Artificial Sequence
  chemically synthesized
tgtagtggtaacgtttgagttc

SEQ ID NO: 30055 - DNA, 22 bp, Artificial Sequence
  chemically synthesized
tagtggtaacgtttgagttctt

SEQ ID NO: 30056 - DNA, 22 bp, Artificial Sequence
  chemically synthesized
gagttctttctcttctttattt

SEQ ID NO: 30057 - DNA, 22 bp, Artificial Sequence
  chemically synthesized
agttctttctcttctttatttg

SEQ ID NO: 30058 - DNA, 22 bp, Artificial Sequence
  chemically synthesized
tttctcttctttatttgtgttt

SEQ ID NO: 30059 - DNA, 22 bp, Artificial Sequence
  chemically synthesized
tctcttctttatttgtgttttg

SEQ ID NO: 30060 - DNA, 22 bp, Artificial Sequence
  chemically synthesized
ctcttctttatttgtgttttgc

SEQ ID NO: 30061 - DNA, 22 bp, Artificial Sequence
  chemically synthesized
tcttctttatttgtgttttgct

SEQ ID NO: 30062 - DNA, 22 bp, Artificial Sequence
  chemically synthesized
ttctttatttgtgttttgctct

SEQ ID NO: 30063 - DNA, 22 bp, Artificial Sequence
  chemically synthesized
ctttatttgtgttttgctctac

SEQ ID NO: 30064 - DNA, 22 bp, Artificial Sequence
  chemically synthesized
tttatttgtgttttgctctacc

SEQ ID NO: 30065 - DNA, 22 bp, Artificial Sequence
  chemically synthesized
tatttgtgttttgctctaccag

SEQ ID NO: 30066 - DNA, 22 bp, Artificial Sequence
  chemically synthesized
atttgtgttttgctctaccagt

SEQ ID NO: 30067 - DNA, 22 bp, Artificial Sequence
  chemically synthesized
tttgtgttttgctctaccagtt

SEQ ID NO: 30068 - DNA, 22 bp, Artificial Sequence
  chemically synthesized
gtgttttgctctaccagttagt

SEQ ID NO: 30069 - DNA, 22 bp, Artificial Sequence
  chemically synthesized
tgttttgctctaccagttagtt

SEQ ID NO: 30070 - DNA, 22 bp, Artificial Sequence
  chemically synthesized
tgctctaccagttagttgtata

SEQ ID NO: 30071 - DNA, 22 bp, Artificial Sequence
  chemically synthesized
gctctaccagttagttgtatac

SEQ ID NO: 30072 - DNA, 22 bp, Artificial Sequence
  chemically synthesized
ctctaccagttagttgtatacc

SEQ ID NO: 30073 - DNA, 22 bp, Artificial Sequence
  chemically synthesized
taccagttagttgtataccttt

SEQ ID NO: 30074 - DNA, 22 bp, Artificial Sequence
  chemically synthesized
ccagttagttgtatacctttgt

SEQ ID NO: 30075 - DNA, 22 bp, Artificial Sequence
  chemically synthesized
gttgtatacctttgtgtgtctt

SEQ ID NO: 30076 - DNA, 22 bp, Artificial Sequence
  chemically synthesized
tatacctttgtgtgtcttcata

SEQ ID NO: 30077 - DNA, 22 bp, Artificial Sequence
  chemically synthesized
tgtgtgtcttcataatggcagt

SEQ ID NO: 30078 - DNA, 22 bp, Artificial Sequence
  chemically synthesized
gtgtgtcttcataatggcagtg

SEQ ID NO: 30079 - DNA, 22 bp, Artificial Sequence
  chemically synthesized
tgtgtcttcataatggcagtgt

SEQ ID NO: 30080 - DNA, 22 bp, Artificial Sequence
  chemically synthesized
cataatggcagtgtcctgtcac

SEQ ID NO: 30081 - DNA, 22 bp, Artificial Sequence
  chemically synthesized
ataatggcagtgtcctgtcact

SEQ ID NO: 30082 - DNA, 22 bp, Artificial Sequence
  chemically synthesized
tcactttcatgtgtaggactcc

SEQ ID NO: 30083 - DNA, 22 bp, Artificial Sequence
  chemically synthesized
tcatgtgtaggactcccttaaa

SEQ ID NO: 30084 - DNA, 22 bp, Artificial Sequence
  chemically synthesized
catgtgtaggactcccttaaat

SEQ ID NO: 30085 - DNA, 22 bp, Artificial Sequence
  chemically synthesized
atgtgtaggactcccttaaata

SEQ ID NO: 30086 - DNA, 22 bp, Artificial Sequence
  chemically synthesized
ccttaaatatttcttgtaaagc

SEQ ID NO: 30087 - DNA, 22 bp, Artificial Sequence
  chemically synthesized
aaatatttcttgtaaagccagt

SEQ ID NO: 30088 - DNA, 22 bp, Artificial Sequence
  chemically synthesized
aatatttcttgtaaagccagtc

SEQ ID NO: 30089 - DNA, 22 bp, Artificial Sequence
  chemically synthesized
cttgtaaagccagtctagtgat

SEQ ID NO: 30090 - DNA, 22 bp, Artificial Sequence
  chemically synthesized
ttgtaaagccagtctagtgata

SEQ ID NO: 30091 - DNA, 22 bp, Artificial Sequence
  chemically synthesized
gtaaagccagtctagtgatagt

SEQ ID NO: 30092 - DNA, 22 bp, Artificial Sequence
  chemically synthesized
taaagccagtctagtgatagtg

SEQ ID NO: 30093 - DNA, 22 bp, Artificial Sequence
  chemically synthesized
gtgatagtgaattccttcaaat

SEQ ID NO: 30094 - DNA, 22 bp, Artificial Sequence
  chemically synthesized
cttcaaatttttcttgcccaga

SEQ ID NO: 30095 - DNA, 22 bp, Artificial Sequence
  chemically synthesized
caaatttttcttgcccagaaaa

SEQ ID NO: 30096 - DNA, 22 bp, Artificial Sequence
  chemically synthesized
aaatttttcttgcccagaaaag

SEQ ID NO: 30097 - DNA, 22 bp, Artificial Sequence
  chemically synthesized
ttcttgcccagaaaagatttta

SEQ ID NO: 30098 - DNA, 22 bp, Artificial Sequence
  chemically synthesized
tcttgcccagaaaagattttat

SEQ ID NO: 30099 - DNA, 22 bp, Artificial Sequence
  chemically synthesized
cttgcccagaaaagattttatt

SEQ ID NO: 30100 - DNA, 22 bp, Artificial Sequence
  chemically synthesized
ttgcccagaaaagattttattt

SEQ ID NO: 30101 - DNA, 22 bp, Artificial Sequence
  chemically synthesized
gcccagaaaagattttatttat

SEQ ID NO: 30102 - DNA, 22 bp, Artificial Sequence
  chemically synthesized
cccagaaaagattttatttatc

SEQ ID NO: 30103 - DNA, 22 bp, Artificial Sequence
  chemically synthesized
tatttatccttcatttttgaag

SEQ ID NO: 30104 - DNA, 22 bp, Artificial Sequence
  chemically synthesized
atttatccttcatttttgaaga

SEQ ID NO: 30105 - DNA, 22 bp, Artificial Sequence
  chemically synthesized
tttatccttcatttttgaagaa

SEQ ID NO: 30106 - DNA, 22 bp, Artificial Sequence
  chemically synthesized
atccttcatttttgaagaacaa

SEQ ID NO: 30107 - DNA, 22 bp, Artificial Sequence
  chemically synthesized
tccttcatttttgaagaacaat

SEQ ID NO: 30108 - DNA, 22 bp, Artificial Sequence
  chemically synthesized
catttttgaagaacaatgttgc

SEQ ID NO: 30109 - DNA, 22 bp, Artificial Sequence
  chemically synthesized
atttttgaagaacaatgttgct

SEQ ID NO: 30110 - DNA, 22 bp, Artificial Sequence
  chemically synthesized
ttgaagaacaatgttgctgggt

SEQ ID NO: 30111 - DNA, 22 bp, Artificial Sequence
  chemically synthesized
tgaagaacaatgttgctgggta

SEQ ID NO: 30112 - DNA, 22 bp, Artificial Sequence
  chemically synthesized
gaagaacaatgttgctgggtat

SEQ ID NO: 30113 - DNA, 22 bp, Artificial Sequence
  chemically synthesized
aagaacaatgttgctgggtata

SEQ ID NO: 30114 - DNA, 22 bp, Artificial Sequence
  chemically synthesized
ctgggtataacatccttggtgt

SEQ ID NO: 30115 - DNA, 22 bp, Artificial Sequence
  chemically synthesized
ggtataacatccttggtgtcat

SEQ ID NO: 30116 - DNA, 22 bp, Artificial Sequence
  chemically synthesized
ggtgtcatttttttctttcact

SEQ ID NO: 30117 - DNA, 22 bp, Artificial Sequence
  chemically synthesized
gtgtcatttttttctttcacta

SEQ ID NO: 30118 - DNA, 22 bp, Artificial Sequence
  chemically synthesized
ttttctttcactattttgaata

SEQ ID NO: 30119 - DNA, 22 bp, Artificial Sequence
  chemically synthesized
tttctttcactattttgaatat

SEQ ID NO: 30120 - DNA, 22 bp, Artificial Sequence
  chemically synthesized
ttctttcactattttgaatata

SEQ ID NO: 30121 - DNA, 22 bp, Artificial Sequence
  chemically synthesized
tctttcactattttgaatatat

SEQ ID NO: 30122 - DNA, 22 bp, Artificial Sequence
  chemically synthesized
ctttcactattttgaatatatc

SEQ ID NO: 30123 - DNA, 22 bp, Artificial Sequence
  chemically synthesized
tttcactattttgaatatatca

SEQ ID NO: 30124 - DNA, 22 bp, Artificial Sequence
  chemically synthesized
tcactattttgaatatatcatc

SEQ ID NO: 30125 - DNA, 22 bp, Artificial Sequence
  chemically synthesized
cactattttgaatatatcatcc

SEQ ID NO: 30126 - DNA, 22 bp, Artificial Sequence
  chemically synthesized
actattttgaatatatcatccc

SEQ ID NO: 30127 - DNA, 22 bp, Artificial Sequence
  chemically synthesized
ttttgaatatatcatcccatct

SEQ ID NO: 30128 - DNA, 22 bp, Artificial Sequence
  chemically synthesized
tgaatatatcatcccatcttct

SEQ ID NO: 30129 - DNA, 22 bp, Artificial Sequence
  chemically synthesized
gaatatatcatcccatcttctc

SEQ ID NO: 30130 - DNA, 22 bp, Artificial Sequence
  chemically synthesized
aatatatcatcccatcttctcc

SEQ ID NO: 30131 - DNA, 22 bp, Artificial Sequence
  chemically synthesized
ctcctggcctgtgaggtttctg

SEQ ID NO: 30132 - DNA, 22 bp, Artificial Sequence
  chemically synthesized
tcctggcctgtgaggtttctgc

SEQ ID NO: 30133 - DNA, 22 bp, Artificial Sequence
  chemically synthesized
ctggcctgtgaggtttctgctg

SEQ ID NO: 30134 - DNA, 22 bp, Artificial Sequence
  chemically synthesized
gcctgtgaggtttctgctgaga

SEQ ID NO: 30135 - DNA, 22 bp, Artificial Sequence
  chemically synthesized
tgaggtttctgctgagaaatct

SEQ ID NO: 30136 - DNA, 22 bp, Artificial Sequence
  chemically synthesized
ctgctgagaaatctgctgttaa

SEQ ID NO: 30137 - DNA, 22 bp, Artificial Sequence
  chemically synthesized
tgctgagaaatctgctgttaat

SEQ ID NO: 30138 - DNA, 22 bp, Artificial Sequence
  chemically synthesized
ctgagaaatctgctgttaatct

SEQ ID NO: 30139 - DNA, 22 bp, Artificial Sequence
  chemically synthesized
agaaatctgctgttaatctgtt

SEQ ID NO: 30140 - DNA, 22 bp, Artificial Sequence
  chemically synthesized
ctgttaatctgttaatcttgtg

SEQ ID NO: 30141 - DNA, 22 bp, Artificial Sequence
  chemically synthesized
ttaatctgttaatcttgtggaa

SEQ ID NO: 30142 - DNA, 22 bp, Artificial Sequence
  chemically synthesized
atctgttaatcttgtggaagtt

SEQ ID NO: 30143 - DNA, 22 bp, Artificial Sequence
  chemically synthesized
ttaatcttgtggaagttccctt

SEQ ID NO: 30144 - DNA, 22 bp, Artificial Sequence
  chemically synthesized
atcttgtggaagttcccttata

SEQ ID NO: 30145 - DNA, 22 bp, Artificial Sequence
  chemically synthesized
gtggaagttcccttataagtga

SEQ ID NO: 30146 - DNA, 22 bp, Artificial Sequence
  chemically synthesized
tggaagttcccttataagtgac

SEQ ID NO: 30147 - DNA, 22 bp, Artificial Sequence
  chemically synthesized
ccttataagtgactagacattt

SEQ ID NO: 30148 - DNA, 22 bp, Artificial Sequence
  chemically synthesized
ataagtgactagacattttgct

SEQ ID NO: 30149 - DNA, 22 bp, Artificial Sequence
  chemically synthesized
taagtgactagacattttgctt

SEQ ID NO: 30150 - DNA, 22 bp, Artificial Sequence
  chemically synthesized
gacattttgcttgctgttttag

SEQ ID NO: 30151 - DNA, 22 bp, Artificial Sequence
  chemically synthesized
tgcttgctgttttagagttctt

SEQ ID NO: 30152 - DNA, 22 bp, Artificial Sequence
  chemically synthesized
gcttgctgttttagagttctta

SEQ ID NO: 30153 - DNA, 22 bp, Artificial Sequence
  chemically synthesized
cttgctgttttagagttcttac

SEQ ID NO: 30154 - DNA, 22 bp, Artificial Sequence
  chemically synthesized
gctgttttagagttcttactct

SEQ ID NO: 30155 - DNA, 22 bp, Artificial Sequence
  chemically synthesized
ctgttttagagttcttactctt

SEQ ID NO: 30156 - DNA, 22 bp, Artificial Sequence
  chemically synthesized
ttttagagttcttactctttgg

SEQ ID NO: 30157 - DNA, 22 bp, Artificial Sequence
  chemically synthesized
tagagttcttactctttggctt

SEQ ID NO: 30158 - DNA, 22 bp, Artificial Sequence
  chemically synthesized
agagttcttactctttggcttt

SEQ ID NO: 30159 - DNA, 22 bp, Artificial Sequence
  chemically synthesized
gagttcttactctttggctttt

SEQ ID NO: 30160 - DNA, 22 bp, Artificial Sequence
  chemically synthesized
ttactctttggcttttgacagt

SEQ ID NO: 30161 - DNA, 22 bp, Artificial Sequence
  chemically synthesized
actctttggcttttgacagttt

SEQ ID NO: 30162 - DNA, 22 bp, Artificial Sequence
  chemically synthesized
ctctttggcttttgacagtttg

SEQ ID NO: 30163 - DNA, 22 bp, Artificial Sequence
  chemically synthesized
tttggcttttgacagtttgact

SEQ ID NO: 30164 - DNA, 22 bp, Artificial Sequence
  chemically synthesized
tggcttttgacagtttgactat

SEQ ID NO: 30165 - DNA, 22 bp, Artificial Sequence
  chemically synthesized
ggcttttgacagtttgactata

SEQ ID NO: 30166 - DNA, 22 bp, Artificial Sequence
  chemically synthesized
gcttttgacagtttgactataa

SEQ ID NO: 30167 - DNA, 22 bp, Artificial Sequence
  chemically synthesized
ttgacagtttgactataatgtg

SEQ ID NO: 30168 - DNA, 22 bp, Artificial Sequence
  chemically synthesized
tgacagtttgactataatgtgc

SEQ ID NO: 30169 - DNA, 22 bp, Artificial Sequence
  chemically synthesized
gacagtttgactataatgtgct

SEQ ID NO: 30170 - DNA, 22 bp, Artificial Sequence
  chemically synthesized
acagtttgactataatgtgctg

SEQ ID NO: 30171 - DNA, 22 bp, Artificial Sequence
  chemically synthesized
gactataatgtgctgtggagaa

SEQ ID NO: 30172 - DNA, 22 bp, Artificial Sequence
  chemically synthesized
actataatgtgctgtggagaag

SEQ ID NO: 30173 - DNA, 22 bp, Artificial Sequence
  chemically synthesized
taatgtgctgtggagaagagct

SEQ ID NO: 30174 - DNA, 22 bp, Artificial Sequence
  chemically synthesized
tggagaagagctttttgcatta

SEQ ID NO: 30175 - DNA, 22 bp, Artificial Sequence
  chemically synthesized
tttgcattatattatttgggaa

SEQ ID NO: 30176 - DNA, 22 bp, Artificial Sequence
  chemically synthesized
ttgcattatattatttgggaat

SEQ ID NO: 30177 - DNA, 22 bp, Artificial Sequence
  chemically synthesized
tgcattatattatttgggaatt

SEQ ID NO: 30178 - DNA, 22 bp, Artificial Sequence
  chemically synthesized
gcattatattatttgggaattt

SEQ ID NO: 30179 - DNA, 22 bp, Artificial Sequence
  chemically synthesized
cattatattatttgggaatttc

SEQ ID NO: 30180 - DNA, 22 bp, Artificial Sequence
  chemically synthesized
tattatttgggaatttctgatt

SEQ ID NO: 30181 - DNA, 22 bp, Artificial Sequence
  chemically synthesized
tttgggaatttctgattttcat

SEQ ID NO: 30182 - DNA, 22 bp, Artificial Sequence
  chemically synthesized
gggaatttctgattttcatttg

SEQ ID NO: 30183 - DNA, 22 bp, Artificial Sequence
  chemically synthesized
ggaatttctgattttcatttgt

SEQ ID NO: 30184 - DNA, 22 bp, Artificial Sequence
  chemically synthesized
ctgattttcatttgtctggatg

SEQ ID NO: 30185 - DNA, 22 bp, Artificial Sequence
  chemically synthesized
tgattttcatttgtctggatgt

SEQ ID NO: 30186 - DNA, 22 bp, Artificial Sequence
  chemically synthesized
attttcatttgtctggatgtct

SEQ ID NO: 30187 - DNA, 22 bp, Artificial Sequence
  chemically synthesized
tcatttgtctggatgtctacat

SEQ ID NO: 30188 - DNA, 22 bp, Artificial Sequence
  chemically synthesized
catttgtctggatgtctacatt

SEQ ID NO: 30189 - DNA, 22 bp, Artificial Sequence
  chemically synthesized
atttgtctggatgtctacattt

SEQ ID NO: 30190 - DNA, 22 bp, Artificial Sequence
  chemically synthesized
gtctggatgtctacatttcttg

SEQ ID NO: 30191 - DNA, 22 bp, Artificial Sequence
  chemically synthesized
tctggatgtctacatttcttgc

SEQ ID NO: 30192 - DNA, 22 bp, Artificial Sequence
  chemically synthesized
gatgtctacatttcttgctaga

SEQ ID NO: 30193 - DNA, 22 bp, Artificial Sequence
  chemically synthesized
catttcttgctagacttgacaa

SEQ ID NO: 30194 - DNA, 22 bp, Artificial Sequence
  chemically synthesized
cttgctagacttgacaagtttt

SEQ ID NO: 30195 - DNA, 22 bp, Artificial Sequence
  chemically synthesized
ttgctagacttgacaagttttc

SEQ ID NO: 30196 - DNA, 22 bp, Artificial Sequence
  chemically synthesized
gctagacttgacaagttttcag

SEQ ID NO: 30197 - DNA, 22 bp, Artificial Sequence
  chemically synthesized
ctagacttgacaagttttcagc

SEQ ID NO: 30198 - DNA, 22 bp, Artificial Sequence
  chemically synthesized
gacttgacaagttttcagctat

SEQ ID NO: 30199 - DNA, 22 bp, Artificial Sequence
  chemically synthesized
gacaagttttcagctattgtgt

SEQ ID NO: 30200 - DNA, 22 bp, Artificial Sequence
  chemically synthesized
acaagttttcagctattgtgtt

SEQ ID NO: 30201 - DNA, 22 bp, Artificial Sequence
  chemically synthesized
tcagctattgtgttgttacgta

SEQ ID NO: 30202 - DNA, 22 bp, Artificial Sequence
  chemically synthesized
cagctattgtgttgttacgtag

SEQ ID NO: 30203 - DNA, 22 bp, Artificial Sequence
  chemically synthesized
agctattgtgttgttacgtagg

SEQ ID NO: 30204 - DNA, 22 bp, Artificial Sequence
  chemically synthesized
ttgtgttgttacgtaggtttcc

SEQ ID NO: 30205 - DNA, 22 bp, Artificial Sequence
  chemically synthesized
tgttgttacgtaggtttcctac

SEQ ID NO: 30206 - DNA, 22 bp, Artificial Sequence
  chemically synthesized
ttacgtaggtttcctacacctt

SEQ ID NO: 30207 - DNA, 22 bp, Artificial Sequence
  chemically synthesized
cgtaggtttcctacacctttca

SEQ ID NO: 30208 - DNA, 22 bp, Artificial Sequence
  chemically synthesized
cctacacctttcatgttctctt

SEQ ID NO: 30209 - DNA, 22 bp, Artificial Sequence
  chemically synthesized
ctacacctttcatgttctcttt

SEQ ID NO: 30210 - DNA, 22 bp, Artificial Sequence
  chemically synthesized
cacctttcatgttctctttacc

SEQ ID NO: 30211 - DNA, 22 bp, Artificial Sequence
  chemically synthesized
tcatgttctctttaccttctgg

SEQ ID NO: 30212 - DNA, 22 bp, Artificial Sequence
  chemically synthesized
catgttctctttaccttctggg

SEQ ID NO: 30213 - DNA, 22 bp, Artificial Sequence
  chemically synthesized
atgttctctttaccttctggga

SEQ ID NO: 30214 - DNA, 22 bp, Artificial Sequence
  chemically synthesized
tctttaccttctgggaaactgc

SEQ ID NO: 30215 - DNA, 22 bp, Artificial Sequence
  chemically synthesized
tttaccttctgggaaactgcaa

SEQ ID NO: 30216 - DNA, 22 bp, Artificial Sequence
  chemically synthesized
taccttctgggaaactgcaaat

SEQ ID NO: 30217 - DNA, 22 bp, Artificial Sequence
  chemically synthesized
accttctgggaaactgcaaatt

SEQ ID NO: 30218 - DNA, 22 bp, Artificial Sequence
  chemically synthesized
ccttctgggaaactgcaaattt

SEQ ID NO: 30219 - DNA, 22 bp, Artificial Sequence
  chemically synthesized
ctgggaaactgcaaatttgaat

SEQ ID NO: 30220 - DNA, 22 bp, Artificial Sequence
  chemically synthesized
tgggaaactgcaaatttgaata

SEQ ID NO: 30221 - DNA, 22 bp, Artificial Sequence
  chemically synthesized
ggaaactgcaaatttgaatatt

SEQ ID NO: 30222 - DNA, 22 bp, Artificial Sequence
  chemically synthesized
caaatttgaatatttgttcact

SEQ ID NO: 30223 - DNA, 22 bp, Artificial Sequence
  chemically synthesized
gaatatttgttcactttatagt

SEQ ID NO: 30224 - DNA, 22 bp, Artificial Sequence
  chemically synthesized
aatatttgttcactttatagtg

SEQ ID NO: 30225 - DNA, 22 bp, Artificial Sequence
  chemically synthesized
gttcactttatagtgcctcata

SEQ ID NO: 30226 - DNA, 22 bp, Artificial Sequence
  chemically synthesized
ttcactttatagtgcctcatat

SEQ ID NO: 30227 - DNA, 22 bp, Artificial Sequence
  chemically synthesized
actttatagtgcctcatatgtc

SEQ ID NO: 30228 - DNA, 22 bp, Artificial Sequence
  chemically synthesized
tatagtgcctcatatgtcacat

SEQ ID NO: 30229 - DNA, 22 bp, Artificial Sequence
  chemically synthesized
atagtgcctcatatgtcacata

SEQ ID NO: 30230 - DNA, 22 bp, Artificial Sequence
  chemically synthesized
tagtgcctcatatgtcacatac

SEQ ID NO: 30231 - DNA, 22 bp, Artificial Sequence
  chemically synthesized
atatgtcacatacactttgttc

SEQ ID NO: 30232 - DNA, 22 bp, Artificial Sequence
  chemically synthesized
tgttcattctttttttttcctt

SEQ ID NO: 30233 - DNA, 22 bp, Artificial Sequence
  chemically synthesized
gttcattctttttttttccttt

SEQ ID NO: 30234 - DNA, 22 bp, Artificial Sequence
  chemically synthesized
ttcattctttttttttcctttc

SEQ ID NO: 30235 - DNA, 22 bp, Artificial Sequence
  chemically synthesized
attctttttttttcctttctat

SEQ ID NO: 30236 - DNA, 22 bp, Artificial Sequence
  chemically synthesized
tttttttttcctttctatcatt

SEQ ID NO: 30237 - DNA, 22 bp, Artificial Sequence
  chemically synthesized
tttttttcctttctatcatttg

SEQ ID NO: 30238 - DNA, 22 bp, Artificial Sequence
  chemically synthesized
ttttttcctttctatcatttga

SEQ ID NO: 30239 - DNA, 22 bp, Artificial Sequence
  chemically synthesized
tttttcctttctatcatttgac

SEQ ID NO: 30240 - DNA, 22 bp, Artificial Sequence
  chemically synthesized
ttttcctttctatcatttgacc

SEQ ID NO: 30241 - DNA, 22 bp, Artificial Sequence
  chemically synthesized
tttcctttctatcatttgacca

SEQ ID NO: 30242 - DNA, 22 bp, Artificial Sequence
  chemically synthesized
ttcctttctatcatttgaccag

SEQ ID NO: 30243 - DNA, 22 bp, Artificial Sequence
  chemically synthesized
tcctttctatcatttgaccagc

SEQ ID NO: 30244 - DNA, 22 bp, Artificial Sequence
  chemically synthesized
cctttctatcatttgaccagct

SEQ ID NO: 30245 - DNA, 22 bp, Artificial Sequence
  chemically synthesized
ctttctatcatttgaccagcta

SEQ ID NO: 30246 - DNA, 22 bp, Artificial Sequence
  chemically synthesized
tctatcatttgaccagctaatt

SEQ ID NO: 30247 - DNA, 22 bp, Artificial Sequence
  chemically synthesized
ctatcatttgaccagctaattt

SEQ ID NO: 30248 - DNA, 22 bp, Artificial Sequence
  chemically synthesized
tatcatttgaccagctaatttt

SEQ ID NO: 30249 - DNA, 22 bp, Artificial Sequence
  chemically synthesized
tcatttgaccagctaattttaa

SEQ ID NO: 30250 - DNA, 22 bp, Artificial Sequence
  chemically synthesized
gaccagctaattttaaaagacc

SEQ ID NO: 30251 - DNA, 22 bp, Artificial Sequence
  chemically synthesized
accagctaattttaaaagacct

SEQ ID NO: 30252 - DNA, 22 bp, Artificial Sequence
  chemically synthesized
attttaaaagacctgtcttcaa

SEQ ID NO: 30253 - DNA, 22 bp, Artificial Sequence
  chemically synthesized
taaaagacctgtcttcaagttc

SEQ ID NO: 30254 - DNA, 22 bp, Artificial Sequence
  chemically synthesized
aaaagacctgtcttcaagttct

SEQ ID NO: 30255 - DNA, 22 bp, Artificial Sequence
  chemically synthesized
aaagacctgtcttcaagttctg

SEQ ID NO: 30256 - DNA, 22 bp, Artificial Sequence
  chemically synthesized
tcttcaagttctgaaatttttc

SEQ ID NO: 30257 - DNA, 22 bp, Artificial Sequence
  chemically synthesized
caagttctgaaatttttcttct

SEQ ID NO: 30258 - DNA, 22 bp, Artificial Sequence
  chemically synthesized
aagttctgaaatttttcttctg

SEQ ID NO: 30259 - DNA, 22 bp, Artificial Sequence
  chemically synthesized
tgaaatttttcttctgcttgat

SEQ ID NO: 30260 - DNA, 22 bp, Artificial Sequence
  chemically synthesized
aaatttttcttctgcttgatct

SEQ ID NO: 30261 - DNA, 22 bp, Artificial Sequence
  chemically synthesized
ttcttctgcttgatctgatcta

SEQ ID NO: 30262 - DNA, 22 bp, Artificial Sequence
  chemically synthesized
tcttctgcttgatctgatctat

SEQ ID NO: 30263 - DNA, 22 bp, Artificial Sequence
  chemically synthesized
cttctgcttgatctgatctatt

SEQ ID NO: 30264 - DNA, 22 bp, Artificial Sequence
  chemically synthesized
ttctgcttgatctgatctattg

SEQ ID NO: 30265 - DNA, 22 bp, Artificial Sequence
  chemically synthesized
ctgcttgatctgatctattgtt

SEQ ID NO: 30266 - DNA, 22 bp, Artificial Sequence
  chemically synthesized
tgcttgatctgatctattgttg

SEQ ID NO: 30267 - DNA, 22 bp, Artificial Sequence
  chemically synthesized
cttgatctgatctattgttgaa

SEQ ID NO: 30268 - DNA, 22 bp, Artificial Sequence
  chemically synthesized
gatctgatctattgttgaagtt

SEQ ID NO: 30269 - DNA, 22 bp, Artificial Sequence
  chemically synthesized
atctgatctattgttgaagttt

SEQ ID NO: 30270 - DNA, 22 bp, Artificial Sequence
  chemically synthesized
atctattgttgaagtttttgaa

SEQ ID NO: 30271 - DNA, 22 bp, Artificial Sequence
  chemically synthesized
ttgttgaagtttttgaatgtat

SEQ ID NO: 30272 - DNA, 22 bp, Artificial Sequence
  chemically synthesized
ttgaagtttttgaatgtatttt

SEQ ID NO: 30273 - DNA, 22 bp, Artificial Sequence
  chemically synthesized
aagtttttgaatgtattttgta

SEQ ID NO: 30274 - DNA, 22 bp, Artificial Sequence
  chemically synthesized
ttgaatgtattttgtatttctt

SEQ ID NO: 30275 - DNA, 22 bp, Artificial Sequence
  chemically synthesized
tgaatgtattttgtatttcttt

SEQ ID NO: 30276 - DNA, 22 bp, Artificial Sequence
  chemically synthesized
gaatgtattttgtatttctttc

SEQ ID NO: 30277 - DNA, 22 bp, Artificial Sequence
  chemically synthesized
aatgtattttgtatttctttca

SEQ ID NO: 30278 - DNA, 22 bp, Artificial Sequence
  chemically synthesized
tgtatttctttcaataaactct

SEQ ID NO: 30279 - DNA, 22 bp, Artificial Sequence
  chemically synthesized
gtatttctttcaataaactctt

SEQ ID NO: 30280 - DNA, 22 bp, Artificial Sequence
  chemically synthesized
tatttctttcaataaactcttc

SEQ ID NO: 30281 - DNA, 22 bp, Artificial Sequence
  chemically synthesized
ctttcaataaactcttcagtta

SEQ ID NO: 30282 - DNA, 22 bp, Artificial Sequence
  chemically synthesized
tttcaataaactcttcagttac

SEQ ID NO: 30283 - DNA, 22 bp, Artificial Sequence
  chemically synthesized
tcaataaactcttcagttacag

SEQ ID NO: 30284 - DNA, 22 bp, Artificial Sequence
  chemically synthesized
caataaactcttcagttacaga

SEQ ID NO: 30285 - DNA, 22 bp, Artificial Sequence
  chemically synthesized
aataaactcttcagttacagaa

SEQ ID NO: 30286 - DNA, 22 bp, Artificial Sequence
  chemically synthesized
ttcagttacagaatttctgttt

SEQ ID NO: 30287 - DNA, 22 bp, Artificial Sequence
  chemically synthesized
cagttacagaatttctgtttgg

SEQ ID NO: 30288 - DNA, 22 bp, Artificial Sequence
  chemically synthesized
agttacagaatttctgtttggt

SEQ ID NO: 30289 - DNA, 22 bp, Artificial Sequence
  chemically synthesized
cagaatttctgtttggttcatt

SEQ ID NO: 30290 - DNA, 22 bp, Artificial Sequence
  chemically synthesized
ctgtttggttcattcttgttgt

SEQ ID NO: 30291 - DNA, 22 bp, Artificial Sequence
  chemically synthesized
tgtttggttcattcttgttgta

SEQ ID NO: 30292 - DNA, 22 bp, Artificial Sequence
  chemically synthesized
tttggttcattcttgttgtatc

SEQ ID NO: 30293 - DNA, 22 bp, Artificial Sequence
  chemically synthesized
ggttcattcttgttgtatctat

SEQ ID NO: 30294 - DNA, 22 bp, Artificial Sequence
  chemically synthesized
gttcattcttgttgtatctatc

SEQ ID NO: 30295 - DNA, 22 bp, Artificial Sequence
  chemically synthesized
attcttgttgtatctatctctt

SEQ ID NO: 30296 - DNA, 22 bp, Artificial Sequence
  chemically synthesized
ttgttgtatctatctcttgggt

SEQ ID NO: 30297 - DNA, 22 bp, Artificial Sequence
  chemically synthesized
gttgtatctatctcttgggtaa

SEQ ID NO: 30298 - DNA, 22 bp, Artificial Sequence
  chemically synthesized
ttgtatctatctcttgggtaaa

SEQ ID NO: 30299 - DNA, 22 bp, Artificial Sequence
  chemically synthesized
tatctatctcttgggtaaattt

SEQ ID NO: 30300 - DNA, 22 bp, Artificial Sequence
  chemically synthesized
tctcttgggtaaatttctcatt

SEQ ID NO: 30301 - DNA, 22 bp, Artificial Sequence
  chemically synthesized
ttgggtaaatttctcattcata

SEQ ID NO: 30302 - DNA, 22 bp, Artificial Sequence
  chemically synthesized
gggtaaatttctcattcatatc

SEQ ID NO: 30303 - DNA, 22 bp, Artificial Sequence
  chemically synthesized
ggtaaatttctcattcatatcc

SEQ ID NO: 30304 - DNA, 22 bp, Artificial Sequence
  chemically synthesized
ctcattcatatcctgaattgtt

SEQ ID NO: 30305 - DNA, 22 bp, Artificial Sequence
  chemically synthesized
tcattcatatcctgaattgttt

SEQ ID NO: 30306 - DNA, 22 bp, Artificial Sequence
  chemically synthesized
attcatatcctgaattgttttt

SEQ ID NO: 30307 - DNA, 22 bp, Artificial Sequence
  chemically synthesized
atatcctgaattgtttttctga

SEQ ID NO: 30308 - DNA, 22 bp, Artificial Sequence
  chemically synthesized
aattgtttttctgatttctttt

SEQ ID NO: 30309 - DNA, 22 bp, Artificial Sequence
  chemically synthesized
tttttctgatttctttttattg

SEQ ID NO: 30310 - DNA, 22 bp, Artificial Sequence
  chemically synthesized
ttctgatttctttttattgttt

SEQ ID NO: 30311 - DNA, 22 bp, Artificial Sequence
  chemically synthesized
tctgatttctttttattgttta

SEQ ID NO: 30312 - DNA, 22 bp, Artificial Sequence
  chemically synthesized
ctgatttctttttattgtttat

SEQ ID NO: 30313 - DNA, 22 bp, Artificial Sequence
  chemically synthesized
tgatttctttttattgtttatc

SEQ ID NO: 30314 - DNA, 22 bp, Artificial Sequence
  chemically synthesized
atttctttttattgtttatctg

SEQ ID NO: 30315 - DNA, 22 bp, Artificial Sequence
  chemically synthesized
ctttttattgtttatctgagtt

SEQ ID NO: 30316 - DNA, 22 bp, Artificial Sequence
  chemically synthesized
tttttattgtttatctgagttc

SEQ ID NO: 30317 - DNA, 22 bp, Artificial Sequence
  chemically synthesized
tttattgtttatctgagttctc

SEQ ID NO: 30318 - DNA, 22 bp, Artificial Sequence
  chemically synthesized
ttattgtttatctgagttctct

SEQ ID NO: 30319 - DNA, 22 bp, Artificial Sequence
  chemically synthesized
tattgtttatctgagttctctt

SEQ ID NO: 30320 - DNA, 22 bp, Artificial Sequence
  chemically synthesized
attgtttatctgagttctcttg

SEQ ID NO: 30321 - DNA, 22 bp, Artificial Sequence
  chemically synthesized
ttgtttatctgagttctcttgt

SEQ ID NO: 30322 - DNA, 22 bp, Artificial Sequence
  chemically synthesized
tttatctgagttctcttgtgtc

SEQ ID NO: 30323 - DNA, 22 bp, Artificial Sequence
  chemically synthesized
atctgagttctcttgtgtctca

SEQ ID NO: 30324 - DNA, 22 bp, Artificial Sequence
  chemically synthesized
tctgagttctcttgtgtctcac

SEQ ID NO: 30325 - DNA, 22 bp, Artificial Sequence
  chemically synthesized
agttctcttgtgtctcactgag

SEQ ID NO: 30326 - DNA, 22 bp, Artificial Sequence
  chemically synthesized
tcttgtgtctcactgagcttcc

SEQ ID NO: 30327 - DNA, 22 bp, Artificial Sequence
  chemically synthesized
ttgtgtctcactgagcttcctt

SEQ ID NO: 30328 - DNA, 22 bp, Artificial Sequence
  chemically synthesized
gtgtctcactgagcttccttaa

SEQ ID NO: 30329 - DNA, 22 bp, Artificial Sequence
  chemically synthesized
tgtctcactgagcttccttaat

SEQ ID NO: 30330 - DNA, 22 bp, Artificial Sequence
  chemically synthesized
actgagcttccttaatatcaac

SEQ ID NO: 30331 - DNA, 22 bp, Artificial Sequence
  chemically synthesized
agcttccttaatatcaacattt

SEQ ID NO: 30332 - DNA, 22 bp, Artificial Sequence
  chemically synthesized
ccttaatatcaacattttggat

SEQ ID NO: 30333 - DNA, 22 bp, Artificial Sequence
  chemically synthesized
cttaatatcaacattttggatt

SEQ ID NO: 30334 - DNA, 22 bp, Artificial Sequence
  chemically synthesized
aatatcaacattttggattctt

SEQ ID NO: 30335 - DNA, 22 bp, Artificial Sequence
  chemically synthesized
atatcaacattttggattcttt

SEQ ID NO: 30336 - DNA, 22 bp, Artificial Sequence
  chemically synthesized
tggattcttttttccagaattt

SEQ ID NO: 30337 - DNA, 22 bp, Artificial Sequence
  chemically synthesized
ggattcttttttccagaatttt

SEQ ID NO: 30338 - DNA, 22 bp, Artificial Sequence
  chemically synthesized
gattcttttttccagaatttta

SEQ ID NO: 30339 - DNA, 22 bp, Artificial Sequence
  chemically synthesized
ttttttccagaattttataaat

SEQ ID NO: 30340 - DNA, 22 bp, Artificial Sequence
  chemically synthesized
ttttccagaattttataaatgt

SEQ ID NO: 30341 - DNA, 22 bp, Artificial Sequence
  chemically synthesized
tttccagaattttataaatgtc

SEQ ID NO: 30342 - DNA, 22 bp, Artificial Sequence
  chemically synthesized
ttccagaattttataaatgtct

SEQ ID NO: 30343 - DNA, 22 bp, Artificial Sequence
  chemically synthesized
tccagaattttataaatgtctt

SEQ ID NO: 30344 - DNA, 22 bp, Artificial Sequence
  chemically synthesized
ccagaattttataaatgtcttt

SEQ ID NO: 30345 - DNA, 22 bp, Artificial Sequence
  chemically synthesized
cagaattttataaatgtctttt

SEQ ID NO: 30346 - DNA, 22 bp, Artificial Sequence
  chemically synthesized
tataaatgtcttttttttccac

SEQ ID NO: 30347 - DNA, 22 bp, Artificial Sequence
  chemically synthesized
ataaatgtcttttttttccact

SEQ ID NO: 30348 - DNA, 22 bp, Artificial Sequence
  chemically synthesized
taaatgtcttttttttccactg

SEQ ID NO: 30349 - DNA, 22 bp, Artificial Sequence
  chemically synthesized
ttttttccactggcttatgttg

SEQ ID NO: 30350 - DNA, 22 bp, Artificial Sequence
  chemically synthesized
tttttccactggcttatgttgc

SEQ ID NO: 30351 - DNA, 22 bp, Artificial Sequence
  chemically synthesized
ttttccactggcttatgttgct

SEQ ID NO: 30352 - DNA, 22 bp, Artificial Sequence
  chemically synthesized
tttccactggcttatgttgctg

SEQ ID NO: 30353 - DNA, 22 bp, Artificial Sequence
  chemically synthesized
ttccactggcttatgttgctga

SEQ ID NO: 30354 - DNA, 22 bp, Artificial Sequence
  chemically synthesized
tccactggcttatgttgctgaa

SEQ ID NO: 30355 - DNA, 22 bp, Artificial Sequence
  chemically synthesized
ccactggcttatgttgctgaag

SEQ ID NO: 30356 - DNA, 22 bp, Artificial Sequence
  chemically synthesized
cactggcttatgttgctgaaga

SEQ ID NO: 30357 - DNA, 22 bp, Artificial Sequence
  chemically synthesized
gcttatgttgctgaagaattat

SEQ ID NO: 30358 - DNA, 22 bp, Artificial Sequence
  chemically synthesized
atgttgctgaagaattattaaa

SEQ ID NO: 30359 - DNA, 22 bp, Artificial Sequence
  chemically synthesized
tgttgctgaagaattattaaat

SEQ ID NO: 30360 - DNA, 22 bp, Artificial Sequence
  chemically synthesized
ctgaagaattattaaattcctt

SEQ ID NO: 30361 - DNA, 22 bp, Artificial Sequence
  chemically synthesized
aagaattattaaattcctttgg

SEQ ID NO: 30362 - DNA, 22 bp, Artificial Sequence
  chemically synthesized
ttaaattcctttggaagtgtca

SEQ ID NO: 30363 - DNA, 22 bp, Artificial Sequence
  chemically synthesized
aattcctttggaagtgtcatat

SEQ ID NO: 30364 - DNA, 22 bp, Artificial Sequence
  chemically synthesized
ctttggaagtgtcatatttctt

SEQ ID NO: 30365 - DNA, 22 bp, Artificial Sequence
  chemically synthesized
tggaagtgtcatatttcttcac

SEQ ID NO: 30366 - DNA, 22 bp, Artificial Sequence
  chemically synthesized
ggaagtgtcatatttcttcacc

SEQ ID NO: 30367 - DNA, 22 bp, Artificial Sequence
  chemically synthesized
gaagtgtcatatttcttcacct

SEQ ID NO: 30368 - DNA, 22 bp, Artificial Sequence
  chemically synthesized
cttcacctttttatgtttattt

SEQ ID NO: 30369 - DNA, 22 bp, Artificial Sequence
  chemically synthesized
ttcacctttttatgtttatttt

SEQ ID NO: 30370 - DNA, 22 bp, Artificial Sequence
  chemically synthesized
cacctttttatgtttattttgt

SEQ ID NO: 30371 - DNA, 22 bp, Artificial Sequence
  chemically synthesized
acctttttatgtttattttgtt

SEQ ID NO: 30372 - DNA, 22 bp, Artificial Sequence
  chemically synthesized
tttatgtttattttgttcttgc

SEQ ID NO: 30373 - DNA, 22 bp, Artificial Sequence
  chemically synthesized
ttatgtttattttgttcttgca

SEQ ID NO: 30374 - DNA, 22 bp, Artificial Sequence
  chemically synthesized
tatgtttattttgttcttgcat

SEQ ID NO: 30375 - DNA, 22 bp, Artificial Sequence
  chemically synthesized
atgtttattttgttcttgcatt

SEQ ID NO: 30376 - DNA, 22 bp, Artificial Sequence
  chemically synthesized
tgtttattttgttcttgcattg

SEQ ID NO: 30377 - DNA, 22 bp, Artificial Sequence
  chemically synthesized
attttgttcttgcattgatatc

SEQ ID NO: 30378 - DNA, 22 bp, Artificial Sequence
  chemically synthesized
ttttgttcttgcattgatatct

SEQ ID NO: 30379 - DNA, 22 bp, Artificial Sequence
  chemically synthesized
tgttcttgcattgatatctctg

SEQ ID NO: 30380 - DNA, 22 bp, Artificial Sequence
  chemically synthesized
gttcttgcattgatatctctgc

SEQ ID NO: 30381 - DNA, 22 bp, Artificial Sequence
  chemically synthesized
ttcttgcattgatatctctgca

SEQ ID NO: 30382 - DNA, 22 bp, Artificial Sequence
  chemically synthesized
ttgcattgatatctctgcatct

SEQ ID NO: 30383 - DNA, 22 bp, Artificial Sequence
  chemically synthesized
gcattgatatctctgcatctgg

SEQ ID NO: 30384 - DNA, 22 bp, Artificial Sequence
  chemically synthesized
cattgatatctctgcatctggt

SEQ ID NO: 30385 - DNA, 22 bp, Artificial Sequence
  chemically synthesized
atatctctgcatctggtgtaat

SEQ ID NO: 30386 - DNA, 22 bp, Artificial Sequence
  chemically synthesized
tgcatctggtgtaatgattgct

SEQ ID NO: 30387 - DNA, 22 bp, Artificial Sequence
  chemically synthesized
catctggtgtaatgattgctgc

SEQ ID NO: 30388 - DNA, 22 bp, Artificial Sequence
  chemically synthesized
gtgtaatgattgctgcttccag

SEQ ID NO: 30389 - DNA, 22 bp, Artificial Sequence
  chemically synthesized
ctgcttccagttttgtaaattt

SEQ ID NO: 30390 - DNA, 22 bp, Artificial Sequence
  chemically synthesized
cttccagttttgtaaatttgtt

SEQ ID NO: 30391 - DNA, 22 bp, Artificial Sequence
  chemically synthesized
ccagttttgtaaatttgttttt

SEQ ID NO: 30392 - DNA, 22 bp, Artificial Sequence
  chemically synthesized
cagttttgtaaatttgtttttg

SEQ ID NO: 30393 - DNA, 22 bp, Artificial Sequence
  chemically synthesized
tgtaaatttgtttttgtagggg

SEQ ID NO: 30394 - DNA, 22 bp, Artificial Sequence
  chemically synthesized
gtaaatttgtttttgtagggga

SEQ ID NO: 30395 - DNA, 22 bp, Artificial Sequence
  chemically synthesized
taaatttgtttttgtaggggaa

SEQ ID NO: 30396 - DNA, 22 bp, Artificial Sequence
  chemically synthesized
gtttttgtaggggaagactttt

SEQ ID NO: 30397 - DNA, 22 bp, Artificial Sequence
  chemically synthesized
tttttgtaggggaagacttttt

SEQ ID NO: 30398 - DNA, 22 bp, Artificial Sequence
  chemically synthesized
ttgtaggggaagacttttttct

SEQ ID NO: 30399 - DNA, 22 bp, Artificial Sequence
  chemically synthesized
tgtaggggaagacttttttctg

SEQ ID NO: 30400 - DNA, 22 bp, Artificial Sequence
  chemically synthesized
gtaggggaagacttttttctga

SEQ ID NO: 30401 - DNA, 22 bp, Artificial Sequence
  chemically synthesized
taggggaagacttttttctgaa

SEQ ID NO: 30402 - DNA, 22 bp, Artificial Sequence
  chemically synthesized
ttttctgaagatgtatcttggt

SEQ ID NO: 30403 - DNA, 22 bp, Artificial Sequence
  chemically synthesized
tttctgaagatgtatcttggtg

SEQ ID NO: 30404 - DNA, 22 bp, Artificial Sequence
  chemically synthesized
ttctgaagatgtatcttggtgt

SEQ ID NO: 30405 - DNA, 22 bp, Artificial Sequence
  chemically synthesized
tctgaagatgtatcttggtgtt

SEQ ID NO: 30406 - DNA, 22 bp, Artificial Sequence
  chemically synthesized
ctgaagatgtatcttggtgttg

SEQ ID NO: 30407 - DNA, 22 bp, Artificial Sequence
  chemically synthesized
tgaagatgtatcttggtgttga

SEQ ID NO: 30408 - DNA, 22 bp, Artificial Sequence
  chemically synthesized
aagatgtatcttggtgttgatt

SEQ ID NO: 30409 - DNA, 22 bp, Artificial Sequence
  chemically synthesized
ggtgttgattgagtagggcact

SEQ ID NO: 30410 - DNA, 22 bp, Artificial Sequence
  chemically synthesized
gtgttgattgagtagggcactt

SEQ ID NO: 30411 - DNA, 22 bp, Artificial Sequence
  chemically synthesized
attgagtagggcactttgattt

SEQ ID NO: 30412 - DNA, 22 bp, Artificial Sequence
  chemically synthesized
agtagggcactttgattttgat

SEQ ID NO: 30413 - DNA, 22 bp, Artificial Sequence
  chemically synthesized
tgattttgatttctaggtgcat

SEQ ID NO: 30414 - DNA, 22 bp, Artificial Sequence
  chemically synthesized
gattttgatttctaggtgcata

SEQ ID NO: 30415 - DNA, 22 bp, Artificial Sequence
  chemically synthesized
attttgatttctaggtgcatac

SEQ ID NO: 30416 - DNA, 22 bp, Artificial Sequence
  chemically synthesized
tgatttctaggtgcatacagca

SEQ ID NO: 30417 - DNA, 22 bp, Artificial Sequence
  chemically synthesized
gatttctaggtgcatacagcag

SEQ ID NO: 30418 - DNA, 22 bp, Artificial Sequence
  chemically synthesized
atttctaggtgcatacagcagc

SEQ ID NO: 30419 - DNA, 22 bp, Artificial Sequence
  chemically synthesized
ctaggtgcatacagcagcatag

SEQ ID NO: 30420 - DNA, 22 bp, Artificial Sequence
  chemically synthesized
taggtgcatacagcagcatagt

SEQ ID NO: 30421 - DNA, 22 bp, Artificial Sequence
  chemically synthesized
ggtgcatacagcagcatagtct

SEQ ID NO: 30422 - DNA, 22 bp, Artificial Sequence
  chemically synthesized
catattattttttttcagctgc

SEQ ID NO: 30423 - DNA, 22 bp, Artificial Sequence
  chemically synthesized
atattattttttttcagctgcc

SEQ ID NO: 30424 - DNA, 22 bp, Artificial Sequence
  chemically synthesized
ttttttttcagctgccaacagt

SEQ ID NO: 30425 - DNA, 22 bp, Artificial Sequence
  chemically synthesized
tttttcagctgccaacagtatc

SEQ ID NO: 30426 - DNA, 22 bp, Artificial Sequence
  chemically synthesized
ttttcagctgccaacagtatca

SEQ ID NO: 30427 - DNA, 22 bp, Artificial Sequence
  chemically synthesized
tttcagctgccaacagtatcat

SEQ ID NO: 30428 - DNA, 22 bp, Artificial Sequence
  chemically synthesized
ttcagctgccaacagtatcatc

SEQ ID NO: 30429 - DNA, 22 bp, Artificial Sequence
  chemically synthesized
tcagctgccaacagtatcatca

SEQ ID NO: 30430 - DNA, 22 bp, Artificial Sequence
  chemically synthesized
cagctgccaacagtatcatcag

SEQ ID NO: 30431 - DNA, 22 bp, Artificial Sequence
  chemically synthesized
agctgccaacagtatcatcagt

SEQ ID NO: 30432 - DNA, 22 bp, Artificial Sequence
  chemically synthesized
ccaacagtatcatcagtgtctg

SEQ ID NO: 30433 - DNA, 22 bp, Artificial Sequence
  chemically synthesized
tgattttttcagtggcttaggg

SEQ ID NO: 30434 - DNA, 22 bp, Artificial Sequence
  chemically synthesized
tttcagtggcttagggtgcatt

SEQ ID NO: 30435 - DNA, 22 bp, Artificial Sequence
  chemically synthesized
ttcagtggcttagggtgcattt

SEQ ID NO: 30436 - DNA, 22 bp, Artificial Sequence
  chemically synthesized
tcagtggcttagggtgcatttg

SEQ ID NO: 30437 - DNA, 22 bp, Artificial Sequence
  chemically synthesized
cagtggcttagggtgcatttgt

SEQ ID NO: 30438 - DNA, 22 bp, Artificial Sequence
  chemically synthesized
agtggcttagggtgcatttgtt

SEQ ID NO: 30439 - DNA, 22 bp, Artificial Sequence
  chemically synthesized
agggtgcatttgttagtgaagg

SEQ ID NO: 30440 - DNA, 22 bp, Artificial Sequence
  chemically synthesized
gggtgcatttgttagtgaaggt

SEQ ID NO: 30441 - DNA, 22 bp, Artificial Sequence
  chemically synthesized
gttagtgaaggtggtgatgagg

SEQ ID NO: 30442 - DNA, 22 bp, Artificial Sequence
  chemically synthesized
ttagtgaaggtggtgatgaggt

SEQ ID NO: 30443 - DNA, 22 bp, Artificial Sequence
  chemically synthesized
gtgaaggtggtgatgaggttgt

SEQ ID NO: 30444 - DNA, 22 bp, Artificial Sequence
  chemically synthesized
tgctggagacaagaatatcaag

SEQ ID NO: 30445 - DNA, 22 bp, Artificial Sequence
  chemically synthesized
gagacaagaatatcaagtgggc

SEQ ID NO: 30446 - DNA, 22 bp, Artificial Sequence
  chemically synthesized
ggccccagtggtggtggtgggc

SEQ ID NO: 30447 - DNA, 22 bp, Artificial Sequence
  chemically synthesized
gccccagtggtggtggtgggcc

SEQ ID NO: 30448 - DNA, 22 bp, Artificial Sequence
  chemically synthesized
gcattcctgtccttgggcccca

SEQ ID NO: 30449 - DNA, 22 bp, Artificial Sequence
  chemically synthesized
ctgtccttgggccccatggctg

SEQ ID NO: 30450 - DNA, 22 bp, Artificial Sequence
  chemically synthesized
tccttgggccccatggctgtgt

SEQ ID NO: 30451 - DNA, 22 bp, Artificial Sequence
  chemically synthesized
gggccccatggctgtgtacatt

SEQ ID NO: 30452 - DNA, 22 bp, Artificial Sequence
  chemically synthesized
ggccccatggctgtgtacattg

SEQ ID NO: 30453 - DNA, 22 bp, Artificial Sequence
  chemically synthesized
tgtacattggcactgatggtaa

SEQ ID NO: 30454 - DNA, 22 bp, Artificial Sequence
  chemically synthesized
gcactgatggtaatgagtctag

SEQ ID NO: 30455 - DNA, 22 bp, Artificial Sequence
  chemically synthesized
atggtaatgagtctagttgggt

SEQ ID NO: 30456 - DNA, 22 bp, Artificial Sequence
  chemically synthesized
gttgggttgattctttggcctt

SEQ ID NO: 30457 - DNA, 22 bp, Artificial Sequence
  chemically synthesized
ggttgattctttggccttcagg

SEQ ID NO: 30458 - DNA, 22 bp, Artificial Sequence
  chemically synthesized
attctttggccttcaggcagtt

SEQ ID NO: 30459 - DNA, 22 bp, Artificial Sequence
  chemically synthesized
tttggccttcaggcagtttgct

SEQ ID NO: 30460 - DNA, 22 bp, Artificial Sequence
  chemically synthesized
tggccttcaggcagtttgcttg

SEQ ID NO: 30461 - DNA, 22 bp, Artificial Sequence
  chemically synthesized
ggccttcaggcagtttgcttgg

SEQ ID NO: 30462 - DNA, 22 bp, Artificial Sequence
  chemically synthesized
gccttcaggcagtttgcttggg

SEQ ID NO: 30463 - DNA, 22 bp, Artificial Sequence
  chemically synthesized
caggcagtttgcttgggtgtca

SEQ ID NO: 30464 - DNA, 22 bp, Artificial Sequence
  chemically synthesized
aggcagtttgcttgggtgtcag

SEQ ID NO: 30465 - DNA, 22 bp, Artificial Sequence
  chemically synthesized
gcttgggtgtcagtagtggcca

SEQ ID NO: 30466 - DNA, 22 bp, Artificial Sequence
  chemically synthesized
cttgggtgtcagtagtggccat

SEQ ID NO: 30467 - DNA, 22 bp, Artificial Sequence
  chemically synthesized
gggtgtcagtagtggccatagt

SEQ ID NO: 30468 - DNA, 22 bp, Artificial Sequence
  chemically synthesized
ggtgtcagtagtggccatagta

SEQ ID NO: 30469 - DNA, 22 bp, Artificial Sequence
  chemically synthesized
ggctggtgtgtgggtcctcagg

SEQ ID NO: 30470 - DNA, 22 bp, Artificial Sequence
  chemically synthesized
gtgtgtgggtcctcaggcttct

SEQ ID NO: 30471 - DNA, 22 bp, Artificial Sequence
  chemically synthesized
aggcttctggacagtgggtgtg

SEQ ID NO: 30472 - DNA, 22 bp, Artificial Sequence
  chemically synthesized
ctggacagtgggtgtggtgtgg

SEQ ID NO: 30473 - DNA, 22 bp, Artificial Sequence
  chemically synthesized
tggacagtgggtgtggtgtggg

SEQ ID NO: 30474 - DNA, 22 bp, Artificial Sequence
  chemically synthesized
gacagtgggtgtggtgtgggtg

SEQ ID NO: 30475 - DNA, 22 bp, Artificial Sequence
  chemically synthesized
tagcaactgcaggacaaccctc

SEQ ID NO: 30476 - DNA, 22 bp, Artificial Sequence
  chemically synthesized
caggacaaccctctggctccca

SEQ ID NO: 30477 - DNA, 22 bp, Artificial Sequence
  chemically synthesized
tggctcccaagcagtctgcact

SEQ ID NO: 30478 - DNA, 22 bp, Artificial Sequence
  chemically synthesized
gctcccaagcagtctgcactgg

SEQ ID NO: 30479 - DNA, 22 bp, Artificial Sequence
  chemically synthesized
ccaagcagtctgcactggtgtt

SEQ ID NO: 30480 - DNA, 22 bp, Artificial Sequence
  chemically synthesized
cactggtgttggtggtggctgc

SEQ ID NO: 30481 - DNA, 22 bp, Artificial Sequence
  chemically synthesized
gtgttggtggtggctgcaaggg

SEQ ID NO: 30482 - DNA, 22 bp, Artificial Sequence
  chemically synthesized
gtggtggctgcaagggctgaat

SEQ ID NO: 30483 - DNA, 22 bp, Artificial Sequence
  chemically synthesized
caagggctgaatgagccagtct

SEQ ID NO: 30484 - DNA, 22 bp, Artificial Sequence
  chemically synthesized
aatgagccagtcttcagaccca

SEQ ID NO: 30485 - DNA, 22 bp, Artificial Sequence
  chemically synthesized
cagacccacaggtggcacatgc

SEQ ID NO: 30486 - DNA, 22 bp, Artificial Sequence
  chemically synthesized
agacccacaggtggcacatgca

SEQ ID NO: 30487 - DNA, 22 bp, Artificial Sequence
  chemically synthesized
tgatggcagtggcagattgggt

SEQ ID NO: 30488 - DNA, 22 bp, Artificial Sequence
  chemically synthesized
ggtaggcccatcatcaggcttc

SEQ ID NO: 30489 - DNA, 22 bp, Artificial Sequence
  chemically synthesized
ctgggagggttgcttaggtacc

SEQ ID NO: 30490 - DNA, 22 bp, Artificial Sequence
  chemically synthesized
tgggagggttgcttaggtacca

SEQ ID NO: 30491 - DNA, 22 bp, Artificial Sequence
  chemically synthesized
ggagggttgcttaggtaccagt

SEQ ID NO: 30492 - DNA, 22 bp, Artificial Sequence
  chemically synthesized
cttaggtaccagtcatggtgga

SEQ ID NO: 30493 - DNA, 22 bp, Artificial Sequence
  chemically synthesized
aggtaccagtcatggtggatgg

SEQ ID NO: 30494 - DNA, 22 bp, Artificial Sequence
  chemically synthesized
ggtaccagtcatggtggatggc

SEQ ID NO: 30495 - DNA, 22 bp, Artificial Sequence
  chemically synthesized
tctctgggttcccagacaactt

SEQ ID NO: 30496 - DNA, 22 bp, Artificial Sequence
  chemically synthesized
tgggttcccagacaacttgctt

SEQ ID NO: 30497 - DNA, 22 bp, Artificial Sequence
  chemically synthesized
ggttcccagacaacttgcttag

SEQ ID NO: 30498 - DNA, 22 bp, Artificial Sequence
  chemically synthesized
ccagacaacttgcttaggcatt

SEQ ID NO: 30499 - DNA, 22 bp, Artificial Sequence
  chemically synthesized
gcttaggcattgaggaaggcaa

SEQ ID NO: 30500 - DNA, 22 bp, Artificial Sequence
  chemically synthesized
cttaggcattgaggaaggcaaa

SEQ ID NO: 30501 - DNA, 22 bp, Artificial Sequence
  chemically synthesized
aggcattgaggaaggcaaagcc

SEQ ID NO: 30502 - DNA, 22 bp, Artificial Sequence
  chemically synthesized
ggcattgaggaaggcaaagcca

SEQ ID NO: 30503 - DNA, 22 bp, Artificial Sequence
  chemically synthesized
aggaaggcaaagccaggctggg

SEQ ID NO: 30504 - DNA, 22 bp, Artificial Sequence
  chemically synthesized
ggtgttcctgacctcaggccac

SEQ ID NO: 30505 - DNA, 22 bp, Artificial Sequence
  chemically synthesized
ctgacctcaggccactcagtgg

SEQ ID NO: 30506 - DNA, 22 bp, Artificial Sequence
  chemically synthesized
acctcaggccactcagtggtgt

SEQ ID NO: 30507 - DNA, 22 bp, Artificial Sequence
  chemically synthesized
aggccactcagtggtgtgtgtg

SEQ ID NO: 30508 - DNA, 22 bp, Artificial Sequence
  chemically synthesized
agtggtgtgtgtggacaccggc

SEQ ID NO: 30509 - DNA, 22 bp, Artificial Sequence
  chemically synthesized
tcataggctggagtggagtgat

SEQ ID NO: 30510 - DNA, 22 bp, Artificial Sequence
  chemically synthesized
gagtggagtgatcctcaggccc

SEQ ID NO: 30511 - DNA, 22 bp, Artificial Sequence
  chemically synthesized
aggcccccagcagaatgcctga

SEQ ID NO: 30512 - DNA, 22 bp, Artificial Sequence
  chemically synthesized
agtgaattagcagctactgcat

SEQ ID NO: 30513 - DNA, 22 bp, Artificial Sequence
  chemically synthesized
gcagctactgcattgttgccct

SEQ ID NO: 30514 - DNA, 22 bp, Artificial Sequence
  chemically synthesized
ctgcattgttgccctgctcttg

SEQ ID NO: 30515 - DNA, 22 bp, Artificial Sequence
  chemically synthesized
cattgttgccctgctcttgaag

SEQ ID NO: 30516 - DNA, 22 bp, Artificial Sequence
  chemically synthesized
ttgccctgctcttgaaggggtg

SEQ ID NO: 30517 - DNA, 22 bp, Artificial Sequence
  chemically synthesized
ccctgctcttgaaggggtgcgg

SEQ ID NO: 30518 - DNA, 22 bp, Artificial Sequence
  chemically synthesized
ctcttgaaggggtgcggggtgt

SEQ ID NO: 30519 - DNA, 22 bp, Artificial Sequence
  chemically synthesized
ttgaaggggtgcggggtgtgtt

SEQ ID NO: 30520 - DNA, 22 bp, Artificial Sequence
  chemically synthesized
gaaggggtgcggggtgtgttgc

SEQ ID NO: 30521 - DNA, 22 bp, Artificial Sequence
  chemically synthesized
aaggggtgcggggtgtgttgct

SEQ ID NO: 30522 - DNA, 22 bp, Artificial Sequence
  chemically synthesized
ctttcagtggcagcagctataa

SEQ ID NO: 30523 - DNA, 22 bp, Artificial Sequence
  chemically synthesized
tcagtggcagcagctataaatg

SEQ ID NO: 30524 - DNA, 22 bp, Artificial Sequence
  chemically synthesized
cagtggcagcagctataaatgg

SEQ ID NO: 30525 - DNA, 22 bp, Artificial Sequence
  chemically synthesized
agtggcagcagctataaatggg

SEQ ID NO: 30526 - DNA, 22 bp, Artificial Sequence
  chemically synthesized
taaatgggttgctggtgggcat

SEQ ID NO: 30527 - DNA, 22 bp, Artificial Sequence
  chemically synthesized
ctggtgggcatgtgtttcagcc

SEQ ID NO: 30528 - DNA, 22 bp, Artificial Sequence
  chemically synthesized
gtgggcatgtgtttcagcccca

SEQ ID NO: 30529 - DNA, 22 bp, Artificial Sequence
  chemically synthesized
cagccccagatggtggctgcaa

SEQ ID NO: 30530 - DNA, 22 bp, Artificial Sequence
  chemically synthesized
agccccagatggtggctgcaag

SEQ ID NO: 30531 - DNA, 22 bp, Artificial Sequence
  chemically synthesized
caagtggggtagcattttctta

SEQ ID NO: 30532 - DNA, 22 bp, Artificial Sequence
  chemically synthesized
tcttagggagcttataaatgtg

SEQ ID NO: 30533 - DNA, 22 bp, Artificial Sequence
  chemically synthesized
cttagggagcttataaatgtgt

SEQ ID NO: 30534 - DNA, 22 bp, Artificial Sequence
  chemically synthesized
ttagggagcttataaatgtgta

SEQ ID NO: 30535 - DNA, 22 bp, Artificial Sequence
  chemically synthesized
agggagcttataaatgtgtagc

SEQ ID NO: 30536 - DNA, 22 bp, Artificial Sequence
  chemically synthesized
gggagcttataaatgtgtagca

SEQ ID NO: 30537 - DNA, 22 bp, Artificial Sequence
  chemically synthesized
ataaatgtgtagcagccctgct

SEQ ID NO: 30538 - DNA, 22 bp, Artificial Sequence
  chemically synthesized
taaatgtgtagcagccctgcta

SEQ ID NO: 30539 - DNA, 22 bp, Artificial Sequence
  chemically synthesized
ctactgggggtgggggagtcca

SEQ ID NO: 30540 - DNA, 22 bp, Artificial Sequence
  chemically synthesized
ctgggggtgggggagtccactt

SEQ ID NO: 30541 - DNA, 22 bp, Artificial Sequence
  chemically synthesized
ggggtgggggagtccacttcta

SEQ ID NO: 30542 - DNA, 22 bp, Artificial Sequence
  chemically synthesized
ctaatgacacactttatccctg

SEQ ID NO: 30543 - DNA, 22 bp, Artificial Sequence
  chemically synthesized
taatgacacactttatccctgg

SEQ ID NO: 30544 - DNA, 22 bp, Artificial Sequence
  chemically synthesized
atgacacactttatccctggtg

SEQ ID NO: 30545 - DNA, 22 bp, Artificial Sequence
  chemically synthesized
tatccctggtgacagcagccag

SEQ ID NO: 30546 - DNA, 22 bp, Artificial Sequence
  chemically synthesized
atccctggtgacagcagccagc

SEQ ID NO: 30547 - DNA, 22 bp, Artificial Sequence
  chemically synthesized
tccctggtgacagcagccagca

SEQ ID NO: 30548 - DNA, 22 bp, Artificial Sequence
  chemically synthesized
gtgacagcagccagcagtagca

SEQ ID NO: 30549 - DNA, 22 bp, Artificial Sequence
  chemically synthesized
agctgtgggtgggggatgtcag

SEQ ID NO: 30550 - DNA, 22 bp, Artificial Sequence
  chemically synthesized
tgggtgggggatgtcagcagag

SEQ ID NO: 30551 - DNA, 22 bp, Artificial Sequence
  chemically synthesized
cagggatgtagagatgcagatg

SEQ ID NO: 30552 - DNA, 22 bp, Artificial Sequence
  chemically synthesized
agggatgtagagatgcagatga

SEQ ID NO: 30553 - DNA, 22 bp, Artificial Sequence
  chemically synthesized
gggtctgaggaacgatgtcatc

SEQ ID NO: 30554 - DNA, 22 bp, Artificial Sequence
  chemically synthesized
aggaacgatgtcatctggtggg

SEQ ID NO: 30555 - DNA, 22 bp, Artificial Sequence
  chemically synthesized
gtgggtgttgggctctcaaaat

SEQ ID NO: 30556 - DNA, 22 bp, Artificial Sequence
  chemically synthesized
ggctctcaaaatggcaccttgc

SEQ ID NO: 30557 - DNA, 22 bp, Artificial Sequence
  chemically synthesized
tcaaaatggcaccttgctgctc

SEQ ID NO: 30558 - DNA, 22 bp, Artificial Sequence
  chemically synthesized
aaaatggcaccttgctgctcag

SEQ ID NO: 30559 - DNA, 22 bp, Artificial Sequence
  chemically synthesized
gctgctcagtaatggggatggc

SEQ ID NO: 30560 - DNA, 22 bp, Artificial Sequence
  chemically synthesized
ctgctcagtaatggggatggca

SEQ ID NO: 30561 - DNA, 22 bp, Artificial Sequence
  chemically synthesized
ctcagtaatggggatggcaggg

SEQ ID NO: 30562 - DNA, 22 bp, Artificial Sequence
  chemically synthesized
agtaatggggatggcaggggtg

SEQ ID NO: 30563 - DNA, 22 bp, Artificial Sequence
  chemically synthesized
cttctctggagcaatgcctttg

SEQ ID NO: 30564 - DNA, 22 bp, Artificial Sequence
  chemically synthesized
ctctggagcaatgcctttgtgc

SEQ ID NO: 30565 - DNA, 22 bp, Artificial Sequence
  chemically synthesized
tctggagcaatgcctttgtgcg

SEQ ID NO: 30566 - DNA, 22 bp, Artificial Sequence
  chemically synthesized
tggagcaatgcctttgtgcgat

SEQ ID NO: 30567 - DNA, 22 bp, Artificial Sequence
  chemically synthesized
gagcaatgcctttgtgcgattg

SEQ ID NO: 30568 - DNA, 22 bp, Artificial Sequence
  chemically synthesized
tgtgcgattgctgggcagttcc

SEQ ID NO: 30569 - DNA, 22 bp, Artificial Sequence
  chemically synthesized
gtgcgattgctgggcagttcct

SEQ ID NO: 30570 - DNA, 22 bp, Artificial Sequence
  chemically synthesized
tgcgattgctgggcagttcctt

SEQ ID NO: 30571 - DNA, 22 bp, Artificial Sequence
  chemically synthesized
ctgggcagttccttatgatagt

SEQ ID NO: 30572 - DNA, 22 bp, Artificial Sequence
  chemically synthesized
ggcagttccttatgatagtctc

SEQ ID NO: 30573 - DNA, 22 bp, Artificial Sequence
  chemically synthesized
cttatgatagtctcaaggcctg

SEQ ID NO: 30574 - DNA, 22 bp, Artificial Sequence
  chemically synthesized
atgatagtctcaaggcctgcat

SEQ ID NO: 30575 - DNA, 22 bp, Artificial Sequence
  chemically synthesized
tgatagtctcaaggcctgcatg

SEQ ID NO: 30576 - DNA, 22 bp, Artificial Sequence
  chemically synthesized
aaggcctgcatggtcaagggac

SEQ ID NO: 30577 - DNA, 22 bp, Artificial Sequence
  chemically synthesized
catggtcaagggactctcctgt

SEQ ID NO: 30578 - DNA, 22 bp, Artificial Sequence
  chemically synthesized
tcctgtggctaggattcctgga

SEQ ID NO: 30579 - DNA, 22 bp, Artificial Sequence
  chemically synthesized
ctgtggctaggattcctggagt

SEQ ID NO: 30580 - DNA, 22 bp, Artificial Sequence
  chemically synthesized
tggctaggattcctggagtcca

SEQ ID NO: 30581 - DNA, 22 bp, Artificial Sequence
  chemically synthesized
ggattcctggagtccataatgc

SEQ ID NO: 30582 - DNA, 22 bp, Artificial Sequence
  chemically synthesized
ctggagtccataatgcagatgt

SEQ ID NO: 30583 - DNA, 22 bp, Artificial Sequence
  chemically synthesized
gagtccataatgcagatgtgga

SEQ ID NO: 30584 - DNA, 22 bp, Artificial Sequence
  chemically synthesized
ggagtcagtcacttaactttcg

SEQ ID NO: 30585 - DNA, 22 bp, Artificial Sequence
  chemically synthesized
aactttcgatgcactggggagc

SEQ ID NO: 30586 - DNA, 22 bp, Artificial Sequence
  chemically synthesized
actttcgatgcactggggagcc

SEQ ID NO: 30587 - DNA, 22 bp, Artificial Sequence
  chemically synthesized
tcgatgcactggggagcctctc

SEQ ID NO: 30588 - DNA, 22 bp, Artificial Sequence
  chemically synthesized
cgatgcactggggagcctctct

SEQ ID NO: 30589 - DNA, 22 bp, Artificial Sequence
  chemically synthesized
gatgcactggggagcctctctg

SEQ ID NO: 30590 - DNA, 22 bp, Artificial Sequence
  chemically synthesized
gggagcctctctggcctcacag

SEQ ID NO: 30591 - DNA, 22 bp, Artificial Sequence
  chemically synthesized
tctggcctcacagaggatccct

SEQ ID NO: 30592 - DNA, 22 bp, Artificial Sequence
  chemically synthesized
tggcctcacagaggatccctac

SEQ ID NO: 30593 - DNA, 22 bp, Artificial Sequence
  chemically synthesized
gcctcacagaggatccctactg

SEQ ID NO: 30594 - DNA, 22 bp, Artificial Sequence
  chemically synthesized
acagaggatccctactgggtag

SEQ ID NO: 30595 - DNA, 22 bp, Artificial Sequence
  chemically synthesized
ctgggtaggcttccttgcttcc

SEQ ID NO: 30596 - DNA, 22 bp, Artificial Sequence
  chemically synthesized
ggtaggcttccttgcttccctc

SEQ ID NO: 30597 - DNA, 22 bp, Artificial Sequence
  chemically synthesized
ccttgcttccctccccttcatt

SEQ ID NO: 30598 - DNA, 22 bp, Artificial Sequence
  chemically synthesized
cttgcttccctccccttcattg

SEQ ID NO: 30599 - DNA, 22 bp, Artificial Sequence
  chemically synthesized
gcttccctccccttcattgcct

SEQ ID NO: 30600 - DNA, 22 bp, Artificial Sequence
  chemically synthesized
cttccctccccttcattgcctt

SEQ ID NO: 30601 - DNA, 22 bp, Artificial Sequence
  chemically synthesized
ccctccccttcattgccttaga

SEQ ID NO: 30602 - DNA, 22 bp, Artificial Sequence
  chemically synthesized
cctccccttcattgccttagat

SEQ ID NO: 30603 - DNA, 22 bp, Artificial Sequence
  chemically synthesized
cccttcattgccttagatgctt

SEQ ID NO: 30604 - DNA, 22 bp, Artificial Sequence
  chemically synthesized
cattgccttagatgcttcctgt

SEQ ID NO: 30605 - DNA, 22 bp, Artificial Sequence
  chemically synthesized
attgccttagatgcttcctgtc

SEQ ID NO: 30606 - DNA, 22 bp, Artificial Sequence
  chemically synthesized
ccttagatgcttcctgtcactt

SEQ ID NO: 30607 - DNA, 22 bp, Artificial Sequence
  chemically synthesized
agatgcttcctgtcacttctct

SEQ ID NO: 30608 - DNA, 22 bp, Artificial Sequence
  chemically synthesized
gatgcttcctgtcacttctctg

SEQ ID NO: 30609 - DNA, 22 bp, Artificial Sequence
  chemically synthesized
cctgtcacttctctgttgaatt

SEQ ID NO: 30610 - DNA, 22 bp, Artificial Sequence
  chemically synthesized
ctgtcacttctctgttgaattc

SEQ ID NO: 30611 - DNA, 22 bp, Artificial Sequence
  chemically synthesized
tcacttctctgttgaattccag

SEQ ID NO: 30612 - DNA, 22 bp, Artificial Sequence
  chemically synthesized
ctctgttgaattccagaattct

SEQ ID NO: 30613 - DNA, 22 bp, Artificial Sequence
  chemically synthesized
tctgttgaattccagaattctc

SEQ ID NO: 30614 - DNA, 22 bp, Artificial Sequence
  chemically synthesized
tgttgaattccagaattctctc

SEQ ID NO: 30615 - DNA, 22 bp, Artificial Sequence
  chemically synthesized
ttgaattccagaattctctctt

SEQ ID NO: 30616 - DNA, 22 bp, Artificial Sequence
  chemically synthesized
aattccagaattctctcttatg

SEQ ID NO: 30617 - DNA, 22 bp, Artificial Sequence
  chemically synthesized
cagaattctctcttatgtggga

SEQ ID NO: 30618 - DNA, 22 bp, Artificial Sequence
  chemically synthesized
tctcttatgtgggattttctac

SEQ ID NO: 30619 - DNA, 22 bp, Artificial Sequence
  chemically synthesized
tcttatgtgggattttctactt

SEQ ID NO: 30620 - DNA, 22 bp, Artificial Sequence
  chemically synthesized
ttatgtgggattttctacttac

SEQ ID NO: 30621 - DNA, 22 bp, Artificial Sequence
  chemically synthesized
atgtgggattttctacttacta

SEQ ID NO: 30622 - DNA, 22 bp, Artificial Sequence
  chemically synthesized
tgtgggattttctacttactat

SEQ ID NO: 30623 - DNA, 22 bp, Artificial Sequence
  chemically synthesized
tctacttactattttggttctt

SEQ ID NO: 30624 - DNA, 22 bp, Artificial Sequence
  chemically synthesized
ctacttactattttggttcttt

SEQ ID NO: 30625 - DNA, 22 bp, Artificial Sequence
  chemically synthesized
tacttactattttggttctttg

SEQ ID NO: 30626 - DNA, 22 bp, Artificial Sequence
  chemically synthesized
cttactattttggttctttgtg

SEQ ID NO: 30627 - DNA, 22 bp, Artificial Sequence
  chemically synthesized
actattttggttctttgtggag

SEQ ID NO: 30628 - DNA, 22 bp, Artificial Sequence
  chemically synthesized
ctattttggttctttgtggagg

SEQ ID NO: 30629 - DNA, 22 bp, Artificial Sequence
  chemically synthesized
ttttggttctttgtggaggagg

SEQ ID NO: 30630 - DNA, 22 bp, Artificial Sequence
  chemically synthesized
tggttctttgtggaggaggtga

SEQ ID NO: 30631 - DNA, 22 bp, Artificial Sequence
  chemically synthesized
ggttctttgtggaggaggtgag

SEQ ID NO: 30632 - DNA, 22 bp, Artificial Sequence
  chemically synthesized
gttctttgtggaggaggtgagt

SEQ ID NO: 30633 - DNA, 22 bp, Artificial Sequence
  chemically synthesized
tttgtggaggaggtgagtgtca

SEQ ID NO: 30634 - DNA, 22 bp, Artificial Sequence
  chemically synthesized
tgtggaggaggtgagtgtcagc

SEQ ID NO: 30635 - DNA, 22 bp, Artificial Sequence
  chemically synthesized
gtggaggaggtgagtgtcagct

SEQ ID NO: 30636 - DNA, 22 bp, Artificial Sequence
  chemically synthesized
tggaggaggtgagtgtcagctg

SEQ ID NO: 30637 - DNA, 22 bp, Artificial Sequence
  chemically synthesized
cccttagtcagtaatcttcaag

SEQ ID NO: 30638 - DNA, 22 bp, Artificial Sequence
  chemically synthesized
agtcagtaatcttcaagcccct

SEQ ID NO: 30639 - DNA, 22 bp, Artificial Sequence
  chemically synthesized
gtcagtaatcttcaagcccctt

SEQ ID NO: 30640 - DNA, 22 bp, Artificial Sequence
  chemically synthesized
caagccccttcccttgaaattt

SEQ ID NO: 30641 - DNA, 22 bp, Artificial Sequence
  chemically synthesized
aagccccttcccttgaaatttt

SEQ ID NO: 30642 - DNA, 22 bp, Artificial Sequence
  chemically synthesized
cccttgaaattttttaagcttt

SEQ ID NO: 30643 - DNA, 22 bp, Artificial Sequence
  chemically synthesized
ccttgaaattttttaagcttta

SEQ ID NO: 30644 - DNA, 22 bp, Artificial Sequence
  chemically synthesized
gaaattttttaagctttatgtt

SEQ ID NO: 30645 - DNA, 22 bp, Artificial Sequence
  chemically synthesized
aaattttttaagctttatgttt

SEQ ID NO: 30646 - DNA, 22 bp, Artificial Sequence
  chemically synthesized
tttaagctttatgtttttattt

SEQ ID NO: 30647 - DNA, 22 bp, Artificial Sequence
  chemically synthesized
ttaagctttatgtttttatttc

SEQ ID NO: 30648 - DNA, 22 bp, Artificial Sequence
  chemically synthesized
taagctttatgtttttatttct

SEQ ID NO: 30649 - DNA, 22 bp, Artificial Sequence
  chemically synthesized
aagctttatgtttttatttcta

SEQ ID NO: 30650 - DNA, 22 bp, Artificial Sequence
  chemically synthesized
agctttatgtttttatttctaa

SEQ ID NO: 30651 - DNA, 22 bp, Artificial Sequence
  chemically synthesized
tatgtttttatttctaatagac

SEQ ID NO: 30652 - DNA, 22 bp, Artificial Sequence
  chemically synthesized
atgtttttatttctaatagact

SEQ ID NO: 30653 - DNA, 22 bp, Artificial Sequence
  chemically synthesized
tgtttttatttctaatagactg

SEQ ID NO: 30654 - DNA, 22 bp, Artificial Sequence
  chemically synthesized
ttatttctaatagactgaaaga

SEQ ID NO: 30655 - DNA, 22 bp, Artificial Sequence
  chemically synthesized
tatttctaatagactgaaagag

SEQ ID NO: 30656 - DNA, 22 bp, Artificial Sequence
  chemically synthesized
atttctaatagactgaaagagc

SEQ ID NO: 30657 - DNA, 22 bp, Artificial Sequence
  chemically synthesized
tttctaatagactgaaagagca

SEQ ID NO: 30658 - DNA, 22 bp, Artificial Sequence
  chemically synthesized
ctaatagactgaaagagcataa

SEQ ID NO: 30659 - DNA, 22 bp, Artificial Sequence
  chemically synthesized
taatagactgaaagagcataat

SEQ ID NO: 30660 - DNA, 22 bp, Artificial Sequence
  chemically synthesized
atagactgaaagagcataatca

SEQ ID NO: 30661 - DNA, 22 bp, Artificial Sequence
  chemically synthesized
aaagagcataatcatattttaa

SEQ ID NO: 30662 - DNA, 22 bp, Artificial Sequence
  chemically synthesized
taaacactctaaggctatatgg

SEQ ID NO: 30663 - DNA, 22 bp, Artificial Sequence
  chemically synthesized
aaacactctaaggctatatggg

SEQ ID NO: 30664 - DNA, 22 bp, Artificial Sequence
  chemically synthesized
aacactctaaggctatatgggg

SEQ ID NO: 30665 - DNA, 22 bp, Artificial Sequence
  chemically synthesized
taaggctatatgggggactatc

SEQ ID NO: 30666 - DNA, 22 bp, Artificial Sequence
  chemically synthesized
aggctatatgggggactatctg

SEQ ID NO: 30667 - DNA, 22 bp, Artificial Sequence
  chemically synthesized
tatgggggactatctgaaggcc

SEQ ID NO: 30668 - DNA, 22 bp, Artificial Sequence
  chemically synthesized
tctgaaggcctcagatgagtaa

SEQ ID NO: 30669 - DNA, 22 bp, Artificial Sequence
  chemically synthesized
aaggcctcagatgagtaaaaga

SEQ ID NO: 30670 - DNA, 22 bp, Artificial Sequence
  chemically synthesized
agatgagtaaaagaagtagcga

SEQ ID NO: 30671 - DNA, 22 bp, Artificial Sequence
  chemically synthesized
gttaactatgtttttcttttca

SEQ ID NO: 30672 - DNA, 22 bp, Artificial Sequence
  chemically synthesized
actatgtttttcttttcatttc

SEQ ID NO: 30673 - DNA, 22 bp, Artificial Sequence
  chemically synthesized
tgtttttcttttcatttcattt

SEQ ID NO: 30674 - DNA, 22 bp, Artificial Sequence
  chemically synthesized
ttcttttcatttcatttcccaa

SEQ ID NO: 30675 - DNA, 22 bp, Artificial Sequence
  chemically synthesized
tcttttcatttcatttcccaaa

SEQ ID NO: 30676 - DNA, 22 bp, Artificial Sequence
  chemically synthesized
cttttcatttcatttcccaaat

SEQ ID NO: 30677 - DNA, 22 bp, Artificial Sequence
  chemically synthesized
ttttcatttcatttcccaaatc

SEQ ID NO: 30678 - DNA, 22 bp, Artificial Sequence
  chemically synthesized
ttcatttcatttcccaaatcaa

SEQ ID NO: 30679 - DNA, 22 bp, Artificial Sequence
  chemically synthesized
tcatttcatttcccaaatcaaa

SEQ ID NO: 30680 - DNA, 22 bp, Artificial Sequence
  chemically synthesized
catttcatttcccaaatcaaat

SEQ ID NO: 30681 - DNA, 22 bp, Artificial Sequence
  chemically synthesized
atttcatttcccaaatcaaatc

SEQ ID NO: 30682 - DNA, 22 bp, Artificial Sequence
  chemically synthesized
catttcccaaatcaaatcattt

SEQ ID NO: 30683 - DNA, 22 bp, Artificial Sequence
  chemically synthesized
atttcccaaatcaaatcatttg

SEQ ID NO: 30684 - DNA, 22 bp, Artificial Sequence
  chemically synthesized
cccaaatcaaatcatttgtttc

SEQ ID NO: 30685 - DNA, 22 bp, Artificial Sequence
  chemically synthesized
ccaaatcaaatcatttgtttct

SEQ ID NO: 30686 - DNA, 22 bp, Artificial Sequence
  chemically synthesized
gtttcttcaaataaagaatctc

SEQ ID NO: 30687 - DNA, 22 bp, Artificial Sequence
  chemically synthesized
tttcttcaaataaagaatctct

SEQ ID NO: 30688 - DNA, 22 bp, Artificial Sequence
  chemically synthesized
cttcaaataaagaatctctatt

SEQ ID NO: 30689 - DNA, 22 bp, Artificial Sequence
  chemically synthesized
ttcaaataaagaatctctattt

SEQ ID NO: 30690 - DNA, 22 bp, Artificial Sequence
  chemically synthesized
caaataaagaatctctatttcc

SEQ ID NO: 30691 - DNA, 22 bp, Artificial Sequence
  chemically synthesized
aaataaagaatctctatttccc

SEQ ID NO: 30692 - DNA, 22 bp, Artificial Sequence
  chemically synthesized
tatttcccccttatgttcttca

SEQ ID NO: 30693 - DNA, 22 bp, Artificial Sequence
  chemically synthesized
tttcccccttatgttcttcagc

SEQ ID NO: 30694 - DNA, 22 bp, Artificial Sequence
  chemically synthesized
cccccttatgttcttcagcaaa

SEQ ID NO: 30695 - DNA, 22 bp, Artificial Sequence
  chemically synthesized
ccccttatgttcttcagcaaat

SEQ ID NO: 30696 - DNA, 22 bp, Artificial Sequence
  chemically synthesized
atgttcttcagcaaataaaaat

SEQ ID NO: 30697 - DNA, 22 bp, Artificial Sequence
  chemically synthesized
tgttcttcagcaaataaaaatg

SEQ ID NO: 30698 - DNA, 22 bp, Artificial Sequence
  chemically synthesized
ttcagcaaataaaaatgtttgc

SEQ ID NO: 30699 - DNA, 22 bp, Artificial Sequence
  chemically synthesized
cagcaaataaaaatgtttgcat

SEQ ID NO: 30700 - DNA, 22 bp, Artificial Sequence
  chemically synthesized
agcaaataaaaatgtttgcatc

SEQ ID NO: 30701 - DNA, 22 bp, Artificial Sequence
  chemically synthesized
gcatctaccaaagtgtatatga

SEQ ID NO: 30702 - DNA, 22 bp, Artificial Sequence
  chemically synthesized
catctaccaaagtgtatatgaa

SEQ ID NO: 30703 - DNA, 22 bp, Artificial Sequence
  chemically synthesized
ccaaagtgtatatgaatttgaa

SEQ ID NO: 30704 - DNA, 22 bp, Artificial Sequence
  chemically synthesized
gaaatacgtaatctaacaaaca

SEQ ID NO: 30705 - DNA, 22 bp, Artificial Sequence
  chemically synthesized
aaatacgtaatctaacaaacaa

SEQ ID NO: 30706 - DNA, 22 bp, Artificial Sequence
  chemically synthesized
acaaacaaggatgttttaagat

SEQ ID NO: 30707 - DNA, 22 bp, Artificial Sequence
  chemically synthesized
taagatctctgagtaagatgca

SEQ ID NO: 30708 - DNA, 22 bp, Artificial Sequence
  chemically synthesized
aagatctctgagtaagatgcat

SEQ ID NO: 30709 - DNA, 22 bp, Artificial Sequence
  chemically synthesized
agatctctgagtaagatgcata

SEQ ID NO: 30710 - DNA, 22 bp, Artificial Sequence
  chemically synthesized
tgagtaagatgcatagttgcaa

SEQ ID NO: 30711 - DNA, 22 bp, Artificial Sequence
  chemically synthesized
agtaagatgcatagttgcaaat

SEQ ID NO: 30712 - DNA, 22 bp, Artificial Sequence
  chemically synthesized
caaataaaaggagttttcaagg

SEQ ID NO: 30713 - DNA, 22 bp, Artificial Sequence
  chemically synthesized
tcaaggataaaaaatgtaaata

SEQ ID NO: 30714 - DNA, 22 bp, Artificial Sequence
  chemically synthesized
caaggataaaaaatgtaaataa

SEQ ID NO: 30715 - DNA, 22 bp, Artificial Sequence
  chemically synthesized
aaggataaaaaatgtaaataaa

SEQ ID NO: 30716 - DNA, 22 bp, Artificial Sequence
  chemically synthesized
ataaatgtgtaccatcagaaac

SEQ ID NO: 30717 - DNA, 22 bp, Artificial Sequence
  chemically synthesized
atggtatattctcctggaaaag

SEQ ID NO: 30718 - DNA, 22 bp, Artificial Sequence
  chemically synthesized
tggtatattctcctggaaaaga

SEQ ID NO: 30719 - DNA, 22 bp, Artificial Sequence
  chemically synthesized
tcctggaaaagatgaagatgaa

SEQ ID NO: 30720 - DNA, 22 bp, Artificial Sequence
  chemically synthesized
ctggaaaagatgaagatgaaga

SEQ ID NO: 30721 - DNA, 22 bp, Artificial Sequence
  chemically synthesized
gaaaagatgaagatgaagaaaa

SEQ ID NO: 30722 - DNA, 22 bp, Artificial Sequence
  chemically synthesized
cagaagaggagaaattctttgg

SEQ ID NO: 30723 - DNA, 22 bp, Artificial Sequence
  chemically synthesized
tttggaaattttgcatttttgt

SEQ ID NO: 30724 - DNA, 22 bp, Artificial Sequence
  chemically synthesized
tggaaattttgcatttttgtgg

SEQ ID NO: 30725 - DNA, 22 bp, Artificial Sequence
  chemically synthesized
ggaaattttgcatttttgtgga

SEQ ID NO: 30726 - DNA, 22 bp, Artificial Sequence
  chemically synthesized
gaaattttgcatttttgtggat

SEQ ID NO: 30727 - DNA, 22 bp, Artificial Sequence
  chemically synthesized
tgcatttttgtggatagtggtt

SEQ ID NO: 30728 - DNA, 22 bp, Artificial Sequence
  chemically synthesized
gcatttttgtggatagtggttt

SEQ ID NO: 30729 - DNA, 22 bp, Artificial Sequence
  chemically synthesized
catttttgtggatagtggtttt

SEQ ID NO: 30730 - DNA, 22 bp, Artificial Sequence
  chemically synthesized
ttgtggatagtggttttgaaga

SEQ ID NO: 30731 - DNA, 22 bp, Artificial Sequence
  chemically synthesized
tgtggatagtggttttgaagaa

SEQ ID NO: 30732 - DNA, 22 bp, Artificial Sequence
  chemically synthesized
gtggatagtggttttgaagaaa

SEQ ID NO: 30733 - DNA, 22 bp, Artificial Sequence
  chemically synthesized
tggatagtggttttgaagaaag

SEQ ID NO: 30734 - DNA, 22 bp, Artificial Sequence
  chemically synthesized
tgaagaaagcttagatatattt

SEQ ID NO: 30735 - DNA, 22 bp, Artificial Sequence
  chemically synthesized
gaagaaagcttagatatattta

SEQ ID NO: 30736 - DNA, 22 bp, Artificial Sequence
  chemically synthesized
aagaaagcttagatatatttaa

SEQ ID NO: 30737 - DNA, 22 bp, Artificial Sequence
  chemically synthesized
agatatatttaaatatgttgct

SEQ ID NO: 30738 - DNA, 22 bp, Artificial Sequence
  chemically synthesized
gatatatttaaatatgttgcta

SEQ ID NO: 30739 - DNA, 22 bp, Artificial Sequence
  chemically synthesized
aaatatgttgctaagatgtgac

SEQ ID NO: 30740 - DNA, 22 bp, Artificial Sequence
  chemically synthesized
aatatgttgctaagatgtgact

SEQ ID NO: 30741 - DNA, 22 bp, Artificial Sequence
  chemically synthesized
ctaagatgtgactcccacactt

SEQ ID NO: 30742 - DNA, 22 bp, Artificial Sequence
  chemically synthesized
agatgtgactcccacactttaa

SEQ ID NO: 30743 - DNA, 22 bp, Artificial Sequence
  chemically synthesized
ccacactttaaagaaaagttct

SEQ ID NO: 30744 - DNA, 22 bp, Artificial Sequence
  chemically synthesized
taaagaaaagttcttcatttta

SEQ ID NO: 30745 - DNA, 22 bp, Artificial Sequence
  chemically synthesized
aaagaaaagttcttcattttag

SEQ ID NO: 30746 - DNA, 22 bp, Artificial Sequence
  chemically synthesized
aagaaaagttcttcattttagt

SEQ ID NO: 30747 - DNA, 22 bp, Artificial Sequence
  chemically synthesized
ttcattttagttgcccttgcaa

SEQ ID NO: 30748 - DNA, 22 bp, Artificial Sequence
  chemically synthesized
cattttagttgcccttgcaaat

SEQ ID NO: 30749 - DNA, 22 bp, Artificial Sequence
  chemically synthesized
attttagttgcccttgcaaatt

SEQ ID NO: 30750 - DNA, 22 bp, Artificial Sequence
  chemically synthesized
tagttgcccttgcaaattggct

SEQ ID NO: 30751 - DNA, 22 bp, Artificial Sequence
  chemically synthesized
agttgcccttgcaaattggcta

SEQ ID NO: 30752 - DNA, 22 bp, Artificial Sequence
  chemically synthesized
gttgcccttgcaaattggctaa

SEQ ID NO: 30753 - DNA, 22 bp, Artificial Sequence
  chemically synthesized
cccttgcaaattggctaagttt

SEQ ID NO: 30754 - DNA, 22 bp, Artificial Sequence
  chemically synthesized
gcaaattggctaagtttatttt

SEQ ID NO: 30755 - DNA, 22 bp, Artificial Sequence
  chemically synthesized
caaattggctaagtttattttt

SEQ ID NO: 30756 - DNA, 22 bp, Artificial Sequence
  chemically synthesized
gctaagtttatttttcctcaac

SEQ ID NO: 30757 - DNA, 22 bp, Artificial Sequence
  chemically synthesized
agtttatttttcctcaacaaat

SEQ ID NO: 30758 - DNA, 22 bp, Artificial Sequence
  chemically synthesized
atttttcctcaacaaataattt

SEQ ID NO: 30759 - DNA, 22 bp, Artificial Sequence
  chemically synthesized
tttttcctcaacaaataatttt

SEQ ID NO: 30760 - DNA, 22 bp, Artificial Sequence
  chemically synthesized
ttcctcaacaaataattttgat

SEQ ID NO: 30761 - DNA, 22 bp, Artificial Sequence
  chemically synthesized
tcctcaacaaataattttgatg

SEQ ID NO: 30762 - DNA, 22 bp, Artificial Sequence
  chemically synthesized
cctcaacaaataattttgatgg

SEQ ID NO: 30763 - DNA, 22 bp, Artificial Sequence
  chemically synthesized
ctcaacaaataattttgatggt

SEQ ID NO: 30764 - DNA, 22 bp, Artificial Sequence
  chemically synthesized
aacaaataattttgatggtttc

SEQ ID NO: 30765 - DNA, 22 bp, Artificial Sequence
  chemically synthesized
tgatggtttctaaaattgtcca

SEQ ID NO: 30766 - DNA, 22 bp, Artificial Sequence
  chemically synthesized
gatggtttctaaaattgtccag

SEQ ID NO: 30767 - DNA, 22 bp, Artificial Sequence
  chemically synthesized
atggtttctaaaattgtccaga

SEQ ID NO: 30768 - DNA, 22 bp, Artificial Sequence
  chemically synthesized
ctaaaattgtccagaatttgag

SEQ ID NO: 30769 - DNA, 22 bp, Artificial Sequence
  chemically synthesized
taaaattgtccagaatttgagg

SEQ ID NO: 30770 - DNA, 22 bp, Artificial Sequence
  chemically synthesized
aaattgtccagaatttgaggaa

SEQ ID NO: 30771 - DNA, 22 bp, Artificial Sequence
  chemically synthesized
tccagaatttgaggaaatactt

SEQ ID NO: 30772 - DNA, 22 bp, Artificial Sequence
  chemically synthesized
gaggaaatacttagatgtagta

SEQ ID NO: 30773 - DNA, 22 bp, Artificial Sequence
  chemically synthesized
aggaaatacttagatgtagtag

SEQ ID NO: 30774 - DNA, 22 bp, Artificial Sequence
  chemically synthesized
agatgtagtagatgacatcaat

SEQ ID NO: 30775 - DNA, 22 bp, Artificial Sequence
  chemically synthesized
gatgtagtagatgacatcaatt

SEQ ID NO: 30776 - DNA, 22 bp, Artificial Sequence
  chemically synthesized
atgttaacttagatttattgtt

SEQ ID NO: 30777 - DNA, 22 bp, Artificial Sequence
  chemically synthesized
tgttaacttagatttattgttg

SEQ ID NO: 30778 - DNA, 22 bp, Artificial Sequence
  chemically synthesized
acttagatttattgttggatgg

SEQ ID NO: 30779 - DNA, 22 bp, Artificial Sequence
  chemically synthesized
agatttattgttggatggttaa

SEQ ID NO: 30780 - DNA, 22 bp, Artificial Sequence
  chemically synthesized
gatttattgttggatggttaag

SEQ ID NO: 30781 - DNA, 22 bp, Artificial Sequence
  chemically synthesized
attgttggatggttaagttaat

SEQ ID NO: 30782 - DNA, 22 bp, Artificial Sequence
  chemically synthesized
ttgttggatggttaagttaatc

SEQ ID NO: 30783 - DNA, 22 bp, Artificial Sequence
  chemically synthesized
ttggatggttaagttaatcatg

SEQ ID NO: 30784 - DNA, 22 bp, Artificial Sequence
  chemically synthesized
gatggttaagttaatcatgtct

SEQ ID NO: 30785 - DNA, 22 bp, Artificial Sequence
  chemically synthesized
agttaatcatgtctgttcttgt

SEQ ID NO: 30786 - DNA, 22 bp, Artificial Sequence
  chemically synthesized
atcatgtctgttcttgtccagt

SEQ ID NO: 30787 - DNA, 22 bp, Artificial Sequence
  chemically synthesized
ttcttgtccagtctagaagttt

SEQ ID NO: 30788 - DNA, 22 bp, Artificial Sequence
  chemically synthesized
ttgtccagtctagaagtttctg

SEQ ID NO: 30789 - DNA, 22 bp, Artificial Sequence
  chemically synthesized
gtccagtctagaagtttctgct

SEQ ID NO: 30790 - DNA, 22 bp, Artificial Sequence
  chemically synthesized
tccagtctagaagtttctgctt

SEQ ID NO: 30791 - DNA, 22 bp, Artificial Sequence
  chemically synthesized
gaagtttctgcttcctcctcat

SEQ ID NO: 30792 - DNA, 22 bp, Artificial Sequence
  chemically synthesized
ctgcttcctcctcatgtgttct

SEQ ID NO: 30793 - DNA, 22 bp, Artificial Sequence
  chemically synthesized
tgcttcctcctcatgtgttcta

SEQ ID NO: 30794 - DNA, 22 bp, Artificial Sequence
  chemically synthesized
cttcctcctcatgtgttctatt

SEQ ID NO: 30795 - DNA, 22 bp, Artificial Sequence
  chemically synthesized
cctcctcatgtgttctattctg

SEQ ID NO: 30796 - DNA, 22 bp, Artificial Sequence
  chemically synthesized
ctcctcatgtgttctattctgt

SEQ ID NO: 30797 - DNA, 22 bp, Artificial Sequence
  chemically synthesized
ctcatgtgttctattctgtcct

SEQ ID NO: 30798 - DNA, 22 bp, Artificial Sequence
  chemically synthesized
atgtgttctattctgtcctcat

SEQ ID NO: 30799 - DNA, 22 bp, Artificial Sequence
  chemically synthesized
tattctgtcctcatcacataac

SEQ ID NO: 30800 - DNA, 22 bp, Artificial Sequence
  chemically synthesized
ttctgtcctcatcacataacat

SEQ ID NO: 30801 - DNA, 22 bp, Artificial Sequence
  chemically synthesized
tgtcctcatcacataacatctg

SEQ ID NO: 30802 - DNA, 22 bp, Artificial Sequence
  chemically synthesized
tcctcatcacataacatctgaa

SEQ ID NO: 30803 - DNA, 22 bp, Artificial Sequence
  chemically synthesized
atcacataacatctgaactgtg

SEQ ID NO: 30804 - DNA, 22 bp, Artificial Sequence
  chemically synthesized
aactgtgatttgacagtgtcct

SEQ ID NO: 30805 - DNA, 22 bp, Artificial Sequence
  chemically synthesized
tgatttgacagtgtccttatta

SEQ ID NO: 30806 - DNA, 22 bp, Artificial Sequence
  chemically synthesized
gacagtgtccttattatcagac

SEQ ID NO: 30807 - DNA, 22 bp, Artificial Sequence
  chemically synthesized
acagtgtccttattatcagact

SEQ ID NO: 30808 - DNA, 22 bp, Artificial Sequence
  chemically synthesized
attatcagactctgctcaatga

SEQ ID NO: 30809 - DNA, 22 bp, Artificial Sequence
  chemically synthesized
ttatcagactctgctcaatgac

SEQ ID NO: 30810 - DNA, 22 bp, Artificial Sequence
  chemically synthesized
tcagactctgctcaatgacagt

SEQ ID NO: 30811 - DNA, 22 bp, Artificial Sequence
  chemically synthesized
tgctcaatgacagtttaaactt

SEQ ID NO: 30812 - DNA, 22 bp, Artificial Sequence
  chemically synthesized
ctcaatgacagtttaaacttct

SEQ ID NO: 30813 - DNA, 22 bp, Artificial Sequence
  chemically synthesized
aatgacagtttaaacttctttt

SEQ ID NO: 30814 - DNA, 22 bp, Artificial Sequence
  chemically synthesized
aaacttctttttgatacagtaa

SEQ ID NO: 30815 - DNA, 22 bp, Artificial Sequence
  chemically synthesized
aacttctttttgatacagtaaa

SEQ ID NO: 30816 - DNA, 22 bp, Artificial Sequence
  chemically synthesized
ctttttgatacagtaaaaaact

SEQ ID NO: 30817 - DNA, 22 bp, Artificial Sequence
  chemically synthesized
tttttgatacagtaaaaaactt

SEQ ID NO: 30818 - DNA, 22 bp, Artificial Sequence
  chemically synthesized
tttgatacagtaaaaaactttt

SEQ ID NO: 30819 - DNA, 22 bp, Artificial Sequence
  chemically synthesized
ttgatacagtaaaaaacttttc

SEQ ID NO: 30820 - DNA, 22 bp, Artificial Sequence
  chemically synthesized
tgatacagtaaaaaacttttcc

SEQ ID NO: 30821 - DNA, 22 bp, Artificial Sequence
  chemically synthesized
gatacagtaaaaaacttttcct

SEQ ID NO: 30822 - DNA, 22 bp, Artificial Sequence
  chemically synthesized
atacagtaaaaaacttttcctt

SEQ ID NO: 30823 - DNA, 22 bp, Artificial Sequence
  chemically synthesized
ttccttaaagatgaaattctta

SEQ ID NO: 30824 - DNA, 22 bp, Artificial Sequence
  chemically synthesized
tccttaaagatgaaattcttaa

SEQ ID NO: 30825 - DNA, 22 bp, Artificial Sequence
  chemically synthesized
ccttaaagatgaaattcttaag

SEQ ID NO: 30826 - DNA, 22 bp, Artificial Sequence
  chemically synthesized
cttaaagatgaaattcttaagg

SEQ ID NO: 30827 - DNA, 22 bp, Artificial Sequence
  chemically synthesized
aaagatgaaattcttaaggaca

SEQ ID NO: 30828 - DNA, 22 bp, Artificial Sequence
  chemically synthesized
aagatgaaattcttaaggacaa

SEQ ID NO: 30829 - DNA, 22 bp, Artificial Sequence
  chemically synthesized
ttaaggacaattagcttgtgta

SEQ ID NO: 30830 - DNA, 22 bp, Artificial Sequence
  chemically synthesized
aaggacaattagcttgtgtaga

SEQ ID NO: 30831 - DNA, 22 bp, Artificial Sequence
  chemically synthesized
aggacaattagcttgtgtagac

SEQ ID NO: 30832 - DNA, 22 bp, Artificial Sequence
  chemically synthesized
gcttgtgtagactcatatgaaa

SEQ ID NO: 30833 - DNA, 22 bp, Artificial Sequence
  chemically synthesized
gtgtagactcatatgaaaattg

SEQ ID NO: 30834 - DNA, 22 bp, Artificial Sequence
  chemically synthesized
tgtagactcatatgaaaattgc

SEQ ID NO: 30835 - DNA, 22 bp, Artificial Sequence
  chemically synthesized
atatgaaaattgcttgcatttt

SEQ ID NO: 30836 - DNA, 22 bp, Artificial Sequence
  chemically synthesized
cttgcattttggagttacatta

SEQ ID NO: 30837 - DNA, 22 bp, Artificial Sequence
  chemically synthesized
gcattttggagttacattagct

SEQ ID NO: 30838 - DNA, 22 bp, Artificial Sequence
  chemically synthesized
cattttggagttacattagctc

SEQ ID NO: 30839 - DNA, 22 bp, Artificial Sequence
  chemically synthesized
tggagttacattagctcttctc

SEQ ID NO: 30840 - DNA, 22 bp, Artificial Sequence
  chemically synthesized
ggagttacattagctcttctcc

SEQ ID NO: 30841 - DNA, 22 bp, Artificial Sequence
  chemically synthesized
gagttacattagctcttctcct

SEQ ID NO: 30842 - DNA, 22 bp, Artificial Sequence
  chemically synthesized
cattagctcttctcctttataa

SEQ ID NO: 30843 - DNA, 22 bp, Artificial Sequence
  chemically synthesized
gctcttctcctttataaattaa

SEQ ID NO: 30844 - DNA, 22 bp, Artificial Sequence
  chemically synthesized
ttctcctttataaattaatgaa

SEQ ID NO: 30845 - DNA, 22 bp, Artificial Sequence
  chemically synthesized
ctcctttataaattaatgaatc

SEQ ID NO: 30846 - DNA, 22 bp, Artificial Sequence
  chemically synthesized
tcctttataaattaatgaatcc

SEQ ID NO: 30847 - DNA, 22 bp, Artificial Sequence
  chemically synthesized
ctttataaattaatgaatccta

SEQ ID NO: 30848 - DNA, 22 bp, Artificial Sequence
  chemically synthesized
tataaattaatgaatcctattg

SEQ ID NO: 30849 - DNA, 22 bp, Artificial Sequence
  chemically synthesized
ataaattaatgaatcctattgg

SEQ ID NO: 30850 - DNA, 22 bp, Artificial Sequence
  chemically synthesized
taaattaatgaatcctattggt

SEQ ID NO: 30851 - DNA, 22 bp, Artificial Sequence
  chemically synthesized
atgaatcctattggtaccatat

SEQ ID NO: 30852 - DNA, 22 bp, Artificial Sequence
  chemically synthesized
ttggtaccatataatagcatca

SEQ ID NO: 30853 - DNA, 22 bp, Artificial Sequence
  chemically synthesized
gtaccatataatagcatcaaca

SEQ ID NO: 30854 - DNA, 22 bp, Artificial Sequence
  chemically synthesized
gccttttgtgtctcgcctttca

SEQ ID NO: 30855 - DNA, 22 bp, Artificial Sequence
  chemically synthesized
ccttttgtgtctcgcctttcaa

SEQ ID NO: 30856 - DNA, 22 bp, Artificial Sequence
  chemically synthesized
ttgtgtctcgcctttcaaaggg

SEQ ID NO: 30857 - DNA, 22 bp, Artificial Sequence
  chemically synthesized
tgtgtctcgcctttcaaagggc

SEQ ID NO: 30858 - DNA, 22 bp, Artificial Sequence
  chemically synthesized
gtgtctcgcctttcaaagggca

SEQ ID NO: 30859 - DNA, 22 bp, Artificial Sequence
  chemically synthesized
tgtctcgcctttcaaagggcaa

SEQ ID NO: 30860 - DNA, 22 bp, Artificial Sequence
  chemically synthesized
gcctttcaaagggcaattttcc

SEQ ID NO: 30861 - DNA, 22 bp, Artificial Sequence
  chemically synthesized
tcaaagggcaattttccaaaaa

SEQ ID NO: 30862 - DNA, 22 bp, Artificial Sequence
  chemically synthesized
caaagggcaattttccaaaaag

SEQ ID NO: 30863 - DNA, 22 bp, Artificial Sequence
  chemically synthesized
aaagggcaattttccaaaaagt

SEQ ID NO: 30864 - DNA, 22 bp, Artificial Sequence
  chemically synthesized
tccaaaaagtatattttgcatg

SEQ ID NO: 30865 - DNA, 22 bp, Artificial Sequence
  chemically synthesized
ccaaaaagtatattttgcatgg

SEQ ID NO: 30866 - DNA, 22 bp, Artificial Sequence
  chemically synthesized
caaaaagtatattttgcatggc

SEQ ID NO: 30867 - DNA, 22 bp, Artificial Sequence
  chemically synthesized
tgcatggctcaggctaaaagta

SEQ ID NO: 30868 - DNA, 22 bp, Artificial Sequence
  chemically synthesized
gcatggctcaggctaaaagtaa

SEQ ID NO: 30869 - DNA, 22 bp, Artificial Sequence
  chemically synthesized
catggctcaggctaaaagtaat

SEQ ID NO: 30870 - DNA, 22 bp, Artificial Sequence
  chemically synthesized
aggctaaaagtaatgtctccag

SEQ ID NO: 30871 - DNA, 22 bp, Artificial Sequence
  chemically synthesized
aaagtaatgtctccagatgaag

SEQ ID NO: 30872 - DNA, 22 bp, Artificial Sequence
  chemically synthesized
cagatgaagttctactttgtga

SEQ ID NO: 30873 - DNA, 22 bp, Artificial Sequence
  chemically synthesized
tactttgtgaccattgattgtg

SEQ ID NO: 30874 - DNA, 22 bp, Artificial Sequence
  chemically synthesized
ctttgtgaccattgattgtgac

SEQ ID NO: 30875 - DNA, 22 bp, Artificial Sequence
  chemically synthesized
tgtgaccattgattgtgactat

SEQ ID NO: 30876 - DNA, 22 bp, Artificial Sequence
  chemically synthesized
gtgaccattgattgtgactatt

SEQ ID NO: 30877 - DNA, 22 bp, Artificial Sequence
  chemically synthesized
tgaccattgattgtgactattg

SEQ ID NO: 30878 - DNA, 22 bp, Artificial Sequence
  chemically synthesized
attgtgactattgataagattt

SEQ ID NO: 30879 - DNA, 22 bp, Artificial Sequence
  chemically synthesized
tgactattgataagatttacta

SEQ ID NO: 30880 - DNA, 22 bp, Artificial Sequence
  chemically synthesized
ttgataagatttactatgtaaa

SEQ ID NO: 30881 - DNA, 22 bp, Artificial Sequence
  chemically synthesized
ataagatttactatgtaaagta

SEQ ID NO: 30882 - DNA, 22 bp, Artificial Sequence
  chemically synthesized
actatgtaaagtataagttact

SEQ ID NO: 30883 - DNA, 22 bp, Artificial Sequence
  chemically synthesized
ctatgtaaagtataagttactg

SEQ ID NO: 30884 - DNA, 22 bp, Artificial Sequence
  chemically synthesized
tgtaaagtataagttactggaa

SEQ ID NO: 30885 - DNA, 22 bp, Artificial Sequence
  chemically synthesized
ctggaataatacatttaagaaa

SEQ ID NO: 30886 - DNA, 22 bp, Artificial Sequence
  chemically synthesized
gaataatacatttaagaaatat

SEQ ID NO: 30887 - DNA, 22 bp, Artificial Sequence
  chemically synthesized
aagaaatatagtagctattaaa

SEQ ID NO: 30888 - DNA, 22 bp, Artificial Sequence
  chemically synthesized
agaaatatagtagctattaaaa

SEQ ID NO: 30889 - DNA, 22 bp, Artificial Sequence
  chemically synthesized
ttaaaacctgtagtctgatgaa

SEQ ID NO: 30890 - DNA, 22 bp, Artificial Sequence
  chemically synthesized
aaacctgtagtctgatgaaatg

SEQ ID NO: 30891 - DNA, 22 bp, Artificial Sequence
  chemically synthesized
tagtctgatgaaatggaatatg

SEQ ID NO: 30892 - DNA, 22 bp, Artificial Sequence
  chemically synthesized
atgaaatggaatatgttttgaa

SEQ ID NO: 30893 - DNA, 22 bp, Artificial Sequence
  chemically synthesized
tgaaagacagcagtgaaaaatg

SEQ ID NO: 30894 - DNA, 22 bp, Artificial Sequence
  chemically synthesized
gaaagacagcagtgaaaaatga

SEQ ID NO: 30895 - DNA, 22 bp, Artificial Sequence
  chemically synthesized
aaagacagcagtgaaaaatgag

SEQ ID NO: 30896 - DNA, 22 bp, Artificial Sequence
  chemically synthesized
ctttttgcaattgagttgaaga

SEQ ID NO: 30897 - DNA, 22 bp, Artificial Sequence
  chemically synthesized
tttgcaattgagttgaagattg

SEQ ID NO: 30898 - DNA, 22 bp, Artificial Sequence
  chemically synthesized
ttgcaattgagttgaagattga

SEQ ID NO: 30899 - DNA, 22 bp, Artificial Sequence
  chemically synthesized
tgcaattgagttgaagattgat

SEQ ID NO: 30900 - DNA, 22 bp, Artificial Sequence
  chemically synthesized
gcaattgagttgaagattgatg

SEQ ID NO: 30901 - DNA, 22 bp, Artificial Sequence
  chemically synthesized
caattgagttgaagattgatgc

SEQ ID NO: 30902 - DNA, 22 bp, Artificial Sequence
  chemically synthesized
agttgaagattgatgccaggat

SEQ ID NO: 30903 - DNA, 22 bp, Artificial Sequence
  chemically synthesized
aagattgatgccaggatcttat

SEQ ID NO: 30904 - DNA, 22 bp, Artificial Sequence
  chemically synthesized
atgccaggatcttattacctcc

SEQ ID NO: 30905 - DNA, 22 bp, Artificial Sequence
  chemically synthesized
attacctccaggatttcacaaa

SEQ ID NO: 30906 - DNA, 22 bp, Artificial Sequence
  chemically synthesized
ttacctccaggatttcacaaag

SEQ ID NO: 30907 - DNA, 22 bp, Artificial Sequence
  chemically synthesized
cctccaggatttcacaaaggat

SEQ ID NO: 30908 - DNA, 22 bp, Artificial Sequence
  chemically synthesized
caggatttcacaaaggatttct

SEQ ID NO: 30909 - DNA, 22 bp, Artificial Sequence
  chemically synthesized
cacaaaggatttcttgagtcat

SEQ ID NO: 30910 - DNA, 22 bp, Artificial Sequence
  chemically synthesized
acaaaggatttcttgagtcatc

SEQ ID NO: 30911 - DNA, 22 bp, Artificial Sequence
  chemically synthesized
cttgagtcatccccttgctcta

SEQ ID NO: 30912 - DNA, 22 bp, Artificial Sequence
  chemically synthesized
ttgagtcatccccttgctctag

SEQ ID NO: 30913 - DNA, 22 bp, Artificial Sequence
  chemically synthesized
gagtcatccccttgctctagct

SEQ ID NO: 30914 - DNA, 22 bp, Artificial Sequence
  chemically synthesized
agtcatccccttgctctagctc

SEQ ID NO: 30915 - DNA, 22 bp, Artificial Sequence
  chemically synthesized
gctctagctcatgaacaaagta

SEQ ID NO: 30916 - DNA, 22 bp, Artificial Sequence
  chemically synthesized
ctctagctcatgaacaaagtat

SEQ ID NO: 30917 - DNA, 22 bp, Artificial Sequence
  chemically synthesized
tagctcatgaacaaagtattgc

SEQ ID NO: 30918 - DNA, 22 bp, Artificial Sequence
  chemically synthesized
gctcatgaacaaagtattgctc

SEQ ID NO: 30919 - DNA, 22 bp, Artificial Sequence
  chemically synthesized
atgaacaaagtattgctcaagt

SEQ ID NO: 30920 - DNA, 22 bp, Artificial Sequence
  chemically synthesized
ctcaagtaatcgacagattatt

SEQ ID NO: 30921 - DNA, 22 bp, Artificial Sequence
  chemically synthesized
aagtaatcgacagattatttgt

SEQ ID NO: 30922 - DNA, 22 bp, Artificial Sequence
  chemically synthesized
tttgtgtattctcacatgtgat

SEQ ID NO: 30923 - DNA, 22 bp, Artificial Sequence
  chemically synthesized
gtgtattctcacatgtgattat

SEQ ID NO: 30924 - DNA, 22 bp, Artificial Sequence
  chemically synthesized
tgtattctcacatgtgattatt

SEQ ID NO: 30925 - DNA, 22 bp, Artificial Sequence
  chemically synthesized
tcacatgtgattattatttagt

SEQ ID NO: 30926 - DNA, 22 bp, Artificial Sequence
  chemically synthesized
acatgtgattattatttagtgc

SEQ ID NO: 30927 - DNA, 22 bp, Artificial Sequence
  chemically synthesized
ttatttagtgctgtcacgggaa

SEQ ID NO: 30928 - DNA, 22 bp, Artificial Sequence
  chemically synthesized
tttagtgctgtcacgggaaata

SEQ ID NO: 30929 - DNA, 22 bp, Artificial Sequence
  chemically synthesized
agtgctgtcacgggaaatatcc

SEQ ID NO: 30930 - DNA, 22 bp, Artificial Sequence
  chemically synthesized
gtgctgtcacgggaaatatcct

SEQ ID NO: 30931 - DNA, 22 bp, Artificial Sequence
  chemically synthesized
tcacgggaaatatcctgcctaa

SEQ ID NO: 30932 - DNA, 22 bp, Artificial Sequence
  chemically synthesized
cctaagtttactggaggtcttc

SEQ ID NO: 30933 - DNA, 22 bp, Artificial Sequence
  chemically synthesized
agtttactggaggtcttcctcc

SEQ ID NO: 30934 - DNA, 22 bp, Artificial Sequence
  chemically synthesized
actggaggtcttcctcccctta

SEQ ID NO: 30935 - DNA, 22 bp, Artificial Sequence
  chemically synthesized
ctggaggtcttcctccccttac

SEQ ID NO: 30936 - DNA, 22 bp, Artificial Sequence
  chemically synthesized
gaggtcttcctccccttacccc

SEQ ID NO: 30937 - DNA, 22 bp, Artificial Sequence
  chemically synthesized
cctccccttacccctccctatg

SEQ ID NO: 30938 - DNA, 22 bp, Artificial Sequence
  chemically synthesized
ctccccttacccctccctatgt

SEQ ID NO: 30939 - DNA, 22 bp, Artificial Sequence
  chemically synthesized
cccttacccctccctatgtcct

SEQ ID NO: 30940 - DNA, 22 bp, Artificial Sequence
  chemically synthesized
acccctccctatgtcctcctac

SEQ ID NO: 30941 - DNA, 22 bp, Artificial Sequence
  chemically synthesized
cccctccctatgtcctcctacc

SEQ ID NO: 30942 - DNA, 22 bp, Artificial Sequence
  chemically synthesized
cctatgtcctcctacctggtta

SEQ ID NO: 30943 - DNA, 22 bp, Artificial Sequence
  chemically synthesized
tgtcctcctacctggttatcct

SEQ ID NO: 30944 - DNA, 22 bp, Artificial Sequence
  chemically synthesized
ctacctggttatccttttcaat

SEQ ID NO: 30945 - DNA, 22 bp, Artificial Sequence
  chemically synthesized
cctggttatccttttcaatcct

SEQ ID NO: 30946 - DNA, 22 bp, Artificial Sequence
  chemically synthesized
gttatccttttcaatcctatta

SEQ ID NO: 30947 - DNA, 22 bp, Artificial Sequence
  chemically synthesized
tccttttcaatcctattactct

SEQ ID NO: 30948 - DNA, 22 bp, Artificial Sequence
  chemically synthesized
ttcaatcctattactctttcct

SEQ ID NO: 30949 - DNA, 22 bp, Artificial Sequence
  chemically synthesized
tcaatcctattactctttcctt

SEQ ID NO: 30950 - DNA, 22 bp, Artificial Sequence
  chemically synthesized
caatcctattactctttccttg

SEQ ID NO: 30951 - DNA, 22 bp, Artificial Sequence
  chemically synthesized
aatcctattactctttccttgc

SEQ ID NO: 30952 - DNA, 22 bp, Artificial Sequence
  chemically synthesized
ttactctttccttgcacactct

SEQ ID NO: 30953 - DNA, 22 bp, Artificial Sequence
  chemically synthesized
ctctttccttgcacactctact

SEQ ID NO: 30954 - DNA, 22 bp, Artificial Sequence
  chemically synthesized
tttccttgcacactctactcca

SEQ ID NO: 30955 - DNA, 22 bp, Artificial Sequence
  chemically synthesized
tccttgcacactctactccagc

SEQ ID NO: 30956 - DNA, 22 bp, Artificial Sequence
  chemically synthesized
ccttgcacactctactccagct

SEQ ID NO: 30957 - DNA, 22 bp, Artificial Sequence
  chemically synthesized
cttgcacactctactccagctt

SEQ ID NO: 30958 - DNA, 22 bp, Artificial Sequence
  chemically synthesized
gcacactctactccagcttagg

SEQ ID NO: 30959 - DNA, 22 bp, Artificial Sequence
  chemically synthesized
cacactctactccagcttaggg

SEQ ID NO: 30960 - DNA, 22 bp, Artificial Sequence
  chemically synthesized
tactccagcttagggcctgggc

SEQ ID NO: 30961 - DNA, 22 bp, Artificial Sequence
  chemically synthesized
ctccagcttagggcctgggctc

SEQ ID NO: 30962 - DNA, 22 bp, Artificial Sequence
  chemically synthesized
cagcttagggcctgggctctga

SEQ ID NO: 30963 - DNA, 22 bp, Artificial Sequence
  chemically synthesized
agggcctgggctctgaccatta

SEQ ID NO: 30964 - DNA, 22 bp, Artificial Sequence
  chemically synthesized
gggcctgggctctgaccattac

SEQ ID NO: 30965 - DNA, 22 bp, Artificial Sequence
  chemically synthesized
ggctctgaccattacctctgcc

SEQ ID NO: 30966 - DNA, 22 bp, Artificial Sequence
  chemically synthesized
tgaccattacctctgcctaaaa

SEQ ID NO: 30967 - DNA, 22 bp, Artificial Sequence
  chemically synthesized
accattacctctgcctaaaaat

SEQ ID NO: 30968 - DNA, 22 bp, Artificial Sequence
  chemically synthesized
cctctgcctaaaaattcctcct

SEQ ID NO: 30969 - DNA, 22 bp, Artificial Sequence
  chemically synthesized
tgcctaaaaattcctcctcatg

SEQ ID NO: 30970 - DNA, 22 bp, Artificial Sequence
  chemically synthesized
cctaaaaattcctcctcatgac

SEQ ID NO: 30971 - DNA, 22 bp, Artificial Sequence
  chemically synthesized
aaaattcctcctcatgacatcc

SEQ ID NO: 30972 - DNA, 22 bp, Artificial Sequence
  chemically synthesized
ctcctcatgacatccatttgcc

SEQ ID NO: 30973 - DNA, 22 bp, Artificial Sequence
  chemically synthesized
ctcatgacatccatttgcccaa

SEQ ID NO: 30974 - DNA, 22 bp, Artificial Sequence
  chemically synthesized
atgacatccatttgcccaattt

SEQ ID NO: 30975 - DNA, 22 bp, Artificial Sequence
  chemically synthesized
gcccaatttcttcaccctttta

SEQ ID NO: 30976 - DNA, 22 bp, Artificial Sequence
  chemically synthesized
cccaatttcttcacccttttaa

SEQ ID NO: 30977 - DNA, 22 bp, Artificial Sequence
  chemically synthesized
cttcacccttttaattacccca

SEQ ID NO: 30978 - DNA, 22 bp, Artificial Sequence
  chemically synthesized
ttcacccttttaattaccccat

SEQ ID NO: 30979 - DNA, 22 bp, Artificial Sequence
  chemically synthesized
cacccttttaattaccccatta

SEQ ID NO: 30980 - DNA, 22 bp, Artificial Sequence
  chemically synthesized
acccttttaattaccccattaa

SEQ ID NO: 30981 - DNA, 22 bp, Artificial Sequence
  chemically synthesized
ttaattaccccattaagtgata

SEQ ID NO: 30982 - DNA, 22 bp, Artificial Sequence
  chemically synthesized
taattaccccattaagtgatat

SEQ ID NO: 30983 - DNA, 22 bp, Artificial Sequence
  chemically synthesized
aattaccccattaagtgatatt

SEQ ID NO: 30984 - DNA, 22 bp, Artificial Sequence
  chemically synthesized
attaccccattaagtgatattt

SEQ ID NO: 30985 - DNA, 22 bp, Artificial Sequence
  chemically synthesized
ccccattaagtgatattttgct

SEQ ID NO: 30986 - DNA, 22 bp, Artificial Sequence
  chemically synthesized
agtgatattttgcttgctcaat

SEQ ID NO: 30987 - DNA, 22 bp, Artificial Sequence
  chemically synthesized
tgcttgctcaatttttgccttt

SEQ ID NO: 30988 - DNA, 22 bp, Artificial Sequence
  chemically synthesized
gcttgctcaatttttgcctttt

SEQ ID NO: 30989 - DNA, 22 bp, Artificial Sequence
  chemically synthesized
cttgctcaatttttgccttttc

SEQ ID NO: 30990 - DNA, 22 bp, Artificial Sequence
  chemically synthesized
gctcaatttttgccttttcaat

SEQ ID NO: 30991 - DNA, 22 bp, Artificial Sequence
  chemically synthesized
ctcaatttttgccttttcaatc

SEQ ID NO: 30992 - DNA, 22 bp, Artificial Sequence
  chemically synthesized
aatttttgccttttcaatcaga

SEQ ID NO: 30993 - DNA, 22 bp, Artificial Sequence
  chemically synthesized
ttgccttttcaatcagatctaa

SEQ ID NO: 30994 - DNA, 22 bp, Artificial Sequence
  chemically synthesized
tgccttttcaatcagatctaat

SEQ ID NO: 30995 - DNA, 22 bp, Artificial Sequence
  chemically synthesized
gccttttcaatcagatctaatt

SEQ ID NO: 30996 - DNA, 22 bp, Artificial Sequence
  chemically synthesized
ccttttcaatcagatctaattt

SEQ ID NO: 30997 - DNA, 22 bp, Artificial Sequence
  chemically synthesized
ttcaatcagatctaatttattt

SEQ ID NO: 30998 - DNA, 22 bp, Artificial Sequence
  chemically synthesized
tcaatcagatctaatttatttt

SEQ ID NO: 30999 - DNA, 22 bp, Artificial Sequence
  chemically synthesized
caatcagatctaatttatttta

SEQ ID NO: 31000 - DNA, 22 bp, Artificial Sequence
  chemically synthesized
aatcagatctaatttattttat

SEQ ID NO: 31001 - DNA, 22 bp, Artificial Sequence
  chemically synthesized
atttattttatatttttaaaat

SEQ ID NO: 31002 - DNA, 22 bp, Artificial Sequence
  chemically synthesized
attttatatttttaaaatttat

SEQ ID NO: 31003 - DNA, 22 bp, Artificial Sequence
  chemically synthesized
ttttatatttttaaaatttatt

SEQ ID NO: 31004 - DNA, 22 bp, Artificial Sequence
  chemically synthesized
tatatttttaaaatttatttat

SEQ ID NO: 31005 - DNA, 22 bp, Artificial Sequence
  chemically synthesized
atatttttaaaatttatttata

SEQ ID NO: 31006 - DNA, 22 bp, Artificial Sequence
  chemically synthesized
tatttttaaaatttatttatat

SEQ ID NO: 31007 - DNA, 22 bp, Artificial Sequence
  chemically synthesized
ttaaaatttatttatatatatt

SEQ ID NO: 31008 - DNA, 22 bp, Artificial Sequence
  chemically synthesized
taaaatttatttatatatattt

SEQ ID NO: 31009 - DNA, 22 bp, Artificial Sequence
  chemically synthesized
aaaatttatttatatatattta

SEQ ID NO: 31010 - DNA, 22 bp, Artificial Sequence
  chemically synthesized
aaatttatttatatatatttag

SEQ ID NO: 31011 - DNA, 22 bp, Artificial Sequence
  chemically synthesized
atttatatatatttagaaggta

SEQ ID NO: 31012 - DNA, 22 bp, Artificial Sequence
  chemically synthesized
tttatatatatttagaaggtat

SEQ ID NO: 31013 - DNA, 22 bp, Artificial Sequence
  chemically synthesized
atatatatttagaaggtatgta

SEQ ID NO: 31014 - DNA, 22 bp, Artificial Sequence
  chemically synthesized
tatatatttagaaggtatgtac

SEQ ID NO: 31015 - DNA, 22 bp, Artificial Sequence
  chemically synthesized
agaaggtatgtactagttcgtt

SEQ ID NO: 31016 - DNA, 22 bp, Artificial Sequence
  chemically synthesized
gaaggtatgtactagttcgtta

SEQ ID NO: 31017 - DNA, 22 bp, Artificial Sequence
  chemically synthesized
gttcgttatcatgctgcttata

SEQ ID NO: 31018 - DNA, 22 bp, Artificial Sequence
  chemically synthesized
gttatcatgctgcttataaaga

SEQ ID NO: 31019 - DNA, 22 bp, Artificial Sequence
  chemically synthesized
tcatgctgcttataaagacata

SEQ ID NO: 31020 - DNA, 22 bp, Artificial Sequence
  chemically synthesized
cttataaagacatacctgagac

SEQ ID NO: 31021 - DNA, 22 bp, Artificial Sequence
  chemically synthesized
ataaagacatacctgagactgg

SEQ ID NO: 31022 - DNA, 22 bp, Artificial Sequence
  chemically synthesized
taaagacatacctgagactggg

SEQ ID NO: 31023 - DNA, 22 bp, Artificial Sequence
  chemically synthesized
agactgggtaatttataaggaa

SEQ ID NO: 31024 - DNA, 22 bp, Artificial Sequence
  chemically synthesized
ggtaatttataaggaaaaaacg

SEQ ID NO: 31025 - DNA, 22 bp, Artificial Sequence
  chemically synthesized
ataaggaaaaaacgtttaattg

SEQ ID NO: 31026 - DNA, 22 bp, Artificial Sequence
  chemically synthesized
taaggaaaaaacgtttaattgt

SEQ ID NO: 31027 - DNA, 22 bp, Artificial Sequence
  chemically synthesized
aattgtctcacagttccacagg

SEQ ID NO: 31028 - DNA, 22 bp, Artificial Sequence
  chemically synthesized
attgtctcacagttccacaggg

SEQ ID NO: 31029 - DNA, 22 bp, Artificial Sequence
  chemically synthesized
tctcacagttccacagggctgg

SEQ ID NO: 31030 - DNA, 22 bp, Artificial Sequence
  chemically synthesized
acagttccacagggctggggag

SEQ ID NO: 31031 - DNA, 22 bp, Artificial Sequence
  chemically synthesized
cacagggctggggaggcctcgg

SEQ ID NO: 31032 - DNA, 22 bp, Artificial Sequence
  chemically synthesized
gggaggcctcgggaaacttaca

SEQ ID NO: 31033 - DNA, 22 bp, Artificial Sequence
  chemically synthesized
gggaaacttacaatcatggcag

SEQ ID NO: 31034 - DNA, 22 bp, Artificial Sequence
  chemically synthesized
acaatcatggcagaagaagaaa

SEQ ID NO: 31035 - DNA, 22 bp, Artificial Sequence
  chemically synthesized
caatcatggcagaagaagaaac

SEQ ID NO: 31036 - DNA, 22 bp, Artificial Sequence
  chemically synthesized
cttcacatggcagcagcaagta

SEQ ID NO: 31037 - DNA, 22 bp, Artificial Sequence
  chemically synthesized
ttcacatggcagcagcaagtag

SEQ ID NO: 31038 - DNA, 22 bp, Artificial Sequence
  chemically synthesized
cacatggcagcagcaagtagaa

SEQ ID NO: 31039 - DNA, 22 bp, Artificial Sequence
  chemically synthesized
acatggcagcagcaagtagaag

SEQ ID NO: 31040 - DNA, 22 bp, Artificial Sequence
  chemically synthesized
ataaaaccatcagatcttgtaa

SEQ ID NO: 31041 - DNA, 22 bp, Artificial Sequence
  chemically synthesized
taaaaccatcagatcttgtaag

SEQ ID NO: 31042 - DNA, 22 bp, Artificial Sequence
  chemically synthesized
gtaagaactcactatcacgaga

SEQ ID NO: 31043 - DNA, 22 bp, Artificial Sequence
  chemically synthesized
taagaactcactatcacgagaa

SEQ ID NO: 31044 - DNA, 22 bp, Artificial Sequence
  chemically synthesized
actatcacgagaagagcatgag

SEQ ID NO: 31045 - DNA, 22 bp, Artificial Sequence
  chemically synthesized
tcacgagaagagcatgagagta

SEQ ID NO: 31046 - DNA, 22 bp, Artificial Sequence
  chemically synthesized
ctctatgattcaattacctccc

SEQ ID NO: 31047 - DNA, 22 bp, Artificial Sequence
  chemically synthesized
tatgattcaattacctccctcc

SEQ ID NO: 31048 - DNA, 22 bp, Artificial Sequence
  chemically synthesized
tgattcaattacctccctccaa

SEQ ID NO: 31049 - DNA, 22 bp, Artificial Sequence
  chemically synthesized
aattacctccctccaaatccct

SEQ ID NO: 31050 - DNA, 22 bp, Artificial Sequence
  chemically synthesized
cctccctccaaatccctcccac

SEQ ID NO: 31051 - DNA, 22 bp, Artificial Sequence
  chemically synthesized
cctccaaatccctcccacaaca

SEQ ID NO: 31052 - DNA, 22 bp, Artificial Sequence
  chemically synthesized
caaatccctcccacaacacgtg

SEQ ID NO: 31053 - DNA, 22 bp, Artificial Sequence
  chemically synthesized
ccacaacacgtgaggattatgg

SEQ ID NO: 31054 - DNA, 22 bp, Artificial Sequence
  chemically synthesized
tgggaactacaattcaagatga

SEQ ID NO: 31055 - DNA, 22 bp, Artificial Sequence
  chemically synthesized
caattcaagatgagatttgggt

SEQ ID NO: 31056 - DNA, 22 bp, Artificial Sequence
  chemically synthesized
aagatgagatttgggtggggac

SEQ ID NO: 31057 - DNA, 22 bp, Artificial Sequence
  chemically synthesized
gggtggggacacagtcaagctg

SEQ ID NO: 31058 - DNA, 22 bp, Artificial Sequence
  chemically synthesized
ggtggggacacagtcaagctgt

SEQ ID NO: 31059 - DNA, 22 bp, Artificial Sequence
  chemically synthesized
tatcagggtacaagctcgggtt

SEQ ID NO: 31060 - DNA, 22 bp, Artificial Sequence
  chemically synthesized
gggttccttacatatgtatgtt

SEQ ID NO: 31061 - DNA, 22 bp, Artificial Sequence
  chemically synthesized
cttacatatgtatgttgcatag

SEQ ID NO: 31062 - DNA, 22 bp, Artificial Sequence
  chemically synthesized
acatatgtatgttgcatagtgg

SEQ ID NO: 31063 - DNA, 22 bp, Artificial Sequence
  chemically synthesized
catatgtatgttgcatagtggt

SEQ ID NO: 31064 - DNA, 22 bp, Artificial Sequence
  chemically synthesized
catagtggtgaagtctgagctt

SEQ ID NO: 31065 - DNA, 22 bp, Artificial Sequence
  chemically synthesized
agcttttagtggaccatcacct

SEQ ID NO: 31066 - DNA, 22 bp, Artificial Sequence
  chemically synthesized
ttagtggaccatcacctgaaaa

SEQ ID NO: 31067 - DNA, 22 bp, Artificial Sequence
  chemically synthesized
tagtggaccatcacctgaaaag

SEQ ID NO: 31068 - DNA, 22 bp, Artificial Sequence
  chemically synthesized
agtggaccatcacctgaaaagt

SEQ ID NO: 31069 - DNA, 22 bp, Artificial Sequence
  chemically synthesized
gtggaccatcacctgaaaagtg

SEQ ID NO: 31070 - DNA, 22 bp, Artificial Sequence
  chemically synthesized
aaaagtgaatgttgtatccaat

SEQ ID NO: 31071 - DNA, 22 bp, Artificial Sequence
  chemically synthesized
tatccaatccgtagtttttcag

SEQ ID NO: 31072 - DNA, 22 bp, Artificial Sequence
  chemically synthesized
ttcagtcctcaccatactccta

SEQ ID NO: 31073 - DNA, 22 bp, Artificial Sequence
  chemically synthesized
tcagtcctcaccatactcctat

SEQ ID NO: 31074 - DNA, 22 bp, Artificial Sequence
  chemically synthesized
cagtcctcaccatactcctatc

SEQ ID NO: 31075 - DNA, 22 bp, Artificial Sequence
  chemically synthesized
agtcctcaccatactcctatcc

SEQ ID NO: 31076 - DNA, 22 bp, Artificial Sequence
  chemically synthesized
accatactcctatcctcccacc

SEQ ID NO: 31077 - DNA, 22 bp, Artificial Sequence
  chemically synthesized
ctatcctcccacctttctctag

SEQ ID NO: 31078 - DNA, 22 bp, Artificial Sequence
  chemically synthesized
tcctcccacctttctctagtct

SEQ ID NO: 31079 - DNA, 22 bp, Artificial Sequence
  chemically synthesized
ccacctttctctagtctcaagt

SEQ ID NO: 31080 - DNA, 22 bp, Artificial Sequence
  chemically synthesized
tctctagtctcaagtgtctatt

SEQ ID NO: 31081 - DNA, 22 bp, Artificial Sequence
  chemically synthesized
ctctagtctcaagtgtctatta

SEQ ID NO: 31082 - DNA, 22 bp, Artificial Sequence
  chemically synthesized
tctagtctcaagtgtctattat

SEQ ID NO: 31083 - DNA, 22 bp, Artificial Sequence
  chemically synthesized
tagtctcaagtgtctattattt

SEQ ID NO: 31084 - DNA, 22 bp, Artificial Sequence
  chemically synthesized
gtctcaagtgtctattatttca

SEQ ID NO: 31085 - DNA, 22 bp, Artificial Sequence
  chemically synthesized
aagtgtctattatttcattcta

SEQ ID NO: 31086 - DNA, 22 bp, Artificial Sequence
  chemically synthesized
ttatttcattctatatgtctat

SEQ ID NO: 31087 - DNA, 22 bp, Artificial Sequence
  chemically synthesized
tttcattctatatgtctatgct

SEQ ID NO: 31088 - DNA, 22 bp, Artificial Sequence
  chemically synthesized
cattctatatgtctatgcttac

SEQ ID NO: 31089 - DNA, 22 bp, Artificial Sequence
  chemically synthesized
attctatatgtctatgcttact

SEQ ID NO: 31090 - DNA, 22 bp, Artificial Sequence
  chemically synthesized
tatatgtctatgcttactcatc

SEQ ID NO: 31091 - DNA, 22 bp, Artificial Sequence
  chemically synthesized
tatgtctatgcttactcatcgt

SEQ ID NO: 31092 - DNA, 22 bp, Artificial Sequence
  chemically synthesized
tgcttactcatcgtttagctcc

SEQ ID NO: 31093 - DNA, 22 bp, Artificial Sequence
  chemically synthesized
actcatcgtttagctcccactt

SEQ ID NO: 31094 - DNA, 22 bp, Artificial Sequence
  chemically synthesized
ctcatcgtttagctcccacttg

SEQ ID NO: 31095 - DNA, 22 bp, Artificial Sequence
  chemically synthesized
atcgtttagctcccacttggct

SEQ ID NO: 31096 - DNA, 22 bp, Artificial Sequence
  chemically synthesized
agctcccacttggctctcacta

SEQ ID NO: 31097 - DNA, 22 bp, Artificial Sequence
  chemically synthesized
gctcccacttggctctcactaa

SEQ ID NO: 31098 - DNA, 22 bp, Artificial Sequence
  chemically synthesized
ccacttggctctcactaaatga

SEQ ID NO: 31099 - DNA, 22 bp, Artificial Sequence
  chemically synthesized
ggctctcactaaatgagaacat

SEQ ID NO: 31100 - DNA, 22 bp, Artificial Sequence
  chemically synthesized
gctctcactaaatgagaacata

SEQ ID NO: 31101 - DNA, 22 bp, Artificial Sequence
  chemically synthesized
tcactaaatgagaacatactgt

SEQ ID NO: 31102 - DNA, 22 bp, Artificial Sequence
  chemically synthesized
actaaatgagaacatactgtgt

SEQ ID NO: 31103 - DNA, 22 bp, Artificial Sequence
  chemically synthesized
aatgagaacatactgtgtttga

SEQ ID NO: 31104 - DNA, 22 bp, Artificial Sequence
  chemically synthesized
tgtttgactttctgtttctgag

SEQ ID NO: 31105 - DNA, 22 bp, Artificial Sequence
  chemically synthesized
gactttctgtttctgagttatt

SEQ ID NO: 31106 - DNA, 22 bp, Artificial Sequence
  chemically synthesized
actttctgtttctgagttattt

SEQ ID NO: 31107 - DNA, 22 bp, Artificial Sequence
  chemically synthesized
tctgtttctgagttatttcact

SEQ ID NO: 31108 - DNA, 22 bp, Artificial Sequence
  chemically synthesized
ctgtttctgagttatttcactg

SEQ ID NO: 31109 - DNA, 22 bp, Artificial Sequence
  chemically synthesized
tgtttctgagttatttcactga

SEQ ID NO: 31110 - DNA, 22 bp, Artificial Sequence
  chemically synthesized
tttctgagttatttcactgagg

SEQ ID NO: 31111 - DNA, 22 bp, Artificial Sequence
  chemically synthesized
ctgagttatttcactgaggata

SEQ ID NO: 31112 - DNA, 22 bp, Artificial Sequence
  chemically synthesized
tgagttatttcactgaggataa

SEQ ID NO: 31113 - DNA, 22 bp, Artificial Sequence
  chemically synthesized
agttatttcactgaggataatg

SEQ ID NO: 31114 - DNA, 22 bp, Artificial Sequence
  chemically synthesized
tttcactgaggataatgtcctc

SEQ ID NO: 31115 - DNA, 22 bp, Artificial Sequence
  chemically synthesized
cactgaggataatgtcctccag

SEQ ID NO: 31116 - DNA, 22 bp, Artificial Sequence
  chemically synthesized
actgaggataatgtcctccagt

SEQ ID NO: 31117 - DNA, 22 bp, Artificial Sequence
  chemically synthesized
aggataatgtcctccagttcta

SEQ ID NO: 31118 - DNA, 22 bp, Artificial Sequence
  chemically synthesized
cagttctaaccatgtttctaga

SEQ ID NO: 31119 - DNA, 22 bp, Artificial Sequence
  chemically synthesized
taaccatgtttctagagaagac

SEQ ID NO: 31120 - DNA, 22 bp, Artificial Sequence
  chemically synthesized
accatgtttctagagaagacat

SEQ ID NO: 31121 - DNA, 22 bp, Artificial Sequence
  chemically synthesized
ctagagaagacatgatttcatt

SEQ ID NO: 31122 - DNA, 22 bp, Artificial Sequence
  chemically synthesized
tagagaagacatgatttcattc

SEQ ID NO: 31123 - DNA, 22 bp, Artificial Sequence
  chemically synthesized
gagaagacatgatttcattctt

SEQ ID NO: 31124 - DNA, 22 bp, Artificial Sequence
  chemically synthesized
cattcttttttatggctgagta

SEQ ID NO: 31125 - DNA, 22 bp, Artificial Sequence
  chemically synthesized
attcttttttatggctgagtaa

SEQ ID NO: 31126 - DNA, 22 bp, Artificial Sequence
  chemically synthesized
ttttttatggctgagtaatata

SEQ ID NO: 31127 - DNA, 22 bp, Artificial Sequence
  chemically synthesized
ttttatggctgagtaatatata

SEQ ID NO: 31128 - DNA, 22 bp, Artificial Sequence
  chemically synthesized
tttatggctgagtaatatatat

SEQ ID NO: 31129 - DNA, 22 bp, Artificial Sequence
  chemically synthesized
ttatggctgagtaatatatatg

SEQ ID NO: 31130 - DNA, 22 bp, Artificial Sequence
  chemically synthesized
tatggctgagtaatatatatgt

SEQ ID NO: 31131 - DNA, 22 bp, Artificial Sequence
  chemically synthesized
atggctgagtaatatatatgta

SEQ ID NO: 31132 - DNA, 22 bp, Artificial Sequence
  chemically synthesized
tggctgagtaatatatatgtat

SEQ ID NO: 31133 - DNA, 22 bp, Artificial Sequence
  chemically synthesized
agtaatatatatgtatataaat

SEQ ID NO: 31134 - DNA, 22 bp, Artificial Sequence
  chemically synthesized
tctttatccaatcgtccattgg

SEQ ID NO: 31135 - DNA, 22 bp, Artificial Sequence
  chemically synthesized
ctttatccaatcgtccattggt

SEQ ID NO: 31136 - DNA, 22 bp, Artificial Sequence
  chemically synthesized
tttatccaatcgtccattggta

SEQ ID NO: 31137 - DNA, 22 bp, Artificial Sequence
  chemically synthesized
tatccaatcgtccattggtaga

SEQ ID NO: 31138 - DNA, 22 bp, Artificial Sequence
  chemically synthesized
atccaatcgtccattggtagac

SEQ ID NO: 31139 - DNA, 22 bp, Artificial Sequence
  chemically synthesized
tccaatcgtccattggtagaca

SEQ ID NO: 31140 - DNA, 22 bp, Artificial Sequence
  chemically synthesized
gtagacatttaggttgattcca

SEQ ID NO: 31141 - DNA, 22 bp, Artificial Sequence
  chemically synthesized
aggttgattccatatctttgct

SEQ ID NO: 31142 - DNA, 22 bp, Artificial Sequence
  chemically synthesized
ggttgattccatatctttgcta

SEQ ID NO: 31143 - DNA, 22 bp, Artificial Sequence
  chemically synthesized
attccatatctttgctattggg

SEQ ID NO: 31144 - DNA, 22 bp, Artificial Sequence
  chemically synthesized
catatctttgctattgggaaca

SEQ ID NO: 31145 - DNA, 22 bp, Artificial Sequence
  chemically synthesized
tgctattgggaacagtgctact

SEQ ID NO: 31146 - DNA, 22 bp, Artificial Sequence
  chemically synthesized
gctattgggaacagtgctactt

SEQ ID NO: 31147 - DNA, 22 bp, Artificial Sequence
  chemically synthesized
ctattgggaacagtgctacttt

SEQ ID NO: 31148 - DNA, 22 bp, Artificial Sequence
  chemically synthesized
ttgggaacagtgctactttgaa

SEQ ID NO: 31149 - DNA, 22 bp, Artificial Sequence
  chemically synthesized
ggaacagtgctactttgaacat

SEQ ID NO: 31150 - DNA, 22 bp, Artificial Sequence
  chemically synthesized
ctttgaacatactaatgcagat

SEQ ID NO: 31151 - DNA, 22 bp, Artificial Sequence
  chemically synthesized
tgaacatactaatgcagatatc

SEQ ID NO: 31152 - DNA, 22 bp, Artificial Sequence
  chemically synthesized
gaacatactaatgcagatatct

SEQ ID NO: 31153 - DNA, 22 bp, Artificial Sequence
  chemically synthesized
aacatactaatgcagatatctt

SEQ ID NO: 31154 - DNA, 22 bp, Artificial Sequence
  chemically synthesized
atgcagatatcttttttaatat

SEQ ID NO: 31155 - DNA, 22 bp, Artificial Sequence
  chemically synthesized
ttttaatatgatctctttcact

SEQ ID NO: 31156 - DNA, 22 bp, Artificial Sequence
  chemically synthesized
tttaatatgatctctttcactt

SEQ ID NO: 31157 - DNA, 22 bp, Artificial Sequence
  chemically synthesized
ttaatatgatctctttcacttt

SEQ ID NO: 31158 - DNA, 22 bp, Artificial Sequence
  chemically synthesized
taatatgatctctttcactttg

SEQ ID NO: 31159 - DNA, 22 bp, Artificial Sequence
  chemically synthesized
aatatgatctctttcactttgg

SEQ ID NO: 31160 - DNA, 22 bp, Artificial Sequence
  chemically synthesized
atatgatctctttcactttggg

SEQ ID NO: 31161 - DNA, 22 bp, Artificial Sequence
  chemically synthesized
tttcactttgggtccataccca

SEQ ID NO: 31162 - DNA, 22 bp, Artificial Sequence
  chemically synthesized
tcactttgggtccatacccagt

SEQ ID NO: 31163 - DNA, 22 bp, Artificial Sequence
  chemically synthesized
cactttgggtccatacccagta

SEQ ID NO: 31164 - DNA, 22 bp, Artificial Sequence
  chemically synthesized
actttgggtccatacccagtag

SEQ ID NO: 31165 - DNA, 22 bp, Artificial Sequence
  chemically synthesized
tgggtccatacccagtagtggg

SEQ ID NO: 31166 - DNA, 22 bp, Artificial Sequence
  chemically synthesized
gggtccatacccagtagtggga

SEQ ID NO: 31167 - DNA, 22 bp, Artificial Sequence
  chemically synthesized
ggtccatacccagtagtgggat

SEQ ID NO: 31168 - DNA, 22 bp, Artificial Sequence
  chemically synthesized
caggattgaatggtagttctgt

SEQ ID NO: 31169 - DNA, 22 bp, Artificial Sequence
  chemically synthesized
aatggtagttctgtttctagtt

SEQ ID NO: 31170 - DNA, 22 bp, Artificial Sequence
  chemically synthesized
tgtttctagttctttaagaaat

SEQ ID NO: 31171 - DNA, 22 bp, Artificial Sequence
  chemically synthesized
tttctagttctttaagaaatct

SEQ ID NO: 31172 - DNA, 22 bp, Artificial Sequence
  chemically synthesized
ctagttctttaagaaatcttca

SEQ ID NO: 31173 - DNA, 22 bp, Artificial Sequence
  chemically synthesized
tagttctttaagaaatcttcat

SEQ ID NO: 31174 - DNA, 22 bp, Artificial Sequence
  chemically synthesized
gttctttaagaaatcttcatgc

SEQ ID NO: 31175 - DNA, 22 bp, Artificial Sequence
  chemically synthesized
tttaagaaatcttcatgctgtc

SEQ ID NO: 31176 - DNA, 22 bp, Artificial Sequence
  chemically synthesized
taagaaatcttcatgctgtctt

SEQ ID NO: 31177 - DNA, 22 bp, Artificial Sequence
  chemically synthesized
aagaaatcttcatgctgtcttc

SEQ ID NO: 31178 - DNA, 22 bp, Artificial Sequence
  chemically synthesized
agaaatcttcatgctgtcttcc

SEQ ID NO: 31179 - DNA, 22 bp, Artificial Sequence
  chemically synthesized
catgctgtcttccataaagttt

SEQ ID NO: 31180 - DNA, 22 bp, Artificial Sequence
  chemically synthesized
atgctgtcttccataaagtttg

SEQ ID NO: 31181 - DNA, 22 bp, Artificial Sequence
  chemically synthesized
tcttccataaagtttgtactaa

SEQ ID NO: 31182 - DNA, 22 bp, Artificial Sequence
  chemically synthesized
ccataaagtttgtactaattta

SEQ ID NO: 31183 - DNA, 22 bp, Artificial Sequence
  chemically synthesized
cataaagtttgtactaatttac

SEQ ID NO: 31184 - DNA, 22 bp, Artificial Sequence
  chemically synthesized
gtactaatttacattcttacca

SEQ ID NO: 31185 - DNA, 22 bp, Artificial Sequence
  chemically synthesized
tactaatttacattcttaccaa

SEQ ID NO: 31186 - DNA, 22 bp, Artificial Sequence
  chemically synthesized
atttacattcttaccaacagtg

SEQ ID NO: 31187 - DNA, 22 bp, Artificial Sequence
  chemically synthesized
acattcttaccaacagtgtata

SEQ ID NO: 31188 - DNA, 22 bp, Artificial Sequence
  chemically synthesized
cattcttaccaacagtgtataa

SEQ ID NO: 31189 - DNA, 22 bp, Artificial Sequence
  chemically synthesized
ttaccaacagtgtataagcatt

SEQ ID NO: 31190 - DNA, 22 bp, Artificial Sequence
  chemically synthesized
accaacagtgtataagcatttt

SEQ ID NO: 31191 - DNA, 22 bp, Artificial Sequence
  chemically synthesized
ccaacagtgtataagcattttc

SEQ ID NO: 31192 - DNA, 22 bp, Artificial Sequence
  chemically synthesized
tcttgtctccacatcctcacca

SEQ ID NO: 31193 - DNA, 22 bp, Artificial Sequence
  chemically synthesized
cttgtctccacatcctcaccaa

SEQ ID NO: 31194 - DNA, 22 bp, Artificial Sequence
  chemically synthesized
ttgtctccacatcctcaccaac

SEQ ID NO: 31195 - DNA, 22 bp, Artificial Sequence
  chemically synthesized
gtctccacatcctcaccaacat

SEQ ID NO: 31196 - DNA, 22 bp, Artificial Sequence
  chemically synthesized
tctccacatcctcaccaacatc

SEQ ID NO: 31197 - DNA, 22 bp, Artificial Sequence
  chemically synthesized
cacatcctcaccaacatctgct

SEQ ID NO: 31198 - DNA, 22 bp, Artificial Sequence
  chemically synthesized
accaacatctgctgtttttgaa

SEQ ID NO: 31199 - DNA, 22 bp, Artificial Sequence
  chemically synthesized
ctgtttttgaactttataatga

SEQ ID NO: 31200 - DNA, 22 bp, Artificial Sequence
  chemically synthesized
tttttgaactttataatgatag

SEQ ID NO: 31201 - DNA, 22 bp, Artificial Sequence
  chemically synthesized
ttgaactttataatgatagcca

SEQ ID NO: 31202 - DNA, 22 bp, Artificial Sequence
  chemically synthesized
tgaactttataatgatagccat

SEQ ID NO: 31203 - DNA, 22 bp, Artificial Sequence
  chemically synthesized
gaactttataatgatagccatt

SEQ ID NO: 31204 - DNA, 22 bp, Artificial Sequence
  chemically synthesized
aactttataatgatagccattc

SEQ ID NO: 31205 - DNA, 22 bp, Artificial Sequence
  chemically synthesized
tataatgatagccattctgact

SEQ ID NO: 31206 - DNA, 22 bp, Artificial Sequence
  chemically synthesized
ataatgatagccattctgactg

SEQ ID NO: 31207 - DNA, 22 bp, Artificial Sequence
  chemically synthesized
taatgatagccattctgactgg

SEQ ID NO: 31208 - DNA, 22 bp, Artificial Sequence
  chemically synthesized
tgactggcataaggaggtatca

SEQ ID NO: 31209 - DNA, 22 bp, Artificial Sequence
  chemically synthesized
actggcataaggaggtatcata

SEQ ID NO: 31210 - DNA, 22 bp, Artificial Sequence
  chemically synthesized
gcataaggaggtatcatatggt

SEQ ID NO: 31211 - DNA, 22 bp, Artificial Sequence
  chemically synthesized
taatttgcattctctgattatt

SEQ ID NO: 31212 - DNA, 22 bp, Artificial Sequence
  chemically synthesized
aatttgcattctctgattatta

SEQ ID NO: 31213 - DNA, 22 bp, Artificial Sequence
  chemically synthesized
atttgcattctctgattattag

SEQ ID NO: 31214 - DNA, 22 bp, Artificial Sequence
  chemically synthesized
gcattctctgattattagtgat

SEQ ID NO: 31215 - DNA, 22 bp, Artificial Sequence
  chemically synthesized
cattctctgattattagtgatg

SEQ ID NO: 31216 - DNA, 22 bp, Artificial Sequence
  chemically synthesized
tctgattattagtgatgttgaa

SEQ ID NO: 31217 - DNA, 22 bp, Artificial Sequence
  chemically synthesized
tgattattagtgatgttgaact

SEQ ID NO: 31218 - DNA, 22 bp, Artificial Sequence
  chemically synthesized
attattagtgatgttgaacttt

SEQ ID NO: 31219 - DNA, 22 bp, Artificial Sequence
  chemically synthesized
ttagtgatgttgaacttttttt

SEQ ID NO: 31220 - DNA, 22 bp, Artificial Sequence
  chemically synthesized
gtgatgttgaacttttttttga

SEQ ID NO: 31221 - DNA, 22 bp, Artificial Sequence
  chemically synthesized
aacttttttttgacgtttattg

SEQ ID NO: 31222 - DNA, 22 bp, Artificial Sequence
  chemically synthesized
ttttttgacgtttattggccac

SEQ ID NO: 31223 - DNA, 22 bp, Artificial Sequence
  chemically synthesized
tttttgacgtttattggccact

SEQ ID NO: 31224 - DNA, 22 bp, Artificial Sequence
  chemically synthesized
ttttgacgtttattggccactt

SEQ ID NO: 31225 - DNA, 22 bp, Artificial Sequence
  chemically synthesized
tttgacgtttattggccacttg

SEQ ID NO: 31226 - DNA, 22 bp, Artificial Sequence
  chemically synthesized
ttgacgtttattggccacttgt

SEQ ID NO: 31227 - DNA, 22 bp, Artificial Sequence
  chemically synthesized
tgacgtttattggccacttgta

SEQ ID NO: 31228 - DNA, 22 bp, Artificial Sequence
  chemically synthesized
gacgtttattggccacttgtat

SEQ ID NO: 31229 - DNA, 22 bp, Artificial Sequence
  chemically synthesized
acgtttattggccacttgtatg

SEQ ID NO: 31230 - DNA, 22 bp, Artificial Sequence
  chemically synthesized
attggccacttgtatgtcttct

SEQ ID NO: 31231 - DNA, 22 bp, Artificial Sequence
  chemically synthesized
ttggccacttgtatgtcttctt

SEQ ID NO: 31232 - DNA, 22 bp, Artificial Sequence
  chemically synthesized
gccacttgtatgtcttcttttg

SEQ ID NO: 31233 - DNA, 22 bp, Artificial Sequence
  chemically synthesized
gtatgtcttcttttggaaaatg

SEQ ID NO: 31234 - DNA, 22 bp, Artificial Sequence
  chemically synthesized
tatgtcttcttttggaaaatgt

SEQ ID NO: 31235 - DNA, 22 bp, Artificial Sequence
  chemically synthesized
cttttggaaaatgtctgctcag

SEQ ID NO: 31236 - DNA, 22 bp, Artificial Sequence
  chemically synthesized
ttttggaaaatgtctgctcagg

SEQ ID NO: 31237 - DNA, 22 bp, Artificial Sequence
  chemically synthesized
ttggaaaatgtctgctcaggac

SEQ ID NO: 31238 - DNA, 22 bp, Artificial Sequence
  chemically synthesized
tggaaaatgtctgctcaggacc

SEQ ID NO: 31239 - DNA, 22 bp, Artificial Sequence
  chemically synthesized
ggaaaatgtctgctcaggacct

SEQ ID NO: 31240 - DNA, 22 bp, Artificial Sequence
  chemically synthesized
gaaaatgtctgctcaggacctg

SEQ ID NO: 31241 - DNA, 22 bp, Artificial Sequence
  chemically synthesized
ctcaggacctgagctcactgta

SEQ ID NO: 31242 - DNA, 22 bp, Artificial Sequence
  chemically synthesized
aggacctgagctcactgtattt

SEQ ID NO: 31243 - DNA, 22 bp, Artificial Sequence
  chemically synthesized
agctcactgtatttgtcagggt

SEQ ID NO: 31244 - DNA, 22 bp, Artificial Sequence
  chemically synthesized
actgtatttgtcagggttccct

SEQ ID NO: 31245 - DNA, 22 bp, Artificial Sequence
  chemically synthesized
tatttgtcagggttccctagag

SEQ ID NO: 31246 - DNA, 22 bp, Artificial Sequence
  chemically synthesized
gtcagggttccctagagagaca

SEQ ID NO: 31247 - DNA, 22 bp, Artificial Sequence
  chemically synthesized
tcagggttccctagagagacag

SEQ ID NO: 31248 - DNA, 22 bp, Artificial Sequence
  chemically synthesized
cctagagagacagaactaatag

SEQ ID NO: 31249 - DNA, 22 bp, Artificial Sequence
  chemically synthesized
gagagacagaactaataggaga

SEQ ID NO: 31250 - DNA, 22 bp, Artificial Sequence
  chemically synthesized
ataggagatagatagatagata

SEQ ID NO: 31251 - DNA, 22 bp, Artificial Sequence
  chemically synthesized
agatataaaagggagtttatta

SEQ ID NO: 31252 - DNA, 22 bp, Artificial Sequence
  chemically synthesized
gatataaaagggagtttattaa

SEQ ID NO: 31253 - DNA, 22 bp, Artificial Sequence
  chemically synthesized
attaagtagtgttaacttacac

SEQ ID NO: 31254 - DNA, 22 bp, Artificial Sequence
  chemically synthesized
ttaagtagtgttaacttacaca

SEQ ID NO: 31255 - DNA, 22 bp, Artificial Sequence
  chemically synthesized
agtagtgttaacttacacaatc

SEQ ID NO: 31256 - DNA, 22 bp, Artificial Sequence
  chemically synthesized
acttacacaatcacaaggtccc

SEQ ID NO: 31257 - DNA, 22 bp, Artificial Sequence
  chemically synthesized
acacaatcacaaggtcccacaa

SEQ ID NO: 31258 - DNA, 22 bp, Artificial Sequence
  chemically synthesized
cacaatcacaaggtcccacaat

SEQ ID NO: 31259 - DNA, 22 bp, Artificial Sequence
  chemically synthesized
caagcagaggagcaaggaagcc

SEQ ID NO: 31260 - DNA, 22 bp, Artificial Sequence
  chemically synthesized
aaggacttggagtccaatgttt

SEQ ID NO: 31261 - DNA, 22 bp, Artificial Sequence
  chemically synthesized
ggagtccaatgtttgagggcag

SEQ ID NO: 31262 - DNA, 22 bp, Artificial Sequence
  chemically synthesized
gagtccaatgtttgagggcagg

SEQ ID NO: 31263 - DNA, 22 bp, Artificial Sequence
  chemically synthesized
gagggcaggaagcatccagcat

SEQ ID NO: 31264 - DNA, 22 bp, Artificial Sequence
  chemically synthesized
agggcaggaagcatccagcatg

SEQ ID NO: 31265 - DNA, 22 bp, Artificial Sequence
  chemically synthesized
ggaggctaagccagtccaggat

SEQ ID NO: 31266 - DNA, 22 bp, Artificial Sequence
  chemically synthesized
gaggctaagccagtccaggatt

SEQ ID NO: 31267 - DNA, 22 bp, Artificial Sequence
  chemically synthesized
agccagtccaggattttcacat

SEQ ID NO: 31268 - DNA, 22 bp, Artificial Sequence
  chemically synthesized
tcacatgttttttttctgcctg

SEQ ID NO: 31269 - DNA, 22 bp, Artificial Sequence
  chemically synthesized
cacatgttttttttctgcctgc

SEQ ID NO: 31270 - DNA, 22 bp, Artificial Sequence
  chemically synthesized
acatgttttttttctgcctgct

SEQ ID NO: 31271 - DNA, 22 bp, Artificial Sequence
  chemically synthesized
tttttctgcctgctttatatcc

SEQ ID NO: 31272 - DNA, 22 bp, Artificial Sequence
  chemically synthesized
ttttctgcctgctttatatcct

SEQ ID NO: 31273 - DNA, 22 bp, Artificial Sequence
  chemically synthesized
tttctgcctgctttatatcctg

SEQ ID NO: 31274 - DNA, 22 bp, Artificial Sequence
  chemically synthesized
ttctgcctgctttatatcctgg

SEQ ID NO: 31275 - DNA, 22 bp, Artificial Sequence
  chemically synthesized
tctgcctgctttatatcctggc

SEQ ID NO: 31276 - DNA, 22 bp, Artificial Sequence
  chemically synthesized
ctgcctgctttatatcctggcc

SEQ ID NO: 31277 - DNA, 22 bp, Artificial Sequence
  chemically synthesized
tgcctgctttatatcctggcca

SEQ ID NO: 31278 - DNA, 22 bp, Artificial Sequence
  chemically synthesized
cctgctttatatcctggccaca

SEQ ID NO: 31279 - DNA, 22 bp, Artificial Sequence
  chemically synthesized
ctttatatcctggccacactgg

SEQ ID NO: 31280 - DNA, 22 bp, Artificial Sequence
  chemically synthesized
tatatcctggccacactggcaa

SEQ ID NO: 31281 - DNA, 22 bp, Artificial Sequence
  chemically synthesized
atatcctggccacactggcaac

SEQ ID NO: 31282 - DNA, 22 bp, Artificial Sequence
  chemically synthesized
tatcctggccacactggcaact

SEQ ID NO: 31283 - DNA, 22 bp, Artificial Sequence
  chemically synthesized
gccacactggcaactgattaga

SEQ ID NO: 31284 - DNA, 22 bp, Artificial Sequence
  chemically synthesized
gcaactgattagatggtgccca

SEQ ID NO: 31285 - DNA, 22 bp, Artificial Sequence
  chemically synthesized
attagatggtgcccacccagat

SEQ ID NO: 31286 - DNA, 22 bp, Artificial Sequence
  chemically synthesized
gatggtgcccacccagattaag

SEQ ID NO: 31287 - DNA, 22 bp, Artificial Sequence
  chemically synthesized
agggtgggtctgcctttcccag

SEQ ID NO: 31288 - DNA, 22 bp, Artificial Sequence
  chemically synthesized
cctttcccagcccactgactaa

SEQ ID NO: 31289 - DNA, 22 bp, Artificial Sequence
  chemically synthesized
tcccagcccactgactaaaatg

SEQ ID NO: 31290 - DNA, 22 bp, Artificial Sequence
  chemically synthesized
cccagcccactgactaaaatgt

SEQ ID NO: 31291 - DNA, 22 bp, Artificial Sequence
  chemically synthesized
ccagcccactgactaaaatgtt

SEQ ID NO: 31292 - DNA, 22 bp, Artificial Sequence
  chemically synthesized
actaaaatgttaatctcctttg

SEQ ID NO: 31293 - DNA, 22 bp, Artificial Sequence
  chemically synthesized
aaatgttaatctcctttggcaa

SEQ ID NO: 31294 - DNA, 22 bp, Artificial Sequence
  chemically synthesized
atctcctttggcaataccctca

SEQ ID NO: 31295 - DNA, 22 bp, Artificial Sequence
  chemically synthesized
ctttggcaataccctcacagac

SEQ ID NO: 31296 - DNA, 22 bp, Artificial Sequence
  chemically synthesized
tggcaataccctcacagacaca

SEQ ID NO: 31297 - DNA, 22 bp, Artificial Sequence
  chemically synthesized
ggcaataccctcacagacacac

SEQ ID NO: 31298 - DNA, 22 bp, Artificial Sequence
  chemically synthesized
gcaataccctcacagacacact

SEQ ID NO: 31299 - DNA, 22 bp, Artificial Sequence
  chemically synthesized
acagacacactcaggatcaata

SEQ ID NO: 31300 - DNA, 22 bp, Artificial Sequence
  chemically synthesized
aggatcaatactttgcacactt

SEQ ID NO: 31301 - DNA, 22 bp, Artificial Sequence
  chemically synthesized
tgcacacttcaatccaatcaag

SEQ ID NO: 31302 - DNA, 22 bp, Artificial Sequence
  chemically synthesized
gcacacttcaatccaatcaagt

SEQ ID NO: 31303 - DNA, 22 bp, Artificial Sequence
  chemically synthesized
cacacttcaatccaatcaagtt

SEQ ID NO: 31304 - DNA, 22 bp, Artificial Sequence
  chemically synthesized
caatccaatcaagttgacactc

SEQ ID NO: 31305 - DNA, 22 bp, Artificial Sequence
  chemically synthesized
aatccaatcaagttgacactca

SEQ ID NO: 31306 - DNA, 22 bp, Artificial Sequence
  chemically synthesized
acactcagtattaaccatcaca

SEQ ID NO: 31307 - DNA, 22 bp, Artificial Sequence
  chemically synthesized
agtattaaccatcacaagtcca

SEQ ID NO: 31308 - DNA, 22 bp, Artificial Sequence
  chemically synthesized
accatcacaagtccatcgcttg

SEQ ID NO: 31309 - DNA, 22 bp, Artificial Sequence
  chemically synthesized
gtcaacttgagcctatacacat

SEQ ID NO: 31310 - DNA, 22 bp, Artificial Sequence
  chemically synthesized
tcaacttgagcctatacacatc

SEQ ID NO: 31311 - DNA, 22 bp, Artificial Sequence
  chemically synthesized
gagcctatacacatcccctgag

SEQ ID NO: 31312 - DNA, 22 bp, Artificial Sequence
  chemically synthesized
agcctatacacatcccctgagg

SEQ ID NO: 31313 - DNA, 22 bp, Artificial Sequence
  chemically synthesized
tacacatcccctgaggtcatac

SEQ ID NO: 31314 - DNA, 22 bp, Artificial Sequence
  chemically synthesized
aggtcatacattatcttcaaat

SEQ ID NO: 31315 - DNA, 22 bp, Artificial Sequence
  chemically synthesized
tcttcaaataaagacaacaata

SEQ ID NO: 31316 - DNA, 22 bp, Artificial Sequence
  chemically synthesized
caaataaagacaacaataagtc

SEQ ID NO: 31317 - DNA, 22 bp, Artificial Sequence
  chemically synthesized
aaataaagacaacaataagtca

SEQ ID NO: 31318 - DNA, 22 bp, Artificial Sequence
  chemically synthesized
tgcctaacatactaaaactatc

SEQ ID NO: 31319 - DNA, 22 bp, Artificial Sequence
  chemically synthesized
acatactaaaactatccttcgt

SEQ ID NO: 31320 - DNA, 22 bp, Artificial Sequence
  chemically synthesized
aaactatccttcgtgcaattga

SEQ ID NO: 31321 - DNA, 22 bp, Artificial Sequence
  chemically synthesized
tccttcgtgcaattgaaaatgc

SEQ ID NO: 31322 - DNA, 22 bp, Artificial Sequence
  chemically synthesized
cgtgcaattgaaaatgcaccaa

SEQ ID NO: 31323 - DNA, 22 bp, Artificial Sequence
  chemically synthesized
gtgcaattgaaaatgcaccaat

SEQ ID NO: 31324 - DNA, 22 bp, Artificial Sequence
  chemically synthesized
aaaatgcaccaatccccattgc

SEQ ID NO: 31325 - DNA, 22 bp, Artificial Sequence
  chemically synthesized
caaatgctattacataaactta

SEQ ID NO: 31326 - DNA, 22 bp, Artificial Sequence
  chemically synthesized
ttacataaacttaacaatactt

SEQ ID NO: 31327 - DNA, 22 bp, Artificial Sequence
  chemically synthesized
cataaacttaacaatacttaaa

SEQ ID NO: 31328 - DNA, 22 bp, Artificial Sequence
  chemically synthesized
aacaatacttaaatgctgatat

SEQ ID NO: 31329 - DNA, 22 bp, Artificial Sequence
  chemically synthesized
acaatacttaaatgctgatatg

SEQ ID NO: 31330 - DNA, 22 bp, Artificial Sequence
  chemically synthesized
aaatgctgatatgaagtcaata

SEQ ID NO: 31331 - DNA, 22 bp, Artificial Sequence
  chemically synthesized
aatgctgatatgaagtcaataa

SEQ ID NO: 31332 - DNA, 22 bp, Artificial Sequence
  chemically synthesized
atatgaagtcaataaatcttat

SEQ ID NO: 31333 - DNA, 22 bp, Artificial Sequence
  chemically synthesized
atgtcacatgataaaggaaaaa

SEQ ID NO: 31334 - DNA, 22 bp, Artificial Sequence
  chemically synthesized
tgtcacatgataaaggaaaaag

SEQ ID NO: 31335 - DNA, 22 bp, Artificial Sequence
  chemically synthesized
tcttagtacaagtgtatacaga

SEQ ID NO: 31336 - DNA, 22 bp, Artificial Sequence
  chemically synthesized
cttagtacaagtgtatacagac

SEQ ID NO: 31337 - DNA, 22 bp, Artificial Sequence
  chemically synthesized
ttagtacaagtgtatacagaca

SEQ ID NO: 31338 - DNA, 22 bp, Artificial Sequence
  chemically synthesized
agtacaagtgtatacagacacg

SEQ ID NO: 31339 - DNA, 22 bp, Artificial Sequence
  chemically synthesized
gtacaagtgtatacagacacga

SEQ ID NO: 31340 - DNA, 22 bp, Artificial Sequence
  chemically synthesized
ttaacaaaagaaggaggaaata

SEQ ID NO: 31341 - DNA, 22 bp, Artificial Sequence
  chemically synthesized
taacaaaagaaggaggaaatac

SEQ ID NO: 31342 - DNA, 22 bp, Artificial Sequence
  chemically synthesized
aacaaaagaaggaggaaatact

SEQ ID NO: 31343 - DNA, 22 bp, Artificial Sequence
  chemically synthesized
acaaaagaaggaggaaatactc

SEQ ID NO: 31344 - DNA, 22 bp, Artificial Sequence
  chemically synthesized
atgacaattacagtccttgtat

SEQ ID NO: 31345 - DNA, 22 bp, Artificial Sequence
  chemically synthesized
cagtccttgtatctgcaattgg

SEQ ID NO: 31346 - DNA, 22 bp, Artificial Sequence
  chemically synthesized
gtatctgcaattggtcacgtga

SEQ ID NO: 31347 - DNA, 22 bp, Artificial Sequence
  chemically synthesized
tatctgcaattggtcacgtgat

SEQ ID NO: 31348 - DNA, 22 bp, Artificial Sequence
  chemically synthesized
caattggtcacgtgatcgtagc

SEQ ID NO: 31349 - DNA, 22 bp, Artificial Sequence
  chemically synthesized
gtcacgtgatcgtagctggtat

SEQ ID NO: 31350 - DNA, 22 bp, Artificial Sequence
  chemically synthesized
gtattgatgactaccttcttct

SEQ ID NO: 31351 - DNA, 22 bp, Artificial Sequence
  chemically synthesized
atgactaccttcttctgctaca

SEQ ID NO: 31352 - DNA, 22 bp, Artificial Sequence
  chemically synthesized
ccttcttctgctacatattctg

SEQ ID NO: 31353 - DNA, 22 bp, Artificial Sequence
  chemically synthesized
cttctgctacatattctgtatt

SEQ ID NO: 31354 - DNA, 22 bp, Artificial Sequence
  chemically synthesized
ttctgctacatattctgtattc

SEQ ID NO: 31355 - DNA, 22 bp, Artificial Sequence
  chemically synthesized
ctgctacatattctgtattccc

SEQ ID NO: 31356 - DNA, 22 bp, Artificial Sequence
  chemically synthesized
tgctacatattctgtattccct

SEQ ID NO: 31357 - DNA, 22 bp, Artificial Sequence
  chemically synthesized
ctacatattctgtattcccttt

SEQ ID NO: 31358 - DNA, 22 bp, Artificial Sequence
  chemically synthesized
catattctgtattccctttgcc

SEQ ID NO: 31359 - DNA, 22 bp, Artificial Sequence
  chemically synthesized
tgtattccctttgccctcagca

SEQ ID NO: 31360 - DNA, 22 bp, Artificial Sequence
  chemically synthesized
tattccctttgccctcagcaag

SEQ ID NO: 31361 - DNA, 22 bp, Artificial Sequence
  chemically synthesized
cctttgccctcagcaagcacct

SEQ ID NO: 31362 - DNA, 22 bp, Artificial Sequence
  chemically synthesized
tgccctcagcaagcacctcagc

SEQ ID NO: 31363 - DNA, 22 bp, Artificial Sequence
  chemically synthesized
gccctcagcaagcacctcagca

SEQ ID NO: 31364 - DNA, 22 bp, Artificial Sequence
  chemically synthesized
ccctcagcaagcacctcagcag

SEQ ID NO: 31365 - DNA, 22 bp, Artificial Sequence
  chemically synthesized
agcaagcacctcagcaggtctt

SEQ ID NO: 31366 - DNA, 22 bp, Artificial Sequence
  chemically synthesized
agcaggtcttgtcttttttttt

SEQ ID NO: 31367 - DNA, 22 bp, Artificial Sequence
  chemically synthesized
gtcttttttttttttttttttc

SEQ ID NO: 31368 - DNA, 22 bp, Artificial Sequence
  chemically synthesized
tcttttttttttttttttttcc

SEQ ID NO: 31369 - DNA, 22 bp, Artificial Sequence
  chemically synthesized
ttttttttttttttttcctggt

SEQ ID NO: 31370 - DNA, 22 bp, Artificial Sequence
  chemically synthesized
tttttttttttttttcctggtg

SEQ ID NO: 31371 - DNA, 22 bp, Artificial Sequence
  chemically synthesized
ttttttttttttttcctggtgg

SEQ ID NO: 31372 - DNA, 22 bp, Artificial Sequence
  chemically synthesized
tttttttttttttcctggtgga

SEQ ID NO: 31373 - DNA, 22 bp, Artificial Sequence
  chemically synthesized
ttttttttttttcctggtggag

SEQ ID NO: 31374 - DNA, 22 bp, Artificial Sequence
  chemically synthesized
tttttttttttcctggtggagt

SEQ ID NO: 31375 - DNA, 22 bp, Artificial Sequence
  chemically synthesized
ttttttttttcctggtggagtg

SEQ ID NO: 31376 - DNA, 22 bp, Artificial Sequence
  chemically synthesized
tttttttttcctggtggagtga

SEQ ID NO: 31377 - DNA, 22 bp, Artificial Sequence
  chemically synthesized
ttttttttcctggtggagtgac

SEQ ID NO: 31378 - DNA, 22 bp, Artificial Sequence
  chemically synthesized
tttttttcctggtggagtgacc

SEQ ID NO: 31379 - DNA, 22 bp, Artificial Sequence
  chemically synthesized
ttttttcctggtggagtgaccc

SEQ ID NO: 31380 - DNA, 22 bp, Artificial Sequence
  chemically synthesized
tttttcctggtggagtgaccca

SEQ ID NO: 31381 - DNA, 22 bp, Artificial Sequence
  chemically synthesized
ttttcctggtggagtgacccaa

SEQ ID NO: 31382 - DNA, 22 bp, Artificial Sequence
  chemically synthesized
tttcctggtggagtgacccaaa

SEQ ID NO: 31383 - DNA, 22 bp, Artificial Sequence
  chemically synthesized
ttcctggtggagtgacccaaac

SEQ ID NO: 31384 - DNA, 22 bp, Artificial Sequence
  chemically synthesized
tcctggtggagtgacccaaacc

SEQ ID NO: 31385 - DNA, 22 bp, Artificial Sequence
  chemically synthesized
cctggtggagtgacccaaacct

SEQ ID NO: 31386 - DNA, 22 bp, Artificial Sequence
  chemically synthesized
ctggtggagtgacccaaacctt

SEQ ID NO: 31387 - DNA, 22 bp, Artificial Sequence
  chemically synthesized
gtggagtgacccaaacctttat

SEQ ID NO: 31388 - DNA, 22 bp, Artificial Sequence
  chemically synthesized
tatttgtagtcctgcctggaat

SEQ ID NO: 31389 - DNA, 22 bp, Artificial Sequence
  chemically synthesized
atttgtagtcctgcctggaatg

SEQ ID NO: 31390 - DNA, 22 bp, Artificial Sequence
  chemically synthesized
tttgtagtcctgcctggaatgg

SEQ ID NO: 31391 - DNA, 22 bp, Artificial Sequence
  chemically synthesized
gtagtcctgcctggaatggcct

SEQ ID NO: 31392 - DNA, 22 bp, Artificial Sequence
  chemically synthesized
tagtcctgcctggaatggcctg

SEQ ID NO: 31393 - DNA, 22 bp, Artificial Sequence
  chemically synthesized
cctggaatggcctgtagtagtt

SEQ ID NO: 31394 - DNA, 22 bp, Artificial Sequence
  chemically synthesized
gaatggcctgtagtagtttccc

SEQ ID NO: 31395 - DNA, 22 bp, Artificial Sequence
  chemically synthesized
tagtagtttcccactgacctta

SEQ ID NO: 31396 - DNA, 22 bp, Artificial Sequence
  chemically synthesized
cccactgaccttaattccagga

SEQ ID NO: 31397 - DNA, 22 bp, Artificial Sequence
  chemically synthesized
ccactgaccttaattccaggac

SEQ ID NO: 31398 - DNA, 22 bp, Artificial Sequence
  chemically synthesized
accttaattccaggacatggta

SEQ ID NO: 31399 - DNA, 22 bp, Artificial Sequence
  chemically synthesized
aattccaggacatggtaaaact

SEQ ID NO: 31400 - DNA, 22 bp, Artificial Sequence
  chemically synthesized
attccaggacatggtaaaacta

SEQ ID NO: 31401 - DNA, 22 bp, Artificial Sequence
  chemically synthesized
caggacatggtaaaactaagag

SEQ ID NO: 31402 - DNA, 22 bp, Artificial Sequence
  chemically synthesized
agagacaccctaatggatctcc

SEQ ID NO: 31403 - DNA, 22 bp, Artificial Sequence
  chemically synthesized
atggatctcctatattccatgc

SEQ ID NO: 31404 - DNA, 22 bp, Artificial Sequence
  chemically synthesized
ctatattccatgcatacgcttc

SEQ ID NO: 31405 - DNA, 22 bp, Artificial Sequence
  chemically synthesized
tattccatgcatacgcttcctt

SEQ ID NO: 31406 - DNA, 22 bp, Artificial Sequence
  chemically synthesized
catgcatacgcttccttacctc

SEQ ID NO: 31407 - DNA, 22 bp, Artificial Sequence
  chemically synthesized
ccttacctccattgtggagttg

SEQ ID NO: 31408 - DNA, 22 bp, Artificial Sequence
  chemically synthesized
cttacctccattgtggagttgt

SEQ ID NO: 31409 - DNA, 22 bp, Artificial Sequence
  chemically synthesized
acctccattgtggagttgtaga

SEQ ID NO: 31410 - DNA, 22 bp, Artificial Sequence
  chemically synthesized
cctccattgtggagttgtagac

SEQ ID NO: 31411 - DNA, 22 bp, Artificial Sequence
  chemically synthesized
cattgtggagttgtagactgat

SEQ ID NO: 31412 - DNA, 22 bp, Artificial Sequence
  chemically synthesized
tggagttgtagactgatttcat

SEQ ID NO: 31413 - DNA, 22 bp, Artificial Sequence
  chemically synthesized
tagactgatttcatcttgatag

SEQ ID NO: 31414 - DNA, 22 bp, Artificial Sequence
  chemically synthesized
atttcatcttgatagtctgggt

SEQ ID NO: 31415 - DNA, 22 bp, Artificial Sequence
  chemically synthesized
catcttgatagtctgggttaat

SEQ ID NO: 31416 - DNA, 22 bp, Artificial Sequence
  chemically synthesized
atcttgatagtctgggttaatc

SEQ ID NO: 31417 - DNA, 22 bp, Artificial Sequence
  chemically synthesized
gatagtctgggttaatcaccgc

SEQ ID NO: 31418 - DNA, 22 bp, Artificial Sequence
  chemically synthesized
atagtctgggttaatcaccgca

SEQ ID NO: 31419 - DNA, 22 bp, Artificial Sequence
  chemically synthesized
ggttaatcaccgcagccaacac

SEQ ID NO: 31420 - DNA, 22 bp, Artificial Sequence
  chemically synthesized
atcaccgcagccaacactgtaa

SEQ ID NO: 31421 - DNA, 22 bp, Artificial Sequence
  chemically synthesized
taactctcttcttagcctgttg

SEQ ID NO: 31422 - DNA, 22 bp, Artificial Sequence
  chemically synthesized
tcttcttagcctgttgacttaa

SEQ ID NO: 31423 - DNA, 22 bp, Artificial Sequence
  chemically synthesized
ttcttagcctgttgacttaaag

SEQ ID NO: 31424 - DNA, 22 bp, Artificial Sequence
  chemically synthesized
cttagcctgttgacttaaaggt

SEQ ID NO: 31425 - DNA, 22 bp, Artificial Sequence
  chemically synthesized
ttagcctgttgacttaaaggtg

SEQ ID NO: 31426 - DNA, 22 bp, Artificial Sequence
  chemically synthesized
agcctgttgacttaaaggtggg

SEQ ID NO: 31427 - DNA, 22 bp, Artificial Sequence
  chemically synthesized
gcctgttgacttaaaggtggga

SEQ ID NO: 31428 - DNA, 22 bp, Artificial Sequence
  chemically synthesized
ttgacttaaaggtgggaggagc

SEQ ID NO: 31429 - DNA, 22 bp, Artificial Sequence
  chemically synthesized
acttaaaggtgggaggagccca

SEQ ID NO: 31430 - DNA, 22 bp, Artificial Sequence
  chemically synthesized
aaaggtgggaggagcccaaagt

SEQ ID NO: 31431 - DNA, 22 bp, Artificial Sequence
  chemically synthesized
aaggtgggaggagcccaaagtg

SEQ ID NO: 31432 - DNA, 22 bp, Artificial Sequence
  chemically synthesized
aatttgcagtttaatggaatca

SEQ ID NO: 31433 - DNA, 22 bp, Artificial Sequence
  chemically synthesized
atttgcagtttaatggaatcat

SEQ ID NO: 31434 - DNA, 22 bp, Artificial Sequence
  chemically synthesized
gcagtttaatggaatcattatt

SEQ ID NO: 31435 - DNA, 22 bp, Artificial Sequence
  chemically synthesized
cagtttaatggaatcattattg

SEQ ID NO: 31436 - DNA, 22 bp, Artificial Sequence
  chemically synthesized
aatggaatcattattgtgtcac

SEQ ID NO: 31437 - DNA, 22 bp, Artificial Sequence
  chemically synthesized
atggaatcattattgtgtcacc

SEQ ID NO: 31438 - DNA, 22 bp, Artificial Sequence
  chemically synthesized
ttgtgtcacctggcggcagtgt

SEQ ID NO: 31439 - DNA, 22 bp, Artificial Sequence
  chemically synthesized
tgtcacctggcggcagtgttcc

SEQ ID NO: 31440 - DNA, 22 bp, Artificial Sequence
  chemically synthesized
gcggcagtgttcctccctctgg

SEQ ID NO: 31441 - DNA, 22 bp, Artificial Sequence
  chemically synthesized
ctccctctggaactaagacctc

SEQ ID NO: 31442 - DNA, 22 bp, Artificial Sequence
  chemically synthesized
cctctggaactaagacctctaa

SEQ ID NO: 31443 - DNA, 22 bp, Artificial Sequence
  chemically synthesized
tggaactaagacctctaagcca

SEQ ID NO: 31444 - DNA, 22 bp, Artificial Sequence
  chemically synthesized
gaactaagacctctaagccagc

SEQ ID NO: 31445 - DNA, 22 bp, Artificial Sequence
  chemically synthesized
agacctctaagccagcagaaca

SEQ ID NO: 31446 - DNA, 22 bp, Artificial Sequence
  chemically synthesized
taagccagcagaacataatgcc

SEQ ID NO: 31447 - DNA, 22 bp, Artificial Sequence
  chemically synthesized
agccagcagaacataatgccat

SEQ ID NO: 31448 - DNA, 22 bp, Artificial Sequence
  chemically synthesized
tgctagtggaacactaggggtg

SEQ ID NO: 31449 - DNA, 22 bp, Artificial Sequence
  chemically synthesized
gctagtggaacactaggggtga

SEQ ID NO: 31450 - DNA, 22 bp, Artificial Sequence
  chemically synthesized
ctagtggaacactaggggtgat

SEQ ID NO: 31451 - DNA, 22 bp, Artificial Sequence
  chemically synthesized
gtggaacactaggggtgatggt

SEQ ID NO: 31452 - DNA, 22 bp, Artificial Sequence
  chemically synthesized
ggggtgatggtgagtggtgcca

SEQ ID NO: 31453 - DNA, 22 bp, Artificial Sequence
  chemically synthesized
ccacttccacttccaccctttg

SEQ ID NO: 31454 - DNA, 22 bp, Artificial Sequence
  chemically synthesized
cacttccacttccaccctttga

SEQ ID NO: 31455 - DNA, 22 bp, Artificial Sequence
  chemically synthesized
ccacttccaccctttgattcct

SEQ ID NO: 31456 - DNA, 22 bp, Artificial Sequence
  chemically synthesized
cacttccaccctttgattcctg

SEQ ID NO: 31457 - DNA, 22 bp, Artificial Sequence
  chemically synthesized
ccaccctttgattcctggaccc

SEQ ID NO: 31458 - DNA, 22 bp, Artificial Sequence
  chemically synthesized
caccctttgattcctggacccg

SEQ ID NO: 31459 - DNA, 22 bp, Artificial Sequence
  chemically synthesized
tgattcctggacccgtgaatcc

SEQ ID NO: 31460 - DNA, 22 bp, Artificial Sequence
  chemically synthesized
gattcctggacccgtgaatcct

SEQ ID NO: 31461 - DNA, 22 bp, Artificial Sequence
  chemically synthesized
attcctggacccgtgaatcctg

SEQ ID NO: 31462 - DNA, 22 bp, Artificial Sequence
  chemically synthesized
ctggacccgtgaatcctgtcta

SEQ ID NO: 31463 - DNA, 22 bp, Artificial Sequence
  chemically synthesized
gacccgtgaatcctgtctatgg

SEQ ID NO: 31464 - DNA, 22 bp, Artificial Sequence
  chemically synthesized
tctatgggagaaacagtaccat

SEQ ID NO: 31465 - DNA, 22 bp, Artificial Sequence
  chemically synthesized
tgggagaaacagtaccatatat

SEQ ID NO: 31466 - DNA, 22 bp, Artificial Sequence
  chemically synthesized
gacactgattcagagcatacac

SEQ ID NO: 31467 - DNA, 22 bp, Artificial Sequence
  chemically synthesized
attcagagcatacacagccttc

SEQ ID NO: 31468 - DNA, 22 bp, Artificial Sequence
  chemically synthesized
agagcatacacagccttctgga

SEQ ID NO: 31469 - DNA, 22 bp, Artificial Sequence
  chemically synthesized
ctggagaactttgccccaggcc

SEQ ID NO: 31470 - DNA, 22 bp, Artificial Sequence
  chemically synthesized
tggagaactttgccccaggcct

SEQ ID NO: 31471 - DNA, 22 bp, Artificial Sequence
  chemically synthesized
gagaactttgccccaggcctgc

SEQ ID NO: 31472 - DNA, 22 bp, Artificial Sequence
  chemically synthesized
tgccccaggcctgcaaagtatt

SEQ ID NO: 31473 - DNA, 22 bp, Artificial Sequence
  chemically synthesized
gccccaggcctgcaaagtattg

SEQ ID NO: 31474 - DNA, 22 bp, Artificial Sequence
  chemically synthesized
ccccaggcctgcaaagtattgt

SEQ ID NO: 31475 - DNA, 22 bp, Artificial Sequence
  chemically synthesized
caaagtattgtcacctagttgg

SEQ ID NO: 31476 - DNA, 22 bp, Artificial Sequence
  chemically synthesized
tcacctagttggcattgtaatc

SEQ ID NO: 31477 - DNA, 22 bp, Artificial Sequence
  chemically synthesized
gttggcattgtaatcgtgactt

SEQ ID NO: 31478 - DNA, 22 bp, Artificial Sequence
  chemically synthesized
gcattgtaatcgtgacttcaaa

SEQ ID NO: 31479 - DNA, 22 bp, Artificial Sequence
  chemically synthesized
taatcgtgacttcaaaaggcca

SEQ ID NO: 31480 - DNA, 22 bp, Artificial Sequence
  chemically synthesized
caaaaggccattcaaaagctgc

SEQ ID NO: 31481 - DNA, 22 bp, Artificial Sequence
  chemically synthesized
aaaaggccattcaaaagctgct

SEQ ID NO: 31482 - DNA, 22 bp, Artificial Sequence
  chemically synthesized
aaaagctgcttcaggatgatag

SEQ ID NO: 31483 - DNA, 22 bp, Artificial Sequence
  chemically synthesized
cttcaggatgatagggatcatg

SEQ ID NO: 31484 - DNA, 22 bp, Artificial Sequence
  chemically synthesized
caggatgatagggatcatggta

SEQ ID NO: 31485 - DNA, 22 bp, Artificial Sequence
  chemically synthesized
aggatgatagggatcatggtaa

SEQ ID NO: 31486 - DNA, 22 bp, Artificial Sequence
  chemically synthesized
catgagcatgagcccactgtca

SEQ ID NO: 31487 - DNA, 22 bp, Artificial Sequence
  chemically synthesized
tcacacttctttagccataaag

SEQ ID NO: 31488 - DNA, 22 bp, Artificial Sequence
  chemically synthesized
ctttagccataaagtgagtggc

SEQ ID NO: 31489 - DNA, 22 bp, Artificial Sequence
  chemically synthesized
tttagccataaagtgagtggct

SEQ ID NO: 31490 - DNA, 22 bp, Artificial Sequence
  chemically synthesized
tagccataaagtgagtggcttg

SEQ ID NO: 31491 - DNA, 22 bp, Artificial Sequence
  chemically synthesized
agccataaagtgagtggcttgg

SEQ ID NO: 31492 - DNA, 22 bp, Artificial Sequence
  chemically synthesized
gccataaagtgagtggcttggt

SEQ ID NO: 31493 - DNA, 22 bp, Artificial Sequence
  chemically synthesized
ggtcagaagcaatgctgtgtgg

SEQ ID NO: 31494 - DNA, 22 bp, Artificial Sequence
  chemically synthesized
gtcagaagcaatgctgtgtgga

SEQ ID NO: 31495 - DNA, 22 bp, Artificial Sequence
  chemically synthesized
tgtggaataccatgacagtgga

SEQ ID NO: 31496 - DNA, 22 bp, Artificial Sequence
  chemically synthesized
tgtgattccatggatggtagtc

SEQ ID NO: 31497 - DNA, 22 bp, Artificial Sequence
  chemically synthesized
tgattccatggatggtagtctt

SEQ ID NO: 31498 - DNA, 22 bp, Artificial Sequence
  chemically synthesized
catggatggtagtcttggcata

SEQ ID NO: 31499 - DNA, 22 bp, Artificial Sequence
  chemically synthesized
ggcataagcattgagttcagga

SEQ ID NO: 31500 - DNA, 22 bp, Artificial Sequence
  chemically synthesized
gcataagcattgagttcaggat

SEQ ID NO: 31501 - DNA, 22 bp, Artificial Sequence
  chemically synthesized
agttcaggattgggaaacccat

SEQ ID NO: 31502 - DNA, 22 bp, Artificial Sequence
  chemically synthesized
aggattgggaaacccatatcca

SEQ ID NO: 31503 - DNA, 22 bp, Artificial Sequence
  chemically synthesized
ggaaacccatatccagagtaag

SEQ ID NO: 31504 - DNA, 22 bp, Artificial Sequence
  chemically synthesized
ttccagtgaggacaagcctctg

SEQ ID NO: 31505 - DNA, 22 bp, Artificial Sequence
  chemically synthesized
cagtgaggacaagcctctgccc

SEQ ID NO: 31506 - DNA, 22 bp, Artificial Sequence
  chemically synthesized
tgccctttccatgatggaagag

SEQ ID NO: 31507 - DNA, 22 bp, Artificial Sequence
  chemically synthesized
ccctttccatgatggaagaggt

SEQ ID NO: 31508 - DNA, 22 bp, Artificial Sequence
  chemically synthesized
tccatgatggaagaggtccaat

SEQ ID NO: 31509 - DNA, 22 bp, Artificial Sequence
  chemically synthesized
ccatgatggaagaggtccaata

SEQ ID NO: 31510 - DNA, 22 bp, Artificial Sequence
  chemically synthesized
catgatggaagaggtccaatat

SEQ ID NO: 31511 - DNA, 22 bp, Artificial Sequence
  chemically synthesized
ccaccaggtagctggctgatca

SEQ ID NO: 31512 - DNA, 22 bp, Artificial Sequence
  chemically synthesized
gctgatcaccccgaggaatggt

SEQ ID NO: 31513 - DNA, 22 bp, Artificial Sequence
  chemically synthesized
atcaccccgaggaatggtgcca

SEQ ID NO: 31514 - DNA, 22 bp, Artificial Sequence
  chemically synthesized
agtgttggtctctgatgctggc

SEQ ID NO: 31515 - DNA, 22 bp, Artificial Sequence
  chemically synthesized
gtgttggtctctgatgctggca

SEQ ID NO: 31516 - DNA, 22 bp, Artificial Sequence
  chemically synthesized
gtctctgatgctggcaagcagt

SEQ ID NO: 31517 - DNA, 22 bp, Artificial Sequence
  chemically synthesized
tgatgctggcaagcagtggctg

SEQ ID NO: 31518 - DNA, 22 bp, Artificial Sequence
  chemically synthesized
atgctggcaagcagtggctgtg

SEQ ID NO: 31519 - DNA, 22 bp, Artificial Sequence
  chemically synthesized
gcaagcagtggctgtggccagg

SEQ ID NO: 31520 - DNA, 22 bp, Artificial Sequence
  chemically synthesized
tggccaggtcagctttggtgag

SEQ ID NO: 31521 - DNA, 22 bp, Artificial Sequence
  chemically synthesized
tggtgagtggaagtccatgttg

SEQ ID NO: 31522 - DNA, 22 bp, Artificial Sequence
  chemically synthesized
ggtgagtggaagtccatgttgc

SEQ ID NO: 31523 - DNA, 22 bp, Artificial Sequence
  chemically synthesized
gtgagtggaagtccatgttgct

SEQ ID NO: 31524 - DNA, 22 bp, Artificial Sequence
  chemically synthesized
ctgagcccaagcataacttcca

SEQ ID NO: 31525 - DNA, 22 bp, Artificial Sequence
  chemically synthesized
agcccaagcataacttccatcc

SEQ ID NO: 31526 - DNA, 22 bp, Artificial Sequence
  chemically synthesized
ccatccctgcaactgtggccac

SEQ ID NO: 31527 - DNA, 22 bp, Artificial Sequence
  chemically synthesized
catccctgcaactgtggccact

SEQ ID NO: 31528 - DNA, 22 bp, Artificial Sequence
  chemically synthesized
caactgtggccactttgttcat

SEQ ID NO: 31529 - DNA, 22 bp, Artificial Sequence
  chemically synthesized
tggccactttgttcatgggtcc

SEQ ID NO: 31530 - DNA, 22 bp, Artificial Sequence
  chemically synthesized
tgttcatgggtccattggacga

SEQ ID NO: 31531 - DNA, 22 bp, Artificial Sequence
  chemically synthesized
gttcatgggtccattggacgat

SEQ ID NO: 31532 - DNA, 22 bp, Artificial Sequence
  chemically synthesized
ttcatgggtccattggacgatg

SEQ ID NO: 31533 - DNA, 22 bp, Artificial Sequence
  chemically synthesized
atgggtccattggacgatgaca

SEQ ID NO: 31534 - DNA, 22 bp, Artificial Sequence
  chemically synthesized
gacgatgacatgagtggcctgg

SEQ ID NO: 31535 - DNA, 22 bp, Artificial Sequence
  chemically synthesized
ggaaaaggctgagtggtgtcca

SEQ ID NO: 31536 - DNA, 22 bp, Artificial Sequence
  chemically synthesized
agtggtgtccacagaattgatc

SEQ ID NO: 31537 - DNA, 22 bp, Artificial Sequence
  chemically synthesized
atcatcctatccacttgattat

SEQ ID NO: 31538 - DNA, 22 bp, Artificial Sequence
  chemically synthesized
tccacttgattattaaaatcct

SEQ ID NO: 31539 - DNA, 22 bp, Artificial Sequence
  chemically synthesized
gattattaaaatcctcttctgc

SEQ ID NO: 31540 - DNA, 22 bp, Artificial Sequence
  chemically synthesized
attattaaaatcctcttctgct

SEQ ID NO: 31541 - DNA, 22 bp, Artificial Sequence
  chemically synthesized
ttaaaatcctcttctgctgagg

SEQ ID NO: 31542 - DNA, 22 bp, Artificial Sequence
  chemically synthesized
aaatcctcttctgctgaggtca

SEQ ID NO: 31543 - DNA, 22 bp, Artificial Sequence
  chemically synthesized
ttctgctgaggtcacccattgg

SEQ ID NO: 31544 - DNA, 22 bp, Artificial Sequence
  chemically synthesized
ctgctgaggtcacccattggtg

SEQ ID NO: 31545 - DNA, 22 bp, Artificial Sequence
  chemically synthesized
tgctgaggtcacccattggtga

SEQ ID NO: 31546 - DNA, 22 bp, Artificial Sequence
  chemically synthesized
ctgaggtcacccattggtgagc

SEQ ID NO: 31547 - DNA, 22 bp, Artificial Sequence
  chemically synthesized
aggtcacccattggtgagcact

SEQ ID NO: 31548 - DNA, 22 bp, Artificial Sequence
  chemically synthesized
gtgagcactcacatgggatgaa

SEQ ID NO: 31549 - DNA, 22 bp, Artificial Sequence
  chemically synthesized
acatgggatgaaaatatctttg

SEQ ID NO: 31550 - DNA, 22 bp, Artificial Sequence
  chemically synthesized
tgtagtttttgactaatcatag

SEQ ID NO: 31551 - DNA, 22 bp, Artificial Sequence
  chemically synthesized
gtagtttttgactaatcataga

SEQ ID NO: 31552 - DNA, 22 bp, Artificial Sequence
  chemically synthesized
tagtttttgactaatcatagag

SEQ ID NO: 31553 - DNA, 22 bp, Artificial Sequence
  chemically synthesized
ttgactaatcatagaggtccat

SEQ ID NO: 31554 - DNA, 22 bp, Artificial Sequence
  chemically synthesized
tgactaatcatagaggtccatc

SEQ ID NO: 31555 - DNA, 22 bp, Artificial Sequence
  chemically synthesized
gactaatcatagaggtccatcc

SEQ ID NO: 31556 - DNA, 22 bp, Artificial Sequence
  chemically synthesized
actaatcatagaggtccatcca

SEQ ID NO: 31557 - DNA, 22 bp, Artificial Sequence
  chemically synthesized
atcatagaggtccatccacata

SEQ ID NO: 31558 - DNA, 22 bp, Artificial Sequence
  chemically synthesized
ttccccaaatttctttgtcatc

SEQ ID NO: 31559 - DNA, 22 bp, Artificial Sequence
  chemically synthesized
ccccaaatttctttgtcatcaa

SEQ ID NO: 31560 - DNA, 22 bp, Artificial Sequence
  chemically synthesized
cccaaatttctttgtcatcaat

SEQ ID NO: 31561 - DNA, 22 bp, Artificial Sequence
  chemically synthesized
ctttgtcatcaattttccagtc

SEQ ID NO: 31562 - DNA, 22 bp, Artificial Sequence
  chemically synthesized
tttgtcatcaattttccagtca

SEQ ID NO: 31563 - DNA, 22 bp, Artificial Sequence
  chemically synthesized
tgtcatcaattttccagtcatg

SEQ ID NO: 31564 - DNA, 22 bp, Artificial Sequence
  chemically synthesized
gtcatcaattttccagtcatgc

SEQ ID NO: 31565 - DNA, 22 bp, Artificial Sequence
  chemically synthesized
tcatcaattttccagtcatgct

SEQ ID NO: 31566 - DNA, 22 bp, Artificial Sequence
  chemically synthesized
tccagtcatgctttttccaagt

SEQ ID NO: 31567 - DNA, 22 bp, Artificial Sequence
  chemically synthesized
ccagtcatgctttttccaagtc

SEQ ID NO: 31568 - DNA, 22 bp, Artificial Sequence
  chemically synthesized
cagtcatgctttttccaagtcc

SEQ ID NO: 31569 - DNA, 22 bp, Artificial Sequence
  chemically synthesized
tttccaagtccctgaccatcta

SEQ ID NO: 31570 - DNA, 22 bp, Artificial Sequence
  chemically synthesized
ttccaagtccctgaccatctag

SEQ ID NO: 31571 - DNA, 22 bp, Artificial Sequence
  chemically synthesized
tccaagtccctgaccatctagc

SEQ ID NO: 31572 - DNA, 22 bp, Artificial Sequence
  chemically synthesized
ccaagtccctgaccatctagcc

SEQ ID NO: 31573 - DNA, 22 bp, Artificial Sequence
  chemically synthesized
caagtccctgaccatctagcca

SEQ ID NO: 31574 - DNA, 22 bp, Artificial Sequence
  chemically synthesized
accatctagccaaacctttggc

SEQ ID NO: 31575 - DNA, 22 bp, Artificial Sequence
  chemically synthesized
gccaaacctttggctacagccc

SEQ ID NO: 31576 - DNA, 22 bp, Artificial Sequence
  chemically synthesized
tggctacagcccatgaataagt

SEQ ID NO: 31577 - DNA, 22 bp, Artificial Sequence
  chemically synthesized
ggctacagcccatgaataagta

SEQ ID NO: 31578 - DNA, 22 bp, Artificial Sequence
  chemically synthesized
gctacagcccatgaataagtat

SEQ ID NO: 31579 - DNA, 22 bp, Artificial Sequence
  chemically synthesized
cagcccatgaataagtatataa

SEQ ID NO: 31580 - DNA, 22 bp, Artificial Sequence
  chemically synthesized
gccatttctccttctgtgcaaa

SEQ ID NO: 31581 - DNA, 22 bp, Artificial Sequence
  chemically synthesized
ctccttctgtgcaaagtgcaca

SEQ ID NO: 31582 - DNA, 22 bp, Artificial Sequence
  chemically synthesized
tccttctgtgcaaagtgcacaa

SEQ ID NO: 31583 - DNA, 22 bp, Artificial Sequence
  chemically synthesized
cttctgtgcaaagtgcacaacc

SEQ ID NO: 31584 - DNA, 22 bp, Artificial Sequence
  chemically synthesized
ctgtgcaaagtgcacaaccagg

SEQ ID NO: 31585 - DNA, 22 bp, Artificial Sequence
  chemically synthesized
tgtgcaaagtgcacaaccaggc

SEQ ID NO: 31586 - DNA, 22 bp, Artificial Sequence
  chemically synthesized
tgcaaagtgcacaaccaggcac

SEQ ID NO: 31587 - DNA, 22 bp, Artificial Sequence
  chemically synthesized
ctcaaagttctgccaactagga

SEQ ID NO: 31588 - DNA, 22 bp, Artificial Sequence
  chemically synthesized
aaagttctgccaactaggaaga

SEQ ID NO: 31589 - DNA, 22 bp, Artificial Sequence
  chemically synthesized
tgccaactaggaagatttccct

SEQ ID NO: 31590 - DNA, 22 bp, Artificial Sequence
  chemically synthesized
ccaactaggaagatttcccttc

SEQ ID NO: 31591 - DNA, 22 bp, Artificial Sequence
  chemically synthesized
ggaagatttcccttcaccgttg

SEQ ID NO: 31592 - DNA, 22 bp, Artificial Sequence
  chemically synthesized
cccttcaccgttgtccttcagg

SEQ ID NO: 31593 - DNA, 22 bp, Artificial Sequence
  chemically synthesized
ccttcaccgttgtccttcaggg

SEQ ID NO: 31594 - DNA, 22 bp, Artificial Sequence
  chemically synthesized
caccgttgtccttcagggatgt

(The sequence listing continues in the following parts.)
